United States Patent Application Publication US 2005/0244851 A1 - sequence listing, part 151

SEQ ID NO: 5896016 - DNA, 25 bp, Homo sapien
aatatcttctattaaccgcaaacct

SEQ ID NO: 5896017 - DNA, 25 bp, Homo sapien
tgaggacgtggctcctcaactcatc

SEQ ID NO: 5896018 - DNA, 25 bp, Homo sapien
gattatttttgctttccctgtctgt

SEQ ID NO: 5896019 - DNA, 25 bp, Homo sapien
aacatgagtcacttctactgaaatg

SEQ ID NO: 5896020 - DNA, 25 bp, Homo sapien
tgaaggcacagtggatgcttaggac

SEQ ID NO: 5896021 - DNA, 25 bp, Homo sapien
gaagccaatggctaacaagacgcca

SEQ ID NO: 5896022 - DNA, 25 bp, Homo sapien
ctggccaagcggaggggtcaccatg

SEQ ID NO: 5896023 - DNA, 25 bp, Homo sapien
catcttgtgacatccaacagtgttc

SEQ ID NO: 5896024 - DNA, 25 bp, Homo sapien
catccaacagtgttctcagcatcca

SEQ ID NO: 5896025 - DNA, 25 bp, Homo sapien
aggggtcaccatggctgtgggtggg

SEQ ID NO: 5896026 - DNA, 25 bp, Homo sapien
cccataaaagcagttaagattatac

SEQ ID NO: 5896027 - DNA, 25 bp, Homo sapien
tccgacgaagccaatggctaacaag

SEQ ID NO: 5896028 - DNA, 25 bp, Homo sapien
cctatactaaagccaacatgagtca

SEQ ID NO: 5896029 - DNA, 25 bp, Homo sapien
tgctccattttctaagcatgttgtc

SEQ ID NO: 5896030 - DNA, 25 bp, Homo sapien
cctctgtgatgtaacatttccagac

SEQ ID NO: 5896031 - DNA, 25 bp, Homo sapien
gggtggggtgggtgggcacgccatg

SEQ ID NO: 5896032 - DNA, 25 bp, Homo sapien
tagaaactggtcggtctgacttcct

SEQ ID NO: 5896033 - DNA, 25 bp, Homo sapien
ttctcagcatccaggatgaggtctc

SEQ ID NO: 5896034 - DNA, 25 bp, Homo sapien
ttatacaagattatttttgctttcc

SEQ ID NO: 5896035 - DNA, 25 bp, Homo sapien
taagattatacaagattatttttgc

SEQ ID NO: 5896036 - DNA, 25 bp, Homo sapien
tgtcctgtatctttcctttggtact

SEQ ID NO: 5896037 - DNA, 25 bp, Homo sapien
ctgagaagcagaaggcaggtgttag

SEQ ID NO: 5896038 - DNA, 25 bp, Homo sapien
agtccccgtgtcacgaagactggaa

SEQ ID NO: 5896039 - DNA, 25 bp, Homo sapien
ctaaagccaacatgagtcacttcta

SEQ ID NO: 5896040 - DNA, 25 bp, Homo sapien
atgggtcatcttcctccacaggaag

SEQ ID NO: 5896041 - DNA, 25 bp, Homo sapien
ggcagatgctttgaggggctgtggc

SEQ ID NO: 5896042 - DNA, 25 bp, Homo sapien
gtatctttcctttggtactgctggc

SEQ ID NO: 5896043 - DNA, 25 bp, Homo sapien
gcagtgtcttcccggaactgaaggc

SEQ ID NO: 5896044 - DNA, 25 bp, Homo sapien
cacgccatgggtcatcttcctccac

SEQ ID NO: 5896045 - DNA, 25 bp, Homo sapien
tgcagttacaagttggcaactgcaa

SEQ ID NO: 5896046 - DNA, 25 bp, Homo sapien
cagctctgtcccagcaacactgagt

SEQ ID NO: 5896047 - DNA, 25 bp, Homo sapien
ttggcaactgcaaaaggacccatgc

SEQ ID NO: 5896048 - DNA, 25 bp, Homo sapien
cagaaatcttcttcataacaacaat

SEQ ID NO: 5896049 - DNA, 25 bp, Homo sapien
ctgtatctttcctttggtactgctg

SEQ ID NO: 5896050 - DNA, 25 bp, Homo sapien
ctattaaccgcaaacctttacatcc

SEQ ID NO: 5896051 - DNA, 25 bp, Homo sapien
tcataacaacaatgaagatccctcc

SEQ ID NO: 5896052 - DNA, 25 bp, Homo sapien
acagttgctaaagctggcgatactg

SEQ ID NO: 5896053 - DNA, 25 bp, Homo sapien
cttagagatggtttggagacttgta

SEQ ID NO: 5896054 - DNA, 25 bp, Homo sapien
aagttggaagctctcttattttcag

SEQ ID NO: 5896055 - DNA, 25 bp, Homo sapien
ccattttctaagcatgttgtctttt

SEQ ID NO: 5896056 - DNA, 25 bp, Homo sapien
caagtgcagttacaagttggcaact

SEQ ID NO: 5896057 - DNA, 25 bp, Homo sapien
ctattatccagaaagatgcagctga

SEQ ID NO: 5896058 - DNA, 25 bp, Homo sapien
ttttcagatgtgttgggagaacaac

SEQ ID NO: 5896059 - DNA, 25 bp, Homo sapien
gccagggtgaacccatggttacagt

SEQ ID NO: 5896060 - DNA, 25 bp, Homo sapien
gttcttggttctacagcggctgagc

SEQ ID NO: 5896061 - DNA, 25 bp, Homo sapien
agtaatagggactggccagggtgaa

SEQ ID NO: 5896062 - DNA, 25 bp, Homo sapien
tgttctcagcatccaggatgaggtc

SEQ ID NO: 5896063 - DNA, 25 bp, Homo sapien
gttttccaaaggcagatgctttgag

SEQ ID NO: 5896064 - DNA, 25 bp, Homo sapien
atccaggatgaggtctctattatcc

SEQ ID NO: 5896065 - DNA, 25 bp, Homo sapien
tggtactgctggccaagcggagggg

SEQ ID NO: 5896066 - DNA, 25 bp, Homo sapien
aggtgttagaaactggtcggtctga

SEQ ID NO: 5896067 - DNA, 25 bp, Homo sapien
tcatcggaggcttagagatggtttg

SEQ ID NO: 5896068 - DNA, 25 bp, Homo sapien
tctgtgatgtaacatttccagactc

SEQ ID NO: 5896069 - DNA, 25 bp, Homo sapien
agggactggccagggtgaacccatg

SEQ ID NO: 5896070 - DNA, 25 bp, Homo sapien
gaatgtgtatgtatcaagtgcagtt

SEQ ID NO: 5896071 - DNA, 25 bp, Homo sapien
gatactgtcttggctttgctccatt

SEQ ID NO: 5896072 - DNA, 25 bp, Homo sapien
tcttcccggaactgaaggcacagtg

SEQ ID NO: 5896073 - DNA, 25 bp, Homo sapien
actacagctctgtcccagcaacact

SEQ ID NO: 5896074 - DNA, 25 bp, Homo sapien
tgcctctgtgatgtaacatttccag

SEQ ID NO: 5896075 - DNA, 25 bp, Homo sapien
ggcaactgcaaaaggacccatgcct

SEQ ID NO: 5896076 - DNA, 25 bp, Homo sapien
tgctttgaggggctgtggcttgtcc

SEQ ID NO: 5896077 - DNA, 25 bp, Homo sapien
ctgggctggaatgtgtatgtatcaa

SEQ ID NO: 5896078 - DNA, 25 bp, Homo sapien
cagggcaagttggaagctctcttat

SEQ ID NO: 5896079 - DNA, 25 bp, Homo sapien
attaaccgcaaacctttacatccac

SEQ ID NO: 5896080 - DNA, 25 bp, Homo sapien
cagatgtgttgggagaacaacctgt

SEQ ID NO: 5896081 - DNA, 25 bp, Homo sapien
gtctctattatccagaaagatgcag

SEQ ID NO: 5896082 - DNA, 25 bp, Homo sapien
gtgtatgtatcaagtgcagttacaa

SEQ ID NO: 5896083 - DNA, 25 bp, Homo sapien
gatgctttgaggggctgtggcttgt

SEQ ID NO: 5896084 - DNA, 25 bp, Homo sapien
tcacttctactgaaatgttcttggt

SEQ ID NO: 5896085 - DNA, 25 bp, Homo sapien
agttggcaactgcaaaaggacccat

SEQ ID NO: 5896086 - DNA, 25 bp, Homo sapien
ctgtttagctctttagggcgagacc

SEQ ID NO: 5896087 - DNA, 25 bp, Homo sapien
gactgggctggaatgtgtatgtatc

SEQ ID NO: 5896088 - DNA, 25 bp, Homo sapien
tcccagcaacactgagtccccgtgt

SEQ ID NO: 5896089 - DNA, 25 bp, Homo sapien
agtcacttctactgaaatgttcttg

SEQ ID NO: 5896090 - DNA, 25 bp, Homo sapien
tgaaatgttcttggttctacagcgg

SEQ ID NO: 5896091 - DNA, 25 bp, Homo sapien
tggaatgtgtatgtatcaagtgcag

SEQ ID NO: 5896092 - DNA, 25 bp, Homo sapien
taacagtaatagggactggccaggg

SEQ ID NO: 5896093 - DNA, 25 bp, Homo sapien
agcatgttgtcttttgaatcatcga

SEQ ID NO: 5896094 - DNA, 25 bp, Homo sapien
aaagccaacatgagtcacttctact

SEQ ID NO: 5896095 - DNA, 25 bp, Homo sapien
ggctgtgggtggggtgggtgggcac

SEQ ID NO: 5896096 - DNA, 25 bp, Homo sapien
gggtcatcttcctccacaggaagag

SEQ ID NO: 5896097 - DNA, 25 bp, Homo sapien
ctcagcatccaggatgaggtctcta

SEQ ID NO: 5896098 - DNA, 25 bp, Homo sapien
ctgtgggtggggtgggtgggcacgc

SEQ ID NO: 5896099 - DNA, 25 bp, Homo sapien
tccacaggaagaggatggggaacag

SEQ ID NO: 5896100 - DNA, 25 bp, Homo sapien
gggcaagttggaagctctcttattt

SEQ ID NO: 5896101 - DNA, 25 bp, Homo sapien
gaggatggggaacagggcaagttgg

SEQ ID NO: 5896102 - DNA, 25 bp, Homo sapien
tgtcctgagaagcagaaggcaggtg

SEQ ID NO: 5896103 - DNA, 25 bp, Homo sapien
tactaaagccaacatgagtcacttc

SEQ ID NO: 5896104 - DNA, 25 bp, Homo sapien
tcctgtatctttcctttggtactgc

SEQ ID NO: 5896105 - DNA, 25 bp, Homo sapien
cttaacagtaatagggactggccag

SEQ ID NO: 5896106 - DNA, 25 bp, Homo sapien
gtcttggctttgctccattttctaa

SEQ ID NO: 5896107 - DNA, 25 bp, Homo sapien
tgagccttttagcatcttgtgacat

SEQ ID NO: 5896108 - DNA, 25 bp, Homo sapien
tggctcctcaactcatcggaggctt

SEQ ID NO: 5896109 - DNA, 25 bp, Homo sapien
gagaagcagaaggcaggtgttagaa

SEQ ID NO: 5896110 - DNA, 25 bp, Homo sapien
tattttcagatgtgttgggagaaca

SEQ ID NO: 5896111 - DNA, 25 bp, Homo sapien
gatgcagctgatctgagggcttgag

SEQ ID NO: 5896112 - DNA, 25 bp, Homo sapien
ttcttcataacaacaatgaagatcc

SEQ ID NO: 5896113 - DNA, 25 bp, Homo sapien
acactgagtccccgtgtcacgaaga

SEQ ID NO: 5896114 - DNA, 25 bp, Homo sapien
taatagggactggccagggtgaacc

SEQ ID NO: 5896115 - DNA, 25 bp, Homo sapien
atagggactggccagggtgaaccca

SEQ ID NO: 5896116 - DNA, 25 bp, Homo sapien
agtgcagttacaagttggcaactgc

SEQ ID NO: 5896117 - DNA, 25 bp, Homo sapien
ttgaggggctgtggcttgtcctgta

SEQ ID NO: 5896118 - DNA, 25 bp, Homo sapien
ttgggagaacaacctgttctgttta

SEQ ID NO: 5896119 - DNA, 25 bp, Homo sapien
ctcaactcatcggaggcttagagat

SEQ ID NO: 5896120 - DNA, 25 bp, Homo sapien
gtatgtatcaagtgcagttacaagt

SEQ ID NO: 5896121 - DNA, 25 bp, Homo sapien
ctctattatccagaaagatgcagct

SEQ ID NO: 5896122 - DNA, 25 bp, Homo sapien
atgtaacatttccagactctatgcc

SEQ ID NO: 5896123 - DNA, 25 bp, Homo sapien
atgtgtatgtatcaagtgcagttac

SEQ ID NO: 5896124 - DNA, 25 bp, Homo sapien
ggactggccagggtgaacccatggt

SEQ ID NO: 5896125 - DNA, 25 bp, Homo sapien
gacatccaacagtgttctcagcatc

SEQ ID NO: 5896126 - DNA, 25 bp, Homo sapien
aaggcagatgctttgaggggctgtg

SEQ ID NO: 5896127 - DNA, 25 bp, Homo sapien
cccatgcctctgtgatgtaacattt

SEQ ID NO: 5896128 - DNA, 25 bp, Homo sapien
cacagtggatgcttaggactgggct

SEQ ID NO: 5896129 - DNA, 25 bp, Homo sapien
tccagaaatcttcttcataacaaca

SEQ ID NO: 5896130 - DNA, 25 bp, Homo sapien
tttgaatcatcgatcataacattta

SEQ ID NO: 5896131 - DNA, 25 bp, Homo sapien
ctgagggcttgagtcctagggagat

SEQ ID NO: 5896132 - DNA, 25 bp, Homo sapien
ttaggactgggctggaatgtgtatg

SEQ ID NO: 5896133 - DNA, 25 bp, Homo sapien
ccaatggctaacaagacgccaacta

SEQ ID NO: 5896134 - DNA, 25 bp, Homo sapien
atttttgctttccctgtctgtcctg

SEQ ID NO: 5896135 - DNA, 25 bp, Homo sapien
cagaaagatgcagctgatctgaggg

SEQ ID NO: 5896136 - DNA, 25 bp, Homo sapien
gttacaagttggcaactgcaaaagg

SEQ ID NO: 5896137 - DNA, 25 bp, Homo sapien
ccaggatgaggtctctattatccag

SEQ ID NO: 5896138 - DNA, 25 bp, Homo sapien
ttctgtttagctctttagggcgaga

SEQ ID NO: 5896139 - DNA, 25 bp, Homo sapien
ctttagggcgagaccttccagaaat

SEQ ID NO: 5896140 - DNA, 25 bp, Homo sapien
aagaggatggggaacagggcaagtt

SEQ ID NO: 5896141 - DNA, 25 bp, Homo sapien
aatttagttttccaaaggcagatgc

SEQ ID NO: 5896142 - DNA, 25 bp, Homo sapien
tgtcttcccggaactgaaggcacag

SEQ ID NO: 5896143 - DNA, 25 bp, Homo sapien
tatccagaaagatgcagctgatctg

SEQ ID NO: 5896144 - DNA, 25 bp, Homo sapien
tgcttggactgactgttgtaactta

SEQ ID NO: 5896145 - DNA, 25 bp, Homo sapien
gctaacatgaaaggatcgtacagtc

SEQ ID NO: 5896146 - DNA, 25 bp, Homo sapien
ggtattaaagtctgtggatggctcg

SEQ ID NO: 5896147 - DNA, 25 bp, Homo sapien
gatcgtttattttgcaagaaaagct

SEQ ID NO: 5896148 - DNA, 25 bp, Homo sapien
gatggctcgtacaccatccgccagg

SEQ ID NO: 5896149 - DNA, 25 bp, Homo sapien
ttcatgttttttaaaagaagtcagg

SEQ ID NO: 5896150 - DNA, 25 bp, Homo sapien
gcaggatgccggcatatacgagtgt

SEQ ID NO: 5896151 - DNA, 25 bp, Homo sapien
cagtgtcacctttttatgttttatt

SEQ ID NO: 5896152 - DNA, 25 bp, Homo sapien
acaccatccgccaggcacagctgca

SEQ ID NO: 5896153 - DNA, 25 bp, Homo sapien
tgttgactaggcagctaaccagtgt

SEQ ID NO: 5896154 - DNA, 25 bp, Homo sapien
gagagtgttgcttggactgactgtt

SEQ ID NO: 5896155 - DNA, 25 bp, Homo sapien
ttctcagtaaagaaggcaaagtggc

SEQ ID NO: 5896156 - DNA, 25 bp, Homo sapien
aagctaacatgaaaggatcgtacag

SEQ ID NO: 5896157 - DNA, 25 bp, Homo sapien
aagaagtcagggttctatattttta

SEQ ID NO: 5896158 - DNA, 25 bp, Homo sapien
acatgaaaggatcgtacagtctggt

SEQ ID NO: 5896159 - DNA, 25 bp, Homo sapien
ctctacatggtactgtacggtacgg

SEQ ID NO: 5896160 - DNA, 25 bp, Homo sapien
caaagtggctgcttgatcccttgct

SEQ ID NO: 5896161 - DNA, 25 bp, Homo sapien
tgaagaagaaagcaaagacaggaga

SEQ ID NO: 5896162 - DNA, 25 bp, Homo sapien
ttaaaagaagtcagggttctatatt

SEQ ID NO: 5896163 - DNA, 25 bp, Homo sapien
aaagcaaagacaggagacatggtat

SEQ ID NO: 5896164 - DNA, 25 bp, Homo sapien
gtaaagaaggcaaagtggctgcttg

SEQ ID NO: 5896165 - DNA, 25 bp, Homo sapien
acatggtactgtacggtacggggac

SEQ ID NO: 5896166 - DNA, 25 bp, Homo sapien
tattaatgttaatgttgactaggca

SEQ ID NO: 5896167 - DNA, 25 bp, Homo sapien
tccccatcgttgaagtgactggaat

SEQ ID NO: 5896168 - DNA, 25 bp, Homo sapien
gactttcaggtactactttctaatt

SEQ ID NO: 5896169 - DNA, 25 bp, Homo sapien
tactactttctaattcatggtagaa

SEQ ID NO: 5896170 - DNA, 25 bp, Homo sapien
tttagagtagcagcactccatatgc

SEQ ID NO: 5896171 - DNA, 25 bp, Homo sapien
aatactgtttattacagccccgccc

SEQ ID NO: 5896172 - DNA, 25 bp, Homo sapien
attacagccccgccccctccacaaa

SEQ ID NO: 5896173 - DNA, 25 bp, Homo sapien
caagtccccatcgttgaagtgactg

SEQ ID NO: 5896174 - DNA, 25 bp, Homo sapien
agtgtgaatctaagactgaagttgg

SEQ ID NO: 5896175 - DNA, 25 bp, Homo sapien
cgtacagtctggtggaggcacagaa

SEQ ID NO: 5896176 - DNA, 25 bp, Homo sapien
aagtgactggaatggtcccatgatg

SEQ ID NO: 5896177 - DNA, 25 bp, Homo sapien
tcagacttcccagaacccttctcag

SEQ ID NO: 5896178 - DNA, 25 bp, Homo sapien
cctaattttattcctatgaatttta

SEQ ID NO: 5896179 - DNA, 25 bp, Homo sapien
tgggttgactttcaggtactacttt

SEQ ID NO: 5896180 - DNA, 25 bp, Homo sapien
agtcagggttctatatttttatagg

SEQ ID NO: 5896181 - DNA, 25 bp, Homo sapien
cttggtaatacctgccatcgggatg

SEQ ID NO: 5896182 - DNA, 25 bp, Homo sapien
ggaaaagaacataacaaggactatt

SEQ ID NO: 5896183 - DNA, 25 bp, Homo sapien
gcccgaaacatggataatcctgaag

SEQ ID NO: 5896184 - DNA, 25 bp, Homo sapien
caggtcagaacgtaatcagagagtg

SEQ ID NO: 5896185 - DNA, 25 bp, Homo sapien
gaaatccaaagtgtagctaacatct

SEQ ID NO: 5896186 - DNA, 25 bp, Homo sapien
caacctaattttattcctatgaatt

SEQ ID NO: 5896187 - DNA, 25 bp, Homo sapien
gtgtagctaacatctgaaatgtttg

SEQ ID NO: 5896188 - DNA, 25 bp, Homo sapien
ttgactaggcagctaaccagtgtca

SEQ ID NO: 5896189 - DNA, 25 bp, Homo sapien
cccatcgttgaagtgactggaatgg

SEQ ID NO: 5896190 - DNA, 25 bp, Homo sapien
taacacttgatgtaaaaggaaaaga

SEQ ID NO: 5896191 - DNA, 25 bp, Homo sapien
gactaggcagctaaccagtgtcacc

SEQ ID NO: 5896192 - DNA, 25 bp, Homo sapien
ttcgcccgaactccttgcactctac

SEQ ID NO: 5896193 - DNA, 25 bp, Homo sapien
acataacaaggactatttttcgccc

SEQ ID NO: 5896194 - DNA, 25 bp, Homo sapien
atgtttgagaagagacattatttat

SEQ ID NO: 5896195 - DNA, 25 bp, Homo sapien
atttttcgcccgaactccttgcact

SEQ ID NO: 5896196 - DNA, 25 bp, Homo sapien
cgaactccttgcactctactgcgca

SEQ ID NO: 5896197 - DNA, 25 bp, Homo sapien
gactggaatggtcccatgatgtgta

SEQ ID NO: 5896198 - DNA, 25 bp, Homo sapien
tggtcccatgatgtgtatgtaaata

SEQ ID NO: 5896199 - DNA, 25 bp, Homo sapien
tacggtacggggacctgtttcttca

SEQ ID NO: 5896200 - DNA, 25 bp, Homo sapien
ttattttgcaagaaaagctaacatg

SEQ ID NO: 5896201 - DNA, 25 bp, Homo sapien
ttttaaaagaagtcagggttctata

SEQ ID NO: 5896202 - DNA, 25 bp, Homo sapien
ccttgcactctactgcgcatcttcc

SEQ ID NO: 5896203 - DNA, 25 bp, Homo sapien
ggtagaatggctaagtaattttctc

SEQ ID NO: 5896204 - DNA, 25 bp, Homo sapien
tctactgcgcatcttccttggtaat

SEQ ID NO: 5896205 - DNA, 25 bp, Homo sapien
tggctcacaattaagaagtttaaca

SEQ ID NO: 5896206 - DNA, 25 bp, Homo sapien
tgaatctaagactgaagttggctca

SEQ ID NO: 5896207 - DNA, 25 bp, Homo sapien
ctactttctaattcatggtagaatg

SEQ ID NO: 5896208 - DNA, 25 bp, Homo sapien
catatacgagtgtgaatctaagact

SEQ ID NO: 5896209 - DNA, 25 bp, Homo sapien
ttattaacaatgatttcatgttttt

SEQ ID NO: 5896210 - DNA, 25 bp, Homo sapien
agtctgtggatggctcgtacaccat

SEQ ID NO: 5896211 - DNA, 25 bp, Homo sapien
aattttattcctatgaattttatta

SEQ ID NO: 5896212 - DNA, 25 bp, Homo sapien
acaatgatttcatgttttttaaaag

SEQ ID NO: 5896213 - DNA, 25 bp, Homo sapien
gttgtaacttaatgcttcttaggaa

SEQ ID NO: 5896214 - DNA, 25 bp, Homo sapien
tcatggtagaatggctaagtaattt

SEQ ID NO: 5896215 - DNA, 25 bp, Homo sapien
tccaaagtgtagctaacatctgaaa

SEQ ID NO: 5896216 - DNA, 25 bp, Homo sapien
gcagctaaccagtgtcaccttttta

SEQ ID NO: 5896217 - DNA, 25 bp, Homo sapien
gtaattttctctacatggtactgta

SEQ ID NO: 5896218 - DNA, 25 bp, Homo sapien
aatattaatgttaatgttgactagg

SEQ ID NO: 5896219 - DNA, 25 bp, Homo sapien
tacctgccatcgggatgatcgttta

SEQ ID NO: 5896220 - DNA, 25 bp, Homo sapien
tgtaacttaatgcttcttaggaaag

SEQ ID NO: 5896221 - DNA, 25 bp, Homo sapien
tggaggcacagaaatccaaagtgta

SEQ ID NO: 5896222 - DNA, 25 bp, Homo sapien
ctcagtaaagaaggcaaagtggctg

SEQ ID NO: 5896223 - DNA, 25 bp, Homo sapien
taacaatgatttcatgttttttaaa

SEQ ID NO: 5896224 - DNA, 25 bp, Homo sapien
gagaagagacattatttataaaacc

SEQ ID NO: 5896225 - DNA, 25 bp, Homo sapien
gcttgatcccttgctgaatgcaagg

SEQ ID NO: 5896226 - DNA, 25 bp, Homo sapien
gtcgcgaggttgtttagagtagcag

SEQ ID NO: 5896227 - DNA, 25 bp, Homo sapien
taaagaggtcactgggttgactttc

SEQ ID NO: 5896228 - DNA, 25 bp, Homo sapien
ttattacagccccgccccctccaca

SEQ ID NO: 5896229 - DNA, 25 bp, Homo sapien
ttgactttcaggtactactttctaa

SEQ ID NO: 5896230 - DNA, 25 bp, Homo sapien
aaggaaaagaacataacaaggacta

SEQ ID NO: 5896231 - DNA, 25 bp, Homo sapien
gtaaaataaaattatgccgtcgcga

SEQ ID NO: 5896232 - DNA, 25 bp, Homo sapien
tgtgaatctaagactgaagttggct

SEQ ID NO: 5896233 - DNA, 25 bp, Homo sapien
tcctatgaattttattaacaatgat

SEQ ID NO: 5896234 - DNA, 25 bp, Homo sapien
tgcaagaaaagctaacatgaaagga

SEQ ID NO: 5896235 - DNA, 25 bp, Homo sapien
aatgatttcatgttttttaaaagaa

SEQ ID NO: 5896236 - DNA, 25 bp, Homo sapien
gtagcagcactccatatgcaggtca

SEQ ID NO: 5896237 - DNA, 25 bp, Homo sapien
aaggcaaagtggctgcttgatccct

SEQ ID NO: 5896238 - DNA, 25 bp, Homo sapien
aggagctaaccagaaaagttctgct

SEQ ID NO: 5896239 - DNA, 25 bp, Homo sapien
tccatatgcaggtcagaacgtaatc

SEQ ID NO: 5896240 - DNA, 25 bp, Homo sapien
attcatggtagaatggctaagtaat

SEQ ID NO: 5896241 - DNA, 25 bp, Homo sapien
ccttaatactgtttattacagcccc

SEQ ID NO: 5896242 - DNA, 25 bp, Homo sapien
gataatcctgaagaagaaagcaaag

SEQ ID NO: 5896243 - DNA, 25 bp, Homo sapien
tttgcaagaaaagctaacatgaaag

SEQ ID NO: 5896244 - DNA, 25 bp, Homo sapien
gaatggctaagtaattttctctaca

SEQ ID NO: 5896245 - DNA, 25 bp, Homo sapien
tgtttagagtagcagcactccatat

SEQ ID NO: 5896246 - DNA, 25 bp, Homo sapien
ttttcgcccgaactccttgcactct

SEQ ID NO: 5896247 - DNA, 25 bp, Homo sapien
ttcaggtactactttctaattcatg

SEQ ID NO: 5896248 - DNA, 25 bp, Homo sapien
ctaagtaattttctctacatggtac

SEQ ID NO: 5896249 - DNA, 25 bp, Homo sapien
cagagagtgttgcttggactgactg

SEQ ID NO: 5896250 - DNA, 25 bp, Homo sapien
taatcagagagtgttgcttggactg

SEQ ID NO: 5896251 - DNA, 25 bp, Homo sapien
cgccccctccacaaaccaagccatg

SEQ ID NO: 5896252 - DNA, 25 bp, Homo sapien
gatcccttgctgaatgcaaggagct

SEQ ID NO: 5896253 - DNA, 25 bp, Homo sapien
gaagtttaacacttgatgtaaaagg

SEQ ID NO: 5896254 - DNA, 25 bp, Homo sapien
ccagatccttaatactgtttattac

SEQ ID NO: 5896255 - DNA, 25 bp, Homo sapien
taaaattatgccgtcgcgaggttgt

SEQ ID NO: 5896256 - DNA, 25 bp, Homo sapien
gaaacatggataatcctgaagaaga

SEQ ID NO: 5896257 - DNA, 25 bp, Homo sapien
ctacatggtactgtacggtacgggg

SEQ ID NO: 5896258 - DNA, 25 bp, Homo sapien
aatacctgccatcgggatgatcgtt

SEQ ID NO: 5896259 - DNA, 25 bp, Homo sapien
cagaacccttctcagtaaagaaggc

SEQ ID NO: 5896260 - DNA, 25 bp, Homo sapien
tgcttcttaggaaagtttaatatta

SEQ ID NO: 5896261 - DNA, 25 bp, Homo sapien
tagaatggctaagtaattttctcta

SEQ ID NO: 5896262 - DNA, 25 bp, Homo sapien
gcacagctgcaggatgccggcatat

SEQ ID NO: 5896263 - DNA, 25 bp, Homo sapien
gacaagtccccatcgttgaagtgac

SEQ ID NO: 5896264 - DNA, 25 bp, Homo sapien
ccctccacaaaccaagccatgcatt

SEQ ID NO: 5896265 - DNA, 25 bp, Homo sapien
acccttctcagtaaagaaggcaaag

SEQ ID NO: 5896266 - DNA, 25 bp, Homo sapien
ggctaagtaattttctctacatggt

SEQ ID NO: 5896267 - DNA, 25 bp, Homo sapien
acaattaagaagtttaacacttgat

SEQ ID NO: 5896268 - DNA, 25 bp, Homo sapien
aattaagaagtttaacacttgatgt

SEQ ID NO: 5896269 - DNA, 25 bp, Homo sapien
aaaagctaacatgaaaggatcgtac

SEQ ID NO: 5896270 - DNA, 25 bp, Homo sapien
tggctcgtacaccatccgccaggca

SEQ ID NO: 5896271 - DNA, 25 bp, Homo sapien
ctgcaggatgccggcatatacgagt

SEQ ID NO: 5896272 - DNA, 25 bp, Homo sapien
gcactccatatgcaggtcagaacgt

SEQ ID NO: 5896273 - DNA, 25 bp, Homo sapien
attcagacttcccagaacccttctc

SEQ ID NO: 5896274 - DNA, 25 bp, Homo sapien
gaagtcagggttctatatttttata

SEQ ID NO: 5896275 - DNA, 25 bp, Homo sapien
atcagagagtgttgcttggactgac

SEQ ID NO: 5896276 - DNA, 25 bp, Homo sapien
agctgcaggatgccggcatatacga

SEQ ID NO: 5896277 - DNA, 25 bp, Homo sapien
aggatgccggcatatacgagtgtga

SEQ ID NO: 5896278 - DNA, 25 bp, Homo sapien
gcactctactgcgcatcttccttgg

SEQ ID NO: 5896279 - DNA, 25 bp, Homo sapien
gtacaccatccgccaggcacagctg

SEQ ID NO: 5896280 - DNA, 25 bp, Homo sapien
aggttgtttagagtagcagcactcc

SEQ ID NO: 5896281 - DNA, 25 bp, Homo sapien
aagaagtttaacacttgatgtaaaa

SEQ ID NO: 5896282 - DNA, 25 bp, Homo sapien
gaacccttctcagtaaagaaggcaa

SEQ ID NO: 5896283 - DNA, 25 bp, Homo sapien
agccatgcattcagacttcccagaa

SEQ ID NO: 5896284 - DNA, 25 bp, Homo sapien
aaatggtaaagaggtcactgggttg

SEQ ID NO: 5896285 - DNA, 25 bp, Homo sapien
atatttttataggcaaatggtaaag

SEQ ID NO: 5896286 - DNA, 25 bp, Homo sapien
gttggctcacaattaagaagtttaa

SEQ ID NO: 5896287 - DNA, 25 bp, Homo sapien
cttccttggtaatacctgccatcgg

SEQ ID NO: 5896288 - DNA, 25 bp, Homo sapien
aatctaagactgaagttggctcaca

SEQ ID NO: 5896289 - DNA, 25 bp, Homo sapien
agcagcactccatatgcaggtcaga

SEQ ID NO: 5896290 - DNA, 25 bp, Homo sapien
agacatggtattaaagtctgtggat

SEQ ID NO: 5896291 - DNA, 25 bp, Homo sapien
ccggcatatacgagtgtgaatctaa

SEQ ID NO: 5896292 - DNA, 25 bp, Homo sapien
aataaaattatgccgtcgcgaggtt

SEQ ID NO: 5896293 - DNA, 25 bp, Homo sapien
caaagacaggagacatggtattaaa

SEQ ID NO: 5896294 - DNA, 25 bp, Homo sapien
ccatcgggatgatcgtttattttgc

SEQ ID NO: 5896295 - DNA, 25 bp, Homo sapien
taattcatggtagaatggctaagta

SEQ ID NO: 5896296 - DNA, 25 bp, Homo sapien
ccgtcgcgaggttgtttagagtagc

SEQ ID NO: 5896297 - DNA, 25 bp, Homo sapien
tctgaaatgtttgagaagagacatt

SEQ ID NO: 5896298 - DNA, 25 bp, Homo sapien
gactgactgttgtaacttaatgctt

SEQ ID NO: 5896299 - DNA, 25 bp, Homo sapien
gaagaaagcaaagacaggagacatg

SEQ ID NO: 5896300 - DNA, 25 bp, Homo sapien
tttaacacttgatgtaaaaggaaaa

SEQ ID NO: 5896301 - DNA, 25 bp, Homo sapien
ctttcaggtactactttctaattca

SEQ ID NO: 5896302 - DNA, 25 bp, Homo sapien
cgtaatcagagagtgttgcttggac

SEQ ID NO: 5896303 - DNA, 25 bp, Homo sapien
taatcctgaagaagaaagcaaagac

SEQ ID NO: 5896304 - DNA, 25 bp, Homo sapien
caagccatgcattcagacttcccag

SEQ ID NO: 5896305 - DNA, 25 bp, Homo sapien
tgccgtcgcgaggttgtttagagta

SEQ ID NO: 5896306 - DNA, 25 bp, Homo sapien
gccccgccccctccacaaaccaagc

SEQ ID NO: 5896307 - DNA, 25 bp, Homo sapien
ggcaaagtggctgcttgatcccttg

SEQ ID NO: 5896308 - DNA, 25 bp, Homo sapien
acccagatccttaatactgtttatt

SEQ ID NO: 5896309 - DNA, 25 bp, Homo sapien
aaggatcgtacagtctggtggaggc

SEQ ID NO: 5896310 - DNA, 25 bp, Homo sapien
gcaaatggtaaagaggtcactgggt

SEQ ID NO: 5896311 - DNA, 25 bp, Homo sapien
gtgttgcttggactgactgttgtaa

SEQ ID NO: 5896312 - DNA, 25 bp, Homo sapien
ggcacagaaatccaaagtgtagcta

SEQ ID NO: 5896313 - DNA, 25 bp, Homo sapien
caaggagctaaccagaaaagttctg

SEQ ID NO: 5896314 - DNA, 25 bp, Homo sapien
tgcaggtcagaacgtaatcagagag

SEQ ID NO: 5896315 - DNA, 25 bp, Homo sapien
ttttattcctatgaattttattaac

SEQ ID NO: 5896316 - DNA, 25 bp, Homo sapien
agctaaccagtgtcacctttttatg

SEQ ID NO: 5896317 - DNA, 25 bp, Homo sapien
cagcactccatatgcaggtcagaac

SEQ ID NO: 5896318 - DNA, 25 bp, Homo sapien
ttaagaagtttaacacttgatgtaa

SEQ ID NO: 5896319 - DNA, 25 bp, Homo sapien
agacattatttataaaacccagatc

SEQ ID NO: 5896320 - DNA, 25 bp, Homo sapien
gaattttattaacaatgatttcatg

SEQ ID NO: 5896321 - DNA, 25 bp, Homo sapien
gtggctgcttgatcccttgctgaat

SEQ ID NO: 5896322 - DNA, 25 bp, Homo sapien
tctaattcatggtagaatggctaag

SEQ ID NO: 5896323 - DNA, 25 bp, Homo sapien
tctgtggatggctcgtacaccatcc

SEQ ID NO: 5896324 - DNA, 25 bp, Homo sapien
gttgcttggactgactgttgtaact

SEQ ID NO: 5896325 - DNA, 25 bp, Homo sapien
tgtcacctttttatgttttattttc

SEQ ID NO: 5896326 - DNA, 25 bp, Homo sapien
gtttgagaagagacattatttataa

SEQ ID NO: 5896327 - DNA, 25 bp, Homo sapien
ctgcttgatcccttgctgaatgcaa

SEQ ID NO: 5896328 - DNA, 25 bp, Homo sapien
cgggatgatcgtttattttgcaaga

SEQ ID NO: 5896329 - DNA, 25 bp, Homo sapien
ggtcagaacgtaatcagagagtgtt

SEQ ID NO: 5896330 - DNA, 25 bp, Homo sapien
aagacaggagacatggtattaaagt

SEQ ID NO: 5896331 - DNA, 25 bp, Homo sapien
tcactgggttgactttcaggtacta

SEQ ID NO: 5896332 - DNA, 25 bp, Homo sapien
taaaacccagatccttaatactgtt

SEQ ID NO: 5896333 - DNA, 25 bp, Homo sapien
tcgtacaccatccgccaggcacagc

SEQ ID NO: 5896334 - DNA, 25 bp, Homo sapien
ctgttgtaacttaatgcttcttagg

SEQ ID NO: 5896335 - DNA, 25 bp, Homo sapien
gcatcttccttggtaatacctgcca

SEQ ID NO: 5896336 - DNA, 25 bp, Homo sapien
acttaatgcttcttaggaaagttta

SEQ ID NO: 5896337 - DNA, 25 bp, Homo sapien
tacagccccgccccctccacaaacc

SEQ ID NO: 5896338 - DNA, 25 bp, Homo sapien
cagccccgccccctccacaaaccaa

SEQ ID NO: 5896339 - DNA, 25 bp, Homo sapien
ctgtttattacagccccgccccctc

SEQ ID NO: 5896340 - DNA, 25 bp, Homo sapien
gttgtttagagtagcagcactccat

SEQ ID NO: 5896341 - DNA, 25 bp, Homo sapien
gctaaccagaaaagttctgcttgac

SEQ ID NO: 5896342 - DNA, 25 bp, Homo sapien
aatccaaagtgtagctaacatctga

SEQ ID NO: 5896343 - DNA, 25 bp, Homo sapien
gcttgacaagtccccatcgttgaag

SEQ ID NO: 5896344 - DNA, 25 bp, Homo sapien
tccttggtaatacctgccatcggga

SEQ ID NO: 5896345 - DNA, 25 bp, Homo sapien
tggtaatacctgccatcgggatgat

SEQ ID NO: 5896346 - DNA, 25 bp, Homo sapien
atgaaaggatcgtacagtctggtgg

SEQ ID NO: 5896347 - DNA, 25 bp, Homo sapien
gagtgttgcttggactgactgttgt

SEQ ID NO: 5896348 - DNA, 25 bp, Homo sapien
acagctgcaggatgccggcatatac

SEQ ID NO: 5896349 - DNA, 25 bp, Homo sapien
attcctatgaattttattaacaatg

SEQ ID NO: 5896350 - DNA, 25 bp, Homo sapien
ctaggcagctaaccagtgtcacctt

SEQ ID NO: 5896351 - DNA, 25 bp, Homo sapien
aagtaattttctctacatggtactg

SEQ ID NO: 5896352 - DNA, 25 bp, Homo sapien
gatgccggcatatacgagtgtgaat

SEQ ID NO: 5896353 - DNA, 25 bp, Homo sapien
acattatttataaaacccagatcct

SEQ ID NO: 5896354 - DNA, 25 bp, Homo sapien
atggctaagtaattttctctacatg

SEQ ID NO: 5896355 - DNA, 25 bp, Homo sapien
ccgaaacatggataatcctgaagaa

SEQ ID NO: 5896356 - DNA, 25 bp, Homo sapien
ccttctcagtaaagaaggcaaagtg

SEQ ID NO: 5896357 - DNA, 25 bp, Homo sapien
ggtactactttctaattcatggtag

SEQ ID NO: 5896358 - DNA, 25 bp, Homo sapien
gctgaatgcaaggagctaaccagaa

SEQ ID NO: 5896359 - DNA, 25 bp, Homo sapien
catccgccaggcacagctgcaggat

SEQ ID NO: 5896360 - DNA, 25 bp, Homo sapien
tggatggctcgtacaccatccgcca

SEQ ID NO: 5896361 - DNA, 25 bp, Homo sapien
tgaagttggctcacaattaagaagt

SEQ ID NO: 5896362 - DNA, 25 bp, Homo sapien
ccccctccacaaaccaagccatgca

SEQ ID NO: 5896363 - DNA, 25 bp, Homo sapien
tacgagtgtgaatctaagactgaag

SEQ ID NO: 5896364 - DNA, 25 bp, Homo sapien
atggtagaatggctaagtaattttc

SEQ ID NO: 5896365 - DNA, 25 bp, Homo sapien
tcacaattaagaagtttaacacttg

SEQ ID NO: 5896366 - DNA, 25 bp, Homo sapien
ccttgctgaatgcaaggagctaacc

SEQ ID NO: 5896367 - DNA, 25 bp, Homo sapien
tacggggacctgtttcttcattggg

SEQ ID NO: 5896368 - DNA, 25 bp, Homo sapien
ttgacaagtccccatcgttgaagtg

SEQ ID NO: 5896369 - DNA, 25 bp, Homo sapien
ggggacctgtttcttcattggggtc

SEQ ID NO: 5896370 - DNA, 25 bp, Homo sapien
ctgcgcatcttccttggtaatacct

SEQ ID NO: 5896371 - DNA, 25 bp, Homo sapien
gcattcagacttcccagaacccttc

SEQ ID NO: 5896372 - DNA, 25 bp, Homo sapien
gctcacaattaagaagtttaacact

SEQ ID NO: 5896373 - DNA, 25 bp, Homo sapien
gaggcacagaaatccaaagtgtagc

SEQ ID NO: 5896374 - DNA, 25 bp, Homo sapien
ttctatatttttataggcaaatggt

SEQ ID NO: 5896375 - DNA, 25 bp, Homo sapien
ctaacatctgaaatgtttgagaaga

SEQ ID NO: 5896376 - DNA, 25 bp, Homo sapien
cgagtgtgaatctaagactgaagtt

SEQ ID NO: 5896377 - DNA, 25 bp, Homo sapien
tatgttttattttcttcaacctaat

SEQ ID NO: 5896378 - DNA, 25 bp, Homo sapien
gacaggagacatggtattaaagtct

SEQ ID NO: 5896379 - DNA, 25 bp, Homo sapien
aaagttctgcttgacaagtccccat

SEQ ID NO: 5896380 - DNA, 25 bp, Homo sapien
agtccccatcgttgaagtgactgga

SEQ ID NO: 5896381 - DNA, 25 bp, Homo sapien
aaagaaggcaaagtggctgcttgat

SEQ ID NO: 5896382 - DNA, 25 bp, Homo sapien
tcagggttctatatttttataggca

SEQ ID NO: 5896383 - DNA, 25 bp, Homo sapien
tgttaatgttgactaggcagctaac

SEQ ID NO: 5896384 - DNA, 25 bp, Homo sapien
cacagaaatccaaagtgtagctaac

SEQ ID NO: 5896385 - DNA, 25 bp, Homo sapien
cagtaaagaaggcaaagtggctgct

SEQ ID NO: 5896386 - DNA, 25 bp, Homo sapien
ttgagaagagacattatttataaaa

SEQ ID NO: 5896387 - DNA, 25 bp, Homo sapien
agatccttaatactgtttattacag

SEQ ID NO: 5896388 - DNA, 25 bp, Homo sapien
cgcgaggttgtttagagtagcagca

SEQ ID NO: 5896389 - DNA, 25 bp, Homo sapien
ctatatttttataggcaaatggtaa

SEQ ID NO: 5896390 - DNA, 25 bp, Homo sapien
gagctaaccagaaaagttctgcttg

SEQ ID NO: 5896391 - DNA, 25 bp, Homo sapien
tggactgactgttgtaacttaatgc

SEQ ID NO: 5896392 - DNA, 25 bp, Homo sapien
aacatctgaaatgtttgagaagaga

SEQ ID NO: 5896393 - DNA, 25 bp, Homo sapien
tgccggcatatacgagtgtgaatct

SEQ ID NO: 5896394 - DNA, 25 bp, Homo sapien
caggagacatggtattaaagtctgt

SEQ ID NO: 5896395 - DNA, 25 bp, Homo sapien
ttgatcccttgctgaatgcaaggag

SEQ ID NO: 5896396 - DNA, 25 bp, Homo sapien
atcgtacagtctggtggaggcacag

SEQ ID NO: 5896397 - DNA, 25 bp, Homo sapien
cagtctggtggaggcacagaaatcc

SEQ ID NO: 5896398 - DNA, 25 bp, Homo sapien
ttttctctacatggtactgtacggt

SEQ ID NO: 5896399 - DNA, 25 bp, Homo sapien
cgaggttgtttagagtagcagcact

SEQ ID NO: 5896400 - DNA, 25 bp, Homo sapien
ttaatactgtttattacagccccgc

SEQ ID NO: 5896401 - DNA, 25 bp, Homo sapien
gaaaggatcgtacagtctggtggag

SEQ ID NO: 5896402 - DNA, 25 bp, Homo sapien
aacgtaatcagagagtgttgcttgg

SEQ ID NO: 5896403 - DNA, 25 bp, Homo sapien
agactgaagttggctcacaattaag

SEQ ID NO: 5896404 - DNA, 25 bp, Homo sapien
atgtaaaataaaattatgccgtcgc

SEQ ID NO: 5896405 - DNA, 25 bp, Homo sapien
catctgaaatgtttgagaagagaca

SEQ ID NO: 5896406 - DNA, 25 bp, Homo sapien
agaacgtaatcagagagtgttgctt

SEQ ID NO: 5896407 - DNA, 25 bp, Homo sapien
tgtggatggctcgtacaccatccgc

SEQ ID NO: 5896408 - DNA, 25 bp, Homo sapien
actgaagttggctcacaattaagaa

SEQ ID NO: 5896409 - DNA, 25 bp, Homo sapien
agctaacatctgaaatgtttgagaa

SEQ ID NO: 5896410 - DNA, 25 bp, Homo sapien
ggtggaggcacagaaatccaaagtg

SEQ ID NO: 5896411 - DNA, 25 bp, Homo sapien
ccatgcattcagacttcccagaacc

SEQ ID NO: 5896412 - DNA, 25 bp, Homo sapien
gtgactggaatggtcccatgatgtg

SEQ ID NO: 5896413 - DNA, 25 bp, Homo sapien
aaaccaagccatgcattcagacttc

SEQ ID NO: 5896414 - DNA, 25 bp, Homo sapien
ttaatgttgactaggcagctaacca

SEQ ID NO: 5896415 - DNA, 25 bp, Homo sapien
tatgccgtcgcgaggttgtttagag

SEQ ID NO: 5896416 - DNA, 25 bp, Homo sapien
ctgcttgacaagtccccatcgttga

SEQ ID NO: 5896417 - DNA, 25 bp, Homo sapien
tatgcaggtcagaacgtaatcagag

SEQ ID NO: 5896418 - DNA, 25 bp, Homo sapien
gctcgtacaccatccgccaggcaca

SEQ ID NO: 5896419 - DNA, 25 bp, Homo sapien
caaggactatttttcgcccgaactc

SEQ ID NO: 5896420 - DNA, 25 bp, Homo sapien
aaagtctgtggatggctcgtacacc

SEQ ID NO: 5896421 - DNA, 25 bp, Homo sapien
agttctgcttgacaagtccccatcg

SEQ ID NO: 5896422 - DNA, 25 bp, Homo sapien
agtttaacacttgatgtaaaaggaa

SEQ ID NO: 5896423 - DNA, 25 bp, Homo sapien
atgcattcagacttcccagaaccct

SEQ ID NO: 5896424 - DNA, 25 bp, Homo sapien
ttctctacatggtactgtacggtac

SEQ ID NO: 5896425 - DNA, 25 bp, Homo sapien
tattttcttcaacctaattttattc

SEQ ID NO: 5896426 - DNA, 25 bp, Homo sapien
agcaaagacaggagacatggtatta

SEQ ID NO: 5896427 - DNA, 25 bp, Homo sapien
ttcaacctaattttattcctatgaa

SEQ ID NO: 5896428 - DNA, 25 bp, Homo sapien
actccatatgcaggtcagaacgtaa

SEQ ID NO: 5896429 - DNA, 25 bp, Homo sapien
caagaaaagctaacatgaaaggatc

SEQ ID NO: 5896430 - DNA, 25 bp, Homo sapien
tcgttgaagtgactggaatggtccc

SEQ ID NO: 5896431 - DNA, 25 bp, Homo sapien
gtttattacagccccgccccctcca

SEQ ID NO: 5896432 - DNA, 25 bp, Homo sapien
cccgaactccttgcactctactgcg

SEQ ID NO: 5896433 - DNA, 25 bp, Homo sapien
aagtggctgcttgatcccttgctga

SEQ ID NO: 5896434 - DNA, 25 bp, Homo sapien
caggtactactttctaattcatggt

SEQ ID NO: 5896435 - DNA, 25 bp, Homo sapien
cccagaacccttctcagtaaagaag

SEQ ID NO: 5896436 - DNA, 25 bp, Homo sapien
gtagctaacatctgaaatgtttgag

SEQ ID NO: 5896437 - DNA, 25 bp, Homo sapien
tatgaattttattaacaatgatttc

SEQ ID NO: 5896438 - DNA, 25 bp, Homo sapien
catggataatcctgaagaagaaagc

SEQ ID NO: 5896439 - DNA, 25 bp, Homo sapien
gaacataacaaggactatttttcgc

SEQ ID NO: 5896440 - DNA, 25 bp, Homo sapien
atgatcgtttattttgcaagaaaag

SEQ ID NO: 5896441 - DNA, 25 bp, Homo sapien
aacatggataatcctgaagaagaaa

SEQ ID NO: 5896442 - DNA, 25 bp, Homo sapien
tacagtctggtggaggcacagaaat

SEQ ID NO: 5896443 - DNA, 25 bp, Homo sapien
ctccacaaaccaagccatgcattca

SEQ ID NO: 5896444 - DNA, 25 bp, Homo sapien
gaagagacattatttataaaaccca

SEQ ID NO: 5896445 - DNA, 25 bp, Homo sapien
tgcaaggagctaaccagaaaagttc

SEQ ID NO: 5896446 - DNA, 25 bp, Homo sapien
aggcagctaaccagtgtcacctttt

SEQ ID NO: 5896447 - DNA, 25 bp, Homo sapien
gactgttgtaacttaatgcttctta

SEQ ID NO: 5896448 - DNA, 25 bp, Homo sapien
ttaatgttaatgttgactaggcagc

SEQ ID NO: 5896449 - DNA, 25 bp, Homo sapien
ggttgactttcaggtactactttct

SEQ ID NO: 5896450 - DNA, 25 bp, Homo sapien
ggtacggggacctgtttcttcattg

SEQ ID NO: 5896451 - DNA, 25 bp, Homo sapien
cagaaatccaaagtgtagctaacat

SEQ ID NO: 5896452 - DNA, 25 bp, Homo sapien
tatttataaaacccagatccttaat

SEQ ID NO: 5896453 - DNA, 25 bp, Homo sapien
aaaataaaattatgccgtcgcgagg

SEQ ID NO: 5896454 - DNA, 25 bp, Homo sapien
cgccaggcacagctgcaggatgccg

SEQ ID NO: 5896455 - DNA, 25 bp, Homo sapien
agggttctatatttttataggcaaa

SEQ ID NO: 5896456 - DNA, 25 bp, Homo sapien
ttaaagtctgtggatggctcgtaca

SEQ ID NO: 5896457 - DNA, 25 bp, Homo sapien
actctactgcgcatcttccttggta

SEQ ID NO: 5896458 - DNA, 25 bp, Homo sapien
tggataatcctgaagaagaaagcaa

SEQ ID NO: 5896459 - DNA, 25 bp, Homo sapien
acaaaccaagccatgcattcagact

SEQ ID NO: 5896460 - DNA, 25 bp, Homo sapien
ggcatatacgagtgtgaatctaaga

SEQ ID NO: 5896461 - DNA, 25 bp, Homo sapien
ccaggcacagctgcaggatgccggc

SEQ ID NO: 5896462 - DNA, 25 bp, Homo sapien
gtcccatgatgtgtatgtaaataac

SEQ ID NO: 5896463 - DNA, 25 bp, Homo sapien
aaacccagatccttaatactgttta

SEQ ID NO: 5896464 - DNA, 25 bp, Homo sapien
atggtattaaagtctgtggatggct

SEQ ID NO: 5896465 - DNA, 25 bp, Homo sapien
ctccttgcactctactgcgcatctt

SEQ ID NO: 5896466 - DNA, 25 bp, Homo sapien
agacttcccagaacccttctcagta

SEQ ID NO: 5896467 - DNA, 25 bp, Homo sapien
ttcccagaacccttctcagtaaaga

SEQ ID NO: 5896468 - DNA, 25 bp, Homo sapien
acttcccagaacccttctcagtaaa

SEQ ID NO: 5896469 - DNA, 25 bp, Homo sapien
atttttataggcaaatggtaaagag

SEQ ID NO: 5896470 - DNA, 25 bp, Homo sapien
ggctgcttgatcccttgctgaatgc

SEQ ID NO: 5896471 - DNA, 25 bp, Homo sapien
ctggtggaggcacagaaatccaaag

SEQ ID NO: 5896472 - DNA, 25 bp, Homo sapien
aattttctctacatggtactgtacg

SEQ ID NO: 5896473 - DNA, 25 bp, Homo sapien
gaaaagttctgcttgacaagtcccc

SEQ ID NO: 5896474 - DNA, 25 bp, Homo sapien
tgccatcgggatgatcgtttatttt

SEQ ID NO: 5896475 - DNA, 25 bp, Homo sapien
ggatgatcgtttattttgcaagaaa

SEQ ID NO: 5896476 - DNA, 25 bp, Homo sapien
catcgttgaagtgactggaatggtc

SEQ ID NO: 5896477 - DNA, 25 bp, Homo sapien
ttaatgcttcttaggaaagtttaat

SEQ ID NO: 5896478 - DNA, 25 bp, Homo sapien
atatgtaaaataaaattatgccgtc

SEQ ID NO: 5896479 - DNA, 25 bp, Homo sapien
ttgcactctactgcgcatcttcctt

SEQ ID NO: 5896480 - DNA, 25 bp, Homo sapien
attatgccgtcgcgaggttgtttag

SEQ ID NO: 5896481 - DNA, 25 bp, Homo sapien
acacttgatgtaaaaggaaaagaac

SEQ ID NO: 5896482 - DNA, 25 bp, Homo sapien
tattaaagtctgtggatggctcgta

SEQ ID NO: 5896483 - DNA, 25 bp, Homo sapien
atccttaatactgtttattacagcc

SEQ ID NO: 5896484 - DNA, 25 bp, Homo sapien
cagaaaagttctgcttgacaagtcc

SEQ ID NO: 5896485 - DNA, 25 bp, Homo sapien
accagaaaagttctgcttgacaagt

SEQ ID NO: 5896486 - DNA, 25 bp, Homo sapien
tcgtttattttgcaagaaaagctaa

SEQ ID NO: 5896487 - DNA, 25 bp, Homo sapien
aagttggctcacaattaagaagttt

SEQ ID NO: 5896488 - DNA, 25 bp, Homo sapien
tggtactgtacggtacggggacctg

SEQ ID NO: 5896489 - DNA, 25 bp, Homo sapien
cccgccccctccacaaaccaagcca

SEQ ID NO: 5896490 - DNA, 25 bp, Homo sapien
actttctaattcatggtagaatggc

SEQ ID NO: 5896491 - DNA, 25 bp, Homo sapien
taagactgaagttggctcacaatta

SEQ ID NO: 5896492 - DNA, 25 bp, Homo sapien
ttctgcttgacaagtccccatcgtt

SEQ ID NO: 5896493 - DNA, 25 bp, Homo sapien
ataggcaaatggtaaagaggtcact

SEQ ID NO: 5896494 - DNA, 25 bp, Homo sapien
aactccttgcactctactgcgcatc

SEQ ID NO: 5896495 - DNA, 25 bp, Homo sapien
ggtcactgggttgactttcaggtac

SEQ ID NO: 5896496 - DNA, 25 bp, Homo sapien
ctatttttcgcccgaactccttgca

SEQ ID NO: 5896497 - DNA, 25 bp, Homo sapien
tactgtttattacagccccgccccc

SEQ ID NO: 5896498 - DNA, 25 bp, Homo sapien
aatgttaatgttgactaggcagcta

SEQ ID NO: 5896499 - DNA, 25 bp, Homo sapien
agaaagcaaagacaggagacatggt

SEQ ID NO: 5896500 - DNA, 25 bp, Homo sapien
gtttattttgcaagaaaagctaaca

SEQ ID NO: 5896501 - DNA, 25 bp, Homo sapien
accatccgccaggcacagctgcagg

SEQ ID NO: 5896502 - DNA, 25 bp, Homo sapien
ggaatggtcccatgatgtgtatgta

SEQ ID NO: 5896503 - DNA, 25 bp, Homo sapien
tttatgttttattttcttcaaccta

SEQ ID NO: 5896504 - DNA, 25 bp, Homo sapien
acatggtattaaagtctgtggatgg

SEQ ID NO: 5896505 - DNA, 25 bp, Homo sapien
gtaatacctgccatcgggatgatcg

SEQ ID NO: 5896506 - DNA, 25 bp, Homo sapien
tactgcgcatcttccttggtaatac

SEQ ID NO: 5896507 - DNA, 25 bp, Homo sapien
tccgccaggcacagctgcaggatgc

SEQ ID NO: 5896508 - DNA, 25 bp, Homo sapien
tagagtagcagcactccatatgcag

SEQ ID NO: 5896509 - DNA, 25 bp, Homo sapien
ctaaccagtgtcacctttttatgtt

SEQ ID NO: 5896510 - DNA, 25 bp, Homo sapien
cttggactgactgttgtaacttaat

SEQ ID NO: 5896511 - DNA, 25 bp, Homo sapien
atcgggatgatcgtttattttgcaa

SEQ ID NO: 5896512 - DNA, 25 bp, Homo sapien
aggcacagctgcaggatgccggcat

SEQ ID NO: 5896513 - DNA, 25 bp, Homo sapien
tcccttgctgaatgcaaggagctaa

SEQ ID NO: 5896514 - DNA, 25 bp, Homo sapien
agagacattatttataaaacccaga

SEQ ID NO: 5896515 - DNA, 25 bp, Homo sapien
attaacaatgatttcatgtttttta

SEQ ID NO: 5896516 - DNA, 25 bp, Homo sapien
caaagtgtagctaacatctgaaatg

SEQ ID NO: 5896517 - DNA, 25 bp, Homo sapien
ggatcgtacagtctggtggaggcac

SEQ ID NO: 5896518 - DNA, 25 bp, Homo sapien
tttcttcaacctaattttattccta

SEQ ID NO: 5896519 - DNA, 25 bp, Homo sapien
ggagacatggtattaaagtctgtgg

SEQ ID NO: 5896520 - DNA, 25 bp, Homo sapien
tgaagtgactggaatggtcccatga

SEQ ID NO: 5896521 - DNA, 25 bp, Homo sapien
aatgcttcttaggaaagtttaatat

SEQ ID NO: 5896522 - DNA, 25 bp, Homo sapien
atggtaaagaggtcactgggttgac

SEQ ID NO: 5896523 - DNA, 25 bp, Homo sapien
tcttcaacctaattttattcctatg

SEQ ID NO: 5896524 - DNA, 25 bp, Homo sapien
agaaggcaaagtggctgcttgatcc

SEQ ID NO: 5896525 - DNA, 25 bp, Homo sapien
tttctaattcatggtagaatggcta

SEQ ID NO: 5896526 - DNA, 25 bp, Homo sapien
aagtgtagctaacatctgaaatgtt

SEQ ID NO: 5896527 - DNA, 25 bp, Homo sapien
ttattcctatgaattttattaacaa

SEQ ID NO: 5896528 - DNA, 25 bp, Homo sapien
atcctgaagaagaaagcaaagacag

SEQ ID NO: 5896529 - DNA, 25 bp, Homo sapien
aatgttgactaggcagctaaccagt

SEQ ID NO: 5896530 - DNA, 25 bp, Homo sapien
tgatttcatgttttttaaaagaagt

SEQ ID NO: 5896531 - DNA, 25 bp, Homo sapien
attatttataaaacccagatcctta

SEQ ID NO: 5896532 - DNA, 25 bp, Homo sapien
aagaagaaagcaaagacaggagaca

SEQ ID NO: 5896533 - DNA, 25 bp, Homo sapien
taacttaatgcttcttaggaaagtt

SEQ ID NO: 5896534 - DNA, 25 bp, Homo sapien
gaggtcactgggttgactttcaggt

SEQ ID NO: 5896535 - DNA, 25 bp, Homo sapien
taacatgaaaggatcgtacagtctg

SEQ ID NO: 5896536 - DNA, 25 bp, Homo sapien
cgcccgaactccttgcactctactg

SEQ ID NO: 5896537 - DNA, 25 bp, Homo sapien
aggcaaatggtaaagaggtcactgg

SEQ ID NO: 5896538 - DNA, 25 bp, Homo sapien
ggttctatatttttataggcaaatg

SEQ ID NO: 5896539 - DNA, 25 bp, Homo sapien
tgaatgcaaggagctaaccagaaaa

SEQ ID NO: 5896540 - DNA, 25 bp, Homo sapien
aatggtcccatgatgtgtatgtaaa

SEQ ID NO: 5896541 - DNA, 25 bp, Homo sapien
ccacaaaccaagccatgcattcaga

SEQ ID NO: 5896542 - DNA, 25 bp, Homo sapien
actgggttgactttcaggtactact

SEQ ID NO: 5896543 - DNA, 25 bp, Homo sapien
aagaacataacaaggactatttttc

SEQ ID NO: 5896544 - DNA, 25 bp, Homo sapien
ctggaatggtcccatgatgtgtatg

SEQ ID NO: 5896545 - DNA, 25 bp, Homo sapien
ttataggcaaatggtaaagaggtca

SEQ ID NO: 5896546 - DNA, 25 bp, Homo sapien
atcttccttggtaatacctgccatc

SEQ ID NO: 5896547 - DNA, 25 bp, Homo sapien
agaaaagctaacatgaaaggatcgt

SEQ ID NO: 5896548 - DNA, 25 bp, Homo sapien
attttgcaagaaaagctaacatgaa

SEQ ID NO: 5896549 - DNA, 25 bp, Homo sapien
accaagccatgcattcagacttccc

SEQ ID NO: 5896550 - DNA, 25 bp, Homo sapien
gagtagcagcactccatatgcaggt

SEQ ID NO: 5896551 - DNA, 25 bp, Homo sapien
taaccagaaaagttctgcttgacaa

SEQ ID NO: 5896552 - DNA, 25 bp, Homo sapien
aagaggtcactgggttgactttcag

SEQ ID NO: 5896553 - DNA, 25 bp, Homo sapien
tatacgagtgtgaatctaagactga

SEQ ID NO: 5896554 - DNA, 25 bp, Homo sapien
gcgcatcttccttggtaatacctgc

SEQ ID NO: 5896555 - DNA, 25 bp, Homo sapien
gtctggtggaggcacagaaatccaa

SEQ ID NO: 5896556 - DNA, 25 bp, Homo sapien
ctgactgttgtaacttaatgcttct

SEQ ID NO: 5896557 - DNA, 25 bp, Homo sapien
tttataaaacccagatccttaatac

SEQ ID NO: 5896558 - DNA, 25 bp, Homo sapien
gactatttttcgcccgaactccttg

SEQ ID NO: 5896559 - DNA, 25 bp, Homo sapien
tataaaacccagatccttaatactg

SEQ ID NO: 5896560 - DNA, 25 bp, Homo sapien
ggtaaagaggtcactgggttgactt

SEQ ID NO: 5896561 - DNA, 25 bp, Homo sapien
ttttataggcaaatggtaaagaggt

SEQ ID NO: 5896562 - DNA, 25 bp, Homo sapien
cctgccatcgggatgatcgtttatt

SEQ ID NO: 5896563 - DNA, 25 bp, Homo sapien
tctaagactgaagttggctcacaat

SEQ ID NO: 5896564 - DNA, 25 bp, Homo sapien
cccatgatgtgtatgtaaataacat

SEQ ID NO: 5896565 - DNA, 25 bp, Homo sapien
catatgcaggtcagaacgtaatcag

SEQ ID NO: 5896566 - DNA, 25 bp, Homo sapien
ttgctgaatgcaaggagctaaccag

SEQ ID NO: 5896567 - DNA, 25 bp, Homo sapien
gttgaagtgactggaatggtcccat

SEQ ID NO: 5896568 - DNA, 25 bp, Homo sapien
aaattatgccgtcgcgaggttgttt

SEQ ID NO: 5896569 - DNA, 25 bp, Homo sapien
accagtgtcacctttttatgtttta

SEQ ID NO: 5896570 - DNA, 25 bp, Homo sapien
atttcatgttttttaaaagaagtca

SEQ ID NO: 5896571 - DNA, 25 bp, Homo sapien
ataacaaggactatttttcgcccga

SEQ ID NO: 5896572 - DNA, 25 bp, Homo sapien
aatgcaaggagctaaccagaaaagt

SEQ ID NO: 5896573 - DNA, 25 bp, Homo sapien
tcagaacgtaatcagagagtgttgc

SEQ ID NO: 5896574 - DNA, 25 bp, Homo sapien
gcatcctgcagctgtgcctggcgga

SEQ ID NO: 5896575 - DNA, 25 bp, Homo sapien
atgttatttacatacacatcatggg

SEQ ID NO: 5896576 - DNA, 25 bp, Homo sapien
ctttgctttcttcttcaggattatc

SEQ ID NO: 5896577 - DNA, 25 bp, Homo sapien
gagaagggttctgggaagtctgaat

SEQ ID NO: 5896578 - DNA, 25 bp, Homo sapien
tgcctggcggatggtgtacgagcca

SEQ ID NO: 5896579 - DNA, 25 bp, Homo sapien
tggcggatggtgtacgagccatcca

SEQ ID NO: 5896580 - DNA, 25 bp, Homo sapien
catttgcctataaaaatatagaacc

SEQ ID NO: 5896581 - DNA, 25 bp, Homo sapien
gttatttacatacacatcatgggac

SEQ ID NO: 5896582 - DNA, 25 bp, Homo sapien
ttacatcaagtgttaaacttcttaa

SEQ ID NO: 5896583 - DNA, 25 bp, Homo sapien
gagaaaattacttagccattctacc

SEQ ID NO: 5896584 - DNA, 25 bp, Homo sapien
taattgtgagccaacttcagtctta

SEQ ID NO: 5896585 - DNA, 25 bp, Homo sapien
atcaagcagccactttgccttcttt

SEQ ID NO: 5896586 - DNA, 25 bp, Homo sapien
gaccccaatgaagaaacaggtcccc

SEQ ID NO: 5896587 - DNA, 25 bp, Homo sapien
gtctttgctttcttcttcaggatta

SEQ ID NO: 5896588 - DNA, 25 bp, Homo sapien
atatggagtgctgctactctaaaca

SEQ ID NO: 5896589 - DNA, 25 bp, Homo sapien
tagtacctgaaagtcaacccagtga

SEQ ID NO: 5896590 - DNA, 25 bp, Homo sapien
tgacactggttagctgcctagtcaa

SEQ ID NO: 5896591 - DNA, 25 bp, Homo sapien
accatttgcctataaaaatatagaa

SEQ ID NO: 5896592 - DNA, 25 bp, Homo sapien
gggcggggctgtaataaacagtatt

SEQ ID NO: 5896593 - DNA, 25 bp, Homo sapien
cgatcatcccgatggcaggtattac

SEQ ID NO: 5896594 - DNA, 25 bp, Homo sapien
aacgatggggacttgtcaagcagaa

SEQ ID NO: 5896595 - DNA, 25 bp, Homo sapien
aagcattaagttacaacagtcagtc

SEQ ID NO: 5896596 - DNA, 25 bp, Homo sapien
attgtgagccaacttcagtcttaga

SEQ ID NO: 5896597 - DNA, 25 bp, Homo sapien
atggtgtacgagccatccacagact

SEQ ID NO: 5896598 - DNA, 25 bp, Homo sapien
tactctaaacaacctcgcgacggca

SEQ ID NO: 5896599 - DNA, 25 bp, Homo sapien
taaaaaggtgacactggttagctgc

SEQ ID NO: 5896600 - DNA, 25 bp, Homo sapien
gcatatggagtgctgctactctaaa

SEQ ID NO: 5896601 - DNA, 25 bp, Homo sapien
catttcagatgttagctacactttg

SEQ ID NO: 5896602 - DNA, 25 bp, Homo sapien
gggaccattccagtcacttcaacga

SEQ ID NO: 5896603 - DNA, 25 bp, Homo sapien
agcaagggatcaagcagccactttg

SEQ ID NO: 5896604 - DNA, 25 bp, Homo sapien
ttagaaagtagtacctgaaagtcaa

SEQ ID NO: 5896605 - DNA, 25 bp, Homo sapien
gcaaaataaacgatcatcccgatgg

SEQ ID NO: 5896606 - DNA, 25 bp, Homo sapien
ctctttaccatttgcctataaaaat

SEQ ID NO: 5896607 - DNA, 25 bp, Homo sapien
gaaaattacttagccattctaccat

SEQ ID NO: 5896608 - DNA, 25 bp, Homo sapien
agcagaacttttctggttagctcct

SEQ ID NO: 5896609 - DNA, 25 bp, Homo sapien
gtaccatgtagagaaaattacttag

SEQ ID NO: 5896610 - DNA, 25 bp, Homo sapien
tggagggggcggggctgtaataaac

SEQ ID NO: 5896611 - DNA, 25 bp, Homo sapien
tctcttctcaaacatttcagatgtt

SEQ ID NO: 5896612 - DNA, 25 bp, Homo sapien
tagccattctaccatgaattagaaa

SEQ ID NO: 5896613 - DNA, 25 bp, Homo sapien
ataccatgtctcctgtctttgcttt

SEQ ID NO: 5896614 - DNA, 25 bp, Homo sapien
ttttacatcaagtgttaaacttctt

SEQ ID NO: 5896615 - DNA, 25 bp, Homo sapien
aaaaggtgacactggttagctgcct

SEQ ID NO: 5896616 - DNA, 25 bp, Homo sapien
gtcacttcaacgatggggacttgtc

SEQ ID NO: 5896617 - DNA, 25 bp, Homo sapien
tacagtaccatgtagagaaaattac

SEQ ID NO: 5896618 - DNA, 25 bp, Homo sapien
tgaattagaaagtagtacctgaaag

SEQ ID NO: 5896619 - DNA, 25 bp, Homo sapien
gtattaccaaggaagatgcgcagta

SEQ ID NO: 5896620 - DNA, 25 bp, Homo sapien
gatggcaggtattaccaaggaagat

SEQ ID NO: 5896621 - DNA, 25 bp, Homo sapien
cctataaaaatatagaaccctgact

SEQ ID NO: 5896622 - DNA, 25 bp, Homo sapien
atggagtgctgctactctaaacaac

SEQ ID NO: 5896623 - DNA, 25 bp, Homo sapien
tcgcgacggcataattttattttac

SEQ ID NO: 5896624 - DNA, 25 bp, Homo sapien
taaacagtattaaggatctgggttt

SEQ ID NO: 5896625 - DNA, 25 bp, Homo sapien
tttgcctataaaaatatagaaccct

SEQ ID NO: 5896626 - DNA, 25 bp, Homo sapien
aacagtattaaggatctgggtttta

SEQ ID NO: 5896627 - DNA, 25 bp, Homo sapien
attccagtcacttcaacgatgggga

SEQ ID NO: 5896628 - DNA, 25 bp, Homo sapien
gcgaaaaatagtccttgttatgttc

SEQ ID NO: 5896629 - DNA, 25 bp, Homo sapien
tctttactgagaagggttctgggaa

SEQ ID NO: 5896630 - DNA, 25 bp, Homo sapien
ttcataggaataaaattaggttgaa

SEQ ID NO: 5896631 - DNA, 25 bp, Homo sapien
acaacagtcagtccaagcaacactc

SEQ ID NO: 5896632 - DNA, 25 bp, Homo sapien
gccggcatcctgcagctgtgcctgg

SEQ ID NO: 5896633 - DNA, 25 bp, Homo sapien
tttaataccatgtctcctgtctttg

SEQ ID NO: 5896634 - DNA, 25 bp, Homo sapien
tacatacacatcatgggaccattcc

SEQ ID NO: 5896635 - DNA, 25 bp, Homo sapien
aattcataggaataaaattaggttg

SEQ ID NO: 5896636 - DNA, 25 bp, Homo sapien
taaaaaacatgaaatcattgttaat

SEQ ID NO: 5896637 - DNA, 25 bp, Homo sapien
gactgtacgatcctttcatgttagc

SEQ ID NO: 5896638 - DNA, 25 bp, Homo sapien
cctgcagctgtgcctggcggatggt

SEQ ID NO: 5896639 - DNA, 25 bp, Homo sapien
gaacttttctggttagctccttgca

SEQ ID NO: 5896640 - DNA, 25 bp, Homo sapien
agcagccactttgccttctttactg

SEQ ID NO: 5896641 - DNA, 25 bp, Homo sapien
cgcagtagagtgcaaggagttcggg

SEQ ID NO: 5896642 - DNA, 25 bp, Homo sapien
caagtgttaaacttcttaattgtga

SEQ ID NO: 5896643 - DNA, 25 bp, Homo sapien
cagtattaaggatctgggttttata

SEQ ID NO: 5896644 - DNA, 25 bp, Homo sapien
cttctttactgagaagggttctggg

SEQ ID NO: 5896645 - DNA, 25 bp, Homo sapien
attaccaaggaagatgcgcagtaga

SEQ ID NO: 5896646 - DNA, 25 bp, Homo sapien
accgtacagtaccatgtagagaaaa

SEQ ID NO: 5896647 - DNA, 25 bp, Homo sapien
gcggatggtgtacgagccatccaca

SEQ ID NO: 5896648 - DNA, 25 bp, Homo sapien
ctctctgattacgttctgacctgca

SEQ ID NO: 5896649 - DNA, 25 bp, Homo sapien
aacataaaaaggtgacactggttag

SEQ ID NO: 5896650 - DNA, 25 bp, Homo sapien
agtgcaaggagttcgggcgaaaaat

SEQ ID NO: 5896651 - DNA, 25 bp, Homo sapien
ttcctaagaagcattaagttacaac

SEQ ID NO: 5896652 - DNA, 25 bp, Homo sapien
catacacatcatgggaccattccag

SEQ ID NO: 5896653 - DNA, 25 bp, Homo sapien
ctctgattacgttctgacctgcata

SEQ ID NO: 5896654 - DNA, 25 bp, Homo sapien
ccaacttcagtcttagattcacact

SEQ ID NO: 5896655 - DNA, 25 bp, Homo sapien
cctaagaagcattaagttacaacag

SEQ ID NO: 5896656 - DNA, 25 bp, Homo sapien
ttggtttgtggagggggcggggctg

SEQ ID NO: 5896657 - DNA, 25 bp, Homo sapien
catcccgatggcaggtattaccaag

SEQ ID NO: 5896658 - DNA, 25 bp, Homo sapien
agcttttcttgcaaaataaacgatc

SEQ ID NO: 5896659 - DNA, 25 bp, Homo sapien
catgtagagaaaattacttagccat

SEQ ID NO: 5896660 - DNA, 25 bp, Homo sapien
taagaagcattaagttacaacagtc

SEQ ID NO: 5896661 - DNA, 25 bp, Homo sapien
ctgggaagtctgaatgcatggcttg

SEQ ID NO: 5896662 - DNA, 25 bp, Homo sapien
tcctttcatgttagcttttcttgca

SEQ ID NO: 5896663 - DNA, 25 bp, Homo sapien
ttctgtgcctccaccagactgtacg

SEQ ID NO: 5896664 - DNA, 25 bp, Homo sapien
aatatagaaccctgacttcttttaa

SEQ ID NO: 5896665 - DNA, 25 bp, Homo sapien
ggtttgtggagggggcggggctgta

SEQ ID NO: 5896666 - DNA, 25 bp, Homo sapien
attaagttacaacagtcagtccaag

SEQ ID NO: 5896667 - DNA, 25 bp, Homo sapien
cagtaccatgtagagaaaattactt

SEQ ID NO: 5896668 - DNA, 25 bp, Homo sapien
gtcagtccaagcaacactctctgat

SEQ ID NO: 5896669 - DNA, 25 bp, Homo sapien
gggcgaaaaatagtccttgttatgt

SEQ ID NO: 5896670 - DNA, 25 bp, Homo sapien
gaagggttctgggaagtctgaatgc

SEQ ID NO: 5896671 - DNA, 25 bp, Homo sapien
tacactttggatttctgtgcctcca

SEQ ID NO: 5896672 - DNA, 25 bp, Homo sapien
atccacagactttaataccatgtct

SEQ ID NO: 5896673 - DNA, 25 bp, Homo sapien
agggttctgggaagtctgaatgcat

SEQ ID NO: 5896674 - DNA, 25 bp, Homo sapien
agaagcattaagttacaacagtcag

SEQ ID NO: 5896675 - DNA, 25 bp, Homo sapien
cagactgtacgatcctttcatgtta

SEQ ID NO: 5896676 - DNA, 25 bp, Homo sapien
accagactgtacgatcctttcatgt

SEQ ID NO: 5896677 - DNA, 25 bp, Homo sapien
gcgacggcataattttattttacat

SEQ ID NO: 5896678 - DNA, 25 bp, Homo sapien
gtagagtgcaaggagttcgggcgaa

SEQ ID NO: 5896679 - DNA, 25 bp, Homo sapien
ttataaataatgtctcttctcaaac

SEQ ID NO: 5896680 - DNA, 25 bp, Homo sapien
ctcaaacatttcagatgttagctac

SEQ ID NO: 5896681 - DNA, 25 bp, Homo sapien
agctccttgcattcagcaagggatc

SEQ ID NO: 5896682 - DNA, 25 bp, Homo sapien
tgtgcctggcggatggtgtacgagc

SEQ ID NO: 5896683 - DNA, 25 bp, Homo sapien
tcgtatatgccggcatcctgcagct

SEQ ID NO: 5896684 - DNA, 25 bp, Homo sapien
cagccactttgccttctttactgag

SEQ ID NO: 5896685 - DNA, 25 bp, Homo sapien
tatttacatacacatcatgggacca

SEQ ID NO: 5896686 - DNA, 25 bp, Homo sapien
ctgtaataaacagtattaaggatct

SEQ ID NO: 5896687 - DNA, 25 bp, Homo sapien
atgggaccattccagtcacttcaac

SEQ ID NO: 5896688 - DNA, 25 bp, Homo sapien
attcacactcgtatatgccggcatc

SEQ ID NO: 5896689 - DNA, 25 bp, Homo sapien
ctttaccatttgcctataaaaatat

SEQ ID NO: 5896690 - DNA, 25 bp, Homo sapien
ttagcttttcttgcaaaataaacga

SEQ ID NO: 5896691 - DNA, 25 bp, Homo sapien
gaaagtcaacccagtgacctcttta

SEQ ID NO: 5896692 - DNA, 25 bp, Homo sapien
tgtagagaaaattacttagccattc

SEQ ID NO: 5896693 - DNA, 25 bp, Homo sapien
gtcaagcagaacttttctggttagc

SEQ ID NO: 5896694 - DNA, 25 bp, Homo sapien
ctttgccttctttactgagaagggt

SEQ ID NO: 5896695 - DNA, 25 bp, Homo sapien
ttcttaattgtgagccaacttcagt

SEQ ID NO: 5896696 - DNA, 25 bp, Homo sapien
tgtacgagccatccacagactttaa

SEQ ID NO: 5896697 - DNA, 25 bp, Homo sapien
ggtgacactggttagctgcctagtc

SEQ ID NO: 5896698 - DNA, 25 bp, Homo sapien
taggttgaagaaaataaaacataaa

SEQ ID NO: 5896699 - DNA, 25 bp, Homo sapien
tcgggcgaaaaatagtccttgttat

SEQ ID NO: 5896700 - DNA, 25 bp, Homo sapien
atcattgttaataaaattcatagga

SEQ ID NO: 5896701 - DNA, 25 bp, Homo sapien
gtatatgccggcatcctgcagctgt

SEQ ID NO: 5896702 - DNA, 25 bp, Homo sapien
gatcctttcatgttagcttttcttg

SEQ ID NO: 5896703 - DNA, 25 bp, Homo sapien
ttccttttacatcaagtgttaaact

SEQ ID NO: 5896704 - DNA, 25 bp, Homo sapien
tctcctgtctttgctttcttcttca

SEQ ID NO: 5896705 - DNA, 25 bp, Homo sapien
tacttagccattctaccatgaatta

SEQ ID NO: 5896706 - DNA, 25 bp, Homo sapien
tgacctctttaccatttgcctataa

SEQ ID NO: 5896707 - DNA, 25 bp, Homo sapien
gagggggcggggctgtaataaacag

SEQ ID NO: 5896708 - DNA, 25 bp, Homo sapien
ctttcctaagaagcattaagttaca

SEQ ID NO: 5896709 - DNA, 25 bp, Homo sapien
acttcttttaaaaaacatgaaatca

SEQ ID NO: 5896710 - DNA, 25 bp, Homo sapien
cattctaccatgaattagaaagtag

SEQ ID NO: 5896711 - DNA, 25 bp, Homo sapien
tgggttttataaataatgtctcttc

SEQ ID NO: 5896712 - DNA, 25 bp, Homo sapien
acctgcatatggagtgctgctactc

SEQ ID NO: 5896713 - DNA, 25 bp, Homo sapien
cagtccaagcaacactctctgatta

SEQ ID NO: 5896714 - DNA, 25 bp, Homo sapien
taaactttcctaagaagcattaagt

SEQ ID NO: 5896715 - DNA, 25 bp, Homo sapien
ggggctgtaataaacagtattaagg

SEQ ID NO: 5896716 - DNA, 25 bp, Homo sapien
ctgtgcctccaccagactgtacgat

SEQ ID NO: 5896717 - DNA, 25 bp, Homo sapien
ggatggtgtacgagccatccacaga

SEQ ID NO: 5896718 - DNA, 25 bp, Homo sapien
tgtctcctgtctttgctttcttctt

SEQ ID NO: 5896719 - DNA, 25 bp, Homo sapien
aacgatcatcccgatggcaggtatt

SEQ ID NO: 5896720 - DNA, 25 bp, Homo sapien
ttttataaataatgtctcttctcaa

SEQ ID NO: 5896721 - DNA, 25 bp, Homo sapien
ctccaccagactgtacgatcctttc

SEQ ID NO: 5896722 - DNA, 25 bp, Homo sapien
cagtcagtccaagcaacactctctg

SEQ ID NO: 5896723 - DNA, 25 bp, Homo sapien
gattacgttctgacctgcatatgga

SEQ ID NO: 5896724 - DNA, 25 bp, Homo sapien
taaaaatatagaaccctgacttctt

SEQ ID NO: 5896725 - DNA, 25 bp, Homo sapien
ttcttttaaaaaacatgaaatcatt

SEQ ID NO: 5896726 - DNA, 25 bp, Homo sapien
ggttagctccttgcattcagcaagg

SEQ ID NO: 5896727 - DNA, 25 bp, Homo sapien
acttttctggttagctccttgcatt

SEQ ID NO: 5896728 - DNA, 25 bp, Homo sapien
acactcgtatatgccggcatcctgc

SEQ ID NO: 5896729 - DNA, 25 bp, Homo sapien
gtacctgaaagtcaacccagtgacc

SEQ ID NO: 5896730 - DNA, 25 bp, Homo sapien
tgacctgcatatggagtgctgctac

SEQ ID NO: 5896731 - DNA, 25 bp, Homo sapien
acatcaagtgttaaacttcttaatt

SEQ ID NO: 5896732 - DNA, 25 bp, Homo sapien
tcagcaagggatcaagcagccactt

SEQ ID NO: 5896733 - DNA, 25 bp, Homo sapien
gaagtctgaatgcatggcttggttt

SEQ ID NO: 5896734 - DNA, 25 bp, Homo sapien
tccagtcacttcaacgatggggact

SEQ ID NO: 5896735 - DNA, 25 bp, Homo sapien
ttacgttctgacctgcatatggagt

SEQ ID NO: 5896736 - DNA, 25 bp, Homo sapien
agagtgcaaggagttcgggcgaaaa

SEQ ID NO: 5896737 - DNA, 25 bp, Homo sapien
ctaaacaacctcgcgacggcataat

SEQ ID NO: 5896738 - DNA, 25 bp, Homo sapien
gtccccgtaccgtacagtaccatgt

SEQ ID NO: 5896739 - DNA, 25 bp, Homo sapien
ttctcaaacatttcagatgttagct

SEQ ID NO: 5896740 - DNA, 25 bp, Homo sapien
tgtgagccaacttcagtcttagatt

SEQ ID NO: 5896741 - DNA, 25 bp, Homo sapien
tgcagctgtgcctggcggatggtgt

SEQ ID NO: 5896742 - DNA, 25 bp, Homo sapien
ctgtctttgctttcttcttcaggat

SEQ ID NO: 5896743 - DNA, 25 bp, Homo sapien
ttagattcacactcgtatatgccgg

SEQ ID NO: 5896744 - DNA, 25 bp, Homo sapien
tggcaggtattaccaaggaagatgc

SEQ ID NO: 5896745 - DNA, 25 bp, Homo sapien
gttagctgcctagtcaacattaaca

SEQ ID NO: 5896746 - DNA, 25 bp, Homo sapien
tgctgctactctaaacaacctcgcg

SEQ ID NO: 5896747 - DNA, 25 bp, Homo sapien
cgagccatccacagactttaatacc

SEQ ID NO: 5896748 - DNA, 25 bp, Homo sapien
gtcaacccagtgacctctttaccat

SEQ ID NO: 5896749 - DNA, 25 bp, Homo sapien
cttttcttgcaaaataaacgatcat

SEQ ID NO: 5896750 - DNA, 25 bp, Homo sapien
tgcaaggagttcgggcgaaaaatag

SEQ ID NO: 5896751 - DNA, 25 bp, Homo sapien
atatgccggcatcctgcagctgtgc

SEQ ID NO: 5896752 - DNA, 25 bp, Homo sapien
gatctgggttttataaataatgtct

SEQ ID NO: 5896753 - DNA, 25 bp, Homo sapien
caagcagccactttgccttctttac

SEQ ID NO: 5896754 - DNA, 25 bp, Homo sapien
taagttacaacagtcagtccaagca

SEQ ID NO: 5896755 - DNA, 25 bp, Homo sapien
tactgagaagggttctgggaagtct

SEQ ID NO: 5896756 - DNA, 25 bp, Homo sapien
tgttagcttttcttgcaaaataaac

SEQ ID NO: 5896757 - DNA, 25 bp, Homo sapien
ggatttctgtgcctccaccagactg

SEQ ID NO: 5896758 - DNA, 25 bp, Homo sapien
cggcatcctgcagctgtgcctggcg

SEQ ID NO: 5896759 - DNA, 25 bp, Homo sapien
tcaacgatggggacttgtcaagcag

SEQ ID NO: 5896760 - DNA, 25 bp, Homo sapien
cagtcacttcaacgatggggacttg

SEQ ID NO: 5896761 - DNA, 25 bp, Homo sapien
taggaataaaattaggttgaagaaa

SEQ ID NO: 5896762 - DNA, 25 bp, Homo sapien
atcaagtgttaaacttcttaattgt

SEQ ID NO: 5896763 - DNA, 25 bp, Homo sapien
gttctgacctgcatatggagtgctg

SEQ ID NO: 5896764 - DNA, 25 bp, Homo sapien
ccgtaccgtacagtaccatgtagag

SEQ ID NO: 5896765 - DNA, 25 bp, Homo sapien
tcacactcgtatatgccggcatcct

SEQ ID NO: 5896766 - DNA, 25 bp, Homo sapien
agtgttaaacttcttaattgtgagc

SEQ ID NO: 5896767 - DNA, 25 bp, Homo sapien
caaggagttcgggcgaaaaatagtc

SEQ ID NO: 5896768 - DNA, 25 bp, Homo sapien
caatgaagaaacaggtccccgtacc

SEQ ID NO: 5896769 - DNA, 25 bp, Homo sapien
attacttagccattctaccatgaat

SEQ ID NO: 5896770 - DNA, 25 bp, Homo sapien
ccatccacagactttaataccatgt

SEQ ID NO: 5896771 - DNA, 25 bp, Homo sapien
aggtattaccaaggaagatgcgcag

SEQ ID NO: 5896772 - DNA, 25 bp, Homo sapien
aagatgcgcagtagagtgcaaggag

SEQ ID NO: 5896773 - DNA, 25 bp, Homo sapien
tttcttgcaaaataaacgatcatcc

SEQ ID NO: 5896774 - DNA, 25 bp, Homo sapien
aacctcgcgacggcataattttatt

SEQ ID NO: 5896775 - DNA, 25 bp, Homo sapien
ttgccttctttactgagaagggttc

SEQ ID NO: 5896776 - DNA, 25 bp, Homo sapien
tgcctataaaaatatagaaccctga

SEQ ID NO: 5896777 - DNA, 25 bp, Homo sapien
gcattaagttacaacagtcagtcca

SEQ ID NO: 5896778 - DNA, 25 bp, Homo sapien
tagtccttgttatgttcttttcctt

SEQ ID NO: 5896779 - DNA, 25 bp, Homo sapien
agccatccacagactttaataccat

SEQ ID NO: 5896780 - DNA, 25 bp, Homo sapien
ttctggttagctccttgcattcagc

SEQ ID NO: 5896781 - DNA, 25 bp, Homo sapien
ctttggatttctgtgcctccaccag

SEQ ID NO: 5896782 - DNA, 25 bp, Homo sapien
aagtcaacccagtgacctctttacc

SEQ ID NO: 5896783 - DNA, 25 bp, Homo sapien
cactttggatttctgtgcctccacc

SEQ ID NO: 5896784 - DNA, 25 bp, Homo sapien
tagctacactttggatttctgtgcc

SEQ ID NO: 5896785 - DNA, 25 bp, Homo sapien
gctactctaaacaacctcgcgacgg

SEQ ID NO: 5896786 - DNA, 25 bp, Homo sapien
aattagaaagtagtacctgaaagtc

SEQ ID NO: 5896787 - DNA, 25 bp, Homo sapien
ttttccttttacatcaagtgttaaa

SEQ ID NO: 5896788 - DNA, 25 bp, Homo sapien
ttgctttcttcttcaggattatcca

SEQ ID NO: 5896789 - DNA, 25 bp, Homo sapien
aataaacagtattaaggatctgggt

SEQ ID NO: 5896790 - DNA, 25 bp, Homo sapien
ggacttgtcaagcagaacttttctg

SEQ ID NO: 5896791 - DNA, 25 bp, Homo sapien
ttacaacagtcagtccaagcaacac

SEQ ID NO: 5896792 - DNA, 25 bp, Homo sapien
acccagtgacctctttaccatttgc

SEQ ID NO: 5896793 - DNA, 25 bp, Homo sapien
aatgtctcttctcaaacatttcaga

SEQ ID NO: 5896794 - DNA, 25 bp, Homo sapien
tataaaaatatagaaccctgacttc

SEQ ID NO: 5896795 - DNA, 25 bp, Homo sapien
aaaaacatgaaatcattgttaataa

SEQ ID NO: 5896796 - DNA, 25 bp, Homo sapien
cctcgcgacggcataattttatttt

SEQ ID NO: 5896797 - DNA, 25 bp, Homo sapien
atattaaactttcctaagaagcatt

SEQ ID NO: 5896798 - DNA, 25 bp, Homo sapien
ccttttacatcaagtgttaaacttc

SEQ ID NO: 5896799 - DNA, 25 bp, Homo sapien
agaaagtagtacctgaaagtcaacc

SEQ ID NO: 5896800 - DNA, 25 bp, Homo sapien
ctgattacgttctgacctgcatatg

SEQ ID NO: 5896801 - DNA, 25 bp, Homo sapien
cctagtcaacattaacattaatatt

SEQ ID NO: 5896802 - DNA, 25 bp, Homo sapien
gccactttgccttctttactgagaa

SEQ ID NO: 5896803 - DNA, 25 bp, Homo sapien
agatgttagctacactttggatttc

SEQ ID NO: 5896804 - DNA, 25 bp, Homo sapien
ttgttaataaaattcataggaataa

SEQ ID NO: 5896805 - DNA, 25 bp, Homo sapien
cttcaggattatccatgtttcgggc

SEQ ID NO: 5896806 - DNA, 25 bp, Homo sapien
tttcagatgttagctacactttgga

SEQ ID NO: 5896807 - DNA, 25 bp, Homo sapien
ggctgtaataaacagtattaaggat

SEQ ID NO: 5896808 - DNA, 25 bp, Homo sapien
ccgatggcaggtattaccaaggaag

SEQ ID NO: 5896809 - DNA, 25 bp, Homo sapien
aagcaacactctctgattacgttct

SEQ ID NO: 5896810 - DNA, 25 bp, Homo sapien
taaggatctgggttttataaataat

SEQ ID NO: 5896811 - DNA, 25 bp, Homo sapien
agactttaataccatgtctcctgtc

SEQ ID NO: 5896812 - DNA, 25 bp, Homo sapien
aaggaagatgcgcagtagagtgcaa

SEQ ID NO: 5896813 - DNA, 25 bp, Homo sapien
caaacatttcagatgttagctacac

SEQ ID NO: 5896814 - DNA, 25 bp, Homo sapien
cactttgccttctttactgagaagg

SEQ ID NO: 5896815 - DNA, 25 bp, Homo sapien
ctggttagctccttgcattcagcaa

SEQ ID NO: 5896816 - DNA, 25 bp, Homo sapien
agggatcaagcagccactttgcctt

SEQ ID NO: 5896817 - DNA, 25 bp, Homo sapien
accatgaattagaaagtagtacctg

SEQ ID NO: 5896818 - DNA, 25 bp, Homo sapien
cataggaataaaattaggttgaaga

SEQ ID NO: 5896819 - DNA, 25 bp, Homo sapien
tcttttccttttacatcaagtgtta

SEQ ID NO: 5896820 - DNA, 25 bp, Homo sapien
ctctaaacaacctcgcgacggcata

SEQ ID NO: 5896821 - DNA, 25 bp, Homo sapien
cacatcatgggaccattccagtcac

SEQ ID NO: 5896822 - DNA, 25 bp, Homo sapien
ctgtacgatcctttcatgttagctt

SEQ ID NO: 5896823 - DNA, 25 bp, Homo sapien
tgaatgcatggcttggtttgtggag

SEQ ID NO: 5896824 - DNA, 25 bp, Homo sapien
acttcttaattgtgagccaacttca

SEQ ID NO: 5896825 - DNA, 25 bp, Homo sapien
acttgtcaagcagaacttttctggt

SEQ ID NO: 5896826 - DNA, 25 bp, Homo sapien
aaacttcttaattgtgagccaactt

SEQ ID NO: 5896827 - DNA, 25 bp, Homo sapien
gtacgatcctttcatgttagctttt

SEQ ID NO: 5896828 - DNA, 25 bp, Homo sapien
taccaaggaagatgcgcagtagagt

SEQ ID NO: 5896829 - DNA, 25 bp, Homo sapien
gaaaaatagtccttgttatgttctt

SEQ ID NO: 5896830 - DNA, 25 bp, Homo sapien
gagttcgggcgaaaaatagtccttg

SEQ ID NO: 5896831 - DNA, 25 bp, Homo sapien
aacactctctgattacgttctgacc

SEQ ID NO: 5896832 - DNA, 25 bp, Homo sapien
ttaccatttgcctataaaaatatag

SEQ ID NO: 5896833 - DNA, 25 bp, Homo sapien
attaaggatctgggttttataaata

SEQ ID NO: 5896834 - DNA, 25 bp, Homo sapien
gtattaaggatctgggttttataaa

SEQ ID NO: 5896835 - DNA, 25 bp, Homo sapien
gcaggtattaccaaggaagatgcgc

SEQ ID NO: 5896836 - DNA, 25 bp, Homo sapien
ccttgcattcagcaagggatcaagc

SEQ ID NO: 5896837 - DNA, 25 bp, Homo sapien
tttactgagaagggttctgggaagt

SEQ ID NO: 5896838 - DNA, 25 bp, Homo sapien
actcgtatatgccggcatcctgcag

SEQ ID NO: 5896839 - DNA, 25 bp, Homo sapien
ttaaacttcttaattgtgagccaac

SEQ ID NO: 5896840 - DNA, 25 bp, Homo sapien
agttacaacagtcagtccaagcaac

SEQ ID NO: 5896841 - DNA, 25 bp, Homo sapien
aataaacgatcatcccgatggcagg

SEQ ID NO: 5896842 - DNA, 25 bp, Homo sapien
ccacagactttaataccatgtctcc

SEQ ID NO: 5896843 - DNA, 25 bp, Homo sapien
tgtggagggggcggggctgtaataa

SEQ ID NO: 5896844 - DNA, 25 bp, Homo sapien
tttacatacacatcatgggaccatt

SEQ ID NO: 5896845 - DNA, 25 bp, Homo sapien
accatgtctcctgtctttgctttct

SEQ ID NO: 5896846 - DNA, 25 bp, Homo sapien
acgttctgacctgcatatggagtgc

SEQ ID NO: 5896847 - DNA, 25 bp, Homo sapien
aataaaacataaaaaggtgacactg

SEQ ID NO: 5896848 - DNA, 25 bp, Homo sapien
ccccgtaccgtacagtaccatgtag

SEQ ID NO: 5896849 - DNA, 25 bp, Homo sapien
catggcttggtttgtggagggggcg

SEQ ID NO: 5896850 - DNA, 25 bp, Homo sapien
acgatcctttcatgttagcttttct

SEQ ID NO: 5896851 - DNA, 25 bp, Homo sapien
catgaaatcattgttaataaaattc

SEQ ID NO: 5896852 - DNA, 25 bp, Homo sapien
tgcgcagtagagtgcaaggagttcg

SEQ ID NO: 5896853 - DNA, 25 bp, Homo sapien
agccaacttcagtcttagattcaca

SEQ ID NO: 5896854 - DNA, 25 bp, Homo sapien
agtcttagattcacactcgtatatg

SEQ ID NO: 5896855 - DNA, 25 bp, Homo sapien
attaaactttcctaagaagcattaa

SEQ ID NO: 5896856 - DNA, 25 bp, Homo sapien
attcagcaagggatcaagcagccac

SEQ ID NO: 5896857 - DNA, 25 bp, Homo sapien
cttttaaaaaacatgaaatcattgt

SEQ ID NO: 5896858 - DNA, 25 bp, Homo sapien
tgttaaacttcttaattgtgagcca

SEQ ID NO: 5896859 - DNA, 25 bp, Homo sapien
ttctaccatgaattagaaagtagta

SEQ ID NO: 5896860 - DNA, 25 bp, Homo sapien
taatattaaactttcctaagaagca

SEQ ID NO: 5896861 - DNA, 25 bp, Homo sapien
gaaatcattgttaataaaattcata

SEQ ID NO: 5896862 - DNA, 25 bp, Homo sapien
aacagtcagtccaagcaacactctc

SEQ ID NO: 5896863 - DNA, 25 bp, Homo sapien
taaaacataaaaaggtgacactggt

SEQ ID NO: 5896864 - DNA, 25 bp, Homo sapien
gctgcctagtcaacattaacattaa

SEQ ID NO: 5896865 - DNA, 25 bp, Homo sapien
aaacaacctcgcgacggcataattt

SEQ ID NO: 5896866 - DNA, 25 bp, Homo sapien
ccagtgacctctttaccatttgcct

SEQ ID NO: 5896867 - DNA, 25 bp, Homo sapien
agtagtacctgaaagtcaacccagt

SEQ ID NO: 5896868 - DNA, 25 bp, Homo sapien
aaagtagtacctgaaagtcaaccca

SEQ ID NO: 5896869 - DNA, 25 bp, Homo sapien
tggttagctgcctagtcaacattaa

SEQ ID NO: 5896870 - DNA, 25 bp, Homo sapien
ttgtcaagcagaacttttctggtta

SEQ ID NO: 5896871 - DNA, 25 bp, Homo sapien
ggaagatgcgcagtagagtgcaagg

SEQ ID NO: 5896872 - DNA, 25 bp, Homo sapien
gccttctttactgagaagggttctg

SEQ ID NO: 5896873 - DNA, 25 bp, Homo sapien
agtgctgctactctaaacaacctcg

SEQ ID NO: 5896874 - DNA, 25 bp, Homo sapien
gcttggtttgtggagggggcggggc

SEQ ID NO: 5896875 - DNA, 25 bp, Homo sapien
gttaataaaattcataggaataaaa

SEQ ID NO: 5896876 - DNA, 25 bp, Homo sapien
tcagtcttagattcacactcgtata

SEQ ID NO: 5896877 - DNA, 25 bp, Homo sapien
ttagctccttgcattcagcaaggga

SEQ ID NO: 5896878 - DNA, 25 bp, Homo sapien
cctggcggatggtgtacgagccatc

SEQ ID NO: 5896879 - DNA, 25 bp, Homo sapien
ctccttgcattcagcaagggatcaa

SEQ ID NO: 5896880 - DNA, 25 bp, Homo sapien
ttctgggaagtctgaatgcatggct

SEQ ID NO: 5896881 - DNA, 25 bp, Homo sapien
ccattccagtcacttcaacgatggg

SEQ ID NO: 5896882 - DNA, 25 bp, Homo sapien
ggagtgctgctactctaaacaacct

SEQ ID NO: 5896883 - DNA, 25 bp, Homo sapien
tcccgatggcaggtattaccaagga

SEQ ID NO: 5896884 - DNA, 25 bp, Homo sapien
aaggtgacactggttagctgcctag

SEQ ID NO: 5896885 - DNA, 25 bp, Homo sapien
cttaattgtgagccaacttcagtct

SEQ ID NO: 5896886 - DNA, 25 bp, Homo sapien
caagcagaacttttctggttagctc

SEQ ID NO: 5896887 - DNA, 25 bp, Homo sapien
tgacttcttttaaaaaacatgaaat

SEQ ID NO: 5896888 - DNA, 25 bp, Homo sapien
tagagaaaattacttagccattcta

SEQ ID NO: 5896889 - DNA, 25 bp, Homo sapien
ggggacttgtcaagcagaacttttc

SEQ ID NO: 5896890 - DNA, 25 bp, Homo sapien
aaaataaacgatcatcccgatggca

SEQ ID NO: 5896891 - DNA, 25 bp, Homo sapien
agtctgaatgcatggcttggtttgt

SEQ ID NO: 5896892 - DNA, 25 bp, Homo sapien
caggtccccgtaccgtacagtacca

SEQ ID NO: 5896893 - DNA, 25 bp, Homo sapien
tacacatcatgggaccattccagtc

SEQ ID NO: 5896894 - DNA, 25 bp, Homo sapien
aactttcctaagaagcattaagtta

SEQ ID NO: 5896895 - DNA, 25 bp, Homo sapien
ggtgtacgagccatccacagacttt

SEQ ID NO: 5896896 - DNA, 25 bp, Homo sapien
catcatgggaccattccagtcactt

SEQ ID NO: 5896897 - DNA, 25 bp, Homo sapien
ttttctggttagctccttgcattca

SEQ ID NO: 5896898 - DNA, 25 bp, Homo sapien
gatgcgcagtagagtgcaaggagtt

SEQ ID NO: 5896899 - DNA, 25 bp, Homo sapien
tacgagccatccacagactttaata

SEQ ID NO: 5896900 - DNA, 25 bp, Homo sapien
ctaccatgaattagaaagtagtacc

SEQ ID NO: 5896901 - DNA, 25 bp, Homo sapien
attaggttgaagaaaataaaacata

SEQ ID NO: 5896902 - DNA, 25 bp, Homo sapien
aaattacttagccattctaccatga

SEQ ID NO: 5896903 - DNA, 25 bp, Homo sapien
cattgttaataaaattcataggaat

SEQ ID NO: 5896904 - DNA, 25 bp, Homo sapien
tcagatgttagctacactttggatt

SEQ ID NO: 5896905 - DNA, 25 bp, Homo sapien
actttaataccatgtctcctgtctt

SEQ ID NO: 5896906 - DNA, 25 bp, Homo sapien
atgttagctacactttggatttctg

SEQ ID NO: 5896907 - DNA, 25 bp, Homo sapien
catgaattagaaagtagtacctgaa

SEQ ID NO: 5896908 - DNA, 25 bp, Homo sapien
gttagctacactttggatttctgtg

SEQ ID NO: 5896909 - DNA, 25 bp, Homo sapien
gaccattccagtcacttcaacgatg

SEQ ID NO: 5896910 - DNA, 25 bp, Homo sapien
cttcagtcttagattcacactcgta

SEQ ID NO: 5896911 - DNA, 25 bp, Homo sapien
ccaaggaagatgcgcagtagagtgc

SEQ ID NO: 5896912 - DNA, 25 bp, Homo sapien
gcctccaccagactgtacgatcctt

SEQ ID NO: 5896913 - DNA, 25 bp, Homo sapien
cactctctgattacgttctgacctg

SEQ ID NO: 5896914 - DNA, 25 bp, Homo sapien
taataaaattcataggaataaaatt

SEQ ID NO: 5896915 - DNA, 25 bp, Homo sapien
ctgaaagtcaacccagtgacctctt

SEQ ID NO: 5896916 - DNA, 25 bp, Homo sapien
tcttctcaaacatttcagatgttag

SEQ ID NO: 5896917 - DNA, 25 bp, Homo sapien
gaataaaattaggttgaagaaaata

SEQ ID NO: 5896918 - DNA, 25 bp, Homo sapien
aacttcagtcttagattcacactcg

SEQ ID NO: 5896919 - DNA, 25 bp, Homo sapien
ctgctactctaaacaacctcgcgac

SEQ ID NO: 5896920 - DNA, 25 bp, Homo sapien
atggggacttgtcaagcagaacttt

SEQ ID NO: 5896921 - DNA, 25 bp, Homo sapien
gtgcctccaccagactgtacgatcc

SEQ ID NO: 5896922 - DNA, 25 bp, Homo sapien
ttgcattcagcaagggatcaagcag

SEQ ID NO: 5896923 - DNA, 25 bp, Homo sapien
acctctttaccatttgcctataaaa

SEQ ID NO: 5896924 - DNA, 25 bp, Homo sapien
tgcctagtcaacattaacattaata

SEQ ID NO: 5896925 - DNA, 25 bp, Homo sapien
agattcacactcgtatatgccggca

SEQ ID NO: 5896926 - DNA, 25 bp, Homo sapien
gcattcagcaagggatcaagcagcc

SEQ ID NO: 5896927 - DNA, 25 bp, Homo sapien
tgagccaacttcagtcttagattca

SEQ ID NO: 5896928 - DNA, 25 bp, Homo sapien
cacttcaacgatggggacttgtcaa

SEQ ID NO: 5896929 - DNA, 25 bp, Homo sapien
gtccaagcaacactctctgattacg

SEQ ID NO: 5896930 - DNA, 25 bp, Homo sapien
tgcatggcttggtttgtggaggggg

SEQ ID NO: 5896931 - DNA, 25 bp, Homo sapien
cataaaaaggtgacactggttagct

SEQ ID NO: 5896932 - DNA, 25 bp, Homo sapien
ggttctgggaagtctgaatgcatgg

SEQ ID NO: 5896933 - DNA, 25 bp, Homo sapien
cctgacttcttttaaaaaacatgaa

SEQ ID NO: 5896934 - DNA, 25 bp, Homo sapien
ggttttataaataatgtctcttctc

SEQ ID NO: 5896935 - DNA, 25 bp, Homo sapien
gggggcggggctgtaataaacagta

SEQ ID NO: 5896936 - DNA, 25 bp, Homo sapien
caacccagtgacctctttaccattt

SEQ ID NO: 5896937 - DNA, 25 bp, Homo sapien
tgaagaaacaggtccccgtaccgta

SEQ ID NO: 5896938 - DNA, 25 bp, Homo sapien
acactggttagctgcctagtcaaca

SEQ ID NO: 5896939 - DNA, 25 bp, Homo sapien
gacggcataattttattttacatat

SEQ ID NO: 5896940 - DNA, 25 bp, Homo sapien
cagaacttttctggttagctccttg

SEQ ID NO: 5896941 - DNA, 25 bp, Homo sapien
ctgagaagggttctgggaagtctga

SEQ ID NO: 5896942 - DNA, 25 bp, Homo sapien
ttcatgttagcttttcttgcaaaat

SEQ ID NO: 5896943 - DNA, 25 bp, Homo sapien
taataccatgtctcctgtctttgct

SEQ ID NO: 5896944 - DNA, 25 bp, Homo sapien
cccaatgaagaaacaggtccccgta

SEQ ID NO: 5896945 - DNA, 25 bp, Homo sapien
aatgcatggcttggtttgtggaggg

SEQ ID NO: 5896946 - DNA, 25 bp, Homo sapien
acaacctcgcgacggcataatttta

SEQ ID NO: 5896947 - DNA, 25 bp, Homo sapien
tctgggttttataaataatgtctct

SEQ ID NO: 5896948 - DNA, 25 bp, Homo sapien
tttgtggagggggcggggctgtaat

SEQ ID NO: 5896949 - DNA, 25 bp, Homo sapien
tcttgcaaaataaacgatcatcccg

SEQ ID NO: 5896950 - DNA, 25 bp, Homo sapien
tggcttggtttgtggagggggcggg

SEQ ID NO: 5896951 - DNA, 25 bp, Homo sapien
ggatcaagcagccactttgccttct

SEQ ID NO: 5896952 - DNA, 25 bp, Homo sapien
atttctgtgcctccaccagactgta

SEQ ID NO: 5896953 - DNA, 25 bp, Homo sapien
tttaaaaaacatgaaatcattgtta

SEQ ID NO: 5896954 - DNA, 25 bp, Homo sapien
acagactttaataccatgtctcctg

SEQ ID NO: 5896955 - DNA, 25 bp, Homo sapien
tgtctcttctcaaacatttcagatg

SEQ ID NO: 5896956 - DNA, 25 bp, Homo sapien
atcctgcagctgtgcctggcggatg

SEQ ID NO: 5896957 - DNA, 25 bp, Homo sapien
catgtctcctgtctttgctttcttc

SEQ ID NO: 5896958 - DNA, 25 bp, Homo sapien
ctgcatatggagtgctgctactcta

SEQ ID NO: 5896959 - DNA, 25 bp, Homo sapien
atgccggcatcctgcagctgtgcct

SEQ ID NO: 5896960 - DNA, 25 bp, Homo sapien
caagggatcaagcagccactttgcc

SEQ ID NO: 5896961 - DNA, 25 bp, Homo sapien
aatagtccttgttatgttcttttcc

SEQ ID NO: 5896962 - DNA, 25 bp, Homo sapien
cttcaacgatggggacttgtcaagc

SEQ ID NO: 5896963 - DNA, 25 bp, Homo sapien
taaacgatcatcccgatggcaggta

SEQ ID NO: 5896964 - DNA, 25 bp, Homo sapien
tctgacctgcatatggagtgctgct

SEQ ID NO: 5896965 - DNA, 25 bp, Homo sapien
tagctgcctagtcaacattaacatt

SEQ ID NO: 5896966 - DNA, 25 bp, Homo sapien
ataaataatgtctcttctcaaacat

SEQ ID NO: 5896967 - DNA, 25 bp, Homo sapien
tcatgggaccattccagtcacttca

SEQ ID NO: 5896968 - DNA, 25 bp, Homo sapien
gctttcttcttcaggattatccatg

SEQ ID NO: 5896969 - DNA, 25 bp, Homo sapien
gcggggctgtaataaacagtattaa

SEQ ID NO: 5896970 - DNA, 25 bp, Homo sapien
ccaccagactgtacgatcctttcat

SEQ ID NO: 5896971 - DNA, 25 bp, Homo sapien
gggaagtctgaatgcatggcttggt

SEQ ID NO: 5896972 - DNA, 25 bp, Homo sapien
accatgtagagaaaattacttagcc

SEQ ID NO: 5896973 - DNA, 25 bp, Homo sapien
cttagccattctaccatgaattaga

SEQ ID NO: 5896974 - DNA, 25 bp, Homo sapien
cagctgtgcctggcggatggtgtac

SEQ ID NO: 5896975 - DNA, 25 bp, Homo sapien
tttcttcttcaggattatccatgtt

SEQ ID NO: 5896976 - DNA, 25 bp, Homo sapien
ctttcatgttagcttttcttgcaaa

SEQ ID NO: 5896977 - DNA, 25 bp, Homo sapien
gcaacactctctgattacgttctga

SEQ ID NO: 5896978 - DNA, 25 bp, Homo sapien
aggatctgggttttataaataatgt

SEQ ID NO: 5896979 - DNA, 25 bp, Homo sapien
tatagaaccctgacttcttttaaaa

SEQ ID NO: 5896980 - DNA, 25 bp, Homo sapien
gtaccgtacagtaccatgtagagaa

SEQ ID NO: 5896981 - DNA, 25 bp, Homo sapien
cgatggggacttgtcaagcagaact

SEQ ID NO: 5896982 - DNA, 25 bp, Homo sapien
ttgcaaaataaacgatcatcccgat

SEQ ID NO: 5896983 - DNA, 25 bp, Homo sapien
taaaattcataggaataaaattagg

SEQ ID NO: 5896984 - DNA, 25 bp, Homo sapien
gtaataaacagtattaaggatctgg

SEQ ID NO: 5896985 - DNA, 25 bp, Homo sapien
tcttcttcaggattatccatgtttc

SEQ ID NO: 5896986 - DNA, 25 bp, Homo sapien
atcatcccgatggcaggtattacca

SEQ ID NO: 5896987 - DNA, 25 bp, Homo sapien
gttcttttccttttacatcaagtgt

SEQ ID NO: 5896988 - DNA, 25 bp, Homo sapien
acctgaaagtcaacccagtgacctc

SEQ ID NO: 5896989 - DNA, 25 bp, Homo sapien
gccattctaccatgaattagaaagt

SEQ ID NO: 5896990 - DNA, 25 bp, Homo sapien
tctgaatgcatggcttggtttgtgg

SEQ ID NO: 5896991 - DNA, 25 bp, Homo sapien
agtgacctctttaccatttgcctat

SEQ ID NO: 5896992 - DNA, 25 bp, Homo sapien
ccaagcaacactctctgattacgtt

SEQ ID NO: 5896993 - DNA, 25 bp, Homo sapien
cgtacagtaccatgtagagaaaatt

SEQ ID NO: 5896994 - DNA, 25 bp, Homo sapien
cagtagagtgcaaggagttcgggcg

SEQ ID NO: 5896995 - DNA, 25 bp, Homo sapien
ttggatttctgtgcctccaccagac

SEQ ID NO: 5896996 - DNA, 25 bp, Homo sapien
catgttagcttttcttgcaaaataa

SEQ ID NO: 5896997 - DNA, 25 bp, Homo sapien
ttcttcaggattatccatgtttcgg

SEQ ID NO: 5896998 - DNA, 25 bp, Homo sapien
tcttagattcacactcgtatatgcc

SEQ ID NO: 5896999 - DNA, 25 bp, Homo sapien
gaaaataaaacataaaaaggtgaca

SEQ ID NO: 5897000 - DNA, 25 bp, Homo sapien
gctacactttggatttctgtgcctc

SEQ ID NO: 5897001 - DNA, 25 bp, Homo sapien
aacatttcagatgttagctacactt

SEQ ID NO: 5897002 - DNA, 25 bp, Homo sapien
gctgtgcctggcggatggtgtacga

SEQ ID NO: 5897003 - DNA, 25 bp, Homo sapien
actggttagctgcctagtcaacatt

SEQ ID NO: 5897004 - DNA, 25 bp, Homo sapien
tttgtttgtctgtattgccaaatgc

SEQ ID NO: 5897005 - DNA, 25 bp, Homo sapien
caatttttttccagcatgaggtgtc

SEQ ID NO: 5897006 - DNA, 25 bp, Homo sapien
aaactgttacttgcttacatatgcc

SEQ ID NO: 5897007 - DNA, 25 bp, Homo sapien
tcagtcaaaattctgaatctctagg

SEQ ID NO: 5897008 - DNA, 25 bp, Homo sapien
gggaaattacagttttaaagtagca

SEQ ID NO: 5897009 - DNA, 25 bp, Homo sapien
gattaagcattgaaaaacaactgtc

SEQ ID NO: 5897010 - DNA, 25 bp, Homo sapien
ccaaatggaaagaccacttagagca

SEQ ID NO: 5897011 - DNA, 25 bp, Homo sapien
agtctcttctgcatgttaccaaata

SEQ ID NO: 5897012 - DNA, 25 bp, Homo sapien
ggtgtttcttacagcacctgaacac

SEQ ID NO: 5897013 - DNA, 25 bp, Homo sapien
acgactagactgagggattaacttc

SEQ ID NO: 5897014 - DNA, 25 bp, Homo sapien
ccacttttctatgtaaacttttcat

SEQ ID NO: 5897015 - DNA, 25 bp, Homo sapien
tcaaaattctgaatctctaggatta

SEQ ID NO: 5897016 - DNA, 25 bp, Homo sapien
ctagatgaaattctaagactcttgt

SEQ ID NO: 5897017 - DNA, 25 bp, Homo sapien
agactgagggattaacttctagatg

SEQ ID NO: 5897018 - DNA, 25 bp, Homo sapien
acacttatcaaactgaaagtcttaa

SEQ ID NO: 5897019 - DNA, 25 bp, Homo sapien
caattgttactatgcacaagctagt

SEQ ID NO: 5897020 - DNA, 25 bp, Homo sapien
tcttaaaaacaatattgtgtgttct

SEQ ID NO: 5897021 - DNA, 25 bp, Homo sapien
tattgtgtgttcttatctatataaa

SEQ ID NO: 5897022 - DNA, 25 bp, Homo sapien
tgcctatttgtttgtctgtattgcc

SEQ ID NO: 5897023 - DNA, 25 bp, Homo sapien
actggtggtctgaattagtatccca

SEQ ID NO: 5897024 - DNA, 25 bp, Homo sapien
caatttataacagtagggaaattac

SEQ ID NO: 5897025 - DNA, 25 bp, Homo sapien
tgttgactcttctttttttctttta

SEQ ID NO: 5897026 - DNA, 25 bp, Homo sapien
tgtattgccaaatgccaaatggaaa

SEQ ID NO: 5897027 - DNA, 25 bp, Homo sapien
atgaaattctaagactcttgtgtat

SEQ ID NO: 5897028 - DNA, 25 bp, Homo sapien
tatgtctgattgaagttcttctttt

SEQ ID NO: 5897029 - DNA, 25 bp, Homo sapien
ttacttgcttacatatgccatgcat

SEQ ID NO: 5897030 - DNA, 25 bp, Homo sapien
gcatgttaccaaatattcagttaaa

SEQ ID NO: 5897031 - DNA, 25 bp, Homo sapien
gtatcaacttttcaattgttactat

SEQ ID NO: 5897032 - DNA, 25 bp, Homo sapien
tgttacttgcttacatatgccatgc

SEQ ID NO: 5897033 - DNA, 25 bp, Homo sapien
aaaattctgaatctctaggattaag

SEQ ID NO: 5897034 - DNA, 25 bp, Homo sapien
atcaaactgaaagtcttaaaaacaa

SEQ ID NO: 5897035 - DNA, 25 bp, Homo sapien
ccagcatgaggtgtcaccaaggatt

SEQ ID NO: 5897036 - DNA, 25 bp, Homo sapien
actgcctatttgtttgtctgtattg

SEQ ID NO: 5897037 - DNA, 25 bp, Homo sapien
aagatctcttctatgcattttcagt

SEQ ID NO: 5897038 - DNA, 25 bp, Homo sapien
ttaaactgttacttgcttacatatg

SEQ ID NO: 5897039 - DNA, 25 bp, Homo sapien
cacattaaactgcctatttgtttgt

SEQ ID NO: 5897040 - DNA, 25 bp, Homo sapien
aaaaagaagacaactttggacactg

SEQ ID NO: 5897041 - DNA, 25 bp, Homo sapien
ggtcacagcattagaaaggttgaga

SEQ ID NO: 5897042 - DNA, 25 bp, Homo sapien
agactggtggtctgaattagtatcc

SEQ ID NO: 5897043 - DNA, 25 bp, Homo sapien
agcattagaaaggttgagatccact

SEQ ID NO: 5897044 - DNA, 25 bp, Homo sapien
tttcttacagcacctgaacacttaa

SEQ ID NO: 5897045 - DNA, 25 bp, Homo sapien
atccactgaaatgttgactcttctt

SEQ ID NO: 5897046 - DNA, 25 bp, Homo sapien
tgattgaagttcttcttttctaggt

SEQ ID NO: 5897047 - DNA, 25 bp, Homo sapien
gatctcttctatgcattttcagtca

SEQ ID NO: 5897048 - DNA, 25 bp, Homo sapien
tcagtctcttctgcatgttaccaaa

SEQ ID NO: 5897049 - DNA, 25 bp, Homo sapien
tgtcctttaaactgttacttgctta

SEQ ID NO: 5897050 - DNA, 25 bp, Homo sapien
ttgtgtgttcttatctatataaaaa

SEQ ID NO: 5897051 - DNA, 25 bp, Homo sapien
catagaaaccattttgtcagtctct

SEQ ID NO: 5897052 - DNA, 25 bp, Homo sapien
ttacagcacctgaacacttaaccaa

SEQ ID NO: 5897053 - DNA, 25 bp, Homo sapien
acagttttaaagtagcaatgaaaat

SEQ ID NO: 5897054 - DNA, 25 bp, Homo sapien
ttctatgtaaacttttcattaaaag

SEQ ID NO: 5897055 - DNA, 25 bp, Homo sapien
tcccacttttctatgtaaacttttc

SEQ ID NO: 5897056 - DNA, 25 bp, Homo sapien
gcacgactagactgagggattaact

SEQ ID NO: 5897057 - DNA, 25 bp, Homo sapien
tgagcaactgtattcaagggtcaca

SEQ ID NO: 5897058 - DNA, 25 bp, Homo sapien
tttgcatcacaatttataacagtag

SEQ ID NO: 5897059 - DNA, 25 bp, Homo sapien
ttctatgcattttcagtcaaaattc

SEQ ID NO: 5897060 - DNA, 25 bp, Homo sapien
acatttcacaatttttttccagcat

SEQ ID NO: 5897061 - DNA, 25 bp, Homo sapien
tttgtcagtctcttctgcatgttac

SEQ ID NO: 5897062 - DNA, 25 bp, Homo sapien
tgtttcttacagcacctgaacactt

SEQ ID NO: 5897063 - DNA, 25 bp, Homo sapien
cattagaaaggttgagatccactga

SEQ ID NO: 5897064 - DNA, 25 bp, Homo sapien
acttttcaattgttactatgcacaa

SEQ ID NO: 5897065 - DNA, 25 bp, Homo sapien
ttgggaaaaagatctcttctatgca

SEQ ID NO: 5897066 - DNA, 25 bp, Homo sapien
tgtgtatgtctgattgaagttcttc

SEQ ID NO: 5897067 - DNA, 25 bp, Homo sapien
tgagatccactgaaatgttgactct

SEQ ID NO: 5897068 - DNA, 25 bp, Homo sapien
cacagatatttgcatcacaatttat

SEQ ID NO: 5897069 - DNA, 25 bp, Homo sapien
aaagaccacttagagcacgactaga

SEQ ID NO: 5897070 - DNA, 25 bp, Homo sapien
ctgaatctctaggattaagcattga

SEQ ID NO: 5897071 - DNA, 25 bp, Homo sapien
tcacagcattagaaaggttgagatc

SEQ ID NO: 5897072 - DNA, 25 bp, Homo sapien
acttatcaaactgaaagtcttaaaa

SEQ ID NO: 5897073 - DNA, 25 bp, Homo sapien
aaaaacaatattgtgtgttcttatc

SEQ ID NO: 5897074 - DNA, 25 bp, Homo sapien
tgtatgtctgattgaagttcttctt

SEQ ID NO: 5897075 - DNA, 25 bp, Homo sapien
attgaagttcttcttttctaggtgt

SEQ ID NO: 5897076 - DNA, 25 bp, Homo sapien
cactgagagtatggtggcatttaat

SEQ ID NO: 5897077 - DNA, 25 bp, Homo sapien
tttggacactgagagtatggtggca

SEQ ID NO: 5897078 - DNA, 25 bp, Homo sapien
tatcaatagatcttaggtctacata

SEQ ID NO: 5897079 - DNA, 25 bp, Homo sapien
ttcttttctaggtgtttcttacagc

SEQ ID NO: 5897080 - DNA, 25 bp, Homo sapien
ttaaaaacaatattgtgtgttctta

SEQ ID NO: 5897081 - DNA, 25 bp, Homo sapien
atttataacagtagggaaattacag

SEQ ID NO: 5897082 - DNA, 25 bp, Homo sapien
cagtgtatcaacttttcaattgtta

SEQ ID NO: 5897083 - DNA, 25 bp, Homo sapien
gactcttgtgtatgtctgattgaag

SEQ ID NO: 5897084 - DNA, 25 bp, Homo sapien
atatgccatgcatagatttttgtta

SEQ ID NO: 5897085 - DNA, 25 bp, Homo sapien
gatcttaggtctacatagctccttg

SEQ ID NO: 5897086 - DNA, 25 bp, Homo sapien
aaaaacaactgtctaaaacatttca

SEQ ID NO: 5897087 - DNA, 25 bp, Homo sapien
catgcatagatttttgttaaagtat

SEQ ID NO: 5897088 - DNA, 25 bp, Homo sapien
atcacattaaactgcctatttgttt

SEQ ID NO: 5897089 - DNA, 25 bp, Homo sapien
tcttacagcacctgaacacttaacc

SEQ ID NO: 5897090 - DNA, 25 bp, Homo sapien
aaccattttgtcagtctcttctgca

SEQ ID NO: 5897091 - DNA, 25 bp, Homo sapien
tcttaggtctacatagctccttgct

SEQ ID NO: 5897092 - DNA, 25 bp, Homo sapien
ttgtcatagaaaccattttgtcagt

SEQ ID NO: 5897093 - DNA, 25 bp, Homo sapien
ttagactggtggtctgaattagtat

SEQ ID NO: 5897094 - DNA, 25 bp, Homo sapien
cacttaaccaatatgccagtgtatc

SEQ ID NO: 5897095 - DNA, 25 bp, Homo sapien
gcatttaattacacacttatcaaac

SEQ ID NO: 5897096 - DNA, 25 bp, Homo sapien
agcacctgaacacttaaccaatatg

SEQ ID NO: 5897097 - DNA, 25 bp, Homo sapien
tggttggggtcctgagcaactgtat

SEQ ID NO: 5897098 - DNA, 25 bp, Homo sapien
tatggttggggtcctgagcaactgt

SEQ ID NO: 5897099 - DNA, 25 bp, Homo sapien
atagctccttgctgtcctttaaact

SEQ ID NO: 5897100 - DNA, 25 bp, Homo sapien
tagatcttaggtctacatagctcct

SEQ ID NO: 5897101 - DNA, 25 bp, Homo sapien
ctccttgctgtcctttaaactgtta

SEQ ID NO: 5897102 - DNA, 25 bp, Homo sapien
gagcacgactagactgagggattaa

SEQ ID NO: 5897103 - DNA, 25 bp, Homo sapien
tttctaggtgtttcttacagcacct

SEQ ID NO: 5897104 - DNA, 25 bp, Homo sapien
cttgtgtatgtctgattgaagttct

SEQ ID NO: 5897105 - DNA, 25 bp, Homo sapien
tctcttctatgcattttcagtcaaa

SEQ ID NO: 5897106 - DNA, 25 bp, Homo sapien
aattagtatcccacttttctatgta

SEQ ID NO: 5897107 - DNA, 25 bp, Homo sapien
aagcattgaaaaacaactgtctaaa

SEQ ID NO: 5897108 - DNA, 25 bp, Homo sapien
gttcttcttttctaggtgtttctta

SEQ ID NO: 5897109 - DNA, 25 bp, Homo sapien
agatgaaattctaagactcttgtgt

SEQ ID NO: 5897110 - DNA, 25 bp, Homo sapien
ataatgtccttaagtatcaaaggaa

SEQ ID NO: 5897111 - DNA, 25 bp, Homo sapien
acaactgtctaaaacatttcacaat

SEQ ID NO: 5897112 - DNA, 25 bp, Homo sapien
gaaaaagatctcttctatgcatttt

SEQ ID NO: 5897113 - DNA, 25 bp, Homo sapien
gtgtgttcttatctatataaaaata

SEQ ID NO: 5897114 - DNA, 25 bp, Homo sapien
tgcatagatttttgttaaagtatga

SEQ ID NO: 5897115 - DNA, 25 bp, Homo sapien
attaacttctagatgaaattctaag

SEQ ID NO: 5897116 - DNA, 25 bp, Homo sapien
ttttccagcatgaggtgtcaccaag

SEQ ID NO: 5897117 - DNA, 25 bp, Homo sapien
gttggggtcctgagcaactgtattc

SEQ ID NO: 5897118 - DNA, 25 bp, Homo sapien
ggaaaacacagatatttgcatcaca

SEQ ID NO: 5897119 - DNA, 25 bp, Homo sapien
aattacacacttatcaaactgaaag

SEQ ID NO: 5897120 - DNA, 25 bp, Homo sapien
tgatttataatgtccttaagtatca

SEQ ID NO: 5897121 - DNA, 25 bp, Homo sapien
tggcatttaattacacacttatcaa

SEQ ID NO: 5897122 - DNA, 25 bp, Homo sapien
aggttgagatccactgaaatgttga

SEQ ID NO: 5897123 - DNA, 25 bp, Homo sapien
attttatggttggggtcctgagcaa

SEQ ID NO: 5897124 - DNA, 25 bp, Homo sapien
actgaaagtcttaaaaacaatattg

SEQ ID NO: 5897125 - DNA, 25 bp, Homo sapien
gcttacatatgccatgcatagattt

SEQ ID NO: 5897126 - DNA, 25 bp, Homo sapien
tcacaatttataacagtagggaaat

SEQ ID NO: 5897127 - DNA, 25 bp, Homo sapien
aaagtcttaaaaacaatattgtgtg

SEQ ID NO: 5897128 - DNA, 25 bp, Homo sapien
gacaactttggacactgagagtatg

SEQ ID NO: 5897129 - DNA, 25 bp, Homo sapien
atggtggcatttaattacacactta

SEQ ID NO: 5897130 - DNA, 25 bp, Homo sapien
tggacactgagagtatggtggcatt

SEQ ID NO: 5897131 - DNA, 25 bp, Homo sapien
ctcttgtgtatgtctgattgaagtt

SEQ ID NO: 5897132 - DNA, 25 bp, Homo sapien
tcaatagatcttaggtctacatagc

SEQ ID NO: 5897133 - DNA, 25 bp, Homo sapien
ttactatgcacaagctagtttgagt

SEQ ID NO: 5897134 - DNA, 25 bp, Homo sapien
agctagtttgagtatcaatagatct

SEQ ID NO: 5897135 - DNA, 25 bp, Homo sapien
ttaaagtatgatttataatgtcctt

SEQ ID NO: 5897136 - DNA, 25 bp, Homo sapien
atttcacaatttttttccagcatga

SEQ ID NO: 5897137 - DNA, 25 bp, Homo sapien
aagacaactttggacactgagagta

SEQ ID NO: 5897138 - DNA, 25 bp, Homo sapien
taatgtatgtaaacatgcctttggg

SEQ ID NO: 5897139 - DNA, 25 bp, Homo sapien
atgcattttcagtcaaaattctgaa

SEQ ID NO: 5897140 - DNA, 25 bp, Homo sapien
tttcattaaaagttgtcatagaaac

SEQ ID NO: 5897141 - DNA, 25 bp, Homo sapien
atttaattacacacttatcaaactg

SEQ ID NO: 5897142 - DNA, 25 bp, Homo sapien
cacttagagcacgactagactgagg

SEQ ID NO: 5897143 - DNA, 25 bp, Homo sapien
ttttttccagcatgaggtgtcacca

SEQ ID NO: 5897144 - DNA, 25 bp, Homo sapien
aggtgtcaccaaggatttagactgg

SEQ ID NO: 5897145 - DNA, 25 bp, Homo sapien
gggaaaaagatctcttctatgcatt

SEQ ID NO: 5897146 - DNA, 25 bp, Homo sapien
gtgtcaccaaggatttagactggtg

SEQ ID NO: 5897147 - DNA, 25 bp, Homo sapien
ggattaacttctagatgaaattcta

SEQ ID NO: 5897148 - DNA, 25 bp, Homo sapien
gagtatggtggcatttaattacaca

SEQ ID NO: 5897149 - DNA, 25 bp, Homo sapien
gcattgaaaaacaactgtctaaaac

SEQ ID NO: 5897150 - DNA, 25 bp, Homo sapien
cattaaactgcctatttgtttgtct

SEQ ID NO: 5897151 - DNA, 25 bp, Homo sapien
attttgtcagtctcttctgcatgtt

SEQ ID NO: 5897152 - DNA, 25 bp, Homo sapien
tgtctgtattgccaaatgccaaatg

SEQ ID NO: 5897153 - DNA, 25 bp, Homo sapien
gtatggtggcatttaattacacact

SEQ ID NO: 5897154 - DNA, 25 bp, Homo sapien
atgcctttgggaaaaagatctcttc

SEQ ID NO: 5897155 - DNA, 25 bp, Homo sapien
ttaattacacacttatcaaactgaa

SEQ ID NO: 5897156 - DNA, 25 bp, Homo sapien
ttctaagactcttgtgtatgtctga

SEQ ID NO: 5897157 - DNA, 25 bp, Homo sapien
ttaggtctacatagctccttgctgt

SEQ ID NO: 5897158 - DNA, 25 bp, Homo sapien
aaaacacagatatttgcatcacaat

SEQ ID NO: 5897159 - DNA, 25 bp, Homo sapien
tctgattgaagttcttcttttctag

SEQ ID NO: 5897160 - DNA, 25 bp, Homo sapien
ttctagatgaaattctaagactctt

SEQ ID NO: 5897161 - DNA, 25 bp, Homo sapien
atttttttccagcatgaggtgtcac

SEQ ID NO: 5897162 - DNA, 25 bp, Homo sapien
tgagtatcaatagatcttaggtcta

SEQ ID NO: 5897163 - DNA, 25 bp, Homo sapien
agctccttgctgtcctttaaactgt

SEQ ID NO: 5897164 - DNA, 25 bp, Homo sapien
agaccacttagagcacgactagact

SEQ ID NO: 5897165 - DNA, 25 bp, Homo sapien
actatgcacaagctagtttgagtat

SEQ ID NO: 5897166 - DNA, 25 bp, Homo sapien
agaagacaactttggacactgagag

SEQ ID NO: 5897167 - DNA, 25 bp, Homo sapien
aataattttatggttggggtcctga

SEQ ID NO: 5897168 - DNA, 25 bp, Homo sapien
gtcatagaaaccattttgtcagtct

SEQ ID NO: 5897169 - DNA, 25 bp, Homo sapien
ctagactgagggattaacttctaga

SEQ ID NO: 5897170 - DNA, 25 bp, Homo sapien
gccagtgtatcaacttttcaattgt

SEQ ID NO: 5897171 - DNA, 25 bp, Homo sapien
aggattaagcattgaaaaacaactg

SEQ ID NO: 5897172 - DNA, 25 bp, Homo sapien
atgccagtgtatcaacttttcaatt

SEQ ID NO: 5897173 - DNA, 25 bp, Homo sapien
aaggatttagactggtggtctgaat

SEQ ID NO: 5897174 - DNA, 25 bp, Homo sapien
gaaaccattttgtcagtctcttctg

SEQ ID NO: 5897175 - DNA, 25 bp, Homo sapien
cttttctaggtgtttcttacagcac

SEQ ID NO: 5897176 - DNA, 25 bp, Homo sapien
tgttactatgcacaagctagtttga

SEQ ID NO: 5897177 - DNA, 25 bp, Homo sapien
caagctagtttgagtatcaatagat

SEQ ID NO: 5897178 - DNA, 25 bp, Homo sapien
tcttctgcatgttaccaaatattca

SEQ ID NO: 5897179 - DNA, 25 bp, Homo sapien
agtatgatttataatgtccttaagt

SEQ ID NO: 5897180 - DNA, 25 bp, Homo sapien
accattggaaaacacagatatttgc

SEQ ID NO: 5897181 - DNA, 25 bp, Homo sapien
agtatcccacttttctatgtaaact

SEQ ID NO: 5897182 - DNA, 25 bp, Homo sapien
tgtctgattgaagttcttcttttct

SEQ ID NO: 5897183 - DNA, 25 bp, Homo sapien
ttagaaaggttgagatccactgaaa

SEQ ID NO: 5897184 - DNA, 25 bp, Homo sapien
ttttcaattgttactatgcacaagc

SEQ ID NO: 5897185 - DNA, 25 bp, Homo sapien
tattgccaaatgccaaatggaaaga

SEQ ID NO: 5897186 - DNA, 25 bp, Homo sapien
gttgagatccactgaaatgttgact

SEQ ID NO: 5897187 - DNA, 25 bp, Homo sapien
aattacagttttaaagtagcaatga

SEQ ID NO: 5897188 - DNA, 25 bp, Homo sapien
acatatgccatgcatagatttttgt

SEQ ID NO: 5897189 - DNA, 25 bp, Homo sapien
acacacttatcaaactgaaagtctt

SEQ ID NO: 5897190 - DNA, 25 bp, Homo sapien
ctttaaactgttacttgcttacata

SEQ ID NO: 5897191 - DNA, 25 bp, Homo sapien
taaaagttgtcatagaaaccatttt

SEQ ID NO: 5897192 - DNA, 25 bp, Homo sapien
cacctgaacacttaaccaatatgcc

SEQ ID NO: 5897193 - DNA, 25 bp, Homo sapien
gtcaccaaggatttagactggtggt

SEQ ID NO: 5897194 - DNA, 25 bp, Homo sapien
tgcacaagctagtttgagtatcaat

SEQ ID NO: 5897195 - DNA, 25 bp, Homo sapien
agggtcacagcattagaaaggttga

SEQ ID NO: 5897196 - DNA, 25 bp, Homo sapien
ttccagcatgaggtgtcaccaagga

SEQ ID NO: 5897197 - DNA, 25 bp, Homo sapien
ttatcaaactgaaagtcttaaaaac

SEQ ID NO: 5897198 - DNA, 25 bp, Homo sapien
atcaacttttcaattgttactatgc

SEQ ID NO: 5897199 - DNA, 25 bp, Homo sapien
aatagatcttaggtctacatagctc

SEQ ID NO: 5897200 - DNA, 25 bp, Homo sapien
ttagtatcccacttttctatgtaaa

SEQ ID NO: 5897201 - DNA, 25 bp, Homo sapien
aatgccaaatggaaagaccacttag

SEQ ID NO: 5897202 - DNA, 25 bp, Homo sapien
ttctgcatgttaccaaatattcagt

SEQ ID NO: 5897203 - DNA, 25 bp, Homo sapien
acatgcctttgggaaaaagatctct

SEQ ID NO: 5897204 - DNA, 25 bp, Homo sapien
caaactgaaagtcttaaaaacaata

SEQ ID NO: 5897205 - DNA, 25 bp, Homo sapien
tctgaattagtatcccacttttcta

SEQ ID NO: 5897206 - DNA, 25 bp, Homo sapien
aaagttgtcatagaaaccattttgt

SEQ ID NO: 5897207 - DNA, 25 bp, Homo sapien
aaatcacattaaactgcctatttgt

SEQ ID NO: 5897208 - DNA, 25 bp, Homo sapien
atgtaaacatgcctttgggaaaaag

SEQ ID NO: 5897209 - DNA, 25 bp, Homo sapien
atgtatgtaaacatgcctttgggaa

SEQ ID NO: 5897210 - DNA, 25 bp, Homo sapien
agtatcaatagatcttaggtctaca

SEQ ID NO: 5897211 - DNA, 25 bp, Homo sapien
ctctaggattaagcattgaaaaaca

SEQ ID NO: 5897212 - DNA, 25 bp, Homo sapien
cctatttgtttgtctgtattgccaa

SEQ ID NO: 5897213 - DNA, 25 bp, Homo sapien
aaactgcctatttgtttgtctgtat

SEQ ID NO: 5897214 - DNA, 25 bp, Homo sapien
ggtggcatttaattacacacttatc

SEQ ID NO: 5897215 - DNA, 25 bp, Homo sapien
gcctttgggaaaaagatctcttcta

SEQ ID NO: 5897216 - DNA, 25 bp, Homo sapien
gtctacatagctccttgctgtcctt

SEQ ID NO: 5897217 - DNA, 25 bp, Homo sapien
tattcaagggtcacagcattagaaa

SEQ ID NO: 5897218 - DNA, 25 bp, Homo sapien
attaatgtatgtaaacatgcctttg

SEQ ID NO: 5897219 - DNA, 25 bp, Homo sapien
cttagagcacgactagactgaggga

SEQ ID NO: 5897220 - DNA, 25 bp, Homo sapien
aaaagatctcttctatgcattttca

SEQ ID NO: 5897221 - DNA, 25 bp, Homo sapien
atttagactggtggtctgaattagt

SEQ ID NO: 5897222 - DNA, 25 bp, Homo sapien
tttatggttggggtcctgagcaact

SEQ ID NO: 5897223 - DNA, 25 bp, Homo sapien
ccattttgtcagtctcttctgcatg

SEQ ID NO: 5897224 - DNA, 25 bp, Homo sapien
ggtctgaattagtatcccacttttc

SEQ ID NO: 5897225 - DNA, 25 bp, Homo sapien
tgccaaatggaaagaccacttagag

SEQ ID NO: 5897226 - DNA, 25 bp, Homo sapien
tgaagttcttcttttctaggtgttt

SEQ ID NO: 5897227 - DNA, 25 bp, Homo sapien
caagggtcacagcattagaaaggtt

SEQ ID NO: 5897228 - DNA, 25 bp, Homo sapien
aattctaagactcttgtgtatgtct

SEQ ID NO: 5897229 - DNA, 25 bp, Homo sapien
tgtcagtctcttctgcatgttacca

SEQ ID NO: 5897230 - DNA, 25 bp, Homo sapien
aacacagatatttgcatcacaattt

SEQ ID NO: 5897231 - DNA, 25 bp, Homo sapien
tgttaaagtatgatttataatgtcc

SEQ ID NO: 5897232 - DNA, 25 bp, Homo sapien
ttacagttttaaagtagcaatgaaa

SEQ ID NO: 5897233 - DNA, 25 bp, Homo sapien
tctaggtgtttcttacagcacctga

SEQ ID NO: 5897234 - DNA, 25 bp, Homo sapien
gactagactgagggattaacttcta

SEQ ID NO: 5897235 - DNA, 25 bp, Homo sapien
ctgtctaaaacatttcacaattttt

SEQ ID NO: 5897236 - DNA, 25 bp, Homo sapien
aaatagctaaaacatctaagaataa

SEQ ID NO: 5897237 - DNA, 25 bp, Homo sapien
attttcagtcaaaattctgaatctc

SEQ ID NO: 5897238 - DNA, 25 bp, Homo sapien
gggtcctgagcaactgtattcaagg

SEQ ID NO: 5897239 - DNA, 25 bp, Homo sapien
ttataacagtagggaaattacagtt

SEQ ID NO: 5897240 - DNA, 25 bp, Homo sapien
catcacaatttataacagtagggaa

SEQ ID NO: 5897241 - DNA, 25 bp, Homo sapien
acttgcttacatatgccatgcatag

SEQ ID NO: 5897242 - DNA, 25 bp, Homo sapien
aatattgtgtgttcttatctatata

SEQ ID NO: 5897243 - DNA, 25 bp, Homo sapien
tgaaagtcttaaaaacaatattgtg

SEQ ID NO: 5897244 - DNA, 25 bp, Homo sapien
acttctagatgaaattctaagactc

SEQ ID NO: 5897245 - DNA, 25 bp, Homo sapien
acttttctatgtaaacttttcatta

SEQ ID NO: 5897246 - DNA, 25 bp, Homo sapien
actgtattcaagggtcacagcatta

SEQ ID NO: 5897247 - DNA, 25 bp, Homo sapien
agttgtcatagaaaccattttgtca

SEQ ID NO: 5897248 - DNA, 25 bp, Homo sapien
tgagggattaacttctagatgaaat

SEQ ID NO: 5897249 - DNA, 25 bp, Homo sapien
gtatgtaaacatgcctttgggaaaa

SEQ ID NO: 5897250 - DNA, 25 bp, Homo sapien
tcttcttttctaggtgtttcttaca

SEQ ID NO: 5897251 - DNA, 25 bp, Homo sapien
agaaaggttgagatccactgaaatg

SEQ ID NO: 5897252 - DNA, 25 bp, Homo sapien
aaattaatgtatgtaaacatgcctt

SEQ ID NO: 5897253 - DNA, 25 bp, Homo sapien
atggaaagaccacttagagcacgac

SEQ ID NO: 5897254 - DNA, 25 bp, Homo sapien
agtcttaaaaacaatattgtgtgtt

SEQ ID NO: 5897255 - DNA, 25 bp, Homo sapien
cttttcattaaaagttgtcatagaa

SEQ ID NO: 5897256 - DNA, 25 bp, Homo sapien
gccatgcatagatttttgttaaagt

SEQ ID NO: 5897257 - DNA, 25 bp, Homo sapien
tatttgcatcacaatttataacagt

SEQ ID NO: 5897258 - DNA, 25 bp, Homo sapien
aggtctacatagctccttgctgtcc

SEQ ID NO: 5897259 - DNA, 25 bp, Homo sapien
ttgctgtcctttaaactgttacttg

SEQ ID NO: 5897260 - DNA, 25 bp, Homo sapien
gccaaatgccaaatggaaagaccac

SEQ ID NO: 5897261 - DNA, 25 bp, Homo sapien
tgtattcaagggtcacagcattaga

SEQ ID NO: 5897262 - DNA, 25 bp, Homo sapien
aaaggttgagatccactgaaatgtt

SEQ ID NO: 5897263 - DNA, 25 bp, Homo sapien
tgaaaaacaactgtctaaaacattt

SEQ ID NO: 5897264 - DNA, 25 bp, Homo sapien
gtaaacatgcctttgggaaaaagat

SEQ ID NO: 5897265 - DNA, 25 bp, Homo sapien
tgcatcacaatttataacagtaggg

SEQ ID NO: 5897266 - DNA, 25 bp, Homo sapien
gtcctgagcaactgtattcaagggt

SEQ ID NO: 5897267 - DNA, 25 bp, Homo sapien
atgccatgcatagatttttgttaaa

SEQ ID NO: 5897268 - DNA, 25 bp, Homo sapien
ttataatgtccttaagtatcaaagg

SEQ ID NO: 5897269 - DNA, 25 bp, Homo sapien
gaatctctaggattaagcattgaaa

SEQ ID NO: 5897270 - DNA, 25 bp, Homo sapien
atctctaggattaagcattgaaaaa

SEQ ID NO: 5897271 - DNA, 25 bp, Homo sapien
aaagaagacaactttggacactgag

SEQ ID NO: 5897272 - DNA, 25 bp, Homo sapien
catgaggtgtcaccaaggatttaga

SEQ ID NO: 5897273 - DNA, 25 bp, Homo sapien
aagactcttgtgtatgtctgattga

SEQ ID NO: 5897274 - DNA, 25 bp, Homo sapien
aaacaactgtctaaaacatttcaca

SEQ ID NO: 5897275 - DNA, 25 bp, Homo sapien
taaccaatatgccagtgtatcaact

SEQ ID NO: 5897276 - DNA, 25 bp, Homo sapien
ccaaggatttagactggtggtctga

SEQ ID NO: 5897277 - DNA, 25 bp, Homo sapien
aacacttaaccaatatgccagtgta

SEQ ID NO: 5897278 - DNA, 25 bp, Homo sapien
ttacatatgccatgcatagattttt

SEQ ID NO: 5897279 - DNA, 25 bp, Homo sapien
aataaaatcacattaaactgcctat

SEQ ID NO: 5897280 - DNA, 25 bp, Homo sapien
gagagtatggtggcatttaattaca

SEQ ID NO: 5897281 - DNA, 25 bp, Homo sapien
ggaaagaccacttagagcacgacta

SEQ ID NO: 5897282 - DNA, 25 bp, Homo sapien
caactgtattcaagggtcacagcat

SEQ ID NO: 5897283 - DNA, 25 bp, Homo sapien
tctcttctgcatgttaccaaatatt

SEQ ID NO: 5897284 - DNA, 25 bp, Homo sapien
tctgtattgccaaatgccaaatgga

SEQ ID NO: 5897285 - DNA, 25 bp, Homo sapien
tagagcacgactagactgagggatt

SEQ ID NO: 5897286 - DNA, 25 bp, Homo sapien
tatttgtttgtctgtattgccaaat

SEQ ID NO: 5897287 - DNA, 25 bp, Homo sapien
ttctgaatctctaggattaagcatt

SEQ ID NO: 5897288 - DNA, 25 bp, Homo sapien
ctgagagtatggtggcatttaatta

SEQ ID NO: 5897289 - DNA, 25 bp, Homo sapien
actttggacactgagagtatggtgg

SEQ ID NO: 5897290 - DNA, 25 bp, Homo sapien
ttgactcttctttttttcttttaga

SEQ ID NO: 5897291 - DNA, 25 bp, Homo sapien
atttataatgtccttaagtatcaaa

SEQ ID NO: 5897292 - DNA, 25 bp, Homo sapien
attgaaaaacaactgtctaaaacat

SEQ ID NO: 5897293 - DNA, 25 bp, Homo sapien
tgtccttaagtatcaaaggaaatgt

SEQ ID NO: 5897294 - DNA, 25 bp, Homo sapien
tctaaaacatttcacaatttttttc

SEQ ID NO: 5897295 - DNA, 25 bp, Homo sapien
tgaattagtatcccacttttctatg

SEQ ID NO: 5897296 - DNA, 25 bp, Homo sapien
ccactgaaatgttgactcttctttt

SEQ ID NO: 5897297 - DNA, 25 bp, Homo sapien
cattggaaaacacagatatttgcat

SEQ ID NO: 5897298 - DNA, 25 bp, Homo sapien
aaacaatattgtgtgttcttatcta

SEQ ID NO: 5897299 - DNA, 25 bp, Homo sapien
acagcattagaaaggttgagatcca

SEQ ID NO: 5897300 - DNA, 25 bp, Homo sapien
caactttggacactgagagtatggt

SEQ ID NO: 5897301 - DNA, 25 bp, Homo sapien
ctttgggaaaaagatctcttctatg

SEQ ID NO: 5897302 - DNA, 25 bp, Homo sapien
tatgatttataatgtccttaagtat

SEQ ID NO: 5897303 - DNA, 25 bp, Homo sapien
taggtgtttcttacagcacctgaac

SEQ ID NO: 5897304 - DNA, 25 bp, Homo sapien
aacttttcattaaaagttgtcatag

SEQ ID NO: 5897305 - DNA, 25 bp, Homo sapien
aaagtatgatttataatgtccttaa

SEQ ID NO: 5897306 - DNA, 25 bp, Homo sapien
actgaaatgttgactcttctttttt

SEQ ID NO: 5897307 - DNA, 25 bp, Homo sapien
cacaatttttttccagcatgaggtg

SEQ ID NO: 5897308 - DNA, 25 bp, Homo sapien
actgagggattaacttctagatgaa

SEQ ID NO: 5897309 - DNA, 25 bp, Homo sapien
attgttactatgcacaagctagttt

SEQ ID NO: 5897310 - DNA, 25 bp, Homo sapien
taaaatcacattaaactgcctattt

SEQ ID NO: 5897311 - DNA, 25 bp, Homo sapien
gcattttcagtcaaaattctgaatc

SEQ ID NO: 5897312 - DNA, 25 bp, Homo sapien
taacagtagggaaattacagtttta

SEQ ID NO: 5897313 - DNA, 25 bp, Homo sapien
tcattaaaagttgtcatagaaacca

SEQ ID NO: 5897314 - DNA, 25 bp, Homo sapien
aaatggaaagaccacttagagcacg

SEQ ID NO: 5897315 - DNA, 25 bp, Homo sapien
ttgccaaatgccaaatggaaagacc

SEQ ID NO: 5897316 - DNA, 25 bp, Homo sapien
tagaaaccattttgtcagtctcttc

SEQ ID NO: 5897317 - DNA, 25 bp, Homo sapien
caaatgccaaatggaaagaccactt

SEQ ID NO: 5897318 - DNA, 25 bp, Homo sapien
cctgagcaactgtattcaagggtca

SEQ ID NO: 5897319 - DNA, 25 bp, Homo sapien
acatagctccttgctgtcctttaaa

SEQ ID NO: 5897320 - DNA, 25 bp, Homo sapien
ctacatagctccttgctgtccttta

SEQ ID NO: 5897321 - DNA, 25 bp, Homo sapien
actgttacttgcttacatatgccat

SEQ ID NO: 5897322 - DNA, 25 bp, Homo sapien
aaacatttcacaatttttttccagc

SEQ ID NO: 5897323 - DNA, 25 bp, Homo sapien
ttaagcattgaaaaacaactgtcta

SEQ ID NO: 5897324 - DNA, 25 bp, Homo sapien
tatgcacaagctagtttgagtatca

SEQ ID NO: 5897325 - DNA, 25 bp, Homo sapien
agaccattggaaaacacagatattt

SEQ ID NO: 5897326 - DNA, 25 bp, Homo sapien
gctgtcctttaaactgttacttgct

SEQ ID NO: 5897327 - DNA, 25 bp, Homo sapien
accacttagagcacgactagactga

SEQ ID NO: 5897328 - DNA, 25 bp, Homo sapien
tggggtcctgagcaactgtattcaa

SEQ ID NO: 5897329 - DNA, 25 bp, Homo sapien
agcatgaggtgtcaccaaggattta

SEQ ID NO: 5897330 - DNA, 25 bp, Homo sapien
ctaggattaagcattgaaaaacaac

SEQ ID NO: 5897331 - DNA, 25 bp, Homo sapien
tgtttgtctgtattgccaaatgcca

SEQ ID NO: 5897332 - DNA, 25 bp, Homo sapien
cagatatttgcatcacaatttataa

SEQ ID NO: 5897333 - DNA, 25 bp, Homo sapien
ataataaaatcacattaaactgcct

SEQ ID NO: 5897334 - DNA, 25 bp, Homo sapien
ctgcatgttaccaaatattcagtta

SEQ ID NO: 5897335 - DNA, 25 bp, Homo sapien
gtggtctgaattagtatcccacttt

SEQ ID NO: 5897336 - DNA, 25 bp, Homo sapien
ttggaaaacacagatatttgcatca

SEQ ID NO: 5897337 - DNA, 25 bp, Homo sapien
agtcaaaattctgaatctctaggat

SEQ ID NO: 5897338 - DNA, 25 bp, Homo sapien
aactgtctaaaacatttcacaattt

SEQ ID NO: 5897339 - DNA, 25 bp, Homo sapien
aatgtccttaagtatcaaaggaaat

SEQ ID NO: 5897340 - DNA, 25 bp, Homo sapien
cacaagctagtttgagtatcaatag

SEQ ID NO: 5897341 - DNA, 25 bp, Homo sapien
gatatttgcatcacaatttataaca

SEQ ID NO: 5897342 - DNA, 25 bp, Homo sapien
ttaaactgcctatttgtttgtctgt

SEQ ID NO: 5897343 - DNA, 25 bp, Homo sapien
ccttgctgtcctttaaactgttact

SEQ ID NO: 5897344 - DNA, 25 bp, Homo sapien
ttcacaatttttttccagcatgagg

SEQ ID NO: 5897345 - DNA, 25 bp, Homo sapien
taattttatggttggggtcctgagc

SEQ ID NO: 5897346 - DNA, 25 bp, Homo sapien
caccaaggatttagactggtggtct

SEQ ID NO: 5897347 - DNA, 25 bp, Homo sapien
aaaaatagctaaaacatctaagaat

SEQ ID NO: 5897348 - DNA, 25 bp, Homo sapien
ttacacacttatcaaactgaaagtc

SEQ ID NO: 5897349 - DNA, 25 bp, Homo sapien
acagcacctgaacacttaaccaata

SEQ ID NO: 5897350 - DNA, 25 bp, Homo sapien
aaacatgcctttgggaaaaagatct

SEQ ID NO: 5897351 - DNA, 25 bp, Homo sapien
ctagtttgagtatcaatagatctta

SEQ ID NO: 5897352 - DNA, 25 bp, Homo sapien
tgaaatgttgactcttctttttttc

SEQ ID NO: 5897353 - DNA, 25 bp, Homo sapien
agatccactgaaatgttgactcttc

SEQ ID NO: 5897354 - DNA, 25 bp, Homo sapien
gacactgagagtatggtggcattta

SEQ ID NO: 5897355 - DNA, 25 bp, Homo sapien
cttaaccaatatgccagtgtatcaa

SEQ ID NO: 5897356 - DNA, 25 bp, Homo sapien
tttcagtcaaaattctgaatctcta

SEQ ID NO: 5897357 - DNA, 25 bp, Homo sapien
agggattaacttctagatgaaattc

SEQ ID NO: 5897358 - DNA, 25 bp, Homo sapien
gtgtatcaacttttcaattgttact

SEQ ID NO: 5897359 - DNA, 25 bp, Homo sapien
tatcccacttttctatgtaaacttt

SEQ ID NO: 5897360 - DNA, 25 bp, Homo sapien
tttgagtatcaatagatcttaggtc

SEQ ID NO: 5897361 - DNA, 25 bp, Homo sapien
ttttctatgtaaacttttcattaaa

SEQ ID NO: 5897362 - DNA, 25 bp, Homo sapien
gaaattacagttttaaagtagcaat

SEQ ID NO: 5897363 - DNA, 25 bp, Homo sapien
ctaagactcttgtgtatgtctgatt

SEQ ID NO: 5897364 - DNA, 25 bp, Homo sapien
caatatgccagtgtatcaacttttc

SEQ ID NO: 5897365 - DNA, 25 bp, Homo sapien
accaatatgccagtgtatcaacttt

SEQ ID NO: 5897366 - DNA, 25 bp, Homo sapien
tcctttaaactgttacttgcttaca

SEQ ID NO: 5897367 - DNA, 25 bp, Homo sapien
tggtggtctgaattagtatcccact

SEQ ID NO: 5897368 - DNA, 25 bp, Homo sapien
ttcaagggtcacagcattagaaagg

SEQ ID NO: 5897369 - DNA, 25 bp, Homo sapien
atgttaccaaatattcagttaaaaa

SEQ ID NO: 5897370 - DNA, 25 bp, Homo sapien
gtgttcttatctatataaaaatagc

SEQ ID NO: 5897371 - DNA, 25 bp, Homo sapien
taaaacatttcacaatttttttcca

SEQ ID NO: 5897372 - DNA, 25 bp, Homo sapien
cctaagaccattggaaaacacagat

SEQ ID NO: 5897373 - DNA, 25 bp, Homo sapien
cctgaacacttaaccaatatgccag

SEQ ID NO: 5897374 - DNA, 25 bp, Homo sapien
atatgccagtgtatcaacttttcaa

SEQ ID NO: 5897375 - DNA, 25 bp, Homo sapien
gaaattctaagactcttgtgtatgt

SEQ ID NO: 5897376 - DNA, 25 bp, Homo sapien
ttgcttacatatgccatgcatagat

SEQ ID NO: 5897377 - DNA, 25 bp, Homo sapien
caacttttcaattgttactatgcac

SEQ ID NO: 5897378 - DNA, 25 bp, Homo sapien
gaataataaaatcacattaaactgc

SEQ ID NO: 5897379 - DNA, 25 bp, Homo sapien
gaaaattaatgtatgtaaacatgcc

SEQ ID NO: 5897380 - DNA, 25 bp, Homo sapien
agtttgagtatcaatagatcttagg

SEQ ID NO: 5897381 - DNA, 25 bp, Homo sapien
attaaaagttgtcatagaaaccatt

SEQ ID NO: 5897382 - DNA, 25 bp, Homo sapien
tcttctatgcattttcagtcaaaat

SEQ ID NO: 5897383 - DNA, 25 bp, Homo sapien
aattctgaatctctaggattaagca

SEQ ID NO: 5897384 - DNA, 25 bp, Homo sapien
tgaggtgtcaccaaggatttagact

SEQ ID NO: 5897385 - DNA, 25 bp, Homo sapien
taagaccattggaaaacacagatat

SEQ ID NO: 5897386 - DNA, 25 bp, Homo sapien
tgaacacttaaccaatatgccagtg

SEQ ID NO: 5897387 - DNA, 25 bp, Homo sapien
ttcaattgttactatgcacaagcta

SEQ ID NO: 5897388 - DNA, 25 bp, Homo sapien
taacttctagatgaaattctaagac

SEQ ID NO: 5897389 - DNA, 25 bp, Homo sapien
tttgtctgtattgccaaatgccaaa

SEQ ID NO: 5897390 - DNA, 25 bp, Homo sapien
ggatttagactggtggtctgaatta

SEQ ID NO: 5897391 - DNA, 25 bp, Homo sapien
ctatgcattttcagtcaaaattctg

SEQ ID NO: 5897392 - DNA, 25 bp, Homo sapien
agcaactgtattcaagggtcacagc

SEQ ID NO: 5897393 - DNA, 25 bp, Homo sapien
acaatattgtgtgttcttatctata

SEQ ID NO: 5897394 - DNA, 25 bp, Homo sapien
gacagttgtttttcaatgcttaatc

SEQ ID NO: 5897395 - DNA, 25 bp, Homo sapien
taatgaaaagtttacatagaaaagt

SEQ ID NO: 5897396 - DNA, 25 bp, Homo sapien
acaattgaaaagttgatacactggc

SEQ ID NO: 5897397 - DNA, 25 bp, Homo sapien
agtcaacatttcagtggatctcaac

SEQ ID NO: 5897398 - DNA, 25 bp, Homo sapien
catagaaaagtgggatactaattca

SEQ ID NO: 5897399 - DNA, 25 bp, Homo sapien
gcagtttaatgtgattttattattc

SEQ ID NO: 5897400 - DNA, 25 bp, Homo sapien
agtctaaatccttggtgacacctca

SEQ ID NO: 5897401 - DNA, 25 bp, Homo sapien
aaggacattataaatcatactttaa

SEQ ID NO: 5897402 - DNA, 25 bp, Homo sapien
cctttctaatgctgtgacccttgaa

SEQ ID NO: 5897403 - DNA, 25 bp, Homo sapien
gagattcagaattttgactgaaaat

SEQ ID NO: 5897404 - DNA, 25 bp, Homo sapien
atactttaacaaaaatctatgcatg

SEQ ID NO: 5897405 - DNA, 25 bp, Homo sapien
agtttacatagaaaagtgggatact

SEQ ID NO: 5897406 - DNA, 25 bp, Homo sapien
tgtgacccttgaatacagttgctca

SEQ ID NO: 5897407 - DNA, 25 bp, Homo sapien
ttcccaaaggcatgtttacatacat

SEQ ID NO: 5897408 - DNA, 25 bp, Homo sapien
acagtttaaaggacagcaaggagct

SEQ ID NO: 5897409 - DNA, 25 bp, Homo sapien
gaagaacttcaatcagacatacaca

SEQ ID NO: 5897410 - DNA, 25 bp, Homo sapien
taagtgtgtaattaaatgccaccat

SEQ ID NO: 5897411 - DNA, 25 bp, Homo sapien
gagctatgtagacctaagatctatt

SEQ ID NO: 5897412 - DNA, 25 bp, Homo sapien
tcaatgcttaatcctagagattcag

SEQ ID NO: 5897413 - DNA, 25 bp, Homo sapien
taaatgccaccatactctcagtgtc

SEQ ID NO: 5897414 - DNA, 25 bp, Homo sapien
tctaaaagaaaaaaagaagagtcaa

SEQ ID NO: 5897415 - DNA, 25 bp, Homo sapien
gtaatttccctactgttataaattg

SEQ ID NO: 5897416 - DNA, 25 bp, Homo sapien
aattgaaaagttgatacactggcat

SEQ ID NO: 5897417 - DNA, 25 bp, Homo sapien
tttagacagttgtttttcaatgctt

SEQ ID NO: 5897418 - DNA, 25 bp, Homo sapien
atatctgtgttttccaatggtctta

SEQ ID NO: 5897419 - DNA, 25 bp, Homo sapien
ggtctttccatttggcatttggcaa

SEQ ID NO: 5897420 - DNA, 25 bp, Homo sapien
acaaataggcagtttaatgtgattt

SEQ ID NO: 5897421 - DNA, 25 bp, Homo sapien
tcaacctttctaatgctgtgaccct

SEQ ID NO: 5897422 - DNA, 25 bp, Homo sapien
cttttaatgaaaagtttacatagaa

SEQ ID NO: 5897423 - DNA, 25 bp, Homo sapien
catatgtaagcaagtaacagtttaa

SEQ ID NO: 5897424 - DNA, 25 bp, Homo sapien
gtgacacctcatgctggaaaaaaat

SEQ ID NO: 5897425 - DNA, 25 bp, Homo sapien
atactaattcagaccaccagtctaa

SEQ ID NO: 5897426 - DNA, 25 bp, Homo sapien
gctcaggaccccaaccataaaatta

SEQ ID NO: 5897427 - DNA, 25 bp, Homo sapien
caaggagctatgtagacctaagatc

SEQ ID NO: 5897428 - DNA, 25 bp, Homo sapien
taagatctattgatactcaaactag

SEQ ID NO: 5897429 - DNA, 25 bp, Homo sapien
atagtaacaattgaaaagttgatac

SEQ ID NO: 5897430 - DNA, 25 bp, Homo sapien
tatgtagacctaagatctattgata

SEQ ID NO: 5897431 - DNA, 25 bp, Homo sapien
gataagtgtgtaattaaatgccacc

SEQ ID NO: 5897432 - DNA, 25 bp, Homo sapien
ttcagtttgataagtgtgtaattaa

SEQ ID NO: 5897433 - DNA, 25 bp, Homo sapien
ttccctactgttataaattgtgatg

SEQ ID NO: 5897434 - DNA, 25 bp, Homo sapien
ttattcttagatgttttagctattt

SEQ ID NO: 5897435 - DNA, 25 bp, Homo sapien
tagcttgtgcatagtaacaattgaa

SEQ ID NO: 5897436 - DNA, 25 bp, Homo sapien
cttaatcctagagattcagaatttt

SEQ ID NO: 5897437 - DNA, 25 bp, Homo sapien
tggtgacacctcatgctggaaaaaa

SEQ ID NO: 5897438 - DNA, 25 bp, Homo sapien
ggcatatgtaagcaagtaacagttt

SEQ ID NO: 5897439 - DNA, 25 bp, Homo sapien
acatacacaagagtcttagaatttc

SEQ ID NO: 5897440 - DNA, 25 bp, Homo sapien
gtgctgtaagaaacacctagaaaag

SEQ ID NO: 5897441 - DNA, 25 bp, Homo sapien
atttccctactgttataaattgtga

SEQ ID NO: 5897442 - DNA, 25 bp, Homo sapien
aacttcaatcagacatacacaagag

SEQ ID NO: 5897443 - DNA, 25 bp, Homo sapien
attaaatgccaccatactctcagtg

SEQ ID NO: 5897444 - DNA, 25 bp, Homo sapien
taattaaatgccaccatactctcag

SEQ ID NO: 5897445 - DNA, 25 bp, Homo sapien
aaggacagcaaggagctatgtagac

SEQ ID NO: 5897446 - DNA, 25 bp, Homo sapien
ctagaaaagaagaacttcaatcaga

SEQ ID NO: 5897447 - DNA, 25 bp, Homo sapien
atgctgtgacccttgaatacagttg

SEQ ID NO: 5897448 - DNA, 25 bp, Homo sapien
gaatttcatctagaagttaatccct

SEQ ID NO: 5897449 - DNA, 25 bp, Homo sapien
gaaaagtttacatagaaaagtggga

SEQ ID NO: 5897450 - DNA, 25 bp, Homo sapien
tttaatgaaaagtttacatagaaaa

SEQ ID NO: 5897451 - DNA, 25 bp, Homo sapien
acttaaggacattataaatcatact

SEQ ID NO: 5897452 - DNA, 25 bp, Homo sapien
aagtggtctttccatttggcatttg

SEQ ID NO: 5897453 - DNA, 25 bp, Homo sapien
aacctttctaatgctgtgacccttg

SEQ ID NO: 5897454 - DNA, 25 bp, Homo sapien
cagaagagactgacaaaatggtttc

SEQ ID NO: 5897455 - DNA, 25 bp, Homo sapien
atttcctttgatacttaaggacatt

SEQ ID NO: 5897456 - DNA, 25 bp, Homo sapien
acctagaaaagaagaacttcaatca

SEQ ID NO: 5897457 - DNA, 25 bp, Homo sapien
tccttggtgacacctcatgctggaa

SEQ ID NO: 5897458 - DNA, 25 bp, Homo sapien
atgcaaatatctgtgttttccaatg

SEQ ID NO: 5897459 - DNA, 25 bp, Homo sapien
aaagtttacatagaaaagtgggata

SEQ ID NO: 5897460 - DNA, 25 bp, Homo sapien
aaaagaagaacttcaatcagacata

SEQ ID NO: 5897461 - DNA, 25 bp, Homo sapien
agagtcaacatttcagtggatctca

SEQ ID NO: 5897462 - DNA, 25 bp, Homo sapien
agttgatacactggcatattggtta

SEQ ID NO: 5897463 - DNA, 25 bp, Homo sapien
ttttcccaaaggcatgtttacatac

SEQ ID NO: 5897464 - DNA, 25 bp, Homo sapien
taaaagaaaaaaagaagagtcaaca

SEQ ID NO: 5897465 - DNA, 25 bp, Homo sapien
tagacctaagatctattgatactca

SEQ ID NO: 5897466 - DNA, 25 bp, Homo sapien
ccctactgttataaattgtgatgca

SEQ ID NO: 5897467 - DNA, 25 bp, Homo sapien
ttctatgacaacttttaatgaaaag

SEQ ID NO: 5897468 - DNA, 25 bp, Homo sapien
aaattgtgatgcaaatatctgtgtt

SEQ ID NO: 5897469 - DNA, 25 bp, Homo sapien
ataaattgtgatgcaaatatctgtg

SEQ ID NO: 5897470 - DNA, 25 bp, Homo sapien
tgttataaattgtgatgcaaatatc

SEQ ID NO: 5897471 - DNA, 25 bp, Homo sapien
actagcttgtgcatagtaacaattg

SEQ ID NO: 5897472 - DNA, 25 bp, Homo sapien
cgtgctctaagtggtctttccattt

SEQ ID NO: 5897473 - DNA, 25 bp, Homo sapien
acacctagaaaagaagaacttcaat

SEQ ID NO: 5897474 - DNA, 25 bp, Homo sapien
ggacagcaaggagctatgtagacct

SEQ ID NO: 5897475 - DNA, 25 bp, Homo sapien
aagagtcttagaatttcatctagaa

SEQ ID NO: 5897476 - DNA, 25 bp, Homo sapien
ggatactaattcagaccaccagtct

SEQ ID NO: 5897477 - DNA, 25 bp, Homo sapien
caagtaacagtttaaaggacagcaa

SEQ ID NO: 5897478 - DNA, 25 bp, Homo sapien
agacatacacaagagtcttagaatt

SEQ ID NO: 5897479 - DNA, 25 bp, Homo sapien
gtggtctttccatttggcatttggc

SEQ ID NO: 5897480 - DNA, 25 bp, Homo sapien
aatgccaccatactctcagtgtcca

SEQ ID NO: 5897481 - DNA, 25 bp, Homo sapien
tcagacatacacaagagtcttagaa

SEQ ID NO: 5897482 - DNA, 25 bp, Homo sapien
tacatagaaaagtgggatactaatt

SEQ ID NO: 5897483 - DNA, 25 bp, Homo sapien
gttcaggtgctgtaagaaacaccta

SEQ ID NO: 5897484 - DNA, 25 bp, Homo sapien
tctttccatttggcatttggcaata

SEQ ID NO: 5897485 - DNA, 25 bp, Homo sapien
ttgaaaagttgatacactggcatat

SEQ ID NO: 5897486 - DNA, 25 bp, Homo sapien
tagtcgtgctctaagtggtctttcc

SEQ ID NO: 5897487 - DNA, 25 bp, Homo sapien
tgtgaaatgttttagacagttgttt

SEQ ID NO: 5897488 - DNA, 25 bp, Homo sapien
cccaaaggcatgtttacatacatta

SEQ ID NO: 5897489 - DNA, 25 bp, Homo sapien
atacagacaaacaaataggcagttt

SEQ ID NO: 5897490 - DNA, 25 bp, Homo sapien
agtggatctcaacctttctaatgct

SEQ ID NO: 5897491 - DNA, 25 bp, Homo sapien
tttggcatttggcaatacagacaaa

SEQ ID NO: 5897492 - DNA, 25 bp, Homo sapien
aaacacctagaaaagaagaacttca

SEQ ID NO: 5897493 - DNA, 25 bp, Homo sapien
ttcatctagaagttaatccctcagt

SEQ ID NO: 5897494 - DNA, 25 bp, Homo sapien
ctatgacaacttttaatgaaaagtt

SEQ ID NO: 5897495 - DNA, 25 bp, Homo sapien
ctggcatattggttaagtgttcagg

SEQ ID NO: 5897496 - DNA, 25 bp, Homo sapien
ttaagactttcagtttgataagtgt

SEQ ID NO: 5897497 - DNA, 25 bp, Homo sapien
acagacaaacaaataggcagtttaa

SEQ ID NO: 5897498 - DNA, 25 bp, Homo sapien
agtaacaattgaaaagttgatacac

SEQ ID NO: 5897499 - DNA, 25 bp, Homo sapien
taacaattgaaaagttgatacactg

SEQ ID NO: 5897500 - DNA, 25 bp, Homo sapien
aatatttggtaacatgcagaagaga

SEQ ID NO: 5897501 - DNA, 25 bp, Homo sapien
tttcattgctactttaaaactgtaa

SEQ ID NO: 5897502 - DNA, 25 bp, Homo sapien
gataagaacacacaatattgttttt

SEQ ID NO: 5897503 - DNA, 25 bp, Homo sapien
aaagtgggatactaattcagaccac

SEQ ID NO: 5897504 - DNA, 25 bp, Homo sapien
ctgtaatttccctactgttataaat

SEQ ID NO: 5897505 - DNA, 25 bp, Homo sapien
tagaatttcatctagaagttaatcc

SEQ ID NO: 5897506 - DNA, 25 bp, Homo sapien
agatctattgatactcaaactagct

SEQ ID NO: 5897507 - DNA, 25 bp, Homo sapien
tgatactcaaactagcttgtgcata

SEQ ID NO: 5897508 - DNA, 25 bp, Homo sapien
tcaaactagcttgtgcatagtaaca

SEQ ID NO: 5897509 - DNA, 25 bp, Homo sapien
ttttaagactttcagtttgataagt

SEQ ID NO: 5897510 - DNA, 25 bp, Homo sapien
tgaaatgttttagacagttgttttt

SEQ ID NO: 5897511 - DNA, 25 bp, Homo sapien
ttaatccctcagtctagtcgtgctc

SEQ ID NO: 5897512 - DNA, 25 bp, Homo sapien
ttgatacactggcatattggttaag

SEQ ID NO: 5897513 - DNA, 25 bp, Homo sapien
gtttctatgacaacttttaatgaaa

SEQ ID NO: 5897514 - DNA, 25 bp, Homo sapien
tagataagaacacacaatattgttt

SEQ ID NO: 5897515 - DNA, 25 bp, Homo sapien
attcttagatgttttagctattttt

SEQ ID NO: 5897516 - DNA, 25 bp, Homo sapien
tccatttggcatttggcaatacaga

SEQ ID NO: 5897517 - DNA, 25 bp, Homo sapien
gctatgtagacctaagatctattga

SEQ ID NO: 5897518 - DNA, 25 bp, Homo sapien
aatccttggtgacacctcatgctgg

SEQ ID NO: 5897519 - DNA, 25 bp, Homo sapien
atctttttcccaaaggcatgtttac

SEQ ID NO: 5897520 - DNA, 25 bp, Homo sapien
tcatactttaacaaaaatctatgca

SEQ ID NO: 5897521 - DNA, 25 bp, Homo sapien
ctttcagtttgataagtgtgtaatt

SEQ ID NO: 5897522 - DNA, 25 bp, Homo sapien
ccagtctaaatccttggtgacacct

SEQ ID NO: 5897523 - DNA, 25 bp, Homo sapien
gagtcttagaatttcatctagaagt

SEQ ID NO: 5897524 - DNA, 25 bp, Homo sapien
gaaaaaaattgtgaaatgttttaga

SEQ ID NO: 5897525 - DNA, 25 bp, Homo sapien
tttgatacttaaggacattataaat

SEQ ID NO: 5897526 - DNA, 25 bp, Homo sapien
ttcctttgatacttaaggacattat

SEQ ID NO: 5897527 - DNA, 25 bp, Homo sapien
gtgttcaggtgctgtaagaaacacc

SEQ ID NO: 5897528 - DNA, 25 bp, Homo sapien
agagactgacaaaatggtttctatg

SEQ ID NO: 5897529 - DNA, 25 bp, Homo sapien
taattcagaccaccagtctaaatcc

SEQ ID NO: 5897530 - DNA, 25 bp, Homo sapien
tgtttttcaatgcttaatcctagag

SEQ ID NO: 5897531 - DNA, 25 bp, Homo sapien
gctatttttatatagataagaacac

SEQ ID NO: 5897532 - DNA, 25 bp, Homo sapien
tcagtctagtcgtgctctaagtggt

SEQ ID NO: 5897533 - DNA, 25 bp, Homo sapien
tttccatttggcatttggcaataca

SEQ ID NO: 5897534 - DNA, 25 bp, Homo sapien
tatttttatatagataagaacacac

SEQ ID NO: 5897535 - DNA, 25 bp, Homo sapien
taagaacacacaatattgtttttaa

SEQ ID NO: 5897536 - DNA, 25 bp, Homo sapien
actttaacaaaaatctatgcatggc

SEQ ID NO: 5897537 - DNA, 25 bp, Homo sapien
gcaaatatctgtgttttccaatggt

SEQ ID NO: 5897538 - DNA, 25 bp, Homo sapien
tatatagataagaacacacaatatt

SEQ ID NO: 5897539 - DNA, 25 bp, Homo sapien
ggacattataaatcatactttaaca

SEQ ID NO: 5897540 - DNA, 25 bp, Homo sapien
cctttgatacttaaggacattataa

SEQ ID NO: 5897541 - DNA, 25 bp, Homo sapien
aagaagaacttcaatcagacataca

SEQ ID NO: 5897542 - DNA, 25 bp, Homo sapien
tagaagttaatccctcagtctagtc

SEQ ID NO: 5897543 - DNA, 25 bp, Homo sapien
catattggttaagtgttcaggtgct

SEQ ID NO: 5897544 - DNA, 25 bp, Homo sapien
tagaaaagtgggatactaattcaga

SEQ ID NO: 5897545 - DNA, 25 bp, Homo sapien
ctactgttataaattgtgatgcaaa

SEQ ID NO: 5897546 - DNA, 25 bp, Homo sapien
catagaagagatctttttcccaaag

SEQ ID NO: 5897547 - DNA, 25 bp, Homo sapien
gaagttaatccctcagtctagtcgt

SEQ ID NO: 5897548 - DNA, 25 bp, Homo sapien
tgctactttaaaactgtaatttccc

SEQ ID NO: 5897549 - DNA, 25 bp, Homo sapien
agagatctttttcccaaaggcatgt

SEQ ID NO: 5897550 - DNA, 25 bp, Homo sapien
cagaattttgactgaaaatgcatag

SEQ ID NO: 5897551 - DNA, 25 bp, Homo sapien
agttaatccctcagtctagtcgtgc

SEQ ID NO: 5897552 - DNA, 25 bp, Homo sapien
atttggcaatacagacaaacaaata

SEQ ID NO: 5897553 - DNA, 25 bp, Homo sapien
cacaatattgtttttaagactttca

SEQ ID NO: 5897554 - DNA, 25 bp, Homo sapien
ttgataagtgtgtaattaaatgcca

SEQ ID NO: 5897555 - DNA, 25 bp, Homo sapien
tgtagacctaagatctattgatact

SEQ ID NO: 5897556 - DNA, 25 bp, Homo sapien
tttggtaacatgcagaagagactga

SEQ ID NO: 5897557 - DNA, 25 bp, Homo sapien
tagagattcagaattttgactgaaa

SEQ ID NO: 5897558 - DNA, 25 bp, Homo sapien
aaaaattgtgaaatgttttagacag

SEQ ID NO: 5897559 - DNA, 25 bp, Homo sapien
tattgtttttaagactttcagtttg

SEQ ID NO: 5897560 - DNA, 25 bp, Homo sapien
agcaaggagctatgtagacctaaga

SEQ ID NO: 5897561 - DNA, 25 bp, Homo sapien
tcaggaccccaaccataaaattatt

SEQ ID NO: 5897562 - DNA, 25 bp, Homo sapien
attgatactcaaactagcttgtgca

SEQ ID NO: 5897563 - DNA, 25 bp, Homo sapien
attcagaccaccagtctaaatcctt

SEQ ID NO: 5897564 - DNA, 25 bp, Homo sapien
agtaacagtttaaaggacagcaagg

SEQ ID NO: 5897565 - DNA, 25 bp, Homo sapien
ggcaatacagacaaacaaataggca

SEQ ID NO: 5897566 - DNA, 25 bp, Homo sapien
ataggcagtttaatgtgattttatt

SEQ ID NO: 5897567 - DNA, 25 bp, Homo sapien
aatccctcagtctagtcgtgctcta

SEQ ID NO: 5897568 - DNA, 25 bp, Homo sapien
tgatacttaaggacattataaatca

SEQ ID NO: 5897569 - DNA, 25 bp, Homo sapien
ccttgaatacagttgctcaggaccc

SEQ ID NO: 5897570 - DNA, 25 bp, Homo sapien
tttatatagataagaacacacaata

SEQ ID NO: 5897571 - DNA, 25 bp, Homo sapien
aacatttcagtggatctcaaccttt

SEQ ID NO: 5897572 - DNA, 25 bp, Homo sapien
catttcagtggatctcaacctttct

SEQ ID NO: 5897573 - DNA, 25 bp, Homo sapien
agtgtgtaattaaatgccaccatac

SEQ ID NO: 5897574 - DNA, 25 bp, Homo sapien
cctagagattcagaattttgactga

SEQ ID NO: 5897575 - DNA, 25 bp, Homo sapien
tagaagagatctttttcccaaaggc

SEQ ID NO: 5897576 - DNA, 25 bp, Homo sapien
gtcttagaatttcatctagaagtta

SEQ ID NO: 5897577 - DNA, 25 bp, Homo sapien
ctatgcatggcatatgtaagcaagt

SEQ ID NO: 5897578 - DNA, 25 bp, Homo sapien
tgactgaaaatgcatagaagagatc

SEQ ID NO: 5897579 - DNA, 25 bp, Homo sapien
ttggcaatacagacaaacaaatagg

SEQ ID NO: 5897580 - DNA, 25 bp, Homo sapien
actaattcagaccaccagtctaaat

SEQ ID NO: 5897581 - DNA, 25 bp, Homo sapien
acaagagtcttagaatttcatctag

SEQ ID NO: 5897582 - DNA, 25 bp, Homo sapien
taatgctgtgacccttgaatacagt

SEQ ID NO: 5897583 - DNA, 25 bp, Homo sapien
atctattgatactcaaactagcttg

SEQ ID NO: 5897584 - DNA, 25 bp, Homo sapien
tctagtcgtgctctaagtggtcttt

SEQ ID NO: 5897585 - DNA, 25 bp, Homo sapien
tacactggcatattggttaagtgtt

SEQ ID NO: 5897586 - DNA, 25 bp, Homo sapien
agttgctcaggaccccaaccataaa

SEQ ID NO: 5897587 - DNA, 25 bp, Homo sapien
aatcagacatacacaagagtcttag

SEQ ID NO: 5897588 - DNA, 25 bp, Homo sapien
cagtttgataagtgtgtaattaaat

SEQ ID NO: 5897589 - DNA, 25 bp, Homo sapien
catactctcagtgtccaaagttgtc

SEQ ID NO: 5897590 - DNA, 25 bp, Homo sapien
agtgggatactaattcagaccacca

SEQ ID NO: 5897591 - DNA, 25 bp, Homo sapien
taacaaaaatctatgcatggcatat

SEQ ID NO: 5897592 - DNA, 25 bp, Homo sapien
gtaacatgcagaagagactgacaaa

SEQ ID NO: 5897593 - DNA, 25 bp, Homo sapien
aggcagtttaatgtgattttattat

SEQ ID NO: 5897594 - DNA, 25 bp, Homo sapien
gactttcagtttgataagtgtgtaa

SEQ ID NO: 5897595 - DNA, 25 bp, Homo sapien
ctattgatactcaaactagcttgtg

SEQ ID NO: 5897596 - DNA, 25 bp, Homo sapien
atttcatctagaagttaatccctca

SEQ ID NO: 5897597 - DNA, 25 bp, Homo sapien
gaagagatctttttcccaaaggcat

SEQ ID NO: 5897598 - DNA, 25 bp, Homo sapien
tgtaagcaagtaacagtttaaagga

SEQ ID NO: 5897599 - DNA, 25 bp, Homo sapien
aatgcttaatcctagagattcagaa

SEQ ID NO: 5897600 - DNA, 25 bp, Homo sapien
tctaatgctgtgacccttgaataca

SEQ ID NO: 5897601 - DNA, 25 bp, Homo sapien
taaaggacagcaaggagctatgtag

SEQ ID NO: 5897602 - DNA, 25 bp, Homo sapien
ctttttcccaaaggcatgtttacat

SEQ ID NO: 5897603 - DNA, 25 bp, Homo sapien
aaatctatgcatggcatatgtaagc

SEQ ID NO: 5897604 - DNA, 25 bp, Homo sapien
ttaaggacattataaatcatacttt

SEQ ID NO: 5897605 - DNA, 25 bp, Homo sapien
tcatgctggaaaaaaattgtgaaat

SEQ ID NO: 5897606 - DNA, 25 bp, Homo sapien
tagacagttgtttttcaatgcttaa

SEQ ID NO: 5897607 - DNA, 25 bp, Homo sapien
agtctagtcgtgctctaagtggtct

SEQ ID NO: 5897608 - DNA, 25 bp, Homo sapien
atctgtgttttccaatggtcttagg

SEQ ID NO: 5897609 - DNA, 25 bp, Homo sapien
cttcaatcagacatacacaagagtc

SEQ ID NO: 5897610 - DNA, 25 bp, Homo sapien
tttaacaaaaatctatgcatggcat

SEQ ID NO: 5897611 - DNA, 25 bp, Homo sapien
actgaatatttggtaacatgcagaa

SEQ ID NO: 5897612 - DNA, 25 bp, Homo sapien
ggcatgtttacatacattaattttc

SEQ ID NO: 5897613 - DNA, 25 bp, Homo sapien
catttggcatttggcaatacagaca

SEQ ID NO: 5897614 - DNA, 25 bp, Homo sapien
ggttaagtgttcaggtgctgtaaga

SEQ ID NO: 5897615 - DNA, 25 bp, Homo sapien
atacacaagagtcttagaatttcat

SEQ ID NO: 5897616 - DNA, 25 bp, Homo sapien
aaaagaagagtcaacatttcagtgg

SEQ ID NO: 5897617 - DNA, 25 bp, Homo sapien
tgggatactaattcagaccaccagt

SEQ ID NO: 5897618 - DNA, 25 bp, Homo sapien
aagaagagtcaacatttcagtggat

SEQ ID NO: 5897619 - DNA, 25 bp, Homo sapien
tttacatagaaaagtgggatactaa

SEQ ID NO: 5897620 - DNA, 25 bp, Homo sapien
tggcatttggcaatacagacaaaca

SEQ ID NO: 5897621 - DNA, 25 bp, Homo sapien
gaaaagttgatacactggcatattg

SEQ ID NO: 5897622 - DNA, 25 bp, Homo sapien
aagtgttcaggtgctgtaagaaaca

SEQ ID NO: 5897623 - DNA, 25 bp, Homo sapien
agcaagtaacagtttaaaggacagc

SEQ ID NO: 5897624 - DNA, 25 bp, Homo sapien
atactcaaactagcttgtgcatagt

SEQ ID NO: 5897625 - DNA, 25 bp, Homo sapien
actgaaaatgcatagaagagatctt

SEQ ID NO: 5897626 - DNA, 25 bp, Homo sapien
ctaagtggtctttccatttggcatt

SEQ ID NO: 5897627 - DNA, 25 bp, Homo sapien
atacttaaggacattataaatcata

SEQ ID NO: 5897628 - DNA, 25 bp, Homo sapien
tttttaactgaatatttggtaacat

SEQ ID NO: 5897629 - DNA, 25 bp, Homo sapien
tcagaccaccagtctaaatccttgg

SEQ ID NO: 5897630 - DNA, 25 bp, Homo sapien
tactctcagtgtccaaagttgtctt

SEQ ID NO: 5897631 - DNA, 25 bp, Homo sapien
gaagagtcaacatttcagtggatct

SEQ ID NO: 5897632 - DNA, 25 bp, Homo sapien
tttgactgaaaatgcatagaagaga

SEQ ID NO: 5897633 - DNA, 25 bp, Homo sapien
agaaaagaagaacttcaatcagaca

SEQ ID NO: 5897634 - DNA, 25 bp, Homo sapien
tgccaccatactctcagtgtccaaa

SEQ ID NO: 5897635 - DNA, 25 bp, Homo sapien
tgctctaagtggtctttccatttgg

SEQ ID NO: 5897636 - DNA, 25 bp, Homo sapien
cagtgtccaaagttgtcttcttttt

SEQ ID NO: 5897637 - DNA, 25 bp, Homo sapien
tgcatagaagagatctttttcccaa

SEQ ID NO: 5897638 - DNA, 25 bp, Homo sapien
actgttataaattgtgatgcaaata

SEQ ID NO: 5897639 - DNA, 25 bp, Homo sapien
tgacaaaatggtttctatgacaact

SEQ ID NO: 5897640 - DNA, 25 bp, Homo sapien
agaacttcaatcagacatacacaag

SEQ ID NO: 5897641 - DNA, 25 bp, Homo sapien
cacacaatattgtttttaagacttt

SEQ ID NO: 5897642 - DNA, 25 bp, Homo sapien
acaaacaaataggcagtttaatgtg

SEQ ID NO: 5897643 - DNA, 25 bp, Homo sapien
aaatatctgtgttttccaatggtct

SEQ ID NO: 5897644 - DNA, 25 bp, Homo sapien
aaaatggtttctatgacaactttta

SEQ ID NO: 5897645 - DNA, 25 bp, Homo sapien
ttggttaagtgttcaggtgctgtaa

SEQ ID NO: 5897646 - DNA, 25 bp, Homo sapien
tggatctcaacctttctaatgctgt

SEQ ID NO: 5897647 - DNA, 25 bp, Homo sapien
aaggcatgtttacatacattaattt

SEQ ID NO: 5897648 - DNA, 25 bp, Homo sapien
aaaatgcatagaagagatctttttc

SEQ ID NO: 5897649 - DNA, 25 bp, Homo sapien
attgtgaaatgttttagacagttgt

SEQ ID NO: 5897650 - DNA, 25 bp, Homo sapien
cctaagatctattgatactcaaact

SEQ ID NO: 5897651 - DNA, 25 bp, Homo sapien
tgaaaatgcatagaagagatctttt

SEQ ID NO: 5897652 - DNA, 25 bp, Homo sapien
tggaaaaaaattgtgaaatgtttta

SEQ ID NO: 5897653 - DNA, 25 bp, Homo sapien
aagactttcagtttgataagtgtgt

SEQ ID NO: 5897654 - DNA, 25 bp, Homo sapien
accatactctcagtgtccaaagttg

SEQ ID NO: 5897655 - DNA, 25 bp, Homo sapien
atgttttagacagttgtttttcaat

SEQ ID NO: 5897656 - DNA, 25 bp, Homo sapien
agaacacacaatattgtttttaaga

SEQ ID NO: 5897657 - DNA, 25 bp, Homo sapien
aatgcatagaagagatctttttccc

SEQ ID NO: 5897658 - DNA, 25 bp, Homo sapien
tgcagaagagactgacaaaatggtt

SEQ ID NO: 5897659 - DNA, 25 bp, Homo sapien
ctcagtgtccaaagttgtcttcttt

SEQ ID NO: 5897660 - DNA, 25 bp, Homo sapien
ttaagtgttcaggtgctgtaagaaa

SEQ ID NO: 5897661 - DNA, 25 bp, Homo sapien
attgctactttaaaactgtaatttc

SEQ ID NO: 5897662 - DNA, 25 bp, Homo sapien
tggtttctatgacaacttttaatga

SEQ ID NO: 5897663 - DNA, 25 bp, Homo sapien
tcaggtgctgtaagaaacacctaga

SEQ ID NO: 5897664 - DNA, 25 bp, Homo sapien
gtgcatagtaacaattgaaaagttg

SEQ ID NO: 5897665 - DNA, 25 bp, Homo sapien
catctagaagttaatccctcagtct

SEQ ID NO: 5897666 - DNA, 25 bp, Homo sapien
ctctcagtgtccaaagttgtcttct

SEQ ID NO: 5897667 - DNA, 25 bp, Homo sapien
aaagttgatacactggcatattggt

SEQ ID NO: 5897668 - DNA, 25 bp, Homo sapien
atggcatatgtaagcaagtaacagt

SEQ ID NO: 5897669 - DNA, 25 bp, Homo sapien
gaatacagttgctcaggaccccaac

SEQ ID NO: 5897670 - DNA, 25 bp, Homo sapien
gacctaagatctattgatactcaaa

SEQ ID NO: 5897671 - DNA, 25 bp, Homo sapien
catgcagaagagactgacaaaatgg

SEQ ID NO: 5897672 - DNA, 25 bp, Homo sapien
tttcaatgcttaatcctagagattc

SEQ ID NO: 5897673 - DNA, 25 bp, Homo sapien
tgtgatgcaaatatctgtgttttcc

SEQ ID NO: 5897674 - DNA, 25 bp, Homo sapien
gatctcaacctttctaatgctgtga

SEQ ID NO: 5897675 - DNA, 25 bp, Homo sapien
gctggaaaaaaattgtgaaatgttt

SEQ ID NO: 5897676 - DNA, 25 bp, Homo sapien
aaattgtgaaatgttttagacagtt

SEQ ID NO: 5897677 - DNA, 25 bp, Homo sapien
tatagataagaacacacaatattgt

SEQ ID NO: 5897678 - DNA, 25 bp, Homo sapien
atacagttgctcaggaccccaacca

SEQ ID NO: 5897679 - DNA, 25 bp, Homo sapien
gcatggcatatgtaagcaagtaaca

SEQ ID NO: 5897680 - DNA, 25 bp, Homo sapien
aactgtaatttccctactgttataa

SEQ ID NO: 5897681 - DNA, 25 bp, Homo sapien
taagaaacacctagaaaagaagaac

SEQ ID NO: 5897682 - DNA, 25 bp, Homo sapien
gttttagacagttgtttttcaatgc

SEQ ID NO: 5897683 - DNA, 25 bp, Homo sapien
tcaacatttcagtggatctcaacct

SEQ ID NO: 5897684 - DNA, 25 bp, Homo sapien
aaatgttttagacagttgtttttca

SEQ ID NO: 5897685 - DNA, 25 bp, Homo sapien
tgtaattaaatgccaccatactctc

SEQ ID NO: 5897686 - DNA, 25 bp, Homo sapien
attttgactgaaaatgcatagaaga

SEQ ID NO: 5897687 - DNA, 25 bp, Homo sapien
actcaaactagcttgtgcatagtaa

SEQ ID NO: 5897688 - DNA, 25 bp, Homo sapien
ccaccatactctcagtgtccaaagt

SEQ ID NO: 5897689 - DNA, 25 bp, Homo sapien
gaattttgactgaaaatgcatagaa

SEQ ID NO: 5897690 - DNA, 25 bp, Homo sapien
caaaggcatgtttacatacattaat

SEQ ID NO: 5897691 - DNA, 25 bp, Homo sapien
acacaagagtcttagaatttcatct

SEQ ID NO: 5897692 - DNA, 25 bp, Homo sapien
aggtgctgtaagaaacacctagaaa

SEQ ID NO: 5897693 - DNA, 25 bp, Homo sapien
tgaatatttggtaacatgcagaaga

SEQ ID NO: 5897694 - DNA, 25 bp, Homo sapien
agatctttttcccaaaggcatgttt

SEQ ID NO: 5897695 - DNA, 25 bp, Homo sapien
tatttggtaacatgcagaagagact

SEQ ID NO: 5897696 - DNA, 25 bp, Homo sapien
aatggtttctatgacaacttttaat

SEQ ID NO: 5897697 - DNA, 25 bp, Homo sapien
atctatgcatggcatatgtaagcaa

SEQ ID NO: 5897698 - DNA, 25 bp, Homo sapien
taacagtttaaaggacagcaaggag

SEQ ID NO: 5897699 - DNA, 25 bp, Homo sapien
tctagaagttaatccctcagtctag

SEQ ID NO: 5897700 - DNA, 25 bp, Homo sapien
gatacactggcatattggttaagtg

SEQ ID NO: 5897701 - DNA, 25 bp, Homo sapien
cttagaatttcatctagaagttaat

SEQ ID NO: 5897702 - DNA, 25 bp, Homo sapien
aggagctatgtagacctaagatcta

SEQ ID NO: 5897703 - DNA, 25 bp, Homo sapien
tgcttaatcctagagattcagaatt

SEQ ID NO: 5897704 - DNA, 25 bp, Homo sapien
tttaactgaatatttggtaacatgc

SEQ ID NO: 5897705 - DNA, 25 bp, Homo sapien
gctgtgacccttgaatacagttgct

SEQ ID NO: 5897706 - DNA, 25 bp, Homo sapien
gttgtttttcaatgcttaatcctag

SEQ ID NO: 5897707 - DNA, 25 bp, Homo sapien
tgtgtaattaaatgccaccatactc

SEQ ID NO: 5897708 - DNA, 25 bp, Homo sapien
tgtaagaaacacctagaaaagaaga

SEQ ID NO: 5897709 - DNA, 25 bp, Homo sapien
tgacccttgaatacagttgctcagg

SEQ ID NO: 5897710 - DNA, 25 bp, Homo sapien
tctcaacctttctaatgctgtgacc

SEQ ID NO: 5897711 - DNA, 25 bp, Homo sapien
tcattgctactttaaaactgtaatt

SEQ ID NO: 5897712 - DNA, 25 bp, Homo sapien
gcttgtgcatagtaacaattgaaaa

SEQ ID NO: 5897713 - DNA, 25 bp, Homo sapien
acccttgaatacagttgctcaggac

SEQ ID NO: 5897714 - DNA, 25 bp, Homo sapien
attgtgatgcaaatatctgtgtttt

SEQ ID NO: 5897715 - DNA, 25 bp, Homo sapien
taaaactgtaatttccctactgtta

SEQ ID NO: 5897716 - DNA, 25 bp, Homo sapien
accaccagtctaaatccttggtgac

SEQ ID NO: 5897717 - DNA, 25 bp, Homo sapien
cagttgtttttcaatgcttaatcct

SEQ ID NO: 5897718 - DNA, 25 bp, Homo sapien
tttaaaggacagcaaggagctatgt

SEQ ID NO: 5897719 - DNA, 25 bp, Homo sapien
cactggcatattggttaagtgttca

SEQ ID NO: 5897720 - DNA, 25 bp, Homo sapien
agtttaaaggacagcaaggagctat

SEQ ID NO: 5897721 - DNA, 25 bp, Homo sapien
caatacagacaaacaaataggcagt

SEQ ID NO: 5897722 - DNA, 25 bp, Homo sapien
aaacaaataggcagtttaatgtgat

SEQ ID NO: 5897723 - DNA, 25 bp, Homo sapien
acaaaatggtttctatgacaacttt

SEQ ID NO: 5897724 - DNA, 25 bp, Homo sapien
gaaaagtgggatactaattcagacc

SEQ ID NO: 5897725 - DNA, 25 bp, Homo sapien
tggtaacatgcagaagagactgaca

SEQ ID NO: 5897726 - DNA, 25 bp, Homo sapien
tgatgcaaatatctgtgttttccaa

SEQ ID NO: 5897727 - DNA, 25 bp, Homo sapien
gtcgtgctctaagtggtctttccat

SEQ ID NO: 5897728 - DNA, 25 bp, Homo sapien
cctcatgctggaaaaaaattgtgaa

SEQ ID NO: 5897729 - DNA, 25 bp, Homo sapien
tccctcagtctagtcgtgctctaag

SEQ ID NO: 5897730 - DNA, 25 bp, Homo sapien
taactgaatatttggtaacatgcag

SEQ ID NO: 5897731 - DNA, 25 bp, Homo sapien
tttctaatgctgtgacccttgaata

SEQ ID NO: 5897732 - DNA, 25 bp, Homo sapien
tatgtaagcaagtaacagtttaaag

SEQ ID NO: 5897733 - DNA, 25 bp, Homo sapien
gtttgataagtgtgtaattaaatgc

SEQ ID NO: 5897734 - DNA, 25 bp, Homo sapien
ttataaattgtgatgcaaatatctg

SEQ ID NO: 5897735 - DNA, 25 bp, Homo sapien
tttttcaatgcttaatcctagagat

SEQ ID NO: 5897736 - DNA, 25 bp, Homo sapien
aacatgcagaagagactgacaaaat

SEQ ID NO: 5897737 - DNA, 25 bp, Homo sapien
actgacaaaatggtttctatgacaa

SEQ ID NO: 5897738 - DNA, 25 bp, Homo sapien
gcatttggcaatacagacaaacaaa

SEQ ID NO: 5897739 - DNA, 25 bp, Homo sapien
ttgaatacagttgctcaggacccca

SEQ ID NO: 5897740 - DNA, 25 bp, Homo sapien
acagttgctcaggaccccaaccata

SEQ ID NO: 5897741 - DNA, 25 bp, Homo sapien
acagcaaggagctatgtagacctaa

SEQ ID NO: 5897742 - DNA, 25 bp, Homo sapien
gaaaaaaagaagagtcaacatttca

SEQ ID NO: 5897743 - DNA, 25 bp, Homo sapien
atgctggaaaaaaattgtgaaatgt

SEQ ID NO: 5897744 - DNA, 25 bp, Homo sapien
gcatagtaacaattgaaaagttgat

SEQ ID NO: 5897745 - DNA, 25 bp, Homo sapien
ttgtttttaagactttcagtttgat

SEQ ID NO: 5897746 - DNA, 25 bp, Homo sapien
aaaaatctatgcatggcatatgtaa

SEQ ID NO: 5897747 - DNA, 25 bp, Homo sapien
atcctagagattcagaattttgact

SEQ ID NO: 5897748 - DNA, 25 bp, Homo sapien
aaactagcttgtgcatagtaacaat

SEQ ID NO: 5897749 - DNA, 25 bp, Homo sapien
attttcattgctactttaaaactgt

SEQ ID NO: 5897750 - DNA, 25 bp, Homo sapien
caccagtctaaatccttggtgacac

SEQ ID NO: 5897751 - DNA, 25 bp, Homo sapien
cctcagtctagtcgtgctctaagtg

SEQ ID NO: 5897752 - DNA, 25 bp, Homo sapien
tttttatatagataagaacacacaa

SEQ ID NO: 5897753 - DNA, 25 bp, Homo sapien
tttcagtggatctcaacctttctaa

SEQ ID NO: 5897754 - DNA, 25 bp, Homo sapien
atgcatggcatatgtaagcaagtaa

SEQ ID NO: 5897755 - DNA, 25 bp, Homo sapien
acaaaaatctatgcatggcatatgt

SEQ ID NO: 5897756 - DNA, 25 bp, Homo sapien
cacctcatgctggaaaaaaattgtg

SEQ ID NO: 5897757 - DNA, 25 bp, Homo sapien
tcaatcagacatacacaagagtctt

SEQ ID NO: 5897758 - DNA, 25 bp, Homo sapien
ctctaagtggtctttccatttggca

SEQ ID NO: 5897759 - DNA, 25 bp, Homo sapien
acatttcctttgatacttaaggaca

SEQ ID NO: 5897760 - DNA, 25 bp, Homo sapien
ggcatattggttaagtgttcaggtg

SEQ ID NO: 5897761 - DNA, 25 bp, Homo sapien
agacaaacaaataggcagtttaatg

SEQ ID NO: 5897762 - DNA, 25 bp, Homo sapien
taagcaagtaacagtttaaaggaca

SEQ ID NO: 5897763 - DNA, 25 bp, Homo sapien
agaccaccagtctaaatccttggtg

SEQ ID NO: 5897764 - DNA, 25 bp, Homo sapien
cttggtgacacctcatgctggaaaa

SEQ ID NO: 5897765 - DNA, 25 bp, Homo sapien
tcagtggatctcaacctttctaatg

SEQ ID NO: 5897766 - DNA, 25 bp, Homo sapien
ttgctcaggaccccaaccataaaat

SEQ ID NO: 5897767 - DNA, 25 bp, Homo sapien
gacacctcatgctggaaaaaaattg

SEQ ID NO: 5897768 - DNA, 25 bp, Homo sapien
ttgtgcatagtaacaattgaaaagt

SEQ ID NO: 5897769 - DNA, 25 bp, Homo sapien
atgaaaagtttacatagaaaagtgg

SEQ ID NO: 5897770 - DNA, 25 bp, Homo sapien
ttcagaattttgactgaaaatgcat

SEQ ID NO: 5897771 - DNA, 25 bp, Homo sapien
tctaaatccttggtgacacctcatg

SEQ ID NO: 5897772 - DNA, 25 bp, Homo sapien
gaagagactgacaaaatggtttcta

SEQ ID NO: 5897773 - DNA, 25 bp, Homo sapien
agactgacaaaatggtttctatgac

SEQ ID NO: 5897774 - DNA, 25 bp, Homo sapien
gctgtaagaaacacctagaaaagaa

SEQ ID NO: 5897775 - DNA, 25 bp, Homo sapien
aaataggcagtttaatgtgatttta

SEQ ID NO: 5897776 - DNA, 25 bp, Homo sapien
aaaaaagaagagtcaacatttcagt

SEQ ID NO: 5897777 - DNA, 25 bp, Homo sapien
taatcctagagattcagaattttga

SEQ ID NO: 5897778 - DNA, 25 bp, Homo sapien
taaatccttggtgacacctcatgct

SEQ ID NO: 5897779 - DNA, 25 bp, Homo sapien
gattcagaattttgactgaaaatgc

SEQ ID NO: 5897780 - DNA, 25 bp, Homo sapien
caatattgtttttaagactttcagt

SEQ ID NO: 5897781 - DNA, 25 bp, Homo sapien
aacacacaatattgtttttaagact

SEQ ID NO: 5897782 - DNA, 25 bp, Homo sapien
tattggttaagtgttcaggtgctgt

SEQ ID NO: 5897783 - DNA, 25 bp, Homo sapien
gtttttaagactttcagtttgataa

SEQ ID NO: 5897784 - DNA, 25 bp, Homo sapien
atgtgtctcccagaactattttggg

SEQ ID NO: 5897785 - DNA, 25 bp, Homo sapien
ctcagcagggtggttactggacaca

SEQ ID NO: 5897786 - DNA, 25 bp, Homo sapien
ccatgcctcagcagggtggttactg

SEQ ID NO: 5897787 - DNA, 25 bp, Homo sapien
ctttgtacccgcccagagcctccta

SEQ ID NO: 5897788 - DNA, 25 bp, Homo sapien
gatggagtgcctttgtacccgccca

SEQ ID NO: 5897789 - DNA, 25 bp, Homo sapien
aagtggggtgcttcagcctggccaa

SEQ ID NO: 5897790 - DNA, 25 bp, Homo sapien
ggaggccctcgctgaccctgctacc

SEQ ID NO: 5897791 - DNA, 25 bp, Homo sapien
agcctcctacccctcagtattcatg

SEQ ID NO: 5897792 - DNA, 25 bp, Homo sapien
ctgtaaccatgcctcagcagggtgg

SEQ ID NO: 5897793 - DNA, 25 bp, Homo sapien
accgtgcttttgctgaccgctccaa

SEQ ID NO: 5897794 - DNA, 25 bp, Homo sapien
ccgggagaaagatgtttacatttta

SEQ ID NO: 5897795 - DNA, 25 bp, Homo sapien
gtctcccagaactattttgggggcc

SEQ ID NO: 5897796 - DNA, 25 bp, Homo sapien
ggacctgtggcgtccatgtctggac

SEQ ID NO: 5897797 - DNA, 25 bp, Homo sapien
ggccttctctaggccctggctgctt

SEQ ID NO: 5897798 - DNA, 25 bp, Homo sapien
ctgatggagtgcctttgtacccgcc

SEQ ID NO: 5897799 - DNA, 25 bp, Homo sapien
tcctacccctcagtattcatgaggt

SEQ ID NO: 5897800 - DNA, 25 bp, Homo sapien
aacaggtggccccgggagaaagatg

SEQ ID NO: 5897801 - DNA, 25 bp, Homo sapien
atagaactaaagccaacccactggc

SEQ ID NO: 5897802 - DNA, 25 bp, Homo sapien
gcacccacactggtgagaagccatt

SEQ ID NO: 5897803 - DNA, 25 bp, Homo sapien
cttccagccttggtccggggacctg

SEQ ID NO: 5897804 - DNA, 25 bp, Homo sapien
tcagggccacgtccgcacccacact

SEQ ID NO: 5897805 - DNA, 25 bp, Homo sapien
cctgtggaaaggccttctctaggcc

SEQ ID NO: 5897806 - DNA, 25 bp, Homo sapien
agcctgggcgctctgaagatgcaca

SEQ ID NO: 5897807 - DNA, 25 bp, Homo sapien
gcccctgggcctgggcaactgtttc

SEQ ID NO: 5897808 - DNA, 25 bp, Homo sapien
tgcttcagggccacgtccgcaccca

SEQ ID NO: 5897809 - DNA, 25 bp, Homo sapien
cgctcagggaccccacttccctacc

SEQ ID NO: 5897810 - DNA, 25 bp, Homo sapien
atttgtctggtgacacctgtttcac

SEQ ID NO: 5897811 - DNA, 25 bp, Homo sapien
caggtggccccgggagaaagatgtt

SEQ ID NO: 5897812 - DNA, 25 bp, Homo sapien
ctggacacagctgcttcgagccata

SEQ ID NO: 5897813 - DNA, 25 bp, Homo sapien
cccacttccctacctccctcaagga

SEQ ID NO: 5897814 - DNA, 25 bp, Homo sapien
ggctctcttggtggcctttgccgca

SEQ ID NO: 5897815 - DNA, 25 bp, Homo sapien
accagtgccaggcctgtgcccgaac

SEQ ID NO: 5897816 - DNA, 25 bp, Homo sapien
gccaggcctgtgcccgaaccttctc

SEQ ID NO: 5897817 - DNA, 25 bp, Homo sapien
gtccagctgtaaccatgcctcagca

SEQ ID NO: 5897818 - DNA, 25 bp, Homo sapien
tccttgctccacaagcaccaagagt

SEQ ID NO: 5897819 - DNA, 25 bp, Homo sapien
cctggctgcttcagggccacgtccg

SEQ ID NO: 5897820 - DNA, 25 bp, Homo sapien
aactaaagccaacccactggctggg

SEQ ID NO: 5897821 - DNA, 25 bp, Homo sapien
gccaccttctttgaggtacaacaga

SEQ ID NO: 5897822 - DNA, 25 bp, Homo sapien
ccgcccagagcctcctacccctcag

SEQ ID NO: 5897823 - DNA, 25 bp, Homo sapien
tgccttgtgtctgcacgacctgtgg

SEQ ID NO: 5897824 - DNA, 25 bp, Homo sapien
acctgtggcgtccatgtctggacct

SEQ ID NO: 5897825 - DNA, 25 bp, Homo sapien
gtggcctttgccgcaggtggctgat

SEQ ID NO: 5897826 - DNA, 25 bp, Homo sapien
gggcccaacaggtggccccgggaga

SEQ ID NO: 5897827 - DNA, 25 bp, Homo sapien
ctttgaggtacaacagactatgcaa

SEQ ID NO: 5897828 - DNA, 25 bp, Homo sapien
taacaaggagtacctcagcctgggc

SEQ ID NO: 5897829 - DNA, 25 bp, Homo sapien
actggtgagaagccattctcctgct

SEQ ID NO: 5897830 - DNA, 25 bp, Homo sapien
ccaggtgcccctgggcctgggcaac

SEQ ID NO: 5897831 - DNA, 25 bp, Homo sapien
gtttcacagcagtttaactgtctca

SEQ ID NO: 5897832 - DNA, 25 bp, Homo sapien
aagcaccaagagtctggctgctccg

SEQ ID NO: 5897833 - DNA, 25 bp, Homo sapien
agactatgcaatagttcccctcccc

SEQ ID NO: 5897834 - DNA, 25 bp, Homo sapien
ggcctttgccgcaggtggctgatgg

SEQ ID NO: 5897835 - DNA, 25 bp, Homo sapien
cgtgcttttgctgaccgctccaacc

SEQ ID NO: 5897836 - DNA, 25 bp, Homo sapien
cccgaaccttctcccgcatgtcctt

SEQ ID NO: 5897837 - DNA, 25 bp, Homo sapien
gcccccatttgtctggtgacacctg

SEQ ID NO: 5897838 - DNA, 25 bp, Homo sapien
tcggatgtgaagagataccagtgcc

SEQ ID NO: 5897839 - DNA, 25 bp, Homo sapien
gtgagaagccattctcctgctccca

SEQ ID NO: 5897840 - DNA, 25 bp, Homo sapien
tactggacacatgtccaggtgcccc

SEQ ID NO: 5897841 - DNA, 25 bp, Homo sapien
gcagggtggttactggacacatgtc

SEQ ID NO: 5897842 - DNA, 25 bp, Homo sapien
acgtccgcacccacactggtgagaa

SEQ ID NO: 5897843 - DNA, 25 bp, Homo sapien
ccatcctcgctggcatcttcccgga

SEQ ID NO: 5897844 - DNA, 25 bp, Homo sapien
gctgccttgtgtctgcacgacctgt

SEQ ID NO: 5897845 - DNA, 25 bp, Homo sapien
tccaacctgcgtgcccacctccaaa

SEQ ID NO: 5897846 - DNA, 25 bp, Homo sapien
ggagctcaccctcctcctcactgcc

SEQ ID NO: 5897847 - DNA, 25 bp, Homo sapien
gacccttcaggccaccttctttgag

SEQ ID NO: 5897848 - DNA, 25 bp, Homo sapien
acacgctgccttgtgtctgcacgac

SEQ ID NO: 5897849 - DNA, 25 bp, Homo sapien
cttggtggcctttgccgcaggtggc

SEQ ID NO: 5897850 - DNA, 25 bp, Homo sapien
tttgctgaccgctccaacctgcgtg

SEQ ID NO: 5897851 - DNA, 25 bp, Homo sapien
ccgcaggtggctgatggagtgcctt

SEQ ID NO: 5897852 - DNA, 25 bp, Homo sapien
cagccttggtccggggacctgtggc

SEQ ID NO: 5897853 - DNA, 25 bp, Homo sapien
tgctacctccccatcctcgctggca

SEQ ID NO: 5897854 - DNA, 25 bp, Homo sapien
gtctggtgacacctgtttcacagca

SEQ ID NO: 5897855 - DNA, 25 bp, Homo sapien
ctgcacgacctgtggaaaggccttc

SEQ ID NO: 5897856 - DNA, 25 bp, Homo sapien
gcccacctccaaacccactcggatg

SEQ ID NO: 5897857 - DNA, 25 bp, Homo sapien
acaagcaccaagagtctggctgctc

SEQ ID NO: 5897858 - DNA, 25 bp, Homo sapien
acatgtccaggtgcccctgggcctg

SEQ ID NO: 5897859 - DNA, 25 bp, Homo sapien
gggcaactgtttcagcccccgcccc

SEQ ID NO: 5897860 - DNA, 25 bp, Homo sapien
agataccagtgccaggcctgtgccc

SEQ ID NO: 5897861 - DNA, 25 bp, Homo sapien
atcttcccggagctcaccctcctcc

SEQ ID NO: 5897862 - DNA, 25 bp, Homo sapien
ctgggcctgggcaactgtttcagcc

SEQ ID NO: 5897863 - DNA, 25 bp, Homo sapien
gggaagcttgaaccccgctcaggga

SEQ ID NO: 5897864 - DNA, 25 bp, Homo sapien
ctccccatcctcgctggcatcttcc

SEQ ID NO: 5897865 - DNA, 25 bp, Homo sapien
catgtctggacctggttcctgcttg

SEQ ID NO: 5897866 - DNA, 25 bp, Homo sapien
ccgcccccatttgtctggtgacacc

SEQ ID NO: 5897867 - DNA, 25 bp, Homo sapien
ccattctcctgctcccactgcaacc

SEQ ID NO: 5897868 - DNA, 25 bp, Homo sapien
atgtccaggtgcccctgggcctggg

SEQ ID NO: 5897869 - DNA, 25 bp, Homo sapien
tgctccggaggccctcgctgaccct

SEQ ID NO: 5897870 - DNA, 25 bp, Homo sapien
ccaagtggggtgcttcagcctggcc

SEQ ID NO: 5897871 - DNA, 25 bp, Homo sapien
ctgccaggactccttccagccttgg

SEQ ID NO: 5897872 - DNA, 25 bp, Homo sapien
cccgcatgtccttgctccacaagca

SEQ ID NO: 5897873 - DNA, 25 bp, Homo sapien
ccccgcccccatttgtctggtgaca

SEQ ID NO: 5897874 - DNA, 25 bp, Homo sapien
gttactggacacatgtccaggtgcc

SEQ ID NO: 5897875 - DNA, 25 bp, Homo sapien
ctgggcaactgtttcagcccccgcc

SEQ ID NO: 5897876 - DNA, 25 bp, Homo sapien
ccgctccaacctgcgtgcccacctc

SEQ ID NO: 5897877 - DNA, 25 bp, Homo sapien
ccacgtccgcacccacactggtgag

SEQ ID NO: 5897878 - DNA, 25 bp, Homo sapien
gaagatgcacatccgaagccacacg

SEQ ID NO: 5897879 - DNA, 25 bp, Homo sapien
tcagaagggaccatgaataatggcc

SEQ ID NO: 5897880 - DNA, 25 bp, Homo sapien
ccgaagccacacgctgccttgtgtc

SEQ ID NO: 5897881 - DNA, 25 bp, Homo sapien
ggtggccccgggagaaagatgttta

SEQ ID NO: 5897882 - DNA, 25 bp, Homo sapien
ccccgtccagctgtaaccatgcctc

SEQ ID NO: 5897883 - DNA, 25 bp, Homo sapien
tgacacctgtttcacagcagtttaa

SEQ ID NO: 5897884 - DNA, 25 bp, Homo sapien
tttgccgcaggtggctgatggagtg

SEQ ID NO: 5897885 - DNA, 25 bp, Homo sapien
ttcacagcagtttaactgtctcaga

SEQ ID NO: 5897886 - DNA, 25 bp, Homo sapien
ggccacgtccgcacccacactggtg

SEQ ID NO: 5897887 - DNA, 25 bp, Homo sapien
aggccctcgctgaccctgctacctc

SEQ ID NO: 5897888 - DNA, 25 bp, Homo sapien
ccggagctcaccctcctcctcactg

SEQ ID NO: 5897889 - DNA, 25 bp, Homo sapien
tcccactgcaaccgtgcttttgctg

SEQ ID NO: 5897890 - DNA, 25 bp, Homo sapien
cctggttcctgcttggctctcttgg

SEQ ID NO: 5897891 - DNA, 25 bp, Homo sapien
ctcccgcatgtccttgctccacaag

SEQ ID NO: 5897892 - DNA, 25 bp, Homo sapien
ccagctgtaaccatgcctcagcagg

SEQ ID NO: 5897893 - DNA, 25 bp, Homo sapien
gaccatgaataatggccatcacttg

SEQ ID NO: 5897894 - DNA, 25 bp, Homo sapien
ataccagtgccaggcctgtgcccga

SEQ ID NO: 5897895 - DNA, 25 bp, Homo sapien
tggttcctgcttggctctcttggtg

SEQ ID NO: 5897896 - DNA, 25 bp, Homo sapien
ccttgtgtctgcacgacctgtggaa

SEQ ID NO: 5897897 - DNA, 25 bp, Homo sapien
ccacaagcaccaagagtctggctgc

SEQ ID NO: 5897898 - DNA, 25 bp, Homo sapien
tagcctctggacacagctgcttcga

SEQ ID NO: 5897899 - DNA, 25 bp, Homo sapien
cttcaggccaccttctttgaggtac

SEQ ID NO: 5897900 - DNA, 25 bp, Homo sapien
tgtgcccgaaccttctcccgcatgt

SEQ ID NO: 5897901 - DNA, 25 bp, Homo sapien
gtgtctcccagaactattttggggg

SEQ ID NO: 5897902 - DNA, 25 bp, Homo sapien
gccatcacttgttaggggccaagtg

SEQ ID NO: 5897903 - DNA, 25 bp, Homo sapien
gagaaagatgtttacattttaaagg

SEQ ID NO: 5897904 - DNA, 25 bp, Homo sapien
gcgtgcccacctccaaacccactcg

SEQ ID NO: 5897905 - DNA, 25 bp, Homo sapien
gccttggtccggggacctgtggcgt

SEQ ID NO: 5897906 - DNA, 25 bp, Homo sapien
ggtgacacctgtttcacagcagttt

SEQ ID NO: 5897907 - DNA, 25 bp, Homo sapien
ctcccccccaccccgtccagctgta

SEQ ID NO: 5897908 - DNA, 25 bp, Homo sapien
tttaactgtctcagaagggaccatg

SEQ ID NO: 5897909 - DNA, 25 bp, Homo sapien
ctctgaagatgcacatccgaagcca

SEQ ID NO: 5897910 - DNA, 25 bp, Homo sapien
ggacacatgtccaggtgcccctggg

SEQ ID NO: 5897911 - DNA, 25 bp, Homo sapien
tggagtgcctttgtacccgcccaga

SEQ ID NO: 5897912 - DNA, 25 bp, Homo sapien
accctgctacctccccatcctcgct

SEQ ID NO: 5897913 - DNA, 25 bp, Homo sapien
aggtgcccctgggcctgggcaactg

SEQ ID NO: 5897914 - DNA, 25 bp, Homo sapien
agggtggttactggacacatgtcca

SEQ ID NO: 5897915 - DNA, 25 bp, Homo sapien
tcctcactgccaggactccttccag

SEQ ID NO: 5897916 - DNA, 25 bp, Homo sapien
gcaccaagagtctggctgctccgga

SEQ ID NO: 5897917 - DNA, 25 bp, Homo sapien
tctggacctggttcctgcttggctc

SEQ ID NO: 5897918 - DNA, 25 bp, Homo sapien
ggactccttccagccttggtccggg

SEQ ID NO: 5897919 - DNA, 25 bp, Homo sapien
ggtacaacagactatgcaatagttc

SEQ ID NO: 5897920 - DNA, 25 bp, Homo sapien
atgaggtgtagcctctggacacagc

SEQ ID NO: 5897921 - DNA, 25 bp, Homo sapien
cagtgccaggcctgtgcccgaacct

SEQ ID NO: 5897922 - DNA, 25 bp, Homo sapien
gctggcatcttcccggagctcaccc

SEQ ID NO: 5897923 - DNA, 25 bp, Homo sapien
tgcccgaaccttctcccgcatgtcc

SEQ ID NO: 5897924 - DNA, 25 bp, Homo sapien
cttgaaccccgctcagggaccccac

SEQ ID NO: 5897925 - DNA, 25 bp, Homo sapien
gaagagataccagtgccaggcctgt

SEQ ID NO: 5897926 - DNA, 25 bp, Homo sapien
agccaacccactggctgggaagctt

SEQ ID NO: 5897927 - DNA, 25 bp, Homo sapien
tacctccctcaaggacccttcaggc

SEQ ID NO: 5897928 - DNA, 25 bp, Homo sapien
actgcaaccgtgcttttgctgaccg

SEQ ID NO: 5897929 - DNA, 25 bp, Homo sapien
ggcgtccatgtctggacctggttcc

SEQ ID NO: 5897930 - DNA, 25 bp, Homo sapien
acccacactggtgagaagccattct

SEQ ID NO: 5897931 - DNA, 25 bp, Homo sapien
ttgtctggtgacacctgtttcacag

SEQ ID NO: 5897932 - DNA, 25 bp, Homo sapien
gcttcgagccatagaactaaagcca

SEQ ID NO: 5897933 - DNA, 25 bp, Homo sapien
tcgctggcatcttcccggagctcac

SEQ ID NO: 5897934 - DNA, 25 bp, Homo sapien
gcaggtggctgatggagtgcctttg

SEQ ID NO: 5897935 - DNA, 25 bp, Homo sapien
acgctgccttgtgtctgcacgacct

SEQ ID NO: 5897936 - DNA, 25 bp, Homo sapien
gtttcagcccccgcccccatttgtc

SEQ ID NO: 5897937 - DNA, 25 bp, Homo sapien
ccagaactattttgggggcccaaca

SEQ ID NO: 5897938 - DNA, 25 bp, Homo sapien
agaagggaccatgaataatggccat

SEQ ID NO: 5897939 - DNA, 25 bp, Homo sapien
cctacctccctcaaggacccttcag

SEQ ID NO: 5897940 - DNA, 25 bp, Homo sapien
gcctttgtacccgcccagagcctcc

SEQ ID NO: 5897941 - DNA, 25 bp, Homo sapien
gaaaggccttctctaggccctggct

SEQ ID NO: 5897942 - DNA, 25 bp, Homo sapien
tccagccttggtccggggacctgtg

SEQ ID NO: 5897943 - DNA, 25 bp, Homo sapien
acctccccatcctcgctggcatctt

SEQ ID NO: 5897944 - DNA, 25 bp, Homo sapien
cctgggcgctctgaagatgcacatc

SEQ ID NO: 5897945 - DNA, 25 bp, Homo sapien
tgcaaccgtgcttttgctgaccgct

SEQ ID NO: 5897946 - DNA, 25 bp, Homo sapien
cactgccaggactccttccagcctt

SEQ ID NO: 5897947 - DNA, 25 bp, Homo sapien
ggatgtgaagagataccagtgccag

SEQ ID NO: 5897948 - DNA, 25 bp, Homo sapien
gcacatccgaagccacacgctgcct

SEQ ID NO: 5897949 - DNA, 25 bp, Homo sapien
agccatagaactaaagccaacccac

SEQ ID NO: 5897950 - DNA, 25 bp, Homo sapien
gaagccattctcctgctcccactgc

SEQ ID NO: 5897951 - DNA, 25 bp, Homo sapien
ctgaccgctccaacctgcgtgccca

SEQ ID NO: 5897952 - DNA, 25 bp, Homo sapien
ccccatcctcgctggcatcttcccg

SEQ ID NO: 5897953 - DNA, 25 bp, Homo sapien
agccattctcctgctcccactgcaa

SEQ ID NO: 5897954 - DNA, 25 bp, Homo sapien
gctcccactgcaaccgtgcttttgc

SEQ ID NO: 5897955 - DNA, 25 bp, Homo sapien
aggtggctgatggagtgcctttgta

SEQ ID NO: 5897956 - DNA, 25 bp, Homo sapien
gcttggctctcttggtggcctttgc

SEQ ID NO: 5897957 - DNA, 25 bp, Homo sapien
ccgcacccacactggtgagaagcca

SEQ ID NO: 5897958 - DNA, 25 bp, Homo sapien
caggcctgtgcccgaaccttctccc

SEQ ID NO: 5897959 - DNA, 25 bp, Homo sapien
gcatcttcccggagctcaccctcct

SEQ ID NO: 5897960 - DNA, 25 bp, Homo sapien
gggagaaagatgtttacattttaaa

SEQ ID NO: 5897961 - DNA, 25 bp, Homo sapien
tacctcagcctgggcgctctgaaga

SEQ ID NO: 5897962 - DNA, 25 bp, Homo sapien
tgctccacaagcaccaagagtctgg

SEQ ID NO: 5897963 - DNA, 25 bp, Homo sapien
tctggctgctccggaggccctcgct

SEQ ID NO: 5897964 - DNA, 25 bp, Homo sapien
tacaacagactatgcaatagttccc

SEQ ID NO: 5897965 - DNA, 25 bp, Homo sapien
ccacacgctgccttgtgtctgcacg

SEQ ID NO: 5897966 - DNA, 25 bp, Homo sapien
ccggaggccctcgctgaccctgcta

SEQ ID NO: 5897967 - DNA, 25 bp, Homo sapien
gtgcccacctccaaacccactcgga

SEQ ID NO: 5897968 - DNA, 25 bp, Homo sapien
cttcagggccacgtccgcacccaca

SEQ ID NO: 5897969 - DNA, 25 bp, Homo sapien
ctccggaggccctcgctgaccctgc

SEQ ID NO: 5897970 - DNA, 25 bp, Homo sapien
tatgcaatagttcccctccccccca

SEQ ID NO: 5897971 - DNA, 25 bp, Homo sapien
tccatgtctggacctggttcctgct

SEQ ID NO: 5897972 - DNA, 25 bp, Homo sapien
ttcagcccccgcccccatttgtctg

SEQ ID NO: 5897973 - DNA, 25 bp, Homo sapien
ggggtgcttcagcctggccaatgtg

SEQ ID NO: 5897974 - DNA, 25 bp, Homo sapien
ctcagtattcatgaggtgtagcctc

SEQ ID NO: 5897975 - DNA, 25 bp, Homo sapien
accaagagtctggctgctccggagg

SEQ ID NO: 5897976 - DNA, 25 bp, Homo sapien
tggccatcacttgttaggggccaag

SEQ ID NO: 5897977 - DNA, 25 bp, Homo sapien
tggaaaggccttctctaggccctgg

SEQ ID NO: 5897978 - DNA, 25 bp, Homo sapien
cctcgctggcatcttcccggagctc

SEQ ID NO: 5897979 - DNA, 25 bp, Homo sapien
aaggccttctctaggccctggctgc

SEQ ID NO: 5897980 - DNA, 25 bp, Homo sapien
gccaatgtgtctcccagaactattt

SEQ ID NO: 5897981 - DNA, 25 bp, Homo sapien
agtctggctgctccggaggccctcg

SEQ ID NO: 5897982 - DNA, 25 bp, Homo sapien
gcacgacctgtggaaaggccttctc

SEQ ID NO: 5897983 - DNA, 25 bp, Homo sapien
tccctcaaggacccttcaggccacc

SEQ ID NO: 5897984 - DNA, 25 bp, Homo sapien
ctgtttcagcccccgcccccatttg

SEQ ID NO: 5897985 - DNA, 25 bp, Homo sapien
ccacctccaaacccactcggatgtg

SEQ ID NO: 5897986 - DNA, 25 bp, Homo sapien
acgacctgtggaaaggccttctcta

SEQ ID NO: 5897987 - DNA, 25 bp, Homo sapien
ggtgtagcctctggacacagctgct

SEQ ID NO: 5897988 - DNA, 25 bp, Homo sapien
cagcagtttaactgtctcagaaggg

SEQ ID NO: 5897989 - DNA, 25 bp, Homo sapien
gtgcctttgtacccgcccagagcct

SEQ ID NO: 5897990 - DNA, 25 bp, Homo sapien
aaccttctcccgcatgtccttgctc

SEQ ID NO: 5897991 - DNA, 25 bp, Homo sapien
ccccatttgtctggtgacacctgtt

SEQ ID NO: 5897992 - DNA, 25 bp, Homo sapien
atgtgaagagataccagtgccaggc

SEQ ID NO: 5897993 - DNA, 25 bp, Homo sapien
ccgtccagctgtaaccatgcctcag

SEQ ID NO: 5897994 - DNA, 25 bp, Homo sapien
gcccaacaggtggccccgggagaaa

SEQ ID NO: 5897995 - DNA, 25 bp, Homo sapien
cttttgctgaccgctccaacctgcg

SEQ ID NO: 5897996 - DNA, 25 bp, Homo sapien
gtgccaggcctgtgcccgaaccttc

SEQ ID NO: 5897997 - DNA, 25 bp, Homo sapien
agggccacgtccgcacccacactgg

SEQ ID NO: 5897998 - DNA, 25 bp, Homo sapien
ccagagcctcctacccctcagtatt

SEQ ID NO: 5897999 - DNA, 25 bp, Homo sapien
gggcctgggcaactgtttcagcccc

SEQ ID NO: 5898000 - DNA, 25 bp, Homo sapien
agagtctggctgctccggaggccct

SEQ ID NO: 5898001 - DNA, 25 bp, Homo sapien
ccctcctcctcactgccaggactcc

SEQ ID NO: 5898002 - DNA, 25 bp, Homo sapien
gtgtctgcacgacctgtggaaaggc

SEQ ID NO: 5898003 - DNA, 25 bp, Homo sapien
ttgaggtacaacagactatgcaata

SEQ ID NO: 5898004 - DNA, 25 bp, Homo sapien
acctgtttcacagcagtttaactgt

SEQ ID NO: 5898005 - DNA, 25 bp, Homo sapien
aacccactggctgggaagcttgaac

SEQ ID NO: 5898006 - DNA, 25 bp, Homo sapien
gttcctgcttggctctcttggtggc

SEQ ID NO: 5898007 - DNA, 25 bp, Homo sapien
tgctgaccgctccaacctgcgtgcc

SEQ ID NO: 5898008 - DNA, 25 bp, Homo sapien
tggttactggacacatgtccaggtg

SEQ ID NO: 5898009 - DNA, 25 bp, Homo sapien
cagcagggtggttactggacacatg

SEQ ID NO: 5898010 - DNA, 25 bp, Homo sapien
caccttctttgaggtacaacagact

SEQ ID NO: 5898011 - DNA, 25 bp, Homo sapien
tggacctggttcctgcttggctctc

SEQ ID NO: 5898012 - DNA, 25 bp, Homo sapien
cccttcaggccaccttctttgaggt

SEQ ID NO: 5898013 - DNA, 25 bp, Homo sapien
cttggtccggggacctgtggcgtcc

SEQ ID NO: 5898014 - DNA, 25 bp, Homo sapien
cgagccatagaactaaagccaaccc

SEQ ID NO: 5898015 - DNA, 25 bp, Homo sapien
tcaaggacccttcaggccaccttct

SEQ ID NO: 5898016 - DNA, 25 bp, Homo sapien
ctggctgggaagcttgaaccccgct

SEQ ID NO: 5898017 - DNA, 25 bp, Homo sapien
caatgtgtctcccagaactattttg

SEQ ID NO: 5898018 - DNA, 25 bp, Homo sapien
tcccggagctcaccctcctcctcac

SEQ ID NO: 5898019 - DNA, 25 bp, Homo sapien
agctcaccctcctcctcactgccag

SEQ ID NO: 5898020 - DNA, 25 bp, Homo sapien
ctgcttggctctcttggtggccttt

SEQ ID NO: 5898021 - DNA, 25 bp, Homo sapien
cgtccatgtctggacctggttcctg

SEQ ID NO: 5898022 - DNA, 25 bp, Homo sapien
ccatttgtctggtgacacctgtttc

SEQ ID NO: 5898023 - DNA, 25 bp, Homo sapien
cagtattcatgaggtgtagcctctg

SEQ ID NO: 5898024 - DNA, 25 bp, Homo sapien
gaccgctccaacctgcgtgcccacc

SEQ ID NO: 5898025 - DNA, 25 bp, Homo sapien
ccaacccactggctgggaagcttga

SEQ ID NO: 5898026 - DNA, 25 bp, Homo sapien
tcagcctggccaatgtgtctcccag

SEQ ID NO: 5898027 - DNA, 25 bp, Homo sapien
acccctcagtattcatgaggtgtag

SEQ ID NO: 5898028 - DNA, 25 bp, Homo sapien
cactggctgggaagcttgaaccccg

SEQ ID NO: 5898029 - DNA, 25 bp, Homo sapien
cgcatgtccttgctccacaagcacc

SEQ ID NO: 5898030 - DNA, 25 bp, Homo sapien
gtggcgtccatgtctggacctggtt

SEQ ID NO: 5898031 - DNA, 25 bp, Homo sapien
ctcttggtggcctttgccgcaggtg

SEQ ID NO: 5898032 - DNA, 25 bp, Homo sapien
tgtccttgctccacaagcaccaaga

SEQ ID NO: 5898033 - DNA, 25 bp, Homo sapien
ctcactgccaggactccttccagcc

SEQ ID NO: 5898034 - DNA, 25 bp, Homo sapien
ctgtttcacagcagtttaactgtct

SEQ ID NO: 5898035 - DNA, 25 bp, Homo sapien
tgcttcagcctggccaatgtgtctc

SEQ ID NO: 5898036 - DNA, 25 bp, Homo sapien
atgaataatggccatcacttgttag

SEQ ID NO: 5898037 - DNA, 25 bp, Homo sapien
ggctgatggagtgcctttgtacccg

SEQ ID NO: 5898038 - DNA, 25 bp, Homo sapien
aaacccactcggatgtgaagagata

SEQ ID NO: 5898039 - DNA, 25 bp, Homo sapien
acatccgaagccacacgctgccttg

SEQ ID NO: 5898040 - DNA, 25 bp, Homo sapien
cttgctccacaagcaccaagagtct

SEQ ID NO: 5898041 - DNA, 25 bp, Homo sapien
ctggacacatgtccaggtgcccctg

SEQ ID NO: 5898042 - DNA, 25 bp, Homo sapien
acccgcccagagcctcctacccctc

SEQ ID NO: 5898043 - DNA, 25 bp, Homo sapien
ggagtacctcagcctgggcgctctg

SEQ ID NO: 5898044 - DNA, 25 bp, Homo sapien
taactgtctcagaagggaccatgaa

SEQ ID NO: 5898045 - DNA, 25 bp, Homo sapien
ccactcggatgtgaagagataccag

SEQ ID NO: 5898046 - DNA, 25 bp, Homo sapien
cctgtgcccgaaccttctcccgcat

SEQ ID NO: 5898047 - DNA, 25 bp, Homo sapien
gcagtttaactgtctcagaagggac

SEQ ID NO: 5898048 - DNA, 25 bp, Homo sapien
ctcaccctcctcctcactgccagga

SEQ ID NO: 5898049 - DNA, 25 bp, Homo sapien
gagaagccattctcctgctcccact

SEQ ID NO: 5898050 - DNA, 25 bp, Homo sapien
cttcagcctggccaatgtgtctccc

SEQ ID NO: 5898051 - DNA, 25 bp, Homo sapien
gagtgcctttgtacccgcccagagc

SEQ ID NO: 5898052 - DNA, 25 bp, Homo sapien
gctgctccggaggccctcgctgacc

SEQ ID NO: 5898053 - DNA, 25 bp, Homo sapien
acctccaaacccactcggatgtgaa

SEQ ID NO: 5898054 - DNA, 25 bp, Homo sapien
agccacacgctgccttgtgtctgca

SEQ ID NO: 5898055 - DNA, 25 bp, Homo sapien
ctacccctcagtattcatgaggtgt

SEQ ID NO: 5898056 - DNA, 25 bp, Homo sapien
agtacctcagcctgggcgctctgaa

SEQ ID NO: 5898057 - DNA, 25 bp, Homo sapien
ctcccagaactattttgggggccca

SEQ ID NO: 5898058 - DNA, 25 bp, Homo sapien
tcgctgaccctgctacctccccatc

SEQ ID NO: 5898059 - DNA, 25 bp, Homo sapien
tgccgcaggtggctgatggagtgcc

SEQ ID NO: 5898060 - DNA, 25 bp, Homo sapien
ctcagggaccccacttccctacctc

SEQ ID NO: 5898061 - DNA, 25 bp, Homo sapien
gccctggctgcttcagggccacgtc

SEQ ID NO: 5898062 - DNA, 25 bp, Homo sapien
cgctctgaagatgcacatccgaagc

SEQ ID NO: 5898063 - DNA, 25 bp, Homo sapien
tggctgcttcagggccacgtccgca

SEQ ID NO: 5898064 - DNA, 25 bp, Homo sapien
gaggtgtagcctctggacacagctg

SEQ ID NO: 5898065 - DNA, 25 bp, Homo sapien
taggggccaagtggggtgcttcagc

SEQ ID NO: 5898066 - DNA, 25 bp, Homo sapien
agctgtaaccatgcctcagcagggt

SEQ ID NO: 5898067 - DNA, 25 bp, Homo sapien
gcctcagcagggtggttactggaca

SEQ ID NO: 5898068 - DNA, 25 bp, Homo sapien
aggacccttcaggccaccttctttg

SEQ ID NO: 5898069 - DNA, 25 bp, Homo sapien
gcctgggcaactgtttcagcccccg

SEQ ID NO: 5898070 - DNA, 25 bp, Homo sapien
actccttccagccttggtccgggga

SEQ ID NO: 5898071 - DNA, 25 bp, Homo sapien
agagcctcctacccctcagtattca

SEQ ID NO: 5898072 - DNA, 25 bp, Homo sapien
ggggacctgtggcgtccatgtctgg

SEQ ID NO: 5898073 - DNA, 25 bp, Homo sapien
gcctctggacacagctgcttcgagc

SEQ ID NO: 5898074 - DNA, 25 bp, Homo sapien
gctgcttcagggccacgtccgcacc

SEQ ID NO: 5898075 - DNA, 25 bp, Homo sapien
gtctgcacgacctgtggaaaggcct

SEQ ID NO: 5898076 - DNA, 25 bp, Homo sapien
gggaccatgaataatggccatcact

SEQ ID NO: 5898077 - DNA, 25 bp, Homo sapien
tgaccctgctacctccccatcctcg

SEQ ID NO: 5898078 - DNA, 25 bp, Homo sapien
gtggctgatggagtgcctttgtacc

SEQ ID NO: 5898079 - DNA, 25 bp, Homo sapien
ctccacaagcaccaagagtctggct

SEQ ID NO: 5898080 - DNA, 25 bp, Homo sapien
gtccaggtgcccctgggcctgggca

SEQ ID NO: 5898081 - DNA, 25 bp, Homo sapien
agctgcttcgagccatagaactaaa

SEQ ID NO: 5898082 - DNA, 25 bp, Homo sapien
cccactggctgggaagcttgaaccc

SEQ ID NO: 5898083 - DNA, 25 bp, Homo sapien
gtccggggacctgtggcgtccatgt

SEQ ID NO: 5898084 - DNA, 25 bp, Homo sapien
tcctgcttggctctcttggtggcct

SEQ ID NO: 5898085 - DNA, 25 bp, Homo sapien
gtaaccatgcctcagcagggtggtt

SEQ ID NO: 5898086 - DNA, 25 bp, Homo sapien
acagactatgcaatagttcccctcc

SEQ ID NO: 5898087 - DNA, 25 bp, Homo sapien
ctgggaagcttgaaccccgctcagg

SEQ ID NO: 5898088 - DNA, 25 bp, Homo sapien
gacctggttcctgcttggctctctt

SEQ ID NO: 5898089 - DNA, 25 bp, Homo sapien
ctggtgacacctgtttcacagcagt

SEQ ID NO: 5898090 - DNA, 25 bp, Homo sapien
ctaggccctggctgcttcagggcca

SEQ ID NO: 5898091 - DNA, 25 bp, Homo sapien
tccttccagccttggtccggggacc

SEQ ID NO: 5898092 - DNA, 25 bp, Homo sapien
actatgcaatagttcccctcccccc

SEQ ID NO: 5898093 - DNA, 25 bp, Homo sapien
ccttctctaggccctggctgcttca

SEQ ID NO: 5898094 - DNA, 25 bp, Homo sapien
ggccaagtggggtgcttcagcctgg

SEQ ID NO: 5898095 - DNA, 25 bp, Homo sapien
aaggagtacctcagcctgggcgctc

SEQ ID NO: 5898096 - DNA, 25 bp, Homo sapien
gtgaagagataccagtgccaggcct

SEQ ID NO: 5898097 - DNA, 25 bp, Homo sapien
tgtctcagaagggaccatgaataat

SEQ ID NO: 5898098 - DNA, 25 bp, Homo sapien
ctccaaacccactcggatgtgaaga

SEQ ID NO: 5898099 - DNA, 25 bp, Homo sapien
gcccccgcccccatttgtctggtga

SEQ ID NO: 5898100 - DNA, 25 bp, Homo sapien
agcctggccaatgtgtctcccagaa

SEQ ID NO: 5898101 - DNA, 25 bp, Homo sapien
tggtccggggacctgtggcgtccat

SEQ ID NO: 5898102 - DNA, 25 bp, Homo sapien
tggcatcttcccggagctcaccctc

SEQ ID NO: 5898103 - DNA, 25 bp, Homo sapien
atccgaagccacacgctgccttgtg

SEQ ID NO: 5898104 - DNA, 25 bp, Homo sapien
caggactccttccagccttggtccg

SEQ ID NO: 5898105 - DNA, 25 bp, Homo sapien
ttctcccgcatgtccttgctccaca

SEQ ID NO: 5898106 - DNA, 25 bp, Homo sapien
gatgtttacattttaaaggtattta

SEQ ID NO: 5898107 - DNA, 25 bp, Homo sapien
acacagctgcttcgagccatagaac

SEQ ID NO: 5898108 - DNA, 25 bp, Homo sapien
agagataccagtgccaggcctgtgc

SEQ ID NO: 5898109 - DNA, 25 bp, Homo sapien
ggctgggaagcttgaaccccgctca

SEQ ID NO: 5898110 - DNA, 25 bp, Homo sapien
gaaagatgtttacattttaaaggta

SEQ ID NO: 5898111 - DNA, 25 bp, Homo sapien
ttgtgtctgcacgacctgtggaaag

SEQ ID NO: 5898112 - DNA, 25 bp, Homo sapien
caagagtctggctgctccggaggcc

SEQ ID NO: 5898113 - DNA, 25 bp, Homo sapien
caccctcctcctcactgccaggact

SEQ ID NO: 5898114 - DNA, 25 bp, Homo sapien
ggaccccacttccctacctccctca

SEQ ID NO: 5898115 - DNA, 25 bp, Homo sapien
cccccaccccgtccagctgtaacca

SEQ ID NO: 5898116 - DNA, 25 bp, Homo sapien
tgcttttgctgaccgctccaacctg

SEQ ID NO: 5898117 - DNA, 25 bp, Homo sapien
aggccaccttctttgaggtacaaca

SEQ ID NO: 5898118 - DNA, 25 bp, Homo sapien
ctctaggccctggctgcttcagggc

SEQ ID NO: 5898119 - DNA, 25 bp, Homo sapien
gtattcatgaggtgtagcctctgga

SEQ ID NO: 5898120 - DNA, 25 bp, Homo sapien
ggtggttactggacacatgtccagg

SEQ ID NO: 5898121 - DNA, 25 bp, Homo sapien
ccctcagtattcatgaggtgtagcc

SEQ ID NO: 5898122 - DNA, 25 bp, Homo sapien
gtggggtgcttcagcctggccaatg

SEQ ID NO: 5898123 - DNA, 25 bp, Homo sapien
caacagactatgcaatagttcccct

SEQ ID NO: 5898124 - DNA, 25 bp, Homo sapien
cttcccggagctcaccctcctcctc

SEQ ID NO: 5898125 - DNA, 25 bp, Homo sapien
tcagcctgggcgctctgaagatgca

SEQ ID NO: 5898126 - DNA, 25 bp, Homo sapien
atcctcgctggcatcttcccggagc

SEQ ID NO: 5898127 - DNA, 25 bp, Homo sapien
tggctgctccggaggccctcgctga

SEQ ID NO: 5898128 - DNA, 25 bp, Homo sapien
tgtggaaaggccttctctaggccct

SEQ ID NO: 5898129 - DNA, 25 bp, Homo sapien
ctcctcctcactgccaggactcctt

SEQ ID NO: 5898130 - DNA, 25 bp, Homo sapien
cctggccaatgtgtctcccagaact

SEQ ID NO: 5898131 - DNA, 25 bp, Homo sapien
ataatggccatcacttgttaggggc

SEQ ID NO: 5898132 - DNA, 25 bp, Homo sapien
gctccaacctgcgtgcccacctcca

SEQ ID NO: 5898133 - DNA, 25 bp, Homo sapien
tggtggcctttgccgcaggtggctg

SEQ ID NO: 5898134 - DNA, 25 bp, Homo sapien
agcttgaaccccgctcagggacccc

SEQ ID NO: 5898135 - DNA, 25 bp, Homo sapien
ctgaagatgcacatccgaagccaca

SEQ ID NO: 5898136 - DNA, 25 bp, Homo sapien
ttgtacccgcccagagcctcctacc

SEQ ID NO: 5898137 - DNA, 25 bp, Homo sapien
gccctcgctgaccctgctacctccc

SEQ ID NO: 5898138 - DNA, 25 bp, Homo sapien
cccaccccgtccagctgtaaccatg

SEQ ID NO: 5898139 - DNA, 25 bp, Homo sapien
gccaggactccttccagccttggtc

SEQ ID NO: 5898140 - DNA, 25 bp, Homo sapien
gaagccacacgctgccttgtgtctg

SEQ ID NO: 5898141 - DNA, 25 bp, Homo sapien
cgaaccttctcccgcatgtccttgc

SEQ ID NO: 5898142 - DNA, 25 bp, Homo sapien
cccgctcagggaccccacttcccta

SEQ ID NO: 5898143 - DNA, 25 bp, Homo sapien
aaccatgcctcagcagggtggttac

SEQ ID NO: 5898144 - DNA, 25 bp, Homo sapien
tggccaatgtgtctcccagaactat

SEQ ID NO: 5898145 - DNA, 25 bp, Homo sapien
acactggtgagaagccattctcctg

SEQ ID NO: 5898146 - DNA, 25 bp, Homo sapien
acacctgtttcacagcagtttaact

SEQ ID NO: 5898147 - DNA, 25 bp, Homo sapien
cctcctacccctcagtattcatgag

SEQ ID NO: 5898148 - DNA, 25 bp, Homo sapien
actgtctcagaagggaccatgaata

SEQ ID NO: 5898149 - DNA, 25 bp, Homo sapien
tggccccgggagaaagatgtttaca

SEQ ID NO: 5898150 - DNA, 25 bp, Homo sapien
ctctcttggtggcctttgccgcagg

SEQ ID NO: 5898151 - DNA, 25 bp, Homo sapien
ccaaacccactcggatgtgaagaga

SEQ ID NO: 5898152 - DNA, 25 bp, Homo sapien
ccttctcccgcatgtccttgctcca

SEQ ID NO: 5898153 - DNA, 25 bp, Homo sapien
caccccgtccagctgtaaccatgcc

SEQ ID NO: 5898154 - DNA, 25 bp, Homo sapien
ttggctctcttggtggcctttgccg

SEQ ID NO: 5898155 - DNA, 25 bp, Homo sapien
ctaaagccaacccactggctgggaa

SEQ ID NO: 5898156 - DNA, 25 bp, Homo sapien
gtacccgcccagagcctcctacccc

SEQ ID NO: 5898157 - DNA, 25 bp, Homo sapien
gtccgcacccacactggtgagaagc

SEQ ID NO: 5898158 - DNA, 25 bp, Homo sapien
gtgcccctgggcctgggcaactgtt

SEQ ID NO: 5898159 - DNA, 25 bp, Homo sapien
ctacctccccatcctcgctggcatc

SEQ ID NO: 5898160 - DNA, 25 bp, Homo sapien
ctctggacacagctgcttcgagcca

SEQ ID NO: 5898161 - DNA, 25 bp, Homo sapien
catgtccttgctccacaagcaccaa

SEQ ID NO: 5898162 - DNA, 25 bp, Homo sapien
gcaactgtttcagcccccgccccca

SEQ ID NO: 5898163 - DNA, 25 bp, Homo sapien
tccctacctccctcaaggacccttc

SEQ ID NO: 5898164 - DNA, 25 bp, Homo sapien
ccaacaggtggccccgggagaaaga

SEQ ID NO: 5898165 - DNA, 25 bp, Homo sapien
tcctgctcccactgcaaccgtgctt

SEQ ID NO: 5898166 - DNA, 25 bp, Homo sapien
tgtagcctctggacacagctgcttc

SEQ ID NO: 5898167 - DNA, 25 bp, Homo sapien
ccacactggtgagaagccattctcc

SEQ ID NO: 5898168 - DNA, 25 bp, Homo sapien
gcccagagcctcctacccctcagta

SEQ ID NO: 5898169 - DNA, 25 bp, Homo sapien
ccttctttgaggtacaacagactat

SEQ ID NO: 5898170 - DNA, 25 bp, Homo sapien
acccactcggatgtgaagagatacc

SEQ ID NO: 5898171 - DNA, 25 bp, Homo sapien
cctcctcactgccaggactccttcc

SEQ ID NO: 5898172 - DNA, 25 bp, Homo sapien
attcatgaggtgtagcctctggaca

SEQ ID NO: 5898173 - DNA, 25 bp, Homo sapien
caaccgtgcttttgctgaccgctcc

SEQ ID NO: 5898174 - DNA, 25 bp, Homo sapien
tcatgaggtgtagcctctggacaca

SEQ ID NO: 5898175 - DNA, 25 bp, Homo sapien
tgggcgctctgaagatgcacatccg

SEQ ID NO: 5898176 - DNA, 25 bp, Homo sapien
gaataatggccatcacttgttaggg

SEQ ID NO: 5898177 - DNA, 25 bp, Homo sapien
aaagccaacccactggctgggaagc

SEQ ID NO: 5898178 - DNA, 25 bp, Homo sapien
ccggggacctgtggcgtccatgtct

SEQ ID NO: 5898179 - DNA, 25 bp, Homo sapien
ctgcttcgagccatagaactaaagc

SEQ ID NO: 5898180 - DNA, 25 bp, Homo sapien
ccctgggcctgggcaactgtttcag

SEQ ID NO: 5898181 - DNA, 25 bp, Homo sapien
agaactaaagccaacccactggctg

SEQ ID NO: 5898182 - DNA, 25 bp, Homo sapien
acagctgcttcgagccatagaacta

SEQ ID NO: 5898183 - DNA, 25 bp, Homo sapien
cctccctcaaggacccttcaggcca

SEQ ID NO: 5898184 - DNA, 25 bp, Homo sapien
ggggccaagtggggtgcttcagcct

SEQ ID NO: 5898185 - DNA, 25 bp, Homo sapien
ccatagaactaaagccaacccactg

SEQ ID NO: 5898186 - DNA, 25 bp, Homo sapien
cctcgctgaccctgctacctcccca

SEQ ID NO: 5898187 - DNA, 25 bp, Homo sapien
ggcctgtgcccgaaccttctcccgc

SEQ ID NO: 5898188 - DNA, 25 bp, Homo sapien
actcggatgtgaagagataccagtg

SEQ ID NO: 5898189 - DNA, 25 bp, Homo sapien
cacagcagtttaactgtctcagaag

SEQ ID NO: 5898190 - DNA, 25 bp, Homo sapien
aatggccatcacttgttaggggcca

SEQ ID NO: 5898191 - DNA, 25 bp, Homo sapien
cctcaaggacccttcaggccacctt

SEQ ID NO: 5898192 - DNA, 25 bp, Homo sapien
tgcaatagttcccctcccccccacc

SEQ ID NO: 5898193 - DNA, 25 bp, Homo sapien
ggacacagctgcttcgagccataga

SEQ ID NO: 5898194 - DNA, 25 bp, Homo sapien
tgtctggacctggttcctgcttggc

SEQ ID NO: 5898195 - DNA, 25 bp, Homo sapien
tctcagaagggaccatgaataatgg

SEQ ID NO: 5898196 - DNA, 25 bp, Homo sapien
atgcctcagcagggtggttactgga

SEQ ID NO: 5898197 - DNA, 25 bp, Homo sapien
agatgcacatccgaagccacacgct

SEQ ID NO: 5898198 - DNA, 25 bp, Homo sapien
cctttgccgcaggtggctgatggag

SEQ ID NO: 5898199 - DNA, 25 bp, Homo sapien
gctgaccctgctacctccccatcct

SEQ ID NO: 5898200 - DNA, 25 bp, Homo sapien
acctgcgtgcccacctccaaaccca

SEQ ID NO: 5898201 - DNA, 25 bp, Homo sapien
acacatgtccaggtgcccctgggcc

SEQ ID NO: 5898202 - DNA, 25 bp, Homo sapien
tcaggccaccttctttgaggtacaa

SEQ ID NO: 5898203 - DNA, 25 bp, Homo sapien
ttctttgaggtacaacagactatgc

SEQ ID NO: 5898204 - DNA, 25 bp, Homo sapien
aagggaccatgaataatggccatca

SEQ ID NO: 5898205 - DNA, 25 bp, Homo sapien
ccactgcaaccgtgcttttgctgac

SEQ ID NO: 5898206 - DNA, 25 bp, Homo sapien
ttctctaggccctggctgcttcagg

SEQ ID NO: 5898207 - DNA, 25 bp, Homo sapien
gaggtacaacagactatgcaatagt

SEQ ID NO: 5898208 - DNA, 25 bp, Homo sapien
cagcccccgcccccatttgtctggt

SEQ ID NO: 5898209 - DNA, 25 bp, Homo sapien
ggtgcttcagcctggccaatgtgtc

SEQ ID NO: 5898210 - DNA, 25 bp, Homo sapien
ctgtggcgtccatgtctggacctgg

SEQ ID NO: 5898211 - DNA, 25 bp, Homo sapien
ctattttgggggcccaacaggtggc

SEQ ID NO: 5898212 - DNA, 25 bp, Homo sapien
gaagcttgaaccccgctcagggacc

SEQ ID NO: 5898213 - DNA, 25 bp, Homo sapien
caacctgcgtgcccacctccaaacc

SEQ ID NO: 5898214 - DNA, 25 bp, Homo sapien
ttcgagccatagaactaaagccaac

SEQ ID NO: 5898215 - DNA, 25 bp, Homo sapien
tggtgagaagccattctcctgctcc

SEQ ID NO: 5898216 - DNA, 25 bp, Homo sapien
ctgcgtgcccacctccaaacccact

SEQ ID NO: 5898217 - DNA, 25 bp, Homo sapien
gttaggggccaagtggggtgcttca

SEQ ID NO: 5898218 - DNA, 25 bp, Homo sapien
cctgctacctccccatcctcgctgg

SEQ ID NO: 5898219 - DNA, 25 bp, Homo sapien
tgaaccccgctcagggaccccactt

SEQ ID NO: 5898220 - DNA, 25 bp, Homo sapien
agtttaactgtctcagaagggacca

SEQ ID NO: 5898221 - DNA, 25 bp, Homo sapien
gacctgtggaaaggccttctctagg

SEQ ID NO: 5898222 - DNA, 25 bp, Homo sapien
tctcctgctcccactgcaaccgtgc

SEQ ID NO: 5898223 - DNA, 25 bp, Homo sapien
attctcctgctcccactgcaaccgt

SEQ ID NO: 5898224 - DNA, 25 bp, Homo sapien
aggccctggctgcttcagggccacg

SEQ ID NO: 5898225 - DNA, 25 bp, Homo sapien
cacttccctacctccctcaaggacc

SEQ ID NO: 5898226 - DNA, 25 bp, Homo sapien
acaaggagtacctcagcctgggcgc

SEQ ID NO: 5898227 - DNA, 25 bp, Homo sapien
atgcacatccgaagccacacgctgc

SEQ ID NO: 5898228 - DNA, 25 bp, Homo sapien
tgtaacaaggagtacctcagcctgg

SEQ ID NO: 5898229 - DNA, 25 bp, Homo sapien
cctcagcctgggcgctctgaagatg

SEQ ID NO: 5898230 - DNA, 25 bp, Homo sapien
ctgctcccactgcaaccgtgctttt

SEQ ID NO: 5898231 - DNA, 25 bp, Homo sapien
ccatgaataatggccatcacttgtt

SEQ ID NO: 5898232 - DNA, 25 bp, Homo sapien
gccccgggagaaagatgtttacatt

SEQ ID NO: 5898233 - DNA, 25 bp, Homo sapien
ggcgctctgaagatgcacatccgaa

SEQ ID NO: 5898234 - DNA, 25 bp, Homo sapien
cctgaagcagccagggcctagagaa

SEQ ID NO: 5898235 - DNA, 25 bp, Homo sapien
tgcggacgtggccctgaagcagcca

SEQ ID NO: 5898236 - DNA, 25 bp, Homo sapien
ttgcatagtctgttgtacctcaaag

SEQ ID NO: 5898237 - DNA, 25 bp, Homo sapien
aggtccagacatggacgccacaggt

SEQ ID NO: 5898238 - DNA, 25 bp, Homo sapien
cacaggtccccggaccaaggctgga

SEQ ID NO: 5898239 - DNA, 25 bp, Homo sapien
atggacgccacaggtccccggacca

SEQ ID NO: 5898240 - DNA, 25 bp, Homo sapien
cagtgggttggctttagttctatgg

SEQ ID NO: 5898241 - DNA, 25 bp, Homo sapien
tattcatggtcccttctgagacagt

SEQ ID NO: 5898242 - DNA, 25 bp, Homo sapien
catccgagtgggtttggaggtgggc

SEQ ID NO: 5898243 - DNA, 25 bp, Homo sapien
caggagaatggcttctcaccagtgt

SEQ ID NO: 5898244 - DNA, 25 bp, Homo sapien
tcagcgagggcctccggagcagcca

SEQ ID NO: 5898245 - DNA, 25 bp, Homo sapien
ttggccaggctgaagcaccccactt

SEQ ID NO: 5898246 - DNA, 25 bp, Homo sapien
gcctttccacaggtcgtgcagacac

SEQ ID NO: 5898247 - DNA, 25 bp, Homo sapien
gagacacattggccaggctgaagca

SEQ ID NO: 5898248 - DNA, 25 bp, Homo sapien
cggggttcaagcttcccagccagtg

SEQ ID NO: 5898249 - DNA, 25 bp, Homo sapien
ggaggctctgggcgggtacaaaggc

SEQ ID NO: 5898250 - DNA, 25 bp, Homo sapien
agtgggtttggaggtgggcacgcag

SEQ ID NO: 5898251 - DNA, 25 bp, Homo sapien
gccctgaagcagccagggcctagag

SEQ ID NO: 5898252 - DNA, 25 bp, Homo sapien
cttctgagacagttaaactgctgtg

SEQ ID NO: 5898253 - DNA, 25 bp, Homo sapien
aaggacatgcgggagaaggttcggg

SEQ ID NO: 5898254 - DNA, 25 bp, Homo sapien
ggccattattcatggtcccttctga

SEQ ID NO: 5898255 - DNA, 25 bp, Homo sapien
cggagcagccagactcttggtgctt

SEQ ID NO: 5898256 - DNA, 25 bp, Homo sapien
gcaaggacatgcgggagaaggttcg

SEQ ID NO: 5898257 - DNA, 25 bp, Homo sapien
ccagacatggacgccacaggtcccc

SEQ ID NO: 5898258 - DNA, 25 bp, Homo sapien
tgggggggaggggaactattgcata

SEQ ID NO: 5898259 - DNA, 25 bp, Homo sapien
acggttgcagtgggagcaggagaat

SEQ ID NO: 5898260 - DNA, 25 bp, Homo sapien
caaggcagcgtgtggcttcggatgt

SEQ ID NO: 5898261 - DNA, 25 bp, Homo sapien
cgcaggttggagcggtcagcaaaag

SEQ ID NO: 5898262 - DNA, 25 bp, Homo sapien
tgtaaacatctttctcccggggcca

SEQ ID NO: 5898263 - DNA, 25 bp, Homo sapien
gacacattggccaggctgaagcacc

SEQ ID NO: 5898264 - DNA, 25 bp, Homo sapien
gagccaagcaggaaccaggtccaga

SEQ ID NO: 5898265 - DNA, 25 bp, Homo sapien
cacctgcggcaaaggccaccaagag

SEQ ID NO: 5898266 - DNA, 25 bp, Homo sapien
gccacaggtccccggaccaaggctg

SEQ ID NO: 5898267 - DNA, 25 bp, Homo sapien
tgaatactgaggggtaggaggctct

SEQ ID NO: 5898268 - DNA, 25 bp, Homo sapien
ggcctccggagcagccagactcttg

SEQ ID NO: 5898269 - DNA, 25 bp, Homo sapien
tccggagcagccagactcttggtgc

SEQ ID NO: 5898270 - DNA, 25 bp, Homo sapien
gaggctacacctcatgaatactgag

SEQ ID NO: 5898271 - DNA, 25 bp, Homo sapien
ctgtgaaacaggtgtcaccagacaa

SEQ ID NO: 5898272 - DNA, 25 bp, Homo sapien
gcctgaagggtccttgagggaggta

SEQ ID NO: 5898273 - DNA, 25 bp, Homo sapien
tctcttcacatccgagtgggtttgg

SEQ ID NO: 5898274 - DNA, 25 bp, Homo sapien
ttaaactgctgtgaaacaggtgtca

SEQ ID NO: 5898275 - DNA, 25 bp, Homo sapien
ggacatgcgggagaaggttcgggca

SEQ ID NO: 5898276 - DNA, 25 bp, Homo sapien
acaggcctggcactggtatctcttc

SEQ ID NO: 5898277 - DNA, 25 bp, Homo sapien
ggagcggtcagcaaaagcacggttg

SEQ ID NO: 5898278 - DNA, 25 bp, Homo sapien
tggagcaaggacatgcgggagaagg

SEQ ID NO: 5898279 - DNA, 25 bp, Homo sapien
gagcaaggacatgcgggagaaggtt

SEQ ID NO: 5898280 - DNA, 25 bp, Homo sapien
gtgaaacaggtgtcaccagacaaat

SEQ ID NO: 5898281 - DNA, 25 bp, Homo sapien
tagggaagtggggtccctgagcggg

SEQ ID NO: 5898282 - DNA, 25 bp, Homo sapien
tatggctcgaagcagctgtgtccag

SEQ ID NO: 5898283 - DNA, 25 bp, Homo sapien
gcaaaagcacggttgcagtgggagc

SEQ ID NO: 5898284 - DNA, 25 bp, Homo sapien
gaagggtccttgagggaggtaggga

SEQ ID NO: 5898285 - DNA, 25 bp, Homo sapien
tgtggcttcggatgtgcatcttcag

SEQ ID NO: 5898286 - DNA, 25 bp, Homo sapien
ctgaaacagttgcccaggcccaggg

SEQ ID NO: 5898287 - DNA, 25 bp, Homo sapien
aggatggggaggtagcagggtcagc

SEQ ID NO: 5898288 - DNA, 25 bp, Homo sapien
gctgaagcaccccacttggccccta

SEQ ID NO: 5898289 - DNA, 25 bp, Homo sapien
tgttgtacctcaaagaaggtggcct

SEQ ID NO: 5898290 - DNA, 25 bp, Homo sapien
aaactgctgtgaaacaggtgtcacc

SEQ ID NO: 5898291 - DNA, 25 bp, Homo sapien
gacgtggccctgaagcagccagggc

SEQ ID NO: 5898292 - DNA, 25 bp, Homo sapien
tcttggtgcttgtggagcaaggaca

SEQ ID NO: 5898293 - DNA, 25 bp, Homo sapien
tgttgggcccccaaaatagttctgg

SEQ ID NO: 5898294 - DNA, 25 bp, Homo sapien
tacaaaggcactccatcagccacct

SEQ ID NO: 5898295 - DNA, 25 bp, Homo sapien
gagcgcccaggctgaggtactcctt

SEQ ID NO: 5898296 - DNA, 25 bp, Homo sapien
gatgccagcgaggatggggaggtag

SEQ ID NO: 5898297 - DNA, 25 bp, Homo sapien
tgggcacgcaggttggagcggtcag

SEQ ID NO: 5898298 - DNA, 25 bp, Homo sapien
cctttaaaatgtaaacatctttctc

SEQ ID NO: 5898299 - DNA, 25 bp, Homo sapien
ggaaggagtcctggcagtgaggagg

SEQ ID NO: 5898300 - DNA, 25 bp, Homo sapien
agcaggaaccaggtccagacatgga

SEQ ID NO: 5898301 - DNA, 25 bp, Homo sapien
taaacatctttctcccggggccacc

SEQ ID NO: 5898302 - DNA, 25 bp, Homo sapien
gcctggcactggtatctcttcacat

SEQ ID NO: 5898303 - DNA, 25 bp, Homo sapien
caaaatagttctgggagacacattg

SEQ ID NO: 5898304 - DNA, 25 bp, Homo sapien
tgcttgtggagcaaggacatgcggg

SEQ ID NO: 5898305 - DNA, 25 bp, Homo sapien
ggtgcttgtggagcaaggacatgcg

SEQ ID NO: 5898306 - DNA, 25 bp, Homo sapien
gaccaaggctggaaggagtcctggc

SEQ ID NO: 5898307 - DNA, 25 bp, Homo sapien
ggccaggctgaagcaccccacttgg

SEQ ID NO: 5898308 - DNA, 25 bp, Homo sapien
tttggaggtgggcacgcaggttgga

SEQ ID NO: 5898309 - DNA, 25 bp, Homo sapien
ggaggagggtgagctccgggaagat

SEQ ID NO: 5898310 - DNA, 25 bp, Homo sapien
agggtcagcgagggcctccggagca

SEQ ID NO: 5898311 - DNA, 25 bp, Homo sapien
gcagtgggagcaggagaatggcttc

SEQ ID NO: 5898312 - DNA, 25 bp, Homo sapien
gggcacaggcctggcactggtatct

SEQ ID NO: 5898313 - DNA, 25 bp, Homo sapien
catcttcagagcgcccaggctgagg

SEQ ID NO: 5898314 - DNA, 25 bp, Homo sapien
ggtccccggaccaaggctggaagga

SEQ ID NO: 5898315 - DNA, 25 bp, Homo sapien
cagtgaggaggagggtgagctccgg

SEQ ID NO: 5898316 - DNA, 25 bp, Homo sapien
ttgtacctcaaagaaggtggcctga

SEQ ID NO: 5898317 - DNA, 25 bp, Homo sapien
tttaaaatgtaaacatctttctccc

SEQ ID NO: 5898318 - DNA, 25 bp, Homo sapien
gcttcggatgtgcatcttcagagcg

SEQ ID NO: 5898319 - DNA, 25 bp, Homo sapien
gtacctcaaagaaggtggcctgaag

SEQ ID NO: 5898320 - DNA, 25 bp, Homo sapien
ccaggctgaagcaccccacttggcc

SEQ ID NO: 5898321 - DNA, 25 bp, Homo sapien
ttgcagtgggagcaggagaatggct

SEQ ID NO: 5898322 - DNA, 25 bp, Homo sapien
gcagggtcagcgagggcctccggag

SEQ ID NO: 5898323 - DNA, 25 bp, Homo sapien
catggtcccttctgagacagttaaa

SEQ ID NO: 5898324 - DNA, 25 bp, Homo sapien
accagacaaatgggggcgggggctg

SEQ ID NO: 5898325 - DNA, 25 bp, Homo sapien
agcggtcagcaaaagcacggttgca

SEQ ID NO: 5898326 - DNA, 25 bp, Homo sapien
caggtccccggaccaaggctggaag

SEQ ID NO: 5898327 - DNA, 25 bp, Homo sapien
caggttggagcggtcagcaaaagca

SEQ ID NO: 5898328 - DNA, 25 bp, Homo sapien
aaaagcacggttgcagtgggagcag

SEQ ID NO: 5898329 - DNA, 25 bp, Homo sapien
aaggcactccatcagccacctgcgg

SEQ ID NO: 5898330 - DNA, 25 bp, Homo sapien
tgtccagtaaccaccctgctgaggc

SEQ ID NO: 5898331 - DNA, 25 bp, Homo sapien
gcagccagggcctagagaaggcctt

SEQ ID NO: 5898332 - DNA, 25 bp, Homo sapien
gtaaccaccctgctgaggcatggtt

SEQ ID NO: 5898333 - DNA, 25 bp, Homo sapien
tcttcacatccgagtgggtttggag

SEQ ID NO: 5898334 - DNA, 25 bp, Homo sapien
ggcctagagaaggcctttccacagg

SEQ ID NO: 5898335 - DNA, 25 bp, Homo sapien
tcgggcacaggcctggcactggtat

SEQ ID NO: 5898336 - DNA, 25 bp, Homo sapien
gagaaggttcgggcacaggcctggc

SEQ ID NO: 5898337 - DNA, 25 bp, Homo sapien
gtgggttggctttagttctatggct

SEQ ID NO: 5898338 - DNA, 25 bp, Homo sapien
ggcccaggggcacctggacatgtgt

SEQ ID NO: 5898339 - DNA, 25 bp, Homo sapien
gggttcaagcttcccagccagtggg

SEQ ID NO: 5898340 - DNA, 25 bp, Homo sapien
aagagagccaagcaggaaccaggtc

SEQ ID NO: 5898341 - DNA, 25 bp, Homo sapien
aggctctgggcgggtacaaaggcac

SEQ ID NO: 5898342 - DNA, 25 bp, Homo sapien
caccaagagagccaagcaggaacca

SEQ ID NO: 5898343 - DNA, 25 bp, Homo sapien
agtgtgggtgcggacgtggccctga

SEQ ID NO: 5898344 - DNA, 25 bp, Homo sapien
tctgagacagttaaactgctgtgaa

SEQ ID NO: 5898345 - DNA, 25 bp, Homo sapien
ctttccacaggtcgtgcagacacaa

SEQ ID NO: 5898346 - DNA, 25 bp, Homo sapien
ggacgccacaggtccccggaccaag

SEQ ID NO: 5898347 - DNA, 25 bp, Homo sapien
catctttctcccggggccacctgtt

SEQ ID NO: 5898348 - DNA, 25 bp, Homo sapien
cattggccaggctgaagcaccccac

SEQ ID NO: 5898349 - DNA, 25 bp, Homo sapien
gcccctaacaagtgatggccattat

SEQ ID NO: 5898350 - DNA, 25 bp, Homo sapien
tgtcaccagacaaatgggggcgggg

SEQ ID NO: 5898351 - DNA, 25 bp, Homo sapien
cccccaaaatagttctgggagacac

SEQ ID NO: 5898352 - DNA, 25 bp, Homo sapien
agtcctggcagtgaggaggagggtg

SEQ ID NO: 5898353 - DNA, 25 bp, Homo sapien
agacatggacgccacaggtccccgg

SEQ ID NO: 5898354 - DNA, 25 bp, Homo sapien
ggttggagcggtcagcaaaagcacg

SEQ ID NO: 5898355 - DNA, 25 bp, Homo sapien
tgagacagttaaactgctgtgaaac

SEQ ID NO: 5898356 - DNA, 25 bp, Homo sapien
tggcctgaagggtccttgagggagg

SEQ ID NO: 5898357 - DNA, 25 bp, Homo sapien
cgaggatggggaggtagcagggtca

SEQ ID NO: 5898358 - DNA, 25 bp, Homo sapien
tccccggaccaaggctggaaggagt

SEQ ID NO: 5898359 - DNA, 25 bp, Homo sapien
gcttctcaccagtgtgggtgcggac

SEQ ID NO: 5898360 - DNA, 25 bp, Homo sapien
ggggcacctggacatgtgtccagta

SEQ ID NO: 5898361 - DNA, 25 bp, Homo sapien
ggtaggaggctctgggcgggtacaa

SEQ ID NO: 5898362 - DNA, 25 bp, Homo sapien
atggccattattcatggtcccttct

SEQ ID NO: 5898363 - DNA, 25 bp, Homo sapien
tgctgaggcatggttacagctggac

SEQ ID NO: 5898364 - DNA, 25 bp, Homo sapien
taaaatgtaaacatctttctcccgg

SEQ ID NO: 5898365 - DNA, 25 bp, Homo sapien
tgggtgcggacgtggccctgaagca

SEQ ID NO: 5898366 - DNA, 25 bp, Homo sapien
ctaacaagtgatggccattattcat

SEQ ID NO: 5898367 - DNA, 25 bp, Homo sapien
atcagccacctgcggcaaaggccac

SEQ ID NO: 5898368 - DNA, 25 bp, Homo sapien
tcttcagagcgcccaggctgaggta

SEQ ID NO: 5898369 - DNA, 25 bp, Homo sapien
tggcccctaacaagtgatggccatt

SEQ ID NO: 5898370 - DNA, 25 bp, Homo sapien
cacctggacatgtgtccagtaacca

SEQ ID NO: 5898371 - DNA, 25 bp, Homo sapien
agggcctccggagcagccagactct

SEQ ID NO: 5898372 - DNA, 25 bp, Homo sapien
gctcgaagcagctgtgtccagaggc

SEQ ID NO: 5898373 - DNA, 25 bp, Homo sapien
caaatgggggcgggggctgaaacag

SEQ ID NO: 5898374 - DNA, 25 bp, Homo sapien
ggtgggggggaggggaactattgca

SEQ ID NO: 5898375 - DNA, 25 bp, Homo sapien
cctggacatgtgtccagtaaccacc

SEQ ID NO: 5898376 - DNA, 25 bp, Homo sapien
cacgcaggttggagcggtcagcaaa

SEQ ID NO: 5898377 - DNA, 25 bp, Homo sapien
tccagtaaccaccctgctgaggcat

SEQ ID NO: 5898378 - DNA, 25 bp, Homo sapien
tccttgagggaggtagggaagtggg

SEQ ID NO: 5898379 - DNA, 25 bp, Homo sapien
cggtcagcaaaagcacggttgcagt

SEQ ID NO: 5898380 - DNA, 25 bp, Homo sapien
ctacacctcatgaatactgaggggt

SEQ ID NO: 5898381 - DNA, 25 bp, Homo sapien
ccagggcctagagaaggcctttcca

SEQ ID NO: 5898382 - DNA, 25 bp, Homo sapien
aggcctggcactggtatctcttcac

SEQ ID NO: 5898383 - DNA, 25 bp, Homo sapien
gcgcccaggctgaggtactccttgt

SEQ ID NO: 5898384 - DNA, 25 bp, Homo sapien
ggaagatgccagcgaggatggggag

SEQ ID NO: 5898385 - DNA, 25 bp, Homo sapien
tggctttagttctatggctcgaagc

SEQ ID NO: 5898386 - DNA, 25 bp, Homo sapien
caagcaggaaccaggtccagacatg

SEQ ID NO: 5898387 - DNA, 25 bp, Homo sapien
ccagactcttggtgcttgtggagca

SEQ ID NO: 5898388 - DNA, 25 bp, Homo sapien
aggggaactattgcatagtctgttg

SEQ ID NO: 5898389 - DNA, 25 bp, Homo sapien
aatggcttctcaccagtgtgggtgc

SEQ ID NO: 5898390 - DNA, 25 bp, Homo sapien
ttcatggtcccttctgagacagtta

SEQ ID NO: 5898391 - DNA, 25 bp, Homo sapien
ctgaagggtccttgagggaggtagg

SEQ ID NO: 5898392 - DNA, 25 bp, Homo sapien
cgggggctgaaacagttgcccaggc

SEQ ID NO: 5898393 - DNA, 25 bp, Homo sapien
tggcttctcaccagtgtgggtgcgg

SEQ ID NO: 5898394 - DNA, 25 bp, Homo sapien
agtctgttgtacctcaaagaaggtg

SEQ ID NO: 5898395 - DNA, 25 bp, Homo sapien
acacctcatgaatactgaggggtag

SEQ ID NO: 5898396 - DNA, 25 bp, Homo sapien
agcagctgtgtccagaggctacacc

SEQ ID NO: 5898397 - DNA, 25 bp, Homo sapien
ctggcactggtatctcttcacatcc

SEQ ID NO: 5898398 - DNA, 25 bp, Homo sapien
tgatggccattattcatggtccctt

SEQ ID NO: 5898399 - DNA, 25 bp, Homo sapien
agcggggttcaagcttcccagccag

SEQ ID NO: 5898400 - DNA, 25 bp, Homo sapien
tactgaggggtaggaggctctgggc

SEQ ID NO: 5898401 - DNA, 25 bp, Homo sapien
agccagactcttggtgcttgtggag

SEQ ID NO: 5898402 - DNA, 25 bp, Homo sapien
ccaggctgaggtactccttgttaca

SEQ ID NO: 5898403 - DNA, 25 bp, Homo sapien
acctcatgaatactgaggggtagga

SEQ ID NO: 5898404 - DNA, 25 bp, Homo sapien
atgcgggagaaggttcgggcacagg

SEQ ID NO: 5898405 - DNA, 25 bp, Homo sapien
tgctgtgaaacaggtgtcaccagac

SEQ ID NO: 5898406 - DNA, 25 bp, Homo sapien
agactcttggtgcttgtggagcaag

SEQ ID NO: 5898407 - DNA, 25 bp, Homo sapien
tctcccggggccacctgttgggccc

SEQ ID NO: 5898408 - DNA, 25 bp, Homo sapien
gctttagttctatggctcgaagcag

SEQ ID NO: 5898409 - DNA, 25 bp, Homo sapien
cagccagtgggttggctttagttct

SEQ ID NO: 5898410 - DNA, 25 bp, Homo sapien
gctctgggcgggtacaaaggcactc

SEQ ID NO: 5898411 - DNA, 25 bp, Homo sapien
tacctttaaaatgtaaacatctttc

SEQ ID NO: 5898412 - DNA, 25 bp, Homo sapien
caggaaccaggtccagacatggacg

SEQ ID NO: 5898413 - DNA, 25 bp, Homo sapien
ggagaatggcttctcaccagtgtgg

SEQ ID NO: 5898414 - DNA, 25 bp, Homo sapien
ggtgcggacgtggccctgaagcagc

SEQ ID NO: 5898415 - DNA, 25 bp, Homo sapien
ggcgggtacaaaggcactccatcag

SEQ ID NO: 5898416 - DNA, 25 bp, Homo sapien
aggttcgggcacaggcctggcactg

SEQ ID NO: 5898417 - DNA, 25 bp, Homo sapien
aaggagtcctggcagtgaggaggag

SEQ ID NO: 5898418 - DNA, 25 bp, Homo sapien
gaggtgggcacgcaggttggagcgg

SEQ ID NO: 5898419 - DNA, 25 bp, Homo sapien
tggggaggtagcagggtcagcgagg

SEQ ID NO: 5898420 - DNA, 25 bp, Homo sapien
tctgttgtacctcaaagaaggtggc

SEQ ID NO: 5898421 - DNA, 25 bp, Homo sapien
tccagaggctacacctcatgaatac

SEQ ID NO: 5898422 - DNA, 25 bp, Homo sapien
ttcggatgtgcatcttcagagcgcc

SEQ ID NO: 5898423 - DNA, 25 bp, Homo sapien
ctcaccagtgtgggtgcggacgtgg

SEQ ID NO: 5898424 - DNA, 25 bp, Homo sapien
gatggggaggtagcagggtcagcga

SEQ ID NO: 5898425 - DNA, 25 bp, Homo sapien
aggcctttccacaggtcgtgcagac

SEQ ID NO: 5898426 - DNA, 25 bp, Homo sapien
acctcaaagaaggtggcctgaaggg

SEQ ID NO: 5898427 - DNA, 25 bp, Homo sapien
gaaacagttgcccaggcccaggggc

SEQ ID NO: 5898428 - DNA, 25 bp, Homo sapien
aaccaccctgctgaggcatggttac

SEQ ID NO: 5898429 - DNA, 25 bp, Homo sapien
tgcagacacaaggcagcgtgtggct

SEQ ID NO: 5898430 - DNA, 25 bp, Homo sapien
gcccaggctgaggtactccttgtta

SEQ ID NO: 5898431 - DNA, 25 bp, Homo sapien
gggttggctttagttctatggctcg

SEQ ID NO: 5898432 - DNA, 25 bp, Homo sapien
gagggtgagctccgggaagatgcca

SEQ ID NO: 5898433 - DNA, 25 bp, Homo sapien
agttaaactgctgtgaaacaggtgt

SEQ ID NO: 5898434 - DNA, 25 bp, Homo sapien
aaaggccaccaagagagccaagcag

SEQ ID NO: 5898435 - DNA, 25 bp, Homo sapien
ggtatctcttcacatccgagtgggt

SEQ ID NO: 5898436 - DNA, 25 bp, Homo sapien
cgagtgggtttggaggtgggcacgc

SEQ ID NO: 5898437 - DNA, 25 bp, Homo sapien
gaggcatggttacagctggacgggg

SEQ ID NO: 5898438 - DNA, 25 bp, Homo sapien
tggtcccttctgagacagttaaact

SEQ ID NO: 5898439 - DNA, 25 bp, Homo sapien
ggtgtcaccagacaaatgggggcgg

SEQ ID NO: 5898440 - DNA, 25 bp, Homo sapien
tctgggcgggtacaaaggcactcca

SEQ ID NO: 5898441 - DNA, 25 bp, Homo sapien
gccacctgcggcaaaggccaccaag

SEQ ID NO: 5898442 - DNA, 25 bp, Homo sapien
gccagtgggttggctttagttctat

SEQ ID NO: 5898443 - DNA, 25 bp, Homo sapien
cacttggcccctaacaagtgatggc

SEQ ID NO: 5898444 - DNA, 25 bp, Homo sapien
aagcacggttgcagtgggagcagga

SEQ ID NO: 5898445 - DNA, 25 bp, Homo sapien
agcaggagaatggcttctcaccagt

SEQ ID NO: 5898446 - DNA, 25 bp, Homo sapien
caagtgatggccattattcatggtc

SEQ ID NO: 5898447 - DNA, 25 bp, Homo sapien
cccagccagtgggttggctttagtt

SEQ ID NO: 5898448 - DNA, 25 bp, Homo sapien
agttctgggagacacattggccagg

SEQ ID NO: 5898449 - DNA, 25 bp, Homo sapien
ggtggcctgaagggtccttgaggga

SEQ ID NO: 5898450 - DNA, 25 bp, Homo sapien
ggtcagcgagggcctccggagcagc

SEQ ID NO: 5898451 - DNA, 25 bp, Homo sapien
ggaaccaggtccagacatggacgcc

SEQ ID NO: 5898452 - DNA, 25 bp, Homo sapien
caccagtgtgggtgcggacgtggcc

SEQ ID NO: 5898453 - DNA, 25 bp, Homo sapien
ttggagcggtcagcaaaagcacggt

SEQ ID NO: 5898454 - DNA, 25 bp, Homo sapien
cagaggctacacctcatgaatactg

SEQ ID NO: 5898455 - DNA, 25 bp, Homo sapien
caaaggcactccatcagccacctgc

SEQ ID NO: 5898456 - DNA, 25 bp, Homo sapien
gacaaatgggggcgggggctgaaac

SEQ ID NO: 5898457 - DNA, 25 bp, Homo sapien
ggcagtgaggaggagggtgagctcc

SEQ ID NO: 5898458 - DNA, 25 bp, Homo sapien
ggggaggggaactattgcatagtct

SEQ ID NO: 5898459 - DNA, 25 bp, Homo sapien
ggggctgaaacagttgcccaggccc

SEQ ID NO: 5898460 - DNA, 25 bp, Homo sapien
gggagacacattggccaggctgaag

SEQ ID NO: 5898461 - DNA, 25 bp, Homo sapien
gagagccaagcaggaaccaggtcca

SEQ ID NO: 5898462 - DNA, 25 bp, Homo sapien
ggggcgggggctgaaacagttgccc

SEQ ID NO: 5898463 - DNA, 25 bp, Homo sapien
aggccaccaagagagccaagcagga

SEQ ID NO: 5898464 - DNA, 25 bp, Homo sapien
gcacaggcctggcactggtatctct

SEQ ID NO: 5898465 - DNA, 25 bp, Homo sapien
cctgctgaggcatggttacagctgg

SEQ ID NO: 5898466 - DNA, 25 bp, Homo sapien
ggagcaggagaatggcttctcacca

SEQ ID NO: 5898467 - DNA, 25 bp, Homo sapien
cacaaggcagcgtgtggcttcggat

SEQ ID NO: 5898468 - DNA, 25 bp, Homo sapien
aggtcgtgcagacacaaggcagcgt

SEQ ID NO: 5898469 - DNA, 25 bp, Homo sapien
ctgaggcatggttacagctggacgg

SEQ ID NO: 5898470 - DNA, 25 bp, Homo sapien
gacacaaggcagcgtgtggcttcgg

SEQ ID NO: 5898471 - DNA, 25 bp, Homo sapien
actcttggtgcttgtggagcaagga

SEQ ID NO: 5898472 - DNA, 25 bp, Homo sapien
tctatggctcgaagcagctgtgtcc

SEQ ID NO: 5898473 - DNA, 25 bp, Homo sapien
aaccaggtccagacatggacgccac

SEQ ID NO: 5898474 - DNA, 25 bp, Homo sapien
cccaggcccaggggcacctggacat

SEQ ID NO: 5898475 - DNA, 25 bp, Homo sapien
gttcaagcttcccagccagtgggtt

SEQ ID NO: 5898476 - DNA, 25 bp, Homo sapien
atagtctgttgtacctcaaagaagg

SEQ ID NO: 5898477 - DNA, 25 bp, Homo sapien
cgggtacaaaggcactccatcagcc

SEQ ID NO: 5898478 - DNA, 25 bp, Homo sapien
tgtggagcaaggacatgcgggagaa

SEQ ID NO: 5898479 - DNA, 25 bp, Homo sapien
ggtagggaagtggggtccctgagcg

SEQ ID NO: 5898480 - DNA, 25 bp, Homo sapien
agaatggcttctcaccagtgtgggt

SEQ ID NO: 5898481 - DNA, 25 bp, Homo sapien
ggctggaaggagtcctggcagtgag

SEQ ID NO: 5898482 - DNA, 25 bp, Homo sapien
tattgcatagtctgttgtacctcaa

SEQ ID NO: 5898483 - DNA, 25 bp, Homo sapien
cgtggccctgaagcagccagggcct

SEQ ID NO: 5898484 - DNA, 25 bp, Homo sapien
cccaaaatagttctgggagacacat

SEQ ID NO: 5898485 - DNA, 25 bp, Homo sapien
gcttcccagccagtgggttggcttt

SEQ ID NO: 5898486 - DNA, 25 bp, Homo sapien
cactggtatctcttcacatccgagt

SEQ ID NO: 5898487 - DNA, 25 bp, Homo sapien
gccacctgttgggcccccaaaatag

SEQ ID NO: 5898488 - DNA, 25 bp, Homo sapien
tccctgagcggggttcaagcttccc

SEQ ID NO: 5898489 - DNA, 25 bp, Homo sapien
gagctccgggaagatgccagcgagg

SEQ ID NO: 5898490 - DNA, 25 bp, Homo sapien
ggtttggaggtgggcacgcaggttg

SEQ ID NO: 5898491 - DNA, 25 bp, Homo sapien
aggctgaagcaccccacttggcccc

SEQ ID NO: 5898492 - DNA, 25 bp, Homo sapien
cagtaaccaccctgctgaggcatgg

SEQ ID NO: 5898493 - DNA, 25 bp, Homo sapien
aggcagcgtgtggcttcggatgtgc

SEQ ID NO: 5898494 - DNA, 25 bp, Homo sapien
gcagcgtgtggcttcggatgtgcat

SEQ ID NO: 5898495 - DNA, 25 bp, Homo sapien
catggttacagctggacggggtggg

SEQ ID NO: 5898496 - DNA, 25 bp, Homo sapien
tgtgtccagaggctacacctcatga

SEQ ID NO: 5898497 - DNA, 25 bp, Homo sapien
agacagttaaactgctgtgaaacag

SEQ ID NO: 5898498 - DNA, 25 bp, Homo sapien
tcgaagcagctgtgtccagaggcta

SEQ ID NO: 5898499 - DNA, 25 bp, Homo sapien
ggggggaggggaactattgcatagt

SEQ ID NO: 5898500 - DNA, 25 bp, Homo sapien
gacatgtgtccagtaaccaccctgc

SEQ ID NO: 5898501 - DNA, 25 bp, Homo sapien
ggcccccaaaatagttctgggagac

SEQ ID NO: 5898502 - DNA, 25 bp, Homo sapien
ggcatggttacagctggacggggtg

SEQ ID NO: 5898503 - DNA, 25 bp, Homo sapien
tgggggcgggggctgaaacagttgc

SEQ ID NO: 5898504 - DNA, 25 bp, Homo sapien
gggagaaggttcgggcacaggcctg

SEQ ID NO: 5898505 - DNA, 25 bp, Homo sapien
gtggggtccctgagcggggttcaag

SEQ ID NO: 5898506 - DNA, 25 bp, Homo sapien
ggcacgcaggttggagcggtcagca

SEQ ID NO: 5898507 - DNA, 25 bp, Homo sapien
ggctacacctcatgaatactgaggg

SEQ ID NO: 5898508 - DNA, 25 bp, Homo sapien
ttccacaggtcgtgcagacacaagg

SEQ ID NO: 5898509 - DNA, 25 bp, Homo sapien
aagatgccagcgaggatggggaggt

SEQ ID NO: 5898510 - DNA, 25 bp, Homo sapien
gaaggcctttccacaggtcgtgcag

SEQ ID NO: 5898511 - DNA, 25 bp, Homo sapien
cccaggggcacctggacatgtgtcc

SEQ ID NO: 5898512 - DNA, 25 bp, Homo sapien
gtgagctccgggaagatgccagcga

SEQ ID NO: 5898513 - DNA, 25 bp, Homo sapien
ggtccttgagggaggtagggaagtg

SEQ ID NO: 5898514 - DNA, 25 bp, Homo sapien
caggcccaggggcacctggacatgt

SEQ ID NO: 5898515 - DNA, 25 bp, Homo sapien
gttctatggctcgaagcagctgtgt

SEQ ID NO: 5898516 - DNA, 25 bp, Homo sapien
tgggcccccaaaatagttctgggag

SEQ ID NO: 5898517 - DNA, 25 bp, Homo sapien
ggctgaaacagttgcccaggcccag

SEQ ID NO: 5898518 - DNA, 25 bp, Homo sapien
tccgggaagatgccagcgaggatgg

SEQ ID NO: 5898519 - DNA, 25 bp, Homo sapien
tgtgcatcttcagagcgcccaggct

SEQ ID NO: 5898520 - DNA, 25 bp, Homo sapien
ttcccagccagtgggttggctttag

SEQ ID NO: 5898521 - DNA, 25 bp, Homo sapien
gccaagcaggaaccaggtccagaca

SEQ ID NO: 5898522 - DNA, 25 bp, Homo sapien
gtgaggaggagggtgagctccggga

SEQ ID NO: 5898523 - DNA, 25 bp, Homo sapien
ccagcgaggatggggaggtagcagg

SEQ ID NO: 5898524 - DNA, 25 bp, Homo sapien
gctgtgtccagaggctacacctcat

SEQ ID NO: 5898525 - DNA, 25 bp, Homo sapien
agtgggagcaggagaatggcttctc

SEQ ID NO: 5898526 - DNA, 25 bp, Homo sapien
gaaacaggtgtcaccagacaaatgg

SEQ ID NO: 5898527 - DNA, 25 bp, Homo sapien
gcgggagaaggttcgggcacaggcc

SEQ ID NO: 5898528 - DNA, 25 bp, Homo sapien
cgagggcctccggagcagccagact

SEQ ID NO: 5898529 - DNA, 25 bp, Homo sapien
cagctgtgtccagaggctacacctc

SEQ ID NO: 5898530 - DNA, 25 bp, Homo sapien
atagttctgggagacacattggcca

SEQ ID NO: 5898531 - DNA, 25 bp, Homo sapien
tgaagcaccccacttggcccctaac

SEQ ID NO: 5898532 - DNA, 25 bp, Homo sapien
actgctgtgaaacaggtgtcaccag

SEQ ID NO: 5898533 - DNA, 25 bp, Homo sapien
aaggctggaaggagtcctggcagtg

SEQ ID NO: 5898534 - DNA, 25 bp, Homo sapien
agccagggcctagagaaggcctttc

SEQ ID NO: 5898535 - DNA, 25 bp, Homo sapien
cggacgtggccctgaagcagccagg

SEQ ID NO: 5898536 - DNA, 25 bp, Homo sapien
cactccatcagccacctgcggcaaa

SEQ ID NO: 5898537 - DNA, 25 bp, Homo sapien
tggccctgaagcagccagggcctag

SEQ ID NO: 5898538 - DNA, 25 bp, Homo sapien
ggcacctggacatgtgtccagtaac

SEQ ID NO: 5898539 - DNA, 25 bp, Homo sapien
gaggggtaggaggctctgggcgggt

SEQ ID NO: 5898540 - DNA, 25 bp, Homo sapien
cttgtggagcaaggacatgcgggag

SEQ ID NO: 5898541 - DNA, 25 bp, Homo sapien
ccagtgtgggtgcggacgtggccct

SEQ ID NO: 5898542 - DNA, 25 bp, Homo sapien
tagcagggtcagcgagggcctccgg

SEQ ID NO: 5898543 - DNA, 25 bp, Homo sapien
ctgaggggtaggaggctctgggcgg

SEQ ID NO: 5898544 - DNA, 25 bp, Homo sapien
aatgtaaacatctttctcccggggc

SEQ ID NO: 5898545 - DNA, 25 bp, Homo sapien
ggtacaaaggcactccatcagccac

SEQ ID NO: 5898546 - DNA, 25 bp, Homo sapien
ggggtaggaggctctgggcgggtac

SEQ ID NO: 5898547 - DNA, 25 bp, Homo sapien
tggttacagctggacggggtggggg

SEQ ID NO: 5898548 - DNA, 25 bp, Homo sapien
ctggtatctcttcacatccgagtgg

SEQ ID NO: 5898549 - DNA, 25 bp, Homo sapien
ctccatcagccacctgcggcaaagg

SEQ ID NO: 5898550 - DNA, 25 bp, Homo sapien
cagacaaatgggggcgggggctgaa

SEQ ID NO: 5898551 - DNA, 25 bp, Homo sapien
actattgcatagtctgttgtacctc

SEQ ID NO: 5898552 - DNA, 25 bp, Homo sapien
ccattattcatggtcccttctgaga

SEQ ID NO: 5898553 - DNA, 25 bp, Homo sapien
gatgtgcatcttcagagcgcccagg

SEQ ID NO: 5898554 - DNA, 25 bp, Homo sapien
ggtgggcacgcaggttggagcggtc

SEQ ID NO: 5898555 - DNA, 25 bp, Homo sapien
gaaggttcgggcacaggcctggcac

SEQ ID NO: 5898556 - DNA, 25 bp, Homo sapien
ttctgggagacacattggccaggct

SEQ ID NO: 5898557 - DNA, 25 bp, Homo sapien
ggttgcagtgggagcaggagaatgg

SEQ ID NO: 5898558 - DNA, 25 bp, Homo sapien
tcaagcttcccagccagtgggttgg

SEQ ID NO: 5898559 - DNA, 25 bp, Homo sapien
gcaaaggccaccaagagagccaagc

SEQ ID NO: 5898560 - DNA, 25 bp, Homo sapien
gcacggttgcagtgggagcaggaga

SEQ ID NO: 5898561 - DNA, 25 bp, Homo sapien
cctagagaaggcctttccacaggtc

SEQ ID NO: 5898562 - DNA, 25 bp, Homo sapien
acaggtcgtgcagacacaaggcagc

SEQ ID NO: 5898563 - DNA, 25 bp, Homo sapien
gctccgggaagatgccagcgaggat

SEQ ID NO: 5898564 - DNA, 25 bp, Homo sapien
ccaggtccagacatggacgccacag

SEQ ID NO: 5898565 - DNA, 25 bp, Homo sapien
attattcatggtcccttctgagaca

SEQ ID NO: 5898566 - DNA, 25 bp, Homo sapien
ggcgggggctgaaacagttgcccag

SEQ ID NO: 5898567 - DNA, 25 bp, Homo sapien
caggtgtcaccagacaaatgggggc

SEQ ID NO: 5898568 - DNA, 25 bp, Homo sapien
ttcacatccgagtgggtttggaggt

SEQ ID NO: 5898569 - DNA, 25 bp, Homo sapien
ggaggggaactattgcatagtctgt

SEQ ID NO: 5898570 - DNA, 25 bp, Homo sapien
tgtgggtgcggacgtggccctgaag

SEQ ID NO: 5898571 - DNA, 25 bp, Homo sapien
aagtggggtccctgagcggggttca

SEQ ID NO: 5898572 - DNA, 25 bp, Homo sapien
gtcagcaaaagcacggttgcagtgg

SEQ ID NO: 5898573 - DNA, 25 bp, Homo sapien
gaagcagctgtgtccagaggctaca

SEQ ID NO: 5898574 - DNA, 25 bp, Homo sapien
ggcactccatcagccacctgcggca

SEQ ID NO: 5898575 - DNA, 25 bp, Homo sapien
tcaccagacaaatgggggcgggggc

SEQ ID NO: 5898576 - DNA, 25 bp, Homo sapien
acatggacgccacaggtccccggac

SEQ ID NO: 5898577 - DNA, 25 bp, Homo sapien
tacagctggacggggtgggggggag

SEQ ID NO: 5898578 - DNA, 25 bp, Homo sapien
catgaatactgaggggtaggaggct

SEQ ID NO: 5898579 - DNA, 25 bp, Homo sapien
ggggtccctgagcggggttcaagct

SEQ ID NO: 5898580 - DNA, 25 bp, Homo sapien
ccacaggtcgtgcagacacaaggca

SEQ ID NO: 5898581 - DNA, 25 bp, Homo sapien
ccaccctgctgaggcatggttacag

SEQ ID NO: 5898582 - DNA, 25 bp, Homo sapien
taaatacctttaaaatgtaaacatc

SEQ ID NO: 5898583 - DNA, 25 bp, Homo sapien
tggcttcggatgtgcatcttcagag

SEQ ID NO: 5898584 - DNA, 25 bp, Homo sapien
tggaggtgggcacgcaggttggagc

SEQ ID NO: 5898585 - DNA, 25 bp, Homo sapien
gagaaggcctttccacaggtcgtgc

SEQ ID NO: 5898586 - DNA, 25 bp, Homo sapien
cttggcccctaacaagtgatggcca

SEQ ID NO: 5898587 - DNA, 25 bp, Homo sapien
ggagtcctggcagtgaggaggaggg

SEQ ID NO: 5898588 - DNA, 25 bp, Homo sapien
acatgcgggagaaggttcgggcaca

SEQ ID NO: 5898589 - DNA, 25 bp, Homo sapien
aatactgaggggtaggaggctctgg

SEQ ID NO: 5898590 - DNA, 25 bp, Homo sapien
aacagttgcccaggcccaggggcac

SEQ ID NO: 5898591 - DNA, 25 bp, Homo sapien
tgcggcaaaggccaccaagagagcc

SEQ ID NO: 5898592 - DNA, 25 bp, Homo sapien
tgggtttggaggtgggcacgcaggt

SEQ ID NO: 5898593 - DNA, 25 bp, Homo sapien
cctgagcggggttcaagcttcccag

SEQ ID NO: 5898594 - DNA, 25 bp, Homo sapien
agcgaggatggggaggtagcagggt

SEQ ID NO: 5898595 - DNA, 25 bp, Homo sapien
cgtgtggcttcggatgtgcatcttc

SEQ ID NO: 5898596 - DNA, 25 bp, Homo sapien
gccaccaagagagccaagcaggaac

SEQ ID NO: 5898597 - DNA, 25 bp, Homo sapien
ctcatgaatactgaggggtaggagg

SEQ ID NO: 5898598 - DNA, 25 bp, Homo sapien
tgtccagaggctacacctcatgaat

SEQ ID NO: 5898599 - DNA, 25 bp, Homo sapien
agcgtgtggcttcggatgtgcatct

SEQ ID NO: 5898600 - DNA, 25 bp, Homo sapien
gaggtagggaagtggggtccctgag

SEQ ID NO: 5898601 - DNA, 25 bp, Homo sapien
tgccagcgaggatggggaggtagca

SEQ ID NO: 5898602 - DNA, 25 bp, Homo sapien
ccaaggctggaaggagtcctggcag

SEQ ID NO: 5898603 - DNA, 25 bp, Homo sapien
cggcaaaggccaccaagagagccaa

SEQ ID NO: 5898604 - DNA, 25 bp, Homo sapien
ggtccctgagcggggttcaagcttc

SEQ ID NO: 5898605 - DNA, 25 bp, Homo sapien
ttcagagcgcccaggctgaggtact

SEQ ID NO: 5898606 - DNA, 25 bp, Homo sapien
tgagcggggttcaagcttcccagcc

SEQ ID NO: 5898607 - DNA, 25 bp, Homo sapien
tgtgtccagtaaccaccctgctgag

SEQ ID NO: 5898608 - DNA, 25 bp, Homo sapien
agaaggtggcctgaagggtccttga

SEQ ID NO: 5898609 - DNA, 25 bp, Homo sapien
caggggcacctggacatgtgtccag

SEQ ID NO: 5898610 - DNA, 25 bp, Homo sapien
tgcatcttcagagcgcccaggctga

SEQ ID NO: 5898611 - DNA, 25 bp, Homo sapien
cagagcgcccaggctgaggtactcc

SEQ ID NO: 5898612 - DNA, 25 bp, Homo sapien
cccggaccaaggctggaaggagtcc

SEQ ID NO: 5898613 - DNA, 25 bp, Homo sapien
aacaagtgatggccattattcatgg

SEQ ID NO: 5898614 - DNA, 25 bp, Homo sapien
cctccggagcagccagactcttggt

SEQ ID NO: 5898615 - DNA, 25 bp, Homo sapien
tgggcgggtacaaaggcactccatc

SEQ ID NO: 5898616 - DNA, 25 bp, Homo sapien
tatctcttcacatccgagtgggttt

SEQ ID NO: 5898617 - DNA, 25 bp, Homo sapien
cagccacctgcggcaaaggccacca

SEQ ID NO: 5898618 - DNA, 25 bp, Homo sapien
agtgatggccattattcatggtccc

SEQ ID NO: 5898619 - DNA, 25 bp, Homo sapien
caaagaaggtggcctgaagggtcct

SEQ ID NO: 5898620 - DNA, 25 bp, Homo sapien
acgccacaggtccccggaccaaggc

SEQ ID NO: 5898621 - DNA, 25 bp, Homo sapien
accctgctgaggcatggttacagct

SEQ ID NO: 5898622 - DNA, 25 bp, Homo sapien
ttggtgcttgtggagcaaggacatg

SEQ ID NO: 5898623 - DNA, 25 bp, Homo sapien
tagagaaggcctttccacaggtcgt

SEQ ID NO: 5898624 - DNA, 25 bp, Homo sapien
taggaggctctgggcgggtacaaag

SEQ ID NO: 5898625 - DNA, 25 bp, Homo sapien
tgaagcagccagggcctagagaagg

SEQ ID NO: 5898626 - DNA, 25 bp, Homo sapien
tgggagcaggagaatggcttctcac

SEQ ID NO: 5898627 - DNA, 25 bp, Homo sapien
tgcccaggcccaggggcacctggac

SEQ ID NO: 5898628 - DNA, 25 bp, Homo sapien
aacaggtgtcaccagacaaatgggg

SEQ ID NO: 5898629 - DNA, 25 bp, Homo sapien
cggatgtgcatcttcagagcgccca

SEQ ID NO: 5898630 - DNA, 25 bp, Homo sapien
tctttctcccggggccacctgttgg

SEQ ID NO: 5898631 - DNA, 25 bp, Homo sapien
aaatagttctgggagacacattggc

SEQ ID NO: 5898632 - DNA, 25 bp, Homo sapien
cagacacaaggcagcgtgtggcttc

SEQ ID NO: 5898633 - DNA, 25 bp, Homo sapien
gaggtagcagggtcagcgagggcct

SEQ ID NO: 5898634 - DNA, 25 bp, Homo sapien
tccgagtgggtttggaggtgggcac

SEQ ID NO: 5898635 - DNA, 25 bp, Homo sapien
tgagggaggtagggaagtggggtcc

SEQ ID NO: 5898636 - DNA, 25 bp, Homo sapien
gtccagacatggacgccacaggtcc

SEQ ID NO: 5898637 - DNA, 25 bp, Homo sapien
ccaagagagccaagcaggaaccagg

SEQ ID NO: 5898638 - DNA, 25 bp, Homo sapien
cgggaagatgccagcgaggatgggg

SEQ ID NO: 5898639 - DNA, 25 bp, Homo sapien
aagcttcccagccagtgggttggct

SEQ ID NO: 5898640 - DNA, 25 bp, Homo sapien
tagttctatggctcgaagcagctgt

SEQ ID NO: 5898641 - DNA, 25 bp, Homo sapien
tcctggcagtgaggaggagggtgag

SEQ ID NO: 5898642 - DNA, 25 bp, Homo sapien
tttctcccggggccacctgttgggc

SEQ ID NO: 5898643 - DNA, 25 bp, Homo sapien
gaactattgcatagtctgttgtacc

SEQ ID NO: 5898644 - DNA, 25 bp, Homo sapien
tggacatgtgtccagtaaccaccct

SEQ ID NO: 5898645 - DNA, 25 bp, Homo sapien
cagcaaaagcacggttgcagtggga

SEQ ID NO: 5898646 - DNA, 25 bp, Homo sapien
ttctcaccagtgtgggtgcggacgt

SEQ ID NO: 5898647 - DNA, 25 bp, Homo sapien
gggaggtagcagggtcagcgagggc

SEQ ID NO: 5898648 - DNA, 25 bp, Homo sapien
acagttaaactgctgtgaaacaggt

SEQ ID NO: 5898649 - DNA, 25 bp, Homo sapien
aaggtggcctgaagggtccttgagg

SEQ ID NO: 5898650 - DNA, 25 bp, Homo sapien
gggaactattgcatagtctgttgta

SEQ ID NO: 5898651 - DNA, 25 bp, Homo sapien
cacatccgagtgggtttggaggtgg

SEQ ID NO: 5898652 - DNA, 25 bp, Homo sapien
tggctcgaagcagctgtgtccagag

SEQ ID NO: 5898653 - DNA, 25 bp, Homo sapien
cccttctgagacagttaaactgctg

SEQ ID NO: 5898654 - DNA, 25 bp, Homo sapien
tttagttctatggctcgaagcagct

SEQ ID NO: 5898655 - DNA, 25 bp, Homo sapien
gagcagccagactcttggtgcttgt

SEQ ID NO: 5898656 - DNA, 25 bp, Homo sapien
catgtgtccagtaaccaccctgctg

SEQ ID NO: 5898657 - DNA, 25 bp, Homo sapien
ctggcagtgaggaggagggtgagct

SEQ ID NO: 5898658 - DNA, 25 bp, Homo sapien
agcgagggcctccggagcagccaga

SEQ ID NO: 5898659 - DNA, 25 bp, Homo sapien
gttggctttagttctatggctcgaa

SEQ ID NO: 5898660 - DNA, 25 bp, Homo sapien
cggaccaaggctggaaggagtcctg

SEQ ID NO: 5898661 - DNA, 25 bp, Homo sapien
gttgcccaggcccaggggcacctgg

SEQ ID NO: 5898662 - DNA, 25 bp, Homo sapien
cgtgcagacacaaggcagcgtgtgg

SEQ ID NO: 5898663 - DNA, 25 bp, Homo sapien
ggtagcagggtcagcgagggcctcc

SEQ ID NO: 5898664 - DNA, 25 bp, Homo sapien
aggagggtgagctccgggaagatgc

SEQ ID NO: 5898665 - DNA, 25 bp, Homo sapien
gcatagtctgttgtacctcaaagaa

SEQ ID NO: 5898666 - DNA, 25 bp, Homo sapien
ctggaaggagtcctggcagtgagga

SEQ ID NO: 5898667 - DNA, 25 bp, Homo sapien
gttcgggcacaggcctggcactggt

SEQ ID NO: 5898668 - DNA, 25 bp, Homo sapien
ctcaaagaaggtggcctgaagggtc

SEQ ID NO: 5898669 - DNA, 25 bp, Homo sapien
gggtgagctccgggaagatgccagc

SEQ ID NO: 5898670 - DNA, 25 bp, Homo sapien
gtcccttctgagacagttaaactgc

SEQ ID NO: 5898671 - DNA, 25 bp, Homo sapien
ctgggagacacattggccaggctga

SEQ ID NO: 5898672 - DNA, 25 bp, Homo sapien
gtcgtgcagacacaaggcagcgtgt

SEQ ID NO: 5898673 - DNA, 25 bp, Homo sapien
cacattggccaggctgaagcacccc

SEQ ID NO: 5898674 - DNA, 25 bp, Homo sapien
aagcagccagggcctagagaaggcc

SEQ ID NO: 5898675 - DNA, 25 bp, Homo sapien
cagttgcccaggcccaggggcacct

SEQ ID NO: 5898676 - DNA, 25 bp, Homo sapien
cctgcggcaaaggccaccaagagag

SEQ ID NO: 5898677 - DNA, 25 bp, Homo sapien
gcagccagactcttggtgcttgtgg

SEQ ID NO: 5898678 - DNA, 25 bp, Homo sapien
agggcctagagaaggcctttccaca

SEQ ID NO: 5898679 - DNA, 25 bp, Homo sapien
ccatcagccacctgcggcaaaggcc

SEQ ID NO: 5898680 - DNA, 25 bp, Homo sapien
ccctaacaagtgatggccattattc

SEQ ID NO: 5898681 - DNA, 25 bp, Homo sapien
aacatctttctcccggggccacctg

SEQ ID NO: 5898682 - DNA, 25 bp, Homo sapien
ggcactggtatctcttcacatccga

SEQ ID NO: 5898683 - DNA, 25 bp, Homo sapien
gaggaggagggtgagctccgggaag

SEQ ID NO: 5898684 - DNA, 25 bp, Homo sapien
ttttcagtctaatggctttttaaca

SEQ ID NO: 5898685 - DNA, 25 bp, Homo sapien
gatttaccaaagtcactggagacaa

SEQ ID NO: 5898686 - DNA, 25 bp, Homo sapien
gagttccatggtcccaaggtttggt

SEQ ID NO: 5898687 - DNA, 25 bp, Homo sapien
tacctgccagttttgtggactacat

SEQ ID NO: 5898688 - DNA, 25 bp, Homo sapien
ccctgacccatgtctgtatatctgt

SEQ ID NO: 5898689 - DNA, 25 bp, Homo sapien
atggtctgattcttttatacttatt

SEQ ID NO: 5898690 - DNA, 25 bp, Homo sapien
gaaggaatatatacctgccagtttt

SEQ ID NO: 5898691 - DNA, 25 bp, Homo sapien
ggactacattaatagggaggctttt

SEQ ID NO: 5898692 - DNA, 25 bp, Homo sapien
cacttatgtgttgtacatggtctga

SEQ ID NO: 5898693 - DNA, 25 bp, Homo sapien
gataagagttccatggtcccaaggt

SEQ ID NO: 5898694 - DNA, 25 bp, Homo sapien
gttccattgcatgagaccttttagt

SEQ ID NO: 5898695 - DNA, 25 bp, Homo sapien
tgttaaaaagccattagactgaaaa

SEQ ID NO: 5898696 - DNA, 25 bp, Homo sapien
accttgggaccatggaactcttatc

SEQ ID NO: 5898697 - DNA, 25 bp, Homo sapien
ttgtctccagtgactttggtaaatc

SEQ ID NO: 5898698 - DNA, 25 bp, Homo sapien
aataagtataaaagaatcagaccat

SEQ ID NO: 5898699 - DNA, 25 bp, Homo sapien
atgtagtccacaaaactggcaggta

SEQ ID NO: 5898700 - DNA, 25 bp, Homo sapien
accaaaccttgggaccatggaactc

SEQ ID NO: 5898701 - DNA, 25 bp, Homo sapien
actaaaaggtctcatgcaatggaac

SEQ ID NO: 5898702 - DNA, 25 bp, Homo sapien
acagatatacagacatgggtcaggg

SEQ ID NO: 5898703 - DNA, 25 bp, Homo sapien
aaaagcctccctattaatgtagtcc

SEQ ID NO: 5898704 - DNA, 25 bp, Homo sapien
tcagaccatgtacaacacataagtg

SEQ ID NO: 5898705 - DNA, 25 bp, Homo sapien
aaaactggcaggtatatattccttc

SEQ ID NO: 5898706 - DNA, 25 bp, Homo sapien
gcttggaagtgcacagctggctagt

SEQ ID NO: 5898707 - DNA, 25 bp, Homo sapien
catggtgtccatgctgtaacagtgg

SEQ ID NO: 5898708 - DNA, 25 bp, Homo sapien
aaaacttttccagcgtgttctctgc

SEQ ID NO: 5898709 - DNA, 25 bp, Homo sapien
gaaatgtaccacagtcctgatgtgt

SEQ ID NO: 5898710 - DNA, 25 bp, Homo sapien
gtatgtagctcactccttattctga

SEQ ID NO: 5898711 - DNA, 25 bp, Homo sapien
aagtctcatgagtcagcagtgcttg

SEQ ID NO: 5898712 - DNA, 25 bp, Homo sapien
ttccacccgtgtctgtgtgagttgt

SEQ ID NO: 5898713 - DNA, 25 bp, Homo sapien
gcagcttatagtatctgtcgggtac

SEQ ID NO: 5898714 - DNA, 25 bp, Homo sapien
gtggagtgcagtacatgcctgagta

SEQ ID NO: 5898715 - DNA, 25 bp, Homo sapien
acattgtctgtggtgtccctgaaac

SEQ ID NO: 5898716 - DNA, 25 bp, Homo sapien
aaacaggacatagtgcccagcgcag

SEQ ID NO: 5898717 - DNA, 25 bp, Homo sapien
gcagagaacacgctggaaaagtttt

SEQ ID NO: 5898718 - DNA, 25 bp, Homo sapien
ccactgttacagcatggacaccatg

SEQ ID NO: 5898719 - DNA, 25 bp, Homo sapien
tcagaataaggagtgagctacatac

SEQ ID NO: 5898720 - DNA, 25 bp, Homo sapien
acaactcacacagacacgggtggaa

SEQ ID NO: 5898721 - DNA, 25 bp, Homo sapien
actagccagctgtgcacttccaagc

SEQ ID NO: 5898722 - DNA, 25 bp, Homo sapien
acacatcaggactgtggtacatttc

SEQ ID NO: 5898723 - DNA, 25 bp, Homo sapien
ctgcgctgggcactatgtcctgttt

SEQ ID NO: 5898724 - DNA, 25 bp, Homo sapien
gtacccgacagatactataagctgc

SEQ ID NO: 5898725 - DNA, 25 bp, Homo sapien
gtttcagggacaccacagacaatgt

SEQ ID NO: 5898726 - DNA, 25 bp, Homo sapien
tactcaggcatgtactgcactccac

SEQ ID NO: 5898727 - DNA, 25 bp, Homo sapien
caagcactgctgactcatgagactt

SEQ ID NO: 5898728 - DNA, 25 bp, Homo sapien
tgcgctacggtgtctatgtcatcaa

SEQ ID NO: 5898729 - DNA, 25 bp, Homo sapien
agtcttggaagtgtctcggcaaccg

SEQ ID NO: 5898730 - DNA, 25 bp, Homo sapien
ttgccctatgctagctactttggag

SEQ ID NO: 5898731 - DNA, 25 bp, Homo sapien
agctgctcaacgtgggcttcctaga

SEQ ID NO: 5898732 - DNA, 25 bp, Homo sapien
gattggccgctaccgcatgatcaag

SEQ ID NO: 5898733 - DNA, 25 bp, Homo sapien
aaccagcatggcgaggagaccttca

SEQ ID NO: 5898734 - DNA, 25 bp, Homo sapien
tgggatgaagatctcacgcccggat

SEQ ID NO: 5898735 - DNA, 25 bp, Homo sapien
atccgtgcggtaccgagtcttggaa

SEQ ID NO: 5898736 - DNA, 25 bp, Homo sapien
gcaaggcccagtttctgaggatcaa

SEQ ID NO: 5898737 - DNA, 25 bp, Homo sapien
atgaccgcaatctgtaccgttgtgg

SEQ ID NO: 5898738 - DNA, 25 bp, Homo sapien
atggacaagtttggcttccggttgc

SEQ ID NO: 5898739 - DNA, 25 bp, Homo sapien
cggttgccgagacacttccaagact

SEQ ID NO: 5898740 - DNA, 25 bp, Homo sapien
tgaaggtctcctcgccatgctggtt

SEQ ID NO: 5898741 - DNA, 25 bp, Homo sapien
tctaggaagcccacgttgagcagct

SEQ ID NO: 5898742 - DNA, 25 bp, Homo sapien
atccgggcgtgagatcttcatccca

SEQ ID NO: 5898743 - DNA, 25 bp, Homo sapien
cttgatcatgcggtagcggccaatc

SEQ ID NO: 5898744 - DNA, 25 bp, Homo sapien
ctccaaagtagctagcatagggcaa

SEQ ID NO: 5898745 - DNA, 25 bp, Homo sapien
gcaaccggaagccaaacttgtccat

SEQ ID NO: 5898746 - DNA, 25 bp, Homo sapien
ttgatgacatagacaccgtagcgca

SEQ ID NO: 5898747 - DNA, 25 bp, Homo sapien
ttccaagactcggtaccgcacggat

SEQ ID NO: 5898748 - DNA, 25 bp, Homo sapien
ttgatcctcagaaactgggccttgc

SEQ ID NO: 5898749 - DNA, 25 bp, Homo sapien
ccacaacggtacagattgcggtcat

SEQ ID NO: 5898750 - DNA, 25 bp, Homo sapien
aaaaacactgagttgctttgggcaa

SEQ ID NO: 5898751 - DNA, 25 bp, Homo sapien
agggatggtctcttcacagtctgtg

SEQ ID NO: 5898752 - DNA, 25 bp, Homo sapien
atctccatctcttagacagttctgc

SEQ ID NO: 5898753 - DNA, 25 bp, Homo sapien
gagtagctcctgtcacctctcagaa

SEQ ID NO: 5898754 - DNA, 25 bp, Homo sapien
aaggcctttcttaggcacatctatc

SEQ ID NO: 5898755 - DNA, 25 bp, Homo sapien
acttgaagccccttagaggctctgt

SEQ ID NO: 5898756 - DNA, 25 bp, Homo sapien
tccttttcagctggtcttggcagag

SEQ ID NO: 5898757 - DNA, 25 bp, Homo sapien
aatgcacttccatacaagctagctg

SEQ ID NO: 5898758 - DNA, 25 bp, Homo sapien
cactcagaagcacttgcccttgttc

SEQ ID NO: 5898759 - DNA, 25 bp, Homo sapien
ttgttccctctaagaaatgcacttc

SEQ ID NO: 5898760 - DNA, 25 bp, Homo sapien
gcatgaggctctttttgccacatct

SEQ ID NO: 5898761 - DNA, 25 bp, Homo sapien
ctctgccaagaccagctgaaaagga

SEQ ID NO: 5898762 - DNA, 25 bp, Homo sapien
gaagtgcatttcttagagggaacaa

SEQ ID NO: 5898763 - DNA, 25 bp, Homo sapien
acagagcctctaaggggcttcaagt

SEQ ID NO: 5898764 - DNA, 25 bp, Homo sapien
gatagatgtgcctaagaaaggcctt

SEQ ID NO: 5898765 - DNA, 25 bp, Homo sapien
gaacaagggcaagtgcttctgagtg

SEQ ID NO: 5898766 - DNA, 25 bp, Homo sapien
cacagactgtgaagagaccatccct

SEQ ID NO: 5898767 - DNA, 25 bp, Homo sapien
agatgtggcaaaaagagcctcatgc

SEQ ID NO: 5898768 - DNA, 25 bp, Homo sapien
ttctgagaggtgacaggagctactc

SEQ ID NO: 5898769 - DNA, 25 bp, Homo sapien
cagctagcttgtatggaagtgcatt

SEQ ID NO: 5898770 - DNA, 25 bp, Homo sapien
gcagaactgtctaagagatggagat

SEQ ID NO: 5898771 - DNA, 25 bp, Homo sapien
ttgcccaaagcaactcagtgttttt

SEQ ID NO: 5898772 - DNA, 25 bp, Homo sapien
tctccatgctcttggctgcagttaa

SEQ ID NO: 5898773 - DNA, 25 bp, Homo sapien
aagtccaggaacttgacctttgtat

SEQ ID NO: 5898774 - DNA, 25 bp, Homo sapien
atttctctggattctgacccaggct

SEQ ID NO: 5898775 - DNA, 25 bp, Homo sapien
ctaagctgtactgggcaagcctggc

SEQ ID NO: 5898776 - DNA, 25 bp, Homo sapien
ctgcagttaactgtcctgggtggat

SEQ ID NO: 5898777 - DNA, 25 bp, Homo sapien
acttctatgtgcttgtcccaaagat

SEQ ID NO: 5898778 - DNA, 25 bp, Homo sapien
aggtcccttcttggacttctatgtg

SEQ ID NO: 5898779 - DNA, 25 bp, Homo sapien
ttcagtgtccagagcctctgagcga

SEQ ID NO: 5898780 - DNA, 25 bp, Homo sapien
agcgatccctgctctgtctgaggtg

SEQ ID NO: 5898781 - DNA, 25 bp, Homo sapien
ggttctcctggctagttcctcaaaa

SEQ ID NO: 5898782 - DNA, 25 bp, Homo sapien
agttcctcaaaacttccctgtatga

SEQ ID NO: 5898783 - DNA, 25 bp, Homo sapien
cacctcagacagagcagggatcgct

SEQ ID NO: 5898784 - DNA, 25 bp, Homo sapien
ttttgaggaactagccaggagaacc

SEQ ID NO: 5898785 - DNA, 25 bp, Homo sapien
atctttgggacaagcacatagaagt

SEQ ID NO: 5898786 - DNA, 25 bp, Homo sapien
atacaaaggtcaagttcctggactt

SEQ ID NO: 5898787 - DNA, 25 bp, Homo sapien
ttaactgcagccaagagcatggaga

SEQ ID NO: 5898788 - DNA, 25 bp, Homo sapien
atccacccaggacagttaactgcag

SEQ ID NO: 5898789 - DNA, 25 bp, Homo sapien
agcctgggtcagaatccagagaaat

SEQ ID NO: 5898790 - DNA, 25 bp, Homo sapien
tcgctcagaggctctggacactgaa

SEQ ID NO: 5898791 - DNA, 25 bp, Homo sapien
tcatacagggaagttttgaggaact

SEQ ID NO: 5898792 - DNA, 25 bp, Homo sapien
cacatagaagtccaagaagggacct

SEQ ID NO: 5898793 - DNA, 25 bp, Homo sapien
gccaggcttgcccagtacagcttag

SEQ ID NO: 5898794 - DNA, 25 bp, Homo sapien
agctttagggtctcaatagtgtcac

SEQ ID NO: 5898795 - DNA, 25 bp, Homo sapien
gctctgagtttgtgcacatgaatac

SEQ ID NO: 5898796 - DNA, 25 bp, Homo sapien
gaatacttacttgtgtttaccaaag

SEQ ID NO: 5898797 - DNA, 25 bp, Homo sapien
aacccaaatatcctgaactgtgcgt

SEQ ID NO: 5898798 - DNA, 25 bp, Homo sapien
tgactcccacattggttgatcacac

SEQ ID NO: 5898799 - DNA, 25 bp, Homo sapien
gaacccatgggagactttaaactct

SEQ ID NO: 5898800 - DNA, 25 bp, Homo sapien
tttcacagcaggactttgactccca

SEQ ID NO: 5898801 - DNA, 25 bp, Homo sapien
aaaactgtcagcatttgggtaatct

SEQ ID NO: 5898802 - DNA, 25 bp, Homo sapien
gatcagggcagtgactttcacagca

SEQ ID NO: 5898803 - DNA, 25 bp, Homo sapien
gtttccattgaaatttcagctctga

SEQ ID NO: 5898804 - DNA, 25 bp, Homo sapien
gtgtcacctgtgtaaatcaaatcaa

SEQ ID NO: 5898805 - DNA, 25 bp, Homo sapien
ctttggtaaacacaagtaagtattc

SEQ ID NO: 5898806 - DNA, 25 bp, Homo sapien
agagtttaaagtctcccatgggttc

SEQ ID NO: 5898807 - DNA, 25 bp, Homo sapien
agattacccaaatgctgacagtttt

SEQ ID NO: 5898808 - DNA, 25 bp, Homo sapien
gtgacactattgagaccctaaagct

SEQ ID NO: 5898809 - DNA, 25 bp, Homo sapien
gtattcatgtgcacaaactcagagc

SEQ ID NO: 5898810 - DNA, 25 bp, Homo sapien
tcagagctgaaatttcaatggaaac

SEQ ID NO: 5898811 - DNA, 25 bp, Homo sapien
acgcacagttcaggatatttgggtt

SEQ ID NO: 5898812 - DNA, 25 bp, Homo sapien
tgggagtcaaagtcctgctgtgaaa

SEQ ID NO: 5898813 - DNA, 25 bp, Homo sapien
tgctgtgaaagtcactgccctgatc

SEQ ID NO: 5898814 - DNA, 25 bp, Homo sapien
ttgatttgatttacacaggtgacac

SEQ ID NO: 5898815 - DNA, 25 bp, Homo sapien
gtgtgatcaaccaatgtgggagtca

SEQ ID NO: 5898816 - DNA, 25 bp, Homo sapien
ttcacacaaaatctcctgggcacag

SEQ ID NO: 5898817 - DNA, 25 bp, Homo sapien
ttccctccatgctgaagcttgcaga

SEQ ID NO: 5898818 - DNA, 25 bp, Homo sapien
agggcacacagatgccttggctctg

SEQ ID NO: 5898819 - DNA, 25 bp, Homo sapien
atggatttctagcagttgtcttagc

SEQ ID NO: 5898820 - DNA, 25 bp, Homo sapien
gaaagggtcacatagctctgccaat

SEQ ID NO: 5898821 - DNA, 25 bp, Homo sapien
aagcttgcagactagggagccgccc

SEQ ID NO: 5898822 - DNA, 25 bp, Homo sapien
ctctatgagaggacacggccgtgga

SEQ ID NO: 5898823 - DNA, 25 bp, Homo sapien
caatcgggacactcacttaacggaa

SEQ ID NO: 5898824 - DNA, 25 bp, Homo sapien
aagcttgcagtgtcctgtgggtcat

SEQ ID NO: 5898825 - DNA, 25 bp, Homo sapien
aagcatcattatcaggcagccagtg

SEQ ID NO: 5898826 - DNA, 25 bp, Homo sapien
ctgagcatgaatcccatcctctgat

SEQ ID NO: 5898827 - DNA, 25 bp, Homo sapien
tccacggccgtgtcctctcatagag

SEQ ID NO: 5898828 - DNA, 25 bp, Homo sapien
atcagaggatgggattcatgctcag

SEQ ID NO: 5898829 - DNA, 25 bp, Homo sapien
cactggctgcctgataatgatgctt

SEQ ID NO: 5898830 - DNA, 25 bp, Homo sapien
ttccgttaagtgagtgtcccgattg

SEQ ID NO: 5898831 - DNA, 25 bp, Homo sapien
cagagccaaggcatctgtgtgccct

SEQ ID NO: 5898832 - DNA, 25 bp, Homo sapien
gctaagacaactgctagaaatccat

SEQ ID NO: 5898833 - DNA, 25 bp, Homo sapien
attggcagagctatgtgaccctttc

SEQ ID NO: 5898834 - DNA, 25 bp, Homo sapien
gggcggctccctagtctgcaagctt

SEQ ID NO: 5898835 - DNA, 25 bp, Homo sapien
ctgtgcccaggagattttgtgtgaa

SEQ ID NO: 5898836 - DNA, 25 bp, Homo sapien
atgacccacaggacactgcaagctt

SEQ ID NO: 5898837 - DNA, 25 bp, Homo sapien
tctgcaagcttcagcatggagggaa

SEQ ID NO: 5898838 - DNA, 25 bp, Homo sapien
tatggaccatcaccaagccacaagg

SEQ ID NO: 5898839 - DNA, 25 bp, Homo sapien
agaaaaatcaactccctcgatcaac

SEQ ID NO: 5898840 - DNA, 25 bp, Homo sapien
acccattttctttactcttcactat

SEQ ID NO: 5898841 - DNA, 25 bp, Homo sapien
ggacctgtccaagtgttggcacgaa

SEQ ID NO: 5898842 - DNA, 25 bp, Homo sapien
atggaactacttcagcactcacaga

SEQ ID NO: 5898843 - DNA, 25 bp, Homo sapien
gggtgaacagcttccttcatgatga

SEQ ID NO: 5898844 - DNA, 25 bp, Homo sapien
tgatgaacactgagaccacctgatt

SEQ ID NO: 5898845 - DNA, 25 bp, Homo sapien
aagtttccactctctagatccagta

SEQ ID NO: 5898846 - DNA, 25 bp, Homo sapien
atgggtcaggtatctctgtgttctt

SEQ ID NO: 5898847 - DNA, 25 bp, Homo sapien
gagaccacctgattccaagtttcca

SEQ ID NO: 5898848 - DNA, 25 bp, Homo sapien
gatccagtactatgacagggactac

SEQ ID NO: 5898849 - DNA, 25 bp, Homo sapien
tcatcatgaaggaagctgttcaccc

SEQ ID NO: 5898850 - DNA, 25 bp, Homo sapien
gtagtccctgtcatagtactggatc

SEQ ID NO: 5898851 - DNA, 25 bp, Homo sapien
tctgtgagtgctgaagtagttccat

SEQ ID NO: 5898852 - DNA, 25 bp, Homo sapien
atagtgaagagtaaagaaaatgggt

SEQ ID NO: 5898853 - DNA, 25 bp, Homo sapien
tggaaacttggaatcaggtggtctc

SEQ ID NO: 5898854 - DNA, 25 bp, Homo sapien
aatcaggtggtctcagtgttcatca

SEQ ID NO: 5898855 - DNA, 25 bp, Homo sapien
gttgatcgagggagttgatttttct

SEQ ID NO: 5898856 - DNA, 25 bp, Homo sapien
ttcgtgccaacacttggacaggtcc

SEQ ID NO: 5898857 - DNA, 25 bp, Homo sapien
ccttgtggcttggtgatggtccata

SEQ ID NO: 5898858 - DNA, 25 bp, Homo sapien
tactggatctagagagtggaaactt

SEQ ID NO: 5898859 - DNA, 25 bp, Homo sapien
aagaacacagagatacctgacccat

SEQ ID NO: 5898860 - DNA, 25 bp, Homo sapien
actcctttctgtttactaccagtgg

SEQ ID NO: 5898861 - DNA, 25 bp, Homo sapien
tacagagtgagctgcatcccgggct

SEQ ID NO: 5898862 - DNA, 25 bp, Homo sapien
ttaaagcttgtcctgtcacgctatg

SEQ ID NO: 5898863 - DNA, 25 bp, Homo sapien
gcaaagggccatgggctcaccagct

SEQ ID NO: 5898864 - DNA, 25 bp, Homo sapien
gaaggctcccttggtatagacctgc

SEQ ID NO: 5898865 - DNA, 25 bp, Homo sapien
gccatcctttggctggttttaaagc

SEQ ID NO: 5898866 - DNA, 25 bp, Homo sapien
tattctttggtctcattacacagga

SEQ ID NO: 5898867 - DNA, 25 bp, Homo sapien
tgtaagcccagatagcctgtaagcc

SEQ ID NO: 5898868 - DNA, 25 bp, Homo sapien
ttatcctcggcgttaagacaagagc

SEQ ID NO: 5898869 - DNA, 25 bp, Homo sapien
atctctcttctgctctttattcttt

SEQ ID NO: 5898870 - DNA, 25 bp, Homo sapien
aaggagtgtgagctgccatagacaa

SEQ ID NO: 5898871 - DNA, 25 bp, Homo sapien
tcctgtgtaatgagaccaaagaata

SEQ ID NO: 5898872 - DNA, 25 bp, Homo sapien
agctggtgagcccatggccctttgc

SEQ ID NO: 5898873 - DNA, 25 bp, Homo sapien
catagcgtgacaggacaagctttaa

SEQ ID NO: 5898874 - DNA, 25 bp, Homo sapien
ccactggtagtaaacagaaaggagt

SEQ ID NO: 5898875 - DNA, 25 bp, Homo sapien
gcaggtctataccaagggagccttc

SEQ ID NO: 5898876 - DNA, 25 bp, Homo sapien
aaagaataaagagcagaagagagat

SEQ ID NO: 5898877 - DNA, 25 bp, Homo sapien
ttgtctatggcagctcacactcctt

SEQ ID NO: 5898878 - DNA, 25 bp, Homo sapien
ggcttacaggctatctgggcttaca

SEQ ID NO: 5898879 - DNA, 25 bp, Homo sapien
gctttaaaaccagccaaaggatggc

SEQ ID NO: 5898880 - DNA, 25 bp, Homo sapien
gctcttgtcttaacgccgaggataa

SEQ ID NO: 5898881 - DNA, 25 bp, Homo sapien
agcccgggatgcagctcactctgta

SEQ ID NO: 5898882 - DNA, 25 bp, Homo sapien
gtaacagtagtgtggtgctctttaa

SEQ ID NO: 5898883 - DNA, 25 bp, Homo sapien
aatactgagcccttagtcatgaact

SEQ ID NO: 5898884 - DNA, 25 bp, Homo sapien
gatcattagtcttcagcaggtttta

SEQ ID NO: 5898885 - DNA, 25 bp, Homo sapien
agttaagtctactctttgccatctg

SEQ ID NO: 5898886 - DNA, 25 bp, Homo sapien
catcttcagtgggaccgtggtctag

SEQ ID NO: 5898887 - DNA, 25 bp, Homo sapien
ttgccatctgagttgtatcatgaca

SEQ ID NO: 5898888 - DNA, 25 bp, Homo sapien
gtggacatcattccctgtgttcatt

SEQ ID NO: 5898889 - DNA, 25 bp, Homo sapien
attctctccccattgatcattagtc

SEQ ID NO: 5898890 - DNA, 25 bp, Homo sapien
ggtctagctttcctagttccaggaa

SEQ ID NO: 5898891 - DNA, 25 bp, Homo sapien
ggagactgcagactccatcttcagt

SEQ ID NO: 5898892 - DNA, 25 bp, Homo sapien
attcgctaggcactctttgtaacag

SEQ ID NO: 5898893 - DNA, 25 bp, Homo sapien
ttcctggaactaggaaagctagacc

SEQ ID NO: 5898894 - DNA, 25 bp, Homo sapien
ttaaagagcaccacactactgttac

SEQ ID NO: 5898895 - DNA, 25 bp, Homo sapien
taaaacctgctgaagactaatgatc

SEQ ID NO: 5898896 - DNA, 25 bp, Homo sapien
agttcatgactaagggctcagtatt

SEQ ID NO: 5898897 - DNA, 25 bp, Homo sapien
ctagaccacggtcccactgaagatg

SEQ ID NO: 5898898 - DNA, 25 bp, Homo sapien
aatgaacacagggaatgatgtccac

SEQ ID NO: 5898899 - DNA, 25 bp, Homo sapien
cagatggcaaagagtagacttaact

SEQ ID NO: 5898900 - DNA, 25 bp, Homo sapien
actgaagatggagtctgcagtctcc

SEQ ID NO: 5898901 - DNA, 25 bp, Homo sapien
gactaatgatcaatggggagagaat

SEQ ID NO: 5898902 - DNA, 25 bp, Homo sapien
ctgttacaaagagtgcctagcgaat

SEQ ID NO: 5898903 - DNA, 25 bp, Homo sapien
tgtcatgatacaactcagatggcaa

SEQ ID NO: 5898904 - DNA, 25 bp, Homo sapien
tagctcccaaatgatactgtcctgc

SEQ ID NO: 5898905 - DNA, 25 bp, Homo sapien
tgtcctgccatcattctgatttgac

SEQ ID NO: 5898906 - DNA, 25 bp, Homo sapien
ttgtgtgctctagtttccatctcaa

SEQ ID NO: 5898907 - DNA, 25 bp, Homo sapien
ggacttttgtcaagtttgccccaat

SEQ ID NO: 5898908 - DNA, 25 bp, Homo sapien
gaatttagcaccgtaatcctgtcct

SEQ ID NO: 5898909 - DNA, 25 bp, Homo sapien
atgacaactgtgctagcccagctaa

SEQ ID NO: 5898910 - DNA, 25 bp, Homo sapien
tgactgtttgtggtgagcatcgccc

SEQ ID NO: 5898911 - DNA, 25 bp, Homo sapien
ttgccccaatggtacgctgtttgaa

SEQ ID NO: 5898912 - DNA, 25 bp, Homo sapien
gttgggcacattctctattggtcag

SEQ ID NO: 5898913 - DNA, 25 bp, Homo sapien
taggctgccgcttcacagtgtagac

SEQ ID NO: 5898914 - DNA, 25 bp, Homo sapien
cagaaagtgttcttggcccaggctc

SEQ ID NO: 5898915 - DNA, 25 bp, Homo sapien
aggacaggattacggtgctaaattc

SEQ ID NO: 5898916 - DNA, 25 bp, Homo sapien
ttcaaacagcgtaccattggggcaa

SEQ ID NO: 5898917 - DNA, 25 bp, Homo sapien
gtcaaatcagaatgatggcaggaca

SEQ ID NO: 5898918 - DNA, 25 bp, Homo sapien
attggggcaaacttgacaaaagtcc

SEQ ID NO: 5898919 - DNA, 25 bp, Homo sapien
ctgaccaatagagaatgtgcccaac

SEQ ID NO: 5898920 - DNA, 25 bp, Homo sapien
ttagctgggctagcacagttgtcat

SEQ ID NO: 5898921 - DNA, 25 bp, Homo sapien
gtctacactgtgaagcggcagccta

SEQ ID NO: 5898922 - DNA, 25 bp, Homo sapien
gcaggacagtatcatttgggagcta

SEQ ID NO: 5898923 - DNA, 25 bp, Homo sapien
gagcctgggccaagaacactttctg

SEQ ID NO: 5898924 - DNA, 25 bp, Homo sapien
gggcgatgctcaccacaaacagtca

SEQ ID NO: 5898925 - DNA, 25 bp, Homo sapien
ttgagatggaaactagagcacacaa

SEQ ID NO: 5898926 - DNA, 25 bp, Homo sapien
gaaaatcatgctcaccaacagacag

SEQ ID NO: 5898927 - DNA, 25 bp, Homo sapien
tttctacagacattctttgggatat

SEQ ID NO: 5898928 - DNA, 25 bp, Homo sapien
gaaggtagcttggtacctggctgcc

SEQ ID NO: 5898929 - DNA, 25 bp, Homo sapien
caccagatgttaacacttagtacct

SEQ ID NO: 5898930 - DNA, 25 bp, Homo sapien
ggtagtctgtgctacaccagatgtt

SEQ ID NO: 5898931 - DNA, 25 bp, Homo sapien
gtcctgacactctattagcactgaa

SEQ ID NO: 5898932 - DNA, 25 bp, Homo sapien
gatattttaaacatccatggaccag

SEQ ID NO: 5898933 - DNA, 25 bp, Homo sapien
ggaccagcaccataaggtagtctgt

SEQ ID NO: 5898934 - DNA, 25 bp, Homo sapien
ggtttcttggctgtacaatgggctt

SEQ ID NO: 5898935 - DNA, 25 bp, Homo sapien
gggtgccacactttatagaggcata

SEQ ID NO: 5898936 - DNA, 25 bp, Homo sapien
ttccttcagagtcctgacactctat

SEQ ID NO: 5898937 - DNA, 25 bp, Homo sapien
ggcagccaggtaccaagctaccttc

SEQ ID NO: 5898938 - DNA, 25 bp, Homo sapien
aacatctggtgtagcacagactacc

SEQ ID NO: 5898939 - DNA, 25 bp, Homo sapien
ttcagtgctaatagagtgtcaggac

SEQ ID NO: 5898940 - DNA, 25 bp, Homo sapien
ctggtccatggatgtttaaaatatc

SEQ ID NO: 5898941 - DNA, 25 bp, Homo sapien
atatcccaaagaatgtctgtagaaa

SEQ ID NO: 5898942 - DNA, 25 bp, Homo sapien
aggtactaagtgttaacatctggtg

SEQ ID NO: 5898943 - DNA, 25 bp, Homo sapien
tatgcctctataaagtgtggcaccc

SEQ ID NO: 5898944 - DNA, 25 bp, Homo sapien
ctgtctgttggtgagcatgattttc

SEQ ID NO: 5898945 - DNA, 25 bp, Homo sapien
acagactaccttatggtgctggtcc

SEQ ID NO: 5898946 - DNA, 25 bp, Homo sapien
aagcccattgtacagccaagaaacc

SEQ ID NO: 5898947 - DNA, 25 bp, Homo sapien
atagagtgtcaggactctgaaggaa

SEQ ID NO: 5898948 - DNA, 25 bp, Homo sapien
gttcccacagcacagagccggtgtg

SEQ ID NO: 5898949 - DNA, 25 bp, Homo sapien
acgtgagcgtgctttcctccttgtg

SEQ ID NO: 5898950 - DNA, 25 bp, Homo sapien
ggttatgcgtatgacccggtatgaa

SEQ ID NO: 5898951 - DNA, 25 bp, Homo sapien
cagagccggtgtgacatgacagaac

SEQ ID NO: 5898952 - DNA, 25 bp, Homo sapien
gcactcagtgagctttctttttaaa

SEQ ID NO: 5898953 - DNA, 25 bp, Homo sapien
atgacagaaccctgcactcagtgag

SEQ ID NO: 5898954 - DNA, 25 bp, Homo sapien
ttcctccttgtgttggttatgcgta

SEQ ID NO: 5898955 - DNA, 25 bp, Homo sapien
gtgcgtttcttatttaatccctctc

SEQ ID NO: 5898956 - DNA, 25 bp, Homo sapien
accccttttacactgtttctgtgat

SEQ ID NO: 5898957 - DNA, 25 bp, Homo sapien
aactcccaggaaatgcagttgtgaa

SEQ ID NO: 5898958 - DNA, 25 bp, Homo sapien
taactcagcggacagtacctttaga

SEQ ID NO: 5898959 - DNA, 25 bp, Homo sapien
cacaccggctctgtgctgtgggaac

SEQ ID NO: 5898960 - DNA, 25 bp, Homo sapien
tacgcataaccaacacaaggaggaa

SEQ ID NO: 5898961 - DNA, 25 bp, Homo sapien
gttctgtcatgtcacaccggctctg

SEQ ID NO: 5898962 - DNA, 25 bp, Homo sapien
tctaaaggtactgtccgctgagtta

SEQ ID NO: 5898963 - DNA, 25 bp, Homo sapien
atcacagaaacagtgtaaaaggggt

SEQ ID NO: 5898964 - DNA, 25 bp, Homo sapien
ttcataccgggtcatacgcataacc

SEQ ID NO: 5898965 - DNA, 25 bp, Homo sapien
ctcactgagtgcagggttctgtcat

SEQ ID NO: 5898966 - DNA, 25 bp, Homo sapien
cacaaggaggaaagcacgctcacgt

SEQ ID NO: 5898967 - DNA, 25 bp, Homo sapien
tttaaaaagaaagctcactgagtgc

SEQ ID NO: 5898968 - DNA, 25 bp, Homo sapien
ttcacaactgcatttcctgggagtt

SEQ ID NO: 5898969 - DNA, 25 bp, Homo sapien
gagagggattaaataagaaacgcac

SEQ ID NO: 5898970 - DNA, 25 bp, Homo sapien
actaaagttcctatccttggcatat

SEQ ID NO: 5898971 - DNA, 25 bp, Homo sapien
gaacatcgttgtaggttctcaccca

SEQ ID NO: 5898972 - DNA, 25 bp, Homo sapien
ccttggcatatgattgcacttgatt

SEQ ID NO: 5898973 - DNA, 25 bp, Homo sapien
gcacttgattttggcatttagggtc

SEQ ID NO: 5898974 - DNA, 25 bp, Homo sapien
attctgagcaacctatctttattga

SEQ ID NO: 5898975 - DNA, 25 bp, Homo sapien
tttctattgtatgttttcggttaag

SEQ ID NO: 5898976 - DNA, 25 bp, Homo sapien
ggttctcacccatgttagttttacg

SEQ ID NO: 5898977 - DNA, 25 bp, Homo sapien
cagactaaattctcattggcagcaa

SEQ ID NO: 5898978 - DNA, 25 bp, Homo sapien
gaacgtgttgcttctataagggaat

SEQ ID NO: 5898979 - DNA, 25 bp, Homo sapien
tctttgcctgtgagatttcaacatt

SEQ ID NO: 5898980 - DNA, 25 bp, Homo sapien
tgacttgagtgttattcagactaaa

SEQ ID NO: 5898981 - DNA, 25 bp, Homo sapien
atatgccaaggataggaactttagt

SEQ ID NO: 5898982 - DNA, 25 bp, Homo sapien
aatcaagtgcaatcatatgccaagg

SEQ ID NO: 5898983 - DNA, 25 bp, Homo sapien
gaccctaaatgccaaaatcaagtgc

SEQ ID NO: 5898984 - DNA, 25 bp, Homo sapien
cttaaccgaaaacatacaatagaaa

SEQ ID NO: 5898985 - DNA, 25 bp, Homo sapien
tcaataaagataggttgctcagaat

SEQ ID NO: 5898986 - DNA, 25 bp, Homo sapien
cgtaaaactaacatgggtgagaacc

SEQ ID NO: 5898987 - DNA, 25 bp, Homo sapien
attcccttatagaagcaacacgttc

SEQ ID NO: 5898988 - DNA, 25 bp, Homo sapien
aatgttgaaatctcacaggcaaaga

SEQ ID NO: 5898989 - DNA, 25 bp, Homo sapien
ttgctgccaatgagaatttagtctg

SEQ ID NO: 5898990 - DNA, 25 bp, Homo sapien
tgggtgagaacctacaacgatgttc

SEQ ID NO: 5898991 - DNA, 25 bp, Homo sapien
tttagtctgaataacactcaagtca

SEQ ID NO: 5898992 - DNA, 25 bp, Homo sapien
ttctgtgtatctagagactcctgac

SEQ ID NO: 5898993 - DNA, 25 bp, Homo sapien
tctgtacagtgagctccttgaaggt

SEQ ID NO: 5898994 - DNA, 25 bp, Homo sapien
ctccatgaagatcacctgctctaat

SEQ ID NO: 5898995 - DNA, 25 bp, Homo sapien
tgggaacccacctctgagacaaggg

SEQ ID NO: 5898996 - DNA, 25 bp, Homo sapien
ttactggacacgttgataatggcat

SEQ ID NO: 5898997 - DNA, 25 bp, Homo sapien
gctctaatgtccctgtgcttagttc

SEQ ID NO: 5898998 - DNA, 25 bp, Homo sapien
gaaacagccttaactcctaagctca

SEQ ID NO: 5898999 - DNA, 25 bp, Homo sapien
tgctttaaagcctgtgtgggtttgc

SEQ ID NO: 5899000 - DNA, 25 bp, Homo sapien
aagggtacagacttcctaatgacaa

SEQ ID NO: 5899001 - DNA, 25 bp, Homo sapien
ctatcttttcttgtatgtttccatg

SEQ ID NO: 5899002 - DNA, 25 bp, Homo sapien
gtttccatgttgtcaggtagttgta

SEQ ID NO: 5899003 - DNA, 25 bp, Homo sapien
atgccattatcaacgtgtccagtaa

SEQ ID NO: 5899004 - DNA, 25 bp, Homo sapien
tacaactacctgacaacatggaaac

SEQ ID NO: 5899005 - DNA, 25 bp, Homo sapien
attagagcaggtgatcttcatggag

SEQ ID NO: 5899006 - DNA, 25 bp, Homo sapien
ttgtcattaggaagtctgtaccctt

SEQ ID NO: 5899007 - DNA, 25 bp, Homo sapien
gaactaagcacagggacattagagc

SEQ ID NO: 5899008 - DNA, 25 bp, Homo sapien
cccttgtctcagaggtgggttccca

SEQ ID NO: 5899009 - DNA, 25 bp, Homo sapien
gcaaacccacacaggctttaaagca

SEQ ID NO: 5899010 - DNA, 25 bp, Homo sapien
gtcaggagtctctagatacacagaa

SEQ ID NO: 5899011 - DNA, 25 bp, Homo sapien
tgagcttaggagttaaggctgtttc

SEQ ID NO: 5899012 - DNA, 25 bp, Homo sapien
accttcaaggagctcactgtacaga

SEQ ID NO: 5899013 - DNA, 25 bp, Homo sapien
catggaaacatacaagaaaagatag

SEQ ID NO: 5899014 - DNA, 25 bp, Homo sapien
taaagagccctctggttcattgcct

SEQ ID NO: 5899015 - DNA, 25 bp, Homo sapien
ttctgtttatcctctcatgggtgat

SEQ ID NO: 5899016 - DNA, 25 bp, Homo sapien
aaagttgccaacctcgacgggctag

SEQ ID NO: 5899017 - DNA, 25 bp, Homo sapien
tgattatctcagtggtgtcaccagg

SEQ ID NO: 5899018 - DNA, 25 bp, Homo sapien
gaaggcagcttcctatatgcagcgt

SEQ ID NO: 5899019 - DNA, 25 bp, Homo sapien
attcctctgagggacttggcctgag

SEQ ID NO: 5899020 - DNA, 25 bp, Homo sapien
gagccagggatgcattctctccaaa

SEQ ID NO: 5899021 - DNA, 25 bp, Homo sapien
gtgcacccttttcagctggatgaga

SEQ ID NO: 5899022 - DNA, 25 bp, Homo sapien
gcagcgtgtgctttcttattcttat

SEQ ID NO: 5899023 - DNA, 25 bp, Homo sapien
gtctaagcagcgatgggttcagtgt

SEQ ID NO: 5899024 - DNA, 25 bp, Homo sapien
gttcattgcctgatcggctttgaga

SEQ ID NO: 5899025 - DNA, 25 bp, Homo sapien
tctcatccagctgaaaagggtgcac

SEQ ID NO: 5899026 - DNA, 25 bp, Homo sapien
aggcaatgaaccagagggctcttta

SEQ ID NO: 5899027 - DNA, 25 bp, Homo sapien
acactgaacccatcgctgcttagac

SEQ ID NO: 5899028 - DNA, 25 bp, Homo sapien
atcacccatgagaggataaacagaa

SEQ ID NO: 5899029 - DNA, 25 bp, Homo sapien
ctcaggccaagtccctcagaggaat

SEQ ID NO: 5899030 - DNA, 25 bp, Homo sapien
tctcaaagccgatcaggcaatgaac

SEQ ID NO: 5899031 - DNA, 25 bp, Homo sapien
cctggtgacaccactgagataatca

SEQ ID NO: 5899032 - DNA, 25 bp, Homo sapien
acgctgcatataggaagctgccttc

SEQ ID NO: 5899033 - DNA, 25 bp, Homo sapien
ataagaataagaaagcacacgctgc

SEQ ID NO: 5899034 - DNA, 25 bp, Homo sapien
tttggagagaatgcatccctggctc

SEQ ID NO: 5899035 - DNA, 25 bp, Homo sapien
ctagcccgtcgaggttggcaacttt

SEQ ID NO: 5899036 - DNA, 25 bp, Homo sapien
atcagccctgtcctgagacagcagg

SEQ ID NO: 5899037 - DNA, 25 bp, Homo sapien
agagtggtctgtaagctccatcagc

SEQ ID NO: 5899038 - DNA, 25 bp, Homo sapien
tacccctccaccttaaacatatatt

SEQ ID NO: 5899039 - DNA, 25 bp, Homo sapien
cctccctggctactgggtcaataat

SEQ ID NO: 5899040 - DNA, 25 bp, Homo sapien
cttggtctctttatgctgctgagtc

SEQ ID NO: 5899041 - DNA, 25 bp, Homo sapien
gggtcaataatctttcaggccatga

SEQ ID NO: 5899042 - DNA, 25 bp, Homo sapien
gcttacttagccttctggttacaga

SEQ ID NO: 5899043 - DNA, 25 bp, Homo sapien
ggcatgggtgacagggctctcattt

SEQ ID NO: 5899044 - DNA, 25 bp, Homo sapien
ggaaggacactggagactttcttgt

SEQ ID NO: 5899045 - DNA, 25 bp, Homo sapien
acaaaacaaggcattctctacccct

SEQ ID NO: 5899046 - DNA, 25 bp, Homo sapien
ttctggttacagactatttccatgc

SEQ ID NO: 5899047 - DNA, 25 bp, Homo sapien
acaagaaagtctccagtgtccttcc

SEQ ID NO: 5899048 - DNA, 25 bp, Homo sapien
gctgatggagcttacagaccactct

SEQ ID NO: 5899049 - DNA, 25 bp, Homo sapien
cctgctgtctcaggacagggctgat

SEQ ID NO: 5899050 - DNA, 25 bp, Homo sapien
aaatgagagccctgtcacccatgcc

SEQ ID NO: 5899051 - DNA, 25 bp, Homo sapien
tcatggcctgaaagattattgaccc

SEQ ID NO: 5899052 - DNA, 25 bp, Homo sapien
attattgacccagtagccagggagg

SEQ ID NO: 5899053 - DNA, 25 bp, Homo sapien
aatatatgtttaaggtggaggggta

SEQ ID NO: 5899054 - DNA, 25 bp, Homo sapien
tctgtaaccagaaggctaagtaagc

SEQ ID NO: 5899055 - DNA, 25 bp, Homo sapien
aggggtagagaatgccttgttttgt

SEQ ID NO: 5899056 - DNA, 25 bp, Homo sapien
gcatggaaatagtctgtaaccagaa

SEQ ID NO: 5899057 - DNA, 25 bp, Homo sapien
gactcagcagcataaagagaccaag

SEQ ID NO: 5899058 - DNA, 25 bp, Homo sapien
aggacacaaacttgattgcccaaag

SEQ ID NO: 5899059 - DNA, 25 bp, Homo sapien
gaatagacctgtcactcaaggctct

SEQ ID NO: 5899060 - DNA, 25 bp, Homo sapien
cccacagaggccattcattgaacag

SEQ ID NO: 5899061 - DNA, 25 bp, Homo sapien
tgccagttacccacatatgaccaga

SEQ ID NO: 5899062 - DNA, 25 bp, Homo sapien
ctgtcctccgctcagttgtagaaag

SEQ ID NO: 5899063 - DNA, 25 bp, Homo sapien
tggaagctgggcctagaaactcaca

SEQ ID NO: 5899064 - DNA, 25 bp, Homo sapien
agtcccattttgtccaccgaataga

SEQ ID NO: 5899065 - DNA, 25 bp, Homo sapien
ggctttcctagctgatgttgtccta

SEQ ID NO: 5899066 - DNA, 25 bp, Homo sapien
agaaactcacagatggcctggcagt

SEQ ID NO: 5899067 - DNA, 25 bp, Homo sapien
gagaggacaggtattgccccacaga

SEQ ID NO: 5899068 - DNA, 25 bp, Homo sapien
atatgaccagaagccagggctcctg

SEQ ID NO: 5899069 - DNA, 25 bp, Homo sapien
tgtgagtttctaggcccagcttcca

SEQ ID NO: 5899070 - DNA, 25 bp, Homo sapien
ctttctacaactgagcggaggacag

SEQ ID NO: 5899071 - DNA, 25 bp, Homo sapien
ctttgggcaatcaagtttgtgtcct

SEQ ID NO: 5899072 - DNA, 25 bp, Homo sapien
caggagccctggcttctggtcatat

SEQ ID NO: 5899073 - DNA, 25 bp, Homo sapien
agagccttgagtgacaggtctattc

SEQ ID NO: 5899074 - DNA, 25 bp, Homo sapien
ctgttcaatgaatggcctctgtggg

SEQ ID NO: 5899075 - DNA, 25 bp, Homo sapien
taggacaacatcagctaggaaagcc

SEQ ID NO: 5899076 - DNA, 25 bp, Homo sapien
tctattcggtggacaaaatgggact

SEQ ID NO: 5899077 - DNA, 25 bp, Homo sapien
actgccaggccatctgtgagtttct

SEQ ID NO: 5899078 - DNA, 25 bp, Homo sapien
tctgtggggcaatacctgtcctctc

SEQ ID NO: 5899079 - DNA, 25 bp, Homo sapien
tctggtcatatgtgggtaactggca

SEQ ID NO: 5899080 - DNA, 25 bp, Homo sapien
cagagaactcggaacatgtgtatgt

SEQ ID NO: 5899081 - DNA, 25 bp, Homo sapien
ttttccacctcgctgtaaaaatggt

SEQ ID NO: 5899082 - DNA, 25 bp, Homo sapien
ctcgctgtaaaaatggtgtgtgtac

SEQ ID NO: 5899083 - DNA, 25 bp, Homo sapien
ggtcttaatccatgtacactttttt

SEQ ID NO: 5899084 - DNA, 25 bp, Homo sapien
gcatgttaatatctttcgttatggg

SEQ ID NO: 5899085 - DNA, 25 bp, Homo sapien
gacacattttggtcttaatccatgt

SEQ ID NO: 5899086 - DNA, 25 bp, Homo sapien
actgttgagctgtagttagaatact

SEQ ID NO: 5899087 - DNA, 25 bp, Homo sapien
cagcactagcaagtgtgtgttttta

SEQ ID NO: 5899088 - DNA, 25 bp, Homo sapien
gtgacatttgattcaactgttgagc

SEQ ID NO: 5899089 - DNA, 25 bp, Homo sapien
tgtattatttggactttggattcag

SEQ ID NO: 5899090 - DNA, 25 bp, Homo sapien
tagactatggaggagtgcagagaac

SEQ ID NO: 5899091 - DNA, 25 bp, Homo sapien
agtattctaactacagctcaacagt

SEQ ID NO: 5899092 - DNA, 25 bp, Homo sapien
cccataacgaaagatattaacatgc

SEQ ID NO: 5899093 - DNA, 25 bp, Homo sapien
taaaaacacacacttgctagtgctg

SEQ ID NO: 5899094 - DNA, 25 bp, Homo sapien
acatacacatgttccgagttctctg

SEQ ID NO: 5899095 - DNA, 25 bp, Homo sapien
aaaaaagtgtacatggattaagacc

SEQ ID NO: 5899096 - DNA, 25 bp, Homo sapien
ctgaatccaaagtccaaataataca

SEQ ID NO: 5899097 - DNA, 25 bp, Homo sapien
acatggattaagaccaaaatgtgtc

SEQ ID NO: 5899098 - DNA, 25 bp, Homo sapien
gctcaacagttgaatcaaatgtcac

SEQ ID NO: 5899099 - DNA, 25 bp, Homo sapien
gtacacacaccatttttacagcgag

SEQ ID NO: 5899100 - DNA, 25 bp, Homo sapien
accatttttacagcgaggtggaaaa

SEQ ID NO: 5899101 - DNA, 25 bp, Homo sapien
gttctctgcactcctccatagtcta

SEQ ID NO: 5899102 - DNA, 25 bp, Homo sapien
aggatgaatggtgccttgctcattc

SEQ ID NO: 5899103 - DNA, 25 bp, Homo sapien
gtgccttgctcattcttgagtagca

SEQ ID NO: 5899104 - DNA, 25 bp, Homo sapien
gctaagtgtatttttttgctccaga

SEQ ID NO: 5899105 - DNA, 25 bp, Homo sapien
tagggtatttcaaaactgccaaggg

SEQ ID NO: 5899106 - DNA, 25 bp, Homo sapien
tttcttggttctacaattgtaatag

SEQ ID NO: 5899107 - DNA, 25 bp, Homo sapien
gagcgggcattattgctccatattg

SEQ ID NO: 5899108 - DNA, 25 bp, Homo sapien
cgggcattattgctccatattggag

SEQ ID NO: 5899109 - DNA, 25 bp, Homo sapien
tacggatgacgttctgttttctgtt

SEQ ID NO: 5899110 - DNA, 25 bp, Homo sapien
ctcattcttgagtagcattagggta

SEQ ID NO: 5899111 - DNA, 25 bp, Homo sapien
gattagttgggccaagtgaaagccc

SEQ ID NO: 5899112 - DNA, 25 bp, Homo sapien
aatggtgccttgctcattcttgagt

SEQ ID NO: 5899113 - DNA, 25 bp, Homo sapien
tctggagcaaaaaaatacacttagc

SEQ ID NO: 5899114 - DNA, 25 bp, Homo sapien
ctccaatatggagcaataatgcccg

SEQ ID NO: 5899115 - DNA, 25 bp, Homo sapien
ctattacaattgtagaaccaagaaa

SEQ ID NO: 5899116 - DNA, 25 bp, Homo sapien
tgctactcaagaatgagcaaggcac

SEQ ID NO: 5899117 - DNA, 25 bp, Homo sapien
gaatgagcaaggcaccattcatcct

SEQ ID NO: 5899118 - DNA, 25 bp, Homo sapien
cccttggcagttttgaaatacccta

SEQ ID NO: 5899119 - DNA, 25 bp, Homo sapien
taccctaatgctactcaagaatgag

SEQ ID NO: 5899120 - DNA, 25 bp, Homo sapien
actcaagaatgagcaaggcaccatt

SEQ ID NO: 5899121 - DNA, 25 bp, Homo sapien
caatatggagcaataatgcccgctc

SEQ ID NO: 5899122 - DNA, 25 bp, Homo sapien
aacagaaaacagaacgtcatccgta

SEQ ID NO: 5899123 - DNA, 25 bp, Homo sapien
gggctttcacttggcccaactaatc

SEQ ID NO: 5899124 - DNA, 25 bp, Homo sapien
ggaattggttcattttcctgttcag

SEQ ID NO: 5899125 - DNA, 25 bp, Homo sapien
tcagaaggtcctgttcctggtcaat

SEQ ID NO: 5899126 - DNA, 25 bp, Homo sapien
gaatgttgactatctgacaggtgac

SEQ ID NO: 5899127 - DNA, 25 bp, Homo sapien
tgactatctgacaggtgactcagaa

SEQ ID NO: 5899128 - DNA, 25 bp, Homo sapien
ttcctagaatttggaggcctcttca

SEQ ID NO: 5899129 - DNA, 25 bp, Homo sapien
gggccaaaacattcccaacttgaat

SEQ ID NO: 5899130 - DNA, 25 bp, Homo sapien
ttttcttcctagaatttggaggcct

SEQ ID NO: 5899131 - DNA, 25 bp, Homo sapien
gttcctggtcaatgatctataacat

SEQ ID NO: 5899132 - DNA, 25 bp, Homo sapien
ggaggcctcttcagaatgttgacta

SEQ ID NO: 5899133 - DNA, 25 bp, Homo sapien
tcccaacttgaatgtctagaatgtg

SEQ ID NO: 5899134 - DNA, 25 bp, Homo sapien
aatgatctataacatgggccaaaac

SEQ ID NO: 5899135 - DNA, 25 bp, Homo sapien
ttctgagtcacctgtcagatagtca

SEQ ID NO: 5899136 - DNA, 25 bp, Homo sapien
aggcctccaaattctaggaagaaaa

SEQ ID NO: 5899137 - DNA, 25 bp, Homo sapien
gtcacctgtcagatagtcaacattc

SEQ ID NO: 5899138 - DNA, 25 bp, Homo sapien
attcaagttgggaatgttttggccc

SEQ ID NO: 5899139 - DNA, 25 bp, Homo sapien
tgaagaggcctccaaattctaggaa

SEQ ID NO: 5899140 - DNA, 25 bp, Homo sapien
tagtcaacattctgaagaggcctcc

SEQ ID NO: 5899141 - DNA, 25 bp, Homo sapien
ctgaacaggaaaatgaaccaattcc

SEQ ID NO: 5899142 - DNA, 25 bp, Homo sapien
cacattctagacattcaagttggga

SEQ ID NO: 5899143 - DNA, 25 bp, Homo sapien
atgttatagatcattgaccaggaac

SEQ ID NO: 5899144 - DNA, 25 bp, Homo sapien
attgaccaggaacaggaccttctga

SEQ ID NO: 5899145 - DNA, 25 bp, Homo sapien
gttttggcccatgttatagatcatt

SEQ ID NO: 5899146 - DNA, 25 bp, Homo sapien
atggcttcacagatatattgctagt

SEQ ID NO: 5899147 - DNA, 25 bp, Homo sapien
gcacaactgccatctccaaatattt

SEQ ID NO: 5899148 - DNA, 25 bp, Homo sapien
ctctttcctaactggtgtgggctta

SEQ ID NO: 5899149 - DNA, 25 bp, Homo sapien
tttccagtagtctaggcattcctat

SEQ ID NO: 5899150 - DNA, 25 bp, Homo sapien
attcctatagtcttattttccagta

SEQ ID NO: 5899151 - DNA, 25 bp, Homo sapien
tgggcttaggagtgatccacactaa

SEQ ID NO: 5899152 - DNA, 25 bp, Homo sapien
cgacccttttgatacaggtttgaat

SEQ ID NO: 5899153 - DNA, 25 bp, Homo sapien
tgtctctctaccactgttttttaag

SEQ ID NO: 5899154 - DNA, 25 bp, Homo sapien
atgtgattattgtgtctctctacca

SEQ ID NO: 5899155 - DNA, 25 bp, Homo sapien
gatagtatctctttcctaactggtg

SEQ ID NO: 5899156 - DNA, 25 bp, Homo sapien
gctatcgtattttcatttactcaat

SEQ ID NO: 5899157 - DNA, 25 bp, Homo sapien
cttaaaaaacagtggtagagagaca

SEQ ID NO: 5899158 - DNA, 25 bp, Homo sapien
attcaaacctgtatcaaaagggtcg

SEQ ID NO: 5899159 - DNA, 25 bp, Homo sapien
taagcccacaccagttaggaaagag

SEQ ID NO: 5899160 - DNA, 25 bp, Homo sapien
tggtagagagacacaataatcacat

SEQ ID NO: 5899161 - DNA, 25 bp, Homo sapien
actagcaatatatctgtgaagccat

SEQ ID NO: 5899162 - DNA, 25 bp, Homo sapien
aaatatttggagatggcagttgtgc

SEQ ID NO: 5899163 - DNA, 25 bp, Homo sapien
ataggaatgcctagactactggaaa

SEQ ID NO: 5899164 - DNA, 25 bp, Homo sapien
caccagttaggaaagagatactatc

SEQ ID NO: 5899165 - DNA, 25 bp, Homo sapien
tactggaaaataagactataggaat

SEQ ID NO: 5899166 - DNA, 25 bp, Homo sapien
attgagtaaatgaaaatacgatagc

SEQ ID NO: 5899167 - DNA, 25 bp, Homo sapien
ttagtgtggatcactcctaagccca

SEQ ID NO: 5899168 - DNA, 25 bp, Homo sapien
gaagtgactcatgttggctttagta

SEQ ID NO: 5899169 - DNA, 25 bp, Homo sapien
aagccctcagatcagctgcatcttt

SEQ ID NO: 5899170 - DNA, 25 bp, Homo sapien
atctctaagcctccgatgagttgag

SEQ ID NO: 5899171 - DNA, 25 bp, Homo sapien
gaagtcagaccgaccagtttctaac

SEQ ID NO: 5899172 - DNA, 25 bp, Homo sapien
atcctggatgctgagaacactgttg

SEQ ID NO: 5899173 - DNA, 25 bp, Homo sapien
atatttccagtcttcgtgacacggg

SEQ ID NO: 5899174 - DNA, 25 bp, Homo sapien
gctcagccgctgtagaaccaagaac

SEQ ID NO: 5899175 - DNA, 25 bp, Homo sapien
gttgccaacttgtaactgcacttga

SEQ ID NO: 5899176 - DNA, 25 bp, Homo sapien
taatagagacctcatcctggatgct

SEQ ID NO: 5899177 - DNA, 25 bp, Homo sapien
ctggccagtccctattactgttaag

SEQ ID NO: 5899178 - DNA, 25 bp, Homo sapien
ttgatacatacacattccagcccag

SEQ ID NO: 5899179 - DNA, 25 bp, Homo sapien
ctcaactcatcggaggcttagagat

SEQ ID NO: 5899180 - DNA, 25 bp, Homo sapien
cccgtgtcacgaagactggaaatat

SEQ ID NO: 5899181 - DNA, 25 bp, Homo sapien
tcaagtgcagttacaagttggcaac

SEQ ID NO: 5899182 - DNA, 25 bp, Homo sapien
agcatccaggatgaggtctctatta

SEQ ID NO: 5899183 - DNA, 25 bp, Homo sapien
gttagaaactggtcggtctgacttc

SEQ ID NO: 5899184 - DNA, 25 bp, Homo sapien
aaagatgcagctgatctgagggctt

SEQ ID NO: 5899185 - DNA, 25 bp, Homo sapien
caacagtgttctcagcatccaggat

SEQ ID NO: 5899186 - DNA, 25 bp, Homo sapien
gttcttggttctacagcggctgagc

SEQ ID NO: 5899187 - DNA, 25 bp, Homo sapien
ctgggctggaatgtgtatgtatcaa

SEQ ID NO: 5899188 - DNA, 25 bp, Homo sapien
tactaaagccaacatgagtcacttc

SEQ ID NO: 5899189 - DNA, 25 bp, Homo sapien
cttaacagtaatagggactggccag

SEQ ID NO: 5899190 - DNA, 25 bp, Homo sapien
aaggcaaagtggctgcttgatccct

SEQ ID NO: 5899191 - DNA, 25 bp, Homo sapien
aaattatgccgtcgcgaggttgttt

SEQ ID NO: 5899192 - DNA, 25 bp, Homo sapien
ggttgactttcaggtactactttct

SEQ ID NO: 5899193 - DNA, 25 bp, Homo sapien
aagccatgcattcagacttcccaga

SEQ ID NO: 5899194 - DNA, 25 bp, Homo sapien
gactgttgtaacttaatgcttctta

SEQ ID NO: 5899195 - DNA, 25 bp, Homo sapien
tgacaagtccccatcgttgaagtga

SEQ ID NO: 5899196 - DNA, 25 bp, Homo sapien
cactccatatgcaggtcagaacgta

SEQ ID NO: 5899197 - DNA, 25 bp, Homo sapien
gaagtgactggaatggtcccatgat

SEQ ID NO: 5899198 - DNA, 25 bp, Homo sapien
ctgcttgatcccttgctgaatgcaa

SEQ ID NO: 5899199 - DNA, 25 bp, Homo sapien
aaagttctgcttgacaagtccccat

SEQ ID NO: 5899200 - DNA, 25 bp, Homo sapien
ttcccagaacccttctcagtaaaga

SEQ ID NO: 5899201 - DNA, 25 bp, Homo sapien
tctttactgagaagggttctgggaa

SEQ ID NO: 5899202 - DNA, 25 bp, Homo sapien
taagaagcattaagttacaacagtc

SEQ ID NO: 5899203 - DNA, 25 bp, Homo sapien
tcacttcaacgatggggacttgtca

SEQ ID NO: 5899204 - DNA, 25 bp, Homo sapien
tacgttctgacctgcatatggagtg

SEQ ID NO: 5899205 - DNA, 25 bp, Homo sapien
tctgggaagtctgaatgcatggctt

SEQ ID NO: 5899206 - DNA, 25 bp, Homo sapien
agaaagtagtacctgaaagtcaacc

SEQ ID NO: 5899207 - DNA, 25 bp, Homo sapien
agggatcaagcagccactttgcctt

SEQ ID NO: 5899208 - DNA, 25 bp, Homo sapien
aaacaacctcgcgacggcataattt

SEQ ID NO: 5899209 - DNA, 25 bp, Homo sapien
atcatgggaccattccagtcacttc

SEQ ID NO: 5899210 - DNA, 25 bp, Homo sapien
ttgcattcagcaagggatcaagcag

SEQ ID NO: 5899211 - DNA, 25 bp, Homo sapien
atggggacttgtcaagcagaacttt

SEQ ID NO: 5899212 - DNA, 25 bp, Homo sapien
accattttgtcagtctcttctgcat

SEQ ID NO: 5899213 - DNA, 25 bp, Homo sapien
cagtctcttctgcatgttaccaaat

SEQ ID NO: 5899214 - DNA, 25 bp, Homo sapien
tgcctatttgtttgtctgtattgcc

SEQ ID NO: 5899215 - DNA, 25 bp, Homo sapien
gaagacaactttggacactgagagt

SEQ ID NO: 5899216 - DNA, 25 bp, Homo sapien
ggtctgaattagtatcccacttttc

SEQ ID NO: 5899217 - DNA, 25 bp, Homo sapien
gactcttgtgtatgtctgattgaag

SEQ ID NO: 5899218 - DNA, 25 bp, Homo sapien
atatgccagtgtatcaacttttcaa

SEQ ID NO: 5899219 - DNA, 25 bp, Homo sapien
gtatcccacttttctatgtaaactt

SEQ ID NO: 5899220 - DNA, 25 bp, Homo sapien
gtttcttacagcacctgaacactta

SEQ ID NO: 5899221 - DNA, 25 bp, Homo sapien
gatcttaggtctacatagctccttg

SEQ ID NO: 5899222 - DNA, 25 bp, Homo sapien
tgttacttgcttacatatgccatgc

SEQ ID NO: 5899223 - DNA, 25 bp, Homo sapien
caaggagctatgtagacctaagatc

SEQ ID NO: 5899224 - DNA, 25 bp, Homo sapien
aagtttacatagaaaagtgggatac

SEQ ID NO: 5899225 - DNA, 25 bp, Homo sapien
atttggtaacatgcagaagagactg

SEQ ID NO: 5899226 - DNA, 25 bp, Homo sapien
taagtgttcaggtgctgtaagaaac

SEQ ID NO: 5899227 - DNA, 25 bp, Homo sapien
ttgaaaagttgatacactggcatat

SEQ ID NO: 5899228 - DNA, 25 bp, Homo sapien
ggcaatacagacaaacaaataggca

SEQ ID NO: 5899229 - DNA, 25 bp, Homo sapien
cttcaatcagacatacacaagagtc

SEQ ID NO: 5899230 - DNA, 25 bp, Homo sapien
gcatggcatatgtaagcaagtaaca

SEQ ID NO: 5899231 - DNA, 25 bp, Homo sapien
atgcagaagagactgacaaaatggt

SEQ ID NO: 5899232 - DNA, 25 bp, Homo sapien
actctcagtgtccaaagttgtcttc

SEQ ID NO: 5899233 - DNA, 25 bp, Homo sapien
gaaaagtgggatactaattcagacc

SEQ ID NO: 5899234 - DNA, 25 bp, Homo sapien
tggctgatggagtgcctttgtaccc

SEQ ID NO: 5899235 - DNA, 25 bp, Homo sapien
atgtctggacctggttcctgcttgg

SEQ ID NO: 5899236 - DNA, 25 bp, Homo sapien
tgaggtgtagcctctggacacagct

SEQ ID NO: 5899237 - DNA, 25 bp, Homo sapien
cagggtggttactggacacatgtcc

SEQ ID NO: 5899238 - DNA, 25 bp, Homo sapien
tcaggccaccttctttgaggtacaa

SEQ ID NO: 5899239 - DNA, 25 bp, Homo sapien
gccatagaactaaagccaacccact

SEQ ID NO: 5899240 - DNA, 25 bp, Homo sapien
tgtaaccatgcctcagcagggtggt

SEQ ID NO: 5899241 - DNA, 25 bp, Homo sapien
gacacagctgcttcgagccatagaa

SEQ ID NO: 5899242 - DNA, 25 bp, Homo sapien
tgggaagcttgaaccccgctcaggg

SEQ ID NO: 5899243 - DNA, 25 bp, Homo sapien
ggacctgtggcgtccatgtctggac

SEQ ID NO: 5899244 - DNA, 25 bp, Homo sapien
tggtgacacctgtttcacagcagtt

SEQ ID NO: 5899245 - DNA, 25 bp, Homo sapien
ccaagcaggaaccaggtccagacat

SEQ ID NO: 5899246 - DNA, 25 bp, Homo sapien
ggacatgtgtccagtaaccaccctg

SEQ ID NO: 5899247 - DNA, 25 bp, Homo sapien
ttgtacctcaaagaaggtggcctga

SEQ ID NO: 5899248 - DNA, 25 bp, Homo sapien
ttctatggctcgaagcagctgtgtc

SEQ ID NO: 5899249 - DNA, 25 bp, Homo sapien
gggtacaaaggcactccatcagcca

SEQ ID NO: 5899250 - DNA, 25 bp, Homo sapien
aactgctgtgaaacaggtgtcacca

SEQ ID NO: 5899251 - DNA, 25 bp, Homo sapien
ccctgagcggggttcaagcttccca

SEQ ID NO: 5899252 - DNA, 25 bp, Homo sapien
accaccctgctgaggcatggttaca

SEQ ID NO: 5899253 - DNA, 25 bp, Homo sapien
gtccagacatggacgccacaggtcc

SEQ ID NO: 5899254 - DNA, 25 bp, Homo sapien
agtgggttggctttagttctatggc

SEQ ID NO: 5899255 - DNA, 25 bp, Homo sapien
agctgtgtccagaggctacacctca

SEQ ID NO: 5899256 - DNA, 25 bp, Homo sapien
gtctcactgagccaacttaactctg

SEQ ID NO: 5899257 - DNA, 25 bp, Homo sapien
aggtgaccgatttcatcaagtttgg

SEQ ID NO: 5899258 - DNA, 25 bp, Homo sapien
ttgtggtgctaactttgtgtccgtc

SEQ ID NO: 5899259 - DNA, 25 bp, Homo sapien
ccccacaagtgtagtcgtcattcaa

SEQ ID NO: 5899260 - DNA, 25 bp, Homo sapien
ggcatccccattattgctaattcat

SEQ ID NO: 5899261 - DNA, 25 bp, Homo sapien
gatctatctcagaggctatagctgg

SEQ ID NO: 5899262 - DNA, 25 bp, Homo sapien
gaaagctggttgtgcctatgtaata

SEQ ID NO: 5899263 - DNA, 25 bp, Homo sapien
ggaaagtctgttgtggttatctgca

SEQ ID NO: 5899264 - DNA, 25 bp, Homo sapien
catccatgattgtctgtctcactga

SEQ ID NO: 5899265 - DNA, 25 bp, Homo sapien
atgctggaatgttagcccttgctag

SEQ ID NO: 5899266 - DNA, 25 bp, Homo sapien
gggtatctgaacaccaacccacatg

SEQ ID NO: 5899267 - DNA, 25 bp, Homo sapien
ccaaacttgatgaaatcggtcacct

SEQ ID NO: 5899268 - DNA, 25 bp, Homo sapien
tgcagataaccacaacagactttcc

SEQ ID NO: 5899269 - DNA, 25 bp, Homo sapien
ttgaatgacgactacacttgtgggg

SEQ ID NO: 5899270 - DNA, 25 bp, Homo sapien
cagagttaagttggctcagtgagac

SEQ ID NO: 5899271 - DNA, 25 bp, Homo sapien
atgaattagcaataatggggatgcc

SEQ ID NO: 5899272 - DNA, 25 bp, Homo sapien
tattacataggcacaaccagctttc

SEQ ID NO: 5899273 - DNA, 25 bp, Homo sapien
ccagctatagcctctgagatagatc

SEQ ID NO: 5899274 - DNA, 25 bp, Homo sapien
gacggacacaaagttagcaccacaa

SEQ ID NO: 5899275 - DNA, 25 bp, Homo sapien
tcagtgagacagacaatcatggatg

SEQ ID NO: 5899276 - DNA, 25 bp, Homo sapien
ctagcaagggctaacattccagcat

SEQ ID NO: 5899277 - DNA, 25 bp, Homo sapien
catgtgggttggtgttcagataccc

SEQ ID NO: 5899278 - DNA, 25 bp, Homo sapien
tgaccggaaccctctgcaaaaacag

SEQ ID NO: 5899279 - DNA, 25 bp, Homo sapien
actgcccgaatccatgtgtgaagcc

SEQ ID NO: 5899280 - DNA, 25 bp, Homo sapien
ttagcaggagtatccactgcccgaa

SEQ ID NO: 5899281 - DNA, 25 bp, Homo sapien
agttttctcacggtcggagcatcag

SEQ ID NO: 5899282 - DNA, 25 bp, Homo sapien
actgctttcatacctagctaggctg

SEQ ID NO: 5899283 - DNA, 25 bp, Homo sapien
gaagccctaagcactcacagacgaa

SEQ ID NO: 5899284 - DNA, 25 bp, Homo sapien
atgggtgacccagtgcatttagcag

SEQ ID NO: 5899285 - DNA, 25 bp, Homo sapien
tagagtgttctgtgcctccaaggac

SEQ ID NO: 5899286 - DNA, 25 bp, Homo sapien
gaacacttgaccctgtagacggagt

SEQ ID NO: 5899287 - DNA, 25 bp, Homo sapien
attggccaccaactgtagatgtata

SEQ ID NO: 5899288 - DNA, 25 bp, Homo sapien
ggacgagcatctagacccttgggac

SEQ ID NO: 5899289 - DNA, 25 bp, Homo sapien
cagcctagctaggtatgaaagcagt

SEQ ID NO: 5899290 - DNA, 25 bp, Homo sapien
ggcttcacacatggattcgggcagt

SEQ ID NO: 5899291 - DNA, 25 bp, Homo sapien
ttcgggcagtggatactcctgctaa

SEQ ID NO: 5899292 - DNA, 25 bp, Homo sapien
actccgtctacagggtcaagtgttc

SEQ ID NO: 5899293 - DNA, 25 bp, Homo sapien
tatacatctacagttggtggccaat

SEQ ID NO: 5899294 - DNA, 25 bp, Homo sapien
ttcgtctgtgagtgcttagggcttc

SEQ ID NO: 5899295 - DNA, 25 bp, Homo sapien
ctgctaaatgcactgggtcacccat

SEQ ID NO: 5899296 - DNA, 25 bp, Homo sapien
gtccttggaggcacagaacactcta

SEQ ID NO: 5899297 - DNA, 25 bp, Homo sapien
ctgatgctccgaccgtgagaaaact

SEQ ID NO: 5899298 - DNA, 25 bp, Homo sapien
ctgtttttgcagagggttccggtca

SEQ ID NO: 5899299 - DNA, 25 bp, Homo sapien
gtcccaagggtctagatgctcgtcc

SEQ ID NO: 5899300 - DNA, 25 bp, Homo sapien
gcaagtcttagtagcctaggtcaag

SEQ ID NO: 5899301 - DNA, 25 bp, Homo sapien
catcactcaactgcaattgggcttt

SEQ ID NO: 5899302 - DNA, 25 bp, Homo sapien
gacctgaggacccaccagtcagaac

SEQ ID NO: 5899303 - DNA, 25 bp, Homo sapien
atgggtgggccagaacatcactcaa

SEQ ID NO: 5899304 - DNA, 25 bp, Homo sapien
aattgggctttcaggttcttgccgg

SEQ ID NO: 5899305 - DNA, 25 bp, Homo sapien
tgtggcacacatgacagactcccag

SEQ ID NO: 5899306 - DNA, 25 bp, Homo sapien
gaacccacatggcaagtcttagtag

SEQ ID NO: 5899307 - DNA, 25 bp, Homo sapien
tttctttccatgtttggctgttggt

SEQ ID NO: 5899308 - DNA, 25 bp, Homo sapien
tcacatctagatggctgtcataaag

SEQ ID NO: 5899309 - DNA, 25 bp, Homo sapien
agccaacggaatggtcagatctcac

SEQ ID NO: 5899310 - DNA, 25 bp, Homo sapien
agctctaggcactgggaggctgttt

SEQ ID NO: 5899311 - DNA, 25 bp, Homo sapien
ctgggagtctgtcatgtgtgccaca

SEQ ID NO: 5899312 - DNA, 25 bp, Homo sapien
ctttatgacagccatctagatgtga

SEQ ID NO: 5899313 - DNA, 25 bp, Homo sapien
gtgagatctgaccattccgttggct

SEQ ID NO: 5899314 - DNA, 25 bp, Homo sapien
cttgacctaggctactaagacttgc

SEQ ID NO: 5899315 - DNA, 25 bp, Homo sapien
ctactaagacttgccatgtgggttc

SEQ ID NO: 5899316 - DNA, 25 bp, Homo sapien
aaagcccaattgcagttgagtgatg

SEQ ID NO: 5899317 - DNA, 25 bp, Homo sapien
aaacagcctcccagtgcctagagct

SEQ ID NO: 5899318 - DNA, 25 bp, Homo sapien
accaacagccaaacatggaaagaaa

SEQ ID NO: 5899319 - DNA, 25 bp, Homo sapien
ccggcaagaacctgaaagcccaatt

SEQ ID NO: 5899320 - DNA, 25 bp, Homo sapien
ttgagtgatgttctggcccacccat

SEQ ID NO: 5899321 - DNA, 25 bp, Homo sapien
gttctgactggtgggtcctcaggtc

SEQ ID NO: 5899322 - DNA, 25 bp, Homo sapien
gctcttttcctttgaatgtttttgc

SEQ ID NO: 5899323 - DNA, 25 bp, Homo sapien
gcccagtttcgttttcgttgctctt

SEQ ID NO: 5899324 - DNA, 25 bp, Homo sapien
ggattcttctattggtcttgtctat

SEQ ID NO: 5899325 - DNA, 25 bp, Homo sapien
gttgctcttttcctttgaatgtttt

SEQ ID NO: 5899326 - DNA, 25 bp, Homo sapien
cacccaggattcttctattggtctt

SEQ ID NO: 5899327 - DNA, 25 bp, Homo sapien
taatttcagcccagtttcgttttcg

SEQ ID NO: 5899328 - DNA, 25 bp, Homo sapien
tgtgtttccttgtgtgtctgcccct

SEQ ID NO: 5899329 - DNA, 25 bp, Homo sapien
ttctattggtcttgtctatccctcc

SEQ ID NO: 5899330 - DNA, 25 bp, Homo sapien
ttcttctattggtcttgtctatccc

SEQ ID NO: 5899331 - DNA, 25 bp, Homo sapien
tttctctgggacttttctttgtgtg

SEQ ID NO: 5899332 - DNA, 25 bp, Homo sapien
atatttaatttcagcccagtttcgt

SEQ ID NO: 5899333 - DNA, 25 bp, Homo sapien
acgaaactgggctgaaattaaatat

SEQ ID NO: 5899334 - DNA, 25 bp, Homo sapien
aagaccaatagaagaatcctgggtg

SEQ ID NO: 5899335 - DNA, 25 bp, Homo sapien
atagacaagaccaatagaagaatcc

SEQ ID NO: 5899336 - DNA, 25 bp, Homo sapien
aaaacattcaaaggaaaagagcaac

SEQ ID NO: 5899337 - DNA, 25 bp, Homo sapien
cgaaaacgaaactgggctgaaatta

SEQ ID NO: 5899338 - DNA, 25 bp, Homo sapien
aggggcagacacacaaggaaacaca

SEQ ID NO: 5899339 - DNA, 25 bp, Homo sapien
gggatagacaagaccaatagaagaa

SEQ ID NO: 5899340 - DNA, 25 bp, Homo sapien
cacacaaagaaaagtcccagagaaa

SEQ ID NO: 5899341 - DNA, 25 bp, Homo sapien
aagagcaacgaaaacgaaactgggc

SEQ ID NO: 5899342 - DNA, 25 bp, Homo sapien
gcaaaaacattcaaaggaaaagagc

SEQ ID NO: 5899343 - DNA, 25 bp, Homo sapien
ggagggatagacaagaccaatagaa

SEQ ID NO: 5899344 - DNA, 25 bp, Homo sapien
tattgtagttcagaacaatccatct

SEQ ID NO: 5899345 - DNA, 25 bp, Homo sapien
aaaatgtctaataacctgcattatt

SEQ ID NO: 5899346 - DNA, 25 bp, Homo sapien
aatagctacgttttttatgtatgta

SEQ ID NO: 5899347 - DNA, 25 bp, Homo sapien
aatgctcccattgtgaattataaat

SEQ ID NO: 5899348 - DNA, 25 bp, Homo sapien
gtgggtcttaattttgtgatactaa

SEQ ID NO: 5899349 - DNA, 25 bp, Homo sapien
catgttttggtcaatgaacgtaaag

SEQ ID NO: 5899350 - DNA, 25 bp, Homo sapien
taactgggaactaaaactctaggtg

SEQ ID NO: 5899351 - DNA, 25 bp, Homo sapien
tggcttttgcagttcaggaaattga

SEQ ID NO: 5899352 - DNA, 25 bp, Homo sapien
atgcagattatagcacaggctgatt

SEQ ID NO: 5899353 - DNA, 25 bp, Homo sapien
tcagataaatgctcccattgtgaat

SEQ ID NO: 5899354 - DNA, 25 bp, Homo sapien
gtgattgtctgtactgtgggtctta

SEQ ID NO: 5899355 - DNA, 25 bp, Homo sapien
attcacaatgggagcatttatctga

SEQ ID NO: 5899356 - DNA, 25 bp, Homo sapien
aataatgcaggttattagacatttt

SEQ ID NO: 5899357 - DNA, 25 bp, Homo sapien
tacatacataaaaaacgtagctatt

SEQ ID NO: 5899358 - DNA, 25 bp, Homo sapien
ctttacgttcattgaccaaaacatg

SEQ ID NO: 5899359 - DNA, 25 bp, Homo sapien
cacctagagttttagttcccagtta

SEQ ID NO: 5899360 - DNA, 25 bp, Homo sapien
tcaatttcctgaactgcaaaagcca

SEQ ID NO: 5899361 - DNA, 25 bp, Homo sapien
atttataattcacaatgggagcatt

SEQ ID NO: 5899362 - DNA, 25 bp, Homo sapien
taagacccacagtacagacaatcac

SEQ ID NO: 5899363 - DNA, 25 bp, Homo sapien
agatggattgttctgaactacaata

SEQ ID NO: 5899364 - DNA, 25 bp, Homo sapien
ttagtatcacaaaattaagacccac

SEQ ID NO: 5899365 - DNA, 25 bp, Homo sapien
aatcagcctgtgctataatctgcat

SEQ ID NO: 5899366 - DNA, 25 bp, Homo sapien
ttgaccaaaggagaaccctgcctct

SEQ ID NO: 5899367 - DNA, 25 bp, Homo sapien
agctctggcgccagggatgacaacc

SEQ ID NO: 5899368 - DNA, 25 bp, Homo sapien
tatttttgatatcagctttgaccaa

SEQ ID NO: 5899369 - DNA, 25 bp, Homo sapien
ttgcacaagtggcactagccccagg

SEQ ID NO: 5899370 - DNA, 25 bp, Homo sapien
ggactgataatgtgaagttcctcat

SEQ ID NO: 5899371 - DNA, 25 bp, Homo sapien
attctcactgtgaatctccctgctg

SEQ ID NO: 5899372 - DNA, 25 bp, Homo sapien
ttcctttcctcaccaccagggtggg

SEQ ID NO: 5899373 - DNA, 25 bp, Homo sapien
gagagaggtctccttccttggttcc

SEQ ID NO: 5899374 - DNA, 25 bp, Homo sapien
tgcccagcccgggactgataatgtg

SEQ ID NO: 5899375 - DNA, 25 bp, Homo sapien
ggtccccggaccatatatttattgc

SEQ ID NO: 5899376 - DNA, 25 bp, Homo sapien
gaccacacccattctcactgtgaat

SEQ ID NO: 5899377 - DNA, 25 bp, Homo sapien
atgaggaacttcacattatcagtcc

SEQ ID NO: 5899378 - DNA, 25 bp, Homo sapien
agaggcagggttctcctttggtcaa

SEQ ID NO: 5899379 - DNA, 25 bp, Homo sapien
ggttgtcatccctggcgccagagct

SEQ ID NO: 5899380 - DNA, 25 bp, Homo sapien
cctggggctagtgccacttgtgcaa

SEQ ID NO: 5899381 - DNA, 25 bp, Homo sapien
cccaccctggtggtgaggaaaggaa

SEQ ID NO: 5899382 - DNA, 25 bp, Homo sapien
ttggtcaaagctgatatcaaaaata

SEQ ID NO: 5899383 - DNA, 25 bp, Homo sapien
cacattatcagtcccgggctgggca

SEQ ID NO: 5899384 - DNA, 25 bp, Homo sapien
gcaataaatatatggtccggggacc

SEQ ID NO: 5899385 - DNA, 25 bp, Homo sapien
ggaaccaaggaaggagacctctctc

SEQ ID NO: 5899386 - DNA, 25 bp, Homo sapien
attcacagtgagaatgggtgtggtc

SEQ ID NO: 5899387 - DNA, 25 bp, Homo sapien
cagcagggagattcacagtgagaat

SEQ ID NO: 5899388 - DNA, 25 bp, Homo sapien
ggcataggtcgtctctaacagtaga

SEQ ID NO: 5899389 - DNA, 25 bp, Homo sapien
atgattcttctacatgtaatcgcaa

SEQ ID NO: 5899390 - DNA, 25 bp, Homo sapien
gactgctggcataggtcgtctctaa

SEQ ID NO: 5899391 - DNA, 25 bp, Homo sapien
aagtccagtccctgcatctagcaaa

SEQ ID NO: 5899392 - DNA, 25 bp, Homo sapien
gcaaaactgatttctcccttctggg

SEQ ID NO: 5899393 - DNA, 25 bp, Homo sapien
gatcactgtgagttttgcacatgga

SEQ ID NO: 5899394 - DNA, 25 bp, Homo sapien
gaggcttgggcttacgtgatcatgt

SEQ ID NO: 5899395 - DNA, 25 bp, Homo sapien
aatatatccagttcgcttgcagaga

SEQ ID NO: 5899396 - DNA, 25 bp, Homo sapien
tgtgcccgtacttacatctactgaa

SEQ ID NO: 5899397 - DNA, 25 bp, Homo sapien
gaaaacgccgattagcacaatctaa

SEQ ID NO: 5899398 - DNA, 25 bp, Homo sapien
gagaaggctggtaattcacttaatt

SEQ ID NO: 5899399 - DNA, 25 bp, Homo sapien
acatgatcacgtaagcccaagcctc

SEQ ID NO: 5899400 - DNA, 25 bp, Homo sapien
tctctgcaagcgaactggatatatt

SEQ ID NO: 5899401 - DNA, 25 bp, Homo sapien
tctactgttagagacgacctatgcc

SEQ ID NO: 5899402 - DNA, 25 bp, Homo sapien
tccatgtgcaaaactcacagtgatc

SEQ ID NO: 5899403 - DNA, 25 bp, Homo sapien
ttgcgattacatgtagaagaatcat

SEQ ID NO: 5899404 - DNA, 25 bp, Homo sapien
ttagagacgacctatgccagcagtc

SEQ ID NO: 5899405 - DNA, 25 bp, Homo sapien
ttagattgtgctaatcggcgttttc

SEQ ID NO: 5899406 - DNA, 25 bp, Homo sapien
tttgctagatgcagggactggactt

SEQ ID NO: 5899407 - DNA, 25 bp, Homo sapien
aattaagtgaattaccagccttctc

SEQ ID NO: 5899408 - DNA, 25 bp, Homo sapien
ttcagtagatgtaagtacgggcaca

SEQ ID NO: 5899409 - DNA, 25 bp, Homo sapien
cccagaagggagaaatcagttttgc

SEQ ID NO: 5899410 - DNA, 25 bp, Homo sapien
aggactctgactaccgcctgagcaa

SEQ ID NO: 5899411 - DNA, 25 bp, Homo sapien
aggagcagagggtccagcaccttct

SEQ ID NO: 5899412 - DNA, 25 bp, Homo sapien
aagggacttagcctcagacacctct

SEQ ID NO: 5899413 - DNA, 25 bp, Homo sapien
tttctgaggctgctctactcaccag

SEQ ID NO: 5899414 - DNA, 25 bp, Homo sapien
tgagacctagtttcagacccaccgg

SEQ ID NO: 5899415 - DNA, 25 bp, Homo sapien
aaagctttgtggtgctcatccctac

SEQ ID NO: 5899416 - DNA, 25 bp, Homo sapien
ggtcactcgcaaggatatcccaggg

SEQ ID NO: 5899417 - DNA, 25 bp, Homo sapien
ctgcctctctgtgttctaaacatgg

SEQ ID NO: 5899418 - DNA, 25 bp, Homo sapien
gcctgagcaagcctgagacctagtt

SEQ ID NO: 5899419 - DNA, 25 bp, Homo sapien
ggccattgagcctcggacacaagga

SEQ ID NO: 5899420 - DNA, 25 bp, Homo sapien
tactcaccaggactcacagggtctg

SEQ ID NO: 5899421 - DNA, 25 bp, Homo sapien
tccttgtgtccgaggctcaatggcc

SEQ ID NO: 5899422 - DNA, 25 bp, Homo sapien
gtagggatgagcaccacaaagcttt

SEQ ID NO: 5899423 - DNA, 25 bp, Homo sapien
agaggtgtctgaggctaagtccctt

SEQ ID NO: 5899424 - DNA, 25 bp, Homo sapien
ccggtgggtctgaaactaggtctca

SEQ ID NO: 5899425 - DNA, 25 bp, Homo sapien
ccctgggatatccttgcgagtgacc

SEQ ID NO: 5899426 - DNA, 25 bp, Homo sapien
ttgctcaggcggtagtcagagtcct

SEQ ID NO: 5899427 - DNA, 25 bp, Homo sapien
ctggtgagtagagcagcctcagaaa

SEQ ID NO: 5899428 - DNA, 25 bp, Homo sapien
aactaggtctcaggcttgctcaggc

SEQ ID NO: 5899429 - DNA, 25 bp, Homo sapien
cagaccctgtgagtcctggtgagta

SEQ ID NO: 5899430 - DNA, 25 bp, Homo sapien
agaaggtgctggaccctctgctcct

SEQ ID NO: 5899431 - DNA, 25 bp, Homo sapien
ccatgtttagaacacagagaggcag

SEQ ID NO: 5899432 - DNA, 25 bp, Homo sapien
tttgaccttgattccacaatgcctt

SEQ ID NO: 5899433 - DNA, 25 bp, Homo sapien
tcctaggtggccagagttgtgactc

SEQ ID NO: 5899434 - DNA, 25 bp, Homo sapien
ggatctgcccctgataatggtgtta

SEQ ID NO: 5899435 - DNA, 25 bp, Homo sapien
actgagccagggtgtttcttgtttt

SEQ ID NO: 5899436 - DNA, 25 bp, Homo sapien
gagtgtactttagttcacgtttgta

SEQ ID NO: 5899437 - DNA, 25 bp, Homo sapien
tattctcacccagtttgaccttgat

SEQ ID NO: 5899438 - DNA, 25 bp, Homo sapien
agctatgtgtcaccttactgagcca

SEQ ID NO: 5899439 - DNA, 25 bp, Homo sapien
agcctctggcttgtaacatttttat

SEQ ID NO: 5899440 - DNA, 25 bp, Homo sapien
acagcactgtgttcccagatggtgg

SEQ ID NO: 5899441 - DNA, 25 bp, Homo sapien
ttactccgggtgactgtggaccaca

SEQ ID NO: 5899442 - DNA, 25 bp, Homo sapien
agaattttgattcctaggtggccag

SEQ ID NO: 5899443 - DNA, 25 bp, Homo sapien
tgtggtccacagtcacccggagtaa

SEQ ID NO: 5899444 - DNA, 25 bp, Homo sapien
atcaaggtcaaactgggtgagaata

SEQ ID NO: 5899445 - DNA, 25 bp, Homo sapien
tacaaacgtgaactaaagtacactc

SEQ ID NO: 5899446 - DNA, 25 bp, Homo sapien
gagtcacaactctggccacctagga

SEQ ID NO: 5899447 - DNA, 25 bp, Homo sapien
ataaaaatgttacaagccagaggct

SEQ ID NO: 5899448 - DNA, 25 bp, Homo sapien
tggctcagtaaggtgacacatagct

SEQ ID NO: 5899449 - DNA, 25 bp, Homo sapien
ccaccatctgggaacacagtgctgt

SEQ ID NO: 5899450 - DNA, 25 bp, Homo sapien
taacaccattatcaggggcagatcc

SEQ ID NO: 5899451 - DNA, 25 bp, Homo sapien
aaggcattgtggaatcaaggtcaaa

SEQ ID NO: 5899452 - DNA, 25 bp, Homo sapien
ctggccacctaggaatcaaaattct

SEQ ID NO: 5899453 - DNA, 25 bp, Homo sapien
aaaacaagaaacaccctggctcagt

SEQ ID NO: 5899454 - DNA, 25 bp, Homo sapien
gctgcataattgtgcataacttcct

SEQ ID NO: 5899455 - DNA, 25 bp, Homo sapien
gtatgcgtccatagcagacactcat

SEQ ID NO: 5899456 - DNA, 25 bp, Homo sapien
aaatctgtttccagctctcaagtgg

SEQ ID NO: 5899457 - DNA, 25 bp, Homo sapien
aatcagtgctctatgtatgcgtcca

SEQ ID NO: 5899458 - DNA, 25 bp, Homo sapien
ggaatgcaccaacactttggcatga

SEQ ID NO: 5899459 - DNA, 25 bp, Homo sapien
aagtttccaagagagtccgtgggat

SEQ ID NO: 5899460 - DNA, 25 bp, Homo sapien
gaaagcaacctcactgcacaaagta

SEQ ID NO: 5899461 - DNA, 25 bp, Homo sapien
cagcaatctgcccaccatgcaagga

SEQ ID NO: 5899462 - DNA, 25 bp, Homo sapien
atgggacttagtttctatcttctta

SEQ ID NO: 5899463 - DNA, 25 bp, Homo sapien
ggtaccctgtcctcagagtgtgtga

SEQ ID NO: 5899464 - DNA, 25 bp, Homo sapien
gacactcatctgtgaatatcgctgg

SEQ ID NO: 5899465 - DNA, 25 bp, Homo sapien
tcatgccaaagtgttggtgcattcc

SEQ ID NO: 5899466 - DNA, 25 bp, Homo sapien
atcccacggactctcttggaaactt

SEQ ID NO: 5899467 - DNA, 25 bp, Homo sapien
aggaagttatgcacaattatgcagc

SEQ ID NO: 5899468 - DNA, 25 bp, Homo sapien
tactttgtgcagtgaggttgctttc

SEQ ID NO: 5899469 - DNA, 25 bp, Homo sapien
ccacttgagagctggaaacagattt

SEQ ID NO: 5899470 - DNA, 25 bp, Homo sapien
tccttgcatggtgggcagattgctg

SEQ ID NO: 5899471 - DNA, 25 bp, Homo sapien
atgagtgtctgctatggacgcatac

SEQ ID NO: 5899472 - DNA, 25 bp, Homo sapien
tggacgcatacatagagcactgatt

SEQ ID NO: 5899473 - DNA, 25 bp, Homo sapien
taagaagatagaaactaagtcccat

SEQ ID NO: 5899474 - DNA, 25 bp, Homo sapien
ccagcgatattcacagatgagtgtc

SEQ ID NO: 5899475 - DNA, 25 bp, Homo sapien
tcacacactctgaggacagggtacc

SEQ ID NO: 5899476 - DNA, 25 bp, Homo sapien
aaacaccagccggaaacagcctttg

SEQ ID NO: 5899477 - DNA, 25 bp, Homo sapien
ccgcgggtgtaagtcttttgtcttg

SEQ ID NO: 5899478 - DNA, 25 bp, Homo sapien
tgacatctcagtcgtagcccatgtt

SEQ ID NO: 5899479 - DNA, 25 bp, Homo sapien
aattaattcacttgaccgcgggtgt

SEQ ID NO: 5899480 - DNA, 25 bp, Homo sapien
gttactctgcttcagatggtcggaa

SEQ ID NO: 5899481 - DNA, 25 bp, Homo sapien
gaagcagtgccgttgcatatccatc

SEQ ID NO: 5899482 - DNA, 25 bp, Homo sapien
gggctgcattagactcggaactgtt

SEQ ID NO: 5899483 - DNA, 25 bp, Homo sapien
cgattcctacttggcttaaacctag

SEQ ID NO: 5899484 - DNA, 25 bp, Homo sapien
catgggtgcctgtgggtgtttccaa

SEQ ID NO: 5899485 - DNA, 25 bp, Homo sapien
agaaggcacttcctgttactctgct

SEQ ID NO: 5899486 - DNA, 25 bp, Homo sapien
aaagcgggcacattcagcctgtcat

SEQ ID NO: 5899487 - DNA, 25 bp, Homo sapien
aacagttccgagtctaatgcagccc

SEQ ID NO: 5899488 - DNA, 25 bp, Homo sapien
agcagagtaacaggaagtgccttct

SEQ ID NO: 5899489 - DNA, 25 bp, Homo sapien
aacatgggctacgactgagatgtca

SEQ ID NO: 5899490 - DNA, 25 bp, Homo sapien
gatggatatgcaacggcactgcttc

SEQ ID NO: 5899491 - DNA, 25 bp, Homo sapien
acacccgcggtcaagtgaattaatt

SEQ ID NO: 5899492 - DNA, 25 bp, Homo sapien
atgacaggctgaatgtgcccgcttt

SEQ ID NO: 5899493 - DNA, 25 bp, Homo sapien
ttccgaccatctgaagcagagtaac

SEQ ID NO: 5899494 - DNA, 25 bp, Homo sapien
ctaggtttaagccaagtaggaatcg

SEQ ID NO: 5899495 - DNA, 25 bp, Homo sapien
ttggaaacacccacaggcacccatg

SEQ ID NO: 5899496 - DNA, 25 bp, Homo sapien
caaaggctgtttccggctggtgttt

SEQ ID NO: 5899497 - DNA, 25 bp, Homo sapien
caagacaaaagacttacacccgcgg

SEQ ID NO: 5899498 - DNA, 25 bp, Homo sapien
tgtcttaacctgacctactttgaga

SEQ ID NO: 5899499 - DNA, 25 bp, Homo sapien
tatatcccaaaactcatcatctcta

SEQ ID NO: 5899500 - DNA, 25 bp, Homo sapien
atatggaaatcatccctcactgggc

SEQ ID NO: 5899501 - DNA, 25 bp, Homo sapien
aatgttccgtcttaacaccacgagg

SEQ ID NO: 5899502 - DNA, 25 bp, Homo sapien
taacagcattgcctgtgctcctagc

SEQ ID NO: 5899503 - DNA, 25 bp, Homo sapien
gacttcacattttcctatcaccttt

SEQ ID NO: 5899504 - DNA, 25 bp, Homo sapien
tatcaccttttctaagctcatccag

SEQ ID NO: 5899505 - DNA, 25 bp, Homo sapien
tctctagtgctagttgctgctaaca

SEQ ID NO: 5899506 - DNA, 25 bp, Homo sapien
tttcctgtttttagatgctctctga

SEQ ID NO: 5899507 - DNA, 25 bp, Homo sapien
ccgctcattactccaatttgcagat

SEQ ID NO: 5899508 - DNA, 25 bp, Homo sapien
aaaggaggtaccacgggccatggct

SEQ ID NO: 5899509 - DNA, 25 bp, Homo sapien
atctgcaaattggagtaatgagcgg

SEQ ID NO: 5899510 - DNA, 25 bp, Homo sapien
cctcgtggtgttaagacggaacatt

SEQ ID NO: 5899511 - DNA, 25 bp, Homo sapien
gctaggagcacaggcaatgctgtta

SEQ ID NO: 5899512 - DNA, 25 bp, Homo sapien
gcccagtgagggatgatttccatat

SEQ ID NO: 5899513 - DNA, 25 bp, Homo sapien
aaaggtgataggaaaatgtgaagtc

SEQ ID NO: 5899514 - DNA, 25 bp, Homo sapien
ctggatgagcttagaaaaggtgata

SEQ ID NO: 5899515 - DNA, 25 bp, Homo sapien
tcagagagcatctaaaaacaggaaa

SEQ ID NO: 5899516 - DNA, 25 bp, Homo sapien
tgttagcagcaactagcactagaga

SEQ ID NO: 5899517 - DNA, 25 bp, Homo sapien
agccatggcccgtggtacctccttt

SEQ ID NO: 5899518 - DNA, 25 bp, Homo sapien
tctcaaagtaggtcaggttaagaca

SEQ ID NO: 5899519 - DNA, 25 bp, Homo sapien
tagagatgatgagttttgggatata

SEQ ID NO: 5899520 - DNA, 25 bp, Homo sapien
gctacttggaattaggtgaactacc

SEQ ID NO: 5899521 - DNA, 25 bp, Homo sapien
tggctcctcaagttttggtgcccca

SEQ ID NO: 5899522 - DNA, 25 bp, Homo sapien
tttggtgccccagccctgaagcagg

SEQ ID NO: 5899523 - DNA, 25 bp, Homo sapien
tcagctcaaaaagcgattggtggat

SEQ ID NO: 5899524 - DNA, 25 bp, Homo sapien
ttcccctatgtaaagctgagaaata

SEQ ID NO: 5899525 - DNA, 25 bp, Homo sapien
ttgtttgttccattcccatagttct

SEQ ID NO: 5899526 - DNA, 25 bp, Homo sapien
attccctttcccctatgtaaagctg

SEQ ID NO: 5899527 - DNA, 25 bp, Homo sapien
aagcgattggtggatttcagatctt

SEQ ID NO: 5899528 - DNA, 25 bp, Homo sapien
tgaagcagggccagctacttggaat

SEQ ID NO: 5899529 - DNA, 25 bp, Homo sapien
aaacatttgcatttgctgggcaatt

SEQ ID NO: 5899530 - DNA, 25 bp, Homo sapien
tttgctgggcaattgcgtatttttt

SEQ ID NO: 5899531 - DNA, 25 bp, Homo sapien
agaactatgggaatggaacaaacaa

SEQ ID NO: 5899532 - DNA, 25 bp, Homo sapien
aaaaaatacgcaattgcccagcaaa

SEQ ID NO: 5899533 - DNA, 25 bp, Homo sapien
atccaccaatcgctttttgagctga

SEQ ID NO: 5899534 - DNA, 25 bp, Homo sapien
aagatctgaaatccaccaatcgctt

SEQ ID NO: 5899535 - DNA, 25 bp, Homo sapien
attccaagtagctggccctgcttca

SEQ ID NO: 5899536 - DNA, 25 bp, Homo sapien
ggtagttcacctaattccaagtagc

SEQ ID NO: 5899537 - DNA, 25 bp, Homo sapien
cctgcttcagggctggggcaccaaa

SEQ ID NO: 5899538 - DNA, 25 bp, Homo sapien
tggggcaccaaaacttgaggagcca

SEQ ID NO: 5899539 - DNA, 25 bp, Homo sapien
aattgcccagcaaatgcaaatgttt

SEQ ID NO: 5899540 - DNA, 25 bp, Homo sapien
tatttctcagctttacataggggaa

SEQ ID NO: 5899541 - DNA, 25 bp, Homo sapien
cagctttacataggggaaagggaat

SEQ ID NO: 5899542 - DNA, 25 bp, Homo sapien
taccctaggagcttcggttgcaagt

SEQ ID NO: 5899543 - DNA, 25 bp, Homo sapien
tcctggctgttttgttcttctgaaa

SEQ ID NO: 5899544 - DNA, 25 bp, Homo sapien
agctacagagctgtgcctctggcca

SEQ ID NO: 5899545 - DNA, 25 bp, Homo sapien
aagccggcctcaagctcatagcgag

SEQ ID NO: 5899546 - DNA, 25 bp, Homo sapien
tgggccaggcctcgcaaaaacacaa

SEQ ID NO: 5899547 - DNA, 25 bp, Homo sapien
gggtggtagctcattactttcctgt

SEQ ID NO: 5899548 - DNA, 25 bp, Homo sapien
aagctgttttgctcagctcctgtaa

SEQ ID NO: 5899549 - DNA, 25 bp, Homo sapien
tactttcctgtgctgggagcaggct

SEQ ID NO: 5899550 - DNA, 25 bp, Homo sapien
ttggctttttgggatacggtctcac

SEQ ID NO: 5899551 - DNA, 25 bp, Homo sapien
tacccagaccgctagtagaggcagg

SEQ ID NO: 5899552 - DNA, 25 bp, Homo sapien
ttggctagttagtggcctctccttg

SEQ ID NO: 5899553 - DNA, 25 bp, Homo sapien
gtgagaccgtatcccaaaaagccaa

SEQ ID NO: 5899554 - DNA, 25 bp, Homo sapien
caaggagaggccactaactagccaa

SEQ ID NO: 5899555 - DNA, 25 bp, Homo sapien
ttgtgtttttgcgaggcctggccca

SEQ ID NO: 5899556 - DNA, 25 bp, Homo sapien
ttacaggagctgagcaaaacagctt

SEQ ID NO: 5899557 - DNA, 25 bp, Homo sapien
agcctgctcccagcacaggaaagta

SEQ ID NO: 5899558 - DNA, 25 bp, Homo sapien
acaggaaagtaatgagctaccaccc

SEQ ID NO: 5899559 - DNA, 25 bp, Homo sapien
acttgcaaccgaagctcctagggta

SEQ ID NO: 5899560 - DNA, 25 bp, Homo sapien
ctcgctatgagcttgaggccggctt

SEQ ID NO: 5899561 - DNA, 25 bp, Homo sapien
tggccagaggcacagctctgtagct

SEQ ID NO: 5899562 - DNA, 25 bp, Homo sapien
cctgcctctactagcggtctgggta

SEQ ID NO: 5899563 - DNA, 25 bp, Homo sapien
tttcagaagaacaaaacagccagga

SEQ ID NO: 5899564 - DNA, 25 bp, Homo sapien
catcctgctagggtccactggaaag

SEQ ID NO: 5899565 - DNA, 25 bp, Homo sapien
aggaaggatccagtctacctgcctc

SEQ ID NO: 5899566 - DNA, 25 bp, Homo sapien
tacatcgtcccaagagtgctgaaca

SEQ ID NO: 5899567 - DNA, 25 bp, Homo sapien
gagatcatggaccacatcctgagga

SEQ ID NO: 5899568 - DNA, 25 bp, Homo sapien
agagagcacatctaactctggcctg

SEQ ID NO: 5899569 - DNA, 25 bp, Homo sapien
tgacctaggtcagtctgtactctct

SEQ ID NO: 5899570 - DNA, 25 bp, Homo sapien
gactccatctcattggcccaggaag

SEQ ID NO: 5899571 - DNA, 25 bp, Homo sapien
agtctgtactctctgttctcaagga

SEQ ID NO: 5899572 - DNA, 25 bp, Homo sapien
tgtatggctggctgtcactttctga

SEQ ID NO: 5899573 - DNA, 25 bp, Homo sapien
aaaatgccttctacagagatcatgg

SEQ ID NO: 5899574 - DNA, 25 bp, Homo sapien
tgagggaattcacccaaggccacta

SEQ ID NO: 5899575 - DNA, 25 bp, Homo sapien
ccatgatctctgtagaaggcatttt

SEQ ID NO: 5899576 - DNA, 25 bp, Homo sapien
agagagtacagactgacctaggtca

SEQ ID NO: 5899577 - DNA, 25 bp, Homo sapien
caggccagagttagatgtgctctct

SEQ ID NO: 5899578 - DNA, 25 bp, Homo sapien
tcagaaagtgacagccagccataca

SEQ ID NO: 5899579 - DNA, 25 bp, Homo sapien
gaggcaggtagactggatccttcct

SEQ ID NO: 5899580 - DNA, 25 bp, Homo sapien
tcctcaggatgtggtccatgatctc

SEQ ID NO: 5899581 - DNA, 25 bp, Homo sapien
ctttccagtggaccctagcaggatg

SEQ ID NO: 5899582 - DNA, 25 bp, Homo sapien
tgttcagcactcttgggacgatgta

SEQ ID NO: 5899583 - DNA, 25 bp, Homo sapien
cttcctgggccaatgagatggagtc

SEQ ID NO: 5899584 - DNA, 25 bp, Homo sapien
tccttgagaacagagagtacagact

SEQ ID NO: 5899585 - DNA, 25 bp, Homo sapien
tagtggccttgggtgaattccctca

SEQ ID NO: 5899586 - DNA, 25 bp, Homo sapien
aagcgaggccagaacccagaggcaa

SEQ ID NO: 5899587 - DNA, 25 bp, Homo sapien
tcaggtcgaggcgaatcttggctct

SEQ ID NO: 5899588 - DNA, 25 bp, Homo sapien
aattcttccagggttgcattaaatc

SEQ ID NO: 5899589 - DNA, 25 bp, Homo sapien
gatggttttctctggtattaaggct

SEQ ID NO: 5899590 - DNA, 25 bp, Homo sapien
taggtctgtcttcttaggccgtgtc

SEQ ID NO: 5899591 - DNA, 25 bp, Homo sapien
tcagagctgggaagcctcaggtcga

SEQ ID NO: 5899592 - DNA, 25 bp, Homo sapien
aaacactgggcaggagcaactcaga

SEQ ID NO: 5899593 - DNA, 25 bp, Homo sapien
ctgatgcagaccgtgtgggaacact

SEQ ID NO: 5899594 - DNA, 25 bp, Homo sapien
ttcttaggccgtgtcctactttgat

SEQ ID NO: 5899595 - DNA, 25 bp, Homo sapien
gactctgtgtgaggctggtaaaccc

SEQ ID NO: 5899596 - DNA, 25 bp, Homo sapien
ggcgaatcttggctctgaaatgtat

SEQ ID NO: 5899597 - DNA, 25 bp, Homo sapien
gggtttaccagcctcacacagagtc

SEQ ID NO: 5899598 - DNA, 25 bp, Homo sapien
atacatttcagagccaagattcgcc

SEQ ID NO: 5899599 - DNA, 25 bp, Homo sapien
agagccaagattcgcctcgacctga

SEQ ID NO: 5899600 - DNA, 25 bp, Homo sapien
gatttaatgcaaccctggaagaatt

SEQ ID NO: 5899601 - DNA, 25 bp, Homo sapien
ttgcctctgggttctggcctcgctt

SEQ ID NO: 5899602 - DNA, 25 bp, Homo sapien
tcgacctgaggcttcccagctctga

SEQ ID NO: 5899603 - DNA, 25 bp, Homo sapien
gacacggcctaagaagacagaccta

SEQ ID NO: 5899604 - DNA, 25 bp, Homo sapien
tctgagttgctcctgcccagtgttt

SEQ ID NO: 5899605 - DNA, 25 bp, Homo sapien
agccttaataccagagaaaaccatc

SEQ ID NO: 5899606 - DNA, 25 bp, Homo sapien
atcaaagtaggacacggcctaagaa

SEQ ID NO: 5899607 - DNA, 25 bp, Homo sapien
agtgttcccacacggtctgcatcag

SEQ ID NO: 5899608 - DNA, 25 bp, Homo sapien
tgagttcaacttaaggtagaaggct

SEQ ID NO: 5899609 - DNA, 25 bp, Homo sapien
ctattggtcttgcttattttataaa

SEQ ID NO: 5899610 - DNA, 25 bp, Homo sapien
gaaggcttgggctgctagtgtttaa

SEQ ID NO: 5899611 - DNA, 25 bp, Homo sapien
tgggctgctagtgtttaattggaaa

SEQ ID NO: 5899612 - DNA, 25 bp, Homo sapien
gagttttcttaaggaggctggctga

SEQ ID NO: 5899613 - DNA, 25 bp, Homo sapien
gtctgtcttaagtctgaaatggtac

SEQ ID NO: 5899614 - DNA, 25 bp, Homo sapien
gataggagaacctgtctgtcttaag

SEQ ID NO: 5899615 - DNA, 25 bp, Homo sapien
gaaatggtactgaagtctccttttc

SEQ ID NO: 5899616 - DNA, 25 bp, Homo sapien
ggctggctgaatattcctttgttca

SEQ ID NO: 5899617 - DNA, 25 bp, Homo sapien
aggaaactctccttcccaagagatg

SEQ ID NO: 5899618 - DNA, 25 bp, Homo sapien
agtctccttttctattggtcttgct

SEQ ID NO: 5899619 - DNA, 25 bp, Homo sapien
catctcttgggaaggagagtttcct

SEQ ID NO: 5899620 - DNA, 25 bp, Homo sapien
cttaagacagacaggttctcctatc

SEQ ID NO: 5899621 - DNA, 25 bp, Homo sapien
agcaagaccaatagaaaaggagact

SEQ ID NO: 5899622 - DNA, 25 bp, Homo sapien
gaaaaggagacttcagtaccatttc

SEQ ID NO: 5899623 - DNA, 25 bp, Homo sapien
agccttctaccttaagttgaactca

SEQ ID NO: 5899624 - DNA, 25 bp, Homo sapien
tttccaattaaacactagcagccca

SEQ ID NO: 5899625 - DNA, 25 bp, Homo sapien
tttataaaataagcaagaccaatag

SEQ ID NO: 5899626 - DNA, 25 bp, Homo sapien
tcagccagcctccttaagaaaactc

SEQ ID NO: 5899627 - DNA, 25 bp, Homo sapien
ttaaacactagcagcccaagccttc

SEQ ID NO: 5899628 - DNA, 25 bp, Homo sapien
gtaccatttcagacttaagacagac

SEQ ID NO: 5899629 - DNA, 25 bp, Homo sapien
tgaacaaaggaatattcagccagcc

SEQ ID NO: 5899630 - DNA, 25 bp, Homo sapien
gagccaatcactacagccaatcatg

SEQ ID NO: 5899631 - DNA, 25 bp, Homo sapien
gagacagggagccaaccagtatagt

SEQ ID NO: 5899632 - DNA, 25 bp, Homo sapien
aaagacaaagtgcttcctctggaca

SEQ ID NO: 5899633 - DNA, 25 bp, Homo sapien
agatttgtttactagggcccagaga

SEQ ID NO: 5899634 - DNA, 25 bp, Homo sapien
gggtgggactttctgttactaacag

SEQ ID NO: 5899635 - DNA, 25 bp, Homo sapien
tgaggccttttcagaaacggaccca

SEQ ID NO: 5899636 - DNA, 25 bp, Homo sapien
gccaagtcttccattagaggtctga

SEQ ID NO: 5899637 - DNA, 25 bp, Homo sapien
ggagaaacctagctagccaagtctt

SEQ ID NO: 5899638 - DNA, 25 bp, Homo sapien
ttattcaagaagtttccctcctcac

SEQ ID NO: 5899639 - DNA, 25 bp, Homo sapien
acctgggcaggaccactggtgacat

SEQ ID NO: 5899640 - DNA, 25 bp, Homo sapien
acctgcactgcattgagatgacttt

SEQ ID NO: 5899641 - DNA, 25 bp, Homo sapien
actatactggttggctccctgtctc

SEQ ID NO: 5899642 - DNA, 25 bp, Homo sapien
aaagtcatctcaatgcagtgcaggt

SEQ ID NO: 5899643 - DNA, 25 bp, Homo sapien
aagacttggctagctaggtttctcc

SEQ ID NO: 5899644 - DNA, 25 bp, Homo sapien
tgggtccgtttctgaaaaggcctca

SEQ ID NO: 5899645 - DNA, 25 bp, Homo sapien
tgtccagaggaagcactttgtcttt

SEQ ID NO: 5899646 - DNA, 25 bp, Homo sapien
tctctgggccctagtaaacaaatct

SEQ ID NO: 5899647 - DNA, 25 bp, Homo sapien
gtgaggagggaaacttcttgaataa

SEQ ID NO: 5899648 - DNA, 25 bp, Homo sapien
atgtcaccagtggtcctgcccaggt

SEQ ID NO: 5899649 - DNA, 25 bp, Homo sapien
ctgttagtaacagaaagtcccaccc

SEQ ID NO: 5899650 - DNA, 25 bp, Homo sapien
catgattggctgtagtgattggctc

SEQ ID NO: 5899651 - DNA, 25 bp, Homo sapien
tcagacctctaatggaagacttggc

SEQ ID NO: 5899652 - DNA, 25 bp, Homo sapien
aggaacttgcaaatctggccacttt

SEQ ID NO: 5899653 - DNA, 25 bp, Homo sapien
attttcgatctctgagttgcacctc

SEQ ID NO: 5899654 - DNA, 25 bp, Homo sapien
agaatcccctgtggtcgtctgggaa

SEQ ID NO: 5899655 - DNA, 25 bp, Homo sapien
actagagtgctacagatggaccgtg

SEQ ID NO: 5899656 - DNA, 25 bp, Homo sapien
tggccactttcctatgcagtgatta

SEQ ID NO: 5899657 - DNA, 25 bp, Homo sapien
ggtggccactctgtattgaagggta

SEQ ID NO: 5899658 - DNA, 25 bp, Homo sapien
ttctgtcaggtgaattcaactctct

SEQ ID NO: 5899659 - DNA, 25 bp, Homo sapien
ggatcaaacccagagtgtctgctct

SEQ ID NO: 5899660 - DNA, 25 bp, Homo sapien
agttgcacctcagccctaaaaaatg

SEQ ID NO: 5899661 - DNA, 25 bp, Homo sapien
aatcgaagggctcatcaggaagaca

SEQ ID NO: 5899662 - DNA, 25 bp, Homo sapien
aggctcctaagatgaccacaacttc

SEQ ID NO: 5899663 - DNA, 25 bp, Homo sapien
ttcccagacgaccacaggggattct

SEQ ID NO: 5899664 - DNA, 25 bp, Homo sapien
gaagttgtggtcatcttaggagcct

SEQ ID NO: 5899665 - DNA, 25 bp, Homo sapien
taatcactgcataggaaagtggcca

SEQ ID NO: 5899666 - DNA, 25 bp, Homo sapien
cattttttagggctgaggtgcaact

SEQ ID NO: 5899667 - DNA, 25 bp, Homo sapien
cacggtccatctgtagcactctagt

SEQ ID NO: 5899668 - DNA, 25 bp, Homo sapien
tacccttcaatacagagtggccacc

SEQ ID NO: 5899669 - DNA, 25 bp, Homo sapien
agagagttgaattcacctgacagaa

SEQ ID NO: 5899670 - DNA, 25 bp, Homo sapien
agagcagacactctgggtttgatcc

SEQ ID NO: 5899671 - DNA, 25 bp, Homo sapien
tgtcttcctgatgagcccttcgatt

SEQ ID NO: 5899672 - DNA, 25 bp, Homo sapien
gaggtgcaactcagagatcgaaaat

SEQ ID NO: 5899673 - DNA, 25 bp, Homo sapien
aaagtggccagatttgcaagttcct

SEQ ID NO: 5899674 - DNA, 25 bp, Homo sapien
aattcagtgaattcggacgggatcg

SEQ ID NO: 5899675 - DNA, 25 bp, Homo sapien
tatgatgtgatcacactctggcccc

SEQ ID NO: 5899676 - DNA, 25 bp, Homo sapien
catagggagggacctttaactcact

SEQ ID NO: 5899677 - DNA, 25 bp, Homo sapien
atccccatagggtgacctgcggcag

SEQ ID NO: 5899678 - DNA, 25 bp, Homo sapien
atgtatgggcctccaattccagcag

SEQ ID NO: 5899679 - DNA, 25 bp, Homo sapien
aaaggctcacactcctgttaatgga

SEQ ID NO: 5899680 - DNA, 25 bp, Homo sapien
acatcatggcctgtgtcggagcaga

SEQ ID NO: 5899681 - DNA, 25 bp, Homo sapien
gaaccatccagcagaccagagataa

SEQ ID NO: 5899682 - DNA, 25 bp, Homo sapien
aacatgcagcagagtggccagcgct

SEQ ID NO: 5899683 - DNA, 25 bp, Homo sapien
aatgaccagctatgcacttgtccgc

SEQ ID NO: 5899684 - DNA, 25 bp, Homo sapien
gagccacttcaaggaccttctatga

SEQ ID NO: 5899685 - DNA, 25 bp, Homo sapien
cgatcccgtccgaattcactgaatt

SEQ ID NO: 5899686 - DNA, 25 bp, Homo sapien
gcggacaagtgcatagctggtcatt

SEQ ID NO: 5899687 - DNA, 25 bp, Homo sapien
tccattaacaggagtgtgagccttt

SEQ ID NO: 5899688 - DNA, 25 bp, Homo sapien
agcgctggccactctgctgcatgtt

SEQ ID NO: 5899689 - DNA, 25 bp, Homo sapien
ctgccgcaggtcaccctatggggat

SEQ ID NO: 5899690 - DNA, 25 bp, Homo sapien
agtgagttaaaggtccctccctatg

SEQ ID NO: 5899691 - DNA, 25 bp, Homo sapien
tctgctccgacacaggccatgatgt

SEQ ID NO: 5899692 - DNA, 25 bp, Homo sapien
tcatagaaggtccttgaagtggctc

SEQ ID NO: 5899693 - DNA, 25 bp, Homo sapien
ctgctggaattggaggcccatacat

SEQ ID NO: 5899694 - DNA, 25 bp, Homo sapien
ggggccagagtgtgatcacatcata

SEQ ID NO: 5899695 - DNA, 25 bp, Homo sapien
ttatctctggtctgctggatggttc

SEQ ID NO: 5899696 - DNA, 25 bp, Homo sapien
gttgcgaatgggttcttgacaagat

SEQ ID NO: 5899697 - DNA, 25 bp, Homo sapien
acacagtggctactttagttgcgaa

SEQ ID NO: 5899698 - DNA, 25 bp, Homo sapien
agcaatgcagtaccaagcagcctgg

SEQ ID NO: 5899699 - DNA, 25 bp, Homo sapien
actaaggtctctaatgtcatgctat

SEQ ID NO: 5899700 - DNA, 25 bp, Homo sapien
cagacccttaacataactagcaaat

SEQ ID NO: 5899701 - DNA, 25 bp, Homo sapien
gatccctttctggacacaagaaaac

SEQ ID NO: 5899702 - DNA, 25 bp, Homo sapien
aagtaggcggagatccagttagcag

SEQ ID NO: 5899703 - DNA, 25 bp, Homo sapien
tgacaagatgtttcccaataaccca

SEQ ID NO: 5899704 - DNA, 25 bp, Homo sapien
atggacaccctgtgttcagagatgc

SEQ ID NO: 5899705 - DNA, 25 bp, Homo sapien
tcagagatgcccagtacagtgtcct

SEQ ID NO: 5899706 - DNA, 25 bp, Homo sapien
atcagagtgaatccagcaatgcagt

SEQ ID NO: 5899707 - DNA, 25 bp, Homo sapien
gttttcttgtgtccagaaagggatc

SEQ ID NO: 5899708 - DNA, 25 bp, Homo sapien
ctgctaactggatctccgcctactt

SEQ ID NO: 5899709 - DNA, 25 bp, Homo sapien
gcatctctgaacacagggtgtccat

SEQ ID NO: 5899710 - DNA, 25 bp, Homo sapien
tgggttattgggaaacatcttgtca

SEQ ID NO: 5899711 - DNA, 25 bp, Homo sapien
ttcgcaactaaagtagccactgtgt

SEQ ID NO: 5899712 - DNA, 25 bp, Homo sapien
atcttgtcaagaacccattcgcaac

SEQ ID NO: 5899713 - DNA, 25 bp, Homo sapien
aggacactgtactgggcatctctga

SEQ ID NO: 5899714 - DNA, 25 bp, Homo sapien
atttgctagttatgttaagggtctg

SEQ ID NO: 5899715 - DNA, 25 bp, Homo sapien
ccaggctgcttggtactgcattgct

SEQ ID NO: 5899716 - DNA, 25 bp, Homo sapien
actgcattgctggattcactctgat

SEQ ID NO: 5899717 - DNA, 25 bp, Homo sapien
atagcatgacattagagaccttagt

SEQ ID NO: 5899718 - DNA, 25 bp, Homo sapien
tttaccagctaagtgactgccacgc

SEQ ID NO: 5899719 - DNA, 25 bp, Homo sapien
tcatgaccccagtgcccaagtgttt

SEQ ID NO: 5899720 - DNA, 25 bp, Homo sapien
tcactgttggattttcctcctgggt

SEQ ID NO: 5899721 - DNA, 25 bp, Homo sapien
tttaaactggaccaaggctctcaga

SEQ ID NO: 5899722 - DNA, 25 bp, Homo sapien
acggctgtgactttcggcacctgga

SEQ ID NO: 5899723 - DNA, 25 bp, Homo sapien
gtgactgtttcgaggaagcctggaa

SEQ ID NO: 5899724 - DNA, 25 bp, Homo sapien
gattgtatttccctctaagtgcctt

SEQ ID NO: 5899725 - DNA, 25 bp, Homo sapien
tttcggcacctggacaaccttgtgg

SEQ ID NO: 5899726 - DNA, 25 bp, Homo sapien
gaaagttctagcttcaggaatgcat

SEQ ID NO: 5899727 - DNA, 25 bp, Homo sapien
ctgcacatctcaggcgcatgcggaa

SEQ ID NO: 5899728 - DNA, 25 bp, Homo sapien
ggctctcagaacaagaacccaagat

SEQ ID NO: 5899729 - DNA, 25 bp, Homo sapien
aaacacttgggcactggggtcatga

SEQ ID NO: 5899730 - DNA, 25 bp, Homo sapien
atcttgggttcttgttctgagagcc

SEQ ID NO: 5899731 - DNA, 25 bp, Homo sapien
atgcattcctgaagctagaactttc

SEQ ID NO: 5899732 - DNA, 25 bp, Homo sapien
ttccgcatgcgcctgagatgtgcag

SEQ ID NO: 5899733 - DNA, 25 bp, Homo sapien
ttccaggcttcctcgaaacagtcac

SEQ ID NO: 5899734 - DNA, 25 bp, Homo sapien
ccacaaggttgtccaggtgccgaaa

SEQ ID NO: 5899735 - DNA, 25 bp, Homo sapien
tccaggtgccgaaagtcacagccgt

SEQ ID NO: 5899736 - DNA, 25 bp, Homo sapien
aaggcacttagagggaaatacaatc

SEQ ID NO: 5899737 - DNA, 25 bp, Homo sapien
tctgagagccttggtccagtttaaa

SEQ ID NO: 5899738 - DNA, 25 bp, Homo sapien
acccaggaggaaaatccaacagtga

SEQ ID NO: 5899739 - DNA, 25 bp, Homo sapien
gcgtggcagtcacttagctggtaaa

SEQ ID NO: 5899740 - DNA, 25 bp, Homo sapien
gggcggactgagacaatcctgcaga

SEQ ID NO: 5899741 - DNA, 25 bp, Homo sapien
taaggttgtttggttccgtgtgtgt

SEQ ID NO: 5899742 - DNA, 25 bp, Homo sapien
aacagtcgggcgagtatcccgttgg

SEQ ID NO: 5899743 - DNA, 25 bp, Homo sapien
ttgaactttccaaaacctagcgagg

SEQ ID NO: 5899744 - DNA, 25 bp, Homo sapien
gtgcaatgcttgttgtccagccaaa

SEQ ID NO: 5899745 - DNA, 25 bp, Homo sapien
gggcataagcctcattactacttga

SEQ ID NO: 5899746 - DNA, 25 bp, Homo sapien
gaggaacccaagaccaagccaggct

SEQ ID NO: 5899747 - DNA, 25 bp, Homo sapien
ttgcccgctcataaactggtttctc

SEQ ID NO: 5899748 - DNA, 25 bp, Homo sapien
ggctcatgccagaaaccgagactta

SEQ ID NO: 5899749 - DNA, 25 bp, Homo sapien
ttacaggctgatactctccgggcag

SEQ ID NO: 5899750 - DNA, 25 bp, Homo sapien
tggcgcctgcggaatcagagaactt

SEQ ID NO: 5899751 - DNA, 25 bp, Homo sapien
aagttctctgattccgcaggcgcca

SEQ ID NO: 5899752 - DNA, 25 bp, Homo sapien
acacacacggaaccaaacaacctta

SEQ ID NO: 5899753 - DNA, 25 bp, Homo sapien
gagaaaccagtttatgagcgggcaa

SEQ ID NO: 5899754 - DNA, 25 bp, Homo sapien
tttggctggacaacaagcattgcac

SEQ ID NO: 5899755 - DNA, 25 bp, Homo sapien
tctgcaggattgtctcagtccgccc

SEQ ID NO: 5899756 - DNA, 25 bp, Homo sapien
agcctggcttggtcttgggttcctc

SEQ ID NO: 5899757 - DNA, 25 bp, Homo sapien
ccaacgggatactcgcccgactgtt

SEQ ID NO: 5899758 - DNA, 25 bp, Homo sapien
taagtctcggtttctggcatgagcc

SEQ ID NO: 5899759 - DNA, 25 bp, Homo sapien
ctgcccggagagtatcagcctgtaa

SEQ ID NO: 5899760 - DNA, 25 bp, Homo sapien
cctcgctaggttttggaaagttcaa

SEQ ID NO: 5899761 - DNA, 25 bp, Homo sapien
tcaagtagtaatgaggcttatgccc

SEQ ID NO: 5899762 - DNA, 25 bp, Homo sapien
agcattctcagcctgtggcagtaaa

SEQ ID NO: 5899763 - DNA, 25 bp, Homo sapien
ctgcttgaacacagtattctcccag

SEQ ID NO: 5899764 - DNA, 25 bp, Homo sapien
aaatagccctattctctgcttgaac

SEQ ID NO: 5899765 - DNA, 25 bp, Homo sapien
tcttcagttggtgtgtttccgggat

SEQ ID NO: 5899766 - DNA, 25 bp, Homo sapien
gtgaggagtttcctaccagttcact

SEQ ID NO: 5899767 - DNA, 25 bp, Homo sapien
ggaactgtacacaccttagttactt

SEQ ID NO: 5899768 - DNA, 25 bp, Homo sapien
tccgttggcttgtgtttctaggtga

SEQ ID NO: 5899769 - DNA, 25 bp, Homo sapien
ggtagcgctcaaagccctaatggaa

SEQ ID NO: 5899770 - DNA, 25 bp, Homo sapien
acgcgtgtaaagttctgtgcatttg

SEQ ID NO: 5899771 - DNA, 25 bp, Homo sapien
taaactgtactcgtccgtgtggaac

SEQ ID NO: 5899772 - DNA, 25 bp, Homo sapien
ttagttacttcatttggctccgttg

SEQ ID NO: 5899773 - DNA, 25 bp, Homo sapien
caacggagccaaatgaagtaactaa

SEQ ID NO: 5899774 - DNA, 25 bp, Homo sapien
gttcaagcagagaatagggctattt

SEQ ID NO: 5899775 - DNA, 25 bp, Homo sapien
caaatgcacagaactttacacgcgt

SEQ ID NO: 5899776 - DNA, 25 bp, Homo sapien
ctgggagaatactgtgttcaagcag

SEQ ID NO: 5899777 - DNA, 25 bp, Homo sapien
tttactgccacaggctgagaatgct

SEQ ID NO: 5899778 - DNA, 25 bp, Homo sapien
tcacctagaaacacaagccaacgga

SEQ ID NO: 5899779 - DNA, 25 bp, Homo sapien
gttccacacggacgagtacagttta

SEQ ID NO: 5899780 - DNA, 25 bp, Homo sapien
agtgaactggtaggaaactcctcac

SEQ ID NO: 5899781 - DNA, 25 bp, Homo sapien
ttccattagggctttgagcgctacc

SEQ ID NO: 5899782 - DNA, 25 bp, Homo sapien
atcccggaaacacaccaactgaaga

SEQ ID NO: 5899783 - DNA, 25 bp, Homo sapien
aagtaactaaggtgtgtacagttcc

SEQ ID NO: 5899784 - DNA, 25 bp, Homo sapien
ggtgatggagaagccttcccatgcc

SEQ ID NO: 5899785 - DNA, 25 bp, Homo sapien
ggcagagagttgagggattcaccca

SEQ ID NO: 5899786 - DNA, 25 bp, Homo sapien
aaatgccctctgtcccagggatggg

SEQ ID NO: 5899787 - DNA, 25 bp, Homo sapien
ctagtcatctctcggtcagtaggtc

SEQ ID NO: 5899788 - DNA, 25 bp, Homo sapien
taggagactcgccttaaatgccctc

SEQ ID NO: 5899789 - DNA, 25 bp, Homo sapien
ggagactcctgagttaacactggga

SEQ ID NO: 5899790 - DNA, 25 bp, Homo sapien
ttctgctttgtctctcctatgtggg

SEQ ID NO: 5899791 - DNA, 25 bp, Homo sapien
gaagacattggccagtcctagtcat

SEQ ID NO: 5899792 - DNA, 25 bp, Homo sapien
acaaggagccaaacacagccaatag

SEQ ID NO: 5899793 - DNA, 25 bp, Homo sapien
gattcacccaggtggctacaggcca

SEQ ID NO: 5899794 - DNA, 25 bp, Homo sapien
agatggagggttctgctttgtctct

SEQ ID NO: 5899795 - DNA, 25 bp, Homo sapien
cccacataggagagacaaagcagaa

SEQ ID NO: 5899796 - DNA, 25 bp, Homo sapien
atgactaggactggccaatgtcttc

SEQ ID NO: 5899797 - DNA, 25 bp, Homo sapien
gagggcatttaaggcgagtctccta

SEQ ID NO: 5899798 - DNA, 25 bp, Homo sapien
ctattggctgtgtttggctccttgt

SEQ ID NO: 5899799 - DNA, 25 bp, Homo sapien
tcccagtgttaactcaggagtctcc

SEQ ID NO: 5899800 - DNA, 25 bp, Homo sapien
agagacaaagcagaaccctccatct

SEQ ID NO: 5899801 - DNA, 25 bp, Homo sapien
cccatccctgggacagagggcattt

SEQ ID NO: 5899802 - DNA, 25 bp, Homo sapien
tggcctgtagccacctgggtgaatc

SEQ ID NO: 5899803 - DNA, 25 bp, Homo sapien
tgggtgaatccctcaactctctgcc

SEQ ID NO: 5899804 - DNA, 25 bp, Homo sapien
gacctactgaccgagagatgactag

SEQ ID NO: 5899805 - DNA, 25 bp, Homo sapien
ggcatgggaaggcttctccatcacc

SEQ ID NO: 5899806 - DNA, 25 bp, Homo sapien
gaaggcaagccaggttacctcgggc

SEQ ID NO: 5899807 - DNA, 25 bp, Homo sapien
agaccttgacttggagtgacagtga

SEQ ID NO: 5899808 - DNA, 25 bp, Homo sapien
gggaccctccctgctagctggttgg

SEQ ID NO: 5899809 - DNA, 25 bp, Homo sapien
agtgcaactgcccagaccttgactt

SEQ ID NO: 5899810 - DNA, 25 bp, Homo sapien
tgaggacagacgtcccatgcaggac

SEQ ID NO: 5899811 - DNA, 25 bp, Homo sapien
gtcaccagcagcgtgtggacagaca

SEQ ID NO: 5899812 - DNA, 25 bp, Homo sapien
gacagtgagtgtcctaggaaacccc

SEQ ID NO: 5899813 - DNA, 25 bp, Homo sapien
cagaagagaccacgagacccttttt

SEQ ID NO: 5899814 - DNA, 25 bp, Homo sapien
agctggttggctagctggcatctcc

SEQ ID NO: 5899815 - DNA, 25 bp, Homo sapien
atctccccgcttggagcagcagagg

SEQ ID NO: 5899816 - DNA, 25 bp, Homo sapien
agatgctgacgggattaccacctca

SEQ ID NO: 5899817 - DNA, 25 bp, Homo sapien
gtcctgcatgggacgtctgtcctca

SEQ ID NO: 5899818 - DNA, 25 bp, Homo sapien
ggagatgccagctagccaaccagct

SEQ ID NO: 5899819 - DNA, 25 bp, Homo sapien
tcactgtcactccaagtcaaggtct

SEQ ID NO: 5899820 - DNA, 25 bp, Homo sapien
aaaaagggtctcgtggtctcttctg

SEQ ID NO: 5899821 - DNA, 25 bp, Homo sapien
tgaggtggtaatcccgtcagcatct

SEQ ID NO: 5899822 - DNA, 25 bp, Homo sapien
cctctgctgctccaagcggggagat

SEQ ID NO: 5899823 - DNA, 25 bp, Homo sapien
aagtcaaggtctgggcagttgcact

SEQ ID NO: 5899824 - DNA, 25 bp, Homo sapien
gcccgaggtaacctggcttgccttc

SEQ ID NO: 5899825 - DNA, 25 bp, Homo sapien
ggggtttcctaggacactcactgtc

SEQ ID NO: 5899826 - DNA, 25 bp, Homo sapien
ccaaccagctagcagggagggtccc

SEQ ID NO: 5899827 - DNA, 25 bp, Homo sapien
tgtctgtccacacgctgctggtgac

SEQ ID NO: 5899828 - DNA, 25 bp, Homo sapien
aatgacatgagctacctgggtccat

SEQ ID NO: 5899829 - DNA, 25 bp, Homo sapien
tttctgcgtcagtgtgagtcatgtg

SEQ ID NO: 5899830 - DNA, 25 bp, Homo sapien
cagttccttctattttccaaaagat

SEQ ID NO: 5899831 - DNA, 25 bp, Homo sapien
gctagggtttaagaatctcaactca

SEQ ID NO: 5899832 - DNA, 25 bp, Homo sapien
actcagagtcttagtgactgggcta

SEQ ID NO: 5899833 - DNA, 25 bp, Homo sapien
ataatttcatccattatttccctga

SEQ ID NO: 5899834 - DNA, 25 bp, Homo sapien
gccagcactcgtcattttattcata

SEQ ID NO: 5899835 - DNA, 25 bp, Homo sapien
agtgtttcagccttttctgcgtcag

SEQ ID NO: 5899836 - DNA, 25 bp, Homo sapien
gccgttcaaaagcagacagttcaaa

SEQ ID NO: 5899837 - DNA, 25 bp, Homo sapien
taggtttgagctccacagtgtttca

SEQ ID NO: 5899838 - DNA, 25 bp, Homo sapien
ttatggactctctttgccgttcaaa

SEQ ID NO: 5899839 - DNA, 25 bp, Homo sapien
atcttttggaaaatagaaggaactg

SEQ ID NO: 5899840 - DNA, 25 bp, Homo sapien
tatgaataaaatgacgagtgctggc

SEQ ID NO: 5899841 - DNA, 25 bp, Homo sapien
tttgaactgtctgcttttgaacggc

SEQ ID NO: 5899842 - DNA, 25 bp, Homo sapien
atggacccaggtagctcatgtcatt

SEQ ID NO: 5899843 - DNA, 25 bp, Homo sapien
ctgacgcagaaaaggctgaaacact

SEQ ID NO: 5899844 - DNA, 25 bp, Homo sapien
tttgaacggcaaagagagtccataa

SEQ ID NO: 5899845 - DNA, 25 bp, Homo sapien
tgagttgagattcttaaaccctagc

SEQ ID NO: 5899846 - DNA, 25 bp, Homo sapien
tgaaacactgtggagctcaaaccta

SEQ ID NO: 5899847 - DNA, 25 bp, Homo sapien
tcagggaaataatggatgaaattat

SEQ ID NO: 5899848 - DNA, 25 bp, Homo sapien
tagcccagtcactaagactctgagt

SEQ ID NO: 5899849 - DNA, 25 bp, Homo sapien
cacatgactcacactgacgcagaaa

SEQ ID NO: 5899850 - DNA, 25 bp, Homo sapien
aagaatttggcccagttagtcactc

SEQ ID NO: 5899851 - DNA, 25 bp, Homo sapien
atttgtaccatagaggactgtccgt

SEQ ID NO: 5899852 - DNA, 25 bp, Homo sapien
gttagtcactctgtgtaatcccgga

SEQ ID NO: 5899853 - DNA, 25 bp, Homo sapien
tctagctgctgaagtcttgcgaagt

SEQ ID NO: 5899854 - DNA, 25 bp, Homo sapien
gtaatcccggaatctagctgctgaa

SEQ ID NO: 5899855 - DNA, 25 bp, Homo sapien
ccgacaactgtcaccaaagcttata

SEQ ID NO: 5899856 - DNA, 25 bp, Homo sapien
gtagatgtttcattggctgtctgaa

SEQ ID NO: 5899857 - DNA, 25 bp, Homo sapien
tgatgcagtccttatacaaaaccga

SEQ ID NO: 5899858 - DNA, 25 bp, Homo sapien
agctgggacctaggctatcttatta

SEQ ID NO: 5899859 - DNA, 25 bp, Homo sapien
ctactgtttagcttctacacattga

SEQ ID NO: 5899860 - DNA, 25 bp, Homo sapien
gaggactgtccgtaactactgttta

SEQ ID NO: 5899861 - DNA, 25 bp, Homo sapien
tataagctttggtgacagttgtcgg

SEQ ID NO: 5899862 - DNA, 25 bp, Homo sapien
gagtgactaactgggccaaattctt

SEQ ID NO: 5899863 - DNA, 25 bp, Homo sapien
tcaatgtgtagaagctaaacagtag

SEQ ID NO: 5899864 - DNA, 25 bp, Homo sapien
acttcgcaagacttcagcagctaga

SEQ ID NO: 5899865 - DNA, 25 bp, Homo sapien
tcggttttgtataaggactgcatca

SEQ ID NO: 5899866 - DNA, 25 bp, Homo sapien
acggacagtcctctatggtacaaat

SEQ ID NO: 5899867 - DNA, 25 bp, Homo sapien
taaacagtagttacggacagtcctc

SEQ ID NO: 5899868 - DNA, 25 bp, Homo sapien
tccgggattacacagagtgactaac

SEQ ID NO: 5899869 - DNA, 25 bp, Homo sapien
ttcagacagccaatgaaacatctac

SEQ ID NO: 5899870 - DNA, 25 bp, Homo sapien
taataagatagcctaggtcccagct

SEQ ID NO: 5899871 - DNA, 25 bp, Homo sapien
ttcagcagctagattccgggattac

SEQ ID NO: 5899872 - DNA, 25 bp, Homo sapien
tgtatctcccctatccaagaaatgt

SEQ ID NO: 5899873 - DNA, 25 bp, Homo sapien
atctgcatcattgttgtatctcccc

SEQ ID NO: 5899874 - DNA, 25 bp, Homo sapien
gggtttcttaccagttgctgtactt

SEQ ID NO: 5899875 - DNA, 25 bp, Homo sapien
aactgcattatattcctaacccttc

SEQ ID NO: 5899876 - DNA, 25 bp, Homo sapien
gatgtttgttctgttgtcctttttt

SEQ ID NO: 5899877 - DNA, 25 bp, Homo sapien
taattttcctgccaccattctgatc

SEQ ID NO: 5899878 - DNA, 25 bp, Homo sapien
gcttccccgaaattacaactgcatt

SEQ ID NO: 5899879 - DNA, 25 bp, Homo sapien
aagctcggtactgccatctaggaaa

SEQ ID NO: 5899880 - DNA, 25 bp, Homo sapien
gagattgaatattacctctgcccct

SEQ ID NO: 5899881 - DNA, 25 bp, Homo sapien
ggtcatgaggaatccactcctgcag

SEQ ID NO: 5899882 - DNA, 25 bp, Homo sapien
ttccaccctggtacgtcgtatataa

SEQ ID NO: 5899883 - DNA, 25 bp, Homo sapien
aaaaaaggacaacagaacaaacatc

SEQ ID NO: 5899884 - DNA, 25 bp, Homo sapien
acatttcttggataggggagataca

SEQ ID NO: 5899885 - DNA, 25 bp, Homo sapien
gatcagaatggtggcaggaaaatta

SEQ ID NO: 5899886 - DNA, 25 bp, Homo sapien
gaagggttaggaatataatgcagtt

SEQ ID NO: 5899887 - DNA, 25 bp, Homo sapien
aggggcagaggtaatattcaatctc

SEQ ID NO: 5899888 - DNA, 25 bp, Homo sapien
aatgcagttgtaatttcggggaagc

SEQ ID NO: 5899889 - DNA, 25 bp, Homo sapien
tttcctagatggcagtaccgagctt

SEQ ID NO: 5899890 - DNA, 25 bp, Homo sapien
ttatatacgacgtaccagggtggaa

SEQ ID NO: 5899891 - DNA, 25 bp, Homo sapien
ctgcaggagtggattcctcatgacc

SEQ ID NO: 5899892 - DNA, 25 bp, Homo sapien
aagtacagcaactggtaagaaaccc

SEQ ID NO: 5899893 - DNA, 25 bp, Homo sapien
ggggagatacaacaatgatgcagat

SEQ ID NO: 5899894 - DNA, 25 bp, Homo sapien
ttgttttctttgttggcttctctca

SEQ ID NO: 5899895 - DNA, 25 bp, Homo sapien
cttttccaattatggtctcaccttg

SEQ ID NO: 5899896 - DNA, 25 bp, Homo sapien
ggtctcaccttgtttctcacaagaa

SEQ ID NO: 5899897 - DNA, 25 bp, Homo sapien
tcagaaagttcaaaggcaccaagtt

SEQ ID NO: 5899898 - DNA, 25 bp, Homo sapien
gttgactttgttttgctcattcagt

SEQ ID NO: 5899899 - DNA, 25 bp, Homo sapien
ctgtttctcgctgtgcagggagagt

SEQ ID NO: 5899900 - DNA, 25 bp, Homo sapien
tgtgcattggtgatcttgttttctt

SEQ ID NO: 5899901 - DNA, 25 bp, Homo sapien
taaccatcctagtgactttgctttt

SEQ ID NO: 5899902 - DNA, 25 bp, Homo sapien
agggtcctttcttggcatgtaacat

SEQ ID NO: 5899903 - DNA, 25 bp, Homo sapien
agactcgtgttctgcgtggctagca

SEQ ID NO: 5899904 - DNA, 25 bp, Homo sapien
gagtaaaagcgttcatcatcagaaa

SEQ ID NO: 5899905 - DNA, 25 bp, Homo sapien
actgaatgagcaaaacaaagtcaac

SEQ ID NO: 5899906 - DNA, 25 bp, Homo sapien
actctccctgcacagcgagaaacag

SEQ ID NO: 5899907 - DNA, 25 bp, Homo sapien
ttcttgtgagaaacaaggtgagacc

SEQ ID NO: 5899908 - DNA, 25 bp, Homo sapien
tgagagaagccaacaaagaaaacaa

SEQ ID NO: 5899909 - DNA, 25 bp, Homo sapien
caaggtgagaccataattggaaaag

SEQ ID NO: 5899910 - DNA, 25 bp, Homo sapien
tgctagccacgcagaacacgagtct

SEQ ID NO: 5899911 - DNA, 25 bp, Homo sapien
aaaagcaaagtcactaggatggtta

SEQ ID NO: 5899912 - DNA, 25 bp, Homo sapien
aagaaaacaagatcaccaatgcaca

SEQ ID NO: 5899913 - DNA, 25 bp, Homo sapien
atgttacatgccaagaaaggaccct

SEQ ID NO: 5899914 - DNA, 25 bp, Homo sapien
aacttggtgcctttgaactttctga

SEQ ID NO: 5899915 - DNA, 25 bp, Homo sapien
tttctgatgatgaacgcttttactc

SEQ ID NO: 5899916 - DNA, 25 bp, Homo sapien
gatgatacaccttttgatgaaccac

SEQ ID NO: 5899917 - DNA, 25 bp, Homo sapien
cctagtggctacctaccattccttt

SEQ ID NO: 5899918 - DNA, 25 bp, Homo sapien
gatgaaccactttcacctataaatt

SEQ ID NO: 5899919 - DNA, 25 bp, Homo sapien
aggtttatgtccactgtttgtctct

SEQ ID NO: 5899920 - DNA, 25 bp, Homo sapien
catggttttcatgcctagtggctac

SEQ ID NO: 5899921 - DNA, 25 bp, Homo sapien
tacaagtatgtgatgaagcccacct

SEQ ID NO: 5899922 - DNA, 25 bp, Homo sapien
gaaactgttgcatatgtaggtaaaa

SEQ ID NO: 5899923 - DNA, 25 bp, Homo sapien
tttgtctctggcatacatggttttc

SEQ ID NO: 5899924 - DNA, 25 bp, Homo sapien
gaacatatcctggaacttcttcttt

SEQ ID NO: 5899925 - DNA, 25 bp, Homo sapien
gaatttactcacaaggaagatctta

SEQ ID NO: 5899926 - DNA, 25 bp, Homo sapien
ccattcctttcaatcaatttcttag

SEQ ID NO: 5899927 - DNA, 25 bp, Homo sapien
aaagaagaagttccaggatatgttc

SEQ ID NO: 5899928 - DNA, 25 bp, Homo sapien
taagatcttccttgtgagtaaattc

SEQ ID NO: 5899929 - DNA, 25 bp, Homo sapien
gaaaaccatgtatgccagagacaaa

SEQ ID NO: 5899930 - DNA, 25 bp, Homo sapien
ctaagaaattgattgaaaggaatgg

SEQ ID NO: 5899931 - DNA, 25 bp, Homo sapien
aaaggaatggtaggtagccactagg

SEQ ID NO: 5899932 - DNA, 25 bp, Homo sapien
gtggttcatcaaaaggtgtatcatc

SEQ ID NO: 5899933 - DNA, 25 bp, Homo sapien
aatttataggtgaaagtggttcatc

SEQ ID NO: 5899934 - DNA, 25 bp, Homo sapien
agagacaaacagtggacataaacct

SEQ ID NO: 5899935 - DNA, 25 bp, Homo sapien
ttttacctacatatgcaacagtttc

SEQ ID NO: 5899936 - DNA, 25 bp, Homo sapien
aggtgggcttcatcacatacttgta

SEQ ID NO: 5899937 - DNA, 25 bp, Homo sapien
gtagccactaggcatgaaaaccatg

SEQ ID NO: 5899938 - DNA, 25 bp, Homo sapien
acatcacattaatttctagtttaga

SEQ ID NO: 5899939 - DNA, 25 bp, Homo sapien
cattacagtatatacacatccatgc

SEQ ID NO: 5899940 - DNA, 25 bp, Homo sapien
tgcaaagagaagagccctcaactgt

SEQ ID NO: 5899941 - DNA, 25 bp, Homo sapien
gtgggtatgtaagaatgcttgtaaa

SEQ ID NO: 5899942 - DNA, 25 bp, Homo sapien
tctcagaggctatagctgggagcag

SEQ ID NO: 5899943 - DNA, 25 bp, Homo sapien
agccctcaactgtaatagctataga

SEQ ID NO: 5899944 - DNA, 25 bp, Homo sapien
taacaacaacaacaacaaaaatcaa

SEQ ID NO: 5899945 - DNA, 25 bp, Homo sapien
cactgagccaacttaactctgatga

SEQ ID NO: 5899946 - DNA, 25 bp, Homo sapien
aaattctgcactgtgcaaagtacaa

SEQ ID NO: 5899947 - DNA, 25 bp, Homo sapien
tctgcactgtgcaaagtacaagttt

SEQ ID NO: 5899948 - DNA, 25 bp, Homo sapien
ttgttaccggcatccccattattgc

SEQ ID NO: 5899949 - DNA, 25 bp, Homo sapien
agaggctatagctgggagcagaaac

SEQ ID NO: 5899950 - DNA, 25 bp, Homo sapien
tcatcaagtttggagtcaattctaa

SEQ ID NO: 5899951 - DNA, 25 bp, Homo sapien
gtgaccgatttcatcaagtttggag

SEQ ID NO: 5899952 - DNA, 25 bp, Homo sapien
gggtatgtaagaatgcttgtaaaca

SEQ ID NO: 5899953 - DNA, 25 bp, Homo sapien
gtctcactgagccaacttaactctg

SEQ ID NO: 5899954 - DNA, 25 bp, Homo sapien
gctgttttgttttaccttaacaaca

SEQ ID NO: 5899955 - DNA, 25 bp, Homo sapien
atcacataaaagttgaaattactag

SEQ ID NO: 5899956 - DNA, 25 bp, Homo sapien
tccagatatgctggaatgttagccc

SEQ ID NO: 5899957 - DNA, 25 bp, Homo sapien
atatactggaatatgttagagaagt

SEQ ID NO: 5899958 - DNA, 25 bp, Homo sapien
taatgtgtgggtatgtaagaatgct

SEQ ID NO: 5899959 - DNA, 25 bp, Homo sapien
gctgtaaataatgtgtgggtatgta

SEQ ID NO: 5899960 - DNA, 25 bp, Homo sapien
ttatgaacgagatctcacattttca

SEQ ID NO: 5899961 - DNA, 25 bp, Homo sapien
atttattagctgtaaataatgtgtg

SEQ ID NO: 5899962 - DNA, 25 bp, Homo sapien
cttctaacacatcacattaatttct

SEQ ID NO: 5899963 - DNA, 25 bp, Homo sapien
atagaaagtaccaggattgttgccg

SEQ ID NO: 5899964 - DNA, 25 bp, Homo sapien
ctcactgagccaacttaactctgat

SEQ ID NO: 5899965 - DNA, 25 bp, Homo sapien
ttgtggtgctaactttgtgtccgtc

SEQ ID NO: 5899966 - DNA, 25 bp, Homo sapien
gtggtgctaactttgtgtccgtctc

SEQ ID NO: 5899967 - DNA, 25 bp, Homo sapien
agatgtgatcaagttcaaattctgc

SEQ ID NO: 5899968 - DNA, 25 bp, Homo sapien
gaaactgtgaaatttgtgggtatct

SEQ ID NO: 5899969 - DNA, 25 bp, Homo sapien
gaaagtctgttgtggttatctgcag

SEQ ID NO: 5899970 - DNA, 25 bp, Homo sapien
atttgtggtgctaactttgtgtccg

SEQ ID NO: 5899971 - DNA, 25 bp, Homo sapien
ctcaactgtaatagctatagaaagt

SEQ ID NO: 5899972 - DNA, 25 bp, Homo sapien
tgcttgtaaactgctgtgcaaagag

SEQ ID NO: 5899973 - DNA, 25 bp, Homo sapien
gctatagctgggagcagaaactgtg

SEQ ID NO: 5899974 - DNA, 25 bp, Homo sapien
atgtaatataggacaaaggtgaccg

SEQ ID NO: 5899975 - DNA, 25 bp, Homo sapien
acacatcacattaatttctagttta

SEQ ID NO: 5899976 - DNA, 25 bp, Homo sapien
ctccatccatgattgtctgtctcac

SEQ ID NO: 5899977 - DNA, 25 bp, Homo sapien
cattattgctaattcattacagtat

SEQ ID NO: 5899978 - DNA, 25 bp, Homo sapien
caatgaaataggcttttgaaagaag

SEQ ID NO: 5899979 - DNA, 25 bp, Homo sapien
tcatttgagactcatctccgccatg

SEQ ID NO: 5899980 - DNA, 25 bp, Homo sapien
gtatagatttgtggtgctaactttg

SEQ ID NO: 5899981 - DNA, 25 bp, Homo sapien
gaaagaagaaaactcacctgtgtga

SEQ ID NO: 5899982 - DNA, 25 bp, Homo sapien
cttaacaacaacaacaacaaaaatc

SEQ ID NO: 5899983 - DNA, 25 bp, Homo sapien
actttgtatttcatttgagactcat

SEQ ID NO: 5899984 - DNA, 25 bp, Homo sapien
ggtgctaactttgtgtccgtctcca

SEQ ID NO: 5899985 - DNA, 25 bp, Homo sapien
tgcctatgtaatataggacaaaggt

SEQ ID NO: 5899986 - DNA, 25 bp, Homo sapien
agtatatacacatccatgcatacat

SEQ ID NO: 5899987 - DNA, 25 bp, Homo sapien
atagctatagaaagtaccaggattg

SEQ ID NO: 5899988 - DNA, 25 bp, Homo sapien
gtctgtctcactgagccaacttaac

SEQ ID NO: 5899989 - DNA, 25 bp, Homo sapien
cgtcattcaatgtgattcagaaagg

SEQ ID NO: 5899990 - DNA, 25 bp, Homo sapien
tctgcagtatagatttgtggtgcta

SEQ ID NO: 5899991 - DNA, 25 bp, Homo sapien
agattgcttttattattcattaatg

SEQ ID NO: 5899992 - DNA, 25 bp, Homo sapien
gtctgttgtggttatctgcagtata

SEQ ID NO: 5899993 - DNA, 25 bp, Homo sapien
ggacaaaggtgaccgatttcatcaa

SEQ ID NO: 5899994 - DNA, 25 bp, Homo sapien
cattaatttctagtttagatgtgat

SEQ ID NO: 5899995 - DNA, 25 bp, Homo sapien
cagatatgctggaatgttagccctt

SEQ ID NO: 5899996 - DNA, 25 bp, Homo sapien
aaaatatgtataatttgttaccggc

SEQ ID NO: 5899997 - DNA, 25 bp, Homo sapien
gttagagaagtagttccagatatgc

SEQ ID NO: 5899998 - DNA, 25 bp, Homo sapien
ttagatgtgatcaagttcaaattct

SEQ ID NO: 5899999 - DNA, 25 bp, Homo sapien
gcttgtaaacactggaaagtctgtt

SEQ ID NO: 5900000 - DNA, 25 bp, Homo sapien
aaaatgtgcatatggatgcttgtaa

SEQ ID NO: 5900001 - DNA, 25 bp, Homo sapien
aggattgttgccgctgttttgtttt

SEQ ID NO: 5900002 - DNA, 25 bp, Homo sapien
ctcatctccgccatgcctctgtcac

SEQ ID NO: 5900003 - DNA, 25 bp, Homo sapien
gaaataggcttttgaaagaagaaaa

SEQ ID NO: 5900004 - DNA, 25 bp, Homo sapien
tgggagcagaaactgtgaaatttgt

SEQ ID NO: 5900005 - DNA, 25 bp, Homo sapien
agcaggaccattttttttatcacat

SEQ ID NO: 5900006 - DNA, 25 bp, Homo sapien
gcctctgtcacacttctaacacatc

SEQ ID NO: 5900007 - DNA, 25 bp, Homo sapien
gatctatctcagaggctatagctgg

SEQ ID NO: 5900008 - DNA, 25 bp, Homo sapien
tttctagtttagatgtgatcaagtt

SEQ ID NO: 5900009 - DNA, 25 bp, Homo sapien
ctaactttgtgtccgtctccatcca

SEQ ID NO: 5900010 - DNA, 25 bp, Homo sapien
aagtctgttgtggttatctgcagta

SEQ ID NO: 5900011 - DNA, 25 bp, Homo sapien
tttgtatttcatttgagactcatct

SEQ ID NO: 5900012 - DNA, 25 bp, Homo sapien
ttgagactcatctccgccatgcctc

SEQ ID NO: 5900013 - DNA, 25 bp, Homo sapien
atgaaataggcttttgaaagaagaa

SEQ ID NO: 5900014 - DNA, 25 bp, Homo sapien
tatggatgcttgtaaactgctgtgc

SEQ ID NO: 5900015 - DNA, 25 bp, Homo sapien
tctagtttagatgtgatcaagttca

SEQ ID NO: 5900016 - DNA, 25 bp, Homo sapien
tgattcagaaaggaaagagtcaagg

SEQ ID NO: 5900017 - DNA, 25 bp, Homo sapien
ctctgtcacacttctaacacatcac

SEQ ID NO: 5900018 - DNA, 25 bp, Homo sapien
ccggcatccccattattgctaattc

SEQ ID NO: 5900019 - DNA, 25 bp, Homo sapien
cagtatagatttgtggtgctaactt

SEQ ID NO: 5900020 - DNA, 25 bp, Homo sapien
tcagattgcttttattattcattaa

SEQ ID NO: 5900021 - DNA, 25 bp, Homo sapien
gcttttgaaagaagaaaactcacct

SEQ ID NO: 5900022 - DNA, 25 bp, Homo sapien
gaaagagtcaagggatatactggaa

SEQ ID NO: 5900023 - DNA, 25 bp, Homo sapien
tccaatactttgtatttcatttgag

SEQ ID NO: 5900024 - DNA, 25 bp, Homo sapien
attagctgtaaataatgtgtgggta

SEQ ID NO: 5900025 - DNA, 25 bp, Homo sapien
tgggtatctgaacaccaacccacat

SEQ ID NO: 5900026 - DNA, 25 bp, Homo sapien
agatttgtggtgctaactttgtgtc

SEQ ID NO: 5900027 - DNA, 25 bp, Homo sapien
aatatgtataatttgttaccggcat

SEQ ID NO: 5900028 - DNA, 25 bp, Homo sapien
actgtaatagctatagaaagtacca

SEQ ID NO: 5900029 - DNA, 25 bp, Homo sapien
gctggttgtgcctatgtaatatagg

SEQ ID NO: 5900030 - DNA, 25 bp, Homo sapien
tgataaagaagatctatctcagagg

SEQ ID NO: 5900031 - DNA, 25 bp, Homo sapien
caagggatatactggaatatgttag

SEQ ID NO: 5900032 - DNA, 25 bp, Homo sapien
aagttgaaattactagaaaatgtgc

SEQ ID NO: 5900033 - DNA, 25 bp, Homo sapien
gaaagctggttgtgcctatgtaata

SEQ ID NO: 5900034 - DNA, 25 bp, Homo sapien
agggatatactggaatatgttagag

SEQ ID NO: 5900035 - DNA, 25 bp, Homo sapien
tctatctcagaggctatagctggga

SEQ ID NO: 5900036 - DNA, 25 bp, Homo sapien
tttcatcaagtttggagtcaattct

SEQ ID NO: 5900037 - DNA, 25 bp, Homo sapien
aattcattacagtatatacacatcc

SEQ ID NO: 5900038 - DNA, 25 bp, Homo sapien
tgtatttcatttgagactcatctcc

SEQ ID NO: 5900039 - DNA, 25 bp, Homo sapien
gagtcaagggatatactggaatatg

SEQ ID NO: 5900040 - DNA, 25 bp, Homo sapien
agaaaatgtgcatatggatgcttgt

SEQ ID NO: 5900041 - DNA, 25 bp, Homo sapien
tagagaagtagttccagatatgctg

SEQ ID NO: 5900042 - DNA, 25 bp, Homo sapien
tcacattttcagattgcttttatta

SEQ ID NO: 5900043 - DNA, 25 bp, Homo sapien
agagcaggaccattttttttatcac

SEQ ID NO: 5900044 - DNA, 25 bp, Homo sapien
taaaaatatgtataatttgttaccg

SEQ ID NO: 5900045 - DNA, 25 bp, Homo sapien
agtagttccagatatgctggaatgt

SEQ ID NO: 5900046 - DNA, 25 bp, Homo sapien
ctgctgtgcaaagagaagagccctc

SEQ ID NO: 5900047 - DNA, 25 bp, Homo sapien
agaaaggaaagagtcaagggatata

SEQ ID NO: 5900048 - DNA, 25 bp, Homo sapien
taaataatgtgtgggtatgtaagaa

SEQ ID NO: 5900049 - DNA, 25 bp, Homo sapien
tactagaaaatgtgcatatggatgc

SEQ ID NO: 5900050 - DNA, 25 bp, Homo sapien
cacaagtgtagtcgtcattcaatgt

SEQ ID NO: 5900051 - DNA, 25 bp, Homo sapien
ttttgaaagaagaaaactcacctgt

SEQ ID NO: 5900052 - DNA, 25 bp, Homo sapien
ctgtcacacttctaacacatcacat

SEQ ID NO: 5900053 - DNA, 25 bp, Homo sapien
tccatgcatacatatgtcaatgatg

SEQ ID NO: 5900054 - DNA, 25 bp, Homo sapien
catccccattattgctaattcatta

SEQ ID NO: 5900055 - DNA, 25 bp, Homo sapien
gtgcaaagtacaagttttagagcag

SEQ ID NO: 5900056 - DNA, 25 bp, Homo sapien
ctgatgaaacagtacaatgaaatag

SEQ ID NO: 5900057 - DNA, 25 bp, Homo sapien
atcaagtttggagtcaattctaaca

SEQ ID NO: 5900058 - DNA, 25 bp, Homo sapien
aatgataaagaagatctatctcaga

SEQ ID NO: 5900059 - DNA, 25 bp, Homo sapien
gatcaagttcaaattctgcactgtg

SEQ ID NO: 5900060 - DNA, 25 bp, Homo sapien
ataggcttttgaaagaagaaaactc

SEQ ID NO: 5900061 - DNA, 25 bp, Homo sapien
gagccaacttaactctgatgaaaca

SEQ ID NO: 5900062 - DNA, 25 bp, Homo sapien
tgtgcaaagagaagagccctcaact

SEQ ID NO: 5900063 - DNA, 25 bp, Homo sapien
catccatgcatacatatgtcaatga

SEQ ID NO: 5900064 - DNA, 25 bp, Homo sapien
gatatgctggaatgttagcccttgc

SEQ ID NO: 5900065 - DNA, 25 bp, Homo sapien
aggctatagctgggagcagaaactg

SEQ ID NO: 5900066 - DNA, 25 bp, Homo sapien
tgtaaataatgtgtgggtatgtaag

SEQ ID NO: 5900067 - DNA, 25 bp, Homo sapien
ttttagagcaggaccatttttttta

SEQ ID NO: 5900068 - DNA, 25 bp, Homo sapien
gttcaaattctgcactgtgcaaagt

SEQ ID NO: 5900069 - DNA, 25 bp, Homo sapien
tttcatttgagactcatctccgcca

SEQ ID NO: 5900070 - DNA, 25 bp, Homo sapien
atgaacgagatctcacattttcaga

SEQ ID NO: 5900071 - DNA, 25 bp, Homo sapien
gtgtgggtatgtaagaatgcttgta

SEQ ID NO: 5900072 - DNA, 25 bp, Homo sapien
atgctttagctttcaatttatttat

SEQ ID NO: 5900073 - DNA, 25 bp, Homo sapien
cccacatgcaaaaccccacaagtgt

SEQ ID NO: 5900074 - DNA, 25 bp, Homo sapien
aaacagtacaatgaaataggctttt

SEQ ID NO: 5900075 - DNA, 25 bp, Homo sapien
tatgtcaatgatgctttagctttca

SEQ ID NO: 5900076 - DNA, 25 bp, Homo sapien
aattatttatgaacgagatctcaca

SEQ ID NO: 5900077 - DNA, 25 bp, Homo sapien
gtatgtaagaatgcttgtaaacact

SEQ ID NO: 5900078 - DNA, 25 bp, Homo sapien
gtccgtctccatccatgattgtctg

SEQ ID NO: 5900079 - DNA, 25 bp, Homo sapien
tgccgctgttttgttttaccttaac

SEQ ID NO: 5900080 - DNA, 25 bp, Homo sapien
agcccttgctaggagaaagctggtt

SEQ ID NO: 5900081 - DNA, 25 bp, Homo sapien
gcaaagtacaagttttagagcagga

SEQ ID NO: 5900082 - DNA, 25 bp, Homo sapien
taatgaagaattatttatgaacgag

SEQ ID NO: 5900083 - DNA, 25 bp, Homo sapien
ctaattcattacagtatatacacat

SEQ ID NO: 5900084 - DNA, 25 bp, Homo sapien
ccaatatccaatactttgtatttca

SEQ ID NO: 5900085 - DNA, 25 bp, Homo sapien
ccaacccacatgcaaaaccccacaa

SEQ ID NO: 5900086 - DNA, 25 bp, Homo sapien
tacaatgaaataggcttttgaaaga

SEQ ID NO: 5900087 - DNA, 25 bp, Homo sapien
atccatgattgtctgtctcactgag

SEQ ID NO: 5900088 - DNA, 25 bp, Homo sapien
gagaaagctggttgtgcctatgtaa

SEQ ID NO: 5900089 - DNA, 25 bp, Homo sapien
atgaagaattatttatgaacgagat

SEQ ID NO: 5900090 - DNA, 25 bp, Homo sapien
ctatgtaatataggacaaaggtgac

SEQ ID NO: 5900091 - DNA, 25 bp, Homo sapien
tgaaacagtacaatgaaataggctt

SEQ ID NO: 5900092 - DNA, 25 bp, Homo sapien
tacacatccatgcatacatatgtca

SEQ ID NO: 5900093 - DNA, 25 bp, Homo sapien
attttcagattgcttttattattca

SEQ ID NO: 5900094 - DNA, 25 bp, Homo sapien
aaaccccacaagtgtagtcgtcatt

SEQ ID NO: 5900095 - DNA, 25 bp, Homo sapien
actggaatatgttagagaagtagtt

SEQ ID NO: 5900096 - DNA, 25 bp, Homo sapien
acttaactctgatgaaacagtacaa

SEQ ID NO: 5900097 - DNA, 25 bp, Homo sapien
aatttctagtttagatgtgatcaag

SEQ ID NO: 5900098 - DNA, 25 bp, Homo sapien
ttgttttaccttaacaacaacaaca

SEQ ID NO: 5900099 - DNA, 25 bp, Homo sapien
tgtgcatatggatgcttgtaaactg

SEQ ID NO: 5900100 - DNA, 25 bp, Homo sapien
agaaagtaccaggattgttgccgct

SEQ ID NO: 5900101 - DNA, 25 bp, Homo sapien
taatagctatagaaagtaccaggat

SEQ ID NO: 5900102 - DNA, 25 bp, Homo sapien
gaaatttgtgggtatctgaacacca

SEQ ID NO: 5900103 - DNA, 25 bp, Homo sapien
aactgtgaaatttgtgggtatctga

SEQ ID NO: 5900104 - DNA, 25 bp, Homo sapien
aactctgatgaaacagtacaatgaa

SEQ ID NO: 5900105 - DNA, 25 bp, Homo sapien
atgtaagaatgcttgtaaacactgg

SEQ ID NO: 5900106 - DNA, 25 bp, Homo sapien
tatgctggaatgttagcccttgcta

SEQ ID NO: 5900107 - DNA, 25 bp, Homo sapien
aagctggttgtgcctatgtaatata

SEQ ID NO: 5900108 - DNA, 25 bp, Homo sapien
tggttgtgcctatgtaatataggac

SEQ ID NO: 5900109 - DNA, 25 bp, Homo sapien
ttattagctgtaaataatgtgtggg

SEQ ID NO: 5900110 - DNA, 25 bp, Homo sapien
attcagaaaggaaagagtcaaggga

SEQ ID NO: 5900111 - DNA, 25 bp, Homo sapien
aactttgtgtccgtctccatccatg

SEQ ID NO: 5900112 - DNA, 25 bp, Homo sapien
gattgtctgtctcactgagccaact

SEQ ID NO: 5900113 - DNA, 25 bp, Homo sapien
tataatttgttaccggcatccccat

SEQ ID NO: 5900114 - DNA, 25 bp, Homo sapien
cacttctaacacatcacattaattt

SEQ ID NO: 5900115 - DNA, 25 bp, Homo sapien
tggttatctgcagtatagatttgtg

SEQ ID NO: 5900116 - DNA, 25 bp, Homo sapien
cacctgtgtgaagaaatggtatctg

SEQ ID NO: 5900117 - DNA, 25 bp, Homo sapien
ttcattacagtatatacacatccat

SEQ ID NO: 5900118 - DNA, 25 bp, Homo sapien
gaagaaaactcacctgtgtgaagaa

SEQ ID NO: 5900119 - DNA, 25 bp, Homo sapien
cacacttctaacacatcacattaat

SEQ ID NO: 5900120 - DNA, 25 bp, Homo sapien
cacattaatttctagtttagatgtg

SEQ ID NO: 5900121 - DNA, 25 bp, Homo sapien
cacatccatgcatacatatgtcaat

SEQ ID NO: 5900122 - DNA, 25 bp, Homo sapien
tagtttagatgtgatcaagttcaaa

SEQ ID NO: 5900123 - DNA, 25 bp, Homo sapien
gttgaaattactagaaaatgtgcat

SEQ ID NO: 5900124 - DNA, 25 bp, Homo sapien
aagaagaaaactcacctgtgtgaag

SEQ ID NO: 5900125 - DNA, 25 bp, Homo sapien
acgagatctcacattttcagattgc

SEQ ID NO: 5900126 - DNA, 25 bp, Homo sapien
aacccacatgcaaaaccccacaagt

SEQ ID NO: 5900127 - DNA, 25 bp, Homo sapien
cccattattgctaattcattacagt

SEQ ID NO: 5900128 - DNA, 25 bp, Homo sapien
gaccgatttcatcaagtttggagtc

SEQ ID NO: 5900129 - DNA, 25 bp, Homo sapien
aatatccaatactttgtatttcatt

SEQ ID NO: 5900130 - DNA, 25 bp, Homo sapien
atttgagactcatctccgccatgcc

SEQ ID NO: 5900131 - DNA, 25 bp, Homo sapien
tcaaattctgcactgtgcaaagtac

SEQ ID NO: 5900132 - DNA, 25 bp, Homo sapien
gtctccatccatgattgtctgtctc

SEQ ID NO: 5900133 - DNA, 25 bp, Homo sapien
tggaaagtctgttgtggttatctgc

SEQ ID NO: 5900134 - DNA, 25 bp, Homo sapien
tatctgcagtatagatttgtggtgc

SEQ ID NO: 5900135 - DNA, 25 bp, Homo sapien
caagtgtagtcgtcattcaatgtga

SEQ ID NO: 5900136 - DNA, 25 bp, Homo sapien
tcattcaatgtgattcagaaaggaa

SEQ ID NO: 5900137 - DNA, 25 bp, Homo sapien
tagctttcaatttatttattagctg

SEQ ID NO: 5900138 - DNA, 25 bp, Homo sapien
ggatatactggaatatgttagagaa

SEQ ID NO: 5900139 - DNA, 25 bp, Homo sapien
aaaggaaagagtcaagggatatact

SEQ ID NO: 5900140 - DNA, 25 bp, Homo sapien
tgcttttattattcattaatgtaaa

SEQ ID NO: 5900141 - DNA, 25 bp, Homo sapien
ttgtaaacactggaaagtctgttgt

SEQ ID NO: 5900142 - DNA, 25 bp, Homo sapien
gaacgagatctcacattttcagatt

SEQ ID NO: 5900143 - DNA, 25 bp, Homo sapien
tgaacaccaacccacatgcaaaacc

SEQ ID NO: 5900144 - DNA, 25 bp, Homo sapien
atactttgtatttcatttgagactc

SEQ ID NO: 5900145 - DNA, 25 bp, Homo sapien
gtaagaatgcttgtaaacactggaa

SEQ ID NO: 5900146 - DNA, 25 bp, Homo sapien
tgctggaatgttagcccttgctagg

SEQ ID NO: 5900147 - DNA, 25 bp, Homo sapien
tgaaattactagaaaatgtgcatat

SEQ ID NO: 5900148 - DNA, 25 bp, Homo sapien
caatactttgtatttcatttgagac

SEQ ID NO: 5900149 - DNA, 25 bp, Homo sapien
tatacacatccatgcatacatatgt

SEQ ID NO: 5900150 - DNA, 25 bp, Homo sapien
aataatgtgtgggtatgtaagaatg

SEQ ID NO: 5900151 - DNA, 25 bp, Homo sapien
tctaacacatcacattaatttctag

SEQ ID NO: 5900152 - DNA, 25 bp, Homo sapien
tctccgccatgcctctgtcacactt

SEQ ID NO: 5900153 - DNA, 25 bp, Homo sapien
tcaatgatgctttagctttcaattt

SEQ ID NO: 5900154 - DNA, 25 bp, Homo sapien
ttatttatgaacgagatctcacatt

SEQ ID NO: 5900155 - DNA, 25 bp, Homo sapien
tgcatacatatgtcaatgatgcttt

SEQ ID NO: 5900156 - DNA, 25 bp, Homo sapien
tgcactgtgcaaagtacaagtttta

SEQ ID NO: 5900157 - DNA, 25 bp, Homo sapien
caccaacccacatgcaaaaccccac

SEQ ID NO: 5900158 - DNA, 25 bp, Homo sapien
gctttagctttcaatttatttatta

SEQ ID NO: 5900159 - DNA, 25 bp, Homo sapien
gttgccgctgttttgttttacctta

SEQ ID NO: 5900160 - DNA, 25 bp, Homo sapien
attctgcactgtgcaaagtacaagt

SEQ ID NO: 5900161 - DNA, 25 bp, Homo sapien
taccggcatccccattattgctaat

SEQ ID NO: 5900162 - DNA, 25 bp, Homo sapien
gtaatataggacaaaggtgaccgat

SEQ ID NO: 5900163 - DNA, 25 bp, Homo sapien
gtcgtcattcaatgtgattcagaaa

SEQ ID NO: 5900164 - DNA, 25 bp, Homo sapien
gaatgcttgtaaacactggaaagtc

SEQ ID NO: 5900165 - DNA, 25 bp, Homo sapien
ttaccttaacaacaacaacaacaaa

SEQ ID NO: 5900166 - DNA, 25 bp, Homo sapien
atgcctctgtcacacttctaacaca

SEQ ID NO: 5900167 - DNA, 25 bp, Homo sapien
atgattgtctgtctcactgagccaa

SEQ ID NO: 5900168 - DNA, 25 bp, Homo sapien
tgcagtatagatttgtggtgctaac

SEQ ID NO: 5900169 - DNA, 25 bp, Homo sapien
agtttggagtcaattctaacaataa

SEQ ID NO: 5900170 - DNA, 25 bp, Homo sapien
atagatttgtggtgctaactttgtg

SEQ ID NO: 5900171 - DNA, 25 bp, Homo sapien
tacatatgtcaatgatgctttagct

SEQ ID NO: 5900172 - DNA, 25 bp, Homo sapien
ccctcaactgtaatagctatagaaa

SEQ ID NO: 5900173 - DNA, 25 bp, Homo sapien
gagactcatctccgccatgcctctg

SEQ ID NO: 5900174 - DNA, 25 bp, Homo sapien
tataggacaaaggtgaccgatttca

SEQ ID NO: 5900175 - DNA, 25 bp, Homo sapien
catatgtcaatgatgctttagcttt

SEQ ID NO: 5900176 - DNA, 25 bp, Homo sapien
aatgtgattcagaaaggaaagagtc

SEQ ID NO: 5900177 - DNA, 25 bp, Homo sapien
aagagaagagccctcaactgtaata

SEQ ID NO: 5900178 - DNA, 25 bp, Homo sapien
ttttaccttaacaacaacaacaaca

SEQ ID NO: 5900179 - DNA, 25 bp, Homo sapien
tggaatatgttagagaagtagttcc

SEQ ID NO: 5900180 - DNA, 25 bp, Homo sapien
ctcacctgtgtgaagaaatggtatc

SEQ ID NO: 5900181 - DNA, 25 bp, Homo sapien
atactggaatatgttagagaagtag

SEQ ID NO: 5900182 - DNA, 25 bp, Homo sapien
agtacaatgaaataggcttttgaaa

SEQ ID NO: 5900183 - DNA, 25 bp, Homo sapien
gttatctgcagtatagatttgtggt

SEQ ID NO: 5900184 - DNA, 25 bp, Homo sapien
gatctcacattttcagattgctttt

SEQ ID NO: 5900185 - DNA, 25 bp, Homo sapien
gtcaagggatatactggaatatgtt

SEQ ID NO: 5900186 - DNA, 25 bp, Homo sapien
taccaggattgttgccgctgttttg

SEQ ID NO: 5900187 - DNA, 25 bp, Homo sapien
ggaccattttttttatcacataaaa

SEQ ID NO: 5900188 - DNA, 25 bp, Homo sapien
ttattgctaattcattacagtatat

SEQ ID NO: 5900189 - DNA, 25 bp, Homo sapien
tcagaggctatagctgggagcagaa

SEQ ID NO: 5900190 - DNA, 25 bp, Homo sapien
ttagagcaggaccattttttttatc

SEQ ID NO: 5900191 - DNA, 25 bp, Homo sapien
gaagaattatttatgaacgagatct

SEQ ID NO: 5900192 - DNA, 25 bp, Homo sapien
caggaccattttttttatcacataa

SEQ ID NO: 5900193 - DNA, 25 bp, Homo sapien
gactcatctccgccatgcctctgtc

SEQ ID NO: 5900194 - DNA, 25 bp, Homo sapien
aactgctgtgcaaagagaagagccc

SEQ ID NO: 5900195 - DNA, 25 bp, Homo sapien
acagtatatacacatccatgcatac

SEQ ID NO: 5900196 - DNA, 25 bp, Homo sapien
taggacaaaggtgaccgatttcatc

SEQ ID NO: 5900197 - DNA, 25 bp, Homo sapien
caactgtaatagctatagaaagtac

SEQ ID NO: 5900198 - DNA, 25 bp, Homo sapien
catgcaaaaccccacaagtgtagtc

SEQ ID NO: 5900199 - DNA, 25 bp, Homo sapien
ttaatttctagtttagatgtgatca

SEQ ID NO: 5900200 - DNA, 25 bp, Homo sapien
caagtttggagtcaattctaacaat

SEQ ID NO: 5900201 - DNA, 25 bp, Homo sapien
cttgctaggagaaagctggttgtgc

SEQ ID NO: 5900202 - DNA, 25 bp, Homo sapien
ccatgcctctgtcacacttctaaca

SEQ ID NO: 5900203 - DNA, 25 bp, Homo sapien
tgatgctttagctttcaatttattt

SEQ ID NO: 5900204 - DNA, 25 bp, Homo sapien
agagccctcaactgtaatagctata

SEQ ID NO: 5900205 - DNA, 25 bp, Homo sapien
tctgaacaccaacccacatgcaaaa

SEQ ID NO: 5900206 - DNA, 25 bp, Homo sapien
caacttaactctgatgaaacagtac

SEQ ID NO: 5900207 - DNA, 25 bp, Homo sapien
caaagagaagagccctcaactgtaa

SEQ ID NO: 5900208 - DNA, 25 bp, Homo sapien
agaagatctatctcagaggctatag

SEQ ID NO: 5900209 - DNA, 25 bp, Homo sapien
aggcttttgaaagaagaaaactcac

SEQ ID NO: 5900210 - DNA, 25 bp, Homo sapien
ctctgatgaaacagtacaatgaaat

SEQ ID NO: 5900211 - DNA, 25 bp, Homo sapien
tcaatgtgattcagaaaggaaagag

SEQ ID NO: 5900212 - DNA, 25 bp, Homo sapien
tgtgcctatgtaatataggacaaag

SEQ ID NO: 5900213 - DNA, 25 bp, Homo sapien
attgctaattcattacagtatatac

SEQ ID NO: 5900214 - DNA, 25 bp, Homo sapien
tgtaaactgctgtgcaaagagaaga

SEQ ID NO: 5900215 - DNA, 25 bp, Homo sapien
cccttgctaggagaaagctggttgt

SEQ ID NO: 5900216 - DNA, 25 bp, Homo sapien
tgctaactttgtgtccgtctccatc

SEQ ID NO: 5900217 - DNA, 25 bp, Homo sapien
tagctgggagcagaaactgtgaaat

SEQ ID NO: 5900218 - DNA, 25 bp, Homo sapien
aatgttagcccttgctaggagaaag

SEQ ID NO: 5900219 - DNA, 25 bp, Homo sapien
tgtcaatgatgctttagctttcaat

SEQ ID NO: 5900220 - DNA, 25 bp, Homo sapien
cacatgcaaaaccccacaagtgtag

SEQ ID NO: 5900221 - DNA, 25 bp, Homo sapien
acagtacaatgaaataggcttttga

SEQ ID NO: 5900222 - DNA, 25 bp, Homo sapien
atgtgatcaagttcaaattctgcac

SEQ ID NO: 5900223 - DNA, 25 bp, Homo sapien
ctagaaaatgtgcatatggatgctt

SEQ ID NO: 5900224 - DNA, 25 bp, Homo sapien
gatgcttgtaaactgctgtgcaaag

SEQ ID NO: 5900225 - DNA, 25 bp, Homo sapien
tgtggttatctgcagtatagatttg

SEQ ID NO: 5900226 - DNA, 25 bp, Homo sapien
tggagtcaattctaacaataaaaat

SEQ ID NO: 5900227 - DNA, 25 bp, Homo sapien
ttgaaagaagaaaactcacctgtgt

SEQ ID NO: 5900228 - DNA, 25 bp, Homo sapien
gaagtagttccagatatgctggaat

SEQ ID NO: 5900229 - DNA, 25 bp, Homo sapien
tgtgggtatctgaacaccaacccac

SEQ ID NO: 5900230 - DNA, 25 bp, Homo sapien
ctatagaaagtaccaggattgttgc

SEQ ID NO: 5900231 - DNA, 25 bp, Homo sapien
gtgaaatttgtgggtatctgaacac

SEQ ID NO: 5900232 - DNA, 25 bp, Homo sapien
aagttcaaattctgcactgtgcaaa

SEQ ID NO: 5900233 - DNA, 25 bp, Homo sapien
gagaagagccctcaactgtaatagc

SEQ ID NO: 5900234 - DNA, 25 bp, Homo sapien
acactggaaagtctgttgtggttat

SEQ ID NO: 5900235 - DNA, 25 bp, Homo sapien
tgtaatagctatagaaagtaccagg

SEQ ID NO: 5900236 - DNA, 25 bp, Homo sapien
tcagaaaggaaagagtcaagggata

SEQ ID NO: 5900237 - DNA, 25 bp, Homo sapien
gctgtgcaaagagaagagccctcaa

SEQ ID NO: 5900238 - DNA, 25 bp, Homo sapien
ctgtgaaatttgtgggtatctgaac

SEQ ID NO: 5900239 - DNA, 25 bp, Homo sapien
ctaggagaaagctggttgtgcctat

SEQ ID NO: 5900240 - DNA, 25 bp, Homo sapien
agaattatttatgaacgagatctca

SEQ ID NO: 5900241 - DNA, 25 bp, Homo sapien
gttgtgcctatgtaatataggacaa

SEQ ID NO: 5900242 - DNA, 25 bp, Homo sapien
tttggagtcaattctaacaataaaa

SEQ ID NO: 5900243 - DNA, 25 bp, Homo sapien
ttaactctgatgaaacagtacaatg

SEQ ID NO: 5900244 - DNA, 25 bp, Homo sapien
tcaagttcaaattctgcactgtgca

SEQ ID NO: 5900245 - DNA, 25 bp, Homo sapien
ccgtctccatccatgattgtctgtc

SEQ ID NO: 5900246 - DNA, 25 bp, Homo sapien
gctgggagcagaaactgtgaaattt

SEQ ID NO: 5900247 - DNA, 25 bp, Homo sapien
ccatccatgattgtctgtctcactg

SEQ ID NO: 5900248 - DNA, 25 bp, Homo sapien
aagaatgcttgtaaacactggaaag

SEQ ID NO: 5900249 - DNA, 25 bp, Homo sapien
tatctcagaggctatagctgggagc

SEQ ID NO: 5900250 - DNA, 25 bp, Homo sapien
gccaacttaactctgatgaaacagt

SEQ ID NO: 5900251 - DNA, 25 bp, Homo sapien
ttagcccttgctaggagaaagctgg

SEQ ID NO: 5900252 - DNA, 25 bp, Homo sapien
gttaccggcatccccattattgcta

SEQ ID NO: 5900253 - DNA, 25 bp, Homo sapien
aggagaaagctggttgtgcctatgt

SEQ ID NO: 5900254 - DNA, 25 bp, Homo sapien
aatgatgctttagctttcaatttat

SEQ ID NO: 5900255 - DNA, 25 bp, Homo sapien
atttatgaacgagatctcacatttt

SEQ ID NO: 5900256 - DNA, 25 bp, Homo sapien
caaaaccccacaagtgtagtcgtca

SEQ ID NO: 5900257 - DNA, 25 bp, Homo sapien
gtaaacactggaaagtctgttgtgg

SEQ ID NO: 5900258 - DNA, 25 bp, Homo sapien
tgtagtcgtcattcaatgtgattca

SEQ ID NO: 5900259 - DNA, 25 bp, Homo sapien
gttgtggttatctgcagtatagatt

SEQ ID NO: 5900260 - DNA, 25 bp, Homo sapien
ggagcagaaactgtgaaatttgtgg

SEQ ID NO: 5900261 - DNA, 25 bp, Homo sapien
tctcacattttcagattgcttttat

SEQ ID NO: 5900262 - DNA, 25 bp, Homo sapien
aactcacctgtgtgaagaaatggta

SEQ ID NO: 5900263 - DNA, 25 bp, Homo sapien
gtgtccgtctccatccatgattgtc

SEQ ID NO: 5900264 - DNA, 25 bp, Homo sapien
tatatacacatccatgcatacatat

SEQ ID NO: 5900265 - DNA, 25 bp, Homo sapien
taacacatcacattaatttctagtt

SEQ ID NO: 5900266 - DNA, 25 bp, Homo sapien
tagtcgtcattcaatgtgattcaga

SEQ ID NO: 5900267 - DNA, 25 bp, Homo sapien
tatccaatactttgtatttcatttg

SEQ ID NO: 5900268 - DNA, 25 bp, Homo sapien
tatctgaacaccaacccacatgcaa

SEQ ID NO: 5900269 - DNA, 25 bp, Homo sapien
aggaaagagtcaagggatatactgg

SEQ ID NO: 5900270 - DNA, 25 bp, Homo sapien
gatttcatcaagtttggagtcaatt

SEQ ID NO: 5900271 - DNA, 25 bp, Homo sapien
actggaaagtctgttgtggttatct

SEQ ID NO: 5900272 - DNA, 25 bp, Homo sapien
ctggaatgttagcccttgctaggag

SEQ ID NO: 5900273 - DNA, 25 bp, Homo sapien
agtacaagttttagagcaggaccat

SEQ ID NO: 5900274 - DNA, 25 bp, Homo sapien
acaacaacaacaacaaaaatcaata

SEQ ID NO: 5900275 - DNA, 25 bp, Homo sapien
tatgtataatttgttaccggcatcc

SEQ ID NO: 5900276 - DNA, 25 bp, Homo sapien
gtcacacttctaacacatcacatta

SEQ ID NO: 5900277 - DNA, 25 bp, Homo sapien
gaagagccctcaactgtaatagcta

SEQ ID NO: 5900278 - DNA, 25 bp, Homo sapien
tagctgtaaataatgtgtgggtatg

SEQ ID NO: 5900279 - DNA, 25 bp, Homo sapien
aaaactcacctgtgtgaagaaatgg

SEQ ID NO: 5900280 - DNA, 25 bp, Homo sapien
accccacaagtgtagtcgtcattca

SEQ ID NO: 5900281 - DNA, 25 bp, Homo sapien
ctgtctcactgagccaacttaactc

SEQ ID NO: 5900282 - DNA, 25 bp, Homo sapien
aaaatgataaagaagatctatctca

SEQ ID NO: 5900283 - DNA, 25 bp, Homo sapien
aaaggtgaccgatttcatcaagttt

SEQ ID NO: 5900284 - DNA, 25 bp, Homo sapien
cactgtgcaaagtacaagttttaga

SEQ ID NO: 5900285 - DNA, 25 bp, Homo sapien
aatgtgcatatggatgcttgtaaac

SEQ ID NO: 5900286 - DNA, 25 bp, Homo sapien
aatttgtgggtatctgaacaccaac

SEQ ID NO: 5900287 - DNA, 25 bp, Homo sapien
attcaatgtgattcagaaaggaaag

SEQ ID NO: 5900288 - DNA, 25 bp, Homo sapien
tttagctttcaatttatttattagc

SEQ ID NO: 5900289 - DNA, 25 bp, Homo sapien
gtgatcaagttcaaattctgcactg

SEQ ID NO: 5900290 - DNA, 25 bp, Homo sapien
ggcatccccattattgctaattcat

SEQ ID NO: 5900291 - DNA, 25 bp, Homo sapien
atgttagagaagtagttccagatat

SEQ ID NO: 5900292 - DNA, 25 bp, Homo sapien
acaaaggtgaccgatttcatcaagt

SEQ ID NO: 5900293 - DNA, 25 bp, Homo sapien
aagatctatctcagaggctatagct

SEQ ID NO: 5900294 - DNA, 25 bp, Homo sapien
atttgttaccggcatccccattatt

SEQ ID NO: 5900295 - DNA, 25 bp, Homo sapien
aaagtacaagttttagagcaggacc

SEQ ID NO: 5900296 - DNA, 25 bp, Homo sapien
atgcttgtaaacactggaaagtctg

SEQ ID NO: 5900297 - DNA, 25 bp, Homo sapien
cttgtaaactgctgtgcaaagagaa

SEQ ID NO: 5900298 - DNA, 25 bp, Homo sapien
caagttttagagcaggaccattttt

SEQ ID NO: 5900299 - DNA, 25 bp, Homo sapien
cagaaactgtgaaatttgtgggtat

SEQ ID NO: 5900300 - DNA, 25 bp, Homo sapien
gttccagatatgctggaatgttagc

SEQ ID NO: 5900301 - DNA, 25 bp, Homo sapien
tttgtgggtatctgaacaccaaccc

SEQ ID NO: 5900302 - DNA, 25 bp, Homo sapien
catatggatgcttgtaaactgctgt

SEQ ID NO: 5900303 - DNA, 25 bp, Homo sapien
ttgtgtccgtctccatccatgattg

SEQ ID NO: 5900304 - DNA, 25 bp, Homo sapien
catctccgccatgcctctgtcacac

SEQ ID NO: 5900305 - DNA, 25 bp, Homo sapien
aacaacaacaacaaaaatcaataat

SEQ ID NO: 5900306 - DNA, 25 bp, Homo sapien
cgccatgcctctgtcacacttctaa

SEQ ID NO: 5900307 - DNA, 25 bp, Homo sapien
ataaagaagatctatctcagaggct

SEQ ID NO: 5900308 - DNA, 25 bp, Homo sapien
agtgtagtcgtcattcaatgtgatt

SEQ ID NO: 5900309 - DNA, 25 bp, Homo sapien
ccaggattgttgccgctgttttgtt

SEQ ID NO: 5900310 - DNA, 25 bp, Homo sapien
ggtatctgaacaccaacccacatgc

SEQ ID NO: 5900311 - DNA, 25 bp, Homo sapien
tccgccatgcctctgtcacacttct

SEQ ID NO: 5900312 - DNA, 25 bp, Homo sapien
agctatagaaagtaccaggattgtt

SEQ ID NO: 5900313 - DNA, 25 bp, Homo sapien
aatataggacaaaggtgaccgattt

SEQ ID NO: 5900314 - DNA, 25 bp, Homo sapien
tttcagattgcttttattattcatt

SEQ ID NO: 5900315 - DNA, 25 bp, Homo sapien
tgcatatggatgcttgtaaactgct

SEQ ID NO: 5900316 - DNA, 25 bp, Homo sapien
agtaccaggattgttgccgctgttt

SEQ ID NO: 5900317 - DNA, 25 bp, Homo sapien
catgcatacatatgtcaatgatgct

SEQ ID NO: 5900318 - DNA, 25 bp, Homo sapien
aggtgaccgatttcatcaagtttgg

SEQ ID NO: 5900319 - DNA, 25 bp, Homo sapien
tgtataatttgttaccggcatcccc

SEQ ID NO: 5900320 - DNA, 25 bp, Homo sapien
tccccattattgctaattcattaca

SEQ ID NO: 5900321 - DNA, 25 bp, Homo sapien
ccatgattgtctgtctcactgagcc

SEQ ID NO: 5900322 - DNA, 25 bp, Homo sapien
atgtgtgggtatgtaagaatgcttg

SEQ ID NO: 5900323 - DNA, 25 bp, Homo sapien
agcagaaactgtgaaatttgtgggt

SEQ ID NO: 5900324 - DNA, 25 bp, Homo sapien
ctgttgtggttatctgcagtataga

SEQ ID NO: 5900325 - DNA, 25 bp, Homo sapien
gagatctcacattttcagattgctt

SEQ ID NO: 5900326 - DNA, 25 bp, Homo sapien
atcacattaatttctagtttagatg

SEQ ID NO: 5900327 - DNA, 25 bp, Homo sapien
taatttgttaccggcatccccatta

SEQ ID NO: 5900328 - DNA, 25 bp, Homo sapien
gatgaaacagtacaatgaaataggc

SEQ ID NO: 5900329 - DNA, 25 bp, Homo sapien
gagtcaattctaacaataaaaatat

SEQ ID NO: 5900330 - DNA, 25 bp, Homo sapien
tatagctgggagcagaaactgtgaa

SEQ ID NO: 5900331 - DNA, 25 bp, Homo sapien
tatttcatttgagactcatctccgc

SEQ ID NO: 5900332 - DNA, 25 bp, Homo sapien
ggaatgttagcccttgctaggagaa

SEQ ID NO: 5900333 - DNA, 25 bp, Homo sapien
aagagtcaagggatatactggaata

SEQ ID NO: 5900334 - DNA, 25 bp, Homo sapien
aaagaagatctatctcagaggctat

SEQ ID NO: 5900335 - DNA, 25 bp, Homo sapien
ccgatttcatcaagtttggagtcaa

SEQ ID NO: 5900336 - DNA, 25 bp, Homo sapien
aaacactggaaagtctgttgtggtt

SEQ ID NO: 5900337 - DNA, 25 bp, Homo sapien
acattttcagattgcttttattatt

SEQ ID NO: 5900338 - DNA, 25 bp, Homo sapien
aacaccaacccacatgcaaaacccc

SEQ ID NO: 5900339 - DNA, 25 bp, Homo sapien
agaaaactcacctgtgtgaagaaat

SEQ ID NO: 5900340 - DNA, 25 bp, Homo sapien
ttgttgccgctgttttgttttacct

SEQ ID NO: 5900341 - DNA, 25 bp, Homo sapien
ttgtctgtctcactgagccaactta

SEQ ID NO: 5900342 - DNA, 25 bp, Homo sapien
attgcttttattattcattaatgta

SEQ ID NO: 5900343 - DNA, 25 bp, Homo sapien
aaagtaccaggattgttgccgctgt

SEQ ID NO: 5900344 - DNA, 25 bp, Homo sapien
aaattactagaaaatgtgcatatgg

SEQ ID NO: 5900345 - DNA, 25 bp, Homo sapien
tggatgcttgtaaactgctgtgcaa

SEQ ID NO: 5900346 - DNA, 25 bp, Homo sapien
attactagaaaatgtgcatatggat

SEQ ID NO: 5900347 - DNA, 25 bp, Homo sapien
ctgagccaacttaactctgatgaaa

SEQ ID NO: 5900348 - DNA, 25 bp, Homo sapien
gctttcaatttatttattagctgta

SEQ ID NO: 5900349 - DNA, 25 bp, Homo sapien
tgctaggagaaagctggttgtgcct

SEQ ID NO: 5900350 - DNA, 25 bp, Homo sapien
gtttagatgtgatcaagttcaaatt

SEQ ID NO: 5900351 - DNA, 25 bp, Homo sapien
tgctaattcattacagtatatacac

SEQ ID NO: 5900352 - DNA, 25 bp, Homo sapien
gattgttgccgctgttttgttttac

SEQ ID NO: 5900353 - DNA, 25 bp, Homo sapien
cccacaagtgtagtcgtcattcaat

SEQ ID NO: 5900354 - DNA, 25 bp, Homo sapien
atatgttagagaagtagttccagat

SEQ ID NO: 5900355 - DNA, 25 bp, Homo sapien
ctgtgcaaagtacaagttttagagc

SEQ ID NO: 5900356 - DNA, 25 bp, Homo sapien
ttacagtatatacacatccatgcat

SEQ ID NO: 5900357 - DNA, 25 bp, Homo sapien
tgtgattcagaaaggaaagagtcaa

SEQ ID NO: 5900358 - DNA, 25 bp, Homo sapien
ctttgtgtccgtctccatccatgat

SEQ ID NO: 5900359 - DNA, 25 bp, Homo sapien
tgttagcccttgctaggagaaagct

SEQ ID NO: 5900360 - DNA, 25 bp, Homo sapien
catacatatgtcaatgatgctttag

SEQ ID NO: 5900361 - DNA, 25 bp, Homo sapien
taaactgctgtgcaaagagaagagc

SEQ ID NO: 5900362 - DNA, 25 bp, Homo sapien
gagaagtagttccagatatgctgga

SEQ ID NO: 5900363 - DNA, 25 bp, Homo sapien
gaatatgttagagaagtagttccag

SEQ ID NO: 5900364 - DNA, 25 bp, Homo sapien
tttcaatttatttattagctgtaaa

SEQ ID NO: 5900365 - DNA, 25 bp, Homo sapien
tagttccagatatgctggaatgtta

SEQ ID NO: 5900366 - DNA, 25 bp, Homo sapien
tgcaaaaccccacaagtgtagtcgt

SEQ ID NO: 5900367 - DNA, 25 bp, Homo sapien
tacaagttttagagcaggaccattt

SEQ ID NO: 5900368 - DNA, 25 bp, Homo sapien
gcacattttctagtaatttcaactt

SEQ ID NO: 5900369 - DNA, 25 bp, Homo sapien
cacagtttctgctcccagctatagc

SEQ ID NO: 5900370 - DNA, 25 bp, Homo sapien
ttgcacagcagtttacaagcatcca

SEQ ID NO: 5900371 - DNA, 25 bp, Homo sapien
tgaatcacattgaatgacgactaca

SEQ ID NO: 5900372 - DNA, 25 bp, Homo sapien
gcatggatgtgtatatactgtaatg

SEQ ID NO: 5900373 - DNA, 25 bp, Homo sapien
taccatttcttcacacaggtgagtt

SEQ ID NO: 5900374 - DNA, 25 bp, Homo sapien
atagcctctgagatagatcttcttt

SEQ ID NO: 5900375 - DNA, 25 bp, Homo sapien
acttgtactttgcacagtgcagaat

SEQ ID NO: 5900376 - DNA, 25 bp, Homo sapien
gcaacaatcctggtactttctatag

SEQ ID NO: 5900377 - DNA, 25 bp, Homo sapien
ggctcagtgagacagacaatcatgg

SEQ ID NO: 5900378 - DNA, 25 bp, Homo sapien
gttcagatacccacaaatttcacag

SEQ ID NO: 5900379 - DNA, 25 bp, Homo sapien
gttagcaccacaaatctatactgca

SEQ ID NO: 5900380 - DNA, 25 bp, Homo sapien
ttttgcatgtgggttggtgttcaga

SEQ ID NO: 5900381 - DNA, 25 bp, Homo sapien
tctgaatcacattgaatgacgacta

SEQ ID NO: 5900382 - DNA, 25 bp, Homo sapien
acataggcacaaccagctttctcct

SEQ ID NO: 5900383 - DNA, 25 bp, Homo sapien
ttcacagtttctgctcccagctata

SEQ ID NO: 5900384 - DNA, 25 bp, Homo sapien
tggtgttcagatacccacaaatttc

SEQ ID NO: 5900385 - DNA, 25 bp, Homo sapien
ggggatgccggtaacaaattataca

SEQ ID NO: 5900386 - DNA, 25 bp, Homo sapien
tctatagctattacagttgagggct

SEQ ID NO: 5900387 - DNA, 25 bp, Homo sapien
aataatggggatgccggtaacaaat

SEQ ID NO: 5900388 - DNA, 25 bp, Homo sapien
aaaaatggtcctgctctaaaacttg

SEQ ID NO: 5900389 - DNA, 25 bp, Homo sapien
ctagtaatttcaacttttatgtgat

SEQ ID NO: 5900390 - DNA, 25 bp, Homo sapien
attgaaagctaaagcatcattgaca

SEQ ID NO: 5900391 - DNA, 25 bp, Homo sapien
gtggggttttgcatgtgggttggtg

SEQ ID NO: 5900392 - DNA, 25 bp, Homo sapien
tcccttgactctttcctttctgaat

SEQ ID NO: 5900393 - DNA, 25 bp, Homo sapien
ggatgtgtatatactgtaatgaatt

SEQ ID NO: 5900394 - DNA, 25 bp, Homo sapien
ggaactacttctctaacatattcca

SEQ ID NO: 5900395 - DNA, 25 bp, Homo sapien
aaatggtcctgctctaaaacttgta

SEQ ID NO: 5900396 - DNA, 25 bp, Homo sapien
gctaataaataaattgaaagctaaa

SEQ ID NO: 5900397 - DNA, 25 bp, Homo sapien
cagcatatctggaactacttctcta

SEQ ID NO: 5900398 - DNA, 25 bp, Homo sapien
cagtttacaagcatccatatgcaca

SEQ ID NO: 5900399 - DNA, 25 bp, Homo sapien
gcaagggctaacattccagcatatc

SEQ ID NO: 5900400 - DNA, 25 bp, Homo sapien
aatgaataataaaagcaatctgaaa

SEQ ID NO: 5900401 - DNA, 25 bp, Homo sapien
aaataaattgaaagctaaagcatca

SEQ ID NO: 5900402 - DNA, 25 bp, Homo sapien
ctaacatattccagtatatcccttg

SEQ ID NO: 5900403 - DNA, 25 bp, Homo sapien
tgacatatgtatgcatggatgtgta

SEQ ID NO: 5900404 - DNA, 25 bp, Homo sapien
gacaatcatggatggagacggacac

SEQ ID NO: 5900405 - DNA, 25 bp, Homo sapien
actttgcacagtgcagaatttgaac

SEQ ID NO: 5900406 - DNA, 25 bp, Homo sapien
atcctggtactttctatagctatta

SEQ ID NO: 5900407 - DNA, 25 bp, Homo sapien
cagacaatcatggatggagacggac

SEQ ID NO: 5900408 - DNA, 25 bp, Homo sapien
ctcaaatgaaatacaaagtattgga

SEQ ID NO: 5900409 - DNA, 25 bp, Homo sapien
aagcaatctgaaaatgtgagatctc

SEQ ID NO: 5900410 - DNA, 25 bp, Homo sapien
ttttattgttagaattgactccaaa

SEQ ID NO: 5900411 - DNA, 25 bp, Homo sapien
agaatttgaacttgatcacatctaa

SEQ ID NO: 5900412 - DNA, 25 bp, Homo sapien
gtcctatattacataggcacaacca

SEQ ID NO: 5900413 - DNA, 25 bp, Homo sapien
gagacagacaatcatggatggagac

SEQ ID NO: 5900414 - DNA, 25 bp, Homo sapien
ttttatgtgataaaaaaaatggtcc

SEQ ID NO: 5900415 - DNA, 25 bp, Homo sapien
ataaataaattgaaagctaaagcat

SEQ ID NO: 5900416 - DNA, 25 bp, Homo sapien
tagcaccacaaatctatactgcaga

SEQ ID NO: 5900417 - DNA, 25 bp, Homo sapien
aaaagcctatttcattgtactgttt

SEQ ID NO: 5900418 - DNA, 25 bp, Homo sapien
tctgagatagatcttctttatcatt

SEQ ID NO: 5900419 - DNA, 25 bp, Homo sapien
acattccagcatatctggaactact

SEQ ID NO: 5900420 - DNA, 25 bp, Homo sapien
gctaacattccagcatatctggaac

SEQ ID NO: 5900421 - DNA, 25 bp, Homo sapien
atccatatgcacattttctagtaat

SEQ ID NO: 5900422 - DNA, 25 bp, Homo sapien
tgttgttaaggtaaaacaaaacagc

SEQ ID NO: 5900423 - DNA, 25 bp, Homo sapien
ttgactccaaacttgatgaaatcgg

SEQ ID NO: 5900424 - DNA, 25 bp, Homo sapien
gcacagcagtttacaagcatccata

SEQ ID NO: 5900425 - DNA, 25 bp, Homo sapien
tactgcagataaccacaacagactt

SEQ ID NO: 5900426 - DNA, 25 bp, Homo sapien
ccagtatatcccttgactctttcct

SEQ ID NO: 5900427 - DNA, 25 bp, Homo sapien
agtgtttacaagcattcttacatac

SEQ ID NO: 5900428 - DNA, 25 bp, Homo sapien
tggatggagacggacacaaagttag

SEQ ID NO: 5900429 - DNA, 25 bp, Homo sapien
cagactttccagtgtttacaagcat

SEQ ID NO: 5900430 - DNA, 25 bp, Homo sapien
gcatgtgggttggtgttcagatacc

SEQ ID NO: 5900431 - DNA, 25 bp, Homo sapien
aggtaaaacaaaacagcggcaacaa

SEQ ID NO: 5900432 - DNA, 25 bp, Homo sapien
gtactgtttcatcagagttaagttg

SEQ ID NO: 5900433 - DNA, 25 bp, Homo sapien
catggcggagatgagtctcaaatga

SEQ ID NO: 5900434 - DNA, 25 bp, Homo sapien
ttgactctttcctttctgaatcaca

SEQ ID NO: 5900435 - DNA, 25 bp, Homo sapien
ctctaacatattccagtatatccct

SEQ ID NO: 5900436 - DNA, 25 bp, Homo sapien
ttacagttgagggctcttctctttg

SEQ ID NO: 5900437 - DNA, 25 bp, Homo sapien
atgtgatgtgttagaagtgtgacag

SEQ ID NO: 5900438 - DNA, 25 bp, Homo sapien
cctatattacataggcacaaccagc

SEQ ID NO: 5900439 - DNA, 25 bp, Homo sapien
aaacttgtactttgcacagtgcaga

SEQ ID NO: 5900440 - DNA, 25 bp, Homo sapien
acagcagtttacaagcatccatatg

SEQ ID NO: 5900441 - DNA, 25 bp, Homo sapien
ttgtcctatattacataggcacaac

SEQ ID NO: 5900442 - DNA, 25 bp, Homo sapien
tgtaatgaattagcaataatgggga

SEQ ID NO: 5900443 - DNA, 25 bp, Homo sapien
tttgaacttgatcacatctaaacta

SEQ ID NO: 5900444 - DNA, 25 bp, Homo sapien
gtatatactgtaatgaattagcaat

SEQ ID NO: 5900445 - DNA, 25 bp, Homo sapien
aattgactccaaacttgatgaaatc

SEQ ID NO: 5900446 - DNA, 25 bp, Homo sapien
atgcacattttctagtaatttcaac

SEQ ID NO: 5900447 - DNA, 25 bp, Homo sapien
tacagctaataaataaattgaaagc

SEQ ID NO: 5900448 - DNA, 25 bp, Homo sapien
ctttccagtgtttacaagcattctt

SEQ ID NO: 5900449 - DNA, 25 bp, Homo sapien
ctaaagcatcattgacatatgtatg

SEQ ID NO: 5900450 - DNA, 25 bp, Homo sapien
cagagttaagttggctcagtgagac

SEQ ID NO: 5900451 - DNA, 25 bp, Homo sapien
ccatttcttcacacaggtgagtttt

SEQ ID NO: 5900452 - DNA, 25 bp, Homo sapien
cagtttctgctcccagctatagcct

SEQ ID NO: 5900453 - DNA, 25 bp, Homo sapien
gtgcagaatttgaacttgatcacat

SEQ ID NO: 5900454 - DNA, 25 bp, Homo sapien
gagttttcttctttcaaaagcctat

SEQ ID NO: 5900455 - DNA, 25 bp, Homo sapien
tgttgttgttgttaaggtaaaacaa

SEQ ID NO: 5900456 - DNA, 25 bp, Homo sapien
actttctatagctattacagttgag

SEQ ID NO: 5900457 - DNA, 25 bp, Homo sapien
cacacattatttacagctaataaat

SEQ ID NO: 5900458 - DNA, 25 bp, Homo sapien
atgaattagcaataatggggatgcc

SEQ ID NO: 5900459 - DNA, 25 bp, Homo sapien
tagctattacagttgagggctcttc

SEQ ID NO: 5900460 - DNA, 25 bp, Homo sapien
cagtgcagaatttgaacttgatcac

SEQ ID NO: 5900461 - DNA, 25 bp, Homo sapien
gtgataaaaaaaatggtcctgctct

SEQ ID NO: 5900462 - DNA, 25 bp, Homo sapien
aaattgaaagctaaagcatcattga

SEQ ID NO: 5900463 - DNA, 25 bp, Homo sapien
attccagcatatctggaactacttc

SEQ ID NO: 5900464 - DNA, 25 bp, Homo sapien
taaactagaaattaatgtgatgtgt

SEQ ID NO: 5900465 - DNA, 25 bp, Homo sapien
gggttggtgttcagatacccacaaa

SEQ ID NO: 5900466 - DNA, 25 bp, Homo sapien
gcagataaccacaacagactttcca

SEQ ID NO: 5900467 - DNA, 25 bp, Homo sapien
gtgacagaggcatggcggagatgag

SEQ ID NO: 5900468 - DNA, 25 bp, Homo sapien
ccaaacttgatgaaatcggtcacct

SEQ ID NO: 5900469 - DNA, 25 bp, Homo sapien
tttcatcagagttaagttggctcag

SEQ ID NO: 5900470 - DNA, 25 bp, Homo sapien
aacatattccagtatatcccttgac

SEQ ID NO: 5900471 - DNA, 25 bp, Homo sapien
tgcacagtgcagaatttgaacttga

SEQ ID NO: 5900472 - DNA, 25 bp, Homo sapien
cttgatcacatctaaactagaaatt

SEQ ID NO: 5900473 - DNA, 25 bp, Homo sapien
ttcttctttcaaaagcctatttcat

SEQ ID NO: 5900474 - DNA, 25 bp, Homo sapien
tatattacataggcacaaccagctt

SEQ ID NO: 5900475 - DNA, 25 bp, Homo sapien
aactacttctctaacatattccagt

SEQ ID NO: 5900476 - DNA, 25 bp, Homo sapien
caatcctggtactttctatagctat

SEQ ID NO: 5900477 - DNA, 25 bp, Homo sapien
tattacataggcacaaccagctttc

SEQ ID NO: 5900478 - DNA, 25 bp, Homo sapien
agcattcttacatacccacacatta

SEQ ID NO: 5900479 - DNA, 25 bp, Homo sapien
aatcacattgaatgacgactacact

SEQ ID NO: 5900480 - DNA, 25 bp, Homo sapien
tagcaagggctaacattccagcata

SEQ ID NO: 5900481 - DNA, 25 bp, Homo sapien
tatactgcagataaccacaacagac

SEQ ID NO: 5900482 - DNA, 25 bp, Homo sapien
attagcaataatggggatgccggta

SEQ ID NO: 5900483 - DNA, 25 bp, Homo sapien
atttcacagtttctgctcccagcta

SEQ ID NO: 5900484 - DNA, 25 bp, Homo sapien
acaaccagctttctcctagcaaggg

SEQ ID NO: 5900485 - DNA, 25 bp, Homo sapien
acaggtgagttttcttctttcaaaa

SEQ ID NO: 5900486 - DNA, 25 bp, Homo sapien
cggtcacctttgtcctatattacat

SEQ ID NO: 5900487 - DNA, 25 bp, Homo sapien
tgaatgacgactacacttgtggggt

SEQ ID NO: 5900488 - DNA, 25 bp, Homo sapien
gcctatttcattgtactgtttcatc

SEQ ID NO: 5900489 - DNA, 25 bp, Homo sapien
ggagatgagtctcaaatgaaataca

SEQ ID NO: 5900490 - DNA, 25 bp, Homo sapien
ctttcctttctgaatcacattgaat

SEQ ID NO: 5900491 - DNA, 25 bp, Homo sapien
gatgtgttagaagtgtgacagaggc

SEQ ID NO: 5900492 - DNA, 25 bp, Homo sapien
gaggcatggcggagatgagtctcaa

SEQ ID NO: 5900493 - DNA, 25 bp, Homo sapien
agctttctcctagcaagggctaaca

SEQ ID NO: 5900494 - DNA, 25 bp, Homo sapien
gagggctcttctctttgcacagcag

SEQ ID NO: 5900495 - DNA, 25 bp, Homo sapien
taatgtgatgtgttagaagtgtgac

SEQ ID NO: 5900496 - DNA, 25 bp, Homo sapien
gaattagcaataatggggatgccgg

SEQ ID NO: 5900497 - DNA, 25 bp, Homo sapien
gtttctgctcccagctatagcctct

SEQ ID NO: 5900498 - DNA, 25 bp, Homo sapien
ctacttctctaacatattccagtat

SEQ ID NO: 5900499 - DNA, 25 bp, Homo sapien
cagaggcatggcggagatgagtctc

SEQ ID NO: 5900500 - DNA, 25 bp, Homo sapien
atgccggtaacaaattatacatatt

SEQ ID NO: 5900501 - DNA, 25 bp, Homo sapien
catcattgacatatgtatgcatgga

SEQ ID NO: 5900502 - DNA, 25 bp, Homo sapien
tgtgttagaagtgtgacagaggcat

SEQ ID NO: 5900503 - DNA, 25 bp, Homo sapien
atgtatgcatggatgtgtatatact

SEQ ID NO: 5900504 - DNA, 25 bp, Homo sapien
agttggctcagtgagacagacaatc

SEQ ID NO: 5900505 - DNA, 25 bp, Homo sapien
atctggaactacttctctaacatat

SEQ ID NO: 5900506 - DNA, 25 bp, Homo sapien
ctacacttgtggggttttgcatgtg

SEQ ID NO: 5900507 - DNA, 25 bp, Homo sapien
aaacttgatgaaatcggtcaccttt

SEQ ID NO: 5900508 - DNA, 25 bp, Homo sapien
agaagtgtgacagaggcatggcgga

SEQ ID NO: 5900509 - DNA, 25 bp, Homo sapien
acgactacacttgtggggttttgca

SEQ ID NO: 5900510 - DNA, 25 bp, Homo sapien
tcaaaagcctatttcattgtactgt

SEQ ID NO: 5900511 - DNA, 25 bp, Homo sapien
aatctgaaaatgtgagatctcgttc

SEQ ID NO: 5900512 - DNA, 25 bp, Homo sapien
taataaaagcaatctgaaaatgtga

SEQ ID NO: 5900513 - DNA, 25 bp, Homo sapien
aaatttcacagtttctgctcccagc

SEQ ID NO: 5900514 - DNA, 25 bp, Homo sapien
aactagaaattaatgtgatgtgtta

SEQ ID NO: 5900515 - DNA, 25 bp, Homo sapien
ataggcacaaccagctttctcctag

SEQ ID NO: 5900516 - DNA, 25 bp, Homo sapien
tctatactgcagataaccacaacag

SEQ ID NO: 5900517 - DNA, 25 bp, Homo sapien
ccttgactctttcctttctgaatca

SEQ ID NO: 5900518 - DNA, 25 bp, Homo sapien
atggggatgccggtaacaaattata

SEQ ID NO: 5900519 - DNA, 25 bp, Homo sapien
acagttgagggctcttctctttgca

SEQ ID NO: 5900520 - DNA, 25 bp, Homo sapien
aaaatgtgagatctcgttcataaat

SEQ ID NO: 5900521 - DNA, 25 bp, Homo sapien
ttctcctagcaagggctaacattcc

SEQ ID NO: 5900522 - DNA, 25 bp, Homo sapien
acttctctaacatattccagtatat

SEQ ID NO: 5900523 - DNA, 25 bp, Homo sapien
ttttcttctttcaaaagcctatttc

SEQ ID NO: 5900524 - DNA, 25 bp, Homo sapien
aatgaaatacaaagtattggatatt

SEQ ID NO: 5900525 - DNA, 25 bp, Homo sapien
acctttgtcctatattacataggca

SEQ ID NO: 5900526 - DNA, 25 bp, Homo sapien
gacagaggcatggcggagatgagtc

SEQ ID NO: 5900527 - DNA, 25 bp, Homo sapien
gactctttcctttctgaatcacatt

SEQ ID NO: 5900528 - DNA, 25 bp, Homo sapien
tcacacaggtgagttttcttctttc

SEQ ID NO: 5900529 - DNA, 25 bp, Homo sapien
tattgatttttgttgttgttgttgt

SEQ ID NO: 5900530 - DNA, 25 bp, Homo sapien
taaggtaaaacaaaacagcggcaac

SEQ ID NO: 5900531 - DNA, 25 bp, Homo sapien
cagctaataaataaattgaaagcta

SEQ ID NO: 5900532 - DNA, 25 bp, Homo sapien
atggatgtgtatatactgtaatgaa

SEQ ID NO: 5900533 - DNA, 25 bp, Homo sapien
ctgctctaaaacttgtactttgcac

SEQ ID NO: 5900534 - DNA, 25 bp, Homo sapien
ttagaagtgtgacagaggcatggcg

SEQ ID NO: 5900535 - DNA, 25 bp, Homo sapien
atatctggaactacttctctaacat

SEQ ID NO: 5900536 - DNA, 25 bp, Homo sapien
attaatgtgatgtgttagaagtgtg

SEQ ID NO: 5900537 - DNA, 25 bp, Homo sapien
cttctttcaaaagcctatttcattg

SEQ ID NO: 5900538 - DNA, 25 bp, Homo sapien
aacaatcctggtactttctatagct

SEQ ID NO: 5900539 - DNA, 25 bp, Homo sapien
cattgtactgtttcatcagagttaa

SEQ ID NO: 5900540 - DNA, 25 bp, Homo sapien
ctcagtgagacagacaatcatggat

SEQ ID NO: 5900541 - DNA, 25 bp, Homo sapien
gctcccagctatagcctctgagata

SEQ ID NO: 5900542 - DNA, 25 bp, Homo sapien
gcaccacaaatctatactgcagata

SEQ ID NO: 5900543 - DNA, 25 bp, Homo sapien
cttcacacaggtgagttttcttctt

SEQ ID NO: 5900544 - DNA, 25 bp, Homo sapien
gcatccatatgcacattttctagta

SEQ ID NO: 5900545 - DNA, 25 bp, Homo sapien
tattccagtatatcccttgactctt

SEQ ID NO: 5900546 - DNA, 25 bp, Homo sapien
atggtcctgctctaaaacttgtact

SEQ ID NO: 5900547 - DNA, 25 bp, Homo sapien
tatatcccttgactctttcctttct

SEQ ID NO: 5900548 - DNA, 25 bp, Homo sapien
gtttacaagcatccatatgcacatt

SEQ ID NO: 5900549 - DNA, 25 bp, Homo sapien
ctccaaacttgatgaaatcggtcac

SEQ ID NO: 5900550 - DNA, 25 bp, Homo sapien
cctggtactttctatagctattaca

SEQ ID NO: 5900551 - DNA, 25 bp, Homo sapien
atttttattgttagaattgactcca

SEQ ID NO: 5900552 - DNA, 25 bp, Homo sapien
ggatgccggtaacaaattatacata

SEQ ID NO: 5900553 - DNA, 25 bp, Homo sapien
tttacattaatgaataataaaagca

SEQ ID NO: 5900554 - DNA, 25 bp, Homo sapien
acaacagactttccagtgtttacaa

SEQ ID NO: 5900555 - DNA, 25 bp, Homo sapien
acattgaatgacgactacacttgtg

SEQ ID NO: 5900556 - DNA, 25 bp, Homo sapien
ctctttgcacagcagtttacaagca

SEQ ID NO: 5900557 - DNA, 25 bp, Homo sapien
attgaatgacgactacacttgtggg

SEQ ID NO: 5900558 - DNA, 25 bp, Homo sapien
caaatctatactgcagataaccaca

SEQ ID NO: 5900559 - DNA, 25 bp, Homo sapien
atcacatctaaactagaaattaatg

SEQ ID NO: 5900560 - DNA, 25 bp, Homo sapien
ccagctttctcctagcaagggctaa

SEQ ID NO: 5900561 - DNA, 25 bp, Homo sapien
ttccagtatatcccttgactctttc

SEQ ID NO: 5900562 - DNA, 25 bp, Homo sapien
gagacggacacaaagttagcaccac

SEQ ID NO: 5900563 - DNA, 25 bp, Homo sapien
acaagcatccatatgcacattttct

SEQ ID NO: 5900564 - DNA, 25 bp, Homo sapien
aaagctaaagcatcattgacatatg

SEQ ID NO: 5900565 - DNA, 25 bp, Homo sapien
ctcgttcataaataattcttcatta

SEQ ID NO: 5900566 - DNA, 25 bp, Homo sapien
ccacaaatttcacagtttctgctcc

SEQ ID NO: 5900567 - DNA, 25 bp, Homo sapien
agcagtttacaagcatccatatgca

SEQ ID NO: 5900568 - DNA, 25 bp, Homo sapien
ttctgctcccagctatagcctctga

SEQ ID NO: 5900569 - DNA, 25 bp, Homo sapien
tctgaaaatgtgagatctcgttcat

SEQ ID NO: 5900570 - DNA, 25 bp, Homo sapien
tcagatacccacaaatttcacagtt

SEQ ID NO: 5900571 - DNA, 25 bp, Homo sapien
agataaccacaacagactttccagt

SEQ ID NO: 5900572 - DNA, 25 bp, Homo sapien
aaatcggtcacctttgtcctatatt

SEQ ID NO: 5900573 - DNA, 25 bp, Homo sapien
ttgcatgtgggttggtgttcagata

SEQ ID NO: 5900574 - DNA, 25 bp, Homo sapien
agcggcaacaatcctggtactttct

SEQ ID NO: 5900575 - DNA, 25 bp, Homo sapien
ccagctatagcctctgagatagatc

SEQ ID NO: 5900576 - DNA, 25 bp, Homo sapien
ttccagtgtttacaagcattcttac

SEQ ID NO: 5900577 - DNA, 25 bp, Homo sapien
gactccaaacttgatgaaatcggtc

SEQ ID NO: 5900578 - DNA, 25 bp, Homo sapien
tccagcatatctggaactacttctc

SEQ ID NO: 5900579 - DNA, 25 bp, Homo sapien
tttctatagctattacagttgaggg

SEQ ID NO: 5900580 - DNA, 25 bp, Homo sapien
tacaagcattcttacatacccacac

SEQ ID NO: 5900581 - DNA, 25 bp, Homo sapien
tgtgagatctcgttcataaataatt

SEQ ID NO: 5900582 - DNA, 25 bp, Homo sapien
tacattaatgaataataaaagcaat

SEQ ID NO: 5900583 - DNA, 25 bp, Homo sapien
atacccacaaatttcacagtttctg

SEQ ID NO: 5900584 - DNA, 25 bp, Homo sapien
tgttagaattgactccaaacttgat

SEQ ID NO: 5900585 - DNA, 25 bp, Homo sapien
tgaaaatgtgagatctcgttcataa

SEQ ID NO: 5900586 - DNA, 25 bp, Homo sapien
ttcctttctgaatcacattgaatga

SEQ ID NO: 5900587 - DNA, 25 bp, Homo sapien
atcatggatggagacggacacaaag

SEQ ID NO: 5900588 - DNA, 25 bp, Homo sapien
catggatggagacggacacaaagtt

SEQ ID NO: 5900589 - DNA, 25 bp, Homo sapien
taaaacttgtactttgcacagtgca

SEQ ID NO: 5900590 - DNA, 25 bp, Homo sapien
gctattacagttgagggctcttctc

SEQ ID NO: 5900591 - DNA, 25 bp, Homo sapien
ttgtactgtttcatcagagttaagt

SEQ ID NO: 5900592 - DNA, 25 bp, Homo sapien
gcacaaccagctttctcctagcaag

SEQ ID NO: 5900593 - DNA, 25 bp, Homo sapien
ttgagggctcttctctttgcacagc

SEQ ID NO: 5900594 - DNA, 25 bp, Homo sapien
tgagatctcgttcataaataattct

SEQ ID NO: 5900595 - DNA, 25 bp, Homo sapien
agcatcattgacatatgtatgcatg

SEQ ID NO: 5900596 - DNA, 25 bp, Homo sapien
gacggacacaaagttagcaccacaa

SEQ ID NO: 5900597 - DNA, 25 bp, Homo sapien
atcagagttaagttggctcagtgag

SEQ ID NO: 5900598 - DNA, 25 bp, Homo sapien
acatatgtatgcatggatgtgtata

SEQ ID NO: 5900599 - DNA, 25 bp, Homo sapien
gccggtaacaaattatacatatttt

SEQ ID NO: 5900600 - DNA, 25 bp, Homo sapien
cacaaagttagcaccacaaatctat

SEQ ID NO: 5900601 - DNA, 25 bp, Homo sapien
agctaaagcatcattgacatatgta

SEQ ID NO: 5900602 - DNA, 25 bp, Homo sapien
ctgcagataaccacaacagactttc

SEQ ID NO: 5900603 - DNA, 25 bp, Homo sapien
cttacatacccacacattatttaca

SEQ ID NO: 5900604 - DNA, 25 bp, Homo sapien
gtgagacagacaatcatggatggag

SEQ ID NO: 5900605 - DNA, 25 bp, Homo sapien
ctcctagcaagggctaacattccag

SEQ ID NO: 5900606 - DNA, 25 bp, Homo sapien
atttcttcacacaggtgagttttct

SEQ ID NO: 5900607 - DNA, 25 bp, Homo sapien
tcattgacatatgtatgcatggatg

SEQ ID NO: 5900608 - DNA, 25 bp, Homo sapien
acacttgtggggttttgcatgtggg

SEQ ID NO: 5900609 - DNA, 25 bp, Homo sapien
catacccacacattatttacagcta

SEQ ID NO: 5900610 - DNA, 25 bp, Homo sapien
atatgcacattttctagtaatttca

SEQ ID NO: 5900611 - DNA, 25 bp, Homo sapien
tgatcacatctaaactagaaattaa

SEQ ID NO: 5900612 - DNA, 25 bp, Homo sapien
ttattgttagaattgactccaaact

SEQ ID NO: 5900613 - DNA, 25 bp, Homo sapien
cggcaacaatcctggtactttctat

SEQ ID NO: 5900614 - DNA, 25 bp, Homo sapien
aagcctatttcattgtactgtttca

SEQ ID NO: 5900615 - DNA, 25 bp, Homo sapien
aagtgtgacagaggcatggcggaga

SEQ ID NO: 5900616 - DNA, 25 bp, Homo sapien
cacatctaaactagaaattaatgtg

SEQ ID NO: 5900617 - DNA, 25 bp, Homo sapien
ataaaagcaatctgaaaatgtgaga

SEQ ID NO: 5900618 - DNA, 25 bp, Homo sapien
tagcaataatggggatgccggtaac

SEQ ID NO: 5900619 - DNA, 25 bp, Homo sapien
gacacaaagttagcaccacaaatct

SEQ ID NO: 5900620 - DNA, 25 bp, Homo sapien
aatctatactgcagataaccacaac

SEQ ID NO: 5900621 - DNA, 25 bp, Homo sapien
cggacacaaagttagcaccacaaat

SEQ ID NO: 5900622 - DNA, 25 bp, Homo sapien
ttaatgaataataaaagcaatctga

SEQ ID NO: 5900623 - DNA, 25 bp, Homo sapien
aggcacaaccagctttctcctagca

SEQ ID NO: 5900624 - DNA, 25 bp, Homo sapien
acttgtggggttttgcatgtgggtt

SEQ ID NO: 5900625 - DNA, 25 bp, Homo sapien
acaaatttcacagtttctgctccca

SEQ ID NO: 5900626 - DNA, 25 bp, Homo sapien
gtcacctttgtcctatattacatag

SEQ ID NO: 5900627 - DNA, 25 bp, Homo sapien
ggggttttgcatgtgggttggtgtt

SEQ ID NO: 5900628 - DNA, 25 bp, Homo sapien
tgaacttgatcacatctaaactaga

SEQ ID NO: 5900629 - DNA, 25 bp, Homo sapien
tttcaaaagcctatttcattgtact

SEQ ID NO: 5900630 - DNA, 25 bp, Homo sapien
ttcttacatacccacacattattta

SEQ ID NO: 5900631 - DNA, 25 bp, Homo sapien
gtctcaaatgaaatacaaagtattg

SEQ ID NO: 5900632 - DNA, 25 bp, Homo sapien
aaccagctttctcctagcaagggct

SEQ ID NO: 5900633 - DNA, 25 bp, Homo sapien
cacagtgcagaatttgaacttgatc

SEQ ID NO: 5900634 - DNA, 25 bp, Homo sapien
aataataaaagcaatctgaaaatgt

SEQ ID NO: 5900635 - DNA, 25 bp, Homo sapien
atttcattgtactgtttcatcagag

SEQ ID NO: 5900636 - DNA, 25 bp, Homo sapien
gttggtgttcagatacccacaaatt

SEQ ID NO: 5900637 - DNA, 25 bp, Homo sapien
tcctgctctaaaacttgtactttgc

SEQ ID NO: 5900638 - DNA, 25 bp, Homo sapien
tcttctctttgcacagcagtttaca

SEQ ID NO: 5900639 - DNA, 25 bp, Homo sapien
caagcattcttacatacccacacat

SEQ ID NO: 5900640 - DNA, 25 bp, Homo sapien
tacccacacattatttacagctaat

SEQ ID NO: 5900641 - DNA, 25 bp, Homo sapien
gcaatctgaaaatgtgagatctcgt

SEQ ID NO: 5900642 - DNA, 25 bp, Homo sapien
atatgtatgcatggatgtgtatata

SEQ ID NO: 5900643 - DNA, 25 bp, Homo sapien
taagttggctcagtgagacagacaa

SEQ ID NO: 5900644 - DNA, 25 bp, Homo sapien
ttctctttgcacagcagtttacaag

SEQ ID NO: 5900645 - DNA, 25 bp, Homo sapien
ttctctaacatattccagtatatcc

SEQ ID NO: 5900646 - DNA, 25 bp, Homo sapien
gacagacaatcatggatggagacgg

SEQ ID NO: 5900647 - DNA, 25 bp, Homo sapien
agttgagggctcttctctttgcaca

SEQ ID NO: 5900648 - DNA, 25 bp, Homo sapien
ggcatggcggagatgagtctcaaat

SEQ ID NO: 5900649 - DNA, 25 bp, Homo sapien
tctaaactagaaattaatgtgatgt

SEQ ID NO: 5900650 - DNA, 25 bp, Homo sapien
tcatcagagttaagttggctcagtg

SEQ ID NO: 5900651 - DNA, 25 bp, Homo sapien
tgtttcatcagagttaagttggctc

SEQ ID NO: 5900652 - DNA, 25 bp, Homo sapien
atctcgttcataaataattcttcat

SEQ ID NO: 5900653 - DNA, 25 bp, Homo sapien
tacatacccacacattatttacagc

SEQ ID NO: 5900654 - DNA, 25 bp, Homo sapien
ctggaactacttctctaacatattc

SEQ ID NO: 5900655 - DNA, 25 bp, Homo sapien
ttcattgtactgtttcatcagagtt

SEQ ID NO: 5900656 - DNA, 25 bp, Homo sapien
taatgaattagcaataatggggatg

SEQ ID NO: 5900657 - DNA, 25 bp, Homo sapien
attgacatatgtatgcatggatgtg

SEQ ID NO: 5900658 - DNA, 25 bp, Homo sapien
tgttagaagtgtgacagaggcatgg

SEQ ID NO: 5900659 - DNA, 25 bp, Homo sapien
cattaatgaataataaaagcaatct

SEQ ID NO: 5900660 - DNA, 25 bp, Homo sapien
gatttttgttgttgttgttgttaag

SEQ ID NO: 5900661 - DNA, 25 bp, Homo sapien
agcctctgagatagatcttctttat

SEQ ID NO: 5900662 - DNA, 25 bp, Homo sapien
tcccagctatagcctctgagataga

SEQ ID NO: 5900663 - DNA, 25 bp, Homo sapien
cattcttacatacccacacattatt

SEQ ID NO: 5900664 - DNA, 25 bp, Homo sapien
gtaaaacaaaacagcggcaacaatc

SEQ ID NO: 5900665 - DNA, 25 bp, Homo sapien
gagttaagttggctcagtgagacag

SEQ ID NO: 5900666 - DNA, 25 bp, Homo sapien
gatggagacggacacaaagttagca

SEQ ID NO: 5900667 - DNA, 25 bp, Homo sapien
gcggagatgagtctcaaatgaaata

SEQ ID NO: 5900668 - DNA, 25 bp, Homo sapien
tgaaatacaaagtattggatattgg

SEQ ID NO: 5900669 - DNA, 25 bp, Homo sapien
taataaataaattgaaagctaaagc

SEQ ID NO: 5900670 - DNA, 25 bp, Homo sapien
gtgggttggtgttcagatacccaca

SEQ ID NO: 5900671 - DNA, 25 bp, Homo sapien
agatctcgttcataaataattcttc

SEQ ID NO: 5900672 - DNA, 25 bp, Homo sapien
atatttttattgttagaattgactc

SEQ ID NO: 5900673 - DNA, 25 bp, Homo sapien
aatttgaacttgatcacatctaaac

SEQ ID NO: 5900674 - DNA, 25 bp, Homo sapien
aacttgatcacatctaaactagaaa

SEQ ID NO: 5900675 - DNA, 25 bp, Homo sapien
gctcttctctttgcacagcagttta

SEQ ID NO: 5900676 - DNA, 25 bp, Homo sapien
ataaccacaacagactttccagtgt

SEQ ID NO: 5900677 - DNA, 25 bp, Homo sapien
tctttcaaaagcctatttcattgta

SEQ ID NO: 5900678 - DNA, 25 bp, Homo sapien
atgtgataaaaaaaatggtcctgct

SEQ ID NO: 5900679 - DNA, 25 bp, Homo sapien
taatggggatgccggtaacaaatta

SEQ ID NO: 5900680 - DNA, 25 bp, Homo sapien
agaaattaatgtgatgtgttagaag

SEQ ID NO: 5900681 - DNA, 25 bp, Homo sapien
aaattaatgtgatgtgttagaagtg

SEQ ID NO: 5900682 - DNA, 25 bp, Homo sapien
gataaaaaaaatggtcctgctctaa

SEQ ID NO: 5900683 - DNA, 25 bp, Homo sapien
aatgtgagatctcgttcataaataa

SEQ ID NO: 5900684 - DNA, 25 bp, Homo sapien
ccagtgtttacaagcattcttacat

SEQ ID NO: 5900685 - DNA, 25 bp, Homo sapien
tgaaagctaaagcatcattgacata

SEQ ID NO: 5900686 - DNA, 25 bp, Homo sapien
acccacaaatttcacagtttctgct

SEQ ID NO: 5900687 - DNA, 25 bp, Homo sapien
gttaaggtaaaacaaaacagcggca

SEQ ID NO: 5900688 - DNA, 25 bp, Homo sapien
aagcatccatatgcacattttctag

SEQ ID NO: 5900689 - DNA, 25 bp, Homo sapien
aaaacaaaacagcggcaacaatcct

SEQ ID NO: 5900690 - DNA, 25 bp, Homo sapien
tggtactttctatagctattacagt

SEQ ID NO: 5900691 - DNA, 25 bp, Homo sapien
tggagacggacacaaagttagcacc

SEQ ID NO: 5900692 - DNA, 25 bp, Homo sapien
tttacagctaataaataaattgaaa

SEQ ID NO: 5900693 - DNA, 25 bp, Homo sapien
gtactttgcacagtgcagaatttga

SEQ ID NO: 5900694 - DNA, 25 bp, Homo sapien
gggctcttctctttgcacagcagtt

SEQ ID NO: 5900695 - DNA, 25 bp, Homo sapien
aaacagcggcaacaatcctggtact

SEQ ID NO: 5900696 - DNA, 25 bp, Homo sapien
aggtgagttttcttctttcaaaagc

SEQ ID NO: 5900697 - DNA, 25 bp, Homo sapien
ggttttgcatgtgggttggtgttca

SEQ ID NO: 5900698 - DNA, 25 bp, Homo sapien
agtatatcccttgactctttccttt

SEQ ID NO: 5900699 - DNA, 25 bp, Homo sapien
ctatagcctctgagatagatcttct

SEQ ID NO: 5900700 - DNA, 25 bp, Homo sapien
tcacattgaatgacgactacacttg

SEQ ID NO: 5900701 - DNA, 25 bp, Homo sapien
tttacaagcattcttacatacccac

SEQ ID NO: 5900702 - DNA, 25 bp, Homo sapien
ttgatgaaatcggtcacctttgtcc

SEQ ID NO: 5900703 - DNA, 25 bp, Homo sapien
ttggctcagtgagacagacaatcat

SEQ ID NO: 5900704 - DNA, 25 bp, Homo sapien
ctttctcctagcaagggctaacatt

SEQ ID NO: 5900705 - DNA, 25 bp, Homo sapien
aacaaaacagcggcaacaatcctgg

SEQ ID NO: 5900706 - DNA, 25 bp, Homo sapien
agctatagcctctgagatagatctt

SEQ ID NO: 5900707 - DNA, 25 bp, Homo sapien
atgtgtatatactgtaatgaattag

SEQ ID NO: 5900708 - DNA, 25 bp, Homo sapien
ggtcctgctctaaaacttgtacttt

SEQ ID NO: 5900709 - DNA, 25 bp, Homo sapien
cggtaacaaattatacatattttta

SEQ ID NO: 5900710 - DNA, 25 bp, Homo sapien
tgaataataaaagcaatctgaaaat

SEQ ID NO: 5900711 - DNA, 25 bp, Homo sapien
cagataccatttcttcacacaggtg

SEQ ID NO: 5900712 - DNA, 25 bp, Homo sapien
atgagtctcaaatgaaatacaaagt

SEQ ID NO: 5900713 - DNA, 25 bp, Homo sapien
cctctgagatagatcttctttatca

SEQ ID NO: 5900714 - DNA, 25 bp, Homo sapien
tgacgactacacttgtggggttttg

SEQ ID NO: 5900715 - DNA, 25 bp, Homo sapien
actgtttcatcagagttaagttggc

SEQ ID NO: 5900716 - DNA, 25 bp, Homo sapien
gatgaaatcggtcacctttgtccta

SEQ ID NO: 5900717 - DNA, 25 bp, Homo sapien
aagggctaacattccagcatatctg

SEQ ID NO: 5900718 - DNA, 25 bp, Homo sapien
atactgtaatgaattagcaataatg

SEQ ID NO: 5900719 - DNA, 25 bp, Homo sapien
ctctttcctttctgaatcacattga

SEQ ID NO: 5900720 - DNA, 25 bp, Homo sapien
ttatgtgataaaaaaaatggtcctg

SEQ ID NO: 5900721 - DNA, 25 bp, Homo sapien
aaaagcaatctgaaaatgtgagatc

SEQ ID NO: 5900722 - DNA, 25 bp, Homo sapien
cctttctgaatcacattgaatgacg

SEQ ID NO: 5900723 - DNA, 25 bp, Homo sapien
caaagttagcaccacaaatctatac

SEQ ID NO: 5900724 - DNA, 25 bp, Homo sapien
atgtgggttggtgttcagataccca

SEQ ID NO: 5900725 - DNA, 25 bp, Homo sapien
agatgagtctcaaatgaaatacaaa

SEQ ID NO: 5900726 - DNA, 25 bp, Homo sapien
actgtaatgaattagcaataatggg

SEQ ID NO: 5900727 - DNA, 25 bp, Homo sapien
tttgcacagtgcagaatttgaactt

SEQ ID NO: 5900728 - DNA, 25 bp, Homo sapien
tgaaatcggtcacctttgtcctata

SEQ ID NO: 5900729 - DNA, 25 bp, Homo sapien
gataccatttcttcacacaggtgag

SEQ ID NO: 5900730 - DNA, 25 bp, Homo sapien
gagtctcaaatgaaatacaaagtat

SEQ ID NO: 5900731 - DNA, 25 bp, Homo sapien
cacaaatctatactgcagataacca

SEQ ID NO: 5900732 - DNA, 25 bp, Homo sapien
taaaaaaaatggtcctgctctaaaa

SEQ ID NO: 5900733 - DNA, 25 bp, Homo sapien
catctaaactagaaattaatgtgat

SEQ ID NO: 5900734 - DNA, 25 bp, Homo sapien
ctagaaattaatgtgatgtgttaga

SEQ ID NO: 5900735 - DNA, 25 bp, Homo sapien
aagttagcaccacaaatctatactg

SEQ ID NO: 5900736 - DNA, 25 bp, Homo sapien
atcggtcacctttgtcctatattac

SEQ ID NO: 5900737 - DNA, 25 bp, Homo sapien
tatcccttgactctttcctttctga

SEQ ID NO: 5900738 - DNA, 25 bp, Homo sapien
attgttagaattgactccaaacttg

SEQ ID NO: 5900739 - DNA, 25 bp, Homo sapien
cccacacattatttacagctaataa

SEQ ID NO: 5900740 - DNA, 25 bp, Homo sapien
gttaagttggctcagtgagacagac

SEQ ID NO: 5900741 - DNA, 25 bp, Homo sapien
gtgatgtgttagaagtgtgacagag

SEQ ID NO: 5900742 - DNA, 25 bp, Homo sapien
ttacataggcacaaccagctttctc

SEQ ID NO: 5900743 - DNA, 25 bp, Homo sapien
gctctaaaacttgtactttgcacag

SEQ ID NO: 5900744 - DNA, 25 bp, Homo sapien
ttgatttttgttgttgttgttgtta

SEQ ID NO: 5900745 - DNA, 25 bp, Homo sapien
acagcggcaacaatcctggtacttt

SEQ ID NO: 5900746 - DNA, 25 bp, Homo sapien
gcatatctggaactacttctctaac

SEQ ID NO: 5900747 - DNA, 25 bp, Homo sapien
ttgtactttgcacagtgcagaattt

SEQ ID NO: 5900748 - DNA, 25 bp, Homo sapien
aacagactttccagtgtttacaagc

SEQ ID NO: 5900749 - DNA, 25 bp, Homo sapien
tggcggagatgagtctcaaatgaaa

SEQ ID NO: 5900750 - DNA, 25 bp, Homo sapien
taacattccagcatatctggaacta

SEQ ID NO: 5900751 - DNA, 25 bp, Homo sapien
cagtgagacagacaatcatggatgg

SEQ ID NO: 5900752 - DNA, 25 bp, Homo sapien
ccacaacagactttccagtgtttac

SEQ ID NO: 5900753 - DNA, 25 bp, Homo sapien
acacaggtgagttttcttctttcaa

SEQ ID NO: 5900754 - DNA, 25 bp, Homo sapien
gcaataatggggatgccggtaacaa

SEQ ID NO: 5900755 - DNA, 25 bp, Homo sapien
agaattgactccaaacttgatgaaa

SEQ ID NO: 5900756 - DNA, 25 bp, Homo sapien
ctttgcacagcagtttacaagcatc

SEQ ID NO: 5900757 - DNA, 25 bp, Homo sapien
agatacccacaaatttcacagtttc

SEQ ID NO: 5900758 - DNA, 25 bp, Homo sapien
gtgtatatactgtaatgaattagca

SEQ ID NO: 5900759 - DNA, 25 bp, Homo sapien
ttagaattgactccaaacttgatga

SEQ ID NO: 5900760 - DNA, 25 bp, Homo sapien
acttgatgaaatcggtcacctttgt

SEQ ID NO: 5900761 - DNA, 25 bp, Homo sapien
tgttgttgttgttgttaaggtaaaa

SEQ ID NO: 5900762 - DNA, 25 bp, Homo sapien
aaagcatcattgacatatgtatgca

SEQ ID NO: 5900763 - DNA, 25 bp, Homo sapien
ttcttcacacaggtgagttttcttc

SEQ ID NO: 5900764 - DNA, 25 bp, Homo sapien
gtgtgacagaggcatggcggagatg

SEQ ID NO: 5900765 - DNA, 25 bp, Homo sapien
aaccacaacagactttccagtgttt

SEQ ID NO: 5900766 - DNA, 25 bp, Homo sapien
caaatgaaatacaaagtattggata

SEQ ID NO: 5900767 - DNA, 25 bp, Homo sapien
gtactttctatagctattacagttg

SEQ ID NO: 5900768 - DNA, 25 bp, Homo sapien
atgcatggatgtgtatatactgtaa

SEQ ID NO: 5900769 - DNA, 25 bp, Homo sapien
ctttgtcctatattacataggcaca

SEQ ID NO: 5900770 - DNA, 25 bp, Homo sapien
accacaaatctatactgcagataac

SEQ ID NO: 5900771 - DNA, 25 bp, Homo sapien
caatcatggatggagacggacacaa

SEQ ID NO: 5900772 - DNA, 25 bp, Homo sapien
cctagcaagggctaacattccagca

SEQ ID NO: 5900773 - DNA, 25 bp, Homo sapien
gcagaatttgaacttgatcacatct

SEQ ID NO: 5900774 - DNA, 25 bp, Homo sapien
ttacaagcatccatatgcacatttt

SEQ ID NO: 5900775 - DNA, 25 bp, Homo sapien
ctatttcattgtactgtttcatcag

SEQ ID NO: 5900776 - DNA, 25 bp, Homo sapien
gactacacttgtggggttttgcatg

SEQ ID NO: 5900777 - DNA, 25 bp, Homo sapien
caaaacagcggcaacaatcctggta

SEQ ID NO: 5900778 - DNA, 25 bp, Homo sapien
atatactgtaatgaattagcaataa

SEQ ID NO: 5900779 - DNA, 25 bp, Homo sapien
gtgttcagatacccacaaatttcac

SEQ ID NO: 5900780 - DNA, 25 bp, Homo sapien
tgagatagatcttctttatcatttt

SEQ ID NO: 5900781 - DNA, 25 bp, Homo sapien
aatgacgactacacttgtggggttt

SEQ ID NO: 5900782 - DNA, 25 bp, Homo sapien
gtgagttttcttctttcaaaagcct

SEQ ID NO: 5900783 - DNA, 25 bp, Homo sapien
gactttccagtgtttacaagcattc

SEQ ID NO: 5900784 - DNA, 25 bp, Homo sapien
tattacagttgagggctcttctctt

SEQ ID NO: 5900785 - DNA, 25 bp, Homo sapien
tttctgaatcacattgaatgacgac

SEQ ID NO: 5900786 - DNA, 25 bp, Homo sapien
ccatatgcacattttctagtaattt

SEQ ID NO: 5900787 - DNA, 25 bp, Homo sapien
tctaaaacttgtactttgcacagtg

SEQ ID NO: 5900788 - DNA, 25 bp, Homo sapien
attattgatttttgttgttgttgtt

SEQ ID NO: 5900789 - DNA, 25 bp, Homo sapien
catattccagtatatcccttgactc

SEQ ID NO: 5900790 - DNA, 25 bp, Homo sapien
ataaattgaaagctaaagcatcatt

SEQ ID NO: 5900791 - DNA, 25 bp, Homo sapien
tatagctattacagttgagggctct

SEQ ID NO: 5900792 - DNA, 25 bp, Homo sapien
gtatgcatggatgtgtatatactgt

SEQ ID NO: 5900793 - DNA, 25 bp, Homo sapien
tgtttacaagcattcttacataccc

SEQ ID NO: 5900794 - DNA, 25 bp, Homo sapien
tttgttgttgttgttgttaaggtaa

SEQ ID NO: 5900795 - DNA, 25 bp, Homo sapien
gggctaacattccagcatatctgga

SEQ ID NO: 5900796 - DNA, 25 bp, Homo sapien
ctgctcccagctatagcctctgaga

SEQ ID NO: 5900797 - DNA, 25 bp, Homo sapien
ttgtggggttttgcatgtgggttgg

SEQ ID NO: 5900798 - DNA, 25 bp, Homo sapien
acacttgaccctgtagacggagtac

SEQ ID NO: 5900799 - DNA, 25 bp, Homo sapien
cctaagcactcacagacgaaaagcc

SEQ ID NO: 5900800 - DNA, 25 bp, Homo sapien
atgagaagtcagagacaagcaatct

SEQ ID NO: 5900801 - DNA, 25 bp, Homo sapien
acccaaacgcaagccaaaccaaaca

SEQ ID NO: 5900802 - DNA, 25 bp, Homo sapien
tactaatcgtttaaaccactcactg

SEQ ID NO: 5900803 - DNA, 25 bp, Homo sapien
tttgctttttatgttgaccgtcagc

SEQ ID NO: 5900804 - DNA, 25 bp, Homo sapien
ttaccattccttgttattactaatc

SEQ ID NO: 5900805 - DNA, 25 bp, Homo sapien
cgtcagcctcgtgttgaatcttaaa

SEQ ID NO: 5900806 - DNA, 25 bp, Homo sapien
agacagttgaagacctttacactat

SEQ ID NO: 5900807 - DNA, 25 bp, Homo sapien
ctcacagacgaaaagccctgaccgg

SEQ ID NO: 5900808 - DNA, 25 bp, Homo sapien
aaatctcaaagccttcgtcagtccc

SEQ ID NO: 5900809 - DNA, 25 bp, Homo sapien
cgatacagcagaatggagacccgat

SEQ ID NO: 5900810 - DNA, 25 bp, Homo sapien
ttctgatgctaagactccagacctt

SEQ ID NO: 5900811 - DNA, 25 bp, Homo sapien
tccaaggactgtctggcgatgactt

SEQ ID NO: 5900812 - DNA, 25 bp, Homo sapien
gaaaagccctgaccggaaccctctg

SEQ ID NO: 5900813 - DNA, 25 bp, Homo sapien
tcttaaacaactttacatcctaaca

SEQ ID NO: 5900814 - DNA, 25 bp, Homo sapien
atttaccattccttgttattactaa

SEQ ID NO: 5900815 - DNA, 25 bp, Homo sapien
aatctgtgaaatggtgctatagatt

SEQ ID NO: 5900816 - DNA, 25 bp, Homo sapien
tgcatttagcaggagtatccactgc

SEQ ID NO: 5900817 - DNA, 25 bp, Homo sapien
gattgttttgctttttatgttgacc

SEQ ID NO: 5900818 - DNA, 25 bp, Homo sapien
aagcaatctgtgaaatggtgctata

SEQ ID NO: 5900819 - DNA, 25 bp, Homo sapien
accaagctcagtatctttgttttgt

SEQ ID NO: 5900820 - DNA, 25 bp, Homo sapien
gaaaccagagaacaaaaccaaccaa

SEQ ID NO: 5900821 - DNA, 25 bp, Homo sapien
cggttcataactgctttcataccta

SEQ ID NO: 5900822 - DNA, 25 bp, Homo sapien
gcagttgagtggggattgctgttga

SEQ ID NO: 5900823 - DNA, 25 bp, Homo sapien
ggactagcgagttccctggctttct

SEQ ID NO: 5900824 - DNA, 25 bp, Homo sapien
ggggattgctgttgattgaagatgt

SEQ ID NO: 5900825 - DNA, 25 bp, Homo sapien
ctttttacatatatgtacataggat

SEQ ID NO: 5900826 - DNA, 25 bp, Homo sapien
cagttttatgcgatacagcagaatg

SEQ ID NO: 5900827 - DNA, 25 bp, Homo sapien
agcactcacagacgaaaagccctga

SEQ ID NO: 5900828 - DNA, 25 bp, Homo sapien
ggggacaaaccccagacagttgaag

SEQ ID NO: 5900829 - DNA, 25 bp, Homo sapien
atctatggtttataaaacctattta

SEQ ID NO: 5900830 - DNA, 25 bp, Homo sapien
tatgcgatacagcagaatggagacc

SEQ ID NO: 5900831 - DNA, 25 bp, Homo sapien
aaatgagaagtcagagacaagcaat

SEQ ID NO: 5900832 - DNA, 25 bp, Homo sapien
atagatttaccattccttgttatta

SEQ ID NO: 5900833 - DNA, 25 bp, Homo sapien
tcgtttaaaccactcactggaaact

SEQ ID NO: 5900834 - DNA, 25 bp, Homo sapien
tgcctccaaggactgtctggcgatg

SEQ ID NO: 5900835 - DNA, 25 bp, Homo sapien
agatgtatataatatctatggttta

SEQ ID NO: 5900836 - DNA, 25 bp, Homo sapien
ctcccactcaacctcataggataac

SEQ ID NO: 5900837 - DNA, 25 bp, Homo sapien
tctagacccttgggactagcgagtt

SEQ ID NO: 5900838 - DNA, 25 bp, Homo sapien
ggattgctgttgattgaagatgtat

SEQ ID NO: 5900839 - DNA, 25 bp, Homo sapien
cattccttgttattactaatcgttt

SEQ ID NO: 5900840 - DNA, 25 bp, Homo sapien
tgtgcctccaaggactgtctggcga

SEQ ID NO: 5900841 - DNA, 25 bp, Homo sapien
gacccttgggactagcgagttccct

SEQ ID NO: 5900842 - DNA, 25 bp, Homo sapien
tccatgtgtgaagccctaagcactc

SEQ ID NO: 5900843 - DNA, 25 bp, Homo sapien
cgagcatctagacccttgggactag

SEQ ID NO: 5900844 - DNA, 25 bp, Homo sapien
tttttgttttgctcagacataaaaa

SEQ ID NO: 5900845 - DNA, 25 bp, Homo sapien
cagaatggagacccgatacaaacgg

SEQ ID NO: 5900846 - DNA, 25 bp, Homo sapien
tagccccaaacccaaacgcaagcca

SEQ ID NO: 5900847 - DNA, 25 bp, Homo sapien
acctccctcccactcaacctcatag

SEQ ID NO: 5900848 - DNA, 25 bp, Homo sapien
atacctccctcccactcaacctcat

SEQ ID NO: 5900849 - DNA, 25 bp, Homo sapien
gaccctgtagacggagtactggggc

SEQ ID NO: 5900850 - DNA, 25 bp, Homo sapien
ttttacatatatgtacataggattg

SEQ ID NO: 5900851 - DNA, 25 bp, Homo sapien
aaagccctgaccggaaccctctgca

SEQ ID NO: 5900852 - DNA, 25 bp, Homo sapien
aatcttaaacaactttacatcctaa

SEQ ID NO: 5900853 - DNA, 25 bp, Homo sapien
agctaggctgttgttattactacaa

SEQ ID NO: 5900854 - DNA, 25 bp, Homo sapien
aaccctctgcaaaaacagtaatagc

SEQ ID NO: 5900855 - DNA, 25 bp, Homo sapien
aaaaacagtaatagctggtggctcc

SEQ ID NO: 5900856 - DNA, 25 bp, Homo sapien
aacagttttatgcgatacagcagaa

SEQ ID NO: 5900857 - DNA, 25 bp, Homo sapien
tattggccaccaactgtagatgtat

SEQ ID NO: 5900858 - DNA, 25 bp, Homo sapien
gagtggggattgctgttgattgaag

SEQ ID NO: 5900859 - DNA, 25 bp, Homo sapien
actgcccgaatccatgtgtgaagcc

SEQ ID NO: 5900860 - DNA, 25 bp, Homo sapien
cggtgtccttctgatgctaagactc

SEQ ID NO: 5900861 - DNA, 25 bp, Homo sapien
caataaataaatctcaaagccttcg

SEQ ID NO: 5900862 - DNA, 25 bp, Homo sapien
gaagacctttacactatgggtgacc

SEQ ID NO: 5900863 - DNA, 25 bp, Homo sapien
aagccctaagcactcacagacgaaa

SEQ ID NO: 5900864 - DNA, 25 bp, Homo sapien
ctggggccacacgtttaaatgagaa

SEQ ID NO: 5900865 - DNA, 25 bp, Homo sapien
tgctttttatgttgaccgtcagcct

SEQ ID NO: 5900866 - DNA, 25 bp, Homo sapien
gcaatctgtgaaatggtgctataga

SEQ ID NO: 5900867 - DNA, 25 bp, Homo sapien
aggagtatccactgcccgaatccat

SEQ ID NO: 5900868 - DNA, 25 bp, Homo sapien
tttcatacctagctaggctgttgtt

SEQ ID NO: 5900869 - DNA, 25 bp, Homo sapien
atacagcagaatggagacccgatac

SEQ ID NO: 5900870 - DNA, 25 bp, Homo sapien
ggccaccaactgtagatgtatatac

SEQ ID NO: 5900871 - DNA, 25 bp, Homo sapien
aattaacagttttatgcgatacagc

SEQ ID NO: 5900872 - DNA, 25 bp, Homo sapien
tctgggtctagagtgttctgtgcct

SEQ ID NO: 5900873 - DNA, 25 bp, Homo sapien
atacctagctaggctgttgttatta

SEQ ID NO: 5900874 - DNA, 25 bp, Homo sapien
atgtacataggattgttttgctttt

SEQ ID NO: 5900875 - DNA, 25 bp, Homo sapien
ttacatatatgtacataggattgtt

SEQ ID NO: 5900876 - DNA, 25 bp, Homo sapien
ggaaactcaattaacagttttatgc

SEQ ID NO: 5900877 - DNA, 25 bp, Homo sapien
cttgggactagcgagttccctggct

SEQ ID NO: 5900878 - DNA, 25 bp, Homo sapien
ttttttaatctttttgttttgctca

SEQ ID NO: 5900879 - DNA, 25 bp, Homo sapien
ttaatctttttgttttgctcagaca

SEQ ID NO: 5900880 - DNA, 25 bp, Homo sapien
tttagcaggagtatccactgcccga

SEQ ID NO: 5900881 - DNA, 25 bp, Homo sapien
acataggattgttttgctttttatg

SEQ ID NO: 5900882 - DNA, 25 bp, Homo sapien
gtccttctgatgctaagactccaga

SEQ ID NO: 5900883 - DNA, 25 bp, Homo sapien
ctctgcaaaaacagtaatagctggt

SEQ ID NO: 5900884 - DNA, 25 bp, Homo sapien
tgcccgaatccatgtgtgaagccct

SEQ ID NO: 5900885 - DNA, 25 bp, Homo sapien
cagacgaaaagccctgaccggaacc

SEQ ID NO: 5900886 - DNA, 25 bp, Homo sapien
cactcacagacgaaaagccctgacc

SEQ ID NO: 5900887 - DNA, 25 bp, Homo sapien
ttccttgttattactaatcgtttaa

SEQ ID NO: 5900888 - DNA, 25 bp, Homo sapien
accaaccaaaaaagagctagcccca

SEQ ID NO: 5900889 - DNA, 25 bp, Homo sapien
acctagctaggctgttgttattact

SEQ ID NO: 5900890 - DNA, 25 bp, Homo sapien
tcagcctcgtgttgaatcttaaaca

SEQ ID NO: 5900891 - DNA, 25 bp, Homo sapien
aggactgtctggcgatgacttgtat

SEQ ID NO: 5900892 - DNA, 25 bp, Homo sapien
ctcactggaaactcaattaacagtt

SEQ ID NO: 5900893 - DNA, 25 bp, Homo sapien
gccccctttcatctgaaagcagata

SEQ ID NO: 5900894 - DNA, 25 bp, Homo sapien
atatctatggtttataaaacctatt

SEQ ID NO: 5900895 - DNA, 25 bp, Homo sapien
ctgtctggcgatgacttgtattggc

SEQ ID NO: 5900896 - DNA, 25 bp, Homo sapien
ggtcggagcatcaggacgagcatct

SEQ ID NO: 5900897 - DNA, 25 bp, Homo sapien
ctatggtttataaaacctatttata

SEQ ID NO: 5900898 - DNA, 25 bp, Homo sapien
gcagatacctccctcccactcaacc

SEQ ID NO: 5900899 - DNA, 25 bp, Homo sapien
ctgcaaaaacagtaatagctggtgg

SEQ ID NO: 5900900 - DNA, 25 bp, Homo sapien
atgacttgtattggccaccaactgt

SEQ ID NO: 5900901 - DNA, 25 bp, Homo sapien
actcaattaacagttttatgcgata

SEQ ID NO: 5900902 - DNA, 25 bp, Homo sapien
ggtgctatagatttaccattccttg

SEQ ID NO: 5900903 - DNA, 25 bp, Homo sapien
cactggaaactcaattaacagtttt

SEQ ID NO: 5900904 - DNA, 25 bp, Homo sapien
aaacagtaatagctggtggctcctg

SEQ ID NO: 5900905 - DNA, 25 bp, Homo sapien
tgctgttgattgaagatgtatataa

SEQ ID NO: 5900906 - DNA, 25 bp, Homo sapien
gctttctgggtctagagtgttctgt

SEQ ID NO: 5900907 - DNA, 25 bp, Homo sapien
caaccaaccaaaaaagagctagccc

SEQ ID NO: 5900908 - DNA, 25 bp, Homo sapien
gcgagttccctggctttctgggtct

SEQ ID NO: 5900909 - DNA, 25 bp, Homo sapien
tatatacggtgtccttctgatgcta

SEQ ID NO: 5900910 - DNA, 25 bp, Homo sapien
taacactataaccaagctcagtatc

SEQ ID NO: 5900911 - DNA, 25 bp, Homo sapien
gtgttgaatcttaaacaactttaca

SEQ ID NO: 5900912 - DNA, 25 bp, Homo sapien
tagatgtatatacggtgtccttctg

SEQ ID NO: 5900913 - DNA, 25 bp, Homo sapien
atagctggtggctcctgaacacttg

SEQ ID NO: 5900914 - DNA, 25 bp, Homo sapien
ccaaacccaaacgcaagccaaacca

SEQ ID NO: 5900915 - DNA, 25 bp, Homo sapien
ccttctgatgctaagactccagacc

SEQ ID NO: 5900916 - DNA, 25 bp, Homo sapien
cacagttttctcacggtcggagcat

SEQ ID NO: 5900917 - DNA, 25 bp, Homo sapien
tagacccttgggactagcgagttcc

SEQ ID NO: 5900918 - DNA, 25 bp, Homo sapien
ggataaccaaagtgtggggacaaac

SEQ ID NO: 5900919 - DNA, 25 bp, Homo sapien
ctgttgattgaagatgtatataata

SEQ ID NO: 5900920 - DNA, 25 bp, Homo sapien
atctgaaagcagatacctccctccc

SEQ ID NO: 5900921 - DNA, 25 bp, Homo sapien
ggaaccctctgcaaaaacagtaata

SEQ ID NO: 5900922 - DNA, 25 bp, Homo sapien
catttagcaggagtatccactgccc

SEQ ID NO: 5900923 - DNA, 25 bp, Homo sapien
cctcgtgttgaatcttaaacaactt

SEQ ID NO: 5900924 - DNA, 25 bp, Homo sapien
agacataaaaactccacgtggcccc

SEQ ID NO: 5900925 - DNA, 25 bp, Homo sapien
gctgttgttattactacaataaata

SEQ ID NO: 5900926 - DNA, 25 bp, Homo sapien
tactggggccacacgtttaaatgag

SEQ ID NO: 5900927 - DNA, 25 bp, Homo sapien
ttaaaccactcactggaaactcaat

SEQ ID NO: 5900928 - DNA, 25 bp, Homo sapien
atccactgcccgaatccatgtgtga

SEQ ID NO: 5900929 - DNA, 25 bp, Homo sapien
acgtttaaatgagaagtcagagaca

SEQ ID NO: 5900930 - DNA, 25 bp, Homo sapien
aacgcagttgagtggggattgctgt

SEQ ID NO: 5900931 - DNA, 25 bp, Homo sapien
tacaataaataaatctcaaagcctt

SEQ ID NO: 5900932 - DNA, 25 bp, Homo sapien
tcgtgttgaatcttaaacaacttta

SEQ ID NO: 5900933 - DNA, 25 bp, Homo sapien
ttgaccctgtagacggagtactggg

SEQ ID NO: 5900934 - DNA, 25 bp, Homo sapien
gccttcgtcagtcccacagttttct

SEQ ID NO: 5900935 - DNA, 25 bp, Homo sapien
ttaaacaactttacatcctaacact

SEQ ID NO: 5900936 - DNA, 25 bp, Homo sapien
gagttccctggctttctgggtctag

SEQ ID NO: 5900937 - DNA, 25 bp, Homo sapien
agctcagtatctttgttttgtttcg

SEQ ID NO: 5900938 - DNA, 25 bp, Homo sapien
caaagtgtggggacaaaccccagac

SEQ ID NO: 5900939 - DNA, 25 bp, Homo sapien
ataaatctcaaagccttcgtcagtc

SEQ ID NO: 5900940 - DNA, 25 bp, Homo sapien
aagcagatacctccctcccactcaa

SEQ ID NO: 5900941 - DNA, 25 bp, Homo sapien
caaaccaaacagaacgcagttgagt

SEQ ID NO: 5900942 - DNA, 25 bp, Homo sapien
catcaggacgagcatctagaccctt

SEQ ID NO: 5900943 - DNA, 25 bp, Homo sapien
atcctaacactataaccaagctcag

SEQ ID NO: 5900944 - DNA, 25 bp, Homo sapien
cttcgtcagtcccacagttttctca

SEQ ID NO: 5900945 - DNA, 25 bp, Homo sapien
catgtgtgaagccctaagcactcac

SEQ ID NO: 5900946 - DNA, 25 bp, Homo sapien
tccacgtggccccctttcatctgaa

SEQ ID NO: 5900947 - DNA, 25 bp, Homo sapien
ccaccaactgtagatgtatatacgg

SEQ ID NO: 5900948 - DNA, 25 bp, Homo sapien
acgcaagccaaaccaaacagaacgc

SEQ ID NO: 5900949 - DNA, 25 bp, Homo sapien
ccaaacagaacgcagttgagtgggg

SEQ ID NO: 5900950 - DNA, 25 bp, Homo sapien
agaacgcagttgagtggggattgct

SEQ ID NO: 5900951 - DNA, 25 bp, Homo sapien
acaagcaatctgtgaaatggtgcta

SEQ ID NO: 5900952 - DNA, 25 bp, Homo sapien
tgggactagcgagttccctggcttt

SEQ ID NO: 5900953 - DNA, 25 bp, Homo sapien
ctgaccggaaccctctgcaaaaaca

SEQ ID NO: 5900954 - DNA, 25 bp, Homo sapien
cccactcaacctcataggataacca

SEQ ID NO: 5900955 - DNA, 25 bp, Homo sapien
gaagtcagagacaagcaatctgtga

SEQ ID NO: 5900956 - DNA, 25 bp, Homo sapien
agtgcatttagcaggagtatccact

SEQ ID NO: 5900957 - DNA, 25 bp, Homo sapien
tggctcctgaacacttgaccctgta

SEQ ID NO: 5900958 - DNA, 25 bp, Homo sapien
caaccaaaaaagagctagccccaaa

SEQ ID NO: 5900959 - DNA, 25 bp, Homo sapien
ctgtagacggagtactggggccaca

SEQ ID NO: 5900960 - DNA, 25 bp, Homo sapien
ctttttatgttgaccgtcagcctcg

SEQ ID NO: 5900961 - DNA, 25 bp, Homo sapien
acacgtttaaatgagaagtcagaga

SEQ ID NO: 5900962 - DNA, 25 bp, Homo sapien
agttgagtggggattgctgttgatt

SEQ ID NO: 5900963 - DNA, 25 bp, Homo sapien
atgttgaccgtcagcctcgtgttga

SEQ ID NO: 5900964 - DNA, 25 bp, Homo sapien
tcggagcatcaggacgagcatctag

SEQ ID NO: 5900965 - DNA, 25 bp, Homo sapien
gctcagacataaaaactccacgtgg

SEQ ID NO: 5900966 - DNA, 25 bp, Homo sapien
cccacagttttctcacggtcggagc

SEQ ID NO: 5900967 - DNA, 25 bp, Homo sapien
ttgctcagacataaaaactccacgt

SEQ ID NO: 5900968 - DNA, 25 bp, Homo sapien
acaaaccccagacagttgaagacct

SEQ ID NO: 5900969 - DNA, 25 bp, Homo sapien
atttataacactttttacatatatg

SEQ ID NO: 5900970 - DNA, 25 bp, Homo sapien
ttgaagacctttacactatgggtga

SEQ ID NO: 5900971 - DNA, 25 bp, Homo sapien
ccctcccactcaacctcataggata

SEQ ID NO: 5900972 - DNA, 25 bp, Homo sapien
agccctgaccggaaccctctgcaaa

SEQ ID NO: 5900973 - DNA, 25 bp, Homo sapien
gagaagtcagagacaagcaatctgt

SEQ ID NO: 5900974 - DNA, 25 bp, Homo sapien
caactgtagatgtatatacggtgtc

SEQ ID NO: 5900975 - DNA, 25 bp, Homo sapien
ctagctaggctgttgttattactac

SEQ ID NO: 5900976 - DNA, 25 bp, Homo sapien
gctcctgaacacttgaccctgtaga

SEQ ID NO: 5900977 - DNA, 25 bp, Homo sapien
accactcactggaaactcaattaac

SEQ ID NO: 5900978 - DNA, 25 bp, Homo sapien
tctttttgttttgctcagacataaa

SEQ ID NO: 5900979 - DNA, 25 bp, Homo sapien
tggccccctttcatctgaaagcaga

SEQ ID NO: 5900980 - DNA, 25 bp, Homo sapien
acagtaatagctggtggctcctgaa

SEQ ID NO: 5900981 - DNA, 25 bp, Homo sapien
attactaatcgtttaaaccactcac

SEQ ID NO: 5900982 - DNA, 25 bp, Homo sapien
agcctcgtgttgaatcttaaacaac

SEQ ID NO: 5900983 - DNA, 25 bp, Homo sapien
ggcgatgacttgtattggccaccaa

SEQ ID NO: 5900984 - DNA, 25 bp, Homo sapien
gccccaaacccaaacgcaagccaaa

SEQ ID NO: 5900985 - DNA, 25 bp, Homo sapien
gaccggaaccctctgcaaaaacagt

SEQ ID NO: 5900986 - DNA, 25 bp, Homo sapien
gtggggacaaaccccagacagttga

SEQ ID NO: 5900987 - DNA, 25 bp, Homo sapien
tgaagccctaagcactcacagacga

SEQ ID NO: 5900988 - DNA, 25 bp, Homo sapien
ctgaaagcagatacctccctcccac

SEQ ID NO: 5900989 - DNA, 25 bp, Homo sapien
ccctgaccggaaccctctgcaaaaa

SEQ ID NO: 5900990 - DNA, 25 bp, Homo sapien
cgtggccccctttcatctgaaagca

SEQ ID NO: 5900991 - DNA, 25 bp, Homo sapien
ctcagtatctttgttttgtttcgtt

SEQ ID NO: 5900992 - DNA, 25 bp, Homo sapien
cccttgggactagcgagttccctgg

SEQ ID NO: 5900993 - DNA, 25 bp, Homo sapien
aaactcaattaacagttttatgcga

SEQ ID NO: 5900994 - DNA, 25 bp, Homo sapien
ggacaaaccccagacagttgaagac

SEQ ID NO: 5900995 - DNA, 25 bp, Homo sapien
acagcagaatggagacccgatacaa

SEQ ID NO: 5900996 - DNA, 25 bp, Homo sapien
acccgatacaaacggttcataactg

SEQ ID NO: 5900997 - DNA, 25 bp, Homo sapien
agcatcaggacgagcatctagaccc

SEQ ID NO: 5900998 - DNA, 25 bp, Homo sapien
ctggtggctcctgaacacttgaccc

SEQ ID NO: 5900999 - DNA, 25 bp, Homo sapien
ctggaaactcaattaacagttttat

SEQ ID NO: 5901000 - DNA, 25 bp, Homo sapien
tgctatagatttaccattccttgtt

SEQ ID NO: 5901001 - DNA, 25 bp, Homo sapien
tgaccgtcagcctcgtgttgaatct

SEQ ID NO: 5901002 - DNA, 25 bp, Homo sapien
ctaatcgtttaaaccactcactgga

SEQ ID NO: 5901003 - DNA, 25 bp, Homo sapien
acactatgggtgacccagtgcattt

SEQ ID NO: 5901004 - DNA, 25 bp, Homo sapien
gtggggattgctgttgattgaagat

SEQ ID NO: 5901005 - DNA, 25 bp, Homo sapien
tacggtgtccttctgatgctaagac

SEQ ID NO: 5901006 - DNA, 25 bp, Homo sapien
ttatgttgaccgtcagcctcgtgtt

SEQ ID NO: 5901007 - DNA, 25 bp, Homo sapien
acaactttacatcctaacactataa

SEQ ID NO: 5901008 - DNA, 25 bp, Homo sapien
taaccaagctcagtatctttgtttt

SEQ ID NO: 5901009 - DNA, 25 bp, Homo sapien
cactttttacatatatgtacatagg

SEQ ID NO: 5901010 - DNA, 25 bp, Homo sapien
aaaccactcactggaaactcaatta

SEQ ID NO: 5901011 - DNA, 25 bp, Homo sapien
aacggttcataactgctttcatacc

SEQ ID NO: 5901012 - DNA, 25 bp, Homo sapien
actacaataaataaatctcaaagcc

SEQ ID NO: 5901013 - DNA, 25 bp, Homo sapien
tgggtctagagtgttctgtgcctcc

SEQ ID NO: 5901014 - DNA, 25 bp, Homo sapien
agatttaccattccttgttattact

SEQ ID NO: 5901015 - DNA, 25 bp, Homo sapien
ctatttataacactttttacatata

SEQ ID NO: 5901016 - DNA, 25 bp, Homo sapien
ccgatacaaacggttcataactgct

SEQ ID NO: 5901017 - DNA, 25 bp, Homo sapien
tagcgagttccctggctttctgggt

SEQ ID NO: 5901018 - DNA, 25 bp, Homo sapien
tctcacggtcggagcatcaggacga

SEQ ID NO: 5901019 - DNA, 25 bp, Homo sapien
cctccaaggactgtctggcgatgac

SEQ ID NO: 5901020 - DNA, 25 bp, Homo sapien
aatcgtttaaaccactcactggaaa

SEQ ID NO: 5901021 - DNA, 25 bp, Homo sapien
taggataaccaaagtgtggggacaa

SEQ ID NO: 5901022 - DNA, 25 bp, Homo sapien
cttgtattggccaccaactgtagat

SEQ ID NO: 5901023 - DNA, 25 bp, Homo sapien
gccaaaccaaacagaacgcagttga

SEQ ID NO: 5901024 - DNA, 25 bp, Homo sapien
tatacggtgtccttctgatgctaag

SEQ ID NO: 5901025 - DNA, 25 bp, Homo sapien
ggccacacgtttaaatgagaagtca

SEQ ID NO: 5901026 - DNA, 25 bp, Homo sapien
aaccaaacagaacgcagttgagtgg

SEQ ID NO: 5901027 - DNA, 25 bp, Homo sapien
aagccttcgtcagtcccacagtttt

SEQ ID NO: 5901028 - DNA, 25 bp, Homo sapien
ggggccacacgtttaaatgagaagt

SEQ ID NO: 5901029 - DNA, 25 bp, Homo sapien
tgttttgctcagacataaaaactcc

SEQ ID NO: 5901030 - DNA, 25 bp, Homo sapien
ctgctttcatacctagctaggctgt

SEQ ID NO: 5901031 - DNA, 25 bp, Homo sapien
tcataactgctttcatacctagcta

SEQ ID NO: 5901032 - DNA, 25 bp, Homo sapien
attgctgttgattgaagatgtatat

SEQ ID NO: 5901033 - DNA, 25 bp, Homo sapien
agacctttacactatgggtgaccca

SEQ ID NO: 5901034 - DNA, 25 bp, Homo sapien
ccctgtagacggagtactggggcca

SEQ ID NO: 5901035 - DNA, 25 bp, Homo sapien
gttttatgcgatacagcagaatgga

SEQ ID NO: 5901036 - DNA, 25 bp, Homo sapien
gaatggagacccgatacaaacggtt

SEQ ID NO: 5901037 - DNA, 25 bp, Homo sapien
ggagcatcaggacgagcatctagac

SEQ ID NO: 5901038 - DNA, 25 bp, Homo sapien
tttatgcgatacagcagaatggaga

SEQ ID NO: 5901039 - DNA, 25 bp, Homo sapien
tggctttctgggtctagagtgttct

SEQ ID NO: 5901040 - DNA, 25 bp, Homo sapien
agacggagtactggggccacacgtt

SEQ ID NO: 5901041 - DNA, 25 bp, Homo sapien
acggagtactggggccacacgttta

SEQ ID NO: 5901042 - DNA, 25 bp, Homo sapien
caaggactgtctggcgatgacttgt

SEQ ID NO: 5901043 - DNA, 25 bp, Homo sapien
agatacctccctcccactcaacctc

SEQ ID NO: 5901044 - DNA, 25 bp, Homo sapien
ccacacgtttaaatgagaagtcaga

SEQ ID NO: 5901045 - DNA, 25 bp, Homo sapien
taagcactcacagacgaaaagccct

SEQ ID NO: 5901046 - DNA, 25 bp, Homo sapien
gcaaaaacagtaatagctggtggct

SEQ ID NO: 5901047 - DNA, 25 bp, Homo sapien
acctcataggataaccaaagtgtgg

SEQ ID NO: 5901048 - DNA, 25 bp, Homo sapien
aagtgtggggacaaaccccagacag

SEQ ID NO: 5901049 - DNA, 25 bp, Homo sapien
caaaaaagagctagccccaaaccca

SEQ ID NO: 5901050 - DNA, 25 bp, Homo sapien
agttgaagacctttacactatgggt

SEQ ID NO: 5901051 - DNA, 25 bp, Homo sapien
acctttacactatgggtgacccagt

SEQ ID NO: 5901052 - DNA, 25 bp, Homo sapien
cactcaacctcataggataaccaaa

SEQ ID NO: 5901053 - DNA, 25 bp, Homo sapien
ataacactttttacatatatgtaca

SEQ ID NO: 5901054 - DNA, 25 bp, Homo sapien
gactgtctggcgatgacttgtattg

SEQ ID NO: 5901055 - DNA, 25 bp, Homo sapien
ttgttttgctttttatgttgaccgt

SEQ ID NO: 5901056 - DNA, 25 bp, Homo sapien
tctagagtgttctgtgcctccaagg

SEQ ID NO: 5901057 - DNA, 25 bp, Homo sapien
tgtgaagccctaagcactcacagac

SEQ ID NO: 5901058 - DNA, 25 bp, Homo sapien
tcctgaacacttgaccctgtagacg

SEQ ID NO: 5901059 - DNA, 25 bp, Homo sapien
tcagacataaaaactccacgtggcc

SEQ ID NO: 5901060 - DNA, 25 bp, Homo sapien
gacgagcatctagacccttgggact

SEQ ID NO: 5901061 - DNA, 25 bp, Homo sapien
actagcgagttccctggctttctgg

SEQ ID NO: 5901062 - DNA, 25 bp, Homo sapien
tgcgatacagcagaatggagacccg

SEQ ID NO: 5901063 - DNA, 25 bp, Homo sapien
ctttacatcctaacactataaccaa

SEQ ID NO: 5901064 - DNA, 25 bp, Homo sapien
atatgtacataggattgttttgctt

SEQ ID NO: 5901065 - DNA, 25 bp, Homo sapien
atatatgtacataggattgttttgc

SEQ ID NO: 5901066 - DNA, 25 bp, Homo sapien
agtactggggccacacgtttaaatg

SEQ ID NO: 5901067 - DNA, 25 bp, Homo sapien
gtcccacagttttctcacggtcgga

SEQ ID NO: 5901068 - DNA, 25 bp, Homo sapien
gatgtatatacggtgtccttctgat

SEQ ID NO: 5901069 - DNA, 25 bp, Homo sapien
aatctttttgttttgctcagacata

SEQ ID NO: 5901070 - DNA, 25 bp, Homo sapien
tgacccagtgcatttagcaggagta

SEQ ID NO: 5901071 - DNA, 25 bp, Homo sapien
ctggcgatgacttgtattggccacc

SEQ ID NO: 5901072 - DNA, 25 bp, Homo sapien
agtaatagctggtggctcctgaaca

SEQ ID NO: 5901073 - DNA, 25 bp, Homo sapien
tcatctgaaagcagatacctccctc

SEQ ID NO: 5901074 - DNA, 25 bp, Homo sapien
agcatctagacccttgggactagcg

SEQ ID NO: 5901075 - DNA, 25 bp, Homo sapien
agagacaagcaatctgtgaaatggt

SEQ ID NO: 5901076 - DNA, 25 bp, Homo sapien
tgtgtgaagccctaagcactcacag

SEQ ID NO: 5901077 - DNA, 25 bp, Homo sapien
tgtatatacggtgtccttctgatgc

SEQ ID NO: 5901078 - DNA, 25 bp, Homo sapien
gacttgtattggccaccaactgtag

SEQ ID NO: 5901079 - DNA, 25 bp, Homo sapien
tgggtgacccagtgcatttagcagg

SEQ ID NO: 5901080 - DNA, 25 bp, Homo sapien
acttgaccctgtagacggagtactg

SEQ ID NO: 5901081 - DNA, 25 bp, Homo sapien
ccctctgcaaaaacagtaatagctg

SEQ ID NO: 5901082 - DNA, 25 bp, Homo sapien
acatcctaacactataaccaagctc

SEQ ID NO: 5901083 - DNA, 25 bp, Homo sapien
gtttaaaccactcactggaaactca

SEQ ID NO: 5901084 - DNA, 25 bp, Homo sapien
ttactacaataaataaatctcaaag

SEQ ID NO: 5901085 - DNA, 25 bp, Homo sapien
ccactgcccgaatccatgtgtgaag

SEQ ID NO: 5901086 - DNA, 25 bp, Homo sapien
acactataaccaagctcagtatctt

SEQ ID NO: 5901087 - DNA, 25 bp, Homo sapien
catctagacccttgggactagcgag

SEQ ID NO: 5901088 - DNA, 25 bp, Homo sapien
aatccatgtgtgaagccctaagcac

SEQ ID NO: 5901089 - DNA, 25 bp, Homo sapien
tgtattggccaccaactgtagatgt

SEQ ID NO: 5901090 - DNA, 25 bp, Homo sapien
cagagaacaaaaccaaccaaccaaa

SEQ ID NO: 5901091 - DNA, 25 bp, Homo sapien
taatagctggtggctcctgaacact

SEQ ID NO: 5901092 - DNA, 25 bp, Homo sapien
tgtagatgtatatacggtgtccttc

SEQ ID NO: 5901093 - DNA, 25 bp, Homo sapien
aaactccacgtggccccctttcatc

SEQ ID NO: 5901094 - DNA, 25 bp, Homo sapien
aactgctttcatacctagctaggct

SEQ ID NO: 5901095 - DNA, 25 bp, Homo sapien
ccccagacagttgaagacctttaca

SEQ ID NO: 5901096 - DNA, 25 bp, Homo sapien
ctttacactatgggtgacccagtgc

SEQ ID NO: 5901097 - DNA, 25 bp, Homo sapien
tttctcacggtcggagcatcaggac

SEQ ID NO: 5901098 - DNA, 25 bp, Homo sapien
atggtgctatagatttaccattcct

SEQ ID NO: 5901099 - DNA, 25 bp, Homo sapien
gttctgtgcctccaaggactgtctg

SEQ ID NO: 5901100 - DNA, 25 bp, Homo sapien
ggtggctcctgaacacttgaccctg

SEQ ID NO: 5901101 - DNA, 25 bp, Homo sapien
tcatacctagctaggctgttgttat

SEQ ID NO: 5901102 - DNA, 25 bp, Homo sapien
aaacaactttacatcctaacactat

SEQ ID NO: 5901103 - DNA, 25 bp, Homo sapien
ccagacagttgaagacctttacact

SEQ ID NO: 5901104 - DNA, 25 bp, Homo sapien
gctagccccaaacccaaacgcaagc

SEQ ID NO: 5901105 - DNA, 25 bp, Homo sapien
tttctgggtctagagtgttctgtgc

SEQ ID NO: 5901106 - DNA, 25 bp, Homo sapien
aacactttttacatatatgtacata

SEQ ID NO: 5901107 - DNA, 25 bp, Homo sapien
gtcagtcccacagttttctcacggt

SEQ ID NO: 5901108 - DNA, 25 bp, Homo sapien
aaacagaacgcagttgagtggggat

SEQ ID NO: 5901109 - DNA, 25 bp, Homo sapien
accaaccaaccaaaaaagagctagc

SEQ ID NO: 5901110 - DNA, 25 bp, Homo sapien
ataggattgttttgctttttatgtt

SEQ ID NO: 5901111 - DNA, 25 bp, Homo sapien
ctgaacacttgaccctgtagacgga

SEQ ID NO: 5901112 - DNA, 25 bp, Homo sapien
gttttgctttttatgttgaccgtca

SEQ ID NO: 5901113 - DNA, 25 bp, Homo sapien
actatgggtgacccagtgcatttag

SEQ ID NO: 5901114 - DNA, 25 bp, Homo sapien
ttttaatctttttgttttgctcaga

SEQ ID NO: 5901115 - DNA, 25 bp, Homo sapien
gttgaatcttaaacaactttacatc

SEQ ID NO: 5901116 - DNA, 25 bp, Homo sapien
aaataaatctcaaagccttcgtcag

SEQ ID NO: 5901117 - DNA, 25 bp, Homo sapien
tgaaatggtgctatagatttaccat

SEQ ID NO: 5901118 - DNA, 25 bp, Homo sapien
gttgaccgtcagcctcgtgttgaat

SEQ ID NO: 5901119 - DNA, 25 bp, Homo sapien
aggctgttgttattactacaataaa

SEQ ID NO: 5901120 - DNA, 25 bp, Homo sapien
acccagtgcatttagcaggagtatc

SEQ ID NO: 5901121 - DNA, 25 bp, Homo sapien
tcgtcagtcccacagttttctcacg

SEQ ID NO: 5901122 - DNA, 25 bp, Homo sapien
gatacaaacggttcataactgcttt

SEQ ID NO: 5901123 - DNA, 25 bp, Homo sapien
ttacatcctaacactataaccaagc

SEQ ID NO: 5901124 - DNA, 25 bp, Homo sapien
ataaataaatctcaaagccttcgtc

SEQ ID NO: 5901125 - DNA, 25 bp, Homo sapien
gtttaaatgagaagtcagagacaag

SEQ ID NO: 5901126 - DNA, 25 bp, Homo sapien
cccctttcatctgaaagcagatacc

SEQ ID NO: 5901127 - DNA, 25 bp, Homo sapien
atggagacccgatacaaacggttca

SEQ ID NO: 5901128 - DNA, 25 bp, Homo sapien
cctaacactataaccaagctcagta

SEQ ID NO: 5901129 - DNA, 25 bp, Homo sapien
gtagacggagtactggggccacacg

SEQ ID NO: 5901130 - DNA, 25 bp, Homo sapien
aaccccagacagttgaagaccttta

SEQ ID NO: 5901131 - DNA, 25 bp, Homo sapien
gtgtccttctgatgctaagactcca

SEQ ID NO: 5901132 - DNA, 25 bp, Homo sapien
ctaggctgttgttattactacaata

SEQ ID NO: 5901133 - DNA, 25 bp, Homo sapien
cacagacgaaaagccctgaccggaa

SEQ ID NO: 5901134 - DNA, 25 bp, Homo sapien
tagagtgttctgtgcctccaaggac

SEQ ID NO: 5901135 - DNA, 25 bp, Homo sapien
tcagagacaagcaatctgtgaaatg

SEQ ID NO: 5901136 - DNA, 25 bp, Homo sapien
accaactgtagatgtatatacggtg

SEQ ID NO: 5901137 - DNA, 25 bp, Homo sapien
gtacataggattgttttgcttttta

SEQ ID NO: 5901138 - DNA, 25 bp, Homo sapien
ctcaaagccttcgtcagtcccacag

SEQ ID NO: 5901139 - DNA, 25 bp, Homo sapien
acagaacgcagttgagtggggattg

SEQ ID NO: 5901140 - DNA, 25 bp, Homo sapien
ttttgctcagacataaaaactccac

SEQ ID NO: 5901141 - DNA, 25 bp, Homo sapien
aactttacatcctaacactataacc

SEQ ID NO: 5901142 - DNA, 25 bp, Homo sapien
aggattgttttgctttttatgttga

SEQ ID NO: 5901143 - DNA, 25 bp, Homo sapien
ttattactaatcgtttaaaccactc

SEQ ID NO: 5901144 - DNA, 25 bp, Homo sapien
gctttcatacctagctaggctgttg

SEQ ID NO: 5901145 - DNA, 25 bp, Homo sapien
gaacacttgaccctgtagacggagt

SEQ ID NO: 5901146 - DNA, 25 bp, Homo sapien
actccacgtggccccctttcatctg

SEQ ID NO: 5901147 - DNA, 25 bp, Homo sapien
ggtgacccagtgcatttagcaggag

SEQ ID NO: 5901148 - DNA, 25 bp, Homo sapien
ttttatgttgaccgtcagcctcgtg

SEQ ID NO: 5901149 - DNA, 25 bp, Homo sapien
ctcaacctcataggataaccaaagt

SEQ ID NO: 5901150 - DNA, 25 bp, Homo sapien
ccaaacgcaagccaaaccaaacaga

SEQ ID NO: 5901151 - DNA, 25 bp, Homo sapien
tctgtgcctccaaggactgtctggc

SEQ ID NO: 5901152 - DNA, 25 bp, Homo sapien
gtctggcgatgacttgtattggcca

SEQ ID NO: 5901153 - DNA, 25 bp, Homo sapien
caagctcagtatctttgttttgttt

SEQ ID NO: 5901154 - DNA, 25 bp, Homo sapien
cctggctttctgggtctagagtgtt

SEQ ID NO: 5901155 - DNA, 25 bp, Homo sapien
ttgttattactaatcgtttaaacca

SEQ ID NO: 5901156 - DNA, 25 bp, Homo sapien
ctccctcccactcaacctcatagga

SEQ ID NO: 5901157 - DNA, 25 bp, Homo sapien
gcaagccaaaccaaacagaacgcag

SEQ ID NO: 5901158 - DNA, 25 bp, Homo sapien
gagtatccactgcccgaatccatgt

SEQ ID NO: 5901159 - DNA, 25 bp, Homo sapien
gagtgttctgtgcctccaaggactg

SEQ ID NO: 5901160 - DNA, 25 bp, Homo sapien
gtgttctgtgcctccaaggactgtc

SEQ ID NO: 5901161 - DNA, 25 bp, Homo sapien
ttacactatgggtgacccagtgcat

SEQ ID NO: 5901162 - DNA, 25 bp, Homo sapien
atctcaaagccttcgtcagtcccac

SEQ ID NO: 5901163 - DNA, 25 bp, Homo sapien
tttcatctgaaagcagatacctccc

SEQ ID NO: 5901164 - DNA, 25 bp, Homo sapien
aaatggtgctatagatttaccattc

SEQ ID NO: 5901165 - DNA, 25 bp, Homo sapien
cgatgacttgtattggccaccaact

SEQ ID NO: 5901166 - DNA, 25 bp, Homo sapien
gttttctcacggtcggagcatcagg

SEQ ID NO: 5901167 - DNA, 25 bp, Homo sapien
gccctaagcactcacagacgaaaag

SEQ ID NO: 5901168 - DNA, 25 bp, Homo sapien
cctttcatctgaaagcagatacctc

SEQ ID NO: 5901169 - DNA, 25 bp, Homo sapien
cagttttctcacggtcggagcatca

SEQ ID NO: 5901170 - DNA, 25 bp, Homo sapien
aggacgagcatctagacccttggga

SEQ ID NO: 5901171 - DNA, 25 bp, Homo sapien
gaaagcagatacctccctcccactc

SEQ ID NO: 5901172 - DNA, 25 bp, Homo sapien
ggagtactggggccacacgtttaaa

SEQ ID NO: 5901173 - DNA, 25 bp, Homo sapien
accgtcagcctcgtgttgaatctta

SEQ ID NO: 5901174 - DNA, 25 bp, Homo sapien
ataactgctttcatacctagctagg

SEQ ID NO: 5901175 - DNA, 25 bp, Homo sapien
caaacggttcataactgctttcata

SEQ ID NO: 5901176 - DNA, 25 bp, Homo sapien
tataaccaagctcagtatctttgtt

SEQ ID NO: 5901177 - DNA, 25 bp, Homo sapien
gttccctggctttctgggtctagag

SEQ ID NO: 5901178 - DNA, 25 bp, Homo sapien
tccctggctttctgggtctagagtg

SEQ ID NO: 5901179 - DNA, 25 bp, Homo sapien
cataggataaccaaagtgtggggac

SEQ ID NO: 5901180 - DNA, 25 bp, Homo sapien
agcagaatggagacccgatacaaac

SEQ ID NO: 5901181 - DNA, 25 bp, Homo sapien
tctgtgaaatggtgctatagattta

SEQ ID NO: 5901182 - DNA, 25 bp, Homo sapien
aaacgcaagccaaaccaaacagaac

SEQ ID NO: 5901183 - DNA, 25 bp, Homo sapien
acctatttataacactttttacata

SEQ ID NO: 5901184 - DNA, 25 bp, Homo sapien
ccggaaccctctgcaaaaacagtaa

SEQ ID NO: 5901185 - DNA, 25 bp, Homo sapien
ttataacactttttacatatatgta

SEQ ID NO: 5901186 - DNA, 25 bp, Homo sapien
ctatagatttaccattccttgttat

SEQ ID NO: 5901187 - DNA, 25 bp, Homo sapien
taatatctatggtttataaaaccta

SEQ ID NO: 5901188 - DNA, 25 bp, Homo sapien
accattccttgttattactaatcgt

SEQ ID NO: 5901189 - DNA, 25 bp, Homo sapien
gtgtggggacaaaccccagacagtt

SEQ ID NO: 5901190 - DNA, 25 bp, Homo sapien
cacgtggccccctttcatctgaaag

SEQ ID NO: 5901191 - DNA, 25 bp, Homo sapien
caaagccttcgtcagtcccacagtt

SEQ ID NO: 5901192 - DNA, 25 bp, Homo sapien
tacaaacggttcataactgctttca

SEQ ID NO: 5901193 - DNA, 25 bp, Homo sapien
gtatccactgcccgaatccatgtgt

SEQ ID NO: 5901194 - DNA, 25 bp, Homo sapien
ggagacccgatacaaacggttcata

SEQ ID NO: 5901195 - DNA, 25 bp, Homo sapien
tcaattaacagttttatgcgataca

SEQ ID NO: 5901196 - DNA, 25 bp, Homo sapien
cgaatccatgtgtgaagccctaagc

SEQ ID NO: 5901197 - DNA, 25 bp, Homo sapien
actgtagatgtatatacggtgtcct

SEQ ID NO: 5901198 - DNA, 25 bp, Homo sapien
agacaagcaatctgtgaaatggtgc

SEQ ID NO: 5901199 - DNA, 25 bp, Homo sapien
tatgggtgacccagtgcatttagca

SEQ ID NO: 5901200 - DNA, 25 bp, Homo sapien
cccgaatccatgtgtgaagccctaa

SEQ ID NO: 5901201 - DNA, 25 bp, Homo sapien
acagttgaagacctttacactatgg

SEQ ID NO: 5901202 - DNA, 25 bp, Homo sapien
agacccgatacaaacggttcataac

SEQ ID NO: 5901203 - DNA, 25 bp, Homo sapien
ttgagtggggattgctgttgattga

SEQ ID NO: 5901204 - DNA, 25 bp, Homo sapien
tttgttttgctcagacataaaaact

SEQ ID NO: 5901205 - DNA, 25 bp, Homo sapien
gagctagccccaaacccaaacgcaa

SEQ ID NO: 5901206 - DNA, 25 bp, Homo sapien
tgaatcttaaacaactttacatcct

SEQ ID NO: 5901207 - DNA, 25 bp, Homo sapien
acggtcggagcatcaggacgagcat

SEQ ID NO: 5901208 - DNA, 25 bp, Homo sapien
gttcataactgctttcatacctagc

SEQ ID NO: 5901209 - DNA, 25 bp, Homo sapien
ggtctagagtgttctgtgcctccaa

SEQ ID NO: 5901210 - DNA, 25 bp, Homo sapien
tcacggtcggagcatcaggacgagc

SEQ ID NO: 5901211 - DNA, 25 bp, Homo sapien
tcaggacgagcatctagacccttgg

SEQ ID NO: 5901212 - DNA, 25 bp, Homo sapien
ttaacagttttatgcgatacagcag

SEQ ID NO: 5901213 - DNA, 25 bp, Homo sapien
gaagatgtatataatatctatggtt

SEQ ID NO: 5901214 - DNA, 25 bp, Homo sapien
acatatatgtacataggattgtttt

SEQ ID NO: 5901215 - DNA, 25 bp, Homo sapien
actataaccaagctcagtatctttg

SEQ ID NO: 5901216 - DNA, 25 bp, Homo sapien
tataatatctatggtttataaaacc

SEQ ID NO: 5901217 - DNA, 25 bp, Homo sapien
cagtcccacagttttctcacggtcg

SEQ ID NO: 5901218 - DNA, 25 bp, Homo sapien
accagagaacaaaaccaaccaacca

SEQ ID NO: 5901219 - DNA, 25 bp, Homo sapien
aagagctagccccaaacccaaacgc

SEQ ID NO: 5901220 - DNA, 25 bp, Homo sapien
tagcaggagtatccactgcccgaat

SEQ ID NO: 5901221 - DNA, 25 bp, Homo sapien
cactcactggaaactcaattaacag

SEQ ID NO: 5901222 - DNA, 25 bp, Homo sapien
agtcagagacaagcaatctgtgaaa

SEQ ID NO: 5901223 - DNA, 25 bp, Homo sapien
ttaaatgagaagtcagagacaagca

SEQ ID NO: 5901224 - DNA, 25 bp, Homo sapien
caacctcataggataaccaaagtgt

SEQ ID NO: 5901225 - DNA, 25 bp, Homo sapien
ccagtgcatttagcaggagtatcca

SEQ ID NO: 5901226 - DNA, 25 bp, Homo sapien
tgtgaaatggtgctatagatttacc

SEQ ID NO: 5901227 - DNA, 25 bp, Homo sapien
agctggtggctcctgaacacttgac

SEQ ID NO: 5901228 - DNA, 25 bp, Homo sapien
ttggccaccaactgtagatgtatat

SEQ ID NO: 5901229 - DNA, 25 bp, Homo sapien
aagccaaaccaaacagaacgcagtt

SEQ ID NO: 5901230 - DNA, 25 bp, Homo sapien
gcaggagtatccactgcccgaatcc

SEQ ID NO: 5901231 - DNA, 25 bp, Homo sapien
ctgatgctaagactccagacctttc

SEQ ID NO: 5901232 - DNA, 25 bp, Homo sapien
tggttatcctatgaggttgagtggg

SEQ ID NO: 5901233 - DNA, 25 bp, Homo sapien
tgggtcacccatagtgtaaaggtct

SEQ ID NO: 5901234 - DNA, 25 bp, Homo sapien
ataacaaggaatggtaaatctatag

SEQ ID NO: 5901235 - DNA, 25 bp, Homo sapien
tggatactcctgctaaatgcactgg

SEQ ID NO: 5901236 - DNA, 25 bp, Homo sapien
gcactgggtcacccatagtgtaaag

SEQ ID NO: 5901237 - DNA, 25 bp, Homo sapien
ccaagggtctagatgctcgtcctga

SEQ ID NO: 5901238 - DNA, 25 bp, Homo sapien
acatcttcaatcaacagcaatcccc

SEQ ID NO: 5901239 - DNA, 25 bp, Homo sapien
tctgctttcagatgaaagggggcca

SEQ ID NO: 5901240 - DNA, 25 bp, Homo sapien
tggtttggcttgcgtttgggtttgg

SEQ ID NO: 5901241 - DNA, 25 bp, Homo sapien
atgaggttgagtgggagggaggtat

SEQ ID NO: 5901242 - DNA, 25 bp, Homo sapien
caatacaagtcatcgccagacagtc

SEQ ID NO: 5901243 - DNA, 25 bp, Homo sapien
tttcgtctgtgagtgcttagggctt

SEQ ID NO: 5901244 - DNA, 25 bp, Homo sapien
tagcatcagaaggacaccgtatata

SEQ ID NO: 5901245 - DNA, 25 bp, Homo sapien
tccgaccgtgagaaaactgtgggac

SEQ ID NO: 5901246 - DNA, 25 bp, Homo sapien
tttattgtagtaataacaacagcct

SEQ ID NO: 5901247 - DNA, 25 bp, Homo sapien
gccccagtactccgtctacagggtc

SEQ ID NO: 5901248 - DNA, 25 bp, Homo sapien
gcgtttgggtttggggctagctctt

SEQ ID NO: 5901249 - DNA, 25 bp, Homo sapien
ttgtatcgggtctccattctgctgt

SEQ ID NO: 5901250 - DNA, 25 bp, Homo sapien
ttcaggagccaccagctattactgt

SEQ ID NO: 5901251 - DNA, 25 bp, Homo sapien
gcatcagaaggacaccgtatataca

SEQ ID NO: 5901252 - DNA, 25 bp, Homo sapien
ctcctgctaaatgcactgggtcacc

SEQ ID NO: 5901253 - DNA, 25 bp, Homo sapien
cactctagacccagaaagccaggga

SEQ ID NO: 5901254 - DNA, 25 bp, Homo sapien
catcgccagacagtccttggaggca

SEQ ID NO: 5901255 - DNA, 25 bp, Homo sapien
gctgacggtcaacataaaaagcaaa

SEQ ID NO: 5901256 - DNA, 25 bp, Homo sapien
aaccatagatattatatacatcttc

SEQ ID NO: 5901257 - DNA, 25 bp, Homo sapien
gtcctgatgctccgaccgtgagaaa

SEQ ID NO: 5901258 - DNA, 25 bp, Homo sapien
aaatgcactgggtcacccatagtgt

SEQ ID NO: 5901259 - DNA, 25 bp, Homo sapien
gccaatacaagtcatcgccagacag

SEQ ID NO: 5901260 - DNA, 25 bp, Homo sapien
cagggtcaagtgttcaggagccacc

SEQ ID NO: 5901261 - DNA, 25 bp, Homo sapien
aagatactgagcttggttatagtgt

SEQ ID NO: 5901262 - DNA, 25 bp, Homo sapien
attcaacacgaggctgacggtcaac

SEQ ID NO: 5901263 - DNA, 25 bp, Homo sapien
tgagaaaactgtgggactgacgaag

SEQ ID NO: 5901264 - DNA, 25 bp, Homo sapien
ttaggatgtaaagttgtttaagatt

SEQ ID NO: 5901265 - DNA, 25 bp, Homo sapien
taggtatgaaagcagttatgaaccg

SEQ ID NO: 5901266 - DNA, 25 bp, Homo sapien
tttatgtctgagcaaaacaaaaaga

SEQ ID NO: 5901267 - DNA, 25 bp, Homo sapien
aaggctttgagatttatttattgta

SEQ ID NO: 5901268 - DNA, 25 bp, Homo sapien
acacatggattcgggcagtggatac

SEQ ID NO: 5901269 - DNA, 25 bp, Homo sapien
cgctagtcccaagggtctagatgct

SEQ ID NO: 5901270 - DNA, 25 bp, Homo sapien
ggagtttttatgtctgagcaaaaca

SEQ ID NO: 5901271 - DNA, 25 bp, Homo sapien
tctccattctgctgtatcgcataaa

SEQ ID NO: 5901272 - DNA, 25 bp, Homo sapien
ctcgctagtcccaagggtctagatg

SEQ ID NO: 5901273 - DNA, 25 bp, Homo sapien
tggagtcttagcatcagaaggacac

SEQ ID NO: 5901274 - DNA, 25 bp, Homo sapien
ctgagcttggttatagtgttaggat

SEQ ID NO: 5901275 - DNA, 25 bp, Homo sapien
tcacagattgcttgtctctgacttc

SEQ ID NO: 5901276 - DNA, 25 bp, Homo sapien
acagaacactctagacccagaaagc

SEQ ID NO: 5901277 - DNA, 25 bp, Homo sapien
atgctcgtcctgatgctccgaccgt

SEQ ID NO: 5901278 - DNA, 25 bp, Homo sapien
gaatggtaaatctatagcaccattt

SEQ ID NO: 5901279 - DNA, 25 bp, Homo sapien
cctgctaaatgcactgggtcaccca

SEQ ID NO: 5901280 - DNA, 25 bp, Homo sapien
ctctagacccagaaagccagggaac

SEQ ID NO: 5901281 - DNA, 25 bp, Homo sapien
cagtactccgtctacagggtcaagt

SEQ ID NO: 5901282 - DNA, 25 bp, Homo sapien
aatctatagcaccatttcacagatt

SEQ ID NO: 5901283 - DNA, 25 bp, Homo sapien
actgggtcacccatagtgtaaaggt

SEQ ID NO: 5901284 - DNA, 25 bp, Homo sapien
cagtgagtggtttaaacgattagta

SEQ ID NO: 5901285 - DNA, 25 bp, Homo sapien
tatgtaaaaagtgttataaataggt

SEQ ID NO: 5901286 - DNA, 25 bp, Homo sapien
gacaccgtatatacatctacagttg

SEQ ID NO: 5901287 - DNA, 25 bp, Homo sapien
gtatatacatctacagttggtggcc

SEQ ID NO: 5901288 - DNA, 25 bp, Homo sapien
gcacagaacactctagacccagaaa

SEQ ID NO: 5901289 - DNA, 25 bp, Homo sapien
gcaaaacaatcctatgtacatatat

SEQ ID NO: 5901290 - DNA, 25 bp, Homo sapien
cagtccttggaggcacagaacactc

SEQ ID NO: 5901291 - DNA, 25 bp, Homo sapien
gagggaggtatctgctttcagatga

SEQ ID NO: 5901292 - DNA, 25 bp, Homo sapien
agaaaactgtgggactgacgaaggc

SEQ ID NO: 5901293 - DNA, 25 bp, Homo sapien
tttggggctagctcttttttggttg

SEQ ID NO: 5901294 - DNA, 25 bp, Homo sapien
ggttgagtgggagggaggtatctgc

SEQ ID NO: 5901295 - DNA, 25 bp, Homo sapien
agaaagccagggaactcgctagtcc

SEQ ID NO: 5901296 - DNA, 25 bp, Homo sapien
gagcttggttatagtgttaggatgt

SEQ ID NO: 5901297 - DNA, 25 bp, Homo sapien
gactgacgaaggctttgagatttat

SEQ ID NO: 5901298 - DNA, 25 bp, Homo sapien
acagttggtggccaatacaagtcat

SEQ ID NO: 5901299 - DNA, 25 bp, Homo sapien
gacagtccttggaggcacagaacac

SEQ ID NO: 5901300 - DNA, 25 bp, Homo sapien
gttctgtttggtttggcttgcgttt

SEQ ID NO: 5901301 - DNA, 25 bp, Homo sapien
gttatgaaccgtttgtatcgggtct

SEQ ID NO: 5901302 - DNA, 25 bp, Homo sapien
aaacgattagtaataacaaggaatg

SEQ ID NO: 5901303 - DNA, 25 bp, Homo sapien
atagtgttaggatgtaaagttgttt

SEQ ID NO: 5901304 - DNA, 25 bp, Homo sapien
tcgtctgtgagtgcttagggcttca

SEQ ID NO: 5901305 - DNA, 25 bp, Homo sapien
gagtgcttagggcttcacacatgga

SEQ ID NO: 5901306 - DNA, 25 bp, Homo sapien
atatacatctacagttggtggccaa

SEQ ID NO: 5901307 - DNA, 25 bp, Homo sapien
ccacactttggttatcctatgaggt

SEQ ID NO: 5901308 - DNA, 25 bp, Homo sapien
ggattcgggcagtggatactcctgc

SEQ ID NO: 5901309 - DNA, 25 bp, Homo sapien
tccattctgctgtatcgcataaaac

SEQ ID NO: 5901310 - DNA, 25 bp, Homo sapien
cccagtactccgtctacagggtcaa

SEQ ID NO: 5901311 - DNA, 25 bp, Homo sapien
aacataaaaagcaaaacaatcctat

SEQ ID NO: 5901312 - DNA, 25 bp, Homo sapien
ccgtatatacatctacagttggtgg

SEQ ID NO: 5901313 - DNA, 25 bp, Homo sapien
gaaggacaccgtatatacatctaca

SEQ ID NO: 5901314 - DNA, 25 bp, Homo sapien
agcctagctaggtatgaaagcagtt

SEQ ID NO: 5901315 - DNA, 25 bp, Homo sapien
cgaaggctttgagatttatttattg

SEQ ID NO: 5901316 - DNA, 25 bp, Homo sapien
tggtttaaacgattagtaataacaa

SEQ ID NO: 5901317 - DNA, 25 bp, Homo sapien
aacacgaggctgacggtcaacataa

SEQ ID NO: 5901318 - DNA, 25 bp, Homo sapien
ccgtttgtatcgggtctccattctg

SEQ ID NO: 5901319 - DNA, 25 bp, Homo sapien
aaggtctggagtcttagcatcagaa

SEQ ID NO: 5901320 - DNA, 25 bp, Homo sapien
acggtcaacataaaaagcaaaacaa

SEQ ID NO: 5901321 - DNA, 25 bp, Homo sapien
atggattcgggcagtggatactcct

SEQ ID NO: 5901322 - DNA, 25 bp, Homo sapien
aggaatggtaaatctatagcaccat

SEQ ID NO: 5901323 - DNA, 25 bp, Homo sapien
tgatgctccgaccgtgagaaaactg

SEQ ID NO: 5901324 - DNA, 25 bp, Homo sapien
gttaattgagtttccagtgagtggt

SEQ ID NO: 5901325 - DNA, 25 bp, Homo sapien
attgagtttccagtgagtggtttaa

SEQ ID NO: 5901326 - DNA, 25 bp, Homo sapien
ccagggaactcgctagtcccaaggg

SEQ ID NO: 5901327 - DNA, 25 bp, Homo sapien
ggaggcacagaacactctagaccca

SEQ ID NO: 5901328 - DNA, 25 bp, Homo sapien
gcttggttatagtgttaggatgtaa

SEQ ID NO: 5901329 - DNA, 25 bp, Homo sapien
cattctgctgtatcgcataaaactg

SEQ ID NO: 5901330 - DNA, 25 bp, Homo sapien
tttaaacgtgtggccccagtactcc

SEQ ID NO: 5901331 - DNA, 25 bp, Homo sapien
tcaacacgaggctgacggtcaacat

SEQ ID NO: 5901332 - DNA, 25 bp, Homo sapien
cttcacacatggattcgggcagtgg

SEQ ID NO: 5901333 - DNA, 25 bp, Homo sapien
aagtcatcgccagacagtccttgga

SEQ ID NO: 5901334 - DNA, 25 bp, Homo sapien
ttagggcttcacacatggattcggg

SEQ ID NO: 5901335 - DNA, 25 bp, Homo sapien
gcaccatttcacagattgcttgtct

SEQ ID NO: 5901336 - DNA, 25 bp, Homo sapien
tgaaccgtttgtatcgggtctccat

SEQ ID NO: 5901337 - DNA, 25 bp, Homo sapien
agattcaacacgaggctgacggtca

SEQ ID NO: 5901338 - DNA, 25 bp, Homo sapien
aggcacagaacactctagacccaga

SEQ ID NO: 5901339 - DNA, 25 bp, Homo sapien
agtgttcaggagccaccagctatta

SEQ ID NO: 5901340 - DNA, 25 bp, Homo sapien
aaaagcaaaacaatcctatgtacat

SEQ ID NO: 5901341 - DNA, 25 bp, Homo sapien
tatgtacatatatgtaaaaagtgtt

SEQ ID NO: 5901342 - DNA, 25 bp, Homo sapien
ctgcgttctgtttggtttggcttgc

SEQ ID NO: 5901343 - DNA, 25 bp, Homo sapien
tgtaaagttgtttaagattcaacac

SEQ ID NO: 5901344 - DNA, 25 bp, Homo sapien
ctgctgtatcgcataaaactgttaa

SEQ ID NO: 5901345 - DNA, 25 bp, Homo sapien
tctgtttggtttggcttgcgtttgg

SEQ ID NO: 5901346 - DNA, 25 bp, Homo sapien
atgctccgaccgtgagaaaactgtg

SEQ ID NO: 5901347 - DNA, 25 bp, Homo sapien
ggttatagtgttaggatgtaaagtt

SEQ ID NO: 5901348 - DNA, 25 bp, Homo sapien
catttaaacgtgtggccccagtact

SEQ ID NO: 5901349 - DNA, 25 bp, Homo sapien
cctgatgctccgaccgtgagaaaac

SEQ ID NO: 5901350 - DNA, 25 bp, Homo sapien
ataaaactgttaattgagtttccag

SEQ ID NO: 5901351 - DNA, 25 bp, Homo sapien
caaggaatggtaaatctatagcacc

SEQ ID NO: 5901352 - DNA, 25 bp, Homo sapien
ggtcagggcttttcgtctgtgagtg

SEQ ID NO: 5901353 - DNA, 25 bp, Homo sapien
taaagttgtttaagattcaacacga

SEQ ID NO: 5901354 - DNA, 25 bp, Homo sapien
aaagccagggaactcgctagtccca

SEQ ID NO: 5901355 - DNA, 25 bp, Homo sapien
ggcttcacacatggattcgggcagt

SEQ ID NO: 5901356 - DNA, 25 bp, Homo sapien
gggactgacgaaggctttgagattt

SEQ ID NO: 5901357 - DNA, 25 bp, Homo sapien
tatgtctgagcaaaacaaaaagatt

SEQ ID NO: 5901358 - DNA, 25 bp, Homo sapien
agtaataacaacagcctagctaggt

SEQ ID NO: 5901359 - DNA, 25 bp, Homo sapien
ggtctccattctgctgtatcgcata

SEQ ID NO: 5901360 - DNA, 25 bp, Homo sapien
tccagtgagtggtttaaacgattag

SEQ ID NO: 5901361 - DNA, 25 bp, Homo sapien
ctagacccagaaagccagggaactc

SEQ ID NO: 5901362 - DNA, 25 bp, Homo sapien
caagtgttcaggagccaccagctat

SEQ ID NO: 5901363 - DNA, 25 bp, Homo sapien
cagacagtccttggaggcacagaac

SEQ ID NO: 5901364 - DNA, 25 bp, Homo sapien
tatctgctttcagatgaaagggggc

SEQ ID NO: 5901365 - DNA, 25 bp, Homo sapien
atcttcaatcaacagcaatccccac

SEQ ID NO: 5901366 - DNA, 25 bp, Homo sapien
tgagtttccagtgagtggtttaaac

SEQ ID NO: 5901367 - DNA, 25 bp, Homo sapien
cacgaggctgacggtcaacataaaa

SEQ ID NO: 5901368 - DNA, 25 bp, Homo sapien
ctgttaattgagtttccagtgagtg

SEQ ID NO: 5901369 - DNA, 25 bp, Homo sapien
gctccgaccgtgagaaaactgtggg

SEQ ID NO: 5901370 - DNA, 25 bp, Homo sapien
catatatgtaaaaagtgttataaat

SEQ ID NO: 5901371 - DNA, 25 bp, Homo sapien
tcgccagacagtccttggaggcaca

SEQ ID NO: 5901372 - DNA, 25 bp, Homo sapien
tagctaggtatgaaagcagttatga

SEQ ID NO: 5901373 - DNA, 25 bp, Homo sapien
tccgtctacagggtcaagtgttcag

SEQ ID NO: 5901374 - DNA, 25 bp, Homo sapien
tctgacttctcatttaaacgtgtgg

SEQ ID NO: 5901375 - DNA, 25 bp, Homo sapien
ccagaaagccagggaactcgctagt

SEQ ID NO: 5901376 - DNA, 25 bp, Homo sapien
acagcaatccccactcaactgcgtt

SEQ ID NO: 5901377 - DNA, 25 bp, Homo sapien
ggtggccaatacaagtcatcgccag

SEQ ID NO: 5901378 - DNA, 25 bp, Homo sapien
gagtgggagggaggtatctgctttc

SEQ ID NO: 5901379 - DNA, 25 bp, Homo sapien
atcgggtctccattctgctgtatcg

SEQ ID NO: 5901380 - DNA, 25 bp, Homo sapien
acccatagtgtaaaggtcttcaact

SEQ ID NO: 5901381 - DNA, 25 bp, Homo sapien
aacaacagcctagctaggtatgaaa

SEQ ID NO: 5901382 - DNA, 25 bp, Homo sapien
agtttccagtgagtggtttaaacga

SEQ ID NO: 5901383 - DNA, 25 bp, Homo sapien
ctttcagatgaaagggggccacgtg

SEQ ID NO: 5901384 - DNA, 25 bp, Homo sapien
tatgaaccgtttgtatcgggtctcc

SEQ ID NO: 5901385 - DNA, 25 bp, Homo sapien
tttggttatcctatgaggttgagtg

SEQ ID NO: 5901386 - DNA, 25 bp, Homo sapien
cgggtctccattctgctgtatcgca

SEQ ID NO: 5901387 - DNA, 25 bp, Homo sapien
cgaccgtgagaaaactgtgggactg

SEQ ID NO: 5901388 - DNA, 25 bp, Homo sapien
aagcaaaacaatcctatgtacatat

SEQ ID NO: 5901389 - DNA, 25 bp, Homo sapien
tgcagagggttccggtcagggcttt

SEQ ID NO: 5901390 - DNA, 25 bp, Homo sapien
agttggtggccaatacaagtcatcg

SEQ ID NO: 5901391 - DNA, 25 bp, Homo sapien
aactgttaattgagtttccagtgag

SEQ ID NO: 5901392 - DNA, 25 bp, Homo sapien
ttgcgtttgggtttggggctagctc

SEQ ID NO: 5901393 - DNA, 25 bp, Homo sapien
aaacaaaacaaagatactgagcttg

SEQ ID NO: 5901394 - DNA, 25 bp, Homo sapien
gtcaagtgttcaggagccaccagct

SEQ ID NO: 5901395 - DNA, 25 bp, Homo sapien
agccagggaactcgctagtcccaag

SEQ ID NO: 5901396 - DNA, 25 bp, Homo sapien
tcaatcaacagcaatccccactcaa

SEQ ID NO: 5901397 - DNA, 25 bp, Homo sapien
cttcaactgtctggggtttgtcccc

SEQ ID NO: 5901398 - DNA, 25 bp, Homo sapien
ggttttataaaccatagatattata

SEQ ID NO: 5901399 - DNA, 25 bp, Homo sapien
tattatatacatcttcaatcaacag

SEQ ID NO: 5901400 - DNA, 25 bp, Homo sapien
tgttcaggagccaccagctattact

SEQ ID NO: 5901401 - DNA, 25 bp, Homo sapien
tgggtttggggctagctcttttttg

SEQ ID NO: 5901402 - DNA, 25 bp, Homo sapien
cgaggctgacggtcaacataaaaag

SEQ ID NO: 5901403 - DNA, 25 bp, Homo sapien
gcttgcgtttgggtttggggctagc

SEQ ID NO: 5901404 - DNA, 25 bp, Homo sapien
cttgtctctgacttctcatttaaac

SEQ ID NO: 5901405 - DNA, 25 bp, Homo sapien
actttggttatcctatgaggttgag

SEQ ID NO: 5901406 - DNA, 25 bp, Homo sapien
gtgggagggaggtatctgctttcag

SEQ ID NO: 5901407 - DNA, 25 bp, Homo sapien
tgtggccccagtactccgtctacag

SEQ ID NO: 5901408 - DNA, 25 bp, Homo sapien
atcctatgtacatatatgtaaaaag

SEQ ID NO: 5901409 - DNA, 25 bp, Homo sapien
aactcgctagtcccaagggtctaga

SEQ ID NO: 5901410 - DNA, 25 bp, Homo sapien
ttggttggttttgttctctggtttc

SEQ ID NO: 5901411 - DNA, 25 bp, Homo sapien
agtgttaggatgtaaagttgtttaa

SEQ ID NO: 5901412 - DNA, 25 bp, Homo sapien
ctgtgggactgacgaaggctttgag

SEQ ID NO: 5901413 - DNA, 25 bp, Homo sapien
tttaagattcaacacgaggctgacg

SEQ ID NO: 5901414 - DNA, 25 bp, Homo sapien
gggctagctcttttttggttggttg

SEQ ID NO: 5901415 - DNA, 25 bp, Homo sapien
agtttttatgtctgagcaaaacaaa

SEQ ID NO: 5901416 - DNA, 25 bp, Homo sapien
actccgtctacagggtcaagtgttc

SEQ ID NO: 5901417 - DNA, 25 bp, Homo sapien
ccttggaggcacagaacactctaga

SEQ ID NO: 5901418 - DNA, 25 bp, Homo sapien
tttttgcagagggttccggtcaggg

SEQ ID NO: 5901419 - DNA, 25 bp, Homo sapien
agtcccaagggtctagatgctcgtc

SEQ ID NO: 5901420 - DNA, 25 bp, Homo sapien
tgaaagcagttatgaaccgtttgta

SEQ ID NO: 5901421 - DNA, 25 bp, Homo sapien
ttgtagtaataacaacagcctagct

SEQ ID NO: 5901422 - DNA, 25 bp, Homo sapien
gagtcttagcatcagaaggacaccg

SEQ ID NO: 5901423 - DNA, 25 bp, Homo sapien
taaatctatagcaccatttcacaga

SEQ ID NO: 5901424 - DNA, 25 bp, Homo sapien
atggtaaatctatagcaccatttca

SEQ ID NO: 5901425 - DNA, 25 bp, Homo sapien
gtctagatgctcgtcctgatgctcc

SEQ ID NO: 5901426 - DNA, 25 bp, Homo sapien
aacgtgtggccccagtactccgtct

SEQ ID NO: 5901427 - DNA, 25 bp, Homo sapien
tttttatgtctgagcaaaacaaaaa

SEQ ID NO: 5901428 - DNA, 25 bp, Homo sapien
gggtcaagtgttcaggagccaccag

SEQ ID NO: 5901429 - DNA, 25 bp, Homo sapien
ttagtaataacaaggaatggtaaat

SEQ ID NO: 5901430 - DNA, 25 bp, Homo sapien
agatgctcgtcctgatgctccgacc

SEQ ID NO: 5901431 - DNA, 25 bp, Homo sapien
ttctcatttaaacgtgtggccccag

SEQ ID NO: 5901432 - DNA, 25 bp, Homo sapien
aggctgacggtcaacataaaaagca

SEQ ID NO: 5901433 - DNA, 25 bp, Homo sapien
gcgttctgtttggtttggcttgcgt

SEQ ID NO: 5901434 - DNA, 25 bp, Homo sapien
tattactgtttttgcagagggttcc

SEQ ID NO: 5901435 - DNA, 25 bp, Homo sapien
tggccaatacaagtcatcgccagac

SEQ ID NO: 5901436 - DNA, 25 bp, Homo sapien
ctgtgagtgcttagggcttcacaca

SEQ ID NO: 5901437 - DNA, 25 bp, Homo sapien
aagggtctagatgctcgtcctgatg

SEQ ID NO: 5901438 - DNA, 25 bp, Homo sapien
gtcttagcatcagaaggacaccgta

SEQ ID NO: 5901439 - DNA, 25 bp, Homo sapien
tatatgtaaaaagtgttataaatag

SEQ ID NO: 5901440 - DNA, 25 bp, Homo sapien
tgtttaagattcaacacgaggctga

SEQ ID NO: 5901441 - DNA, 25 bp, Homo sapien
gatgaaagggggccacgtggagttt

SEQ ID NO: 5901442 - DNA, 25 bp, Homo sapien
taaataggttttataaaccatagat

SEQ ID NO: 5901443 - DNA, 25 bp, Homo sapien
tgacttctcatttaaacgtgtggcc

SEQ ID NO: 5901444 - DNA, 25 bp, Homo sapien
ggtcaacataaaaagcaaaacaatc

SEQ ID NO: 5901445 - DNA, 25 bp, Homo sapien
tgctttcagatgaaagggggccacg

SEQ ID NO: 5901446 - DNA, 25 bp, Homo sapien
ctagtcccaagggtctagatgctcg

SEQ ID NO: 5901447 - DNA, 25 bp, Homo sapien
caatcctatgtacatatatgtaaaa

SEQ ID NO: 5901448 - DNA, 25 bp, Homo sapien
taataacaacagcctagctaggtat

SEQ ID NO: 5901449 - DNA, 25 bp, Homo sapien
gtagtaataacaacagcctagctag

SEQ ID NO: 5901450 - DNA, 25 bp, Homo sapien
aaaactgttaattgagtttccagtg

SEQ ID NO: 5901451 - DNA, 25 bp, Homo sapien
acagattgcttgtctctgacttctc

SEQ ID NO: 5901452 - DNA, 25 bp, Homo sapien
atacatctacagttggtggccaata

SEQ ID NO: 5901453 - DNA, 25 bp, Homo sapien
tttggcttgcgtttgggtttggggc

SEQ ID NO: 5901454 - DNA, 25 bp, Homo sapien
acactttggttatcctatgaggttg

SEQ ID NO: 5901455 - DNA, 25 bp, Homo sapien
gacgaaggctttgagatttatttat

SEQ ID NO: 5901456 - DNA, 25 bp, Homo sapien
aactgtctggggtttgtccccacac

SEQ ID NO: 5901457 - DNA, 25 bp, Homo sapien
tggttggttggttttgttctctggt

SEQ ID NO: 5901458 - DNA, 25 bp, Homo sapien
gagtggtttaaacgattagtaataa

SEQ ID NO: 5901459 - DNA, 25 bp, Homo sapien
atcagaaggacaccgtatatacatc

SEQ ID NO: 5901460 - DNA, 25 bp, Homo sapien
tcacacatggattcgggcagtggat

SEQ ID NO: 5901461 - DNA, 25 bp, Homo sapien
tgtctctgacttctcatttaaacgt

SEQ ID NO: 5901462 - DNA, 25 bp, Homo sapien
aacaaagatactgagcttggttata

SEQ ID NO: 5901463 - DNA, 25 bp, Homo sapien
ctaaatgcactgggtcacccatagt

SEQ ID NO: 5901464 - DNA, 25 bp, Homo sapien
ccactcaactgcgttctgtttggtt

SEQ ID NO: 5901465 - DNA, 25 bp, Homo sapien
tcctatgaggttgagtgggagggag

SEQ ID NO: 5901466 - DNA, 25 bp, Homo sapien
tgtttttgcagagggttccggtcag

SEQ ID NO: 5901467 - DNA, 25 bp, Homo sapien
ttatagtgttaggatgtaaagttgt

SEQ ID NO: 5901468 - DNA, 25 bp, Homo sapien
ttatatacatcttcaatcaacagca

SEQ ID NO: 5901469 - DNA, 25 bp, Homo sapien
tcaacataaaaagcaaaacaatcct

SEQ ID NO: 5901470 - DNA, 25 bp, Homo sapien
taataacaaggaatggtaaatctat

SEQ ID NO: 5901471 - DNA, 25 bp, Homo sapien
tggccccagtactccgtctacaggg

SEQ ID NO: 5901472 - DNA, 25 bp, Homo sapien
gatgtaaagttgtttaagattcaac

SEQ ID NO: 5901473 - DNA, 25 bp, Homo sapien
ctatgaggttgagtgggagggaggt

SEQ ID NO: 5901474 - DNA, 25 bp, Homo sapien
agcaatccccactcaactgcgttct

SEQ ID NO: 5901475 - DNA, 25 bp, Homo sapien
actcaactgcgttctgtttggtttg

SEQ ID NO: 5901476 - DNA, 25 bp, Homo sapien
ccatagtgtaaaggtcttcaactgt

SEQ ID NO: 5901477 - DNA, 25 bp, Homo sapien
ttactgtttttgcagagggttccgg

SEQ ID NO: 5901478 - DNA, 25 bp, Homo sapien
aaaacaaagatactgagcttggtta

SEQ ID NO: 5901479 - DNA, 25 bp, Homo sapien
gctaggtatgaaagcagttatgaac

SEQ ID NO: 5901480 - DNA, 25 bp, Homo sapien
tcgcataaaactgttaattgagttt

SEQ ID NO: 5901481 - DNA, 25 bp, Homo sapien
acatggattcgggcagtggatactc

SEQ ID NO: 5901482 - DNA, 25 bp, Homo sapien
tacagggtcaagtgttcaggagcca

SEQ ID NO: 5901483 - DNA, 25 bp, Homo sapien
tacatatatgtaaaaagtgttataa

SEQ ID NO: 5901484 - DNA, 25 bp, Homo sapien
ggcttttcgtctgtgagtgcttagg

SEQ ID NO: 5901485 - DNA, 25 bp, Homo sapien
ggtaaatctatagcaccatttcaca

SEQ ID NO: 5901486 - DNA, 25 bp, Homo sapien
atacatcttcaatcaacagcaatcc

SEQ ID NO: 5901487 - DNA, 25 bp, Homo sapien
aactgcgttctgtttggtttggctt

SEQ ID NO: 5901488 - DNA, 25 bp, Homo sapien
cttcaatcaacagcaatccccactc

SEQ ID NO: 5901489 - DNA, 25 bp, Homo sapien
acagcctagctaggtatgaaagcag

SEQ ID NO: 5901490 - DNA, 25 bp, Homo sapien
gatactgagcttggttatagtgtta

SEQ ID NO: 5901491 - DNA, 25 bp, Homo sapien
agaacactctagacccagaaagcca

SEQ ID NO: 5901492 - DNA, 25 bp, Homo sapien
accatttcacagattgcttgtctct

SEQ ID NO: 5901493 - DNA, 25 bp, Homo sapien
aggtcttcaactgtctggggtttgt

SEQ ID NO: 5901494 - DNA, 25 bp, Homo sapien
ttggaggcacagaacactctagacc

SEQ ID NO: 5901495 - DNA, 25 bp, Homo sapien
gtttgtatcgggtctccattctgct

SEQ ID NO: 5901496 - DNA, 25 bp, Homo sapien
cttttcgtctgtgagtgcttagggc

SEQ ID NO: 5901497 - DNA, 25 bp, Homo sapien
ttccggtcagggcttttcgtctgtg

SEQ ID NO: 5901498 - DNA, 25 bp, Homo sapien
gtccttggaggcacagaacactcta

SEQ ID NO: 5901499 - DNA, 25 bp, Homo sapien
gctattactgtttttgcagagggtt

SEQ ID NO: 5901500 - DNA, 25 bp, Homo sapien
gtatcgggtctccattctgctgtat

SEQ ID NO: 5901501 - DNA, 25 bp, Homo sapien
agggcttttcgtctgtgagtgctta

SEQ ID NO: 5901502 - DNA, 25 bp, Homo sapien
cgtctacagggtcaagtgttcagga

SEQ ID NO: 5901503 - DNA, 25 bp, Homo sapien
tctggagtcttagcatcagaaggac

SEQ ID NO: 5901504 - DNA, 25 bp, Homo sapien
gccagacagtccttggaggcacaga

SEQ ID NO: 5901505 - DNA, 25 bp, Homo sapien
aacaaggaatggtaaatctatagca

SEQ ID NO: 5901506 - DNA, 25 bp, Homo sapien
tgtttggtttggcttgcgtttgggt

SEQ ID NO: 5901507 - DNA, 25 bp, Homo sapien
tcacccatagtgtaaaggtcttcaa

SEQ ID NO: 5901508 - DNA, 25 bp, Homo sapien
taattgagtttccagtgagtggttt

SEQ ID NO: 5901509 - DNA, 25 bp, Homo sapien
ggggccacgtggagtttttatgtct

SEQ ID NO: 5901510 - DNA, 25 bp, Homo sapien
tgttaggatgtaaagttgtttaaga

SEQ ID NO: 5901511 - DNA, 25 bp, Homo sapien
ctgtctggggtttgtccccacactt

SEQ ID NO: 5901512 - DNA, 25 bp, Homo sapien
gtcttcaactgtctggggtttgtcc

SEQ ID NO: 5901513 - DNA, 25 bp, Homo sapien
gctgtatcgcataaaactgttaatt

SEQ ID NO: 5901514 - DNA, 25 bp, Homo sapien
tgagcaaaacaaaaagattaaaaaa

SEQ ID NO: 5901515 - DNA, 25 bp, Homo sapien
cagaaggacaccgtatatacatcta

SEQ ID NO: 5901516 - DNA, 25 bp, Homo sapien
agggaactcgctagtcccaagggtc

SEQ ID NO: 5901517 - DNA, 25 bp, Homo sapien
tgacggtcaacataaaaagcaaaac

SEQ ID NO: 5901518 - DNA, 25 bp, Homo sapien
ggtcacccatagtgtaaaggtcttc

SEQ ID NO: 5901519 - DNA, 25 bp, Homo sapien
agacccagaaagccagggaactcgc

SEQ ID NO: 5901520 - DNA, 25 bp, Homo sapien
gggtctagatgctcgtcctgatgct

SEQ ID NO: 5901521 - DNA, 25 bp, Homo sapien
ttcagatgaaagggggccacgtgga

SEQ ID NO: 5901522 - DNA, 25 bp, Homo sapien
tctgagcaaaacaaaaagattaaaa

SEQ ID NO: 5901523 - DNA, 25 bp, Homo sapien
gaggtatctgctttcagatgaaagg

SEQ ID NO: 5901524 - DNA, 25 bp, Homo sapien
tattgtagtaataacaacagcctag

SEQ ID NO: 5901525 - DNA, 25 bp, Homo sapien
gggagggaggtatctgctttcagat

SEQ ID NO: 5901526 - DNA, 25 bp, Homo sapien
tcagggcttttcgtctgtgagtgct

SEQ ID NO: 5901527 - DNA, 25 bp, Homo sapien
acatctacagttggtggccaataca

SEQ ID NO: 5901528 - DNA, 25 bp, Homo sapien
cagttatgaaccgtttgtatcgggt

SEQ ID NO: 5901529 - DNA, 25 bp, Homo sapien
tatcctatgaggttgagtgggaggg

SEQ ID NO: 5901530 - DNA, 25 bp, Homo sapien
cgaaacaaaacaaagatactgagct

SEQ ID NO: 5901531 - DNA, 25 bp, Homo sapien
gaggttgagtgggagggaggtatct

SEQ ID NO: 5901532 - DNA, 25 bp, Homo sapien
ggagccaccagctattactgttttt

SEQ ID NO: 5901533 - DNA, 25 bp, Homo sapien
tactcctgctaaatgcactgggtca

SEQ ID NO: 5901534 - DNA, 25 bp, Homo sapien
tataaataggttttataaaccatag

SEQ ID NO: 5901535 - DNA, 25 bp, Homo sapien
ccccactcaactgcgttctgtttgg

SEQ ID NO: 5901536 - DNA, 25 bp, Homo sapien
gtgggactgacgaaggctttgagat

SEQ ID NO: 5901537 - DNA, 25 bp, Homo sapien
ttaaacgattagtaataacaaggaa

SEQ ID NO: 5901538 - DNA, 25 bp, Homo sapien
cagagggttccggtcagggcttttc

SEQ ID NO: 5901539 - DNA, 25 bp, Homo sapien
aaaacaatcctatgtacatatatgt

SEQ ID NO: 5901540 - DNA, 25 bp, Homo sapien
acccagaaagccagggaactcgcta

SEQ ID NO: 5901541 - DNA, 25 bp, Homo sapien
aacactctagacccagaaagccagg

SEQ ID NO: 5901542 - DNA, 25 bp, Homo sapien
gtggagtttttatgtctgagcaaaa

SEQ ID NO: 5901543 - DNA, 25 bp, Homo sapien
tatagcaccatttcacagattgctt

SEQ ID NO: 5901544 - DNA, 25 bp, Homo sapien
ttgagtgggagggaggtatctgctt

SEQ ID NO: 5901545 - DNA, 25 bp, Homo sapien
accgtgagaaaactgtgggactgac

SEQ ID NO: 5901546 - DNA, 25 bp, Homo sapien
ccaccagctattactgtttttgcag

SEQ ID NO: 5901547 - DNA, 25 bp, Homo sapien
ttgtccccacactttggttatccta

SEQ ID NO: 5901548 - DNA, 25 bp, Homo sapien
aaaactgtgggactgacgaaggctt

SEQ ID NO: 5901549 - DNA, 25 bp, Homo sapien
agggcttcacacatggattcgggca

SEQ ID NO: 5901550 - DNA, 25 bp, Homo sapien
gtgagtgcttagggcttcacacatg

SEQ ID NO: 5901551 - DNA, 25 bp, Homo sapien
cctagctaggtatgaaagcagttat

SEQ ID NO: 5901552 - DNA, 25 bp, Homo sapien
ggttccggtcagggcttttcgtctg

SEQ ID NO: 5901553 - DNA, 25 bp, Homo sapien
gggcagtggatactcctgctaaatg

SEQ ID NO: 5901554 - DNA, 25 bp, Homo sapien
aactgtgggactgacgaaggctttg

SEQ ID NO: 5901555 - DNA, 25 bp, Homo sapien
tgtaaaggtcttcaactgtctgggg

SEQ ID NO: 5901556 - DNA, 25 bp, Homo sapien
atagtgtaaaggtcttcaactgtct

SEQ ID NO: 5901557 - DNA, 25 bp, Homo sapien
ctgacgaaggctttgagatttattt

SEQ ID NO: 5901558 - DNA, 25 bp, Homo sapien
caggagccaccagctattactgttt

SEQ ID NO: 5901559 - DNA, 25 bp, Homo sapien
tcgtcctgatgctccgaccgtgaga

SEQ ID NO: 5901560 - DNA, 25 bp, Homo sapien
atctacagttggtggccaatacaag

SEQ ID NO: 5901561 - DNA, 25 bp, Homo sapien
actgtttttgcagagggttccggtc

SEQ ID NO: 5901562 - DNA, 25 bp, Homo sapien
agccaccagctattactgtttttgc

SEQ ID NO: 5901563 - DNA, 25 bp, Homo sapien
tactgagcttggttatagtgttagg

SEQ ID NO: 5901564 - DNA, 25 bp, Homo sapien
tctctgacttctcatttaaacgtgt

SEQ ID NO: 5901565 - DNA, 25 bp, Homo sapien
gtccccacactttggttatcctatg

SEQ ID NO: 5901566 - DNA, 25 bp, Homo sapien
attcgggcagtggatactcctgcta

SEQ ID NO: 5901567 - DNA, 25 bp, Homo sapien
tcccaagggtctagatgctcgtcct

SEQ ID NO: 5901568 - DNA, 25 bp, Homo sapien
accagctattactgtttttgcagag

SEQ ID NO: 5901569 - DNA, 25 bp, Homo sapien
caaagatactgagcttggttatagt

SEQ ID NO: 5901570 - DNA, 25 bp, Homo sapien
atatacatcttcaatcaacagcaat

SEQ ID NO: 5901571 - DNA, 25 bp, Homo sapien
aggatgtaaagttgtttaagattca

SEQ ID NO: 5901572 - DNA, 25 bp, Homo sapien
ttggttatagtgttaggatgtaaag

SEQ ID NO: 5901573 - DNA, 25 bp, Homo sapien
taaaggtcttcaactgtctggggtt

SEQ ID NO: 5901574 - DNA, 25 bp, Homo sapien
aacgaaacaaaacaaagatactgag

SEQ ID NO: 5901575 - DNA, 25 bp, Homo sapien
cataaaaagcaaaacaatcctatgt

SEQ ID NO: 5901576 - DNA, 25 bp, Homo sapien
cgtgtggccccagtactccgtctac

SEQ ID NO: 5901577 - DNA, 25 bp, Homo sapien
atacaagtcatcgccagacagtcct

SEQ ID NO: 5901578 - DNA, 25 bp, Homo sapien
ctcatttaaacgtgtggccccagta

SEQ ID NO: 5901579 - DNA, 25 bp, Homo sapien
agtaataacaaggaatggtaaatct

SEQ ID NO: 5901580 - DNA, 25 bp, Homo sapien
tttccagtgagtggtttaaacgatt

SEQ ID NO: 5901581 - DNA, 25 bp, Homo sapien
ataacaacagcctagctaggtatga

SEQ ID NO: 5901582 - DNA, 25 bp, Homo sapien
acgattagtaataacaaggaatggt

SEQ ID NO: 5901583 - DNA, 25 bp, Homo sapien
ttctgctgtatcgcataaaactgtt

SEQ ID NO: 5901584 - DNA, 25 bp, Homo sapien
acgtggagtttttatgtctgagcaa

SEQ ID NO: 5901585 - DNA, 25 bp, Homo sapien
ggtatctgctttcagatgaaagggg

SEQ ID NO: 5901586 - DNA, 25 bp, Homo sapien
gtgcttagggcttcacacatggatt

SEQ ID NO: 5901587 - DNA, 25 bp, Homo sapien
ttggtggccaatacaagtcatcgcc

SEQ ID NO: 5901588 - DNA, 25 bp, Homo sapien
gatactcctgctaaatgcactgggt

SEQ ID NO: 5901589 - DNA, 25 bp, Homo sapien
tatgaaagcagttatgaaccgtttg

SEQ ID NO: 5901590 - DNA, 25 bp, Homo sapien
acaaaacaaagatactgagcttggt

SEQ ID NO: 5901591 - DNA, 25 bp, Homo sapien
cagctattactgtttttgcagaggg

SEQ ID NO: 5901592 - DNA, 25 bp, Homo sapien
tgtacatatatgtaaaaagtgttat

SEQ ID NO: 5901593 - DNA, 25 bp, Homo sapien
ggtatgaaagcagttatgaaccgtt

SEQ ID NO: 5901594 - DNA, 25 bp, Homo sapien
tcaacagcaatccccactcaactgc

SEQ ID NO: 5901595 - DNA, 25 bp, Homo sapien
ggccacgtggagtttttatgtctga

SEQ ID NO: 5901596 - DNA, 25 bp, Homo sapien
aaagcagttatgaaccgtttgtatc

SEQ ID NO: 5901597 - DNA, 25 bp, Homo sapien
gcttagggcttcacacatggattcg

SEQ ID NO: 5901598 - DNA, 25 bp, Homo sapien
attgcttgtctctgacttctcattt

SEQ ID NO: 5901599 - DNA, 25 bp, Homo sapien
gctagctcttttttggttggttggt

SEQ ID NO: 5901600 - DNA, 25 bp, Homo sapien
taggttttataaaccatagatatta

SEQ ID NO: 5901601 - DNA, 25 bp, Homo sapien
agcagttatgaaccgtttgtatcgg

SEQ ID NO: 5901602 - DNA, 25 bp, Homo sapien
ctttgagatttatttattgtagtaa

SEQ ID NO: 5901603 - DNA, 25 bp, Homo sapien
acaagtcatcgccagacagtccttg

SEQ ID NO: 5901604 - DNA, 25 bp, Homo sapien
acttctcatttaaacgtgtggcccc

SEQ ID NO: 5901605 - DNA, 25 bp, Homo sapien
caccgtatatacatctacagttggt

SEQ ID NO: 5901606 - DNA, 25 bp, Homo sapien
tggggctagctcttttttggttggt

SEQ ID NO: 5901607 - DNA, 25 bp, Homo sapien
tttgcagagggttccggtcagggct

SEQ ID NO: 5901608 - DNA, 25 bp, Homo sapien
tttggttggttggttttgttctctg

SEQ ID NO: 5901609 - DNA, 25 bp, Homo sapien
atgcactgggtcacccatagtgtaa

SEQ ID NO: 5901610 - DNA, 25 bp, Homo sapien
catttcacagattgcttgtctctga

SEQ ID NO: 5901611 - DNA, 25 bp, Homo sapien
aatcaacagcaatccccactcaact

SEQ ID NO: 5901612 - DNA, 25 bp, Homo sapien
aacaatcctatgtacatatatgtaa

SEQ ID NO: 5901613 - DNA, 25 bp, Homo sapien
tatttattgtagtaataacaacagc

SEQ ID NO: 5901614 - DNA, 25 bp, Homo sapien
caacagcctagctaggtatgaaagc

SEQ ID NO: 5901615 - DNA, 25 bp, Homo sapien
gtttgtccccacactttggttatcc

SEQ ID NO: 5901616 - DNA, 25 bp, Homo sapien
ctacagttggtggccaatacaagtc

SEQ ID NO: 5901617 - DNA, 25 bp, Homo sapien
aggacaccgtatatacatctacagt

SEQ ID NO: 5901618 - DNA, 25 bp, Homo sapien
caatccccactcaactgcgttctgt

SEQ ID NO: 5901619 - DNA, 25 bp, Homo sapien
gttgtttaagattcaacacgaggct

SEQ ID NO: 5901620 - DNA, 25 bp, Homo sapien
tgtatcgcataaaactgttaattga

SEQ ID NO: 5901621 - DNA, 25 bp, Homo sapien
atccccactcaactgcgttctgttt

SEQ ID NO: 5901622 - DNA, 25 bp, Homo sapien
ctagatgctcgtcctgatgctccga

SEQ ID NO: 5901623 - DNA, 25 bp, Homo sapien
taagattcaacacgaggctgacggt

SEQ ID NO: 5901624 - DNA, 25 bp, Homo sapien
agtgtaaaggtcttcaactgtctgg

SEQ ID NO: 5901625 - DNA, 25 bp, Homo sapien
gcataaaactgttaattgagtttcc

SEQ ID NO: 5901626 - DNA, 25 bp, Homo sapien
tctatagcaccatttcacagattgc

SEQ ID NO: 5901627 - DNA, 25 bp, Homo sapien
taaaccatagatattatatacatct

SEQ ID NO: 5901628 - DNA, 25 bp, Homo sapien
tgtctgagcaaaacaaaaagattaa

SEQ ID NO: 5901629 - DNA, 25 bp, Homo sapien
agtggatactcctgctaaatgcact

SEQ ID NO: 5901630 - DNA, 25 bp, Homo sapien
ggaactcgctagtcccaagggtcta

SEQ ID NO: 5901631 - DNA, 25 bp, Homo sapien
gcagtggatactcctgctaaatgca

SEQ ID NO: 5901632 - DNA, 25 bp, Homo sapien
gtgagtggtttaaacgattagtaat

SEQ ID NO: 5901633 - DNA, 25 bp, Homo sapien
ccacgtggagtttttatgtctgagc

SEQ ID NO: 5901634 - DNA, 25 bp, Homo sapien
gggaggtatctgctttcagatgaaa

SEQ ID NO: 5901635 - DNA, 25 bp, Homo sapien
gaaaggtctggagtcttagcatcag

SEQ ID NO: 5901636 - DNA, 25 bp, Homo sapien
tgctaaatgcactgggtcacccata

SEQ ID NO: 5901637 - DNA, 25 bp, Homo sapien
tcaactgcgttctgtttggtttggc

SEQ ID NO: 5901638 - DNA, 25 bp, Homo sapien
cttagcatcagaaggacaccgtata

SEQ ID NO: 5901639 - DNA, 25 bp, Homo sapien
tggcttgcgtttgggtttggggcta

SEQ ID NO: 5901640 - DNA, 25 bp, Homo sapien
cctatgtacatatatgtaaaaagtg

SEQ ID NO: 5901641 - DNA, 25 bp, Homo sapien
tatcgcataaaactgttaattgagt

SEQ ID NO: 5901642 - DNA, 25 bp, Homo sapien
gattagtaataacaaggaatggtaa

SEQ ID NO: 5901643 - DNA, 25 bp, Homo sapien
gtctgtgagtgcttagggcttcaca

SEQ ID NO: 5901644 - DNA, 25 bp, Homo sapien
tctacagggtcaagtgttcaggagc

SEQ ID NO: 5901645 - DNA, 25 bp, Homo sapien
cagatgaaagggggccacgtggagt

SEQ ID NO: 5901646 - DNA, 25 bp, Homo sapien
gttatcctatgaggttgagtgggag

SEQ ID NO: 5901647 - DNA, 25 bp, Homo sapien
gtcatcgccagacagtccttggagg

SEQ ID NO: 5901648 - DNA, 25 bp, Homo sapien
tagcaccatttcacagattgcttgt

SEQ ID NO: 5901649 - DNA, 25 bp, Homo sapien
taaaaagcaaaacaatcctatgtac

SEQ ID NO: 5901650 - DNA, 25 bp, Homo sapien
ccggtcagggcttttcgtctgtgag

SEQ ID NO: 5901651 - DNA, 25 bp, Homo sapien
gtactccgtctacagggtcaagtgt

SEQ ID NO: 5901652 - DNA, 25 bp, Homo sapien
aagttgtttaagattcaacacgagg

SEQ ID NO: 5901653 - DNA, 25 bp, Homo sapien
agattgcttgtctctgacttctcat

SEQ ID NO: 5901654 - DNA, 25 bp, Homo sapien
tttcacagattgcttgtctctgact

SEQ ID NO: 5901655 - DNA, 25 bp, Homo sapien
ggtctggagtcttagcatcagaagg

SEQ ID NO: 5901656 - DNA, 25 bp, Homo sapien
tgcttgtctctgacttctcatttaa

SEQ ID NO: 5901657 - DNA, 25 bp, Homo sapien
tcaactgtctggggtttgtccccac

SEQ ID NO: 5901658 - DNA, 25 bp, Homo sapien
aataggttttataaaccatagatat

SEQ ID NO: 5901659 - DNA, 25 bp, Homo sapien
tcgggcagtggatactcctgctaaa

SEQ ID NO: 5901660 - DNA, 25 bp, Homo sapien
ggctttgagatttatttattgtagt

SEQ ID NO: 5901661 - DNA, 25 bp, Homo sapien
cgtgagaaaactgtgggactgacga

SEQ ID NO: 5901662 - DNA, 25 bp, Homo sapien
gctcgtcctgatgctccgaccgtga

SEQ ID NO: 5901663 - DNA, 25 bp, Homo sapien
taaacgtgtggccccagtactccgt

SEQ ID NO: 5901664 - DNA, 25 bp, Homo sapien
gtctggggtttgtccccacactttg

SEQ ID NO: 5901665 - DNA, 25 bp, Homo sapien
aaccgtttgtatcgggtctccattc

SEQ ID NO: 5901666 - DNA, 25 bp, Homo sapien
aatggtcagatctcacaggctgaga

SEQ ID NO: 5901667 - DNA, 25 bp, Homo sapien
atcaagagaaacttccaagccaacg

SEQ ID NO: 5901668 - DNA, 25 bp, Homo sapien
agtgagactggtgaattggtttgat

SEQ ID NO: 5901669 - DNA, 25 bp, Homo sapien
atgtgtcacccctcccattaccccc

SEQ ID NO: 5901670 - DNA, 25 bp, Homo sapien
tgtgcttatttcattttgggggatg

SEQ ID NO: 5901671 - DNA, 25 bp, Homo sapien
cacgagatatctctagctttcattt

SEQ ID NO: 5901672 - DNA, 25 bp, Homo sapien
tctagcatgttccccctcacctctc

SEQ ID NO: 5901673 - DNA, 25 bp, Homo sapien
cctgcactacccagtgtctcactgg

SEQ ID NO: 5901674 - DNA, 25 bp, Homo sapien
catcactcaactgcaattgggcttt

SEQ ID NO: 5901675 - DNA, 25 bp, Homo sapien
ctccccaccccctgccacttgaaac

SEQ ID NO: 5901676 - DNA, 25 bp, Homo sapien
gcatgttccccctcacctctcccca

SEQ ID NO: 5901677 - DNA, 25 bp, Homo sapien
gcatttgactcttaacactcaccca

SEQ ID NO: 5901678 - DNA, 25 bp, Homo sapien
caccagtcagaacccacatggcaag

SEQ ID NO: 5901679 - DNA, 25 bp, Homo sapien
tctgatgtgtcacccctcccattac

SEQ ID NO: 5901680 - DNA, 25 bp, Homo sapien
tggtgagccatgggtgggccagaac

SEQ ID NO: 5901681 - DNA, 25 bp, Homo sapien
tctcactggctgtgttggaaacgga

SEQ ID NO: 5901682 - DNA, 25 bp, Homo sapien
tgaggacccaccagtcagaacccac

SEQ ID NO: 5901683 - DNA, 25 bp, Homo sapien
gatggctgtcataaagtttctagca

SEQ ID NO: 5901684 - DNA, 25 bp, Homo sapien
aattttgcatttgactcttaacact

SEQ ID NO: 5901685 - DNA, 25 bp, Homo sapien
tcacctctccccaccccctgccact

SEQ ID NO: 5901686 - DNA, 25 bp, Homo sapien
tcttcgggcgtttctttccatgttt

SEQ ID NO: 5901687 - DNA, 25 bp, Homo sapien
gtgagacctgaggacccaccagtca

SEQ ID NO: 5901688 - DNA, 25 bp, Homo sapien
cccctgcactacccagtgtctcact

SEQ ID NO: 5901689 - DNA, 25 bp, Homo sapien
taggtcaaggaaagacagaataatc

SEQ ID NO: 5901690 - DNA, 25 bp, Homo sapien
tttgatttttttcacatctagatgg

SEQ ID NO: 5901691 - DNA, 25 bp, Homo sapien
acataactctgaggccatggcccat

SEQ ID NO: 5901692 - DNA, 25 bp, Homo sapien
cctggtcccctgcactacccagtgt

SEQ ID NO: 5901693 - DNA, 25 bp, Homo sapien
aaagaaactagaacccaagtcacag

SEQ ID NO: 5901694 - DNA, 25 bp, Homo sapien
ttctactaatcaagagaaacttcca

SEQ ID NO: 5901695 - DNA, 25 bp, Homo sapien
tagtagcctaggtcaaggaaagaca

SEQ ID NO: 5901696 - DNA, 25 bp, Homo sapien
cacagcattttcccacataactctg

SEQ ID NO: 5901697 - DNA, 25 bp, Homo sapien
ctgttccgcctggggataaggtgct

SEQ ID NO: 5901698 - DNA, 25 bp, Homo sapien
agagctgtggcacacatgacagact

SEQ ID NO: 5901699 - DNA, 25 bp, Homo sapien
ccagtcagaacccacatggcaagtc

SEQ ID NO: 5901700 - DNA, 25 bp, Homo sapien
agactcccagcagcccgggaccttg

SEQ ID NO: 5901701 - DNA, 25 bp, Homo sapien
cttgtttaaaatgtttggatggttg

SEQ ID NO: 5901702 - DNA, 25 bp, Homo sapien
tggttttagttttggtgagccatgg

SEQ ID NO: 5901703 - DNA, 25 bp, Homo sapien
ttttgcatttgactcttaacactca

SEQ ID NO: 5901704 - DNA, 25 bp, Homo sapien
ccacttgaaaccttctactaatcaa

SEQ ID NO: 5901705 - DNA, 25 bp, Homo sapien
cagcattttcccacataactctgag

SEQ ID NO: 5901706 - DNA, 25 bp, Homo sapien
ccaccccctgccacttgaaaccttc

SEQ ID NO: 5901707 - DNA, 25 bp, Homo sapien
agaacatcactcaactgcaattggg

SEQ ID NO: 5901708 - DNA, 25 bp, Homo sapien
tccacagcctcctggtcccctgcac

SEQ ID NO: 5901709 - DNA, 25 bp, Homo sapien
aagtcttagtagcctaggtcaagga

SEQ ID NO: 5901710 - DNA, 25 bp, Homo sapien
gaacccaagtcacagcattttccca

SEQ ID NO: 5901711 - DNA, 25 bp, Homo sapien
tttgggtaaagatactgtgagacct

SEQ ID NO: 5901712 - DNA, 25 bp, Homo sapien
caggtacaaaatttgggtaaagata

SEQ ID NO: 5901713 - DNA, 25 bp, Homo sapien
tgtttggctgttggttttagttttg

SEQ ID NO: 5901714 - DNA, 25 bp, Homo sapien
gcctcctggtcccctgcactaccca

SEQ ID NO: 5901715 - DNA, 25 bp, Homo sapien
ctagctttcatttcaattttgcatt

SEQ ID NO: 5901716 - DNA, 25 bp, Homo sapien
ctgtggcacacatgacagactccca

SEQ ID NO: 5901717 - DNA, 25 bp, Homo sapien
gagccatgggtgggccagaacatca

SEQ ID NO: 5901718 - DNA, 25 bp, Homo sapien
acaggctgagaaattgttcccctcc

SEQ ID NO: 5901719 - DNA, 25 bp, Homo sapien
cccaccagtcagaacccacatggca

SEQ ID NO: 5901720 - DNA, 25 bp, Homo sapien
cctctgatgtgtcacccctcccatt

SEQ ID NO: 5901721 - DNA, 25 bp, Homo sapien
aactgcaattgggctttcaggttct

SEQ ID NO: 5901722 - DNA, 25 bp, Homo sapien
ccaagtcacagcattttcccacata

SEQ ID NO: 5901723 - DNA, 25 bp, Homo sapien
gttttggtgagccatgggtgggcca

SEQ ID NO: 5901724 - DNA, 25 bp, Homo sapien
tgtaacgtagaggaagtgagactgg

SEQ ID NO: 5901725 - DNA, 25 bp, Homo sapien
catctagatggctgtcataaagttt

SEQ ID NO: 5901726 - DNA, 25 bp, Homo sapien
ctgaatacattaacggtgctaaaaa

SEQ ID NO: 5901727 - DNA, 25 bp, Homo sapien
ttcacatctagatggctgtcataaa

SEQ ID NO: 5901728 - DNA, 25 bp, Homo sapien
aggctgagaaattgttcccctccaa

SEQ ID NO: 5901729 - DNA, 25 bp, Homo sapien
acagactcccagcagcccgggacct

SEQ ID NO: 5901730 - DNA, 25 bp, Homo sapien
cacaagcacgagatatctctagctt

SEQ ID NO: 5901731 - DNA, 25 bp, Homo sapien
acccagactctgtgcttatttcatt

SEQ ID NO: 5901732 - DNA, 25 bp, Homo sapien
agaaattgttcccctccaagcattt

SEQ ID NO: 5901733 - DNA, 25 bp, Homo sapien
tgaattggtttgatttttttcacat

SEQ ID NO: 5901734 - DNA, 25 bp, Homo sapien
agtgtctcactggctgtgttggaaa

SEQ ID NO: 5901735 - DNA, 25 bp, Homo sapien
tgcactacccagtgtctcactggct

SEQ ID NO: 5901736 - DNA, 25 bp, Homo sapien
agcagcccgggaccttgctgtcttc

SEQ ID NO: 5901737 - DNA, 25 bp, Homo sapien
gggataaggtgctaacatagattta

SEQ ID NO: 5901738 - DNA, 25 bp, Homo sapien
gtggcacacatgacagactcccagc

SEQ ID NO: 5901739 - DNA, 25 bp, Homo sapien
tgggaggctgtttcaggaaagtgag

SEQ ID NO: 5901740 - DNA, 25 bp, Homo sapien
aggcactgggaggctgtttcaggaa

SEQ ID NO: 5901741 - DNA, 25 bp, Homo sapien
gtggtttggagttaggcagagggaa

SEQ ID NO: 5901742 - DNA, 25 bp, Homo sapien
cctggggataaggtgctaacataga

SEQ ID NO: 5901743 - DNA, 25 bp, Homo sapien
atgttccccctcacctctccccacc

SEQ ID NO: 5901744 - DNA, 25 bp, Homo sapien
ctctgaggccatggcccatccacag

SEQ ID NO: 5901745 - DNA, 25 bp, Homo sapien
cacaggtacaaaatttgggtaaaga

SEQ ID NO: 5901746 - DNA, 25 bp, Homo sapien
actaatcaagagaaacttccaagcc

SEQ ID NO: 5901747 - DNA, 25 bp, Homo sapien
ctaggcactgggaggctgtttcagg

SEQ ID NO: 5901748 - DNA, 25 bp, Homo sapien
aggttgtaacgtagaggaagtgaga

SEQ ID NO: 5901749 - DNA, 25 bp, Homo sapien
agaaactagaacccaagtcacagca

SEQ ID NO: 5901750 - DNA, 25 bp, Homo sapien
ctgaggccatggcccatccacagcc

SEQ ID NO: 5901751 - DNA, 25 bp, Homo sapien
agtttctagcatgttccccctcacc

SEQ ID NO: 5901752 - DNA, 25 bp, Homo sapien
actcacccagactctgtgcttattt

SEQ ID NO: 5901753 - DNA, 25 bp, Homo sapien
cccctcacctctccccaccccctgc

SEQ ID NO: 5901754 - DNA, 25 bp, Homo sapien
tggtcagatctcacaggctgagaaa

SEQ ID NO: 5901755 - DNA, 25 bp, Homo sapien
agctctaggcactgggaggctgttt

SEQ ID NO: 5901756 - DNA, 25 bp, Homo sapien
cttaacactcacccagactctgtgc

SEQ ID NO: 5901757 - DNA, 25 bp, Homo sapien
atccagagctgtggcacacatgaca

SEQ ID NO: 5901758 - DNA, 25 bp, Homo sapien
tcagaacccacatggcaagtcttag

SEQ ID NO: 5901759 - DNA, 25 bp, Homo sapien
aggaaagtgagactcaagaggaaga

SEQ ID NO: 5901760 - DNA, 25 bp, Homo sapien
tttcaggaaagtgagactcaagagg

SEQ ID NO: 5901761 - DNA, 25 bp, Homo sapien
gctaacatagatttaactgaataca

SEQ ID NO: 5901762 - DNA, 25 bp, Homo sapien
aattgggctttcaggttcttgccgg

SEQ ID NO: 5901763 - DNA, 25 bp, Homo sapien
ctgcaattgggctttcaggttcttg

SEQ ID NO: 5901764 - DNA, 25 bp, Homo sapien
atgaaaaagctgcttctcattaacc

SEQ ID NO: 5901765 - DNA, 25 bp, Homo sapien
gtcccctgcactacccagtgtctca

SEQ ID NO: 5901766 - DNA, 25 bp, Homo sapien
atctctagctttcatttcaattttg

SEQ ID NO: 5901767 - DNA, 25 bp, Homo sapien
acttgaaaccttctactaatcaaga

SEQ ID NO: 5901768 - DNA, 25 bp, Homo sapien
aggtgctaacatagatttaactgaa

SEQ ID NO: 5901769 - DNA, 25 bp, Homo sapien
tttcatgaaaaagctgcttctcatt

SEQ ID NO: 5901770 - DNA, 25 bp, Homo sapien
tcaattttgcatttgactcttaaca

SEQ ID NO: 5901771 - DNA, 25 bp, Homo sapien
cgtttctttccatgtttggctgttg

SEQ ID NO: 5901772 - DNA, 25 bp, Homo sapien
gcaattgggctttcaggttcttgcc

SEQ ID NO: 5901773 - DNA, 25 bp, Homo sapien
gttaggcagagggaagttacagaca

SEQ ID NO: 5901774 - DNA, 25 bp, Homo sapien
acggaatggtcagatctcacaggct

SEQ ID NO: 5901775 - DNA, 25 bp, Homo sapien
ggtttgatttttttcacatctagat

SEQ ID NO: 5901776 - DNA, 25 bp, Homo sapien
actagaacccaagtcacagcatttt

SEQ ID NO: 5901777 - DNA, 25 bp, Homo sapien
cagcctcctggtcccctgcactacc

SEQ ID NO: 5901778 - DNA, 25 bp, Homo sapien
gtacaaaatttgggtaaagatactg

SEQ ID NO: 5901779 - DNA, 25 bp, Homo sapien
caagcatttcatgaaaaagctgctt

SEQ ID NO: 5901780 - DNA, 25 bp, Homo sapien
tgtctcactggctgtgttggaaacg

SEQ ID NO: 5901781 - DNA, 25 bp, Homo sapien
ttctcgactcttcgggcgtttcttt

SEQ ID NO: 5901782 - DNA, 25 bp, Homo sapien
ctcgactcttcgggcgtttctttcc

SEQ ID NO: 5901783 - DNA, 25 bp, Homo sapien
gctgtcataaagtttctagcatgtt

SEQ ID NO: 5901784 - DNA, 25 bp, Homo sapien
taatccagagctgtggcacacatga

SEQ ID NO: 5901785 - DNA, 25 bp, Homo sapien
agaataatccagagctgtggcacac

SEQ ID NO: 5901786 - DNA, 25 bp, Homo sapien
ggctgttccgcctggggataaggtg

SEQ ID NO: 5901787 - DNA, 25 bp, Homo sapien
tgggtgggccagaacatcactcaac

SEQ ID NO: 5901788 - DNA, 25 bp, Homo sapien
acagacacaggtacaaaatttgggt

SEQ ID NO: 5901789 - DNA, 25 bp, Homo sapien
tagcatgttccccctcacctctccc

SEQ ID NO: 5901790 - DNA, 25 bp, Homo sapien
ggagttgcataagctcaccgtccac

SEQ ID NO: 5901791 - DNA, 25 bp, Homo sapien
ctctccccaccccctgccacttgaa

SEQ ID NO: 5901792 - DNA, 25 bp, Homo sapien
ccacataactctgaggccatggccc

SEQ ID NO: 5901793 - DNA, 25 bp, Homo sapien
aagtgagactcaagaggaagacaga

SEQ ID NO: 5901794 - DNA, 25 bp, Homo sapien
cgtccacaagcacgagatatctcta

SEQ ID NO: 5901795 - DNA, 25 bp, Homo sapien
tttaaaatgtttggatggttggctg

SEQ ID NO: 5901796 - DNA, 25 bp, Homo sapien
gggaccttgctgtcttctcgactct

SEQ ID NO: 5901797 - DNA, 25 bp, Homo sapien
aaaagctgcttctcattaaccatgc

SEQ ID NO: 5901798 - DNA, 25 bp, Homo sapien
aaacttccaagccaacggaatggtc

SEQ ID NO: 5901799 - DNA, 25 bp, Homo sapien
agacagaataatccagagctgtggc

SEQ ID NO: 5901800 - DNA, 25 bp, Homo sapien
tggtggtttggagttaggcagaggg

SEQ ID NO: 5901801 - DNA, 25 bp, Homo sapien
gcataagctcaccgtccacaagcac

SEQ ID NO: 5901802 - DNA, 25 bp, Homo sapien
aattggtttgatttttttcacatct

SEQ ID NO: 5901803 - DNA, 25 bp, Homo sapien
gcaagtcttagtagcctaggtcaag

SEQ ID NO: 5901804 - DNA, 25 bp, Homo sapien
tgttggaaacggagttgcataagct

SEQ ID NO: 5901805 - DNA, 25 bp, Homo sapien
ccagcagcccgggaccttgctgtct

SEQ ID NO: 5901806 - DNA, 25 bp, Homo sapien
agatatctctagctttcatttcaat

SEQ ID NO: 5901807 - DNA, 25 bp, Homo sapien
aaacggagttgcataagctcaccgt

SEQ ID NO: 5901808 - DNA, 25 bp, Homo sapien
ttcccctccaagcatttcatgaaaa

SEQ ID NO: 5901809 - DNA, 25 bp, Homo sapien
agcatttcatgaaaaagctgcttct

SEQ ID NO: 5901810 - DNA, 25 bp, Homo sapien
ggccagaacatcactcaactgcaat

SEQ ID NO: 5901811 - DNA, 25 bp, Homo sapien
aatttgggtaaagatactgtgagac

SEQ ID NO: 5901812 - DNA, 25 bp, Homo sapien
ttttcacatctagatggctgtcata

SEQ ID NO: 5901813 - DNA, 25 bp, Homo sapien
aactgaatacattaacggtgctaaa

SEQ ID NO: 5901814 - DNA, 25 bp, Homo sapien
tcacaggctgagaaattgttcccct

SEQ ID NO: 5901815 - DNA, 25 bp, Homo sapien
ttgctgtcttctcgactcttcgggc

SEQ ID NO: 5901816 - DNA, 25 bp, Homo sapien
actgggaggctgtttcaggaaagtg

SEQ ID NO: 5901817 - DNA, 25 bp, Homo sapien
cacagcctcctggtcccctgcacta

SEQ ID NO: 5901818 - DNA, 25 bp, Homo sapien
gatgtgggctttttcccctggtggt

SEQ ID NO: 5901819 - DNA, 25 bp, Homo sapien
ttcccctggtggtttggagttaggc

SEQ ID NO: 5901820 - DNA, 25 bp, Homo sapien
tcaggttcttgccgggagctctagg

SEQ ID NO: 5901821 - DNA, 25 bp, Homo sapien
tcatgaaaaagctgcttctcattaa

SEQ ID NO: 5901822 - DNA, 25 bp, Homo sapien
agaaagaaactagaacccaagtcac

SEQ ID NO: 5901823 - DNA, 25 bp, Homo sapien
catttcaattttgcatttgactctt

SEQ ID NO: 5901824 - DNA, 25 bp, Homo sapien
gagttaggcagagggaagttacaga

SEQ ID NO: 5901825 - DNA, 25 bp, Homo sapien
gacccaccagtcagaacccacatgg

SEQ ID NO: 5901826 - DNA, 25 bp, Homo sapien
tgggccagaacatcactcaactgca

SEQ ID NO: 5901827 - DNA, 25 bp, Homo sapien
cacacatgacagactcccagcagcc

SEQ ID NO: 5901828 - DNA, 25 bp, Homo sapien
ttgactcttaacactcacccagact

SEQ ID NO: 5901829 - DNA, 25 bp, Homo sapien
agacacaggtacaaaatttgggtaa

SEQ ID NO: 5901830 - DNA, 25 bp, Homo sapien
taacgtagaggaagtgagactggtg

SEQ ID NO: 5901831 - DNA, 25 bp, Homo sapien
ggtaaagatactgtgagacctgagg

SEQ ID NO: 5901832 - DNA, 25 bp, Homo sapien
atggcccatccacagcctcctggtc

SEQ ID NO: 5901833 - DNA, 25 bp, Homo sapien
acgtagaggaagtgagactggtgaa

SEQ ID NO: 5901834 - DNA, 25 bp, Homo sapien
cgactcttcgggcgtttctttccat

SEQ ID NO: 5901835 - DNA, 25 bp, Homo sapien
gtagcctaggtcaaggaaagacaga

SEQ ID NO: 5901836 - DNA, 25 bp, Homo sapien
gtgagactcaagaggaagacagaaa

SEQ ID NO: 5901837 - DNA, 25 bp, Homo sapien
aaaatttgggtaaagatactgtgag

SEQ ID NO: 5901838 - DNA, 25 bp, Homo sapien
agtcagaacccacatggcaagtctt

SEQ ID NO: 5901839 - DNA, 25 bp, Homo sapien
ggtgggccagaacatcactcaactg

SEQ ID NO: 5901840 - DNA, 25 bp, Homo sapien
aaggaaagacagaataatccagagc

SEQ ID NO: 5901841 - DNA, 25 bp, Homo sapien
gccgggagctctaggcactgggagg

SEQ ID NO: 5901842 - DNA, 25 bp, Homo sapien
atagatttaactgaatacattaacg

SEQ ID NO: 5901843 - DNA, 25 bp, Homo sapien
gatactgtgagacctgaggacccac

SEQ ID NO: 5901844 - DNA, 25 bp, Homo sapien
aggttcttgccgggagctctaggca

SEQ ID NO: 5901845 - DNA, 25 bp, Homo sapien
gatctcacaggctgagaaattgttc

SEQ ID NO: 5901846 - DNA, 25 bp, Homo sapien
tggggataaggtgctaacatagatt

SEQ ID NO: 5901847 - DNA, 25 bp, Homo sapien
aaccttctactaatcaagagaaact

SEQ ID NO: 5901848 - DNA, 25 bp, Homo sapien
tagaacccaagtcacagcattttcc

SEQ ID NO: 5901849 - DNA, 25 bp, Homo sapien
atatctctagctttcatttcaattt

SEQ ID NO: 5901850 - DNA, 25 bp, Homo sapien
attgttcccctccaagcatttcatg

SEQ ID NO: 5901851 - DNA, 25 bp, Homo sapien
tgatgtgtcacccctcccattaccc

SEQ ID NO: 5901852 - DNA, 25 bp, Homo sapien
agaaacttccaagccaacggaatgg

SEQ ID NO: 5901853 - DNA, 25 bp, Homo sapien
aaactagaacccaagtcacagcatt

SEQ ID NO: 5901854 - DNA, 25 bp, Homo sapien
tctcacaggctgagaaattgttccc

SEQ ID NO: 5901855 - DNA, 25 bp, Homo sapien
gctgtgttggaaacggagttgcata

SEQ ID NO: 5901856 - DNA, 25 bp, Homo sapien
aactctgaggccatggcccatccac

SEQ ID NO: 5901857 - DNA, 25 bp, Homo sapien
taggcagagggaagttacagacaca

SEQ ID NO: 5901858 - DNA, 25 bp, Homo sapien
agatttaactgaatacattaacggt

SEQ ID NO: 5901859 - DNA, 25 bp, Homo sapien
gggaagttacagacacaggtacaaa

SEQ ID NO: 5901860 - DNA, 25 bp, Homo sapien
ggccatggcccatccacagcctcct

SEQ ID NO: 5901861 - DNA, 25 bp, Homo sapien
cccctgccacttgaaaccttctact

SEQ ID NO: 5901862 - DNA, 25 bp, Homo sapien
tcccagcagcccgggaccttgctgt

SEQ ID NO: 5901863 - DNA, 25 bp, Homo sapien
accccctgccacttgaaaccttcta

SEQ ID NO: 5901864 - DNA, 25 bp, Homo sapien
agactctgtgcttatttcattttgg

SEQ ID NO: 5901865 - DNA, 25 bp, Homo sapien
cctggtggtttggagttaggcagag

SEQ ID NO: 5901866 - DNA, 25 bp, Homo sapien
ctcttaacactcacccagactctgt

SEQ ID NO: 5901867 - DNA, 25 bp, Homo sapien
ggctgttggttttagttttggtgag

SEQ ID NO: 5901868 - DNA, 25 bp, Homo sapien
tttggtgagccatgggtgggccaga

SEQ ID NO: 5901869 - DNA, 25 bp, Homo sapien
ttccaagccaacggaatggtcagat

SEQ ID NO: 5901870 - DNA, 25 bp, Homo sapien
ttaactgaatacattaacggtgcta

SEQ ID NO: 5901871 - DNA, 25 bp, Homo sapien
gttttagttttggtgagccatgggt

SEQ ID NO: 5901872 - DNA, 25 bp, Homo sapien
gcattttcccacataactctgaggc

SEQ ID NO: 5901873 - DNA, 25 bp, Homo sapien
gtcacagcattttcccacataactc

SEQ ID NO: 5901874 - DNA, 25 bp, Homo sapien
gataaggtgctaacatagatttaac

SEQ ID NO: 5901875 - DNA, 25 bp, Homo sapien
ctttcatttcaattttgcatttgac

SEQ ID NO: 5901876 - DNA, 25 bp, Homo sapien
gttgtaacgtagaggaagtgagact

SEQ ID NO: 5901877 - DNA, 25 bp, Homo sapien
ccagactctgtgcttatttcatttt

SEQ ID NO: 5901878 - DNA, 25 bp, Homo sapien
ataactctgaggccatggcccatcc

SEQ ID NO: 5901879 - DNA, 25 bp, Homo sapien
ggtcaaggaaagacagaataatcca

SEQ ID NO: 5901880 - DNA, 25 bp, Homo sapien
tgtcacccctcccattacccccttg

SEQ ID NO: 5901881 - DNA, 25 bp, Homo sapien
ccttgctgtcttctcgactcttcgg

SEQ ID NO: 5901882 - DNA, 25 bp, Homo sapien
aggacccaccagtcagaacccacat

SEQ ID NO: 5901883 - DNA, 25 bp, Homo sapien
catttcatgaaaaagctgcttctca

SEQ ID NO: 5901884 - DNA, 25 bp, Homo sapien
ggagctctaggcactgggaggctgt

SEQ ID NO: 5901885 - DNA, 25 bp, Homo sapien
ttggatggttggctgttccgcctgg

SEQ ID NO: 5901886 - DNA, 25 bp, Homo sapien
gtcttagtagcctaggtcaaggaaa

SEQ ID NO: 5901887 - DNA, 25 bp, Homo sapien
aggctgtttcaggaaagtgagactc

SEQ ID NO: 5901888 - DNA, 25 bp, Homo sapien
aagccaacggaatggtcagatctca

SEQ ID NO: 5901889 - DNA, 25 bp, Homo sapien
aagatactgtgagacctgaggaccc

SEQ ID NO: 5901890 - DNA, 25 bp, Homo sapien
agttacagacacaggtacaaaattt

SEQ ID NO: 5901891 - DNA, 25 bp, Homo sapien
agagaaacttccaagccaacggaat

SEQ ID NO: 5901892 - DNA, 25 bp, Homo sapien
gaagttacagacacaggtacaaaat

SEQ ID NO: 5901893 - DNA, 25 bp, Homo sapien
accgtccacaagcacgagatatctc

SEQ ID NO: 5901894 - DNA, 25 bp, Homo sapien
catgggtgggccagaacatcactca

SEQ ID NO: 5901895 - DNA, 25 bp, Homo sapien
ataaagtttctagcatgttccccct

SEQ ID NO: 5901896 - DNA, 25 bp, Homo sapien
tggagttaggcagagggaagttaca

SEQ ID NO: 5901897 - DNA, 25 bp, Homo sapien
cccatccacagcctcctggtcccct

SEQ ID NO: 5901898 - DNA, 25 bp, Homo sapien
acagaataatccagagctgtggcac

SEQ ID NO: 5901899 - DNA, 25 bp, Homo sapien
tgtcttctcgactcttcgggcgttt

SEQ ID NO: 5901900 - DNA, 25 bp, Homo sapien
ccttctactaatcaagagaaacttc

SEQ ID NO: 5901901 - DNA, 25 bp, Homo sapien
agttgcataagctcaccgtccacaa

SEQ ID NO: 5901902 - DNA, 25 bp, Homo sapien
tctgtgcttatttcattttggggga

SEQ ID NO: 5901903 - DNA, 25 bp, Homo sapien
tgacagactcccagcagcccgggac

SEQ ID NO: 5901904 - DNA, 25 bp, Homo sapien
cagcccgggaccttgctgtcttctc

SEQ ID NO: 5901905 - DNA, 25 bp, Homo sapien
tttccatgtttggctgttggtttta

SEQ ID NO: 5901906 - DNA, 25 bp, Homo sapien
caagcacgagatatctctagctttc

SEQ ID NO: 5901907 - DNA, 25 bp, Homo sapien
agcacgagatatctctagctttcat

SEQ ID NO: 5901908 - DNA, 25 bp, Homo sapien
actcaactgcaattgggctttcagg

SEQ ID NO: 5901909 - DNA, 25 bp, Homo sapien
gccaacggaatggtcagatctcaca

SEQ ID NO: 5901910 - DNA, 25 bp, Homo sapien
acaaaatttgggtaaagatactgtg

SEQ ID NO: 5901911 - DNA, 25 bp, Homo sapien
tccatgtttggctgttggttttagt

SEQ ID NO: 5901912 - DNA, 25 bp, Homo sapien
cgggagctctaggcactgggaggct

SEQ ID NO: 5901913 - DNA, 25 bp, Homo sapien
cacatggcaagtcttagtagcctag

SEQ ID NO: 5901914 - DNA, 25 bp, Homo sapien
ctcaagaggaagacagaaaaggttg

SEQ ID NO: 5901915 - DNA, 25 bp, Homo sapien
gaaaccttctactaatcaagagaaa

SEQ ID NO: 5901916 - DNA, 25 bp, Homo sapien
atttaactgaatacattaacggtgc

SEQ ID NO: 5901917 - DNA, 25 bp, Homo sapien
gctgtttcaggaaagtgagactcaa

SEQ ID NO: 5901918 - DNA, 25 bp, Homo sapien
aaaggttgtaacgtagaggaagtga

SEQ ID NO: 5901919 - DNA, 25 bp, Homo sapien
gccatgggtgggccagaacatcact

SEQ ID NO: 5901920 - DNA, 25 bp, Homo sapien
tcaactgcaattgggctttcaggtt

SEQ ID NO: 5901921 - DNA, 25 bp, Homo sapien
cccctggtggtttggagttaggcag

SEQ ID NO: 5901922 - DNA, 25 bp, Homo sapien
gcccgggaccttgctgtcttctcga

SEQ ID NO: 5901923 - DNA, 25 bp, Homo sapien
ttggaaacggagttgcataagctca

SEQ ID NO: 5901924 - DNA, 25 bp, Homo sapien
aaagtttctagcatgttccccctca

SEQ ID NO: 5901925 - DNA, 25 bp, Homo sapien
tgtgttggaaacggagttgcataag

SEQ ID NO: 5901926 - DNA, 25 bp, Homo sapien
ttggctgttccgcctggggataagg

SEQ ID NO: 5901927 - DNA, 25 bp, Homo sapien
ggatggttggctgttccgcctgggg

SEQ ID NO: 5901928 - DNA, 25 bp, Homo sapien
tgtttcaggaaagtgagactcaaga

SEQ ID NO: 5901929 - DNA, 25 bp, Homo sapien
aaagacagaataatccagagctgtg

SEQ ID NO: 5901930 - DNA, 25 bp, Homo sapien
tgtcataaagtttctagcatgttcc

SEQ ID NO: 5901931 - DNA, 25 bp, Homo sapien
gctcaccgtccacaagcacgagata

SEQ ID NO: 5901932 - DNA, 25 bp, Homo sapien
cacatgacagactcccagcagcccg

SEQ ID NO: 5901933 - DNA, 25 bp, Homo sapien
catggcaagtcttagtagcctaggt

SEQ ID NO: 5901934 - DNA, 25 bp, Homo sapien
ccgggaccttgctgtcttctcgact

SEQ ID NO: 5901935 - DNA, 25 bp, Homo sapien
tttcccacataactctgaggccatg

SEQ ID NO: 5901936 - DNA, 25 bp, Homo sapien
cagatctcacaggctgagaaattgt

SEQ ID NO: 5901937 - DNA, 25 bp, Homo sapien
tagttttggtgagccatgggtgggc

SEQ ID NO: 5901938 - DNA, 25 bp, Homo sapien
tctagatggctgtcataaagtttct

SEQ ID NO: 5901939 - DNA, 25 bp, Homo sapien
cccacatggcaagtcttagtagcct

SEQ ID NO: 5901940 - DNA, 25 bp, Homo sapien
aacccacatggcaagtcttagtagc

SEQ ID NO: 5901941 - DNA, 25 bp, Homo sapien
tccgcctggggataaggtgctaaca

SEQ ID NO: 5901942 - DNA, 25 bp, Homo sapien
ttggtttgatttttttcacatctag

SEQ ID NO: 5901943 - DNA, 25 bp, Homo sapien
gacagaaaaggttgtaacgtagagg

SEQ ID NO: 5901944 - DNA, 25 bp, Homo sapien
ccagtgtctcactggctgtgttgga

SEQ ID NO: 5901945 - DNA, 25 bp, Homo sapien
tcataaagtttctagcatgttcccc

SEQ ID NO: 5901946 - DNA, 25 bp, Homo sapien
gaaagtgagactcaagaggaagaca

SEQ ID NO: 5901947 - DNA, 25 bp, Homo sapien
gtgagccatgggtgggccagaacat

SEQ ID NO: 5901948 - DNA, 25 bp, Homo sapien
gagggaagttacagacacaggtaca

SEQ ID NO: 5901949 - DNA, 25 bp, Homo sapien
ggcagagggaagttacagacacagg

SEQ ID NO: 5901950 - DNA, 25 bp, Homo sapien
cccctccaagcatttcatgaaaaag

SEQ ID NO: 5901951 - DNA, 25 bp, Homo sapien
ctacccagtgtctcactggctgtgt

SEQ ID NO: 5901952 - DNA, 25 bp, Homo sapien
actcccagcagcccgggaccttgct

SEQ ID NO: 5901953 - DNA, 25 bp, Homo sapien
caagagaaacttccaagccaacgga

SEQ ID NO: 5901954 - DNA, 25 bp, Homo sapien
ttggctgttggttttagttttggtg

SEQ ID NO: 5901955 - DNA, 25 bp, Homo sapien
ttgcatttgactcttaacactcacc

SEQ ID NO: 5901956 - DNA, 25 bp, Homo sapien
gggctttcaggttcttgccgggagc

SEQ ID NO: 5901957 - DNA, 25 bp, Homo sapien
ttgccgggagctctaggcactggga

SEQ ID NO: 5901958 - DNA, 25 bp, Homo sapien
aagtcacagcattttcccacataac

SEQ ID NO: 5901959 - DNA, 25 bp, Homo sapien
cctcacctctccccaccccctgcca

SEQ ID NO: 5901960 - DNA, 25 bp, Homo sapien
aggaagtgagactggtgaattggtt

SEQ ID NO: 5901961 - DNA, 25 bp, Homo sapien
acccaagtcacagcattttcccaca

SEQ ID NO: 5901962 - DNA, 25 bp, Homo sapien
acatagatttaactgaatacattaa

SEQ ID NO: 5901963 - DNA, 25 bp, Homo sapien
ttcgggcgtttctttccatgtttgg

SEQ ID NO: 5901964 - DNA, 25 bp, Homo sapien
agaggaagtgagactggtgaattgg

SEQ ID NO: 5901965 - DNA, 25 bp, Homo sapien
acggagttgcataagctcaccgtcc

SEQ ID NO: 5901966 - DNA, 25 bp, Homo sapien
acttccaagccaacggaatggtcag

SEQ ID NO: 5901967 - DNA, 25 bp, Homo sapien
tcttgccgggagctctaggcactgg

SEQ ID NO: 5901968 - DNA, 25 bp, Homo sapien
tgttcccctccaagcatttcatgaa

SEQ ID NO: 5901969 - DNA, 25 bp, Homo sapien
tttctagcatgttccccctcacctc

SEQ ID NO: 5901970 - DNA, 25 bp, Homo sapien
cgcctggggataaggtgctaacata

SEQ ID NO: 5901971 - DNA, 25 bp, Homo sapien
attttcccacataactctgaggcca

SEQ ID NO: 5901972 - DNA, 25 bp, Homo sapien
cctgaggacccaccagtcagaaccc

SEQ ID NO: 5901973 - DNA, 25 bp, Homo sapien
aagctcaccgtccacaagcacgaga

SEQ ID NO: 5901974 - DNA, 25 bp, Homo sapien
tttggagttaggcagagggaagtta

SEQ ID NO: 5901975 - DNA, 25 bp, Homo sapien
agctttcatttcaattttgcatttg

SEQ ID NO: 5901976 - DNA, 25 bp, Homo sapien
gaagtgagactggtgaattggtttg

SEQ ID NO: 5901977 - DNA, 25 bp, Homo sapien
gttggttttagttttggtgagccat

SEQ ID NO: 5901978 - DNA, 25 bp, Homo sapien
cagaaaaggttgtaacgtagaggaa

SEQ ID NO: 5901979 - DNA, 25 bp, Homo sapien
ccaagccaacggaatggtcagatct

SEQ ID NO: 5901980 - DNA, 25 bp, Homo sapien
cactacccagtgtctcactggctgt

SEQ ID NO: 5901981 - DNA, 25 bp, Homo sapien
atttgactcttaacactcacccaga

SEQ ID NO: 5901982 - DNA, 25 bp, Homo sapien
ctactaatcaagagaaacttccaag

SEQ ID NO: 5901983 - DNA, 25 bp, Homo sapien
tttcaattttgcatttgactcttaa

SEQ ID NO: 5901984 - DNA, 25 bp, Homo sapien
catgacagactcccagcagcccggg

SEQ ID NO: 5901985 - DNA, 25 bp, Homo sapien
ttttttcacatctagatggctgtca

SEQ ID NO: 5901986 - DNA, 25 bp, Homo sapien
gaccttgctgtcttctcgactcttc

SEQ ID NO: 5901987 - DNA, 25 bp, Homo sapien
ttcatttcaattttgcatttgactc

SEQ ID NO: 5901988 - DNA, 25 bp, Homo sapien
tcccacataactctgaggccatggc

SEQ ID NO: 5901989 - DNA, 25 bp, Homo sapien
taaaatgtttggatggttggctgtt

SEQ ID NO: 5901990 - DNA, 25 bp, Homo sapien
tcaccgtccacaagcacgagatatc

SEQ ID NO: 5901991 - DNA, 25 bp, Homo sapien
agctgtggcacacatgacagactcc

SEQ ID NO: 5901992 - DNA, 25 bp, Homo sapien
gtagaggaagtgagactggtgaatt

SEQ ID NO: 5901993 - DNA, 25 bp, Homo sapien
agcctaggtcaaggaaagacagaat

SEQ ID NO: 5901994 - DNA, 25 bp, Homo sapien
ggtttggagttaggcagagggaagt

SEQ ID NO: 5901995 - DNA, 25 bp, Homo sapien
tccctctgatgtgtcacccctccca

SEQ ID NO: 5901996 - DNA, 25 bp, Homo sapien
tgggtaaagatactgtgagacctga

SEQ ID NO: 5901997 - DNA, 25 bp, Homo sapien
gttccgcctggggataaggtgctaa

SEQ ID NO: 5901998 - DNA, 25 bp, Homo sapien
aagacagaaaaggttgtaacgtaga

SEQ ID NO: 5901999 - DNA, 25 bp, Homo sapien
caacggaatggtcagatctcacagg

SEQ ID NO: 5902000 - DNA, 25 bp, Homo sapien
catgtttggctgttggttttagttt

SEQ ID NO: 5902001 - DNA, 25 bp, Homo sapien
tcactggctgtgttggaaacggagt

SEQ ID NO: 5902002 - DNA, 25 bp, Homo sapien
ctgtgagacctgaggacccaccagt

SEQ ID NO: 5902003 - DNA, 25 bp, Homo sapien
ttgggctttcaggttcttgccggga

SEQ ID NO: 5902004 - DNA, 25 bp, Homo sapien
tttctttccatgtttggctgttggt

SEQ ID NO: 5902005 - DNA, 25 bp, Homo sapien
ggtgaattggtttgatttttttcac

SEQ ID NO: 5902006 - DNA, 25 bp, Homo sapien
caagaggaagacagaaaaggttgta

SEQ ID NO: 5902007 - DNA, 25 bp, Homo sapien
ccagaacatcactcaactgcaattg

SEQ ID NO: 5902008 - DNA, 25 bp, Homo sapien
tggctgtcataaagtttctagcatg

SEQ ID NO: 5902009 - DNA, 25 bp, Homo sapien
ataagctcaccgtccacaagcacga

SEQ ID NO: 5902010 - DNA, 25 bp, Homo sapien
gaatacattaacggtgctaaaaaaa

SEQ ID NO: 5902011 - DNA, 25 bp, Homo sapien
gctttcaggttcttgccgggagctc

SEQ ID NO: 5902012 - DNA, 25 bp, Homo sapien
tcaaggaaagacagaataatccaga

SEQ ID NO: 5902013 - DNA, 25 bp, Homo sapien
tttagttttggtgagccatgggtgg

SEQ ID NO: 5902014 - DNA, 25 bp, Homo sapien
gacctgaggacccaccagtcagaac

SEQ ID NO: 5902015 - DNA, 25 bp, Homo sapien
tccaagcatttcatgaaaaagctgc

SEQ ID NO: 5902016 - DNA, 25 bp, Homo sapien
cctccaagcatttcatgaaaaagct

SEQ ID NO: 5902017 - DNA, 25 bp, Homo sapien
actcttcgggcgtttctttccatgt

SEQ ID NO: 5902018 - DNA, 25 bp, Homo sapien
tcacccagactctgtgcttatttca

SEQ ID NO: 5902019 - DNA, 25 bp, Homo sapien
ggcacacatgacagactcccagcag

SEQ ID NO: 5902020 - DNA, 25 bp, Homo sapien
taaagatactgtgagacctgaggac

SEQ ID NO: 5902021 - DNA, 25 bp, Homo sapien
aaatgtttggatggttggctgttcc

SEQ ID NO: 5902022 - DNA, 25 bp, Homo sapien
gggatgtgggctttttcccctggtg

SEQ ID NO: 5902023 - DNA, 25 bp, Homo sapien
catccacagcctcctggtcccctgc

SEQ ID NO: 5902024 - DNA, 25 bp, Homo sapien
ggaaagacagaataatccagagctg

SEQ ID NO: 5902025 - DNA, 25 bp, Homo sapien
tccacaagcacgagatatctctagc

SEQ ID NO: 5902026 - DNA, 25 bp, Homo sapien
atgtttggatggttggctgttccgc

SEQ ID NO: 5902027 - DNA, 25 bp, Homo sapien
taagaaagaaactagaacccaagtc

SEQ ID NO: 5902028 - DNA, 25 bp, Homo sapien
gaaaaagctgcttctcattaaccat

SEQ ID NO: 5902029 - DNA, 25 bp, Homo sapien
cgagatatctctagctttcatttca

SEQ ID NO: 5902030 - DNA, 25 bp, Homo sapien
gagacctgaggacccaccagtcaga

SEQ ID NO: 5902031 - DNA, 25 bp, Homo sapien
tcactcaactgcaattgggctttca

SEQ ID NO: 5902032 - DNA, 25 bp, Homo sapien
tcttctcgactcttcgggcgtttct

SEQ ID NO: 5902033 - DNA, 25 bp, Homo sapien
tcaggaaagtgagactcaagaggaa

SEQ ID NO: 5902034 - DNA, 25 bp, Homo sapien
atttcattttgggggatgtgggctt

SEQ ID NO: 5902035 - DNA, 25 bp, Homo sapien
tgccacttgaaaccttctactaatc

SEQ ID NO: 5902036 - DNA, 25 bp, Homo sapien
gcactgggaggctgtttcaggaaag

SEQ ID NO: 5902037 - DNA, 25 bp, Homo sapien
acactcacccagactctgtgcttat

SEQ ID NO: 5902038 - DNA, 25 bp, Homo sapien
gagactcaagaggaagacagaaaag

SEQ ID NO: 5902039 - DNA, 25 bp, Homo sapien
taatcaagagaaacttccaagccaa

SEQ ID NO: 5902040 - DNA, 25 bp, Homo sapien
gaggccatggcccatccacagcctc

SEQ ID NO: 5902041 - DNA, 25 bp, Homo sapien
tctttccatgtttggctgttggttt

SEQ ID NO: 5902042 - DNA, 25 bp, Homo sapien
gactcttaacactcacccagactct

SEQ ID NO: 5902043 - DNA, 25 bp, Homo sapien
tactgtgagacctgaggacccacca

SEQ ID NO: 5902044 - DNA, 25 bp, Homo sapien
tggcaagtcttagtagcctaggtca

SEQ ID NO: 5902045 - DNA, 25 bp, Homo sapien
cctaggtcaaggaaagacagaataa

SEQ ID NO: 5902046 - DNA, 25 bp, Homo sapien
tttcaggttcttgccgggagctcta

SEQ ID NO: 5902047 - DNA, 25 bp, Homo sapien
gctgagaaattgttcccctccaagc

SEQ ID NO: 5902048 - DNA, 25 bp, Homo sapien
ctcctggtcccctgcactacccagt

SEQ ID NO: 5902049 - DNA, 25 bp, Homo sapien
ggaatggtcagatctcacaggctga

SEQ ID NO: 5902050 - DNA, 25 bp, Homo sapien
gctgtcttctcgactcttcgggcgt

SEQ ID NO: 5902051 - DNA, 25 bp, Homo sapien
tgtttaaaatgtttggatggttggc

SEQ ID NO: 5902052 - DNA, 25 bp, Homo sapien
actggctgtgttggaaacggagttg

SEQ ID NO: 5902053 - DNA, 25 bp, Homo sapien
taacatagatttaactgaatacatt

SEQ ID NO: 5902054 - DNA, 25 bp, Homo sapien
ctctagctttcatttcaattttgca

SEQ ID NO: 5902055 - DNA, 25 bp, Homo sapien
atttttttcacatctagatggctgt

SEQ ID NO: 5902056 - DNA, 25 bp, Homo sapien
gtgctaacatagatttaactgaata

SEQ ID NO: 5902057 - DNA, 25 bp, Homo sapien
agaggaagacagaaaaggttgtaac

SEQ ID NO: 5902058 - DNA, 25 bp, Homo sapien
gtcagatctcacaggctgagaaatt

SEQ ID NO: 5902059 - DNA, 25 bp, Homo sapien
taacactcacccagactctgtgctt

SEQ ID NO: 5902060 - DNA, 25 bp, Homo sapien
ctggtgaattggtttgatttttttc

SEQ ID NO: 5902061 - DNA, 25 bp, Homo sapien
taaggtgctaacatagatttaactg

SEQ ID NO: 5902062 - DNA, 25 bp, Homo sapien
ggaaacggagttgcataagctcacc

SEQ ID NO: 5902063 - DNA, 25 bp, Homo sapien
ttgcataagctcaccgtccacaagc

SEQ ID NO: 5902064 - DNA, 25 bp, Homo sapien
ggttggctgttccgcctggggataa

SEQ ID NO: 5902065 - DNA, 25 bp, Homo sapien
cagagggaagttacagacacaggta

SEQ ID NO: 5902066 - DNA, 25 bp, Homo sapien
cacatctagatggctgtcataaagt

SEQ ID NO: 5902067 - DNA, 25 bp, Homo sapien
ggcgtttctttccatgtttggctgt

SEQ ID NO: 5902068 - DNA, 25 bp, Homo sapien
ttacagacacaggtacaaaatttgg

SEQ ID NO: 5902069 - DNA, 25 bp, Homo sapien
aacatcactcaactgcaattgggct

SEQ ID NO: 5902070 - DNA, 25 bp, Homo sapien
ccagagctgtggcacacatgacaga

SEQ ID NO: 5902071 - DNA, 25 bp, Homo sapien
agaacccacatggcaagtcttagta

SEQ ID NO: 5902072 - DNA, 25 bp, Homo sapien
tggtcccctgcactacccagtgtct

SEQ ID NO: 5902073 - DNA, 25 bp, Homo sapien
ctgttggttttagttttggtgagcc

SEQ ID NO: 5902074 - DNA, 25 bp, Homo sapien
aataatccagagctgtggcacacat

SEQ ID NO: 5902075 - DNA, 25 bp, Homo sapien
gttcttgccgggagctctaggcact

SEQ ID NO: 5902076 - DNA, 25 bp, Homo sapien
ggaggctgtttcaggaaagtgagac

SEQ ID NO: 5902077 - DNA, 25 bp, Homo sapien
ttgaaaccttctactaatcaagaga

SEQ ID NO: 5902078 - DNA, 25 bp, Homo sapien
tgagactggtgaattggtttgattt

SEQ ID NO: 5902079 - DNA, 25 bp, Homo sapien
ccatggcccatccacagcctcctgg

SEQ ID NO: 5902080 - DNA, 25 bp, Homo sapien
ggaagacagaaaaggttgtaacgta

SEQ ID NO: 5902081 - DNA, 25 bp, Homo sapien
acctctccccaccccctgccacttg

SEQ ID NO: 5902082 - DNA, 25 bp, Homo sapien
cgggcgtttctttccatgtttggct

SEQ ID NO: 5902083 - DNA, 25 bp, Homo sapien
actctgtgcttatttcattttgggg

SEQ ID NO: 5902084 - DNA, 25 bp, Homo sapien
cttagtagcctaggtcaaggaaaga

SEQ ID NO: 5902085 - DNA, 25 bp, Homo sapien
gactcaagaggaagacagaaaaggt

SEQ ID NO: 5902086 - DNA, 25 bp, Homo sapien
atggttggctgttccgcctggggat

SEQ ID NO: 5902087 - DNA, 25 bp, Homo sapien
tgggggatgtgggctttttcccctg

SEQ ID NO: 5902088 - DNA, 25 bp, Homo sapien
tgagaaattgttcccctccaagcat

SEQ ID NO: 5902089 - DNA, 25 bp, Homo sapien
gtttggatggttggctgttccgcct

SEQ ID NO: 5902090 - DNA, 25 bp, Homo sapien
cctgccacttgaaaccttctactaa

SEQ ID NO: 5902091 - DNA, 25 bp, Homo sapien
tgatttttttcacatctagatggct

SEQ ID NO: 5902092 - DNA, 25 bp, Homo sapien
tggctgtgttggaaacggagttgca

SEQ ID NO: 5902093 - DNA, 25 bp, Homo sapien
ggcccatccacagcctcctggtccc

SEQ ID NO: 5902094 - DNA, 25 bp, Homo sapien
tagatggctgtcataaagtttctag

SEQ ID NO: 5902095 - DNA, 25 bp, Homo sapien
ctctaggcactgggaggctgtttca

SEQ ID NO: 5902096 - DNA, 25 bp, Homo sapien
agactggtgaattggtttgattttt

SEQ ID NO: 5902097 - DNA, 25 bp, Homo sapien
acccagtgtctcactggctgtgttg

SEQ ID NO: 5902098 - DNA, 25 bp, Homo sapien
aaattgttcccctccaagcatttca

SEQ ID NO: 5902099 - DNA, 25 bp, Homo sapien
gcacagagtctgggtgagtgttaag

SEQ ID NO: 5902100 - DNA, 25 bp, Homo sapien
gccacagctctggattattctgtct

SEQ ID NO: 5902101 - DNA, 25 bp, Homo sapien
caaccttttctgtcttcctcttgag

SEQ ID NO: 5902102 - DNA, 25 bp, Homo sapien
gccaaccatccaaacattttaaaca

SEQ ID NO: 5902103 - DNA, 25 bp, Homo sapien
gaaagctagagatatctcgtgcttg

SEQ ID NO: 5902104 - DNA, 25 bp, Homo sapien
ctagaaactttatgacagccatcta

SEQ ID NO: 5902105 - DNA, 25 bp, Homo sapien
aaataagcacagagtctgggtgagt

SEQ ID NO: 5902106 - DNA, 25 bp, Homo sapien
agtgttaagagtcaaatgcaaaatt

SEQ ID NO: 5902107 - DNA, 25 bp, Homo sapien
gggccatggcctcagagttatgtgg

SEQ ID NO: 5902108 - DNA, 25 bp, Homo sapien
acagagtctgggtgagtgttaagag

SEQ ID NO: 5902109 - DNA, 25 bp, Homo sapien
acccaaattttgtacctgtgtctgt

SEQ ID NO: 5902110 - DNA, 25 bp, Homo sapien
attctgtctttccttgacctaggct

SEQ ID NO: 5902111 - DNA, 25 bp, Homo sapien
cagagttatgtgggaaaatgctgtg

SEQ ID NO: 5902112 - DNA, 25 bp, Homo sapien
tgggtgagtgttaagagtcaaatgc

SEQ ID NO: 5902113 - DNA, 25 bp, Homo sapien
aacagccaaccatccaaacatttta

SEQ ID NO: 5902114 - DNA, 25 bp, Homo sapien
taacttccctctgcctaactccaaa

SEQ ID NO: 5902115 - DNA, 25 bp, Homo sapien
gagttatgtgggaaaatgctgtgac

SEQ ID NO: 5902116 - DNA, 25 bp, Homo sapien
ggaacatgctagaaactttatgaca

SEQ ID NO: 5902117 - DNA, 25 bp, Homo sapien
tcccggcaagaacctgaaagcccaa

SEQ ID NO: 5902118 - DNA, 25 bp, Homo sapien
tgaaacagcctcccagtgcctagag

SEQ ID NO: 5902119 - DNA, 25 bp, Homo sapien
gaaaaaaatcaaaccaattcaccag

SEQ ID NO: 5902120 - DNA, 25 bp, Homo sapien
gcttggaggggaacaatttctcagc

SEQ ID NO: 5902121 - DNA, 25 bp, Homo sapien
cagtatctttacccaaattttgtac

SEQ ID NO: 5902122 - DNA, 25 bp, Homo sapien
atgggccatggcctcagagttatgt

SEQ ID NO: 5902123 - DNA, 25 bp, Homo sapien
ttagcaccttatccccaggcggaac

SEQ ID NO: 5902124 - DNA, 25 bp, Homo sapien
tgtgtctgtaacttccctctgccta

SEQ ID NO: 5902125 - DNA, 25 bp, Homo sapien
ttggaggggaacaatttctcagcct

SEQ ID NO: 5902126 - DNA, 25 bp, Homo sapien
gttacaaccttttctgtcttcctct

SEQ ID NO: 5902127 - DNA, 25 bp, Homo sapien
gtcccgggctgctgggagtctgtca

SEQ ID NO: 5902128 - DNA, 25 bp, Homo sapien
acagccatctagatgtgaaaaaaat

SEQ ID NO: 5902129 - DNA, 25 bp, Homo sapien
tagagatatctcgtgcttgtggacg

SEQ ID NO: 5902130 - DNA, 25 bp, Homo sapien
cctagagctcccggcaagaacctga

SEQ ID NO: 5902131 - DNA, 25 bp, Homo sapien
tttctcagcctgtgagatctgacca

SEQ ID NO: 5902132 - DNA, 25 bp, Homo sapien
actggtgggtcctcaggtctcacag

SEQ ID NO: 5902133 - DNA, 25 bp, Homo sapien
tgcaaaattgaaatgaaagctagag

SEQ ID NO: 5902134 - DNA, 25 bp, Homo sapien
ccttatccccaggcggaacagccaa

SEQ ID NO: 5902135 - DNA, 25 bp, Homo sapien
attgaaatgaaagctagagatatct

SEQ ID NO: 5902136 - DNA, 25 bp, Homo sapien
gtttcaagtggcagggggtggggag

SEQ ID NO: 5902137 - DNA, 25 bp, Homo sapien
agcctcccagtgcctagagctcccg

SEQ ID NO: 5902138 - DNA, 25 bp, Homo sapien
attgcagttgagtgatgttctggcc

SEQ ID NO: 5902139 - DNA, 25 bp, Homo sapien
ggtgagtgttaagagtcaaatgcaa

SEQ ID NO: 5902140 - DNA, 25 bp, Homo sapien
ccctctgcctaactccaaaccacca

SEQ ID NO: 5902141 - DNA, 25 bp, Homo sapien
aaattgaaatgaaagctagagatat

SEQ ID NO: 5902142 - DNA, 25 bp, Homo sapien
cttttctgtcttcctcttgagtctc

SEQ ID NO: 5902143 - DNA, 25 bp, Homo sapien
tccaacacagccagtgagacactgg

SEQ ID NO: 5902144 - DNA, 25 bp, Homo sapien
caattgcagttgagtgatgttctgg

SEQ ID NO: 5902145 - DNA, 25 bp, Homo sapien
agtctgggtgagtgttaagagtcaa

SEQ ID NO: 5902146 - DNA, 25 bp, Homo sapien
cctctacgttacaaccttttctgtc

SEQ ID NO: 5902147 - DNA, 25 bp, Homo sapien
actaaaaccaacagccaaacatgga

SEQ ID NO: 5902148 - DNA, 25 bp, Homo sapien
agcttatgcaactccgtttccaaca

SEQ ID NO: 5902149 - DNA, 25 bp, Homo sapien
agtctcacttcctctacgttacaac

SEQ ID NO: 5902150 - DNA, 25 bp, Homo sapien
gttaaatctatgttagcaccttatc

SEQ ID NO: 5902151 - DNA, 25 bp, Homo sapien
aaagaaacgcccgaagagtcgagaa

SEQ ID NO: 5902152 - DNA, 25 bp, Homo sapien
tggggagaggtgagggggaacatgc

SEQ ID NO: 5902153 - DNA, 25 bp, Homo sapien
ccacccatggctcaccaaaactaaa

SEQ ID NO: 5902154 - DNA, 25 bp, Homo sapien
gttgagtgatgttctggcccaccca

SEQ ID NO: 5902155 - DNA, 25 bp, Homo sapien
agagtcgagaagacagcaaggtccc

SEQ ID NO: 5902156 - DNA, 25 bp, Homo sapien
tcgagaagacagcaaggtcccgggc

SEQ ID NO: 5902157 - DNA, 25 bp, Homo sapien
cccgggctgctgggagtctgtcatg

SEQ ID NO: 5902158 - DNA, 25 bp, Homo sapien
tgtattcagttaaatctatgttagc

SEQ ID NO: 5902159 - DNA, 25 bp, Homo sapien
aaactttatgacagccatctagatg

SEQ ID NO: 5902160 - DNA, 25 bp, Homo sapien
ttcctgaaacagcctcccagtgcct

SEQ ID NO: 5902161 - DNA, 25 bp, Homo sapien
cctcaggtctcacagtatctttacc

SEQ ID NO: 5902162 - DNA, 25 bp, Homo sapien
aggtctcacagtatctttacccaaa

SEQ ID NO: 5902163 - DNA, 25 bp, Homo sapien
tatctttacccaaattttgtacctg

SEQ ID NO: 5902164 - DNA, 25 bp, Homo sapien
agatctgaccattccgttggcttgg

SEQ ID NO: 5902165 - DNA, 25 bp, Homo sapien
tggcccacccatggctcaccaaaac

SEQ ID NO: 5902166 - DNA, 25 bp, Homo sapien
aggaggctgtggatgggccatggcc

SEQ ID NO: 5902167 - DNA, 25 bp, Homo sapien
acagccagtgagacactgggtagtg

SEQ ID NO: 5902168 - DNA, 25 bp, Homo sapien
attccgttggcttggaagtttctct

SEQ ID NO: 5902169 - DNA, 25 bp, Homo sapien
tcttgattagtagaaggtttcaagt

SEQ ID NO: 5902170 - DNA, 25 bp, Homo sapien
aaacgcccgaagagtcgagaagaca

SEQ ID NO: 5902171 - DNA, 25 bp, Homo sapien
tctatgttagcaccttatccccagg

SEQ ID NO: 5902172 - DNA, 25 bp, Homo sapien
tgacagccatctagatgtgaaaaaa

SEQ ID NO: 5902173 - DNA, 25 bp, Homo sapien
gagctcccggcaagaacctgaaagc

SEQ ID NO: 5902174 - DNA, 25 bp, Homo sapien
gtgtgccacagctctggattattct

SEQ ID NO: 5902175 - DNA, 25 bp, Homo sapien
tctgtaacttccctctgcctaactc

SEQ ID NO: 5902176 - DNA, 25 bp, Homo sapien
tccgttggcttggaagtttctcttg

SEQ ID NO: 5902177 - DNA, 25 bp, Homo sapien
ctttttcatgaaatgcttggagggg

SEQ ID NO: 5902178 - DNA, 25 bp, Homo sapien
gatatctcgtgcttgtggacggtga

SEQ ID NO: 5902179 - DNA, 25 bp, Homo sapien
ggagtctgtcatgtgtgccacagct

SEQ ID NO: 5902180 - DNA, 25 bp, Homo sapien
aatgtattcagttaaatctatgtta

SEQ ID NO: 5902181 - DNA, 25 bp, Homo sapien
gaggctgtggatgggccatggcctc

SEQ ID NO: 5902182 - DNA, 25 bp, Homo sapien
tcagcctgtgagatctgaccattcc

SEQ ID NO: 5902183 - DNA, 25 bp, Homo sapien
tatgacagccatctagatgtgaaaa

SEQ ID NO: 5902184 - DNA, 25 bp, Homo sapien
tcacttcctctacgttacaaccttt

SEQ ID NO: 5902185 - DNA, 25 bp, Homo sapien
caagggggtaatgggaggggtgaca

SEQ ID NO: 5902186 - DNA, 25 bp, Homo sapien
ggctcaccaaaactaaaaccaacag

SEQ ID NO: 5902187 - DNA, 25 bp, Homo sapien
aggggaccaggaggctgtggatggg

SEQ ID NO: 5902188 - DNA, 25 bp, Homo sapien
tgttagcaccttatccccaggcgga

SEQ ID NO: 5902189 - DNA, 25 bp, Homo sapien
ggacggtgagcttatgcaactccgt

SEQ ID NO: 5902190 - DNA, 25 bp, Homo sapien
ccatctagatgtgaaaaaaatcaaa

SEQ ID NO: 5902191 - DNA, 25 bp, Homo sapien
agacagcaaggtcccgggctgctgg

SEQ ID NO: 5902192 - DNA, 25 bp, Homo sapien
agccaaacatggaaagaaacgcccg

SEQ ID NO: 5902193 - DNA, 25 bp, Homo sapien
acaatttctcagcctgtgagatctg

SEQ ID NO: 5902194 - DNA, 25 bp, Homo sapien
ccaggaggctgtggatgggccatgg

SEQ ID NO: 5902195 - DNA, 25 bp, Homo sapien
gctactaagacttgccatgtgggtt

SEQ ID NO: 5902196 - DNA, 25 bp, Homo sapien
acgcccgaagagtcgagaagacagc

SEQ ID NO: 5902197 - DNA, 25 bp, Homo sapien
gctagagatatctcgtgcttgtgga

SEQ ID NO: 5902198 - DNA, 25 bp, Homo sapien
ataagcacagagtctgggtgagtgt

SEQ ID NO: 5902199 - DNA, 25 bp, Homo sapien
ctaggctactaagacttgccatgtg

SEQ ID NO: 5902200 - DNA, 25 bp, Homo sapien
agtggcagggggtggggagaggtga

SEQ ID NO: 5902201 - DNA, 25 bp, Homo sapien
cagctctggattattctgtctttcc

SEQ ID NO: 5902202 - DNA, 25 bp, Homo sapien
actgggtagtgcaggggaccaggag

SEQ ID NO: 5902203 - DNA, 25 bp, Homo sapien
cttatgcaactccgtttccaacaca

SEQ ID NO: 5902204 - DNA, 25 bp, Homo sapien
caactccgtttccaacacagccagt

SEQ ID NO: 5902205 - DNA, 25 bp, Homo sapien
caggggaaaaagcccacatccccca

SEQ ID NO: 5902206 - DNA, 25 bp, Homo sapien
gggtaatgggaggggtgacacatca

SEQ ID NO: 5902207 - DNA, 25 bp, Homo sapien
tggaagtttctcttgattagtagaa

SEQ ID NO: 5902208 - DNA, 25 bp, Homo sapien
ccccaaaatgaaataagcacagagt

SEQ ID NO: 5902209 - DNA, 25 bp, Homo sapien
gattattctgtctttccttgaccta

SEQ ID NO: 5902210 - DNA, 25 bp, Homo sapien
agcaccttatccccaggcggaacag

SEQ ID NO: 5902211 - DNA, 25 bp, Homo sapien
ttattctgtctttccttgacctagg

SEQ ID NO: 5902212 - DNA, 25 bp, Homo sapien
agggggaacatgctagaaactttat

SEQ ID NO: 5902213 - DNA, 25 bp, Homo sapien
tgagtgttaagagtcaaatgcaaaa

SEQ ID NO: 5902214 - DNA, 25 bp, Homo sapien
tgctagaaactttatgacagccatc

SEQ ID NO: 5902215 - DNA, 25 bp, Homo sapien
tctgtcttcctcttgagtctcactt

SEQ ID NO: 5902216 - DNA, 25 bp, Homo sapien
gtcctcaggtctcacagtatcttta

SEQ ID NO: 5902217 - DNA, 25 bp, Homo sapien
cctgaaacagcctcccagtgcctag

SEQ ID NO: 5902218 - DNA, 25 bp, Homo sapien
gcctcagagttatgtgggaaaatgc

SEQ ID NO: 5902219 - DNA, 25 bp, Homo sapien
tggcagggggtggggagaggtgagg

SEQ ID NO: 5902220 - DNA, 25 bp, Homo sapien
tgagacactgggtagtgcaggggac

SEQ ID NO: 5902221 - DNA, 25 bp, Homo sapien
ccagtgcctagagctcccggcaaga

SEQ ID NO: 5902222 - DNA, 25 bp, Homo sapien
gggtcctcaggtctcacagtatctt

SEQ ID NO: 5902223 - DNA, 25 bp, Homo sapien
ttgattagtagaaggtttcaagtgg

SEQ ID NO: 5902224 - DNA, 25 bp, Homo sapien
agtttctcttgattagtagaaggtt

SEQ ID NO: 5902225 - DNA, 25 bp, Homo sapien
gcagctttttcatgaaatgcttgga

SEQ ID NO: 5902226 - DNA, 25 bp, Homo sapien
agcctgtgagatctgaccattccgt

SEQ ID NO: 5902227 - DNA, 25 bp, Homo sapien
ggggaacatgctagaaactttatga

SEQ ID NO: 5902228 - DNA, 25 bp, Homo sapien
tacgttacaaccttttctgtcttcc

SEQ ID NO: 5902229 - DNA, 25 bp, Homo sapien
tcaggtctcacagtatctttaccca

SEQ ID NO: 5902230 - DNA, 25 bp, Homo sapien
atggaaagaaacgcccgaagagtcg

SEQ ID NO: 5902231 - DNA, 25 bp, Homo sapien
aatgaaataagcacagagtctgggt

SEQ ID NO: 5902232 - DNA, 25 bp, Homo sapien
aaccaattcaccagtctcacttcct

SEQ ID NO: 5902233 - DNA, 25 bp, Homo sapien
aatgggaggggtgacacatcagagg

SEQ ID NO: 5902234 - DNA, 25 bp, Homo sapien
aacatgctagaaactttatgacagc

SEQ ID NO: 5902235 - DNA, 25 bp, Homo sapien
tggtgggtcctcaggtctcacagta

SEQ ID NO: 5902236 - DNA, 25 bp, Homo sapien
tttatgacagccatctagatgtgaa

SEQ ID NO: 5902237 - DNA, 25 bp, Homo sapien
atgtgaaaaaaatcaaaccaattca

SEQ ID NO: 5902238 - DNA, 25 bp, Homo sapien
gcttgtggacggtgagcttatgcaa

SEQ ID NO: 5902239 - DNA, 25 bp, Homo sapien
gtggacggtgagcttatgcaactcc

SEQ ID NO: 5902240 - DNA, 25 bp, Homo sapien
cacagctctggattattctgtcttt

SEQ ID NO: 5902241 - DNA, 25 bp, Homo sapien
gaccaggaggctgtggatgggccat

SEQ ID NO: 5902242 - DNA, 25 bp, Homo sapien
gagtctcactttcctgaaacagcct

SEQ ID NO: 5902243 - DNA, 25 bp, Homo sapien
ccaaacatggaaagaaacgcccgaa

SEQ ID NO: 5902244 - DNA, 25 bp, Homo sapien
aacctgaaagcccaattgcagttga

SEQ ID NO: 5902245 - DNA, 25 bp, Homo sapien
tcccagtgcctagagctcccggcaa

SEQ ID NO: 5902246 - DNA, 25 bp, Homo sapien
ctgtgacttgggttctagtttcttt

SEQ ID NO: 5902247 - DNA, 25 bp, Homo sapien
acggtgagcttatgcaactccgttt

SEQ ID NO: 5902248 - DNA, 25 bp, Homo sapien
aagagtcaaatgcaaaattgaaatg

SEQ ID NO: 5902249 - DNA, 25 bp, Homo sapien
aagcacagagtctgggtgagtgtta

SEQ ID NO: 5902250 - DNA, 25 bp, Homo sapien
ccaaattttgtacctgtgtctgtaa

SEQ ID NO: 5902251 - DNA, 25 bp, Homo sapien
agtagaaggtttcaagtggcagggg

SEQ ID NO: 5902252 - DNA, 25 bp, Homo sapien
ccaggcggaacagccaaccatccaa

SEQ ID NO: 5902253 - DNA, 25 bp, Homo sapien
aaaatgctgtgacttgggttctagt

SEQ ID NO: 5902254 - DNA, 25 bp, Homo sapien
ctgctgggagtctgtcatgtgtgcc

SEQ ID NO: 5902255 - DNA, 25 bp, Homo sapien
tgatgttctggcccacccatggctc

SEQ ID NO: 5902256 - DNA, 25 bp, Homo sapien
actttatgacagccatctagatgtg

SEQ ID NO: 5902257 - DNA, 25 bp, Homo sapien
gagtcaaatgcaaaattgaaatgaa

SEQ ID NO: 5902258 - DNA, 25 bp, Homo sapien
gaagagtcgagaagacagcaaggtc

SEQ ID NO: 5902259 - DNA, 25 bp, Homo sapien
tcatgtgtgccacagctctggatta

SEQ ID NO: 5902260 - DNA, 25 bp, Homo sapien
tctgtctttccttgacctaggctac

SEQ ID NO: 5902261 - DNA, 25 bp, Homo sapien
tgtctttccttgacctaggctacta

SEQ ID NO: 5902262 - DNA, 25 bp, Homo sapien
caacagccaaacatggaaagaaacg

SEQ ID NO: 5902263 - DNA, 25 bp, Homo sapien
ctcaccaaaactaaaaccaacagcc

SEQ ID NO: 5902264 - DNA, 25 bp, Homo sapien
agtctgtcatgtgtgccacagctct

SEQ ID NO: 5902265 - DNA, 25 bp, Homo sapien
cagccaaccatccaaacattttaaa

SEQ ID NO: 5902266 - DNA, 25 bp, Homo sapien
cttggaagtttctcttgattagtag

SEQ ID NO: 5902267 - DNA, 25 bp, Homo sapien
tctgactggtgggtcctcaggtctc

SEQ ID NO: 5902268 - DNA, 25 bp, Homo sapien
ggtagtgcaggggaccaggaggctg

SEQ ID NO: 5902269 - DNA, 25 bp, Homo sapien
aaattttgtacctgtgtctgtaact

SEQ ID NO: 5902270 - DNA, 25 bp, Homo sapien
acactgggtagtgcaggggaccagg

SEQ ID NO: 5902271 - DNA, 25 bp, Homo sapien
caccttatccccaggcggaacagcc

SEQ ID NO: 5902272 - DNA, 25 bp, Homo sapien
tttttagcaccgttaatgtattcag

SEQ ID NO: 5902273 - DNA, 25 bp, Homo sapien
ttgagtctcactttcctgaaacagc

SEQ ID NO: 5902274 - DNA, 25 bp, Homo sapien
aaatcaaaccaattcaccagtctca

SEQ ID NO: 5902275 - DNA, 25 bp, Homo sapien
cctcttgagtctcactttcctgaaa

SEQ ID NO: 5902276 - DNA, 25 bp, Homo sapien
gttatgtgggaaaatgctgtgactt

SEQ ID NO: 5902277 - DNA, 25 bp, Homo sapien
tgtgagatctgaccattccgttggc

SEQ ID NO: 5902278 - DNA, 25 bp, Homo sapien
agaacctgaaagcccaattgcagtt

SEQ ID NO: 5902279 - DNA, 25 bp, Homo sapien
tttagcaccgttaatgtattcagtt

SEQ ID NO: 5902280 - DNA, 25 bp, Homo sapien
tagagctcccggcaagaacctgaaa

SEQ ID NO: 5902281 - DNA, 25 bp, Homo sapien
aggggaacaatttctcagcctgtga

SEQ ID NO: 5902282 - DNA, 25 bp, Homo sapien
tgtaacttccctctgcctaactcca

SEQ ID NO: 5902283 - DNA, 25 bp, Homo sapien
ggtgagggggaacatgctagaaact

SEQ ID NO: 5902284 - DNA, 25 bp, Homo sapien
aatctatgttagcaccttatcccca

SEQ ID NO: 5902285 - DNA, 25 bp, Homo sapien
ccagtgagacactgggtagtgcagg

SEQ ID NO: 5902286 - DNA, 25 bp, Homo sapien
ttccctctgcctaactccaaaccac

SEQ ID NO: 5902287 - DNA, 25 bp, Homo sapien
cacagtatctttacccaaattttgt

SEQ ID NO: 5902288 - DNA, 25 bp, Homo sapien
atgttctggcccacccatggctcac

SEQ ID NO: 5902289 - DNA, 25 bp, Homo sapien
gacttgggttctagtttctttctta

SEQ ID NO: 5902290 - DNA, 25 bp, Homo sapien
aagcagctttttcatgaaatgcttg

SEQ ID NO: 5902291 - DNA, 25 bp, Homo sapien
gggaccaggaggctgtggatgggcc

SEQ ID NO: 5902292 - DNA, 25 bp, Homo sapien
ttgtggacggtgagcttatgcaact

SEQ ID NO: 5902293 - DNA, 25 bp, Homo sapien
gaagacagcaaggtcccgggctgct

SEQ ID NO: 5902294 - DNA, 25 bp, Homo sapien
gaagtttctcttgattagtagaagg

SEQ ID NO: 5902295 - DNA, 25 bp, Homo sapien
atctagatgtgaaaaaaatcaaacc

SEQ ID NO: 5902296 - DNA, 25 bp, Homo sapien
aatttctcagcctgtgagatctgac

SEQ ID NO: 5902297 - DNA, 25 bp, Homo sapien
ctgcctaactccaaaccaccagggg

SEQ ID NO: 5902298 - DNA, 25 bp, Homo sapien
tctcagcctgtgagatctgaccatt

SEQ ID NO: 5902299 - DNA, 25 bp, Homo sapien
tgtacctgtgtctgtaacttccctc

SEQ ID NO: 5902300 - DNA, 25 bp, Homo sapien
caaaattgaaatgaaagctagagat

SEQ ID NO: 5902301 - DNA, 25 bp, Homo sapien
caccaggggaaaaagcccacatccc

SEQ ID NO: 5902302 - DNA, 25 bp, Homo sapien
agccagtgagacactgggtagtgca

SEQ ID NO: 5902303 - DNA, 25 bp, Homo sapien
gaccattccgttggcttggaagttt

SEQ ID NO: 5902304 - DNA, 25 bp, Homo sapien
gtgccacagctctggattattctgt

SEQ ID NO: 5902305 - DNA, 25 bp, Homo sapien
cctgtgagatctgaccattccgttg

SEQ ID NO: 5902306 - DNA, 25 bp, Homo sapien
gtgaaaaaaatcaaaccaattcacc

SEQ ID NO: 5902307 - DNA, 25 bp, Homo sapien
tttccttgacctaggctactaagac

SEQ ID NO: 5902308 - DNA, 25 bp, Homo sapien
tactaagacttgccatgtgggttct

SEQ ID NO: 5902309 - DNA, 25 bp, Homo sapien
tctttccttgacctaggctactaag

SEQ ID NO: 5902310 - DNA, 25 bp, Homo sapien
cttgacctaggctactaagacttgc

SEQ ID NO: 5902311 - DNA, 25 bp, Homo sapien
atgcttggaggggaacaatttctca

SEQ ID NO: 5902312 - DNA, 25 bp, Homo sapien
tttgtacctgtgtctgtaacttccc

SEQ ID NO: 5902313 - DNA, 25 bp, Homo sapien
ctcagagttatgtgggaaaatgctg

SEQ ID NO: 5902314 - DNA, 25 bp, Homo sapien
tatgtgggaaaatgctgtgacttgg

SEQ ID NO: 5902315 - DNA, 25 bp, Homo sapien
ttaatgagaagcagctttttcatga

SEQ ID NO: 5902316 - DNA, 25 bp, Homo sapien
tgagtgatgttctggcccacccatg

SEQ ID NO: 5902317 - DNA, 25 bp, Homo sapien
ttcagttaaatctatgttagcacct

SEQ ID NO: 5902318 - DNA, 25 bp, Homo sapien
ccaattcaccagtctcacttcctct

SEQ ID NO: 5902319 - DNA, 25 bp, Homo sapien
aatgctgtgacttgggttctagttt

SEQ ID NO: 5902320 - DNA, 25 bp, Homo sapien
cgggctgctgggagtctgtcatgtg

SEQ ID NO: 5902321 - DNA, 25 bp, Homo sapien
tgaaatgcttggaggggaacaattt

SEQ ID NO: 5902322 - DNA, 25 bp, Homo sapien
ttttcatgaaatgcttggaggggaa

SEQ ID NO: 5902323 - DNA, 25 bp, Homo sapien
aatgcaaaattgaaatgaaagctag

SEQ ID NO: 5902324 - DNA, 25 bp, Homo sapien
tgaaagcccaattgcagttgagtga

SEQ ID NO: 5902325 - DNA, 25 bp, Homo sapien
agccatctagatgtgaaaaaaatca

SEQ ID NO: 5902326 - DNA, 25 bp, Homo sapien
aagctagagatatctcgtgcttgtg

SEQ ID NO: 5902327 - DNA, 25 bp, Homo sapien
ctcactttcctgaaacagcctccca

SEQ ID NO: 5902328 - DNA, 25 bp, Homo sapien
cgttaatgtattcagttaaatctat

SEQ ID NO: 5902329 - DNA, 25 bp, Homo sapien
ttaatgtattcagttaaatctatgt

SEQ ID NO: 5902330 - DNA, 25 bp, Homo sapien
ctcacagtatctttacccaaatttt

SEQ ID NO: 5902331 - DNA, 25 bp, Homo sapien
tgggaaaatgctgtgacttgggttc

SEQ ID NO: 5902332 - DNA, 25 bp, Homo sapien
gcatggttaatgagaagcagctttt

SEQ ID NO: 5902333 - DNA, 25 bp, Homo sapien
gtctcactttcctgaaacagcctcc

SEQ ID NO: 5902334 - DNA, 25 bp, Homo sapien
gggagaggtgagggggaacatgcta

SEQ ID NO: 5902335 - DNA, 25 bp, Homo sapien
tatgcaactccgtttccaacacagc

SEQ ID NO: 5902336 - DNA, 25 bp, Homo sapien
aaagcccaattgcagttgagtgatg

SEQ ID NO: 5902337 - DNA, 25 bp, Homo sapien
tgtcatgtgtgccacagctctggat

SEQ ID NO: 5902338 - DNA, 25 bp, Homo sapien
tgaaatgaaagctagagatatctcg

SEQ ID NO: 5902339 - DNA, 25 bp, Homo sapien
atccccaggcggaacagccaaccat

SEQ ID NO: 5902340 - DNA, 25 bp, Homo sapien
cagttgagtgatgttctggcccacc

SEQ ID NO: 5902341 - DNA, 25 bp, Homo sapien
acagcaaggtcccgggctgctggga

SEQ ID NO: 5902342 - DNA, 25 bp, Homo sapien
caaccatccaaacattttaaacaag

SEQ ID NO: 5902343 - DNA, 25 bp, Homo sapien
attttgtacctgtgtctgtaacttc

SEQ ID NO: 5902344 - DNA, 25 bp, Homo sapien
gagaggtgagggggaacatgctaga

SEQ ID NO: 5902345 - DNA, 25 bp, Homo sapien
agcccaattgcagttgagtgatgtt

SEQ ID NO: 5902346 - DNA, 25 bp, Homo sapien
tttctgtcttcctcttgagtctcac

SEQ ID NO: 5902347 - DNA, 25 bp, Homo sapien
ttcaagtggcagggggtggggagag

SEQ ID NO: 5902348 - DNA, 25 bp, Homo sapien
cactttcctgaaacagcctcccagt

SEQ ID NO: 5902349 - DNA, 25 bp, Homo sapien
ctagatgtgaaaaaaatcaaaccaa

SEQ ID NO: 5902350 - DNA, 25 bp, Homo sapien
tagaaggtttcaagtggcagggggt

SEQ ID NO: 5902351 - DNA, 25 bp, Homo sapien
ggtggggagaggtgagggggaacat

SEQ ID NO: 5902352 - DNA, 25 bp, Homo sapien
tatgttagcaccttatccccaggcg

SEQ ID NO: 5902353 - DNA, 25 bp, Homo sapien
aaaaatcaaaccaattcaccagtct

SEQ ID NO: 5902354 - DNA, 25 bp, Homo sapien
aggctactaagacttgccatgtggg

SEQ ID NO: 5902355 - DNA, 25 bp, Homo sapien
tccttgacctaggctactaagactt

SEQ ID NO: 5902356 - DNA, 25 bp, Homo sapien
caagtggcagggggtggggagaggt

SEQ ID NO: 5902357 - DNA, 25 bp, Homo sapien
aaacatggaaagaaacgcccgaaga

SEQ ID NO: 5902358 - DNA, 25 bp, Homo sapien
acagccaaacatggaaagaaacgcc

SEQ ID NO: 5902359 - DNA, 25 bp, Homo sapien
caaggtcccgggctgctgggagtct

SEQ ID NO: 5902360 - DNA, 25 bp, Homo sapien
ggaaagaaacgcccgaagagtcgag

SEQ ID NO: 5902361 - DNA, 25 bp, Homo sapien
ggaaaatgctgtgacttgggttcta

SEQ ID NO: 5902362 - DNA, 25 bp, Homo sapien
gcccacccatggctcaccaaaacta

SEQ ID NO: 5902363 - DNA, 25 bp, Homo sapien
cccaattgcagttgagtgatgttct

SEQ ID NO: 5902364 - DNA, 25 bp, Homo sapien
gcaggggaccaggaggctgtggatg

SEQ ID NO: 5902365 - DNA, 25 bp, Homo sapien
gttctggcccacccatggctcacca

SEQ ID NO: 5902366 - DNA, 25 bp, Homo sapien
gcggaacagccaaccatccaaacat

SEQ ID NO: 5902367 - DNA, 25 bp, Homo sapien
tgtcttcctcttgagtctcactttc

SEQ ID NO: 5902368 - DNA, 25 bp, Homo sapien
tgtgggaaaatgctgtgacttgggt

SEQ ID NO: 5902369 - DNA, 25 bp, Homo sapien
gtgcaggggaccaggaggctgtgga

SEQ ID NO: 5902370 - DNA, 25 bp, Homo sapien
agaaactttatgacagccatctaga

SEQ ID NO: 5902371 - DNA, 25 bp, Homo sapien
gcagggggtggggagaggtgagggg

SEQ ID NO: 5902372 - DNA, 25 bp, Homo sapien
tgggtagtgcaggggaccaggaggc

SEQ ID NO: 5902373 - DNA, 25 bp, Homo sapien
tcttcctcttgagtctcactttcct

SEQ ID NO: 5902374 - DNA, 25 bp, Homo sapien
gggaacaatttctcagcctgtgaga

SEQ ID NO: 5902375 - DNA, 25 bp, Homo sapien
gggggtaatgggaggggtgacacat

SEQ ID NO: 5902376 - DNA, 25 bp, Homo sapien
gcctaactccaaaccaccaggggaa

SEQ ID NO: 5902377 - DNA, 25 bp, Homo sapien
taaaaccaacagccaaacatggaaa

SEQ ID NO: 5902378 - DNA, 25 bp, Homo sapien
catgctagaaactttatgacagcca

SEQ ID NO: 5902379 - DNA, 25 bp, Homo sapien
caaatgcaaaattgaaatgaaagct

SEQ ID NO: 5902380 - DNA, 25 bp, Homo sapien
agtgatgttctggcccacccatggc

SEQ ID NO: 5902381 - DNA, 25 bp, Homo sapien
atgtgggttctgactggtgggtcct

SEQ ID NO: 5902382 - DNA, 25 bp, Homo sapien
ttatccccaggcggaacagccaacc

SEQ ID NO: 5902383 - DNA, 25 bp, Homo sapien
cctcccagtgcctagagctcccggc

SEQ ID NO: 5902384 - DNA, 25 bp, Homo sapien
cgtttccaacacagccagtgagaca

SEQ ID NO: 5902385 - DNA, 25 bp, Homo sapien
tcccccaaaatgaaataagcacaga

SEQ ID NO: 5902386 - DNA, 25 bp, Homo sapien
aagacttgccatgtgggttctgact

SEQ ID NO: 5902387 - DNA, 25 bp, Homo sapien
ttagtagaaggtttcaagtggcagg

SEQ ID NO: 5902388 - DNA, 25 bp, Homo sapien
ggctgctgggagtctgtcatgtgtg

SEQ ID NO: 5902389 - DNA, 25 bp, Homo sapien
tccgtttccaacacagccagtgaga

SEQ ID NO: 5902390 - DNA, 25 bp, Homo sapien
ggttaatgagaagcagctttttcat

SEQ ID NO: 5902391 - DNA, 25 bp, Homo sapien
gtctcacagtatctttacccaaatt

SEQ ID NO: 5902392 - DNA, 25 bp, Homo sapien
ccagtctcacttcctctacgttaca

SEQ ID NO: 5902393 - DNA, 25 bp, Homo sapien
gaggtgagggggaacatgctagaaa

SEQ ID NO: 5902394 - DNA, 25 bp, Homo sapien
ttcaccagtctcacttcctctacgt

SEQ ID NO: 5902395 - DNA, 25 bp, Homo sapien
gcaccgttaatgtattcagttaaat

SEQ ID NO: 5902396 - DNA, 25 bp, Homo sapien
ggctgtggatgggccatggcctcag

SEQ ID NO: 5902397 - DNA, 25 bp, Homo sapien
gtgggtcctcaggtctcacagtatc

SEQ ID NO: 5902398 - DNA, 25 bp, Homo sapien
ggaggggaacaatttctcagcctgt

SEQ ID NO: 5902399 - DNA, 25 bp, Homo sapien
ttcatgaaatgcttggaggggaaca

SEQ ID NO: 5902400 - DNA, 25 bp, Homo sapien
atgtgtgccacagctctggattatt

SEQ ID NO: 5902401 - DNA, 25 bp, Homo sapien
tgagggggaacatgctagaaacttt

SEQ ID NO: 5902402 - DNA, 25 bp, Homo sapien
aattcaccagtctcacttcctctac

SEQ ID NO: 5902403 - DNA, 25 bp, Homo sapien
gtaatgggaggggtgacacatcaga

SEQ ID NO: 5902404 - DNA, 25 bp, Homo sapien
aaatgaaagctagagatatctcgtg

SEQ ID NO: 5902405 - DNA, 25 bp, Homo sapien
cctgtgtctgtaacttccctctgcc

SEQ ID NO: 5902406 - DNA, 25 bp, Homo sapien
gacttgccatgtgggttctgactgg

SEQ ID NO: 5902407 - DNA, 25 bp, Homo sapien
tctttacccaaattttgtacctgtg

SEQ ID NO: 5902408 - DNA, 25 bp, Homo sapien
ggcaagaacctgaaagcccaattgc

SEQ ID NO: 5902409 - DNA, 25 bp, Homo sapien
acccatggctcaccaaaactaaaac

SEQ ID NO: 5902410 - DNA, 25 bp, Homo sapien
atggttaatgagaagcagctttttc

SEQ ID NO: 5902411 - DNA, 25 bp, Homo sapien
tggattattctgtctttccttgacc

SEQ ID NO: 5902412 - DNA, 25 bp, Homo sapien
catggcctcagagttatgtgggaaa

SEQ ID NO: 5902413 - DNA, 25 bp, Homo sapien
acatggaaagaaacgcccgaagagt

SEQ ID NO: 5902414 - DNA, 25 bp, Homo sapien
ccccaggcggaacagccaaccatcc

SEQ ID NO: 5902415 - DNA, 25 bp, Homo sapien
gctcccggcaagaacctgaaagccc

SEQ ID NO: 5902416 - DNA, 25 bp, Homo sapien
gcccgaagagtcgagaagacagcaa

SEQ ID NO: 5902417 - DNA, 25 bp, Homo sapien
ttacccaaattttgtacctgtgtct

SEQ ID NO: 5902418 - DNA, 25 bp, Homo sapien
tctacgttacaaccttttctgtctt

SEQ ID NO: 5902419 - DNA, 25 bp, Homo sapien
cagttaaatctatgttagcacctta

SEQ ID NO: 5902420 - DNA, 25 bp, Homo sapien
caacacagccagtgagacactgggt

SEQ ID NO: 5902421 - DNA, 25 bp, Homo sapien
ggcttggaagtttctcttgattagt

SEQ ID NO: 5902422 - DNA, 25 bp, Homo sapien
catgaaatgcttggaggggaacaat

SEQ ID NO: 5902423 - DNA, 25 bp, Homo sapien
acctaggctactaagacttgccatg

SEQ ID NO: 5902424 - DNA, 25 bp, Homo sapien
cgttggcttggaagtttctcttgat

SEQ ID NO: 5902425 - DNA, 25 bp, Homo sapien
ggatgggccatggcctcagagttat

SEQ ID NO: 5902426 - DNA, 25 bp, Homo sapien
tgacctaggctactaagacttgcca

SEQ ID NO: 5902427 - DNA, 25 bp, Homo sapien
aagcccacatcccccaaaatgaaat

SEQ ID NO: 5902428 - DNA, 25 bp, Homo sapien
aaacagcctcccagtgcctagagct

SEQ ID NO: 5902429 - DNA, 25 bp, Homo sapien
gggttctgactggtgggtcctcagg

SEQ ID NO: 5902430 - DNA, 25 bp, Homo sapien
taaatctatgttagcaccttatccc

SEQ ID NO: 5902431 - DNA, 25 bp, Homo sapien
tgcctagagctcccggcaagaacct

SEQ ID NO: 5902432 - DNA, 25 bp, Homo sapien
tgagatctgaccattccgttggctt

SEQ ID NO: 5902433 - DNA, 25 bp, Homo sapien
agtgagacactgggtagtgcagggg

SEQ ID NO: 5902434 - DNA, 25 bp, Homo sapien
tagcaccgttaatgtattcagttaa

SEQ ID NO: 5902435 - DNA, 25 bp, Homo sapien
tgccatgtgggttctgactggtggg

SEQ ID NO: 5902436 - DNA, 25 bp, Homo sapien
tttctcttgattagtagaaggtttc

SEQ ID NO: 5902437 - DNA, 25 bp, Homo sapien
tttccaacacagccagtgagacact

SEQ ID NO: 5902438 - DNA, 25 bp, Homo sapien
tacctgtgtctgtaacttccctctg

SEQ ID NO: 5902439 - DNA, 25 bp, Homo sapien
ttaagagtcaaatgcaaaattgaaa

SEQ ID NO: 5902440 - DNA, 25 bp, Homo sapien
caaaactaaaaccaacagccaaaca

SEQ ID NO: 5902441 - DNA, 25 bp, Homo sapien
tctcttgattagtagaaggtttcaa

SEQ ID NO: 5902442 - DNA, 25 bp, Homo sapien
tctcgtgcttgtggacggtgagctt

SEQ ID NO: 5902443 - DNA, 25 bp, Homo sapien
ccaaaatgaaataagcacagagtct

SEQ ID NO: 5902444 - DNA, 25 bp, Homo sapien
tctggattattctgtctttccttga

SEQ ID NO: 5902445 - DNA, 25 bp, Homo sapien
accaccaggggaaaaagcccacatc

SEQ ID NO: 5902446 - DNA, 25 bp, Homo sapien
acacagccagtgagacactgggtag

SEQ ID NO: 5902447 - DNA, 25 bp, Homo sapien
tgttaagagtcaaatgcaaaattga

SEQ ID NO: 5902448 - DNA, 25 bp, Homo sapien
agatgtgaaaaaaatcaaaccaatt

SEQ ID NO: 5902449 - DNA, 25 bp, Homo sapien
ttggcttggaagtttctcttgatta

SEQ ID NO: 5902450 - DNA, 25 bp, Homo sapien
caccagtctcacttcctctacgtta

SEQ ID NO: 5902451 - DNA, 25 bp, Homo sapien
tttttttagcaccgttaatgtattc

SEQ ID NO: 5902452 - DNA, 25 bp, Homo sapien
tgtctgtaacttccctctgcctaac

SEQ ID NO: 5902453 - DNA, 25 bp, Homo sapien
aaaccaacagccaaacatggaaaga

SEQ ID NO: 5902454 - DNA, 25 bp, Homo sapien
agaagcagctttttcatgaaatgct

SEQ ID NO: 5902455 - DNA, 25 bp, Homo sapien
tatctcgtgcttgtggacggtgagc

SEQ ID NO: 5902456 - DNA, 25 bp, Homo sapien
acttccctctgcctaactccaaacc

SEQ ID NO: 5902457 - DNA, 25 bp, Homo sapien
tcgtgcttgtggacggtgagcttat

SEQ ID NO: 5902458 - DNA, 25 bp, Homo sapien
gaaggtttcaagtggcagggggtgg

SEQ ID NO: 5902459 - DNA, 25 bp, Homo sapien
ctgtggatgggccatggcctcagag

SEQ ID NO: 5902460 - DNA, 25 bp, Homo sapien
gtcaaatgcaaaattgaaatgaaag

SEQ ID NO: 5902461 - DNA, 25 bp, Homo sapien
aaatgcttggaggggaacaatttct

SEQ ID NO: 5902462 - DNA, 25 bp, Homo sapien
caagaacctgaaagcccaattgcag

SEQ ID NO: 5902463 - DNA, 25 bp, Homo sapien
tgggaggggtgacacatcagaggga

SEQ ID NO: 5902464 - DNA, 25 bp, Homo sapien
catcccccaaaatgaaataagcaca

SEQ ID NO: 5902465 - DNA, 25 bp, Homo sapien
atgaaagctagagatatctcgtgct

SEQ ID NO: 5902466 - DNA, 25 bp, Homo sapien
gctgggagtctgtcatgtgtgccac

SEQ ID NO: 5902467 - DNA, 25 bp, Homo sapien
gctctggattattctgtctttcctt

SEQ ID NO: 5902468 - DNA, 25 bp, Homo sapien
agtgcctagagctcccggcaagaac

SEQ ID NO: 5902469 - DNA, 25 bp, Homo sapien
gaacaatttctcagcctgtgagatc

SEQ ID NO: 5902470 - DNA, 25 bp, Homo sapien
aaactaaaaccaacagccaaacatg

SEQ ID NO: 5902471 - DNA, 25 bp, Homo sapien
gagatatctcgtgcttgtggacggt

SEQ ID NO: 5902472 - DNA, 25 bp, Homo sapien
gattagtagaaggtttcaagtggca

SEQ ID NO: 5902473 - DNA, 25 bp, Homo sapien
ccatgtgggttctgactggtgggtc

SEQ ID NO: 5902474 - DNA, 25 bp, Homo sapien
tgggagtctgtcatgtgtgccacag

SEQ ID NO: 5902475 - DNA, 25 bp, Homo sapien
tgaaataagcacagagtctgggtga

SEQ ID NO: 5902476 - DNA, 25 bp, Homo sapien
ccgaagagtcgagaagacagcaagg

SEQ ID NO: 5902477 - DNA, 25 bp, Homo sapien
tctgtcatgtgtgccacagctctgg

SEQ ID NO: 5902478 - DNA, 25 bp, Homo sapien
accgttaatgtattcagttaaatct

SEQ ID NO: 5902479 - DNA, 25 bp, Homo sapien
tgagaagcagctttttcatgaaatg

SEQ ID NO: 5902480 - DNA, 25 bp, Homo sapien
ctttcctgaaacagcctcccagtgc

SEQ ID NO: 5902481 - DNA, 25 bp, Homo sapien
tgctgtgacttgggttctagtttct

SEQ ID NO: 5902482 - DNA, 25 bp, Homo sapien
cctgaaagcccaattgcagttgagt

SEQ ID NO: 5902483 - DNA, 25 bp, Homo sapien
gtggatgggccatggcctcagagtt

SEQ ID NO: 5902484 - DNA, 25 bp, Homo sapien
tgagcttatgcaactccgtttccaa

SEQ ID NO: 5902485 - DNA, 25 bp, Homo sapien
gtgggttctgactggtgggtcctca

SEQ ID NO: 5902486 - DNA, 25 bp, Homo sapien
agaaacgcccgaagagtcgagaaga

SEQ ID NO: 5902487 - DNA, 25 bp, Homo sapien
accaacagccaaacatggaaagaaa

SEQ ID NO: 5902488 - DNA, 25 bp, Homo sapien
acagcctcccagtgcctagagctcc

SEQ ID NO: 5902489 - DNA, 25 bp, Homo sapien
aaaatgaaataagcacagagtctgg

SEQ ID NO: 5902490 - DNA, 25 bp, Homo sapien
atggctcaccaaaactaaaaccaac

SEQ ID NO: 5902491 - DNA, 25 bp, Homo sapien
ccggcaagaacctgaaagcccaatt

SEQ ID NO: 5902492 - DNA, 25 bp, Homo sapien
caaaccaattcaccagtctcacttc

SEQ ID NO: 5902493 - DNA, 25 bp, Homo sapien
gtgcttgtggacggtgagcttatgc

SEQ ID NO: 5902494 - DNA, 25 bp, Homo sapien
aggcggaacagccaaccatccaaac

SEQ ID NO: 5902495 - DNA, 25 bp, Homo sapien
tgcaactccgtttccaacacagcca

SEQ ID NO: 5902496 - DNA, 25 bp, Homo sapien
gagaagacagcaaggtcccgggctg

SEQ ID NO: 5902497 - DNA, 25 bp, Homo sapien
ggaacagccaaccatccaaacattt

SEQ ID NO: 5902498 - DNA, 25 bp, Homo sapien
accttttctgtcttcctcttgagtc

SEQ ID NO: 5902499 - DNA, 25 bp, Homo sapien
tgactggtgggtcctcaggtctcac

SEQ ID NO: 5902500 - DNA, 25 bp, Homo sapien
agacactgggtagtgcaggggacca

SEQ ID NO: 5902501 - DNA, 25 bp, Homo sapien
tcttgagtctcactttcctgaaaca

SEQ ID NO: 5902502 - DNA, 25 bp, Homo sapien
agcaaggtcccgggctgctgggagt

SEQ ID NO: 5902503 - DNA, 25 bp, Homo sapien
ctctgcctaactccaaaccaccagg

SEQ ID NO: 5902504 - DNA, 25 bp, Homo sapien
cttgccatgtgggttctgactggtg

SEQ ID NO: 5902505 - DNA, 25 bp, Homo sapien
ccatggctcaccaaaactaaaacca

SEQ ID NO: 5902506 - DNA, 25 bp, Homo sapien
tctgggtgagtgttaagagtcaaat

SEQ ID NO: 5902507 - DNA, 25 bp, Homo sapien
ctaagacttgccatgtgggttctga

SEQ ID NO: 5902508 - DNA, 25 bp, Homo sapien
caccaaaactaaaaccaacagccaa

SEQ ID NO: 5902509 - DNA, 25 bp, Homo sapien
ccattccgttggcttggaagtttct

SEQ ID NO: 5902510 - DNA, 25 bp, Homo sapien
atctgaccattccgttggcttggaa

SEQ ID NO: 5902511 - DNA, 25 bp, Homo sapien
gccatggcctcagagttatgtggga

SEQ ID NO: 5902512 - DNA, 25 bp, Homo sapien
gtgacttgggttctagtttctttct

SEQ ID NO: 5902513 - DNA, 25 bp, Homo sapien
ttcctctacgttacaaccttttctg

SEQ ID NO: 5902514 - DNA, 25 bp, Homo sapien
tctcacttcctctacgttacaacct

SEQ ID NO: 5902515 - DNA, 25 bp, Homo sapien
tgcagttgagtgatgttctggccca

SEQ ID NO: 5902516 - DNA, 25 bp, Homo sapien
tggcctcagagttatgtgggaaaat

SEQ ID NO: 5902517 - DNA, 25 bp, Homo sapien
ttcctcttgagtctcactttcctga

SEQ ID NO: 5902518 - DNA, 25 bp, Homo sapien
aatgagaagcagctttttcatgaaa

SEQ ID NO: 5902519 - DNA, 25 bp, Homo sapien
tagtgcaggggaccaggaggctgtg

SEQ ID NO: 5902520 - DNA, 25 bp, Homo sapien
agctttttcatgaaatgcttggagg

SEQ ID NO: 5902521 - DNA, 25 bp, Homo sapien
ctgaccattccgttggcttggaagt

SEQ ID NO: 5902522 - DNA, 25 bp, Homo sapien
tctggcccacccatggctcaccaaa

SEQ ID NO: 5902523 - DNA, 25 bp, Homo sapien
atcaaaccaattcaccagtctcact

SEQ ID NO: 5902524 - DNA, 25 bp, Homo sapien
agtcgagaagacagcaaggtcccgg

SEQ ID NO: 5902525 - DNA, 25 bp, Homo sapien
gttctgactggtgggtcctcaggtc

SEQ ID NO: 5902526 - DNA, 25 bp, Homo sapien
tattcagttaaatctatgttagcac

SEQ ID NO: 5902527 - DNA, 25 bp, Homo sapien
ggtgagcttatgcaactccgtttcc

SEQ ID NO: 5902528 - DNA, 25 bp, Homo sapien
tacaaccttttctgtcttcctcttg

SEQ ID NO: 5902529 - DNA, 25 bp, Homo sapien
agagtctgggtgagtgttaagagtc

SEQ ID NO: 5902530 - DNA, 25 bp, Homo sapien
aggtcccgggctgctgggagtctgt

SEQ ID NO: 5902531 - DNA, 25 bp, Homo sapien
actccgtttccaacacagccagtga

SEQ ID NO: 5902532 - DNA, 25 bp, Homo sapien
ttgaaacgggagtaagactcggaca

SEQ ID NO: 5902533 - DNA, 25 bp, Homo sapien
gcttcaccagccccacgcagagacg

SEQ ID NO: 5902534 - DNA, 25 bp, Homo sapien
gggaaaaataaacatctattctcta

SEQ ID NO: 5902535 - DNA, 25 bp, Homo sapien
actgcgaattccttaaagctctatc

SEQ ID NO: 5902536 - DNA, 25 bp, Homo sapien
ggcctggcgctgcacctcatggccc

SEQ ID NO: 5902537 - DNA, 25 bp, Homo sapien
tacgaccgtgtatatatttaatttc

SEQ ID NO: 5902538 - DNA, 25 bp, Homo sapien
gcagagacgatcgctatggagggag

SEQ ID NO: 5902539 - DNA, 25 bp, Homo sapien
gtttttgcttctctgggtacctcct

SEQ ID NO: 5902540 - DNA, 25 bp, Homo sapien
tgtatatatttaatttcagcccagt

SEQ ID NO: 5902541 - DNA, 25 bp, Homo sapien
ggcatcaatcagggcgacagagaaa

SEQ ID NO: 5902542 - DNA, 25 bp, Homo sapien
aacaagcgtgccaagatcaagaaag

SEQ ID NO: 5902543 - DNA, 25 bp, Homo sapien
gaaatacaaccccacagactgcgag

SEQ ID NO: 5902544 - DNA, 25 bp, Homo sapien
ctcggggctgccgcttcaccagccc

SEQ ID NO: 5902545 - DNA, 25 bp, Homo sapien
ggcccagggactgtacaaccactct

SEQ ID NO: 5902546 - DNA, 25 bp, Homo sapien
gggggaaaaataaacatctattctc

SEQ ID NO: 5902547 - DNA, 25 bp, Homo sapien
ctggtttctctgggacttttctttg

SEQ ID NO: 5902548 - DNA, 25 bp, Homo sapien
accccacagactgcgagactgaacc

SEQ ID NO: 5902549 - DNA, 25 bp, Homo sapien
acctcctgcacccccaacgctggcc

SEQ ID NO: 5902550 - DNA, 25 bp, Homo sapien
tatatatttaatttcagcccagttt

SEQ ID NO: 5902551 - DNA, 25 bp, Homo sapien
ttctctacccacccaggattcttct

SEQ ID NO: 5902552 - DNA, 25 bp, Homo sapien
gcgctgcacctcatggcccagggac

SEQ ID NO: 5902553 - DNA, 25 bp, Homo sapien
cgagcaagagaaagcaatcctccga

SEQ ID NO: 5902554 - DNA, 25 bp, Homo sapien
gctatggagggaggcatcaatcagg

SEQ ID NO: 5902555 - DNA, 25 bp, Homo sapien
caaccccacagactgcgagactgaa

SEQ ID NO: 5902556 - DNA, 25 bp, Homo sapien
aggattcttctattggtcttgtcta

SEQ ID NO: 5902557 - DNA, 25 bp, Homo sapien
cctgcacccccaacgctggccctgg

SEQ ID NO: 5902558 - DNA, 25 bp, Homo sapien
tgcttacgaccgtgtatatatttaa

SEQ ID NO: 5902559 - DNA, 25 bp, Homo sapien
tcagggcgacagagaaagcgagcaa

SEQ ID NO: 5902560 - DNA, 25 bp, Homo sapien
agagacgatcgctatggagggaggc

SEQ ID NO: 5902561 - DNA, 25 bp, Homo sapien
tctaccaccacggttcaggacaaag

SEQ ID NO: 5902562 - DNA, 25 bp, Homo sapien
ggtttctctgggacttttctttgtg

SEQ ID NO: 5902563 - DNA, 25 bp, Homo sapien
acagagaaagcgagcaagagaaagc

SEQ ID NO: 5902564 - DNA, 25 bp, Homo sapien
agggcgacagagaaagcgagcaaga

SEQ ID NO: 5902565 - DNA, 25 bp, Homo sapien
gatgaaactgcgaattccttaaagc

SEQ ID NO: 5902566 - DNA, 25 bp, Homo sapien
gcggtcccaacggcgcccgtgccac

SEQ ID NO: 5902567 - DNA, 25 bp, Homo sapien
tcccaacggcgcccgtgccacctcc

SEQ ID NO: 5902568 - DNA, 25 bp, Homo sapien
acgatcgctatggagggaggcatca

SEQ ID NO: 5902569 - DNA, 25 bp, Homo sapien
ttccttgtgtgtctgcccctcgcct

SEQ ID NO: 5902570 - DNA, 25 bp, Homo sapien
ctggttccaaaacaagcgtgccaag

SEQ ID NO: 5902571 - DNA, 25 bp, Homo sapien
cctcatggcccagggactgtacaac

SEQ ID NO: 5902572 - DNA, 25 bp, Homo sapien
cacggttcaggacaaagacgagagc

SEQ ID NO: 5902573 - DNA, 25 bp, Homo sapien
agcccagtttcgttttcgttgctct

SEQ ID NO: 5902574 - DNA, 25 bp, Homo sapien
gtgtctgcccctcgcctcttctcta

SEQ ID NO: 5902575 - DNA, 25 bp, Homo sapien
tcctttgaatgtttttgcttctctg

SEQ ID NO: 5902576 - DNA, 25 bp, Homo sapien
ccccacgcagagacgatcgctatgg

SEQ ID NO: 5902577 - DNA, 25 bp, Homo sapien
ctcttttcctttgaatgtttttgct

SEQ ID NO: 5902578 - DNA, 25 bp, Homo sapien
gagactccttgagaaatacaacccc

SEQ ID NO: 5902579 - DNA, 25 bp, Homo sapien
atctagccaaactgcttacgaccgt

SEQ ID NO: 5902580 - DNA, 25 bp, Homo sapien
ttctctaactcactgtataagatga

SEQ ID NO: 5902581 - DNA, 25 bp, Homo sapien
agcctgaatgagtcccagatcaaga

SEQ ID NO: 5902582 - DNA, 25 bp, Homo sapien
aagaacggcctggcgctgcacctca

SEQ ID NO: 5902583 - DNA, 25 bp, Homo sapien
cgaattccttaaagctctatctagc

SEQ ID NO: 5902584 - DNA, 25 bp, Homo sapien
ctatctagccaaactgcttacgacc

SEQ ID NO: 5902585 - DNA, 25 bp, Homo sapien
tttcagcccagtttcgttttcgttg

SEQ ID NO: 5902586 - DNA, 25 bp, Homo sapien
aagatcaagaaagccacaggcatca

SEQ ID NO: 5902587 - DNA, 25 bp, Homo sapien
aaactgcttacgaccgtgtatatat

SEQ ID NO: 5902588 - DNA, 25 bp, Homo sapien
ttgcttctctgggtacctcctgcac

SEQ ID NO: 5902589 - DNA, 25 bp, Homo sapien
aaagcaatcctccgagtggacattc

SEQ ID NO: 5902590 - DNA, 25 bp, Homo sapien
ccctcgcctcttctctacccaccca

SEQ ID NO: 5902591 - DNA, 25 bp, Homo sapien
ttaatttcagcccagtttcgttttc

SEQ ID NO: 5902592 - DNA, 25 bp, Homo sapien
gccctggtttctctgggacttttct

SEQ ID NO: 5902593 - DNA, 25 bp, Homo sapien
tttctctgggacttttctttgtgtg

SEQ ID NO: 5902594 - DNA, 25 bp, Homo sapien
agaaagcgagcaagagaaagcaatc

SEQ ID NO: 5902595 - DNA, 25 bp, Homo sapien
actcggacaggtgctatgggggaaa

SEQ ID NO: 5902596 - DNA, 25 bp, Homo sapien
aagccacaggcatcaagaacggcct

SEQ ID NO: 5902597 - DNA, 25 bp, Homo sapien
tctggagactccttgagaaatacaa

SEQ ID NO: 5902598 - DNA, 25 bp, Homo sapien
aaaataaacatctattctctaactc

SEQ ID NO: 5902599 - DNA, 25 bp, Homo sapien
caagatctggttccaaaacaagcgt

SEQ ID NO: 5902600 - DNA, 25 bp, Homo sapien
caagagaaagcaatcctccgagtgg

SEQ ID NO: 5902601 - DNA, 25 bp, Homo sapien
caacgctggccctggtttctctggg

SEQ ID NO: 5902602 - DNA, 25 bp, Homo sapien
gtgtgtctgcccctcgcctcttctc

SEQ ID NO: 5902603 - DNA, 25 bp, Homo sapien
gcgagactgaaccgccgctacaagc

SEQ ID NO: 5902604 - DNA, 25 bp, Homo sapien
ccttgtgtgtctgcccctcgcctct

SEQ ID NO: 5902605 - DNA, 25 bp, Homo sapien
tcatggcccagggactgtacaacca

SEQ ID NO: 5902606 - DNA, 25 bp, Homo sapien
gcttctctgggtacctcctgcaccc

SEQ ID NO: 5902607 - DNA, 25 bp, Homo sapien
gcccgtgccacctccagggctcctc

SEQ ID NO: 5902608 - DNA, 25 bp, Homo sapien
ccaggattcttctattggtcttgtc

SEQ ID NO: 5902609 - DNA, 25 bp, Homo sapien
accacggttcaggacaaagacgaga

SEQ ID NO: 5902610 - DNA, 25 bp, Homo sapien
atgtttttgcttctctgggtacctc

SEQ ID NO: 5902611 - DNA, 25 bp, Homo sapien
ccgcttcaccagccccacgcagaga

SEQ ID NO: 5902612 - DNA, 25 bp, Homo sapien
gagtgtgtttccttgtgtgtctgcc

SEQ ID NO: 5902613 - DNA, 25 bp, Homo sapien
gactgaaccgccgctacaagccaaa

SEQ ID NO: 5902614 - DNA, 25 bp, Homo sapien
cactgtataagatgaaactgcgaat

SEQ ID NO: 5902615 - DNA, 25 bp, Homo sapien
aaactgcgaattccttaaagctcta

SEQ ID NO: 5902616 - DNA, 25 bp, Homo sapien
ctgtacaaccactctaccaccacgg

SEQ ID NO: 5902617 - DNA, 25 bp, Homo sapien
ttgtctatccctcccgtaaatcccc

SEQ ID NO: 5902618 - DNA, 25 bp, Homo sapien
tacaaccccacagactgcgagactg

SEQ ID NO: 5902619 - DNA, 25 bp, Homo sapien
tggccagctccgggggcccgcggtc

SEQ ID NO: 5902620 - DNA, 25 bp, Homo sapien
taccaccacggttcaggacaaagac

SEQ ID NO: 5902621 - DNA, 25 bp, Homo sapien
cgacagagaaagcgagcaagagaaa

SEQ ID NO: 5902622 - DNA, 25 bp, Homo sapien
gaatgtttttgcttctctgggtacc

SEQ ID NO: 5902623 - DNA, 25 bp, Homo sapien
cgagtggacattcacataggaacaa

SEQ ID NO: 5902624 - DNA, 25 bp, Homo sapien
caccagccccacgcagagacgatcg

SEQ ID NO: 5902625 - DNA, 25 bp, Homo sapien
ggcatcaagaacggcctggcgctgc

SEQ ID NO: 5902626 - DNA, 25 bp, Homo sapien
ctgcccctcgcctcttctctaccca

SEQ ID NO: 5902627 - DNA, 25 bp, Homo sapien
gttttcgttgctcttttcctttgaa

SEQ ID NO: 5902628 - DNA, 25 bp, Homo sapien
ctgaaccgccgctacaagccaaaga

SEQ ID NO: 5902629 - DNA, 25 bp, Homo sapien
cagactgcgagactgaaccgccgct

SEQ ID NO: 5902630 - DNA, 25 bp, Homo sapien
ttctctgggtacctcctgcaccccc

SEQ ID NO: 5902631 - DNA, 25 bp, Homo sapien
tgcacccccaacgctggccctggtt

SEQ ID NO: 5902632 - DNA, 25 bp, Homo sapien
aatacaaccccacagactgcgagac

SEQ ID NO: 5902633 - DNA, 25 bp, Homo sapien
cttccttttctggagactccttgag

SEQ ID NO: 5902634 - DNA, 25 bp, Homo sapien
gcccgcggtcccaacggcgcccgtg

SEQ ID NO: 5902635 - DNA, 25 bp, Homo sapien
ttgagaaatacaaccccacagactg

SEQ ID NO: 5902636 - DNA, 25 bp, Homo sapien
tcggacaggtgctatgggggaaaaa

SEQ ID NO: 5902637 - DNA, 25 bp, Homo sapien
ctctaactcactgtataagatgaaa

SEQ ID NO: 5902638 - DNA, 25 bp, Homo sapien
gtgtttccttgtgtgtctgcccctc

SEQ ID NO: 5902639 - DNA, 25 bp, Homo sapien
ttccaaaacaagcgtgccaagatca

SEQ ID NO: 5902640 - DNA, 25 bp, Homo sapien
gcgcccgtgccacctccagggctcc

SEQ ID NO: 5902641 - DNA, 25 bp, Homo sapien
acccaggattcttctattggtcttg

SEQ ID NO: 5902642 - DNA, 25 bp, Homo sapien
gtctgcccctcgcctcttctctacc

SEQ ID NO: 5902643 - DNA, 25 bp, Homo sapien
agagaaagcaatcctccgagtggac

SEQ ID NO: 5902644 - DNA, 25 bp, Homo sapien
gattcttctattggtcttgtctatc

SEQ ID NO: 5902645 - DNA, 25 bp, Homo sapien
tggccctggtttctctgggactttt

SEQ ID NO: 5902646 - DNA, 25 bp, Homo sapien
gtgagtgtgtttccttgtgtgtctg

SEQ ID NO: 5902647 - DNA, 25 bp, Homo sapien
aactcactgtataagatgaaactgc

SEQ ID NO: 5902648 - DNA, 25 bp, Homo sapien
tggagactccttgagaaatacaacc

SEQ ID NO: 5902649 - DNA, 25 bp, Homo sapien
tctattggtcttgtctatccctccc

SEQ ID NO: 5902650 - DNA, 25 bp, Homo sapien
ttgaatgtttttgcttctctgggta

SEQ ID NO: 5902651 - DNA, 25 bp, Homo sapien
ggacttttctttgtgtgagtgtgag

SEQ ID NO: 5902652 - DNA, 25 bp, Homo sapien
ttctttgtgtgagtgtgagtgtgtt

SEQ ID NO: 5902653 - DNA, 25 bp, Homo sapien
aataaacatctattctctaactcac

SEQ ID NO: 5902654 - DNA, 25 bp, Homo sapien
aattccttaaagctctatctagcca

SEQ ID NO: 5902655 - DNA, 25 bp, Homo sapien
ttggtcttgtctatccctcccgtaa

SEQ ID NO: 5902656 - DNA, 25 bp, Homo sapien
ccgcggtcccaacggcgcccgtgcc

SEQ ID NO: 5902657 - DNA, 25 bp, Homo sapien
tttcctttgaatgtttttgcttctc

SEQ ID NO: 5902658 - DNA, 25 bp, Homo sapien
ttttgaaacgggagtaagactcgga

SEQ ID NO: 5902659 - DNA, 25 bp, Homo sapien
gtgccacctccagggctcctcgggg

SEQ ID NO: 5902660 - DNA, 25 bp, Homo sapien
cttacgaccgtgtatatatttaatt

SEQ ID NO: 5902661 - DNA, 25 bp, Homo sapien
atcaagatctggttccaaaacaagc

SEQ ID NO: 5902662 - DNA, 25 bp, Homo sapien
agcaagagaaagcaatcctccgagt

SEQ ID NO: 5902663 - DNA, 25 bp, Homo sapien
cccacagactgcgagactgaaccgc

SEQ ID NO: 5902664 - DNA, 25 bp, Homo sapien
ctgggtacctcctgcacccccaacg

SEQ ID NO: 5902665 - DNA, 25 bp, Homo sapien
atggcccagggactgtacaaccact

SEQ ID NO: 5902666 - DNA, 25 bp, Homo sapien
tgtggccagctccgggggcccgcgg

SEQ ID NO: 5902667 - DNA, 25 bp, Homo sapien
tcgttgctcttttcctttgaatgtt

SEQ ID NO: 5902668 - DNA, 25 bp, Homo sapien
cggcgcccgtgccacctccagggct

SEQ ID NO: 5902669 - DNA, 25 bp, Homo sapien
aacggcgcccgtgccacctccaggg

SEQ ID NO: 5902670 - DNA, 25 bp, Homo sapien
gtttccttgtgtgtctgcccctcgc

SEQ ID NO: 5902671 - DNA, 25 bp, Homo sapien
ccttgagaaatacaaccccacagac

SEQ ID NO: 5902672 - DNA, 25 bp, Homo sapien
ccttaaagctctatctagccaaact

SEQ ID NO: 5902673 - DNA, 25 bp, Homo sapien
cagtttcgttttcgttgctcttttc

SEQ ID NO: 5902674 - DNA, 25 bp, Homo sapien
gtgagtgtgagtgtgtttccttgtg

SEQ ID NO: 5902675 - DNA, 25 bp, Homo sapien
tccccttccttttctggagactcct

SEQ ID NO: 5902676 - DNA, 25 bp, Homo sapien
tctctgggacttttctttgtgtgag

SEQ ID NO: 5902677 - DNA, 25 bp, Homo sapien
atctggttccaaaacaagcgtgcca

SEQ ID NO: 5902678 - DNA, 25 bp, Homo sapien
cttttcctttgaatgtttttgcttc

SEQ ID NO: 5902679 - DNA, 25 bp, Homo sapien
catcaagaacggcctggcgctgcac

SEQ ID NO: 5902680 - DNA, 25 bp, Homo sapien
ctctatctagccaaactgcttacga

SEQ ID NO: 5902681 - DNA, 25 bp, Homo sapien
ccgtgccacctccagggctcctcgg

SEQ ID NO: 5902682 - DNA, 25 bp, Homo sapien
tatttaatttcagcccagtttcgtt

SEQ ID NO: 5902683 - DNA, 25 bp, Homo sapien
ctagccaaactgcttacgaccgtgt

SEQ ID NO: 5902684 - DNA, 25 bp, Homo sapien
cctccgagtggacattcacatagga

SEQ ID NO: 5902685 - DNA, 25 bp, Homo sapien
ttgtgtgagtgtgagtgtgtttcct

SEQ ID NO: 5902686 - DNA, 25 bp, Homo sapien
ctctgggtacctcctgcacccccaa

SEQ ID NO: 5902687 - DNA, 25 bp, Homo sapien
gatcaagaaagccacaggcatcaag

SEQ ID NO: 5902688 - DNA, 25 bp, Homo sapien
tcgctatggagggaggcatcaatca

SEQ ID NO: 5902689 - DNA, 25 bp, Homo sapien
acccacccaggattcttctattggt

SEQ ID NO: 5902690 - DNA, 25 bp, Homo sapien
gggaggcatcaatcagggcgacaga

SEQ ID NO: 5902691 - DNA, 25 bp, Homo sapien
agccccacgcagagacgatcgctat

SEQ ID NO: 5902692 - DNA, 25 bp, Homo sapien
ttccttaaagctctatctagccaaa

SEQ ID NO: 5902693 - DNA, 25 bp, Homo sapien
tccgagtggacattcacataggaac

SEQ ID NO: 5902694 - DNA, 25 bp, Homo sapien
gagactgaaccgccgctacaagcca

SEQ ID NO: 5902695 - DNA, 25 bp, Homo sapien
tgggacttttctttgtgtgagtgtg

SEQ ID NO: 5902696 - DNA, 25 bp, Homo sapien
agatctggttccaaaacaagcgtgc

SEQ ID NO: 5902697 - DNA, 25 bp, Homo sapien
agcgagcaagagaaagcaatcctcc

SEQ ID NO: 5902698 - DNA, 25 bp, Homo sapien
tcagcctgaatgagtcccagatcaa

SEQ ID NO: 5902699 - DNA, 25 bp, Homo sapien
ccaccacggttcaggacaaagacga

SEQ ID NO: 5902700 - DNA, 25 bp, Homo sapien
gagtgtgagtgtgtttccttgtgtg

SEQ ID NO: 5902701 - DNA, 25 bp, Homo sapien
agacgatcgctatggagggaggcat

SEQ ID NO: 5902702 - DNA, 25 bp, Homo sapien
cccttccttttctggagactccttg

SEQ ID NO: 5902703 - DNA, 25 bp, Homo sapien
ctcctgcacccccaacgctggccct

SEQ ID NO: 5902704 - DNA, 25 bp, Homo sapien
taaacatctattctctaactcactg

SEQ ID NO: 5902705 - DNA, 25 bp, Homo sapien
ttcaccagccccacgcagagacgat

SEQ ID NO: 5902706 - DNA, 25 bp, Homo sapien
atcctccgagtggacattcacatag

SEQ ID NO: 5902707 - DNA, 25 bp, Homo sapien
gtgtgagtgtgagtgtgtttccttg

SEQ ID NO: 5902708 - DNA, 25 bp, Homo sapien
cacagactgcgagactgaaccgccg

SEQ ID NO: 5902709 - DNA, 25 bp, Homo sapien
tgagtcccagatcaagatctggttc

SEQ ID NO: 5902710 - DNA, 25 bp, Homo sapien
ctttgaatgtttttgcttctctggg

SEQ ID NO: 5902711 - DNA, 25 bp, Homo sapien
cgtgtatatatttaatttcagccca

SEQ ID NO: 5902712 - DNA, 25 bp, Homo sapien
tggacattcacataggaacaaaacg

SEQ ID NO: 5902713 - DNA, 25 bp, Homo sapien
ccaacggcgcccgtgccacctccag

SEQ ID NO: 5902714 - DNA, 25 bp, Homo sapien
gtacctcctgcacccccaacgctgg

SEQ ID NO: 5902715 - DNA, 25 bp, Homo sapien
acgcagagacgatcgctatggaggg

SEQ ID NO: 5902716 - DNA, 25 bp, Homo sapien
ggttccaaaacaagcgtgccaagat

SEQ ID NO: 5902717 - DNA, 25 bp, Homo sapien
tattctctaactcactgtataagat

SEQ ID NO: 5902718 - DNA, 25 bp, Homo sapien
tatatttaatttcagcccagtttcg

SEQ ID NO: 5902719 - DNA, 25 bp, Homo sapien
ttttctttgtgtgagtgtgagtgtg

SEQ ID NO: 5902720 - DNA, 25 bp, Homo sapien
cagggactgtacaaccactctacca

SEQ ID NO: 5902721 - DNA, 25 bp, Homo sapien
ctcactgtataagatgaaactgcga

SEQ ID NO: 5902722 - DNA, 25 bp, Homo sapien
gctgccgcttcaccagccccacgca

SEQ ID NO: 5902723 - DNA, 25 bp, Homo sapien
aacgggagtaagactcggacaggtg

SEQ ID NO: 5902724 - DNA, 25 bp, Homo sapien
gatcgctatggagggaggcatcaat

SEQ ID NO: 5902725 - DNA, 25 bp, Homo sapien
gggctgccgcttcaccagccccacg

SEQ ID NO: 5902726 - DNA, 25 bp, Homo sapien
ctccttgagaaatacaaccccacag

SEQ ID NO: 5902727 - DNA, 25 bp, Homo sapien
ttttgcttctctgggtacctcctgc

SEQ ID NO: 5902728 - DNA, 25 bp, Homo sapien
cctgaatgagtcccagatcaagatc

SEQ ID NO: 5902729 - DNA, 25 bp, Homo sapien
cacctcatggcccagggactgtaca

SEQ ID NO: 5902730 - DNA, 25 bp, Homo sapien
tcaagaacggcctggcgctgcacct

SEQ ID NO: 5902731 - DNA, 25 bp, Homo sapien
gactgtacaaccactctaccaccac

SEQ ID NO: 5902732 - DNA, 25 bp, Homo sapien
cctggcgctgcacctcatggcccag

SEQ ID NO: 5902733 - DNA, 25 bp, Homo sapien
aatccccttccttttctggagactc

SEQ ID NO: 5902734 - DNA, 25 bp, Homo sapien
tcacataggaacaaaacggtttttg

SEQ ID NO: 5902735 - DNA, 25 bp, Homo sapien
cacaggcatcaagaacggcctggcg

SEQ ID NO: 5902736 - DNA, 25 bp, Homo sapien
ctctacccacccaggattcttctat

SEQ ID NO: 5902737 - DNA, 25 bp, Homo sapien
catctattctctaactcactgtata

SEQ ID NO: 5902738 - DNA, 25 bp, Homo sapien
agaaagcaatcctccgagtggacat

SEQ ID NO: 5902739 - DNA, 25 bp, Homo sapien
ggacaggtgctatgggggaaaaata

SEQ ID NO: 5902740 - DNA, 25 bp, Homo sapien
agtagctgtggccagctccgggggc

SEQ ID NO: 5902741 - DNA, 25 bp, Homo sapien
aatcagggcgacagagaaagcgagc

SEQ ID NO: 5902742 - DNA, 25 bp, Homo sapien
gagctcagcctgaatgagtcccaga

SEQ ID NO: 5902743 - DNA, 25 bp, Homo sapien
cttctattggtcttgtctatccctc

SEQ ID NO: 5902744 - DNA, 25 bp, Homo sapien
tttctggagactccttgagaaatac

SEQ ID NO: 5902745 - DNA, 25 bp, Homo sapien
gggctcctcggggctgccgcttcac

SEQ ID NO: 5902746 - DNA, 25 bp, Homo sapien
tcttctctacccacccaggattctt

SEQ ID NO: 5902747 - DNA, 25 bp, Homo sapien
tgccaagatcaagaaagccacaggc

SEQ ID NO: 5902748 - DNA, 25 bp, Homo sapien
aaagctctatctagccaaactgctt

SEQ ID NO: 5902749 - DNA, 25 bp, Homo sapien
tggcgctgcacctcatggcccaggg

SEQ ID NO: 5902750 - DNA, 25 bp, Homo sapien
gctgcacctcatggcccagggactg

SEQ ID NO: 5902751 - DNA, 25 bp, Homo sapien
cacctccagggctcctcggggctgc

SEQ ID NO: 5902752 - DNA, 25 bp, Homo sapien
aacatctattctctaactcactgta

SEQ ID NO: 5902753 - DNA, 25 bp, Homo sapien
acggcctggcgctgcacctcatggc

SEQ ID NO: 5902754 - DNA, 25 bp, Homo sapien
ccagatcaagatctggttccaaaac

SEQ ID NO: 5902755 - DNA, 25 bp, Homo sapien
aggagctcagcctgaatgagtccca

SEQ ID NO: 5902756 - DNA, 25 bp, Homo sapien
cagctccgggggcccgcggtcccaa

SEQ ID NO: 5902757 - DNA, 25 bp, Homo sapien
cgcctcttctctacccacccaggat

SEQ ID NO: 5902758 - DNA, 25 bp, Homo sapien
gttgctcttttcctttgaatgtttt

SEQ ID NO: 5902759 - DNA, 25 bp, Homo sapien
agcaatcctccgagtggacattcac

SEQ ID NO: 5902760 - DNA, 25 bp, Homo sapien
ttaaagctctatctagccaaactgc

SEQ ID NO: 5902761 - DNA, 25 bp, Homo sapien
caggcatcaagaacggcctggcgct

SEQ ID NO: 5902762 - DNA, 25 bp, Homo sapien
agtcccagatcaagatctggttcca

SEQ ID NO: 5902763 - DNA, 25 bp, Homo sapien
ctttgtgtgagtgtgagtgtgtttc

SEQ ID NO: 5902764 - DNA, 25 bp, Homo sapien
gtacaaccactctaccaccacggtt

SEQ ID NO: 5902765 - DNA, 25 bp, Homo sapien
tcaagaaagccacaggcatcaagaa

SEQ ID NO: 5902766 - DNA, 25 bp, Homo sapien
gactgcgagactgaaccgccgctac

SEQ ID NO: 5902767 - DNA, 25 bp, Homo sapien
tatggagggaggcatcaatcagggc

SEQ ID NO: 5902768 - DNA, 25 bp, Homo sapien
acgctggccctggtttctctgggac

SEQ ID NO: 5902769 - DNA, 25 bp, Homo sapien
tcctcggggctgccgcttcaccagc

SEQ ID NO: 5902770 - DNA, 25 bp, Homo sapien
tgcacctcatggcccagggactgta

SEQ ID NO: 5902771 - DNA, 25 bp, Homo sapien
gtgtgagtgtgtttccttgtgtgtc

SEQ ID NO: 5902772 - DNA, 25 bp, Homo sapien
agagaaagcgagcaagagaaagcaa

SEQ ID NO: 5902773 - DNA, 25 bp, Homo sapien
cttttctggagactccttgagaaat

SEQ ID NO: 5902774 - DNA, 25 bp, Homo sapien
ggagtaagactcggacaggtgctat

SEQ ID NO: 5902775 - DNA, 25 bp, Homo sapien
cggggctgccgcttcaccagcccca

SEQ ID NO: 5902776 - DNA, 25 bp, Homo sapien
caatcctccgagtggacattcacat

SEQ ID NO: 5902777 - DNA, 25 bp, Homo sapien
cgtgccaagatcaagaaagccacag

SEQ ID NO: 5902778 - DNA, 25 bp, Homo sapien
aaccactctaccaccacggttcagg

SEQ ID NO: 5902779 - DNA, 25 bp, Homo sapien
taagactcggacaggtgctatgggg

SEQ ID NO: 5902780 - DNA, 25 bp, Homo sapien
agcgtgccaagatcaagaaagccac

SEQ ID NO: 5902781 - DNA, 25 bp, Homo sapien
gctcagcctgaatgagtcccagatc

SEQ ID NO: 5902782 - DNA, 25 bp, Homo sapien
tctattctctaactcactgtataag

SEQ ID NO: 5902783 - DNA, 25 bp, Homo sapien
tgaaactgcgaattccttaaagctc

SEQ ID NO: 5902784 - DNA, 25 bp, Homo sapien
ccacccaggattcttctattggtct

SEQ ID NO: 5902785 - DNA, 25 bp, Homo sapien
tgctcttttcctttgaatgtttttg

SEQ ID NO: 5902786 - DNA, 25 bp, Homo sapien
tcagcccagtttcgttttcgttgct

SEQ ID NO: 5902787 - DNA, 25 bp, Homo sapien
caagcgtgccaagatcaagaaagcc

SEQ ID NO: 5902788 - DNA, 25 bp, Homo sapien
ccaggagctcagcctgaatgagtcc

SEQ ID NO: 5902789 - DNA, 25 bp, Homo sapien
gaacggcctggcgctgcacctcatg

SEQ ID NO: 5902790 - DNA, 25 bp, Homo sapien
tggagggaggcatcaatcagggcga

SEQ ID NO: 5902791 - DNA, 25 bp, Homo sapien
gaaaaataaacatctattctctaac

SEQ ID NO: 5902792 - DNA, 25 bp, Homo sapien
ccaagatcaagaaagccacaggcat

SEQ ID NO: 5902793 - DNA, 25 bp, Homo sapien
ttcttctattggtcttgtctatccc

SEQ ID NO: 5902794 - DNA, 25 bp, Homo sapien
ctgcgagactgaaccgccgctacaa

SEQ ID NO: 5902795 - DNA, 25 bp, Homo sapien
actctaccaccacggttcaggacaa

SEQ ID NO: 5902796 - DNA, 25 bp, Homo sapien
cgggagtaagactcggacaggtgct

SEQ ID NO: 5902797 - DNA, 25 bp, Homo sapien
gccacaggcatcaagaacggcctgg

SEQ ID NO: 5902798 - DNA, 25 bp, Homo sapien
gactccttgagaaatacaaccccac

SEQ ID NO: 5902799 - DNA, 25 bp, Homo sapien
ccactctaccaccacggttcaggac

SEQ ID NO: 5902800 - DNA, 25 bp, Homo sapien
ctgtataagatgaaactgcgaattc

SEQ ID NO: 5902801 - DNA, 25 bp, Homo sapien
cccaacgctggccctggtttctctg

SEQ ID NO: 5902802 - DNA, 25 bp, Homo sapien
gtaaatccccttccttttctggaga

SEQ ID NO: 5902803 - DNA, 25 bp, Homo sapien
ccaaactgcttacgaccgtgtatat

SEQ ID NO: 5902804 - DNA, 25 bp, Homo sapien
tccagggctcctcggggctgccgct

SEQ ID NO: 5902805 - DNA, 25 bp, Homo sapien
tgccgcttcaccagccccacgcaga

SEQ ID NO: 5902806 - DNA, 25 bp, Homo sapien
ttgtgtgtctgcccctcgcctcttc

SEQ ID NO: 5902807 - DNA, 25 bp, Homo sapien
cacccccaacgctggccctggtttc

SEQ ID NO: 5902808 - DNA, 25 bp, Homo sapien
gggtacctcctgcacccccaacgct

SEQ ID NO: 5902809 - DNA, 25 bp, Homo sapien
ggtcttgtctatccctcccgtaaat

SEQ ID NO: 5902810 - DNA, 25 bp, Homo sapien
aatgagtcccagatcaagatctggt

SEQ ID NO: 5902811 - DNA, 25 bp, Homo sapien
ctcgcctcttctctacccacccagg

SEQ ID NO: 5902812 - DNA, 25 bp, Homo sapien
gctcctcggggctgccgcttcacca

SEQ ID NO: 5902813 - DNA, 25 bp, Homo sapien
cccagggactgtacaaccactctac

SEQ ID NO: 5902814 - DNA, 25 bp, Homo sapien
tctgggacttttctttgtgtgagtg

SEQ ID NO: 5902815 - DNA, 25 bp, Homo sapien
tcttgtctatccctcccgtaaatcc

SEQ ID NO: 5902816 - DNA, 25 bp, Homo sapien
ctacccacccaggattcttctattg

SEQ ID NO: 5902817 - DNA, 25 bp, Homo sapien
agatcaagatctggttccaaaacaa

SEQ ID NO: 5902818 - DNA, 25 bp, Homo sapien
agactcggacaggtgctatggggga

SEQ ID NO: 5902819 - DNA, 25 bp, Homo sapien
aagaaagccacaggcatcaagaacg

SEQ ID NO: 5902820 - DNA, 25 bp, Homo sapien
tagctgtggccagctccgggggccc

SEQ ID NO: 5902821 - DNA, 25 bp, Homo sapien
tccttttctggagactccttgagaa

SEQ ID NO: 5902822 - DNA, 25 bp, Homo sapien
catcaatcagggcgacagagaaagc

SEQ ID NO: 5902823 - DNA, 25 bp, Homo sapien
gtgtgtttccttgtgtgtctgcccc

SEQ ID NO: 5902824 - DNA, 25 bp, Homo sapien
tattggtcttgtctatccctcccgt

SEQ ID NO: 5902825 - DNA, 25 bp, Homo sapien
gagggaggcatcaatcagggcgaca

SEQ ID NO: 5902826 - DNA, 25 bp, Homo sapien
agctctatctagccaaactgcttac

SEQ ID NO: 5902827 - DNA, 25 bp, Homo sapien
actgcttacgaccgtgtatatattt

SEQ ID NO: 5902828 - DNA, 25 bp, Homo sapien
tgaatgagtcccagatcaagatctg

SEQ ID NO: 5902829 - DNA, 25 bp, Homo sapien
agtggacattcacataggaacaaaa

SEQ ID NO: 5902830 - DNA, 25 bp, Homo sapien
gcccctcgcctcttctctacccacc

SEQ ID NO: 5902831 - DNA, 25 bp, Homo sapien
gtataagatgaaactgcgaattcct

SEQ ID NO: 5902832 - DNA, 25 bp, Homo sapien
gggactgtacaaccactctaccacc

SEQ ID NO: 5902833 - DNA, 25 bp, Homo sapien
cccccaacgctggccctggtttctc

SEQ ID NO: 5902834 - DNA, 25 bp, Homo sapien
cctcttctctacccacccaggattc

SEQ ID NO: 5902835 - DNA, 25 bp, Homo sapien
cgaccgtgtatatatttaatttcag

SEQ ID NO: 5902836 - DNA, 25 bp, Homo sapien
cctccagggctcctcggggctgccg

SEQ ID NO: 5902837 - DNA, 25 bp, Homo sapien
accgtgtatatatttaatttcagcc

SEQ ID NO: 5902838 - DNA, 25 bp, Homo sapien
gaggcatcaatcagggcgacagaga

SEQ ID NO: 5902839 - DNA, 25 bp, Homo sapien
tcaatcagggcgacagagaaagcga

SEQ ID NO: 5902840 - DNA, 25 bp, Homo sapien
agccaaactgcttacgaccgtgtat

SEQ ID NO: 5902841 - DNA, 25 bp, Homo sapien
gaaacgggagtaagactcggacagg

SEQ ID NO: 5902842 - DNA, 25 bp, Homo sapien
aaaacaagcgtgccaagatcaagaa

SEQ ID NO: 5902843 - DNA, 25 bp, Homo sapien
gagaaatacaaccccacagactgcg

SEQ ID NO: 5902844 - DNA, 25 bp, Homo sapien
cattcacataggaacaaaacggttt

SEQ ID NO: 5902845 - DNA, 25 bp, Homo sapien
gctgtggccagctccgggggcccgc

SEQ ID NO: 5902846 - DNA, 25 bp, Homo sapien
ccacgcagagacgatcgctatggag

SEQ ID NO: 5902847 - DNA, 25 bp, Homo sapien
tttcgttgctcttttcctttgaatg

SEQ ID NO: 5902848 - DNA, 25 bp, Homo sapien
tgcgaattccttaaagctctatcta

SEQ ID NO: 5902849 - DNA, 25 bp, Homo sapien
tcgttttcgttgctcttttcctttg

SEQ ID NO: 5902850 - DNA, 25 bp, Homo sapien
aaagcgagcaagagaaagcaatcct

SEQ ID NO: 5902851 - DNA, 25 bp, Homo sapien
aagatgaaactgcgaattccttaaa

SEQ ID NO: 5902852 - DNA, 25 bp, Homo sapien
ctaactcactgtataagatgaaact

SEQ ID NO: 5902853 - DNA, 25 bp, Homo sapien
tcccagatcaagatctggttccaaa

SEQ ID NO: 5902854 - DNA, 25 bp, Homo sapien
gctggccctggtttctctgggactt

SEQ ID NO: 5902855 - DNA, 25 bp, Homo sapien
ccagccccacgcagagacgatcgct

SEQ ID NO: 5902856 - DNA, 25 bp, Homo sapien
cagggctcctcggggctgccgcttc

SEQ ID NO: 5902857 - DNA, 25 bp, Homo sapien
gccacctccagggctcctcggggct

SEQ ID NO: 5902858 - DNA, 25 bp, Homo sapien
ataagatgaaactgcgaattcctta

SEQ ID NO: 5902859 - DNA, 25 bp, Homo sapien
agtaagactcggacaggtgctatgg

SEQ ID NO: 5902860 - DNA, 25 bp, Homo sapien
ccaaaacaagcgtgccaagatcaag

SEQ ID NO: 5902861 - DNA, 25 bp, Homo sapien
acaaccactctaccaccacggttca

SEQ ID NO: 5902862 - DNA, 25 bp, Homo sapien
tctatccctcccgtaaatccccttc

SEQ ID NO: 5902863 - DNA, 25 bp, Homo sapien
acttttctttgtgtgagtgtgagtg

SEQ ID NO: 5902864 - DNA, 25 bp, Homo sapien
gaaagccacaggcatcaagaacggc

SEQ ID NO: 5902865 - DNA, 25 bp, Homo sapien
ggcgacagagaaagcgagcaagaga

SEQ ID NO: 5902866 - DNA, 25 bp, Homo sapien
gacattcacataggaacaaaacggt

SEQ ID NO: 5902867 - DNA, 25 bp, Homo sapien
ggtcccaacggcgcccgtgccacct

SEQ ID NO: 5902868 - DNA, 25 bp, Homo sapien
gccagctccgggggcccgcggtccc

SEQ ID NO: 5902869 - DNA, 25 bp, Homo sapien
agaaaagtcccagagaaaccagggc

SEQ ID NO: 5902870 - DNA, 25 bp, Homo sapien
tacagtccctgggccatgaggtgca

SEQ ID NO: 5902871 - DNA, 25 bp, Homo sapien
gtgaatgtccactcggaggattgct

SEQ ID NO: 5902872 - DNA, 25 bp, Homo sapien
ctggaggtggcacgggcgccgttgg

SEQ ID NO: 5902873 - DNA, 25 bp, Homo sapien
tagagaagaggcgaggggcagacac

SEQ ID NO: 5902874 - DNA, 25 bp, Homo sapien
tctctgtcgccctgattgatgcctc

SEQ ID NO: 5902875 - DNA, 25 bp, Homo sapien
gaaaacgaaactgggctgaaattaa

SEQ ID NO: 5902876 - DNA, 25 bp, Homo sapien
gcagtttggctagatagagctttaa

SEQ ID NO: 5902877 - DNA, 25 bp, Homo sapien
tatacagtgagttagagaatagatg

SEQ ID NO: 5902878 - DNA, 25 bp, Homo sapien
ggagccctggaggtggcacgggcgc

SEQ ID NO: 5902879 - DNA, 25 bp, Homo sapien
gaaattaaatatatacacggtcgta

SEQ ID NO: 5902880 - DNA, 25 bp, Homo sapien
gcaggaggtacccagagaagcaaaa

SEQ ID NO: 5902881 - DNA, 25 bp, Homo sapien
ttcagtctcgcagtctgtggggttg

SEQ ID NO: 5902882 - DNA, 25 bp, Homo sapien
aaccgtggtggtagagtggttgtac

SEQ ID NO: 5902883 - DNA, 25 bp, Homo sapien
cagacacacaaggaaacacactcac

SEQ ID NO: 5902884 - DNA, 25 bp, Homo sapien
gaatgtccactcggaggattgcttt

SEQ ID NO: 5902885 - DNA, 25 bp, Homo sapien
gaggagccctggaggtggcacgggc

SEQ ID NO: 5902886 - DNA, 25 bp, Homo sapien
agcaacgaaaacgaaactgggctga

SEQ ID NO: 5902887 - DNA, 25 bp, Homo sapien
ttgtagcggcggttcagtctcgcag

SEQ ID NO: 5902888 - DNA, 25 bp, Homo sapien
tcgccctgattgatgcctccctcca

SEQ ID NO: 5902889 - DNA, 25 bp, Homo sapien
cacgggcgccgttgggaccgcgggc

SEQ ID NO: 5902890 - DNA, 25 bp, Homo sapien
taaggaattcgcagtttcatcttat

SEQ ID NO: 5902891 - DNA, 25 bp, Homo sapien
gaaccagatcttgatctgggactca

SEQ ID NO: 5902892 - DNA, 25 bp, Homo sapien
ttgggggtgcaggaggtacccagag

SEQ ID NO: 5902893 - DNA, 25 bp, Homo sapien
aaaccgttttgttcctatgtgaatg

SEQ ID NO: 5902894 - DNA, 25 bp, Homo sapien
gcagccccgaggagccctggaggtg

SEQ ID NO: 5902895 - DNA, 25 bp, Homo sapien
ctgaaattaaatatatacacggtcg

SEQ ID NO: 5902896 - DNA, 25 bp, Homo sapien
tgggactcattcaggctgagctcct

SEQ ID NO: 5902897 - DNA, 25 bp, Homo sapien
cacctgtccgagtcttactcccgtt

SEQ ID NO: 5902898 - DNA, 25 bp, Homo sapien
ttgtatttctcaaggagtctccaga

SEQ ID NO: 5902899 - DNA, 25 bp, Homo sapien
ggaggtggcacgggcgccgttggga

SEQ ID NO: 5902900 - DNA, 25 bp, Homo sapien
gttcctatgtgaatgtccactcgga

SEQ ID NO: 5902901 - DNA, 25 bp, Homo sapien
tggtgaagcggcagccccgaggagc

SEQ ID NO: 5902902 - DNA, 25 bp, Homo sapien
cacactcacacaaagaaaagtccca

SEQ ID NO: 5902903 - DNA, 25 bp, Homo sapien
atcttatacagtgagttagagaata

SEQ ID NO: 5902904 - DNA, 25 bp, Homo sapien
agaggcgaggggcagacacacaagg

SEQ ID NO: 5902905 - DNA, 25 bp, Homo sapien
ggtggtagagtggttgtacagtccc

SEQ ID NO: 5902906 - DNA, 25 bp, Homo sapien
tctctgcgtggggctggtgaagcgg

SEQ ID NO: 5902907 - DNA, 25 bp, Homo sapien
atgcctgtggctttcttgatcttgg

SEQ ID NO: 5902908 - DNA, 25 bp, Homo sapien
tctgggactcattcaggctgagctc

SEQ ID NO: 5902909 - DNA, 25 bp, Homo sapien
ctttcttgatcttggcacgcttgtt

SEQ ID NO: 5902910 - DNA, 25 bp, Homo sapien
atagcacctgtccgagtcttactcc

SEQ ID NO: 5902911 - DNA, 25 bp, Homo sapien
gtatttctcaaggagtctccagaaa

SEQ ID NO: 5902912 - DNA, 25 bp, Homo sapien
tgggtgggtagagaagaggcgaggg

SEQ ID NO: 5902913 - DNA, 25 bp, Homo sapien
accagatcttgatctgggactcatt

SEQ ID NO: 5902914 - DNA, 25 bp, Homo sapien
atttctcaaggagtctccagaaaag

SEQ ID NO: 5902915 - DNA, 25 bp, Homo sapien
tggtagagtggttgtacagtccctg

SEQ ID NO: 5902916 - DNA, 25 bp, Homo sapien
ccactcggaggattgctttctcttg

SEQ ID NO: 5902917 - DNA, 25 bp, Homo sapien
gtcccagagaaaccagggccagcgt

SEQ ID NO: 5902918 - DNA, 25 bp, Homo sapien
cctgattgatgcctccctccatagc

SEQ ID NO: 5902919 - DNA, 25 bp, Homo sapien
gggcccccggagctggccacagcta

SEQ ID NO: 5902920 - DNA, 25 bp, Homo sapien
tctccagaaaaggaaggggatttac

SEQ ID NO: 5902921 - DNA, 25 bp, Homo sapien
cctgtccgagtcttactcccgtttc

SEQ ID NO: 5902922 - DNA, 25 bp, Homo sapien
gtggcacgggcgccgttgggaccgc

SEQ ID NO: 5902923 - DNA, 25 bp, Homo sapien
tacagtgagttagagaatagatgtt

SEQ ID NO: 5902924 - DNA, 25 bp, Homo sapien
tttggctagatagagctttaaggaa

SEQ ID NO: 5902925 - DNA, 25 bp, Homo sapien
gcctgtggctttcttgatcttggca

SEQ ID NO: 5902926 - DNA, 25 bp, Homo sapien
catgaggtgcagcgccaggccgttc

SEQ ID NO: 5902927 - DNA, 25 bp, Homo sapien
ttgctcgctttctctgtcgccctga

SEQ ID NO: 5902928 - DNA, 25 bp, Homo sapien
gaaaagagcaacgaaaacgaaactg

SEQ ID NO: 5902929 - DNA, 25 bp, Homo sapien
caagaccaatagaagaatcctgggt

SEQ ID NO: 5902930 - DNA, 25 bp, Homo sapien
ggactcattcaggctgagctcctgg

SEQ ID NO: 5902931 - DNA, 25 bp, Homo sapien
cagagaaaccagggccagcgttggg

SEQ ID NO: 5902932 - DNA, 25 bp, Homo sapien
gctttaaggaattcgcagtttcatc

SEQ ID NO: 5902933 - DNA, 25 bp, Homo sapien
atatatacacggtcgtaagcagttt

SEQ ID NO: 5902934 - DNA, 25 bp, Homo sapien
ccagggccagcgttgggggtgcagg

SEQ ID NO: 5902935 - DNA, 25 bp, Homo sapien
cattcaaaggaaaagagcaacgaaa

SEQ ID NO: 5902936 - DNA, 25 bp, Homo sapien
cgccaggccgttcttgatgcctgtg

SEQ ID NO: 5902937 - DNA, 25 bp, Homo sapien
gagaatagatgtttatttttccccc

SEQ ID NO: 5902938 - DNA, 25 bp, Homo sapien
gccgttcttgatgcctgtggctttc

SEQ ID NO: 5902939 - DNA, 25 bp, Homo sapien
cgtctctgcgtggggctggtgaagc

SEQ ID NO: 5902940 - DNA, 25 bp, Homo sapien
caaaggaaaagagcaacgaaaacga

SEQ ID NO: 5902941 - DNA, 25 bp, Homo sapien
aagcagtttggctagatagagcttt

SEQ ID NO: 5902942 - DNA, 25 bp, Homo sapien
tctgcgtggggctggtgaagcggca

SEQ ID NO: 5902943 - DNA, 25 bp, Homo sapien
cttggcacgcttgttttggaaccag

SEQ ID NO: 5902944 - DNA, 25 bp, Homo sapien
cactcacactcacacaaagaaaagt

SEQ ID NO: 5902945 - DNA, 25 bp, Homo sapien
gctctcgtctttgtcctgaaccgtg

SEQ ID NO: 5902946 - DNA, 25 bp, Homo sapien
accgttttgttcctatgtgaatgtc

SEQ ID NO: 5902947 - DNA, 25 bp, Homo sapien
ctcacactcacacaaagaaaagtcc

SEQ ID NO: 5902948 - DNA, 25 bp, Homo sapien
ggcagacacacaaggaaacacactc

SEQ ID NO: 5902949 - DNA, 25 bp, Homo sapien
gtgcaggaggtacccagagaagcaa

SEQ ID NO: 5902950 - DNA, 25 bp, Homo sapien
ttttgttcctatgtgaatgtccact

SEQ ID NO: 5902951 - DNA, 25 bp, Homo sapien
aagtcccagagaaaccagggccagc

SEQ ID NO: 5902952 - DNA, 25 bp, Homo sapien
ggttcagtctcgcagtctgtggggt

SEQ ID NO: 5902953 - DNA, 25 bp, Homo sapien
agcgatcgtctctgcgtggggctgg

SEQ ID NO: 5902954 - DNA, 25 bp, Homo sapien
gtggggttgtatttctcaaggagtc

SEQ ID NO: 5902955 - DNA, 25 bp, Homo sapien
cagagaagcaaaaacattcaaagga

SEQ ID NO: 5902956 - DNA, 25 bp, Homo sapien
tagagctttaaggaattcgcagttt

SEQ ID NO: 5902957 - DNA, 25 bp, Homo sapien
caaagaaaagtcccagagaaaccag

SEQ ID NO: 5902958 - DNA, 25 bp, Homo sapien
caaggagtctccagaaaaggaaggg

SEQ ID NO: 5902959 - DNA, 25 bp, Homo sapien
acacggtcgtaagcagtttggctag

SEQ ID NO: 5902960 - DNA, 25 bp, Homo sapien
aacgaaactgggctgaaattaaata

SEQ ID NO: 5902961 - DNA, 25 bp, Homo sapien
tggcttgtagcggcggttcagtctc

SEQ ID NO: 5902962 - DNA, 25 bp, Homo sapien
gctggtgaagcggcagccccgagga

SEQ ID NO: 5902963 - DNA, 25 bp, Homo sapien
ggtcgtaagcagtttggctagatag

SEQ ID NO: 5902964 - DNA, 25 bp, Homo sapien
ctccctccatagcgatcgtctctgc

SEQ ID NO: 5902965 - DNA, 25 bp, Homo sapien
gaaggggatttacgggagggataga

SEQ ID NO: 5902966 - DNA, 25 bp, Homo sapien
ggggttgtatttctcaaggagtctc

SEQ ID NO: 5902967 - DNA, 25 bp, Homo sapien
tctttggcttgtagcggcggttcag

SEQ ID NO: 5902968 - DNA, 25 bp, Homo sapien
gtggctttcttgatcttggcacgct

SEQ ID NO: 5902969 - DNA, 25 bp, Homo sapien
gccatgaggtgcagcgccaggccgt

SEQ ID NO: 5902970 - DNA, 25 bp, Homo sapien
gcagtttcatcttatacagtgagtt

SEQ ID NO: 5902971 - DNA, 25 bp, Homo sapien
gctttctcttgctcgctttctctgt

SEQ ID NO: 5902972 - DNA, 25 bp, Homo sapien
atcttggcacgcttgttttggaacc

SEQ ID NO: 5902973 - DNA, 25 bp, Homo sapien
aggcgaggggcagacacacaaggaa

SEQ ID NO: 5902974 - DNA, 25 bp, Homo sapien
agtttggctagatagagctttaagg

SEQ ID NO: 5902975 - DNA, 25 bp, Homo sapien
ttcttgatcttggcacgcttgtttt

SEQ ID NO: 5902976 - DNA, 25 bp, Homo sapien
aggattgctttctcttgctcgcttt

SEQ ID NO: 5902977 - DNA, 25 bp, Homo sapien
attgatgcctccctccatagcgatc

SEQ ID NO: 5902978 - DNA, 25 bp, Homo sapien
atttacgggagggatagacaagacc

SEQ ID NO: 5902979 - DNA, 25 bp, Homo sapien
tcgctttctctgtcgccctgattga

SEQ ID NO: 5902980 - DNA, 25 bp, Homo sapien
tgaggtgcagcgccaggccgttctt

SEQ ID NO: 5902981 - DNA, 25 bp, Homo sapien
agcggcagccccgaggagccctgga

SEQ ID NO: 5902982 - DNA, 25 bp, Homo sapien
ccccatagcacctgtccgagtctta

SEQ ID NO: 5902983 - DNA, 25 bp, Homo sapien
tctgtcgccctgattgatgcctccc

SEQ ID NO: 5902984 - DNA, 25 bp, Homo sapien
tttttcccccatagcacctgtccga

SEQ ID NO: 5902985 - DNA, 25 bp, Homo sapien
tttggcttgtagcggcggttcagtc

SEQ ID NO: 5902986 - DNA, 25 bp, Homo sapien
aaactgggctgaaattaaatatata

SEQ ID NO: 5902987 - DNA, 25 bp, Homo sapien
gaagaggcgaggggcagacacacaa

SEQ ID NO: 5902988 - DNA, 25 bp, Homo sapien
atatacacggtcgtaagcagtttgg

SEQ ID NO: 5902989 - DNA, 25 bp, Homo sapien
tctcgtctttgtcctgaaccgtggt

SEQ ID NO: 5902990 - DNA, 25 bp, Homo sapien
caaggaaacacactcacactcacac

SEQ ID NO: 5902991 - DNA, 25 bp, Homo sapien
ggttgtatttctcaaggagtctcca

SEQ ID NO: 5902992 - DNA, 25 bp, Homo sapien
tttctcttgctcgctttctctgtcg

SEQ ID NO: 5902993 - DNA, 25 bp, Homo sapien
tcctatgtgaatgtccactcggagg

SEQ ID NO: 5902994 - DNA, 25 bp, Homo sapien
ctttgtcctgaaccgtggtggtaga

SEQ ID NO: 5902995 - DNA, 25 bp, Homo sapien
gacacacaaggaaacacactcacac

SEQ ID NO: 5902996 - DNA, 25 bp, Homo sapien
gagttagagaatagatgtttatttt

SEQ ID NO: 5902997 - DNA, 25 bp, Homo sapien
ttcaaaggaaaagagcaacgaaaac

SEQ ID NO: 5902998 - DNA, 25 bp, Homo sapien
gcttgtagcggcggttcagtctcgc

SEQ ID NO: 5902999 - DNA, 25 bp, Homo sapien
aggtggcacgggcgccgttgggacc

SEQ ID NO: 5903000 - DNA, 25 bp, Homo sapien
atcgtctctgcgtggggctggtgaa

SEQ ID NO: 5903001 - DNA, 25 bp, Homo sapien
ggggatttacgggagggatagacaa

SEQ ID NO: 5903002 - DNA, 25 bp, Homo sapien
tttcccccatagcacctgtccgagt

SEQ ID NO: 5903003 - DNA, 25 bp, Homo sapien
cagtctgtggggttgtatttctcaa

SEQ ID NO: 5903004 - DNA, 25 bp, Homo sapien
aggagtctccagaaaaggaagggga

SEQ ID NO: 5903005 - DNA, 25 bp, Homo sapien
cgaaactgggctgaaattaaatata

SEQ ID NO: 5903006 - DNA, 25 bp, Homo sapien
ggggcagacacacaaggaaacacac

SEQ ID NO: 5903007 - DNA, 25 bp, Homo sapien
gattgctttctcttgctcgctttct

SEQ ID NO: 5903008 - DNA, 25 bp, Homo sapien
aaaacattcaaaggaaaagagcaac

SEQ ID NO: 5903009 - DNA, 25 bp, Homo sapien
ggtgggtagagaagaggcgaggggc

SEQ ID NO: 5903010 - DNA, 25 bp, Homo sapien
ccagcgttgggggtgcaggaggtac

SEQ ID NO: 5903011 - DNA, 25 bp, Homo sapien
ctgtggggttgtatttctcaaggag

SEQ ID NO: 5903012 - DNA, 25 bp, Homo sapien
ccgtggtggtagagtggttgtacag

SEQ ID NO: 5903013 - DNA, 25 bp, Homo sapien
gaagcaaaaacattcaaaggaaaag

SEQ ID NO: 5903014 - DNA, 25 bp, Homo sapien
aaatatatacacggtcgtaagcagt

SEQ ID NO: 5903015 - DNA, 25 bp, Homo sapien
ttgtcctgaaccgtggtggtagagt

SEQ ID NO: 5903016 - DNA, 25 bp, Homo sapien
tttaaggaattcgcagtttcatctt

SEQ ID NO: 5903017 - DNA, 25 bp, Homo sapien
ttgggaccgcgggcccccggagctg

SEQ ID NO: 5903018 - DNA, 25 bp, Homo sapien
gttgtacagtccctgggccatgagg

SEQ ID NO: 5903019 - DNA, 25 bp, Homo sapien
agccccgaggagccctggaggtggc

SEQ ID NO: 5903020 - DNA, 25 bp, Homo sapien
aaccagggccagcgttgggggtgca

SEQ ID NO: 5903021 - DNA, 25 bp, Homo sapien
ttgttttggaaccagatcttgatct

SEQ ID NO: 5903022 - DNA, 25 bp, Homo sapien
ccctgggccatgaggtgcagcgcca

SEQ ID NO: 5903023 - DNA, 25 bp, Homo sapien
cttgatcttggcacgcttgttttgg

SEQ ID NO: 5903024 - DNA, 25 bp, Homo sapien
gtccctgggccatgaggtgcagcgc

SEQ ID NO: 5903025 - DNA, 25 bp, Homo sapien
tggctagatagagctttaaggaatt

SEQ ID NO: 5903026 - DNA, 25 bp, Homo sapien
gaggtacccagagaagcaaaaacat

SEQ ID NO: 5903027 - DNA, 25 bp, Homo sapien
caaaaaccgttttgttcctatgtga

SEQ ID NO: 5903028 - DNA, 25 bp, Homo sapien
aggaggtacccagagaagcaaaaac

SEQ ID NO: 5903029 - DNA, 25 bp, Homo sapien
gtggtggtagagtggttgtacagtc

SEQ ID NO: 5903030 - DNA, 25 bp, Homo sapien
tcatcttatacagtgagttagagaa

SEQ ID NO: 5903031 - DNA, 25 bp, Homo sapien
gagaagaggcgaggggcagacacac

SEQ ID NO: 5903032 - DNA, 25 bp, Homo sapien
ttcttgatgcctgtggctttcttga

SEQ ID NO: 5903033 - DNA, 25 bp, Homo sapien
aagaatcctgggtgggtagagaaga

SEQ ID NO: 5903034 - DNA, 25 bp, Homo sapien
tcgtctttgtcctgaaccgtggtgg

SEQ ID NO: 5903035 - DNA, 25 bp, Homo sapien
cccagagaagcaaaaacattcaaag

SEQ ID NO: 5903036 - DNA, 25 bp, Homo sapien
gcggttcagtctcgcagtctgtggg

SEQ ID NO: 5903037 - DNA, 25 bp, Homo sapien
ccatagcacctgtccgagtcttact

SEQ ID NO: 5903038 - DNA, 25 bp, Homo sapien
tttggaaccagatcttgatctggga

SEQ ID NO: 5903039 - DNA, 25 bp, Homo sapien
atagcgatcgtctctgcgtggggct

SEQ ID NO: 5903040 - DNA, 25 bp, Homo sapien
ggctgaaattaaatatatacacggt

SEQ ID NO: 5903041 - DNA, 25 bp, Homo sapien
gggctggtgaagcggcagccccgag

SEQ ID NO: 5903042 - DNA, 25 bp, Homo sapien
cgttgggggtgcaggaggtacccag

SEQ ID NO: 5903043 - DNA, 25 bp, Homo sapien
ggatttacgggagggatagacaaga

SEQ ID NO: 5903044 - DNA, 25 bp, Homo sapien
gtgcagcgccaggccgttcttgatg

SEQ ID NO: 5903045 - DNA, 25 bp, Homo sapien
aggaaacacactcacactcacacaa

SEQ ID NO: 5903046 - DNA, 25 bp, Homo sapien
agccctggaggtggcacgggcgccg

SEQ ID NO: 5903047 - DNA, 25 bp, Homo sapien
tagacaagaccaatagaagaatcct

SEQ ID NO: 5903048 - DNA, 25 bp, Homo sapien
gctcgctttctctgtcgccctgatt

SEQ ID NO: 5903049 - DNA, 25 bp, Homo sapien
agggccagcgttgggggtgcaggag

SEQ ID NO: 5903050 - DNA, 25 bp, Homo sapien
atcctgggtgggtagagaagaggcg

SEQ ID NO: 5903051 - DNA, 25 bp, Homo sapien
tcttgctcgctttctctgtcgccct

SEQ ID NO: 5903052 - DNA, 25 bp, Homo sapien
agagtggttgtacagtccctgggcc

SEQ ID NO: 5903053 - DNA, 25 bp, Homo sapien
caatagaagaatcctgggtgggtag

SEQ ID NO: 5903054 - DNA, 25 bp, Homo sapien
tagatagagctttaaggaattcgca

SEQ ID NO: 5903055 - DNA, 25 bp, Homo sapien
gacaagaccaatagaagaatcctgg

SEQ ID NO: 5903056 - DNA, 25 bp, Homo sapien
acggtcgtaagcagtttggctagat

SEQ ID NO: 5903057 - DNA, 25 bp, Homo sapien
aaaagtcccagagaaaccagggcca

SEQ ID NO: 5903058 - DNA, 25 bp, Homo sapien
gcgggcccccggagctggccacagc

SEQ ID NO: 5903059 - DNA, 25 bp, Homo sapien
cgttcttgatgcctgtggctttctt

SEQ ID NO: 5903060 - DNA, 25 bp, Homo sapien
tatttttcccccatagcacctgtcc

SEQ ID NO: 5903061 - DNA, 25 bp, Homo sapien
gcttgttttggaaccagatcttgat

SEQ ID NO: 5903062 - DNA, 25 bp, Homo sapien
cagtccctgggccatgaggtgcagc

SEQ ID NO: 5903063 - DNA, 25 bp, Homo sapien
accaatagaagaatcctgggtgggt

SEQ ID NO: 5903064 - DNA, 25 bp, Homo sapien
cctgggtgggtagagaagaggcgag

SEQ ID NO: 5903065 - DNA, 25 bp, Homo sapien
cacacaaggaaacacactcacactc

SEQ ID NO: 5903066 - DNA, 25 bp, Homo sapien
gaaacacactcacactcacacaaag

SEQ ID NO: 5903067 - DNA, 25 bp, Homo sapien
ccgaggagccctggaggtggcacgg

SEQ ID NO: 5903068 - DNA, 25 bp, Homo sapien
ggtacccagagaagcaaaaacattc

SEQ ID NO: 5903069 - DNA, 25 bp, Homo sapien
cgtggggctggtgaagcggcagccc

SEQ ID NO: 5903070 - DNA, 25 bp, Homo sapien
gcacgcttgttttggaaccagatct

SEQ ID NO: 5903071 - DNA, 25 bp, Homo sapien
gtaagcagtttggctagatagagct

SEQ ID NO: 5903072 - DNA, 25 bp, Homo sapien
agcgccaggccgttcttgatgcctg

SEQ ID NO: 5903073 - DNA, 25 bp, Homo sapien
gagggatagacaagaccaatagaag

SEQ ID NO: 5903074 - DNA, 25 bp, Homo sapien
aacattcaaaggaaaagagcaacga

SEQ ID NO: 5903075 - DNA, 25 bp, Homo sapien
actgggctgaaattaaatatataca

SEQ ID NO: 5903076 - DNA, 25 bp, Homo sapien
tcgcagtttcatcttatacagtgag

SEQ ID NO: 5903077 - DNA, 25 bp, Homo sapien
tggcacgcttgttttggaaccagat

SEQ ID NO: 5903078 - DNA, 25 bp, Homo sapien
caacgaaaacgaaactgggctgaaa

SEQ ID NO: 5903079 - DNA, 25 bp, Homo sapien
ttacgggagggatagacaagaccaa

SEQ ID NO: 5903080 - DNA, 25 bp, Homo sapien
atgtccactcggaggattgctttct

SEQ ID NO: 5903081 - DNA, 25 bp, Homo sapien
ggccagcgttgggggtgcaggaggt

SEQ ID NO: 5903082 - DNA, 25 bp, Homo sapien
acgcttgttttggaaccagatcttg

SEQ ID NO: 5903083 - DNA, 25 bp, Homo sapien
ctgtggctttcttgatcttggcacg

SEQ ID NO: 5903084 - DNA, 25 bp, Homo sapien
cggcagccccgaggagccctggagg

SEQ ID NO: 5903085 - DNA, 25 bp, Homo sapien
atgcctccctccatagcgatcgtct

SEQ ID NO: 5903086 - DNA, 25 bp, Homo sapien
tgatgcctccctccatagcgatcgt

SEQ ID NO: 5903087 - DNA, 25 bp, Homo sapien
gggatagacaagaccaatagaagaa

SEQ ID NO: 5903088 - DNA, 25 bp, Homo sapien
gcgaggggcagacacacaaggaaac

SEQ ID NO: 5903089 - DNA, 25 bp, Homo sapien
gtctttgtcctgaaccgtggtggta

SEQ ID NO: 5903090 - DNA, 25 bp, Homo sapien
cacaaggaaacacactcacactcac

SEQ ID NO: 5903091 - DNA, 25 bp, Homo sapien
agaagaatcctgggtgggtagagaa

SEQ ID NO: 5903092 - DNA, 25 bp, Homo sapien
gggccatgaggtgcagcgccaggcc

SEQ ID NO: 5903093 - DNA, 25 bp, Homo sapien
cacacaaagaaaagtcccagagaaa

SEQ ID NO: 5903094 - DNA, 25 bp, Homo sapien
gtccactcggaggattgctttctct

SEQ ID NO: 5903095 - DNA, 25 bp, Homo sapien
gaggggcagacacacaaggaaacac

SEQ ID NO: 5903096 - DNA, 25 bp, Homo sapien
ttgctttctcttgctcgctttctct

SEQ ID NO: 5903097 - DNA, 25 bp, Homo sapien
gagctttaaggaattcgcagtttca

SEQ ID NO: 5903098 - DNA, 25 bp, Homo sapien
aggtgcagcgccaggccgttcttga

SEQ ID NO: 5903099 - DNA, 25 bp, Homo sapien
ccccgaggagccctggaggtggcac

SEQ ID NO: 5903100 - DNA, 25 bp, Homo sapien
gagaaaccagggccagcgttggggg

SEQ ID NO: 5903101 - DNA, 25 bp, Homo sapien
tcttgatctgggactcattcaggct

SEQ ID NO: 5903102 - DNA, 25 bp, Homo sapien
tggaaccagatcttgatctgggact

SEQ ID NO: 5903103 - DNA, 25 bp, Homo sapien
gggggtgcaggaggtacccagagaa

SEQ ID NO: 5903104 - DNA, 25 bp, Homo sapien
ccctccatagcgatcgtctctgcgt

SEQ ID NO: 5903105 - DNA, 25 bp, Homo sapien
tacccagagaagcaaaaacattcaa

SEQ ID NO: 5903106 - DNA, 25 bp, Homo sapien
atacacggtcgtaagcagtttggct

SEQ ID NO: 5903107 - DNA, 25 bp, Homo sapien
gggagggatagacaagaccaataga

SEQ ID NO: 5903108 - DNA, 25 bp, Homo sapien
tgattgatgcctccctccatagcga

SEQ ID NO: 5903109 - DNA, 25 bp, Homo sapien
agcacctgtccgagtcttactcccg

SEQ ID NO: 5903110 - DNA, 25 bp, Homo sapien
gtgaagcggcagccccgaggagccc

SEQ ID NO: 5903111 - DNA, 25 bp, Homo sapien
tgggtagagaagaggcgaggggcag

SEQ ID NO: 5903112 - DNA, 25 bp, Homo sapien
cttgatgcctgtggctttcttgatc

SEQ ID NO: 5903113 - DNA, 25 bp, Homo sapien
ggaggattgctttctcttgctcgct

SEQ ID NO: 5903114 - DNA, 25 bp, Homo sapien
gagtctccagaaaaggaaggggatt

SEQ ID NO: 5903115 - DNA, 25 bp, Homo sapien
gatctgggactcattcaggctgagc

SEQ ID NO: 5903116 - DNA, 25 bp, Homo sapien
tgtacagtccctgggccatgaggtg

SEQ ID NO: 5903117 - DNA, 25 bp, Homo sapien
gcctccctccatagcgatcgtctct

SEQ ID NO: 5903118 - DNA, 25 bp, Homo sapien
cacactcacactcacacaaagaaaa

SEQ ID NO: 5903119 - DNA, 25 bp, Homo sapien
tggttgtacagtccctgggccatga

SEQ ID NO: 5903120 - DNA, 25 bp, Homo sapien
ccatagcgatcgtctctgcgtgggg

SEQ ID NO: 5903121 - DNA, 25 bp, Homo sapien
aacacactcacactcacacaaagaa

SEQ ID NO: 5903122 - DNA, 25 bp, Homo sapien
gggaccgcgggcccccggagctggc

SEQ ID NO: 5903123 - DNA, 25 bp, Homo sapien
tgaaccgtggtggtagagtggttgt

SEQ ID NO: 5903124 - DNA, 25 bp, Homo sapien
ctccatagcgatcgtctctgcgtgg

SEQ ID NO: 5903125 - DNA, 25 bp, Homo sapien
gatagagctttaaggaattcgcagt

SEQ ID NO: 5903126 - DNA, 25 bp, Homo sapien
cgatcgtctctgcgtggggctggtg

SEQ ID NO: 5903127 - DNA, 25 bp, Homo sapien
tggggctggtgaagcggcagccccg

SEQ ID NO: 5903128 - DNA, 25 bp, Homo sapien
gtctgtggggttgtatttctcaagg

SEQ ID NO: 5903129 - DNA, 25 bp, Homo sapien
gagaagcaaaaacattcaaaggaaa

SEQ ID NO: 5903130 - DNA, 25 bp, Homo sapien
agagcaacgaaaacgaaactgggct

SEQ ID NO: 5903131 - DNA, 25 bp, Homo sapien
atagaagaatcctgggtgggtagag

SEQ ID NO: 5903132 - DNA, 25 bp, Homo sapien
tgtcgccctgattgatgcctccctc

SEQ ID NO: 5903133 - DNA, 25 bp, Homo sapien
gtagagtggttgtacagtccctggg

SEQ ID NO: 5903134 - DNA, 25 bp, Homo sapien
gaccgcgggcccccggagctggcca

SEQ ID NO: 5903135 - DNA, 25 bp, Homo sapien
ccctggaggtggcacgggcgccgtt

SEQ ID NO: 5903136 - DNA, 25 bp, Homo sapien
ttgttcctatgtgaatgtccactcg

SEQ ID NO: 5903137 - DNA, 25 bp, Homo sapien
agcaaaaacattcaaaggaaaagag

SEQ ID NO: 5903138 - DNA, 25 bp, Homo sapien
ggctttcttgatcttggcacgcttg

SEQ ID NO: 5903139 - DNA, 25 bp, Homo sapien
tcccccatagcacctgtccgagtct

SEQ ID NO: 5903140 - DNA, 25 bp, Homo sapien
tttcatcttatacagtgagttagag

SEQ ID NO: 5903141 - DNA, 25 bp, Homo sapien
cggcggttcagtctcgcagtctgtg

SEQ ID NO: 5903142 - DNA, 25 bp, Homo sapien
ctcaaggagtctccagaaaaggaag

SEQ ID NO: 5903143 - DNA, 25 bp, Homo sapien
gaaaccagggccagcgttgggggtg

SEQ ID NO: 5903144 - DNA, 25 bp, Homo sapien
gctttctctgtcgccctgattgatg

SEQ ID NO: 5903145 - DNA, 25 bp, Homo sapien
ggtagagaagaggcgaggggcagac

SEQ ID NO: 5903146 - DNA, 25 bp, Homo sapien
agaccaatagaagaatcctgggtgg

SEQ ID NO: 5903147 - DNA, 25 bp, Homo sapien
gatagacaagaccaatagaagaatc

SEQ ID NO: 5903148 - DNA, 25 bp, Homo sapien
tgggctgaaattaaatatatacacg

SEQ ID NO: 5903149 - DNA, 25 bp, Homo sapien
tgatcttggcacgcttgttttggaa

SEQ ID NO: 5903150 - DNA, 25 bp, Homo sapien
ccaggccgttcttgatgcctgtggc

SEQ ID NO: 5903151 - DNA, 25 bp, Homo sapien
ctatgtgaatgtccactcggaggat

SEQ ID NO: 5903152 - DNA, 25 bp, Homo sapien
agtttcatcttatacagtgagttag

SEQ ID NO: 5903153 - DNA, 25 bp, Homo sapien
gcagcgccaggccgttcttgatgcc

SEQ ID NO: 5903154 - DNA, 25 bp, Homo sapien
cgcagtctgtggggttgtatttctc

SEQ ID NO: 5903155 - DNA, 25 bp, Homo sapien
tttctctgtcgccctgattgatgcc

SEQ ID NO: 5903156 - DNA, 25 bp, Homo sapien
tccgagtcttactcccgtttcaaaa

SEQ ID NO: 5903157 - DNA, 25 bp, Homo sapien
atgtgaatgtccactcggaggattg

SEQ ID NO: 5903158 - DNA, 25 bp, Homo sapien
cactcacacaaagaaaagtcccaga

SEQ ID NO: 5903159 - DNA, 25 bp, Homo sapien
ctcacacaaagaaaagtcccagaga

SEQ ID NO: 5903160 - DNA, 25 bp, Homo sapien
tgatgcctgtggctttcttgatctt

SEQ ID NO: 5903161 - DNA, 25 bp, Homo sapien
gggtgcaggaggtacccagagaagc

SEQ ID NO: 5903162 - DNA, 25 bp, Homo sapien
gtctcgcagtctgtggggttgtatt

SEQ ID NO: 5903163 - DNA, 25 bp, Homo sapien
tctcttgctcgctttctctgtcgcc

SEQ ID NO: 5903164 - DNA, 25 bp, Homo sapien
cgttttgttcctatgtgaatgtcca

SEQ ID NO: 5903165 - DNA, 25 bp, Homo sapien
tgtccgagtcttactcccgtttcaa

SEQ ID NO: 5903166 - DNA, 25 bp, Homo sapien
gccctgattgatgcctccctccata

SEQ ID NO: 5903167 - DNA, 25 bp, Homo sapien
cagtgagttagagaatagatgttta

SEQ ID NO: 5903168 - DNA, 25 bp, Homo sapien
agcgttgggggtgcaggaggtaccc

SEQ ID NO: 5903169 - DNA, 25 bp, Homo sapien
cagtctcgcagtctgtggggttgta

SEQ ID NO: 5903170 - DNA, 25 bp, Homo sapien
gatcttgatctgggactcattcagg

SEQ ID NO: 5903171 - DNA, 25 bp, Homo sapien
tgcgtggggctggtgaagcggcagc

SEQ ID NO: 5903172 - DNA, 25 bp, Homo sapien
gcccccggagctggccacagctact

SEQ ID NO: 5903173 - DNA, 25 bp, Homo sapien
attcgcagtttcatcttatacagtg

SEQ ID NO: 5903174 - DNA, 25 bp, Homo sapien
ccgcgggcccccggagctggccaca

SEQ ID NO: 5903175 - DNA, 25 bp, Homo sapien
cttatacagtgagttagagaataga

SEQ ID NO: 5903176 - DNA, 25 bp, Homo sapien
ggcacgggcgccgttgggaccgcgg

SEQ ID NO: 5903177 - DNA, 25 bp, Homo sapien
cacaaagaaaagtcccagagaaacc

SEQ ID NO: 5903178 - DNA, 25 bp, Homo sapien
acgggagggatagacaagaccaata

SEQ ID NO: 5903179 - DNA, 25 bp, Homo sapien
gtagcggcggttcagtctcgcagtc

SEQ ID NO: 5903180 - DNA, 25 bp, Homo sapien
tcgtaagcagtttggctagatagag

SEQ ID NO: 5903181 - DNA, 25 bp, Homo sapien
aggccgttcttgatgcctgtggctt

SEQ ID NO: 5903182 - DNA, 25 bp, Homo sapien
ctgggccatgaggtgcagcgccagg

SEQ ID NO: 5903183 - DNA, 25 bp, Homo sapien
gttttggaaccagatcttgatctgg

SEQ ID NO: 5903184 - DNA, 25 bp, Homo sapien
ttctcaaggagtctccagaaaagga

SEQ ID NO: 5903185 - DNA, 25 bp, Homo sapien
gaattcgcagtttcatcttatacag

SEQ ID NO: 5903186 - DNA, 25 bp, Homo sapien
aattaaatatatacacggtcgtaag

SEQ ID NO: 5903187 - DNA, 25 bp, Homo sapien
gtcctgaaccgtggtggtagagtgg

SEQ ID NO: 5903188 - DNA, 25 bp, Homo sapien
ctcgcagtctgtggggttgtatttc

SEQ ID NO: 5903189 - DNA, 25 bp, Homo sapien
aggaattcgcagtttcatcttatac

SEQ ID NO: 5903190 - DNA, 25 bp, Homo sapien
gtgagttagagaatagatgtttatt

SEQ ID NO: 5903191 - DNA, 25 bp, Homo sapien
cctgaaccgtggtggtagagtggtt

SEQ ID NO: 5903192 - DNA, 25 bp, Homo sapien
ttaaatatatacacggtcgtaagca

SEQ ID NO: 5903193 - DNA, 25 bp, Homo sapien
cccagagaaaccagggccagcgttg

SEQ ID NO: 5903194 - DNA, 25 bp, Homo sapien
tagagaatagatgtttatttttccc

SEQ ID NO: 5903195 - DNA, 25 bp, Homo sapien
gctagatagagctttaaggaattcg

SEQ ID NO: 5903196 - DNA, 25 bp, Homo sapien
gttagagaatagatgtttatttttc

SEQ ID NO: 5903197 - DNA, 25 bp, Homo sapien
tcggaggattgctttctcttgctcg

SEQ ID NO: 5903198 - DNA, 25 bp, Homo sapien
gaatcctgggtgggtagagaagagg

SEQ ID NO: 5903199 - DNA, 25 bp, Homo sapien
caaaaacattcaaaggaaaagagca

SEQ ID NO: 5903200 - DNA, 25 bp, Homo sapien
gaagcggcagccccgaggagccctg

SEQ ID NO: 5903201 - DNA, 25 bp, Homo sapien
agcggcggttcagtctcgcagtctg

SEQ ID NO: 5903202 - DNA, 25 bp, Homo sapien
actcggaggattgctttctcttgct

SEQ ID NO: 5903203 - DNA, 25 bp, Homo sapien
agtggttgtacagtccctgggccat

SEQ ID NO: 5903204 - DNA, 25 bp, Homo sapien
ttgatctgggactcattcaggctga

SEQ ID NO: 5903205 - DNA, 25 bp, Homo sapien
cagatcttgatctgggactcattca

SEQ ID NO: 5903206 - DNA, 25 bp, Homo sapien
cagtagcctttcctatctttaaatg

SEQ ID NO: 5903207 - DNA, 25 bp, Homo sapien
gcttttgcagttcaggaaattgaat

SEQ ID NO: 5903208 - DNA, 25 bp, Homo sapien
aggctgggcacaaacgcttaaacca

SEQ ID NO: 5903209 - DNA, 25 bp, Homo sapien
tgctgagatgtctgtcccagactac

SEQ ID NO: 5903210 - DNA, 25 bp, Homo sapien
tttgtgatactaagcattaaatagc

SEQ ID NO: 5903211 - DNA, 25 bp, Homo sapien
ttaagactgtatagtggcagtgatt

SEQ ID NO: 5903212 - DNA, 25 bp, Homo sapien
cctttgcctgacaaaaagaattttc

SEQ ID NO: 5903213 - DNA, 25 bp, Homo sapien
ttgtctttaagactgtatagtggca

SEQ ID NO: 5903214 - DNA, 25 bp, Homo sapien
tcttaactctaaaaatgtctaataa

SEQ ID NO: 5903215 - DNA, 25 bp, Homo sapien
tatgtatgtagatcatgcttttgga

SEQ ID NO: 5903216 - DNA, 25 bp, Homo sapien
gtgagcacagaccaactgaacaaaa

SEQ ID NO: 5903217 - DNA, 25 bp, Homo sapien
tgggaactaaaactctaggtgagaa

SEQ ID NO: 5903218 - DNA, 25 bp, Homo sapien
aacaatcaggtggcttttgcagttc

SEQ ID NO: 5903219 - DNA, 25 bp, Homo sapien
tttgcctttgcctgacaaaaagaat

SEQ ID NO: 5903220 - DNA, 25 bp, Homo sapien
acgcaactgctttgcctttgcctga

SEQ ID NO: 5903221 - DNA, 25 bp, Homo sapien
caccacagaaagccttaccactact

SEQ ID NO: 5903222 - DNA, 25 bp, Homo sapien
gatattgctccagatgctgagatgt

SEQ ID NO: 5903223 - DNA, 25 bp, Homo sapien
tctccaaggggccttatactcaacg

SEQ ID NO: 5903224 - DNA, 25 bp, Homo sapien
caccgtgcagtctccaaggggcctt

SEQ ID NO: 5903225 - DNA, 25 bp, Homo sapien
gttgggagagcatgagagtggatat

SEQ ID NO: 5903226 - DNA, 25 bp, Homo sapien
acgtcttgtataaaaccaagcttta

SEQ ID NO: 5903227 - DNA, 25 bp, Homo sapien
gtctaataacctgcattattagaaa

SEQ ID NO: 5903228 - DNA, 25 bp, Homo sapien
agctacgttttttatgtatgtagat

SEQ ID NO: 5903229 - DNA, 25 bp, Homo sapien
atgtctaataacctgcattattaga

SEQ ID NO: 5903230 - DNA, 25 bp, Homo sapien
cagatgctgagatgtctgtcccaga

SEQ ID NO: 5903231 - DNA, 25 bp, Homo sapien
aaaggctgggcacaaacgcttaaac

SEQ ID NO: 5903232 - DNA, 25 bp, Homo sapien
caaaatcatgcagtagcctttccta

SEQ ID NO: 5903233 - DNA, 25 bp, Homo sapien
ttcaggaaattgaatgcagattata

SEQ ID NO: 5903234 - DNA, 25 bp, Homo sapien
tctgagacagcagatattgctccag

SEQ ID NO: 5903235 - DNA, 25 bp, Homo sapien
aaaagcaaaacaatcaggtggcttt

SEQ ID NO: 5903236 - DNA, 25 bp, Homo sapien
gtctttaagactgtatagtggcagt

SEQ ID NO: 5903237 - DNA, 25 bp, Homo sapien
agccacgtcttgtataaaaccaagc

SEQ ID NO: 5903238 - DNA, 25 bp, Homo sapien
ttttggtcaatgaacgtaaagaaaa

SEQ ID NO: 5903239 - DNA, 25 bp, Homo sapien
ggttatgtgagcacagaccaactga

SEQ ID NO: 5903240 - DNA, 25 bp, Homo sapien
tgcagtagcctttcctatctttaaa

SEQ ID NO: 5903241 - DNA, 25 bp, Homo sapien
aattttccctcctcgtgtggttatg

SEQ ID NO: 5903242 - DNA, 25 bp, Homo sapien
gcagtgattgtctgtactgtgggtc

SEQ ID NO: 5903243 - DNA, 25 bp, Homo sapien
cactactgcccagatgtctgagaca

SEQ ID NO: 5903244 - DNA, 25 bp, Homo sapien
ttaaatctgtgttgggagagcatga

SEQ ID NO: 5903245 - DNA, 25 bp, Homo sapien
agtggaaaatcaagaattcgtaatc

SEQ ID NO: 5903246 - DNA, 25 bp, Homo sapien
gggtcttaattttgtgatactaagc

SEQ ID NO: 5903247 - DNA, 25 bp, Homo sapien
accaactgaacaaaatcatgcagta

SEQ ID NO: 5903248 - DNA, 25 bp, Homo sapien
gaaaatcaagaattcgtaatcagat

SEQ ID NO: 5903249 - DNA, 25 bp, Homo sapien
cagatgtctgagacagcagatattg

SEQ ID NO: 5903250 - DNA, 25 bp, Homo sapien
tatgtagatcatgcttttggaaaaa

SEQ ID NO: 5903251 - DNA, 25 bp, Homo sapien
ctgtgttgggagagcatgagagtgg

SEQ ID NO: 5903252 - DNA, 25 bp, Homo sapien
ggcacaaacgcttaaaccaaaacta

SEQ ID NO: 5903253 - DNA, 25 bp, Homo sapien
tgtggcccgtcgcatggaagccacg

SEQ ID NO: 5903254 - DNA, 25 bp, Homo sapien
tgaacaaaatcatgcagtagccttt

SEQ ID NO: 5903255 - DNA, 25 bp, Homo sapien
agactacaccacggttcacaccgtg

SEQ ID NO: 5903256 - DNA, 25 bp, Homo sapien
tactcaacgcaactgctttgccttt

SEQ ID NO: 5903257 - DNA, 25 bp, Homo sapien
gttttttatgtatgtagatcatgct

SEQ ID NO: 5903258 - DNA, 25 bp, Homo sapien
tattttaatgaattgtctttaagac

SEQ ID NO: 5903259 - DNA, 25 bp, Homo sapien
tgttttggtcaatgaacgtaaagaa

SEQ ID NO: 5903260 - DNA, 25 bp, Homo sapien
tcgctgtggcccgtcgcatggaagc

SEQ ID NO: 5903261 - DNA, 25 bp, Homo sapien
taacttccaaaacttcttaactcta

SEQ ID NO: 5903262 - DNA, 25 bp, Homo sapien
aatgcatcgctgtggcccgtcgcat

SEQ ID NO: 5903263 - DNA, 25 bp, Homo sapien
cctttcctatctttaaatggcaagg

SEQ ID NO: 5903264 - DNA, 25 bp, Homo sapien
ccacagaaagccttaccactactgc

SEQ ID NO: 5903265 - DNA, 25 bp, Homo sapien
tggcccgtcgcatggaagccacgtc

SEQ ID NO: 5903266 - DNA, 25 bp, Homo sapien
tatactcaacgcaactgctttgcct

SEQ ID NO: 5903267 - DNA, 25 bp, Homo sapien
gatatttttaataatttacacttta

SEQ ID NO: 5903268 - DNA, 25 bp, Homo sapien
tccaaggggccttatactcaacgca

SEQ ID NO: 5903269 - DNA, 25 bp, Homo sapien
aaaatactttttctggaaatgtcaa

SEQ ID NO: 5903270 - DNA, 25 bp, Homo sapien
ttggatatgcaaaacatttattttg

SEQ ID NO: 5903271 - DNA, 25 bp, Homo sapien
agtgattgtctgtactgtgggtctt

SEQ ID NO: 5903272 - DNA, 25 bp, Homo sapien
ctttataatatgctacacacatatt

SEQ ID NO: 5903273 - DNA, 25 bp, Homo sapien
gtcttaattttgtgatactaagcat

SEQ ID NO: 5903274 - DNA, 25 bp, Homo sapien
tgtcccagactacaccacggttcac

SEQ ID NO: 5903275 - DNA, 25 bp, Homo sapien
aagaggacatttacatcaccacaga

SEQ ID NO: 5903276 - DNA, 25 bp, Homo sapien
tggcttttgcagttcaggaaattga

SEQ ID NO: 5903277 - DNA, 25 bp, Homo sapien
tgtgatactaagcattaaatagcta

SEQ ID NO: 5903278 - DNA, 25 bp, Homo sapien
ggtggcttttgcagttcaggaaatt

SEQ ID NO: 5903279 - DNA, 25 bp, Homo sapien
tacaccacggttcacaccgtgcagt

SEQ ID NO: 5903280 - DNA, 25 bp, Homo sapien
caccacggttcacaccgtgcagtct

SEQ ID NO: 5903281 - DNA, 25 bp, Homo sapien
aaattgaatgcagattatagcacag

SEQ ID NO: 5903282 - DNA, 25 bp, Homo sapien
atcaagaattcgtaatcagataaat

SEQ ID NO: 5903283 - DNA, 25 bp, Homo sapien
acatattgtagttcagaacaatcca

SEQ ID NO: 5903284 - DNA, 25 bp, Homo sapien
ttaaatggcaagggaaaggctgggc

SEQ ID NO: 5903285 - DNA, 25 bp, Homo sapien
ccacgtcttgtataaaaccaagctt

SEQ ID NO: 5903286 - DNA, 25 bp, Homo sapien
aatgaattgtctttaagactgtata

SEQ ID NO: 5903287 - DNA, 25 bp, Homo sapien
tgtagcagctacagtgtaaagaggg

SEQ ID NO: 5903288 - DNA, 25 bp, Homo sapien
aaactatgttttaaatctgtgttgg

SEQ ID NO: 5903289 - DNA, 25 bp, Homo sapien
cagattatagcacaggctgattttt

SEQ ID NO: 5903290 - DNA, 25 bp, Homo sapien
caagggaaaggctgggcacaaacgc

SEQ ID NO: 5903291 - DNA, 25 bp, Homo sapien
caactgaacaaaatcatgcagtagc

SEQ ID NO: 5903292 - DNA, 25 bp, Homo sapien
atatgcaaaacatttattttgacat

SEQ ID NO: 5903293 - DNA, 25 bp, Homo sapien
gtgtggttatgtgagcacagaccaa

SEQ ID NO: 5903294 - DNA, 25 bp, Homo sapien
ggttcacaccgtgcagtctccaagg

SEQ ID NO: 5903295 - DNA, 25 bp, Homo sapien
gatcatgcttttggaaaaagcaaaa

SEQ ID NO: 5903296 - DNA, 25 bp, Homo sapien
tatgttttaaatctgtgttgggaga

SEQ ID NO: 5903297 - DNA, 25 bp, Homo sapien
tttggaaaaagcaaaacaatcaggt

SEQ ID NO: 5903298 - DNA, 25 bp, Homo sapien
gctgtggcccgtcgcatggaagcca

SEQ ID NO: 5903299 - DNA, 25 bp, Homo sapien
aggatgtagcagctacagtgtaaag

SEQ ID NO: 5903300 - DNA, 25 bp, Homo sapien
ttccctcctcgtgtggttatgtgag

SEQ ID NO: 5903301 - DNA, 25 bp, Homo sapien
tggatatggattctaaaatactttt

SEQ ID NO: 5903302 - DNA, 25 bp, Homo sapien
caaggggccttatactcaacgcaac

SEQ ID NO: 5903303 - DNA, 25 bp, Homo sapien
aaatagctacgttttttatgtatgt

SEQ ID NO: 5903304 - DNA, 25 bp, Homo sapien
atgtgagcacagaccaactgaacaa

SEQ ID NO: 5903305 - DNA, 25 bp, Homo sapien
aaatctgtgttgggagagcatgaga

SEQ ID NO: 5903306 - DNA, 25 bp, Homo sapien
ttaatgaattgtctttaagactgta

SEQ ID NO: 5903307 - DNA, 25 bp, Homo sapien
atctgtgttgggagagcatgagagt

SEQ ID NO: 5903308 - DNA, 25 bp, Homo sapien
cccagatgtctgagacagcagatat

SEQ ID NO: 5903309 - DNA, 25 bp, Homo sapien
gcacagaccaactgaacaaaatcat

SEQ ID NO: 5903310 - DNA, 25 bp, Homo sapien
ttttaaatctgtgttgggagagcat

SEQ ID NO: 5903311 - DNA, 25 bp, Homo sapien
ctgagatgtctgtcccagactacac

SEQ ID NO: 5903312 - DNA, 25 bp, Homo sapien
catcgctgtggcccgtcgcatggaa

SEQ ID NO: 5903313 - DNA, 25 bp, Homo sapien
gctccagatgctgagatgtctgtcc

SEQ ID NO: 5903314 - DNA, 25 bp, Homo sapien
tgtctgagacagcagatattgctcc

SEQ ID NO: 5903315 - DNA, 25 bp, Homo sapien
tagatcatgcttttggaaaaagcaa

SEQ ID NO: 5903316 - DNA, 25 bp, Homo sapien
gcaactgctttgcctttgcctgaca

SEQ ID NO: 5903317 - DNA, 25 bp, Homo sapien
aactctaggtgagaaggtaaaacta

SEQ ID NO: 5903318 - DNA, 25 bp, Homo sapien
ttttgcagttcaggaaattgaatgc

SEQ ID NO: 5903319 - DNA, 25 bp, Homo sapien
gatgtagcagctacagtgtaaagag

SEQ ID NO: 5903320 - DNA, 25 bp, Homo sapien
ggaaattgaatgcagattatagcac

SEQ ID NO: 5903321 - DNA, 25 bp, Homo sapien
cccattgtgaattataaatatttta

SEQ ID NO: 5903322 - DNA, 25 bp, Homo sapien
aatatgctacacacatattgtagtt

SEQ ID NO: 5903323 - DNA, 25 bp, Homo sapien
taaatgctcccattgtgaattataa

SEQ ID NO: 5903324 - DNA, 25 bp, Homo sapien
tggaaaatcaagaattcgtaatcag

SEQ ID NO: 5903325 - DNA, 25 bp, Homo sapien
agcctttcctatctttaaatggcaa

SEQ ID NO: 5903326 - DNA, 25 bp, Homo sapien
caaacaagttagatttttacaaagc

SEQ ID NO: 5903327 - DNA, 25 bp, Homo sapien
ggaactaaaactctaggtgagaagg

SEQ ID NO: 5903328 - DNA, 25 bp, Homo sapien
tataacttccaaaacttcttaactc

SEQ ID NO: 5903329 - DNA, 25 bp, Homo sapien
cacaaacgcttaaaccaaaactatg

SEQ ID NO: 5903330 - DNA, 25 bp, Homo sapien
gcagttcaggaaattgaatgcagat

SEQ ID NO: 5903331 - DNA, 25 bp, Homo sapien
tgctacacacatattgtagttcaga

SEQ ID NO: 5903332 - DNA, 25 bp, Homo sapien
tttttatgtatgtagatcatgcttt

SEQ ID NO: 5903333 - DNA, 25 bp, Homo sapien
tgattgtctgtactgtgggtcttaa

SEQ ID NO: 5903334 - DNA, 25 bp, Homo sapien
ttaaatagctacgttttttatgtat

SEQ ID NO: 5903335 - DNA, 25 bp, Homo sapien
catgagagtggatatggattctaaa

SEQ ID NO: 5903336 - DNA, 25 bp, Homo sapien
ctttaagactgtatagtggcagtga

SEQ ID NO: 5903337 - DNA, 25 bp, Homo sapien
ccagactacaccacggttcacaccg

SEQ ID NO: 5903338 - DNA, 25 bp, Homo sapien
acagaccaactgaacaaaatcatgc

SEQ ID NO: 5903339 - DNA, 25 bp, Homo sapien
accactactgcccagatgtctgaga

SEQ ID NO: 5903340 - DNA, 25 bp, Homo sapien
ctcaacgcaactgctttgcctttgc

SEQ ID NO: 5903341 - DNA, 25 bp, Homo sapien
acagcagatattgctccagatgctg

SEQ ID NO: 5903342 - DNA, 25 bp, Homo sapien
ctatctttaaatggcaagggaaagg

SEQ ID NO: 5903343 - DNA, 25 bp, Homo sapien
agagtggatatggattctaaaatac

SEQ ID NO: 5903344 - DNA, 25 bp, Homo sapien
atagtggcagtgattgtctgtactg

SEQ ID NO: 5903345 - DNA, 25 bp, Homo sapien
tttcctatctttaaatggcaaggga

SEQ ID NO: 5903346 - DNA, 25 bp, Homo sapien
actatgttttaaatctgtgttggga

SEQ ID NO: 5903347 - DNA, 25 bp, Homo sapien
gagcacagaccaactgaacaaaatc

SEQ ID NO: 5903348 - DNA, 25 bp, Homo sapien
catggaagccacgtcttgtataaaa

SEQ ID NO: 5903349 - DNA, 25 bp, Homo sapien
taattttgtgatactaagcattaaa

SEQ ID NO: 5903350 - DNA, 25 bp, Homo sapien
taactgggaactaaaactctaggtg

SEQ ID NO: 5903351 - DNA, 25 bp, Homo sapien
gatgctgagatgtctgtcccagact

SEQ ID NO: 5903352 - DNA, 25 bp, Homo sapien
aaaccaagctttaaccaagaggaca

SEQ ID NO: 5903353 - DNA, 25 bp, Homo sapien
catgttttggtcaatgaacgtaaag

SEQ ID NO: 5903354 - DNA, 25 bp, Homo sapien
gaggacatttacatcaccacagaaa

SEQ ID NO: 5903355 - DNA, 25 bp, Homo sapien
taataacctgcattattagaaaaaa

SEQ ID NO: 5903356 - DNA, 25 bp, Homo sapien
ggaaatgtcaaaatatcaataagtg

SEQ ID NO: 5903357 - DNA, 25 bp, Homo sapien
aactaaaactctaggtgagaaggta

SEQ ID NO: 5903358 - DNA, 25 bp, Homo sapien
taagcattaaatagctacgtttttt

SEQ ID NO: 5903359 - DNA, 25 bp, Homo sapien
aacaaaatcatgcagtagcctttcc

SEQ ID NO: 5903360 - DNA, 25 bp, Homo sapien
atcaccacagaaagccttaccacta

SEQ ID NO: 5903361 - DNA, 25 bp, Homo sapien
agtggatatggattctaaaatactt

SEQ ID NO: 5903362 - DNA, 25 bp, Homo sapien
tataaaaccaagctttaaccaagag

SEQ ID NO: 5903363 - DNA, 25 bp, Homo sapien
atagctacgttttttatgtatgtag

SEQ ID NO: 5903364 - DNA, 25 bp, Homo sapien
tgggagagcatgagagtggatatgg

SEQ ID NO: 5903365 - DNA, 25 bp, Homo sapien
ctacgttttttatgtatgtagatca

SEQ ID NO: 5903366 - DNA, 25 bp, Homo sapien
gtcaaaatatcaataagtggaaaat

SEQ ID NO: 5903367 - DNA, 25 bp, Homo sapien
gcaaaacaatcaggtggcttttgca

SEQ ID NO: 5903368 - DNA, 25 bp, Homo sapien
aaatgtcaaaatatcaataagtgga

SEQ ID NO: 5903369 - DNA, 25 bp, Homo sapien
ctgacaaaaagaattttccctcctc

SEQ ID NO: 5903370 - DNA, 25 bp, Homo sapien
acacacatattgtagttcagaacaa

SEQ ID NO: 5903371 - DNA, 25 bp, Homo sapien
tgaatgcagattatagcacaggctg

SEQ ID NO: 5903372 - DNA, 25 bp, Homo sapien
tgcctgacaaaaagaattttccctc

SEQ ID NO: 5903373 - DNA, 25 bp, Homo sapien
cgtaatcagataaatgctcccattg

SEQ ID NO: 5903374 - DNA, 25 bp, Homo sapien
cagatattgctccagatgctgagat

SEQ ID NO: 5903375 - DNA, 25 bp, Homo sapien
agagcatgagagtggatatggattc

SEQ ID NO: 5903376 - DNA, 25 bp, Homo sapien
ctaaaatactttttctggaaatgtc

SEQ ID NO: 5903377 - DNA, 25 bp, Homo sapien
actacaccacggttcacaccgtgca

SEQ ID NO: 5903378 - DNA, 25 bp, Homo sapien
tgagagtggatatggattctaaaat

SEQ ID NO: 5903379 - DNA, 25 bp, Homo sapien
actaagcattaaatagctacgtttt

SEQ ID NO: 5903380 - DNA, 25 bp, Homo sapien
ttctggaaatgtcaaaatatcaata

SEQ ID NO: 5903381 - DNA, 25 bp, Homo sapien
ttttaatgaattgtctttaagactg

SEQ ID NO: 5903382 - DNA, 25 bp, Homo sapien
aaatcatgcagtagcctttcctatc

SEQ ID NO: 5903383 - DNA, 25 bp, Homo sapien
cacaccgtgcagtctccaaggggcc

SEQ ID NO: 5903384 - DNA, 25 bp, Homo sapien
tatgctacacacatattgtagttca

SEQ ID NO: 5903385 - DNA, 25 bp, Homo sapien
atttacatcaccacagaaagcctta

SEQ ID NO: 5903386 - DNA, 25 bp, Homo sapien
atattgtagttcagaacaatccatc

SEQ ID NO: 5903387 - DNA, 25 bp, Homo sapien
ttcacaccgtgcagtctccaagggg

SEQ ID NO: 5903388 - DNA, 25 bp, Homo sapien
aatatcaataagtggaaaatcaaga

SEQ ID NO: 5903389 - DNA, 25 bp, Homo sapien
ttatgtgagcacagaccaactgaac

SEQ ID NO: 5903390 - DNA, 25 bp, Homo sapien
tctgtactgtgggtcttaattttgt

SEQ ID NO: 5903391 - DNA, 25 bp, Homo sapien
gatgtctgtcccagactacaccacg

SEQ ID NO: 5903392 - DNA, 25 bp, Homo sapien
gattatagcacaggctgattttttt

SEQ ID NO: 5903393 - DNA, 25 bp, Homo sapien
aatactttttctggaaatgtcaaaa

SEQ ID NO: 5903394 - DNA, 25 bp, Homo sapien
aatgctcccattgtgaattataaat

SEQ ID NO: 5903395 - DNA, 25 bp, Homo sapien
tttatgtatgtagatcatgcttttg

SEQ ID NO: 5903396 - DNA, 25 bp, Homo sapien
cttaattttgtgatactaagcatta

SEQ ID NO: 5903397 - DNA, 25 bp, Homo sapien
tgaattgtctttaagactgtatagt

SEQ ID NO: 5903398 - DNA, 25 bp, Homo sapien
ctgtatagtggcagtgattgtctgt

SEQ ID NO: 5903399 - DNA, 25 bp, Homo sapien
agggaaaggctgggcacaaacgctt

SEQ ID NO: 5903400 - DNA, 25 bp, Homo sapien
gaagccacgtcttgtataaaaccaa

SEQ ID NO: 5903401 - DNA, 25 bp, Homo sapien
ttgctccagatgctgagatgtctgt

SEQ ID NO: 5903402 - DNA, 25 bp, Homo sapien
tgtataaaaccaagctttaaccaag

SEQ ID NO: 5903403 - DNA, 25 bp, Homo sapien
agaccaactgaacaaaatcatgcag

SEQ ID NO: 5903404 - DNA, 25 bp, Homo sapien
actgaacaaaatcatgcagtagcct

SEQ ID NO: 5903405 - DNA, 25 bp, Homo sapien
tgcccagatgtctgagacagcagat

SEQ ID NO: 5903406 - DNA, 25 bp, Homo sapien
gccttatactcaacgcaactgcttt

SEQ ID NO: 5903407 - DNA, 25 bp, Homo sapien
agtggcagtgattgtctgtactgtg

SEQ ID NO: 5903408 - DNA, 25 bp, Homo sapien
ctgctttgcctttgcctgacaaaaa

SEQ ID NO: 5903409 - DNA, 25 bp, Homo sapien
aactgctttgcctttgcctgacaaa

SEQ ID NO: 5903410 - DNA, 25 bp, Homo sapien
tagatttttacaaagcccttttata

SEQ ID NO: 5903411 - DNA, 25 bp, Homo sapien
gcagtctccaaggggccttatactc

SEQ ID NO: 5903412 - DNA, 25 bp, Homo sapien
tcaataagtggaaaatcaagaattc

SEQ ID NO: 5903413 - DNA, 25 bp, Homo sapien
ttttctggaaatgtcaaaatatcaa

SEQ ID NO: 5903414 - DNA, 25 bp, Homo sapien
ccgtcgcatggaagccacgtcttgt

SEQ ID NO: 5903415 - DNA, 25 bp, Homo sapien
agctttaaccaagaggacatttaca

SEQ ID NO: 5903416 - DNA, 25 bp, Homo sapien
tgatactaagcattaaatagctacg

SEQ ID NO: 5903417 - DNA, 25 bp, Homo sapien
aagactgtatagtggcagtgattgt

SEQ ID NO: 5903418 - DNA, 25 bp, Homo sapien
caggaaattgaatgcagattatagc

SEQ ID NO: 5903419 - DNA, 25 bp, Homo sapien
actgggaactaaaactctaggtgag

SEQ ID NO: 5903420 - DNA, 25 bp, Homo sapien
tgcctttgcctgacaaaaagaattt

SEQ ID NO: 5903421 - DNA, 25 bp, Homo sapien
acgttttttatgtatgtagatcatg

SEQ ID NO: 5903422 - DNA, 25 bp, Homo sapien
ggacatttacatcaccacagaaagc

SEQ ID NO: 5903423 - DNA, 25 bp, Homo sapien
tgtactgtgggtcttaattttgtga

SEQ ID NO: 5903424 - DNA, 25 bp, Homo sapien
aattgtctttaagactgtatagtgg

SEQ ID NO: 5903425 - DNA, 25 bp, Homo sapien
gtggttatgtgagcacagaccaact

SEQ ID NO: 5903426 - DNA, 25 bp, Homo sapien
ttaaccaagaggacatttacatcac

SEQ ID NO: 5903427 - DNA, 25 bp, Homo sapien
taatcagataaatgctcccattgtg

SEQ ID NO: 5903428 - DNA, 25 bp, Homo sapien
aaagccttaccactactgcccagat

SEQ ID NO: 5903429 - DNA, 25 bp, Homo sapien
tggaagccacgtcttgtataaaacc

SEQ ID NO: 5903430 - DNA, 25 bp, Homo sapien
ggtcaatgaacgtaaagaaaaccaa

SEQ ID NO: 5903431 - DNA, 25 bp, Homo sapien
tcgtgtggttatgtgagcacagacc

SEQ ID NO: 5903432 - DNA, 25 bp, Homo sapien
tatcaataagtggaaaatcaagaat

SEQ ID NO: 5903433 - DNA, 25 bp, Homo sapien
aattcgtaatcagataaatgctccc

SEQ ID NO: 5903434 - DNA, 25 bp, Homo sapien
caacgcaactgctttgcctttgcct

SEQ ID NO: 5903435 - DNA, 25 bp, Homo sapien
tctgtcccagactacaccacggttc

SEQ ID NO: 5903436 - DNA, 25 bp, Homo sapien
tcccagactacaccacggttcacac

SEQ ID NO: 5903437 - DNA, 25 bp, Homo sapien
tgtatgtagatcatgcttttggaaa

SEQ ID NO: 5903438 - DNA, 25 bp, Homo sapien
gatgtctgagacagcagatattgct

SEQ ID NO: 5903439 - DNA, 25 bp, Homo sapien
tgtagatcatgcttttggaaaaagc

SEQ ID NO: 5903440 - DNA, 25 bp, Homo sapien
gatatggattctaaaatactttttc

SEQ ID NO: 5903441 - DNA, 25 bp, Homo sapien
ctttttctggaaatgtcaaaatatc

SEQ ID NO: 5903442 - DNA, 25 bp, Homo sapien
attgaatgcagattatagcacaggc

SEQ ID NO: 5903443 - DNA, 25 bp, Homo sapien
tccagatgctgagatgtctgtccca

SEQ ID NO: 5903444 - DNA, 25 bp, Homo sapien
aatgcagattatagcacaggctgat

SEQ ID NO: 5903445 - DNA, 25 bp, Homo sapien
aagcaaaacaatcaggtggcttttg

SEQ ID NO: 5903446 - DNA, 25 bp, Homo sapien
caggtggcttttgcagttcaggaaa

SEQ ID NO: 5903447 - DNA, 25 bp, Homo sapien
ctttaaatggcaagggaaaggctgg

SEQ ID NO: 5903448 - DNA, 25 bp, Homo sapien
ttctaaaatactttttctggaaatg

SEQ ID NO: 5903449 - DNA, 25 bp, Homo sapien
gaaaaagcaaaacaatcaggtggct

SEQ ID NO: 5903450 - DNA, 25 bp, Homo sapien
taataatttacactttaagcatgag

SEQ ID NO: 5903451 - DNA, 25 bp, Homo sapien
acacatattgtagttcagaacaatc

SEQ ID NO: 5903452 - DNA, 25 bp, Homo sapien
acggttcacaccgtgcagtctccaa

SEQ ID NO: 5903453 - DNA, 25 bp, Homo sapien
ctaaaaatgtctaataacctgcatt

SEQ ID NO: 5903454 - DNA, 25 bp, Homo sapien
ataatatgctacacacatattgtag

SEQ ID NO: 5903455 - DNA, 25 bp, Homo sapien
agcatgagagtggatatggattcta

SEQ ID NO: 5903456 - DNA, 25 bp, Homo sapien
atggcaagggaaaggctgggcacaa

SEQ ID NO: 5903457 - DNA, 25 bp, Homo sapien
ttttccctcctcgtgtggttatgtg

SEQ ID NO: 5903458 - DNA, 25 bp, Homo sapien
ataacctgcattattagaaaaaaac

SEQ ID NO: 5903459 - DNA, 25 bp, Homo sapien
tgcatcgctgtggcccgtcgcatgg

SEQ ID NO: 5903460 - DNA, 25 bp, Homo sapien
tttttaataatttacactttaagca

SEQ ID NO: 5903461 - DNA, 25 bp, Homo sapien
aaaacaatcaggtggcttttgcagt

SEQ ID NO: 5903462 - DNA, 25 bp, Homo sapien
agaattcgtaatcagataaatgctc

SEQ ID NO: 5903463 - DNA, 25 bp, Homo sapien
atgtcaaaatatcaataagtggaaa

SEQ ID NO: 5903464 - DNA, 25 bp, Homo sapien
ttacatcaccacagaaagccttacc

SEQ ID NO: 5903465 - DNA, 25 bp, Homo sapien
tggcagtgattgtctgtactgtggg

SEQ ID NO: 5903466 - DNA, 25 bp, Homo sapien
tactttttctggaaatgtcaaaata

SEQ ID NO: 5903467 - DNA, 25 bp, Homo sapien
aataagtggaaaatcaagaattcgt

SEQ ID NO: 5903468 - DNA, 25 bp, Homo sapien
cagataaatgctcccattgtgaatt

SEQ ID NO: 5903469 - DNA, 25 bp, Homo sapien
ccacggttcacaccgtgcagtctcc

SEQ ID NO: 5903470 - DNA, 25 bp, Homo sapien
atcagataaatgctcccattgtgaa

SEQ ID NO: 5903471 - DNA, 25 bp, Homo sapien
atcaggtggcttttgcagttcagga

SEQ ID NO: 5903472 - DNA, 25 bp, Homo sapien
ggatatgcaaaacatttattttgac

SEQ ID NO: 5903473 - DNA, 25 bp, Homo sapien
cattaaatagctacgttttttatgt

SEQ ID NO: 5903474 - DNA, 25 bp, Homo sapien
aaatcaagaattcgtaatcagataa

SEQ ID NO: 5903475 - DNA, 25 bp, Homo sapien
ggaaaggctgggcacaaacgcttaa

SEQ ID NO: 5903476 - DNA, 25 bp, Homo sapien
taagtggaaaatcaagaattcgtaa

SEQ ID NO: 5903477 - DNA, 25 bp, Homo sapien
ctcctcgtgtggttatgtgagcaca

SEQ ID NO: 5903478 - DNA, 25 bp, Homo sapien
ttataatatgctacacacatattgt

SEQ ID NO: 5903479 - DNA, 25 bp, Homo sapien
attgtctgtactgtgggtcttaatt

SEQ ID NO: 5903480 - DNA, 25 bp, Homo sapien
aaaaaatgcatcgctgtggcccgtc

SEQ ID NO: 5903481 - DNA, 25 bp, Homo sapien
agaattttccctcctcgtgtggtta

SEQ ID NO: 5903482 - DNA, 25 bp, Homo sapien
cttgtataaaaccaagctttaacca

SEQ ID NO: 5903483 - DNA, 25 bp, Homo sapien
tggaaaaagcaaaacaatcaggtgg

SEQ ID NO: 5903484 - DNA, 25 bp, Homo sapien
caagaattcgtaatcagataaatgc

SEQ ID NO: 5903485 - DNA, 25 bp, Homo sapien
cctgcattattagaaaaaaacattt

SEQ ID NO: 5903486 - DNA, 25 bp, Homo sapien
ctttaaccaagaggacatttacatc

SEQ ID NO: 5903487 - DNA, 25 bp, Homo sapien
aatattttaatgaattgtctttaag

SEQ ID NO: 5903488 - DNA, 25 bp, Homo sapien
aaccaagaggacatttacatcacca

SEQ ID NO: 5903489 - DNA, 25 bp, Homo sapien
tttgcctgacaaaaagaattttccc

SEQ ID NO: 5903490 - DNA, 25 bp, Homo sapien
gtcttgtataaaaccaagctttaac

SEQ ID NO: 5903491 - DNA, 25 bp, Homo sapien
ccctcctcgtgtggttatgtgagca

SEQ ID NO: 5903492 - DNA, 25 bp, Homo sapien
aggggccttatactcaacgcaactg

SEQ ID NO: 5903493 - DNA, 25 bp, Homo sapien
aaatggcaagggaaaggctgggcac

SEQ ID NO: 5903494 - DNA, 25 bp, Homo sapien
gtgcagtctccaaggggccttatac

SEQ ID NO: 5903495 - DNA, 25 bp, Homo sapien
ccgtgcagtctccaaggggccttat

SEQ ID NO: 5903496 - DNA, 25 bp, Homo sapien
aaaaatgtctaataacctgcattat

SEQ ID NO: 5903497 - DNA, 25 bp, Homo sapien
tgtctgtcccagactacaccacggt

SEQ ID NO: 5903498 - DNA, 25 bp, Homo sapien
caatcaggtggcttttgcagttcag

SEQ ID NO: 5903499 - DNA, 25 bp, Homo sapien
ctggaaatgtcaaaatatcaataag

SEQ ID NO: 5903500 - DNA, 25 bp, Homo sapien
gataaatgctcccattgtgaattat

SEQ ID NO: 5903501 - DNA, 25 bp, Homo sapien
ctgtgggtcttaattttgtgatact

SEQ ID NO: 5903502 - DNA, 25 bp, Homo sapien
catgcagtagcctttcctatcttta

SEQ ID NO: 5903503 - DNA, 25 bp, Homo sapien
gattctaaaatactttttctggaaa

SEQ ID NO: 5903504 - DNA, 25 bp, Homo sapien
ttatagcacaggctgattttttttt

SEQ ID NO: 5903505 - DNA, 25 bp, Homo sapien
agcacaggctgattttttttttctt

SEQ ID NO: 5903506 - DNA, 25 bp, Homo sapien
agcattaaatagctacgttttttat

SEQ ID NO: 5903507 - DNA, 25 bp, Homo sapien
tactgtgggtcttaattttgtgata

SEQ ID NO: 5903508 - DNA, 25 bp, Homo sapien
ggagagcatgagagtggatatggat

SEQ ID NO: 5903509 - DNA, 25 bp, Homo sapien
agaaagccttaccactactgcccag

SEQ ID NO: 5903510 - DNA, 25 bp, Homo sapien
aacctgcattattagaaaaaaacat

SEQ ID NO: 5903511 - DNA, 25 bp, Homo sapien
gtagcctttcctatctttaaatggc

SEQ ID NO: 5903512 - DNA, 25 bp, Homo sapien
ggcaagggaaaggctgggcacaaac

SEQ ID NO: 5903513 - DNA, 25 bp, Homo sapien
ttggtcaatgaacgtaaagaaaacc

SEQ ID NO: 5903514 - DNA, 25 bp, Homo sapien
aacttcttaactctaaaaatgtcta

SEQ ID NO: 5903515 - DNA, 25 bp, Homo sapien
caaaactatgttttaaatctgtgtt

SEQ ID NO: 5903516 - DNA, 25 bp, Homo sapien
atctttaaatggcaagggaaaggct

SEQ ID NO: 5903517 - DNA, 25 bp, Homo sapien
ccaaaaaatgcatcgctgtggcccg

SEQ ID NO: 5903518 - DNA, 25 bp, Homo sapien
taaaaccaagctttaaccaagagga

SEQ ID NO: 5903519 - DNA, 25 bp, Homo sapien
tggattctaaaatactttttctgga

SEQ ID NO: 5903520 - DNA, 25 bp, Homo sapien
acatttacatcaccacagaaagcct

SEQ ID NO: 5903521 - DNA, 25 bp, Homo sapien
atcatgcagtagcctttcctatctt

SEQ ID NO: 5903522 - DNA, 25 bp, Homo sapien
ctaaaactctaggtgagaaggtaaa

SEQ ID NO: 5903523 - DNA, 25 bp, Homo sapien
aaatgtctaataacctgcattatta

SEQ ID NO: 5903524 - DNA, 25 bp, Homo sapien
tgcagattatagcacaggctgattt

SEQ ID NO: 5903525 - DNA, 25 bp, Homo sapien
agttcaggaaattgaatgcagatta

SEQ ID NO: 5903526 - DNA, 25 bp, Homo sapien
gctgggcacaaacgcttaaaccaaa

SEQ ID NO: 5903527 - DNA, 25 bp, Homo sapien
aactctaaaaatgtctaataacctg

SEQ ID NO: 5903528 - DNA, 25 bp, Homo sapien
gtcgcatggaagccacgtcttgtat

SEQ ID NO: 5903529 - DNA, 25 bp, Homo sapien
ttgcagttcaggaaattgaatgcag

SEQ ID NO: 5903530 - DNA, 25 bp, Homo sapien
ctacacacatattgtagttcagaac

SEQ ID NO: 5903531 - DNA, 25 bp, Homo sapien
tcctatctttaaatggcaagggaaa

SEQ ID NO: 5903532 - DNA, 25 bp, Homo sapien
atactaagcattaaatagctacgtt

SEQ ID NO: 5903533 - DNA, 25 bp, Homo sapien
ttaccactactgcccagatgtctga

SEQ ID NO: 5903534 - DNA, 25 bp, Homo sapien
taaataactgggaactaaaactcta

SEQ ID NO: 5903535 - DNA, 25 bp, Homo sapien
accaagctttaaccaagaggacatt

SEQ ID NO: 5903536 - DNA, 25 bp, Homo sapien
tcaatgaacgtaaagaaaaccaaac

SEQ ID NO: 5903537 - DNA, 25 bp, Homo sapien
ttcgtaatcagataaatgctcccat

SEQ ID NO: 5903538 - DNA, 25 bp, Homo sapien
agccttaccactactgcccagatgt

SEQ ID NO: 5903539 - DNA, 25 bp, Homo sapien
ctactgcccagatgtctgagacagc

SEQ ID NO: 5903540 - DNA, 25 bp, Homo sapien
gtgttgggagagcatgagagtggat

SEQ ID NO: 5903541 - DNA, 25 bp, Homo sapien
gctttgcctttgcctgacaaaaaga

SEQ ID NO: 5903542 - DNA, 25 bp, Homo sapien
gactgtatagtggcagtgattgtct

SEQ ID NO: 5903543 - DNA, 25 bp, Homo sapien
ccaagaggacatttacatcaccaca

SEQ ID NO: 5903544 - DNA, 25 bp, Homo sapien
gtgggtcttaattttgtgatactaa

SEQ ID NO: 5903545 - DNA, 25 bp, Homo sapien
ccttaccactactgcccagatgtct

SEQ ID NO: 5903546 - DNA, 25 bp, Homo sapien
tgttttaaatctgtgttgggagagc

SEQ ID NO: 5903547 - DNA, 25 bp, Homo sapien
agacagcagatattgctccagatgc

SEQ ID NO: 5903548 - DNA, 25 bp, Homo sapien
tgggcacaaacgcttaaaccaaaac

SEQ ID NO: 5903549 - DNA, 25 bp, Homo sapien
ttcatgttttggtcaatgaacgtaa

SEQ ID NO: 5903550 - DNA, 25 bp, Homo sapien
attttgtgatactaagcattaaata

SEQ ID NO: 5903551 - DNA, 25 bp, Homo sapien
ttacaaagcccttttataacttcca

SEQ ID NO: 5903552 - DNA, 25 bp, Homo sapien
accaaaactatgttttaaatctgtg

SEQ ID NO: 5903553 - DNA, 25 bp, Homo sapien
tatggattctaaaatactttttctg

SEQ ID NO: 5903554 - DNA, 25 bp, Homo sapien
ctctaaaaatgtctaataacctgca

SEQ ID NO: 5903555 - DNA, 25 bp, Homo sapien
aaaatgcatcgctgtggcccgtcgc

SEQ ID NO: 5903556 - DNA, 25 bp, Homo sapien
gcttttggaaaaagcaaaacaatca

SEQ ID NO: 5903557 - DNA, 25 bp, Homo sapien
ctcccattgtgaattataaatattt

SEQ ID NO: 5903558 - DNA, 25 bp, Homo sapien
caagctttaaccaagaggacattta

SEQ ID NO: 5903559 - DNA, 25 bp, Homo sapien
actgcccagatgtctgagacagcag

SEQ ID NO: 5903560 - DNA, 25 bp, Homo sapien
ttaactctaaaaatgtctaataacc

SEQ ID NO: 5903561 - DNA, 25 bp, Homo sapien
cgcatggaagccacgtcttgtataa

SEQ ID NO: 5903562 - DNA, 25 bp, Homo sapien
agtctccaaggggccttatactcaa

SEQ ID NO: 5903563 - DNA, 25 bp, Homo sapien
atagcacaggctgattttttttttc

SEQ ID NO: 5903564 - DNA, 25 bp, Homo sapien
acatcaccacagaaagccttaccac

SEQ ID NO: 5903565 - DNA, 25 bp, Homo sapien
gggccttatactcaacgcaactgct

SEQ ID NO: 5903566 - DNA, 25 bp, Homo sapien
gagatgtctgtcccagactacacca

SEQ ID NO: 5903567 - DNA, 25 bp, Homo sapien
gtatagtggcagtgattgtctgtac

SEQ ID NO: 5903568 - DNA, 25 bp, Homo sapien
tgtctgtactgtgggtcttaatttt

SEQ ID NO: 5903569 - DNA, 25 bp, Homo sapien
cttatactcaacgcaactgctttgc

SEQ ID NO: 5903570 - DNA, 25 bp, Homo sapien
tattgctccagatgctgagatgtct

SEQ ID NO: 5903571 - DNA, 25 bp, Homo sapien
acagaaagccttaccactactgccc

SEQ ID NO: 5903572 - DNA, 25 bp, Homo sapien
tgagacagcagatattgctccagat

SEQ ID NO: 5903573 - DNA, 25 bp, Homo sapien
tttaataatttacactttaagcatg

SEQ ID NO: 5903574 - DNA, 25 bp, Homo sapien
gcccgtcgcatggaagccacgtctt

SEQ ID NO: 5903575 - DNA, 25 bp, Homo sapien
cctcgtgtggttatgtgagcacaga

SEQ ID NO: 5903576 - DNA, 25 bp, Homo sapien
cttcttaactctaaaaatgtctaat

SEQ ID NO: 5903577 - DNA, 25 bp, Homo sapien
agcagatattgctccagatgctgag

SEQ ID NO: 5903578 - DNA, 25 bp, Homo sapien
tgctcccattgtgaattataaatat

SEQ ID NO: 5903579 - DNA, 25 bp, Homo sapien
tataatctgcattcaatttcctgaa

SEQ ID NO: 5903580 - DNA, 25 bp, Homo sapien
tgctcacataaccacacgaggaggg

SEQ ID NO: 5903581 - DNA, 25 bp, Homo sapien
agttggtctgtgctcacataaccac

SEQ ID NO: 5903582 - DNA, 25 bp, Homo sapien
gacccacagtacagacaatcactgc

SEQ ID NO: 5903583 - DNA, 25 bp, Homo sapien
tccacttattgatattttgacattt

SEQ ID NO: 5903584 - DNA, 25 bp, Homo sapien
gtcaaaataaatgttttgcatatcc

SEQ ID NO: 5903585 - DNA, 25 bp, Homo sapien
cacagatttaaaacatagttttggt

SEQ ID NO: 5903586 - DNA, 25 bp, Homo sapien
aaaacgtagctatttaatgcttagt

SEQ ID NO: 5903587 - DNA, 25 bp, Homo sapien
tttagaatccatatccactctcatg

SEQ ID NO: 5903588 - DNA, 25 bp, Homo sapien
acatctgggcagtagtggtaaggct

SEQ ID NO: 5903589 - DNA, 25 bp, Homo sapien
cagtcttaaagacaattcattaaaa

SEQ ID NO: 5903590 - DNA, 25 bp, Homo sapien
gacgtggcttccatgcgacgggcca

SEQ ID NO: 5903591 - DNA, 25 bp, Homo sapien
tgtaaatgtcctcttggttaaagct

SEQ ID NO: 5903592 - DNA, 25 bp, Homo sapien
tctttttgtcaggcaaaggcaaagc

SEQ ID NO: 5903593 - DNA, 25 bp, Homo sapien
ttataattcacaatgggagcattta

SEQ ID NO: 5903594 - DNA, 25 bp, Homo sapien
gaactgcaaaagccacctgattgtt

SEQ ID NO: 5903595 - DNA, 25 bp, Homo sapien
gtttggttttctttacgttcattga

SEQ ID NO: 5903596 - DNA, 25 bp, Homo sapien
tagaatccatatccactctcatgct

SEQ ID NO: 5903597 - DNA, 25 bp, Homo sapien
taataatgcaggttattagacattt

SEQ ID NO: 5903598 - DNA, 25 bp, Homo sapien
tctaataatgcaggttattagacat

SEQ ID NO: 5903599 - DNA, 25 bp, Homo sapien
agtctgggacagacatctcagcatc

SEQ ID NO: 5903600 - DNA, 25 bp, Homo sapien
tggtgtagtctgggacagacatctc

SEQ ID NO: 5903601 - DNA, 25 bp, Homo sapien
catgcttaaagtgtaaattattaaa

SEQ ID NO: 5903602 - DNA, 25 bp, Homo sapien
actatacagtcttaaagacaattca

SEQ ID NO: 5903603 - DNA, 25 bp, Homo sapien
tgtggtgatgtaaatgtcctcttgg

SEQ ID NO: 5903604 - DNA, 25 bp, Homo sapien
gctttttccaaaagcatgatctaca

SEQ ID NO: 5903605 - DNA, 25 bp, Homo sapien
ctttacgttcattgaccaaaacatg

SEQ ID NO: 5903606 - DNA, 25 bp, Homo sapien
atgtttttttctaataatgcaggtt

SEQ ID NO: 5903607 - DNA, 25 bp, Homo sapien
acaaaattaagacccacagtacaga

SEQ ID NO: 5903608 - DNA, 25 bp, Homo sapien
gttaaagcttggttttatacaagac

SEQ ID NO: 5903609 - DNA, 25 bp, Homo sapien
cacttattgatattttgacatttcc

SEQ ID NO: 5903610 - DNA, 25 bp, Homo sapien
ccctctttacactgtagctgctaca

SEQ ID NO: 5903611 - DNA, 25 bp, Homo sapien
ttggttttatacaagacgtggcttc

SEQ ID NO: 5903612 - DNA, 25 bp, Homo sapien
acatacataaaaaacgtagctattt

SEQ ID NO: 5903613 - DNA, 25 bp, Homo sapien
atacaagacgtggcttccatgcgac

SEQ ID NO: 5903614 - DNA, 25 bp, Homo sapien
caaaagcatgatctacatacataaa

SEQ ID NO: 5903615 - DNA, 25 bp, Homo sapien
ctgcatgattttgttcagttggtct

SEQ ID NO: 5903616 - DNA, 25 bp, Homo sapien
cggtgtgaaccgtggtgtagtctgg

SEQ ID NO: 5903617 - DNA, 25 bp, Homo sapien
tgcacggtgtgaaccgtggtgtagt

SEQ ID NO: 5903618 - DNA, 25 bp, Homo sapien
ctacaatatgtgtgtagcatattat

SEQ ID NO: 5903619 - DNA, 25 bp, Homo sapien
tcctcttggttaaagcttggtttta

SEQ ID NO: 5903620 - DNA, 25 bp, Homo sapien
actctcatgctctcccaacacagat

SEQ ID NO: 5903621 - DNA, 25 bp, Homo sapien
tagttttggtttaagcgtttgtgcc

SEQ ID NO: 5903622 - DNA, 25 bp, Homo sapien
catttccagaaaaagtattttagaa

SEQ ID NO: 5903623 - DNA, 25 bp, Homo sapien
taaatgtcctcttggttaaagcttg

SEQ ID NO: 5903624 - DNA, 25 bp, Homo sapien
ttggagactgcacggtgtgaaccgt

SEQ ID NO: 5903625 - DNA, 25 bp, Homo sapien
aatgcaggttattagacatttttag

SEQ ID NO: 5903626 - DNA, 25 bp, Homo sapien
tataaaagggctttgtaaaaatcta

SEQ ID NO: 5903627 - DNA, 25 bp, Homo sapien
taaagcttggttttatacaagacgt

SEQ ID NO: 5903628 - DNA, 25 bp, Homo sapien
gattacgaattcttgattttccact

SEQ ID NO: 5903629 - DNA, 25 bp, Homo sapien
gagttaagaagttttggaagttata

SEQ ID NO: 5903630 - DNA, 25 bp, Homo sapien
agacatctgggcagtagtggtaagg

SEQ ID NO: 5903631 - DNA, 25 bp, Homo sapien
gcctgtgctataatctgcattcaat

SEQ ID NO: 5903632 - DNA, 25 bp, Homo sapien
ttttttctaataatgcaggttatta

SEQ ID NO: 5903633 - DNA, 25 bp, Homo sapien
tttgtcaggcaaaggcaaagcagtt

SEQ ID NO: 5903634 - DNA, 25 bp, Homo sapien
gataggaaaggctactgcatgattt

SEQ ID NO: 5903635 - DNA, 25 bp, Homo sapien
gcaaaggcaaagcagttgcgttgag

SEQ ID NO: 5903636 - DNA, 25 bp, Homo sapien
atatttataattcacaatgggagca

SEQ ID NO: 5903637 - DNA, 25 bp, Homo sapien
ctcttggttaaagcttggttttata

SEQ ID NO: 5903638 - DNA, 25 bp, Homo sapien
tagctatttaatgcttagtatcaca

SEQ ID NO: 5903639 - DNA, 25 bp, Homo sapien
ttgttcagttggtctgtgctcacat

SEQ ID NO: 5903640 - DNA, 25 bp, Homo sapien
ggtaaggctttctgtggtgatgtaa

SEQ ID NO: 5903641 - DNA, 25 bp, Homo sapien
tagtggtaaggctttctgtggtgat

SEQ ID NO: 5903642 - DNA, 25 bp, Homo sapien
tttttgtcaggcaaaggcaaagcag

SEQ ID NO: 5903643 - DNA, 25 bp, Homo sapien
gtgcccagcctttcccttgccattt

SEQ ID NO: 5903644 - DNA, 25 bp, Homo sapien
atgtcaaaataaatgttttgcatat

SEQ ID NO: 5903645 - DNA, 25 bp, Homo sapien
ttaagacccacagtacagacaatca

SEQ ID NO: 5903646 - DNA, 25 bp, Homo sapien
tgaactacaatatgtgtgtagcata

SEQ ID NO: 5903647 - DNA, 25 bp, Homo sapien
ttgagtataaggccccttggagact

SEQ ID NO: 5903648 - DNA, 25 bp, Homo sapien
agacaatcactgccactatacagtc

SEQ ID NO: 5903649 - DNA, 25 bp, Homo sapien
gcagtagtggtaaggctttctgtgg

SEQ ID NO: 5903650 - DNA, 25 bp, Homo sapien
cagcctgtgctataatctgcattca

SEQ ID NO: 5903651 - DNA, 25 bp, Homo sapien
ctggagcaatatctgctgtctcaga

SEQ ID NO: 5903652 - DNA, 25 bp, Homo sapien
ggttttatacaagacgtggcttcca

SEQ ID NO: 5903653 - DNA, 25 bp, Homo sapien
cacctagagttttagttcccagtta

SEQ ID NO: 5903654 - DNA, 25 bp, Homo sapien
tgcgttgagtataaggccccttgga

SEQ ID NO: 5903655 - DNA, 25 bp, Homo sapien
cagaaaaagtattttagaatccata

SEQ ID NO: 5903656 - DNA, 25 bp, Homo sapien
caaaagccacctgattgttttgctt

SEQ ID NO: 5903657 - DNA, 25 bp, Homo sapien
attttccacttattgatattttgac

SEQ ID NO: 5903658 - DNA, 25 bp, Homo sapien
tggaagttataaaagggctttgtaa

SEQ ID NO: 5903659 - DNA, 25 bp, Homo sapien
gaaaaagtattttagaatccatatc

SEQ ID NO: 5903660 - DNA, 25 bp, Homo sapien
tactgcatgattttgttcagttggt

SEQ ID NO: 5903661 - DNA, 25 bp, Homo sapien
taaagataggaaaggctactgcatg

SEQ ID NO: 5903662 - DNA, 25 bp, Homo sapien
cgtggtgtagtctgggacagacatc

SEQ ID NO: 5903663 - DNA, 25 bp, Homo sapien
caatatctgctgtctcagacatctg

SEQ ID NO: 5903664 - DNA, 25 bp, Homo sapien
gctataatctgcattcaatttcctg

SEQ ID NO: 5903665 - DNA, 25 bp, Homo sapien
aggctttctgtggtgatgtaaatgt

SEQ ID NO: 5903666 - DNA, 25 bp, Homo sapien
aagtattttagaatccatatccact

SEQ ID NO: 5903667 - DNA, 25 bp, Homo sapien
ttacgaattcttgattttccactta

SEQ ID NO: 5903668 - DNA, 25 bp, Homo sapien
tatcacaaaattaagacccacagta

SEQ ID NO: 5903669 - DNA, 25 bp, Homo sapien
cagcatctggagcaatatctgctgt

SEQ ID NO: 5903670 - DNA, 25 bp, Homo sapien
tcagttggtctgtgctcacataacc

SEQ ID NO: 5903671 - DNA, 25 bp, Homo sapien
gtataaggccccttggagactgcac

SEQ ID NO: 5903672 - DNA, 25 bp, Homo sapien
gcttagtatcacaaaattaagaccc

SEQ ID NO: 5903673 - DNA, 25 bp, Homo sapien
gatggattgttctgaactacaatat

SEQ ID NO: 5903674 - DNA, 25 bp, Homo sapien
aggcaaaggcaaagcagttgcgttg

SEQ ID NO: 5903675 - DNA, 25 bp, Homo sapien
tttttccaaaagcatgatctacata

SEQ ID NO: 5903676 - DNA, 25 bp, Homo sapien
ctgaactgcaaaagccacctgattg

SEQ ID NO: 5903677 - DNA, 25 bp, Homo sapien
gcattcaatttcctgaactgcaaaa

SEQ ID NO: 5903678 - DNA, 25 bp, Homo sapien
atacataaaaaacgtagctatttaa

SEQ ID NO: 5903679 - DNA, 25 bp, Homo sapien
atgattttgttcagttggtctgtgc

SEQ ID NO: 5903680 - DNA, 25 bp, Homo sapien
gctactgcatgattttgttcagttg

SEQ ID NO: 5903681 - DNA, 25 bp, Homo sapien
gggagcatttatctgattacgaatt

SEQ ID NO: 5903682 - DNA, 25 bp, Homo sapien
tttcctgaactgcaaaagccacctg

SEQ ID NO: 5903683 - DNA, 25 bp, Homo sapien
tcaatttcctgaactgcaaaagcca

SEQ ID NO: 5903684 - DNA, 25 bp, Homo sapien
gtttttttctaataatgcaggttat

SEQ ID NO: 5903685 - DNA, 25 bp, Homo sapien
attttagaatccatatccactctca

SEQ ID NO: 5903686 - DNA, 25 bp, Homo sapien
ctcacataaccacacgaggagggaa

SEQ ID NO: 5903687 - DNA, 25 bp, Homo sapien
ttccatgcgacgggccacagcgatg

SEQ ID NO: 5903688 - DNA, 25 bp, Homo sapien
aaaattaagacccacagtacagaca

SEQ ID NO: 5903689 - DNA, 25 bp, Homo sapien
gaatccatatccactctcatgctct

SEQ ID NO: 5903690 - DNA, 25 bp, Homo sapien
caaaataaatgttttgcatatccaa

SEQ ID NO: 5903691 - DNA, 25 bp, Homo sapien
gcatgattttgttcagttggtctgt

SEQ ID NO: 5903692 - DNA, 25 bp, Homo sapien
agtatcacaaaattaagacccacag

SEQ ID NO: 5903693 - DNA, 25 bp, Homo sapien
cacaatgggagcatttatctgatta

SEQ ID NO: 5903694 - DNA, 25 bp, Homo sapien
aaaaatcagcctgtgctataatctg

SEQ ID NO: 5903695 - DNA, 25 bp, Homo sapien
tgggacagacatctcagcatctgga

SEQ ID NO: 5903696 - DNA, 25 bp, Homo sapien
aacacagatttaaaacatagttttg

SEQ ID NO: 5903697 - DNA, 25 bp, Homo sapien
ttgatattttgacatttccagaaaa

SEQ ID NO: 5903698 - DNA, 25 bp, Homo sapien
tttccacttattgatattttgacat

SEQ ID NO: 5903699 - DNA, 25 bp, Homo sapien
tgcaaaagccacctgattgttttgc

SEQ ID NO: 5903700 - DNA, 25 bp, Homo sapien
gctgtctcagacatctgggcagtag

SEQ ID NO: 5903701 - DNA, 25 bp, Homo sapien
ctcacctagagttttagttcccagt

SEQ ID NO: 5903702 - DNA, 25 bp, Homo sapien
tagttttaccttctcacctagagtt

SEQ ID NO: 5903703 - DNA, 25 bp, Homo sapien
tcactgccactatacagtcttaaag

SEQ ID NO: 5903704 - DNA, 25 bp, Homo sapien
atctcagcatctggagcaatatctg

SEQ ID NO: 5903705 - DNA, 25 bp, Homo sapien
tgtgctcacataaccacacgaggag

SEQ ID NO: 5903706 - DNA, 25 bp, Homo sapien
ctgtgctataatctgcattcaattt

SEQ ID NO: 5903707 - DNA, 25 bp, Homo sapien
cgggccacagcgatgcattttttgg

SEQ ID NO: 5903708 - DNA, 25 bp, Homo sapien
acaatatgtgtgtagcatattataa

SEQ ID NO: 5903709 - DNA, 25 bp, Homo sapien
gattgttctgaactacaatatgtgt

SEQ ID NO: 5903710 - DNA, 25 bp, Homo sapien
gattttgttcagttggtctgtgctc

SEQ ID NO: 5903711 - DNA, 25 bp, Homo sapien
gctttgtaaaaatctaacttgtttg

SEQ ID NO: 5903712 - DNA, 25 bp, Homo sapien
agcagttgcgttgagtataaggccc

SEQ ID NO: 5903713 - DNA, 25 bp, Homo sapien
agcatgatctacatacataaaaaac

SEQ ID NO: 5903714 - DNA, 25 bp, Homo sapien
atgcttagtatcacaaaattaagac

SEQ ID NO: 5903715 - DNA, 25 bp, Homo sapien
attagacatttttagagttaagaag

SEQ ID NO: 5903716 - DNA, 25 bp, Homo sapien
tggttaaagcttggttttatacaag

SEQ ID NO: 5903717 - DNA, 25 bp, Homo sapien
gcgtttgtgcccagcctttcccttg

SEQ ID NO: 5903718 - DNA, 25 bp, Homo sapien
tttccagaaaaagtattttagaatc

SEQ ID NO: 5903719 - DNA, 25 bp, Homo sapien
caggttattagacatttttagagtt

SEQ ID NO: 5903720 - DNA, 25 bp, Homo sapien
taaagtgtaaattattaaaaatatc

SEQ ID NO: 5903721 - DNA, 25 bp, Homo sapien
ttgctttttccaaaagcatgatcta

SEQ ID NO: 5903722 - DNA, 25 bp, Homo sapien
tttccaaaagcatgatctacataca

SEQ ID NO: 5903723 - DNA, 25 bp, Homo sapien
aagcgtttgtgcccagcctttccct

SEQ ID NO: 5903724 - DNA, 25 bp, Homo sapien
gtgaaccgtggtgtagtctgggaca

SEQ ID NO: 5903725 - DNA, 25 bp, Homo sapien
ttggttttctttacgttcattgacc

SEQ ID NO: 5903726 - DNA, 25 bp, Homo sapien
cgtggcttccatgcgacgggccaca

SEQ ID NO: 5903727 - DNA, 25 bp, Homo sapien
tcaggcaaaggcaaagcagttgcgt

SEQ ID NO: 5903728 - DNA, 25 bp, Homo sapien
ggagcaatatctgctgtctcagaca

SEQ ID NO: 5903729 - DNA, 25 bp, Homo sapien
aagacccacagtacagacaatcact

SEQ ID NO: 5903730 - DNA, 25 bp, Homo sapien
aggctactgcatgattttgttcagt

SEQ ID NO: 5903731 - DNA, 25 bp, Homo sapien
agcctttcccttgccatttaaagat

SEQ ID NO: 5903732 - DNA, 25 bp, Homo sapien
cacataaccacacgaggagggaaaa

SEQ ID NO: 5903733 - DNA, 25 bp, Homo sapien
gtgatgtaaatgtcctcttggttaa

SEQ ID NO: 5903734 - DNA, 25 bp, Homo sapien
ctttacactgtagctgctacatcct

SEQ ID NO: 5903735 - DNA, 25 bp, Homo sapien
ataatgcaggttattagacattttt

SEQ ID NO: 5903736 - DNA, 25 bp, Homo sapien
aaaaaacgtagctatttaatgctta

SEQ ID NO: 5903737 - DNA, 25 bp, Homo sapien
tttaccttctcacctagagttttag

SEQ ID NO: 5903738 - DNA, 25 bp, Homo sapien
atctgattacgaattcttgattttc

SEQ ID NO: 5903739 - DNA, 25 bp, Homo sapien
aaattctttttgtcaggcaaaggca

SEQ ID NO: 5903740 - DNA, 25 bp, Homo sapien
tttaatgcttagtatcacaaaatta

SEQ ID NO: 5903741 - DNA, 25 bp, Homo sapien
catgatctacatacataaaaaacgt

SEQ ID NO: 5903742 - DNA, 25 bp, Homo sapien
ttttctttacgttcattgaccaaaa

SEQ ID NO: 5903743 - DNA, 25 bp, Homo sapien
aattaagacccacagtacagacaat

SEQ ID NO: 5903744 - DNA, 25 bp, Homo sapien
cttattgatattttgacatttccag

SEQ ID NO: 5903745 - DNA, 25 bp, Homo sapien
tgcaggttattagacatttttagag

SEQ ID NO: 5903746 - DNA, 25 bp, Homo sapien
tatacagtcttaaagacaattcatt

SEQ ID NO: 5903747 - DNA, 25 bp, Homo sapien
gatattttgacatttccagaaaaag

SEQ ID NO: 5903748 - DNA, 25 bp, Homo sapien
ccccttggagactgcacggtgtgaa

SEQ ID NO: 5903749 - DNA, 25 bp, Homo sapien
acatctcagcatctggagcaatatc

SEQ ID NO: 5903750 - DNA, 25 bp, Homo sapien
ggtctgtgctcacataaccacacga

SEQ ID NO: 5903751 - DNA, 25 bp, Homo sapien
aaatatttataattcacaatgggag

SEQ ID NO: 5903752 - DNA, 25 bp, Homo sapien
tcctgaactgcaaaagccacctgat

SEQ ID NO: 5903753 - DNA, 25 bp, Homo sapien
gttcagttggtctgtgctcacataa

SEQ ID NO: 5903754 - DNA, 25 bp, Homo sapien
ttctcacctagagttttagttccca

SEQ ID NO: 5903755 - DNA, 25 bp, Homo sapien
atttataattcacaatgggagcatt

SEQ ID NO: 5903756 - DNA, 25 bp, Homo sapien
tcttgattttccacttattgatatt

SEQ ID NO: 5903757 - DNA, 25 bp, Homo sapien
atccactctcatgctctcccaacac

SEQ ID NO: 5903758 - DNA, 25 bp, Homo sapien
cacggtgtgaaccgtggtgtagtct

SEQ ID NO: 5903759 - DNA, 25 bp, Homo sapien
ccactctcatgctctcccaacacag

SEQ ID NO: 5903760 - DNA, 25 bp, Homo sapien
ttatctgattacgaattcttgattt

SEQ ID NO: 5903761 - DNA, 25 bp, Homo sapien
acaagacgtggcttccatgcgacgg

SEQ ID NO: 5903762 - DNA, 25 bp, Homo sapien
aaaaaaatcagcctgtgctataatc

SEQ ID NO: 5903763 - DNA, 25 bp, Homo sapien
atctgggcagtagtggtaaggcttt

SEQ ID NO: 5903764 - DNA, 25 bp, Homo sapien
ttgccatttaaagataggaaaggct

SEQ ID NO: 5903765 - DNA, 25 bp, Homo sapien
cacagtacagacaatcactgccact

SEQ ID NO: 5903766 - DNA, 25 bp, Homo sapien
taccttctcacctagagttttagtt

SEQ ID NO: 5903767 - DNA, 25 bp, Homo sapien
gtgtgaaccgtggtgtagtctggga

SEQ ID NO: 5903768 - DNA, 25 bp, Homo sapien
tctcccaacacagatttaaaacata

SEQ ID NO: 5903769 - DNA, 25 bp, Homo sapien
catagttttggtttaagcgtttgtg

SEQ ID NO: 5903770 - DNA, 25 bp, Homo sapien
tttggtttaagcgtttgtgcccagc

SEQ ID NO: 5903771 - DNA, 25 bp, Homo sapien
ttgacatttccagaaaaagtatttt

SEQ ID NO: 5903772 - DNA, 25 bp, Homo sapien
ggagactgcacggtgtgaaccgtgg

SEQ ID NO: 5903773 - DNA, 25 bp, Homo sapien
gctttctgtggtgatgtaaatgtcc

SEQ ID NO: 5903774 - DNA, 25 bp, Homo sapien
gctatttaatgcttagtatcacaaa

SEQ ID NO: 5903775 - DNA, 25 bp, Homo sapien
ggttattagacatttttagagttaa

SEQ ID NO: 5903776 - DNA, 25 bp, Homo sapien
cttaaagacaattcattaaaatatt

SEQ ID NO: 5903777 - DNA, 25 bp, Homo sapien
aatatgtgtgtagcatattataaag

SEQ ID NO: 5903778 - DNA, 25 bp, Homo sapien
taaccacacgaggagggaaaattct

SEQ ID NO: 5903779 - DNA, 25 bp, Homo sapien
ctctttacactgtagctgctacatc

SEQ ID NO: 5903780 - DNA, 25 bp, Homo sapien
cagttgcgttgagtataaggcccct

SEQ ID NO: 5903781 - DNA, 25 bp, Homo sapien
gggaaaattctttttgtcaggcaaa

SEQ ID NO: 5903782 - DNA, 25 bp, Homo sapien
aacgtagctatttaatgcttagtat

SEQ ID NO: 5903783 - DNA, 25 bp, Homo sapien
atgcgacgggccacagcgatgcatt

SEQ ID NO: 5903784 - DNA, 25 bp, Homo sapien
atctacatacataaaaaacgtagct

SEQ ID NO: 5903785 - DNA, 25 bp, Homo sapien
tacagtcttaaagacaattcattaa

SEQ ID NO: 5903786 - DNA, 25 bp, Homo sapien
atctggagcaatatctgctgtctca

SEQ ID NO: 5903787 - DNA, 25 bp, Homo sapien
aatcactgccactatacagtcttaa

SEQ ID NO: 5903788 - DNA, 25 bp, Homo sapien
gcttggttttatacaagacgtggct

SEQ ID NO: 5903789 - DNA, 25 bp, Homo sapien
acgaattcttgattttccacttatt

SEQ ID NO: 5903790 - DNA, 25 bp, Homo sapien
gtttgtgcccagcctttcccttgcc

SEQ ID NO: 5903791 - DNA, 25 bp, Homo sapien
agacatctcagcatctggagcaata

SEQ ID NO: 5903792 - DNA, 25 bp, Homo sapien
taatgcttagtatcacaaaattaag

SEQ ID NO: 5903793 - DNA, 25 bp, Homo sapien
tgatctacatacataaaaaacgtag

SEQ ID NO: 5903794 - DNA, 25 bp, Homo sapien
ttgttctgaactacaatatgtgtgt

SEQ ID NO: 5903795 - DNA, 25 bp, Homo sapien
tgtctcagacatctgggcagtagtg

SEQ ID NO: 5903796 - DNA, 25 bp, Homo sapien
tcccaacacagatttaaaacatagt

SEQ ID NO: 5903797 - DNA, 25 bp, Homo sapien
gtgtagtctgggacagacatctcag

SEQ ID NO: 5903798 - DNA, 25 bp, Homo sapien
aagaaaaaaaaaatcagcctgtgct

SEQ ID NO: 5903799 - DNA, 25 bp, Homo sapien
taaggctttctgtggtgatgtaaat

SEQ ID NO: 5903800 - DNA, 25 bp, Homo sapien
tattgatattttgacatttccagaa

SEQ ID NO: 5903801 - DNA, 25 bp, Homo sapien
actgccactatacagtcttaaagac

SEQ ID NO: 5903802 - DNA, 25 bp, Homo sapien
atatccactctcatgctctcccaac

SEQ ID NO: 5903803 - DNA, 25 bp, Homo sapien
cgttgagtataaggccccttggaga

SEQ ID NO: 5903804 - DNA, 25 bp, Homo sapien
gcttccatgcgacgggccacagcga

SEQ ID NO: 5903805 - DNA, 25 bp, Homo sapien
aaagccacctgattgttttgctttt

SEQ ID NO: 5903806 - DNA, 25 bp, Homo sapien
ctgattacgaattcttgattttcca

SEQ ID NO: 5903807 - DNA, 25 bp, Homo sapien
taaaatatttataattcacaatggg

SEQ ID NO: 5903808 - DNA, 25 bp, Homo sapien
gagggaaaattctttttgtcaggca

SEQ ID NO: 5903809 - DNA, 25 bp, Homo sapien
ttggtctgtgctcacataaccacac

SEQ ID NO: 5903810 - DNA, 25 bp, Homo sapien
ccaacacagatttaaaacatagttt

SEQ ID NO: 5903811 - DNA, 25 bp, Homo sapien
tttctgtggtgatgtaaatgtcctc

SEQ ID NO: 5903812 - DNA, 25 bp, Homo sapien
aaaggcaaagcagttgcgttgagta

SEQ ID NO: 5903813 - DNA, 25 bp, Homo sapien
tcccttgccatttaaagataggaaa

SEQ ID NO: 5903814 - DNA, 25 bp, Homo sapien
ccacctgattgttttgctttttcca

SEQ ID NO: 5903815 - DNA, 25 bp, Homo sapien
atccatatccactctcatgctctcc

SEQ ID NO: 5903816 - DNA, 25 bp, Homo sapien
gagcatttatctgattacgaattct

SEQ ID NO: 5903817 - DNA, 25 bp, Homo sapien
aaggccccttggagactgcacggtg

SEQ ID NO: 5903818 - DNA, 25 bp, Homo sapien
ggttttctttacgttcattgaccaa

SEQ ID NO: 5903819 - DNA, 25 bp, Homo sapien
aagacgtggcttccatgcgacgggc

SEQ ID NO: 5903820 - DNA, 25 bp, Homo sapien
tggtgatgtaaatgtcctcttggtt

SEQ ID NO: 5903821 - DNA, 25 bp, Homo sapien
attctttttgtcaggcaaaggcaaa

SEQ ID NO: 5903822 - DNA, 25 bp, Homo sapien
cttggttaaagcttggttttataca

SEQ ID NO: 5903823 - DNA, 25 bp, Homo sapien
gtagtctgggacagacatctcagca

SEQ ID NO: 5903824 - DNA, 25 bp, Homo sapien
taggaaaggctactgcatgattttg

SEQ ID NO: 5903825 - DNA, 25 bp, Homo sapien
atttatctgattacgaattcttgat

SEQ ID NO: 5903826 - DNA, 25 bp, Homo sapien
tgcttaaagtgtaaattattaaaaa

SEQ ID NO: 5903827 - DNA, 25 bp, Homo sapien
atgctctcccaacacagatttaaaa

SEQ ID NO: 5903828 - DNA, 25 bp, Homo sapien
gccatttaaagataggaaaggctac

SEQ ID NO: 5903829 - DNA, 25 bp, Homo sapien
aaaagtattttagaatccatatcca

SEQ ID NO: 5903830 - DNA, 25 bp, Homo sapien
aaaaaaaaatcagcctgtgctataa

SEQ ID NO: 5903831 - DNA, 25 bp, Homo sapien
accgtggtgtagtctgggacagaca

SEQ ID NO: 5903832 - DNA, 25 bp, Homo sapien
tccagaaaaagtattttagaatcca

SEQ ID NO: 5903833 - DNA, 25 bp, Homo sapien
ctgggcagtagtggtaaggctttct

SEQ ID NO: 5903834 - DNA, 25 bp, Homo sapien
gtgctataatctgcattcaatttcc

SEQ ID NO: 5903835 - DNA, 25 bp, Homo sapien
ataaggccccttggagactgcacgg

SEQ ID NO: 5903836 - DNA, 25 bp, Homo sapien
aaagcatgatctacatacataaaaa

SEQ ID NO: 5903837 - DNA, 25 bp, Homo sapien
ttattagacatttttagagttaaga

SEQ ID NO: 5903838 - DNA, 25 bp, Homo sapien
gcatttatctgattacgaattcttg

SEQ ID NO: 5903839 - DNA, 25 bp, Homo sapien
ggccccttggagactgcacggtgtg

SEQ ID NO: 5903840 - DNA, 25 bp, Homo sapien
gagtataaggccccttggagactgc

SEQ ID NO: 5903841 - DNA, 25 bp, Homo sapien
ttcacaatgggagcatttatctgat

SEQ ID NO: 5903842 - DNA, 25 bp, Homo sapien
tctgtggtgatgtaaatgtcctctt

SEQ ID NO: 5903843 - DNA, 25 bp, Homo sapien
gaaaattctttttgtcaggcaaagg

SEQ ID NO: 5903844 - DNA, 25 bp, Homo sapien
ccatatccactctcatgctctccca

SEQ ID NO: 5903845 - DNA, 25 bp, Homo sapien
gttctgaactacaatatgtgtgtag

SEQ ID NO: 5903846 - DNA, 25 bp, Homo sapien
acagacaatcactgccactatacag

SEQ ID NO: 5903847 - DNA, 25 bp, Homo sapien
ttaagcgtttgtgcccagcctttcc

SEQ ID NO: 5903848 - DNA, 25 bp, Homo sapien
agactgcacggtgtgaaccgtggtg

SEQ ID NO: 5903849 - DNA, 25 bp, Homo sapien
atgggagcatttatctgattacgaa

SEQ ID NO: 5903850 - DNA, 25 bp, Homo sapien
actgcacggtgtgaaccgtggtgta

SEQ ID NO: 5903851 - DNA, 25 bp, Homo sapien
acaatcactgccactatacagtctt

SEQ ID NO: 5903852 - DNA, 25 bp, Homo sapien
ccttgccatttaaagataggaaagg

SEQ ID NO: 5903853 - DNA, 25 bp, Homo sapien
gaaaaaaaaaatcagcctgtgctat

SEQ ID NO: 5903854 - DNA, 25 bp, Homo sapien
gaaccgtggtgtagtctgggacaga

SEQ ID NO: 5903855 - DNA, 25 bp, Homo sapien
tgtcctcttggttaaagcttggttt

SEQ ID NO: 5903856 - DNA, 25 bp, Homo sapien
gtcttaaagacaattcattaaaata

SEQ ID NO: 5903857 - DNA, 25 bp, Homo sapien
gtggtaaggctttctgtggtgatgt

SEQ ID NO: 5903858 - DNA, 25 bp, Homo sapien
ttatacaagacgtggcttccatgcg

SEQ ID NO: 5903859 - DNA, 25 bp, Homo sapien
tattttgacatttccagaaaaagta

SEQ ID NO: 5903860 - DNA, 25 bp, Homo sapien
gacatttccagaaaaagtattttag

SEQ ID NO: 5903861 - DNA, 25 bp, Homo sapien
acagacatctcagcatctggagcaa

SEQ ID NO: 5903862 - DNA, 25 bp, Homo sapien
ttttgctttttccaaaagcatgatc

SEQ ID NO: 5903863 - DNA, 25 bp, Homo sapien
cagtacagacaatcactgccactat

SEQ ID NO: 5903864 - DNA, 25 bp, Homo sapien
tagagttaagaagttttggaagtta

SEQ ID NO: 5903865 - DNA, 25 bp, Homo sapien
tagagttttagttcccagttattta

SEQ ID NO: 5903866 - DNA, 25 bp, Homo sapien
ccactatacagtcttaaagacaatt

SEQ ID NO: 5903867 - DNA, 25 bp, Homo sapien
gtttaagcgtttgtgcccagccttt

SEQ ID NO: 5903868 - DNA, 25 bp, Homo sapien
cataaccacacgaggagggaaaatt

SEQ ID NO: 5903869 - DNA, 25 bp, Homo sapien
aaatgtttttttctaataatgcagg

SEQ ID NO: 5903870 - DNA, 25 bp, Homo sapien
ccagcctttcccttgccatttaaag

SEQ ID NO: 5903871 - DNA, 25 bp, Homo sapien
atctgcattcaatttcctgaactgc

SEQ ID NO: 5903872 - DNA, 25 bp, Homo sapien
aactacaatatgtgtgtagcatatt

SEQ ID NO: 5903873 - DNA, 25 bp, Homo sapien
aaaggctactgcatgattttgttca

SEQ ID NO: 5903874 - DNA, 25 bp, Homo sapien
gggcagtagtggtaaggctttctgt

SEQ ID NO: 5903875 - DNA, 25 bp, Homo sapien
ctgcattcaatttcctgaactgcaa

SEQ ID NO: 5903876 - DNA, 25 bp, Homo sapien
ctgctgtctcagacatctgggcagt

SEQ ID NO: 5903877 - DNA, 25 bp, Homo sapien
gcgacgggccacagcgatgcatttt

SEQ ID NO: 5903878 - DNA, 25 bp, Homo sapien
tctgtgctcacataaccacacgagg

SEQ ID NO: 5903879 - DNA, 25 bp, Homo sapien
ctcatgcttaaagtgtaaattatta

SEQ ID NO: 5903880 - DNA, 25 bp, Homo sapien
ataaaaaacgtagctatttaatgct

SEQ ID NO: 5903881 - DNA, 25 bp, Homo sapien
tggcttccatgcgacgggccacagc

SEQ ID NO: 5903882 - DNA, 25 bp, Homo sapien
attcttgattttccacttattgata

SEQ ID NO: 5903883 - DNA, 25 bp, Homo sapien
tttaaagataggaaaggctactgca

SEQ ID NO: 5903884 - DNA, 25 bp, Homo sapien
ctacatacataaaaaacgtagctat

SEQ ID NO: 5903885 - DNA, 25 bp, Homo sapien
aattcacaatgggagcatttatctg

SEQ ID NO: 5903886 - DNA, 25 bp, Homo sapien
ccatgcgacgggccacagcgatgca

SEQ ID NO: 5903887 - DNA, 25 bp, Homo sapien
cctttcccttgccatttaaagatag

SEQ ID NO: 5903888 - DNA, 25 bp, Homo sapien
tccaaaagcatgatctacatacata

SEQ ID NO: 5903889 - DNA, 25 bp, Homo sapien
gtattttagaatccatatccactct

SEQ ID NO: 5903890 - DNA, 25 bp, Homo sapien
tttcccttgccatttaaagatagga

SEQ ID NO: 5903891 - DNA, 25 bp, Homo sapien
agtagtggtaaggctttctgtggtg

SEQ ID NO: 5903892 - DNA, 25 bp, Homo sapien
tcagacatctgggcagtagtggtaa

SEQ ID NO: 5903893 - DNA, 25 bp, Homo sapien
gtacagacaatcactgccactatac

SEQ ID NO: 5903894 - DNA, 25 bp, Homo sapien
caatgggagcatttatctgattacg

SEQ ID NO: 5903895 - DNA, 25 bp, Homo sapien
atctgctgtctcagacatctgggca

SEQ ID NO: 5903896 - DNA, 25 bp, Homo sapien
ttttatacaagacgtggcttccatg

SEQ ID NO: 5903897 - DNA, 25 bp, Homo sapien
tggattgttctgaactacaatatgt

SEQ ID NO: 5903898 - DNA, 25 bp, Homo sapien
atatctgctgtctcagacatctggg

SEQ ID NO: 5903899 - DNA, 25 bp, Homo sapien
tttctaataatgcaggttattagac

SEQ ID NO: 5903900 - DNA, 25 bp, Homo sapien
ttttgttcagttggtctgtgctcac

SEQ ID NO: 5903901 - DNA, 25 bp, Homo sapien
cccacagtacagacaatcactgcca

SEQ ID NO: 5903902 - DNA, 25 bp, Homo sapien
aaagcagttgcgttgagtataaggc

SEQ ID NO: 5903903 - DNA, 25 bp, Homo sapien
ttagtatcacaaaattaagacccac

SEQ ID NO: 5903904 - DNA, 25 bp, Homo sapien
tatttaatgcttagtatcacaaaat

SEQ ID NO: 5903905 - DNA, 25 bp, Homo sapien
attcaatttcctgaactgcaaaagc

SEQ ID NO: 5903906 - DNA, 25 bp, Homo sapien
agcaatatctgctgtctcagacatc

SEQ ID NO: 5903907 - DNA, 25 bp, Homo sapien
aatgtcctcttggttaaagcttggt

SEQ ID NO: 5903908 - DNA, 25 bp, Homo sapien
tctcatgctctcccaacacagattt

SEQ ID NO: 5903909 - DNA, 25 bp, Homo sapien
cgtagctatttaatgcttagtatca

SEQ ID NO: 5903910 - DNA, 25 bp, Homo sapien
aggcaaagcagttgcgttgagtata

SEQ ID NO: 5903911 - DNA, 25 bp, Homo sapien
tgccactatacagtcttaaagacaa

SEQ ID NO: 5903912 - DNA, 25 bp, Homo sapien
gttgcgttgagtataaggccccttg

SEQ ID NO: 5903913 - DNA, 25 bp, Homo sapien
tctgaactacaatatgtgtgtagca

SEQ ID NO: 5903914 - DNA, 25 bp, Homo sapien
gacgggccacagcgatgcatttttt

SEQ ID NO: 5903915 - DNA, 25 bp, Homo sapien
gatgtaaatgtcctcttggttaaag

SEQ ID NO: 5903916 - DNA, 25 bp, Homo sapien
aagataggaaaggctactgcatgat

SEQ ID NO: 5903917 - DNA, 25 bp, Homo sapien
gaggagggaaaattctttttgtcag

SEQ ID NO: 5903918 - DNA, 25 bp, Homo sapien
gcccagcctttcccttgccatttaa

SEQ ID NO: 5903919 - DNA, 25 bp, Homo sapien
agccacctgattgttttgctttttc

SEQ ID NO: 5903920 - DNA, 25 bp, Homo sapien
tgtcaggcaaaggcaaagcagttgc

SEQ ID NO: 5903921 - DNA, 25 bp, Homo sapien
gctctcccaacacagatttaaaaca

SEQ ID NO: 5903922 - DNA, 25 bp, Homo sapien
gcaaagcagttgcgttgagtataag

SEQ ID NO: 5903923 - DNA, 25 bp, Homo sapien
aagcttggttttatacaagacgtgg

SEQ ID NO: 5903924 - DNA, 25 bp, Homo sapien
ttacgttcattgaccaaaacatgaa

SEQ ID NO: 5903925 - DNA, 25 bp, Homo sapien
aatttcctgaactgcaaaagccacc

SEQ ID NO: 5903926 - DNA, 25 bp, Homo sapien
ttctttacgttcattgaccaaaaca

SEQ ID NO: 5903927 - DNA, 25 bp, Homo sapien
actgcaaaagccacctgattgtttt

SEQ ID NO: 5903928 - DNA, 25 bp, Homo sapien
ccttggagactgcacggtgtgaacc

SEQ ID NO: 5903929 - DNA, 25 bp, Homo sapien
tgattgttttgctttttccaaaagc

SEQ ID NO: 5903930 - DNA, 25 bp, Homo sapien
tctcagacatctgggcagtagtggt

SEQ ID NO: 5903931 - DNA, 25 bp, Homo sapien
gttttggtttaagcgtttgtgccca

SEQ ID NO: 5903932 - DNA, 25 bp, Homo sapien
tcacaaaattaagacccacagtaca

SEQ ID NO: 5903933 - DNA, 25 bp, Homo sapien
taatctgcattcaatttcctgaact

SEQ ID NO: 5903934 - DNA, 25 bp, Homo sapien
ataattcacaatgggagcatttatc

SEQ ID NO: 5903935 - DNA, 25 bp, Homo sapien
gcatctggagcaatatctgctgtct

SEQ ID NO: 5903936 - DNA, 25 bp, Homo sapien
tctgggacagacatctcagcatctg

SEQ ID NO: 5903937 - DNA, 25 bp, Homo sapien
ttgtgcccagcctttcccttgccat

SEQ ID NO: 5903938 - DNA, 25 bp, Homo sapien
ccttctcacctagagttttagttcc

SEQ ID NO: 5903939 - DNA, 25 bp, Homo sapien
gaattcttgattttccacttattga

SEQ ID NO: 5903940 - DNA, 25 bp, Homo sapien
ttttgacatttccagaaaaagtatt

SEQ ID NO: 5903941 - DNA, 25 bp, Homo sapien
aaatcagcctgtgctataatctgca

SEQ ID NO: 5903942 - DNA, 25 bp, Homo sapien
tcatgctctcccaacacagatttaa

SEQ ID NO: 5903943 - DNA, 25 bp, Homo sapien
acctgattgttttgctttttccaaa

SEQ ID NO: 5903944 - DNA, 25 bp, Homo sapien
catttaaagataggaaaggctactg

SEQ ID NO: 5903945 - DNA, 25 bp, Homo sapien
acataaaaaacgtagctatttaatg

SEQ ID NO: 5903946 - DNA, 25 bp, Homo sapien
ctcagcatctggagcaatatctgct

SEQ ID NO: 5903947 - DNA, 25 bp, Homo sapien
tagacatttttagagttaagaagtt

SEQ ID NO: 5903948 - DNA, 25 bp, Homo sapien
atcagcctgtgctataatctgcatt

SEQ ID NO: 5903949 - DNA, 25 bp, Homo sapien
tggtttaagcgtttgtgcccagcct

SEQ ID NO: 5903950 - DNA, 25 bp, Homo sapien
ggaaaggctactgcatgattttgtt

SEQ ID NO: 5903951 - DNA, 25 bp, Homo sapien
ggacagacatctcagcatctggagc

SEQ ID NO: 5903952 - DNA, 25 bp, Homo sapien
actgagccggccggagggcctcccc

SEQ ID NO: 5903953 - DNA, 25 bp, Homo sapien
gggggaaggatgccattattcggac

SEQ ID NO: 5903954 - DNA, 25 bp, Homo sapien
cccacctttctacacctcacctggc

SEQ ID NO: 5903955 - DNA, 25 bp, Homo sapien
gggagatttatatttttgatatcag

SEQ ID NO: 5903956 - DNA, 25 bp, Homo sapien
ctcaccaccagggtgggcagctctg

SEQ ID NO: 5903957 - DNA, 25 bp, Homo sapien
cgaaccatcgaccgtttctctccca

SEQ ID NO: 5903958 - DNA, 25 bp, Homo sapien
gctcttgggggaaggatgccattat

SEQ ID NO: 5903959 - DNA, 25 bp, Homo sapien
ccaccagggtgggcagctctggcgc

SEQ ID NO: 5903960 - DNA, 25 bp, Homo sapien
cacaagtggcactagccccagggcc

SEQ ID NO: 5903961 - DNA, 25 bp, Homo sapien
cggggataactggtagcagcggcag

SEQ ID NO: 5903962 - DNA, 25 bp, Homo sapien
tcttgggggaaggatgccattattc

SEQ ID NO: 5903963 - DNA, 25 bp, Homo sapien
attattcggacggttgctcccagcc

SEQ ID NO: 5903964 - DNA, 25 bp, Homo sapien
atcgaccgtttctctcccacctaga

SEQ ID NO: 5903965 - DNA, 25 bp, Homo sapien
caaaggagaaccctgcctctccctg

SEQ ID NO: 5903966 - DNA, 25 bp, Homo sapien
gtcccctgctcctgcccagcccggg

SEQ ID NO: 5903967 - DNA, 25 bp, Homo sapien
aggatgccattattcggacggttgc

SEQ ID NO: 5903968 - DNA, 25 bp, Homo sapien
gcctccccgtcccctgctcctgccc

SEQ ID NO: 5903969 - DNA, 25 bp, Homo sapien
ggtgcgcacttggccgcaggaccgg

SEQ ID NO: 5903970 - DNA, 25 bp, Homo sapien
gcctcacagctgaacagctgagtct

SEQ ID NO: 5903971 - DNA, 25 bp, Homo sapien
tgagccggccggagggcctccccgt

SEQ ID NO: 5903972 - DNA, 25 bp, Homo sapien
cgcccggcgctgcctgacagcccgg

SEQ ID NO: 5903973 - DNA, 25 bp, Homo sapien
acagcccggggataactggtagcag

SEQ ID NO: 5903974 - DNA, 25 bp, Homo sapien
ttcccgttctgtccctttgtatatt

SEQ ID NO: 5903975 - DNA, 25 bp, Homo sapien
ccacacccattctcactgtgaatct

SEQ ID NO: 5903976 - DNA, 25 bp, Homo sapien
ttgtatattctctactctgtacaca

SEQ ID NO: 5903977 - DNA, 25 bp, Homo sapien
ccggaccatatatttattgcatgcg

SEQ ID NO: 5903978 - DNA, 25 bp, Homo sapien
gcgaccacacccattctcactgtga

SEQ ID NO: 5903979 - DNA, 25 bp, Homo sapien
agcaggacaaggcagctgctgccga

SEQ ID NO: 5903980 - DNA, 25 bp, Homo sapien
ctccctgtggctcattggccctctc

SEQ ID NO: 5903981 - DNA, 25 bp, Homo sapien
acccgctggctaaattcactgctga

SEQ ID NO: 5903982 - DNA, 25 bp, Homo sapien
ggagagaggtctccttccttggttc

SEQ ID NO: 5903983 - DNA, 25 bp, Homo sapien
ccctctcccccggctccgtgctgct

SEQ ID NO: 5903984 - DNA, 25 bp, Homo sapien
ccgaggtgtcccctcctcttcctgg

SEQ ID NO: 5903985 - DNA, 25 bp, Homo sapien
aggggaggggactgagccggccgga

SEQ ID NO: 5903986 - DNA, 25 bp, Homo sapien
cgccagggatgacaaccctgaccca

SEQ ID NO: 5903987 - DNA, 25 bp, Homo sapien
taaattcactgctgagctaggactc

SEQ ID NO: 5903988 - DNA, 25 bp, Homo sapien
gggcagctctggcgccagggatgac

SEQ ID NO: 5903989 - DNA, 25 bp, Homo sapien
accacgcacttcctgcacgacccca

SEQ ID NO: 5903990 - DNA, 25 bp, Homo sapien
gtatattctctactctgtacacagg

SEQ ID NO: 5903991 - DNA, 25 bp, Homo sapien
tggcgcagaccacgcacttcctgca

SEQ ID NO: 5903992 - DNA, 25 bp, Homo sapien
agaggtgctgagccagggtgcgcac

SEQ ID NO: 5903993 - DNA, 25 bp, Homo sapien
ctttgtatattctctactctgtaca

SEQ ID NO: 5903994 - DNA, 25 bp, Homo sapien
attttgcacaagtggcactagcccc

SEQ ID NO: 5903995 - DNA, 25 bp, Homo sapien
aagcagcaggacaaggcagctgctg

SEQ ID NO: 5903996 - DNA, 25 bp, Homo sapien
ccgctggctaaattcactgctgagc

SEQ ID NO: 5903997 - DNA, 25 bp, Homo sapien
ccagacaaggcggcagaggtgctga

SEQ ID NO: 5903998 - DNA, 25 bp, Homo sapien
tctcactgtgaatctccctgctggg

SEQ ID NO: 5903999 - DNA, 25 bp, Homo sapien
cctgacccatctgtctctgcttccg

SEQ ID NO: 5904000 - DNA, 25 bp, Homo sapien
gactcagcccagacaaggcggcaga

SEQ ID NO: 5904001 - DNA, 25 bp, Homo sapien
ggtgcgcccggcgctgcctgacagc

SEQ ID NO: 5904002 - DNA, 25 bp, Homo sapien
gataactggtagcagcggcagcgcc

SEQ ID NO: 5904003 - DNA, 25 bp, Homo sapien
ccagggatgacaaccctgacccatc

SEQ ID NO: 5904004 - DNA, 25 bp, Homo sapien
gcacgaccccaaggtggcgctggag

SEQ ID NO: 5904005 - DNA, 25 bp, Homo sapien
ccttcctttcctcaccaccagggtg

SEQ ID NO: 5904006 - DNA, 25 bp, Homo sapien
atctgtctctgcttccgaggtgtcc

SEQ ID NO: 5904007 - DNA, 25 bp, Homo sapien
agaccacgcacttcctgcacgaccc

SEQ ID NO: 5904008 - DNA, 25 bp, Homo sapien
gctgagtctgaagcagcaggacaag

SEQ ID NO: 5904009 - DNA, 25 bp, Homo sapien
agcgccgtccctcctaggtgcgccc

SEQ ID NO: 5904010 - DNA, 25 bp, Homo sapien
gcagaggtgctgagccagggtgcgc

SEQ ID NO: 5904011 - DNA, 25 bp, Homo sapien
caggacaaggcagctgctgccgagc

SEQ ID NO: 5904012 - DNA, 25 bp, Homo sapien
tgacccctatcctgagcccaacttt

SEQ ID NO: 5904013 - DNA, 25 bp, Homo sapien
tgctgccgagctgctggcgcagacc

SEQ ID NO: 5904014 - DNA, 25 bp, Homo sapien
agggatgacaaccctgacccatctg

SEQ ID NO: 5904015 - DNA, 25 bp, Homo sapien
ctacccgctggctaaattcactgct

SEQ ID NO: 5904016 - DNA, 25 bp, Homo sapien
attctctactctgtacacaggctct

SEQ ID NO: 5904017 - DNA, 25 bp, Homo sapien
ctcctgcccagcccgggactgataa

SEQ ID NO: 5904018 - DNA, 25 bp, Homo sapien
tacacctcacctggcctcactgttt

SEQ ID NO: 5904019 - DNA, 25 bp, Homo sapien
tcctcaccaccagggtgggcagctc

SEQ ID NO: 5904020 - DNA, 25 bp, Homo sapien
tcctcttcctggggtccccggacca

SEQ ID NO: 5904021 - DNA, 25 bp, Homo sapien
ccctcctaggtgcgcccggcgctgc

SEQ ID NO: 5904022 - DNA, 25 bp, Homo sapien
gccaacccttcctttcctcaccacc

SEQ ID NO: 5904023 - DNA, 25 bp, Homo sapien
gctgctgccgagctgctggcgcaga

SEQ ID NO: 5904024 - DNA, 25 bp, Homo sapien
gcagcaggacaaggcagctgctgcc

SEQ ID NO: 5904025 - DNA, 25 bp, Homo sapien
cagccgaaccatcgaccgtttctct

SEQ ID NO: 5904026 - DNA, 25 bp, Homo sapien
tgacagcccggggataactggtagc

SEQ ID NO: 5904027 - DNA, 25 bp, Homo sapien
ctgcttccgaggtgtcccctcctct

SEQ ID NO: 5904028 - DNA, 25 bp, Homo sapien
cttcctggggtccccggaccatata

SEQ ID NO: 5904029 - DNA, 25 bp, Homo sapien
tttctacacctcacctggcctcact

SEQ ID NO: 5904030 - DNA, 25 bp, Homo sapien
gaccccaaggtggcgctggagagcc

SEQ ID NO: 5904031 - DNA, 25 bp, Homo sapien
gggccaacccttcctttcctcacca

SEQ ID NO: 5904032 - DNA, 25 bp, Homo sapien
gagggcctccccgtcccctgctcct

SEQ ID NO: 5904033 - DNA, 25 bp, Homo sapien
cacttcctgcacgaccccaaggtgg

SEQ ID NO: 5904034 - DNA, 25 bp, Homo sapien
ctccccgtcccctgctcctgcccag

SEQ ID NO: 5904035 - DNA, 25 bp, Homo sapien
tcactgtgaatctccctgctggggt

SEQ ID NO: 5904036 - DNA, 25 bp, Homo sapien
tcctggggtccccggaccatatatt

SEQ ID NO: 5904037 - DNA, 25 bp, Homo sapien
gccctaggtgacccctatcctgagc

SEQ ID NO: 5904038 - DNA, 25 bp, Homo sapien
gtccctttgtatattctctactctg

SEQ ID NO: 5904039 - DNA, 25 bp, Homo sapien
tttgaccaaaggagaaccctgcctc

SEQ ID NO: 5904040 - DNA, 25 bp, Homo sapien
ggatgacaaccctgacccatctgtc

SEQ ID NO: 5904041 - DNA, 25 bp, Homo sapien
ccttgcgaccacacccattctcact

SEQ ID NO: 5904042 - DNA, 25 bp, Homo sapien
agcccaactttagctgggctggaga

SEQ ID NO: 5904043 - DNA, 25 bp, Homo sapien
tctctcccacctagagcgccgtccc

SEQ ID NO: 5904044 - DNA, 25 bp, Homo sapien
gaaggatgccattattcggacggtt

SEQ ID NO: 5904045 - DNA, 25 bp, Homo sapien
aattcactgctgagctaggactcag

SEQ ID NO: 5904046 - DNA, 25 bp, Homo sapien
ctggcctcactgtttagtgccttag

SEQ ID NO: 5904047 - DNA, 25 bp, Homo sapien
tgaacagctgagtctgaagcagcag

SEQ ID NO: 5904048 - DNA, 25 bp, Homo sapien
tttattgcatgcgccctaggtgacc

SEQ ID NO: 5904049 - DNA, 25 bp, Homo sapien
ctgtacacaggctcttccagagccg

SEQ ID NO: 5904050 - DNA, 25 bp, Homo sapien
tagtgccttagcctggggaagtcag

SEQ ID NO: 5904051 - DNA, 25 bp, Homo sapien
cggacggttgctcccagccctacct

SEQ ID NO: 5904052 - DNA, 25 bp, Homo sapien
tgaagcagcaggacaaggcagctgc

SEQ ID NO: 5904053 - DNA, 25 bp, Homo sapien
aacagctgagtctgaagcagcagga

SEQ ID NO: 5904054 - DNA, 25 bp, Homo sapien
ctcctaggtgcgcccggcgctgcct

SEQ ID NO: 5904055 - DNA, 25 bp, Homo sapien
gggataactggtagcagcggcagcg

SEQ ID NO: 5904056 - DNA, 25 bp, Homo sapien
cctttctacacctcacctggcctca

SEQ ID NO: 5904057 - DNA, 25 bp, Homo sapien
ttgggggaaggatgccattattcgg

SEQ ID NO: 5904058 - DNA, 25 bp, Homo sapien
cagcggcagcgccgcagtggtggcc

SEQ ID NO: 5904059 - DNA, 25 bp, Homo sapien
agcccggggataactggtagcagcg

SEQ ID NO: 5904060 - DNA, 25 bp, Homo sapien
cctgagcccaactttagctgggctg

SEQ ID NO: 5904061 - DNA, 25 bp, Homo sapien
cccgttctgtccctttgtatattct

SEQ ID NO: 5904062 - DNA, 25 bp, Homo sapien
ctagagcgccgtccctcctaggtgc

SEQ ID NO: 5904063 - DNA, 25 bp, Homo sapien
gactgataatgtgaagttcctcatt

SEQ ID NO: 5904064 - DNA, 25 bp, Homo sapien
tatttattgcatgcgccctaggtga

SEQ ID NO: 5904065 - DNA, 25 bp, Homo sapien
ccaaggtggcgctggagagcctcta

SEQ ID NO: 5904066 - DNA, 25 bp, Homo sapien
cctgctcctgcccagcccgggactg

SEQ ID NO: 5904067 - DNA, 25 bp, Homo sapien
gaggggactgagccggccggagggc

SEQ ID NO: 5904068 - DNA, 25 bp, Homo sapien
cagcccgggactgataatgtgaagt

SEQ ID NO: 5904069 - DNA, 25 bp, Homo sapien
cgttctgtccctttgtatattctct

SEQ ID NO: 5904070 - DNA, 25 bp, Homo sapien
gagatttatatttttgatatcagct

SEQ ID NO: 5904071 - DNA, 25 bp, Homo sapien
tctactctgtacacaggctcttcca

SEQ ID NO: 5904072 - DNA, 25 bp, Homo sapien
gctgaacagctgagtctgaagcagc

SEQ ID NO: 5904073 - DNA, 25 bp, Homo sapien
cattggccctctcccccggctccgt

SEQ ID NO: 5904074 - DNA, 25 bp, Homo sapien
tgctcctgcccagcccgggactgat

SEQ ID NO: 5904075 - DNA, 25 bp, Homo sapien
tttgcacaagtggcactagccccag

SEQ ID NO: 5904076 - DNA, 25 bp, Homo sapien
tttatatttttgatatcagctttga

SEQ ID NO: 5904077 - DNA, 25 bp, Homo sapien
agagcgccgtccctcctaggtgcgc

SEQ ID NO: 5904078 - DNA, 25 bp, Homo sapien
gggcctccccgtcccctgctcctgc

SEQ ID NO: 5904079 - DNA, 25 bp, Homo sapien
cctcacctggcctcactgtttagtg

SEQ ID NO: 5904080 - DNA, 25 bp, Homo sapien
ttccgaggtgtcccctcctcttcct

SEQ ID NO: 5904081 - DNA, 25 bp, Homo sapien
taggtgcgcccggcgctgcctgaca

SEQ ID NO: 5904082 - DNA, 25 bp, Homo sapien
gcagctctggcgccagggatgacaa

SEQ ID NO: 5904083 - DNA, 25 bp, Homo sapien
gccgcaggaccggacagccgaacca

SEQ ID NO: 5904084 - DNA, 25 bp, Homo sapien
gggactgataatgtgaagttcctca

SEQ ID NO: 5904085 - DNA, 25 bp, Homo sapien
gctaaattcactgctgagctaggac

SEQ ID NO: 5904086 - DNA, 25 bp, Homo sapien
tgaatctccctgctggggtcggagc

SEQ ID NO: 5904087 - DNA, 25 bp, Homo sapien
gcggcagcgccgcagtggtggcccc

SEQ ID NO: 5904088 - DNA, 25 bp, Homo sapien
atcctgagcccaactttagctgggc

SEQ ID NO: 5904089 - DNA, 25 bp, Homo sapien
tgtgaatctccctgctggggtcgga

SEQ ID NO: 5904090 - DNA, 25 bp, Homo sapien
gccgagctgctggcgcagaccacgc

SEQ ID NO: 5904091 - DNA, 25 bp, Homo sapien
gctggcgcagaccacgcacttcctg

SEQ ID NO: 5904092 - DNA, 25 bp, Homo sapien
cagctgctgccgagctgctggcgca

SEQ ID NO: 5904093 - DNA, 25 bp, Homo sapien
agcattgggcacagttggagagagg

SEQ ID NO: 5904094 - DNA, 25 bp, Homo sapien
ctgtctctgcttccgaggtgtcccc

SEQ ID NO: 5904095 - DNA, 25 bp, Homo sapien
tgacccatctgtctctgcttccgag

SEQ ID NO: 5904096 - DNA, 25 bp, Homo sapien
ggggtcggagcattgggcacagttg

SEQ ID NO: 5904097 - DNA, 25 bp, Homo sapien
attctcactgtgaatctccctgctg

SEQ ID NO: 5904098 - DNA, 25 bp, Homo sapien
gccctacctccggcccttgcgacca

SEQ ID NO: 5904099 - DNA, 25 bp, Homo sapien
tgctgctcttgggggaaggatgcca

SEQ ID NO: 5904100 - DNA, 25 bp, Homo sapien
tgggctggagagaggtctccttcct

SEQ ID NO: 5904101 - DNA, 25 bp, Homo sapien
cctaggtgcgcccggcgctgcctga

SEQ ID NO: 5904102 - DNA, 25 bp, Homo sapien
ttcctcattttgcacaagtggcact

SEQ ID NO: 5904103 - DNA, 25 bp, Homo sapien
ggtggcgctggagagcctctacccg

SEQ ID NO: 5904104 - DNA, 25 bp, Homo sapien
gctgcctgacagcccggggataact

SEQ ID NO: 5904105 - DNA, 25 bp, Homo sapien
cggcagaggtgctgagccagggtgc

SEQ ID NO: 5904106 - DNA, 25 bp, Homo sapien
ccccgtcccctgctcctgcccagcc

SEQ ID NO: 5904107 - DNA, 25 bp, Homo sapien
cacttggccgcaggaccggacagcc

SEQ ID NO: 5904108 - DNA, 25 bp, Homo sapien
gataatgtgaagttcctcattttgc

SEQ ID NO: 5904109 - DNA, 25 bp, Homo sapien
taggtgacccctatcctgagcccaa

SEQ ID NO: 5904110 - DNA, 25 bp, Homo sapien
gcgccgcagtggtggccccaccttt

SEQ ID NO: 5904111 - DNA, 25 bp, Homo sapien
tctcccacctagagcgccgtccctc

SEQ ID NO: 5904112 - DNA, 25 bp, Homo sapien
ctgataatgtgaagttcctcatttt

SEQ ID NO: 5904113 - DNA, 25 bp, Homo sapien
cggttgctcccagccctacctccgg

SEQ ID NO: 5904114 - DNA, 25 bp, Homo sapien
gctggagagcctctacccgctggct

SEQ ID NO: 5904115 - DNA, 25 bp, Homo sapien
cctgcccagcccgggactgataatg

SEQ ID NO: 5904116 - DNA, 25 bp, Homo sapien
ctcccagccctacctccggcccttg

SEQ ID NO: 5904117 - DNA, 25 bp, Homo sapien
cctccggcccttgcgaccacaccca

SEQ ID NO: 5904118 - DNA, 25 bp, Homo sapien
gctgagctaggactcagcccagaca

SEQ ID NO: 5904119 - DNA, 25 bp, Homo sapien
accaaaggagaaccctgcctctccc

SEQ ID NO: 5904120 - DNA, 25 bp, Homo sapien
cacgcacttcctgcacgaccccaag

SEQ ID NO: 5904121 - DNA, 25 bp, Homo sapien
ggccctctcccccggctccgtgctg

SEQ ID NO: 5904122 - DNA, 25 bp, Homo sapien
tggcgctggagagcctctacccgct

SEQ ID NO: 5904123 - DNA, 25 bp, Homo sapien
gcgctgcctgacagcccggggataa

SEQ ID NO: 5904124 - DNA, 25 bp, Homo sapien
ccagggtgcgcacttggccgcagga

SEQ ID NO: 5904125 - DNA, 25 bp, Homo sapien
gcttccgaggtgtcccctcctcttc

SEQ ID NO: 5904126 - DNA, 25 bp, Homo sapien
ctctccctgtggctcattggccctc

SEQ ID NO: 5904127 - DNA, 25 bp, Homo sapien
ctccttccttggttcccgttctgtc

SEQ ID NO: 5904128 - DNA, 25 bp, Homo sapien
gaccacacccattctcactgtgaat

SEQ ID NO: 5904129 - DNA, 25 bp, Homo sapien
atcagctttgaccaaaggagaaccc

SEQ ID NO: 5904130 - DNA, 25 bp, Homo sapien
gaagttcctcattttgcacaagtgg

SEQ ID NO: 5904131 - DNA, 25 bp, Homo sapien
aaccatcgaccgtttctctcccacc

SEQ ID NO: 5904132 - DNA, 25 bp, Homo sapien
aaggtggcgctggagagcctctacc

SEQ ID NO: 5904133 - DNA, 25 bp, Homo sapien
aaggcggcagaggtgctgagccagg

SEQ ID NO: 5904134 - DNA, 25 bp, Homo sapien
gcccgggactgataatgtgaagttc

SEQ ID NO: 5904135 - DNA, 25 bp, Homo sapien
ccattattcggacggttgctcccag

SEQ ID NO: 5904136 - DNA, 25 bp, Homo sapien
cggcccttgcgaccacacccattct

SEQ ID NO: 5904137 - DNA, 25 bp, Homo sapien
tactctgtacacaggctcttccaga

SEQ ID NO: 5904138 - DNA, 25 bp, Homo sapien
cttcctgcacgaccccaaggtggcg

SEQ ID NO: 5904139 - DNA, 25 bp, Homo sapien
tgccattattcggacggttgctccc

SEQ ID NO: 5904140 - DNA, 25 bp, Homo sapien
ctgcacgaccccaaggtggcgctgg

SEQ ID NO: 5904141 - DNA, 25 bp, Homo sapien
catatatttattgcatgcgccctag

SEQ ID NO: 5904142 - DNA, 25 bp, Homo sapien
tattcggacggttgctcccagccct

SEQ ID NO: 5904143 - DNA, 25 bp, Homo sapien
acccattctcactgtgaatctccct

SEQ ID NO: 5904144 - DNA, 25 bp, Homo sapien
tccggcccttgcgaccacacccatt

SEQ ID NO: 5904145 - DNA, 25 bp, Homo sapien
cgcacttcctgcacgaccccaaggt

SEQ ID NO: 5904146 - DNA, 25 bp, Homo sapien
accatatatttattgcatgcgccct

SEQ ID NO: 5904147 - DNA, 25 bp, Homo sapien
cagtggtggccccacctttctacac

SEQ ID NO: 5904148 - DNA, 25 bp, Homo sapien
agtctgaagcagcaggacaaggcag

SEQ ID NO: 5904149 - DNA, 25 bp, Homo sapien
gggtccccggaccatatatttattg

SEQ ID NO: 5904150 - DNA, 25 bp, Homo sapien
cctgacagcccggggataactggta

SEQ ID NO: 5904151 - DNA, 25 bp, Homo sapien
cacagctgaacagctgagtctgaag

SEQ ID NO: 5904152 - DNA, 25 bp, Homo sapien
ccctgcctctccctgtggctcattg

SEQ ID NO: 5904153 - DNA, 25 bp, Homo sapien
tgatatcagctttgaccaaaggaga

SEQ ID NO: 5904154 - DNA, 25 bp, Homo sapien
gagcctctacccgctggctaaattc

SEQ ID NO: 5904155 - DNA, 25 bp, Homo sapien
tccgtgctgctcttgggggaaggat

SEQ ID NO: 5904156 - DNA, 25 bp, Homo sapien
ctggcgccagggatgacaaccctga

SEQ ID NO: 5904157 - DNA, 25 bp, Homo sapien
caagtggcactagccccagggccaa

SEQ ID NO: 5904158 - DNA, 25 bp, Homo sapien
gctccgtgctgctcttgggggaagg

SEQ ID NO: 5904159 - DNA, 25 bp, Homo sapien
cccggggataactggtagcagcggc

SEQ ID NO: 5904160 - DNA, 25 bp, Homo sapien
tgcacaagtggcactagccccaggg

SEQ ID NO: 5904161 - DNA, 25 bp, Homo sapien
gccggagggcctccccgtcccctgc

SEQ ID NO: 5904162 - DNA, 25 bp, Homo sapien
cctaggtgacccctatcctgagccc

SEQ ID NO: 5904163 - DNA, 25 bp, Homo sapien
gccgcagtggtggccccacctttct

SEQ ID NO: 5904164 - DNA, 25 bp, Homo sapien
gtggctcattggccctctcccccgg

SEQ ID NO: 5904165 - DNA, 25 bp, Homo sapien
actgtttagtgccttagcctgggga

SEQ ID NO: 5904166 - DNA, 25 bp, Homo sapien
tgagtctgaagcagcaggacaaggc

SEQ ID NO: 5904167 - DNA, 25 bp, Homo sapien
ctcagcccagacaaggcggcagagg

SEQ ID NO: 5904168 - DNA, 25 bp, Homo sapien
ctgcctctccctgtggctcattggc

SEQ ID NO: 5904169 - DNA, 25 bp, Homo sapien
gcgctggagagcctctacccgctgg

SEQ ID NO: 5904170 - DNA, 25 bp, Homo sapien
tggccgcaggaccggacagccgaac

SEQ ID NO: 5904171 - DNA, 25 bp, Homo sapien
tttttgatatcagctttgaccaaag

SEQ ID NO: 5904172 - DNA, 25 bp, Homo sapien
cttggccgcaggaccggacagccga

SEQ ID NO: 5904173 - DNA, 25 bp, Homo sapien
ttcctttcctcaccaccagggtggg

SEQ ID NO: 5904174 - DNA, 25 bp, Homo sapien
cccctgctcctgcccagcccgggac

SEQ ID NO: 5904175 - DNA, 25 bp, Homo sapien
tttctctcccacctagagcgccgtc

SEQ ID NO: 5904176 - DNA, 25 bp, Homo sapien
ggaccggacagccgaaccatcgacc

SEQ ID NO: 5904177 - DNA, 25 bp, Homo sapien
tcctgcacgaccccaaggtggcgct

SEQ ID NO: 5904178 - DNA, 25 bp, Homo sapien
aaggagaaccctgcctctccctgtg

SEQ ID NO: 5904179 - DNA, 25 bp, Homo sapien
gcctctccctgtggctcattggccc

SEQ ID NO: 5904180 - DNA, 25 bp, Homo sapien
ccccggaccatatatttattgcatg

SEQ ID NO: 5904181 - DNA, 25 bp, Homo sapien
gccgaaccatcgaccgtttctctcc

SEQ ID NO: 5904182 - DNA, 25 bp, Homo sapien
tatatttttgatatcagctttgacc

SEQ ID NO: 5904183 - DNA, 25 bp, Homo sapien
cagccctacctccggcccttgcgac

SEQ ID NO: 5904184 - DNA, 25 bp, Homo sapien
cctgctggggtcggagcattgggca

SEQ ID NO: 5904185 - DNA, 25 bp, Homo sapien
gggaggggactgagccggccggagg

SEQ ID NO: 5904186 - DNA, 25 bp, Homo sapien
ccatcgaccgtttctctcccaccta

SEQ ID NO: 5904187 - DNA, 25 bp, Homo sapien
gctttgaccaaaggagaaccctgcc

SEQ ID NO: 5904188 - DNA, 25 bp, Homo sapien
ggcggcagaggtgctgagccagggt

SEQ ID NO: 5904189 - DNA, 25 bp, Homo sapien
tggccccacctttctacacctcacc

SEQ ID NO: 5904190 - DNA, 25 bp, Homo sapien
ccctttgtatattctctactctgta

SEQ ID NO: 5904191 - DNA, 25 bp, Homo sapien
ctcacagctgaacagctgagtctga

SEQ ID NO: 5904192 - DNA, 25 bp, Homo sapien
tagctgggctggagagaggtctcct

SEQ ID NO: 5904193 - DNA, 25 bp, Homo sapien
gttgctcccagccctacctccggcc

SEQ ID NO: 5904194 - DNA, 25 bp, Homo sapien
cagcccagacaaggcggcagaggtg

SEQ ID NO: 5904195 - DNA, 25 bp, Homo sapien
accggacagccgaaccatcgaccgt

SEQ ID NO: 5904196 - DNA, 25 bp, Homo sapien
ttcactgctgagctaggactcagcc

SEQ ID NO: 5904197 - DNA, 25 bp, Homo sapien
gtggtggccccacctttctacacct

SEQ ID NO: 5904198 - DNA, 25 bp, Homo sapien
tacctccggcccttgcgaccacacc

SEQ ID NO: 5904199 - DNA, 25 bp, Homo sapien
ctcttcctggggtccccggaccata

SEQ ID NO: 5904200 - DNA, 25 bp, Homo sapien
tccctgctggggtcggagcattggg

SEQ ID NO: 5904201 - DNA, 25 bp, Homo sapien
tcactgtttagtgccttagcctggg

SEQ ID NO: 5904202 - DNA, 25 bp, Homo sapien
tgcccagcccgggactgataatgtg

SEQ ID NO: 5904203 - DNA, 25 bp, Homo sapien
ctgctcttgggggaaggatgccatt

SEQ ID NO: 5904204 - DNA, 25 bp, Homo sapien
ctaggactcagcccagacaaggcgg

SEQ ID NO: 5904205 - DNA, 25 bp, Homo sapien
tctctactctgtacacaggctcttc

SEQ ID NO: 5904206 - DNA, 25 bp, Homo sapien
gctgggctggagagaggtctccttc

SEQ ID NO: 5904207 - DNA, 25 bp, Homo sapien
gcgcagaccacgcacttcctgcacg

SEQ ID NO: 5904208 - DNA, 25 bp, Homo sapien
cccccggctccgtgctgctcttggg

SEQ ID NO: 5904209 - DNA, 25 bp, Homo sapien
ggaccatatatttattgcatgcgcc

SEQ ID NO: 5904210 - DNA, 25 bp, Homo sapien
cacctcacctggcctcactgtttag

SEQ ID NO: 5904211 - DNA, 25 bp, Homo sapien
ccattctcactgtgaatctccctgc

SEQ ID NO: 5904212 - DNA, 25 bp, Homo sapien
aggactcagcccagacaaggcggca

SEQ ID NO: 5904213 - DNA, 25 bp, Homo sapien
cgagctgctggcgcagaccacgcac

SEQ ID NO: 5904214 - DNA, 25 bp, Homo sapien
tgaccaaaggagaaccctgcctctc

SEQ ID NO: 5904215 - DNA, 25 bp, Homo sapien
gatttatatttttgatatcagcttt

SEQ ID NO: 5904216 - DNA, 25 bp, Homo sapien
agtggcactagccccagggccaacc

SEQ ID NO: 5904217 - DNA, 25 bp, Homo sapien
ccatctgtctctgcttccgaggtgt

SEQ ID NO: 5904218 - DNA, 25 bp, Homo sapien
cccaactttagctgggctggagaga

SEQ ID NO: 5904219 - DNA, 25 bp, Homo sapien
tgcgcccggcgctgcctgacagccc

SEQ ID NO: 5904220 - DNA, 25 bp, Homo sapien
tgagcccaactttagctgggctgga

SEQ ID NO: 5904221 - DNA, 25 bp, Homo sapien
gaggtgtcccctcctcttcctgggg

SEQ ID NO: 5904222 - DNA, 25 bp, Homo sapien
tatatttattgcatgcgccctaggt

SEQ ID NO: 5904223 - DNA, 25 bp, Homo sapien
gggtgggcagctctggcgccaggga

SEQ ID NO: 5904224 - DNA, 25 bp, Homo sapien
tgcgcacttggccgcaggaccggac

SEQ ID NO: 5904225 - DNA, 25 bp, Homo sapien
ctgccgagctgctggcgcagaccac

SEQ ID NO: 5904226 - DNA, 25 bp, Homo sapien
tggagagcctctacccgctggctaa

SEQ ID NO: 5904227 - DNA, 25 bp, Homo sapien
atgacaaccctgacccatctgtctc

SEQ ID NO: 5904228 - DNA, 25 bp, Homo sapien
gacagccgaaccatcgaccgtttct

SEQ ID NO: 5904229 - DNA, 25 bp, Homo sapien
gtgccttagcctggggaagtcagtg

SEQ ID NO: 5904230 - DNA, 25 bp, Homo sapien
cctacctccggcccttgcgaccaca

SEQ ID NO: 5904231 - DNA, 25 bp, Homo sapien
tctgaagcagcaggacaaggcagct

SEQ ID NO: 5904232 - DNA, 25 bp, Homo sapien
caacccttcctttcctcaccaccag

SEQ ID NO: 5904233 - DNA, 25 bp, Homo sapien
gcctctacccgctggctaaattcac

SEQ ID NO: 5904234 - DNA, 25 bp, Homo sapien
ccagggccaacccttcctttcctca

SEQ ID NO: 5904235 - DNA, 25 bp, Homo sapien
gcccttgcgaccacacccattctca

SEQ ID NO: 5904236 - DNA, 25 bp, Homo sapien
cgcagtggtggccccacctttctac

SEQ ID NO: 5904237 - DNA, 25 bp, Homo sapien
atgcgccctaggtgacccctatcct

SEQ ID NO: 5904238 - DNA, 25 bp, Homo sapien
caggaccggacagccgaaccatcga

SEQ ID NO: 5904239 - DNA, 25 bp, Homo sapien
cgccgtccctcctaggtgcgcccgg

SEQ ID NO: 5904240 - DNA, 25 bp, Homo sapien
ttgcatgcgccctaggtgaccccta

SEQ ID NO: 5904241 - DNA, 25 bp, Homo sapien
actttagctgggctggagagaggtc

SEQ ID NO: 5904242 - DNA, 25 bp, Homo sapien
ccgtccctcctaggtgcgcccggcg

SEQ ID NO: 5904243 - DNA, 25 bp, Homo sapien
ggcgccagggatgacaaccctgacc

SEQ ID NO: 5904244 - DNA, 25 bp, Homo sapien
ctggggtccccggaccatatattta

SEQ ID NO: 5904245 - DNA, 25 bp, Homo sapien
caccaccagggtgggcagctctggc

SEQ ID NO: 5904246 - DNA, 25 bp, Homo sapien
ctgtggctcattggccctctccccc

SEQ ID NO: 5904247 - DNA, 25 bp, Homo sapien
tgctggggtcggagcattgggcaca

SEQ ID NO: 5904248 - DNA, 25 bp, Homo sapien
tttagtgccttagcctggggaagtc

SEQ ID NO: 5904249 - DNA, 25 bp, Homo sapien
gtgggcagctctggcgccagggatg

SEQ ID NO: 5904250 - DNA, 25 bp, Homo sapien
gtgctgagccagggtgcgcacttgg

SEQ ID NO: 5904251 - DNA, 25 bp, Homo sapien
tattgcatgcgccctaggtgacccc

SEQ ID NO: 5904252 - DNA, 25 bp, Homo sapien
acaaggcagctgctgccgagctgct

SEQ ID NO: 5904253 - DNA, 25 bp, Homo sapien
tttgatatcagctttgaccaaagga

SEQ ID NO: 5904254 - DNA, 25 bp, Homo sapien
agctctggcgccagggatgacaacc

SEQ ID NO: 5904255 - DNA, 25 bp, Homo sapien
ggacaaggcagctgctgccgagctg

SEQ ID NO: 5904256 - DNA, 25 bp, Homo sapien
aaccctgcctctccctgtggctcat

SEQ ID NO: 5904257 - DNA, 25 bp, Homo sapien
acctggcctcactgtttagtgcctt

SEQ ID NO: 5904258 - DNA, 25 bp, Homo sapien
taatgtgaagttcctcattttgcac

SEQ ID NO: 5904259 - DNA, 25 bp, Homo sapien
ggctggagagaggtctccttccttg

SEQ ID NO: 5904260 - DNA, 25 bp, Homo sapien
ctggggtcggagcattgggcacagt

SEQ ID NO: 5904261 - DNA, 25 bp, Homo sapien
gtgaagttcctcattttgcacaagt

SEQ ID NO: 5904262 - DNA, 25 bp, Homo sapien
cacctttctacacctcacctggcct

SEQ ID NO: 5904263 - DNA, 25 bp, Homo sapien
gagagcctctacccgctggctaaat

SEQ ID NO: 5904264 - DNA, 25 bp, Homo sapien
ggactgagccggccggagggcctcc

SEQ ID NO: 5904265 - DNA, 25 bp, Homo sapien
tgcctgacagcccggggataactgg

SEQ ID NO: 5904266 - DNA, 25 bp, Homo sapien
tttcctcaccaccagggtgggcagc

SEQ ID NO: 5904267 - DNA, 25 bp, Homo sapien
gctgagccagggtgcgcacttggcc

SEQ ID NO: 5904268 - DNA, 25 bp, Homo sapien
cccagccctacctccggcccttgcg

SEQ ID NO: 5904269 - DNA, 25 bp, Homo sapien
aggtgctgagccagggtgcgcactt

SEQ ID NO: 5904270 - DNA, 25 bp, Homo sapien
cggagggcctccccgtcccctgctc

SEQ ID NO: 5904271 - DNA, 25 bp, Homo sapien
caaccctgacccatctgtctctgct

SEQ ID NO: 5904272 - DNA, 25 bp, Homo sapien
ccctgtggctcattggccctctccc

SEQ ID NO: 5904273 - DNA, 25 bp, Homo sapien
ctctgtacacaggctcttccagagc

SEQ ID NO: 5904274 - DNA, 25 bp, Homo sapien
gtccccggaccatatatttattgca

SEQ ID NO: 5904275 - DNA, 25 bp, Homo sapien
gggaaggatgccattattcggacgg

SEQ ID NO: 5904276 - DNA, 25 bp, Homo sapien
cctttcctcaccaccagggtgggca

SEQ ID NO: 5904277 - DNA, 25 bp, Homo sapien
atattctctactctgtacacaggct

SEQ ID NO: 5904278 - DNA, 25 bp, Homo sapien
ctgctggcgcagaccacgcacttcc

SEQ ID NO: 5904279 - DNA, 25 bp, Homo sapien
gcagaccacgcacttcctgcacgac

SEQ ID NO: 5904280 - DNA, 25 bp, Homo sapien
gctggctaaattcactgctgagcta

SEQ ID NO: 5904281 - DNA, 25 bp, Homo sapien
acctagagcgccgtccctcctaggt

SEQ ID NO: 5904282 - DNA, 25 bp, Homo sapien
ctggagagaggtctccttccttggt

SEQ ID NO: 5904283 - DNA, 25 bp, Homo sapien
agctaggactcagcccagacaaggc

SEQ ID NO: 5904284 - DNA, 25 bp, Homo sapien
cagctgaacagctgagtctgaagca

SEQ ID NO: 5904285 - DNA, 25 bp, Homo sapien
ctctggcgccagggatgacaaccct

SEQ ID NO: 5904286 - DNA, 25 bp, Homo sapien
tttagctgggctggagagaggtctc

SEQ ID NO: 5904287 - DNA, 25 bp, Homo sapien
ggtgacccctatcctgagcccaact

SEQ ID NO: 5904288 - DNA, 25 bp, Homo sapien
ggtggccccacctttctacacctca

SEQ ID NO: 5904289 - DNA, 25 bp, Homo sapien
tggctaaattcactgctgagctagg

SEQ ID NO: 5904290 - DNA, 25 bp, Homo sapien
cccggctccgtgctgctcttggggg

SEQ ID NO: 5904291 - DNA, 25 bp, Homo sapien
cgcaggaccggacagccgaaccatc

SEQ ID NO: 5904292 - DNA, 25 bp, Homo sapien
agttcctcattttgcacaagtggca

SEQ ID NO: 5904293 - DNA, 25 bp, Homo sapien
ctctacccgctggctaaattcactg

SEQ ID NO: 5904294 - DNA, 25 bp, Homo sapien
tgagctaggactcagcccagacaag

SEQ ID NO: 5904295 - DNA, 25 bp, Homo sapien
gacggttgctcccagccctacctcc

SEQ ID NO: 5904296 - DNA, 25 bp, Homo sapien
cggctccgtgctgctcttgggggaa

SEQ ID NO: 5904297 - DNA, 25 bp, Homo sapien
ggtcggagcattgggcacagttgga

SEQ ID NO: 5904298 - DNA, 25 bp, Homo sapien
aagggagatttatatttttgatatc

SEQ ID NO: 5904299 - DNA, 25 bp, Homo sapien
cgaccgtttctctcccacctagagc

SEQ ID NO: 5904300 - DNA, 25 bp, Homo sapien
acccctatcctgagcccaactttag

SEQ ID NO: 5904301 - DNA, 25 bp, Homo sapien
ttcggacggttgctcccagccctac

SEQ ID NO: 5904302 - DNA, 25 bp, Homo sapien
ttctgtccctttgtatattctctac

SEQ ID NO: 5904303 - DNA, 25 bp, Homo sapien
gtccctcctaggtgcgcccggcgct

SEQ ID NO: 5904304 - DNA, 25 bp, Homo sapien
ggcctcactgtttagtgccttagcc

SEQ ID NO: 5904305 - DNA, 25 bp, Homo sapien
acccatctgtctctgcttccgaggt

SEQ ID NO: 5904306 - DNA, 25 bp, Homo sapien
ccgtcccctgctcctgcccagcccg

SEQ ID NO: 5904307 - DNA, 25 bp, Homo sapien
gacaaccctgacccatctgtctctg

SEQ ID NO: 5904308 - DNA, 25 bp, Homo sapien
ctctcccccggctccgtgctgctct

SEQ ID NO: 5904309 - DNA, 25 bp, Homo sapien
ttggttcccgttctgtccctttgta

SEQ ID NO: 5904310 - DNA, 25 bp, Homo sapien
accagggtgggcagctctggcgcca

SEQ ID NO: 5904311 - DNA, 25 bp, Homo sapien
ggagaaccctgcctctccctgtggc

SEQ ID NO: 5904312 - DNA, 25 bp, Homo sapien
gtctccttccttggttcccgttctg

SEQ ID NO: 5904313 - DNA, 25 bp, Homo sapien
ctatcctgagcccaactttagctgg

SEQ ID NO: 5904314 - DNA, 25 bp, Homo sapien
tatttttgatatcagctttgaccaa

SEQ ID NO: 5904315 - DNA, 25 bp, Homo sapien
ccccaaggtggcgctggagagcctc

SEQ ID NO: 5904316 - DNA, 25 bp, Homo sapien
cctcattttgcacaagtggcactag

SEQ ID NO: 5904317 - DNA, 25 bp, Homo sapien
tggcactagccccagggccaaccct

SEQ ID NO: 5904318 - DNA, 25 bp, Homo sapien
ggggactgagccggccggagggcct

SEQ ID NO: 5904319 - DNA, 25 bp, Homo sapien
ctgtccctttgtatattctctactc

SEQ ID NO: 5904320 - DNA, 25 bp, Homo sapien
ctcccccggctccgtgctgctcttg

SEQ ID NO: 5904321 - DNA, 25 bp, Homo sapien
ggaagggagatttatatttttgata

SEQ ID NO: 5904322 - DNA, 25 bp, Homo sapien
tcccacctagagcgccgtccctcct

SEQ ID NO: 5904323 - DNA, 25 bp, Homo sapien
accctgacccatctgtctctgcttc

SEQ ID NO: 5904324 - DNA, 25 bp, Homo sapien
gcatgcgccctaggtgacccctatc

SEQ ID NO: 5904325 - DNA, 25 bp, Homo sapien
ttgcgaccacacccattctcactgt

SEQ ID NO: 5904326 - DNA, 25 bp, Homo sapien
cgtttctctcccacctagagcgccg

SEQ ID NO: 5904327 - DNA, 25 bp, Homo sapien
actgtgaatctccctgctggggtcg

SEQ ID NO: 5904328 - DNA, 25 bp, Homo sapien
cggacagccgaaccatcgaccgttt

SEQ ID NO: 5904329 - DNA, 25 bp, Homo sapien
cgtgctgctcttgggggaaggatgc

SEQ ID NO: 5904330 - DNA, 25 bp, Homo sapien
ctctgcttccgaggtgtcccctcct

SEQ ID NO: 5904331 - DNA, 25 bp, Homo sapien
tgctcccagccctacctccggccct

SEQ ID NO: 5904332 - DNA, 25 bp, Homo sapien
agaaccctgcctctccctgtggctc

SEQ ID NO: 5904333 - DNA, 25 bp, Homo sapien
tcattttgcacaagtggcactagcc

SEQ ID NO: 5904334 - DNA, 25 bp, Homo sapien
ccacctagagcgccgtccctcctag

SEQ ID NO: 5904335 - DNA, 25 bp, Homo sapien
cagctttgaccaaaggagaaccctg

SEQ ID NO: 5904336 - DNA, 25 bp, Homo sapien
tggtagcagcggcagcgccgcagtg

SEQ ID NO: 5904337 - DNA, 25 bp, Homo sapien
atatcagctttgaccaaaggagaac

SEQ ID NO: 5904338 - DNA, 25 bp, Homo sapien
tgtttagtgccttagcctggggaag

SEQ ID NO: 5904339 - DNA, 25 bp, Homo sapien
gtagcagcggcagcgccgcagtggt

SEQ ID NO: 5904340 - DNA, 25 bp, Homo sapien
tgtcccctcctcttcctggggtccc

SEQ ID NO: 5904341 - DNA, 25 bp, Homo sapien
cactgctgagctaggactcagccca

SEQ ID NO: 5904342 - DNA, 25 bp, Homo sapien
cattgggcacagttggagagagggg

SEQ ID NO: 5904343 - DNA, 25 bp, Homo sapien
acgaccccaaggtggcgctggagag

SEQ ID NO: 5904344 - DNA, 25 bp, Homo sapien
actggtagcagcggcagcgccgcag

SEQ ID NO: 5904345 - DNA, 25 bp, Homo sapien
tctccctgctggggtcggagcattg

SEQ ID NO: 5904346 - DNA, 25 bp, Homo sapien
caactttagctgggctggagagagg

SEQ ID NO: 5904347 - DNA, 25 bp, Homo sapien
agccagggtgcgcacttggccgcag

SEQ ID NO: 5904348 - DNA, 25 bp, Homo sapien
cagggtgggcagctctggcgccagg

SEQ ID NO: 5904349 - DNA, 25 bp, Homo sapien
ctgctgagctaggactcagcccaga

SEQ ID NO: 5904350 - DNA, 25 bp, Homo sapien
ggctcattggccctctcccccggct

SEQ ID NO: 5904351 - DNA, 25 bp, Homo sapien
atgtgaagttcctcattttgcacaa

SEQ ID NO: 5904352 - DNA, 25 bp, Homo sapien
tgagccagggtgcgcacttggccgc

SEQ ID NO: 5904353 - DNA, 25 bp, Homo sapien
agagaggtctccttccttggttccc

SEQ ID NO: 5904354 - DNA, 25 bp, Homo sapien
ctcattggccctctcccccggctcc

SEQ ID NO: 5904355 - DNA, 25 bp, Homo sapien
tctacacctcacctggcctcactgt

SEQ ID NO: 5904356 - DNA, 25 bp, Homo sapien
tcggagcattgggcacagttggaga

SEQ ID NO: 5904357 - DNA, 25 bp, Homo sapien
cgcacttggccgcaggaccggacag

SEQ ID NO: 5904358 - DNA, 25 bp, Homo sapien
agcagcggcagcgccgcagtggtgg

SEQ ID NO: 5904359 - DNA, 25 bp, Homo sapien
ttggccctctcccccggctccgtgc

SEQ ID NO: 5904360 - DNA, 25 bp, Homo sapien
ggagcattgggcacagttggagaga

SEQ ID NO: 5904361 - DNA, 25 bp, Homo sapien
ggtgtcccctcctcttcctggggtc

SEQ ID NO: 5904362 - DNA, 25 bp, Homo sapien
cggcgctgcctgacagcccggggat

SEQ ID NO: 5904363 - DNA, 25 bp, Homo sapien
agacaaggcggcagaggtgctgagc

SEQ ID NO: 5904364 - DNA, 25 bp, Homo sapien
agctgctggcgcagaccacgcactt

SEQ ID NO: 5904365 - DNA, 25 bp, Homo sapien
cagctgagtctgaagcagcaggaca

SEQ ID NO: 5904366 - DNA, 25 bp, Homo sapien
ggcagctgctgccgagctgctggcg

SEQ ID NO: 5904367 - DNA, 25 bp, Homo sapien
gccttagcctggggaagtcagtggg

SEQ ID NO: 5904368 - DNA, 25 bp, Homo sapien
acacccattctcactgtgaatctcc

SEQ ID NO: 5904369 - DNA, 25 bp, Homo sapien
cccggcgctgcctgacagcccgggg

SEQ ID NO: 5904370 - DNA, 25 bp, Homo sapien
cccagcccgggactgataatgtgaa

SEQ ID NO: 5904371 - DNA, 25 bp, Homo sapien
cagcgccgcagtggtggccccacct

SEQ ID NO: 5904372 - DNA, 25 bp, Homo sapien
taactggtagcagcggcagcgccgc

SEQ ID NO: 5904373 - DNA, 25 bp, Homo sapien
ggttcccgttctgtccctttgtata

SEQ ID NO: 5904374 - DNA, 25 bp, Homo sapien
ccctatcctgagcccaactttagct

SEQ ID NO: 5904375 - DNA, 25 bp, Homo sapien
cctcactgtttagtgccttagcctg

SEQ ID NO: 5904376 - DNA, 25 bp, Homo sapien
gccccacctttctacacctcacctg

SEQ ID NO: 5904377 - DNA, 25 bp, Homo sapien
acaaggcggcagaggtgctgagcca

SEQ ID NO: 5904378 - DNA, 25 bp, Homo sapien
ccgggactgataatgtgaagttcct

SEQ ID NO: 5904379 - DNA, 25 bp, Homo sapien
aatctccctgctggggtcggagcat

SEQ ID NO: 5904380 - DNA, 25 bp, Homo sapien
gtctctgcttccgaggtgtcccctc

SEQ ID NO: 5904381 - DNA, 25 bp, Homo sapien
gcccagacaaggcggcagaggtgct

SEQ ID NO: 5904382 - DNA, 25 bp, Homo sapien
ggggaagggagatttatatttttga

SEQ ID NO: 5904383 - DNA, 25 bp, Homo sapien
gcactagccccagggccaacccttc

SEQ ID NO: 5904384 - DNA, 25 bp, Homo sapien
agggtgcgcacttggccgcaggacc

SEQ ID NO: 5904385 - DNA, 25 bp, Homo sapien
gatgccattattcggacggttgctc

SEQ ID NO: 5904386 - DNA, 25 bp, Homo sapien
aaggcagctgctgccgagctgctgg

SEQ ID NO: 5904387 - DNA, 25 bp, Homo sapien
accgtttctctcccacctagagcgc

SEQ ID NO: 5904388 - DNA, 25 bp, Homo sapien
ggcagcgccgcagtggtggccccac

SEQ ID NO: 5904389 - DNA, 25 bp, Homo sapien
tcacctggcctcactgtttagtgcc

SEQ ID NO: 5904390 - DNA, 25 bp, Homo sapien
gcgccctaggtgacccctatcctga

SEQ ID NO: 5904391 - DNA, 25 bp, Homo sapien
tccgaccccagcagggagattcaca

SEQ ID NO: 5904392 - DNA, 25 bp, Homo sapien
ggctgtccggtcctgcggccaagtg

SEQ ID NO: 5904393 - DNA, 25 bp, Homo sapien
tgggtcagggttgtcatccctggcg

SEQ ID NO: 5904394 - DNA, 25 bp, Homo sapien
ggaggtagggctgggagcaaccgtc

SEQ ID NO: 5904395 - DNA, 25 bp, Homo sapien
gaatttagccagcgggtagaggctc

SEQ ID NO: 5904396 - DNA, 25 bp, Homo sapien
tctggaagagcctgtgtacagagta

SEQ ID NO: 5904397 - DNA, 25 bp, Homo sapien
cttcagactcagctgttcagctgtg

SEQ ID NO: 5904398 - DNA, 25 bp, Homo sapien
aggaacttcacattatcagtcccgg

SEQ ID NO: 5904399 - DNA, 25 bp, Homo sapien
ggccctggggctagtgccacttgtg

SEQ ID NO: 5904400 - DNA, 25 bp, Homo sapien
aggcagcgccgggcgcacctaggag

SEQ ID NO: 5904401 - DNA, 25 bp, Homo sapien
gacagatgggtcagggttgtcatcc

SEQ ID NO: 5904402 - DNA, 25 bp, Homo sapien
tggcgccagagctgcccaccctggt

SEQ ID NO: 5904403 - DNA, 25 bp, Homo sapien
ggaagtgcgtggtctgcgccagcag

SEQ ID NO: 5904404 - DNA, 25 bp, Homo sapien
ggtgaggtgtagaaaggtggggcca

SEQ ID NO: 5904405 - DNA, 25 bp, Homo sapien
aaccgtccgaataatggcatccttc

SEQ ID NO: 5904406 - DNA, 25 bp, Homo sapien
gtagagaatatacaaagggacagaa

SEQ ID NO: 5904407 - DNA, 25 bp, Homo sapien
gcagcgccgggcgcacctaggaggg

SEQ ID NO: 5904408 - DNA, 25 bp, Homo sapien
accccagcagggagattcacagtga

SEQ ID NO: 5904409 - DNA, 25 bp, Homo sapien
gctgcccaccctggtggtgaggaaa

SEQ ID NO: 5904410 - DNA, 25 bp, Homo sapien
cagagctgcccaccctggtggtgag

SEQ ID NO: 5904411 - DNA, 25 bp, Homo sapien
tgtctgggctgagtcctagctcagc

SEQ ID NO: 5904412 - DNA, 25 bp, Homo sapien
ctaaggcactaaacagtgaggccag

SEQ ID NO: 5904413 - DNA, 25 bp, Homo sapien
tgtcctgctgcttcagactcagctg

SEQ ID NO: 5904414 - DNA, 25 bp, Homo sapien
agggccggaggtagggctgggagca

SEQ ID NO: 5904415 - DNA, 25 bp, Homo sapien
accactgcggcgctgccgctgctac

SEQ ID NO: 5904416 - DNA, 25 bp, Homo sapien
cagcccagctaaagttgggctcagg

SEQ ID NO: 5904417 - DNA, 25 bp, Homo sapien
gtgcgcaccctggctcagcacctct

SEQ ID NO: 5904418 - DNA, 25 bp, Homo sapien
ggttggccctggggctagtgccact

SEQ ID NO: 5904419 - DNA, 25 bp, Homo sapien
gctcaggataggggtcacctagggc

SEQ ID NO: 5904420 - DNA, 25 bp, Homo sapien
gtccgaataatggcatccttccccc

SEQ ID NO: 5904421 - DNA, 25 bp, Homo sapien
ggtgtggtcgcaagggccggaggta

SEQ ID NO: 5904422 - DNA, 25 bp, Homo sapien
aatggcatccttcccccaagagcag

SEQ ID NO: 5904423 - DNA, 25 bp, Homo sapien
tgcgccagcagctcggcagcagctg

SEQ ID NO: 5904424 - DNA, 25 bp, Homo sapien
taggtgggagagaaacggtcgatgg

SEQ ID NO: 5904425 - DNA, 25 bp, Homo sapien
cagctcggcagcagctgccttgtcc

SEQ ID NO: 5904426 - DNA, 25 bp, Homo sapien
agccgggggagagggccaatgagcc

SEQ ID NO: 5904427 - DNA, 25 bp, Homo sapien
gcggccaagtgcgcaccctggctca

SEQ ID NO: 5904428 - DNA, 25 bp, Homo sapien
gggagaggcagggttctcctttggt

SEQ ID NO: 5904429 - DNA, 25 bp, Homo sapien
agaaacggtcgatggttcggctgtc

SEQ ID NO: 5904430 - DNA, 25 bp, Homo sapien
gctaccagttatccccgggctgtca

SEQ ID NO: 5904431 - DNA, 25 bp, Homo sapien
gacctctctccagcccagctaaagt

SEQ ID NO: 5904432 - DNA, 25 bp, Homo sapien
cccctctctccaactgtgcccaatg

SEQ ID NO: 5904433 - DNA, 25 bp, Homo sapien
ttggccctggggctagtgccacttg

SEQ ID NO: 5904434 - DNA, 25 bp, Homo sapien
gccagagctgcccaccctggtggtg

SEQ ID NO: 5904435 - DNA, 25 bp, Homo sapien
agagcctgtgtacagagtagagaat

SEQ ID NO: 5904436 - DNA, 25 bp, Homo sapien
gggagcaaccgtccgaataatggca

SEQ ID NO: 5904437 - DNA, 25 bp, Homo sapien
caactgtgcccaatgctccgacccc

SEQ ID NO: 5904438 - DNA, 25 bp, Homo sapien
agggagattcacagtgagaatgggt

SEQ ID NO: 5904439 - DNA, 25 bp, Homo sapien
ctaaacagtgaggccaggtgaggtg

SEQ ID NO: 5904440 - DNA, 25 bp, Homo sapien
tcacagtgagaatgggtgtggtcgc

SEQ ID NO: 5904441 - DNA, 25 bp, Homo sapien
tcaggataggggtcacctagggcgc

SEQ ID NO: 5904442 - DNA, 25 bp, Homo sapien
agctaaagttgggctcaggataggg

SEQ ID NO: 5904443 - DNA, 25 bp, Homo sapien
ccaccactgcggcgctgccgctgct

SEQ ID NO: 5904444 - DNA, 25 bp, Homo sapien
aggagggacggcgctctaggtggga

SEQ ID NO: 5904445 - DNA, 25 bp, Homo sapien
aaaggtggggccaccactgcggcgc

SEQ ID NO: 5904446 - DNA, 25 bp, Homo sapien
gaacttcacattatcagtcccgggc

SEQ ID NO: 5904447 - DNA, 25 bp, Homo sapien
agccagcgggtagaggctctccagc

SEQ ID NO: 5904448 - DNA, 25 bp, Homo sapien
tgcaggaagtgcgtggtctgcgcca

SEQ ID NO: 5904449 - DNA, 25 bp, Homo sapien
ccccaggaagaggaggggacacctc

SEQ ID NO: 5904450 - DNA, 25 bp, Homo sapien
ggctagtgccacttgtgcaaaatga

SEQ ID NO: 5904451 - DNA, 25 bp, Homo sapien
gtggggccaccactgcggcgctgcc

SEQ ID NO: 5904452 - DNA, 25 bp, Homo sapien
gtcgtgcaggaagtgcgtggtctgc

SEQ ID NO: 5904453 - DNA, 25 bp, Homo sapien
tcggctgtccggtcctgcggccaag

SEQ ID NO: 5904454 - DNA, 25 bp, Homo sapien
tcacctagggcgcatgcaataaata

SEQ ID NO: 5904455 - DNA, 25 bp, Homo sapien
acagtgagaatgggtgtggtcgcaa

SEQ ID NO: 5904456 - DNA, 25 bp, Homo sapien
ccaagtgcgcaccctggctcagcac

SEQ ID NO: 5904457 - DNA, 25 bp, Homo sapien
cggaagcagagacagatgggtcagg

SEQ ID NO: 5904458 - DNA, 25 bp, Homo sapien
aatgaggaacttcacattatcagtc

SEQ ID NO: 5904459 - DNA, 25 bp, Homo sapien
gggtcgtgcaggaagtgcgtggtct

SEQ ID NO: 5904460 - DNA, 25 bp, Homo sapien
atgctccgaccccagcagggagatt

SEQ ID NO: 5904461 - DNA, 25 bp, Homo sapien
tgagaatgggtgtggtcgcaagggc

SEQ ID NO: 5904462 - DNA, 25 bp, Homo sapien
gcacggagccgggggagagggccaa

SEQ ID NO: 5904463 - DNA, 25 bp, Homo sapien
cgcaagggccggaggtagggctggg

SEQ ID NO: 5904464 - DNA, 25 bp, Homo sapien
agcgggtagaggctctccagcgcca

SEQ ID NO: 5904465 - DNA, 25 bp, Homo sapien
cagagtagagaatatacaaagggac

SEQ ID NO: 5904466 - DNA, 25 bp, Homo sapien
agtgccacttgtgcaaaatgaggaa

SEQ ID NO: 5904467 - DNA, 25 bp, Homo sapien
tccctggcgccagagctgcccaccc

SEQ ID NO: 5904468 - DNA, 25 bp, Homo sapien
caatgagccacagggagaggcaggg

SEQ ID NO: 5904469 - DNA, 25 bp, Homo sapien
gaggctctccagcgccaccttgggg

SEQ ID NO: 5904470 - DNA, 25 bp, Homo sapien
ggtcgatggttcggctgtccggtcc

SEQ ID NO: 5904471 - DNA, 25 bp, Homo sapien
acagtgaggccaggtgaggtgtaga

SEQ ID NO: 5904472 - DNA, 25 bp, Homo sapien
cttgtcctgctgcttcagactcagc

SEQ ID NO: 5904473 - DNA, 25 bp, Homo sapien
gtcctagctcagcagtgaatttagc

SEQ ID NO: 5904474 - DNA, 25 bp, Homo sapien
tggctcagcacctctgccgccttgt

SEQ ID NO: 5904475 - DNA, 25 bp, Homo sapien
ggggtcacctagggcgcatgcaata

SEQ ID NO: 5904476 - DNA, 25 bp, Homo sapien
ggttgtcatccctggcgccagagct

SEQ ID NO: 5904477 - DNA, 25 bp, Homo sapien
tggtgaggaaaggaagggttggccc

SEQ ID NO: 5904478 - DNA, 25 bp, Homo sapien
gctctaggtgggagagaaacggtcg

SEQ ID NO: 5904479 - DNA, 25 bp, Homo sapien
tcctgctgcttcagactcagctgtt

SEQ ID NO: 5904480 - DNA, 25 bp, Homo sapien
caataaatatatggtccggggaccc

SEQ ID NO: 5904481 - DNA, 25 bp, Homo sapien
gagagggccaatgagccacagggag

SEQ ID NO: 5904482 - DNA, 25 bp, Homo sapien
aaggcactaaacagtgaggccaggt

SEQ ID NO: 5904483 - DNA, 25 bp, Homo sapien
ctgctaccagttatccccgggctgt

SEQ ID NO: 5904484 - DNA, 25 bp, Homo sapien
gctgtcaggcagcgccgggcgcacc

SEQ ID NO: 5904485 - DNA, 25 bp, Homo sapien
cagatgggtcagggttgtcatccct

SEQ ID NO: 5904486 - DNA, 25 bp, Homo sapien
atcagtcccgggctgggcaggagca

SEQ ID NO: 5904487 - DNA, 25 bp, Homo sapien
acggagccgggggagagggccaatg

SEQ ID NO: 5904488 - DNA, 25 bp, Homo sapien
gctcggcagcagctgccttgtcctg

SEQ ID NO: 5904489 - DNA, 25 bp, Homo sapien
agctgatatcaaaaatataaatctc

SEQ ID NO: 5904490 - DNA, 25 bp, Homo sapien
agcagagacagatgggtcagggttg

SEQ ID NO: 5904491 - DNA, 25 bp, Homo sapien
accaaggaaggagacctctctccag

SEQ ID NO: 5904492 - DNA, 25 bp, Homo sapien
gccttgtctgggctgagtcctagct

SEQ ID NO: 5904493 - DNA, 25 bp, Homo sapien
acctcggaagcagagacagatgggt

SEQ ID NO: 5904494 - DNA, 25 bp, Homo sapien
tgcccaatgctccgaccccagcagg

SEQ ID NO: 5904495 - DNA, 25 bp, Homo sapien
gaccccaggaagaggaggggacacc

SEQ ID NO: 5904496 - DNA, 25 bp, Homo sapien
gggttctcctttggtcaaagctgat

SEQ ID NO: 5904497 - DNA, 25 bp, Homo sapien
tctctccagcccagctaaagttggg

SEQ ID NO: 5904498 - DNA, 25 bp, Homo sapien
actgtgcccaatgctccgaccccag

SEQ ID NO: 5904499 - DNA, 25 bp, Homo sapien
cccaccctggtggtgaggaaaggaa

SEQ ID NO: 5904500 - DNA, 25 bp, Homo sapien
caggtgaggtgtagaaaggtggggc

SEQ ID NO: 5904501 - DNA, 25 bp, Homo sapien
ccttcccccaagagcagcacggagc

SEQ ID NO: 5904502 - DNA, 25 bp, Homo sapien
accttggggtcgtgcaggaagtgcg

SEQ ID NO: 5904503 - DNA, 25 bp, Homo sapien
ctttggtcaaagctgatatcaaaaa

SEQ ID NO: 5904504 - DNA, 25 bp, Homo sapien
tctcctttggtcaaagctgatatca

SEQ ID NO: 5904505 - DNA, 25 bp, Homo sapien
gagtcctagctcagcagtgaattta

SEQ ID NO: 5904506 - DNA, 25 bp, Homo sapien
gagggccaatgagccacagggagag

SEQ ID NO: 5904507 - DNA, 25 bp, Homo sapien
gacttccccaggctaaggcactaaa

SEQ ID NO: 5904508 - DNA, 25 bp, Homo sapien
ccagttatccccgggctgtcaggca

SEQ ID NO: 5904509 - DNA, 25 bp, Homo sapien
tctccaactgtgcccaatgctccga

SEQ ID NO: 5904510 - DNA, 25 bp, Homo sapien
aggagacctctctccagcccagcta

SEQ ID NO: 5904511 - DNA, 25 bp, Homo sapien
agagaaacggtcgatggttcggctg

SEQ ID NO: 5904512 - DNA, 25 bp, Homo sapien
gggctcaggataggggtcacctagg

SEQ ID NO: 5904513 - DNA, 25 bp, Homo sapien
gctcagcacctctgccgccttgtct

SEQ ID NO: 5904514 - DNA, 25 bp, Homo sapien
ggcactaaacagtgaggccaggtga

SEQ ID NO: 5904515 - DNA, 25 bp, Homo sapien
gcccagctaaagttgggctcaggat

SEQ ID NO: 5904516 - DNA, 25 bp, Homo sapien
cctggcgccagagctgcccaccctg

SEQ ID NO: 5904517 - DNA, 25 bp, Homo sapien
ggctgggcaggagcaggggacgggg

SEQ ID NO: 5904518 - DNA, 25 bp, Homo sapien
aaagttgggctcaggataggggtca

SEQ ID NO: 5904519 - DNA, 25 bp, Homo sapien
acctaggagggacggcgctctaggt

SEQ ID NO: 5904520 - DNA, 25 bp, Homo sapien
gcagggagattcacagtgagaatgg

SEQ ID NO: 5904521 - DNA, 25 bp, Homo sapien
atgagccacagggagaggcagggtt

SEQ ID NO: 5904522 - DNA, 25 bp, Homo sapien
ctgcggccaagtgcgcaccctggct

SEQ ID NO: 5904523 - DNA, 25 bp, Homo sapien
tacagagtagagaatatacaaaggg

SEQ ID NO: 5904524 - DNA, 25 bp, Homo sapien
agctgccttgtcctgctgcttcaga

SEQ ID NO: 5904525 - DNA, 25 bp, Homo sapien
atccttcccccaagagcagcacgga

SEQ ID NO: 5904526 - DNA, 25 bp, Homo sapien
ctagtgccacttgtgcaaaatgagg

SEQ ID NO: 5904527 - DNA, 25 bp, Homo sapien
cactaaacagtgaggccaggtgagg

SEQ ID NO: 5904528 - DNA, 25 bp, Homo sapien
cccactgacttccccaggctaaggc

SEQ ID NO: 5904529 - DNA, 25 bp, Homo sapien
gccgctgctaccagttatccccggg

SEQ ID NO: 5904530 - DNA, 25 bp, Homo sapien
gtagggctgggagcaaccgtccgaa

SEQ ID NO: 5904531 - DNA, 25 bp, Homo sapien
cactgacttccccaggctaaggcac

SEQ ID NO: 5904532 - DNA, 25 bp, Homo sapien
aggccaggtgaggtgtagaaaggtg

SEQ ID NO: 5904533 - DNA, 25 bp, Homo sapien
acggtcgatggttcggctgtccggt

SEQ ID NO: 5904534 - DNA, 25 bp, Homo sapien
ggtcagggttgtcatccctggcgcc

SEQ ID NO: 5904535 - DNA, 25 bp, Homo sapien
caagagcagcacggagccgggggag

SEQ ID NO: 5904536 - DNA, 25 bp, Homo sapien
agttatccccgggctgtcaggcagc

SEQ ID NO: 5904537 - DNA, 25 bp, Homo sapien
cctctctccaactgtgcccaatgct

SEQ ID NO: 5904538 - DNA, 25 bp, Homo sapien
ccagctaaagttgggctcaggatag

SEQ ID NO: 5904539 - DNA, 25 bp, Homo sapien
gcacctaggagggacggcgctctag

SEQ ID NO: 5904540 - DNA, 25 bp, Homo sapien
agattcacagtgagaatgggtgtgg

SEQ ID NO: 5904541 - DNA, 25 bp, Homo sapien
gctcagcagtgaatttagccagcgg

SEQ ID NO: 5904542 - DNA, 25 bp, Homo sapien
accctggctcagcacctctgccgcc

SEQ ID NO: 5904543 - DNA, 25 bp, Homo sapien
ctggggctagtgccacttgtgcaaa

SEQ ID NO: 5904544 - DNA, 25 bp, Homo sapien
ccagcagctcggcagcagctgcctt

SEQ ID NO: 5904545 - DNA, 25 bp, Homo sapien
taggggtcacctagggcgcatgcaa

SEQ ID NO: 5904546 - DNA, 25 bp, Homo sapien
ggtctgcgccagcagctcggcagca

SEQ ID NO: 5904547 - DNA, 25 bp, Homo sapien
ccacttgtgcaaaatgaggaacttc

SEQ ID NO: 5904548 - DNA, 25 bp, Homo sapien
aaagctgatatcaaaaatataaatc

SEQ ID NO: 5904549 - DNA, 25 bp, Homo sapien
acttcacattatcagtcccgggctg

SEQ ID NO: 5904550 - DNA, 25 bp, Homo sapien
ggcagcagctgccttgtcctgctgc

SEQ ID NO: 5904551 - DNA, 25 bp, Homo sapien
tggaagagcctgtgtacagagtaga

SEQ ID NO: 5904552 - DNA, 25 bp, Homo sapien
aggccctccggccggctcagtcccc

SEQ ID NO: 5904553 - DNA, 25 bp, Homo sapien
gggggagagggccaatgagccacag

SEQ ID NO: 5904554 - DNA, 25 bp, Homo sapien
ctgacttccccaggctaaggcacta

SEQ ID NO: 5904555 - DNA, 25 bp, Homo sapien
ctgctgcttcagactcagctgttca

SEQ ID NO: 5904556 - DNA, 25 bp, Homo sapien
acacctcggaagcagagacagatgg

SEQ ID NO: 5904557 - DNA, 25 bp, Homo sapien
ttcccccaagagcagcacggagccg

SEQ ID NO: 5904558 - DNA, 25 bp, Homo sapien
gagcaaccgtccgaataatggcatc

SEQ ID NO: 5904559 - DNA, 25 bp, Homo sapien
gcggcgctgccgctgctaccagtta

SEQ ID NO: 5904560 - DNA, 25 bp, Homo sapien
ggtgggagagaaacggtcgatggtt

SEQ ID NO: 5904561 - DNA, 25 bp, Homo sapien
gacagaacgggaaccaaggaaggag

SEQ ID NO: 5904562 - DNA, 25 bp, Homo sapien
cggcgctctaggtgggagagaaacg

SEQ ID NO: 5904563 - DNA, 25 bp, Homo sapien
aaacagtgaggccaggtgaggtgta

SEQ ID NO: 5904564 - DNA, 25 bp, Homo sapien
ccagcgggtagaggctctccagcgc

SEQ ID NO: 5904565 - DNA, 25 bp, Homo sapien
ggtagaggctctccagcgccacctt

SEQ ID NO: 5904566 - DNA, 25 bp, Homo sapien
ggggccaccactgcggcgctgccgc

SEQ ID NO: 5904567 - DNA, 25 bp, Homo sapien
gtcgcaagggccggaggtagggctg

SEQ ID NO: 5904568 - DNA, 25 bp, Homo sapien
ggctgagtcctagctcagcagtgaa

SEQ ID NO: 5904569 - DNA, 25 bp, Homo sapien
gtgaatttagccagcgggtagaggc

SEQ ID NO: 5904570 - DNA, 25 bp, Homo sapien
tctgggctgagtcctagctcagcag

SEQ ID NO: 5904571 - DNA, 25 bp, Homo sapien
gctgcttcagactcagctgttcagc

SEQ ID NO: 5904572 - DNA, 25 bp, Homo sapien
ttgtcatccctggcgccagagctgc

SEQ ID NO: 5904573 - DNA, 25 bp, Homo sapien
gaggggacacctcggaagcagagac

SEQ ID NO: 5904574 - DNA, 25 bp, Homo sapien
agactcagctgttcagctgtgaggc

SEQ ID NO: 5904575 - DNA, 25 bp, Homo sapien
agcacctctgccgccttgtctgggc

SEQ ID NO: 5904576 - DNA, 25 bp, Homo sapien
agcctgtgtacagagtagagaatat

SEQ ID NO: 5904577 - DNA, 25 bp, Homo sapien
tggcatccttcccccaagagcagca

SEQ ID NO: 5904578 - DNA, 25 bp, Homo sapien
aagtgcgcaccctggctcagcacct

SEQ ID NO: 5904579 - DNA, 25 bp, Homo sapien
ctcggaagcagagacagatgggtca

SEQ ID NO: 5904580 - DNA, 25 bp, Homo sapien
gacggcgctctaggtgggagagaaa

SEQ ID NO: 5904581 - DNA, 25 bp, Homo sapien
tgtacagagtagagaatatacaaag

SEQ ID NO: 5904582 - DNA, 25 bp, Homo sapien
tggttcggctgtccggtcctgcggc

SEQ ID NO: 5904583 - DNA, 25 bp, Homo sapien
ccctggggctagtgccacttgtgca

SEQ ID NO: 5904584 - DNA, 25 bp, Homo sapien
ctccagcgccaccttggggtcgtgc

SEQ ID NO: 5904585 - DNA, 25 bp, Homo sapien
cctctctccagcccagctaaagttg

SEQ ID NO: 5904586 - DNA, 25 bp, Homo sapien
ggggctagtgccacttgtgcaaaat

SEQ ID NO: 5904587 - DNA, 25 bp, Homo sapien
agagcagcacggagccgggggagag

SEQ ID NO: 5904588 - DNA, 25 bp, Homo sapien
ttggtcaaagctgatatcaaaaata

SEQ ID NO: 5904589 - DNA, 25 bp, Homo sapien
ctgatatcaaaaatataaatctccc

SEQ ID NO: 5904590 - DNA, 25 bp, Homo sapien
tgcttcagactcagctgttcagctg

SEQ ID NO: 5904591 - DNA, 25 bp, Homo sapien
agcgccgggcgcacctaggagggac

SEQ ID NO: 5904592 - DNA, 25 bp, Homo sapien
atttagccagcgggtagaggctctc

SEQ ID NO: 5904593 - DNA, 25 bp, Homo sapien
ttgtgcaaaatgaggaacttcacat

SEQ ID NO: 5904594 - DNA, 25 bp, Homo sapien
ctaaagttgggctcaggataggggt

SEQ ID NO: 5904595 - DNA, 25 bp, Homo sapien
tcagcacctctgccgccttgtctgg

SEQ ID NO: 5904596 - DNA, 25 bp, Homo sapien
tccaactgtgcccaatgctccgacc

SEQ ID NO: 5904597 - DNA, 25 bp, Homo sapien
aggtgtagaaaggtggggccaccac

SEQ ID NO: 5904598 - DNA, 25 bp, Homo sapien
aatatatggtccggggaccccagga

SEQ ID NO: 5904599 - DNA, 25 bp, Homo sapien
ggctgggagcaaccgtccgaataat

SEQ ID NO: 5904600 - DNA, 25 bp, Homo sapien
tctctccaactgtgcccaatgctcc

SEQ ID NO: 5904601 - DNA, 25 bp, Homo sapien
gcaggagcaggggacggggaggccc

SEQ ID NO: 5904602 - DNA, 25 bp, Homo sapien
cgctgccgctgctaccagttatccc

SEQ ID NO: 5904603 - DNA, 25 bp, Homo sapien
ccgggcgcacctaggagggacggcg

SEQ ID NO: 5904604 - DNA, 25 bp, Homo sapien
cctggctcagcacctctgccgcctt

SEQ ID NO: 5904605 - DNA, 25 bp, Homo sapien
ccggtcctgcggccaagtgcgcacc

SEQ ID NO: 5904606 - DNA, 25 bp, Homo sapien
gcatccttcccccaagagcagcacg

SEQ ID NO: 5904607 - DNA, 25 bp, Homo sapien
tgcaataaatatatggtccggggac

SEQ ID NO: 5904608 - DNA, 25 bp, Homo sapien
tcaaaaatataaatctcccttcccc

SEQ ID NO: 5904609 - DNA, 25 bp, Homo sapien
gaagaggaggggacacctcggaagc

SEQ ID NO: 5904610 - DNA, 25 bp, Homo sapien
tcggcagcagctgccttgtcctgct

SEQ ID NO: 5904611 - DNA, 25 bp, Homo sapien
tggggtcgtgcaggaagtgcgtggt

SEQ ID NO: 5904612 - DNA, 25 bp, Homo sapien
agggctgggagcaaccgtccgaata

SEQ ID NO: 5904613 - DNA, 25 bp, Homo sapien
cgccgggcgcacctaggagggacgg

SEQ ID NO: 5904614 - DNA, 25 bp, Homo sapien
gaaggagacctctctccagcccagc

SEQ ID NO: 5904615 - DNA, 25 bp, Homo sapien
cgggctgggcaggagcaggggacgg

SEQ ID NO: 5904616 - DNA, 25 bp, Homo sapien
cggctctggaagagcctgtgtacag

SEQ ID NO: 5904617 - DNA, 25 bp, Homo sapien
cacagggagaggcagggttctcctt

SEQ ID NO: 5904618 - DNA, 25 bp, Homo sapien
gccaggtgaggtgtagaaaggtggg

SEQ ID NO: 5904619 - DNA, 25 bp, Homo sapien
tcaaagctgatatcaaaaatataaa

SEQ ID NO: 5904620 - DNA, 25 bp, Homo sapien
tggtccggggaccccaggaagagga

SEQ ID NO: 5904621 - DNA, 25 bp, Homo sapien
gccttgtcctgctgcttcagactca

SEQ ID NO: 5904622 - DNA, 25 bp, Homo sapien
gggagagggccaatgagccacaggg

SEQ ID NO: 5904623 - DNA, 25 bp, Homo sapien
tctgccgccttgtctgggctgagtc

SEQ ID NO: 5904624 - DNA, 25 bp, Homo sapien
ctgggagcaaccgtccgaataatgg

SEQ ID NO: 5904625 - DNA, 25 bp, Homo sapien
ctctccagcgccaccttggggtcgt

SEQ ID NO: 5904626 - DNA, 25 bp, Homo sapien
ccgaataatggcatccttcccccaa

SEQ ID NO: 5904627 - DNA, 25 bp, Homo sapien
catgcaataaatatatggtccgggg

SEQ ID NO: 5904628 - DNA, 25 bp, Homo sapien
caccctggtggtgaggaaaggaagg

SEQ ID NO: 5904629 - DNA, 25 bp, Homo sapien
cagcacggagccgggggagagggcc

SEQ ID NO: 5904630 - DNA, 25 bp, Homo sapien
ggagccgggggagagggccaatgag

SEQ ID NO: 5904631 - DNA, 25 bp, Homo sapien
gaggcagggttctcctttggtcaaa

SEQ ID NO: 5904632 - DNA, 25 bp, Homo sapien
gaagcagagacagatgggtcagggt

SEQ ID NO: 5904633 - DNA, 25 bp, Homo sapien
aaacggtcgatggttcggctgtccg

SEQ ID NO: 5904634 - DNA, 25 bp, Homo sapien
gggaaccaaggaaggagacctctct

SEQ ID NO: 5904635 - DNA, 25 bp, Homo sapien
gggcgcacctaggagggacggcgct

SEQ ID NO: 5904636 - DNA, 25 bp, Homo sapien
caggaagtgcgtggtctgcgccagc

SEQ ID NO: 5904637 - DNA, 25 bp, Homo sapien
tatggtccggggaccccaggaagag

SEQ ID NO: 5904638 - DNA, 25 bp, Homo sapien
agcgccaccttggggtcgtgcagga

SEQ ID NO: 5904639 - DNA, 25 bp, Homo sapien
gggccaatgagccacagggagaggc

SEQ ID NO: 5904640 - DNA, 25 bp, Homo sapien
aggtagggctgggagcaaccgtccg

SEQ ID NO: 5904641 - DNA, 25 bp, Homo sapien
gagccacagggagaggcagggttct

SEQ ID NO: 5904642 - DNA, 25 bp, Homo sapien
tagaggctctccagcgccaccttgg

SEQ ID NO: 5904643 - DNA, 25 bp, Homo sapien
tgtcaggcagcgccgggcgcaccta

SEQ ID NO: 5904644 - DNA, 25 bp, Homo sapien
cagtgaatttagccagcgggtagag

SEQ ID NO: 5904645 - DNA, 25 bp, Homo sapien
cctagctcagcagtgaatttagcca

SEQ ID NO: 5904646 - DNA, 25 bp, Homo sapien
agagaatatacaaagggacagaacg

SEQ ID NO: 5904647 - DNA, 25 bp, Homo sapien
tagctcagcagtgaatttagccagc

SEQ ID NO: 5904648 - DNA, 25 bp, Homo sapien
gcgtggtctgcgccagcagctcggc

SEQ ID NO: 5904649 - DNA, 25 bp, Homo sapien
gcaaaatgaggaacttcacattatc

SEQ ID NO: 5904650 - DNA, 25 bp, Homo sapien
aaaatgaggaacttcacattatcag

SEQ ID NO: 5904651 - DNA, 25 bp, Homo sapien
gtcatccctggcgccagagctgccc

SEQ ID NO: 5904652 - DNA, 25 bp, Homo sapien
gcaaccgtccgaataatggcatcct

SEQ ID NO: 5904653 - DNA, 25 bp, Homo sapien
ccgtccgaataatggcatccttccc

SEQ ID NO: 5904654 - DNA, 25 bp, Homo sapien
tgaggtgtagaaaggtggggccacc

SEQ ID NO: 5904655 - DNA, 25 bp, Homo sapien
gcaggggacggggaggccctccggc

SEQ ID NO: 5904656 - DNA, 25 bp, Homo sapien
ggagagaaacggtcgatggttcggc

SEQ ID NO: 5904657 - DNA, 25 bp, Homo sapien
gtccggtcctgcggccaagtgcgca

SEQ ID NO: 5904658 - DNA, 25 bp, Homo sapien
cgggtagaggctctccagcgccacc

SEQ ID NO: 5904659 - DNA, 25 bp, Homo sapien
caagggccggaggtagggctgggag

SEQ ID NO: 5904660 - DNA, 25 bp, Homo sapien
aatatacaaagggacagaacgggaa

SEQ ID NO: 5904661 - DNA, 25 bp, Homo sapien
agaatgggtgtggtcgcaagggccg

SEQ ID NO: 5904662 - DNA, 25 bp, Homo sapien
gataggggtcacctagggcgcatgc

SEQ ID NO: 5904663 - DNA, 25 bp, Homo sapien
gagtagagaatatacaaagggacag

SEQ ID NO: 5904664 - DNA, 25 bp, Homo sapien
ctagggcgcatgcaataaatatatg

SEQ ID NO: 5904665 - DNA, 25 bp, Homo sapien
gcagctgccttgtcctgctgcttca

SEQ ID NO: 5904666 - DNA, 25 bp, Homo sapien
atccccgggctgtcaggcagcgccg

SEQ ID NO: 5904667 - DNA, 25 bp, Homo sapien
caggctaaggcactaaacagtgagg

SEQ ID NO: 5904668 - DNA, 25 bp, Homo sapien
ttgggctcaggataggggtcaccta

SEQ ID NO: 5904669 - DNA, 25 bp, Homo sapien
gtgcaaaatgaggaacttcacatta

SEQ ID NO: 5904670 - DNA, 25 bp, Homo sapien
cagaacgggaaccaaggaaggagac

SEQ ID NO: 5904671 - DNA, 25 bp, Homo sapien
gaataatggcatccttcccccaaga

SEQ ID NO: 5904672 - DNA, 25 bp, Homo sapien
ggtggtgaggaaaggaagggttggc

SEQ ID NO: 5904673 - DNA, 25 bp, Homo sapien
gagacagatgggtcagggttgtcat

SEQ ID NO: 5904674 - DNA, 25 bp, Homo sapien
tcaggcagcgccgggcgcacctagg

SEQ ID NO: 5904675 - DNA, 25 bp, Homo sapien
tctccagcccagctaaagttgggct

SEQ ID NO: 5904676 - DNA, 25 bp, Homo sapien
gcgctctaggtgggagagaaacggt

SEQ ID NO: 5904677 - DNA, 25 bp, Homo sapien
aggaagaggaggggacacctcggaa

SEQ ID NO: 5904678 - DNA, 25 bp, Homo sapien
ggcgctgccgctgctaccagttatc

SEQ ID NO: 5904679 - DNA, 25 bp, Homo sapien
agttgggctcaggataggggtcacc

SEQ ID NO: 5904680 - DNA, 25 bp, Homo sapien
ctgtccggtcctgcggccaagtgcg

SEQ ID NO: 5904681 - DNA, 25 bp, Homo sapien
tggtcgcaagggccggaggtagggc

SEQ ID NO: 5904682 - DNA, 25 bp, Homo sapien
agaaaggtggggccaccactgcggc

SEQ ID NO: 5904683 - DNA, 25 bp, Homo sapien
cctccggccggctcagtcccctccc

SEQ ID NO: 5904684 - DNA, 25 bp, Homo sapien
cccgggctgggcaggagcaggggac

SEQ ID NO: 5904685 - DNA, 25 bp, Homo sapien
tatacaaagggacagaacgggaacc

SEQ ID NO: 5904686 - DNA, 25 bp, Homo sapien
gtgcgtggtctgcgccagcagctcg

SEQ ID NO: 5904687 - DNA, 25 bp, Homo sapien
acttgtgcaaaatgaggaacttcac

SEQ ID NO: 5904688 - DNA, 25 bp, Homo sapien
agaggaggggacacctcggaagcag

SEQ ID NO: 5904689 - DNA, 25 bp, Homo sapien
cagtcccgggctgggcaggagcagg

SEQ ID NO: 5904690 - DNA, 25 bp, Homo sapien
tgtgtacagagtagagaatatacaa

SEQ ID NO: 5904691 - DNA, 25 bp, Homo sapien
tcctgcggccaagtgcgcaccctgg

SEQ ID NO: 5904692 - DNA, 25 bp, Homo sapien
aggaaggagacctctctccagccca

SEQ ID NO: 5904693 - DNA, 25 bp, Homo sapien
cagcagctgccttgtcctgctgctt

SEQ ID NO: 5904694 - DNA, 25 bp, Homo sapien
tacaaagggacagaacgggaaccaa

SEQ ID NO: 5904695 - DNA, 25 bp, Homo sapien
tgccacttgtgcaaaatgaggaact

SEQ ID NO: 5904696 - DNA, 25 bp, Homo sapien
ctgcggcgctgccgctgctaccagt

SEQ ID NO: 5904697 - DNA, 25 bp, Homo sapien
tgccgccttgtctgggctgagtcct

SEQ ID NO: 5904698 - DNA, 25 bp, Homo sapien
ttatccccgggctgtcaggcagcgc

SEQ ID NO: 5904699 - DNA, 25 bp, Homo sapien
ctgagtcctagctcagcagtgaatt

SEQ ID NO: 5904700 - DNA, 25 bp, Homo sapien
cttccccaggctaaggcactaaaca

SEQ ID NO: 5904701 - DNA, 25 bp, Homo sapien
agtgaggccaggtgaggtgtagaaa

SEQ ID NO: 5904702 - DNA, 25 bp, Homo sapien
gccctccggccggctcagtcccctc

SEQ ID NO: 5904703 - DNA, 25 bp, Homo sapien
cttggggtcgtgcaggaagtgcgtg

SEQ ID NO: 5904704 - DNA, 25 bp, Homo sapien
cctgtgtacagagtagagaatatac

SEQ ID NO: 5904705 - DNA, 25 bp, Homo sapien
acggggaggccctccggccggctca

SEQ ID NO: 5904706 - DNA, 25 bp, Homo sapien
ctgccttgtcctgctgcttcagact

SEQ ID NO: 5904707 - DNA, 25 bp, Homo sapien
ccagcgccaccttggggtcgtgcag

SEQ ID NO: 5904708 - DNA, 25 bp, Homo sapien
agcagctcggcagcagctgccttgt

SEQ ID NO: 5904709 - DNA, 25 bp, Homo sapien
cccaggctaaggcactaaacagtga

SEQ ID NO: 5904710 - DNA, 25 bp, Homo sapien
ggggacacctcggaagcagagacag

SEQ ID NO: 5904711 - DNA, 25 bp, Homo sapien
gtggtctgcgccagcagctcggcag

SEQ ID NO: 5904712 - DNA, 25 bp, Homo sapien
agaatatacaaagggacagaacggg

SEQ ID NO: 5904713 - DNA, 25 bp, Homo sapien
cacattatcagtcccgggctgggca

SEQ ID NO: 5904714 - DNA, 25 bp, Homo sapien
tgaggaaaggaagggttggccctgg

SEQ ID NO: 5904715 - DNA, 25 bp, Homo sapien
agcagcacggagccgggggagaggg

SEQ ID NO: 5904716 - DNA, 25 bp, Homo sapien
tgcccaccctggtggtgaggaaagg

SEQ ID NO: 5904717 - DNA, 25 bp, Homo sapien
ctgccgctgctaccagttatccccg

SEQ ID NO: 5904718 - DNA, 25 bp, Homo sapien
cctctgccgccttgtctgggctgag

SEQ ID NO: 5904719 - DNA, 25 bp, Homo sapien
aggataggggtcacctagggcgcat

SEQ ID NO: 5904720 - DNA, 25 bp, Homo sapien
gatgggtcagggttgtcatccctgg

SEQ ID NO: 5904721 - DNA, 25 bp, Homo sapien
ccaccttggggtcgtgcaggaagtg

SEQ ID NO: 5904722 - DNA, 25 bp, Homo sapien
tgaggccaggtgaggtgtagaaagg

SEQ ID NO: 5904723 - DNA, 25 bp, Homo sapien
tctgcgccagcagctcggcagcagc

SEQ ID NO: 5904724 - DNA, 25 bp, Homo sapien
cagagacagatgggtcagggttgtc

SEQ ID NO: 5904725 - DNA, 25 bp, Homo sapien
ggccggaggtagggctgggagcaac

SEQ ID NO: 5904726 - DNA, 25 bp, Homo sapien
cccaagagcagcacggagccggggg

SEQ ID NO: 5904727 - DNA, 25 bp, Homo sapien
cattatcagtcccgggctgggcagg

SEQ ID NO: 5904728 - DNA, 25 bp, Homo sapien
cagcagggagattcacagtgagaat

SEQ ID NO: 5904729 - DNA, 25 bp, Homo sapien
cccaatgctccgaccccagcaggga

SEQ ID NO: 5904730 - DNA, 25 bp, Homo sapien
cccagcagggagattcacagtgaga

SEQ ID NO: 5904731 - DNA, 25 bp, Homo sapien
ttatcagtcccgggctgggcaggag

SEQ ID NO: 5904732 - DNA, 25 bp, Homo sapien
attcacagtgagaatgggtgtggtc

SEQ ID NO: 5904733 - DNA, 25 bp, Homo sapien
ttagccagcgggtagaggctctcca

SEQ ID NO: 5904734 - DNA, 25 bp, Homo sapien
aggaggggacacctcggaagcagag

SEQ ID NO: 5904735 - DNA, 25 bp, Homo sapien
aggtggggccaccactgcggcgctg

SEQ ID NO: 5904736 - DNA, 25 bp, Homo sapien
cagggttctcctttggtcaaagctg

SEQ ID NO: 5904737 - DNA, 25 bp, Homo sapien
cacctctgccgccttgtctgggctg

SEQ ID NO: 5904738 - DNA, 25 bp, Homo sapien
gagcaggggacggggaggccctccg

SEQ ID NO: 5904739 - DNA, 25 bp, Homo sapien
cttgtctgggctgagtcctagctca

SEQ ID NO: 5904740 - DNA, 25 bp, Homo sapien
ggcgcatgcaataaatatatggtcc

SEQ ID NO: 5904741 - DNA, 25 bp, Homo sapien
gcgccagagctgcccaccctggtgg

SEQ ID NO: 5904742 - DNA, 25 bp, Homo sapien
ctgggcaggagcaggggacggggag

SEQ ID NO: 5904743 - DNA, 25 bp, Homo sapien
ataatggcatccttcccccaagagc

SEQ ID NO: 5904744 - DNA, 25 bp, Homo sapien
ggccaccactgcggcgctgccgctg

SEQ ID NO: 5904745 - DNA, 25 bp, Homo sapien
aggagcaggggacggggaggccctc

SEQ ID NO: 5904746 - DNA, 25 bp, Homo sapien
gctccgaccccagcagggagattca

SEQ ID NO: 5904747 - DNA, 25 bp, Homo sapien
gaagagcctgtgtacagagtagaga

SEQ ID NO: 5904748 - DNA, 25 bp, Homo sapien
ccgccttgtctgggctgagtcctag

SEQ ID NO: 5904749 - DNA, 25 bp, Homo sapien
agcagtgaatttagccagcgggtag

SEQ ID NO: 5904750 - DNA, 25 bp, Homo sapien
gatatcaaaaatataaatctccctt

SEQ ID NO: 5904751 - DNA, 25 bp, Homo sapien
tgggtgtggtcgcaagggccggagg

SEQ ID NO: 5904752 - DNA, 25 bp, Homo sapien
ggctaaggcactaaacagtgaggcc

SEQ ID NO: 5904753 - DNA, 25 bp, Homo sapien
agggttggccctggggctagtgcca

SEQ ID NO: 5904754 - DNA, 25 bp, Homo sapien
caatgctccgaccccagcagggaga

SEQ ID NO: 5904755 - DNA, 25 bp, Homo sapien
aagtgcgtggtctgcgccagcagct

SEQ ID NO: 5904756 - DNA, 25 bp, Homo sapien
gtgtagaaaggtggggccaccactg

SEQ ID NO: 5904757 - DNA, 25 bp, Homo sapien
gtcccgggctgggcaggagcagggg

SEQ ID NO: 5904758 - DNA, 25 bp, Homo sapien
ggagattcacagtgagaatgggtgt

SEQ ID NO: 5904759 - DNA, 25 bp, Homo sapien
agggcgcatgcaataaatatatggt

SEQ ID NO: 5904760 - DNA, 25 bp, Homo sapien
ctaggagggacggcgctctaggtgg

SEQ ID NO: 5904761 - DNA, 25 bp, Homo sapien
cgccagcagctcggcagcagctgcc

SEQ ID NO: 5904762 - DNA, 25 bp, Homo sapien
agtgagaatgggtgtggtcgcaagg

SEQ ID NO: 5904763 - DNA, 25 bp, Homo sapien
cgccaccttggggtcgtgcaggaag

SEQ ID NO: 5904764 - DNA, 25 bp, Homo sapien
tatatggtccggggaccccaggaag

SEQ ID NO: 5904765 - DNA, 25 bp, Homo sapien
tcagggttgtcatccctggcgccag

SEQ ID NO: 5904766 - DNA, 25 bp, Homo sapien
cgctgctaccagttatccccgggct

SEQ ID NO: 5904767 - DNA, 25 bp, Homo sapien
cgaccccagcagggagattcacagt

SEQ ID NO: 5904768 - DNA, 25 bp, Homo sapien
gctctggaagagcctgtgtacagag

SEQ ID NO: 5904769 - DNA, 25 bp, Homo sapien
tcgatggttcggctgtccggtcctg

SEQ ID NO: 5904770 - DNA, 25 bp, Homo sapien
ccggaggtagggctgggagcaaccg

SEQ ID NO: 5904771 - DNA, 25 bp, Homo sapien
ccccgggctgtcaggcagcgccggg

SEQ ID NO: 5904772 - DNA, 25 bp, Homo sapien
gagacctctctccagcccagctaaa

SEQ ID NO: 5904773 - DNA, 25 bp, Homo sapien
gggcaggagcaggggacggggaggc

SEQ ID NO: 5904774 - DNA, 25 bp, Homo sapien
gagggacggcgctctaggtgggaga

SEQ ID NO: 5904775 - DNA, 25 bp, Homo sapien
tgggctgagtcctagctcagcagtg

SEQ ID NO: 5904776 - DNA, 25 bp, Homo sapien
tgtgcccaatgctccgaccccagca

SEQ ID NO: 5904777 - DNA, 25 bp, Homo sapien
ccaggaagaggaggggacacctcgg

SEQ ID NO: 5904778 - DNA, 25 bp, Homo sapien
gtagaaaggtggggccaccactgcg

SEQ ID NO: 5904779 - DNA, 25 bp, Homo sapien
gaaccaaggaaggagacctctctcc

SEQ ID NO: 5904780 - DNA, 25 bp, Homo sapien
taaatatatggtccggggaccccag

SEQ ID NO: 5904781 - DNA, 25 bp, Homo sapien
ggctctccagcgccaccttggggtc

SEQ ID NO: 5904782 - DNA, 25 bp, Homo sapien
gccacagggagaggcagggttctcc

SEQ ID NO: 5904783 - DNA, 25 bp, Homo sapien
ggtcacctagggcgcatgcaataaa

SEQ ID NO: 5904784 - DNA, 25 bp, Homo sapien
ggcagggttctcctttggtcaaagc

SEQ ID NO: 5904785 - DNA, 25 bp, Homo sapien
gccaatgagccacagggagaggcag

SEQ ID NO: 5904786 - DNA, 25 bp, Homo sapien
acctagggcgcatgcaataaatata

SEQ ID NO: 5904787 - DNA, 25 bp, Homo sapien
tccggccggctcagtcccctcccct

SEQ ID NO: 5904788 - DNA, 25 bp, Homo sapien
aatgggtgtggtcgcaagggccgga

SEQ ID NO: 5904789 - DNA, 25 bp, Homo sapien
catccctggcgccagagctgcccac

SEQ ID NO: 5904790 - DNA, 25 bp, Homo sapien
ggtcaaagctgatatcaaaaatata

SEQ ID NO: 5904791 - DNA, 25 bp, Homo sapien
caaggaaggagacctctctccagcc

SEQ ID NO: 5904792 - DNA, 25 bp, Homo sapien
ggggaggccctccggccggctcagt

SEQ ID NO: 5904793 - DNA, 25 bp, Homo sapien
tgaggaacttcacattatcagtccc

SEQ ID NO: 5904794 - DNA, 25 bp, Homo sapien
gttcggctgtccggtcctgcggcca

SEQ ID NO: 5904795 - DNA, 25 bp, Homo sapien
ccgggctgtcaggcagcgccgggcg

SEQ ID NO: 5904796 - DNA, 25 bp, Homo sapien
ttcacattatcagtcccgggctggg

SEQ ID NO: 5904797 - DNA, 25 bp, Homo sapien
tccccaggctaaggcactaaacagt

SEQ ID NO: 5904798 - DNA, 25 bp, Homo sapien
tgtggtcgcaagggccggaggtagg

SEQ ID NO: 5904799 - DNA, 25 bp, Homo sapien
cccccaagagcagcacggagccggg

SEQ ID NO: 5904800 - DNA, 25 bp, Homo sapien
cagggagaggcagggttctcctttg

SEQ ID NO: 5904801 - DNA, 25 bp, Homo sapien
ggccaagtgcgcaccctggctcagc

SEQ ID NO: 5904802 - DNA, 25 bp, Homo sapien
gggacggcgctctaggtgggagaga

SEQ ID NO: 5904803 - DNA, 25 bp, Homo sapien
gagaggcagggttctcctttggtca

SEQ ID NO: 5904804 - DNA, 25 bp, Homo sapien
tatcaaaaatataaatctcccttcc

SEQ ID NO: 5904805 - DNA, 25 bp, Homo sapien
tccagcccagctaaagttgggctca

SEQ ID NO: 5904806 - DNA, 25 bp, Homo sapien
cactgcggcgctgccgctgctacca

SEQ ID NO: 5904807 - DNA, 25 bp, Homo sapien
gcaccctggctcagcacctctgccg

SEQ ID NO: 5904808 - DNA, 25 bp, Homo sapien
tctaggtgggagagaaacggtcgat

SEQ ID NO: 5904809 - DNA, 25 bp, Homo sapien
ctggtggtgaggaaaggaagggttg

SEQ ID NO: 5904810 - DNA, 25 bp, Homo sapien
gggctgtcaggcagcgccgggcgca

SEQ ID NO: 5904811 - DNA, 25 bp, Homo sapien
tcagcagtgaatttagccagcgggt

SEQ ID NO: 5904812 - DNA, 25 bp, Homo sapien
cgtgcaggaagtgcgtggtctgcgc

SEQ ID NO: 5904813 - DNA, 25 bp, Homo sapien
tcagactcagctgttcagctgtgag

SEQ ID NO: 5904814 - DNA, 25 bp, Homo sapien
tcctttggtcaaagctgatatcaaa

SEQ ID NO: 5904815 - DNA, 25 bp, Homo sapien
gggaccccaggaagaggaggggaca

SEQ ID NO: 5904816 - DNA, 25 bp, Homo sapien
cgcatgcaataaatatatggtccgg

SEQ ID NO: 5904817 - DNA, 25 bp, Homo sapien
ggtcctgcggccaagtgcgcaccct

SEQ ID NO: 5904818 - DNA, 25 bp, Homo sapien
agggttgtcatccctggcgccagag

SEQ ID NO: 5904819 - DNA, 25 bp, Homo sapien
taccagttatccccgggctgtcagg

SEQ ID NO: 5904820 - DNA, 25 bp, Homo sapien
tgggagagaaacggtcgatggttcg

SEQ ID NO: 5904821 - DNA, 25 bp, Homo sapien
ggaggccctccggccggctcagtcc

SEQ ID NO: 5904822 - DNA, 25 bp, Homo sapien
gagctgcccaccctggtggtgagga

SEQ ID NO: 5904823 - DNA, 25 bp, Homo sapien
gcgcacctaggagggacggcgctct

SEQ ID NO: 5904824 - DNA, 25 bp, Homo sapien
gaagggttggccctggggctagtgc

SEQ ID NO: 5904825 - DNA, 25 bp, Homo sapien
ccgggggagagggccaatgagccac

SEQ ID NO: 5904826 - DNA, 25 bp, Homo sapien
gatggttcggctgtccggtcctgcg

SEQ ID NO: 5904827 - DNA, 25 bp, Homo sapien
gttctcctttggtcaaagctgatat

SEQ ID NO: 5904828 - DNA, 25 bp, Homo sapien
gcgcaccctggctcagcacctctgc

SEQ ID NO: 5904829 - DNA, 25 bp, Homo sapien
ggacacctcggaagcagagacagat

SEQ ID NO: 5904830 - DNA, 25 bp, Homo sapien
cacagccccagccagcccagggtcc

SEQ ID NO: 5904831 - DNA, 25 bp, Homo sapien
ctccacccatctcctgaatagccgt

SEQ ID NO: 5904832 - DNA, 25 bp, Homo sapien
gatatggattcattctgatgagaag

SEQ ID NO: 5904833 - DNA, 25 bp, Homo sapien
tgtggtcatgactgggtgtgagcac

SEQ ID NO: 5904834 - DNA, 25 bp, Homo sapien
gaaaatgattcttctacatgtaatc

SEQ ID NO: 5904835 - DNA, 25 bp, Homo sapien
agatacagactgctggcataggtcg

SEQ ID NO: 5904836 - DNA, 25 bp, Homo sapien
catgactgggtgtgagcacagatgc

SEQ ID NO: 5904837 - DNA, 25 bp, Homo sapien
ggcataggtcgtctctaacagtaga

SEQ ID NO: 5904838 - DNA, 25 bp, Homo sapien
gtgcgcatgagctcatacagggctc

SEQ ID NO: 5904839 - DNA, 25 bp, Homo sapien
catctactgaacactgtatatgtaa

SEQ ID NO: 5904840 - DNA, 25 bp, Homo sapien
acagggctcactgtcagcttggacc

SEQ ID NO: 5904841 - DNA, 25 bp, Homo sapien
ctgcatctagcaaaccgccgccctt

SEQ ID NO: 5904842 - DNA, 25 bp, Homo sapien
ttccaaaatttgaatttaagctata

SEQ ID NO: 5904843 - DNA, 25 bp, Homo sapien
cctctgtggtcatgactgggtgtga

SEQ ID NO: 5904844 - DNA, 25 bp, Homo sapien
ttaaagcgcagaaggaaaatgattc

SEQ ID NO: 5904845 - DNA, 25 bp, Homo sapien
gggaggcttgggcttacgtgatcat

SEQ ID NO: 5904846 - DNA, 25 bp, Homo sapien
agcgagaccacgtgtcgtgcgcatg

SEQ ID NO: 5904847 - DNA, 25 bp, Homo sapien
ttgggatcactgtgagttttgcaca

SEQ ID NO: 5904848 - DNA, 25 bp, Homo sapien
tcgtgcgcatgagctcatacagggc

SEQ ID NO: 5904849 - DNA, 25 bp, Homo sapien
tacagcaggcttacacactttcttt

SEQ ID NO: 5904850 - DNA, 25 bp, Homo sapien
gcattcagagtaaagtcttaagaca

SEQ ID NO: 5904851 - DNA, 25 bp, Homo sapien
tgatcatgtggcattcagagtaaag

SEQ ID NO: 5904852 - DNA, 25 bp, Homo sapien
tacttacatctactgaacactgtat

SEQ ID NO: 5904853 - DNA, 25 bp, Homo sapien
ttacacactttcttttcttaagtgg

SEQ ID NO: 5904854 - DNA, 25 bp, Homo sapien
ggctcactgtcagcttggaccagcc

SEQ ID NO: 5904855 - DNA, 25 bp, Homo sapien
taaacccaggatgtttaaaaacaca

SEQ ID NO: 5904856 - DNA, 25 bp, Homo sapien
cagcccagggtccctctgtggtcat

SEQ ID NO: 5904857 - DNA, 25 bp, Homo sapien
tataaacctatgaagattctaacca

SEQ ID NO: 5904858 - DNA, 25 bp, Homo sapien
tatggattcattctgatgagaagaa

SEQ ID NO: 5904859 - DNA, 25 bp, Homo sapien
aaagaaagctccacccatctcctga

SEQ ID NO: 5904860 - DNA, 25 bp, Homo sapien
gaggtacagcaggcttacacacttt

SEQ ID NO: 5904861 - DNA, 25 bp, Homo sapien
tttgtttaggataagagaaggctgg

SEQ ID NO: 5904862 - DNA, 25 bp, Homo sapien
ggaccagcccgtgaggtacagcagg

SEQ ID NO: 5904863 - DNA, 25 bp, Homo sapien
ctggcataggtcgtctctaacagta

SEQ ID NO: 5904864 - DNA, 25 bp, Homo sapien
atacagactgctggcataggtcgtc

SEQ ID NO: 5904865 - DNA, 25 bp, Homo sapien
taagaaaactgttcagactggtatt

SEQ ID NO: 5904866 - DNA, 25 bp, Homo sapien
ctttttggatgtttcaagattcaga

SEQ ID NO: 5904867 - DNA, 25 bp, Homo sapien
tgagaagaaaacagcgagaccacgt

SEQ ID NO: 5904868 - DNA, 25 bp, Homo sapien
gcagaagaagacatgagcacataca

SEQ ID NO: 5904869 - DNA, 25 bp, Homo sapien
ggagggaggggcgatgcccttcaga

SEQ ID NO: 5904870 - DNA, 25 bp, Homo sapien
ggttcttgccaaactggagggaggg

SEQ ID NO: 5904871 - DNA, 25 bp, Homo sapien
cccgagtagctttttgtttaggata

SEQ ID NO: 5904872 - DNA, 25 bp, Homo sapien
gtgataagaaaactgttcagactgg

SEQ ID NO: 5904873 - DNA, 25 bp, Homo sapien
tgtgagcacagatgctggccttggg

SEQ ID NO: 5904874 - DNA, 25 bp, Homo sapien
ggagagatacagactgctggcatag

SEQ ID NO: 5904875 - DNA, 25 bp, Homo sapien
acatggagagatacagactgctggc

SEQ ID NO: 5904876 - DNA, 25 bp, Homo sapien
ctgtaatctacgtgatgtgataaga

SEQ ID NO: 5904877 - DNA, 25 bp, Homo sapien
tcgtctctaacagtagagaaaacgc

SEQ ID NO: 5904878 - DNA, 25 bp, Homo sapien
ggtacagcaggcttacacactttct

SEQ ID NO: 5904879 - DNA, 25 bp, Homo sapien
taagacataaacccaggatgtttaa

SEQ ID NO: 5904880 - DNA, 25 bp, Homo sapien
agacagtcgatatggattcattctg

SEQ ID NO: 5904881 - DNA, 25 bp, Homo sapien
atcgcaaaactgatttctcccttct

SEQ ID NO: 5904882 - DNA, 25 bp, Homo sapien
cagatgctggccttgggatcactgt

SEQ ID NO: 5904883 - DNA, 25 bp, Homo sapien
tcctataattctttttggatgtttc

SEQ ID NO: 5904884 - DNA, 25 bp, Homo sapien
attcagagtaaagtcttaagacata

SEQ ID NO: 5904885 - DNA, 25 bp, Homo sapien
ttacaaagaaagctccacccatctc

SEQ ID NO: 5904886 - DNA, 25 bp, Homo sapien
agtaaagtcttaagacataaaccca

SEQ ID NO: 5904887 - DNA, 25 bp, Homo sapien
agagagtacttttataaacctatga

SEQ ID NO: 5904888 - DNA, 25 bp, Homo sapien
caaaccgccgccctttcctctgtgc

SEQ ID NO: 5904889 - DNA, 25 bp, Homo sapien
gaacactgtatatgtaatttttaaa

SEQ ID NO: 5904890 - DNA, 25 bp, Homo sapien
gcttggaccagcccgtgaggtacag

SEQ ID NO: 5904891 - DNA, 25 bp, Homo sapien
tgtcgtgcgcatgagctcatacagg

SEQ ID NO: 5904892 - DNA, 25 bp, Homo sapien
tcagacagtcgatatggattcattc

SEQ ID NO: 5904893 - DNA, 25 bp, Homo sapien
ccagggtccctctgtggtcatgact

SEQ ID NO: 5904894 - DNA, 25 bp, Homo sapien
tgggcttacgtgatcatgtggcatt

SEQ ID NO: 5904895 - DNA, 25 bp, Homo sapien
cagtagagaaaacgccgattagcac

SEQ ID NO: 5904896 - DNA, 25 bp, Homo sapien
tgaagattctaaccaaaattttaaa

SEQ ID NO: 5904897 - DNA, 25 bp, Homo sapien
acaaagaaagctccacccatctcct

SEQ ID NO: 5904898 - DNA, 25 bp, Homo sapien
ggggcacagccccagccagcccagg

SEQ ID NO: 5904899 - DNA, 25 bp, Homo sapien
tgtttaggataagagaaggctggta

SEQ ID NO: 5904900 - DNA, 25 bp, Homo sapien
gctataaatgtaaatatatccagtt

SEQ ID NO: 5904901 - DNA, 25 bp, Homo sapien
ataattctttttggatgtttcaaga

SEQ ID NO: 5904902 - DNA, 25 bp, Homo sapien
atacatctgtaatctacgtgatgtg

SEQ ID NO: 5904903 - DNA, 25 bp, Homo sapien
acatgagcacatacatctgtaatct

SEQ ID NO: 5904904 - DNA, 25 bp, Homo sapien
cacagatgctggccttgggatcact

SEQ ID NO: 5904905 - DNA, 25 bp, Homo sapien
ctgttcagactggtattgcaaggtg

SEQ ID NO: 5904906 - DNA, 25 bp, Homo sapien
gcttgcagagagtacttttataaac

SEQ ID NO: 5904907 - DNA, 25 bp, Homo sapien
tcagactggtattgcaaggtgatct

SEQ ID NO: 5904908 - DNA, 25 bp, Homo sapien
ggtcgtctctaacagtagagaaaac

SEQ ID NO: 5904909 - DNA, 25 bp, Homo sapien
ctataattctttttggatgtttcaa

SEQ ID NO: 5904910 - DNA, 25 bp, Homo sapien
tatatcctataattctttttggatg

SEQ ID NO: 5904911 - DNA, 25 bp, Homo sapien
tcgatatggattcattctgatgaga

SEQ ID NO: 5904912 - DNA, 25 bp, Homo sapien
cttgccaaactggagggaggggcga

SEQ ID NO: 5904913 - DNA, 25 bp, Homo sapien
agtagctttttgtttaggataagag

SEQ ID NO: 5904914 - DNA, 25 bp, Homo sapien
taaatatatccagttcgcttgcaga

SEQ ID NO: 5904915 - DNA, 25 bp, Homo sapien
agaagaaaacagcgagaccacgtgt

SEQ ID NO: 5904916 - DNA, 25 bp, Homo sapien
caatctaaatcccccgagtagcttt

SEQ ID NO: 5904917 - DNA, 25 bp, Homo sapien
ttcttctacatgtaatcgcaaaact

SEQ ID NO: 5904918 - DNA, 25 bp, Homo sapien
accagcccgtgaggtacagcaggct

SEQ ID NO: 5904919 - DNA, 25 bp, Homo sapien
aacagtagagaaaacgccgattagc

SEQ ID NO: 5904920 - DNA, 25 bp, Homo sapien
agaaagctccacccatctcctgaat

SEQ ID NO: 5904921 - DNA, 25 bp, Homo sapien
agagtaaagtcttaagacataaacc

SEQ ID NO: 5904922 - DNA, 25 bp, Homo sapien
cttctacatgtaatcgcaaaactga

SEQ ID NO: 5904923 - DNA, 25 bp, Homo sapien
agagtacttttataaacctatgaag

SEQ ID NO: 5904924 - DNA, 25 bp, Homo sapien
actgatttctcccttctgggggagg

SEQ ID NO: 5904925 - DNA, 25 bp, Homo sapien
gagcacatacatctgtaatctacgt

SEQ ID NO: 5904926 - DNA, 25 bp, Homo sapien
cagtccctgcatctagcaaaccgcc

SEQ ID NO: 5904927 - DNA, 25 bp, Homo sapien
taggataagagaaggctggtaattc

SEQ ID NO: 5904928 - DNA, 25 bp, Homo sapien
gatcactgtgagttttgcacatgga

SEQ ID NO: 5904929 - DNA, 25 bp, Homo sapien
tgagcacagatgctggccttgggat

SEQ ID NO: 5904930 - DNA, 25 bp, Homo sapien
gggggaggcttgggcttacgtgatc

SEQ ID NO: 5904931 - DNA, 25 bp, Homo sapien
gtttcaagattcagaaaaagtccag

SEQ ID NO: 5904932 - DNA, 25 bp, Homo sapien
tatcctataattctttttggatgtt

SEQ ID NO: 5904933 - DNA, 25 bp, Homo sapien
ggcacagccccagccagcccagggt

SEQ ID NO: 5904934 - DNA, 25 bp, Homo sapien
acagtcgatatggattcattctgat

SEQ ID NO: 5904935 - DNA, 25 bp, Homo sapien
agtacttttataaacctatgaagat

SEQ ID NO: 5904936 - DNA, 25 bp, Homo sapien
ataagagaaggctggtaattcactt

SEQ ID NO: 5904937 - DNA, 25 bp, Homo sapien
cccgtacttacatctactgaacact

SEQ ID NO: 5904938 - DNA, 25 bp, Homo sapien
tgtggcattcagagtaaagtcttaa

SEQ ID NO: 5904939 - DNA, 25 bp, Homo sapien
agttttgcacatggagagatacaga

SEQ ID NO: 5904940 - DNA, 25 bp, Homo sapien
attcagaaaaagtccagtccctgca

SEQ ID NO: 5904941 - DNA, 25 bp, Homo sapien
gtagagaaaacgccgattagcacaa

SEQ ID NO: 5904942 - DNA, 25 bp, Homo sapien
tgggtgtgagcacagatgctggcct

SEQ ID NO: 5904943 - DNA, 25 bp, Homo sapien
cttaagacataaacccaggatgttt

SEQ ID NO: 5904944 - DNA, 25 bp, Homo sapien
aaactgatttctcccttctggggga

SEQ ID NO: 5904945 - DNA, 25 bp, Homo sapien
agctccacccatctcctgaatagcc

SEQ ID NO: 5904946 - DNA, 25 bp, Homo sapien
atgtgataagaaaactgttcagact

SEQ ID NO: 5904947 - DNA, 25 bp, Homo sapien
actggtattgcaaggtgatctcaga

SEQ ID NO: 5904948 - DNA, 25 bp, Homo sapien
atttttaaagcgcagaaggaaaatg

SEQ ID NO: 5904949 - DNA, 25 bp, Homo sapien
aaccgccgccctttcctctgtgccc

SEQ ID NO: 5904950 - DNA, 25 bp, Homo sapien
gccccagccagcccagggtccctct

SEQ ID NO: 5904951 - DNA, 25 bp, Homo sapien
gcatctagcaaaccgccgccctttc

SEQ ID NO: 5904952 - DNA, 25 bp, Homo sapien
cacaatctaaatcccccgagtagct

SEQ ID NO: 5904953 - DNA, 25 bp, Homo sapien
ttttccaaaatttgaatttaagcta

SEQ ID NO: 5904954 - DNA, 25 bp, Homo sapien
tcttaagtggttcttgccaaactgg

SEQ ID NO: 5904955 - DNA, 25 bp, Homo sapien
actgggtgtgagcacagatgctggc

SEQ ID NO: 5904956 - DNA, 25 bp, Homo sapien
aagaagacatgagcacatacatctg

SEQ ID NO: 5904957 - DNA, 25 bp, Homo sapien
caaggtgatctcagacagtcgatat

SEQ ID NO: 5904958 - DNA, 25 bp, Homo sapien
gcttacacactttcttttcttaagt

SEQ ID NO: 5904959 - DNA, 25 bp, Homo sapien
ggccttgggatcactgtgagttttg

SEQ ID NO: 5904960 - DNA, 25 bp, Homo sapien
tgtcgggttcctttacaaagaaagc

SEQ ID NO: 5904961 - DNA, 25 bp, Homo sapien
agcgcagaaggaaaatgattcttct

SEQ ID NO: 5904962 - DNA, 25 bp, Homo sapien
aggaaaatgattcttctacatgtaa

SEQ ID NO: 5904963 - DNA, 25 bp, Homo sapien
tggcattcagagtaaagtcttaaga

SEQ ID NO: 5904964 - DNA, 25 bp, Homo sapien
tctacatgtaatcgcaaaactgatt

SEQ ID NO: 5904965 - DNA, 25 bp, Homo sapien
aaagtccagtccctgcatctagcaa

SEQ ID NO: 5904966 - DNA, 25 bp, Homo sapien
ttgcacatggagagatacagactgc

SEQ ID NO: 5904967 - DNA, 25 bp, Homo sapien
tttcttaagtggttcttgccaaact

SEQ ID NO: 5904968 - DNA, 25 bp, Homo sapien
aacctatgaagattctaaccaaaat

SEQ ID NO: 5904969 - DNA, 25 bp, Homo sapien
ctgggggaggcttgggcttacgtga

SEQ ID NO: 5904970 - DNA, 25 bp, Homo sapien
agaaaaagtccagtccctgcatcta

SEQ ID NO: 5904971 - DNA, 25 bp, Homo sapien
cctctgtgcccgtacttacatctac

SEQ ID NO: 5904972 - DNA, 25 bp, Homo sapien
ccatctcctgaatagccgttttgga

SEQ ID NO: 5904973 - DNA, 25 bp, Homo sapien
aagattcctattttccaaaatttga

SEQ ID NO: 5904974 - DNA, 25 bp, Homo sapien
gaagacatgagcacatacatctgta

SEQ ID NO: 5904975 - DNA, 25 bp, Homo sapien
agaaaactgttcagactggtattgc

SEQ ID NO: 5904976 - DNA, 25 bp, Homo sapien
cactgtcagcttggaccagcccgtg

SEQ ID NO: 5904977 - DNA, 25 bp, Homo sapien
ccttctgggggaggcttgggcttac

SEQ ID NO: 5904978 - DNA, 25 bp, Homo sapien
ctagcaaaccgccgccctttcctct

SEQ ID NO: 5904979 - DNA, 25 bp, Homo sapien
agcacaatctaaatcccccgagtag

SEQ ID NO: 5904980 - DNA, 25 bp, Homo sapien
ctttcctctgtgcccgtacttacat

SEQ ID NO: 5904981 - DNA, 25 bp, Homo sapien
ccgtgaggtacagcaggcttacaca

SEQ ID NO: 5904982 - DNA, 25 bp, Homo sapien
ttttggatgtttcaagattcagaaa

SEQ ID NO: 5904983 - DNA, 25 bp, Homo sapien
aaaacgccgattagcacaatctaaa

SEQ ID NO: 5904984 - DNA, 25 bp, Homo sapien
aaaggcagaagaagacatgagcaca

SEQ ID NO: 5904985 - DNA, 25 bp, Homo sapien
gctggtaattcacttaatttaaatt

SEQ ID NO: 5904986 - DNA, 25 bp, Homo sapien
gatgctggccttgggatcactgtga

SEQ ID NO: 5904987 - DNA, 25 bp, Homo sapien
cgcagaaggaaaatgattcttctac

SEQ ID NO: 5904988 - DNA, 25 bp, Homo sapien
tgcccgtacttacatctactgaaca

SEQ ID NO: 5904989 - DNA, 25 bp, Homo sapien
tcagagtaaagtcttaagacataaa

SEQ ID NO: 5904990 - DNA, 25 bp, Homo sapien
cgtgatcatgtggcattcagagtaa

SEQ ID NO: 5904991 - DNA, 25 bp, Homo sapien
cacaaaaagattcctattttccaaa

SEQ ID NO: 5904992 - DNA, 25 bp, Homo sapien
ctgtcagcttggaccagcccgtgag

SEQ ID NO: 5904993 - DNA, 25 bp, Homo sapien
ggcttgggcttacgtgatcatgtgg

SEQ ID NO: 5904994 - DNA, 25 bp, Homo sapien
tgtaatcgcaaaactgatttctccc

SEQ ID NO: 5904995 - DNA, 25 bp, Homo sapien
acatacatctgtaatctacgtgatg

SEQ ID NO: 5904996 - DNA, 25 bp, Homo sapien
tggattcattctgatgagaagaaaa

SEQ ID NO: 5904997 - DNA, 25 bp, Homo sapien
cttttataaacctatgaagattcta

SEQ ID NO: 5904998 - DNA, 25 bp, Homo sapien
tatatccagttcgcttgcagagagt

SEQ ID NO: 5904999 - DNA, 25 bp, Homo sapien
ttttaaagcgcagaaggaaaatgat

SEQ ID NO: 5905000 - DNA, 25 bp, Homo sapien
aacacaaaaagattcctattttcca

SEQ ID NO: 5905001 - DNA, 25 bp, Homo sapien
cctatgaagattctaaccaaaattt

SEQ ID NO: 5905002 - DNA, 25 bp, Homo sapien
catgtggcattcagagtaaagtctt

SEQ ID NO: 5905003 - DNA, 25 bp, Homo sapien
atgtttcaagattcagaaaaagtcc

SEQ ID NO: 5905004 - DNA, 25 bp, Homo sapien
ttcaagattcagaaaaagtccagtc

SEQ ID NO: 5905005 - DNA, 25 bp, Homo sapien
acactgtatatgtaatttttaaatt

SEQ ID NO: 5905006 - DNA, 25 bp, Homo sapien
aggctggtaattcacttaatttaaa

SEQ ID NO: 5905007 - DNA, 25 bp, Homo sapien
agggaggggcgatgcccttcagaag

SEQ ID NO: 5905008 - DNA, 25 bp, Homo sapien
tttatatcctataattctttttgga

SEQ ID NO: 5905009 - DNA, 25 bp, Homo sapien
agtcgatatggattcattctgatga

SEQ ID NO: 5905010 - DNA, 25 bp, Homo sapien
ccgattagcacaatctaaatccccc

SEQ ID NO: 5905011 - DNA, 25 bp, Homo sapien
acagcgagaccacgtgtcgtgcgca

SEQ ID NO: 5905012 - DNA, 25 bp, Homo sapien
gatctcagacagtcgatatggattc

SEQ ID NO: 5905013 - DNA, 25 bp, Homo sapien
accacgtgtcgtgcgcatgagctca

SEQ ID NO: 5905014 - DNA, 25 bp, Homo sapien
cagcttggaccagcccgtgaggtac

SEQ ID NO: 5905015 - DNA, 25 bp, Homo sapien
agactgctggcataggtcgtctcta

SEQ ID NO: 5905016 - DNA, 25 bp, Homo sapien
atctgtaatctacgtgatgtgataa

SEQ ID NO: 5905017 - DNA, 25 bp, Homo sapien
cagcaggcttacacactttcttttc

SEQ ID NO: 5905018 - DNA, 25 bp, Homo sapien
tcatacagggctcactgtcagcttg

SEQ ID NO: 5905019 - DNA, 25 bp, Homo sapien
tattttccaaaatttgaatttaagc

SEQ ID NO: 5905020 - DNA, 25 bp, Homo sapien
cgtacttacatctactgaacactgt

SEQ ID NO: 5905021 - DNA, 25 bp, Homo sapien
gattcattctgatgagaagaaaaca

SEQ ID NO: 5905022 - DNA, 25 bp, Homo sapien
tctaaatcccccgagtagctttttg

SEQ ID NO: 5905023 - DNA, 25 bp, Homo sapien
ttctgatgagaagaaaacagcgaga

SEQ ID NO: 5905024 - DNA, 25 bp, Homo sapien
gggatcactgtgagttttgcacatg

SEQ ID NO: 5905025 - DNA, 25 bp, Homo sapien
gaaaacagcgagaccacgtgtcgtg

SEQ ID NO: 5905026 - DNA, 25 bp, Homo sapien
tctgtgcccgtacttacatctactg

SEQ ID NO: 5905027 - DNA, 25 bp, Homo sapien
cataaacccaggatgtttaaaaaca

SEQ ID NO: 5905028 - DNA, 25 bp, Homo sapien
gtctctaacagtagagaaaacgccg

SEQ ID NO: 5905029 - DNA, 25 bp, Homo sapien
tacatctactgaacactgtatatgt

SEQ ID NO: 5905030 - DNA, 25 bp, Homo sapien
ctcactgtcagcttggaccagcccg

SEQ ID NO: 5905031 - DNA, 25 bp, Homo sapien
cagaaggaaaatgattcttctacat

SEQ ID NO: 5905032 - DNA, 25 bp, Homo sapien
tcagaaaaagtccagtccctgcatc

SEQ ID NO: 5905033 - DNA, 25 bp, Homo sapien
ttaaaggcagaagaagacatgagca

SEQ ID NO: 5905034 - DNA, 25 bp, Homo sapien
ccgccgccctttcctctgtgcccgt

SEQ ID NO: 5905035 - DNA, 25 bp, Homo sapien
tgatttctcccttctgggggaggct

SEQ ID NO: 5905036 - DNA, 25 bp, Homo sapien
tccagtccctgcatctagcaaaccg

SEQ ID NO: 5905037 - DNA, 25 bp, Homo sapien
gggttcctttacaaagaaagctcca

SEQ ID NO: 5905038 - DNA, 25 bp, Homo sapien
tctacgtgatgtgataagaaaactg

SEQ ID NO: 5905039 - DNA, 25 bp, Homo sapien
cttacatctactgaacactgtatat

SEQ ID NO: 5905040 - DNA, 25 bp, Homo sapien
aacgccgattagcacaatctaaatc

SEQ ID NO: 5905041 - DNA, 25 bp, Homo sapien
cgccctttcctctgtgcccgtactt

SEQ ID NO: 5905042 - DNA, 25 bp, Homo sapien
aagctataaatgtaaatatatccag

SEQ ID NO: 5905043 - DNA, 25 bp, Homo sapien
gattagcacaatctaaatcccccga

SEQ ID NO: 5905044 - DNA, 25 bp, Homo sapien
gcacatacatctgtaatctacgtga

SEQ ID NO: 5905045 - DNA, 25 bp, Homo sapien
cagccagcccagggtccctctgtgg

SEQ ID NO: 5905046 - DNA, 25 bp, Homo sapien
gcacatggagagatacagactgctg

SEQ ID NO: 5905047 - DNA, 25 bp, Homo sapien
atggagagatacagactgctggcat

SEQ ID NO: 5905048 - DNA, 25 bp, Homo sapien
actgtgagttttgcacatggagaga

SEQ ID NO: 5905049 - DNA, 25 bp, Homo sapien
ttcttgccaaactggagggaggggc

SEQ ID NO: 5905050 - DNA, 25 bp, Homo sapien
ttaagtggttcttgccaaactggag

SEQ ID NO: 5905051 - DNA, 25 bp, Homo sapien
gcatgagctcatacagggctcactg

SEQ ID NO: 5905052 - DNA, 25 bp, Homo sapien
atctagcaaaccgccgccctttcct

SEQ ID NO: 5905053 - DNA, 25 bp, Homo sapien
cgagtagctttttgtttaggataag

SEQ ID NO: 5905054 - DNA, 25 bp, Homo sapien
ccctttcctctgtgcccgtacttac

SEQ ID NO: 5905055 - DNA, 25 bp, Homo sapien
gcagagagtacttttataaacctat

SEQ ID NO: 5905056 - DNA, 25 bp, Homo sapien
tgatgtgataagaaaactgttcaga

SEQ ID NO: 5905057 - DNA, 25 bp, Homo sapien
cgtgatgtgataagaaaactgttca

SEQ ID NO: 5905058 - DNA, 25 bp, Homo sapien
atgagcacatacatctgtaatctac

SEQ ID NO: 5905059 - DNA, 25 bp, Homo sapien
gccagcccagggtccctctgtggtc

SEQ ID NO: 5905060 - DNA, 25 bp, Homo sapien
taaatttttaaagcgcagaaggaaa

SEQ ID NO: 5905061 - DNA, 25 bp, Homo sapien
aagagaaggctggtaattcacttaa

SEQ ID NO: 5905062 - DNA, 25 bp, Homo sapien
gtgatctcagacagtcgatatggat

SEQ ID NO: 5905063 - DNA, 25 bp, Homo sapien
ggcttacgtgatcatgtggcattca

SEQ ID NO: 5905064 - DNA, 25 bp, Homo sapien
acccatctcctgaatagccgttttg

SEQ ID NO: 5905065 - DNA, 25 bp, Homo sapien
tccagttcgcttgcagagagtactt

SEQ ID NO: 5905066 - DNA, 25 bp, Homo sapien
agattcagaaaaagtccagtccctg

SEQ ID NO: 5905067 - DNA, 25 bp, Homo sapien
ggataagagaaggctggtaattcac

SEQ ID NO: 5905068 - DNA, 25 bp, Homo sapien
cgccgattagcacaatctaaatccc

SEQ ID NO: 5905069 - DNA, 25 bp, Homo sapien
aactgttcagactggtattgcaagg

SEQ ID NO: 5905070 - DNA, 25 bp, Homo sapien
ttttgcacatggagagatacagact

SEQ ID NO: 5905071 - DNA, 25 bp, Homo sapien
aatttatatcctataattctttttg

SEQ ID NO: 5905072 - DNA, 25 bp, Homo sapien
tctactgaacactgtatatgtaatt

SEQ ID NO: 5905073 - DNA, 25 bp, Homo sapien
gtggttcttgccaaactggagggag

SEQ ID NO: 5905074 - DNA, 25 bp, Homo sapien
tggtattgcaaggtgatctcagaca

SEQ ID NO: 5905075 - DNA, 25 bp, Homo sapien
tggtcatgactgggtgtgagcacag

SEQ ID NO: 5905076 - DNA, 25 bp, Homo sapien
gagctcatacagggctcactgtcag

SEQ ID NO: 5905077 - DNA, 25 bp, Homo sapien
tgcaaggtgatctcagacagtcgat

SEQ ID NO: 5905078 - DNA, 25 bp, Homo sapien
ttagcacaatctaaatcccccgagt

SEQ ID NO: 5905079 - DNA, 25 bp, Homo sapien
ttcttttcttaagtggttcttgcca

SEQ ID NO: 5905080 - DNA, 25 bp, Homo sapien
aggtgatctcagacagtcgatatgg

SEQ ID NO: 5905081 - DNA, 25 bp, Homo sapien
tgtgagttttgcacatggagagata

SEQ ID NO: 5905082 - DNA, 25 bp, Homo sapien
aagtcttaagacataaacccaggat

SEQ ID NO: 5905083 - DNA, 25 bp, Homo sapien
gtaatctacgtgatgtgataagaaa

SEQ ID NO: 5905084 - DNA, 25 bp, Homo sapien
agactggtattgcaaggtgatctca

SEQ ID NO: 5905085 - DNA, 25 bp, Homo sapien
tatgaagattctaaccaaaatttta

SEQ ID NO: 5905086 - DNA, 25 bp, Homo sapien
aaagctccacccatctcctgaatag

SEQ ID NO: 5905087 - DNA, 25 bp, Homo sapien
tgtgcccgtacttacatctactgaa

SEQ ID NO: 5905088 - DNA, 25 bp, Homo sapien
gttcgcttgcagagagtacttttat

SEQ ID NO: 5905089 - DNA, 25 bp, Homo sapien
attgcaaggtgatctcagacagtcg

SEQ ID NO: 5905090 - DNA, 25 bp, Homo sapien
agaagaagacatgagcacatacatc

SEQ ID NO: 5905091 - DNA, 25 bp, Homo sapien
gtcagcttggaccagcccgtgaggt

SEQ ID NO: 5905092 - DNA, 25 bp, Homo sapien
ctttcttttcttaagtggttcttgc

SEQ ID NO: 5905093 - DNA, 25 bp, Homo sapien
tccctctgtggtcatgactgggtgt

SEQ ID NO: 5905094 - DNA, 25 bp, Homo sapien
caagattcagaaaaagtccagtccc

SEQ ID NO: 5905095 - DNA, 25 bp, Homo sapien
agagatacagactgctggcataggt

SEQ ID NO: 5905096 - DNA, 25 bp, Homo sapien
cccagccagcccagggtccctctgt

SEQ ID NO: 5905097 - DNA, 25 bp, Homo sapien
cttacgtgatcatgtggcattcaga

SEQ ID NO: 5905098 - DNA, 25 bp, Homo sapien
gttcctttacaaagaaagctccacc

SEQ ID NO: 5905099 - DNA, 25 bp, Homo sapien
aaatgattcttctacatgtaatcgc

SEQ ID NO: 5905100 - DNA, 25 bp, Homo sapien
tactgaacactgtatatgtaatttt

SEQ ID NO: 5905101 - DNA, 25 bp, Homo sapien
ctgatgagaagaaaacagcgagacc

SEQ ID NO: 5905102 - DNA, 25 bp, Homo sapien
ctctaacagtagagaaaacgccgat

SEQ ID NO: 5905103 - DNA, 25 bp, Homo sapien
tgagttttgcacatggagagataca

SEQ ID NO: 5905104 - DNA, 25 bp, Homo sapien
tggtaattcacttaatttaaattta

SEQ ID NO: 5905105 - DNA, 25 bp, Homo sapien
gaggcttgggcttacgtgatcatgt

SEQ ID NO: 5905106 - DNA, 25 bp, Homo sapien
cagcccgtgaggtacagcaggctta

SEQ ID NO: 5905107 - DNA, 25 bp, Homo sapien
ccacccatctcctgaatagccgttt

SEQ ID NO: 5905108 - DNA, 25 bp, Homo sapien
tctcagacagtcgatatggattcat

SEQ ID NO: 5905109 - DNA, 25 bp, Homo sapien
agcacagatgctggccttgggatca

SEQ ID NO: 5905110 - DNA, 25 bp, Homo sapien
cacactttcttttcttaagtggttc

SEQ ID NO: 5905111 - DNA, 25 bp, Homo sapien
cttgggcttacgtgatcatgtggca

SEQ ID NO: 5905112 - DNA, 25 bp, Homo sapien
ggaggggcgatgcccttcagaaggg

SEQ ID NO: 5905113 - DNA, 25 bp, Homo sapien
agaaaacgccgattagcacaatcta

SEQ ID NO: 5905114 - DNA, 25 bp, Homo sapien
tacgtgatcatgtggcattcagagt

SEQ ID NO: 5905115 - DNA, 25 bp, Homo sapien
aggcttacacactttcttttcttaa

SEQ ID NO: 5905116 - DNA, 25 bp, Homo sapien
agcaaaccgccgccctttcctctgt

SEQ ID NO: 5905117 - DNA, 25 bp, Homo sapien
aagtggttcttgccaaactggaggg

SEQ ID NO: 5905118 - DNA, 25 bp, Homo sapien
tgactgggtgtgagcacagatgctg

SEQ ID NO: 5905119 - DNA, 25 bp, Homo sapien
aaaaagtccagtccctgcatctagc

SEQ ID NO: 5905120 - DNA, 25 bp, Homo sapien
tataaatgtaaatatatccagttcg

SEQ ID NO: 5905121 - DNA, 25 bp, Homo sapien
taggtcgtctctaacagtagagaaa

SEQ ID NO: 5905122 - DNA, 25 bp, Homo sapien
aatctacgtgatgtgataagaaaac

SEQ ID NO: 5905123 - DNA, 25 bp, Homo sapien
gctttttgtttaggataagagaagg

SEQ ID NO: 5905124 - DNA, 25 bp, Homo sapien
tgtaaatatatccagttcgcttgca

SEQ ID NO: 5905125 - DNA, 25 bp, Homo sapien
aatgtaaatatatccagttcgcttg

SEQ ID NO: 5905126 - DNA, 25 bp, Homo sapien
aggcagaagaagacatgagcacata

SEQ ID NO: 5905127 - DNA, 25 bp, Homo sapien
acagactgctggcataggtcgtctc

SEQ ID NO: 5905128 - DNA, 25 bp, Homo sapien
gtcttaagacataaacccaggatgt

SEQ ID NO: 5905129 - DNA, 25 bp, Homo sapien
ttctgggggaggcttgggcttacgt

SEQ ID NO: 5905130 - DNA, 25 bp, Homo sapien
tatccagttcgcttgcagagagtac

SEQ ID NO: 5905131 - DNA, 25 bp, Homo sapien
atgattcttctacatgtaatcgcaa

SEQ ID NO: 5905132 - DNA, 25 bp, Homo sapien
gagaaggctggtaattcacttaatt

SEQ ID NO: 5905133 - DNA, 25 bp, Homo sapien
gcaggcttacacactttcttttctt

SEQ ID NO: 5905134 - DNA, 25 bp, Homo sapien
aaagcgcagaaggaaaatgattctt

SEQ ID NO: 5905135 - DNA, 25 bp, Homo sapien
ctggccttgggatcactgtgagttt

SEQ ID NO: 5905136 - DNA, 25 bp, Homo sapien
aagaaaacagcgagaccacgtgtcg

SEQ ID NO: 5905137 - DNA, 25 bp, Homo sapien
aatatatccagttcgcttgcagaga

SEQ ID NO: 5905138 - DNA, 25 bp, Homo sapien
agggtccctctgtggtcatgactgg

SEQ ID NO: 5905139 - DNA, 25 bp, Homo sapien
gccgccctttcctctgtgcccgtac

SEQ ID NO: 5905140 - DNA, 25 bp, Homo sapien
tttaggataagagaaggctggtaat

SEQ ID NO: 5905141 - DNA, 25 bp, Homo sapien
aaacagcgagaccacgtgtcgtgcg

SEQ ID NO: 5905142 - DNA, 25 bp, Homo sapien
agacataaacccaggatgtttaaaa

SEQ ID NO: 5905143 - DNA, 25 bp, Homo sapien
tcctttacaaagaaagctccaccca

SEQ ID NO: 5905144 - DNA, 25 bp, Homo sapien
tacgtgatgtgataagaaaactgtt

SEQ ID NO: 5905145 - DNA, 25 bp, Homo sapien
agaccacgtgtcgtgcgcatgagct

SEQ ID NO: 5905146 - DNA, 25 bp, Homo sapien
ccctgcatctagcaaaccgccgccc

SEQ ID NO: 5905147 - DNA, 25 bp, Homo sapien
gtccctgcatctagcaaaccgccgc

SEQ ID NO: 5905148 - DNA, 25 bp, Homo sapien
tagctttttgtttaggataagagaa

SEQ ID NO: 5905149 - DNA, 25 bp, Homo sapien
taaatgtaaatatatccagttcgct

SEQ ID NO: 5905150 - DNA, 25 bp, Homo sapien
tcccttctgggggaggcttgggctt

SEQ ID NO: 5905151 - DNA, 25 bp, Homo sapien
gaaggaaaatgattcttctacatgt

SEQ ID NO: 5905152 - DNA, 25 bp, Homo sapien
gtattgcaaggtgatctcagacagt

SEQ ID NO: 5905153 - DNA, 25 bp, Homo sapien
cgagaccacgtgtcgtgcgcatgag

SEQ ID NO: 5905154 - DNA, 25 bp, Homo sapien
atttctcccttctgggggaggcttg

SEQ ID NO: 5905155 - DNA, 25 bp, Homo sapien
tcgggttcctttacaaagaaagctc

SEQ ID NO: 5905156 - DNA, 25 bp, Homo sapien
tacttttataaacctatgaagattc

SEQ ID NO: 5905157 - DNA, 25 bp, Homo sapien
cagaagggggcacagccccagccag

SEQ ID NO: 5905158 - DNA, 25 bp, Homo sapien
gcgcatgagctcatacagggctcac

SEQ ID NO: 5905159 - DNA, 25 bp, Homo sapien
cttttcttaagtggttcttgccaaa

SEQ ID NO: 5905160 - DNA, 25 bp, Homo sapien
ggatgtttcaagattcagaaaaagt

SEQ ID NO: 5905161 - DNA, 25 bp, Homo sapien
tctgtggtcatgactgggtgtgagc

SEQ ID NO: 5905162 - DNA, 25 bp, Homo sapien
tcctattttccaaaatttgaattta

SEQ ID NO: 5905163 - DNA, 25 bp, Homo sapien
ccttgggatcactgtgagttttgca

SEQ ID NO: 5905164 - DNA, 25 bp, Homo sapien
tgctggcataggtcgtctctaacag

SEQ ID NO: 5905165 - DNA, 25 bp, Homo sapien
tcgcttgcagagagtacttttataa

SEQ ID NO: 5905166 - DNA, 25 bp, Homo sapien
taaacctatgaagattctaaccaaa

SEQ ID NO: 5905167 - DNA, 25 bp, Homo sapien
gtcatgactgggtgtgagcacagat

SEQ ID NO: 5905168 - DNA, 25 bp, Homo sapien
catgtaatcgcaaaactgatttctc

SEQ ID NO: 5905169 - DNA, 25 bp, Homo sapien
caaaactgatttctcccttctgggg

SEQ ID NO: 5905170 - DNA, 25 bp, Homo sapien
ggtccctctgtggtcatgactgggt

SEQ ID NO: 5905171 - DNA, 25 bp, Homo sapien
ctttacaaagaaagctccacccatc

SEQ ID NO: 5905172 - DNA, 25 bp, Homo sapien
ctaacagtagagaaaacgccgatta

SEQ ID NO: 5905173 - DNA, 25 bp, Homo sapien
gattcttctacatgtaatcgcaaaa

SEQ ID NO: 5905174 - DNA, 25 bp, Homo sapien
gcccgtgaggtacagcaggcttaca

SEQ ID NO: 5905175 - DNA, 25 bp, Homo sapien
cattctgatgagaagaaaacagcga

SEQ ID NO: 5905176 - DNA, 25 bp, Homo sapien
ttctttttggatgtttcaagattca

SEQ ID NO: 5905177 - DNA, 25 bp, Homo sapien
gttcagactggtattgcaaggtgat

SEQ ID NO: 5905178 - DNA, 25 bp, Homo sapien
gtgaggtacagcaggcttacacact

SEQ ID NO: 5905179 - DNA, 25 bp, Homo sapien
cagccccagccagcccagggtccct

SEQ ID NO: 5905180 - DNA, 25 bp, Homo sapien
gcccagggtccctctgtggtcatga

SEQ ID NO: 5905181 - DNA, 25 bp, Homo sapien
gataagaaaactgttcagactggta

SEQ ID NO: 5905182 - DNA, 25 bp, Homo sapien
agacatgagcacatacatctgtaat

SEQ ID NO: 5905183 - DNA, 25 bp, Homo sapien
aattctttttggatgtttcaagatt

SEQ ID NO: 5905184 - DNA, 25 bp, Homo sapien
cgtgtcgtgcgcatgagctcataca

SEQ ID NO: 5905185 - DNA, 25 bp, Homo sapien
gatgagaagaaaacagcgagaccac

SEQ ID NO: 5905186 - DNA, 25 bp, Homo sapien
actgctggcataggtcgtctctaac

SEQ ID NO: 5905187 - DNA, 25 bp, Homo sapien
cataggtcgtctctaacagtagaga

SEQ ID NO: 5905188 - DNA, 25 bp, Homo sapien
atcatgtggcattcagagtaaagtc

SEQ ID NO: 5905189 - DNA, 25 bp, Homo sapien
atgagctcatacagggctcactgtc

SEQ ID NO: 5905190 - DNA, 25 bp, Homo sapien
gattcctattttccaaaatttgaat

SEQ ID NO: 5905191 - DNA, 25 bp, Homo sapien
cgcaaaactgatttctcccttctgg

SEQ ID NO: 5905192 - DNA, 25 bp, Homo sapien
ctgaacactgtatatgtaattttta

SEQ ID NO: 5905193 - DNA, 25 bp, Homo sapien
tttataaacctatgaagattctaac

SEQ ID NO: 5905194 - DNA, 25 bp, Homo sapien
acatctgtaatctacgtgatgtgat

SEQ ID NO: 5905195 - DNA, 25 bp, Homo sapien
tttaaatttttaaagcgcagaagga

SEQ ID NO: 5905196 - DNA, 25 bp, Homo sapien
aaaactgttcagactggtattgcaa

SEQ ID NO: 5905197 - DNA, 25 bp, Homo sapien
gcccttcagaagggggcacagcccc

SEQ ID NO: 5905198 - DNA, 25 bp, Homo sapien
ttgcagagagtacttttataaacct

SEQ ID NO: 5905199 - DNA, 25 bp, Homo sapien
cagttcgcttgcagagagtactttt

SEQ ID NO: 5905200 - DNA, 25 bp, Homo sapien
agtccagtccctgcatctagcaaac

SEQ ID NO: 5905201 - DNA, 25 bp, Homo sapien
cacgtgtcgtgcgcatgagctcata

SEQ ID NO: 5905202 - DNA, 25 bp, Homo sapien
agggggcacagccccagccagccca

SEQ ID NO: 5905203 - DNA, 25 bp, Homo sapien
tttttgtttaggataagagaaggct

SEQ ID NO: 5905204 - DNA, 25 bp, Homo sapien
agagaaaacgccgattagcacaatc

SEQ ID NO: 5905205 - DNA, 25 bp, Homo sapien
ttggaccagcccgtgaggtacagca

SEQ ID NO: 5905206 - DNA, 25 bp, Homo sapien
agggctcactgtcagcttggaccag

SEQ ID NO: 5905207 - DNA, 25 bp, Homo sapien
tgctggccttgggatcactgtgagt

SEQ ID NO: 5905208 - DNA, 25 bp, Homo sapien
ttcctctgtgcccgtacttacatct

SEQ ID NO: 5905209 - DNA, 25 bp, Homo sapien
taatcgcaaaactgatttctccctt

SEQ ID NO: 5905210 - DNA, 25 bp, Homo sapien
ttggatgtttcaagattcagaaaaa

SEQ ID NO: 5905211 - DNA, 25 bp, Homo sapien
gaagggggcacagccccagccagcc

SEQ ID NO: 5905212 - DNA, 25 bp, Homo sapien
atacagggctcactgtcagcttgga

SEQ ID NO: 5905213 - DNA, 25 bp, Homo sapien
tcactgtgagttttgcacatggaga

SEQ ID NO: 5905214 - DNA, 25 bp, Homo sapien
taaagtcttaagacataaacccagg

SEQ ID NO: 5905215 - DNA, 25 bp, Homo sapien
gaaggctggtaattcacttaattta

SEQ ID NO: 5905216 - DNA, 25 bp, Homo sapien
ttcattctgatgagaagaaaacagc

SEQ ID NO: 5905217 - DNA, 25 bp, Homo sapien
ggtgtgagcacagatgctggccttg

SEQ ID NO: 5905218 - DNA, 25 bp, Homo sapien
tacatgtaatcgcaaaactgatttc

SEQ ID NO: 5905219 - DNA, 25 bp, Homo sapien
gctcatacagggctcactgtcagct

SEQ ID NO: 5905220 - DNA, 25 bp, Homo sapien
aaaagtactctctgcaagcgaactg

SEQ ID NO: 5905221 - DNA, 25 bp, Homo sapien
gaatgaatccatatcgactgtctga

SEQ ID NO: 5905222 - DNA, 25 bp, Homo sapien
taaaattttggttagaatcttcata

SEQ ID NO: 5905223 - DNA, 25 bp, Homo sapien
atcacatcacgtagattacagatgt

SEQ ID NO: 5905224 - DNA, 25 bp, Homo sapien
caagcctcccccagaagggagaaat

SEQ ID NO: 5905225 - DNA, 25 bp, Homo sapien
aggagatgggtggagctttctttgt

SEQ ID NO: 5905226 - DNA, 25 bp, Homo sapien
tctgcaagcgaactggatatattta

SEQ ID NO: 5905227 - DNA, 25 bp, Homo sapien
tagattgtgctaatcggcgttttct

SEQ ID NO: 5905228 - DNA, 25 bp, Homo sapien
agaagggagaaatcagttttgcgat

SEQ ID NO: 5905229 - DNA, 25 bp, Homo sapien
taaaaattacatatacagtgttcag

SEQ ID NO: 5905230 - DNA, 25 bp, Homo sapien
aagaaaagaaagtgtgtaagcctgc

SEQ ID NO: 5905231 - DNA, 25 bp, Homo sapien
agtcatgaccacagagggaccctgg

SEQ ID NO: 5905232 - DNA, 25 bp, Homo sapien
tatgtgctcatgtcttcttctgcct

SEQ ID NO: 5905233 - DNA, 25 bp, Homo sapien
tatgagctcatgcgcacgacacgtg

SEQ ID NO: 5905234 - DNA, 25 bp, Homo sapien
gctcacacccagtcatgaccacaga

SEQ ID NO: 5905235 - DNA, 25 bp, Homo sapien
gaatcattttccttctgcgctttaa

SEQ ID NO: 5905236 - DNA, 25 bp, Homo sapien
gctttctttgtaaaggaacccgaca

SEQ ID NO: 5905237 - DNA, 25 bp, Homo sapien
acacgtggtctcgctgttttcttct

SEQ ID NO: 5905238 - DNA, 25 bp, Homo sapien
aagggagaaatcagttttgcgatta

SEQ ID NO: 5905239 - DNA, 25 bp, Homo sapien
actctgaatgccacatgatcacgta

SEQ ID NO: 5905240 - DNA, 25 bp, Homo sapien
agcctgctgtacctcacgggctggt

SEQ ID NO: 5905241 - DNA, 25 bp, Homo sapien
ttacatgtagaagaatcattttcct

SEQ ID NO: 5905242 - DNA, 25 bp, Homo sapien
atcccaaggccagcatctgtgctca

SEQ ID NO: 5905243 - DNA, 25 bp, Homo sapien
actcgggggatttagattgtgctaa

SEQ ID NO: 5905244 - DNA, 25 bp, Homo sapien
ggtccaagctgacagtgagccctgt

SEQ ID NO: 5905245 - DNA, 25 bp, Homo sapien
aatttaaattaagtgaattaccagc

SEQ ID NO: 5905246 - DNA, 25 bp, Homo sapien
cggcgttttctctactgttagagac

SEQ ID NO: 5905247 - DNA, 25 bp, Homo sapien
aaaattacatatacagtgttcagta

SEQ ID NO: 5905248 - DNA, 25 bp, Homo sapien
tggttagaatcttcataggtttata

SEQ ID NO: 5905249 - DNA, 25 bp, Homo sapien
gcgttttctctactgttagagacga

SEQ ID NO: 5905250 - DNA, 25 bp, Homo sapien
tcttgaaacatccaaaaagaattat

SEQ ID NO: 5905251 - DNA, 25 bp, Homo sapien
atctgtgctcacacccagtcatgac

SEQ ID NO: 5905252 - DNA, 25 bp, Homo sapien
agatgtaagtacgggcacagaggaa

SEQ ID NO: 5905253 - DNA, 25 bp, Homo sapien
cgactgtctgagatcaccttgcaat

SEQ ID NO: 5905254 - DNA, 25 bp, Homo sapien
gcaagaaccacttaagaaaagaaag

SEQ ID NO: 5905255 - DNA, 25 bp, Homo sapien
acatgatcacgtaagcccaagcctc

SEQ ID NO: 5905256 - DNA, 25 bp, Homo sapien
gatcacgtaagcccaagcctccccc

SEQ ID NO: 5905257 - DNA, 25 bp, Homo sapien
gccagcagtctgtatctctccatgt

SEQ ID NO: 5905258 - DNA, 25 bp, Homo sapien
agattacagatgtatgtgctcatgt

SEQ ID NO: 5905259 - DNA, 25 bp, Homo sapien
ctgtacctcacgggctggtccaagc

SEQ ID NO: 5905260 - DNA, 25 bp, Homo sapien
agtgatcccaaggccagcatctgtg

SEQ ID NO: 5905261 - DNA, 25 bp, Homo sapien
aaattttggttagaatcttcatagg

SEQ ID NO: 5905262 - DNA, 25 bp, Homo sapien
tgtgtttttaaacatcctgggttta

SEQ ID NO: 5905263 - DNA, 25 bp, Homo sapien
ctattcaggagatgggtggagcttt

SEQ ID NO: 5905264 - DNA, 25 bp, Homo sapien
caaaaagctactcgggggatttaga

SEQ ID NO: 5905265 - DNA, 25 bp, Homo sapien
tactgttagagacgacctatgccag

SEQ ID NO: 5905266 - DNA, 25 bp, Homo sapien
gctagatgcagggactggacttttt

SEQ ID NO: 5905267 - DNA, 25 bp, Homo sapien
gagctttctttgtaaaggaacccga

SEQ ID NO: 5905268 - DNA, 25 bp, Homo sapien
ccacagagggaccctgggctggctg

SEQ ID NO: 5905269 - DNA, 25 bp, Homo sapien
atacagtgttcagtagatgtaagta

SEQ ID NO: 5905270 - DNA, 25 bp, Homo sapien
ttgctagatgcagggactggacttt

SEQ ID NO: 5905271 - DNA, 25 bp, Homo sapien
atgatcacgtaagcccaagcctccc

SEQ ID NO: 5905272 - DNA, 25 bp, Homo sapien
ctgacagtgagccctgtatgagctc

SEQ ID NO: 5905273 - DNA, 25 bp, Homo sapien
tctctgcaagcgaactggatatatt

SEQ ID NO: 5905274 - DNA, 25 bp, Homo sapien
tgcaagcgaactggatatatttaca

SEQ ID NO: 5905275 - DNA, 25 bp, Homo sapien
tcagttttgcgattacatgtagaag

SEQ ID NO: 5905276 - DNA, 25 bp, Homo sapien
tcgctgttttcttctcatcagaatg

SEQ ID NO: 5905277 - DNA, 25 bp, Homo sapien
ccacatgatcacgtaagcccaagcc

SEQ ID NO: 5905278 - DNA, 25 bp, Homo sapien
tcacagtgatcccaaggccagcatc

SEQ ID NO: 5905279 - DNA, 25 bp, Homo sapien
tggaaaataggaatctttttgtgtt

SEQ ID NO: 5905280 - DNA, 25 bp, Homo sapien
aattacatatacagtgttcagtaga

SEQ ID NO: 5905281 - DNA, 25 bp, Homo sapien
agaggaaagggcggcggtttgctag

SEQ ID NO: 5905282 - DNA, 25 bp, Homo sapien
acagtgatcccaaggccagcatctg

SEQ ID NO: 5905283 - DNA, 25 bp, Homo sapien
caaaactcacagtgatcccaaggcc

SEQ ID NO: 5905284 - DNA, 25 bp, Homo sapien
aatcagttttgcgattacatgtaga

SEQ ID NO: 5905285 - DNA, 25 bp, Homo sapien
cttctgaagggcatcgcccctccct

SEQ ID NO: 5905286 - DNA, 25 bp, Homo sapien
cagttttcttatcacatcacgtaga

SEQ ID NO: 5905287 - DNA, 25 bp, Homo sapien
tcataggtttataaaagtactctct

SEQ ID NO: 5905288 - DNA, 25 bp, Homo sapien
tatagcttaaattcaaattttggaa

SEQ ID NO: 5905289 - DNA, 25 bp, Homo sapien
cagtgagccctgtatgagctcatgc

SEQ ID NO: 5905290 - DNA, 25 bp, Homo sapien
atccatatcgactgtctgagatcac

SEQ ID NO: 5905291 - DNA, 25 bp, Homo sapien
attttggttagaatcttcataggtt

SEQ ID NO: 5905292 - DNA, 25 bp, Homo sapien
caaaacggctattcaggagatgggt

SEQ ID NO: 5905293 - DNA, 25 bp, Homo sapien
tcacgtaagcccaagcctcccccag

SEQ ID NO: 5905294 - DNA, 25 bp, Homo sapien
tttctctactgttagagacgaccta

SEQ ID NO: 5905295 - DNA, 25 bp, Homo sapien
ataaaagtactctctgcaagcgaac

SEQ ID NO: 5905296 - DNA, 25 bp, Homo sapien
aagtacgggcacagaggaaagggcg

SEQ ID NO: 5905297 - DNA, 25 bp, Homo sapien
aagtactctctgcaagcgaactgga

SEQ ID NO: 5905298 - DNA, 25 bp, Homo sapien
agggaccctgggctggctggggctg

SEQ ID NO: 5905299 - DNA, 25 bp, Homo sapien
acagtgttcagtagatgtaagtacg

SEQ ID NO: 5905300 - DNA, 25 bp, Homo sapien
gtgctcacacccagtcatgaccaca

SEQ ID NO: 5905301 - DNA, 25 bp, Homo sapien
atgtagaagaatcattttccttctg

SEQ ID NO: 5905302 - DNA, 25 bp, Homo sapien
gaatccatatcgactgtctgagatc

SEQ ID NO: 5905303 - DNA, 25 bp, Homo sapien
cacgacacgtggtctcgctgttttc

SEQ ID NO: 5905304 - DNA, 25 bp, Homo sapien
ggggctgtgcccccttctgaagggc

SEQ ID NO: 5905305 - DNA, 25 bp, Homo sapien
cccttctgaagggcatcgcccctcc

SEQ ID NO: 5905306 - DNA, 25 bp, Homo sapien
aagactttactctgaatgccacatg

SEQ ID NO: 5905307 - DNA, 25 bp, Homo sapien
gtacgggcacagaggaaagggcggc

SEQ ID NO: 5905308 - DNA, 25 bp, Homo sapien
tttaaaattttggttagaatcttca

SEQ ID NO: 5905309 - DNA, 25 bp, Homo sapien
ccacttaagaaaagaaagtgtgtaa

SEQ ID NO: 5905310 - DNA, 25 bp, Homo sapien
gtttgctagatgcagggactggact

SEQ ID NO: 5905311 - DNA, 25 bp, Homo sapien
ctggctggggctgtgcccccttctg

SEQ ID NO: 5905312 - DNA, 25 bp, Homo sapien
ttctcttatcctaaacaaaaagcta

SEQ ID NO: 5905313 - DNA, 25 bp, Homo sapien
gttagagacgacctatgccagcagt

SEQ ID NO: 5905314 - DNA, 25 bp, Homo sapien
aaagtgtgtaagcctgctgtacctc

SEQ ID NO: 5905315 - DNA, 25 bp, Homo sapien
agagggaccctgggctggctggggc

SEQ ID NO: 5905316 - DNA, 25 bp, Homo sapien
ctactcgggggatttagattgtgct

SEQ ID NO: 5905317 - DNA, 25 bp, Homo sapien
ggctggctggggctgtgcccccttc

SEQ ID NO: 5905318 - DNA, 25 bp, Homo sapien
agtgtgtaagcctgctgtacctcac

SEQ ID NO: 5905319 - DNA, 25 bp, Homo sapien
cgacctatgccagcagtctgtatct

SEQ ID NO: 5905320 - DNA, 25 bp, Homo sapien
tgtatgtgctcatgtcttcttctgc

SEQ ID NO: 5905321 - DNA, 25 bp, Homo sapien
aagtgaattaccagccttctcttat

SEQ ID NO: 5905322 - DNA, 25 bp, Homo sapien
tacagatgtatgtgctcatgtcttc

SEQ ID NO: 5905323 - DNA, 25 bp, Homo sapien
tgctcatgtcttcttctgcctttaa

SEQ ID NO: 5905324 - DNA, 25 bp, Homo sapien
aagaatcattttccttctgcgcttt

SEQ ID NO: 5905325 - DNA, 25 bp, Homo sapien
atcgactgtctgagatcaccttgca

SEQ ID NO: 5905326 - DNA, 25 bp, Homo sapien
attaccagccttctcttatcctaaa

SEQ ID NO: 5905327 - DNA, 25 bp, Homo sapien
cggtttgctagatgcagggactgga

SEQ ID NO: 5905328 - DNA, 25 bp, Homo sapien
tagcttaaattcaaattttggaaaa

SEQ ID NO: 5905329 - DNA, 25 bp, Homo sapien
atcctgggtttatgtcttaagactt

SEQ ID NO: 5905330 - DNA, 25 bp, Homo sapien
tttctgaatcttgaaacatccaaaa

SEQ ID NO: 5905331 - DNA, 25 bp, Homo sapien
caagctgacagtgagccctgtatga

SEQ ID NO: 5905332 - DNA, 25 bp, Homo sapien
ggcggtttgctagatgcagggactg

SEQ ID NO: 5905333 - DNA, 25 bp, Homo sapien
gttagaatcttcataggtttataaa

SEQ ID NO: 5905334 - DNA, 25 bp, Homo sapien
gcggcggtttgctagatgcagggac

SEQ ID NO: 5905335 - DNA, 25 bp, Homo sapien
actctctgcaagcgaactggatata

SEQ ID NO: 5905336 - DNA, 25 bp, Homo sapien
gtaagtacgggcacagaggaaaggg

SEQ ID NO: 5905337 - DNA, 25 bp, Homo sapien
taccagtctgaacagttttcttatc

SEQ ID NO: 5905338 - DNA, 25 bp, Homo sapien
ttcttctcatcagaatgaatccata

SEQ ID NO: 5905339 - DNA, 25 bp, Homo sapien
gactttactctgaatgccacatgat

SEQ ID NO: 5905340 - DNA, 25 bp, Homo sapien
caaggccagcatctgtgctcacacc

SEQ ID NO: 5905341 - DNA, 25 bp, Homo sapien
agtctgtatctctccatgtgcaaaa

SEQ ID NO: 5905342 - DNA, 25 bp, Homo sapien
ttacatatacagtgttcagtagatg

SEQ ID NO: 5905343 - DNA, 25 bp, Homo sapien
gttttcttatcacatcacgtagatt

SEQ ID NO: 5905344 - DNA, 25 bp, Homo sapien
cttatcctaaacaaaaagctactcg

SEQ ID NO: 5905345 - DNA, 25 bp, Homo sapien
ccccagaagggagaaatcagttttg

SEQ ID NO: 5905346 - DNA, 25 bp, Homo sapien
tctactgttagagacgacctatgcc

SEQ ID NO: 5905347 - DNA, 25 bp, Homo sapien
aaagctactcgggggatttagattg

SEQ ID NO: 5905348 - DNA, 25 bp, Homo sapien
tcatgaccacagagggaccctgggc

SEQ ID NO: 5905349 - DNA, 25 bp, Homo sapien
cagggactggactttttctgaatct

SEQ ID NO: 5905350 - DNA, 25 bp, Homo sapien
tgaacagttttcttatcacatcacg

SEQ ID NO: 5905351 - DNA, 25 bp, Homo sapien
tagaatcttcataggtttataaaag

SEQ ID NO: 5905352 - DNA, 25 bp, Homo sapien
tcatcagaatgaatccatatcgact

SEQ ID NO: 5905353 - DNA, 25 bp, Homo sapien
ccctccctccagtttggcaagaacc

SEQ ID NO: 5905354 - DNA, 25 bp, Homo sapien
tgcgcacgacacgtggtctcgctgt

SEQ ID NO: 5905355 - DNA, 25 bp, Homo sapien
ctccagtttggcaagaaccacttaa

SEQ ID NO: 5905356 - DNA, 25 bp, Homo sapien
ggctattcaggagatgggtggagct

SEQ ID NO: 5905357 - DNA, 25 bp, Homo sapien
tgtttttaaacatcctgggtttatg

SEQ ID NO: 5905358 - DNA, 25 bp, Homo sapien
acgtagattacagatgtatgtgctc

SEQ ID NO: 5905359 - DNA, 25 bp, Homo sapien
gtactctctgcaagcgaactggata

SEQ ID NO: 5905360 - DNA, 25 bp, Homo sapien
tccatgtgcaaaactcacagtgatc

SEQ ID NO: 5905361 - DNA, 25 bp, Homo sapien
caagcgaactggatatatttacatt

SEQ ID NO: 5905362 - DNA, 25 bp, Homo sapien
agtgttcagtagatgtaagtacggg

SEQ ID NO: 5905363 - DNA, 25 bp, Homo sapien
tgagatcaccttgcaataccagtct

SEQ ID NO: 5905364 - DNA, 25 bp, Homo sapien
gggcggcggtttgctagatgcaggg

SEQ ID NO: 5905365 - DNA, 25 bp, Homo sapien
ccatatcgactgtctgagatcacct

SEQ ID NO: 5905366 - DNA, 25 bp, Homo sapien
acgggcacagaggaaagggcggcgg

SEQ ID NO: 5905367 - DNA, 25 bp, Homo sapien
tctgtatctctccatgtgcaaaact

SEQ ID NO: 5905368 - DNA, 25 bp, Homo sapien
agcctcccccagaagggagaaatca

SEQ ID NO: 5905369 - DNA, 25 bp, Homo sapien
tttttctgaatcttgaaacatccaa

SEQ ID NO: 5905370 - DNA, 25 bp, Homo sapien
tttagattgtgctaatcggcgtttt

SEQ ID NO: 5905371 - DNA, 25 bp, Homo sapien
ttaaacatcctgggtttatgtctta

SEQ ID NO: 5905372 - DNA, 25 bp, Homo sapien
gagccctgtatgagctcatgcgcac

SEQ ID NO: 5905373 - DNA, 25 bp, Homo sapien
acatcctgggtttatgtcttaagac

SEQ ID NO: 5905374 - DNA, 25 bp, Homo sapien
cctgtatgagctcatgcgcacgaca

SEQ ID NO: 5905375 - DNA, 25 bp, Homo sapien
gagacgacctatgccagcagtctgt

SEQ ID NO: 5905376 - DNA, 25 bp, Homo sapien
tttggcaagaaccacttaagaaaag

SEQ ID NO: 5905377 - DNA, 25 bp, Homo sapien
tctgaatgccacatgatcacgtaag

SEQ ID NO: 5905378 - DNA, 25 bp, Homo sapien
ggctggtccaagctgacagtgagcc

SEQ ID NO: 5905379 - DNA, 25 bp, Homo sapien
cagcagtctgtatctctccatgtgc

SEQ ID NO: 5905380 - DNA, 25 bp, Homo sapien
tgtctgagatcaccttgcaatacca

SEQ ID NO: 5905381 - DNA, 25 bp, Homo sapien
gactggactttttctgaatcttgaa

SEQ ID NO: 5905382 - DNA, 25 bp, Homo sapien
tcttaagactttactctgaatgcca

SEQ ID NO: 5905383 - DNA, 25 bp, Homo sapien
acgtaagcccaagcctcccccagaa

SEQ ID NO: 5905384 - DNA, 25 bp, Homo sapien
ctatgccagcagtctgtatctctcc

SEQ ID NO: 5905385 - DNA, 25 bp, Homo sapien
gaattaccagccttctcttatccta

SEQ ID NO: 5905386 - DNA, 25 bp, Homo sapien
ctggactttttctgaatcttgaaac

SEQ ID NO: 5905387 - DNA, 25 bp, Homo sapien
taaattcaaattttggaaaatagga

SEQ ID NO: 5905388 - DNA, 25 bp, Homo sapien
gctgttttcttctcatcagaatgaa

SEQ ID NO: 5905389 - DNA, 25 bp, Homo sapien
atgccagcagtctgtatctctccat

SEQ ID NO: 5905390 - DNA, 25 bp, Homo sapien
cttctcatcagaatgaatccatatc

SEQ ID NO: 5905391 - DNA, 25 bp, Homo sapien
ggtttatgtcttaagactttactct

SEQ ID NO: 5905392 - DNA, 25 bp, Homo sapien
cgaactggatatatttacatttata

SEQ ID NO: 5905393 - DNA, 25 bp, Homo sapien
tctcgctgttttcttctcatcagaa

SEQ ID NO: 5905394 - DNA, 25 bp, Homo sapien
tgggtggagctttctttgtaaagga

SEQ ID NO: 5905395 - DNA, 25 bp, Homo sapien
tcccccagaagggagaaatcagttt

SEQ ID NO: 5905396 - DNA, 25 bp, Homo sapien
ttgcaataccagtctgaacagtttt

SEQ ID NO: 5905397 - DNA, 25 bp, Homo sapien
atatacagtgttcagtagatgtaag

SEQ ID NO: 5905398 - DNA, 25 bp, Homo sapien
agtttggcaagaaccacttaagaaa

SEQ ID NO: 5905399 - DNA, 25 bp, Homo sapien
gtagattacagatgtatgtgctcat

SEQ ID NO: 5905400 - DNA, 25 bp, Homo sapien
gatttagattgtgctaatcggcgtt

SEQ ID NO: 5905401 - DNA, 25 bp, Homo sapien
ggtggagctttctttgtaaaggaac

SEQ ID NO: 5905402 - DNA, 25 bp, Homo sapien
tcacgtagattacagatgtatgtgc

SEQ ID NO: 5905403 - DNA, 25 bp, Homo sapien
tgtgcaaaactcacagtgatcccaa

SEQ ID NO: 5905404 - DNA, 25 bp, Homo sapien
ttaagactttactctgaatgccaca

SEQ ID NO: 5905405 - DNA, 25 bp, Homo sapien
aggaaagggcggcggtttgctagat

SEQ ID NO: 5905406 - DNA, 25 bp, Homo sapien
tctgaatcttgaaacatccaaaaag

SEQ ID NO: 5905407 - DNA, 25 bp, Homo sapien
cttcataggtttataaaagtactct

SEQ ID NO: 5905408 - DNA, 25 bp, Homo sapien
catgtgcaaaactcacagtgatccc

SEQ ID NO: 5905409 - DNA, 25 bp, Homo sapien
ctttactctgaatgccacatgatca

SEQ ID NO: 5905410 - DNA, 25 bp, Homo sapien
agctcatgcgcacgacacgtggtct

SEQ ID NO: 5905411 - DNA, 25 bp, Homo sapien
tcacacccagtcatgaccacagagg

SEQ ID NO: 5905412 - DNA, 25 bp, Homo sapien
aataccagtctgaacagttttctta

SEQ ID NO: 5905413 - DNA, 25 bp, Homo sapien
gacagtgagccctgtatgagctcat

SEQ ID NO: 5905414 - DNA, 25 bp, Homo sapien
ttaagtgaattaccagccttctctt

SEQ ID NO: 5905415 - DNA, 25 bp, Homo sapien
acatgtagaagaatcattttccttc

SEQ ID NO: 5905416 - DNA, 25 bp, Homo sapien
cagtagatgtaagtacgggcacaga

SEQ ID NO: 5905417 - DNA, 25 bp, Homo sapien
aaagaaagtgtgtaagcctgctgta

SEQ ID NO: 5905418 - DNA, 25 bp, Homo sapien
aagggcggcggtttgctagatgcag

SEQ ID NO: 5905419 - DNA, 25 bp, Homo sapien
gggagaaatcagttttgcgattaca

SEQ ID NO: 5905420 - DNA, 25 bp, Homo sapien
tctctactgttagagacgacctatg

SEQ ID NO: 5905421 - DNA, 25 bp, Homo sapien
gcacagaggaaagggcggcggtttg

SEQ ID NO: 5905422 - DNA, 25 bp, Homo sapien
aggccagcatctgtgctcacaccca

SEQ ID NO: 5905423 - DNA, 25 bp, Homo sapien
aggtttataaaagtactctctgcaa

SEQ ID NO: 5905424 - DNA, 25 bp, Homo sapien
gtaagcccaagcctcccccagaagg

SEQ ID NO: 5905425 - DNA, 25 bp, Homo sapien
agcgaactggatatatttacattta

SEQ ID NO: 5905426 - DNA, 25 bp, Homo sapien
atgtaagtacgggcacagaggaaag

SEQ ID NO: 5905427 - DNA, 25 bp, Homo sapien
acctatgccagcagtctgtatctct

SEQ ID NO: 5905428 - DNA, 25 bp, Homo sapien
tcaaattttggaaaataggaatctt

SEQ ID NO: 5905429 - DNA, 25 bp, Homo sapien
agctgacagtgagccctgtatgagc

SEQ ID NO: 5905430 - DNA, 25 bp, Homo sapien
ctccctccagtttggcaagaaccac

SEQ ID NO: 5905431 - DNA, 25 bp, Homo sapien
caccttgcaataccagtctgaacag

SEQ ID NO: 5905432 - DNA, 25 bp, Homo sapien
agtctgaacagttttcttatcacat

SEQ ID NO: 5905433 - DNA, 25 bp, Homo sapien
acggctattcaggagatgggtggag

SEQ ID NO: 5905434 - DNA, 25 bp, Homo sapien
ttgcgattacatgtagaagaatcat

SEQ ID NO: 5905435 - DNA, 25 bp, Homo sapien
gggactggactttttctgaatcttg

SEQ ID NO: 5905436 - DNA, 25 bp, Homo sapien
tttaaaaattacatatacagtgttc

SEQ ID NO: 5905437 - DNA, 25 bp, Homo sapien
acatatacagtgttcagtagatgta

SEQ ID NO: 5905438 - DNA, 25 bp, Homo sapien
aaacatcctgggtttatgtcttaag

SEQ ID NO: 5905439 - DNA, 25 bp, Homo sapien
ccttgcaataccagtctgaacagtt

SEQ ID NO: 5905440 - DNA, 25 bp, Homo sapien
gagatgggtggagctttctttgtaa

SEQ ID NO: 5905441 - DNA, 25 bp, Homo sapien
tatgtcttaagactttactctgaat

SEQ ID NO: 5905442 - DNA, 25 bp, Homo sapien
tgcagggactggactttttctgaat

SEQ ID NO: 5905443 - DNA, 25 bp, Homo sapien
tttggaaaataggaatctttttgtg

SEQ ID NO: 5905444 - DNA, 25 bp, Homo sapien
cacatcacgtagattacagatgtat

SEQ ID NO: 5905445 - DNA, 25 bp, Homo sapien
gtagaagaatcattttccttctgcg

SEQ ID NO: 5905446 - DNA, 25 bp, Homo sapien
ctcatgcgcacgacacgtggtctcg

SEQ ID NO: 5905447 - DNA, 25 bp, Homo sapien
ccagaagggagaaatcagttttgcg

SEQ ID NO: 5905448 - DNA, 25 bp, Homo sapien
ttataaaagtactctctgcaagcga

SEQ ID NO: 5905449 - DNA, 25 bp, Homo sapien
agctactcgggggatttagattgtg

SEQ ID NO: 5905450 - DNA, 25 bp, Homo sapien
tgtatctctccatgtgcaaaactca

SEQ ID NO: 5905451 - DNA, 25 bp, Homo sapien
tgggtttatgtcttaagactttact

SEQ ID NO: 5905452 - DNA, 25 bp, Homo sapien
ctgtgctcacacccagtcatgacca

SEQ ID NO: 5905453 - DNA, 25 bp, Homo sapien
gaaccacttaagaaaagaaagtgtg

SEQ ID NO: 5905454 - DNA, 25 bp, Homo sapien
agttttgcgattacatgtagaagaa

SEQ ID NO: 5905455 - DNA, 25 bp, Homo sapien
ctggatatatttacatttatagctt

SEQ ID NO: 5905456 - DNA, 25 bp, Homo sapien
acagagggaccctgggctggctggg

SEQ ID NO: 5905457 - DNA, 25 bp, Homo sapien
catcacgtagattacagatgtatgt

SEQ ID NO: 5905458 - DNA, 25 bp, Homo sapien
tggagctttctttgtaaaggaaccc

SEQ ID NO: 5905459 - DNA, 25 bp, Homo sapien
agccttctcttatcctaaacaaaaa

SEQ ID NO: 5905460 - DNA, 25 bp, Homo sapien
ttttcttctcatcagaatgaatcca

SEQ ID NO: 5905461 - DNA, 25 bp, Homo sapien
tgcaaaactcacagtgatcccaagg

SEQ ID NO: 5905462 - DNA, 25 bp, Homo sapien
tctctccatgtgcaaaactcacagt

SEQ ID NO: 5905463 - DNA, 25 bp, Homo sapien
attacagatgtatgtgctcatgtct

SEQ ID NO: 5905464 - DNA, 25 bp, Homo sapien
ttttaaacatcctgggtttatgtct

SEQ ID NO: 5905465 - DNA, 25 bp, Homo sapien
agatcaccttgcaataccagtctga

SEQ ID NO: 5905466 - DNA, 25 bp, Homo sapien
cgggctggtccaagctgacagtgag

SEQ ID NO: 5905467 - DNA, 25 bp, Homo sapien
tttggttagaatcttcataggttta

SEQ ID NO: 5905468 - DNA, 25 bp, Homo sapien
tcaggagatgggtggagctttcttt

SEQ ID NO: 5905469 - DNA, 25 bp, Homo sapien
ctggtccaagctgacagtgagccct

SEQ ID NO: 5905470 - DNA, 25 bp, Homo sapien
gattgtgctaatcggcgttttctct

SEQ ID NO: 5905471 - DNA, 25 bp, Homo sapien
agaagaatcattttccttctgcgct

SEQ ID NO: 5905472 - DNA, 25 bp, Homo sapien
gtgaattaccagccttctcttatcc

SEQ ID NO: 5905473 - DNA, 25 bp, Homo sapien
tcgcccctccctccagtttggcaag

SEQ ID NO: 5905474 - DNA, 25 bp, Homo sapien
acgtggtctcgctgttttcttctca

SEQ ID NO: 5905475 - DNA, 25 bp, Homo sapien
gaaagggcggcggtttgctagatgc

SEQ ID NO: 5905476 - DNA, 25 bp, Homo sapien
cgacacgtggtctcgctgttttctt

SEQ ID NO: 5905477 - DNA, 25 bp, Homo sapien
tgtaagcctgctgtacctcacgggc

SEQ ID NO: 5905478 - DNA, 25 bp, Homo sapien
atgaatccatatcgactgtctgaga

SEQ ID NO: 5905479 - DNA, 25 bp, Homo sapien
ccctccagtttggcaagaaccactt

SEQ ID NO: 5905480 - DNA, 25 bp, Homo sapien
gtagatgtaagtacgggcacagagg

SEQ ID NO: 5905481 - DNA, 25 bp, Homo sapien
ccttctcttatcctaaacaaaaagc

SEQ ID NO: 5905482 - DNA, 25 bp, Homo sapien
cctgggtttatgtcttaagacttta

SEQ ID NO: 5905483 - DNA, 25 bp, Homo sapien
tagagacgacctatgccagcagtct

SEQ ID NO: 5905484 - DNA, 25 bp, Homo sapien
taagcctgctgtacctcacgggctg

SEQ ID NO: 5905485 - DNA, 25 bp, Homo sapien
tctgagatcaccttgcaataccagt

SEQ ID NO: 5905486 - DNA, 25 bp, Homo sapien
catgcgcacgacacgtggtctcgct

SEQ ID NO: 5905487 - DNA, 25 bp, Homo sapien
catccaaaaagaattataggatata

SEQ ID NO: 5905488 - DNA, 25 bp, Homo sapien
gagaaatcagttttgcgattacatg

SEQ ID NO: 5905489 - DNA, 25 bp, Homo sapien
ggaccctgggctggctggggctgtg

SEQ ID NO: 5905490 - DNA, 25 bp, Homo sapien
cctgggctggctggggctgtgcccc

SEQ ID NO: 5905491 - DNA, 25 bp, Homo sapien
gcatctgtgctcacacccagtcatg

SEQ ID NO: 5905492 - DNA, 25 bp, Homo sapien
attcaaattttggaaaataggaatc

SEQ ID NO: 5905493 - DNA, 25 bp, Homo sapien
gccagcatctgtgctcacacccagt

SEQ ID NO: 5905494 - DNA, 25 bp, Homo sapien
aattaagtgaattaccagccttctc

SEQ ID NO: 5905495 - DNA, 25 bp, Homo sapien
gctaatcggcgttttctctactgtt

SEQ ID NO: 5905496 - DNA, 25 bp, Homo sapien
taccagccttctcttatcctaaaca

SEQ ID NO: 5905497 - DNA, 25 bp, Homo sapien
cacgggctggtccaagctgacagtg

SEQ ID NO: 5905498 - DNA, 25 bp, Homo sapien
caaaaagaattataggatataaatt

SEQ ID NO: 5905499 - DNA, 25 bp, Homo sapien
tgttcagtagatgtaagtacgggca

SEQ ID NO: 5905500 - DNA, 25 bp, Homo sapien
gatgtatgtgctcatgtcttcttct

SEQ ID NO: 5905501 - DNA, 25 bp, Homo sapien
gaatcttcataggtttataaaagta

SEQ ID NO: 5905502 - DNA, 25 bp, Homo sapien
tttccttctgcgctttaaaaattta

SEQ ID NO: 5905503 - DNA, 25 bp, Homo sapien
atgaccacagagggaccctgggctg

SEQ ID NO: 5905504 - DNA, 25 bp, Homo sapien
gaccacagagggaccctgggctggc

SEQ ID NO: 5905505 - DNA, 25 bp, Homo sapien
tccaaaaagaattataggatataaa

SEQ ID NO: 5905506 - DNA, 25 bp, Homo sapien
acttaagaaaagaaagtgtgtaagc

SEQ ID NO: 5905507 - DNA, 25 bp, Homo sapien
accctgggctggctggggctgtgcc

SEQ ID NO: 5905508 - DNA, 25 bp, Homo sapien
acccagtcatgaccacagagggacc

SEQ ID NO: 5905509 - DNA, 25 bp, Homo sapien
aaacggctattcaggagatgggtgg

SEQ ID NO: 5905510 - DNA, 25 bp, Homo sapien
taaattaagtgaattaccagccttc

SEQ ID NO: 5905511 - DNA, 25 bp, Homo sapien
taaatttaaattaagtgaattacca

SEQ ID NO: 5905512 - DNA, 25 bp, Homo sapien
tggcaagaaccacttaagaaaagaa

SEQ ID NO: 5905513 - DNA, 25 bp, Homo sapien
gtggtctcgctgttttcttctcatc

SEQ ID NO: 5905514 - DNA, 25 bp, Homo sapien
gacgacctatgccagcagtctgtat

SEQ ID NO: 5905515 - DNA, 25 bp, Homo sapien
cagcatctgtgctcacacccagtca

SEQ ID NO: 5905516 - DNA, 25 bp, Homo sapien
tatctctccatgtgcaaaactcaca

SEQ ID NO: 5905517 - DNA, 25 bp, Homo sapien
aatttaaaaattacatatacagtgt

SEQ ID NO: 5905518 - DNA, 25 bp, Homo sapien
taatcggcgttttctctactgttag

SEQ ID NO: 5905519 - DNA, 25 bp, Homo sapien
tgttttcttctcatcagaatgaatc

SEQ ID NO: 5905520 - DNA, 25 bp, Homo sapien
gatgggtggagctttctttgtaaag

SEQ ID NO: 5905521 - DNA, 25 bp, Homo sapien
ataggtttataaaagtactctctgc

SEQ ID NO: 5905522 - DNA, 25 bp, Homo sapien
tttatgtcttaagactttactctga

SEQ ID NO: 5905523 - DNA, 25 bp, Homo sapien
ttactctgaatgccacatgatcacg

SEQ ID NO: 5905524 - DNA, 25 bp, Homo sapien
tcttatcacatcacgtagattacag

SEQ ID NO: 5905525 - DNA, 25 bp, Homo sapien
attcaggagatgggtggagctttct

SEQ ID NO: 5905526 - DNA, 25 bp, Homo sapien
gaaatcagttttgcgattacatgta

SEQ ID NO: 5905527 - DNA, 25 bp, Homo sapien
tgtatgagctcatgcgcacgacacg

SEQ ID NO: 5905528 - DNA, 25 bp, Homo sapien
gaaacatccaaaaagaattatagga

SEQ ID NO: 5905529 - DNA, 25 bp, Homo sapien
atcggcgttttctctactgttagag

SEQ ID NO: 5905530 - DNA, 25 bp, Homo sapien
tctcatcagaatgaatccatatcga

SEQ ID NO: 5905531 - DNA, 25 bp, Homo sapien
actttttctgaatcttgaaacatcc

SEQ ID NO: 5905532 - DNA, 25 bp, Homo sapien
tccaagctgacagtgagccctgtat

SEQ ID NO: 5905533 - DNA, 25 bp, Homo sapien
tctgaagggcatcgcccctccctcc

SEQ ID NO: 5905534 - DNA, 25 bp, Homo sapien
cccaaggccagcatctgtgctcaca

SEQ ID NO: 5905535 - DNA, 25 bp, Homo sapien
tgctgtacctcacgggctggtccaa

SEQ ID NO: 5905536 - DNA, 25 bp, Homo sapien
agaaagtgtgtaagcctgctgtacc

SEQ ID NO: 5905537 - DNA, 25 bp, Homo sapien
ctcttatcctaaacaaaaagctact

SEQ ID NO: 5905538 - DNA, 25 bp, Homo sapien
ttgaaacatccaaaaagaattatag

SEQ ID NO: 5905539 - DNA, 25 bp, Homo sapien
gattacatgtagaagaatcattttc

SEQ ID NO: 5905540 - DNA, 25 bp, Homo sapien
tgtgtaagcctgctgtacctcacgg

SEQ ID NO: 5905541 - DNA, 25 bp, Homo sapien
cctgctgtacctcacgggctggtcc

SEQ ID NO: 5905542 - DNA, 25 bp, Homo sapien
aactggatatatttacatttatagc

SEQ ID NO: 5905543 - DNA, 25 bp, Homo sapien
aacatccaaaaagaattataggata

SEQ ID NO: 5905544 - DNA, 25 bp, Homo sapien
acacccagtcatgaccacagaggga

SEQ ID NO: 5905545 - DNA, 25 bp, Homo sapien
ccagtctgaacagttttcttatcac

SEQ ID NO: 5905546 - DNA, 25 bp, Homo sapien
aatgccacatgatcacgtaagccca

SEQ ID NO: 5905547 - DNA, 25 bp, Homo sapien
tgatcccaaggccagcatctgtgct

SEQ ID NO: 5905548 - DNA, 25 bp, Homo sapien
ttttgcgattacatgtagaagaatc

SEQ ID NO: 5905549 - DNA, 25 bp, Homo sapien
tgaatcttgaaacatccaaaaagaa

SEQ ID NO: 5905550 - DNA, 25 bp, Homo sapien
tatcctaaacaaaaagctactcggg

SEQ ID NO: 5905551 - DNA, 25 bp, Homo sapien
cagatgtatgtgctcatgtcttctt

SEQ ID NO: 5905552 - DNA, 25 bp, Homo sapien
aatcttgaaacatccaaaaagaatt

SEQ ID NO: 5905553 - DNA, 25 bp, Homo sapien
gccctgtatgagctcatgcgcacga

SEQ ID NO: 5905554 - DNA, 25 bp, Homo sapien
gggcacagaggaaagggcggcggtt

SEQ ID NO: 5905555 - DNA, 25 bp, Homo sapien
cctcccccagaagggagaaatcagt

SEQ ID NO: 5905556 - DNA, 25 bp, Homo sapien
ccagtcatgaccacagagggaccct

SEQ ID NO: 5905557 - DNA, 25 bp, Homo sapien
ggactttttctgaatcttgaaacat

SEQ ID NO: 5905558 - DNA, 25 bp, Homo sapien
ttcagtagatgtaagtacgggcaca

SEQ ID NO: 5905559 - DNA, 25 bp, Homo sapien
ttatcacatcacgtagattacagat

SEQ ID NO: 5905560 - DNA, 25 bp, Homo sapien
gtgctaatcggcgttttctctactg

SEQ ID NO: 5905561 - DNA, 25 bp, Homo sapien
gtttataaaagtactctctgcaagc

SEQ ID NO: 5905562 - DNA, 25 bp, Homo sapien
gtacctcacgggctggtccaagctg

SEQ ID NO: 5905563 - DNA, 25 bp, Homo sapien
tgccacatgatcacgtaagcccaag

SEQ ID NO: 5905564 - DNA, 25 bp, Homo sapien
tgtcttaagactttactctgaatgc

SEQ ID NO: 5905565 - DNA, 25 bp, Homo sapien
aacagttttcttatcacatcacgta

SEQ ID NO: 5905566 - DNA, 25 bp, Homo sapien
ctcacgggctggtccaagctgacag

SEQ ID NO: 5905567 - DNA, 25 bp, Homo sapien
gtgagccctgtatgagctcatgcgc

SEQ ID NO: 5905568 - DNA, 25 bp, Homo sapien
aaactcacagtgatcccaaggccag

SEQ ID NO: 5905569 - DNA, 25 bp, Homo sapien
gggggatttagattgtgctaatcgg

SEQ ID NO: 5905570 - DNA, 25 bp, Homo sapien
gttttctctactgttagagacgacc

SEQ ID NO: 5905571 - DNA, 25 bp, Homo sapien
ctgttagagacgacctatgccagca

SEQ ID NO: 5905572 - DNA, 25 bp, Homo sapien
tgggctggctggggctgtgccccct

SEQ ID NO: 5905573 - DNA, 25 bp, Homo sapien
ttgtgctaatcggcgttttctctac

SEQ ID NO: 5905574 - DNA, 25 bp, Homo sapien
gcgattacatgtagaagaatcattt

SEQ ID NO: 5905575 - DNA, 25 bp, Homo sapien
gaaaagaaagtgtgtaagcctgctg

SEQ ID NO: 5905576 - DNA, 25 bp, Homo sapien
gcccctccctccagtttggcaagaa

SEQ ID NO: 5905577 - DNA, 25 bp, Homo sapien
acctcacgggctggtccaagctgac

SEQ ID NO: 5905578 - DNA, 25 bp, Homo sapien
gatgcagggactggactttttctga

SEQ ID NO: 5905579 - DNA, 25 bp, Homo sapien
cgcacgacacgtggtctcgctgttt

SEQ ID NO: 5905580 - DNA, 25 bp, Homo sapien
tttaaattaagtgaattaccagcct

SEQ ID NO: 5905581 - DNA, 25 bp, Homo sapien
tctgaacagttttcttatcacatca

SEQ ID NO: 5905582 - DNA, 25 bp, Homo sapien
gcaataccagtctgaacagttttct

SEQ ID NO: 5905583 - DNA, 25 bp, Homo sapien
gggatttagattgtgctaatcggcg

SEQ ID NO: 5905584 - DNA, 25 bp, Homo sapien
tccttctgcgctttaaaaatttaaa

SEQ ID NO: 5905585 - DNA, 25 bp, Homo sapien
ttaagaaaagaaagtgtgtaagcct

SEQ ID NO: 5905586 - DNA, 25 bp, Homo sapien
cattttccttctgcgctttaaaaat

SEQ ID NO: 5905587 - DNA, 25 bp, Homo sapien
atcattttccttctgcgctttaaaa

SEQ ID NO: 5905588 - DNA, 25 bp, Homo sapien
ccagtttggcaagaaccacttaaga

SEQ ID NO: 5905589 - DNA, 25 bp, Homo sapien
atcaccttgcaataccagtctgaac

SEQ ID NO: 5905590 - DNA, 25 bp, Homo sapien
ccagccttctcttatcctaaacaaa

SEQ ID NO: 5905591 - DNA, 25 bp, Homo sapien
atatcgactgtctgagatcaccttg

SEQ ID NO: 5905592 - DNA, 25 bp, Homo sapien
ggtctcgctgttttcttctcatcag

SEQ ID NO: 5905593 - DNA, 25 bp, Homo sapien
gcagtctgtatctctccatgtgcaa

SEQ ID NO: 5905594 - DNA, 25 bp, Homo sapien
tgagctcatgcgcacgacacgtggt

SEQ ID NO: 5905595 - DNA, 25 bp, Homo sapien
tttcttatcacatcacgtagattac

SEQ ID NO: 5905596 - DNA, 25 bp, Homo sapien
tctccatgtgcaaaactcacagtga

SEQ ID NO: 5905597 - DNA, 25 bp, Homo sapien
atcagaatgaatccatatcgactgt

SEQ ID NO: 5905598 - DNA, 25 bp, Homo sapien
actgtctgagatcaccttgcaatac

SEQ ID NO: 5905599 - DNA, 25 bp, Homo sapien
tgtgctcatgtcttcttctgccttt

SEQ ID NO: 5905600 - DNA, 25 bp, Homo sapien
tccaaaacggctattcaggagatgg

SEQ ID NO: 5905601 - DNA, 25 bp, Homo sapien
tgaatgccacatgatcacgtaagcc

SEQ ID NO: 5905602 - DNA, 25 bp, Homo sapien
tagatgcagggactggactttttct

SEQ ID NO: 5905603 - DNA, 25 bp, Homo sapien
aagcccaagcctcccccagaaggga

SEQ ID NO: 5905604 - DNA, 25 bp, Homo sapien
tcgggggatttagattgtgctaatc

SEQ ID NO: 5905605 - DNA, 25 bp, Homo sapien
cagaatgaatccatatcgactgtct

SEQ ID NO: 5905606 - DNA, 25 bp, Homo sapien
actcacagtgatcccaaggccagca

SEQ ID NO: 5905607 - DNA, 25 bp, Homo sapien
atcttcataggtttataaaagtact

SEQ ID NO: 5905608 - DNA, 25 bp, Homo sapien
acagaggaaagggcggcggtttgct

SEQ ID NO: 5905609 - DNA, 25 bp, Homo sapien
gcttaaattcaaattttggaaaata

SEQ ID NO: 5905610 - DNA, 25 bp, Homo sapien
ctctctgtgttctaaacatggcaga

SEQ ID NO: 5905611 - DNA, 25 bp, Homo sapien
ctcttcagagcagaaccggacacta

SEQ ID NO: 5905612 - DNA, 25 bp, Homo sapien
tcagaggccttgagagctcatattg

SEQ ID NO: 5905613 - DNA, 25 bp, Homo sapien
ctgagaaatagagccctaagggact

SEQ ID NO: 5905614 - DNA, 25 bp, Homo sapien
tgactgtcaccggcaacatctacat

SEQ ID NO: 5905615 - DNA, 25 bp, Homo sapien
acagagacactaggatgccaagacc

SEQ ID NO: 5905616 - DNA, 25 bp, Homo sapien
cggcaacatctacatatacaatggg

SEQ ID NO: 5905617 - DNA, 25 bp, Homo sapien
gatatcccagggacctcgcaaagct

SEQ ID NO: 5905618 - DNA, 25 bp, Homo sapien
cctgcccaggactctgactaccgcc

SEQ ID NO: 5905619 - DNA, 25 bp, Homo sapien
ctccccctgagcctccataccccac

SEQ ID NO: 5905620 - DNA, 25 bp, Homo sapien
ggccccctccttggaggaagtggtg

SEQ ID NO: 5905621 - DNA, 25 bp, Homo sapien
actaggatgccaagacctctgacag

SEQ ID NO: 5905622 - DNA, 25 bp, Homo sapien
cacggggccctggagaccctccagc

SEQ ID NO: 5905623 - DNA, 25 bp, Homo sapien
ctggggaacatggccaggtggccca

SEQ ID NO: 5905624 - DNA, 25 bp, Homo sapien
tcgtgacccccgccctgcctctctg

SEQ ID NO: 5905625 - DNA, 25 bp, Homo sapien
cctagtttcagacccaccggctccc

SEQ ID NO: 5905626 - DNA, 25 bp, Homo sapien
tgagagctcatattgcgtggaccaa

SEQ ID NO: 5905627 - DNA, 25 bp, Homo sapien
tgcctgcccaggactctgactaccg

SEQ ID NO: 5905628 - DNA, 25 bp, Homo sapien
ggggccttgggtagcgttagcatgt

SEQ ID NO: 5905629 - DNA, 25 bp, Homo sapien
cccatgtctggagacttgtccccat

SEQ ID NO: 5905630 - DNA, 25 bp, Homo sapien
cttcagagcagaaccggacactagc

SEQ ID NO: 5905631 - DNA, 25 bp, Homo sapien
cagacccaccggctcccagaggctt

SEQ ID NO: 5905632 - DNA, 25 bp, Homo sapien
cctgagggcacctgggaaaggcaag

SEQ ID NO: 5905633 - DNA, 25 bp, Homo sapien
ggtgcgaatggcattcatgtgaccg

SEQ ID NO: 5905634 - DNA, 25 bp, Homo sapien
gtgctacaacagcagagtcccctgg

SEQ ID NO: 5905635 - DNA, 25 bp, Homo sapien
taccaggaggatggcaaagcttggc

SEQ ID NO: 5905636 - DNA, 25 bp, Homo sapien
gagtcccctggtccaggccagagag

SEQ ID NO: 5905637 - DNA, 25 bp, Homo sapien
tgacaagtgtatttatgagttgtaa

SEQ ID NO: 5905638 - DNA, 25 bp, Homo sapien
gggctctgtgactgtcaccggcaac

SEQ ID NO: 5905639 - DNA, 25 bp, Homo sapien
tgtggaggagagtttgggaacagga

SEQ ID NO: 5905640 - DNA, 25 bp, Homo sapien
ggggaaggtgaagtcgcgcggagga

SEQ ID NO: 5905641 - DNA, 25 bp, Homo sapien
agggacttagcctcagacacctctt

SEQ ID NO: 5905642 - DNA, 25 bp, Homo sapien
agggtctggggaggctctgagaaat

SEQ ID NO: 5905643 - DNA, 25 bp, Homo sapien
aaaatgacaagtgtatttatgagtt

SEQ ID NO: 5905644 - DNA, 25 bp, Homo sapien
ccaggccagagagctggaggctgaa

SEQ ID NO: 5905645 - DNA, 25 bp, Homo sapien
ttgggtagcgttagcatgtgtggag

SEQ ID NO: 5905646 - DNA, 25 bp, Homo sapien
gcctgagcaagcctgagacctagtt

SEQ ID NO: 5905647 - DNA, 25 bp, Homo sapien
agtttgggaacaggagaaaaatgac

SEQ ID NO: 5905648 - DNA, 25 bp, Homo sapien
cctggtccaggccagagagctggag

SEQ ID NO: 5905649 - DNA, 25 bp, Homo sapien
gagacttgtccccatcccctgctgg

SEQ ID NO: 5905650 - DNA, 25 bp, Homo sapien
agacacctcttcagagcagaaccgg

SEQ ID NO: 5905651 - DNA, 25 bp, Homo sapien
agagctcatattgcgtggaccaaga

SEQ ID NO: 5905652 - DNA, 25 bp, Homo sapien
acaaggaaggctcgtgacccccgcc

SEQ ID NO: 5905653 - DNA, 25 bp, Homo sapien
cagaggcttcggccattgagcctcg

SEQ ID NO: 5905654 - DNA, 25 bp, Homo sapien
actcacagggtctggggaggctctg

SEQ ID NO: 5905655 - DNA, 25 bp, Homo sapien
acctggcagagccactcctacccat

SEQ ID NO: 5905656 - DNA, 25 bp, Homo sapien
ccattgagcctcggacacaaggaag

SEQ ID NO: 5905657 - DNA, 25 bp, Homo sapien
tcaccggcaacatctacatatacaa

SEQ ID NO: 5905658 - DNA, 25 bp, Homo sapien
cacctgggaaaggcaaggagcagag

SEQ ID NO: 5905659 - DNA, 25 bp, Homo sapien
atggggccttgggtagcgttagcat

SEQ ID NO: 5905660 - DNA, 25 bp, Homo sapien
aggccttgagagctcatattgcgtg

SEQ ID NO: 5905661 - DNA, 25 bp, Homo sapien
tctacatatacaatgggccagtgct

SEQ ID NO: 5905662 - DNA, 25 bp, Homo sapien
ggtctggggaggctctgagaaatag

SEQ ID NO: 5905663 - DNA, 25 bp, Homo sapien
gacactagcaggccacagtgcctgc

SEQ ID NO: 5905664 - DNA, 25 bp, Homo sapien
tcccttgctcctgggggagaggata

SEQ ID NO: 5905665 - DNA, 25 bp, Homo sapien
agagtttgggaacaggagaaaaatg

SEQ ID NO: 5905666 - DNA, 25 bp, Homo sapien
ctttctgaggctgctctactcacca

SEQ ID NO: 5905667 - DNA, 25 bp, Homo sapien
cccaggactctgactaccgcctgag

SEQ ID NO: 5905668 - DNA, 25 bp, Homo sapien
tggaggctgaacctggggaacatgg

SEQ ID NO: 5905669 - DNA, 25 bp, Homo sapien
gaagtggtgctacaacagcagagtc

SEQ ID NO: 5905670 - DNA, 25 bp, Homo sapien
caacagcagagtcccctggtccagg

SEQ ID NO: 5905671 - DNA, 25 bp, Homo sapien
tgactaccgcctgagcaagcctgag

SEQ ID NO: 5905672 - DNA, 25 bp, Homo sapien
ggcagagccactcctacccatgtct

SEQ ID NO: 5905673 - DNA, 25 bp, Homo sapien
ggatgccaagacctctgacagggcc

SEQ ID NO: 5905674 - DNA, 25 bp, Homo sapien
aatagagccctaagggacttagcct

SEQ ID NO: 5905675 - DNA, 25 bp, Homo sapien
tgcctgagggcacctgggaaaggca

SEQ ID NO: 5905676 - DNA, 25 bp, Homo sapien
acagggtctggggaggctctgagaa

SEQ ID NO: 5905677 - DNA, 25 bp, Homo sapien
taggatgccaagacctctgacaggg

SEQ ID NO: 5905678 - DNA, 25 bp, Homo sapien
gccttgagagctcatattgcgtgga

SEQ ID NO: 5905679 - DNA, 25 bp, Homo sapien
tcatgtgaccgggggctctgtgact

SEQ ID NO: 5905680 - DNA, 25 bp, Homo sapien
cccaccggctcccagaggcttcggc

SEQ ID NO: 5905681 - DNA, 25 bp, Homo sapien
aagcctgagacctagtttcagaccc

SEQ ID NO: 5905682 - DNA, 25 bp, Homo sapien
gcattcatgtgaccgggggctctgt

SEQ ID NO: 5905683 - DNA, 25 bp, Homo sapien
gcctctctgtgttctaaacatggca

SEQ ID NO: 5905684 - DNA, 25 bp, Homo sapien
gccctaagggacttagcctcagaca

SEQ ID NO: 5905685 - DNA, 25 bp, Homo sapien
gctttgtggtgctcatccctacctt

SEQ ID NO: 5905686 - DNA, 25 bp, Homo sapien
ggcaaagcttggcatctggccgaga

SEQ ID NO: 5905687 - DNA, 25 bp, Homo sapien
cagggtcactcgcaaggatatccca

SEQ ID NO: 5905688 - DNA, 25 bp, Homo sapien
ccagggacctcgcaaagctttgtgg

SEQ ID NO: 5905689 - DNA, 25 bp, Homo sapien
ttggcatctggccgagacagagaca

SEQ ID NO: 5905690 - DNA, 25 bp, Homo sapien
aacaggagaaaaatgacaagtgtat

SEQ ID NO: 5905691 - DNA, 25 bp, Homo sapien
tggccaggtggcccacggtgcgaat

SEQ ID NO: 5905692 - DNA, 25 bp, Homo sapien
gggtcactcgcaaggatatcccagg

SEQ ID NO: 5905693 - DNA, 25 bp, Homo sapien
cctcggacacaaggaaggctcgtga

SEQ ID NO: 5905694 - DNA, 25 bp, Homo sapien
gagaccctccagctccccctgagcc

SEQ ID NO: 5905695 - DNA, 25 bp, Homo sapien
gagctggtcccagggtcactcgcaa

SEQ ID NO: 5905696 - DNA, 25 bp, Homo sapien
tcccctgctggacccccaacggccc

SEQ ID NO: 5905697 - DNA, 25 bp, Homo sapien
ctgcctctctgtgttctaaacatgg

SEQ ID NO: 5905698 - DNA, 25 bp, Homo sapien
cagaaccggacactagcaggccaca

SEQ ID NO: 5905699 - DNA, 25 bp, Homo sapien
acagtgcctgcccaggactctgact

SEQ ID NO: 5905700 - DNA, 25 bp, Homo sapien
tggtccaggccagagagctggaggc

SEQ ID NO: 5905701 - DNA, 25 bp, Homo sapien
agacactaggatgccaagacctctg

SEQ ID NO: 5905702 - DNA, 25 bp, Homo sapien
accccactcctgaagagggagctcc

SEQ ID NO: 5905703 - DNA, 25 bp, Homo sapien
caaggatatcccagggacctcgcaa

SEQ ID NO: 5905704 - DNA, 25 bp, Homo sapien
ggaacaggagaaaaatgacaagtgt

SEQ ID NO: 5905705 - DNA, 25 bp, Homo sapien
cactcgcaaggatatcccagggacc

SEQ ID NO: 5905706 - DNA, 25 bp, Homo sapien
ggcttcggccattgagcctcggaca

SEQ ID NO: 5905707 - DNA, 25 bp, Homo sapien
tacccatgtctggagacttgtcccc

SEQ ID NO: 5905708 - DNA, 25 bp, Homo sapien
cggggccctggagaccctccagctc

SEQ ID NO: 5905709 - DNA, 25 bp, Homo sapien
ggctctgagaaatagagccctaagg

SEQ ID NO: 5905710 - DNA, 25 bp, Homo sapien
ctctgagaaatagagccctaaggga

SEQ ID NO: 5905711 - DNA, 25 bp, Homo sapien
atggcaaagcttggcatctggccga

SEQ ID NO: 5905712 - DNA, 25 bp, Homo sapien
acctcgcaaagctttgtggtgctca

SEQ ID NO: 5905713 - DNA, 25 bp, Homo sapien
taaacatggcagaggagggagctgg

SEQ ID NO: 5905714 - DNA, 25 bp, Homo sapien
ggcatctggccgagacagagacact

SEQ ID NO: 5905715 - DNA, 25 bp, Homo sapien
tctgtgactgtcaccggcaacatct

SEQ ID NO: 5905716 - DNA, 25 bp, Homo sapien
catggccaggtggcccacggtgcga

SEQ ID NO: 5905717 - DNA, 25 bp, Homo sapien
tactcaccaggactcacagggtctg

SEQ ID NO: 5905718 - DNA, 25 bp, Homo sapien
cttcggccattgagcctcggacaca

SEQ ID NO: 5905719 - DNA, 25 bp, Homo sapien
aaggtgaagtcgcgcggaggagcaa

SEQ ID NO: 5905720 - DNA, 25 bp, Homo sapien
cctaagggacttagcctcagacacc

SEQ ID NO: 5905721 - DNA, 25 bp, Homo sapien
tgggaacaggagaaaaatgacaagt

SEQ ID NO: 5905722 - DNA, 25 bp, Homo sapien
cccactcctgaagagggagctcctg

SEQ ID NO: 5905723 - DNA, 25 bp, Homo sapien
cgccctgcctctctgtgttctaaac

SEQ ID NO: 5905724 - DNA, 25 bp, Homo sapien
gaccgggggctctgtgactgtcacc

SEQ ID NO: 5905725 - DNA, 25 bp, Homo sapien
gccaaggaacctatttgccacccgt

SEQ ID NO: 5905726 - DNA, 25 bp, Homo sapien
actaccgcctgagcaagcctgagac

SEQ ID NO: 5905727 - DNA, 25 bp, Homo sapien
gccacccgtgcctgagggcacctgg

SEQ ID NO: 5905728 - DNA, 25 bp, Homo sapien
agagcagaaccggacactagcaggc

SEQ ID NO: 5905729 - DNA, 25 bp, Homo sapien
aggaaggctcgtgacccccgccctg

SEQ ID NO: 5905730 - DNA, 25 bp, Homo sapien
cgcggaggagcaacccctcccttgc

SEQ ID NO: 5905731 - DNA, 25 bp, Homo sapien
gaaggctcgtgacccccgccctgcc

SEQ ID NO: 5905732 - DNA, 25 bp, Homo sapien
ggatggcaaagcttggcatctggcc

SEQ ID NO: 5905733 - DNA, 25 bp, Homo sapien
tggcagaggagggagctggtcccag

SEQ ID NO: 5905734 - DNA, 25 bp, Homo sapien
gggggctctgtgactgtcaccggca

SEQ ID NO: 5905735 - DNA, 25 bp, Homo sapien
tgcccaggactctgactaccgcctg

SEQ ID NO: 5905736 - DNA, 25 bp, Homo sapien
catctacatatacaatgggccagtg

SEQ ID NO: 5905737 - DNA, 25 bp, Homo sapien
ccctgagcctccataccccactcct

SEQ ID NO: 5905738 - DNA, 25 bp, Homo sapien
gccactcctacccatgtctggagac

SEQ ID NO: 5905739 - DNA, 25 bp, Homo sapien
gtgacccccgccctgcctctctgtg

SEQ ID NO: 5905740 - DNA, 25 bp, Homo sapien
tgggaaaggcaaggagcagagggtc

SEQ ID NO: 5905741 - DNA, 25 bp, Homo sapien
ctcgcaaagctttgtggtgctcatc

SEQ ID NO: 5905742 - DNA, 25 bp, Homo sapien
gccagagagctggaggctgaacctg

SEQ ID NO: 5905743 - DNA, 25 bp, Homo sapien
ccttctttctgaggctgctctactc

SEQ ID NO: 5905744 - DNA, 25 bp, Homo sapien
ccgggggctctgtgactgtcaccgg

SEQ ID NO: 5905745 - DNA, 25 bp, Homo sapien
agcagagtcccctggtccaggccag

SEQ ID NO: 5905746 - DNA, 25 bp, Homo sapien
tgcgaatggcattcatgtgaccggg

SEQ ID NO: 5905747 - DNA, 25 bp, Homo sapien
gacagggccaaggaacctatttgcc

SEQ ID NO: 5905748 - DNA, 25 bp, Homo sapien
gcaagcctgagacctagtttcagac

SEQ ID NO: 5905749 - DNA, 25 bp, Homo sapien
acagcagagtcccctggtccaggcc

SEQ ID NO: 5905750 - DNA, 25 bp, Homo sapien
caccaggactcacagggtctgggga

SEQ ID NO: 5905751 - DNA, 25 bp, Homo sapien
ctgaggctgctctactcaccaggac

SEQ ID NO: 5905752 - DNA, 25 bp, Homo sapien
tggagaccctccagctccccctgag

SEQ ID NO: 5905753 - DNA, 25 bp, Homo sapien
gagagctggaggctgaacctgggga

SEQ ID NO: 5905754 - DNA, 25 bp, Homo sapien
aatgacaagtgtatttatgagttgt

SEQ ID NO: 5905755 - DNA, 25 bp, Homo sapien
cttctgagctgtctacaccctacca

SEQ ID NO: 5905756 - DNA, 25 bp, Homo sapien
cgttagcatgtgtggaggagagttt

SEQ ID NO: 5905757 - DNA, 25 bp, Homo sapien
actctgactaccgcctgagcaagcc

SEQ ID NO: 5905758 - DNA, 25 bp, Homo sapien
cccagggtcactcgcaaggatatcc

SEQ ID NO: 5905759 - DNA, 25 bp, Homo sapien
ctctgacagggccaaggaacctatt

SEQ ID NO: 5905760 - DNA, 25 bp, Homo sapien
tctggagacttgtccccatcccctg

SEQ ID NO: 5905761 - DNA, 25 bp, Homo sapien
cagagtcccctggtccaggccagag

SEQ ID NO: 5905762 - DNA, 25 bp, Homo sapien
tggcattcatgtgaccgggggctct

SEQ ID NO: 5905763 - DNA, 25 bp, Homo sapien
cctggagaccctccagctccccctg

SEQ ID NO: 5905764 - DNA, 25 bp, Homo sapien
ttagcatgtgtggaggagagtttgg

SEQ ID NO: 5905765 - DNA, 25 bp, Homo sapien
caggactcacagggtctggggaggc

SEQ ID NO: 5905766 - DNA, 25 bp, Homo sapien
cccctggtccaggccagagagctgg

SEQ ID NO: 5905767 - DNA, 25 bp, Homo sapien
gcccacggtgcgaatggcattcatg

SEQ ID NO: 5905768 - DNA, 25 bp, Homo sapien
agcaccttctttctgaggctgctct

SEQ ID NO: 5905769 - DNA, 25 bp, Homo sapien
ctctgtgttctaaacatggcagagg

SEQ ID NO: 5905770 - DNA, 25 bp, Homo sapien
ggagcagagggtccagcaccttctt

SEQ ID NO: 5905771 - DNA, 25 bp, Homo sapien
ctccttggaggaagtggtgctacaa

SEQ ID NO: 5905772 - DNA, 25 bp, Homo sapien
ctgtgttctaaacatggcagaggag

SEQ ID NO: 5905773 - DNA, 25 bp, Homo sapien
tgtctggagacttgtccccatcccc

SEQ ID NO: 5905774 - DNA, 25 bp, Homo sapien
tggtcccagggtcactcgcaaggat

SEQ ID NO: 5905775 - DNA, 25 bp, Homo sapien
agtgcctgcccaggactctgactac

SEQ ID NO: 5905776 - DNA, 25 bp, Homo sapien
tattgcgtggaccaagatagaccct

SEQ ID NO: 5905777 - DNA, 25 bp, Homo sapien
ggacttagcctcagacacctcttca

SEQ ID NO: 5905778 - DNA, 25 bp, Homo sapien
ctgacagggccaaggaacctatttg

SEQ ID NO: 5905779 - DNA, 25 bp, Homo sapien
cccgtgcctgagggcacctgggaaa

SEQ ID NO: 5905780 - DNA, 25 bp, Homo sapien
gaccctccagctccccctgagcctc

SEQ ID NO: 5905781 - DNA, 25 bp, Homo sapien
catttccctgacctggcagagccac

SEQ ID NO: 5905782 - DNA, 25 bp, Homo sapien
cgcaaagctttgtggtgctcatccc

SEQ ID NO: 5905783 - DNA, 25 bp, Homo sapien
cccttctgagctgtctacaccctac

SEQ ID NO: 5905784 - DNA, 25 bp, Homo sapien
tctactcaccaggactcacagggtc

SEQ ID NO: 5905785 - DNA, 25 bp, Homo sapien
ccacggtgcgaatggcattcatgtg

SEQ ID NO: 5905786 - DNA, 25 bp, Homo sapien
gtgaccgggggctctgtgactgtca

SEQ ID NO: 5905787 - DNA, 25 bp, Homo sapien
acccctcccttgctcctgggggaga

SEQ ID NO: 5905788 - DNA, 25 bp, Homo sapien
tctgagctgtctacaccctaccagg

SEQ ID NO: 5905789 - DNA, 25 bp, Homo sapien
acaccctaccaggaggatggcaaag

SEQ ID NO: 5905790 - DNA, 25 bp, Homo sapien
acaatgggccagtgctggggggaac

SEQ ID NO: 5905791 - DNA, 25 bp, Homo sapien
accggacactagcaggccacagtgc

SEQ ID NO: 5905792 - DNA, 25 bp, Homo sapien
ctgctggacccccaacggccccctc

SEQ ID NO: 5905793 - DNA, 25 bp, Homo sapien
catgtctggagacttgtccccatcc

SEQ ID NO: 5905794 - DNA, 25 bp, Homo sapien
tatcccagggacctcgcaaagcttt

SEQ ID NO: 5905795 - DNA, 25 bp, Homo sapien
cccatcccctgctggacccccaacg

SEQ ID NO: 5905796 - DNA, 25 bp, Homo sapien
atttgccacccgtgcctgagggcac

SEQ ID NO: 5905797 - DNA, 25 bp, Homo sapien
gccaagacctctgacagggccaagg

SEQ ID NO: 5905798 - DNA, 25 bp, Homo sapien
gcttggcatctggccgagacagaga

SEQ ID NO: 5905799 - DNA, 25 bp, Homo sapien
tcagacacctcttcagagcagaacc

SEQ ID NO: 5905800 - DNA, 25 bp, Homo sapien
actgtcaccggcaacatctacatat

SEQ ID NO: 5905801 - DNA, 25 bp, Homo sapien
agcctcagacacctcttcagagcag

SEQ ID NO: 5905802 - DNA, 25 bp, Homo sapien
ccctaccttcagaggccttgagagc

SEQ ID NO: 5905803 - DNA, 25 bp, Homo sapien
tccccatcccctgctggacccccaa

SEQ ID NO: 5905804 - DNA, 25 bp, Homo sapien
ggaacatggccaggtggcccacggt

SEQ ID NO: 5905805 - DNA, 25 bp, Homo sapien
cacccgtgcctgagggcacctggga

SEQ ID NO: 5905806 - DNA, 25 bp, Homo sapien
agcaggccacagtgcctgcccagga

SEQ ID NO: 5905807 - DNA, 25 bp, Homo sapien
cgcaaggatatcccagggacctcgc

SEQ ID NO: 5905808 - DNA, 25 bp, Homo sapien
agcgttagcatgtgtggaggagagt

SEQ ID NO: 5905809 - DNA, 25 bp, Homo sapien
ctcctacccatgtctggagacttgt

SEQ ID NO: 5905810 - DNA, 25 bp, Homo sapien
tgacctggcagagccactcctaccc

SEQ ID NO: 5905811 - DNA, 25 bp, Homo sapien
accggcaacatctacatatacaatg

SEQ ID NO: 5905812 - DNA, 25 bp, Homo sapien
gagctcctggcccttctgagctgtc

SEQ ID NO: 5905813 - DNA, 25 bp, Homo sapien
ctgagcaagcctgagacctagtttc

SEQ ID NO: 5905814 - DNA, 25 bp, Homo sapien
gagctggaggctgaacctggggaac

SEQ ID NO: 5905815 - DNA, 25 bp, Homo sapien
tgagggcacctgggaaaggcaagga

SEQ ID NO: 5905816 - DNA, 25 bp, Homo sapien
gcctccataccccactcctgaagag

SEQ ID NO: 5905817 - DNA, 25 bp, Homo sapien
cctcagacacctcttcagagcagaa

SEQ ID NO: 5905818 - DNA, 25 bp, Homo sapien
cagagagctggaggctgaacctggg

SEQ ID NO: 5905819 - DNA, 25 bp, Homo sapien
ggtggcccacggtgcgaatggcatt

SEQ ID NO: 5905820 - DNA, 25 bp, Homo sapien
ccagctccccctgagcctccatacc

SEQ ID NO: 5905821 - DNA, 25 bp, Homo sapien
agctcatattgcgtggaccaagata

SEQ ID NO: 5905822 - DNA, 25 bp, Homo sapien
aagctttgtggtgctcatccctacc

SEQ ID NO: 5905823 - DNA, 25 bp, Homo sapien
ggggaacatggccaggtggcccacg

SEQ ID NO: 5905824 - DNA, 25 bp, Homo sapien
ctccataccccactcctgaagaggg

SEQ ID NO: 5905825 - DNA, 25 bp, Homo sapien
gggaggctctgagaaatagagccct

SEQ ID NO: 5905826 - DNA, 25 bp, Homo sapien
ttctttctgaggctgctctactcac

SEQ ID NO: 5905827 - DNA, 25 bp, Homo sapien
ccctccttggaggaagtggtgctac

SEQ ID NO: 5905828 - DNA, 25 bp, Homo sapien
cctgggggaaggtgaagtcgcgcgg

SEQ ID NO: 5905829 - DNA, 25 bp, Homo sapien
aaaggcaaggagcagagggtccagc

SEQ ID NO: 5905830 - DNA, 25 bp, Homo sapien
tgaagtcgcgcggaggagcaacccc

SEQ ID NO: 5905831 - DNA, 25 bp, Homo sapien
tgtcaccggcaacatctacatatac

SEQ ID NO: 5905832 - DNA, 25 bp, Homo sapien
cggacactagcaggccacagtgcct

SEQ ID NO: 5905833 - DNA, 25 bp, Homo sapien
cttgtccccatcccctgctggaccc

SEQ ID NO: 5905834 - DNA, 25 bp, Homo sapien
ggtgaagtcgcgcggaggagcaacc

SEQ ID NO: 5905835 - DNA, 25 bp, Homo sapien
cagagccactcctacccatgtctgg

SEQ ID NO: 5905836 - DNA, 25 bp, Homo sapien
ggagaaaaatgacaagtgtatttat

SEQ ID NO: 5905837 - DNA, 25 bp, Homo sapien
aagtcgcgcggaggagcaacccctc

SEQ ID NO: 5905838 - DNA, 25 bp, Homo sapien
accctaccaggaggatggcaaagct

SEQ ID NO: 5905839 - DNA, 25 bp, Homo sapien
cactcctgaagagggagctcctggc

SEQ ID NO: 5905840 - DNA, 25 bp, Homo sapien
attgagcctcggacacaaggaaggc

SEQ ID NO: 5905841 - DNA, 25 bp, Homo sapien
ccccctccttggaggaagtggtgct

SEQ ID NO: 5905842 - DNA, 25 bp, Homo sapien
agacagagacactaggatgccaaga

SEQ ID NO: 5905843 - DNA, 25 bp, Homo sapien
catattgcgtggaccaagatagacc

SEQ ID NO: 5905844 - DNA, 25 bp, Homo sapien
caagatagaccctgggggaaggtga

SEQ ID NO: 5905845 - DNA, 25 bp, Homo sapien
aagagggagctcctggcccttctga

SEQ ID NO: 5905846 - DNA, 25 bp, Homo sapien
gacccacatttccctgacctggcag

SEQ ID NO: 5905847 - DNA, 25 bp, Homo sapien
acctctgacagggccaaggaaccta

SEQ ID NO: 5905848 - DNA, 25 bp, Homo sapien
tttccctgacctggcagagccactc

SEQ ID NO: 5905849 - DNA, 25 bp, Homo sapien
gagcctccataccccactcctgaag

SEQ ID NO: 5905850 - DNA, 25 bp, Homo sapien
ctcctgaagagggagctcctggccc

SEQ ID NO: 5905851 - DNA, 25 bp, Homo sapien
gaacctatttgccacccgtgcctga

SEQ ID NO: 5905852 - DNA, 25 bp, Homo sapien
tcggacacaaggaaggctcgtgacc

SEQ ID NO: 5905853 - DNA, 25 bp, Homo sapien
gacccaccggctcccagaggcttcg

SEQ ID NO: 5905854 - DNA, 25 bp, Homo sapien
agggacctcgcaaagctttgtggtg

SEQ ID NO: 5905855 - DNA, 25 bp, Homo sapien
cacatttccctgacctggcagagcc

SEQ ID NO: 5905856 - DNA, 25 bp, Homo sapien
gaggagagtttgggaacaggagaaa

SEQ ID NO: 5905857 - DNA, 25 bp, Homo sapien
gtttcagacccaccggctcccagag

SEQ ID NO: 5905858 - DNA, 25 bp, Homo sapien
gacttgtccccatcccctgctggac

SEQ ID NO: 5905859 - DNA, 25 bp, Homo sapien
ggccttgggtagcgttagcatgtgt

SEQ ID NO: 5905860 - DNA, 25 bp, Homo sapien
aacacggggccctggagaccctcca

SEQ ID NO: 5905861 - DNA, 25 bp, Homo sapien
agacctctgacagggccaaggaacc

SEQ ID NO: 5905862 - DNA, 25 bp, Homo sapien
gagggtccagcaccttctttctgag

SEQ ID NO: 5905863 - DNA, 25 bp, Homo sapien
tggaggagagtttgggaacaggaga

SEQ ID NO: 5905864 - DNA, 25 bp, Homo sapien
ggctgctctactcaccaggactcac

SEQ ID NO: 5905865 - DNA, 25 bp, Homo sapien
gctacaacagcagagtcccctggtc

SEQ ID NO: 5905866 - DNA, 25 bp, Homo sapien
gtcccagggtcactcgcaaggatat

SEQ ID NO: 5905867 - DNA, 25 bp, Homo sapien
accttcagaggccttgagagctcat

SEQ ID NO: 5905868 - DNA, 25 bp, Homo sapien
aacatctacatatacaatgggccag

SEQ ID NO: 5905869 - DNA, 25 bp, Homo sapien
atgccaagacctctgacagggccaa

SEQ ID NO: 5905870 - DNA, 25 bp, Homo sapien
tcccagggacctcgcaaagctttgt

SEQ ID NO: 5905871 - DNA, 25 bp, Homo sapien
ggaacacggggccctggagaccctc

SEQ ID NO: 5905872 - DNA, 25 bp, Homo sapien
acactaggatgccaagacctctgac

SEQ ID NO: 5905873 - DNA, 25 bp, Homo sapien
atgtgaccgggggctctgtgactgt

SEQ ID NO: 5905874 - DNA, 25 bp, Homo sapien
gaggatggcaaagcttggcatctgg

SEQ ID NO: 5905875 - DNA, 25 bp, Homo sapien
agctgtctacaccctaccaggagga

SEQ ID NO: 5905876 - DNA, 25 bp, Homo sapien
gagggagctcctggcccttctgagc

SEQ ID NO: 5905877 - DNA, 25 bp, Homo sapien
ccagcaccttctttctgaggctgct

SEQ ID NO: 5905878 - DNA, 25 bp, Homo sapien
tgtgtggaggagagtttgggaacag

SEQ ID NO: 5905879 - DNA, 25 bp, Homo sapien
gtcactcgcaaggatatcccaggga

SEQ ID NO: 5905880 - DNA, 25 bp, Homo sapien
tggccgagacagagacactaggatg

SEQ ID NO: 5905881 - DNA, 25 bp, Homo sapien
cttgagagctcatattgcgtggacc

SEQ ID NO: 5905882 - DNA, 25 bp, Homo sapien
cctaccaggaggatggcaaagcttg

SEQ ID NO: 5905883 - DNA, 25 bp, Homo sapien
catggcagaggagggagctggtccc

SEQ ID NO: 5905884 - DNA, 25 bp, Homo sapien
cctgggaaaggcaaggagcagaggg

SEQ ID NO: 5905885 - DNA, 25 bp, Homo sapien
tcatccctaccttcagaggccttga

SEQ ID NO: 5905886 - DNA, 25 bp, Homo sapien
gggccaaggaacctatttgccaccc

SEQ ID NO: 5905887 - DNA, 25 bp, Homo sapien
ccggctcccagaggcttcggccatt

SEQ ID NO: 5905888 - DNA, 25 bp, Homo sapien
ggaggaagtggtgctacaacagcag

SEQ ID NO: 5905889 - DNA, 25 bp, Homo sapien
caccggctcccagaggcttcggcca

SEQ ID NO: 5905890 - DNA, 25 bp, Homo sapien
cgtgcctgagggcacctgggaaagg

SEQ ID NO: 5905891 - DNA, 25 bp, Homo sapien
ggacctcgcaaagctttgtggtgct

SEQ ID NO: 5905892 - DNA, 25 bp, Homo sapien
ctcaccaggactcacagggtctggg

SEQ ID NO: 5905893 - DNA, 25 bp, Homo sapien
acacaaggaaggctcgtgacccccg

SEQ ID NO: 5905894 - DNA, 25 bp, Homo sapien
ggacacaaggaaggctcgtgacccc

SEQ ID NO: 5905895 - DNA, 25 bp, Homo sapien
cggaggagcaacccctcccttgctc

SEQ ID NO: 5905896 - DNA, 25 bp, Homo sapien
tgaagagggagctcctggcccttct

SEQ ID NO: 5905897 - DNA, 25 bp, Homo sapien
agcaacccctcccttgctcctgggg

SEQ ID NO: 5905898 - DNA, 25 bp, Homo sapien
gagggagctggtcccagggtcactc

SEQ ID NO: 5905899 - DNA, 25 bp, Homo sapien
ggactcacagggtctggggaggctc

SEQ ID NO: 5905900 - DNA, 25 bp, Homo sapien
aggaacctatttgccacccgtgcct

SEQ ID NO: 5905901 - DNA, 25 bp, Homo sapien
gctcgtgacccccgccctgcctctc

SEQ ID NO: 5905902 - DNA, 25 bp, Homo sapien
aggccagagagctggaggctgaacc

SEQ ID NO: 5905903 - DNA, 25 bp, Homo sapien
caggagaaaaatgacaagtgtattt

SEQ ID NO: 5905904 - DNA, 25 bp, Homo sapien
caggactctgactaccgcctgagca

SEQ ID NO: 5905905 - DNA, 25 bp, Homo sapien
caaagctttgtggtgctcatcccta

SEQ ID NO: 5905906 - DNA, 25 bp, Homo sapien
cagagggtccagcaccttctttctg

SEQ ID NO: 5905907 - DNA, 25 bp, Homo sapien
gccaggtggcccacggtgcgaatgg

SEQ ID NO: 5905908 - DNA, 25 bp, Homo sapien
tgtggtgctcatccctaccttcaga

SEQ ID NO: 5905909 - DNA, 25 bp, Homo sapien
caaagcttggcatctggccgagaca

SEQ ID NO: 5905910 - DNA, 25 bp, Homo sapien
tttgtggtgctcatccctaccttca

SEQ ID NO: 5905911 - DNA, 25 bp, Homo sapien
gagaaatagagccctaagggactta

SEQ ID NO: 5905912 - DNA, 25 bp, Homo sapien
ttctgaggctgctctactcaccagg

SEQ ID NO: 5905913 - DNA, 25 bp, Homo sapien
gcagaggagggagctggtcccaggg

SEQ ID NO: 5905914 - DNA, 25 bp, Homo sapien
catatacaatgggccagtgctgggg

SEQ ID NO: 5905915 - DNA, 25 bp, Homo sapien
cccagaggcttcggccattgagcct

SEQ ID NO: 5905916 - DNA, 25 bp, Homo sapien
ccctccagctccccctgagcctcca

SEQ ID NO: 5905917 - DNA, 25 bp, Homo sapien
gcgtggaccaagatagaccctgggg

SEQ ID NO: 5905918 - DNA, 25 bp, Homo sapien
catctggccgagacagagacactag

SEQ ID NO: 5905919 - DNA, 25 bp, Homo sapien
ggactctgactaccgcctgagcaag

SEQ ID NO: 5905920 - DNA, 25 bp, Homo sapien
gaggctgaacctggggaacatggcc

SEQ ID NO: 5905921 - DNA, 25 bp, Homo sapien
acctatttgccacccgtgcctgagg

SEQ ID NO: 5905922 - DNA, 25 bp, Homo sapien
aggcaaggagcagagggtccagcac

SEQ ID NO: 5905923 - DNA, 25 bp, Homo sapien
aggctcgtgacccccgccctgcctc

SEQ ID NO: 5905924 - DNA, 25 bp, Homo sapien
ataccccactcctgaagagggagct

SEQ ID NO: 5905925 - DNA, 25 bp, Homo sapien
tggtgctacaacagcagagtcccct

SEQ ID NO: 5905926 - DNA, 25 bp, Homo sapien
ggctgaacctggggaacatggccag

SEQ ID NO: 5905927 - DNA, 25 bp, Homo sapien
gtagcgttagcatgtgtggaggaga

SEQ ID NO: 5905928 - DNA, 25 bp, Homo sapien
aggaagtggtgctacaacagcagag

SEQ ID NO: 5905929 - DNA, 25 bp, Homo sapien
ggcccttctgagctgtctacaccct

SEQ ID NO: 5905930 - DNA, 25 bp, Homo sapien
agctccccctgagcctccatacccc

SEQ ID NO: 5905931 - DNA, 25 bp, Homo sapien
ttagcctcagacacctcttcagagc

SEQ ID NO: 5905932 - DNA, 25 bp, Homo sapien
ccctgcctctctgtgttctaaacat

SEQ ID NO: 5905933 - DNA, 25 bp, Homo sapien
acttagcctcagacacctcttcaga

SEQ ID NO: 5905934 - DNA, 25 bp, Homo sapien
tagtttcagacccaccggctcccag

SEQ ID NO: 5905935 - DNA, 25 bp, Homo sapien
gccctggagaccctccagctccccc

SEQ ID NO: 5905936 - DNA, 25 bp, Homo sapien
ggccacagtgcctgcccaggactct

SEQ ID NO: 5905937 - DNA, 25 bp, Homo sapien
ccacagtgcctgcccaggactctga

SEQ ID NO: 5905938 - DNA, 25 bp, Homo sapien
taagggacttagcctcagacacctc

SEQ ID NO: 5905939 - DNA, 25 bp, Homo sapien
acacctcttcagagcagaaccggac

SEQ ID NO: 5905940 - DNA, 25 bp, Homo sapien
tctgactaccgcctgagcaagcctg

SEQ ID NO: 5905941 - DNA, 25 bp, Homo sapien
acggtgcgaatggcattcatgtgac

SEQ ID NO: 5905942 - DNA, 25 bp, Homo sapien
tggagacttgtccccatcccctgct

SEQ ID NO: 5905943 - DNA, 25 bp, Homo sapien
tggcccacggtgcgaatggcattca

SEQ ID NO: 5905944 - DNA, 25 bp, Homo sapien
ctgtctacaccctaccaggaggatg

SEQ ID NO: 5905945 - DNA, 25 bp, Homo sapien
ccttgggtagcgttagcatgtgtgg

SEQ ID NO: 5905946 - DNA, 25 bp, Homo sapien
tcagagcagaaccggacactagcag

SEQ ID NO: 5905947 - DNA, 25 bp, Homo sapien
cactagcaggccacagtgcctgccc

SEQ ID NO: 5905948 - DNA, 25 bp, Homo sapien
ggaccaagatagaccctgggggaag

SEQ ID NO: 5905949 - DNA, 25 bp, Homo sapien
tcacagggtctggggaggctctgag

SEQ ID NO: 5905950 - DNA, 25 bp, Homo sapien
tacatatacaatgggccagtgctgg

SEQ ID NO: 5905951 - DNA, 25 bp, Homo sapien
tccctgacctggcagagccactcct

SEQ ID NO: 5905952 - DNA, 25 bp, Homo sapien
agggcacctgggaaaggcaaggagc

SEQ ID NO: 5905953 - DNA, 25 bp, Homo sapien
tgtccccatcccctgctggaccccc

SEQ ID NO: 5905954 - DNA, 25 bp, Homo sapien
caagacctctgacagggccaaggaa

SEQ ID NO: 5905955 - DNA, 25 bp, Homo sapien
acctcttcagagcagaaccggacac

SEQ ID NO: 5905956 - DNA, 25 bp, Homo sapien
gggagctggtcccagggtcactcgc

SEQ ID NO: 5905957 - DNA, 25 bp, Homo sapien
gctggaggctgaacctggggaacat

SEQ ID NO: 5905958 - DNA, 25 bp, Homo sapien
aggagggagctggtcccagggtcac

SEQ ID NO: 5905959 - DNA, 25 bp, Homo sapien
caccttctttctgaggctgctctac

SEQ ID NO: 5905960 - DNA, 25 bp, Homo sapien
agaggagggagctggtcccagggtc

SEQ ID NO: 5905961 - DNA, 25 bp, Homo sapien
tgagctgtctacaccctaccaggag

SEQ ID NO: 5905962 - DNA, 25 bp, Homo sapien
agcagaaccggacactagcaggcca

SEQ ID NO: 5905963 - DNA, 25 bp, Homo sapien
ccaggaggatggcaaagcttggcat

SEQ ID NO: 5905964 - DNA, 25 bp, Homo sapien
gggaggatggggccttgggtagcgt

SEQ ID NO: 5905965 - DNA, 25 bp, Homo sapien
ggaaggtgaagtcgcgcggaggagc

SEQ ID NO: 5905966 - DNA, 25 bp, Homo sapien
caaggaacctatttgccacccgtgc

SEQ ID NO: 5905967 - DNA, 25 bp, Homo sapien
gtgctcatccctaccttcagaggcc

SEQ ID NO: 5905968 - DNA, 25 bp, Homo sapien
ggcacctgggaaaggcaaggagcag

SEQ ID NO: 5905969 - DNA, 25 bp, Homo sapien
gtctacaccctaccaggaggatggc

SEQ ID NO: 5905970 - DNA, 25 bp, Homo sapien
ctgctctactcaccaggactcacag

SEQ ID NO: 5905971 - DNA, 25 bp, Homo sapien
ttgccacccgtgcctgagggcacct

SEQ ID NO: 5905972 - DNA, 25 bp, Homo sapien
ggagcaacccctcccttgctcctgg

SEQ ID NO: 5905973 - DNA, 25 bp, Homo sapien
tggtgctcatccctaccttcagagg

SEQ ID NO: 5905974 - DNA, 25 bp, Homo sapien
ctatttgccacccgtgcctgagggc

SEQ ID NO: 5905975 - DNA, 25 bp, Homo sapien
gttctaaacatggcagaggagggag

SEQ ID NO: 5905976 - DNA, 25 bp, Homo sapien
gcaacatctacatatacaatgggcc

SEQ ID NO: 5905977 - DNA, 25 bp, Homo sapien
ggaaaggcaaggagcagagggtcca

SEQ ID NO: 5905978 - DNA, 25 bp, Homo sapien
gagccctaagggacttagcctcaga

SEQ ID NO: 5905979 - DNA, 25 bp, Homo sapien
atagaccctgggggaaggtgaagtc

SEQ ID NO: 5905980 - DNA, 25 bp, Homo sapien
ggatggggccttgggtagcgttagc

SEQ ID NO: 5905981 - DNA, 25 bp, Homo sapien
tagagccctaagggacttagcctca

SEQ ID NO: 5905982 - DNA, 25 bp, Homo sapien
ccttggaggaagtggtgctacaaca

SEQ ID NO: 5905983 - DNA, 25 bp, Homo sapien
agagacactaggatgccaagacctc

SEQ ID NO: 5905984 - DNA, 25 bp, Homo sapien
gctctactcaccaggactcacaggg

SEQ ID NO: 5905985 - DNA, 25 bp, Homo sapien
cccgccctgcctctctgtgttctaa

SEQ ID NO: 5905986 - DNA, 25 bp, Homo sapien
tctaaacatggcagaggagggagct

SEQ ID NO: 5905987 - DNA, 25 bp, Homo sapien
ttgcgtggaccaagatagaccctgg

SEQ ID NO: 5905988 - DNA, 25 bp, Homo sapien
agaggccttgagagctcatattgcg

SEQ ID NO: 5905989 - DNA, 25 bp, Homo sapien
atccctaccttcagaggccttgaga

SEQ ID NO: 5905990 - DNA, 25 bp, Homo sapien
gctggtcccagggtcactcgcaagg

SEQ ID NO: 5905991 - DNA, 25 bp, Homo sapien
aaggagcagagggtccagcaccttc

SEQ ID NO: 5905992 - DNA, 25 bp, Homo sapien
gcctgagacctagtttcagacccac

SEQ ID NO: 5905993 - DNA, 25 bp, Homo sapien
gtgttctaaacatggcagaggaggg

SEQ ID NO: 5905994 - DNA, 25 bp, Homo sapien
tcctggcccttctgagctgtctaca

SEQ ID NO: 5905995 - DNA, 25 bp, Homo sapien
gggtccagcaccttctttctgaggc

SEQ ID NO: 5905996 - DNA, 25 bp, Homo sapien
tttgggaacaggagaaaaatgacaa

SEQ ID NO: 5905997 - DNA, 25 bp, Homo sapien
gaaccggacactagcaggccacagt

SEQ ID NO: 5905998 - DNA, 25 bp, Homo sapien
ttcagacccaccggctcccagaggc

SEQ ID NO: 5905999 - DNA, 25 bp, Homo sapien
tacaacagcagagtcccctggtcca

SEQ ID NO: 5906000 - DNA, 25 bp, Homo sapien
catcccctgctggacccccaacggc

SEQ ID NO: 5906001 - DNA, 25 bp, Homo sapien
gaaaaatgacaagtgtatttatgag

SEQ ID NO: 5906002 - DNA, 25 bp, Homo sapien
gctctgtgactgtcaccggcaacat

SEQ ID NO: 5906003 - DNA, 25 bp, Homo sapien
caggtggcccacggtgcgaatggca

SEQ ID NO: 5906004 - DNA, 25 bp, Homo sapien
ctgagcctccataccccactcctga

SEQ ID NO: 5906005 - DNA, 25 bp, Homo sapien
agtggtgctacaacagcagagtccc

SEQ ID NO: 5906006 - DNA, 25 bp, Homo sapien
ctcccagaggcttcggccattgagc

SEQ ID NO: 5906007 - DNA, 25 bp, Homo sapien
gaaatagagccctaagggacttagc

SEQ ID NO: 5906008 - DNA, 25 bp, Homo sapien
gacccccgccctgcctctctgtgtt

SEQ ID NO: 5906009 - DNA, 25 bp, Homo sapien
gaggcttcggccattgagcctcgga

SEQ ID NO: 5906010 - DNA, 25 bp, Homo sapien
cctgaagagggagctcctggccctt

SEQ ID NO: 5906011 - DNA, 25 bp, Homo sapien
ctagcaggccacagtgcctgcccag

SEQ ID NO: 5906012 - DNA, 25 bp, Homo sapien
ctgagacctagtttcagacccaccg

SEQ ID NO: 5906013 - DNA, 25 bp, Homo sapien
tcggccattgagcctcggacacaag

SEQ ID NO: 5906014 - DNA, 25 bp, Homo sapien
cactcctacccatgtctggagactt

SEQ ID NO: 5906015 - DNA, 25 bp, Homo sapien
cagggccaaggaacctatttgccac

SEQ ID NO: 5906016 - DNA, 25 bp, Homo sapien
gccgagacagagacactaggatgcc

SEQ ID NO: 5906017 - DNA, 25 bp, Homo sapien
gggagctcctggcccttctgagctg

SEQ ID NO: 5906018 - DNA, 25 bp, Homo sapien
gggccctggagaccctccagctccc

SEQ ID NO: 5906019 - DNA, 25 bp, Homo sapien
cgagacagagacactaggatgccaa

SEQ ID NO: 5906020 - DNA, 25 bp, Homo sapien
cgaatggcattcatgtgaccggggg

SEQ ID NO: 5906021 - DNA, 25 bp, Homo sapien
gagccactcctacccatgtctggag

SEQ ID NO: 5906022 - DNA, 25 bp, Homo sapien
cccacatttccctgacctggcagag

SEQ ID NO: 5906023 - DNA, 25 bp, Homo sapien
gagacctagtttcagacccaccggc

SEQ ID NO: 5906024 - DNA, 25 bp, Homo sapien
ggagagtttgggaacaggagaaaaa

SEQ ID NO: 5906025 - DNA, 25 bp, Homo sapien
gtccaggccagagagctggaggctg

SEQ ID NO: 5906026 - DNA, 25 bp, Homo sapien
gtccagcaccttctttctgaggctg

SEQ ID NO: 5906027 - DNA, 25 bp, Homo sapien
gggtagcgttagcatgtgtggagga

SEQ ID NO: 5906028 - DNA, 25 bp, Homo sapien
gtcgcgcggaggagcaacccctccc

SEQ ID NO: 5906029 - DNA, 25 bp, Homo sapien
ctggcagagccactcctacccatgt

SEQ ID NO: 5906030 - DNA, 25 bp, Homo sapien
cttcagaggccttgagagctcatat

SEQ ID NO: 5906031 - DNA, 25 bp, Homo sapien
ccccctgagcctccataccccactc

SEQ ID NO: 5906032 - DNA, 25 bp, Homo sapien
gtggaccaagatagaccctggggga

SEQ ID NO: 5906033 - DNA, 25 bp, Homo sapien
tgagcctcggacacaaggaaggctc

SEQ ID NO: 5906034 - DNA, 25 bp, Homo sapien
aggaggatggcaaagcttggcatct

SEQ ID NO: 5906035 - DNA, 25 bp, Homo sapien
aacatggcagaggagggagctggtc

SEQ ID NO: 5906036 - DNA, 25 bp, Homo sapien
agcctcggacacaaggaaggctcgt

SEQ ID NO: 5906037 - DNA, 25 bp, Homo sapien
agcatgtgtggaggagagtttggga

SEQ ID NO: 5906038 - DNA, 25 bp, Homo sapien
agcagagggtccagcaccttctttc

SEQ ID NO: 5906039 - DNA, 25 bp, Homo sapien
ccctcccttgctcctgggggagagg

SEQ ID NO: 5906040 - DNA, 25 bp, Homo sapien
gaggctgctctactcaccaggactc

SEQ ID NO: 5906041 - DNA, 25 bp, Homo sapien
gaggagcaacccctcccttgctcct

SEQ ID NO: 5906042 - DNA, 25 bp, Homo sapien
taccgcctgagcaagcctgagacct

SEQ ID NO: 5906043 - DNA, 25 bp, Homo sapien
tgggggaaggtgaagtcgcgcggag

SEQ ID NO: 5906044 - DNA, 25 bp, Homo sapien
cctgacctggcagagccactcctac

SEQ ID NO: 5906045 - DNA, 25 bp, Homo sapien
ccataccccactcctgaagagggag

SEQ ID NO: 5906046 - DNA, 25 bp, Homo sapien
aggatatcccagggacctcgcaaag

SEQ ID NO: 5906047 - DNA, 25 bp, Homo sapien
gctcctggcccttctgagctgtcta

SEQ ID NO: 5906048 - DNA, 25 bp, Homo sapien
aacatggccaggtggcccacggtgc

SEQ ID NO: 5906049 - DNA, 25 bp, Homo sapien
ctccagctccccctgagcctccata

SEQ ID NO: 5906050 - DNA, 25 bp, Homo sapien
tctggccgagacagagacactagga

SEQ ID NO: 5906051 - DNA, 25 bp, Homo sapien
gagcaagcctgagacctagtttcag

SEQ ID NO: 5906052 - DNA, 25 bp, Homo sapien
gacctagtttcagacccaccggctc

SEQ ID NO: 5906053 - DNA, 25 bp, Homo sapien
gaggctctgagaaatagagccctaa

SEQ ID NO: 5906054 - DNA, 25 bp, Homo sapien
gctcatccctaccttcagaggcctt

SEQ ID NO: 5906055 - DNA, 25 bp, Homo sapien
aatggcattcatgtgaccgggggct

SEQ ID NO: 5906056 - DNA, 25 bp, Homo sapien
ctaccttcagaggccttgagagctc

SEQ ID NO: 5906057 - DNA, 25 bp, Homo sapien
caggccacagtgcctgcccaggact

SEQ ID NO: 5906058 - DNA, 25 bp, Homo sapien
ccgcctgagcaagcctgagacctag

SEQ ID NO: 5906059 - DNA, 25 bp, Homo sapien
aagcttggcatctggccgagacaga

SEQ ID NO: 5906060 - DNA, 25 bp, Homo sapien
gaggatggggccttgggtagcgtta

SEQ ID NO: 5906061 - DNA, 25 bp, Homo sapien
ctggcccttctgagctgtctacacc

SEQ ID NO: 5906062 - DNA, 25 bp, Homo sapien
gcaaggagcagagggtccagcacct

SEQ ID NO: 5906063 - DNA, 25 bp, Homo sapien
attcatgtgaccgggggctctgtga

SEQ ID NO: 5906064 - DNA, 25 bp, Homo sapien
ctcgcaaggatatcccagggacctc

SEQ ID NO: 5906065 - DNA, 25 bp, Homo sapien
cccccgccctgcctctctgtgttct

SEQ ID NO: 5906066 - DNA, 25 bp, Homo sapien
ctcatattgcgtggaccaagataga

SEQ ID NO: 5906067 - DNA, 25 bp, Homo sapien
ttggaggaagtggtgctacaacagc

SEQ ID NO: 5906068 - DNA, 25 bp, Homo sapien
tgtgactgtcaccggcaacatctac

SEQ ID NO: 5906069 - DNA, 25 bp, Homo sapien
gtcccctggtccaggccagagagct

SEQ ID NO: 5906070 - DNA, 25 bp, Homo sapien
ggccattgagcctcggacacaagga

SEQ ID NO: 5906071 - DNA, 25 bp, Homo sapien
catgtgtggaggagagtttgggaac

SEQ ID NO: 5906072 - DNA, 25 bp, Homo sapien
accctgggggaaggtgaagtcgcgc

SEQ ID NO: 5906073 - DNA, 25 bp, Homo sapien
ggctcccagaggcttcggccattga

SEQ ID NO: 5906074 - DNA, 25 bp, Homo sapien
cgcgcggaggagcaacccctccctt

SEQ ID NO: 5906075 - DNA, 25 bp, Homo sapien
cctacccatgtctggagacttgtcc

SEQ ID NO: 5906076 - DNA, 25 bp, Homo sapien
caacccctcccttgctcctggggga

SEQ ID NO: 5906077 - DNA, 25 bp, Homo sapien
ctacaccctaccaggaggatggcaa

SEQ ID NO: 5906078 - DNA, 25 bp, Homo sapien
ggtctatcttggtccacgcaatatg

SEQ ID NO: 5906079 - DNA, 25 bp, Homo sapien
ggctctgccaggtcagggaaatgtg

SEQ ID NO: 5906080 - DNA, 25 bp, Homo sapien
cttccttgtgtccgaggctcaatgg

SEQ ID NO: 5906081 - DNA, 25 bp, Homo sapien
gtcacatgaatgccattcgcaccgt

SEQ ID NO: 5906082 - DNA, 25 bp, Homo sapien
atatccttgcgagtgaccctgggac

SEQ ID NO: 5906083 - DNA, 25 bp, Homo sapien
ccaggggactctgctgttgtagcac

SEQ ID NO: 5906084 - DNA, 25 bp, Homo sapien
gagggtctccagggccccgtgttcc

SEQ ID NO: 5906085 - DNA, 25 bp, Homo sapien
caagctttgccatcctcctggtagg

SEQ ID NO: 5906086 - DNA, 25 bp, Homo sapien
acaagtctccagacatgggtaggag

SEQ ID NO: 5906087 - DNA, 25 bp, Homo sapien
cacatgaatgccattcgcaccgtgg

SEQ ID NO: 5906088 - DNA, 25 bp, Homo sapien
gcgaggtccctgggatatccttgcg

SEQ ID NO: 5906089 - DNA, 25 bp, Homo sapien
gccatcctcctggtagggtgtagac

SEQ ID NO: 5906090 - DNA, 25 bp, Homo sapien
gccttccttgtgtccgaggctcaat

SEQ ID NO: 5906091 - DNA, 25 bp, Homo sapien
cgcaatatgagctctcaaggcctct

SEQ ID NO: 5906092 - DNA, 25 bp, Homo sapien
gagtggggtatggaggctcaggggg

SEQ ID NO: 5906093 - DNA, 25 bp, Homo sapien
gagtcctggtgagtagagcagcctc

SEQ ID NO: 5906094 - DNA, 25 bp, Homo sapien
ccagcaggggatggggacaagtctc

SEQ ID NO: 5906095 - DNA, 25 bp, Homo sapien
actgtggcctgctagtgtccggttc

SEQ ID NO: 5906096 - DNA, 25 bp, Homo sapien
aggcacgggtggcaaataggttcct

SEQ ID NO: 5906097 - DNA, 25 bp, Homo sapien
cctcaggcacgggtggcaaataggt

SEQ ID NO: 5906098 - DNA, 25 bp, Homo sapien
tgtctgaggctaagtcccttagggc

SEQ ID NO: 5906099 - DNA, 25 bp, Homo sapien
ctctgggagccggtgggtctgaaac

SEQ ID NO: 5906100 - DNA, 25 bp, Homo sapien
agtcccttagggctctatttctcag

SEQ ID NO: 5906101 - DNA, 25 bp, Homo sapien
gaaactaggtctcaggcttgctcag

SEQ ID NO: 5906102 - DNA, 25 bp, Homo sapien
tccttgtgtccgaggctcaatggcc

SEQ ID NO: 5906103 - DNA, 25 bp, Homo sapien
gtagcaccacttcctccaaggaggg

SEQ ID NO: 5906104 - DNA, 25 bp, Homo sapien
agcaccacaaagctttgcgaggtcc

SEQ ID NO: 5906105 - DNA, 25 bp, Homo sapien
gcctccccagaccctgtgagtcctg

SEQ ID NO: 5906106 - DNA, 25 bp, Homo sapien
ggcctggaccaggggactctgctgt

SEQ ID NO: 5906107 - DNA, 25 bp, Homo sapien
aggggactctgctgttgtagcacca

SEQ ID NO: 5906108 - DNA, 25 bp, Homo sapien
tcctccacacatgctaacgctaccc

SEQ ID NO: 5906109 - DNA, 25 bp, Homo sapien
acatgggtaggagtggctctgccag

SEQ ID NO: 5906110 - DNA, 25 bp, Homo sapien
tccacgcaatatgagctctcaaggc

SEQ ID NO: 5906111 - DNA, 25 bp, Homo sapien
aatggccgaagcctctgggagccgg

SEQ ID NO: 5906112 - DNA, 25 bp, Homo sapien
ggccctgtcagaggtcttggcatcc

SEQ ID NO: 5906113 - DNA, 25 bp, Homo sapien
ctggcccattgtatatgtagatgtt

SEQ ID NO: 5906114 - DNA, 25 bp, Homo sapien
tgaaggtagggatgagcaccacaaa

SEQ ID NO: 5906115 - DNA, 25 bp, Homo sapien
tcacgagccttccttgtgtccgagg

SEQ ID NO: 5906116 - DNA, 25 bp, Homo sapien
gaggggttgctcctccgcgcgactt

SEQ ID NO: 5906117 - DNA, 25 bp, Homo sapien
atggggacaagtctccagacatggg

SEQ ID NO: 5906118 - DNA, 25 bp, Homo sapien
gccaagctttgccatcctcctggta

SEQ ID NO: 5906119 - DNA, 25 bp, Homo sapien
tatcctctcccccaggagcaaggga

SEQ ID NO: 5906120 - DNA, 25 bp, Homo sapien
aggtgccctcaggcacgggtggcaa

SEQ ID NO: 5906121 - DNA, 25 bp, Homo sapien
ccagacatgggtaggagtggctctg

SEQ ID NO: 5906122 - DNA, 25 bp, Homo sapien
gatgagcaccacaaagctttgcgag

SEQ ID NO: 5906123 - DNA, 25 bp, Homo sapien
ccttagggctctatttctcagagcc

SEQ ID NO: 5906124 - DNA, 25 bp, Homo sapien
gtaggagtggctctgccaggtcagg

SEQ ID NO: 5906125 - DNA, 25 bp, Homo sapien
cagaaagaaggtgctggaccctctg

SEQ ID NO: 5906126 - DNA, 25 bp, Homo sapien
acgggtggcaaataggttccttggc

SEQ ID NO: 5906127 - DNA, 25 bp, Homo sapien
gcaagggaggggttgctcctccgcg

SEQ ID NO: 5906128 - DNA, 25 bp, Homo sapien
ccctctgctccttgcctttcccagg

SEQ ID NO: 5906129 - DNA, 25 bp, Homo sapien
gggcaggcactgtggcctgctagtg

SEQ ID NO: 5906130 - DNA, 25 bp, Homo sapien
tagacagctcagaagggccaggagc

SEQ ID NO: 5906131 - DNA, 25 bp, Homo sapien
gagctctcaaggcctctgaaggtag

SEQ ID NO: 5906132 - DNA, 25 bp, Homo sapien
ttctgctctgaagaggtgtctgagg

SEQ ID NO: 5906133 - DNA, 25 bp, Homo sapien
tccctgggatatccttgcgagtgac

SEQ ID NO: 5906134 - DNA, 25 bp, Homo sapien
tctgccatgtttagaacacagagag

SEQ ID NO: 5906135 - DNA, 25 bp, Homo sapien
ctctgctgttgtagcaccacttcct

SEQ ID NO: 5906136 - DNA, 25 bp, Homo sapien
gggactctgctgttgtagcaccact

SEQ ID NO: 5906137 - DNA, 25 bp, Homo sapien
gtgagtcctggtgagtagagcagcc

SEQ ID NO: 5906138 - DNA, 25 bp, Homo sapien
cctctcccccaggagcaagggaggg

SEQ ID NO: 5906139 - DNA, 25 bp, Homo sapien
atgctaacgctacccaaggccccat

SEQ ID NO: 5906140 - DNA, 25 bp, Homo sapien
agggctctatttctcagagcctccc

SEQ ID NO: 5906141 - DNA, 25 bp, Homo sapien
tcttggtccacgcaatatgagctct

SEQ ID NO: 5906142 - DNA, 25 bp, Homo sapien
tgagcaccacaaagctttgcgaggt

SEQ ID NO: 5906143 - DNA, 25 bp, Homo sapien
gggaccagctccctcctctgccatg

SEQ ID NO: 5906144 - DNA, 25 bp, Homo sapien
atgtttagaacacagagaggcaggg

SEQ ID NO: 5906145 - DNA, 25 bp, Homo sapien
gaccctgggaccagctccctcctct

SEQ ID NO: 5906146 - DNA, 25 bp, Homo sapien
ctgtcagaggtcttggcatcctagt

SEQ ID NO: 5906147 - DNA, 25 bp, Homo sapien
atgttccccaggttcagcctccagc

SEQ ID NO: 5906148 - DNA, 25 bp, Homo sapien
cctgggatatccttgcgagtgaccc

SEQ ID NO: 5906149 - DNA, 25 bp, Homo sapien
cggtcacatgaatgccattcgcacc

SEQ ID NO: 5906150 - DNA, 25 bp, Homo sapien
acacatgctaacgctacccaaggcc

SEQ ID NO: 5906151 - DNA, 25 bp, Homo sapien
ccattcgcaccgtgggccacctggc

SEQ ID NO: 5906152 - DNA, 25 bp, Homo sapien
gctcctccgcgcgacttcaccttcc

SEQ ID NO: 5906153 - DNA, 25 bp, Homo sapien
ttgccatcctcctggtagggtgtag

SEQ ID NO: 5906154 - DNA, 25 bp, Homo sapien
agaacacagagaggcagggcggggg

SEQ ID NO: 5906155 - DNA, 25 bp, Homo sapien
tgtgtccgaggctcaatggccgaag

SEQ ID NO: 5906156 - DNA, 25 bp, Homo sapien
gggtggcaaataggttccttggccc

SEQ ID NO: 5906157 - DNA, 25 bp, Homo sapien
cgttgggggtccagcaggggatggg

SEQ ID NO: 5906158 - DNA, 25 bp, Homo sapien
tgctcaggcggtagtcagagtcctg

SEQ ID NO: 5906159 - DNA, 25 bp, Homo sapien
gtgccctcaggcacgggtggcaaat

SEQ ID NO: 5906160 - DNA, 25 bp, Homo sapien
aggcactgtggcctgctagtgtccg

SEQ ID NO: 5906161 - DNA, 25 bp, Homo sapien
ttgtcatttttctcctgttcccaaa

SEQ ID NO: 5906162 - DNA, 25 bp, Homo sapien
caggggatggggacaagtctccaga

SEQ ID NO: 5906163 - DNA, 25 bp, Homo sapien
tcagaagggccaggagctccctctt

SEQ ID NO: 5906164 - DNA, 25 bp, Homo sapien
ggggtatggaggctcagggggagct

SEQ ID NO: 5906165 - DNA, 25 bp, Homo sapien
atatgagctctcaaggcctctgaag

SEQ ID NO: 5906166 - DNA, 25 bp, Homo sapien
acaactcataaatacacttgtcatt

SEQ ID NO: 5906167 - DNA, 25 bp, Homo sapien
tgttgtagcaccacttcctccaagg

SEQ ID NO: 5906168 - DNA, 25 bp, Homo sapien
gtatatgtagatgttgccggtgaca

SEQ ID NO: 5906169 - DNA, 25 bp, Homo sapien
gggtaggagtggctctgccaggtca

SEQ ID NO: 5906170 - DNA, 25 bp, Homo sapien
cttgcctttcccaggtgccctcagg

SEQ ID NO: 5906171 - DNA, 25 bp, Homo sapien
gggatgagcaccacaaagctttgcg

SEQ ID NO: 5906172 - DNA, 25 bp, Homo sapien
gaggcagggcgggggtcacgagcct

SEQ ID NO: 5906173 - DNA, 25 bp, Homo sapien
ggagctccctcttcaggagtggggt

SEQ ID NO: 5906174 - DNA, 25 bp, Homo sapien
ccggtgacagtcacagagcccccgg

SEQ ID NO: 5906175 - DNA, 25 bp, Homo sapien
ttgtagcaccacttcctccaaggag

SEQ ID NO: 5906176 - DNA, 25 bp, Homo sapien
aactcataaatacacttgtcatttt

SEQ ID NO: 5906177 - DNA, 25 bp, Homo sapien
tgggatatccttgcgagtgaccctg

SEQ ID NO: 5906178 - DNA, 25 bp, Homo sapien
aggctaagtcccttagggctctatt

SEQ ID NO: 5906179 - DNA, 25 bp, Homo sapien
ctgctctgaagaggtgtctgaggct

SEQ ID NO: 5906180 - DNA, 25 bp, Homo sapien
ttgctcctccgcgcgacttcacctt

SEQ ID NO: 5906181 - DNA, 25 bp, Homo sapien
tgtggcctgctagtgtccggttctg

SEQ ID NO: 5906182 - DNA, 25 bp, Homo sapien
tcctcctggtagggtgtagacagct

SEQ ID NO: 5906183 - DNA, 25 bp, Homo sapien
tctgaggctaagtcccttagggctc

SEQ ID NO: 5906184 - DNA, 25 bp, Homo sapien
gtcatttttctcctgttcccaaact

SEQ ID NO: 5906185 - DNA, 25 bp, Homo sapien
catgaatgccattcgcaccgtgggc

SEQ ID NO: 5906186 - DNA, 25 bp, Homo sapien
taagtcccttagggctctatttctc

SEQ ID NO: 5906187 - DNA, 25 bp, Homo sapien
taacgctacccaaggccccatcctc

SEQ ID NO: 5906188 - DNA, 25 bp, Homo sapien
ttcagcctccagctctctggcctgg

SEQ ID NO: 5906189 - DNA, 25 bp, Homo sapien
tctgaaggtagggatgagcaccaca

SEQ ID NO: 5906190 - DNA, 25 bp, Homo sapien
aggctcaatggccgaagcctctggg

SEQ ID NO: 5906191 - DNA, 25 bp, Homo sapien
ccttgcgagtgaccctgggaccagc

SEQ ID NO: 5906192 - DNA, 25 bp, Homo sapien
gtcagaggtcttggcatcctagtgt

SEQ ID NO: 5906193 - DNA, 25 bp, Homo sapien
gtgtccggttctgctctgaagaggt

SEQ ID NO: 5906194 - DNA, 25 bp, Homo sapien
gttccccaggttcagcctccagctc

SEQ ID NO: 5906195 - DNA, 25 bp, Homo sapien
gggggtccagcaggggatggggaca

SEQ ID NO: 5906196 - DNA, 25 bp, Homo sapien
cttgctcaggcggtagtcagagtcc

SEQ ID NO: 5906197 - DNA, 25 bp, Homo sapien
tgacagtcacagagcccccggtcac

SEQ ID NO: 5906198 - DNA, 25 bp, Homo sapien
agatgccaagctttgccatcctcct

SEQ ID NO: 5906199 - DNA, 25 bp, Homo sapien
tccgaggctcaatggccgaagcctc

SEQ ID NO: 5906200 - DNA, 25 bp, Homo sapien
cacagagaggcagggcgggggtcac

SEQ ID NO: 5906201 - DNA, 25 bp, Homo sapien
ggtccacgcaatatgagctctcaag

SEQ ID NO: 5906202 - DNA, 25 bp, Homo sapien
tctcctgttcccaaactctcctcca

SEQ ID NO: 5906203 - DNA, 25 bp, Homo sapien
atatgtagatgttgccggtgacagt

SEQ ID NO: 5906204 - DNA, 25 bp, Homo sapien
cccccggtcacatgaatgccattcg

SEQ ID NO: 5906205 - DNA, 25 bp, Homo sapien
gtgctggaccctctgctccttgcct

SEQ ID NO: 5906206 - DNA, 25 bp, Homo sapien
ggcgggggtcacgagccttccttgt

SEQ ID NO: 5906207 - DNA, 25 bp, Homo sapien
gcgagtgaccctgggaccagctccc

SEQ ID NO: 5906208 - DNA, 25 bp, Homo sapien
caccacaaagctttgcgaggtccct

SEQ ID NO: 5906209 - DNA, 25 bp, Homo sapien
gctggagggtctccagggccccgtg

SEQ ID NO: 5906210 - DNA, 25 bp, Homo sapien
tgccatgtttagaacacagagaggc

SEQ ID NO: 5906211 - DNA, 25 bp, Homo sapien
accgtgggccacctggccatgttcc

SEQ ID NO: 5906212 - DNA, 25 bp, Homo sapien
tggtagggtgtagacagctcagaag

SEQ ID NO: 5906213 - DNA, 25 bp, Homo sapien
gggaggggttgctcctccgcgcgac

SEQ ID NO: 5906214 - DNA, 25 bp, Homo sapien
ctgaaactaggtctcaggcttgctc

SEQ ID NO: 5906215 - DNA, 25 bp, Homo sapien
caaataggttccttggccctgtcag

SEQ ID NO: 5906216 - DNA, 25 bp, Homo sapien
atgttgccggtgacagtcacagagc

SEQ ID NO: 5906217 - DNA, 25 bp, Homo sapien
gtccagcaggggatggggacaagtc

SEQ ID NO: 5906218 - DNA, 25 bp, Homo sapien
ggccagatgccaagctttgccatcc

SEQ ID NO: 5906219 - DNA, 25 bp, Homo sapien
ctctctggcctggaccaggggactc

SEQ ID NO: 5906220 - DNA, 25 bp, Homo sapien
gagcctccccagaccctgtgagtcc

SEQ ID NO: 5906221 - DNA, 25 bp, Homo sapien
acacttgtcatttttctcctgttcc

SEQ ID NO: 5906222 - DNA, 25 bp, Homo sapien
tgtccgaggctcaatggccgaagcc

SEQ ID NO: 5906223 - DNA, 25 bp, Homo sapien
cccagaccctgtgagtcctggtgag

SEQ ID NO: 5906224 - DNA, 25 bp, Homo sapien
ggtcttggcatcctagtgtctctgt

SEQ ID NO: 5906225 - DNA, 25 bp, Homo sapien
gtctcaggcttgctcaggcggtagt

SEQ ID NO: 5906226 - DNA, 25 bp, Homo sapien
ggtcacgagccttccttgtgtccga

SEQ ID NO: 5906227 - DNA, 25 bp, Homo sapien
tcaaggcctctgaaggtagggatga

SEQ ID NO: 5906228 - DNA, 25 bp, Homo sapien
gttccccccagcactggcccattgt

SEQ ID NO: 5906229 - DNA, 25 bp, Homo sapien
cccaggttcagcctccagctctctg

SEQ ID NO: 5906230 - DNA, 25 bp, Homo sapien
cactggcccattgtatatgtagatg

SEQ ID NO: 5906231 - DNA, 25 bp, Homo sapien
ccaaactctcctccacacatgctaa

SEQ ID NO: 5906232 - DNA, 25 bp, Homo sapien
gctctcaaggcctctgaaggtaggg

SEQ ID NO: 5906233 - DNA, 25 bp, Homo sapien
ctccctcttcaggagtggggtatgg

SEQ ID NO: 5906234 - DNA, 25 bp, Homo sapien
gctaagtcccttagggctctatttc

SEQ ID NO: 5906235 - DNA, 25 bp, Homo sapien
tctatcttggtccacgcaatatgag

SEQ ID NO: 5906236 - DNA, 25 bp, Homo sapien
ctgttcccaaactctcctccacaca

SEQ ID NO: 5906237 - DNA, 25 bp, Homo sapien
ctcagggggagctggagggtctcca

SEQ ID NO: 5906238 - DNA, 25 bp, Homo sapien
taggttccttggccctgtcagaggt

SEQ ID NO: 5906239 - DNA, 25 bp, Homo sapien
agcagcctcagaaagaaggtgctgg

SEQ ID NO: 5906240 - DNA, 25 bp, Homo sapien
gcctccagctctctggcctggacca

SEQ ID NO: 5906241 - DNA, 25 bp, Homo sapien
tttttctcctgttcccaaactctcc

SEQ ID NO: 5906242 - DNA, 25 bp, Homo sapien
tgaggctaagtcccttagggctcta

SEQ ID NO: 5906243 - DNA, 25 bp, Homo sapien
tatggaggctcagggggagctggag

SEQ ID NO: 5906244 - DNA, 25 bp, Homo sapien
gccggtgggtctgaaactaggtctc

SEQ ID NO: 5906245 - DNA, 25 bp, Homo sapien
gtgaccctgggaccagctccctcct

SEQ ID NO: 5906246 - DNA, 25 bp, Homo sapien
agcactggcccattgtatatgtaga

SEQ ID NO: 5906247 - DNA, 25 bp, Homo sapien
agacatgggtaggagtggctctgcc

SEQ ID NO: 5906248 - DNA, 25 bp, Homo sapien
actctcctccacacatgctaacgct

SEQ ID NO: 5906249 - DNA, 25 bp, Homo sapien
gaccctgtgagtcctggtgagtaga

SEQ ID NO: 5906250 - DNA, 25 bp, Homo sapien
gctggaccctctgctccttgccttt

SEQ ID NO: 5906251 - DNA, 25 bp, Homo sapien
tcaggagtggggtatggaggctcag

SEQ ID NO: 5906252 - DNA, 25 bp, Homo sapien
ctcctctgccatgtttagaacacag

SEQ ID NO: 5906253 - DNA, 25 bp, Homo sapien
ccaggtgccctcaggcacgggtggc

SEQ ID NO: 5906254 - DNA, 25 bp, Homo sapien
ctccagctctctggcctggaccagg

SEQ ID NO: 5906255 - DNA, 25 bp, Homo sapien
gtagagcagcctcagaaagaaggtg

SEQ ID NO: 5906256 - DNA, 25 bp, Homo sapien
ttgggggtccagcaggggatgggga

SEQ ID NO: 5906257 - DNA, 25 bp, Homo sapien
cagagcctccccagaccctgtgagt

SEQ ID NO: 5906258 - DNA, 25 bp, Homo sapien
cggtgggtctgaaactaggtctcag

SEQ ID NO: 5906259 - DNA, 25 bp, Homo sapien
caggttcagcctccagctctctggc

SEQ ID NO: 5906260 - DNA, 25 bp, Homo sapien
cacgcaatatgagctctcaaggcct

SEQ ID NO: 5906261 - DNA, 25 bp, Homo sapien
tgccattcgcaccgtgggccacctg

SEQ ID NO: 5906262 - DNA, 25 bp, Homo sapien
cagcctccagctctctggcctggac

SEQ ID NO: 5906263 - DNA, 25 bp, Homo sapien
tagtgtccggttctgctctgaagag

SEQ ID NO: 5906264 - DNA, 25 bp, Homo sapien
aagggccaggagctccctcttcagg

SEQ ID NO: 5906265 - DNA, 25 bp, Homo sapien
ctaggtctcaggcttgctcaggcgg

SEQ ID NO: 5906266 - DNA, 25 bp, Homo sapien
agcaggggatggggacaagtctcca

SEQ ID NO: 5906267 - DNA, 25 bp, Homo sapien
ccctcctctgccatgtttagaacac

SEQ ID NO: 5906268 - DNA, 25 bp, Homo sapien
aagaggtgtctgaggctaagtccct

SEQ ID NO: 5906269 - DNA, 25 bp, Homo sapien
tctgaagaggtgtctgaggctaagt

SEQ ID NO: 5906270 - DNA, 25 bp, Homo sapien
ggccatgttccccaggttcagcctc

SEQ ID NO: 5906271 - DNA, 25 bp, Homo sapien
gtttagaacacagagaggcagggcg

SEQ ID NO: 5906272 - DNA, 25 bp, Homo sapien
tgaagaggtgtctgaggctaagtcc

SEQ ID NO: 5906273 - DNA, 25 bp, Homo sapien
ctgccaggtcagggaaatgtgggtc

SEQ ID NO: 5906274 - DNA, 25 bp, Homo sapien
aggagcaagggaggggttgctcctc

SEQ ID NO: 5906275 - DNA, 25 bp, Homo sapien
tttctcctgttcccaaactctcctc

SEQ ID NO: 5906276 - DNA, 25 bp, Homo sapien
aaactctcctccacacatgctaacg

SEQ ID NO: 5906277 - DNA, 25 bp, Homo sapien
ccacaaagctttgcgaggtccctgg

SEQ ID NO: 5906278 - DNA, 25 bp, Homo sapien
acgctacccaaggccccatcctccc

SEQ ID NO: 5906279 - DNA, 25 bp, Homo sapien
aaatacacttgtcatttttctcctg

SEQ ID NO: 5906280 - DNA, 25 bp, Homo sapien
ctggccatgttccccaggttcagcc

SEQ ID NO: 5906281 - DNA, 25 bp, Homo sapien
tcaatggccgaagcctctgggagcc

SEQ ID NO: 5906282 - DNA, 25 bp, Homo sapien
cagagaggcagggcgggggtcacga

SEQ ID NO: 5906283 - DNA, 25 bp, Homo sapien
agggtctatcttggtccacgcaata

SEQ ID NO: 5906284 - DNA, 25 bp, Homo sapien
cccattgtatatgtagatgttgccg

SEQ ID NO: 5906285 - DNA, 25 bp, Homo sapien
ctgctccttgcctttcccaggtgcc

SEQ ID NO: 5906286 - DNA, 25 bp, Homo sapien
cctctgaaggtagggatgagcacca

SEQ ID NO: 5906287 - DNA, 25 bp, Homo sapien
tgggccacctggccatgttccccag

SEQ ID NO: 5906288 - DNA, 25 bp, Homo sapien
ataaatacacttgtcatttttctcc

SEQ ID NO: 5906289 - DNA, 25 bp, Homo sapien
tcccaggtgccctcaggcacgggtg

SEQ ID NO: 5906290 - DNA, 25 bp, Homo sapien
gggggagctggagggtctccagggc

SEQ ID NO: 5906291 - DNA, 25 bp, Homo sapien
gaccaggggactctgctgttgtagc

SEQ ID NO: 5906292 - DNA, 25 bp, Homo sapien
ctgtgagtcctggtgagtagagcag

SEQ ID NO: 5906293 - DNA, 25 bp, Homo sapien
ccaggagcaagggaggggttgctcc

SEQ ID NO: 5906294 - DNA, 25 bp, Homo sapien
agagcagcctcagaaagaaggtgct

SEQ ID NO: 5906295 - DNA, 25 bp, Homo sapien
gggccgttgggggtccagcagggga

SEQ ID NO: 5906296 - DNA, 25 bp, Homo sapien
ggtatggaggctcagggggagctgg

SEQ ID NO: 5906297 - DNA, 25 bp, Homo sapien
cagaggtcttggcatcctagtgtct

SEQ ID NO: 5906298 - DNA, 25 bp, Homo sapien
ggtccctgggatatccttgcgagtg

SEQ ID NO: 5906299 - DNA, 25 bp, Homo sapien
agatgttgccggtgacagtcacaga

SEQ ID NO: 5906300 - DNA, 25 bp, Homo sapien
aggagtggggtatggaggctcaggg

SEQ ID NO: 5906301 - DNA, 25 bp, Homo sapien
gggagccggtgggtctgaaactagg

SEQ ID NO: 5906302 - DNA, 25 bp, Homo sapien
gccaggagctccctcttcaggagtg

SEQ ID NO: 5906303 - DNA, 25 bp, Homo sapien
tggaccaggggactctgctgttgta

SEQ ID NO: 5906304 - DNA, 25 bp, Homo sapien
gtgagtagagcagcctcagaaagaa

SEQ ID NO: 5906305 - DNA, 25 bp, Homo sapien
cattgtatatgtagatgttgccggt

SEQ ID NO: 5906306 - DNA, 25 bp, Homo sapien
atgccaagctttgccatcctcctgg

SEQ ID NO: 5906307 - DNA, 25 bp, Homo sapien
gctagtgtccggttctgctctgaag

SEQ ID NO: 5906308 - DNA, 25 bp, Homo sapien
gtccggttctgctctgaagaggtgt

SEQ ID NO: 5906309 - DNA, 25 bp, Homo sapien
gagaggcagggcgggggtcacgagc

SEQ ID NO: 5906310 - DNA, 25 bp, Homo sapien
ggcggtagtcagagtcctgggcagg

SEQ ID NO: 5906311 - DNA, 25 bp, Homo sapien
cccggtcacatgaatgccattcgca

SEQ ID NO: 5906312 - DNA, 25 bp, Homo sapien
agagtcctgggcaggcactgtggcc

SEQ ID NO: 5906313 - DNA, 25 bp, Homo sapien
tctcccccaggagcaagggaggggt

SEQ ID NO: 5906314 - DNA, 25 bp, Homo sapien
acttgtcatttttctcctgttccca

SEQ ID NO: 5906315 - DNA, 25 bp, Homo sapien
ctccacacatgctaacgctacccaa

SEQ ID NO: 5906316 - DNA, 25 bp, Homo sapien
catttttctcctgttcccaaactct

SEQ ID NO: 5906317 - DNA, 25 bp, Homo sapien
ggatatccttgcgagtgaccctggg

SEQ ID NO: 5906318 - DNA, 25 bp, Homo sapien
gcctcagaaagaaggtgctggaccc

SEQ ID NO: 5906319 - DNA, 25 bp, Homo sapien
caatatgagctctcaaggcctctga

SEQ ID NO: 5906320 - DNA, 25 bp, Homo sapien
gtagtcagagtcctgggcaggcact

SEQ ID NO: 5906321 - DNA, 25 bp, Homo sapien
ggcttgctcaggcggtagtcagagt

SEQ ID NO: 5906322 - DNA, 25 bp, Homo sapien
gagccggtgggtctgaaactaggtc

SEQ ID NO: 5906323 - DNA, 25 bp, Homo sapien
gaccagctccctcctctgccatgtt

SEQ ID NO: 5906324 - DNA, 25 bp, Homo sapien
gctcagaagggccaggagctccctc

SEQ ID NO: 5906325 - DNA, 25 bp, Homo sapien
ttggccctgtcagaggtcttggcat

SEQ ID NO: 5906326 - DNA, 25 bp, Homo sapien
agggtgtagacagctcagaagggcc

SEQ ID NO: 5906327 - DNA, 25 bp, Homo sapien
acagtcacagagcccccggtcacat

SEQ ID NO: 5906328 - DNA, 25 bp, Homo sapien
agctctctggcctggaccaggggac

SEQ ID NO: 5906329 - DNA, 25 bp, Homo sapien
gctcaatggccgaagcctctgggag

SEQ ID NO: 5906330 - DNA, 25 bp, Homo sapien
tccccaggttcagcctccagctctc

SEQ ID NO: 5906331 - DNA, 25 bp, Homo sapien
tgtctctgtctcggccagatgccaa

SEQ ID NO: 5906332 - DNA, 25 bp, Homo sapien
acatgctaacgctacccaaggcccc

SEQ ID NO: 5906333 - DNA, 25 bp, Homo sapien
ggcccattgtatatgtagatgttgc

SEQ ID NO: 5906334 - DNA, 25 bp, Homo sapien
ggtgtctgaggctaagtcccttagg

SEQ ID NO: 5906335 - DNA, 25 bp, Homo sapien
tttcccaggtgccctcaggcacggg

SEQ ID NO: 5906336 - DNA, 25 bp, Homo sapien
gcaggcactgtggcctgctagtgtc

SEQ ID NO: 5906337 - DNA, 25 bp, Homo sapien
ctcagagcctccccagaccctgtga

SEQ ID NO: 5906338 - DNA, 25 bp, Homo sapien
gaggctcagggggagctggagggtc

SEQ ID NO: 5906339 - DNA, 25 bp, Homo sapien
cggtagtcagagtcctgggcaggca

SEQ ID NO: 5906340 - DNA, 25 bp, Homo sapien
tgcctttcccaggtgccctcaggca

SEQ ID NO: 5906341 - DNA, 25 bp, Homo sapien
ttggtccacgcaatatgagctctca

SEQ ID NO: 5906342 - DNA, 25 bp, Homo sapien
agaagggccaggagctccctcttca

SEQ ID NO: 5906343 - DNA, 25 bp, Homo sapien
gaggtgtctgaggctaagtccctta

SEQ ID NO: 5906344 - DNA, 25 bp, Homo sapien
gcctctgggagccggtgggtctgaa

SEQ ID NO: 5906345 - DNA, 25 bp, Homo sapien
ttacaactcataaatacacttgtca

SEQ ID NO: 5906346 - DNA, 25 bp, Homo sapien
gctccttgcctttcccaggtgccct

SEQ ID NO: 5906347 - DNA, 25 bp, Homo sapien
ccctgtcagaggtcttggcatccta

SEQ ID NO: 5906348 - DNA, 25 bp, Homo sapien
ctgctgttgtagcaccacttcctcc

SEQ ID NO: 5906349 - DNA, 25 bp, Homo sapien
gctctgaagaggtgtctgaggctaa

SEQ ID NO: 5906350 - DNA, 25 bp, Homo sapien
gacttcaccttcccccagggtctat

SEQ ID NO: 5906351 - DNA, 25 bp, Homo sapien
ttgcgagtgaccctgggaccagctc

SEQ ID NO: 5906352 - DNA, 25 bp, Homo sapien
cgggggtcacgagccttccttgtgt

SEQ ID NO: 5906353 - DNA, 25 bp, Homo sapien
ctcaggcggtagtcagagtcctggg

SEQ ID NO: 5906354 - DNA, 25 bp, Homo sapien
tccccagaccctgtgagtcctggtg

SEQ ID NO: 5906355 - DNA, 25 bp, Homo sapien
gctaacgctacccaaggccccatcc

SEQ ID NO: 5906356 - DNA, 25 bp, Homo sapien
attcgcaccgtgggccacctggcca

SEQ ID NO: 5906357 - DNA, 25 bp, Homo sapien
gtggcaaataggttccttggccctg

SEQ ID NO: 5906358 - DNA, 25 bp, Homo sapien
ggttcagcctccagctctctggcct

SEQ ID NO: 5906359 - DNA, 25 bp, Homo sapien
tcggccagatgccaagctttgccat

SEQ ID NO: 5906360 - DNA, 25 bp, Homo sapien
caggcggtagtcagagtcctgggca

SEQ ID NO: 5906361 - DNA, 25 bp, Homo sapien
ctgctagtgtccggttctgctctga

SEQ ID NO: 5906362 - DNA, 25 bp, Homo sapien
tggtgagtagagcagcctcagaaag

SEQ ID NO: 5906363 - DNA, 25 bp, Homo sapien
ggggatggggacaagtctccagaca

SEQ ID NO: 5906364 - DNA, 25 bp, Homo sapien
ggctcagggggagctggagggtctc

SEQ ID NO: 5906365 - DNA, 25 bp, Homo sapien
aatgccattcgcaccgtgggccacc

SEQ ID NO: 5906366 - DNA, 25 bp, Homo sapien
aagtctccagacatgggtaggagtg

SEQ ID NO: 5906367 - DNA, 25 bp, Homo sapien
ccccagcactggcccattgtatatg

SEQ ID NO: 5906368 - DNA, 25 bp, Homo sapien
gaggtcttggcatcctagtgtctct

SEQ ID NO: 5906369 - DNA, 25 bp, Homo sapien
tctcaaggcctctgaaggtagggat

SEQ ID NO: 5906370 - DNA, 25 bp, Homo sapien
ccagcactggcccattgtatatgta

SEQ ID NO: 5906371 - DNA, 25 bp, Homo sapien
tctctgtctcggccagatgccaagc

SEQ ID NO: 5906372 - DNA, 25 bp, Homo sapien
ctgggaccagctccctcctctgcca

SEQ ID NO: 5906373 - DNA, 25 bp, Homo sapien
tcccccaggagcaagggaggggttg

SEQ ID NO: 5906374 - DNA, 25 bp, Homo sapien
gagggggccgttgggggtccagcag

SEQ ID NO: 5906375 - DNA, 25 bp, Homo sapien
gtcctggtgagtagagcagcctcag

SEQ ID NO: 5906376 - DNA, 25 bp, Homo sapien
ctctgccaggtcagggaaatgtggg

SEQ ID NO: 5906377 - DNA, 25 bp, Homo sapien
ctgggagccggtgggtctgaaacta

SEQ ID NO: 5906378 - DNA, 25 bp, Homo sapien
tcctgggcaggcactgtggcctgct

SEQ ID NO: 5906379 - DNA, 25 bp, Homo sapien
agtcacagagcccccggtcacatga

SEQ ID NO: 5906380 - DNA, 25 bp, Homo sapien
catcctagtgtctctgtctcggcca

SEQ ID NO: 5906381 - DNA, 25 bp, Homo sapien
ccacacatgctaacgctacccaagg

SEQ ID NO: 5906382 - DNA, 25 bp, Homo sapien
ctccctcctctgccatgtttagaac

SEQ ID NO: 5906383 - DNA, 25 bp, Homo sapien
cgaggctcaatggccgaagcctctg

SEQ ID NO: 5906384 - DNA, 25 bp, Homo sapien
ggcctctgaaggtagggatgagcac

SEQ ID NO: 5906385 - DNA, 25 bp, Homo sapien
ggggttgctcctccgcgcgacttca

SEQ ID NO: 5906386 - DNA, 25 bp, Homo sapien
ggtagggatgagcaccacaaagctt

SEQ ID NO: 5906387 - DNA, 25 bp, Homo sapien
ggtgacagtcacagagcccccggtc

SEQ ID NO: 5906388 - DNA, 25 bp, Homo sapien
tggcctgctagtgtccggttctgct

SEQ ID NO: 5906389 - DNA, 25 bp, Homo sapien
tggagggtctccagggccccgtgtt

SEQ ID NO: 5906390 - DNA, 25 bp, Homo sapien
gccgttgggggtccagcaggggatg

SEQ ID NO: 5906391 - DNA, 25 bp, Homo sapien
ccccaggagcaagggaggggttgct

SEQ ID NO: 5906392 - DNA, 25 bp, Homo sapien
cttcccccagggtctatcttggtcc

SEQ ID NO: 5906393 - DNA, 25 bp, Homo sapien
ccagggtctatcttggtccacgcaa

SEQ ID NO: 5906394 - DNA, 25 bp, Homo sapien
tctcggccagatgccaagctttgcc

SEQ ID NO: 5906395 - DNA, 25 bp, Homo sapien
ccgcgcgacttcaccttcccccagg

SEQ ID NO: 5906396 - DNA, 25 bp, Homo sapien
ctttgccatcctcctggtagggtgt

SEQ ID NO: 5906397 - DNA, 25 bp, Homo sapien
aaggtagggatgagcaccacaaagc

SEQ ID NO: 5906398 - DNA, 25 bp, Homo sapien
tcttggcatcctagtgtctctgtct

SEQ ID NO: 5906399 - DNA, 25 bp, Homo sapien
tcctgttcccaaactctcctccaca

SEQ ID NO: 5906400 - DNA, 25 bp, Homo sapien
tcccaaactctcctccacacatgct

SEQ ID NO: 5906401 - DNA, 25 bp, Homo sapien
cctggtgagtagagcagcctcagaa

SEQ ID NO: 5906402 - DNA, 25 bp, Homo sapien
aagggaggggttgctcctccgcgcg

SEQ ID NO: 5906403 - DNA, 25 bp, Homo sapien
ctcttcaggagtggggtatggaggc

SEQ ID NO: 5906404 - DNA, 25 bp, Homo sapien
ctccgcgcgacttcaccttccccca

SEQ ID NO: 5906405 - DNA, 25 bp, Homo sapien
ggggtcacgagccttccttgtgtcc

SEQ ID NO: 5906406 - DNA, 25 bp, Homo sapien
ccatgttccccaggttcagcctcca

SEQ ID NO: 5906407 - DNA, 25 bp, Homo sapien
gtggctctgccaggtcagggaaatg

SEQ ID NO: 5906408 - DNA, 25 bp, Homo sapien
atgggtaggagtggctctgccaggt

SEQ ID NO: 5906409 - DNA, 25 bp, Homo sapien
catcctcctggtagggtgtagacag

SEQ ID NO: 5906410 - DNA, 25 bp, Homo sapien
gaccctctgctccttgcctttccca

SEQ ID NO: 5906411 - DNA, 25 bp, Homo sapien
ggttgctcctccgcgcgacttcacc

SEQ ID NO: 5906412 - DNA, 25 bp, Homo sapien
atccttgcgagtgaccctgggacca

SEQ ID NO: 5906413 - DNA, 25 bp, Homo sapien
ggttctgctctgaagaggtgtctga

SEQ ID NO: 5906414 - DNA, 25 bp, Homo sapien
gactctgctgttgtagcaccacttc

SEQ ID NO: 5906415 - DNA, 25 bp, Homo sapien
tcccccagggtctatcttggtccac

SEQ ID NO: 5906416 - DNA, 25 bp, Homo sapien
ggcatcctagtgtctctgtctcggc

SEQ ID NO: 5906417 - DNA, 25 bp, Homo sapien
ttagaacacagagaggcagggcggg

SEQ ID NO: 5906418 - DNA, 25 bp, Homo sapien
ccctgtgagtcctggtgagtagagc

SEQ ID NO: 5906419 - DNA, 25 bp, Homo sapien
ttgtatatgtagatgttgccggtga

SEQ ID NO: 5906420 - DNA, 25 bp, Homo sapien
caccacttcctccaaggagggggcc

SEQ ID NO: 5906421 - DNA, 25 bp, Homo sapien
gctgttgtagcaccacttcctccaa

SEQ ID NO: 5906422 - DNA, 25 bp, Homo sapien
tccttgcctttcccaggtgccctca

SEQ ID NO: 5906423 - DNA, 25 bp, Homo sapien
aggagtggctctgccaggtcaggga

SEQ ID NO: 5906424 - DNA, 25 bp, Homo sapien
gtggggtatggaggctcagggggag

SEQ ID NO: 5906425 - DNA, 25 bp, Homo sapien
ttccttggccctgtcagaggtcttg

SEQ ID NO: 5906426 - DNA, 25 bp, Homo sapien
gagtggctctgccaggtcagggaaa

SEQ ID NO: 5906427 - DNA, 25 bp, Homo sapien
gggccaggagctccctcttcaggag

SEQ ID NO: 5906428 - DNA, 25 bp, Homo sapien
tctcctccacacatgctaacgctac

SEQ ID NO: 5906429 - DNA, 25 bp, Homo sapien
aagaaggtgctggaccctctgctcc

SEQ ID NO: 5906430 - DNA, 25 bp, Homo sapien
gagcaagggaggggttgctcctccg

SEQ ID NO: 5906431 - DNA, 25 bp, Homo sapien
tcacagagcccccggtcacatgaat

SEQ ID NO: 5906432 - DNA, 25 bp, Homo sapien
ctcctggtagggtgtagacagctca

SEQ ID NO: 5906433 - DNA, 25 bp, Homo sapien
cctctgccatgtttagaacacagag

SEQ ID NO: 5906434 - DNA, 25 bp, Homo sapien
gaaggtgctggaccctctgctcctt

SEQ ID NO: 5906435 - DNA, 25 bp, Homo sapien
gggagctggagggtctccagggccc

SEQ ID NO: 5906436 - DNA, 25 bp, Homo sapien
ctccagacatgggtaggagtggctc

SEQ ID NO: 5906437 - DNA, 25 bp, Homo sapien
caggagctccctcttcaggagtggg

SEQ ID NO: 5906438 - DNA, 25 bp, Homo sapien
gtctgaaactaggtctcaggcttgc

SEQ ID NO: 5906439 - DNA, 25 bp, Homo sapien
ctcataaatacacttgtcatttttc

SEQ ID NO: 5906440 - DNA, 25 bp, Homo sapien
gttgccggtgacagtcacagagccc

SEQ ID NO: 5906441 - DNA, 25 bp, Homo sapien
ccttggccctgtcagaggtcttggc

SEQ ID NO: 5906442 - DNA, 25 bp, Homo sapien
ccctgggaccagctccctcctctgc

SEQ ID NO: 5906443 - DNA, 25 bp, Homo sapien
ccagctctctggcctggaccagggg

SEQ ID NO: 5906444 - DNA, 25 bp, Homo sapien
cagggggagctggagggtctccagg

SEQ ID NO: 5906445 - DNA, 25 bp, Homo sapien
gggtctgaaactaggtctcaggctt

SEQ ID NO: 5906446 - DNA, 25 bp, Homo sapien
aagcctctgggagccggtgggtctg

SEQ ID NO: 5906447 - DNA, 25 bp, Homo sapien
aacacagagaggcagggcgggggtc

SEQ ID NO: 5906448 - DNA, 25 bp, Homo sapien
gagtgaccctgggaccagctccctc

SEQ ID NO: 5906449 - DNA, 25 bp, Homo sapien
ctctggcctggaccaggggactctg

SEQ ID NO: 5906450 - DNA, 25 bp, Homo sapien
gtctccagacatgggtaggagtggc

SEQ ID NO: 5906451 - DNA, 25 bp, Homo sapien
gcactgtggcctgctagtgtccggt

SEQ ID NO: 5906452 - DNA, 25 bp, Homo sapien
cgtgggccacctggccatgttcccc

SEQ ID NO: 5906453 - DNA, 25 bp, Homo sapien
ctatttctcagagcctccccagacc

SEQ ID NO: 5906454 - DNA, 25 bp, Homo sapien
agctccctcttcaggagtggggtat

SEQ ID NO: 5906455 - DNA, 25 bp, Homo sapien
tgtagacagctcagaagggccagga

SEQ ID NO: 5906456 - DNA, 25 bp, Homo sapien
aggtctcaggcttgctcaggcggta

SEQ ID NO: 5906457 - DNA, 25 bp, Homo sapien
tatcttggtccacgcaatatgagct

SEQ ID NO: 5906458 - DNA, 25 bp, Homo sapien
acaaagctttgcgaggtccctggga

SEQ ID NO: 5906459 - DNA, 25 bp, Homo sapien
agagcccccggtcacatgaatgcca

SEQ ID NO: 5906460 - DNA, 25 bp, Homo sapien
gtagggtgtagacagctcagaaggg

SEQ ID NO: 5906461 - DNA, 25 bp, Homo sapien
ctctgctccttgcctttcccaggtg

SEQ ID NO: 5906462 - DNA, 25 bp, Homo sapien
tcaggcacgggtggcaaataggttc

SEQ ID NO: 5906463 - DNA, 25 bp, Homo sapien
agctttgcgaggtccctgggatatc

SEQ ID NO: 5906464 - DNA, 25 bp, Homo sapien
gcacgggtggcaaataggttccttg

SEQ ID NO: 5906465 - DNA, 25 bp, Homo sapien
aaggcctctgaaggtagggatgagc

SEQ ID NO: 5906466 - DNA, 25 bp, Homo sapien
tggaccctctgctccttgcctttcc

SEQ ID NO: 5906467 - DNA, 25 bp, Homo sapien
acgagccttccttgtgtccgaggct

SEQ ID NO: 5906468 - DNA, 25 bp, Homo sapien
gccgaagcctctgggagccggtggg

SEQ ID NO: 5906469 - DNA, 25 bp, Homo sapien
ggcagggcgggggtcacgagccttc

SEQ ID NO: 5906470 - DNA, 25 bp, Homo sapien
atttctcagagcctccccagaccct

SEQ ID NO: 5906471 - DNA, 25 bp, Homo sapien
ccagctccctcctctgccatgttta

SEQ ID NO: 5906472 - DNA, 25 bp, Homo sapien
tcctccgcgcgacttcaccttcccc

SEQ ID NO: 5906473 - DNA, 25 bp, Homo sapien
gtgggtctgaaactaggtctcaggc

SEQ ID NO: 5906474 - DNA, 25 bp, Homo sapien
ctcagaaagaaggtgctggaccctc

SEQ ID NO: 5906475 - DNA, 25 bp, Homo sapien
ctagtgtctctgtctcggccagatg

SEQ ID NO: 5906476 - DNA, 25 bp, Homo sapien
gagtagagcagcctcagaaagaagg

SEQ ID NO: 5906477 - DNA, 25 bp, Homo sapien
cttgtgtccgaggctcaatggccga

SEQ ID NO: 5906478 - DNA, 25 bp, Homo sapien
tggaggctcagggggagctggaggg

SEQ ID NO: 5906479 - DNA, 25 bp, Homo sapien
gacagctcagaagggccaggagctc

SEQ ID NO: 5906480 - DNA, 25 bp, Homo sapien
gccctcaggcacgggtggcaaatag

SEQ ID NO: 5906481 - DNA, 25 bp, Homo sapien
ctcaggcttgctcaggcggtagtca

SEQ ID NO: 5906482 - DNA, 25 bp, Homo sapien
aataggttccttggccctgtcagag

SEQ ID NO: 5906483 - DNA, 25 bp, Homo sapien
cgaagcctctgggagccggtgggtc

SEQ ID NO: 5906484 - DNA, 25 bp, Homo sapien
ccggttctgctctgaagaggtgtct

SEQ ID NO: 5906485 - DNA, 25 bp, Homo sapien
ccctcttcaggagtggggtatggag

SEQ ID NO: 5906486 - DNA, 25 bp, Homo sapien
tctgtctcggccagatgccaagctt

SEQ ID NO: 5906487 - DNA, 25 bp, Homo sapien
gtagatgttgccggtgacagtcaca

SEQ ID NO: 5906488 - DNA, 25 bp, Homo sapien
cctggaccaggggactctgctgttg

SEQ ID NO: 5906489 - DNA, 25 bp, Homo sapien
ctttgcgaggtccctgggatatcct

SEQ ID NO: 5906490 - DNA, 25 bp, Homo sapien
gagccttccttgtgtccgaggctca

SEQ ID NO: 5906491 - DNA, 25 bp, Homo sapien
atacacttgtcatttttctcctgtt

SEQ ID NO: 5906492 - DNA, 25 bp, Homo sapien
acagagcccccggtcacatgaatgc

SEQ ID NO: 5906493 - DNA, 25 bp, Homo sapien
tagggatgagcaccacaaagctttg

SEQ ID NO: 5906494 - DNA, 25 bp, Homo sapien
aactaggtctcaggcttgctcaggc

SEQ ID NO: 5906495 - DNA, 25 bp, Homo sapien
cctggtagggtgtagacagctcaga

SEQ ID NO: 5906496 - DNA, 25 bp, Homo sapien
atgtagatgttgccggtgacagtca

SEQ ID NO: 5906497 - DNA, 25 bp, Homo sapien
tgtctcggccagatgccaagctttg

SEQ ID NO: 5906498 - DNA, 25 bp, Homo sapien
ttggcatcctagtgtctctgtctcg

SEQ ID NO: 5906499 - DNA, 25 bp, Homo sapien
agtgtctctgtctcggccagatgcc

SEQ ID NO: 5906500 - DNA, 25 bp, Homo sapien
gttcccaaactctcctccacacatg

SEQ ID NO: 5906501 - DNA, 25 bp, Homo sapien
tcccttagggctctatttctcagag

SEQ ID NO: 5906502 - DNA, 25 bp, Homo sapien
aaagctttgcgaggtccctgggata

SEQ ID NO: 5906503 - DNA, 25 bp, Homo sapien
ggtgtagacagctcagaagggccag

SEQ ID NO: 5906504 - DNA, 25 bp, Homo sapien
ctgggcaggcactgtggcctgctag

SEQ ID NO: 5906505 - DNA, 25 bp, Homo sapien
ttgcgaggtccctgggatatccttg

SEQ ID NO: 5906506 - DNA, 25 bp, Homo sapien
tggccgaagcctctgggagccggtg

SEQ ID NO: 5906507 - DNA, 25 bp, Homo sapien
ggacaagtctccagacatgggtagg

SEQ ID NO: 5906508 - DNA, 25 bp, Homo sapien
agtcctgggcaggcactgtggcctg

SEQ ID NO: 5906509 - DNA, 25 bp, Homo sapien
gagctggagggtctccagggccccg

SEQ ID NO: 5906510 - DNA, 25 bp, Homo sapien
ctggcctggaccaggggactctgct

SEQ ID NO: 5906511 - DNA, 25 bp, Homo sapien
gggtccagcaggggatggggacaag

SEQ ID NO: 5906512 - DNA, 25 bp, Homo sapien
ggatggggacaagtctccagacatg

SEQ ID NO: 5906513 - DNA, 25 bp, Homo sapien
tgaatgccattcgcaccgtgggcca

SEQ ID NO: 5906514 - DNA, 25 bp, Homo sapien
tcctagtgtctctgtctcggccaga

SEQ ID NO: 5906515 - DNA, 25 bp, Homo sapien
ggcaaataggttccttggccctgtc

SEQ ID NO: 5906516 - DNA, 25 bp, Homo sapien
atgagctctcaaggcctctgaaggt

SEQ ID NO: 5906517 - DNA, 25 bp, Homo sapien
cttcaggagtggggtatggaggctc

SEQ ID NO: 5906518 - DNA, 25 bp, Homo sapien
cagcctcagaaagaaggtgctggac

SEQ ID NO: 5906519 - DNA, 25 bp, Homo sapien
tcagagtcctgggcaggcactgtgg

SEQ ID NO: 5906520 - DNA, 25 bp, Homo sapien
cagaccctgtgagtcctggtgagta

SEQ ID NO: 5906521 - DNA, 25 bp, Homo sapien
ttagggctctatttctcagagcctc

SEQ ID NO: 5906522 - DNA, 25 bp, Homo sapien
agctttgccatcctcctggtagggt

SEQ ID NO: 5906523 - DNA, 25 bp, Homo sapien
gcaccgtgggccacctggccatgtt

SEQ ID NO: 5906524 - DNA, 25 bp, Homo sapien
aggtgctggaccctctgctccttgc

SEQ ID NO: 5906525 - DNA, 25 bp, Homo sapien
tgccggtgacagtcacagagccccc

SEQ ID NO: 5906526 - DNA, 25 bp, Homo sapien
tcaccttcccccagggtctatcttg

SEQ ID NO: 5906527 - DNA, 25 bp, Homo sapien
agctccctcctctgccatgtttaga

SEQ ID NO: 5906528 - DNA, 25 bp, Homo sapien
caggcttgctcaggcggtagtcaga

SEQ ID NO: 5906529 - DNA, 25 bp, Homo sapien
ccagatgccaagctttgccatcctc

SEQ ID NO: 5906530 - DNA, 25 bp, Homo sapien
ggggacaagtctccagacatgggta

SEQ ID NO: 5906531 - DNA, 25 bp, Homo sapien
ccccagggtctatcttggtccacgc

SEQ ID NO: 5906532 - DNA, 25 bp, Homo sapien
ggttccttggccctgtcagaggtct

SEQ ID NO: 5906533 - DNA, 25 bp, Homo sapien
gaaagaaggtgctggaccctctgct

SEQ ID NO: 5906534 - DNA, 25 bp, Homo sapien
agcccccggtcacatgaatgccatt

SEQ ID NO: 5906535 - DNA, 25 bp, Homo sapien
gcgcgacttcaccttcccccagggt

SEQ ID NO: 5906536 - DNA, 25 bp, Homo sapien
agtcagagtcctgggcaggcactgt

SEQ ID NO: 5906537 - DNA, 25 bp, Homo sapien
gaggtccctgggatatccttgcgag

SEQ ID NO: 5906538 - DNA, 25 bp, Homo sapien
ccatgtttagaacacagagaggcag

SEQ ID NO: 5906539 - DNA, 25 bp, Homo sapien
tcgcaccgtgggccacctggccatg

SEQ ID NO: 5906540 - DNA, 25 bp, Homo sapien
cagggcgggggtcacgagccttcct

SEQ ID NO: 5906541 - DNA, 25 bp, Homo sapien
gcctgctagtgtccggttctgctct

SEQ ID NO: 5906542 - DNA, 25 bp, Homo sapien
agcaccacttcctccaaggaggggg

SEQ ID NO: 5906543 - DNA, 25 bp, Homo sapien
cctttcccaggtgccctcaggcacg

SEQ ID NO: 5906544 - DNA, 25 bp, Homo sapien
cagctcagaagggccaggagctccc

SEQ ID NO: 5906545 - DNA, 25 bp, Homo sapien
ttctcagagcctccccagaccctgt

SEQ ID NO: 5906546 - DNA, 25 bp, Homo sapien
tggcttgtaacatttttataaaaca

SEQ ID NO: 5906547 - DNA, 25 bp, Homo sapien
tccgattttaaaagagtaaacatct

SEQ ID NO: 5906548 - DNA, 25 bp, Homo sapien
tgggttgacaggtgcagccatcatg

SEQ ID NO: 5906549 - DNA, 25 bp, Homo sapien
ttaattcacttgttgctattcaaat

SEQ ID NO: 5906550 - DNA, 25 bp, Homo sapien
aattttgattcctaggtggccagag

SEQ ID NO: 5906551 - DNA, 25 bp, Homo sapien
ttgattcctaggtggccagagttgt

SEQ ID NO: 5906552 - DNA, 25 bp, Homo sapien
atttctgagtgtactttagttcacg

SEQ ID NO: 5906553 - DNA, 25 bp, Homo sapien
ttatcactctcttatgatactgacc

SEQ ID NO: 5906554 - DNA, 25 bp, Homo sapien
ttttttacccttatcactctcttat

SEQ ID NO: 5906555 - DNA, 25 bp, Homo sapien
gagtgtactttagttcacgtttgta

SEQ ID NO: 5906556 - DNA, 25 bp, Homo sapien
gtttgtgtgtgatttctttgttttc

SEQ ID NO: 5906557 - DNA, 25 bp, Homo sapien
gtgactgtggaccacagcactgtgt

SEQ ID NO: 5906558 - DNA, 25 bp, Homo sapien
gtgatcagtgaggtcttggggatct

SEQ ID NO: 5906559 - DNA, 25 bp, Homo sapien
gtggggcatttatttggatgaatat

SEQ ID NO: 5906560 - DNA, 25 bp, Homo sapien
gcagttattaattcccttgcttggt

SEQ ID NO: 5906561 - DNA, 25 bp, Homo sapien
agcaatatgtggggcatttatttgg

SEQ ID NO: 5906562 - DNA, 25 bp, Homo sapien
ggtacctattagattcagtcatgct

SEQ ID NO: 5906563 - DNA, 25 bp, Homo sapien
tttgggatttttgttgattctgttt

SEQ ID NO: 5906564 - DNA, 25 bp, Homo sapien
cactgcacattctgcaggaaaagag

SEQ ID NO: 5906565 - DNA, 25 bp, Homo sapien
tcttttttacccttatcactctctt

SEQ ID NO: 5906566 - DNA, 25 bp, Homo sapien
ggatttttgtgctgttgtgatcagt

SEQ ID NO: 5906567 - DNA, 25 bp, Homo sapien
tttttactatagaaactattctgcc

SEQ ID NO: 5906568 - DNA, 25 bp, Homo sapien
ccgggtgactgtggaccacagcact

SEQ ID NO: 5906569 - DNA, 25 bp, Homo sapien
ttttgttgattctgtttgtcttctt

SEQ ID NO: 5906570 - DNA, 25 bp, Homo sapien
ttgcttggtccttgggttgacaggt

SEQ ID NO: 5906571 - DNA, 25 bp, Homo sapien
attcccttgcttggtccttgggttg

SEQ ID NO: 5906572 - DNA, 25 bp, Homo sapien
actgaccactgccttactggcaata

SEQ ID NO: 5906573 - DNA, 25 bp, Homo sapien
ttttacccttatcactctcttatga

SEQ ID NO: 5906574 - DNA, 25 bp, Homo sapien
cttgggttgacaggtgcagccatca

SEQ ID NO: 5906575 - DNA, 25 bp, Homo sapien
tataaaacagaattttgattcctag

SEQ ID NO: 5906576 - DNA, 25 bp, Homo sapien
ttcctctgtaacaggatcttttgtc

SEQ ID NO: 5906577 - DNA, 25 bp, Homo sapien
tggccagagttgtgactcatagagg

SEQ ID NO: 5906578 - DNA, 25 bp, Homo sapien
tgttgtgatcagtgaggtcttgggg

SEQ ID NO: 5906579 - DNA, 25 bp, Homo sapien
atgctgtgtctctgcctgaagtggt

SEQ ID NO: 5906580 - DNA, 25 bp, Homo sapien
aatcaatgtgttcatactgtttgaa

SEQ ID NO: 5906581 - DNA, 25 bp, Homo sapien
cccagatggtggtggtcactgcaca

SEQ ID NO: 5906582 - DNA, 25 bp, Homo sapien
atatattgattaaaagggtagggtg

SEQ ID NO: 5906583 - DNA, 25 bp, Homo sapien
ggaccacagcactgtgttcccagat

SEQ ID NO: 5906584 - DNA, 25 bp, Homo sapien
ttgattccacaatgccttcctctgt

SEQ ID NO: 5906585 - DNA, 25 bp, Homo sapien
ttgtctagatttctgagtgtacttt

SEQ ID NO: 5906586 - DNA, 25 bp, Homo sapien
ttttaattcacttgttgctattcaa

SEQ ID NO: 5906587 - DNA, 25 bp, Homo sapien
tgcaggaaaagagaatccaaacccc

SEQ ID NO: 5906588 - DNA, 25 bp, Homo sapien
attttgtatttgttttgtttgtgtg

SEQ ID NO: 5906589 - DNA, 25 bp, Homo sapien
atagagggatttttgtgctgttgtg

SEQ ID NO: 5906590 - DNA, 25 bp, Homo sapien
tgttttggttttgattttagagcct

SEQ ID NO: 5906591 - DNA, 25 bp, Homo sapien
ttactgagccagggtgtttcttgtt

SEQ ID NO: 5906592 - DNA, 25 bp, Homo sapien
gctgttgtgatcagtgaggtcttgg

SEQ ID NO: 5906593 - DNA, 25 bp, Homo sapien
gtctttgcctcccagttactgggac

SEQ ID NO: 5906594 - DNA, 25 bp, Homo sapien
accactgccttactggcaatacaac

SEQ ID NO: 5906595 - DNA, 25 bp, Homo sapien
gatgaccaacctgatccgattttaa

SEQ ID NO: 5906596 - DNA, 25 bp, Homo sapien
accaacctgatccgattttaaaaga

SEQ ID NO: 5906597 - DNA, 25 bp, Homo sapien
tttgtttttactatagaaactattc

SEQ ID NO: 5906598 - DNA, 25 bp, Homo sapien
ctgccttactggcaatacaactaat

SEQ ID NO: 5906599 - DNA, 25 bp, Homo sapien
ttgtgctgttgtgatcagtgaggtc

SEQ ID NO: 5906600 - DNA, 25 bp, Homo sapien
tctggcttgtaacatttttataaaa

SEQ ID NO: 5906601 - DNA, 25 bp, Homo sapien
caaatcaatgtgttcatactgtttg

SEQ ID NO: 5906602 - DNA, 25 bp, Homo sapien
caatatgtggggcatttatttggat

SEQ ID NO: 5906603 - DNA, 25 bp, Homo sapien
taattttgtatttgttttgtttgtg

SEQ ID NO: 5906604 - DNA, 25 bp, Homo sapien
catgggagggagagagacactaact

SEQ ID NO: 5906605 - DNA, 25 bp, Homo sapien
tgattctgtttgtcttcttttgttt

SEQ ID NO: 5906606 - DNA, 25 bp, Homo sapien
ataatggtgttactccgggtgactg

SEQ ID NO: 5906607 - DNA, 25 bp, Homo sapien
atgatagatagatgaccaacctgat

SEQ ID NO: 5906608 - DNA, 25 bp, Homo sapien
tcctagagtcacctgtctttgcctc

SEQ ID NO: 5906609 - DNA, 25 bp, Homo sapien
gatcagtgaggtcttggggatctgc

SEQ ID NO: 5906610 - DNA, 25 bp, Homo sapien
tgtgactcatagagggatttttgtg

SEQ ID NO: 5906611 - DNA, 25 bp, Homo sapien
cacttgttgctattcaaatcaatgt

SEQ ID NO: 5906612 - DNA, 25 bp, Homo sapien
ggttgacaggtgcagccatcatgat

SEQ ID NO: 5906613 - DNA, 25 bp, Homo sapien
ctatgtgtcaccttactgagccagg

SEQ ID NO: 5906614 - DNA, 25 bp, Homo sapien
ttcacttgttgctattcaaatcaat

SEQ ID NO: 5906615 - DNA, 25 bp, Homo sapien
agatttctgagtgtactttagttca

SEQ ID NO: 5906616 - DNA, 25 bp, Homo sapien
tcaatgtgttcatactgtttgaaca

SEQ ID NO: 5906617 - DNA, 25 bp, Homo sapien
aagatcatagcaatatgtggggcat

SEQ ID NO: 5906618 - DNA, 25 bp, Homo sapien
gacaggtgcagccatcatgatagat

SEQ ID NO: 5906619 - DNA, 25 bp, Homo sapien
cccagttactgggactaaagctatg

SEQ ID NO: 5906620 - DNA, 25 bp, Homo sapien
tagttcacgtttgtattagaattat

SEQ ID NO: 5906621 - DNA, 25 bp, Homo sapien
ctttcattctgagcagttattaatt

SEQ ID NO: 5906622 - DNA, 25 bp, Homo sapien
ttgcctcccagttactgggactaaa

SEQ ID NO: 5906623 - DNA, 25 bp, Homo sapien
cctgataatggtgttactccgggtg

SEQ ID NO: 5906624 - DNA, 25 bp, Homo sapien
cagccatcatgatagatagatgacc

SEQ ID NO: 5906625 - DNA, 25 bp, Homo sapien
gatagatgaccaacctgatccgatt

SEQ ID NO: 5906626 - DNA, 25 bp, Homo sapien
actgtgttcccagatggtggtggtc

SEQ ID NO: 5906627 - DNA, 25 bp, Homo sapien
aggatcttttgtctagatttctgag

SEQ ID NO: 5906628 - DNA, 25 bp, Homo sapien
ccttactgagccagggtgtttcttg

SEQ ID NO: 5906629 - DNA, 25 bp, Homo sapien
ttgttgattctgtttgtcttctttt

SEQ ID NO: 5906630 - DNA, 25 bp, Homo sapien
agggagagagacactaactctaaga

SEQ ID NO: 5906631 - DNA, 25 bp, Homo sapien
gtactttagttcacgtttgtattag

SEQ ID NO: 5906632 - DNA, 25 bp, Homo sapien
ttttgattttagagcctctggcttg

SEQ ID NO: 5906633 - DNA, 25 bp, Homo sapien
tactgggactaaagctatgtgtcac

SEQ ID NO: 5906634 - DNA, 25 bp, Homo sapien
acccttatcactctcttatgatact

SEQ ID NO: 5906635 - DNA, 25 bp, Homo sapien
aaatatcaagagggcatgggaggga

SEQ ID NO: 5906636 - DNA, 25 bp, Homo sapien
atatgtggggcatttatttggatga

SEQ ID NO: 5906637 - DNA, 25 bp, Homo sapien
atactgaccactgccttactggcaa

SEQ ID NO: 5906638 - DNA, 25 bp, Homo sapien
tgttttccagtttatttttaattca

SEQ ID NO: 5906639 - DNA, 25 bp, Homo sapien
atattttttaatcagtaattttgta

SEQ ID NO: 5906640 - DNA, 25 bp, Homo sapien
gttactgggactaaagctatgtgtc

SEQ ID NO: 5906641 - DNA, 25 bp, Homo sapien
ttaatttctttcaaatatcaagagg

SEQ ID NO: 5906642 - DNA, 25 bp, Homo sapien
tgaccactgccttactggcaataca

SEQ ID NO: 5906643 - DNA, 25 bp, Homo sapien
tttgttttgtttgtgtgtgatttct

SEQ ID NO: 5906644 - DNA, 25 bp, Homo sapien
actattctgcccttgtaatcctaga

SEQ ID NO: 5906645 - DNA, 25 bp, Homo sapien
ctatagaaactattctgcccttgta

SEQ ID NO: 5906646 - DNA, 25 bp, Homo sapien
cacagcactgtgttcccagatggtg

SEQ ID NO: 5906647 - DNA, 25 bp, Homo sapien
gctgtgtctctgcctgaagtggtat

SEQ ID NO: 5906648 - DNA, 25 bp, Homo sapien
acctgatccgattttaaaagagtaa

SEQ ID NO: 5906649 - DNA, 25 bp, Homo sapien
ttgacaggtgcagccatcatgatag

SEQ ID NO: 5906650 - DNA, 25 bp, Homo sapien
acattctgcaggaaaagagaatcca

SEQ ID NO: 5906651 - DNA, 25 bp, Homo sapien
gggcatttatttggatgaatatatt

SEQ ID NO: 5906652 - DNA, 25 bp, Homo sapien
cccctgataatggtgttactccggg

SEQ ID NO: 5906653 - DNA, 25 bp, Homo sapien
tactccgggtgactgtggaccacag

SEQ ID NO: 5906654 - DNA, 25 bp, Homo sapien
gccatcatgatagatagatgaccaa

SEQ ID NO: 5906655 - DNA, 25 bp, Homo sapien
tattcaaatcaatgtgttcatactg

SEQ ID NO: 5906656 - DNA, 25 bp, Homo sapien
tggtgttactccgggtgactgtgga

SEQ ID NO: 5906657 - DNA, 25 bp, Homo sapien
ttctcacccagtttgaccttgattc

SEQ ID NO: 5906658 - DNA, 25 bp, Homo sapien
tctgtaacaggatcttttgtctaga

SEQ ID NO: 5906659 - DNA, 25 bp, Homo sapien
ccttgtaatcctagagtcacctgtc

SEQ ID NO: 5906660 - DNA, 25 bp, Homo sapien
ctgggactaaagctatgtgtcacct

SEQ ID NO: 5906661 - DNA, 25 bp, Homo sapien
tggggatctgcccctgataatggtg

SEQ ID NO: 5906662 - DNA, 25 bp, Homo sapien
gggactaaagctatgtgtcacctta

SEQ ID NO: 5906663 - DNA, 25 bp, Homo sapien
cagttactgggactaaagctatgtg

SEQ ID NO: 5906664 - DNA, 25 bp, Homo sapien
ctcacccagtttgaccttgattcca

SEQ ID NO: 5906665 - DNA, 25 bp, Homo sapien
acctgtctttgcctcccagttactg

SEQ ID NO: 5906666 - DNA, 25 bp, Homo sapien
tttagttcacgtttgtattagaatt

SEQ ID NO: 5906667 - DNA, 25 bp, Homo sapien
ttcttgttttggttttgattttaga

SEQ ID NO: 5906668 - DNA, 25 bp, Homo sapien
tcatagagggatttttgtgctgttg

SEQ ID NO: 5906669 - DNA, 25 bp, Homo sapien
agggcatgggagggagagagacact

SEQ ID NO: 5906670 - DNA, 25 bp, Homo sapien
tctgtttgtcttcttttgtttgttt

SEQ ID NO: 5906671 - DNA, 25 bp, Homo sapien
catcttttttacccttatcactctc

SEQ ID NO: 5906672 - DNA, 25 bp, Homo sapien
ttctgcccttgtaatcctagagtca

SEQ ID NO: 5906673 - DNA, 25 bp, Homo sapien
aagtggtatttgggatttttgttga

SEQ ID NO: 5906674 - DNA, 25 bp, Homo sapien
ttttaatttctttcaaatatcaaga

SEQ ID NO: 5906675 - DNA, 25 bp, Homo sapien
gtaaacatcttttttacccttatca

SEQ ID NO: 5906676 - DNA, 25 bp, Homo sapien
agaattttgattcctaggtggccag

SEQ ID NO: 5906677 - DNA, 25 bp, Homo sapien
ctagagtcacctgtctttgcctccc

SEQ ID NO: 5906678 - DNA, 25 bp, Homo sapien
tattagattcagtcatgctgtgtct

SEQ ID NO: 5906679 - DNA, 25 bp, Homo sapien
tgcagccatcatgatagatagatga

SEQ ID NO: 5906680 - DNA, 25 bp, Homo sapien
agaatccaaacccctattctcaccc

SEQ ID NO: 5906681 - DNA, 25 bp, Homo sapien
gtgtgtgatttctttgttttccagt

SEQ ID NO: 5906682 - DNA, 25 bp, Homo sapien
ccttgattccacaatgccttcctct

SEQ ID NO: 5906683 - DNA, 25 bp, Homo sapien
tgttttgtttgtgtgtgatttcttt

SEQ ID NO: 5906684 - DNA, 25 bp, Homo sapien
gatcatagcaatatgtggggcattt

SEQ ID NO: 5906685 - DNA, 25 bp, Homo sapien
tgggatttttgttgattctgtttgt

SEQ ID NO: 5906686 - DNA, 25 bp, Homo sapien
agagcctctggcttgtaacattttt

SEQ ID NO: 5906687 - DNA, 25 bp, Homo sapien
ttcctaggtggccagagttgtgact

SEQ ID NO: 5906688 - DNA, 25 bp, Homo sapien
gggtagggtggaggtacctattaga

SEQ ID NO: 5906689 - DNA, 25 bp, Homo sapien
tttctttcaaatatcaagagggcat

SEQ ID NO: 5906690 - DNA, 25 bp, Homo sapien
tattctcacccagtttgaccttgat

SEQ ID NO: 5906691 - DNA, 25 bp, Homo sapien
atcagtaattttgtatttgttttgt

SEQ ID NO: 5906692 - DNA, 25 bp, Homo sapien
agagagacactaactctaagatcat

SEQ ID NO: 5906693 - DNA, 25 bp, Homo sapien
ctgtggaccacagcactgtgttccc

SEQ ID NO: 5906694 - DNA, 25 bp, Homo sapien
agacactaactctaagatcatagca

SEQ ID NO: 5906695 - DNA, 25 bp, Homo sapien
atgtggggcatttatttggatgaat

SEQ ID NO: 5906696 - DNA, 25 bp, Homo sapien
gagcagttattaattcccttgcttg

SEQ ID NO: 5906697 - DNA, 25 bp, Homo sapien
ctctcttatgatactgaccactgcc

SEQ ID NO: 5906698 - DNA, 25 bp, Homo sapien
ctagatttctgagtgtactttagtt

SEQ ID NO: 5906699 - DNA, 25 bp, Homo sapien
cttatgatactgaccactgccttac

SEQ ID NO: 5906700 - DNA, 25 bp, Homo sapien
tattctgcccttgtaatcctagagt

SEQ ID NO: 5906701 - DNA, 25 bp, Homo sapien
ggcatgggagggagagagacactaa

SEQ ID NO: 5906702 - DNA, 25 bp, Homo sapien
gttcacgtttgtattagaattatat

SEQ ID NO: 5906703 - DNA, 25 bp, Homo sapien
ttttgattcctaggtggccagagtt

SEQ ID NO: 5906704 - DNA, 25 bp, Homo sapien
gtggtggtcactgcacattctgcag

SEQ ID NO: 5906705 - DNA, 25 bp, Homo sapien
tgataatggtgttactccgggtgac

SEQ ID NO: 5906706 - DNA, 25 bp, Homo sapien
tgaagtggtatttgggatttttgtt

SEQ ID NO: 5906707 - DNA, 25 bp, Homo sapien
ttagattcagtcatgctgtgtctct

SEQ ID NO: 5906708 - DNA, 25 bp, Homo sapien
tttactatagaaactattctgccct

SEQ ID NO: 5906709 - DNA, 25 bp, Homo sapien
accacagcactgtgttcccagatgg

SEQ ID NO: 5906710 - DNA, 25 bp, Homo sapien
ccttcctctgtaacaggatcttttg

SEQ ID NO: 5906711 - DNA, 25 bp, Homo sapien
tgttcccagatggtggtggtcactg

SEQ ID NO: 5906712 - DNA, 25 bp, Homo sapien
gatctgcccctgataatggtgttac

SEQ ID NO: 5906713 - DNA, 25 bp, Homo sapien
agtcatgctgtgtctctgcctgaag

SEQ ID NO: 5906714 - DNA, 25 bp, Homo sapien
ttacccttatcactctcttatgata

SEQ ID NO: 5906715 - DNA, 25 bp, Homo sapien
actcatagagggatttttgtgctgt

SEQ ID NO: 5906716 - DNA, 25 bp, Homo sapien
gtggtatttgggatttttgttgatt

SEQ ID NO: 5906717 - DNA, 25 bp, Homo sapien
ggagagagacactaactctaagatc

SEQ ID NO: 5906718 - DNA, 25 bp, Homo sapien
aaagagaatccaaacccctattctc

SEQ ID NO: 5906719 - DNA, 25 bp, Homo sapien
ctgagtgtactttagttcacgtttg

SEQ ID NO: 5906720 - DNA, 25 bp, Homo sapien
caggtgcagccatcatgatagatag

SEQ ID NO: 5906721 - DNA, 25 bp, Homo sapien
gatggtggtggtcactgcacattct

SEQ ID NO: 5906722 - DNA, 25 bp, Homo sapien
tgtcttcttttgtttgtttttacta

SEQ ID NO: 5906723 - DNA, 25 bp, Homo sapien
attcagtcatgctgtgtctctgcct

SEQ ID NO: 5906724 - DNA, 25 bp, Homo sapien
gattccacaatgccttcctctgtaa

SEQ ID NO: 5906725 - DNA, 25 bp, Homo sapien
gttgtgactcatagagggatttttg

SEQ ID NO: 5906726 - DNA, 25 bp, Homo sapien
agtgaggtcttggggatctgcccct

SEQ ID NO: 5906727 - DNA, 25 bp, Homo sapien
tactggcaatacaactaatatgaaa

SEQ ID NO: 5906728 - DNA, 25 bp, Homo sapien
cctaggtggccagagttgtgactca

SEQ ID NO: 5906729 - DNA, 25 bp, Homo sapien
ttatttttaattcacttgttgctat

SEQ ID NO: 5906730 - DNA, 25 bp, Homo sapien
taaaacagaattttgattcctaggt

SEQ ID NO: 5906731 - DNA, 25 bp, Homo sapien
ctgtctttgcctcccagttactggg

SEQ ID NO: 5906732 - DNA, 25 bp, Homo sapien
tcatagcaatatgtggggcatttat

SEQ ID NO: 5906733 - DNA, 25 bp, Homo sapien
agcctctggcttgtaacatttttat

SEQ ID NO: 5906734 - DNA, 25 bp, Homo sapien
ctgatccgattttaaaagagtaaac

SEQ ID NO: 5906735 - DNA, 25 bp, Homo sapien
tgtctctgcctgaagtggtatttgg

SEQ ID NO: 5906736 - DNA, 25 bp, Homo sapien
tcttcttttgtttgtttttactata

SEQ ID NO: 5906737 - DNA, 25 bp, Homo sapien
atattgattaaaagggtagggtgga

SEQ ID NO: 5906738 - DNA, 25 bp, Homo sapien
ctcttatgatactgaccactgcctt

SEQ ID NO: 5906739 - DNA, 25 bp, Homo sapien
tcagtcatgctgtgtctctgcctga

SEQ ID NO: 5906740 - DNA, 25 bp, Homo sapien
aatcctagagtcacctgtctttgcc

SEQ ID NO: 5906741 - DNA, 25 bp, Homo sapien
acagaattttgattcctaggtggcc

SEQ ID NO: 5906742 - DNA, 25 bp, Homo sapien
tgtttttactatagaaactattctg

SEQ ID NO: 5906743 - DNA, 25 bp, Homo sapien
cacccagtttgaccttgattccaca

SEQ ID NO: 5906744 - DNA, 25 bp, Homo sapien
gcctcccagttactgggactaaagc

SEQ ID NO: 5906745 - DNA, 25 bp, Homo sapien
atagcaatatgtggggcatttattt

SEQ ID NO: 5906746 - DNA, 25 bp, Homo sapien
aacccctattctcacccagtttgac

SEQ ID NO: 5906747 - DNA, 25 bp, Homo sapien
tgagccagggtgtttcttgttttgg

SEQ ID NO: 5906748 - DNA, 25 bp, Homo sapien
aggtcttggggatctgcccctgata

SEQ ID NO: 5906749 - DNA, 25 bp, Homo sapien
tcccttgcttggtccttgggttgac

SEQ ID NO: 5906750 - DNA, 25 bp, Homo sapien
taactctaagatcatagcaatatgt

SEQ ID NO: 5906751 - DNA, 25 bp, Homo sapien
tcatgatagatagatgaccaacctg

SEQ ID NO: 5906752 - DNA, 25 bp, Homo sapien
gtggaccacagcactgtgttcccag

SEQ ID NO: 5906753 - DNA, 25 bp, Homo sapien
gcacattctgcaggaaaagagaatc

SEQ ID NO: 5906754 - DNA, 25 bp, Homo sapien
caggaaaagagaatccaaaccccta

SEQ ID NO: 5906755 - DNA, 25 bp, Homo sapien
ttcaaatcaatgtgttcatactgtt

SEQ ID NO: 5906756 - DNA, 25 bp, Homo sapien
tacctattagattcagtcatgctgt

SEQ ID NO: 5906757 - DNA, 25 bp, Homo sapien
taattcccttgcttggtccttgggt

SEQ ID NO: 5906758 - DNA, 25 bp, Homo sapien
ggtggtcactgcacattctgcagga

SEQ ID NO: 5906759 - DNA, 25 bp, Homo sapien
ctgagcagttattaattcccttgct

SEQ ID NO: 5906760 - DNA, 25 bp, Homo sapien
ccttatcactctcttatgatactga

SEQ ID NO: 5906761 - DNA, 25 bp, Homo sapien
ttagagcctctggcttgtaacattt

SEQ ID NO: 5906762 - DNA, 25 bp, Homo sapien
cccctattctcacccagtttgacct

SEQ ID NO: 5906763 - DNA, 25 bp, Homo sapien
gcccttgtaatcctagagtcacctg

SEQ ID NO: 5906764 - DNA, 25 bp, Homo sapien
aattcacttgttgctattcaaatca

SEQ ID NO: 5906765 - DNA, 25 bp, Homo sapien
aaagctatgtgtcaccttactgagc

SEQ ID NO: 5906766 - DNA, 25 bp, Homo sapien
ttgctattcaaatcaatgtgttcat

SEQ ID NO: 5906767 - DNA, 25 bp, Homo sapien
aactttcattctgagcagttattaa

SEQ ID NO: 5906768 - DNA, 25 bp, Homo sapien
tgtatttgttttgtttgtgtgtgat

SEQ ID NO: 5906769 - DNA, 25 bp, Homo sapien
aatgccttcctctgtaacaggatct

SEQ ID NO: 5906770 - DNA, 25 bp, Homo sapien
tgggagggagagagacactaactct

SEQ ID NO: 5906771 - DNA, 25 bp, Homo sapien
gggatctgcccctgataatggtgtt

SEQ ID NO: 5906772 - DNA, 25 bp, Homo sapien
gtgtgatttctttgttttccagttt

SEQ ID NO: 5906773 - DNA, 25 bp, Homo sapien
ggatttttgttgattctgtttgtct

SEQ ID NO: 5906774 - DNA, 25 bp, Homo sapien
cactgccttactggcaatacaacta

SEQ ID NO: 5906775 - DNA, 25 bp, Homo sapien
gagttgtgactcatagagggatttt

SEQ ID NO: 5906776 - DNA, 25 bp, Homo sapien
taacaggatcttttgtctagatttc

SEQ ID NO: 5906777 - DNA, 25 bp, Homo sapien
agttattaattcccttgcttggtcc

SEQ ID NO: 5906778 - DNA, 25 bp, Homo sapien
ttgtaatcctagagtcacctgtctt

SEQ ID NO: 5906779 - DNA, 25 bp, Homo sapien
ctaagatcatagcaatatgtggggc

SEQ ID NO: 5906780 - DNA, 25 bp, Homo sapien
caccttactgagccagggtgtttct

SEQ ID NO: 5906781 - DNA, 25 bp, Homo sapien
gtcaccttactgagccagggtgttt

SEQ ID NO: 5906782 - DNA, 25 bp, Homo sapien
tttaatcagtaattttgtatttgtt

SEQ ID NO: 5906783 - DNA, 25 bp, Homo sapien
catcatgatagatagatgaccaacc

SEQ ID NO: 5906784 - DNA, 25 bp, Homo sapien
tgccttcctctgtaacaggatcttt

SEQ ID NO: 5906785 - DNA, 25 bp, Homo sapien
atagaaactattctgcccttgtaat

SEQ ID NO: 5906786 - DNA, 25 bp, Homo sapien
atcaagagggcatgggagggagaga

SEQ ID NO: 5906787 - DNA, 25 bp, Homo sapien
ctggcaatacaactaatatgaaaac

SEQ ID NO: 5906788 - DNA, 25 bp, Homo sapien
atttttaatttctttcaaatatcaa

SEQ ID NO: 5906789 - DNA, 25 bp, Homo sapien
gtcttggggatctgcccctgataat

SEQ ID NO: 5906790 - DNA, 25 bp, Homo sapien
aatccaaacccctattctcacccag

SEQ ID NO: 5906791 - DNA, 25 bp, Homo sapien
caaactttcattctgagcagttatt

SEQ ID NO: 5906792 - DNA, 25 bp, Homo sapien
tggaggtacctattagattcagtca

SEQ ID NO: 5906793 - DNA, 25 bp, Homo sapien
cattctgagcagttattaattccct

SEQ ID NO: 5906794 - DNA, 25 bp, Homo sapien
agaaactattctgcccttgtaatcc

SEQ ID NO: 5906795 - DNA, 25 bp, Homo sapien
gaggtacctattagattcagtcatg

SEQ ID NO: 5906796 - DNA, 25 bp, Homo sapien
atcactctcttatgatactgaccac

SEQ ID NO: 5906797 - DNA, 25 bp, Homo sapien
ttcccagatggtggtggtcactgca

SEQ ID NO: 5906798 - DNA, 25 bp, Homo sapien
cctctggcttgtaacatttttataa

SEQ ID NO: 5906799 - DNA, 25 bp, Homo sapien
acatttttaatttctttcaaatatc

SEQ ID NO: 5906800 - DNA, 25 bp, Homo sapien
gcatttatttggatgaatatattga

SEQ ID NO: 5906801 - DNA, 25 bp, Homo sapien
ctaaagctatgtgtcaccttactga

SEQ ID NO: 5906802 - DNA, 25 bp, Homo sapien
agagaatccaaacccctattctcac

SEQ ID NO: 5906803 - DNA, 25 bp, Homo sapien
tagatgaccaacctgatccgatttt

SEQ ID NO: 5906804 - DNA, 25 bp, Homo sapien
gaccttgattccacaatgccttcct

SEQ ID NO: 5906805 - DNA, 25 bp, Homo sapien
cctattctcacccagtttgaccttg

SEQ ID NO: 5906806 - DNA, 25 bp, Homo sapien
ggtggccagagttgtgactcataga

SEQ ID NO: 5906807 - DNA, 25 bp, Homo sapien
caaacccctattctcacccagtttg

SEQ ID NO: 5906808 - DNA, 25 bp, Homo sapien
ctccgggtgactgtggaccacagca

SEQ ID NO: 5906809 - DNA, 25 bp, Homo sapien
ggagggagagagacactaactctaa

SEQ ID NO: 5906810 - DNA, 25 bp, Homo sapien
caacctgatccgattttaaaagagt

SEQ ID NO: 5906811 - DNA, 25 bp, Homo sapien
tctctgcctgaagtggtatttggga

SEQ ID NO: 5906812 - DNA, 25 bp, Homo sapien
aatggtgttactccgggtgactgtg

SEQ ID NO: 5906813 - DNA, 25 bp, Homo sapien
atatcaagagggcatgggagggaga

SEQ ID NO: 5906814 - DNA, 25 bp, Homo sapien
ttccagtttatttttaattcacttg

SEQ ID NO: 5906815 - DNA, 25 bp, Homo sapien
tgtgttcccagatggtggtggtcac

SEQ ID NO: 5906816 - DNA, 25 bp, Homo sapien
tccttgggttgacaggtgcagccat

SEQ ID NO: 5906817 - DNA, 25 bp, Homo sapien
aacatcttttttacccttatcactc

SEQ ID NO: 5906818 - DNA, 25 bp, Homo sapien
atttttgtgctgttgtgatcagtga

SEQ ID NO: 5906819 - DNA, 25 bp, Homo sapien
taggtggccagagttgtgactcata

SEQ ID NO: 5906820 - DNA, 25 bp, Homo sapien
ttttgtgctgttgtgatcagtgagg

SEQ ID NO: 5906821 - DNA, 25 bp, Homo sapien
agagtcacctgtctttgcctcccag

SEQ ID NO: 5906822 - DNA, 25 bp, Homo sapien
gtctagatttctgagtgtactttag

SEQ ID NO: 5906823 - DNA, 25 bp, Homo sapien
aatttctttcaaatatcaagagggc

SEQ ID NO: 5906824 - DNA, 25 bp, Homo sapien
ttgattttagagcctctggcttgta

SEQ ID NO: 5906825 - DNA, 25 bp, Homo sapien
tgaggtcttggggatctgcccctga

SEQ ID NO: 5906826 - DNA, 25 bp, Homo sapien
tcttttgtctagatttctgagtgta

SEQ ID NO: 5906827 - DNA, 25 bp, Homo sapien
attctgcaggaaaagagaatccaaa

SEQ ID NO: 5906828 - DNA, 25 bp, Homo sapien
tgttgctattcaaatcaatgtgttc

SEQ ID NO: 5906829 - DNA, 25 bp, Homo sapien
tccaaacccctattctcacccagtt

SEQ ID NO: 5906830 - DNA, 25 bp, Homo sapien
tgcctgaagtggtatttgggatttt

SEQ ID NO: 5906831 - DNA, 25 bp, Homo sapien
tatgatactgaccactgccttactg

SEQ ID NO: 5906832 - DNA, 25 bp, Homo sapien
ttgtttgtttttactatagaaacta

SEQ ID NO: 5906833 - DNA, 25 bp, Homo sapien
ggttttgattttagagcctctggct

SEQ ID NO: 5906834 - DNA, 25 bp, Homo sapien
ttccacaatgccttcctctgtaaca

SEQ ID NO: 5906835 - DNA, 25 bp, Homo sapien
ttctgagtgtactttagttcacgtt

SEQ ID NO: 5906836 - DNA, 25 bp, Homo sapien
ggtggaggtacctattagattcagt

SEQ ID NO: 5906837 - DNA, 25 bp, Homo sapien
acactaactctaagatcatagcaat

SEQ ID NO: 5906838 - DNA, 25 bp, Homo sapien
atttttgttgattctgtttgtcttc

SEQ ID NO: 5906839 - DNA, 25 bp, Homo sapien
tgattaaaagggtagggtggaggta

SEQ ID NO: 5906840 - DNA, 25 bp, Homo sapien
atgtgtcaccttactgagccagggt

SEQ ID NO: 5906841 - DNA, 25 bp, Homo sapien
actaactctaagatcatagcaatat

SEQ ID NO: 5906842 - DNA, 25 bp, Homo sapien
gctattcaaatcaatgtgttcatac

SEQ ID NO: 5906843 - DNA, 25 bp, Homo sapien
atgaaaacatttttaatttctttca

SEQ ID NO: 5906844 - DNA, 25 bp, Homo sapien
cctgaagtggtatttgggatttttg

SEQ ID NO: 5906845 - DNA, 25 bp, Homo sapien
cctctgtaacaggatcttttgtcta

SEQ ID NO: 5906846 - DNA, 25 bp, Homo sapien
cagtttgaccttgattccacaatgc

SEQ ID NO: 5906847 - DNA, 25 bp, Homo sapien
gtgatttctttgttttccagtttat

SEQ ID NO: 5906848 - DNA, 25 bp, Homo sapien
ttttgtctagatttctgagtgtact

SEQ ID NO: 5906849 - DNA, 25 bp, Homo sapien
tcacctgtctttgcctcccagttac

SEQ ID NO: 5906850 - DNA, 25 bp, Homo sapien
agagggcatgggagggagagagaca

SEQ ID NO: 5906851 - DNA, 25 bp, Homo sapien
tcatgctgtgtctctgcctgaagtg

SEQ ID NO: 5906852 - DNA, 25 bp, Homo sapien
gtagggtggaggtacctattagatt

SEQ ID NO: 5906853 - DNA, 25 bp, Homo sapien
tatttgttttgtttgtgtgtgattt

SEQ ID NO: 5906854 - DNA, 25 bp, Homo sapien
gtaatcctagagtcacctgtctttg

SEQ ID NO: 5906855 - DNA, 25 bp, Homo sapien
tgtaacaggatcttttgtctagatt

SEQ ID NO: 5906856 - DNA, 25 bp, Homo sapien
cttggggatctgcccctgataatgg

SEQ ID NO: 5906857 - DNA, 25 bp, Homo sapien
ggtatttgggatttttgttgattct

SEQ ID NO: 5906858 - DNA, 25 bp, Homo sapien
ggtccttgggttgacaggtgcagcc

SEQ ID NO: 5906859 - DNA, 25 bp, Homo sapien
ttctgagcagttattaattcccttg

SEQ ID NO: 5906860 - DNA, 25 bp, Homo sapien
cctattagattcagtcatgctgtgt

SEQ ID NO: 5906861 - DNA, 25 bp, Homo sapien
tatttgggatttttgttgattctgt

SEQ ID NO: 5906862 - DNA, 25 bp, Homo sapien
gcttggtccttgggttgacaggtgc

SEQ ID NO: 5906863 - DNA, 25 bp, Homo sapien
cttactggcaatacaactaatatga

SEQ ID NO: 5906864 - DNA, 25 bp, Homo sapien
gtgttactccgggtgactgtggacc

SEQ ID NO: 5906865 - DNA, 25 bp, Homo sapien
aaacagaattttgattcctaggtgg

SEQ ID NO: 5906866 - DNA, 25 bp, Homo sapien
tttcaaatatcaagagggcatggga

SEQ ID NO: 5906867 - DNA, 25 bp, Homo sapien
tgtgttcatactgtttgaacaacac

SEQ ID NO: 5906868 - DNA, 25 bp, Homo sapien
tgatactgaccactgccttactggc

SEQ ID NO: 5906869 - DNA, 25 bp, Homo sapien
ttggttttgattttagagcctctgg

SEQ ID NO: 5906870 - DNA, 25 bp, Homo sapien
aatgtgttcatactgtttgaacaac

SEQ ID NO: 5906871 - DNA, 25 bp, Homo sapien
tcacgtttgtattagaattatattt

SEQ ID NO: 5906872 - DNA, 25 bp, Homo sapien
ttgtgtgtgatttctttgttttcca

SEQ ID NO: 5906873 - DNA, 25 bp, Homo sapien
cttgttttggttttgattttagagc

SEQ ID NO: 5906874 - DNA, 25 bp, Homo sapien
tgcccctgataatggtgttactccg

SEQ ID NO: 5906875 - DNA, 25 bp, Homo sapien
aaactattctgcccttgtaatccta

SEQ ID NO: 5906876 - DNA, 25 bp, Homo sapien
agagacactaactctaagatcatag

SEQ ID NO: 5906877 - DNA, 25 bp, Homo sapien
acaggatcttttgtctagatttctg

SEQ ID NO: 5906878 - DNA, 25 bp, Homo sapien
tggtcactgcacattctgcaggaaa

SEQ ID NO: 5906879 - DNA, 25 bp, Homo sapien
ctcccagttactgggactaaagcta

SEQ ID NO: 5906880 - DNA, 25 bp, Homo sapien
agagggatttttgtgctgttgtgat

SEQ ID NO: 5906881 - DNA, 25 bp, Homo sapien
tagatagatgaccaacctgatccga

SEQ ID NO: 5906882 - DNA, 25 bp, Homo sapien
ttcttttgtttgtttttactataga

SEQ ID NO: 5906883 - DNA, 25 bp, Homo sapien
gatagatagatgaccaacctgatcc

SEQ ID NO: 5906884 - DNA, 25 bp, Homo sapien
ttttggttttgattttagagcctct

SEQ ID NO: 5906885 - DNA, 25 bp, Homo sapien
attaattcccttgcttggtccttgg

SEQ ID NO: 5906886 - DNA, 25 bp, Homo sapien
ccttgcttggtccttgggttgacag

SEQ ID NO: 5906887 - DNA, 25 bp, Homo sapien
tttgtatttgttttgtttgtgtgtg

SEQ ID NO: 5906888 - DNA, 25 bp, Homo sapien
gatcttttgtctagatttctgagtg

SEQ ID NO: 5906889 - DNA, 25 bp, Homo sapien
ttgtttgtgtgtgatttctttgttt

SEQ ID NO: 5906890 - DNA, 25 bp, Homo sapien
taatcagtaattttgtatttgtttt

SEQ ID NO: 5906891 - DNA, 25 bp, Homo sapien
tcaaatatcaagagggcatgggagg

SEQ ID NO: 5906892 - DNA, 25 bp, Homo sapien
cagcactgtgttcccagatggtggt

SEQ ID NO: 5906893 - DNA, 25 bp, Homo sapien
ggtgcagccatcatgatagatagat

SEQ ID NO: 5906894 - DNA, 25 bp, Homo sapien
attctgtttgtcttcttttgtttgt

SEQ ID NO: 5906895 - DNA, 25 bp, Homo sapien
actttagttcacgtttgtattagaa

SEQ ID NO: 5906896 - DNA, 25 bp, Homo sapien
actgagccagggtgtttcttgtttt

SEQ ID NO: 5906897 - DNA, 25 bp, Homo sapien
gcactgtgttcccagatggtggtgg

SEQ ID NO: 5906898 - DNA, 25 bp, Homo sapien
ttttagagcctctggcttgtaacat

SEQ ID NO: 5906899 - DNA, 25 bp, Homo sapien
cagagttgtgactcatagagggatt

SEQ ID NO: 5906900 - DNA, 25 bp, Homo sapien
gttgattctgtttgtcttcttttgt

SEQ ID NO: 5906901 - DNA, 25 bp, Homo sapien
gtgtactttagttcacgtttgtatt

SEQ ID NO: 5906902 - DNA, 25 bp, Homo sapien
tggtggtggtcactgcacattctgc

SEQ ID NO: 5906903 - DNA, 25 bp, Homo sapien
gcttgtaacatttttataaaacaga

SEQ ID NO: 5906904 - DNA, 25 bp, Homo sapien
gattttagagcctctggcttgtaac

SEQ ID NO: 5906905 - DNA, 25 bp, Homo sapien
atttttaattcacttgttgctattc

SEQ ID NO: 5906906 - DNA, 25 bp, Homo sapien
gttactccgggtgactgtggaccac

SEQ ID NO: 5906907 - DNA, 25 bp, Homo sapien
ttggtccttgggttgacaggtgcag

SEQ ID NO: 5906908 - DNA, 25 bp, Homo sapien
cagatggtggtggtcactgcacatt

SEQ ID NO: 5906909 - DNA, 25 bp, Homo sapien
tttataaaacagaattttgattcct

SEQ ID NO: 5906910 - DNA, 25 bp, Homo sapien
gccttactggcaatacaactaatat

SEQ ID NO: 5906911 - DNA, 25 bp, Homo sapien
agggtggaggtacctattagattca

SEQ ID NO: 5906912 - DNA, 25 bp, Homo sapien
agggatttttgtgctgttgtgatca

SEQ ID NO: 5906913 - DNA, 25 bp, Homo sapien
gaaaagagaatccaaacccctattc

SEQ ID NO: 5906914 - DNA, 25 bp, Homo sapien
ttcattctgagcagttattaattcc

SEQ ID NO: 5906915 - DNA, 25 bp, Homo sapien
gtgctgttgtgatcagtgaggtctt

SEQ ID NO: 5906916 - DNA, 25 bp, Homo sapien
cactctcttatgatactgaccactg

SEQ ID NO: 5906917 - DNA, 25 bp, Homo sapien
agattcagtcatgctgtgtctctgc

SEQ ID NO: 5906918 - DNA, 25 bp, Homo sapien
ttgtgatcagtgaggtcttggggat

SEQ ID NO: 5906919 - DNA, 25 bp, Homo sapien
gactaaagctatgtgtcaccttact

SEQ ID NO: 5906920 - DNA, 25 bp, Homo sapien
tgactcatagagggatttttgtgct

SEQ ID NO: 5906921 - DNA, 25 bp, Homo sapien
tttttaatcagtaattttgtatttg

SEQ ID NO: 5906922 - DNA, 25 bp, Homo sapien
ttattaattcccttgcttggtcctt

SEQ ID NO: 5906923 - DNA, 25 bp, Homo sapien
ctgcacattctgcaggaaaagagaa

SEQ ID NO: 5906924 - DNA, 25 bp, Homo sapien
tctgcctgaagtggtatttgggatt

SEQ ID NO: 5906925 - DNA, 25 bp, Homo sapien
actctaagatcatagcaatatgtgg

SEQ ID NO: 5906926 - DNA, 25 bp, Homo sapien
ctgcccttgtaatcctagagtcacc

SEQ ID NO: 5906927 - DNA, 25 bp, Homo sapien
gtttatttttaattcacttgttgct

SEQ ID NO: 5906928 - DNA, 25 bp, Homo sapien
gattcctaggtggccagagttgtga

SEQ ID NO: 5906929 - DNA, 25 bp, Homo sapien
tgaccaacctgatccgattttaaaa

SEQ ID NO: 5906930 - DNA, 25 bp, Homo sapien
cttgttgctattcaaatcaatgtgt

SEQ ID NO: 5906931 - DNA, 25 bp, Homo sapien
ttttgtttgtgtgtgatttctttgt

SEQ ID NO: 5906932 - DNA, 25 bp, Homo sapien
ggcaatacaactaatatgaaaacat

SEQ ID NO: 5906933 - DNA, 25 bp, Homo sapien
tcagtgaggtcttggggatctgccc

SEQ ID NO: 5906934 - DNA, 25 bp, Homo sapien
ctttgcctcccagttactgggacta

SEQ ID NO: 5906935 - DNA, 25 bp, Homo sapien
gtttgaccttgattccacaatgcct

SEQ ID NO: 5906936 - DNA, 25 bp, Homo sapien
tctgcccctgataatggtgttactc

SEQ ID NO: 5906937 - DNA, 25 bp, Homo sapien
cagtttatttttaattcacttgttg

SEQ ID NO: 5906938 - DNA, 25 bp, Homo sapien
ttgaccttgattccacaatgccttc

SEQ ID NO: 5906939 - DNA, 25 bp, Homo sapien
acaatgccttcctctgtaacaggat

SEQ ID NO: 5906940 - DNA, 25 bp, Homo sapien
agtcacctgtctttgcctcccagtt

SEQ ID NO: 5906941 - DNA, 25 bp, Homo sapien
tactatagaaactattctgcccttg

SEQ ID NO: 5906942 - DNA, 25 bp, Homo sapien
agctatgtgtcaccttactgagcca

SEQ ID NO: 5906943 - DNA, 25 bp, Homo sapien
gtcactgcacattctgcaggaaaag

SEQ ID NO: 5906944 - DNA, 25 bp, Homo sapien
tgtgtctctgcctgaagtggtattt

SEQ ID NO: 5906945 - DNA, 25 bp, Homo sapien
gtgtcaccttactgagccagggtgt

SEQ ID NO: 5906946 - DNA, 25 bp, Homo sapien
cccagtttgaccttgattccacaat

SEQ ID NO: 5906947 - DNA, 25 bp, Homo sapien
caagagggcatgggagggagagaga

SEQ ID NO: 5906948 - DNA, 25 bp, Homo sapien
tctttcaaatatcaagagggcatgg

SEQ ID NO: 5906949 - DNA, 25 bp, Homo sapien
tctgcaggaaaagagaatccaaacc

SEQ ID NO: 5906950 - DNA, 25 bp, Homo sapien
gactgtggaccacagcactgtgttc

SEQ ID NO: 5906951 - DNA, 25 bp, Homo sapien
gatccgattttaaaagagtaaacat

SEQ ID NO: 5906952 - DNA, 25 bp, Homo sapien
gccagagttgtgactcatagaggga

SEQ ID NO: 5906953 - DNA, 25 bp, Homo sapien
ccacaatgccttcctctgtaacagg

SEQ ID NO: 5906954 - DNA, 25 bp, Homo sapien
gggtgactgtggaccacagcactgt

SEQ ID NO: 5906955 - DNA, 25 bp, Homo sapien
tgtattgccagtaaggcagtggtca

SEQ ID NO: 5906956 - DNA, 25 bp, Homo sapien
ttataaaaatgttacaagccagagg

SEQ ID NO: 5906957 - DNA, 25 bp, Homo sapien
acacagcatgactgaatctaatagg

SEQ ID NO: 5906958 - DNA, 25 bp, Homo sapien
attcatccaaataaatgccccacat

SEQ ID NO: 5906959 - DNA, 25 bp, Homo sapien
tgaaagaaattaaaaatgttttcat

SEQ ID NO: 5906960 - DNA, 25 bp, Homo sapien
aaaacaaatacaaaattactgatta

SEQ ID NO: 5906961 - DNA, 25 bp, Homo sapien
taaggtgacacatagctttagtccc

SEQ ID NO: 5906962 - DNA, 25 bp, Homo sapien
tttggattctcttttcctgcagaat

SEQ ID NO: 5906963 - DNA, 25 bp, Homo sapien
tacaagggcagaatagtttctatag

SEQ ID NO: 5906964 - DNA, 25 bp, Homo sapien
acaaacagaatcaacaaaaatccca

SEQ ID NO: 5906965 - DNA, 25 bp, Homo sapien
agtatcataagagagtgataagggt

SEQ ID NO: 5906966 - DNA, 25 bp, Homo sapien
ggatcaggttggtcatctatctatc

SEQ ID NO: 5906967 - DNA, 25 bp, Homo sapien
caccattatcaggggcagatcccca

SEQ ID NO: 5906968 - DNA, 25 bp, Homo sapien
ctatcatgatggctgcacctgtcaa

SEQ ID NO: 5906969 - DNA, 25 bp, Homo sapien
atattgctatgatcttagagttagt

SEQ ID NO: 5906970 - DNA, 25 bp, Homo sapien
ggcagaatagtttctatagtaaaaa

SEQ ID NO: 5906971 - DNA, 25 bp, Homo sapien
caccatctgggaacacagtgctgtg

SEQ ID NO: 5906972 - DNA, 25 bp, Homo sapien
tttcctgcagaatgtgcagtgacca

SEQ ID NO: 5906973 - DNA, 25 bp, Homo sapien
tgctatgatcttagagttagtgtct

SEQ ID NO: 5906974 - DNA, 25 bp, Homo sapien
ctgcacctgtcaacccaaggaccaa

SEQ ID NO: 5906975 - DNA, 25 bp, Homo sapien
gccctcttgatatttgaaagaaatt

SEQ ID NO: 5906976 - DNA, 25 bp, Homo sapien
aaatgttacaagccagaggctctaa

SEQ ID NO: 5906977 - DNA, 25 bp, Homo sapien
gatcttagagttagtgtctctctcc

SEQ ID NO: 5906978 - DNA, 25 bp, Homo sapien
tgtgcagtgaccaccaccatctggg

SEQ ID NO: 5906979 - DNA, 25 bp, Homo sapien
cactcagaaatctagacaaaagatc

SEQ ID NO: 5906980 - DNA, 25 bp, Homo sapien
tcacaactctggccacctaggaatc

SEQ ID NO: 5906981 - DNA, 25 bp, Homo sapien
ccccaagacctcactgatcacaaca

SEQ ID NO: 5906982 - DNA, 25 bp, Homo sapien
gaacacagtgctgtggtccacagtc

SEQ ID NO: 5906983 - DNA, 25 bp, Homo sapien
agcaacaagtgaattaaaaataaac

SEQ ID NO: 5906984 - DNA, 25 bp, Homo sapien
aacaaatacaaaattactgattaaa

SEQ ID NO: 5906985 - DNA, 25 bp, Homo sapien
atgccccacatattgctatgatctt

SEQ ID NO: 5906986 - DNA, 25 bp, Homo sapien
tgatttgaatagcaacaagtgaatt

SEQ ID NO: 5906987 - DNA, 25 bp, Homo sapien
gcacctgtcaacccaaggaccaagc

SEQ ID NO: 5906988 - DNA, 25 bp, Homo sapien
atcaaggtcaaactgggtgagaata

SEQ ID NO: 5906989 - DNA, 25 bp, Homo sapien
tgactgaatctaataggtacctcca

SEQ ID NO: 5906990 - DNA, 25 bp, Homo sapien
aggaaggcattgtggaatcaaggtc

SEQ ID NO: 5906991 - DNA, 25 bp, Homo sapien
acaaacaaaagaagacaaacagaat

SEQ ID NO: 5906992 - DNA, 25 bp, Homo sapien
aatgtgcagtgaccaccaccatctg

SEQ ID NO: 5906993 - DNA, 25 bp, Homo sapien
ttacagaggaaggcattgtggaatc

SEQ ID NO: 5906994 - DNA, 25 bp, Homo sapien
ttagtgtctctctccctcccatgcc

SEQ ID NO: 5906995 - DNA, 25 bp, Homo sapien
atttgaatagcaacaagtgaattaa

SEQ ID NO: 5906996 - DNA, 25 bp, Homo sapien
gtgagaataggggtttggattctct

SEQ ID NO: 5906997 - DNA, 25 bp, Homo sapien
atccaaataaatgccccacatattg

SEQ ID NO: 5906998 - DNA, 25 bp, Homo sapien
attatcaggggcagatccccaagac

SEQ ID NO: 5906999 - DNA, 25 bp, Homo sapien
atgaacacattgatttgaatagcaa

SEQ ID NO: 5907000 - DNA, 25 bp, Homo sapien
atcacaacagcacaaaaatccctct

SEQ ID NO: 5907001 - DNA, 25 bp, Homo sapien
atcacacacaaacaaaacaaataca

SEQ ID NO: 5907002 - DNA, 25 bp, Homo sapien
aatacaaacgtgaactaaagtacac

SEQ ID NO: 5907003 - DNA, 25 bp, Homo sapien
agacaaacagaatcaacaaaaatcc

SEQ ID NO: 5907004 - DNA, 25 bp, Homo sapien
tacaaacgtgaactaaagtacactc

SEQ ID NO: 5907005 - DNA, 25 bp, Homo sapien
ttgatatttgaaagaaattaaaaat

SEQ ID NO: 5907006 - DNA, 25 bp, Homo sapien
tgatcacaacagcacaaaaatccct

SEQ ID NO: 5907007 - DNA, 25 bp, Homo sapien
tcactgatcacaacagcacaaaaat

SEQ ID NO: 5907008 - DNA, 25 bp, Homo sapien
agagttagtgtctctctccctccca

SEQ ID NO: 5907009 - DNA, 25 bp, Homo sapien
tagtaaaaacaaacaaaagaagaca

SEQ ID NO: 5907010 - DNA, 25 bp, Homo sapien
gaatagcaacaagtgaattaaaaat

SEQ ID NO: 5907011 - DNA, 25 bp, Homo sapien
actcttttaaaatcggatcaggttg

SEQ ID NO: 5907012 - DNA, 25 bp, Homo sapien
aattaataactgctcagaatgaaag

SEQ ID NO: 5907013 - DNA, 25 bp, Homo sapien
aattctaatacaaacgtgaactaaa

SEQ ID NO: 5907014 - DNA, 25 bp, Homo sapien
gagaataggggtttggattctcttt

SEQ ID NO: 5907015 - DNA, 25 bp, Homo sapien
tacaaaattactgattaaaaaatat

SEQ ID NO: 5907016 - DNA, 25 bp, Homo sapien
gtttactcttttaaaatcggatcag

SEQ ID NO: 5907017 - DNA, 25 bp, Homo sapien
cacccggagtaacaccattatcagg

SEQ ID NO: 5907018 - DNA, 25 bp, Homo sapien
agatgtttactcttttaaaatcgga

SEQ ID NO: 5907019 - DNA, 25 bp, Homo sapien
ccacctaggaatcaaaattctgttt

SEQ ID NO: 5907020 - DNA, 25 bp, Homo sapien
tcttagagttagtgtctctctccct

SEQ ID NO: 5907021 - DNA, 25 bp, Homo sapien
gaaggcattgtggaatcaaggtcaa

SEQ ID NO: 5907022 - DNA, 25 bp, Homo sapien
tccctcccatgccctcttgatattt

SEQ ID NO: 5907023 - DNA, 25 bp, Homo sapien
atctatctatcatgatggctgcacc

SEQ ID NO: 5907024 - DNA, 25 bp, Homo sapien
caggtgactctaggattacaagggc

SEQ ID NO: 5907025 - DNA, 25 bp, Homo sapien
gtgttgttcaaacagtatgaacaca

SEQ ID NO: 5907026 - DNA, 25 bp, Homo sapien
aaataaatgccccacatattgctat

SEQ ID NO: 5907027 - DNA, 25 bp, Homo sapien
tggaatcaaggtcaaactgggtgag

SEQ ID NO: 5907028 - DNA, 25 bp, Homo sapien
tctatgagtcacaactctggccacc

SEQ ID NO: 5907029 - DNA, 25 bp, Homo sapien
ggctgcacctgtcaacccaaggacc

SEQ ID NO: 5907030 - DNA, 25 bp, Homo sapien
tcccaaataccacttcaggcagaga

SEQ ID NO: 5907031 - DNA, 25 bp, Homo sapien
gaccaccaccatctgggaacacagt

SEQ ID NO: 5907032 - DNA, 25 bp, Homo sapien
agaatgtgcagtgaccaccaccatc

SEQ ID NO: 5907033 - DNA, 25 bp, Homo sapien
ataattctaatacaaacgtgaacta

SEQ ID NO: 5907034 - DNA, 25 bp, Homo sapien
gctcagtaaggtgacacatagcttt

SEQ ID NO: 5907035 - DNA, 25 bp, Homo sapien
gaagacaaacagaatcaacaaaaat

SEQ ID NO: 5907036 - DNA, 25 bp, Homo sapien
aaacaaaagaagacaaacagaatca

SEQ ID NO: 5907037 - DNA, 25 bp, Homo sapien
aaatgccccacatattgctatgatc

SEQ ID NO: 5907038 - DNA, 25 bp, Homo sapien
ggttggtcatctatctatcatgatg

SEQ ID NO: 5907039 - DNA, 25 bp, Homo sapien
accaccatctgggaacacagtgctg

SEQ ID NO: 5907040 - DNA, 25 bp, Homo sapien
gtgaccaccaccatctgggaacaca

SEQ ID NO: 5907041 - DNA, 25 bp, Homo sapien
tcggatcaggttggtcatctatcta

SEQ ID NO: 5907042 - DNA, 25 bp, Homo sapien
cggagtaacaccattatcaggggca

SEQ ID NO: 5907043 - DNA, 25 bp, Homo sapien
caagaaacaccctggctcagtaagg

SEQ ID NO: 5907044 - DNA, 25 bp, Homo sapien
ttaataactgctcagaatgaaagtt

SEQ ID NO: 5907045 - DNA, 25 bp, Homo sapien
aactaaagtacactcagaaatctag

SEQ ID NO: 5907046 - DNA, 25 bp, Homo sapien
agccagaggctctaaaatcaaaacc

SEQ ID NO: 5907047 - DNA, 25 bp, Homo sapien
tcatccaaataaatgccccacatat

SEQ ID NO: 5907048 - DNA, 25 bp, Homo sapien
gtggtccacagtcacccggagtaac

SEQ ID NO: 5907049 - DNA, 25 bp, Homo sapien
tgtggaatcaaggtcaaactgggtg

SEQ ID NO: 5907050 - DNA, 25 bp, Homo sapien
aaaatccctctatgagtcacaactc

SEQ ID NO: 5907051 - DNA, 25 bp, Homo sapien
ggaccaagcaagggaattaataact

SEQ ID NO: 5907052 - DNA, 25 bp, Homo sapien
tatagtaaaaacaaacaaaagaaga

SEQ ID NO: 5907053 - DNA, 25 bp, Homo sapien
aggcattgtggaatcaaggtcaaac

SEQ ID NO: 5907054 - DNA, 25 bp, Homo sapien
acctaggaatcaaaattctgtttta

SEQ ID NO: 5907055 - DNA, 25 bp, Homo sapien
attgctatgatcttagagttagtgt

SEQ ID NO: 5907056 - DNA, 25 bp, Homo sapien
ggtcatctatctatcatgatggctg

SEQ ID NO: 5907057 - DNA, 25 bp, Homo sapien
ccatctgggaacacagtgctgtggt

SEQ ID NO: 5907058 - DNA, 25 bp, Homo sapien
gtatgaacacattgatttgaatagc

SEQ ID NO: 5907059 - DNA, 25 bp, Homo sapien
caacaagtgaattaaaaataaactg

SEQ ID NO: 5907060 - DNA, 25 bp, Homo sapien
tcctgcagaatgtgcagtgaccacc

SEQ ID NO: 5907061 - DNA, 25 bp, Homo sapien
aacaaaaatcccaaataccacttca

SEQ ID NO: 5907062 - DNA, 25 bp, Homo sapien
aatcaacaaaaatcccaaataccac

SEQ ID NO: 5907063 - DNA, 25 bp, Homo sapien
gaaatctagacaaaagatcctgtta

SEQ ID NO: 5907064 - DNA, 25 bp, Homo sapien
tgagtcacaactctggccacctagg

SEQ ID NO: 5907065 - DNA, 25 bp, Homo sapien
acaaaagaagacaaacagaatcaac

SEQ ID NO: 5907066 - DNA, 25 bp, Homo sapien
ttctcttttcctgcagaatgtgcag

SEQ ID NO: 5907067 - DNA, 25 bp, Homo sapien
attgatttgaatagcaacaagtgaa

SEQ ID NO: 5907068 - DNA, 25 bp, Homo sapien
tacctccaccctacccttttaatca

SEQ ID NO: 5907069 - DNA, 25 bp, Homo sapien
tagtttctatagtaaaaacaaacaa

SEQ ID NO: 5907070 - DNA, 25 bp, Homo sapien
aaacaaagaaatcacacacaaacaa

SEQ ID NO: 5907071 - DNA, 25 bp, Homo sapien
agtcacaactctggccacctaggaa

SEQ ID NO: 5907072 - DNA, 25 bp, Homo sapien
caaacagtatgaacacattgatttg

SEQ ID NO: 5907073 - DNA, 25 bp, Homo sapien
aaacaaacaaaagaagacaaacaga

SEQ ID NO: 5907074 - DNA, 25 bp, Homo sapien
aataactgctcagaatgaaagtttg

SEQ ID NO: 5907075 - DNA, 25 bp, Homo sapien
gggcagatccccaagacctcactga

SEQ ID NO: 5907076 - DNA, 25 bp, Homo sapien
cacagtcacccggagtaacaccatt

SEQ ID NO: 5907077 - DNA, 25 bp, Homo sapien
tacactcagaaatctagacaaaaga

SEQ ID NO: 5907078 - DNA, 25 bp, Homo sapien
aggaatcaaaattctgttttataaa

SEQ ID NO: 5907079 - DNA, 25 bp, Homo sapien
cagtggtcagtatcataagagagtg

SEQ ID NO: 5907080 - DNA, 25 bp, Homo sapien
aaacagaatcaacaaaaatcccaaa

SEQ ID NO: 5907081 - DNA, 25 bp, Homo sapien
aatctaataggtacctccaccctac

SEQ ID NO: 5907082 - DNA, 25 bp, Homo sapien
tgataagggtaaaaaagatgtttac

SEQ ID NO: 5907083 - DNA, 25 bp, Homo sapien
aagaagacaaacagaatcaacaaaa

SEQ ID NO: 5907084 - DNA, 25 bp, Homo sapien
cagtcacccggagtaacaccattat

SEQ ID NO: 5907085 - DNA, 25 bp, Homo sapien
cccagtaactgggaggcaaagacag

SEQ ID NO: 5907086 - DNA, 25 bp, Homo sapien
tccacagtcacccggagtaacacca

SEQ ID NO: 5907087 - DNA, 25 bp, Homo sapien
ggaattaataactgctcagaatgaa

SEQ ID NO: 5907088 - DNA, 25 bp, Homo sapien
gccagtaaggcagtggtcagtatca

SEQ ID NO: 5907089 - DNA, 25 bp, Homo sapien
atattcatccaaataaatgccccac

SEQ ID NO: 5907090 - DNA, 25 bp, Homo sapien
gaatagtttctatagtaaaaacaaa

SEQ ID NO: 5907091 - DNA, 25 bp, Homo sapien
gcagatccccaagacctcactgatc

SEQ ID NO: 5907092 - DNA, 25 bp, Homo sapien
agatccccaagacctcactgatcac

SEQ ID NO: 5907093 - DNA, 25 bp, Homo sapien
cacttcaggcagagacacagcatga

SEQ ID NO: 5907094 - DNA, 25 bp, Homo sapien
actgatcacaacagcacaaaaatcc

SEQ ID NO: 5907095 - DNA, 25 bp, Homo sapien
atccccaagacctcactgatcacaa

SEQ ID NO: 5907096 - DNA, 25 bp, Homo sapien
agaaacaccctggctcagtaaggtg

SEQ ID NO: 5907097 - DNA, 25 bp, Homo sapien
tagctttagtcccagtaactgggag

SEQ ID NO: 5907098 - DNA, 25 bp, Homo sapien
actgaatctaataggtacctccacc

SEQ ID NO: 5907099 - DNA, 25 bp, Homo sapien
gttgttcaaacagtatgaacacatt

SEQ ID NO: 5907100 - DNA, 25 bp, Homo sapien
gtaactgggaggcaaagacaggtga

SEQ ID NO: 5907101 - DNA, 25 bp, Homo sapien
caaaaatcccaaataccacttcagg

SEQ ID NO: 5907102 - DNA, 25 bp, Homo sapien
acaaagaaatcacacacaaacaaaa

SEQ ID NO: 5907103 - DNA, 25 bp, Homo sapien
ctgggaggcaaagacaggtgactct

SEQ ID NO: 5907104 - DNA, 25 bp, Homo sapien
cttcaggcagagacacagcatgact

SEQ ID NO: 5907105 - DNA, 25 bp, Homo sapien
ttggtcatctatctatcatgatggc

SEQ ID NO: 5907106 - DNA, 25 bp, Homo sapien
atctgggaacacagtgctgtggtcc

SEQ ID NO: 5907107 - DNA, 25 bp, Homo sapien
aacaccattatcaggggcagatccc

SEQ ID NO: 5907108 - DNA, 25 bp, Homo sapien
gtgacacatagctttagtcccagta

SEQ ID NO: 5907109 - DNA, 25 bp, Homo sapien
acaaaacaaatacaaaattactgat

SEQ ID NO: 5907110 - DNA, 25 bp, Homo sapien
ctatctatcatgatggctgcacctg

SEQ ID NO: 5907111 - DNA, 25 bp, Homo sapien
ggattacaagggcagaatagtttct

SEQ ID NO: 5907112 - DNA, 25 bp, Homo sapien
acagaatcaacaaaaatcccaaata

SEQ ID NO: 5907113 - DNA, 25 bp, Homo sapien
gggtgagaataggggtttggattct

SEQ ID NO: 5907114 - DNA, 25 bp, Homo sapien
tctctctccctcccatgccctcttg

SEQ ID NO: 5907115 - DNA, 25 bp, Homo sapien
gttgtattgccagtaaggcagtggt

SEQ ID NO: 5907116 - DNA, 25 bp, Homo sapien
ggcaaagacaggtgactctaggatt

SEQ ID NO: 5907117 - DNA, 25 bp, Homo sapien
tccctctatgagtcacaactctggc

SEQ ID NO: 5907118 - DNA, 25 bp, Homo sapien
ggtttggattctcttttcctgcaga

SEQ ID NO: 5907119 - DNA, 25 bp, Homo sapien
acagcatgactgaatctaataggta

SEQ ID NO: 5907120 - DNA, 25 bp, Homo sapien
ggtcagtatcataagagagtgataa

SEQ ID NO: 5907121 - DNA, 25 bp, Homo sapien
tgttacagaggaaggcattgtggaa

SEQ ID NO: 5907122 - DNA, 25 bp, Homo sapien
aaatcacacacaaacaaaacaaata

SEQ ID NO: 5907123 - DNA, 25 bp, Homo sapien
atgttacaagccagaggctctaaaa

SEQ ID NO: 5907124 - DNA, 25 bp, Homo sapien
tttcatattagttgtattgccagta

SEQ ID NO: 5907125 - DNA, 25 bp, Homo sapien
ataaaaatgttacaagccagaggct

SEQ ID NO: 5907126 - DNA, 25 bp, Homo sapien
aaaaatgttacaagccagaggctct

SEQ ID NO: 5907127 - DNA, 25 bp, Homo sapien
acatattgctatgatcttagagtta

SEQ ID NO: 5907128 - DNA, 25 bp, Homo sapien
cctctatgagtcacaactctggcca

SEQ ID NO: 5907129 - DNA, 25 bp, Homo sapien
ggggtttggattctcttttcctgca

SEQ ID NO: 5907130 - DNA, 25 bp, Homo sapien
agaaatcacacacaaacaaaacaaa

SEQ ID NO: 5907131 - DNA, 25 bp, Homo sapien
aagacctcactgatcacaacagcac

SEQ ID NO: 5907132 - DNA, 25 bp, Homo sapien
ataagagagtgataagggtaaaaaa

SEQ ID NO: 5907133 - DNA, 25 bp, Homo sapien
gattctcttttcctgcagaatgtgc

SEQ ID NO: 5907134 - DNA, 25 bp, Homo sapien
cttttcctgcagaatgtgcagtgac

SEQ ID NO: 5907135 - DNA, 25 bp, Homo sapien
gctctaaaatcaaaaccaaaacaag

SEQ ID NO: 5907136 - DNA, 25 bp, Homo sapien
aaggcagtggtcagtatcataagag

SEQ ID NO: 5907137 - DNA, 25 bp, Homo sapien
agtacactcagaaatctagacaaaa

SEQ ID NO: 5907138 - DNA, 25 bp, Homo sapien
tcatctatctatcatgatggctgca

SEQ ID NO: 5907139 - DNA, 25 bp, Homo sapien
acctgtcaacccaaggaccaagcaa

SEQ ID NO: 5907140 - DNA, 25 bp, Homo sapien
agaggctctaaaatcaaaaccaaaa

SEQ ID NO: 5907141 - DNA, 25 bp, Homo sapien
ggtccacagtcacccggagtaacac

SEQ ID NO: 5907142 - DNA, 25 bp, Homo sapien
tgactctaggattacaagggcagaa

SEQ ID NO: 5907143 - DNA, 25 bp, Homo sapien
aagagagtgataagggtaaaaaaga

SEQ ID NO: 5907144 - DNA, 25 bp, Homo sapien
tgatggctgcacctgtcaacccaag

SEQ ID NO: 5907145 - DNA, 25 bp, Homo sapien
aaactggaaaacaaagaaatcacac

SEQ ID NO: 5907146 - DNA, 25 bp, Homo sapien
caaactgggtgagaataggggtttg

SEQ ID NO: 5907147 - DNA, 25 bp, Homo sapien
acaactctggccacctaggaatcaa

SEQ ID NO: 5907148 - DNA, 25 bp, Homo sapien
atcaggttggtcatctatctatcat

SEQ ID NO: 5907149 - DNA, 25 bp, Homo sapien
cctggctcagtaaggtgacacatag

SEQ ID NO: 5907150 - DNA, 25 bp, Homo sapien
ctctggccacctaggaatcaaaatt

SEQ ID NO: 5907151 - DNA, 25 bp, Homo sapien
ccattatcaggggcagatccccaag

SEQ ID NO: 5907152 - DNA, 25 bp, Homo sapien
cccggagtaacaccattatcagggg

SEQ ID NO: 5907153 - DNA, 25 bp, Homo sapien
tggaaaacaaagaaatcacacacaa

SEQ ID NO: 5907154 - DNA, 25 bp, Homo sapien
tcataagagagtgataagggtaaaa

SEQ ID NO: 5907155 - DNA, 25 bp, Homo sapien
tagttgtattgccagtaaggcagtg

SEQ ID NO: 5907156 - DNA, 25 bp, Homo sapien
aaggaccaagcaagggaattaataa

SEQ ID NO: 5907157 - DNA, 25 bp, Homo sapien
gtggtcagtatcataagagagtgat

SEQ ID NO: 5907158 - DNA, 25 bp, Homo sapien
gagtaacaccattatcaggggcaga

SEQ ID NO: 5907159 - DNA, 25 bp, Homo sapien
actctaggattacaagggcagaata

SEQ ID NO: 5907160 - DNA, 25 bp, Homo sapien
gcagagacacagcatgactgaatct

SEQ ID NO: 5907161 - DNA, 25 bp, Homo sapien
actggaaaacaaagaaatcacacac

SEQ ID NO: 5907162 - DNA, 25 bp, Homo sapien
agaggaaggcattgtggaatcaagg

SEQ ID NO: 5907163 - DNA, 25 bp, Homo sapien
aagacaggtgactctaggattacaa

SEQ ID NO: 5907164 - DNA, 25 bp, Homo sapien
cctgttacagaggaaggcattgtgg

SEQ ID NO: 5907165 - DNA, 25 bp, Homo sapien
taggattacaagggcagaatagttt

SEQ ID NO: 5907166 - DNA, 25 bp, Homo sapien
atgttttcatattagttgtattgcc

SEQ ID NO: 5907167 - DNA, 25 bp, Homo sapien
ccaaataccacttcaggcagagaca

SEQ ID NO: 5907168 - DNA, 25 bp, Homo sapien
cagtgaccaccaccatctgggaaca

SEQ ID NO: 5907169 - DNA, 25 bp, Homo sapien
gtaacaccattatcaggggcagatc

SEQ ID NO: 5907170 - DNA, 25 bp, Homo sapien
cacaaaaatccctctatgagtcaca

SEQ ID NO: 5907171 - DNA, 25 bp, Homo sapien
acagcacaaaaatccctctatgagt

SEQ ID NO: 5907172 - DNA, 25 bp, Homo sapien
caagggcagaatagtttctatagta

SEQ ID NO: 5907173 - DNA, 25 bp, Homo sapien
gacaggtgactctaggattacaagg

SEQ ID NO: 5907174 - DNA, 25 bp, Homo sapien
tatgagtcacaactctggccaccta

SEQ ID NO: 5907175 - DNA, 25 bp, Homo sapien
tctctccctcccatgccctcttgat

SEQ ID NO: 5907176 - DNA, 25 bp, Homo sapien
attagttgtattgccagtaaggcag

SEQ ID NO: 5907177 - DNA, 25 bp, Homo sapien
tgaactaaagtacactcagaaatct

SEQ ID NO: 5907178 - DNA, 25 bp, Homo sapien
agatcctgttacagaggaaggcatt

SEQ ID NO: 5907179 - DNA, 25 bp, Homo sapien
agtgtctctctccctcccatgccct

SEQ ID NO: 5907180 - DNA, 25 bp, Homo sapien
tccaccctacccttttaatcaatat

SEQ ID NO: 5907181 - DNA, 25 bp, Homo sapien
tggctcagtaaggtgacacatagct

SEQ ID NO: 5907182 - DNA, 25 bp, Homo sapien
atcctgttacagaggaaggcattgt

SEQ ID NO: 5907183 - DNA, 25 bp, Homo sapien
gaatcaaggtcaaactgggtgagaa

SEQ ID NO: 5907184 - DNA, 25 bp, Homo sapien
caaggtcaaactgggtgagaatagg

SEQ ID NO: 5907185 - DNA, 25 bp, Homo sapien
tcccatgccctcttgatatttgaaa

SEQ ID NO: 5907186 - DNA, 25 bp, Homo sapien
ctatgatcttagagttagtgtctct

SEQ ID NO: 5907187 - DNA, 25 bp, Homo sapien
ccagaggctctaaaatcaaaaccaa

SEQ ID NO: 5907188 - DNA, 25 bp, Homo sapien
atagcaacaagtgaattaaaaataa

SEQ ID NO: 5907189 - DNA, 25 bp, Homo sapien
catagctttagtcccagtaactggg

SEQ ID NO: 5907190 - DNA, 25 bp, Homo sapien
catgatggctgcacctgtcaaccca

SEQ ID NO: 5907191 - DNA, 25 bp, Homo sapien
gacacatagctttagtcccagtaac

SEQ ID NO: 5907192 - DNA, 25 bp, Homo sapien
taggggtttggattctcttttcctg

SEQ ID NO: 5907193 - DNA, 25 bp, Homo sapien
ttttaaaatcggatcaggttggtca

SEQ ID NO: 5907194 - DNA, 25 bp, Homo sapien
ttttataaaaatgttacaagccaga

SEQ ID NO: 5907195 - DNA, 25 bp, Homo sapien
attgtggaatcaaggtcaaactggg

SEQ ID NO: 5907196 - DNA, 25 bp, Homo sapien
cacatagctttagtcccagtaactg

SEQ ID NO: 5907197 - DNA, 25 bp, Homo sapien
aaaatcggatcaggttggtcatcta

SEQ ID NO: 5907198 - DNA, 25 bp, Homo sapien
aaagtacactcagaaatctagacaa

SEQ ID NO: 5907199 - DNA, 25 bp, Homo sapien
aaatataattctaatacaaacgtga

SEQ ID NO: 5907200 - DNA, 25 bp, Homo sapien
aggctctaaaatcaaaaccaaaaca

SEQ ID NO: 5907201 - DNA, 25 bp, Homo sapien
attacaagggcagaatagtttctat

SEQ ID NO: 5907202 - DNA, 25 bp, Homo sapien
accacttcaggcagagacacagcat

SEQ ID NO: 5907203 - DNA, 25 bp, Homo sapien
ctcttttcctgcagaatgtgcagtg

SEQ ID NO: 5907204 - DNA, 25 bp, Homo sapien
cctcactgatcacaacagcacaaaa

SEQ ID NO: 5907205 - DNA, 25 bp, Homo sapien
tgctgtggtccacagtcacccggag

SEQ ID NO: 5907206 - DNA, 25 bp, Homo sapien
caaatacaaaattactgattaaaaa

SEQ ID NO: 5907207 - DNA, 25 bp, Homo sapien
ctaggaatcaaaattctgttttata

SEQ ID NO: 5907208 - DNA, 25 bp, Homo sapien
gttttcatattagttgtattgccag

SEQ ID NO: 5907209 - DNA, 25 bp, Homo sapien
atctatcatgatggctgcacctgtc

SEQ ID NO: 5907210 - DNA, 25 bp, Homo sapien
aatctagacaaaagatcctgttaca

SEQ ID NO: 5907211 - DNA, 25 bp, Homo sapien
ttgaatagcaacaagtgaattaaaa

SEQ ID NO: 5907212 - DNA, 25 bp, Homo sapien
accctggctcagtaaggtgacacat

SEQ ID NO: 5907213 - DNA, 25 bp, Homo sapien
gtcccagtaactgggaggcaaagac

SEQ ID NO: 5907214 - DNA, 25 bp, Homo sapien
ctcagaaatctagacaaaagatcct

SEQ ID NO: 5907215 - DNA, 25 bp, Homo sapien
tagtcccagtaactgggaggcaaag

SEQ ID NO: 5907216 - DNA, 25 bp, Homo sapien
ccaccaccatctgggaacacagtgc

SEQ ID NO: 5907217 - DNA, 25 bp, Homo sapien
tatcataagagagtgataagggtaa

SEQ ID NO: 5907218 - DNA, 25 bp, Homo sapien
ctgggtgagaataggggtttggatt

SEQ ID NO: 5907219 - DNA, 25 bp, Homo sapien
ccaaataaatgccccacatattgct

SEQ ID NO: 5907220 - DNA, 25 bp, Homo sapien
ttcaaacagtatgaacacattgatt

SEQ ID NO: 5907221 - DNA, 25 bp, Homo sapien
tcaacaaaaatcccaaataccactt

SEQ ID NO: 5907222 - DNA, 25 bp, Homo sapien
ggcagtggtcagtatcataagagag

SEQ ID NO: 5907223 - DNA, 25 bp, Homo sapien
agagacacagcatgactgaatctaa

SEQ ID NO: 5907224 - DNA, 25 bp, Homo sapien
aaaatcccaaataccacttcaggca

SEQ ID NO: 5907225 - DNA, 25 bp, Homo sapien
aggtcaaactgggtgagaatagggg

SEQ ID NO: 5907226 - DNA, 25 bp, Homo sapien
aaagatcctgttacagaggaaggca

SEQ ID NO: 5907227 - DNA, 25 bp, Homo sapien
caggttggtcatctatctatcatga

SEQ ID NO: 5907228 - DNA, 25 bp, Homo sapien
tctaggattacaagggcagaatagt

SEQ ID NO: 5907229 - DNA, 25 bp, Homo sapien
aatccctctatgagtcacaactctg

SEQ ID NO: 5907230 - DNA, 25 bp, Homo sapien
gggaggcaaagacaggtgactctag

SEQ ID NO: 5907231 - DNA, 25 bp, Homo sapien
ttgccagtaaggcagtggtcagtat

SEQ ID NO: 5907232 - DNA, 25 bp, Homo sapien
gcattgtggaatcaaggtcaaactg

SEQ ID NO: 5907233 - DNA, 25 bp, Homo sapien
ctaaagtacactcagaaatctagac

SEQ ID NO: 5907234 - DNA, 25 bp, Homo sapien
catgactgaatctaataggtacctc

SEQ ID NO: 5907235 - DNA, 25 bp, Homo sapien
acccaaggaccaagcaagggaatta

SEQ ID NO: 5907236 - DNA, 25 bp, Homo sapien
cctcccatgccctcttgatatttga

SEQ ID NO: 5907237 - DNA, 25 bp, Homo sapien
tgttttataaaaatgttacaagcca

SEQ ID NO: 5907238 - DNA, 25 bp, Homo sapien
agggaattaataactgctcagaatg

SEQ ID NO: 5907239 - DNA, 25 bp, Homo sapien
aacaagaaacaccctggctcagtaa

SEQ ID NO: 5907240 - DNA, 25 bp, Homo sapien
tggattctcttttcctgcagaatgt

SEQ ID NO: 5907241 - DNA, 25 bp, Homo sapien
tagacaaaagatcctgttacagagg

SEQ ID NO: 5907242 - DNA, 25 bp, Homo sapien
cctcttgatatttgaaagaaattaa

SEQ ID NO: 5907243 - DNA, 25 bp, Homo sapien
gaataggggtttggattctcttttc

SEQ ID NO: 5907244 - DNA, 25 bp, Homo sapien
aactgggaggcaaagacaggtgact

SEQ ID NO: 5907245 - DNA, 25 bp, Homo sapien
tcttgatatttgaaagaaattaaaa

SEQ ID NO: 5907246 - DNA, 25 bp, Homo sapien
cacacaaacaaaacaaatacaaaat

SEQ ID NO: 5907247 - DNA, 25 bp, Homo sapien
agggcagaatagtttctatagtaaa

SEQ ID NO: 5907248 - DNA, 25 bp, Homo sapien
caccctacccttttaatcaatatat

SEQ ID NO: 5907249 - DNA, 25 bp, Homo sapien
tcagtatcataagagagtgataagg

SEQ ID NO: 5907250 - DNA, 25 bp, Homo sapien
acacagtgctgtggtccacagtcac

SEQ ID NO: 5907251 - DNA, 25 bp, Homo sapien
ccaagacctcactgatcacaacagc

SEQ ID NO: 5907252 - DNA, 25 bp, Homo sapien
aaaagaagacaaacagaatcaacaa

SEQ ID NO: 5907253 - DNA, 25 bp, Homo sapien
atggctgcacctgtcaacccaagga

SEQ ID NO: 5907254 - DNA, 25 bp, Homo sapien
accaagcaagggaattaataactgc

SEQ ID NO: 5907255 - DNA, 25 bp, Homo sapien
tcatattagttgtattgccagtaag

SEQ ID NO: 5907256 - DNA, 25 bp, Homo sapien
agcacaaaaatccctctatgagtca

SEQ ID NO: 5907257 - DNA, 25 bp, Homo sapien
caaaaatccctctatgagtcacaac

SEQ ID NO: 5907258 - DNA, 25 bp, Homo sapien
caaaagatcctgttacagaggaagg

SEQ ID NO: 5907259 - DNA, 25 bp, Homo sapien
gtcacccggagtaacaccattatca

SEQ ID NO: 5907260 - DNA, 25 bp, Homo sapien
acattgatttgaatagcaacaagtg

SEQ ID NO: 5907261 - DNA, 25 bp, Homo sapien
gagtgataagggtaaaaaagatgtt

SEQ ID NO: 5907262 - DNA, 25 bp, Homo sapien
cacaaacaaaacaaatacaaaatta

SEQ ID NO: 5907263 - DNA, 25 bp, Homo sapien
tgaatctaataggtacctccaccct

SEQ ID NO: 5907264 - DNA, 25 bp, Homo sapien
caacagcacaaaaatccctctatga

SEQ ID NO: 5907265 - DNA, 25 bp, Homo sapien
agaatcaacaaaaatcccaaatacc

SEQ ID NO: 5907266 - DNA, 25 bp, Homo sapien
caaacgtgaactaaagtacactcag

SEQ ID NO: 5907267 - DNA, 25 bp, Homo sapien
caagtgaattaaaaataaactggaa

SEQ ID NO: 5907268 - DNA, 25 bp, Homo sapien
gcagaatgtgcagtgaccaccacca

SEQ ID NO: 5907269 - DNA, 25 bp, Homo sapien
ccaaggaccaagcaagggaattaat

SEQ ID NO: 5907270 - DNA, 25 bp, Homo sapien
gggaacacagtgctgtggtccacag

SEQ ID NO: 5907271 - DNA, 25 bp, Homo sapien
tctgttttataaaaatgttacaagc

SEQ ID NO: 5907272 - DNA, 25 bp, Homo sapien
ccaaaacaagaaacaccctggctca

SEQ ID NO: 5907273 - DNA, 25 bp, Homo sapien
gaggcaaagacaggtgactctagga

SEQ ID NO: 5907274 - DNA, 25 bp, Homo sapien
gttacaagccagaggctctaaaatc

SEQ ID NO: 5907275 - DNA, 25 bp, Homo sapien
ctggccacctaggaatcaaaattct

SEQ ID NO: 5907276 - DNA, 25 bp, Homo sapien
ataaatgccccacatattgctatga

SEQ ID NO: 5907277 - DNA, 25 bp, Homo sapien
tgtctctctccctcccatgccctct

SEQ ID NO: 5907278 - DNA, 25 bp, Homo sapien
ctaatacaaacgtgaactaaagtac

SEQ ID NO: 5907279 - DNA, 25 bp, Homo sapien
aacagtatgaacacattgatttgaa

SEQ ID NO: 5907280 - DNA, 25 bp, Homo sapien
ataccacttcaggcagagacacagc

SEQ ID NO: 5907281 - DNA, 25 bp, Homo sapien
ttagagttagtgtctctctccctcc

SEQ ID NO: 5907282 - DNA, 25 bp, Homo sapien
ttctaatacaaacgtgaactaaagt

SEQ ID NO: 5907283 - DNA, 25 bp, Homo sapien
atattagttgtattgccagtaaggc

SEQ ID NO: 5907284 - DNA, 25 bp, Homo sapien
tctaataggtacctccaccctaccc

SEQ ID NO: 5907285 - DNA, 25 bp, Homo sapien
agtaaggtgacacatagctttagtc

SEQ ID NO: 5907286 - DNA, 25 bp, Homo sapien
gaaaacaaagaaatcacacacaaac

SEQ ID NO: 5907287 - DNA, 25 bp, Homo sapien
tcaggggcagatccccaagacctca

SEQ ID NO: 5907288 - DNA, 25 bp, Homo sapien
ttaaaatcggatcaggttggtcatc

SEQ ID NO: 5907289 - DNA, 25 bp, Homo sapien
atgatcttagagttagtgtctctct

SEQ ID NO: 5907290 - DNA, 25 bp, Homo sapien
aggtgacacatagctttagtcccag

SEQ ID NO: 5907291 - DNA, 25 bp, Homo sapien
cagaatagtttctatagtaaaaaca

SEQ ID NO: 5907292 - DNA, 25 bp, Homo sapien
atcatgatggctgcacctgtcaacc

SEQ ID NO: 5907293 - DNA, 25 bp, Homo sapien
gaacacattgatttgaatagcaaca

SEQ ID NO: 5907294 - DNA, 25 bp, Homo sapien
tcaggcagagacacagcatgactga

SEQ ID NO: 5907295 - DNA, 25 bp, Homo sapien
tctagacaaaagatcctgttacaga

SEQ ID NO: 5907296 - DNA, 25 bp, Homo sapien
aggcagagacacagcatgactgaat

SEQ ID NO: 5907297 - DNA, 25 bp, Homo sapien
ggtgactctaggattacaagggcag

SEQ ID NO: 5907298 - DNA, 25 bp, Homo sapien
gacctcactgatcacaacagcacaa

SEQ ID NO: 5907299 - DNA, 25 bp, Homo sapien
cagaaatctagacaaaagatcctgt

SEQ ID NO: 5907300 - DNA, 25 bp, Homo sapien
gctttagtcccagtaactgggaggc

SEQ ID NO: 5907301 - DNA, 25 bp, Homo sapien
gtcaaactgggtgagaataggggtt

SEQ ID NO: 5907302 - DNA, 25 bp, Homo sapien
cacacacaaacaaaacaaatacaaa

SEQ ID NO: 5907303 - DNA, 25 bp, Homo sapien
acacattgatttgaatagcaacaag

SEQ ID NO: 5907304 - DNA, 25 bp, Homo sapien
agttagtgtctctctccctcccatg

SEQ ID NO: 5907305 - DNA, 25 bp, Homo sapien
ataaactggaaaacaaagaaatcac

SEQ ID NO: 5907306 - DNA, 25 bp, Homo sapien
acagtgctgtggtccacagtcaccc

SEQ ID NO: 5907307 - DNA, 25 bp, Homo sapien
atataattctaatacaaacgtgaac

SEQ ID NO: 5907308 - DNA, 25 bp, Homo sapien
gtcaacccaaggaccaagcaaggga

SEQ ID NO: 5907309 - DNA, 25 bp, Homo sapien
tttagtcccagtaactgggaggcaa

SEQ ID NO: 5907310 - DNA, 25 bp, Homo sapien
tgaattaaaaataaactggaaaaca

SEQ ID NO: 5907311 - DNA, 25 bp, Homo sapien
cagtaaggcagtggtcagtatcata

SEQ ID NO: 5907312 - DNA, 25 bp, Homo sapien
acaccctggctcagtaaggtgacac

SEQ ID NO: 5907313 - DNA, 25 bp, Homo sapien
tattgccagtaaggcagtggtcagt

SEQ ID NO: 5907314 - DNA, 25 bp, Homo sapien
agtgctgtggtccacagtcacccgg

SEQ ID NO: 5907315 - DNA, 25 bp, Homo sapien
aatcggatcaggttggtcatctatc

SEQ ID NO: 5907316 - DNA, 25 bp, Homo sapien
aactgggtgagaataggggtttgga

SEQ ID NO: 5907317 - DNA, 25 bp, Homo sapien
ctgtggtccacagtcacccggagta

SEQ ID NO: 5907318 - DNA, 25 bp, Homo sapien
acagaggaaggcattgtggaatcaa

SEQ ID NO: 5907319 - DNA, 25 bp, Homo sapien
atgtttactcttttaaaatcggatc

SEQ ID NO: 5907320 - DNA, 25 bp, Homo sapien
caaagacaggtgactctaggattac

SEQ ID NO: 5907321 - DNA, 25 bp, Homo sapien
aaagaaatcacacacaaacaaaaca

SEQ ID NO: 5907322 - DNA, 25 bp, Homo sapien
tctaaaatcaaaaccaaaacaagaa

SEQ ID NO: 5907323 - DNA, 25 bp, Homo sapien
ctgtcaacccaaggaccaagcaagg

SEQ ID NO: 5907324 - DNA, 25 bp, Homo sapien
gccccacatattgctatgatcttag

SEQ ID NO: 5907325 - DNA, 25 bp, Homo sapien
ttactcttttaaaatcggatcaggt

SEQ ID NO: 5907326 - DNA, 25 bp, Homo sapien
cagtaactgggaggcaaagacaggt

SEQ ID NO: 5907327 - DNA, 25 bp, Homo sapien
tatcaggggcagatccccaagacct

SEQ ID NO: 5907328 - DNA, 25 bp, Homo sapien
ccacatattgctatgatcttagagt

SEQ ID NO: 5907329 - DNA, 25 bp, Homo sapien
agacacagcatgactgaatctaata

SEQ ID NO: 5907330 - DNA, 25 bp, Homo sapien
caagggaattaataactgctcagaa

SEQ ID NO: 5907331 - DNA, 25 bp, Homo sapien
tcaatatattcatccaaataaatgc

SEQ ID NO: 5907332 - DNA, 25 bp, Homo sapien
tcttttaaaatcggatcaggttggt

SEQ ID NO: 5907333 - DNA, 25 bp, Homo sapien
tcagtaaggtgacacatagctttag

SEQ ID NO: 5907334 - DNA, 25 bp, Homo sapien
aggggcagatccccaagacctcact

SEQ ID NO: 5907335 - DNA, 25 bp, Homo sapien
aaacaccctggctcagtaaggtgac

SEQ ID NO: 5907336 - DNA, 25 bp, Homo sapien
agcatgactgaatctaataggtacc

SEQ ID NO: 5907337 - DNA, 25 bp, Homo sapien
gacaaaagatcctgttacagaggaa

SEQ ID NO: 5907338 - DNA, 25 bp, Homo sapien
tgcagtgaccaccaccatctgggaa

SEQ ID NO: 5907339 - DNA, 25 bp, Homo sapien
cagtatgaacacattgatttgaata

SEQ ID NO: 5907340 - DNA, 25 bp, Homo sapien
caacccaaggaccaagcaagggaat

SEQ ID NO: 5907341 - DNA, 25 bp, Homo sapien
aaataccacttcaggcagagacaca

SEQ ID NO: 5907342 - DNA, 25 bp, Homo sapien
ggccacctaggaatcaaaattctgt

SEQ ID NO: 5907343 - DNA, 25 bp, Homo sapien
cacaacagcacaaaaatccctctat

SEQ ID NO: 5907344 - DNA, 25 bp, Homo sapien
caagccagaggctctaaaatcaaaa

SEQ ID NO: 5907345 - DNA, 25 bp, Homo sapien
cgtgaactaaagtacactcagaaat

SEQ ID NO: 5907346 - DNA, 25 bp, Homo sapien
aactctggccacctaggaatcaaaa

SEQ ID NO: 5907347 - DNA, 25 bp, Homo sapien
aatcccaaataccacttcaggcaga

SEQ ID NO: 5907348 - DNA, 25 bp, Homo sapien
caagcaagggaattaataactgctc

SEQ ID NO: 5907349 - DNA, 25 bp, Homo sapien
atgccctcttgatatttgaaagaaa

SEQ ID NO: 5907350 - DNA, 25 bp, Homo sapien
aaaacaagaaacaccctggctcagt

SEQ ID NO: 5907351 - DNA, 25 bp, Homo sapien
tctatagtaaaaacaaacaaaagaa

SEQ ID NO: 5907352 - DNA, 25 bp, Homo sapien
ccatgccctcttgatatttgaaaga

SEQ ID NO: 5907353 - DNA, 25 bp, Homo sapien
tgttcaaacagtatgaacacattga

SEQ ID NO: 5907354 - DNA, 25 bp, Homo sapien
ctgcagaatgtgcagtgaccaccac

SEQ ID NO: 5907355 - DNA, 25 bp, Homo sapien
tacaagccagaggctctaaaatcaa

SEQ ID NO: 5907356 - DNA, 25 bp, Homo sapien
tctccctcccatgccctcttgatat

SEQ ID NO: 5907357 - DNA, 25 bp, Homo sapien
aatatattcatccaaataaatgccc

SEQ ID NO: 5907358 - DNA, 25 bp, Homo sapien
agcaagggaattaataactgctcag

SEQ ID NO: 5907359 - DNA, 25 bp, Homo sapien
gagagtgataagggtaaaaaagatg

SEQ ID NO: 5907360 - DNA, 25 bp, Homo sapien
ctgggaacacagtgctgtggtccac

SEQ ID NO: 5907361 - DNA, 25 bp, Homo sapien
aacgtgaactaaagtacactcagaa

SEQ ID NO: 5907362 - DNA, 25 bp, Homo sapien
gtaaggcagtggtcagtatcataag

SEQ ID NO: 5907363 - DNA, 25 bp, Homo sapien
gatatttgaaagaaattaaaaatgt

SEQ ID NO: 5907364 - DNA, 25 bp, Homo sapien
taatcagtgctctatgtatgcgtcc

SEQ ID NO: 5907365 - DNA, 25 bp, Homo sapien
caggggcagcaatctgcccaccatg

SEQ ID NO: 5907366 - DNA, 25 bp, Homo sapien
ccaacactttggcatgacaattgta

SEQ ID NO: 5907367 - DNA, 25 bp, Homo sapien
gcataacttccttctccgtggctgg

SEQ ID NO: 5907368 - DNA, 25 bp, Homo sapien
agtatttggaaaagaagtatgggac

SEQ ID NO: 5907369 - DNA, 25 bp, Homo sapien
aaatgtgtttgctataaaattagag

SEQ ID NO: 5907370 - DNA, 25 bp, Homo sapien
atgaaagcaacctcactgcacaaag

SEQ ID NO: 5907371 - DNA, 25 bp, Homo sapien
aacactgctcagtgtgcggtctgct

SEQ ID NO: 5907372 - DNA, 25 bp, Homo sapien
tctgcccaccatgcaaggatgaaaa

SEQ ID NO: 5907373 - DNA, 25 bp, Homo sapien
gtttaaatctcaaatgaagtaagca

SEQ ID NO: 5907374 - DNA, 25 bp, Homo sapien
acatccatgggacaggaaatgtgtt

SEQ ID NO: 5907375 - DNA, 25 bp, Homo sapien
cctggcctctccaagggtgtcatga

SEQ ID NO: 5907376 - DNA, 25 bp, Homo sapien
gacaggaaatgtgtttgctataaaa

SEQ ID NO: 5907377 - DNA, 25 bp, Homo sapien
agagagtccgtgggattataggaaa

SEQ ID NO: 5907378 - DNA, 25 bp, Homo sapien
gtgaatatcgctgggtttgtaatct

SEQ ID NO: 5907379 - DNA, 25 bp, Homo sapien
catgaaaatcagtatagactttgtt

SEQ ID NO: 5907380 - DNA, 25 bp, Homo sapien
tcagtgtgcggtctgcttcacgaca

SEQ ID NO: 5907381 - DNA, 25 bp, Homo sapien
cgctgggtttgtaatcttttgttat

SEQ ID NO: 5907382 - DNA, 25 bp, Homo sapien
acactcatctgtgaatatcgctggg

SEQ ID NO: 5907383 - DNA, 25 bp, Homo sapien
ttaaatctcaaatgaagtaagcaag

SEQ ID NO: 5907384 - DNA, 25 bp, Homo sapien
gggacttagtttctatcttcttaag

SEQ ID NO: 5907385 - DNA, 25 bp, Homo sapien
tgcccccacccctccacccaacaca

SEQ ID NO: 5907386 - DNA, 25 bp, Homo sapien
cacccaacacagtcccccttctctg

SEQ ID NO: 5907387 - DNA, 25 bp, Homo sapien
catgtcatatgttgagagagcactg

SEQ ID NO: 5907388 - DNA, 25 bp, Homo sapien
aggcacacctctcaagtttaaaggg

SEQ ID NO: 5907389 - DNA, 25 bp, Homo sapien
aagaggatgtttaggctgtacatac

SEQ ID NO: 5907390 - DNA, 25 bp, Homo sapien
gccttcagtttcctcatataccaaa

SEQ ID NO: 5907391 - DNA, 25 bp, Homo sapien
gctggcttgtagacagaggaaactg

SEQ ID NO: 5907392 - DNA, 25 bp, Homo sapien
gtttctatcttcttaaggggagccg

SEQ ID NO: 5907393 - DNA, 25 bp, Homo sapien
tttcctgtccttgtcaccagtgaag

SEQ ID NO: 5907394 - DNA, 25 bp, Homo sapien
tcctgtccttgtcaccagtgaagga

SEQ ID NO: 5907395 - DNA, 25 bp, Homo sapien
gagtttatttttctatgaacgcgta

SEQ ID NO: 5907396 - DNA, 25 bp, Homo sapien
tcagagtgtgtgacagccactgtaa

SEQ ID NO: 5907397 - DNA, 25 bp, Homo sapien
agtggctaaaagtttccaagagagt

SEQ ID NO: 5907398 - DNA, 25 bp, Homo sapien
tatacatagaaatatgctgcataat

SEQ ID NO: 5907399 - DNA, 25 bp, Homo sapien
acagggacaggcacacctctcaagt

SEQ ID NO: 5907400 - DNA, 25 bp, Homo sapien
tgtgacagccactgtaatcagtgct

SEQ ID NO: 5907401 - DNA, 25 bp, Homo sapien
gaaaagaagtatgggacttagtttc

SEQ ID NO: 5907402 - DNA, 25 bp, Homo sapien
ttgtagacagaggaaactgtatgtt

SEQ ID NO: 5907403 - DNA, 25 bp, Homo sapien
cattaacatgtcatatgttgagaga

SEQ ID NO: 5907404 - DNA, 25 bp, Homo sapien
tggctaaaagtttccaagagagtcc

SEQ ID NO: 5907405 - DNA, 25 bp, Homo sapien
cgacagggacaggcacacctctcaa

SEQ ID NO: 5907406 - DNA, 25 bp, Homo sapien
agcttgagtttggacaactagtaag

SEQ ID NO: 5907407 - DNA, 25 bp, Homo sapien
tagccttcagtttcctcatatacca

SEQ ID NO: 5907408 - DNA, 25 bp, Homo sapien
cactttggcatgacaattgtatgaa

SEQ ID NO: 5907409 - DNA, 25 bp, Homo sapien
ataaaattagagatataaggcaggg

SEQ ID NO: 5907410 - DNA, 25 bp, Homo sapien
gcctctccaagggtgtcatgaaaat

SEQ ID NO: 5907411 - DNA, 25 bp, Homo sapien
cctatacatagaaatatgctgcata

SEQ ID NO: 5907412 - DNA, 25 bp, Homo sapien
tgagtttggacaactagtaaggaat

SEQ ID NO: 5907413 - DNA, 25 bp, Homo sapien
tgcccaccatgcaaggatgaaaatc

SEQ ID NO: 5907414 - DNA, 25 bp, Homo sapien
atcgctgggtttgtaatcttttgtt

SEQ ID NO: 5907415 - DNA, 25 bp, Homo sapien
agagcactggaatgtttggtgagtt

SEQ ID NO: 5907416 - DNA, 25 bp, Homo sapien
gagccgtttaattaaatacaacatc

SEQ ID NO: 5907417 - DNA, 25 bp, Homo sapien
cgtttaattaaatacaacatccatg

SEQ ID NO: 5907418 - DNA, 25 bp, Homo sapien
taattaaatacaacatccatgggac

SEQ ID NO: 5907419 - DNA, 25 bp, Homo sapien
gaatatcgctgggtttgtaatcttt

SEQ ID NO: 5907420 - DNA, 25 bp, Homo sapien
gtctgcttcacgacagggacaggca

SEQ ID NO: 5907421 - DNA, 25 bp, Homo sapien
ctttgtttcattaacatgtcatatg

SEQ ID NO: 5907422 - DNA, 25 bp, Homo sapien
tatttggaaaagaagtatgggactt

SEQ ID NO: 5907423 - DNA, 25 bp, Homo sapien
ctttggcatgacaattgtatgaaag

SEQ ID NO: 5907424 - DNA, 25 bp, Homo sapien
aaacgtttaaatctcaaatgaagta

SEQ ID NO: 5907425 - DNA, 25 bp, Homo sapien
tcagtatagactttgtttcattaac

SEQ ID NO: 5907426 - DNA, 25 bp, Homo sapien
ttatataagaggatgtttaggctgt

SEQ ID NO: 5907427 - DNA, 25 bp, Homo sapien
ggaaatgcaaagtgtctgcccccac

SEQ ID NO: 5907428 - DNA, 25 bp, Homo sapien
acgcgtagcttgagtttggacaact

SEQ ID NO: 5907429 - DNA, 25 bp, Homo sapien
gtaaggaatgcaccaacactttggc

SEQ ID NO: 5907430 - DNA, 25 bp, Homo sapien
gctgtacatactggggtagatcatt

SEQ ID NO: 5907431 - DNA, 25 bp, Homo sapien
gggagccgtttaattaaatacaaca

SEQ ID NO: 5907432 - DNA, 25 bp, Homo sapien
aagggtgtcatgaaaatcagtatag

SEQ ID NO: 5907433 - DNA, 25 bp, Homo sapien
ggaatgtttggtgagtttatttttc

SEQ ID NO: 5907434 - DNA, 25 bp, Homo sapien
tccgtggctggcttgtagacagagg

SEQ ID NO: 5907435 - DNA, 25 bp, Homo sapien
ctgtgaatatcgctgggtttgtaat

SEQ ID NO: 5907436 - DNA, 25 bp, Homo sapien
acagtcccccttctctggcttttgc

SEQ ID NO: 5907437 - DNA, 25 bp, Homo sapien
ggcaggggcagcaatctgcccacca

SEQ ID NO: 5907438 - DNA, 25 bp, Homo sapien
gaaactgtatgttagccttcagttt

SEQ ID NO: 5907439 - DNA, 25 bp, Homo sapien
ctggaatgtttggtgagtttatttt

SEQ ID NO: 5907440 - DNA, 25 bp, Homo sapien
gtcatgaaaatcagtatagactttg

SEQ ID NO: 5907441 - DNA, 25 bp, Homo sapien
ttggtaccctgtcctcagagtgtgt

SEQ ID NO: 5907442 - DNA, 25 bp, Homo sapien
cccaacacagtcccccttctctggc

SEQ ID NO: 5907443 - DNA, 25 bp, Homo sapien
gcagacactcatctgtgaatatcgc

SEQ ID NO: 5907444 - DNA, 25 bp, Homo sapien
tatgcgtccatagcagacactcatc

SEQ ID NO: 5907445 - DNA, 25 bp, Homo sapien
tgacaattgtatgaaagcaacctca

SEQ ID NO: 5907446 - DNA, 25 bp, Homo sapien
tatgctgcataattgtgcataactt

SEQ ID NO: 5907447 - DNA, 25 bp, Homo sapien
gcaaggatgaaaatctgtttccagc

SEQ ID NO: 5907448 - DNA, 25 bp, Homo sapien
agacataacactgctcagtgtgcgg

SEQ ID NO: 5907449 - DNA, 25 bp, Homo sapien
agggtttcagtttcctgtccttgtc

SEQ ID NO: 5907450 - DNA, 25 bp, Homo sapien
tagcagacactcatctgtgaatatc

SEQ ID NO: 5907451 - DNA, 25 bp, Homo sapien
agagtgtgtgacagccactgtaatc

SEQ ID NO: 5907452 - DNA, 25 bp, Homo sapien
tgcaccaacactttggcatgacaat

SEQ ID NO: 5907453 - DNA, 25 bp, Homo sapien
aagcaacctcactgcacaaagtatt

SEQ ID NO: 5907454 - DNA, 25 bp, Homo sapien
cccctatacatagaaatatgctgca

SEQ ID NO: 5907455 - DNA, 25 bp, Homo sapien
atgtttaggctgtacatactggggt

SEQ ID NO: 5907456 - DNA, 25 bp, Homo sapien
attataggaaaaccagggcctcttg

SEQ ID NO: 5907457 - DNA, 25 bp, Homo sapien
atgaacgcgtagcttgagtttggac

SEQ ID NO: 5907458 - DNA, 25 bp, Homo sapien
agagtccgtgggattataggaaaac

SEQ ID NO: 5907459 - DNA, 25 bp, Homo sapien
ccttctctggcttttgctctcctgg

SEQ ID NO: 5907460 - DNA, 25 bp, Homo sapien
tgaaggaaatgcaaagtgtctgccc

SEQ ID NO: 5907461 - DNA, 25 bp, Homo sapien
agctctcaagtggctaaaagtttcc

SEQ ID NO: 5907462 - DNA, 25 bp, Homo sapien
agcactggaatgtttggtgagttta

SEQ ID NO: 5907463 - DNA, 25 bp, Homo sapien
tcttggtaccctgtcctcagagtgt

SEQ ID NO: 5907464 - DNA, 25 bp, Homo sapien
agtgaaggaaatgcaaagtgtctgc

SEQ ID NO: 5907465 - DNA, 25 bp, Homo sapien
tcctcatataccaaactgaaaacgt

SEQ ID NO: 5907466 - DNA, 25 bp, Homo sapien
gtatgttagccttcagtttcctcat

SEQ ID NO: 5907467 - DNA, 25 bp, Homo sapien
atgggacaggaaatgtgtttgctat

SEQ ID NO: 5907468 - DNA, 25 bp, Homo sapien
ccccacccctccacccaacacagtc

SEQ ID NO: 5907469 - DNA, 25 bp, Homo sapien
gctctatgtatgcgtccatagcaga

SEQ ID NO: 5907470 - DNA, 25 bp, Homo sapien
ggggcagcaatctgcccaccatgca

SEQ ID NO: 5907471 - DNA, 25 bp, Homo sapien
cctgcccctatacatagaaatatgc

SEQ ID NO: 5907472 - DNA, 25 bp, Homo sapien
agtttcctgtccttgtcaccagtga

SEQ ID NO: 5907473 - DNA, 25 bp, Homo sapien
gaggatgtttaggctgtacatactg

SEQ ID NO: 5907474 - DNA, 25 bp, Homo sapien
tatagactttgtttcattaacatgt

SEQ ID NO: 5907475 - DNA, 25 bp, Homo sapien
aaagtgtctgcccccacccctccac

SEQ ID NO: 5907476 - DNA, 25 bp, Homo sapien
gcttcacgacagggacaggcacacc

SEQ ID NO: 5907477 - DNA, 25 bp, Homo sapien
gggacaggaaatgtgtttgctataa

SEQ ID NO: 5907478 - DNA, 25 bp, Homo sapien
gactttgtttcattaacatgtcata

SEQ ID NO: 5907479 - DNA, 25 bp, Homo sapien
tgcctgcccctatacatagaaatat

SEQ ID NO: 5907480 - DNA, 25 bp, Homo sapien
ataacactgctcagtgtgcggtctg

SEQ ID NO: 5907481 - DNA, 25 bp, Homo sapien
agtttcctcatataccaaactgaaa

SEQ ID NO: 5907482 - DNA, 25 bp, Homo sapien
agtccgtgggattataggaaaacca

SEQ ID NO: 5907483 - DNA, 25 bp, Homo sapien
ctgtcctcagagtgtgtgacagcca

SEQ ID NO: 5907484 - DNA, 25 bp, Homo sapien
agccactgtaatcagtgctctatgt

SEQ ID NO: 5907485 - DNA, 25 bp, Homo sapien
gcacacctctcaagtttaaagggtt

SEQ ID NO: 5907486 - DNA, 25 bp, Homo sapien
ggtaccctgtcctcagagtgtgtga

SEQ ID NO: 5907487 - DNA, 25 bp, Homo sapien
ctgtttccagctctcaagtggctaa

SEQ ID NO: 5907488 - DNA, 25 bp, Homo sapien
cactggaatgtttggtgagtttatt

SEQ ID NO: 5907489 - DNA, 25 bp, Homo sapien
acataacactgctcagtgtgcggtc

SEQ ID NO: 5907490 - DNA, 25 bp, Homo sapien
ctgctcagtgtgcggtctgcttcac

SEQ ID NO: 5907491 - DNA, 25 bp, Homo sapien
agtgtctgcccccacccctccaccc

SEQ ID NO: 5907492 - DNA, 25 bp, Homo sapien
aacttccttctccgtggctggcttg

SEQ ID NO: 5907493 - DNA, 25 bp, Homo sapien
gggaagcaagacataacactgctca

SEQ ID NO: 5907494 - DNA, 25 bp, Homo sapien
cggtctgcttcacgacagggacagg

SEQ ID NO: 5907495 - DNA, 25 bp, Homo sapien
tagactttgtttcattaacatgtca

SEQ ID NO: 5907496 - DNA, 25 bp, Homo sapien
agggcctcttggtaccctgtcctca

SEQ ID NO: 5907497 - DNA, 25 bp, Homo sapien
tagaaatatgctgcataattgtgca

SEQ ID NO: 5907498 - DNA, 25 bp, Homo sapien
aacactttggcatgacaattgtatg

SEQ ID NO: 5907499 - DNA, 25 bp, Homo sapien
gcataattgtgcataacttccttct

SEQ ID NO: 5907500 - DNA, 25 bp, Homo sapien
ccccttctctggcttttgctctcct

SEQ ID NO: 5907501 - DNA, 25 bp, Homo sapien
cactgctcagtgtgcggtctgcttc

SEQ ID NO: 5907502 - DNA, 25 bp, Homo sapien
tgtacatactggggtagatcattgc

SEQ ID NO: 5907503 - DNA, 25 bp, Homo sapien
ggaaatgtgtttgctataaaattag

SEQ ID NO: 5907504 - DNA, 25 bp, Homo sapien
actgaaaacgtttaaatctcaaatg

SEQ ID NO: 5907505 - DNA, 25 bp, Homo sapien
agtttggacaactagtaaggaatgc

SEQ ID NO: 5907506 - DNA, 25 bp, Homo sapien
ctgcttcacgacagggacaggcaca

SEQ ID NO: 5907507 - DNA, 25 bp, Homo sapien
gtaatcttttgttatataagaggat

SEQ ID NO: 5907508 - DNA, 25 bp, Homo sapien
taggaaaaccagggcctcttggtac

SEQ ID NO: 5907509 - DNA, 25 bp, Homo sapien
ccaagggtgtcatgaaaatcagtat

SEQ ID NO: 5907510 - DNA, 25 bp, Homo sapien
aaagtttccaagagagtccgtggga

SEQ ID NO: 5907511 - DNA, 25 bp, Homo sapien
gttagccttcagtttcctcatatac

SEQ ID NO: 5907512 - DNA, 25 bp, Homo sapien
tttggacaactagtaaggaatgcac

SEQ ID NO: 5907513 - DNA, 25 bp, Homo sapien
tagtaaggaatgcaccaacactttg

SEQ ID NO: 5907514 - DNA, 25 bp, Homo sapien
ctctcctggcctctccaagggtgtc

SEQ ID NO: 5907515 - DNA, 25 bp, Homo sapien
atatcgctgggtttgtaatcttttg

SEQ ID NO: 5907516 - DNA, 25 bp, Homo sapien
atgtgtttgctataaaattagagat

SEQ ID NO: 5907517 - DNA, 25 bp, Homo sapien
ataagaggatgtttaggctgtacat

SEQ ID NO: 5907518 - DNA, 25 bp, Homo sapien
atctcaaatgaagtaagcaaggttc

SEQ ID NO: 5907519 - DNA, 25 bp, Homo sapien
ttaggctgtacatactggggtagat

SEQ ID NO: 5907520 - DNA, 25 bp, Homo sapien
gtagacagaggaaactgtatgttag

SEQ ID NO: 5907521 - DNA, 25 bp, Homo sapien
tgcgtccatagcagacactcatctg

SEQ ID NO: 5907522 - DNA, 25 bp, Homo sapien
ctctcaagtggctaaaagtttccaa

SEQ ID NO: 5907523 - DNA, 25 bp, Homo sapien
cctcactgcacaaagtatttggaaa

SEQ ID NO: 5907524 - DNA, 25 bp, Homo sapien
gcaatctgcccaccatgcaaggatg

SEQ ID NO: 5907525 - DNA, 25 bp, Homo sapien
tttcagtttcctgtccttgtcacca

SEQ ID NO: 5907526 - DNA, 25 bp, Homo sapien
ttctatcttcttaaggggagccgtt

SEQ ID NO: 5907527 - DNA, 25 bp, Homo sapien
ggtttcagtttcctgtccttgtcac

SEQ ID NO: 5907528 - DNA, 25 bp, Homo sapien
aatctgcccaccatgcaaggatgaa

SEQ ID NO: 5907529 - DNA, 25 bp, Homo sapien
acaattgtatgaaagcaacctcact

SEQ ID NO: 5907530 - DNA, 25 bp, Homo sapien
gtgctctatgtatgcgtccatagca

SEQ ID NO: 5907531 - DNA, 25 bp, Homo sapien
atcagtgctctatgtatgcgtccat

SEQ ID NO: 5907532 - DNA, 25 bp, Homo sapien
gtgcataacttccttctccgtggct

SEQ ID NO: 5907533 - DNA, 25 bp, Homo sapien
tttgttatataagaggatgtttagg

SEQ ID NO: 5907534 - DNA, 25 bp, Homo sapien
ctatcttcttaaggggagccgttta

SEQ ID NO: 5907535 - DNA, 25 bp, Homo sapien
gttgagagagcactggaatgtttgg

SEQ ID NO: 5907536 - DNA, 25 bp, Homo sapien
tctcctgggaagcaagacataacac

SEQ ID NO: 5907537 - DNA, 25 bp, Homo sapien
gaaagcaacctcactgcacaaagta

SEQ ID NO: 5907538 - DNA, 25 bp, Homo sapien
ggatgtttaggctgtacatactggg

SEQ ID NO: 5907539 - DNA, 25 bp, Homo sapien
tgttatataagaggatgtttaggct

SEQ ID NO: 5907540 - DNA, 25 bp, Homo sapien
atatgttgagagagcactggaatgt

SEQ ID NO: 5907541 - DNA, 25 bp, Homo sapien
aaggaaatgcaaagtgtctgccccc

SEQ ID NO: 5907542 - DNA, 25 bp, Homo sapien
aagtatgggacttagtttctatctt

SEQ ID NO: 5907543 - DNA, 25 bp, Homo sapien
tctccgtggctggcttgtagacaga

SEQ ID NO: 5907544 - DNA, 25 bp, Homo sapien
gacttagtttctatcttcttaaggg

SEQ ID NO: 5907545 - DNA, 25 bp, Homo sapien
tttcctcatataccaaactgaaaac

SEQ ID NO: 5907546 - DNA, 25 bp, Homo sapien
aatgcaccaacactttggcatgaca

SEQ ID NO: 5907547 - DNA, 25 bp, Homo sapien
aatcttttgttatataagaggatgt

SEQ ID NO: 5907548 - DNA, 25 bp, Homo sapien
ctgggaagcaagacataacactgct

SEQ ID NO: 5907549 - DNA, 25 bp, Homo sapien
aaccagggcctcttggtaccctgtc

SEQ ID NO: 5907550 - DNA, 25 bp, Homo sapien
atataagaggatgtttaggctgtac

SEQ ID NO: 5907551 - DNA, 25 bp, Homo sapien
aggctgtacatactggggtagatca

SEQ ID NO: 5907552 - DNA, 25 bp, Homo sapien
aaagaagtatgggacttagtttcta

SEQ ID NO: 5907553 - DNA, 25 bp, Homo sapien
ctgggtttgtaatcttttgttatat

SEQ ID NO: 5907554 - DNA, 25 bp, Homo sapien
tcactgcacaaagtatttggaaaag

SEQ ID NO: 5907555 - DNA, 25 bp, Homo sapien
ccagtgaaggaaatgcaaagtgtct

SEQ ID NO: 5907556 - DNA, 25 bp, Homo sapien
aaggcaggggcagcaatctgcccac

SEQ ID NO: 5907557 - DNA, 25 bp, Homo sapien
gcttgtagacagaggaaactgtatg

SEQ ID NO: 5907558 - DNA, 25 bp, Homo sapien
ctgtatgttagccttcagtttcctc

SEQ ID NO: 5907559 - DNA, 25 bp, Homo sapien
tgtgtgacagccactgtaatcagtg

SEQ ID NO: 5907560 - DNA, 25 bp, Homo sapien
atccatgggacaggaaatgtgtttg

SEQ ID NO: 5907561 - DNA, 25 bp, Homo sapien
aatatgctgcataattgtgcataac

SEQ ID NO: 5907562 - DNA, 25 bp, Homo sapien
tgtaatcagtgctctatgtatgcgt

SEQ ID NO: 5907563 - DNA, 25 bp, Homo sapien
aaatgcaaagtgtctgcccccaccc

SEQ ID NO: 5907564 - DNA, 25 bp, Homo sapien
aaatctcaaatgaagtaagcaaggt

SEQ ID NO: 5907565 - DNA, 25 bp, Homo sapien
catataccaaactgaaaacgtttaa

SEQ ID NO: 5907566 - DNA, 25 bp, Homo sapien
tctatgtatgcgtccatagcagaca

SEQ ID NO: 5907567 - DNA, 25 bp, Homo sapien
tgaaaacgtttaaatctcaaatgaa

SEQ ID NO: 5907568 - DNA, 25 bp, Homo sapien
gtgtttgctataaaattagagatat

SEQ ID NO: 5907569 - DNA, 25 bp, Homo sapien
gctcagtgtgcggtctgcttcacga

SEQ ID NO: 5907570 - DNA, 25 bp, Homo sapien
ccttgtcaccagtgaaggaaatgca

SEQ ID NO: 5907571 - DNA, 25 bp, Homo sapien
cttttgctctcctggcctctccaag

SEQ ID NO: 5907572 - DNA, 25 bp, Homo sapien
gaaaatctgtttccagctctcaagt

SEQ ID NO: 5907573 - DNA, 25 bp, Homo sapien
tcagtttcctcatataccaaactga

SEQ ID NO: 5907574 - DNA, 25 bp, Homo sapien
attaaatacaacatccatgggacag

SEQ ID NO: 5907575 - DNA, 25 bp, Homo sapien
tgagagagcactggaatgtttggtg

SEQ ID NO: 5907576 - DNA, 25 bp, Homo sapien
agacactcatctgtgaatatcgctg

SEQ ID NO: 5907577 - DNA, 25 bp, Homo sapien
caccatgcaaggatgaaaatctgtt

SEQ ID NO: 5907578 - DNA, 25 bp, Homo sapien
atgcaaggatgaaaatctgtttcca

SEQ ID NO: 5907579 - DNA, 25 bp, Homo sapien
ctatgaacgcgtagcttgagtttgg

SEQ ID NO: 5907580 - DNA, 25 bp, Homo sapien
aattgtatgaaagcaacctcactgc

SEQ ID NO: 5907581 - DNA, 25 bp, Homo sapien
acaggcacacctctcaagtttaaag

SEQ ID NO: 5907582 - DNA, 25 bp, Homo sapien
gtcaccagtgaaggaaatgcaaagt

SEQ ID NO: 5907583 - DNA, 25 bp, Homo sapien
ggcatgacaattgtatgaaagcaac

SEQ ID NO: 5907584 - DNA, 25 bp, Homo sapien
tttccaagagagtccgtgggattat

SEQ ID NO: 5907585 - DNA, 25 bp, Homo sapien
cttttgttatataagaggatgttta

SEQ ID NO: 5907586 - DNA, 25 bp, Homo sapien
tataggaaaaccagggcctcttggt

SEQ ID NO: 5907587 - DNA, 25 bp, Homo sapien
ctctccaagggtgtcatgaaaatca

SEQ ID NO: 5907588 - DNA, 25 bp, Homo sapien
agggacaggcacacctctcaagttt

SEQ ID NO: 5907589 - DNA, 25 bp, Homo sapien
gagatataaggcaggggcagcaatc

SEQ ID NO: 5907590 - DNA, 25 bp, Homo sapien
ggggtagatcattgcctgcccctat

SEQ ID NO: 5907591 - DNA, 25 bp, Homo sapien
acagccactgtaatcagtgctctat

SEQ ID NO: 5907592 - DNA, 25 bp, Homo sapien
atctgtgaatatcgctgggtttgta

SEQ ID NO: 5907593 - DNA, 25 bp, Homo sapien
tcatctgtgaatatcgctgggtttg

SEQ ID NO: 5907594 - DNA, 25 bp, Homo sapien
gggtgtcatgaaaatcagtatagac

SEQ ID NO: 5907595 - DNA, 25 bp, Homo sapien
caccagtgaaggaaatgcaaagtgt

SEQ ID NO: 5907596 - DNA, 25 bp, Homo sapien
taaaagtttccaagagagtccgtgg

SEQ ID NO: 5907597 - DNA, 25 bp, Homo sapien
tgcccctatacatagaaatatgctg

SEQ ID NO: 5907598 - DNA, 25 bp, Homo sapien
gtatgggacttagtttctatcttct

SEQ ID NO: 5907599 - DNA, 25 bp, Homo sapien
cagtgctctatgtatgcgtccatag

SEQ ID NO: 5907600 - DNA, 25 bp, Homo sapien
ctctggcttttgctctcctggcctc

SEQ ID NO: 5907601 - DNA, 25 bp, Homo sapien
ggaatgcaccaacactttggcatga

SEQ ID NO: 5907602 - DNA, 25 bp, Homo sapien
gtttatttttctatgaacgcgtagc

SEQ ID NO: 5907603 - DNA, 25 bp, Homo sapien
actgtaatcagtgctctatgtatgc

SEQ ID NO: 5907604 - DNA, 25 bp, Homo sapien
gaaatatgctgcataattgtgcata

SEQ ID NO: 5907605 - DNA, 25 bp, Homo sapien
aactgtatgttagccttcagtttcc

SEQ ID NO: 5907606 - DNA, 25 bp, Homo sapien
gtgtcatgaaaatcagtatagactt

SEQ ID NO: 5907607 - DNA, 25 bp, Homo sapien
tttggaaaagaagtatgggacttag

SEQ ID NO: 5907608 - DNA, 25 bp, Homo sapien
tcccccttctctggcttttgctctc

SEQ ID NO: 5907609 - DNA, 25 bp, Homo sapien
caccaacactttggcatgacaattg

SEQ ID NO: 5907610 - DNA, 25 bp, Homo sapien
ccatgcaaggatgaaaatctgtttc

SEQ ID NO: 5907611 - DNA, 25 bp, Homo sapien
ctgcataattgtgcataacttcctt

SEQ ID NO: 5907612 - DNA, 25 bp, Homo sapien
atctgtttccagctctcaagtggct

SEQ ID NO: 5907613 - DNA, 25 bp, Homo sapien
ggacaggcacacctctcaagtttaa

SEQ ID NO: 5907614 - DNA, 25 bp, Homo sapien
catgacaattgtatgaaagcaacct

SEQ ID NO: 5907615 - DNA, 25 bp, Homo sapien
ccatgggacaggaaatgtgtttgct

SEQ ID NO: 5907616 - DNA, 25 bp, Homo sapien
tgaaaatcagtatagactttgtttc

SEQ ID NO: 5907617 - DNA, 25 bp, Homo sapien
aggaaactgtatgttagccttcagt

SEQ ID NO: 5907618 - DNA, 25 bp, Homo sapien
acagaggaaactgtatgttagcctt

SEQ ID NO: 5907619 - DNA, 25 bp, Homo sapien
aaaatcagtatagactttgtttcat

SEQ ID NO: 5907620 - DNA, 25 bp, Homo sapien
attgcctgcccctatacatagaaat

SEQ ID NO: 5907621 - DNA, 25 bp, Homo sapien
ctcaaatgaagtaagcaaggttctg

SEQ ID NO: 5907622 - DNA, 25 bp, Homo sapien
ttgtgcataacttccttctccgtgg

SEQ ID NO: 5907623 - DNA, 25 bp, Homo sapien
tccttctccgtggctggcttgtaga

SEQ ID NO: 5907624 - DNA, 25 bp, Homo sapien
gcaacctcactgcacaaagtatttg

SEQ ID NO: 5907625 - DNA, 25 bp, Homo sapien
ggcttttgctctcctggcctctcca

SEQ ID NO: 5907626 - DNA, 25 bp, Homo sapien
agcaagacataacactgctcagtgt

SEQ ID NO: 5907627 - DNA, 25 bp, Homo sapien
gaagcaagacataacactgctcagt

SEQ ID NO: 5907628 - DNA, 25 bp, Homo sapien
tgctgcataattgtgcataacttcc

SEQ ID NO: 5907629 - DNA, 25 bp, Homo sapien
aaggatgaaaatctgtttccagctc

SEQ ID NO: 5907630 - DNA, 25 bp, Homo sapien
tgggattataggaaaaccagggcct

SEQ ID NO: 5907631 - DNA, 25 bp, Homo sapien
tacaacatccatgggacaggaaatg

SEQ ID NO: 5907632 - DNA, 25 bp, Homo sapien
tggctggcttgtagacagaggaaac

SEQ ID NO: 5907633 - DNA, 25 bp, Homo sapien
caacatccatgggacaggaaatgtg

SEQ ID NO: 5907634 - DNA, 25 bp, Homo sapien
tttgctctcctggcctctccaaggg

SEQ ID NO: 5907635 - DNA, 25 bp, Homo sapien
tgcacaaagtatttggaaaagaagt

SEQ ID NO: 5907636 - DNA, 25 bp, Homo sapien
tgacagccactgtaatcagtgctct

SEQ ID NO: 5907637 - DNA, 25 bp, Homo sapien
catagcagacactcatctgtgaata

SEQ ID NO: 5907638 - DNA, 25 bp, Homo sapien
cttctccgtggctggcttgtagaca

SEQ ID NO: 5907639 - DNA, 25 bp, Homo sapien
tgtcatatgttgagagagcactgga

SEQ ID NO: 5907640 - DNA, 25 bp, Homo sapien
gtttcattaacatgtcatatgttga

SEQ ID NO: 5907641 - DNA, 25 bp, Homo sapien
ctgtccttgtcaccagtgaaggaaa

SEQ ID NO: 5907642 - DNA, 25 bp, Homo sapien
tccaagagagtccgtgggattatag

SEQ ID NO: 5907643 - DNA, 25 bp, Homo sapien
ccaaactgaaaacgtttaaatctca

SEQ ID NO: 5907644 - DNA, 25 bp, Homo sapien
ctggggtagatcattgcctgcccct

SEQ ID NO: 5907645 - DNA, 25 bp, Homo sapien
ggcctcttggtaccctgtcctcaga

SEQ ID NO: 5907646 - DNA, 25 bp, Homo sapien
cttccttctccgtggctggcttgta

SEQ ID NO: 5907647 - DNA, 25 bp, Homo sapien
ttgtttcattaacatgtcatatgtt

SEQ ID NO: 5907648 - DNA, 25 bp, Homo sapien
cttcagtttcctcatataccaaact

SEQ ID NO: 5907649 - DNA, 25 bp, Homo sapien
agagagcactggaatgtttggtgag

SEQ ID NO: 5907650 - DNA, 25 bp, Homo sapien
ggtagatcattgcctgcccctatac

SEQ ID NO: 5907651 - DNA, 25 bp, Homo sapien
caagagagtccgtgggattatagga

SEQ ID NO: 5907652 - DNA, 25 bp, Homo sapien
tggacaactagtaaggaatgcacca

SEQ ID NO: 5907653 - DNA, 25 bp, Homo sapien
tcagtttcctgtccttgtcaccagt

SEQ ID NO: 5907654 - DNA, 25 bp, Homo sapien
catactggggtagatcattgcctgc

SEQ ID NO: 5907655 - DNA, 25 bp, Homo sapien
atgaaaatctgtttccagctctcaa

SEQ ID NO: 5907656 - DNA, 25 bp, Homo sapien
actcatctgtgaatatcgctgggtt

SEQ ID NO: 5907657 - DNA, 25 bp, Homo sapien
gtgagtttatttttctatgaacgcg

SEQ ID NO: 5907658 - DNA, 25 bp, Homo sapien
tactggggtagatcattgcctgccc

SEQ ID NO: 5907659 - DNA, 25 bp, Homo sapien
cctcttggtaccctgtcctcagagt

SEQ ID NO: 5907660 - DNA, 25 bp, Homo sapien
gctaaaagtttccaagagagtccgt

SEQ ID NO: 5907661 - DNA, 25 bp, Homo sapien
gcgtagcttgagtttggacaactag

SEQ ID NO: 5907662 - DNA, 25 bp, Homo sapien
tcatatgttgagagagcactggaat

SEQ ID NO: 5907663 - DNA, 25 bp, Homo sapien
aaggaatgcaccaacactttggcat

SEQ ID NO: 5907664 - DNA, 25 bp, Homo sapien
ttcacgacagggacaggcacacctc

SEQ ID NO: 5907665 - DNA, 25 bp, Homo sapien
ggattataggaaaaccagggcctct

SEQ ID NO: 5907666 - DNA, 25 bp, Homo sapien
atgcaaagtgtctgcccccacccct

SEQ ID NO: 5907667 - DNA, 25 bp, Homo sapien
gatcattgcctgcccctatacatag

SEQ ID NO: 5907668 - DNA, 25 bp, Homo sapien
cttgagtttggacaactagtaagga

SEQ ID NO: 5907669 - DNA, 25 bp, Homo sapien
gaacgcgtagcttgagtttggacaa

SEQ ID NO: 5907670 - DNA, 25 bp, Homo sapien
aattgtgcataacttccttctccgt

SEQ ID NO: 5907671 - DNA, 25 bp, Homo sapien
atgggacttagtttctatcttctta

SEQ ID NO: 5907672 - DNA, 25 bp, Homo sapien
cgtccatagcagacactcatctgtg

SEQ ID NO: 5907673 - DNA, 25 bp, Homo sapien
tttaattaaatacaacatccatggg

SEQ ID NO: 5907674 - DNA, 25 bp, Homo sapien
tttggtgagtttatttttctatgaa

SEQ ID NO: 5907675 - DNA, 25 bp, Homo sapien
cacgacagggacaggcacacctctc

SEQ ID NO: 5907676 - DNA, 25 bp, Homo sapien
taaatacaacatccatgggacagga

SEQ ID NO: 5907677 - DNA, 25 bp, Homo sapien
gggtttgtaatcttttgttatataa

SEQ ID NO: 5907678 - DNA, 25 bp, Homo sapien
agtttccaagagagtccgtgggatt

SEQ ID NO: 5907679 - DNA, 25 bp, Homo sapien
tcctgggaagcaagacataacactg

SEQ ID NO: 5907680 - DNA, 25 bp, Homo sapien
gtatgaaagcaacctcactgcacaa

SEQ ID NO: 5907681 - DNA, 25 bp, Homo sapien
ttggcatgacaattgtatgaaagca

SEQ ID NO: 5907682 - DNA, 25 bp, Homo sapien
cctcagagtgtgtgacagccactgt

SEQ ID NO: 5907683 - DNA, 25 bp, Homo sapien
gacaactagtaaggaatgcaccaac

SEQ ID NO: 5907684 - DNA, 25 bp, Homo sapien
cgtgggattataggaaaaccagggc

SEQ ID NO: 5907685 - DNA, 25 bp, Homo sapien
ctcctggcctctccaagggtgtcat

SEQ ID NO: 5907686 - DNA, 25 bp, Homo sapien
gtttccagctctcaagtggctaaaa

SEQ ID NO: 5907687 - DNA, 25 bp, Homo sapien
ctcatataccaaactgaaaacgttt

SEQ ID NO: 5907688 - DNA, 25 bp, Homo sapien
taccctgtcctcagagtgtgtgaca

SEQ ID NO: 5907689 - DNA, 25 bp, Homo sapien
tagtttctatcttcttaaggggagc

SEQ ID NO: 5907690 - DNA, 25 bp, Homo sapien
gcaaagtgtctgcccccacccctcc

SEQ ID NO: 5907691 - DNA, 25 bp, Homo sapien
gtcctcagagtgtgtgacagccact

SEQ ID NO: 5907692 - DNA, 25 bp, Homo sapien
tgctctcctggcctctccaagggtg

SEQ ID NO: 5907693 - DNA, 25 bp, Homo sapien
aacatgtcatatgttgagagagcac

SEQ ID NO: 5907694 - DNA, 25 bp, Homo sapien
tgtctgcccccacccctccacccaa

SEQ ID NO: 5907695 - DNA, 25 bp, Homo sapien
tataaggcaggggcagcaatctgcc

SEQ ID NO: 5907696 - DNA, 25 bp, Homo sapien
tctgcccccacccctccacccaaca

SEQ ID NO: 5907697 - DNA, 25 bp, Homo sapien
gtttgtaatcttttgttatataaga

SEQ ID NO: 5907698 - DNA, 25 bp, Homo sapien
ctcaagtggctaaaagtttccaaga

SEQ ID NO: 5907699 - DNA, 25 bp, Homo sapien
aacctcactgcacaaagtatttgga

SEQ ID NO: 5907700 - DNA, 25 bp, Homo sapien
tccatagcagacactcatctgtgaa

SEQ ID NO: 5907701 - DNA, 25 bp, Homo sapien
acacagtcccccttctctggctttt

SEQ ID NO: 5907702 - DNA, 25 bp, Homo sapien
tccgtgggattataggaaaaccagg

SEQ ID NO: 5907703 - DNA, 25 bp, Homo sapien
ccagggcctcttggtaccctgtcct

SEQ ID NO: 5907704 - DNA, 25 bp, Homo sapien
tacatactggggtagatcattgcct

SEQ ID NO: 5907705 - DNA, 25 bp, Homo sapien
aaatctgtttccagctctcaagtgg

SEQ ID NO: 5907706 - DNA, 25 bp, Homo sapien
ataattgtgcataacttccttctcc

SEQ ID NO: 5907707 - DNA, 25 bp, Homo sapien
ctggcttttgctctcctggcctctc

SEQ ID NO: 5907708 - DNA, 25 bp, Homo sapien
ccctgtcctcagagtgtgtgacagc

SEQ ID NO: 5907709 - DNA, 25 bp, Homo sapien
agacagaggaaactgtatgttagcc

SEQ ID NO: 5907710 - DNA, 25 bp, Homo sapien
actagtaaggaatgcaccaacactt

SEQ ID NO: 5907711 - DNA, 25 bp, Homo sapien
ttccagctctcaagtggctaaaagt

SEQ ID NO: 5907712 - DNA, 25 bp, Homo sapien
caacacagtcccccttctctggctt

SEQ ID NO: 5907713 - DNA, 25 bp, Homo sapien
actgcacaaagtatttggaaaagaa

SEQ ID NO: 5907714 - DNA, 25 bp, Homo sapien
tccacccaacacagtcccccttctc

SEQ ID NO: 5907715 - DNA, 25 bp, Homo sapien
ttcattaacatgtcatatgttgaga

SEQ ID NO: 5907716 - DNA, 25 bp, Homo sapien
caagtggctaaaagtttccaagaga

SEQ ID NO: 5907717 - DNA, 25 bp, Homo sapien
catagaaatatgctgcataattgtg

SEQ ID NO: 5907718 - DNA, 25 bp, Homo sapien
ttctatgaacgcgtagcttgagttt

SEQ ID NO: 5907719 - DNA, 25 bp, Homo sapien
aatgtttggtgagtttatttttcta

SEQ ID NO: 5907720 - DNA, 25 bp, Homo sapien
aatcagtatagactttgtttcatta

SEQ ID NO: 5907721 - DNA, 25 bp, Homo sapien
agtatagactttgtttcattaacat

SEQ ID NO: 5907722 - DNA, 25 bp, Homo sapien
gtccttgtcaccagtgaaggaaatg

SEQ ID NO: 5907723 - DNA, 25 bp, Homo sapien
tagagatataaggcaggggcagcaa

SEQ ID NO: 5907724 - DNA, 25 bp, Homo sapien
gtagcttgagtttggacaactagta

SEQ ID NO: 5907725 - DNA, 25 bp, Homo sapien
tgtttggtgagtttatttttctatg

SEQ ID NO: 5907726 - DNA, 25 bp, Homo sapien
agtcccccttctctggcttttgctc

SEQ ID NO: 5907727 - DNA, 25 bp, Homo sapien
ttatttttctatgaacgcgtagctt

SEQ ID NO: 5907728 - DNA, 25 bp, Homo sapien
gccgtttaattaaatacaacatcca

SEQ ID NO: 5907729 - DNA, 25 bp, Homo sapien
tggaaaagaagtatgggacttagtt

SEQ ID NO: 5907730 - DNA, 25 bp, Homo sapien
ggatgaaaatctgtttccagctctc

SEQ ID NO: 5907731 - DNA, 25 bp, Homo sapien
ccactgtaatcagtgctctatgtat

SEQ ID NO: 5907732 - DNA, 25 bp, Homo sapien
ttctctggcttttgctctcctggcc

SEQ ID NO: 5907733 - DNA, 25 bp, Homo sapien
attagagatataaggcaggggcagc

SEQ ID NO: 5907734 - DNA, 25 bp, Homo sapien
ggcagcaatctgcccaccatgcaag

SEQ ID NO: 5907735 - DNA, 25 bp, Homo sapien
agtgtgtgacagccactgtaatcag

SEQ ID NO: 5907736 - DNA, 25 bp, Homo sapien
ccagctctcaagtggctaaaagttt

SEQ ID NO: 5907737 - DNA, 25 bp, Homo sapien
cagcaatctgcccaccatgcaagga

SEQ ID NO: 5907738 - DNA, 25 bp, Homo sapien
cccaccatgcaaggatgaaaatctg

SEQ ID NO: 5907739 - DNA, 25 bp, Homo sapien
atttttctatgaacgcgtagcttga

SEQ ID NO: 5907740 - DNA, 25 bp, Homo sapien
agtgtgcggtctgcttcacgacagg

SEQ ID NO: 5907741 - DNA, 25 bp, Homo sapien
agaggaaactgtatgttagccttca

SEQ ID NO: 5907742 - DNA, 25 bp, Homo sapien
gatataaggcaggggcagcaatctg

SEQ ID NO: 5907743 - DNA, 25 bp, Homo sapien
tacatagaaatatgctgcataattg

SEQ ID NO: 5907744 - DNA, 25 bp, Homo sapien
cgtggctggcttgtagacagaggaa

SEQ ID NO: 5907745 - DNA, 25 bp, Homo sapien
cacctctcaagtttaaagggtttca

SEQ ID NO: 5907746 - DNA, 25 bp, Homo sapien
ttaacatgtcatatgttgagagagc

SEQ ID NO: 5907747 - DNA, 25 bp, Homo sapien
gtttaggctgtacatactggggtag

SEQ ID NO: 5907748 - DNA, 25 bp, Homo sapien
tatgtatgcgtccatagcagacact

SEQ ID NO: 5907749 - DNA, 25 bp, Homo sapien
acgtttaaatctcaaatgaagtaag

SEQ ID NO: 5907750 - DNA, 25 bp, Homo sapien
ttgtcaccagtgaaggaaatgcaaa

SEQ ID NO: 5907751 - DNA, 25 bp, Homo sapien
tggcttgtagacagaggaaactgta

SEQ ID NO: 5907752 - DNA, 25 bp, Homo sapien
ttgtatgaaagcaacctcactgcac

SEQ ID NO: 5907753 - DNA, 25 bp, Homo sapien
atgttgagagagcactggaatgttt

SEQ ID NO: 5907754 - DNA, 25 bp, Homo sapien
caagacataacactgctcagtgtgc

SEQ ID NO: 5907755 - DNA, 25 bp, Homo sapien
tgtatgcgtccatagcagacactca

SEQ ID NO: 5907756 - DNA, 25 bp, Homo sapien
tggcctctccaagggtgtcatgaaa

SEQ ID NO: 5907757 - DNA, 25 bp, Homo sapien
ctccaagggtgtcatgaaaatcagt

SEQ ID NO: 5907758 - DNA, 25 bp, Homo sapien
ccacccctccacccaacacagtccc

SEQ ID NO: 5907759 - DNA, 25 bp, Homo sapien
ttgtaatcttttgttatataagagg

SEQ ID NO: 5907760 - DNA, 25 bp, Homo sapien
aatacaacatccatgggacaggaaa

SEQ ID NO: 5907761 - DNA, 25 bp, Homo sapien
agaagtatgggacttagtttctatc

SEQ ID NO: 5907762 - DNA, 25 bp, Homo sapien
atgttagccttcagtttcctcatat

SEQ ID NO: 5907763 - DNA, 25 bp, Homo sapien
tggtgagtttatttttctatgaacg

SEQ ID NO: 5907764 - DNA, 25 bp, Homo sapien
tgtgcggtctgcttcacgacaggga

SEQ ID NO: 5907765 - DNA, 25 bp, Homo sapien
cttagtttctatcttcttaagggga

SEQ ID NO: 5907766 - DNA, 25 bp, Homo sapien
ttttctatgaacgcgtagcttgagt

SEQ ID NO: 5907767 - DNA, 25 bp, Homo sapien
ataacttccttctccgtggctggct

SEQ ID NO: 5907768 - DNA, 25 bp, Homo sapien
caactagtaaggaatgcaccaacac

SEQ ID NO: 5907769 - DNA, 25 bp, Homo sapien
cctccacccaacacagtcccccttc

SEQ ID NO: 5907770 - DNA, 25 bp, Homo sapien
tgcggtctgcttcacgacagggaca

SEQ ID NO: 5907771 - DNA, 25 bp, Homo sapien
tcattgcctgcccctatacatagaa

SEQ ID NO: 5907772 - DNA, 25 bp, Homo sapien
caggaaatgtgtttgctataaaatt

SEQ ID NO: 5907773 - DNA, 25 bp, Homo sapien
tagatcattgcctgcccctatacat

SEQ ID NO: 5907774 - DNA, 25 bp, Homo sapien
gtgcagtgaggttgctttcatacaa

SEQ ID NO: 5907775 - DNA, 25 bp, Homo sapien
aatgatctaccccagtatgtacagc

SEQ ID NO: 5907776 - DNA, 25 bp, Homo sapien
cttgcatggtgggcagattgctgcc

SEQ ID NO: 5907777 - DNA, 25 bp, Homo sapien
acactttgcatttccttcactggtg

SEQ ID NO: 5907778 - DNA, 25 bp, Homo sapien
cagcgatattcacagatgagtgtct

SEQ ID NO: 5907779 - DNA, 25 bp, Homo sapien
gaagcagaccgcacactgagcagtg

SEQ ID NO: 5907780 - DNA, 25 bp, Homo sapien
aataaactcaccaaacattccagtg

SEQ ID NO: 5907781 - DNA, 25 bp, Homo sapien
gagagctggaaacagattttcatcc

SEQ ID NO: 5907782 - DNA, 25 bp, Homo sapien
cttactagttgtccaaactcaagct

SEQ ID NO: 5907783 - DNA, 25 bp, Homo sapien
tccaaatactttgtgcagtgaggtt

SEQ ID NO: 5907784 - DNA, 25 bp, Homo sapien
aatactttgtgcagtgaggttgctt

SEQ ID NO: 5907785 - DNA, 25 bp, Homo sapien
gctgtcacacactctgaggacaggg

SEQ ID NO: 5907786 - DNA, 25 bp, Homo sapien
tctctcaacatatgacatgttaatg

SEQ ID NO: 5907787 - DNA, 25 bp, Homo sapien
acgcatacatagagcactgattaca

SEQ ID NO: 5907788 - DNA, 25 bp, Homo sapien
gggtggaggggtgggggcagacact

SEQ ID NO: 5907789 - DNA, 25 bp, Homo sapien
ctaacatacagtttcctctgtctac

SEQ ID NO: 5907790 - DNA, 25 bp, Homo sapien
ttctatgtataggggcaggcaatga

SEQ ID NO: 5907791 - DNA, 25 bp, Homo sapien
gtgggcagattgctgcccctgcctt

SEQ ID NO: 5907792 - DNA, 25 bp, Homo sapien
tacttcatttgagatttaaacgttt

SEQ ID NO: 5907793 - DNA, 25 bp, Homo sapien
gctctctcaacatatgacatgttaa

SEQ ID NO: 5907794 - DNA, 25 bp, Homo sapien
cagagaagggggactgtgttgggtg

SEQ ID NO: 5907795 - DNA, 25 bp, Homo sapien
ttttatagcaaacacatttcctgtc

SEQ ID NO: 5907796 - DNA, 25 bp, Homo sapien
aattttatagcaaacacatttcctg

SEQ ID NO: 5907797 - DNA, 25 bp, Homo sapien
gcagtgaggttgctttcatacaatt

SEQ ID NO: 5907798 - DNA, 25 bp, Homo sapien
catacagtttcctctgtctacaagc

SEQ ID NO: 5907799 - DNA, 25 bp, Homo sapien
aaaagccagagaagggggactgtgt

SEQ ID NO: 5907800 - DNA, 25 bp, Homo sapien
aacggctccccttaagaagatagaa

SEQ ID NO: 5907801 - DNA, 25 bp, Homo sapien
agacactttgcatttccttcactgg

SEQ ID NO: 5907802 - DNA, 25 bp, Homo sapien
cttggagaggccaggagagcaaaag

SEQ ID NO: 5907803 - DNA, 25 bp, Homo sapien
gtataggggcaggcaatgatctacc

SEQ ID NO: 5907804 - DNA, 25 bp, Homo sapien
gaccgcacactgagcagtgttatgt

SEQ ID NO: 5907805 - DNA, 25 bp, Homo sapien
ctagttgtccaaactcaagctacgc

SEQ ID NO: 5907806 - DNA, 25 bp, Homo sapien
acatcctcttatataacaaaagatt

SEQ ID NO: 5907807 - DNA, 25 bp, Homo sapien
tgtgcctgtccctgtcgtgaagcag

SEQ ID NO: 5907808 - DNA, 25 bp, Homo sapien
tcactggtgacaaggacaggaaact

SEQ ID NO: 5907809 - DNA, 25 bp, Homo sapien
gaaaaataaactcaccaaacattcc

SEQ ID NO: 5907810 - DNA, 25 bp, Homo sapien
gacaaggacaggaaactgaaaccct

SEQ ID NO: 5907811 - DNA, 25 bp, Homo sapien
ccacggactctcttggaaactttta

SEQ ID NO: 5907812 - DNA, 25 bp, Homo sapien
caaacacatttcctgtcccatggat

SEQ ID NO: 5907813 - DNA, 25 bp, Homo sapien
aaactcaagctacgcgttcatagaa

SEQ ID NO: 5907814 - DNA, 25 bp, Homo sapien
actctgaggacagggtaccaagagg

SEQ ID NO: 5907815 - DNA, 25 bp, Homo sapien
actcaagctacgcgttcatagaaaa

SEQ ID NO: 5907816 - DNA, 25 bp, Homo sapien
tttccttcactggtgacaaggacag

SEQ ID NO: 5907817 - DNA, 25 bp, Homo sapien
tcctgtcccatggatgttgtattta

SEQ ID NO: 5907818 - DNA, 25 bp, Homo sapien
gctacgcgttcatagaaaaataaac

SEQ ID NO: 5907819 - DNA, 25 bp, Homo sapien
ttcatagaaaaataaactcaccaaa

SEQ ID NO: 5907820 - DNA, 25 bp, Homo sapien
ctctaattttatagcaaacacattt

SEQ ID NO: 5907821 - DNA, 25 bp, Homo sapien
acttgagaggtgtgcctgtccctgt

SEQ ID NO: 5907822 - DNA, 25 bp, Homo sapien
ttcttttccaaatactttgtgcagt

SEQ ID NO: 5907823 - DNA, 25 bp, Homo sapien
cagcatatttctatgtataggggca

SEQ ID NO: 5907824 - DNA, 25 bp, Homo sapien
tttcctgtcccatggatgttgtatt

SEQ ID NO: 5907825 - DNA, 25 bp, Homo sapien
ccaggagagcaaaagccagagaagg

SEQ ID NO: 5907826 - DNA, 25 bp, Homo sapien
cttttccaaatactttgtgcagtga

SEQ ID NO: 5907827 - DNA, 25 bp, Homo sapien
tacaaacccagcgatattcacagat

SEQ ID NO: 5907828 - DNA, 25 bp, Homo sapien
atgttaatgaaacaaagtctatact

SEQ ID NO: 5907829 - DNA, 25 bp, Homo sapien
tcatgacacccttggagaggccagg

SEQ ID NO: 5907830 - DNA, 25 bp, Homo sapien
tgcatggtgggcagattgctgcccc

SEQ ID NO: 5907831 - DNA, 25 bp, Homo sapien
gtcccatacttcttttccaaatact

SEQ ID NO: 5907832 - DNA, 25 bp, Homo sapien
tgtgttgggtggaggggtgggggca

SEQ ID NO: 5907833 - DNA, 25 bp, Homo sapien
acgttttcagtttggtatatgagga

SEQ ID NO: 5907834 - DNA, 25 bp, Homo sapien
ctaccccagtatgtacagcctaaac

SEQ ID NO: 5907835 - DNA, 25 bp, Homo sapien
ttgctgcccctgccttatatctcta

SEQ ID NO: 5907836 - DNA, 25 bp, Homo sapien
acagtggctgtcacacactctgagg

SEQ ID NO: 5907837 - DNA, 25 bp, Homo sapien
tgttgtatttaattaaacggctccc

SEQ ID NO: 5907838 - DNA, 25 bp, Homo sapien
gatagaaactaagtcccatacttct

SEQ ID NO: 5907839 - DNA, 25 bp, Homo sapien
gcaggcaatgatctaccccagtatg

SEQ ID NO: 5907840 - DNA, 25 bp, Homo sapien
cctgtcgtgaagcagaccgcacact

SEQ ID NO: 5907841 - DNA, 25 bp, Homo sapien
tctcttggaaacttttagccacttg

SEQ ID NO: 5907842 - DNA, 25 bp, Homo sapien
cagattgctgcccctgccttatatc

SEQ ID NO: 5907843 - DNA, 25 bp, Homo sapien
atctctaattttatagcaaacacat

SEQ ID NO: 5907844 - DNA, 25 bp, Homo sapien
tttcctataatcccacggactctct

SEQ ID NO: 5907845 - DNA, 25 bp, Homo sapien
tcctataatcccacggactctcttg

SEQ ID NO: 5907846 - DNA, 25 bp, Homo sapien
gattgctgcccctgccttatatctc

SEQ ID NO: 5907847 - DNA, 25 bp, Homo sapien
agcctaaacatcctcttatataaca

SEQ ID NO: 5907848 - DNA, 25 bp, Homo sapien
caaacccagcgatattcacagatga

SEQ ID NO: 5907849 - DNA, 25 bp, Homo sapien
tgacatgttaatgaaacaaagtcta

SEQ ID NO: 5907850 - DNA, 25 bp, Homo sapien
acacactctgaggacagggtaccaa

SEQ ID NO: 5907851 - DNA, 25 bp, Homo sapien
tgtccctgtcgtgaagcagaccgca

SEQ ID NO: 5907852 - DNA, 25 bp, Homo sapien
tcaagctacgcgttcatagaaaaat

SEQ ID NO: 5907853 - DNA, 25 bp, Homo sapien
tgcctgtccctgtcgtgaagcagac

SEQ ID NO: 5907854 - DNA, 25 bp, Homo sapien
ttagccacttgagagctggaaacag

SEQ ID NO: 5907855 - DNA, 25 bp, Homo sapien
catttccttcactggtgacaaggac

SEQ ID NO: 5907856 - DNA, 25 bp, Homo sapien
gcaatgatctaccccagtatgtaca

SEQ ID NO: 5907857 - DNA, 25 bp, Homo sapien
caattgtcatgccaaagtgttggtg

SEQ ID NO: 5907858 - DNA, 25 bp, Homo sapien
ggtgtgcctgtccctgtcgtgaagc

SEQ ID NO: 5907859 - DNA, 25 bp, Homo sapien
tgtcgtgaagcagaccgcacactga

SEQ ID NO: 5907860 - DNA, 25 bp, Homo sapien
ctatggacgcatacatagagcactg

SEQ ID NO: 5907861 - DNA, 25 bp, Homo sapien
tatgacatgttaatgaaacaaagtc

SEQ ID NO: 5907862 - DNA, 25 bp, Homo sapien
aaacattccagtgctctctcaacat

SEQ ID NO: 5907863 - DNA, 25 bp, Homo sapien
ccacggagaaggaagttatgcacaa

SEQ ID NO: 5907864 - DNA, 25 bp, Homo sapien
tctgctatggacgcatacatagagc

SEQ ID NO: 5907865 - DNA, 25 bp, Homo sapien
tactagttgtccaaactcaagctac

SEQ ID NO: 5907866 - DNA, 25 bp, Homo sapien
agccacggagaaggaagttatgcac

SEQ ID NO: 5907867 - DNA, 25 bp, Homo sapien
ataggggcaggcaatgatctacccc

SEQ ID NO: 5907868 - DNA, 25 bp, Homo sapien
gttatgcacaattatgcagcatatt

SEQ ID NO: 5907869 - DNA, 25 bp, Homo sapien
taaactcaccaaacattccagtgct

SEQ ID NO: 5907870 - DNA, 25 bp, Homo sapien
tggatgttgtatttaattaaacggc

SEQ ID NO: 5907871 - DNA, 25 bp, Homo sapien
tccctgtcgtgaagcagaccgcaca

SEQ ID NO: 5907872 - DNA, 25 bp, Homo sapien
cccagcgatattcacagatgagtgt

SEQ ID NO: 5907873 - DNA, 25 bp, Homo sapien
accaagaggccctggttttcctata

SEQ ID NO: 5907874 - DNA, 25 bp, Homo sapien
aactcaccaaacattccagtgctct

SEQ ID NO: 5907875 - DNA, 25 bp, Homo sapien
agtgtctgctatggacgcatacata

SEQ ID NO: 5907876 - DNA, 25 bp, Homo sapien
gggtgggggcagacactttgcattt

SEQ ID NO: 5907877 - DNA, 25 bp, Homo sapien
caaatactttgtgcagtgaggttgc

SEQ ID NO: 5907878 - DNA, 25 bp, Homo sapien
agaagatagaaactaagtcccatac

SEQ ID NO: 5907879 - DNA, 25 bp, Homo sapien
tggaaacagattttcatccttgcat

SEQ ID NO: 5907880 - DNA, 25 bp, Homo sapien
acttcttttccaaatactttgtgca

SEQ ID NO: 5907881 - DNA, 25 bp, Homo sapien
tcatgccaaagtgttggtgcattcc

SEQ ID NO: 5907882 - DNA, 25 bp, Homo sapien
gtatgtacagcctaaacatcctctt

SEQ ID NO: 5907883 - DNA, 25 bp, Homo sapien
agcagaccgcacactgagcagtgtt

SEQ ID NO: 5907884 - DNA, 25 bp, Homo sapien
ttgtccaaactcaagctacgcgttc

SEQ ID NO: 5907885 - DNA, 25 bp, Homo sapien
attccagtgctctctcaacatatga

SEQ ID NO: 5907886 - DNA, 25 bp, Homo sapien
cacccttggagaggccaggagagca

SEQ ID NO: 5907887 - DNA, 25 bp, Homo sapien
atggacgcatacatagagcactgat

SEQ ID NO: 5907888 - DNA, 25 bp, Homo sapien
atactgattttcatgacacccttgg

SEQ ID NO: 5907889 - DNA, 25 bp, Homo sapien
gcgatattcacagatgagtgtctgc

SEQ ID NO: 5907890 - DNA, 25 bp, Homo sapien
gctgcccctgccttatatctctaat

SEQ ID NO: 5907891 - DNA, 25 bp, Homo sapien
ttcatccttgcatggtgggcagatt

SEQ ID NO: 5907892 - DNA, 25 bp, Homo sapien
tagaaaaataaactcaccaaacatt

SEQ ID NO: 5907893 - DNA, 25 bp, Homo sapien
aggggcaggcaatgatctaccccag

SEQ ID NO: 5907894 - DNA, 25 bp, Homo sapien
tattcacagatgagtgtctgctatg

SEQ ID NO: 5907895 - DNA, 25 bp, Homo sapien
ctgtcccatggatgttgtatttaat

SEQ ID NO: 5907896 - DNA, 25 bp, Homo sapien
aaacttttagccacttgagagctgg

SEQ ID NO: 5907897 - DNA, 25 bp, Homo sapien
tgcttacttcatttgagatttaaac

SEQ ID NO: 5907898 - DNA, 25 bp, Homo sapien
catggtgggcagattgctgcccctg

SEQ ID NO: 5907899 - DNA, 25 bp, Homo sapien
tgagtgtctgctatggacgcataca

SEQ ID NO: 5907900 - DNA, 25 bp, Homo sapien
cagatgagtgtctgctatggacgca

SEQ ID NO: 5907901 - DNA, 25 bp, Homo sapien
ataacaaaagattacaaacccagcg

SEQ ID NO: 5907902 - DNA, 25 bp, Homo sapien
ggccaggagagcaaaagccagagaa

SEQ ID NO: 5907903 - DNA, 25 bp, Homo sapien
gccagagaagggggactgtgttggg

SEQ ID NO: 5907904 - DNA, 25 bp, Homo sapien
gattacagtggctgtcacacactct

SEQ ID NO: 5907905 - DNA, 25 bp, Homo sapien
tcgtgaagcagaccgcacactgagc

SEQ ID NO: 5907906 - DNA, 25 bp, Homo sapien
tggtgcattccttactagttgtcca

SEQ ID NO: 5907907 - DNA, 25 bp, Homo sapien
gtgctctctcaacatatgacatgtt

SEQ ID NO: 5907908 - DNA, 25 bp, Homo sapien
gtgttatgtcttgcttcccaggaga

SEQ ID NO: 5907909 - DNA, 25 bp, Homo sapien
ggctaacatacagtttcctctgtct

SEQ ID NO: 5907910 - DNA, 25 bp, Homo sapien
atatttctatgtataggggcaggca

SEQ ID NO: 5907911 - DNA, 25 bp, Homo sapien
aatcccacggactctcttggaaact

SEQ ID NO: 5907912 - DNA, 25 bp, Homo sapien
cccttggagaggccaggagagcaaa

SEQ ID NO: 5907913 - DNA, 25 bp, Homo sapien
cctcttatataacaaaagattacaa

SEQ ID NO: 5907914 - DNA, 25 bp, Homo sapien
atgtataggggcaggcaatgatcta

SEQ ID NO: 5907915 - DNA, 25 bp, Homo sapien
atgaggaaactgaaggctaacatac

SEQ ID NO: 5907916 - DNA, 25 bp, Homo sapien
accttgcttacttcatttgagattt

SEQ ID NO: 5907917 - DNA, 25 bp, Homo sapien
attccttactagttgtccaaactca

SEQ ID NO: 5907918 - DNA, 25 bp, Homo sapien
gggcaggcaatgatctaccccagta

SEQ ID NO: 5907919 - DNA, 25 bp, Homo sapien
tggtatatgaggaaactgaaggcta

SEQ ID NO: 5907920 - DNA, 25 bp, Homo sapien
aggcaatgatctaccccagtatgta

SEQ ID NO: 5907921 - DNA, 25 bp, Homo sapien
aagttatgcacaattatgcagcata

SEQ ID NO: 5907922 - DNA, 25 bp, Homo sapien
gaggaaactgaaggctaacatacag

SEQ ID NO: 5907923 - DNA, 25 bp, Homo sapien
ctataatcccacggactctcttgga

SEQ ID NO: 5907924 - DNA, 25 bp, Homo sapien
ctatactgattttcatgacaccctt

SEQ ID NO: 5907925 - DNA, 25 bp, Homo sapien
gatgagtgtctgctatggacgcata

SEQ ID NO: 5907926 - DNA, 25 bp, Homo sapien
caaagtctatactgattttcatgac

SEQ ID NO: 5907927 - DNA, 25 bp, Homo sapien
attttcatgacacccttggagaggc

SEQ ID NO: 5907928 - DNA, 25 bp, Homo sapien
gagagcaaaagccagagaaggggga

SEQ ID NO: 5907929 - DNA, 25 bp, Homo sapien
actgattttcatgacacccttggag

SEQ ID NO: 5907930 - DNA, 25 bp, Homo sapien
catagaaaaataaactcaccaaaca

SEQ ID NO: 5907931 - DNA, 25 bp, Homo sapien
tggctgtcacacactctgaggacag

SEQ ID NO: 5907932 - DNA, 25 bp, Homo sapien
ggacgcatacatagagcactgatta

SEQ ID NO: 5907933 - DNA, 25 bp, Homo sapien
tgagcagtgttatgtcttgcttccc

SEQ ID NO: 5907934 - DNA, 25 bp, Homo sapien
aacacatttcctgtcccatggatgt

SEQ ID NO: 5907935 - DNA, 25 bp, Homo sapien
agccacttgagagctggaaacagat

SEQ ID NO: 5907936 - DNA, 25 bp, Homo sapien
aaaataaactcaccaaacattccag

SEQ ID NO: 5907937 - DNA, 25 bp, Homo sapien
tttcagtttggtatatgaggaaact

SEQ ID NO: 5907938 - DNA, 25 bp, Homo sapien
cacatttcctgtcccatggatgttg

SEQ ID NO: 5907939 - DNA, 25 bp, Homo sapien
tgtctacaagccagccacggagaag

SEQ ID NO: 5907940 - DNA, 25 bp, Homo sapien
tcaacatatgacatgttaatgaaac

SEQ ID NO: 5907941 - DNA, 25 bp, Homo sapien
aaacttgagaggtgtgcctgtccct

SEQ ID NO: 5907942 - DNA, 25 bp, Homo sapien
ttaaacgttttcagtttggtatatg

SEQ ID NO: 5907943 - DNA, 25 bp, Homo sapien
atagagcactgattacagtggctgt

SEQ ID NO: 5907944 - DNA, 25 bp, Homo sapien
ggagaaggaagttatgcacaattat

SEQ ID NO: 5907945 - DNA, 25 bp, Homo sapien
atgaaacaaagtctatactgatttt

SEQ ID NO: 5907946 - DNA, 25 bp, Homo sapien
tactttgtgcagtgaggttgctttc

SEQ ID NO: 5907947 - DNA, 25 bp, Homo sapien
tgattttcatgacacccttggagag

SEQ ID NO: 5907948 - DNA, 25 bp, Homo sapien
atatctctaattttatagcaaacac

SEQ ID NO: 5907949 - DNA, 25 bp, Homo sapien
gtcccatggatgttgtatttaatta

SEQ ID NO: 5907950 - DNA, 25 bp, Homo sapien
gacagggtaccaagaggccctggtt

SEQ ID NO: 5907951 - DNA, 25 bp, Homo sapien
ccacttgagagctggaaacagattt

SEQ ID NO: 5907952 - DNA, 25 bp, Homo sapien
tggagaggccaggagagcaaaagcc

SEQ ID NO: 5907953 - DNA, 25 bp, Homo sapien
cagaaccttgcttacttcatttgag

SEQ ID NO: 5907954 - DNA, 25 bp, Homo sapien
gaggtgtgcctgtccctgtcgtgaa

SEQ ID NO: 5907955 - DNA, 25 bp, Homo sapien
ttcacagatgagtgtctgctatgga

SEQ ID NO: 5907956 - DNA, 25 bp, Homo sapien
aagtcccatacttcttttccaaata

SEQ ID NO: 5907957 - DNA, 25 bp, Homo sapien
gggggcagacactttgcatttcctt

SEQ ID NO: 5907958 - DNA, 25 bp, Homo sapien
catggatgttgtatttaattaaacg

SEQ ID NO: 5907959 - DNA, 25 bp, Homo sapien
ccaaactcaagctacgcgttcatag

SEQ ID NO: 5907960 - DNA, 25 bp, Homo sapien
catttcctgtcccatggatgttgta

SEQ ID NO: 5907961 - DNA, 25 bp, Homo sapien
cctgtccctgtcgtgaagcagaccg

SEQ ID NO: 5907962 - DNA, 25 bp, Homo sapien
aacatatgacatgttaatgaaacaa

SEQ ID NO: 5907963 - DNA, 25 bp, Homo sapien
ggaagttatgcacaattatgcagca

SEQ ID NO: 5907964 - DNA, 25 bp, Homo sapien
atataacaaaagattacaaacccag

SEQ ID NO: 5907965 - DNA, 25 bp, Homo sapien
caaaagattacaaacccagcgatat

SEQ ID NO: 5907966 - DNA, 25 bp, Homo sapien
ataatcccacggactctcttggaaa

SEQ ID NO: 5907967 - DNA, 25 bp, Homo sapien
tctcaacatatgacatgttaatgaa

SEQ ID NO: 5907968 - DNA, 25 bp, Homo sapien
gactgtgttgggtggaggggtgggg

SEQ ID NO: 5907969 - DNA, 25 bp, Homo sapien
cactgattacagtggctgtcacaca

SEQ ID NO: 5907970 - DNA, 25 bp, Homo sapien
tatgcacaattatgcagcatatttc

SEQ ID NO: 5907971 - DNA, 25 bp, Homo sapien
acttgagagctggaaacagattttc

SEQ ID NO: 5907972 - DNA, 25 bp, Homo sapien
gttttcctataatcccacggactct

SEQ ID NO: 5907973 - DNA, 25 bp, Homo sapien
acactgagcagtgttatgtcttgct

SEQ ID NO: 5907974 - DNA, 25 bp, Homo sapien
taatgaaacaaagtctatactgatt

SEQ ID NO: 5907975 - DNA, 25 bp, Homo sapien
caagccagccacggagaaggaagtt

SEQ ID NO: 5907976 - DNA, 25 bp, Homo sapien
ctttaaacttgagaggtgtgcctgt

SEQ ID NO: 5907977 - DNA, 25 bp, Homo sapien
agtttggtatatgaggaaactgaag

SEQ ID NO: 5907978 - DNA, 25 bp, Homo sapien
aaccctttaaacttgagaggtgtgc

SEQ ID NO: 5907979 - DNA, 25 bp, Homo sapien
gtgaagcagaccgcacactgagcag

SEQ ID NO: 5907980 - DNA, 25 bp, Homo sapien
aagccagagaagggggactgtgttg

SEQ ID NO: 5907981 - DNA, 25 bp, Homo sapien
ggaggggtgggggcagacactttgc

SEQ ID NO: 5907982 - DNA, 25 bp, Homo sapien
ttttcatccttgcatggtgggcaga

SEQ ID NO: 5907983 - DNA, 25 bp, Homo sapien
tgctttcatacaattgtcatgccaa

SEQ ID NO: 5907984 - DNA, 25 bp, Homo sapien
gcacactgagcagtgttatgtcttg

SEQ ID NO: 5907985 - DNA, 25 bp, Homo sapien
cagtgctctctcaacatatgacatg

SEQ ID NO: 5907986 - DNA, 25 bp, Homo sapien
ttgagaggtgtgcctgtccctgtcg

SEQ ID NO: 5907987 - DNA, 25 bp, Homo sapien
gagaggccaggagagcaaaagccag

SEQ ID NO: 5907988 - DNA, 25 bp, Homo sapien
cccagtatgtacagcctaaacatcc

SEQ ID NO: 5907989 - DNA, 25 bp, Homo sapien
aagtgttggtgcattccttactagt

SEQ ID NO: 5907990 - DNA, 25 bp, Homo sapien
cctaaacatcctcttatataacaaa

SEQ ID NO: 5907991 - DNA, 25 bp, Homo sapien
tggtgacaaggacaggaaactgaaa

SEQ ID NO: 5907992 - DNA, 25 bp, Homo sapien
aacaaaagattacaaacccagcgat

SEQ ID NO: 5907993 - DNA, 25 bp, Homo sapien
gttggtgcattccttactagttgtc

SEQ ID NO: 5907994 - DNA, 25 bp, Homo sapien
tgttgggtggaggggtgggggcaga

SEQ ID NO: 5907995 - DNA, 25 bp, Homo sapien
catacaattgtcatgccaaagtgtt

SEQ ID NO: 5907996 - DNA, 25 bp, Homo sapien
aggccctggttttcctataatccca

SEQ ID NO: 5907997 - DNA, 25 bp, Homo sapien
aaggaagttatgcacaattatgcag

SEQ ID NO: 5907998 - DNA, 25 bp, Homo sapien
caagaggccctggttttcctataat

SEQ ID NO: 5907999 - DNA, 25 bp, Homo sapien
tagaaactaagtcccatacttcttt

SEQ ID NO: 5908000 - DNA, 25 bp, Homo sapien
acatgttaatgaaacaaagtctata

SEQ ID NO: 5908001 - DNA, 25 bp, Homo sapien
gtacagcctaaacatcctcttatat

SEQ ID NO: 5908002 - DNA, 25 bp, Homo sapien
tgctatggacgcatacatagagcac

SEQ ID NO: 5908003 - DNA, 25 bp, Homo sapien
ttcctctgtctacaagccagccacg

SEQ ID NO: 5908004 - DNA, 25 bp, Homo sapien
aaacgttttcagtttggtatatgag

SEQ ID NO: 5908005 - DNA, 25 bp, Homo sapien
tggttttcctataatcccacggact

SEQ ID NO: 5908006 - DNA, 25 bp, Homo sapien
agtggctgtcacacactctgaggac

SEQ ID NO: 5908007 - DNA, 25 bp, Homo sapien
cggctccccttaagaagatagaaac

SEQ ID NO: 5908008 - DNA, 25 bp, Homo sapien
tttcatgacacccttggagaggcca

SEQ ID NO: 5908009 - DNA, 25 bp, Homo sapien
actgaaggctaacatacagtttcct

SEQ ID NO: 5908010 - DNA, 25 bp, Homo sapien
ttcatacaattgtcatgccaaagtg

SEQ ID NO: 5908011 - DNA, 25 bp, Homo sapien
acggactctcttggaaacttttagc

SEQ ID NO: 5908012 - DNA, 25 bp, Homo sapien
ctgattacagtggctgtcacacact

SEQ ID NO: 5908013 - DNA, 25 bp, Homo sapien
tccagtgctctctcaacatatgaca

SEQ ID NO: 5908014 - DNA, 25 bp, Homo sapien
ccagccacggagaaggaagttatgc

SEQ ID NO: 5908015 - DNA, 25 bp, Homo sapien
agattacaaacccagcgatattcac

SEQ ID NO: 5908016 - DNA, 25 bp, Homo sapien
ttgagagctggaaacagattttcat

SEQ ID NO: 5908017 - DNA, 25 bp, Homo sapien
gtggaggggtgggggcagacacttt

SEQ ID NO: 5908018 - DNA, 25 bp, Homo sapien
ttgtgcagtgaggttgctttcatac

SEQ ID NO: 5908019 - DNA, 25 bp, Homo sapien
tccttactagttgtccaaactcaag

SEQ ID NO: 5908020 - DNA, 25 bp, Homo sapien
tgcatttccttcactggtgacaagg

SEQ ID NO: 5908021 - DNA, 25 bp, Homo sapien
atttctatgtataggggcaggcaat

SEQ ID NO: 5908022 - DNA, 25 bp, Homo sapien
gttaatgaaacaaagtctatactga

SEQ ID NO: 5908023 - DNA, 25 bp, Homo sapien
gtccaaactcaagctacgcgttcat

SEQ ID NO: 5908024 - DNA, 25 bp, Homo sapien
ggactctcttggaaacttttagcca

SEQ ID NO: 5908025 - DNA, 25 bp, Homo sapien
aactaagtcccatacttcttttcca

SEQ ID NO: 5908026 - DNA, 25 bp, Homo sapien
cccttaagaagatagaaactaagtc

SEQ ID NO: 5908027 - DNA, 25 bp, Homo sapien
ttggaaacttttagccacttgagag

SEQ ID NO: 5908028 - DNA, 25 bp, Homo sapien
gtgacaaggacaggaaactgaaacc

SEQ ID NO: 5908029 - DNA, 25 bp, Homo sapien
cttaagaagatagaaactaagtccc

SEQ ID NO: 5908030 - DNA, 25 bp, Homo sapien
ctatgtataggggcaggcaatgatc

SEQ ID NO: 5908031 - DNA, 25 bp, Homo sapien
caattatgcagcatatttctatgta

SEQ ID NO: 5908032 - DNA, 25 bp, Homo sapien
aacagattttcatccttgcatggtg

SEQ ID NO: 5908033 - DNA, 25 bp, Homo sapien
tcagtttggtatatgaggaaactga

SEQ ID NO: 5908034 - DNA, 25 bp, Homo sapien
gagcaaaagccagagaagggggact

SEQ ID NO: 5908035 - DNA, 25 bp, Homo sapien
actggtgacaaggacaggaaactga

SEQ ID NO: 5908036 - DNA, 25 bp, Homo sapien
tgaggttgctttcatacaattgtca

SEQ ID NO: 5908037 - DNA, 25 bp, Homo sapien
agaaggaagttatgcacaattatgc

SEQ ID NO: 5908038 - DNA, 25 bp, Homo sapien
tacgcgttcatagaaaaataaactc

SEQ ID NO: 5908039 - DNA, 25 bp, Homo sapien
tctgtctacaagccagccacggaga

SEQ ID NO: 5908040 - DNA, 25 bp, Homo sapien
aagctacgcgttcatagaaaaataa

SEQ ID NO: 5908041 - DNA, 25 bp, Homo sapien
gcattccttactagttgtccaaact

SEQ ID NO: 5908042 - DNA, 25 bp, Homo sapien
attatgcagcatatttctatgtata

SEQ ID NO: 5908043 - DNA, 25 bp, Homo sapien
cacaattatgcagcatatttctatg

SEQ ID NO: 5908044 - DNA, 25 bp, Homo sapien
tttccaaatactttgtgcagtgagg

SEQ ID NO: 5908045 - DNA, 25 bp, Homo sapien
acactctgaggacagggtaccaaga

SEQ ID NO: 5908046 - DNA, 25 bp, Homo sapien
tcttggaaacttttagccacttgag

SEQ ID NO: 5908047 - DNA, 25 bp, Homo sapien
gctccccttaagaagatagaaacta

SEQ ID NO: 5908048 - DNA, 25 bp, Homo sapien
ttttagccacttgagagctggaaac

SEQ ID NO: 5908049 - DNA, 25 bp, Homo sapien
gtgttggtgcattccttactagttg

SEQ ID NO: 5908050 - DNA, 25 bp, Homo sapien
gaaacagattttcatccttgcatgg

SEQ ID NO: 5908051 - DNA, 25 bp, Homo sapien
acattccagtgctctctcaacatat

SEQ ID NO: 5908052 - DNA, 25 bp, Homo sapien
cgcgttcatagaaaaataaactcac

SEQ ID NO: 5908053 - DNA, 25 bp, Homo sapien
catatgacatgttaatgaaacaaag

SEQ ID NO: 5908054 - DNA, 25 bp, Homo sapien
tgtcatgccaaagtgttggtgcatt

SEQ ID NO: 5908055 - DNA, 25 bp, Homo sapien
gggcagacactttgcatttccttca

SEQ ID NO: 5908056 - DNA, 25 bp, Homo sapien
ttaaacttgagaggtgtgcctgtcc

SEQ ID NO: 5908057 - DNA, 25 bp, Homo sapien
aacatacagtttcctctgtctacaa

SEQ ID NO: 5908058 - DNA, 25 bp, Homo sapien
tctacaagccagccacggagaagga

SEQ ID NO: 5908059 - DNA, 25 bp, Homo sapien
ttacagtggctgtcacacactctga

SEQ ID NO: 5908060 - DNA, 25 bp, Homo sapien
gattttcatccttgcatggtgggca

SEQ ID NO: 5908061 - DNA, 25 bp, Homo sapien
tgtctgctatggacgcatacataga

SEQ ID NO: 5908062 - DNA, 25 bp, Homo sapien
cagaccgcacactgagcagtgttat

SEQ ID NO: 5908063 - DNA, 25 bp, Homo sapien
aaagattacaaacccagcgatattc

SEQ ID NO: 5908064 - DNA, 25 bp, Homo sapien
cttacttcatttgagatttaaacgt

SEQ ID NO: 5908065 - DNA, 25 bp, Homo sapien
actctcttggaaacttttagccact

SEQ ID NO: 5908066 - DNA, 25 bp, Homo sapien
tgaaaccctttaaacttgagaggtg

SEQ ID NO: 5908067 - DNA, 25 bp, Homo sapien
ctaattttatagcaaacacatttcc

SEQ ID NO: 5908068 - DNA, 25 bp, Homo sapien
aacccagcgatattcacagatgagt

SEQ ID NO: 5908069 - DNA, 25 bp, Homo sapien
cagtgttatgtcttgcttcccagga

SEQ ID NO: 5908070 - DNA, 25 bp, Homo sapien
ttgggtggaggggtgggggcagaca

SEQ ID NO: 5908071 - DNA, 25 bp, Homo sapien
tgagatttaaacgttttcagtttgg

SEQ ID NO: 5908072 - DNA, 25 bp, Homo sapien
gacacccttggagaggccaggagag

SEQ ID NO: 5908073 - DNA, 25 bp, Homo sapien
ggcagattgctgcccctgccttata

SEQ ID NO: 5908074 - DNA, 25 bp, Homo sapien
tccttgcatggtgggcagattgctg

SEQ ID NO: 5908075 - DNA, 25 bp, Homo sapien
atatgaggaaactgaaggctaacat

SEQ ID NO: 5908076 - DNA, 25 bp, Homo sapien
gttttcagtttggtatatgaggaaa

SEQ ID NO: 5908077 - DNA, 25 bp, Homo sapien
aggacagggtaccaagaggccctgg

SEQ ID NO: 5908078 - DNA, 25 bp, Homo sapien
gatgttgtatttaattaaacggctc

SEQ ID NO: 5908079 - DNA, 25 bp, Homo sapien
gttgctttcatacaattgtcatgcc

SEQ ID NO: 5908080 - DNA, 25 bp, Homo sapien
gaaactaagtcccatacttcttttc

SEQ ID NO: 5908081 - DNA, 25 bp, Homo sapien
taaacggctccccttaagaagatag

SEQ ID NO: 5908082 - DNA, 25 bp, Homo sapien
tggtgggcagattgctgcccctgcc

SEQ ID NO: 5908083 - DNA, 25 bp, Homo sapien
ttatataacaaaagattacaaaccc

SEQ ID NO: 5908084 - DNA, 25 bp, Homo sapien
tttgcatttccttcactggtgacaa

SEQ ID NO: 5908085 - DNA, 25 bp, Homo sapien
tacaagccagccacggagaaggaag

SEQ ID NO: 5908086 - DNA, 25 bp, Homo sapien
gaaccttgcttacttcatttgagat

SEQ ID NO: 5908087 - DNA, 25 bp, Homo sapien
acttttagccacttgagagctggaa

SEQ ID NO: 5908088 - DNA, 25 bp, Homo sapien
caccaaacattccagtgctctctca

SEQ ID NO: 5908089 - DNA, 25 bp, Homo sapien
atgacacccttggagaggccaggag

SEQ ID NO: 5908090 - DNA, 25 bp, Homo sapien
aagtctatactgattttcatgacac

SEQ ID NO: 5908091 - DNA, 25 bp, Homo sapien
tccttcactggtgacaaggacagga

SEQ ID NO: 5908092 - DNA, 25 bp, Homo sapien
ttcatttgagatttaaacgttttca

SEQ ID NO: 5908093 - DNA, 25 bp, Homo sapien
tgaaggctaacatacagtttcctct

SEQ ID NO: 5908094 - DNA, 25 bp, Homo sapien
agtgaggttgctttcatacaattgt

SEQ ID NO: 5908095 - DNA, 25 bp, Homo sapien
agaggccctggttttcctataatcc

SEQ ID NO: 5908096 - DNA, 25 bp, Homo sapien
tgaggacagggtaccaagaggccct

SEQ ID NO: 5908097 - DNA, 25 bp, Homo sapien
gtgggggcagacactttgcatttcc

SEQ ID NO: 5908098 - DNA, 25 bp, Homo sapien
ggaaactgaaggctaacatacagtt

SEQ ID NO: 5908099 - DNA, 25 bp, Homo sapien
gcaaaagccagagaagggggactgt

SEQ ID NO: 5908100 - DNA, 25 bp, Homo sapien
tcttatataacaaaagattacaaac

SEQ ID NO: 5908101 - DNA, 25 bp, Homo sapien
gatattcacagatgagtgtctgcta

SEQ ID NO: 5908102 - DNA, 25 bp, Homo sapien
tttggtatatgaggaaactgaaggc

SEQ ID NO: 5908103 - DNA, 25 bp, Homo sapien
gtgcattccttactagttgtccaaa

SEQ ID NO: 5908104 - DNA, 25 bp, Homo sapien
aggttgctttcatacaattgtcatg

SEQ ID NO: 5908105 - DNA, 25 bp, Homo sapien
atcctcttatataacaaaagattac

SEQ ID NO: 5908106 - DNA, 25 bp, Homo sapien
ccaaacattccagtgctctctcaac

SEQ ID NO: 5908107 - DNA, 25 bp, Homo sapien
tgtcacacactctgaggacagggta

SEQ ID NO: 5908108 - DNA, 25 bp, Homo sapien
aacaaagtctatactgattttcatg

SEQ ID NO: 5908109 - DNA, 25 bp, Homo sapien
atacatagagcactgattacagtgg

SEQ ID NO: 5908110 - DNA, 25 bp, Homo sapien
gtatatgaggaaactgaaggctaac

SEQ ID NO: 5908111 - DNA, 25 bp, Homo sapien
tacagtttcctctgtctacaagcca

SEQ ID NO: 5908112 - DNA, 25 bp, Homo sapien
cttgcttacttcatttgagatttaa

SEQ ID NO: 5908113 - DNA, 25 bp, Homo sapien
cagattttcatccttgcatggtggg

SEQ ID NO: 5908114 - DNA, 25 bp, Homo sapien
ctttcatacaattgtcatgccaaag

SEQ ID NO: 5908115 - DNA, 25 bp, Homo sapien
gcagacactttgcatttccttcact

SEQ ID NO: 5908116 - DNA, 25 bp, Homo sapien
gagaggtgtgcctgtccctgtcgtg

SEQ ID NO: 5908117 - DNA, 25 bp, Homo sapien
tctgaggacagggtaccaagaggcc

SEQ ID NO: 5908118 - DNA, 25 bp, Homo sapien
ggaaacttttagccacttgagagct

SEQ ID NO: 5908119 - DNA, 25 bp, Homo sapien
tcccacggactctcttggaaacttt

SEQ ID NO: 5908120 - DNA, 25 bp, Homo sapien
gcatatttctatgtataggggcagg

SEQ ID NO: 5908121 - DNA, 25 bp, Homo sapien
gcatacatagagcactgattacagt

SEQ ID NO: 5908122 - DNA, 25 bp, Homo sapien
gccaaagtgttggtgcattccttac

SEQ ID NO: 5908123 - DNA, 25 bp, Homo sapien
cttcactggtgacaaggacaggaaa

SEQ ID NO: 5908124 - DNA, 25 bp, Homo sapien
cacagatgagtgtctgctatggacg

SEQ ID NO: 5908125 - DNA, 25 bp, Homo sapien
ccctgccttatatctctaattttat

SEQ ID NO: 5908126 - DNA, 25 bp, Homo sapien
acggagaaggaagttatgcacaatt

SEQ ID NO: 5908127 - DNA, 25 bp, Homo sapien
aaactgaaggctaacatacagtttc

SEQ ID NO: 5908128 - DNA, 25 bp, Homo sapien
tgcagcatatttctatgtatagggg

SEQ ID NO: 5908129 - DNA, 25 bp, Homo sapien
gaagggggactgtgttgggtggagg

SEQ ID NO: 5908130 - DNA, 25 bp, Homo sapien
cgttcatagaaaaataaactcacca

SEQ ID NO: 5908131 - DNA, 25 bp, Homo sapien
caaagtgttggtgcattccttacta

SEQ ID NO: 5908132 - DNA, 25 bp, Homo sapien
actttgcatttccttcactggtgac

SEQ ID NO: 5908133 - DNA, 25 bp, Homo sapien
aggagagcaaaagccagagaagggg

SEQ ID NO: 5908134 - DNA, 25 bp, Homo sapien
atagcaaacacatttcctgtcccat

SEQ ID NO: 5908135 - DNA, 25 bp, Homo sapien
gtctatactgattttcatgacaccc

SEQ ID NO: 5908136 - DNA, 25 bp, Homo sapien
aggggtgggggcagacactttgcat

SEQ ID NO: 5908137 - DNA, 25 bp, Homo sapien
agcaaacacatttcctgtcccatgg

SEQ ID NO: 5908138 - DNA, 25 bp, Homo sapien
ttatagcaaacacatttcctgtccc

SEQ ID NO: 5908139 - DNA, 25 bp, Homo sapien
taagaagatagaaactaagtcccat

SEQ ID NO: 5908140 - DNA, 25 bp, Homo sapien
atgtacagcctaaacatcctcttat

SEQ ID NO: 5908141 - DNA, 25 bp, Homo sapien
tacaattgtcatgccaaagtgttgg

SEQ ID NO: 5908142 - DNA, 25 bp, Homo sapien
tgcacaattatgcagcatatttcta

SEQ ID NO: 5908143 - DNA, 25 bp, Homo sapien
gaaacaaagtctatactgattttca

SEQ ID NO: 5908144 - DNA, 25 bp, Homo sapien
accccagtatgtacagcctaaacat

SEQ ID NO: 5908145 - DNA, 25 bp, Homo sapien
tccccttaagaagatagaaactaag

SEQ ID NO: 5908146 - DNA, 25 bp, Homo sapien
ccgcacactgagcagtgttatgtct

SEQ ID NO: 5908147 - DNA, 25 bp, Homo sapien
gtttcctctgtctacaagccagcca

SEQ ID NO: 5908148 - DNA, 25 bp, Homo sapien
tcacacactctgaggacagggtacc

SEQ ID NO: 5908149 - DNA, 25 bp, Homo sapien
atgccaaagtgttggtgcattcctt

SEQ ID NO: 5908150 - DNA, 25 bp, Homo sapien
attgtcatgccaaagtgttggtgca

SEQ ID NO: 5908151 - DNA, 25 bp, Homo sapien
tatgcagcatatttctatgtatagg

SEQ ID NO: 5908152 - DNA, 25 bp, Homo sapien
gggactgtgttgggtggaggggtgg

SEQ ID NO: 5908153 - DNA, 25 bp, Homo sapien
gtaccaagaggccctggttttccta

SEQ ID NO: 5908154 - DNA, 25 bp, Homo sapien
agcactgattacagtggctgtcaca

SEQ ID NO: 5908155 - DNA, 25 bp, Homo sapien
catccttgcatggtgggcagattgc

SEQ ID NO: 5908156 - DNA, 25 bp, Homo sapien
ctttgtgcagtgaggttgctttcat

SEQ ID NO: 5908157 - DNA, 25 bp, Homo sapien
attacaaacccagcgatattcacag

SEQ ID NO: 5908158 - DNA, 25 bp, Homo sapien
cagtatgtacagcctaaacatcctc

SEQ ID NO: 5908159 - DNA, 25 bp, Homo sapien
gaggccaggagagcaaaagccagag

SEQ ID NO: 5908160 - DNA, 25 bp, Homo sapien
atctaccccagtatgtacagcctaa

SEQ ID NO: 5908161 - DNA, 25 bp, Homo sapien
agagcactgattacagtggctgtca

SEQ ID NO: 5908162 - DNA, 25 bp, Homo sapien
tgatctaccccagtatgtacagcct

SEQ ID NO: 5908163 - DNA, 25 bp, Homo sapien
gctggaaacagattttcatccttgc

SEQ ID NO: 5908164 - DNA, 25 bp, Homo sapien
taaacatcctcttatataacaaaag

SEQ ID NO: 5908165 - DNA, 25 bp, Homo sapien
aaggctaacatacagtttcctctgt

SEQ ID NO: 5908166 - DNA, 25 bp, Homo sapien
gccctggttttcctataatcccacg

SEQ ID NO: 5908167 - DNA, 25 bp, Homo sapien
ctcaccaaacattccagtgctctct

SEQ ID NO: 5908168 - DNA, 25 bp, Homo sapien
acatagagcactgattacagtggct

SEQ ID NO: 5908169 - DNA, 25 bp, Homo sapien
agttgtccaaactcaagctacgcgt

SEQ ID NO: 5908170 - DNA, 25 bp, Homo sapien
ctaagtcccatacttcttttccaaa

SEQ ID NO: 5908171 - DNA, 25 bp, Homo sapien
agccagccacggagaaggaagttat

SEQ ID NO: 5908172 - DNA, 25 bp, Homo sapien
aagatagaaactaagtcccatactt

SEQ ID NO: 5908173 - DNA, 25 bp, Homo sapien
cctggttttcctataatcccacgga

SEQ ID NO: 5908174 - DNA, 25 bp, Homo sapien
cccatggatgttgtatttaattaaa

SEQ ID NO: 5908175 - DNA, 25 bp, Homo sapien
actgagcagtgttatgtcttgcttc

SEQ ID NO: 5908176 - DNA, 25 bp, Homo sapien
agcagtgttatgtcttgcttcccag

SEQ ID NO: 5908177 - DNA, 25 bp, Homo sapien
cctctgtctacaagccagccacgga

SEQ ID NO: 5908178 - DNA, 25 bp, Homo sapien
ccctttaaacttgagaggtgtgcct

SEQ ID NO: 5908179 - DNA, 25 bp, Homo sapien
gagaagggggactgtgttgggtgga

SEQ ID NO: 5908180 - DNA, 25 bp, Homo sapien
cagtttcctctgtctacaagccagc

SEQ ID NO: 5908181 - DNA, 25 bp, Homo sapien
acagcctaaacatcctcttatataa

SEQ ID NO: 5908182 - DNA, 25 bp, Homo sapien
gagctggaaacagattttcatcctt

SEQ ID NO: 5908183 - DNA, 25 bp, Homo sapien
catttgagatttaaacgttttcagt

SEQ ID NO: 5908184 - DNA, 25 bp, Homo sapien
atggtcggaaatgcccacaccactg

SEQ ID NO: 5908185 - DNA, 25 bp, Homo sapien
ccatgctgagagagccacacccaaa

SEQ ID NO: 5908186 - DNA, 25 bp, Homo sapien
tatccatcgacttggattaagtcaa

SEQ ID NO: 5908187 - DNA, 25 bp, Homo sapien
caactgtcctgagctacagccaccc

SEQ ID NO: 5908188 - DNA, 25 bp, Homo sapien
aagaaaggttcccaaggagccattc

SEQ ID NO: 5908189 - DNA, 25 bp, Homo sapien
gagcgttgcttctcctcctggggac

SEQ ID NO: 5908190 - DNA, 25 bp, Homo sapien
tgcttctcctcctggggaccctact

SEQ ID NO: 5908191 - DNA, 25 bp, Homo sapien
agggctgcaacagccgcactatcat

SEQ ID NO: 5908192 - DNA, 25 bp, Homo sapien
cagaccatccacgaggagggctgca

SEQ ID NO: 5908193 - DNA, 25 bp, Homo sapien
cagtccccaccacaacctggctcca

SEQ ID NO: 5908194 - DNA, 25 bp, Homo sapien
aagtcaaagcgggcacattcagcct

SEQ ID NO: 5908195 - DNA, 25 bp, Homo sapien
atagccatgctgagagagccacacc

SEQ ID NO: 5908196 - DNA, 25 bp, Homo sapien
aggtgcttgagtccagccaagaggc

SEQ ID NO: 5908197 - DNA, 25 bp, Homo sapien
ctacatccccaggcacatccgaaag

SEQ ID NO: 5908198 - DNA, 25 bp, Homo sapien
gcctgtgggtgtttccaaacaccag

SEQ ID NO: 5908199 - DNA, 25 bp, Homo sapien
gtcgtagcccatgttcctaaattaa

SEQ ID NO: 5908200 - DNA, 25 bp, Homo sapien
gactcggaactgttcagtgctcgcc

SEQ ID NO: 5908201 - DNA, 25 bp, Homo sapien
gcaaaactcagcccctgaagcagac

SEQ ID NO: 5908202 - DNA, 25 bp, Homo sapien
gaggaagggtcctttcagtcttgct

SEQ ID NO: 5908203 - DNA, 25 bp, Homo sapien
tccctgacatctcagtcgtagccca

SEQ ID NO: 5908204 - DNA, 25 bp, Homo sapien
acatctcagtcgtagcccatgttcc

SEQ ID NO: 5908205 - DNA, 25 bp, Homo sapien
agaaccttcagaatgtggggagaca

SEQ ID NO: 5908206 - DNA, 25 bp, Homo sapien
cagcacaatgactctgagcagaccc

SEQ ID NO: 5908207 - DNA, 25 bp, Homo sapien
ttcctgttactctgcttcagatggt

SEQ ID NO: 5908208 - DNA, 25 bp, Homo sapien
ctcagcccctgaagcagaccatcca

SEQ ID NO: 5908209 - DNA, 25 bp, Homo sapien
ggtaactctgagggctgcattagac

SEQ ID NO: 5908210 - DNA, 25 bp, Homo sapien
ttccatgtgcctcctgggcaccagg

SEQ ID NO: 5908211 - DNA, 25 bp, Homo sapien
gggtgtttccaaacaccagccggaa

SEQ ID NO: 5908212 - DNA, 25 bp, Homo sapien
cagtgcaactccttctacatcccca

SEQ ID NO: 5908213 - DNA, 25 bp, Homo sapien
cagcccctgaagcagaccatccacg

SEQ ID NO: 5908214 - DNA, 25 bp, Homo sapien
gctctccctgacatctcagtcgtag

SEQ ID NO: 5908215 - DNA, 25 bp, Homo sapien
tcatagccatgctgagagagccaca

SEQ ID NO: 5908216 - DNA, 25 bp, Homo sapien
agcagttgcttcctggctggaggct

SEQ ID NO: 5908217 - DNA, 25 bp, Homo sapien
gaagaaccagcagttgcttcctggc

SEQ ID NO: 5908218 - DNA, 25 bp, Homo sapien
aacagcctttgctagaaggcacttc

SEQ ID NO: 5908219 - DNA, 25 bp, Homo sapien
tggagaggaggtgcttgagtccagc

SEQ ID NO: 5908220 - DNA, 25 bp, Homo sapien
cgcactatcatcaaccgcttctgtt

SEQ ID NO: 5908221 - DNA, 25 bp, Homo sapien
cacaacctggctccaggacccgggg

SEQ ID NO: 5908222 - DNA, 25 bp, Homo sapien
cttggattaagtcaaagcgggcaca

SEQ ID NO: 5908223 - DNA, 25 bp, Homo sapien
cagttgcttcctggctggaggctgc

SEQ ID NO: 5908224 - DNA, 25 bp, Homo sapien
cttggcttaaacctagaggccagaa

SEQ ID NO: 5908225 - DNA, 25 bp, Homo sapien
atccctttctttgctctccctgaca

SEQ ID NO: 5908226 - DNA, 25 bp, Homo sapien
tcacttgaccgcgggtgtaagtctt

SEQ ID NO: 5908227 - DNA, 25 bp, Homo sapien
agcgagattggtgcaaaactcagcc

SEQ ID NO: 5908228 - DNA, 25 bp, Homo sapien
acaccagccggaaacagcctttgct

SEQ ID NO: 5908229 - DNA, 25 bp, Homo sapien
gagtgtgcatgggtgcctgtgggtg

SEQ ID NO: 5908230 - DNA, 25 bp, Homo sapien
cagccgcactatcatcaaccgcttc

SEQ ID NO: 5908231 - DNA, 25 bp, Homo sapien
aagcagtgccgttgcatatccatcg

SEQ ID NO: 5908232 - DNA, 25 bp, Homo sapien
ctcagcacaatgactctgagcagac

SEQ ID NO: 5908233 - DNA, 25 bp, Homo sapien
agaaaagggtcacacgcgtgaagca

SEQ ID NO: 5908234 - DNA, 25 bp, Homo sapien
tgtcttgtgaagaaccttcagaatg

SEQ ID NO: 5908235 - DNA, 25 bp, Homo sapien
aagggtcctttcagtcttgctcctt

SEQ ID NO: 5908236 - DNA, 25 bp, Homo sapien
aaacctagaggccagaagaaccagc

SEQ ID NO: 5908237 - DNA, 25 bp, Homo sapien
cgtagcccatgttcctaaattaatt

SEQ ID NO: 5908238 - DNA, 25 bp, Homo sapien
tcaccaccatgatggtcacactcaa

SEQ ID NO: 5908239 - DNA, 25 bp, Homo sapien
ctggacccaaacatccacaggggca

SEQ ID NO: 5908240 - DNA, 25 bp, Homo sapien
aaggttcccaaggagccattccgcc

SEQ ID NO: 5908241 - DNA, 25 bp, Homo sapien
cttctcctcctggggaccctactgc

SEQ ID NO: 5908242 - DNA, 25 bp, Homo sapien
ggcaccaggatttcacttgagaatg

SEQ ID NO: 5908243 - DNA, 25 bp, Homo sapien
actgttcagtgctcgccctatgctc

SEQ ID NO: 5908244 - DNA, 25 bp, Homo sapien
ctactgccaacagctgaggggaaaa

SEQ ID NO: 5908245 - DNA, 25 bp, Homo sapien
caccgccatgcctggagaggaggtg

SEQ ID NO: 5908246 - DNA, 25 bp, Homo sapien
gcctttgctagaaggcacttcctgt

SEQ ID NO: 5908247 - DNA, 25 bp, Homo sapien
tacactgtgggagcgttgcttctcc

SEQ ID NO: 5908248 - DNA, 25 bp, Homo sapien
cccaccaagaagaaaagggtcacac

SEQ ID NO: 5908249 - DNA, 25 bp, Homo sapien
ccaagaagaaaagggtcacacgcgt

SEQ ID NO: 5908250 - DNA, 25 bp, Homo sapien
gaagaaccttcagaatgtggggaga

SEQ ID NO: 5908251 - DNA, 25 bp, Homo sapien
gcttaaacctagaggccagaagaac

SEQ ID NO: 5908252 - DNA, 25 bp, Homo sapien
ccgccatgcctggagaggaggtgct

SEQ ID NO: 5908253 - DNA, 25 bp, Homo sapien
ccaggatttcacttgagaatgaata

SEQ ID NO: 5908254 - DNA, 25 bp, Homo sapien
tgaccgcgggtgtaagtcttttgtc

SEQ ID NO: 5908255 - DNA, 25 bp, Homo sapien
acaccactggacccaaacatccaca

SEQ ID NO: 5908256 - DNA, 25 bp, Homo sapien
gatggtcacactcaactgtcctgag

SEQ ID NO: 5908257 - DNA, 25 bp, Homo sapien
ttgctagaaggcacttcctgttact

SEQ ID NO: 5908258 - DNA, 25 bp, Homo sapien
tcgccctatgctcccatagcccatc

SEQ ID NO: 5908259 - DNA, 25 bp, Homo sapien
gttgcttctcctcctggggacccta

SEQ ID NO: 5908260 - DNA, 25 bp, Homo sapien
agaagttcaccaccatgatggtcac

SEQ ID NO: 5908261 - DNA, 25 bp, Homo sapien
aggcacatccgaaaggaggaagggt

SEQ ID NO: 5908262 - DNA, 25 bp, Homo sapien
cctacttggcttaaacctagaggcc

SEQ ID NO: 5908263 - DNA, 25 bp, Homo sapien
tctgcaagcccaagaagttcaccac

SEQ ID NO: 5908264 - DNA, 25 bp, Homo sapien
gccctatgctcccatagcccatccc

SEQ ID NO: 5908265 - DNA, 25 bp, Homo sapien
aggctgcttatgcatagtgtatgcg

SEQ ID NO: 5908266 - DNA, 25 bp, Homo sapien
ctcagtcgtagcccatgttcctaaa

SEQ ID NO: 5908267 - DNA, 25 bp, Homo sapien
gctgagagagccacacccaaaccac

SEQ ID NO: 5908268 - DNA, 25 bp, Homo sapien
tcattgtgttccatgtgcctcctgg

SEQ ID NO: 5908269 - DNA, 25 bp, Homo sapien
atccccaggcacatccgaaaggagg

SEQ ID NO: 5908270 - DNA, 25 bp, Homo sapien
aatcgcaccgcatacactgtgggag

SEQ ID NO: 5908271 - DNA, 25 bp, Homo sapien
cccagtccccaccacaacctggctc

SEQ ID NO: 5908272 - DNA, 25 bp, Homo sapien
gtgtaagtcttttgtcttgtgaaga

SEQ ID NO: 5908273 - DNA, 25 bp, Homo sapien
gagcgcaagtatctgaagcgagatt

SEQ ID NO: 5908274 - DNA, 25 bp, Homo sapien
atgatggtcacactcaactgtcctg

SEQ ID NO: 5908275 - DNA, 25 bp, Homo sapien
ctttctttgctctccctgacatctc

SEQ ID NO: 5908276 - DNA, 25 bp, Homo sapien
gccacccaccaagaagaaaagggtc

SEQ ID NO: 5908277 - DNA, 25 bp, Homo sapien
accagccggaaacagcctttgctag

SEQ ID NO: 5908278 - DNA, 25 bp, Homo sapien
cttgaccgcgggtgtaagtcttttg

SEQ ID NO: 5908279 - DNA, 25 bp, Homo sapien
ttactctgcttcagatggtcggaaa

SEQ ID NO: 5908280 - DNA, 25 bp, Homo sapien
aagggtcacacgcgtgaagcagtgc

SEQ ID NO: 5908281 - DNA, 25 bp, Homo sapien
tcttgctccttctgcaagcccaaga

SEQ ID NO: 5908282 - DNA, 25 bp, Homo sapien
acattcagcctgtcatagccatgct

SEQ ID NO: 5908283 - DNA, 25 bp, Homo sapien
ggaaatgcccacaccactggaccca

SEQ ID NO: 5908284 - DNA, 25 bp, Homo sapien
tgacaaggctcagcacaatgactct

SEQ ID NO: 5908285 - DNA, 25 bp, Homo sapien
ccatgatggtcacactcaactgtcc

SEQ ID NO: 5908286 - DNA, 25 bp, Homo sapien
tcacttgagaatgaatactaatggg

SEQ ID NO: 5908287 - DNA, 25 bp, Homo sapien
gttatggccagtgcaactccttcta

SEQ ID NO: 5908288 - DNA, 25 bp, Homo sapien
acttcctgttactctgcttcagatg

SEQ ID NO: 5908289 - DNA, 25 bp, Homo sapien
gggtcacacgcgtgaagcagtgccg

SEQ ID NO: 5908290 - DNA, 25 bp, Homo sapien
ctgcaacagccgcactatcatcaac

SEQ ID NO: 5908291 - DNA, 25 bp, Homo sapien
tgacatctcagtcgtagcccatgtt

SEQ ID NO: 5908292 - DNA, 25 bp, Homo sapien
ccgcgggtgtaagtcttttgtcttg

SEQ ID NO: 5908293 - DNA, 25 bp, Homo sapien
agatggtcggaaatgcccacaccac

SEQ ID NO: 5908294 - DNA, 25 bp, Homo sapien
ggtcggaaatgcccacaccactgga

SEQ ID NO: 5908295 - DNA, 25 bp, Homo sapien
ggcaccgccatgcctggagaggagg

SEQ ID NO: 5908296 - DNA, 25 bp, Homo sapien
tttgtcattgtgttccatgtgcctc

SEQ ID NO: 5908297 - DNA, 25 bp, Homo sapien
gggctgtagttggctttgtcattgt

SEQ ID NO: 5908298 - DNA, 25 bp, Homo sapien
gcattagactcggaactgttcagtg

SEQ ID NO: 5908299 - DNA, 25 bp, Homo sapien
tctgcttcagatggtcggaaatgcc

SEQ ID NO: 5908300 - DNA, 25 bp, Homo sapien
gggaggtaactctgagggctgcatt

SEQ ID NO: 5908301 - DNA, 25 bp, Homo sapien
agcctgtcatagccatgctgagaga

SEQ ID NO: 5908302 - DNA, 25 bp, Homo sapien
ctgagctacagccacccaccaagaa

SEQ ID NO: 5908303 - DNA, 25 bp, Homo sapien
ctagaggccagaagaaccagcagtt

SEQ ID NO: 5908304 - DNA, 25 bp, Homo sapien
tgttcagtgctcgccctatgctccc

SEQ ID NO: 5908305 - DNA, 25 bp, Homo sapien
agcagaccatccacgaggagggctg

SEQ ID NO: 5908306 - DNA, 25 bp, Homo sapien
tgagggctgcattagactcggaact

SEQ ID NO: 5908307 - DNA, 25 bp, Homo sapien
cacccaccaagaagaaaagggtcac

SEQ ID NO: 5908308 - DNA, 25 bp, Homo sapien
agattggtgcaaaactcagcccctg

SEQ ID NO: 5908309 - DNA, 25 bp, Homo sapien
gtgaagaaccttcagaatgtgggga

SEQ ID NO: 5908310 - DNA, 25 bp, Homo sapien
tgctcccatagcccatccctttctt

SEQ ID NO: 5908311 - DNA, 25 bp, Homo sapien
acaatgactctgagcagacccagtc

SEQ ID NO: 5908312 - DNA, 25 bp, Homo sapien
ccatccctttctttgctctccctga

SEQ ID NO: 5908313 - DNA, 25 bp, Homo sapien
atctcagtcgtagcccatgttccta

SEQ ID NO: 5908314 - DNA, 25 bp, Homo sapien
actgccaacagctgaggggaaaaag

SEQ ID NO: 5908315 - DNA, 25 bp, Homo sapien
cctttcagtcttgctccttctgcaa

SEQ ID NO: 5908316 - DNA, 25 bp, Homo sapien
aaatgcccacaccactggacccaaa

SEQ ID NO: 5908317 - DNA, 25 bp, Homo sapien
gacagagcgcaagtatctgaagcga

SEQ ID NO: 5908318 - DNA, 25 bp, Homo sapien
gctccttctgcaagcccaagaagtt

SEQ ID NO: 5908319 - DNA, 25 bp, Homo sapien
ttaaacctagaggccagaagaacca

SEQ ID NO: 5908320 - DNA, 25 bp, Homo sapien
atgttcctaaattaattcacttgac

SEQ ID NO: 5908321 - DNA, 25 bp, Homo sapien
cactggacccaaacatccacagggg

SEQ ID NO: 5908322 - DNA, 25 bp, Homo sapien
cttcagatggtcggaaatgcccaca

SEQ ID NO: 5908323 - DNA, 25 bp, Homo sapien
taactctgagggctgcattagactc

SEQ ID NO: 5908324 - DNA, 25 bp, Homo sapien
ccgcctcctgacaaggctcagcaca

SEQ ID NO: 5908325 - DNA, 25 bp, Homo sapien
ccatccacgaggagggctgcaacag

SEQ ID NO: 5908326 - DNA, 25 bp, Homo sapien
ggctgcattagactcggaactgttc

SEQ ID NO: 5908327 - DNA, 25 bp, Homo sapien
ctgcacgtgacagagcgcaagtatc

SEQ ID NO: 5908328 - DNA, 25 bp, Homo sapien
caggggcagggctgtagttggcttt

SEQ ID NO: 5908329 - DNA, 25 bp, Homo sapien
cgtgaagcagtgccgttgcatatcc

SEQ ID NO: 5908330 - DNA, 25 bp, Homo sapien
gtcacactcaactgtcctgagctac

SEQ ID NO: 5908331 - DNA, 25 bp, Homo sapien
tatggccagtgcaactccttctaca

SEQ ID NO: 5908332 - DNA, 25 bp, Homo sapien
cggaaacagcctttgctagaaggca

SEQ ID NO: 5908333 - DNA, 25 bp, Homo sapien
accacaacctggctccaggacccgg

SEQ ID NO: 5908334 - DNA, 25 bp, Homo sapien
gttcaccaccatgatggtcacactc

SEQ ID NO: 5908335 - DNA, 25 bp, Homo sapien
tttgtcttgtgaagaaccttcagaa

SEQ ID NO: 5908336 - DNA, 25 bp, Homo sapien
ccatgtgcctcctgggcaccaggat

SEQ ID NO: 5908337 - DNA, 25 bp, Homo sapien
tctgagggctgcattagactcggaa

SEQ ID NO: 5908338 - DNA, 25 bp, Homo sapien
ccctgaagcagaccatccacgagga

SEQ ID NO: 5908339 - DNA, 25 bp, Homo sapien
ggccctgcacgtgacagagcgcaag

SEQ ID NO: 5908340 - DNA, 25 bp, Homo sapien
tttcacttgagaatgaatactaatg

SEQ ID NO: 5908341 - DNA, 25 bp, Homo sapien
tggctttgtcattgtgttccatgtg

SEQ ID NO: 5908342 - DNA, 25 bp, Homo sapien
attaattcacttgaccgcgggtgta

SEQ ID NO: 5908343 - DNA, 25 bp, Homo sapien
ctgtgggtgtttccaaacaccagcc

SEQ ID NO: 5908344 - DNA, 25 bp, Homo sapien
aaccacccgattcctacttggctta

SEQ ID NO: 5908345 - DNA, 25 bp, Homo sapien
gattaagtcaaagcgggcacattca

SEQ ID NO: 5908346 - DNA, 25 bp, Homo sapien
agccatgctgagagagccacaccca

SEQ ID NO: 5908347 - DNA, 25 bp, Homo sapien
ctcccatagcccatccctttctttg

SEQ ID NO: 5908348 - DNA, 25 bp, Homo sapien
gtgacagagcgcaagtatctgaagc

SEQ ID NO: 5908349 - DNA, 25 bp, Homo sapien
tacttggcttaaacctagaggccag

SEQ ID NO: 5908350 - DNA, 25 bp, Homo sapien
ccgttgcatatccatcgacttggat

SEQ ID NO: 5908351 - DNA, 25 bp, Homo sapien
gttgcttcctggctggaggctgctt

SEQ ID NO: 5908352 - DNA, 25 bp, Homo sapien
ctgcattagactcggaactgttcag

SEQ ID NO: 5908353 - DNA, 25 bp, Homo sapien
ggcagggctgtagttggctttgtca

SEQ ID NO: 5908354 - DNA, 25 bp, Homo sapien
caccaggatttcacttgagaatgaa

SEQ ID NO: 5908355 - DNA, 25 bp, Homo sapien
catacactgtgggagcgttgcttct

SEQ ID NO: 5908356 - DNA, 25 bp, Homo sapien
attcacttgaccgcgggtgtaagtc

SEQ ID NO: 5908357 - DNA, 25 bp, Homo sapien
atccacgaggagggctgcaacagcc

SEQ ID NO: 5908358 - DNA, 25 bp, Homo sapien
cccaagaagttcaccaccatgatgg

SEQ ID NO: 5908359 - DNA, 25 bp, Homo sapien
aagttcaccaccatgatggtcacac

SEQ ID NO: 5908360 - DNA, 25 bp, Homo sapien
aatgactctgagcagacccagtccc

SEQ ID NO: 5908361 - DNA, 25 bp, Homo sapien
ggggcaccgccatgcctggagagga

SEQ ID NO: 5908362 - DNA, 25 bp, Homo sapien
gtccccaccacaacctggctccagg

SEQ ID NO: 5908363 - DNA, 25 bp, Homo sapien
ccacaccactggacccaaacatcca

SEQ ID NO: 5908364 - DNA, 25 bp, Homo sapien
gcaactccttctacatccccaggca

SEQ ID NO: 5908365 - DNA, 25 bp, Homo sapien
tgcttatgcatagtgtatgcgcatg

SEQ ID NO: 5908366 - DNA, 25 bp, Homo sapien
aagtatctgaagcgagattggtgca

SEQ ID NO: 5908367 - DNA, 25 bp, Homo sapien
tggtcacactcaactgtcctgagct

SEQ ID NO: 5908368 - DNA, 25 bp, Homo sapien
ccgattcctacttggcttaaaccta

SEQ ID NO: 5908369 - DNA, 25 bp, Homo sapien
attagactcggaactgttcagtgct

SEQ ID NO: 5908370 - DNA, 25 bp, Homo sapien
atgtgcctcctgggcaccaggattt

SEQ ID NO: 5908371 - DNA, 25 bp, Homo sapien
ttgctctccctgacatctcagtcgt

SEQ ID NO: 5908372 - DNA, 25 bp, Homo sapien
aaccagcagttgcttcctggctgga

SEQ ID NO: 5908373 - DNA, 25 bp, Homo sapien
agcagacccagtccccaccacaacc

SEQ ID NO: 5908374 - DNA, 25 bp, Homo sapien
tgccgttgcatatccatcgacttgg

SEQ ID NO: 5908375 - DNA, 25 bp, Homo sapien
gtgggagcgttgcttctcctcctgg

SEQ ID NO: 5908376 - DNA, 25 bp, Homo sapien
gtgtatgcgcatgagtgtgcatggg

SEQ ID NO: 5908377 - DNA, 25 bp, Homo sapien
tgggcaccaggatttcacttgagaa

SEQ ID NO: 5908378 - DNA, 25 bp, Homo sapien
tgttactctgcttcagatggtcgga

SEQ ID NO: 5908379 - DNA, 25 bp, Homo sapien
ctcggaactgttcagtgctcgccct

SEQ ID NO: 5908380 - DNA, 25 bp, Homo sapien
ctttgctctccctgacatctcagtc

SEQ ID NO: 5908381 - DNA, 25 bp, Homo sapien
gaaacagcctttgctagaaggcact

SEQ ID NO: 5908382 - DNA, 25 bp, Homo sapien
cagtgctcgccctatgctcccatag

SEQ ID NO: 5908383 - DNA, 25 bp, Homo sapien
gcatgggtgcctgtgggtgtttcca

SEQ ID NO: 5908384 - DNA, 25 bp, Homo sapien
cctgacaaggctcagcacaatgact

SEQ ID NO: 5908385 - DNA, 25 bp, Homo sapien
tacagccacccaccaagaagaaaag

SEQ ID NO: 5908386 - DNA, 25 bp, Homo sapien
tccatcgacttggattaagtcaaag

SEQ ID NO: 5908387 - DNA, 25 bp, Homo sapien
cattccgcctcctgacaaggctcag

SEQ ID NO: 5908388 - DNA, 25 bp, Homo sapien
ctcctggggaccctactgccaacag

SEQ ID NO: 5908389 - DNA, 25 bp, Homo sapien
atgggggaggtaactctgagggctg

SEQ ID NO: 5908390 - DNA, 25 bp, Homo sapien
ctcctgggcaccaggatttcacttg

SEQ ID NO: 5908391 - DNA, 25 bp, Homo sapien
agaaccagcagttgcttcctggctg

SEQ ID NO: 5908392 - DNA, 25 bp, Homo sapien
tggggaccctactgccaacagctga

SEQ ID NO: 5908393 - DNA, 25 bp, Homo sapien
gtgcaactccttctacatccccagg

SEQ ID NO: 5908394 - DNA, 25 bp, Homo sapien
gcctcctgacaaggctcagcacaat

SEQ ID NO: 5908395 - DNA, 25 bp, Homo sapien
catagcccatccctttctttgctct

SEQ ID NO: 5908396 - DNA, 25 bp, Homo sapien
aacagccgcactatcatcaaccgct

SEQ ID NO: 5908397 - DNA, 25 bp, Homo sapien
tgcttcctggctggaggctgcttat

SEQ ID NO: 5908398 - DNA, 25 bp, Homo sapien
cgagattggtgcaaaactcagcccc

SEQ ID NO: 5908399 - DNA, 25 bp, Homo sapien
accaccatgatggtcacactcaact

SEQ ID NO: 5908400 - DNA, 25 bp, Homo sapien
ctgaagcgagattggtgcaaaactc

SEQ ID NO: 5908401 - DNA, 25 bp, Homo sapien
gggcggggcaccgccatgcctggag

SEQ ID NO: 5908402 - DNA, 25 bp, Homo sapien
tgactctgagcagacccagtcccca

SEQ ID NO: 5908403 - DNA, 25 bp, Homo sapien
ttccaaacaccagccggaaacagcc

SEQ ID NO: 5908404 - DNA, 25 bp, Homo sapien
gctgtagttggctttgtcattgtgt

SEQ ID NO: 5908405 - DNA, 25 bp, Homo sapien
ctgtgggagcgttgcttctcctcct

SEQ ID NO: 5908406 - DNA, 25 bp, Homo sapien
gaagaaaagggtcacacgcgtgaag

SEQ ID NO: 5908407 - DNA, 25 bp, Homo sapien
aaacaccagccggaaacagcctttg

SEQ ID NO: 5908408 - DNA, 25 bp, Homo sapien
cagcctttgctagaaggcacttcct

SEQ ID NO: 5908409 - DNA, 25 bp, Homo sapien
ctcctgacaaggctcagcacaatga

SEQ ID NO: 5908410 - DNA, 25 bp, Homo sapien
actctgcttcagatggtcggaaatg

SEQ ID NO: 5908411 - DNA, 25 bp, Homo sapien
gggggaggtaactctgagggctgca

SEQ ID NO: 5908412 - DNA, 25 bp, Homo sapien
cacaggggcagggctgtagttggct

SEQ ID NO: 5908413 - DNA, 25 bp, Homo sapien
tgcatatccatcgacttggattaag

SEQ ID NO: 5908414 - DNA, 25 bp, Homo sapien
cactcaactgtcctgagctacagcc

SEQ ID NO: 5908415 - DNA, 25 bp, Homo sapien
acatccacaggggcagggctgtagt

SEQ ID NO: 5908416 - DNA, 25 bp, Homo sapien
cccatagcccatccctttctttgct

SEQ ID NO: 5908417 - DNA, 25 bp, Homo sapien
tagcccatgttcctaaattaattca

SEQ ID NO: 5908418 - DNA, 25 bp, Homo sapien
tgtagttggctttgtcattgtgttc

SEQ ID NO: 5908419 - DNA, 25 bp, Homo sapien
ctatcatcaaccgcttctgttatgg

SEQ ID NO: 5908420 - DNA, 25 bp, Homo sapien
tccgaaaggaggaagggtcctttca

SEQ ID NO: 5908421 - DNA, 25 bp, Homo sapien
tgtcatagccatgctgagagagcca

SEQ ID NO: 5908422 - DNA, 25 bp, Homo sapien
cttttgtcttgtgaagaaccttcag

SEQ ID NO: 5908423 - DNA, 25 bp, Homo sapien
gctgcttatgcatagtgtatgcgca

SEQ ID NO: 5908424 - DNA, 25 bp, Homo sapien
gtaagtcttttgtcttgtgaagaac

SEQ ID NO: 5908425 - DNA, 25 bp, Homo sapien
tttcagtcttgctccttctgcaagc

SEQ ID NO: 5908426 - DNA, 25 bp, Homo sapien
gttgcatatccatcgacttggatta

SEQ ID NO: 5908427 - DNA, 25 bp, Homo sapien
attgtgttccatgtgcctcctgggc

SEQ ID NO: 5908428 - DNA, 25 bp, Homo sapien
tggtgcaaaactcagcccctgaagc

SEQ ID NO: 5908429 - DNA, 25 bp, Homo sapien
gaccctactgccaacagctgagggg

SEQ ID NO: 5908430 - DNA, 25 bp, Homo sapien
gcccctgaagcagaccatccacgag

SEQ ID NO: 5908431 - DNA, 25 bp, Homo sapien
ttcccaaggagccattccgcctcct

SEQ ID NO: 5908432 - DNA, 25 bp, Homo sapien
gcacatccgaaaggaggaagggtcc

SEQ ID NO: 5908433 - DNA, 25 bp, Homo sapien
tggattaagtcaaagcgggcacatt

SEQ ID NO: 5908434 - DNA, 25 bp, Homo sapien
ttaagtcaaagcgggcacattcagc

SEQ ID NO: 5908435 - DNA, 25 bp, Homo sapien
tggcttaaacctagaggccagaaga

SEQ ID NO: 5908436 - DNA, 25 bp, Homo sapien
ccacgaggagggctgcaacagccgc

SEQ ID NO: 5908437 - DNA, 25 bp, Homo sapien
tgcttcagatggtcggaaatgccca

SEQ ID NO: 5908438 - DNA, 25 bp, Homo sapien
ccctactgccaacagctgaggggaa

SEQ ID NO: 5908439 - DNA, 25 bp, Homo sapien
tgagagagccacacccaaaccaccc

SEQ ID NO: 5908440 - DNA, 25 bp, Homo sapien
gcagtgccgttgcatatccatcgac

SEQ ID NO: 5908441 - DNA, 25 bp, Homo sapien
catatccatcgacttggattaagtc

SEQ ID NO: 5908442 - DNA, 25 bp, Homo sapien
gcacgtgacagagcgcaagtatctg

SEQ ID NO: 5908443 - DNA, 25 bp, Homo sapien
acaaggctcagcacaatgactctga

SEQ ID NO: 5908444 - DNA, 25 bp, Homo sapien
ttgtgaagaaccttcagaatgtggg

SEQ ID NO: 5908445 - DNA, 25 bp, Homo sapien
tccttctgcaagcccaagaagttca

SEQ ID NO: 5908446 - DNA, 25 bp, Homo sapien
tcctggctggaggctgcttatgcat

SEQ ID NO: 5908447 - DNA, 25 bp, Homo sapien
gcatgagtgtgcatgggtgcctgtg

SEQ ID NO: 5908448 - DNA, 25 bp, Homo sapien
gcccacaccactggacccaaacatc

SEQ ID NO: 5908449 - DNA, 25 bp, Homo sapien
tagttggctttgtcattgtgttcca

SEQ ID NO: 5908450 - DNA, 25 bp, Homo sapien
ggctgcaacagccgcactatcatca

SEQ ID NO: 5908451 - DNA, 25 bp, Homo sapien
ccccaccacaacctggctccaggac

SEQ ID NO: 5908452 - DNA, 25 bp, Homo sapien
ctaaattaattcacttgaccgcggg

SEQ ID NO: 5908453 - DNA, 25 bp, Homo sapien
gtgcatgggtgcctgtgggtgtttc

SEQ ID NO: 5908454 - DNA, 25 bp, Homo sapien
tcggaaatgcccacaccactggacc

SEQ ID NO: 5908455 - DNA, 25 bp, Homo sapien
gagaggaggtgcttgagtccagcca

SEQ ID NO: 5908456 - DNA, 25 bp, Homo sapien
gaaggcacttcctgttactctgctt

SEQ ID NO: 5908457 - DNA, 25 bp, Homo sapien
tctccctgacatctcagtcgtagcc

SEQ ID NO: 5908458 - DNA, 25 bp, Homo sapien
atactaatgggggaggtaactctga

SEQ ID NO: 5908459 - DNA, 25 bp, Homo sapien
ccctgcacgtgacagagcgcaagta

SEQ ID NO: 5908460 - DNA, 25 bp, Homo sapien
ggaggctgcttatgcatagtgtatg

SEQ ID NO: 5908461 - DNA, 25 bp, Homo sapien
gccagaagaaccagcagttgcttcc

SEQ ID NO: 5908462 - DNA, 25 bp, Homo sapien
gccggaaacagcctttgctagaagg

SEQ ID NO: 5908463 - DNA, 25 bp, Homo sapien
tgcatagtgtatgcgcatgagtgtg

SEQ ID NO: 5908464 - DNA, 25 bp, Homo sapien
caccaagaagaaaagggtcacacgc

SEQ ID NO: 5908465 - DNA, 25 bp, Homo sapien
gcggggcaccgccatgcctggagag

SEQ ID NO: 5908466 - DNA, 25 bp, Homo sapien
ccatgttcctaaattaattcacttg

SEQ ID NO: 5908467 - DNA, 25 bp, Homo sapien
aactcagcccctgaagcagaccatc

SEQ ID NO: 5908468 - DNA, 25 bp, Homo sapien
ccgcttctgttatggccagtgcaac

SEQ ID NO: 5908469 - DNA, 25 bp, Homo sapien
agccaagaggccctgcacgtgacag

SEQ ID NO: 5908470 - DNA, 25 bp, Homo sapien
ggggcagggctgtagttggctttgt

SEQ ID NO: 5908471 - DNA, 25 bp, Homo sapien
ttctacatccccaggcacatccgaa

SEQ ID NO: 5908472 - DNA, 25 bp, Homo sapien
atgagtgtgcatgggtgcctgtggg

SEQ ID NO: 5908473 - DNA, 25 bp, Homo sapien
agaggccagaagaaccagcagttgc

SEQ ID NO: 5908474 - DNA, 25 bp, Homo sapien
gtgcctgtgggtgtttccaaacacc

SEQ ID NO: 5908475 - DNA, 25 bp, Homo sapien
cagagcgcaagtatctgaagcgaga

SEQ ID NO: 5908476 - DNA, 25 bp, Homo sapien
gtgcttgagtccagccaagaggccc

SEQ ID NO: 5908477 - DNA, 25 bp, Homo sapien
cctgtcatagccatgctgagagagc

SEQ ID NO: 5908478 - DNA, 25 bp, Homo sapien
ggaggtgcttgagtccagccaagag

SEQ ID NO: 5908479 - DNA, 25 bp, Homo sapien
gtatctgaagcgagattggtgcaaa

SEQ ID NO: 5908480 - DNA, 25 bp, Homo sapien
gggtcctttcagtcttgctccttct

SEQ ID NO: 5908481 - DNA, 25 bp, Homo sapien
ttcctacttggcttaaacctagagg

SEQ ID NO: 5908482 - DNA, 25 bp, Homo sapien
gggcacattcagcctgtcatagcca

SEQ ID NO: 5908483 - DNA, 25 bp, Homo sapien
tcagtcttgctccttctgcaagccc

SEQ ID NO: 5908484 - DNA, 25 bp, Homo sapien
gtgggtgtttccaaacaccagccgg

SEQ ID NO: 5908485 - DNA, 25 bp, Homo sapien
gtcacacgcgtgaagcagtgccgtt

SEQ ID NO: 5908486 - DNA, 25 bp, Homo sapien
ttgctccttctgcaagcccaagaag

SEQ ID NO: 5908487 - DNA, 25 bp, Homo sapien
gtccagccaagaggccctgcacgtg

SEQ ID NO: 5908488 - DNA, 25 bp, Homo sapien
gaggaggtgcttgagtccagccaag

SEQ ID NO: 5908489 - DNA, 25 bp, Homo sapien
cactatcatcaaccgcttctgttat

SEQ ID NO: 5908490 - DNA, 25 bp, Homo sapien
gaggtaactctgagggctgcattag

SEQ ID NO: 5908491 - DNA, 25 bp, Homo sapien
tcaaccgcttctgttatggccagtg

SEQ ID NO: 5908492 - DNA, 25 bp, Homo sapien
tcctgagctacagccacccaccaag

SEQ ID NO: 5908493 - DNA, 25 bp, Homo sapien
tgtgttccatgtgcctcctgggcac

SEQ ID NO: 5908494 - DNA, 25 bp, Homo sapien
gaaaggttcccaaggagccattccg

SEQ ID NO: 5908495 - DNA, 25 bp, Homo sapien
gggtgtaagtcttttgtcttgtgaa

SEQ ID NO: 5908496 - DNA, 25 bp, Homo sapien
ttccgcctcctgacaaggctcagca

SEQ ID NO: 5908497 - DNA, 25 bp, Homo sapien
gacccagtccccaccacaacctggc

SEQ ID NO: 5908498 - DNA, 25 bp, Homo sapien
gcacttcctgttactctgcttcaga

SEQ ID NO: 5908499 - DNA, 25 bp, Homo sapien
gctcgccctatgctcccatagccca

SEQ ID NO: 5908500 - DNA, 25 bp, Homo sapien
ggctcagcacaatgactctgagcag

SEQ ID NO: 5908501 - DNA, 25 bp, Homo sapien
ctgaagcagaccatccacgaggagg

SEQ ID NO: 5908502 - DNA, 25 bp, Homo sapien
tcgcaccgcatacactgtgggagcg

SEQ ID NO: 5908503 - DNA, 25 bp, Homo sapien
tgtcattgtgttccatgtgcctcct

SEQ ID NO: 5908504 - DNA, 25 bp, Homo sapien
taatgggggaggtaactctgagggc

SEQ ID NO: 5908505 - DNA, 25 bp, Homo sapien
gtttccaaacaccagccggaaacag

SEQ ID NO: 5908506 - DNA, 25 bp, Homo sapien
gcacaatgactctgagcagacccag

SEQ ID NO: 5908507 - DNA, 25 bp, Homo sapien
ggacccaaacatccacaggggcagg

SEQ ID NO: 5908508 - DNA, 25 bp, Homo sapien
aactccttctacatccccaggcaca

SEQ ID NO: 5908509 - DNA, 25 bp, Homo sapien
agccacacccaaaccacccgattcc

SEQ ID NO: 5908510 - DNA, 25 bp, Homo sapien
ccaggcacatccgaaaggaggaagg

SEQ ID NO: 5908511 - DNA, 25 bp, Homo sapien
ccaagaggccctgcacgtgacagag

SEQ ID NO: 5908512 - DNA, 25 bp, Homo sapien
attcagcctgtcatagccatgctga

SEQ ID NO: 5908513 - DNA, 25 bp, Homo sapien
gtgtttccaaacaccagccggaaac

SEQ ID NO: 5908514 - DNA, 25 bp, Homo sapien
gggtgcctgtgggtgtttccaaaca

SEQ ID NO: 5908515 - DNA, 25 bp, Homo sapien
actctgagcagacccagtccccacc

SEQ ID NO: 5908516 - DNA, 25 bp, Homo sapien
gcgttgcttctcctcctggggaccc

SEQ ID NO: 5908517 - DNA, 25 bp, Homo sapien
accactggacccaaacatccacagg

SEQ ID NO: 5908518 - DNA, 25 bp, Homo sapien
gatttcacttgagaatgaatactaa

SEQ ID NO: 5908519 - DNA, 25 bp, Homo sapien
gaggagggctgcaacagccgcacta

SEQ ID NO: 5908520 - DNA, 25 bp, Homo sapien
ccacacccaaaccacccgattccta

SEQ ID NO: 5908521 - DNA, 25 bp, Homo sapien
aggcacttcctgttactctgcttca

SEQ ID NO: 5908522 - DNA, 25 bp, Homo sapien
tcctaaattaattcacttgaccgcg

SEQ ID NO: 5908523 - DNA, 25 bp, Homo sapien
aaaactcagcccctgaagcagacca

SEQ ID NO: 5908524 - DNA, 25 bp, Homo sapien
ccaaaccacccgattcctacttggc

SEQ ID NO: 5908525 - DNA, 25 bp, Homo sapien
ggaagggtcctttcagtcttgctcc

SEQ ID NO: 5908526 - DNA, 25 bp, Homo sapien
gcgggtgtaagtcttttgtcttgtg

SEQ ID NO: 5908527 - DNA, 25 bp, Homo sapien
gtcaaagcgggcacattcagcctgt

SEQ ID NO: 5908528 - DNA, 25 bp, Homo sapien
tcagcctgtcatagccatgctgaga

SEQ ID NO: 5908529 - DNA, 25 bp, Homo sapien
gaccatccacgaggagggctgcaac

SEQ ID NO: 5908530 - DNA, 25 bp, Homo sapien
gaggccctgcacgtgacagagcgca

SEQ ID NO: 5908531 - DNA, 25 bp, Homo sapien
tcttgtgaagaaccttcagaatgtg

SEQ ID NO: 5908532 - DNA, 25 bp, Homo sapien
caaagcgggcacattcagcctgtca

SEQ ID NO: 5908533 - DNA, 25 bp, Homo sapien
acccaaacatccacaggggcagggc

SEQ ID NO: 5908534 - DNA, 25 bp, Homo sapien
cccaaggagccattccgcctcctga

SEQ ID NO: 5908535 - DNA, 25 bp, Homo sapien
gggaccctactgccaacagctgagg

SEQ ID NO: 5908536 - DNA, 25 bp, Homo sapien
cttcctggctggaggctgcttatgc

SEQ ID NO: 5908537 - DNA, 25 bp, Homo sapien
ctttgctagaaggcacttcctgtta

SEQ ID NO: 5908538 - DNA, 25 bp, Homo sapien
gcgcaagtatctgaagcgagattgg

SEQ ID NO: 5908539 - DNA, 25 bp, Homo sapien
atccacaggggcagggctgtagttg

SEQ ID NO: 5908540 - DNA, 25 bp, Homo sapien
gagctacagccacccaccaagaaga

SEQ ID NO: 5908541 - DNA, 25 bp, Homo sapien
atgcccacaccactggacccaaaca

SEQ ID NO: 5908542 - DNA, 25 bp, Homo sapien
caagcccaagaagttcaccaccatg

SEQ ID NO: 5908543 - DNA, 25 bp, Homo sapien
tgaatcgcaccgcatacactgtggg

SEQ ID NO: 5908544 - DNA, 25 bp, Homo sapien
cctatgctcccatagcccatccctt

SEQ ID NO: 5908545 - DNA, 25 bp, Homo sapien
ccagccaagaggccctgcacgtgac

SEQ ID NO: 5908546 - DNA, 25 bp, Homo sapien
aaattaattcacttgaccgcgggtg

SEQ ID NO: 5908547 - DNA, 25 bp, Homo sapien
cagtcgtagcccatgttcctaaatt

SEQ ID NO: 5908548 - DNA, 25 bp, Homo sapien
tcctcctggggaccctactgccaac

SEQ ID NO: 5908549 - DNA, 25 bp, Homo sapien
aagaggccctgcacgtgacagagcg

SEQ ID NO: 5908550 - DNA, 25 bp, Homo sapien
gttggctttgtcattgtgttccatg

SEQ ID NO: 5908551 - DNA, 25 bp, Homo sapien
ccctttctttgctctccctgacatc

SEQ ID NO: 5908552 - DNA, 25 bp, Homo sapien
ccagcagttgcttcctggctggagg

SEQ ID NO: 5908553 - DNA, 25 bp, Homo sapien
gttcctaaattaattcacttgaccg

SEQ ID NO: 5908554 - DNA, 25 bp, Homo sapien
tatgcatagtgtatgcgcatgagtg

SEQ ID NO: 5908555 - DNA, 25 bp, Homo sapien
cactgtgggagcgttgcttctcctc

SEQ ID NO: 5908556 - DNA, 25 bp, Homo sapien
attggtgcaaaactcagcccctgaa

SEQ ID NO: 5908557 - DNA, 25 bp, Homo sapien
tagactcggaactgttcagtgctcg

SEQ ID NO: 5908558 - DNA, 25 bp, Homo sapien
ccaaacatccacaggggcagggctg

SEQ ID NO: 5908559 - DNA, 25 bp, Homo sapien
ctcaactgtcctgagctacagccac

SEQ ID NO: 5908560 - DNA, 25 bp, Homo sapien
gccatgcctggagaggaggtgcttg

SEQ ID NO: 5908561 - DNA, 25 bp, Homo sapien
ccaccacaacctggctccaggaccc

SEQ ID NO: 5908562 - DNA, 25 bp, Homo sapien
gtgcctcctgggcaccaggatttca

SEQ ID NO: 5908563 - DNA, 25 bp, Homo sapien
gtcttttgtcttgtgaagaaccttc

SEQ ID NO: 5908564 - DNA, 25 bp, Homo sapien
tggccagtgcaactccttctacatc

SEQ ID NO: 5908565 - DNA, 25 bp, Homo sapien
cctgggcaccaggatttcacttgag

SEQ ID NO: 5908566 - DNA, 25 bp, Homo sapien
ggagggctgcaacagccgcactatc

SEQ ID NO: 5908567 - DNA, 25 bp, Homo sapien
gctttgtcattgtgttccatgtgcc

SEQ ID NO: 5908568 - DNA, 25 bp, Homo sapien
gaaaggaggaagggtcctttcagtc

SEQ ID NO: 5908569 - DNA, 25 bp, Homo sapien
catagtgtatgcgcatgagtgtgca

SEQ ID NO: 5908570 - DNA, 25 bp, Homo sapien
tagcccatccctttctttgctctcc

SEQ ID NO: 5908571 - DNA, 25 bp, Homo sapien
gcgcatgagtgtgcatgggtgcctg

SEQ ID NO: 5908572 - DNA, 25 bp, Homo sapien
gagtccagccaagaggccctgcacg

SEQ ID NO: 5908573 - DNA, 25 bp, Homo sapien
ttctttgctctccctgacatctcag

SEQ ID NO: 5908574 - DNA, 25 bp, Homo sapien
tgagcagacccagtccccaccacaa

SEQ ID NO: 5908575 - DNA, 25 bp, Homo sapien
aggggcggggcaccgccatgcctgg

SEQ ID NO: 5908576 - DNA, 25 bp, Homo sapien
cacactcaactgtcctgagctacag

SEQ ID NO: 5908577 - DNA, 25 bp, Homo sapien
ctggctggaggctgcttatgcatag

SEQ ID NO: 5908578 - DNA, 25 bp, Homo sapien
ttcagtgctcgccctatgctcccat

SEQ ID NO: 5908579 - DNA, 25 bp, Homo sapien
aaccgcttctgttatggccagtgca

SEQ ID NO: 5908580 - DNA, 25 bp, Homo sapien
tcgacttggattaagtcaaagcggg

SEQ ID NO: 5908581 - DNA, 25 bp, Homo sapien
agagagccacacccaaaccacccga

SEQ ID NO: 5908582 - DNA, 25 bp, Homo sapien
caagaagttcaccaccatgatggtc

SEQ ID NO: 5908583 - DNA, 25 bp, Homo sapien
gaactgttcagtgctcgccctatgc

SEQ ID NO: 5908584 - DNA, 25 bp, Homo sapien
tgcaagcccaagaagttcaccacca

SEQ ID NO: 5908585 - DNA, 25 bp, Homo sapien
tgtcctgagctacagccacccacca

SEQ ID NO: 5908586 - DNA, 25 bp, Homo sapien
cctggggaccctactgccaacagct

SEQ ID NO: 5908587 - DNA, 25 bp, Homo sapien
ctccttctacatccccaggcacatc

SEQ ID NO: 5908588 - DNA, 25 bp, Homo sapien
tctgagcagacccagtccccaccac

SEQ ID NO: 5908589 - DNA, 25 bp, Homo sapien
gtgtgcatgggtgcctgtgggtgtt

SEQ ID NO: 5908590 - DNA, 25 bp, Homo sapien
gcttgagtccagccaagaggccctg

SEQ ID NO: 5908591 - DNA, 25 bp, Homo sapien
gcaccgcatacactgtgggagcgtt

SEQ ID NO: 5908592 - DNA, 25 bp, Homo sapien
cttatgcatagtgtatgcgcatgag

SEQ ID NO: 5908593 - DNA, 25 bp, Homo sapien
gtgcaaaactcagcccctgaagcag

SEQ ID NO: 5908594 - DNA, 25 bp, Homo sapien
ctggaggctgcttatgcatagtgta

SEQ ID NO: 5908595 - DNA, 25 bp, Homo sapien
gattcctacttggcttaaacctaga

SEQ ID NO: 5908596 - DNA, 25 bp, Homo sapien
cctgacatctcagtcgtagcccatg

SEQ ID NO: 5908597 - DNA, 25 bp, Homo sapien
cttctgcaagcccaagaagttcacc

SEQ ID NO: 5908598 - DNA, 25 bp, Homo sapien
gcccatgttcctaaattaattcact

SEQ ID NO: 5908599 - DNA, 25 bp, Homo sapien
ttgagtccagccaagaggccctgca

SEQ ID NO: 5908600 - DNA, 25 bp, Homo sapien
agagccacacccaaaccacccgatt

SEQ ID NO: 5908601 - DNA, 25 bp, Homo sapien
gctagaaggcacttcctgttactct

SEQ ID NO: 5908602 - DNA, 25 bp, Homo sapien
aagcgggcacattcagcctgtcata

SEQ ID NO: 5908603 - DNA, 25 bp, Homo sapien
gtatgcgcatgagtgtgcatgggtg

SEQ ID NO: 5908604 - DNA, 25 bp, Homo sapien
gcctcctgggcaccaggatttcact

SEQ ID NO: 5908605 - DNA, 25 bp, Homo sapien
gcaagtatctgaagcgagattggtg

SEQ ID NO: 5908606 - DNA, 25 bp, Homo sapien
gaagcagaccatccacgaggagggc

SEQ ID NO: 5908607 - DNA, 25 bp, Homo sapien
ccttctacatccccaggcacatccg

SEQ ID NO: 5908608 - DNA, 25 bp, Homo sapien
gaagcgagattggtgcaaaactcag

SEQ ID NO: 5908609 - DNA, 25 bp, Homo sapien
aaacatccacaggggcagggctgta

SEQ ID NO: 5908610 - DNA, 25 bp, Homo sapien
cagacccagtccccaccacaacctg

SEQ ID NO: 5908611 - DNA, 25 bp, Homo sapien
aagaagaaaagggtcacacgcgtga

SEQ ID NO: 5908612 - DNA, 25 bp, Homo sapien
gcttctgttatggccagtgcaactc

SEQ ID NO: 5908613 - DNA, 25 bp, Homo sapien
cacacgcgtgaagcagtgccgttgc

SEQ ID NO: 5908614 - DNA, 25 bp, Homo sapien
agtgccgttgcatatccatcgactt

SEQ ID NO: 5908615 - DNA, 25 bp, Homo sapien
gtgctcgccctatgctcccatagcc

SEQ ID NO: 5908616 - DNA, 25 bp, Homo sapien
tctcctcctggggaccctactgcca

SEQ ID NO: 5908617 - DNA, 25 bp, Homo sapien
catcaaccgcttctgttatggccag

SEQ ID NO: 5908618 - DNA, 25 bp, Homo sapien
tcagatggtcggaaatgcccacacc

SEQ ID NO: 5908619 - DNA, 25 bp, Homo sapien
gacttggattaagtcaaagcgggca

SEQ ID NO: 5908620 - DNA, 25 bp, Homo sapien
gcaacagccgcactatcatcaaccg

SEQ ID NO: 5908621 - DNA, 25 bp, Homo sapien
ctgttatggccagtgcaactccttc

SEQ ID NO: 5908622 - DNA, 25 bp, Homo sapien
cctggagaggaggtgcttgagtcca

SEQ ID NO: 5908623 - DNA, 25 bp, Homo sapien
caccatgatggtcacactcaactgt

SEQ ID NO: 5908624 - DNA, 25 bp, Homo sapien
gagccattccgcctcctgacaaggc

SEQ ID NO: 5908625 - DNA, 25 bp, Homo sapien
aggccagaagaaccagcagttgctt

SEQ ID NO: 5908626 - DNA, 25 bp, Homo sapien
cgcgtgaagcagtgccgttgcatat

SEQ ID NO: 5908627 - DNA, 25 bp, Homo sapien
acatccccaggcacatccgaaagga

SEQ ID NO: 5908628 - DNA, 25 bp, Homo sapien
cagccggaaacagcctttgctagaa

SEQ ID NO: 5908629 - DNA, 25 bp, Homo sapien
aggaggaagggtcctttcagtcttg

SEQ ID NO: 5908630 - DNA, 25 bp, Homo sapien
ggttcccaaggagccattccgcctc

SEQ ID NO: 5908631 - DNA, 25 bp, Homo sapien
cctgttactctgcttcagatggtcg

SEQ ID NO: 5908632 - DNA, 25 bp, Homo sapien
tagaaggcacttcctgttactctgc

SEQ ID NO: 5908633 - DNA, 25 bp, Homo sapien
gccagtgcaactccttctacatccc

SEQ ID NO: 5908634 - DNA, 25 bp, Homo sapien
aggatttcacttgagaatgaatact

SEQ ID NO: 5908635 - DNA, 25 bp, Homo sapien
aggagccattccgcctcctgacaag

SEQ ID NO: 5908636 - DNA, 25 bp, Homo sapien
tgaagcagtgccgttgcatatccat

SEQ ID NO: 5908637 - DNA, 25 bp, Homo sapien
atgggtgcctgtgggtgtttccaaa

SEQ ID NO: 5908638 - DNA, 25 bp, Homo sapien
atgctgagagagccacacccaaacc

SEQ ID NO: 5908639 - DNA, 25 bp, Homo sapien
agggctgcattagactcggaactgt

SEQ ID NO: 5908640 - DNA, 25 bp, Homo sapien
gggagcgttgcttctcctcctgggg

SEQ ID NO: 5908641 - DNA, 25 bp, Homo sapien
tagtgtatgcgcatgagtgtgcatg

SEQ ID NO: 5908642 - DNA, 25 bp, Homo sapien
catcgacttggattaagtcaaagcg

SEQ ID NO: 5908643 - DNA, 25 bp, Homo sapien
ccacccgattcctacttggcttaaa

SEQ ID NO: 5908644 - DNA, 25 bp, Homo sapien
ccaaacaccagccggaaacagcctt

SEQ ID NO: 5908645 - DNA, 25 bp, Homo sapien
agcccaagaagttcaccaccatgat

SEQ ID NO: 5908646 - DNA, 25 bp, Homo sapien
caacctggctccaggacccgggggc

SEQ ID NO: 5908647 - DNA, 25 bp, Homo sapien
gcccatccctttctttgctctccct

SEQ ID NO: 5908648 - DNA, 25 bp, Homo sapien
ttctgttatggccagtgcaactcct

SEQ ID NO: 5908649 - DNA, 25 bp, Homo sapien
caaggagccattccgcctcctgaca

SEQ ID NO: 5908650 - DNA, 25 bp, Homo sapien
cggaactgttcagtgctcgccctat

SEQ ID NO: 5908651 - DNA, 25 bp, Homo sapien
tgcctggagaggaggtgcttgagtc

SEQ ID NO: 5908652 - DNA, 25 bp, Homo sapien
agtcttgctccttctgcaagcccaa

SEQ ID NO: 5908653 - DNA, 25 bp, Homo sapien
aagtcttttgtcttgtgaagaacct

SEQ ID NO: 5908654 - DNA, 25 bp, Homo sapien
gccattccgcctcctgacaaggctc

SEQ ID NO: 5908655 - DNA, 25 bp, Homo sapien
ccccaggcacatccgaaaggaggaa

SEQ ID NO: 5908656 - DNA, 25 bp, Homo sapien
accgcatacactgtgggagcgttgc

SEQ ID NO: 5908657 - DNA, 25 bp, Homo sapien
actgtcctgagctacagccacccac

SEQ ID NO: 5908658 - DNA, 25 bp, Homo sapien
catgcctggagaggaggtgcttgag

SEQ ID NO: 5908659 - DNA, 25 bp, Homo sapien
atctgaagcgagattggtgcaaaac

SEQ ID NO: 5908660 - DNA, 25 bp, Homo sapien
atgcgcatgagtgtgcatgggtgcc

SEQ ID NO: 5908661 - DNA, 25 bp, Homo sapien
gccgcactatcatcaaccgcttctg

SEQ ID NO: 5908662 - DNA, 25 bp, Homo sapien
aaaagggtcacacgcgtgaagcagt

SEQ ID NO: 5908663 - DNA, 25 bp, Homo sapien
gtcctttcagtcttgctccttctgc

SEQ ID NO: 5908664 - DNA, 25 bp, Homo sapien
gcgggcacattcagcctgtcatagc

SEQ ID NO: 5908665 - DNA, 25 bp, Homo sapien
gaatactaatgggggaggtaactct

SEQ ID NO: 5908666 - DNA, 25 bp, Homo sapien
cgcatacactgtgggagcgttgctt

SEQ ID NO: 5908667 - DNA, 25 bp, Homo sapien
acgaggagggctgcaacagccgcac

SEQ ID NO: 5908668 - DNA, 25 bp, Homo sapien
tgttccatgtgcctcctgggcacca

SEQ ID NO: 5908669 - DNA, 25 bp, Homo sapien
acgtgacagagcgcaagtatctgaa

SEQ ID NO: 5908670 - DNA, 25 bp, Homo sapien
aaggctcagcacaatgactctgagc

SEQ ID NO: 5908671 - DNA, 25 bp, Homo sapien
cagaagaaccagcagttgcttcctg

SEQ ID NO: 5908672 - DNA, 25 bp, Homo sapien
actctgagggctgcattagactcgg

SEQ ID NO: 5908673 - DNA, 25 bp, Homo sapien
cagccacccaccaagaagaaaaggg

SEQ ID NO: 5908674 - DNA, 25 bp, Homo sapien
ggctggaggctgcttatgcatagtg

SEQ ID NO: 5908675 - DNA, 25 bp, Homo sapien
gctacagccacccaccaagaagaaa

SEQ ID NO: 5908676 - DNA, 25 bp, Homo sapien
taattcacttgaccgcgggtgtaag

SEQ ID NO: 5908677 - DNA, 25 bp, Homo sapien
gcacattcagcctgtcatagccatg

SEQ ID NO: 5908678 - DNA, 25 bp, Homo sapien
cagggctgtagttggctttgtcatt

SEQ ID NO: 5908679 - DNA, 25 bp, Homo sapien
acctagaggccagaagaaccagcag

SEQ ID NO: 5908680 - DNA, 25 bp, Homo sapien
cacgcgtgaagcagtgccgttgcat

SEQ ID NO: 5908681 - DNA, 25 bp, Homo sapien
tatgctcccatagcccatccctttc

SEQ ID NO: 5908682 - DNA, 25 bp, Homo sapien
atcatcaaccgcttctgttatggcc

SEQ ID NO: 5908683 - DNA, 25 bp, Homo sapien
tttgggtccagtggtgtgggcattt

SEQ ID NO: 5908684 - DNA, 25 bp, Homo sapien
ccttcctcctttcggatgtgcctgg

SEQ ID NO: 5908685 - DNA, 25 bp, Homo sapien
agctcaggacagttgagtgtgacca

SEQ ID NO: 5908686 - DNA, 25 bp, Homo sapien
tttgcaccaatctcgcttcagatac

SEQ ID NO: 5908687 - DNA, 25 bp, Homo sapien
cggatgtgcctggggatgtagaagg

SEQ ID NO: 5908688 - DNA, 25 bp, Homo sapien
aatgtgcccgctttgacttaatcca

SEQ ID NO: 5908689 - DNA, 25 bp, Homo sapien
ggccataacagaagcggttgatgat

SEQ ID NO: 5908690 - DNA, 25 bp, Homo sapien
gccaagtaggaatcgggtggtttgg

SEQ ID NO: 5908691 - DNA, 25 bp, Homo sapien
tttggaaacacccacaggcacccat

SEQ ID NO: 5908692 - DNA, 25 bp, Homo sapien
aggaggcggaatggctccttgggaa

SEQ ID NO: 5908693 - DNA, 25 bp, Homo sapien
gtagctcaggacagttgagtgtgac

SEQ ID NO: 5908694 - DNA, 25 bp, Homo sapien
aacggcactgcttcacgcgtgtgac

SEQ ID NO: 5908695 - DNA, 25 bp, Homo sapien
tccagtggtgtgggcatttccgacc

SEQ ID NO: 5908696 - DNA, 25 bp, Homo sapien
cattctcaagtgaaatcctggtgcc

SEQ ID NO: 5908697 - DNA, 25 bp, Homo sapien
ggagagcaaagaaagggatgggcta

SEQ ID NO: 5908698 - DNA, 25 bp, Homo sapien
gcaactgctggttcttctggcctct

SEQ ID NO: 5908699 - DNA, 25 bp, Homo sapien
gcagagtaacaggaagtgccttcta

SEQ ID NO: 5908700 - DNA, 25 bp, Homo sapien
tgcaccaatctcgcttcagatactt

SEQ ID NO: 5908701 - DNA, 25 bp, Homo sapien
tgaattaatttaggaacatgggcta

SEQ ID NO: 5908702 - DNA, 25 bp, Homo sapien
aacttcttgggcttgcagaaggagc

SEQ ID NO: 5908703 - DNA, 25 bp, Homo sapien
gtgacccttttcttcttggtgggtg

SEQ ID NO: 5908704 - DNA, 25 bp, Homo sapien
cctctaggtttaagccaagtaggaa

SEQ ID NO: 5908705 - DNA, 25 bp, Homo sapien
aatgcagccctcagagttacctccc

SEQ ID NO: 5908706 - DNA, 25 bp, Homo sapien
ggtgtggctctctcagcatggctat

SEQ ID NO: 5908707 - DNA, 25 bp, Homo sapien
tccccacattctgaaggttcttcac

SEQ ID NO: 5908708 - DNA, 25 bp, Homo sapien
gtggtgtgggcatttccgaccatct

SEQ ID NO: 5908709 - DNA, 25 bp, Homo sapien
cagccctcagagttacctcccccat

SEQ ID NO: 5908710 - DNA, 25 bp, Homo sapien
tgtgcccgctttgacttaatccaag

SEQ ID NO: 5908711 - DNA, 25 bp, Homo sapien
tcttgggcttgcagaaggagcaaga

SEQ ID NO: 5908712 - DNA, 25 bp, Homo sapien
cctcagctgttggcagtagggtccc

SEQ ID NO: 5908713 - DNA, 25 bp, Homo sapien
ctgagatgtcagggagagcaaagaa

SEQ ID NO: 5908714 - DNA, 25 bp, Homo sapien
ataacagaagcggttgatgatagtg

SEQ ID NO: 5908715 - DNA, 25 bp, Homo sapien
gtggtttgggtgtggctctctcagc

SEQ ID NO: 5908716 - DNA, 25 bp, Homo sapien
ccatcatggtggtgaacttcttggg

SEQ ID NO: 5908717 - DNA, 25 bp, Homo sapien
tttccgaccatctgaagcagagtaa

SEQ ID NO: 5908718 - DNA, 25 bp, Homo sapien
gcttcaggggctgagttttgcacca

SEQ ID NO: 5908719 - DNA, 25 bp, Homo sapien
aattaatttaggaacatgggctacg

SEQ ID NO: 5908720 - DNA, 25 bp, Homo sapien
gaacacaatgacaaagccaactaca

SEQ ID NO: 5908721 - DNA, 25 bp, Homo sapien
agccaactacagccctgcccctgtg

SEQ ID NO: 5908722 - DNA, 25 bp, Homo sapien
tgcagccctcagagttacctccccc

SEQ ID NO: 5908723 - DNA, 25 bp, Homo sapien
ttgagtgtgaccatcatggtggtga

SEQ ID NO: 5908724 - DNA, 25 bp, Homo sapien
atggatatgcaacggcactgcttca

SEQ ID NO: 5908725 - DNA, 25 bp, Homo sapien
gctggttcttctggcctctaggttt

SEQ ID NO: 5908726 - DNA, 25 bp, Homo sapien
cagaagcggttgatgatagtgcggc

SEQ ID NO: 5908727 - DNA, 25 bp, Homo sapien
gtcctggagccaggttgtggtgggg

SEQ ID NO: 5908728 - DNA, 25 bp, Homo sapien
cccttttcttcttggtgggtggctg

SEQ ID NO: 5908729 - DNA, 25 bp, Homo sapien
acgcgtgtgacccttttcttcttgg

SEQ ID NO: 5908730 - DNA, 25 bp, Homo sapien
tctctcagcatggctatgacaggct

SEQ ID NO: 5908731 - DNA, 25 bp, Homo sapien
gcaacgctcccacagtgtatgcggt

SEQ ID NO: 5908732 - DNA, 25 bp, Homo sapien
gtccccaggaggagaagcaacgctc

SEQ ID NO: 5908733 - DNA, 25 bp, Homo sapien
acccttcctcctttcggatgtgcct

SEQ ID NO: 5908734 - DNA, 25 bp, Homo sapien
cctggtgcccaggaggcacatggaa

SEQ ID NO: 5908735 - DNA, 25 bp, Homo sapien
ctgtcacgtgcagggcctcttggct

SEQ ID NO: 5908736 - DNA, 25 bp, Homo sapien
gtttccggctggtgtttggaaacac

SEQ ID NO: 5908737 - DNA, 25 bp, Homo sapien
aggaagtgccttctagcaaaggctg

SEQ ID NO: 5908738 - DNA, 25 bp, Homo sapien
gacccttttcttcttggtgggtggc

SEQ ID NO: 5908739 - DNA, 25 bp, Homo sapien
cagatacttgcgctctgtcacgtgc

SEQ ID NO: 5908740 - DNA, 25 bp, Homo sapien
caccaatctcgcttcagatacttgc

SEQ ID NO: 5908741 - DNA, 25 bp, Homo sapien
gggcctcttggctggactcaagcac

SEQ ID NO: 5908742 - DNA, 25 bp, Homo sapien
tgaatgtgcccgctttgacttaatc

SEQ ID NO: 5908743 - DNA, 25 bp, Homo sapien
tcttcacaagacaaaagacttacac

SEQ ID NO: 5908744 - DNA, 25 bp, Homo sapien
ctcaggacagttgagtgtgaccatc

SEQ ID NO: 5908745 - DNA, 25 bp, Homo sapien
gttgcactggccataacagaagcgg

SEQ ID NO: 5908746 - DNA, 25 bp, Homo sapien
aagtcgatggatatgcaacggcact

SEQ ID NO: 5908747 - DNA, 25 bp, Homo sapien
actacagccctgcccctgtggatgt

SEQ ID NO: 5908748 - DNA, 25 bp, Homo sapien
ctcgtggatggtctgcttcaggggc

SEQ ID NO: 5908749 - DNA, 25 bp, Homo sapien
cggcactgcttcacgcgtgtgaccc

SEQ ID NO: 5908750 - DNA, 25 bp, Homo sapien
ggacccttcctcctttcggatgtgc

SEQ ID NO: 5908751 - DNA, 25 bp, Homo sapien
gtgcccaggaggcacatggaacaca

SEQ ID NO: 5908752 - DNA, 25 bp, Homo sapien
gtggtgaacttcttgggcttgcaga

SEQ ID NO: 5908753 - DNA, 25 bp, Homo sapien
gcccccgggtcctggagccaggttg

SEQ ID NO: 5908754 - DNA, 25 bp, Homo sapien
ctgtttccggctggtgtttggaaac

SEQ ID NO: 5908755 - DNA, 25 bp, Homo sapien
gaacagttccgagtctaatgcagcc

SEQ ID NO: 5908756 - DNA, 25 bp, Homo sapien
tgggctatgggagcatagggcgagc

SEQ ID NO: 5908757 - DNA, 25 bp, Homo sapien
aagaaagggatgggctatgggagca

SEQ ID NO: 5908758 - DNA, 25 bp, Homo sapien
cgagcactgaacagttccgagtcta

SEQ ID NO: 5908759 - DNA, 25 bp, Homo sapien
gcagtagggtccccaggaggagaag

SEQ ID NO: 5908760 - DNA, 25 bp, Homo sapien
gagccaggttgtggtggggactggg

SEQ ID NO: 5908761 - DNA, 25 bp, Homo sapien
caagcacctcctctccaggcatggc

SEQ ID NO: 5908762 - DNA, 25 bp, Homo sapien
catggctatgacaggctgaatgtgc

SEQ ID NO: 5908763 - DNA, 25 bp, Homo sapien
aggagttgcactggccataacagaa

SEQ ID NO: 5908764 - DNA, 25 bp, Homo sapien
ggctgttgcagccctcctcgtggat

SEQ ID NO: 5908765 - DNA, 25 bp, Homo sapien
gtgcggctgttgcagccctcctcgt

SEQ ID NO: 5908766 - DNA, 25 bp, Homo sapien
cctcctcgtggatggtctgcttcag

SEQ ID NO: 5908767 - DNA, 25 bp, Homo sapien
aacatgggctacgactgagatgtca

SEQ ID NO: 5908768 - DNA, 25 bp, Homo sapien
ccataacagaagcggttgatgatag

SEQ ID NO: 5908769 - DNA, 25 bp, Homo sapien
ttctagcaaaggctgtttccggctg

SEQ ID NO: 5908770 - DNA, 25 bp, Homo sapien
tgaaaggacccttcctcctttcgga

SEQ ID NO: 5908771 - DNA, 25 bp, Homo sapien
ctctccaggcatggcggtgccccgc

SEQ ID NO: 5908772 - DNA, 25 bp, Homo sapien
ggcatttccgaccatctgaagcaga

SEQ ID NO: 5908773 - DNA, 25 bp, Homo sapien
ttagtattcattctcaagtgaaatc

SEQ ID NO: 5908774 - DNA, 25 bp, Homo sapien
tcagcatggctatgacaggctgaat

SEQ ID NO: 5908775 - DNA, 25 bp, Homo sapien
gttttgcaccaatctcgcttcagat

SEQ ID NO: 5908776 - DNA, 25 bp, Homo sapien
gacaaaagacttacacccgcggtca

SEQ ID NO: 5908777 - DNA, 25 bp, Homo sapien
tggttcttctggcctctaggtttaa

SEQ ID NO: 5908778 - DNA, 25 bp, Homo sapien
ggcctctaggtttaagccaagtagg

SEQ ID NO: 5908779 - DNA, 25 bp, Homo sapien
ccttctagcaaaggctgtttccggc

SEQ ID NO: 5908780 - DNA, 25 bp, Homo sapien
ctcttggctggactcaagcacctcc

SEQ ID NO: 5908781 - DNA, 25 bp, Homo sapien
gctatgacaggctgaatgtgcccgc

SEQ ID NO: 5908782 - DNA, 25 bp, Homo sapien
tcaggaggcggaatggctccttggg

SEQ ID NO: 5908783 - DNA, 25 bp, Homo sapien
tgcactggccataacagaagcggtt

SEQ ID NO: 5908784 - DNA, 25 bp, Homo sapien
gtggctgtagctcaggacagttgag

SEQ ID NO: 5908785 - DNA, 25 bp, Homo sapien
aactgctggttcttctggcctctag

SEQ ID NO: 5908786 - DNA, 25 bp, Homo sapien
gaaggttcttcacaagacaaaagac

SEQ ID NO: 5908787 - DNA, 25 bp, Homo sapien
ctaatgcagccctcagagttacctc

SEQ ID NO: 5908788 - DNA, 25 bp, Homo sapien
ctttttcccctcagctgttggcagt

SEQ ID NO: 5908789 - DNA, 25 bp, Homo sapien
agagcaaagaaagggatgggctatg

SEQ ID NO: 5908790 - DNA, 25 bp, Homo sapien
taacaggaagtgccttctagcaaag

SEQ ID NO: 5908791 - DNA, 25 bp, Homo sapien
tgtgctgagccttgtcaggaggcgg

SEQ ID NO: 5908792 - DNA, 25 bp, Homo sapien
gactgggtctgctcagagtcattgt

SEQ ID NO: 5908793 - DNA, 25 bp, Homo sapien
tggtggtgaacttcttgggcttgca

SEQ ID NO: 5908794 - DNA, 25 bp, Homo sapien
ggaacatgggctacgactgagatgt

SEQ ID NO: 5908795 - DNA, 25 bp, Homo sapien
atgcaacggcactgcttcacgcgtg

SEQ ID NO: 5908796 - DNA, 25 bp, Homo sapien
gcatagggcgagcactgaacagttc

SEQ ID NO: 5908797 - DNA, 25 bp, Homo sapien
gatgtagaaggagttgcactggcca

SEQ ID NO: 5908798 - DNA, 25 bp, Homo sapien
tggtgggtggctgtagctcaggaca

SEQ ID NO: 5908799 - DNA, 25 bp, Homo sapien
gggactgggtctgctcagagtcatt

SEQ ID NO: 5908800 - DNA, 25 bp, Homo sapien
ggtgtgggcatttccgaccatctga

SEQ ID NO: 5908801 - DNA, 25 bp, Homo sapien
aatctcgcttcagatacttgcgctc

SEQ ID NO: 5908802 - DNA, 25 bp, Homo sapien
cctcctttcggatgtgcctggggat

SEQ ID NO: 5908803 - DNA, 25 bp, Homo sapien
ctcaagtgaaatcctggtgcccagg

SEQ ID NO: 5908804 - DNA, 25 bp, Homo sapien
cccacattctgaaggttcttcacaa

SEQ ID NO: 5908805 - DNA, 25 bp, Homo sapien
gggcttgcagaaggagcaagactga

SEQ ID NO: 5908806 - DNA, 25 bp, Homo sapien
ttctgaaggttcttcacaagacaaa

SEQ ID NO: 5908807 - DNA, 25 bp, Homo sapien
ttcggatgtgcctggggatgtagaa

SEQ ID NO: 5908808 - DNA, 25 bp, Homo sapien
caagtgaattaatttaggaacatgg

SEQ ID NO: 5908809 - DNA, 25 bp, Homo sapien
cacattctgaaggttcttcacaaga

SEQ ID NO: 5908810 - DNA, 25 bp, Homo sapien
tggatgtttgggtccagtggtgtgg

SEQ ID NO: 5908811 - DNA, 25 bp, Homo sapien
tcattgtgctgagccttgtcaggag

SEQ ID NO: 5908812 - DNA, 25 bp, Homo sapien
ctccaggcatggcggtgccccgccc

SEQ ID NO: 5908813 - DNA, 25 bp, Homo sapien
cctccagccaggaagcaactgctgg

SEQ ID NO: 5908814 - DNA, 25 bp, Homo sapien
cctgtggatgtttgggtccagtggt

SEQ ID NO: 5908815 - DNA, 25 bp, Homo sapien
tcctttcggatgtgcctggggatgt

SEQ ID NO: 5908816 - DNA, 25 bp, Homo sapien
tgtgcctggggatgtagaaggagtt

SEQ ID NO: 5908817 - DNA, 25 bp, Homo sapien
aagcaacgctcccacagtgtatgcg

SEQ ID NO: 5908818 - DNA, 25 bp, Homo sapien
ccaagtcgatggatatgcaacggca

SEQ ID NO: 5908819 - DNA, 25 bp, Homo sapien
cagtggtgtgggcatttccgaccat

SEQ ID NO: 5908820 - DNA, 25 bp, Homo sapien
ggtccagtggtgtgggcatttccga

SEQ ID NO: 5908821 - DNA, 25 bp, Homo sapien
ggtgaacttcttgggcttgcagaag

SEQ ID NO: 5908822 - DNA, 25 bp, Homo sapien
tggcagtagggtccccaggaggaga

SEQ ID NO: 5908823 - DNA, 25 bp, Homo sapien
aacgctcccacagtgtatgcggtgc

SEQ ID NO: 5908824 - DNA, 25 bp, Homo sapien
agcaaaggctgtttccggctggtgt

SEQ ID NO: 5908825 - DNA, 25 bp, Homo sapien
cgctctgtcacgtgcagggcctctt

SEQ ID NO: 5908826 - DNA, 25 bp, Homo sapien
ggtgtttggaaacacccacaggcac

SEQ ID NO: 5908827 - DNA, 25 bp, Homo sapien
gggtcctggagccaggttgtggtgg

SEQ ID NO: 5908828 - DNA, 25 bp, Homo sapien
caggggctgagttttgcaccaatct

SEQ ID NO: 5908829 - DNA, 25 bp, Homo sapien
tccagccaggaagcaactgctggtt

SEQ ID NO: 5908830 - DNA, 25 bp, Homo sapien
tttaggaacatgggctacgactgag

SEQ ID NO: 5908831 - DNA, 25 bp, Homo sapien
ggagaagcaacgctcccacagtgta

SEQ ID NO: 5908832 - DNA, 25 bp, Homo sapien
gcactgcttcacgcgtgtgaccctt

SEQ ID NO: 5908833 - DNA, 25 bp, Homo sapien
tgcccctgtggatgtttgggtccag

SEQ ID NO: 5908834 - DNA, 25 bp, Homo sapien
gctctctcagcatggctatgacagg

SEQ ID NO: 5908835 - DNA, 25 bp, Homo sapien
aggttcttcacaagacaaaagactt

SEQ ID NO: 5908836 - DNA, 25 bp, Homo sapien
agggcgagcactgaacagttccgag

SEQ ID NO: 5908837 - DNA, 25 bp, Homo sapien
ctggtgtttggaaacacccacaggc

SEQ ID NO: 5908838 - DNA, 25 bp, Homo sapien
tggactcaagcacctcctctccagg

SEQ ID NO: 5908839 - DNA, 25 bp, Homo sapien
agtaacaggaagtgccttctagcaa

SEQ ID NO: 5908840 - DNA, 25 bp, Homo sapien
catacactatgcataagcagcctcc

SEQ ID NO: 5908841 - DNA, 25 bp, Homo sapien
atatgcaacggcactgcttcacgcg

SEQ ID NO: 5908842 - DNA, 25 bp, Homo sapien
ctgaaggttcttcacaagacaaaag

SEQ ID NO: 5908843 - DNA, 25 bp, Homo sapien
cgtgcagggcctcttggctggactc

SEQ ID NO: 5908844 - DNA, 25 bp, Homo sapien
cacccatgcacactcatgcgcatac

SEQ ID NO: 5908845 - DNA, 25 bp, Homo sapien
tggctctctcagcatggctatgaca

SEQ ID NO: 5908846 - DNA, 25 bp, Homo sapien
cccattagtattcattctcaagtga

SEQ ID NO: 5908847 - DNA, 25 bp, Homo sapien
ctgttggcagtagggtccccaggag

SEQ ID NO: 5908848 - DNA, 25 bp, Homo sapien
ggcacccatgcacactcatgcgcat

SEQ ID NO: 5908849 - DNA, 25 bp, Homo sapien
cttgcgctctgtcacgtgcagggcc

SEQ ID NO: 5908850 - DNA, 25 bp, Homo sapien
aaggagcaagactgaaaggaccctt

SEQ ID NO: 5908851 - DNA, 25 bp, Homo sapien
caagtgaaatcctggtgcccaggag

SEQ ID NO: 5908852 - DNA, 25 bp, Homo sapien
ggctggtgtttggaaacacccacag

SEQ ID NO: 5908853 - DNA, 25 bp, Homo sapien
tctaggtttaagccaagtaggaatc

SEQ ID NO: 5908854 - DNA, 25 bp, Homo sapien
cagccctgcccctgtggatgtttgg

SEQ ID NO: 5908855 - DNA, 25 bp, Homo sapien
gccctgcccctgtggatgtttgggt

SEQ ID NO: 5908856 - DNA, 25 bp, Homo sapien
tgcacactcatgcgcatacactatg

SEQ ID NO: 5908857 - DNA, 25 bp, Homo sapien
cacccacaggcacccatgcacactc

SEQ ID NO: 5908858 - DNA, 25 bp, Homo sapien
tgtggctctctcagcatggctatga

SEQ ID NO: 5908859 - DNA, 25 bp, Homo sapien
gactgagatgtcagggagagcaaag

SEQ ID NO: 5908860 - DNA, 25 bp, Homo sapien
acacaatgacaaagccaactacagc

SEQ ID NO: 5908861 - DNA, 25 bp, Homo sapien
gcggctgttgcagccctcctcgtgg

SEQ ID NO: 5908862 - DNA, 25 bp, Homo sapien
attgtgctgagccttgtcaggaggc

SEQ ID NO: 5908863 - DNA, 25 bp, Homo sapien
gtctgcttcaggggctgagttttgc

SEQ ID NO: 5908864 - DNA, 25 bp, Homo sapien
ggcggaatggctccttgggaacctt

SEQ ID NO: 5908865 - DNA, 25 bp, Homo sapien
ctatgcataagcagcctccagccag

SEQ ID NO: 5908866 - DNA, 25 bp, Homo sapien
aaatcctggtgcccaggaggcacat

SEQ ID NO: 5908867 - DNA, 25 bp, Homo sapien
ctctgtcacgtgcagggcctcttgg

SEQ ID NO: 5908868 - DNA, 25 bp, Homo sapien
tgcagggcctcttggctggactcaa

SEQ ID NO: 5908869 - DNA, 25 bp, Homo sapien
ttcttggtgggtggctgtagctcag

SEQ ID NO: 5908870 - DNA, 25 bp, Homo sapien
agcactgaacagttccgagtctaat

SEQ ID NO: 5908871 - DNA, 25 bp, Homo sapien
agcctccagccaggaagcaactgct

SEQ ID NO: 5908872 - DNA, 25 bp, Homo sapien
gggatgtagaaggagttgcactggc

SEQ ID NO: 5908873 - DNA, 25 bp, Homo sapien
cacaagacaaaagacttacacccgc

SEQ ID NO: 5908874 - DNA, 25 bp, Homo sapien
aacacccacaggcacccatgcacac

SEQ ID NO: 5908875 - DNA, 25 bp, Homo sapien
ttcccctcagctgttggcagtaggg

SEQ ID NO: 5908876 - DNA, 25 bp, Homo sapien
agcaaagaaagggatgggctatggg

SEQ ID NO: 5908877 - DNA, 25 bp, Homo sapien
ctggcctctaggtttaagccaagta

SEQ ID NO: 5908878 - DNA, 25 bp, Homo sapien
gggatgggctatgggagcatagggc

SEQ ID NO: 5908879 - DNA, 25 bp, Homo sapien
aggctgaatgtgcccgctttgactt

SEQ ID NO: 5908880 - DNA, 25 bp, Homo sapien
gcagcctccagccaggaagcaactg

SEQ ID NO: 5908881 - DNA, 25 bp, Homo sapien
gccaggaagcaactgctggttcttc

SEQ ID NO: 5908882 - DNA, 25 bp, Homo sapien
gaatggctccttgggaacctttctt

SEQ ID NO: 5908883 - DNA, 25 bp, Homo sapien
caagactgaaaggacccttcctcct

SEQ ID NO: 5908884 - DNA, 25 bp, Homo sapien
ttttcccctcagctgttggcagtag

SEQ ID NO: 5908885 - DNA, 25 bp, Homo sapien
aagcagcctccagccaggaagcaac

SEQ ID NO: 5908886 - DNA, 25 bp, Homo sapien
tgaaatcctggtgcccaggaggcac

SEQ ID NO: 5908887 - DNA, 25 bp, Homo sapien
gaggcggaatggctccttgggaacc

SEQ ID NO: 5908888 - DNA, 25 bp, Homo sapien
tcacgcgtgtgacccttttcttctt

SEQ ID NO: 5908889 - DNA, 25 bp, Homo sapien
tggagccaggttgtggtggggactg

SEQ ID NO: 5908890 - DNA, 25 bp, Homo sapien
ccgagtctaatgcagccctcagagt

SEQ ID NO: 5908891 - DNA, 25 bp, Homo sapien
aagggatgggctatgggagcatagg

SEQ ID NO: 5908892 - DNA, 25 bp, Homo sapien
gcttgcagaaggagcaagactgaaa

SEQ ID NO: 5908893 - DNA, 25 bp, Homo sapien
tgtggatgtttgggtccagtggtgt

SEQ ID NO: 5908894 - DNA, 25 bp, Homo sapien
gagtctaatgcagccctcagagtta

SEQ ID NO: 5908895 - DNA, 25 bp, Homo sapien
ctttcggatgtgcctggggatgtag

SEQ ID NO: 5908896 - DNA, 25 bp, Homo sapien
catggaacacaatgacaaagccaac

SEQ ID NO: 5908897 - DNA, 25 bp, Homo sapien
tggtctgcttcaggggctgagtttt

SEQ ID NO: 5908898 - DNA, 25 bp, Homo sapien
ggtggggactgggtctgctcagagt

SEQ ID NO: 5908899 - DNA, 25 bp, Homo sapien
gacttacacccgcggtcaagtgaat

SEQ ID NO: 5908900 - DNA, 25 bp, Homo sapien
tcagggagagcaaagaaagggatgg

SEQ ID NO: 5908901 - DNA, 25 bp, Homo sapien
ctgcttcaggggctgagttttgcac

SEQ ID NO: 5908902 - DNA, 25 bp, Homo sapien
ttccggctggtgtttggaaacaccc

SEQ ID NO: 5908903 - DNA, 25 bp, Homo sapien
tttcttcttggtgggtggctgtagc

SEQ ID NO: 5908904 - DNA, 25 bp, Homo sapien
agtgccttctagcaaaggctgtttc

SEQ ID NO: 5908905 - DNA, 25 bp, Homo sapien
cctgcccctgtggatgtttgggtcc

SEQ ID NO: 5908906 - DNA, 25 bp, Homo sapien
gttggcagtagggtccccaggagga

SEQ ID NO: 5908907 - DNA, 25 bp, Homo sapien
tgtgggcatttccgaccatctgaag

SEQ ID NO: 5908908 - DNA, 25 bp, Homo sapien
agcaagactgaaaggacccttcctc

SEQ ID NO: 5908909 - DNA, 25 bp, Homo sapien
cagccctcctcgtggatggtctgct

SEQ ID NO: 5908910 - DNA, 25 bp, Homo sapien
catctgaagcagagtaacaggaagt

SEQ ID NO: 5908911 - DNA, 25 bp, Homo sapien
cactggccataacagaagcggttga

SEQ ID NO: 5908912 - DNA, 25 bp, Homo sapien
ccaggaggcacatggaacacaatga

SEQ ID NO: 5908913 - DNA, 25 bp, Homo sapien
agtagggtccccaggaggagaagca

SEQ ID NO: 5908914 - DNA, 25 bp, Homo sapien
gggtggtttgggtgtggctctctca

SEQ ID NO: 5908915 - DNA, 25 bp, Homo sapien
gagttgcactggccataacagaagc

SEQ ID NO: 5908916 - DNA, 25 bp, Homo sapien
atgatagtgcggctgttgcagccct

SEQ ID NO: 5908917 - DNA, 25 bp, Homo sapien
cacctcctctccaggcatggcggtg

SEQ ID NO: 5908918 - DNA, 25 bp, Homo sapien
cccctcagctgttggcagtagggtc

SEQ ID NO: 5908919 - DNA, 25 bp, Homo sapien
cactatgcataagcagcctccagcc

SEQ ID NO: 5908920 - DNA, 25 bp, Homo sapien
ccccgggtcctggagccaggttgtg

SEQ ID NO: 5908921 - DNA, 25 bp, Homo sapien
ctacgactgagatgtcagggagagc

SEQ ID NO: 5908922 - DNA, 25 bp, Homo sapien
tctgaagcagagtaacaggaagtgc

SEQ ID NO: 5908923 - DNA, 25 bp, Homo sapien
gactcaagcacctcctctccaggca

SEQ ID NO: 5908924 - DNA, 25 bp, Homo sapien
gggtggctgtagctcaggacagttg

SEQ ID NO: 5908925 - DNA, 25 bp, Homo sapien
taggaatcgggtggtttgggtgtgg

SEQ ID NO: 5908926 - DNA, 25 bp, Homo sapien
acaggctgaatgtgcccgctttgac

SEQ ID NO: 5908927 - DNA, 25 bp, Homo sapien
gttgcagccctcctcgtggatggtc

SEQ ID NO: 5908928 - DNA, 25 bp, Homo sapien
taagccaagtaggaatcgggtggtt

SEQ ID NO: 5908929 - DNA, 25 bp, Homo sapien
ctatgggagcatagggcgagcactg

SEQ ID NO: 5908930 - DNA, 25 bp, Homo sapien
cccatgcacactcatgcgcatacac

SEQ ID NO: 5908931 - DNA, 25 bp, Homo sapien
cctggggatgtagaaggagttgcac

SEQ ID NO: 5908932 - DNA, 25 bp, Homo sapien
cggtcaagtgaattaatttaggaac

SEQ ID NO: 5908933 - DNA, 25 bp, Homo sapien
agagtcattgtgctgagccttgtca

SEQ ID NO: 5908934 - DNA, 25 bp, Homo sapien
gatgggctatgggagcatagggcga

SEQ ID NO: 5908935 - DNA, 25 bp, Homo sapien
catgcacactcatgcgcatacacta

SEQ ID NO: 5908936 - DNA, 25 bp, Homo sapien
gggtctgctcagagtcattgtgctg

SEQ ID NO: 5908937 - DNA, 25 bp, Homo sapien
ttcaggggctgagttttgcaccaat

SEQ ID NO: 5908938 - DNA, 25 bp, Homo sapien
catttccgaccatctgaagcagagt

SEQ ID NO: 5908939 - DNA, 25 bp, Homo sapien
cttaatccaagtcgatggatatgca

SEQ ID NO: 5908940 - DNA, 25 bp, Homo sapien
ggctgagttttgcaccaatctcgct

SEQ ID NO: 5908941 - DNA, 25 bp, Homo sapien
ctagcaaaggctgtttccggctggt

SEQ ID NO: 5908942 - DNA, 25 bp, Homo sapien
gaggcacatggaacacaatgacaaa

SEQ ID NO: 5908943 - DNA, 25 bp, Homo sapien
tattcattctcaagtgaaatcctgg

SEQ ID NO: 5908944 - DNA, 25 bp, Homo sapien
tacacccgcggtcaagtgaattaat

SEQ ID NO: 5908945 - DNA, 25 bp, Homo sapien
caactacagccctgcccctgtggat

SEQ ID NO: 5908946 - DNA, 25 bp, Homo sapien
agttgagtgtgaccatcatggtggt

SEQ ID NO: 5908947 - DNA, 25 bp, Homo sapien
gccctcctcgtggatggtctgcttc

SEQ ID NO: 5908948 - DNA, 25 bp, Homo sapien
cttggctggactcaagcacctcctc

SEQ ID NO: 5908949 - DNA, 25 bp, Homo sapien
cacatggaacacaatgacaaagcca

SEQ ID NO: 5908950 - DNA, 25 bp, Homo sapien
ctcaagcacctcctctccaggcatg

SEQ ID NO: 5908951 - DNA, 25 bp, Homo sapien
cctggagccaggttgtggtggggac

SEQ ID NO: 5908952 - DNA, 25 bp, Homo sapien
catgcgcatacactatgcataagca

SEQ ID NO: 5908953 - DNA, 25 bp, Homo sapien
caggaagcaactgctggttcttctg

SEQ ID NO: 5908954 - DNA, 25 bp, Homo sapien
aatttaggaacatgggctacgactg

SEQ ID NO: 5908955 - DNA, 25 bp, Homo sapien
gggagcatagggcgagcactgaaca

SEQ ID NO: 5908956 - DNA, 25 bp, Homo sapien
tgtctccccacattctgaaggttct

SEQ ID NO: 5908957 - DNA, 25 bp, Homo sapien
ctgttgcagccctcctcgtggatgg

SEQ ID NO: 5908958 - DNA, 25 bp, Homo sapien
gacttaatccaagtcgatggatatg

SEQ ID NO: 5908959 - DNA, 25 bp, Homo sapien
gcccaggaggcacatggaacacaat

SEQ ID NO: 5908960 - DNA, 25 bp, Homo sapien
tacactatgcataagcagcctccag

SEQ ID NO: 5908961 - DNA, 25 bp, Homo sapien
ggctatgggagcatagggcgagcac

SEQ ID NO: 5908962 - DNA, 25 bp, Homo sapien
cattagtattcattctcaagtgaaa

SEQ ID NO: 5908963 - DNA, 25 bp, Homo sapien
gctgaatgtgcccgctttgacttaa

SEQ ID NO: 5908964 - DNA, 25 bp, Homo sapien
tgacaaagccaactacagccctgcc

SEQ ID NO: 5908965 - DNA, 25 bp, Homo sapien
aagcaactgctggttcttctggcct

SEQ ID NO: 5908966 - DNA, 25 bp, Homo sapien
caaaagacttacacccgcggtcaag

SEQ ID NO: 5908967 - DNA, 25 bp, Homo sapien
atagggcgagcactgaacagttccg

SEQ ID NO: 5908968 - DNA, 25 bp, Homo sapien
gaaggagttgcactggccataacag

SEQ ID NO: 5908969 - DNA, 25 bp, Homo sapien
tgtcagggagagcaaagaaagggat

SEQ ID NO: 5908970 - DNA, 25 bp, Homo sapien
cttacacccgcggtcaagtgaatta

SEQ ID NO: 5908971 - DNA, 25 bp, Homo sapien
tgaagcagagtaacaggaagtgcct

SEQ ID NO: 5908972 - DNA, 25 bp, Homo sapien
aggaggagaagcaacgctcccacag

SEQ ID NO: 5908973 - DNA, 25 bp, Homo sapien
ccccaggaggagaagcaacgctccc

SEQ ID NO: 5908974 - DNA, 25 bp, Homo sapien
agaaggagcaagactgaaaggaccc

SEQ ID NO: 5908975 - DNA, 25 bp, Homo sapien
gcagaaggagcaagactgaaaggac

SEQ ID NO: 5908976 - DNA, 25 bp, Homo sapien
tgccttctagcaaaggctgtttccg

SEQ ID NO: 5908977 - DNA, 25 bp, Homo sapien
ctttgacttaatccaagtcgatgga

SEQ ID NO: 5908978 - DNA, 25 bp, Homo sapien
gcttcagatacttgcgctctgtcac

SEQ ID NO: 5908979 - DNA, 25 bp, Homo sapien
cggaatggctccttgggaacctttc

SEQ ID NO: 5908980 - DNA, 25 bp, Homo sapien
tcagagttacctcccccattagtat

SEQ ID NO: 5908981 - DNA, 25 bp, Homo sapien
gccctcagagttacctcccccatta

SEQ ID NO: 5908982 - DNA, 25 bp, Homo sapien
tgcctggggatgtagaaggagttgc

SEQ ID NO: 5908983 - DNA, 25 bp, Homo sapien
gactgaaaggacccttcctcctttc

SEQ ID NO: 5908984 - DNA, 25 bp, Homo sapien
cactcatgcgcatacactatgcata

SEQ ID NO: 5908985 - DNA, 25 bp, Homo sapien
tcgcttcagatacttgcgctctgtc

SEQ ID NO: 5908986 - DNA, 25 bp, Homo sapien
ggctgtagctcaggacagttgagtg

SEQ ID NO: 5908987 - DNA, 25 bp, Homo sapien
ccaggcatggcggtgccccgcccct

SEQ ID NO: 5908988 - DNA, 25 bp, Homo sapien
cccacaggcacccatgcacactcat

SEQ ID NO: 5908989 - DNA, 25 bp, Homo sapien
tgggcatttccgaccatctgaagca

SEQ ID NO: 5908990 - DNA, 25 bp, Homo sapien
tgtttgggtccagtggtgtgggcat

SEQ ID NO: 5908991 - DNA, 25 bp, Homo sapien
acgactgagatgtcagggagagcaa

SEQ ID NO: 5908992 - DNA, 25 bp, Homo sapien
atgcataagcagcctccagccagga

SEQ ID NO: 5908993 - DNA, 25 bp, Homo sapien
gtgtgacccttttcttcttggtggg

SEQ ID NO: 5908994 - DNA, 25 bp, Homo sapien
tagggtccccaggaggagaagcaac

SEQ ID NO: 5908995 - DNA, 25 bp, Homo sapien
caaagaaagggatgggctatgggag

SEQ ID NO: 5908996 - DNA, 25 bp, Homo sapien
agtgaaatcctggtgcccaggaggc

SEQ ID NO: 5908997 - DNA, 25 bp, Homo sapien
gatgtttgggtccagtggtgtgggc

SEQ ID NO: 5908998 - DNA, 25 bp, Homo sapien
gaccatcatggtggtgaacttcttg

SEQ ID NO: 5908999 - DNA, 25 bp, Homo sapien
ggcgagcactgaacagttccgagtc

SEQ ID NO: 5909000 - DNA, 25 bp, Homo sapien
atgggagcatagggcgagcactgaa

SEQ ID NO: 5909001 - DNA, 25 bp, Homo sapien
acagttccgagtctaatgcagccct

SEQ ID NO: 5909002 - DNA, 25 bp, Homo sapien
cacccgcggtcaagtgaattaattt

SEQ ID NO: 5909003 - DNA, 25 bp, Homo sapien
gccaggttgtggtggggactgggtc

SEQ ID NO: 5909004 - DNA, 25 bp, Homo sapien
cccgcggtcaagtgaattaatttag

SEQ ID NO: 5909005 - DNA, 25 bp, Homo sapien
gagtgtgaccatcatggtggtgaac

SEQ ID NO: 5909006 - DNA, 25 bp, Homo sapien
ttgcagaaggagcaagactgaaagg

SEQ ID NO: 5909007 - DNA, 25 bp, Homo sapien
acaatgacaaagccaactacagccc

SEQ ID NO: 5909008 - DNA, 25 bp, Homo sapien
tgtttggaaacacccacaggcaccc

SEQ ID NO: 5909009 - DNA, 25 bp, Homo sapien
gaagtgccttctagcaaaggctgtt

SEQ ID NO: 5909010 - DNA, 25 bp, Homo sapien
ctggccataacagaagcggttgatg

SEQ ID NO: 5909011 - DNA, 25 bp, Homo sapien
ccggctggtgtttggaaacacccac

SEQ ID NO: 5909012 - DNA, 25 bp, Homo sapien
agagtaacaggaagtgccttctagc

SEQ ID NO: 5909013 - DNA, 25 bp, Homo sapien
agcggttgatgatagtgcggctgtt

SEQ ID NO: 5909014 - DNA, 25 bp, Homo sapien
tgaacttcttgggcttgcagaagga

SEQ ID NO: 5909015 - DNA, 25 bp, Homo sapien
tgggctacgactgagatgtcaggga

SEQ ID NO: 5909016 - DNA, 25 bp, Homo sapien
cgctcccacagtgtatgcggtgcga

SEQ ID NO: 5909017 - DNA, 25 bp, Homo sapien
ttcattctcaagtgaaatcctggtg

SEQ ID NO: 5909018 - DNA, 25 bp, Homo sapien
caggacagttgagtgtgaccatcat

SEQ ID NO: 5909019 - DNA, 25 bp, Homo sapien
tatgacaggctgaatgtgcccgctt

SEQ ID NO: 5909020 - DNA, 25 bp, Homo sapien
gttcttcacaagacaaaagacttac

SEQ ID NO: 5909021 - DNA, 25 bp, Homo sapien
cgtggatggtctgcttcaggggctg

SEQ ID NO: 5909022 - DNA, 25 bp, Homo sapien
tccgaccatctgaagcagagtaaca

SEQ ID NO: 5909023 - DNA, 25 bp, Homo sapien
tgtagaaggagttgcactggccata

SEQ ID NO: 5909024 - DNA, 25 bp, Homo sapien
atccaagtcgatggatatgcaacgg

SEQ ID NO: 5909025 - DNA, 25 bp, Homo sapien
cagggcctcttggctggactcaagc

SEQ ID NO: 5909026 - DNA, 25 bp, Homo sapien
tctcagcatggctatgacaggctga

SEQ ID NO: 5909027 - DNA, 25 bp, Homo sapien
ttcacaagacaaaagacttacaccc

SEQ ID NO: 5909028 - DNA, 25 bp, Homo sapien
gagttttgcaccaatctcgcttcag

SEQ ID NO: 5909029 - DNA, 25 bp, Homo sapien
ggaatcgggtggtttgggtgtggct

SEQ ID NO: 5909030 - DNA, 25 bp, Homo sapien
cttcacgcgtgtgacccttttcttc

SEQ ID NO: 5909031 - DNA, 25 bp, Homo sapien
cgatggatatgcaacggcactgctt

SEQ ID NO: 5909032 - DNA, 25 bp, Homo sapien
gatagtgcggctgttgcagccctcc

SEQ ID NO: 5909033 - DNA, 25 bp, Homo sapien
gatggtctgcttcaggggctgagtt

SEQ ID NO: 5909034 - DNA, 25 bp, Homo sapien
tttaagccaagtaggaatcgggtgg

SEQ ID NO: 5909035 - DNA, 25 bp, Homo sapien
tgggtgtggctctctcagcatggct

SEQ ID NO: 5909036 - DNA, 25 bp, Homo sapien
agggagagcaaagaaagggatgggc

SEQ ID NO: 5909037 - DNA, 25 bp, Homo sapien
ataagcagcctccagccaggaagca

SEQ ID NO: 5909038 - DNA, 25 bp, Homo sapien
cagccaggaagcaactgctggttct

SEQ ID NO: 5909039 - DNA, 25 bp, Homo sapien
gtgggtggctgtagctcaggacagt

SEQ ID NO: 5909040 - DNA, 25 bp, Homo sapien
ctcatgcgcatacactatgcataag

SEQ ID NO: 5909041 - DNA, 25 bp, Homo sapien
gagcatagggcgagcactgaacagt

SEQ ID NO: 5909042 - DNA, 25 bp, Homo sapien
ctgggtctgctcagagtcattgtgc

SEQ ID NO: 5909043 - DNA, 25 bp, Homo sapien
ctgagccttgtcaggaggcggaatg

SEQ ID NO: 5909044 - DNA, 25 bp, Homo sapien
cacgtgcagggcctcttggctggac

SEQ ID NO: 5909045 - DNA, 25 bp, Homo sapien
ttctcaagtgaaatcctggtgccca

SEQ ID NO: 5909046 - DNA, 25 bp, Homo sapien
tcagagtcattgtgctgagccttgt

SEQ ID NO: 5909047 - DNA, 25 bp, Homo sapien
gtcgatggatatgcaacggcactgc

SEQ ID NO: 5909048 - DNA, 25 bp, Homo sapien
cgctttgacttaatccaagtcgatg

SEQ ID NO: 5909049 - DNA, 25 bp, Homo sapien
tggggactgggtctgctcagagtca

SEQ ID NO: 5909050 - DNA, 25 bp, Homo sapien
tgcgcatacactatgcataagcagc

SEQ ID NO: 5909051 - DNA, 25 bp, Homo sapien
tcttcttggtgggtggctgtagctc

SEQ ID NO: 5909052 - DNA, 25 bp, Homo sapien
ctgaacagttccgagtctaatgcag

SEQ ID NO: 5909053 - DNA, 25 bp, Homo sapien
gtcacgtgcagggcctcttggctgg

SEQ ID NO: 5909054 - DNA, 25 bp, Homo sapien
ctgagttttgcaccaatctcgcttc

SEQ ID NO: 5909055 - DNA, 25 bp, Homo sapien
cgcatacactatgcataagcagcct

SEQ ID NO: 5909056 - DNA, 25 bp, Homo sapien
tcttctggcctctaggtttaagcca

SEQ ID NO: 5909057 - DNA, 25 bp, Homo sapien
tcagctgttggcagtagggtcccca

SEQ ID NO: 5909058 - DNA, 25 bp, Homo sapien
ttgtggtggggactgggtctgctca

SEQ ID NO: 5909059 - DNA, 25 bp, Homo sapien
cttttcttcttggtgggtggctgta

SEQ ID NO: 5909060 - DNA, 25 bp, Homo sapien
ccaatctcgcttcagatacttgcgc

SEQ ID NO: 5909061 - DNA, 25 bp, Homo sapien
aaggctgtttccggctggtgtttgg

SEQ ID NO: 5909062 - DNA, 25 bp, Homo sapien
cttcttgggcttgcagaaggagcaa

SEQ ID NO: 5909063 - DNA, 25 bp, Homo sapien
ggtttgggtgtggctctctcagcat

SEQ ID NO: 5909064 - DNA, 25 bp, Homo sapien
ccaggaggagaagcaacgctcccac

SEQ ID NO: 5909065 - DNA, 25 bp, Homo sapien
agagttacctcccccattagtattc

SEQ ID NO: 5909066 - DNA, 25 bp, Homo sapien
cttgtcaggaggcggaatggctcct

SEQ ID NO: 5909067 - DNA, 25 bp, Homo sapien
aggaggcacatggaacacaatgaca

SEQ ID NO: 5909068 - DNA, 25 bp, Homo sapien
agtgaattaatttaggaacatgggc

SEQ ID NO: 5909069 - DNA, 25 bp, Homo sapien
tcgggtggtttgggtgtggctctct

SEQ ID NO: 5909070 - DNA, 25 bp, Homo sapien
tgggtccagtggtgtgggcatttcc

SEQ ID NO: 5909071 - DNA, 25 bp, Homo sapien
cccacagtgtatgcggtgcgattca

SEQ ID NO: 5909072 - DNA, 25 bp, Homo sapien
ttccgagtctaatgcagccctcaga

SEQ ID NO: 5909073 - DNA, 25 bp, Homo sapien
gaggagaagcaacgctcccacagtg

SEQ ID NO: 5909074 - DNA, 25 bp, Homo sapien
gcataagcagcctccagccaggaag

SEQ ID NO: 5909075 - DNA, 25 bp, Homo sapien
agcacctcctctccaggcatggcgg

SEQ ID NO: 5909076 - DNA, 25 bp, Homo sapien
tgcagccctcctcgtggatggtctg

SEQ ID NO: 5909077 - DNA, 25 bp, Homo sapien
catggtggtgaacttcttgggcttg

SEQ ID NO: 5909078 - DNA, 25 bp, Homo sapien
ctgctggttcttctggcctctaggt

SEQ ID NO: 5909079 - DNA, 25 bp, Homo sapien
cacaggcacccatgcacactcatgc

SEQ ID NO: 5909080 - DNA, 25 bp, Homo sapien
ggcacatggaacacaatgacaaagc

SEQ ID NO: 5909081 - DNA, 25 bp, Homo sapien
cgaccatctgaagcagagtaacagg

SEQ ID NO: 5909082 - DNA, 25 bp, Homo sapien
gttcttctggcctctaggtttaagc

SEQ ID NO: 5909083 - DNA, 25 bp, Homo sapien
caggttgtggtggggactgggtctg

SEQ ID NO: 5909084 - DNA, 25 bp, Homo sapien
ttctggcctctaggtttaagccaag

SEQ ID NO: 5909085 - DNA, 25 bp, Homo sapien
tggtgcccaggaggcacatggaaca

SEQ ID NO: 5909086 - DNA, 25 bp, Homo sapien
tggatggtctgcttcaggggctgag

SEQ ID NO: 5909087 - DNA, 25 bp, Homo sapien
ggctgtttccggctggtgtttggaa

SEQ ID NO: 5909088 - DNA, 25 bp, Homo sapien
taggaacatgggctacgactgagat

SEQ ID NO: 5909089 - DNA, 25 bp, Homo sapien
tttgggtgtggctctctcagcatgg

SEQ ID NO: 5909090 - DNA, 25 bp, Homo sapien
tggaacacaatgacaaagccaacta

SEQ ID NO: 5909091 - DNA, 25 bp, Homo sapien
ctgctcagagtcattgtgctgagcc

SEQ ID NO: 5909092 - DNA, 25 bp, Homo sapien
aatcgggtggtttgggtgtggctct

SEQ ID NO: 5909093 - DNA, 25 bp, Homo sapien
atcctggtgcccaggaggcacatgg

SEQ ID NO: 5909094 - DNA, 25 bp, Homo sapien
gcaacggcactgcttcacgcgtgtg

SEQ ID NO: 5909095 - DNA, 25 bp, Homo sapien
tacttgcgctctgtcacgtgcaggg

SEQ ID NO: 5909096 - DNA, 25 bp, Homo sapien
ggctacgactgagatgtcagggaga

SEQ ID NO: 5909097 - DNA, 25 bp, Homo sapien
tacagccctgcccctgtggatgttt

SEQ ID NO: 5909098 - DNA, 25 bp, Homo sapien
tgcgctctgtcacgtgcagggcctc

SEQ ID NO: 5909099 - DNA, 25 bp, Homo sapien
gtgaccatcatggtggtgaacttct

SEQ ID NO: 5909100 - DNA, 25 bp, Homo sapien
gaaacacccacaggcacccatgcac

SEQ ID NO: 5909101 - DNA, 25 bp, Homo sapien
gtcaagtgaattaatttaggaacat

SEQ ID NO: 5909102 - DNA, 25 bp, Homo sapien
ggttgtggtggggactgggtctgct

SEQ ID NO: 5909103 - DNA, 25 bp, Homo sapien
gaagcggttgatgatagtgcggctg

SEQ ID NO: 5909104 - DNA, 25 bp, Homo sapien
ggaagcaactgctggttcttctggc

SEQ ID NO: 5909105 - DNA, 25 bp, Homo sapien
ttgggcttgcagaaggagcaagact

SEQ ID NO: 5909106 - DNA, 25 bp, Homo sapien
ctgtagctcaggacagttgagtgtg

SEQ ID NO: 5909107 - DNA, 25 bp, Homo sapien
tctcgcttcagatacttgcgctctg

SEQ ID NO: 5909108 - DNA, 25 bp, Homo sapien
cggttgatgatagtgcggctgttgc

SEQ ID NO: 5909109 - DNA, 25 bp, Homo sapien
tcctcgtggatggtctgcttcaggg

SEQ ID NO: 5909110 - DNA, 25 bp, Homo sapien
gccttgtcaggaggcggaatggctc

SEQ ID NO: 5909111 - DNA, 25 bp, Homo sapien
tagaaggagttgcactggccataac

SEQ ID NO: 5909112 - DNA, 25 bp, Homo sapien
actgcttcacgcgtgtgaccctttt

SEQ ID NO: 5909113 - DNA, 25 bp, Homo sapien
gagccttgtcaggaggcggaatggc

SEQ ID NO: 5909114 - DNA, 25 bp, Homo sapien
gatacttgcgctctgtcacgtgcag

SEQ ID NO: 5909115 - DNA, 25 bp, Homo sapien
aacagaagcggttgatgatagtgcg

SEQ ID NO: 5909116 - DNA, 25 bp, Homo sapien
catgggctacgactgagatgtcagg

SEQ ID NO: 5909117 - DNA, 25 bp, Homo sapien
tagtgcggctgttgcagccctcctc

SEQ ID NO: 5909118 - DNA, 25 bp, Homo sapien
tgtcaggaggcggaatggctccttg

SEQ ID NO: 5909119 - DNA, 25 bp, Homo sapien
gtgtgaccatcatggtggtgaactt

SEQ ID NO: 5909120 - DNA, 25 bp, Homo sapien
tgcccgctttgacttaatccaagtc

SEQ ID NO: 5909121 - DNA, 25 bp, Homo sapien
tgacaggctgaatgtgcccgctttg

SEQ ID NO: 5909122 - DNA, 25 bp, Homo sapien
gtctaatgcagccctcagagttacc

SEQ ID NO: 5909123 - DNA, 25 bp, Homo sapien
gctcagagtcattgtgctgagcctt

SEQ ID NO: 5909124 - DNA, 25 bp, Homo sapien
tcctctccaggcatggcggtgcccc

SEQ ID NO: 5909125 - DNA, 25 bp, Homo sapien
tctccccacattctgaaggttcttc

SEQ ID NO: 5909126 - DNA, 25 bp, Homo sapien
gaaagggatgggctatgggagcata

SEQ ID NO: 5909127 - DNA, 25 bp, Homo sapien
atcatggtggtgaacttcttgggct

SEQ ID NO: 5909128 - DNA, 25 bp, Homo sapien
ttgacttaatccaagtcgatggata

SEQ ID NO: 5909129 - DNA, 25 bp, Homo sapien
agtattcattctcaagtgaaatcct

SEQ ID NO: 5909130 - DNA, 25 bp, Homo sapien
aagcagagtaacaggaagtgccttc

SEQ ID NO: 5909131 - DNA, 25 bp, Homo sapien
caaaggctgtttccggctggtgttt

SEQ ID NO: 5909132 - DNA, 25 bp, Homo sapien
caggcacccatgcacactcatgcgc

SEQ ID NO: 5909133 - DNA, 25 bp, Homo sapien
gtggtggggactgggtctgctcaga

SEQ ID NO: 5909134 - DNA, 25 bp, Homo sapien
caagacaaaagacttacacccgcgg

SEQ ID NO: 5909135 - DNA, 25 bp, Homo sapien
acagttgagtgtgaccatcatggtg

SEQ ID NO: 5909136 - DNA, 25 bp, Homo sapien
gctggactcaagcacctcctctcca

SEQ ID NO: 5909137 - DNA, 25 bp, Homo sapien
tggaaacacccacaggcacccatgc

SEQ ID NO: 5909138 - DNA, 25 bp, Homo sapien
cactgaacagttccgagtctaatgc

SEQ ID NO: 5909139 - DNA, 25 bp, Homo sapien
gagatgtcagggagagcaaagaaag

SEQ ID NO: 5909140 - DNA, 25 bp, Homo sapien
gcgtgtgacccttttcttcttggtg

SEQ ID NO: 5909141 - DNA, 25 bp, Homo sapien
cattctgaaggttcttcacaagaca

SEQ ID NO: 5909142 - DNA, 25 bp, Homo sapien
ggagcaagactgaaaggacccttcc

SEQ ID NO: 5909143 - DNA, 25 bp, Homo sapien
ttcagatacttgcgctctgtcacgt

SEQ ID NO: 5909144 - DNA, 25 bp, Homo sapien
tgatgatagtgcggctgttgcagcc

SEQ ID NO: 5909145 - DNA, 25 bp, Homo sapien
cacactcatgcgcatacactatgca

SEQ ID NO: 5909146 - DNA, 25 bp, Homo sapien
agaagcaacgctcccacagtgtatg

SEQ ID NO: 5909147 - DNA, 25 bp, Homo sapien
ctcccacagtgtatgcggtgcgatt

SEQ ID NO: 5909148 - DNA, 25 bp, Homo sapien
acaggaagtgccttctagcaaaggc

SEQ ID NO: 5909149 - DNA, 25 bp, Homo sapien
ttcctcctttcggatgtgcctgggg

SEQ ID NO: 5909150 - DNA, 25 bp, Homo sapien
gcctcttggctggactcaagcacct

SEQ ID NO: 5909151 - DNA, 25 bp, Homo sapien
tggctggactcaagcacctcctctc

SEQ ID NO: 5909152 - DNA, 25 bp, Homo sapien
cgcggtcaagtgaattaatttagga

SEQ ID NO: 5909153 - DNA, 25 bp, Homo sapien
aaagccaactacagccctgcccctg

SEQ ID NO: 5909154 - DNA, 25 bp, Homo sapien
accatctgaagcagagtaacaggaa

SEQ ID NO: 5909155 - DNA, 25 bp, Homo sapien
gggtccccaggaggagaagcaacgc

SEQ ID NO: 5909156 - DNA, 25 bp, Homo sapien
tggggatgtagaaggagttgcactg

SEQ ID NO: 5909157 - DNA, 25 bp, Homo sapien
cctcctctccaggcatggcggtgcc

SEQ ID NO: 5909158 - DNA, 25 bp, Homo sapien
gtctgctcagagtcattgtgctgag

SEQ ID NO: 5909159 - DNA, 25 bp, Homo sapien
aatgacaaagccaactacagccctg

SEQ ID NO: 5909160 - DNA, 25 bp, Homo sapien
cttggtgggtggctgtagctcagga

SEQ ID NO: 5909161 - DNA, 25 bp, Homo sapien
tgctgagccttgtcaggaggcggaa

SEQ ID NO: 5909162 - DNA, 25 bp, Homo sapien
ccgggtcctggagccaggttgtggt

SEQ ID NO: 5909163 - DNA, 25 bp, Homo sapien
taatccaagtcgatggatatgcaac

SEQ ID NO: 5909164 - DNA, 25 bp, Homo sapien
acaaagccaactacagccctgcccc

SEQ ID NO: 5909165 - DNA, 25 bp, Homo sapien
agctgttggcagtagggtccccagg

SEQ ID NO: 5909166 - DNA, 25 bp, Homo sapien
cccgctttgacttaatccaagtcga

SEQ ID NO: 5909167 - DNA, 25 bp, Homo sapien
agtcattgtgctgagccttgtcagg

SEQ ID NO: 5909168 - DNA, 25 bp, Homo sapien
ggacagttgagtgtgaccatcatgg

SEQ ID NO: 5909169 - DNA, 25 bp, Homo sapien
gttgatgatagtgcggctgttgcag

SEQ ID NO: 5909170 - DNA, 25 bp, Homo sapien
gatgtcagggagagcaaagaaaggg

SEQ ID NO: 5909171 - DNA, 25 bp, Homo sapien
aagacttacacccgcggtcaagtga

SEQ ID NO: 5909172 - DNA, 25 bp, Homo sapien
ggatatgcaacggcactgcttcacg

SEQ ID NO: 5909173 - DNA, 25 bp, Homo sapien
agcatggctatgacaggctgaatgt

SEQ ID NO: 5909174 - DNA, 25 bp, Homo sapien
taggtttaagccaagtaggaatcgg

SEQ ID NO: 5909175 - DNA, 25 bp, Homo sapien
agttccgagtctaatgcagccctca

SEQ ID NO: 5909176 - DNA, 25 bp, Homo sapien
cccctgtggatgtttgggtccagtg

SEQ ID NO: 5909177 - DNA, 25 bp, Homo sapien
ggggctgagttttgcaccaatctcg

SEQ ID NO: 5909178 - DNA, 25 bp, Homo sapien
gatgtgcctggggatgtagaaggag

SEQ ID NO: 5909179 - DNA, 25 bp, Homo sapien
tggctatgacaggctgaatgtgccc

SEQ ID NO: 5909180 - DNA, 25 bp, Homo sapien
tgcttcacgcgtgtgacccttttct

SEQ ID NO: 5909181 - DNA, 25 bp, Homo sapien
ttaatttaggaacatgggctacgac

SEQ ID NO: 5909182 - DNA, 25 bp, Homo sapien
cctgcctcttgagacacttactccc

SEQ ID NO: 5909183 - DNA, 25 bp, Homo sapien
tggcaaagcagtggagggcaagggc

SEQ ID NO: 5909184 - DNA, 25 bp, Homo sapien
ccaggcctttgccaatggcagcctg

SEQ ID NO: 5909185 - DNA, 25 bp, Homo sapien
cctgcttgttctctcctttttctac

SEQ ID NO: 5909186 - DNA, 25 bp, Homo sapien
aaagcagtggagggcaagggctgct

SEQ ID NO: 5909187 - DNA, 25 bp, Homo sapien
tcctgtttttagatgctctctgatg

SEQ ID NO: 5909188 - DNA, 25 bp, Homo sapien
agggctgctatacggttgacaacga

SEQ ID NO: 5909189 - DNA, 25 bp, Homo sapien
ctgggcaggctaaaagctttcctgt

SEQ ID NO: 5909190 - DNA, 25 bp, Homo sapien
gcagctaggatagaactatatccca

SEQ ID NO: 5909191 - DNA, 25 bp, Homo sapien
aaaactcatcatctctagtgctagt

SEQ ID NO: 5909192 - DNA, 25 bp, Homo sapien
tggccagtacaggatctggaaagga

SEQ ID NO: 5909193 - DNA, 25 bp, Homo sapien
gaactatatcccaaaactcatcatc

SEQ ID NO: 5909194 - DNA, 25 bp, Homo sapien
cctgtgctcctagcaggggcagcct

SEQ ID NO: 5909195 - DNA, 25 bp, Homo sapien
acagccatccggaccggaagacaac

SEQ ID NO: 5909196 - DNA, 25 bp, Homo sapien
ggctgctatacggttgacaacgagg

SEQ ID NO: 5909197 - DNA, 25 bp, Homo sapien
ggagggcaagggctgctatacggtt

SEQ ID NO: 5909198 - DNA, 25 bp, Homo sapien
agccgtgctgggcccccagaagctg

SEQ ID NO: 5909199 - DNA, 25 bp, Homo sapien
acagcatgtgcctgcctcttgagac

SEQ ID NO: 5909200 - DNA, 25 bp, Homo sapien
attgcctgtgctcctagcaggggca

SEQ ID NO: 5909201 - DNA, 25 bp, Homo sapien
ccctgactttggcaagctggaggag

SEQ ID NO: 5909202 - DNA, 25 bp, Homo sapien
tttcctgtttttagatgctctctga

SEQ ID NO: 5909203 - DNA, 25 bp, Homo sapien
ccgctcattactccaatttgcagat

SEQ ID NO: 5909204 - DNA, 25 bp, Homo sapien
ttagatgctctctgatgagatatgg

SEQ ID NO: 5909205 - DNA, 25 bp, Homo sapien
gttctagccatggaggtaaagagct

SEQ ID NO: 5909206 - DNA, 25 bp, Homo sapien
cagcctgcttatccctgactttggc

SEQ ID NO: 5909207 - DNA, 25 bp, Homo sapien
aagctttcctgtttttagatgctct

SEQ ID NO: 5909208 - DNA, 25 bp, Homo sapien
tcttgagacacttactccccctcct

SEQ ID NO: 5909209 - DNA, 25 bp, Homo sapien
acctatagctgcctggccaccaatg

SEQ ID NO: 5909210 - DNA, 25 bp, Homo sapien
agcctgcttgttctctcctttttct

SEQ ID NO: 5909211 - DNA, 25 bp, Homo sapien
aggcctgcgcagcagttctctggca

SEQ ID NO: 5909212 - DNA, 25 bp, Homo sapien
ctagtgctagttgctgctaacagca

SEQ ID NO: 5909213 - DNA, 25 bp, Homo sapien
gcgcagcagttctctggcatacttc

SEQ ID NO: 5909214 - DNA, 25 bp, Homo sapien
ctaactccccctgatcacgttcctg

SEQ ID NO: 5909215 - DNA, 25 bp, Homo sapien
tttttctacttctaactacaccctg

SEQ ID NO: 5909216 - DNA, 25 bp, Homo sapien
ccccctgatcacgttcctgccaatg

SEQ ID NO: 5909217 - DNA, 25 bp, Homo sapien
tctctggcatacttctgctaggcca

SEQ ID NO: 5909218 - DNA, 25 bp, Homo sapien
gttctctggcatacttctgctaggc

SEQ ID NO: 5909219 - DNA, 25 bp, Homo sapien
ctttctctcctctcaccccaagccc

SEQ ID NO: 5909220 - DNA, 25 bp, Homo sapien
gggggtctggagtggccagtacagg

SEQ ID NO: 5909221 - DNA, 25 bp, Homo sapien
tggaattggtgaggcctgaggttag

SEQ ID NO: 5909222 - DNA, 25 bp, Homo sapien
cccagaagctgcaatagcagcagac

SEQ ID NO: 5909223 - DNA, 25 bp, Homo sapien
ggcaagctggaggagggcacctata

SEQ ID NO: 5909224 - DNA, 25 bp, Homo sapien
cccaagccccacagcatgtgcctgc

SEQ ID NO: 5909225 - DNA, 25 bp, Homo sapien
gttccgtcttaacaccacgaggtct

SEQ ID NO: 5909226 - DNA, 25 bp, Homo sapien
gtacaggatctggaaaggaggtacc

SEQ ID NO: 5909227 - DNA, 25 bp, Homo sapien
ccaaagcctgcttgttctctccttt

SEQ ID NO: 5909228 - DNA, 25 bp, Homo sapien
ctgcctggccaccaatgagctaggc

SEQ ID NO: 5909229 - DNA, 25 bp, Homo sapien
atgtggcattggccaccccaggtga

SEQ ID NO: 5909230 - DNA, 25 bp, Homo sapien
tccaggccgctcattactccaattt

SEQ ID NO: 5909231 - DNA, 25 bp, Homo sapien
ttgagagttctagccatggaggtaa

SEQ ID NO: 5909232 - DNA, 25 bp, Homo sapien
tctcaccccaagccccacagcatgt

SEQ ID NO: 5909233 - DNA, 25 bp, Homo sapien
gctcattactccaatttgcagatct

SEQ ID NO: 5909234 - DNA, 25 bp, Homo sapien
tagcctggggacttcacattttcct

SEQ ID NO: 5909235 - DNA, 25 bp, Homo sapien
accccaagccccacagcatgtgcct

SEQ ID NO: 5909236 - DNA, 25 bp, Homo sapien
cagtggagggcaagggctgctatac

SEQ ID NO: 5909237 - DNA, 25 bp, Homo sapien
tggaggtaaagagcttgtggaggcc

SEQ ID NO: 5909238 - DNA, 25 bp, Homo sapien
gcagcagttctctggcatacttctg

SEQ ID NO: 5909239 - DNA, 25 bp, Homo sapien
gctaacagggcaacaacaatgtctt

SEQ ID NO: 5909240 - DNA, 25 bp, Homo sapien
gctaggcagtgccgaaagctctgta

SEQ ID NO: 5909241 - DNA, 25 bp, Homo sapien
agatgctctctgatgagatatggaa

SEQ ID NO: 5909242 - DNA, 25 bp, Homo sapien
ggcagcctgcttatccctgactttg

SEQ ID NO: 5909243 - DNA, 25 bp, Homo sapien
tgtggggcacaagttccatggcaaa

SEQ ID NO: 5909244 - DNA, 25 bp, Homo sapien
gcttgtggaggccatccaggtgggc

SEQ ID NO: 5909245 - DNA, 25 bp, Homo sapien
atccaggtgggcactggggctgggc

SEQ ID NO: 5909246 - DNA, 25 bp, Homo sapien
ccaaaactcatcatctctagtgcta

SEQ ID NO: 5909247 - DNA, 25 bp, Homo sapien
ttcacattttcctatcaccttttct

SEQ ID NO: 5909248 - DNA, 25 bp, Homo sapien
gctgtggggcacaagttccatggca

SEQ ID NO: 5909249 - DNA, 25 bp, Homo sapien
gtgggcactggggctgggctagaag

SEQ ID NO: 5909250 - DNA, 25 bp, Homo sapien
aaatgtggcattggccaccccaggt

SEQ ID NO: 5909251 - DNA, 25 bp, Homo sapien
ccctcactgggcctttctctcctct

SEQ ID NO: 5909252 - DNA, 25 bp, Homo sapien
ggccgctcattactccaatttgcag

SEQ ID NO: 5909253 - DNA, 25 bp, Homo sapien
tctaactacaccctgccctggttgg

SEQ ID NO: 5909254 - DNA, 25 bp, Homo sapien
gcctggggacttcacattttcctat

SEQ ID NO: 5909255 - DNA, 25 bp, Homo sapien
ggccaaagcctgcttgttctctcct

SEQ ID NO: 5909256 - DNA, 25 bp, Homo sapien
gatagaactatatcccaaaactcat

SEQ ID NO: 5909257 - DNA, 25 bp, Homo sapien
tcagccgtgctgggcccccagaagc

SEQ ID NO: 5909258 - DNA, 25 bp, Homo sapien
caagctggaggagggcacctatagc

SEQ ID NO: 5909259 - DNA, 25 bp, Homo sapien
gagagttctagccatggaggtaaag

SEQ ID NO: 5909260 - DNA, 25 bp, Homo sapien
cgggccatggctgggcaggctaaaa

SEQ ID NO: 5909261 - DNA, 25 bp, Homo sapien
ctcactgggcctttctctcctctca

SEQ ID NO: 5909262 - DNA, 25 bp, Homo sapien
tacggttgacaacgaggtacagcca

SEQ ID NO: 5909263 - DNA, 25 bp, Homo sapien
cagttctctggcatacttctgctag

SEQ ID NO: 5909264 - DNA, 25 bp, Homo sapien
cattttcctatcaccttttctaagc

SEQ ID NO: 5909265 - DNA, 25 bp, Homo sapien
tcctaactccccctgatcacgttcc

SEQ ID NO: 5909266 - DNA, 25 bp, Homo sapien
gtctggagtggccagtacaggatct

SEQ ID NO: 5909267 - DNA, 25 bp, Homo sapien
ttctctcctttttctacttctaact

SEQ ID NO: 5909268 - DNA, 25 bp, Homo sapien
gtgaggcctgaggttagcctgggga

SEQ ID NO: 5909269 - DNA, 25 bp, Homo sapien
ctaacagcattgcctgtgctcctag

SEQ ID NO: 5909270 - DNA, 25 bp, Homo sapien
gcaatagcagcagacgggaggcctg

SEQ ID NO: 5909271 - DNA, 25 bp, Homo sapien
agcagtggagggcaagggctgctat

SEQ ID NO: 5909272 - DNA, 25 bp, Homo sapien
tagccatggaggtaaagagcttgtg

SEQ ID NO: 5909273 - DNA, 25 bp, Homo sapien
gtaaatgtggcattggccaccccag

SEQ ID NO: 5909274 - DNA, 25 bp, Homo sapien
aggcctttgccaatggcagcctgct

SEQ ID NO: 5909275 - DNA, 25 bp, Homo sapien
ttggcaagctggaggagggcaccta

SEQ ID NO: 5909276 - DNA, 25 bp, Homo sapien
ggaggccatccaggtgggcactggg

SEQ ID NO: 5909277 - DNA, 25 bp, Homo sapien
gctgctaacagcattgcctgtgctc

SEQ ID NO: 5909278 - DNA, 25 bp, Homo sapien
gcctgcttatccctgactttggcaa

SEQ ID NO: 5909279 - DNA, 25 bp, Homo sapien
aggatctggaaaggaggtaccacgg

SEQ ID NO: 5909280 - DNA, 25 bp, Homo sapien
caagggctgctatacggttgacaac

SEQ ID NO: 5909281 - DNA, 25 bp, Homo sapien
gtttttagatgctctctgatgagat

SEQ ID NO: 5909282 - DNA, 25 bp, Homo sapien
ccacagcatgtgcctgcctcttgag

SEQ ID NO: 5909283 - DNA, 25 bp, Homo sapien
tccatggcaaagcagtggagggcaa

SEQ ID NO: 5909284 - DNA, 25 bp, Homo sapien
actagcagctaggatagaactatat

SEQ ID NO: 5909285 - DNA, 25 bp, Homo sapien
agtggccagtacaggatctggaaag

SEQ ID NO: 5909286 - DNA, 25 bp, Homo sapien
cttcctaactccccctgatcacgtt

SEQ ID NO: 5909287 - DNA, 25 bp, Homo sapien
gggtctggagtggccagtacaggat

SEQ ID NO: 5909288 - DNA, 25 bp, Homo sapien
tggttggctagagcagctccagggc

SEQ ID NO: 5909289 - DNA, 25 bp, Homo sapien
gatctgctcagaactagcagctagg

SEQ ID NO: 5909290 - DNA, 25 bp, Homo sapien
gccagtacaggatctggaaaggagg

SEQ ID NO: 5909291 - DNA, 25 bp, Homo sapien
gcagcagacgggaggcctgcgcagc

SEQ ID NO: 5909292 - DNA, 25 bp, Homo sapien
ggcagcctgctaacagggcaacaac

SEQ ID NO: 5909293 - DNA, 25 bp, Homo sapien
caagccccacagcatgtgcctgcct

SEQ ID NO: 5909294 - DNA, 25 bp, Homo sapien
aagacaacgtggttatcatttacct

SEQ ID NO: 5909295 - DNA, 25 bp, Homo sapien
cagacgggaggcctgcgcagcagtt

SEQ ID NO: 5909296 - DNA, 25 bp, Homo sapien
tcatctctagtgctagttgctgcta

SEQ ID NO: 5909297 - DNA, 25 bp, Homo sapien
atgctctctgatgagatatggaaat

SEQ ID NO: 5909298 - DNA, 25 bp, Homo sapien
ggcagtgccgaaagctctgtaaatg

SEQ ID NO: 5909299 - DNA, 25 bp, Homo sapien
tggtgaggcctgaggttagcctggg

SEQ ID NO: 5909300 - DNA, 25 bp, Homo sapien
tcctgccaatgttccgtcttaacac

SEQ ID NO: 5909301 - DNA, 25 bp, Homo sapien
caatgagctaggcagtgccgaaagc

SEQ ID NO: 5909302 - DNA, 25 bp, Homo sapien
cctatcaccttttctaagctcatcc

SEQ ID NO: 5909303 - DNA, 25 bp, Homo sapien
caccctgccctggttggctagagca

SEQ ID NO: 5909304 - DNA, 25 bp, Homo sapien
ctttgccaatggcagcctgcttatc

SEQ ID NO: 5909305 - DNA, 25 bp, Homo sapien
gaccggaagacaacgtggttatcat

SEQ ID NO: 5909306 - DNA, 25 bp, Homo sapien
ccagggcttcctaactccccctgat

SEQ ID NO: 5909307 - DNA, 25 bp, Homo sapien
aactcatcatctctagtgctagttg

SEQ ID NO: 5909308 - DNA, 25 bp, Homo sapien
tgtgcctgcctcttgagacacttac

SEQ ID NO: 5909309 - DNA, 25 bp, Homo sapien
cctactttgagagttctagccatgg

SEQ ID NO: 5909310 - DNA, 25 bp, Homo sapien
cgaaagctctgtaaatgtggcattg

SEQ ID NO: 5909311 - DNA, 25 bp, Homo sapien
tcatccctcactgggcctttctctc

SEQ ID NO: 5909312 - DNA, 25 bp, Homo sapien
ctcatcatctctagtgctagttgct

SEQ ID NO: 5909313 - DNA, 25 bp, Homo sapien
gcaaagcagtggagggcaagggctg

SEQ ID NO: 5909314 - DNA, 25 bp, Homo sapien
acgtggttatcatttacctcagccg

SEQ ID NO: 5909315 - DNA, 25 bp, Homo sapien
gaggtctggaattggtgaggcctga

SEQ ID NO: 5909316 - DNA, 25 bp, Homo sapien
aaggaggtaccacgggccatggctg

SEQ ID NO: 5909317 - DNA, 25 bp, Homo sapien
ccaggtgggcactggggctgggcta

SEQ ID NO: 5909318 - DNA, 25 bp, Homo sapien
ggacttcacattttcctatcacctt

SEQ ID NO: 5909319 - DNA, 25 bp, Homo sapien
gttcctgccaatgttccgtcttaac

SEQ ID NO: 5909320 - DNA, 25 bp, Homo sapien
gccctggttggctagagcagctcca

SEQ ID NO: 5909321 - DNA, 25 bp, Homo sapien
actatatcccaaaactcatcatctc

SEQ ID NO: 5909322 - DNA, 25 bp, Homo sapien
cagcattgcctgtgctcctagcagg

SEQ ID NO: 5909323 - DNA, 25 bp, Homo sapien
ctctcctttttctacttctaactac

SEQ ID NO: 5909324 - DNA, 25 bp, Homo sapien
agggcaacaacaatgtcttaacctg

SEQ ID NO: 5909325 - DNA, 25 bp, Homo sapien
gttccatggcaaagcagtggagggc

SEQ ID NO: 5909326 - DNA, 25 bp, Homo sapien
tggcatacttctgctaggccaaagc

SEQ ID NO: 5909327 - DNA, 25 bp, Homo sapien
gcctttctctcctctcaccccaagc

SEQ ID NO: 5909328 - DNA, 25 bp, Homo sapien
ccctgatcacgttcctgccaatgtt

SEQ ID NO: 5909329 - DNA, 25 bp, Homo sapien
gacaacgtggttatcatttacctca

SEQ ID NO: 5909330 - DNA, 25 bp, Homo sapien
tcacgttcctgccaatgttccgtct

SEQ ID NO: 5909331 - DNA, 25 bp, Homo sapien
cctggttggctagagcagctccagg

SEQ ID NO: 5909332 - DNA, 25 bp, Homo sapien
gaactagcagctaggatagaactat

SEQ ID NO: 5909333 - DNA, 25 bp, Homo sapien
gggcacctatagctgcctggccacc

SEQ ID NO: 5909334 - DNA, 25 bp, Homo sapien
aacaatgtcttaacctgacctactt

SEQ ID NO: 5909335 - DNA, 25 bp, Homo sapien
aggttagcctggggacttcacattt

SEQ ID NO: 5909336 - DNA, 25 bp, Homo sapien
gctttcctgtttttagatgctctct

SEQ ID NO: 5909337 - DNA, 25 bp, Homo sapien
tgaggttagcctggggacttcacat

SEQ ID NO: 5909338 - DNA, 25 bp, Homo sapien
tctagccatggaggtaaagagcttg

SEQ ID NO: 5909339 - DNA, 25 bp, Homo sapien
gtggagggcaagggctgctatacgg

SEQ ID NO: 5909340 - DNA, 25 bp, Homo sapien
gccgaaagctctgtaaatgtggcat

SEQ ID NO: 5909341 - DNA, 25 bp, Homo sapien
ggctaaaagctttcctgtttttaga

SEQ ID NO: 5909342 - DNA, 25 bp, Homo sapien
gacctactttgagagttctagccat

SEQ ID NO: 5909343 - DNA, 25 bp, Homo sapien
gactttggcaagctggaggagggca

SEQ ID NO: 5909344 - DNA, 25 bp, Homo sapien
ccatccggaccggaagacaacgtgg

SEQ ID NO: 5909345 - DNA, 25 bp, Homo sapien
ctccagggcttcctaactccccctg

SEQ ID NO: 5909346 - DNA, 25 bp, Homo sapien
ctatagctgcctggccaccaatgag

SEQ ID NO: 5909347 - DNA, 25 bp, Homo sapien
cccccagaagctgcaatagcagcag

SEQ ID NO: 5909348 - DNA, 25 bp, Homo sapien
gctctctgatgagatatggaaatca

SEQ ID NO: 5909349 - DNA, 25 bp, Homo sapien
aacgaggtacagccatccggaccgg

SEQ ID NO: 5909350 - DNA, 25 bp, Homo sapien
ggcattggccaccccaggtgagggg

SEQ ID NO: 5909351 - DNA, 25 bp, Homo sapien
gaagctgcaatagcagcagacggga

SEQ ID NO: 5909352 - DNA, 25 bp, Homo sapien
ctgggcctttctctcctctcacccc

SEQ ID NO: 5909353 - DNA, 25 bp, Homo sapien
catggaggtaaagagcttgtggagg

SEQ ID NO: 5909354 - DNA, 25 bp, Homo sapien
tctggaattggtgaggcctgaggtt

SEQ ID NO: 5909355 - DNA, 25 bp, Homo sapien
tgacaacgaggtacagccatccgga

SEQ ID NO: 5909356 - DNA, 25 bp, Homo sapien
cttaacctgacctactttgagagtt

SEQ ID NO: 5909357 - DNA, 25 bp, Homo sapien
gacacttactccccctcctcctctg

SEQ ID NO: 5909358 - DNA, 25 bp, Homo sapien
tatatcccaaaactcatcatctcta

SEQ ID NO: 5909359 - DNA, 25 bp, Homo sapien
caccacgaggtctggaattggtgag

SEQ ID NO: 5909360 - DNA, 25 bp, Homo sapien
gagatatggaaatcatccctcactg

SEQ ID NO: 5909361 - DNA, 25 bp, Homo sapien
gatctggaaaggaggtaccacgggc

SEQ ID NO: 5909362 - DNA, 25 bp, Homo sapien
cgaggtacagccatccggaccggaa

SEQ ID NO: 5909363 - DNA, 25 bp, Homo sapien
tcattactccaatttgcagatctgc

SEQ ID NO: 5909364 - DNA, 25 bp, Homo sapien
agaagggggtctggagtggccagta

SEQ ID NO: 5909365 - DNA, 25 bp, Homo sapien
aacagcattgcctgtgctcctagca

SEQ ID NO: 5909366 - DNA, 25 bp, Homo sapien
aatagcagcagacgggaggcctgcg

SEQ ID NO: 5909367 - DNA, 25 bp, Homo sapien
aggatagaactatatcccaaaactc

SEQ ID NO: 5909368 - DNA, 25 bp, Homo sapien
ttgccaatggcagcctgcttatccc

SEQ ID NO: 5909369 - DNA, 25 bp, Homo sapien
gtaccacgggccatggctgggcagg

SEQ ID NO: 5909370 - DNA, 25 bp, Homo sapien
caggccgctcattactccaatttgc

SEQ ID NO: 5909371 - DNA, 25 bp, Homo sapien
tactttgagagttctagccatggag

SEQ ID NO: 5909372 - DNA, 25 bp, Homo sapien
attactccaatttgcagatctgctc

SEQ ID NO: 5909373 - DNA, 25 bp, Homo sapien
gaaatcatccctcactgggcctttc

SEQ ID NO: 5909374 - DNA, 25 bp, Homo sapien
tagcagctaggatagaactatatcc

SEQ ID NO: 5909375 - DNA, 25 bp, Homo sapien
gagacacttactccccctcctcctc

SEQ ID NO: 5909376 - DNA, 25 bp, Homo sapien
cagcctgctaacagggcaacaacaa

SEQ ID NO: 5909377 - DNA, 25 bp, Homo sapien
tggaaaggaggtaccacgggccatg

SEQ ID NO: 5909378 - DNA, 25 bp, Homo sapien
tcaccccaagccccacagcatgtgc

SEQ ID NO: 5909379 - DNA, 25 bp, Homo sapien
agctgcaatagcagcagacgggagg

SEQ ID NO: 5909380 - DNA, 25 bp, Homo sapien
taaagagcttgtggaggccatccag

SEQ ID NO: 5909381 - DNA, 25 bp, Homo sapien
ttgctgctaacagcattgcctgtgc

SEQ ID NO: 5909382 - DNA, 25 bp, Homo sapien
gctagagcagctccagggcttccta

SEQ ID NO: 5909383 - DNA, 25 bp, Homo sapien
tgttctctcctttttctacttctaa

SEQ ID NO: 5909384 - DNA, 25 bp, Homo sapien
gggcctttctctcctctcaccccaa

SEQ ID NO: 5909385 - DNA, 25 bp, Homo sapien
agccccacagcatgtgcctgcctct

SEQ ID NO: 5909386 - DNA, 25 bp, Homo sapien
taagctcatccaggccgctcattac

SEQ ID NO: 5909387 - DNA, 25 bp, Homo sapien
ctagttgctgctaacagcattgcct

SEQ ID NO: 5909388 - DNA, 25 bp, Homo sapien
acaggatctggaaaggaggtaccac

SEQ ID NO: 5909389 - DNA, 25 bp, Homo sapien
taacagggcaacaacaatgtcttaa

SEQ ID NO: 5909390 - DNA, 25 bp, Homo sapien
tgctaacagcattgcctgtgctcct

SEQ ID NO: 5909391 - DNA, 25 bp, Homo sapien
atgagatatggaaatcatccctcac

SEQ ID NO: 5909392 - DNA, 25 bp, Homo sapien
tggctagagcagctccagggcttcc

SEQ ID NO: 5909393 - DNA, 25 bp, Homo sapien
ctttgagagttctagccatggaggt

SEQ ID NO: 5909394 - DNA, 25 bp, Homo sapien
ggcaagggctgctatacggttgaca

SEQ ID NO: 5909395 - DNA, 25 bp, Homo sapien
gagcttgtggaggccatccaggtgg

SEQ ID NO: 5909396 - DNA, 25 bp, Homo sapien
tacctcagccgtgctgggcccccag

SEQ ID NO: 5909397 - DNA, 25 bp, Homo sapien
ccgtgctgggcccccagaagctgca

SEQ ID NO: 5909398 - DNA, 25 bp, Homo sapien
gcctgctaacagggcaacaacaatg

SEQ ID NO: 5909399 - DNA, 25 bp, Homo sapien
ttaacaccacgaggtctggaattgg

SEQ ID NO: 5909400 - DNA, 25 bp, Homo sapien
ccacgaggtctggaattggtgaggc

SEQ ID NO: 5909401 - DNA, 25 bp, Homo sapien
aggccatccaggtgggcactggggc

SEQ ID NO: 5909402 - DNA, 25 bp, Homo sapien
gtgctgggcccccagaagctgcaat

SEQ ID NO: 5909403 - DNA, 25 bp, Homo sapien
tccgtcttaacaccacgaggtctgg

SEQ ID NO: 5909404 - DNA, 25 bp, Homo sapien
acttcacattttcctatcacctttt

SEQ ID NO: 5909405 - DNA, 25 bp, Homo sapien
gagaggatgctgtggggcacaagtt

SEQ ID NO: 5909406 - DNA, 25 bp, Homo sapien
accacgggccatggctgggcaggct

SEQ ID NO: 5909407 - DNA, 25 bp, Homo sapien
ggaggtaccacgggccatggctggg

SEQ ID NO: 5909408 - DNA, 25 bp, Homo sapien
gaaaggaggtaccacgggccatggc

SEQ ID NO: 5909409 - DNA, 25 bp, Homo sapien
gccaatgttccgtcttaacaccacg

SEQ ID NO: 5909410 - DNA, 25 bp, Homo sapien
ggatgctgtggggcacaagttccat

SEQ ID NO: 5909411 - DNA, 25 bp, Homo sapien
agctaggatagaactatatcccaaa

SEQ ID NO: 5909412 - DNA, 25 bp, Homo sapien
atgagctaggcagtgccgaaagctc

SEQ ID NO: 5909413 - DNA, 25 bp, Homo sapien
agccatccggaccggaagacaacgt

SEQ ID NO: 5909414 - DNA, 25 bp, Homo sapien
tgtgctcctagcaggggcagcctgc

SEQ ID NO: 5909415 - DNA, 25 bp, Homo sapien
gtggttatcatttacctcagccgtg

SEQ ID NO: 5909416 - DNA, 25 bp, Homo sapien
gcatacttctgctaggccaaagcct

SEQ ID NO: 5909417 - DNA, 25 bp, Homo sapien
agcatgtgcctgcctcttgagacac

SEQ ID NO: 5909418 - DNA, 25 bp, Homo sapien
ctccaatttgcagatctgctcagaa

SEQ ID NO: 5909419 - DNA, 25 bp, Homo sapien
tagaactatatcccaaaactcatca

SEQ ID NO: 5909420 - DNA, 25 bp, Homo sapien
agggcttcctaactccccctgatca

SEQ ID NO: 5909421 - DNA, 25 bp, Homo sapien
agctggaggagggcacctatagctg

SEQ ID NO: 5909422 - DNA, 25 bp, Homo sapien
ggcccccagaagctgcaatagcagc

SEQ ID NO: 5909423 - DNA, 25 bp, Homo sapien
ggctgggcaggctaaaagctttcct

SEQ ID NO: 5909424 - DNA, 25 bp, Homo sapien
tatcaccttttctaagctcatccag

SEQ ID NO: 5909425 - DNA, 25 bp, Homo sapien
tgctcagaactagcagctaggatag

SEQ ID NO: 5909426 - DNA, 25 bp, Homo sapien
atagctgcctggccaccaatgagct

SEQ ID NO: 5909427 - DNA, 25 bp, Homo sapien
ctggccaccaatgagctaggcagtg

SEQ ID NO: 5909428 - DNA, 25 bp, Homo sapien
atctctagtgctagttgctgctaac

SEQ ID NO: 5909429 - DNA, 25 bp, Homo sapien
gatcacgttcctgccaatgttccgt

SEQ ID NO: 5909430 - DNA, 25 bp, Homo sapien
cttctaactacaccctgccctggtt

SEQ ID NO: 5909431 - DNA, 25 bp, Homo sapien
tggaaatcatccctcactgggcctt

SEQ ID NO: 5909432 - DNA, 25 bp, Homo sapien
tctgatgagatatggaaatcatccc

SEQ ID NO: 5909433 - DNA, 25 bp, Homo sapien
ctggggacttcacattttcctatca

SEQ ID NO: 5909434 - DNA, 25 bp, Homo sapien
acaagttccatggcaaagcagtgga

SEQ ID NO: 5909435 - DNA, 25 bp, Homo sapien
atggctgggcaggctaaaagctttc

SEQ ID NO: 5909436 - DNA, 25 bp, Homo sapien
tccggaccggaagacaacgtggtta

SEQ ID NO: 5909437 - DNA, 25 bp, Homo sapien
catttacctcagccgtgctgggccc

SEQ ID NO: 5909438 - DNA, 25 bp, Homo sapien
tagagcagctccagggcttcctaac

SEQ ID NO: 5909439 - DNA, 25 bp, Homo sapien
aatcatccctcactgggcctttctc

SEQ ID NO: 5909440 - DNA, 25 bp, Homo sapien
atgttccgtcttaacaccacgaggt

SEQ ID NO: 5909441 - DNA, 25 bp, Homo sapien
ttatccctgactttggcaagctgga

SEQ ID NO: 5909442 - DNA, 25 bp, Homo sapien
gaggcctgaggttagcctggggact

SEQ ID NO: 5909443 - DNA, 25 bp, Homo sapien
ctccccctgatcacgttcctgccaa

SEQ ID NO: 5909444 - DNA, 25 bp, Homo sapien
cgggaggcctgcgcagcagttctct

SEQ ID NO: 5909445 - DNA, 25 bp, Homo sapien
cagaagctgcaatagcagcagacgg

SEQ ID NO: 5909446 - DNA, 25 bp, Homo sapien
cggttgacaacgaggtacagccatc

SEQ ID NO: 5909447 - DNA, 25 bp, Homo sapien
ggtaaagagcttgtggaggccatcc

SEQ ID NO: 5909448 - DNA, 25 bp, Homo sapien
ctcagaactagcagctaggatagaa

SEQ ID NO: 5909449 - DNA, 25 bp, Homo sapien
ctgatcacgttcctgccaatgttcc

SEQ ID NO: 5909450 - DNA, 25 bp, Homo sapien
atgtcttaacctgacctactttgag

SEQ ID NO: 5909451 - DNA, 25 bp, Homo sapien
ttctctcctctcaccccaagcccca

SEQ ID NO: 5909452 - DNA, 25 bp, Homo sapien
gccatccaggtgggcactggggctg

SEQ ID NO: 5909453 - DNA, 25 bp, Homo sapien
tggggcacaagttccatggcaaagc

SEQ ID NO: 5909454 - DNA, 25 bp, Homo sapien
gagcagctccagggcttcctaactc

SEQ ID NO: 5909455 - DNA, 25 bp, Homo sapien
cctgaggttagcctggggacttcac

SEQ ID NO: 5909456 - DNA, 25 bp, Homo sapien
tgcagatctgctcagaactagcagc

SEQ ID NO: 5909457 - DNA, 25 bp, Homo sapien
ctgccaatgttccgtcttaacacca

SEQ ID NO: 5909458 - DNA, 25 bp, Homo sapien
ttccaggcctttgccaatggcagcc

SEQ ID NO: 5909459 - DNA, 25 bp, Homo sapien
gcattgcctgtgctcctagcagggg

SEQ ID NO: 5909460 - DNA, 25 bp, Homo sapien
tatcccaaaactcatcatctctagt

SEQ ID NO: 5909461 - DNA, 25 bp, Homo sapien
agctgcctggccaccaatgagctag

SEQ ID NO: 5909462 - DNA, 25 bp, Homo sapien
agctctgtaaatgtggcattggcca

SEQ ID NO: 5909463 - DNA, 25 bp, Homo sapien
tgatgagatatggaaatcatccctc

SEQ ID NO: 5909464 - DNA, 25 bp, Homo sapien
gcacaagttccatggcaaagcagtg

SEQ ID NO: 5909465 - DNA, 25 bp, Homo sapien
acaacaatgtcttaacctgacctac

SEQ ID NO: 5909466 - DNA, 25 bp, Homo sapien
taacctgacctactttgagagttct

SEQ ID NO: 5909467 - DNA, 25 bp, Homo sapien
atccctgactttggcaagctggagg

SEQ ID NO: 5909468 - DNA, 25 bp, Homo sapien
ccaccaatgagctaggcagtgccga

SEQ ID NO: 5909469 - DNA, 25 bp, Homo sapien
tgggcccccagaagctgcaatagca

SEQ ID NO: 5909470 - DNA, 25 bp, Homo sapien
ggaggcctgcgcagcagttctctgg

SEQ ID NO: 5909471 - DNA, 25 bp, Homo sapien
gccaatggcagcctgcttatccctg

SEQ ID NO: 5909472 - DNA, 25 bp, Homo sapien
atcatttacctcagccgtgctgggc

SEQ ID NO: 5909473 - DNA, 25 bp, Homo sapien
gcctggccaccaatgagctaggcag

SEQ ID NO: 5909474 - DNA, 25 bp, Homo sapien
aggtgggcactggggctgggctaga

SEQ ID NO: 5909475 - DNA, 25 bp, Homo sapien
tgcttgttctctcctttttctactt

SEQ ID NO: 5909476 - DNA, 25 bp, Homo sapien
ctcctttttctacttctaactacac

SEQ ID NO: 5909477 - DNA, 25 bp, Homo sapien
aatttgcagatctgctcagaactag

SEQ ID NO: 5909478 - DNA, 25 bp, Homo sapien
aagagcttgtggaggccatccaggt

SEQ ID NO: 5909479 - DNA, 25 bp, Homo sapien
catcatctctagtgctagttgctgc

SEQ ID NO: 5909480 - DNA, 25 bp, Homo sapien
atgctgtggggcacaagttccatgg

SEQ ID NO: 5909481 - DNA, 25 bp, Homo sapien
gttggctagagcagctccagggctt

SEQ ID NO: 5909482 - DNA, 25 bp, Homo sapien
tctaagctcatccaggccgctcatt

SEQ ID NO: 5909483 - DNA, 25 bp, Homo sapien
gcctgcgcagcagttctctggcata

SEQ ID NO: 5909484 - DNA, 25 bp, Homo sapien
tctggcatacttctgctaggccaaa

SEQ ID NO: 5909485 - DNA, 25 bp, Homo sapien
accttttctaagctcatccaggccg

SEQ ID NO: 5909486 - DNA, 25 bp, Homo sapien
ggtctggaattggtgaggcctgagg

SEQ ID NO: 5909487 - DNA, 25 bp, Homo sapien
gggcaggctaaaagctttcctgttt

SEQ ID NO: 5909488 - DNA, 25 bp, Homo sapien
gttagcctggggacttcacattttc

SEQ ID NO: 5909489 - DNA, 25 bp, Homo sapien
cgtcttaacaccacgaggtctggaa

SEQ ID NO: 5909490 - DNA, 25 bp, Homo sapien
ctcatccaggccgctcattactcca

SEQ ID NO: 5909491 - DNA, 25 bp, Homo sapien
acttctgctaggccaaagcctgctt

SEQ ID NO: 5909492 - DNA, 25 bp, Homo sapien
gggcactggggctgggctagaaggg

SEQ ID NO: 5909493 - DNA, 25 bp, Homo sapien
gagttctagccatggaggtaaagag

SEQ ID NO: 5909494 - DNA, 25 bp, Homo sapien
gacgggaggcctgcgcagcagttct

SEQ ID NO: 5909495 - DNA, 25 bp, Homo sapien
ggcaacaacaatgtcttaacctgac

SEQ ID NO: 5909496 - DNA, 25 bp, Homo sapien
ctgtttttagatgctctctgatgag

SEQ ID NO: 5909497 - DNA, 25 bp, Homo sapien
aaagctctgtaaatgtggcattggc

SEQ ID NO: 5909498 - DNA, 25 bp, Homo sapien
acagggcaacaacaatgtcttaacc

SEQ ID NO: 5909499 - DNA, 25 bp, Homo sapien
tacttctaactacaccctgccctgg

SEQ ID NO: 5909500 - DNA, 25 bp, Homo sapien
ggcttcctaactccccctgatcacg

SEQ ID NO: 5909501 - DNA, 25 bp, Homo sapien
tacaccctgccctggttggctagag

SEQ ID NO: 5909502 - DNA, 25 bp, Homo sapien
ttttcctatcaccttttctaagctc

SEQ ID NO: 5909503 - DNA, 25 bp, Homo sapien
ttcctatcaccttttctaagctcat

SEQ ID NO: 5909504 - DNA, 25 bp, Homo sapien
tgctcctagcaggggcagcctgcta

SEQ ID NO: 5909505 - DNA, 25 bp, Homo sapien
tctgctcagaactagcagctaggat

SEQ ID NO: 5909506 - DNA, 25 bp, Homo sapien
catccaggccgctcattactccaat

SEQ ID NO: 5909507 - DNA, 25 bp, Homo sapien
ctgacctactttgagagttctagcc

SEQ ID NO: 5909508 - DNA, 25 bp, Homo sapien
ggggcagcctgctaacagggcaaca

SEQ ID NO: 5909509 - DNA, 25 bp, Homo sapien
ctggagtggccagtacaggatctgg

SEQ ID NO: 5909510 - DNA, 25 bp, Homo sapien
atacttctgctaggccaaagcctgc

SEQ ID NO: 5909511 - DNA, 25 bp, Homo sapien
cggaccggaagacaacgtggttatc

SEQ ID NO: 5909512 - DNA, 25 bp, Homo sapien
tcaccttttctaagctcatccaggc

SEQ ID NO: 5909513 - DNA, 25 bp, Homo sapien
ttttagatgctctctgatgagatat

SEQ ID NO: 5909514 - DNA, 25 bp, Homo sapien
acctgacctactttgagagttctag

SEQ ID NO: 5909515 - DNA, 25 bp, Homo sapien
agcagacgggaggcctgcgcagcag

SEQ ID NO: 5909516 - DNA, 25 bp, Homo sapien
ctgctaacagggcaacaacaatgtc

SEQ ID NO: 5909517 - DNA, 25 bp, Homo sapien
ggaggagggcacctatagctgcctg

SEQ ID NO: 5909518 - DNA, 25 bp, Homo sapien
cactgggcctttctctcctctcacc

SEQ ID NO: 5909519 - DNA, 25 bp, Homo sapien
gctatacggttgacaacgaggtaca

SEQ ID NO: 5909520 - DNA, 25 bp, Homo sapien
cttgttctctcctttttctacttct

SEQ ID NO: 5909521 - DNA, 25 bp, Homo sapien
tttctaagctcatccaggccgctca

SEQ ID NO: 5909522 - DNA, 25 bp, Homo sapien
taggccaaagcctgcttgttctctc

SEQ ID NO: 5909523 - DNA, 25 bp, Homo sapien
caatgtcttaacctgacctactttg

SEQ ID NO: 5909524 - DNA, 25 bp, Homo sapien
tatggaaatcatccctcactgggcc

SEQ ID NO: 5909525 - DNA, 25 bp, Homo sapien
caacgtggttatcatttacctcagc

SEQ ID NO: 5909526 - DNA, 25 bp, Homo sapien
catggcaaagcagtggagggcaagg

SEQ ID NO: 5909527 - DNA, 25 bp, Homo sapien
tgcctgcctcttgagacacttactc

SEQ ID NO: 5909528 - DNA, 25 bp, Homo sapien
acgaggtctggaattggtgaggcct

SEQ ID NO: 5909529 - DNA, 25 bp, Homo sapien
agtgctagttgctgctaacagcatt

SEQ ID NO: 5909530 - DNA, 25 bp, Homo sapien
tgcctcttgagacacttactccccc

SEQ ID NO: 5909531 - DNA, 25 bp, Homo sapien
ctctcctctcaccccaagccccaca

SEQ ID NO: 5909532 - DNA, 25 bp, Homo sapien
ctctagtgctagttgctgctaacag

SEQ ID NO: 5909533 - DNA, 25 bp, Homo sapien
tactccaatttgcagatctgctcag

SEQ ID NO: 5909534 - DNA, 25 bp, Homo sapien
catgtgcctgcctcttgagacactt

SEQ ID NO: 5909535 - DNA, 25 bp, Homo sapien
gtacagccatccggaccggaagaca

SEQ ID NO: 5909536 - DNA, 25 bp, Homo sapien
agcaggggcagcctgctaacagggc

SEQ ID NO: 5909537 - DNA, 25 bp, Homo sapien
tttctacttctaactacaccctgcc

SEQ ID NO: 5909538 - DNA, 25 bp, Homo sapien
tctggaaaggaggtaccacgggcca

SEQ ID NO: 5909539 - DNA, 25 bp, Homo sapien
gcacctatagctgcctggccaccaa

SEQ ID NO: 5909540 - DNA, 25 bp, Homo sapien
ccaatttgcagatctgctcagaact

SEQ ID NO: 5909541 - DNA, 25 bp, Homo sapien
gtgccgaaagctctgtaaatgtggc

SEQ ID NO: 5909542 - DNA, 25 bp, Homo sapien
gggcacaagttccatggcaaagcag

SEQ ID NO: 5909543 - DNA, 25 bp, Homo sapien
ttgagacacttactccccctcctcc

SEQ ID NO: 5909544 - DNA, 25 bp, Homo sapien
gttgacaacgaggtacagccatccg

SEQ ID NO: 5909545 - DNA, 25 bp, Homo sapien
agggcaagggctgctatacggttga

SEQ ID NO: 5909546 - DNA, 25 bp, Homo sapien
gagggcacctatagctgcctggcca

SEQ ID NO: 5909547 - DNA, 25 bp, Homo sapien
ctctgtaaatgtggcattggccacc

SEQ ID NO: 5909548 - DNA, 25 bp, Homo sapien
cacattttcctatcaccttttctaa

SEQ ID NO: 5909549 - DNA, 25 bp, Homo sapien
tttgcagatctgctcagaactagca

SEQ ID NO: 5909550 - DNA, 25 bp, Homo sapien
ggaagacaacgtggttatcatttac

SEQ ID NO: 5909551 - DNA, 25 bp, Homo sapien
ggttatcatttacctcagccgtgct

SEQ ID NO: 5909552 - DNA, 25 bp, Homo sapien
aaagcctgcttgttctctccttttt

SEQ ID NO: 5909553 - DNA, 25 bp, Homo sapien
tttacctcagccgtgctgggccccc

SEQ ID NO: 5909554 - DNA, 25 bp, Homo sapien
tcttaacaccacgaggtctggaatt

SEQ ID NO: 5909555 - DNA, 25 bp, Homo sapien
gaattggtgaggcctgaggttagcc

SEQ ID NO: 5909556 - DNA, 25 bp, Homo sapien
aggtaccacgggccatggctgggca

SEQ ID NO: 5909557 - DNA, 25 bp, Homo sapien
cttttctaagctcatccaggccgct

SEQ ID NO: 5909558 - DNA, 25 bp, Homo sapien
gctgggcccccagaagctgcaatag

SEQ ID NO: 5909559 - DNA, 25 bp, Homo sapien
gcctttgccaatggcagcctgctta

SEQ ID NO: 5909560 - DNA, 25 bp, Homo sapien
ggggacttcacattttcctatcacc

SEQ ID NO: 5909561 - DNA, 25 bp, Homo sapien
atggcagcctgcttatccctgactt

SEQ ID NO: 5909562 - DNA, 25 bp, Homo sapien
aggtacagccatccggaccggaaga

SEQ ID NO: 5909563 - DNA, 25 bp, Homo sapien
atccctcactgggcctttctctcct

SEQ ID NO: 5909564 - DNA, 25 bp, Homo sapien
aactccccctgatcacgttcctgcc

SEQ ID NO: 5909565 - DNA, 25 bp, Homo sapien
gagctaggcagtgccgaaagctctg

SEQ ID NO: 5909566 - DNA, 25 bp, Homo sapien
ttatcatttacctcagccgtgctgg

SEQ ID NO: 5909567 - DNA, 25 bp, Homo sapien
ctgcaatagcagcagacgggaggcc

SEQ ID NO: 5909568 - DNA, 25 bp, Homo sapien
gctaggccaaagcctgcttgttctc

SEQ ID NO: 5909569 - DNA, 25 bp, Homo sapien
gcagctccagggcttcctaactccc

SEQ ID NO: 5909570 - DNA, 25 bp, Homo sapien
ttgtggaggccatccaggtgggcac

SEQ ID NO: 5909571 - DNA, 25 bp, Homo sapien
ctgctatacggttgacaacgaggta

SEQ ID NO: 5909572 - DNA, 25 bp, Homo sapien
aaaagctttcctgtttttagatgct

SEQ ID NO: 5909573 - DNA, 25 bp, Homo sapien
gggagaggatgctgtggggcacaag

SEQ ID NO: 5909574 - DNA, 25 bp, Homo sapien
cagtacaggatctggaaaggaggta

SEQ ID NO: 5909575 - DNA, 25 bp, Homo sapien
aggagggcacctatagctgcctggc

SEQ ID NO: 5909576 - DNA, 25 bp, Homo sapien
gcaggctaaaagctttcctgttttt

SEQ ID NO: 5909577 - DNA, 25 bp, Homo sapien
cagatctgctcagaactagcagcta

SEQ ID NO: 5909578 - DNA, 25 bp, Homo sapien
tctacttctaactacaccctgccct

SEQ ID NO: 5909579 - DNA, 25 bp, Homo sapien
tctctgatgagatatggaaatcatc

SEQ ID NO: 5909580 - DNA, 25 bp, Homo sapien
taggcagtgccgaaagctctgtaaa

SEQ ID NO: 5909581 - DNA, 25 bp, Homo sapien
ctcctctcaccccaagccccacagc

SEQ ID NO: 5909582 - DNA, 25 bp, Homo sapien
ccatggctgggcaggctaaaagctt

SEQ ID NO: 5909583 - DNA, 25 bp, Homo sapien
agcagttctctggcatacttctgct

SEQ ID NO: 5909584 - DNA, 25 bp, Homo sapien
ggagtggccagtacaggatctggaa

SEQ ID NO: 5909585 - DNA, 25 bp, Homo sapien
tgctagttgctgctaacagcattgc

SEQ ID NO: 5909586 - DNA, 25 bp, Homo sapien
gaggatgctgtggggcacaagttcc

SEQ ID NO: 5909587 - DNA, 25 bp, Homo sapien
taactacaccctgccctggttggct

SEQ ID NO: 5909588 - DNA, 25 bp, Homo sapien
gtggcattggccaccccaggtgagg

SEQ ID NO: 5909589 - DNA, 25 bp, Homo sapien
acaacgaggtacagccatccggacc

SEQ ID NO: 5909590 - DNA, 25 bp, Homo sapien
ctgactttggcaagctggaggaggg

SEQ ID NO: 5909591 - DNA, 25 bp, Homo sapien
ccggaagacaacgtggttatcattt

SEQ ID NO: 5909592 - DNA, 25 bp, Homo sapien
cagtgccgaaagctctgtaaatgtg

SEQ ID NO: 5909593 - DNA, 25 bp, Homo sapien
cctcagccgtgctgggcccccagaa

SEQ ID NO: 5909594 - DNA, 25 bp, Homo sapien
agctcatccaggccgctcattactc

SEQ ID NO: 5909595 - DNA, 25 bp, Homo sapien
cctcttgagacacttactccccctc

SEQ ID NO: 5909596 - DNA, 25 bp, Homo sapien
actacaccctgccctggttggctag

SEQ ID NO: 5909597 - DNA, 25 bp, Homo sapien
ctaggatagaactatatcccaaaac

SEQ ID NO: 5909598 - DNA, 25 bp, Homo sapien
caatgttccgtcttaacaccacgag

SEQ ID NO: 5909599 - DNA, 25 bp, Homo sapien
ctaaaagctttcctgtttttagatg

SEQ ID NO: 5909600 - DNA, 25 bp, Homo sapien
accaatgagctaggcagtgccgaaa

SEQ ID NO: 5909601 - DNA, 25 bp, Homo sapien
ccctgccctggttggctagagcagc

SEQ ID NO: 5909602 - DNA, 25 bp, Homo sapien
gcttatccctgactttggcaagctg

SEQ ID NO: 5909603 - DNA, 25 bp, Homo sapien
agttgctgctaacagcattgcctgt

SEQ ID NO: 5909604 - DNA, 25 bp, Homo sapien
ggccaccaatgagctaggcagtgcc

SEQ ID NO: 5909605 - DNA, 25 bp, Homo sapien
caatggcagcctgcttatccctgac

SEQ ID NO: 5909606 - DNA, 25 bp, Homo sapien
tagcagcagacgggaggcctgcgca

SEQ ID NO: 5909607 - DNA, 25 bp, Homo sapien
gaggtaaagagcttgtggaggccat

SEQ ID NO: 5909608 - DNA, 25 bp, Homo sapien
ctgccctggttggctagagcagctc

SEQ ID NO: 5909609 - DNA, 25 bp, Homo sapien
ggcctgaggttagcctggggacttc

SEQ ID NO: 5909610 - DNA, 25 bp, Homo sapien
tatacggttgacaacgaggtacagc

SEQ ID NO: 5909611 - DNA, 25 bp, Homo sapien
acgttcctgccaatgttccgtctta

SEQ ID NO: 5909612 - DNA, 25 bp, Homo sapien
tcccaaaactcatcatctctagtgc

SEQ ID NO: 5909613 - DNA, 25 bp, Homo sapien
ggccatggctgggcaggctaaaagc

SEQ ID NO: 5909614 - DNA, 25 bp, Homo sapien
ctgtaaatgtggcattggccacccc

SEQ ID NO: 5909615 - DNA, 25 bp, Homo sapien
gtcttaacctgacctactttgagag

SEQ ID NO: 5909616 - DNA, 25 bp, Homo sapien
aagttccatggcaaagcagtggagg

SEQ ID NO: 5909617 - DNA, 25 bp, Homo sapien
ctgctaggccaaagcctgcttgttc

SEQ ID NO: 5909618 - DNA, 25 bp, Homo sapien
ctttggcaagctggaggagggcacc

SEQ ID NO: 5909619 - DNA, 25 bp, Homo sapien
gctagaagggggtctggagtggcca

SEQ ID NO: 5909620 - DNA, 25 bp, Homo sapien
caacaacaatgtcttaacctgacct

SEQ ID NO: 5909621 - DNA, 25 bp, Homo sapien
gccatggaggtaaagagcttgtgga

SEQ ID NO: 5909622 - DNA, 25 bp, Homo sapien
aagggggtctggagtggccagtaca

SEQ ID NO: 5909623 - DNA, 25 bp, Homo sapien
cacgggccatggctgggcaggctaa

SEQ ID NO: 5909624 - DNA, 25 bp, Homo sapien
agctccagggcttcctaactccccc

SEQ ID NO: 5909625 - DNA, 25 bp, Homo sapien
attggtgaggcctgaggttagcctg

SEQ ID NO: 5909626 - DNA, 25 bp, Homo sapien
ccccacagcatgtgcctgcctcttg

SEQ ID NO: 5909627 - DNA, 25 bp, Homo sapien
cctctcaccccaagccccacagcat

SEQ ID NO: 5909628 - DNA, 25 bp, Homo sapien
aacaccacgaggtctggaattggtg

SEQ ID NO: 5909629 - DNA, 25 bp, Homo sapien
tgcctgtgctcctagcaggggcagc

SEQ ID NO: 5909630 - DNA, 25 bp, Homo sapien
caggggcagcctgctaacagggcaa

SEQ ID NO: 5909631 - DNA, 25 bp, Homo sapien
gtggaggccatccaggtgggcactg

SEQ ID NO: 5909632 - DNA, 25 bp, Homo sapien
cagaactagcagctaggatagaact

SEQ ID NO: 5909633 - DNA, 25 bp, Homo sapien
ttctgctaggccaaagcctgcttgt

SEQ ID NO: 5909634 - DNA, 25 bp, Homo sapien
attggccaccccaggtgagggggga

SEQ ID NO: 5909635 - DNA, 25 bp, Homo sapien
ctggaggagggcacctatagctgcc

SEQ ID NO: 5909636 - DNA, 25 bp, Homo sapien
ctgcgcagcagttctctggcatact

SEQ ID NO: 5909637 - DNA, 25 bp, Homo sapien
ctgcttatccctgactttggcaagc

SEQ ID NO: 5909638 - DNA, 25 bp, Homo sapien
gatatggaaatcatccctcactggg

SEQ ID NO: 5909639 - DNA, 25 bp, Homo sapien
ccaattccagacctcgtggtgttaa

SEQ ID NO: 5909640 - DNA, 25 bp, Homo sapien
tggagctgctctagccaaccagggc

SEQ ID NO: 5909641 - DNA, 25 bp, Homo sapien
tgcccagccatggcccgtggtacct

SEQ ID NO: 5909642 - DNA, 25 bp, Homo sapien
tcccccctcacctggggtggccaat

SEQ ID NO: 5909643 - DNA, 25 bp, Homo sapien
tgggatatagttctatcctagctgc

SEQ ID NO: 5909644 - DNA, 25 bp, Homo sapien
atgctgtggggcttggggtgagagg

SEQ ID NO: 5909645 - DNA, 25 bp, Homo sapien
gatggctgtacctcgttgtcaaccg

SEQ ID NO: 5909646 - DNA, 25 bp, Homo sapien
gggagttaggaagccctggagctgc

SEQ ID NO: 5909647 - DNA, 25 bp, Homo sapien
cagcttgccaaagtcagggataagc

SEQ ID NO: 5909648 - DNA, 25 bp, Homo sapien
cttctagcccagccccagtgcccac

SEQ ID NO: 5909649 - DNA, 25 bp, Homo sapien
ggcagctataggtgccctcctccag

SEQ ID NO: 5909650 - DNA, 25 bp, Homo sapien
gtgtctcaagaggcaggcacatgct

SEQ ID NO: 5909651 - DNA, 25 bp, Homo sapien
gcccgtggtacctcctttccagatc

SEQ ID NO: 5909652 - DNA, 25 bp, Homo sapien
agagagcatctaaaaacaggaaagc

SEQ ID NO: 5909653 - DNA, 25 bp, Homo sapien
ctagccaaccagggcagggtgtagt

SEQ ID NO: 5909654 - DNA, 25 bp, Homo sapien
agtccccaggctaacctcaggcctc

SEQ ID NO: 5909655 - DNA, 25 bp, Homo sapien
ctcaagaggcaggcacatgctgtgg

SEQ ID NO: 5909656 - DNA, 25 bp, Homo sapien
aggtcaggttaagacattgttgttg

SEQ ID NO: 5909657 - DNA, 25 bp, Homo sapien
tgccagagaactgctgcgcaggcct

SEQ ID NO: 5909658 - DNA, 25 bp, Homo sapien
aaattggagtaatgagcggcctgga

SEQ ID NO: 5909659 - DNA, 25 bp, Homo sapien
atctgcaaattggagtaatgagcgg

SEQ ID NO: 5909660 - DNA, 25 bp, Homo sapien
cctcaggcctcaccaattccagacc

SEQ ID NO: 5909661 - DNA, 25 bp, Homo sapien
taggaagccctggagctgctctagc

SEQ ID NO: 5909662 - DNA, 25 bp, Homo sapien
tcaggcctcaccaattccagacctc

SEQ ID NO: 5909663 - DNA, 25 bp, Homo sapien
cctcccgtctgctgctattgcagct

SEQ ID NO: 5909664 - DNA, 25 bp, Homo sapien
ctagcagaagtatgccagagaactg

SEQ ID NO: 5909665 - DNA, 25 bp, Homo sapien
gcaatgctgttagcagcaactagca

SEQ ID NO: 5909666 - DNA, 25 bp, Homo sapien
tgctgttagcagcaactagcactag

SEQ ID NO: 5909667 - DNA, 25 bp, Homo sapien
tacctcctttccagatcctgtactg

SEQ ID NO: 5909668 - DNA, 25 bp, Homo sapien
gcagcaactagcactagagatgatg

SEQ ID NO: 5909669 - DNA, 25 bp, Homo sapien
aaatgtgaagtccccaggctaacct

SEQ ID NO: 5909670 - DNA, 25 bp, Homo sapien
gagggggagtaagtgtctcaagagg

SEQ ID NO: 5909671 - DNA, 25 bp, Homo sapien
tacagagctttcggcactgcctagc

SEQ ID NO: 5909672 - DNA, 25 bp, Homo sapien
tgagcggcctggatgagcttagaaa

SEQ ID NO: 5909673 - DNA, 25 bp, Homo sapien
aggcaatgctgttagcagcaactag

SEQ ID NO: 5909674 - DNA, 25 bp, Homo sapien
atatagttctatcctagctgctagt

SEQ ID NO: 5909675 - DNA, 25 bp, Homo sapien
cggcctggatgagcttagaaaaggt

SEQ ID NO: 5909676 - DNA, 25 bp, Homo sapien
ggatggcctccacaagctctttacc

SEQ ID NO: 5909677 - DNA, 25 bp, Homo sapien
ccagacctcgtggtgttaagacgga

SEQ ID NO: 5909678 - DNA, 25 bp, Homo sapien
cccagccatggcccgtggtacctcc

SEQ ID NO: 5909679 - DNA, 25 bp, Homo sapien
gacattgttgttgccctgttagcag

SEQ ID NO: 5909680 - DNA, 25 bp, Homo sapien
acctggggtggccaatgccacattt

SEQ ID NO: 5909681 - DNA, 25 bp, Homo sapien
atgagttttgggatatagttctatc

SEQ ID NO: 5909682 - DNA, 25 bp, Homo sapien
tcccgtctgctgctattgcagcttc

SEQ ID NO: 5909683 - DNA, 25 bp, Homo sapien
cactgctttgccatggaacttgtgc

SEQ ID NO: 5909684 - DNA, 25 bp, Homo sapien
gttgttgccctgttagcaggctgcc

SEQ ID NO: 5909685 - DNA, 25 bp, Homo sapien
tgatgagttttgggatatagttcta

SEQ ID NO: 5909686 - DNA, 25 bp, Homo sapien
cagtgagggatgatttccatatctc

SEQ ID NO: 5909687 - DNA, 25 bp, Homo sapien
tccactgctttgccatggaacttgt

SEQ ID NO: 5909688 - DNA, 25 bp, Homo sapien
agcaactagcactagagatgatgag

SEQ ID NO: 5909689 - DNA, 25 bp, Homo sapien
tgaggtaaatgataaccacgttgtc

SEQ ID NO: 5909690 - DNA, 25 bp, Homo sapien
atggaacttgtgccccacagcatcc

SEQ ID NO: 5909691 - DNA, 25 bp, Homo sapien
agacctcgtggtgttaagacggaac

SEQ ID NO: 5909692 - DNA, 25 bp, Homo sapien
ggcactgcctagctcattggtggcc

SEQ ID NO: 5909693 - DNA, 25 bp, Homo sapien
ccatatctcatcagagagcatctaa

SEQ ID NO: 5909694 - DNA, 25 bp, Homo sapien
ttccggtccggatggctgtacctcg

SEQ ID NO: 5909695 - DNA, 25 bp, Homo sapien
agcggcctggatgagcttagaaaag

SEQ ID NO: 5909696 - DNA, 25 bp, Homo sapien
aggcctcaccaattccagacctcgt

SEQ ID NO: 5909697 - DNA, 25 bp, Homo sapien
agggcagggtgtagttagaagtaga

SEQ ID NO: 5909698 - DNA, 25 bp, Homo sapien
agttagaagtagaaaaaggagagaa

SEQ ID NO: 5909699 - DNA, 25 bp, Homo sapien
tttacagagctttcggcactgccta

SEQ ID NO: 5909700 - DNA, 25 bp, Homo sapien
agcagcccttgccctccactgcttt

SEQ ID NO: 5909701 - DNA, 25 bp, Homo sapien
gggcttggggtgagaggagagaaag

SEQ ID NO: 5909702 - DNA, 25 bp, Homo sapien
ttgccctccactgctttgccatgga

SEQ ID NO: 5909703 - DNA, 25 bp, Homo sapien
ggaacattggcaggaacgtgatcag

SEQ ID NO: 5909704 - DNA, 25 bp, Homo sapien
ttggtggccaggcagctataggtgc

SEQ ID NO: 5909705 - DNA, 25 bp, Homo sapien
gttgtcaaccgtatagcagcccttg

SEQ ID NO: 5909706 - DNA, 25 bp, Homo sapien
gcaggctgcccctgctaggagcaca

SEQ ID NO: 5909707 - DNA, 25 bp, Homo sapien
aggagcacaggcaatgctgttagca

SEQ ID NO: 5909708 - DNA, 25 bp, Homo sapien
cctgctaggagcacaggcaatgctg

SEQ ID NO: 5909709 - DNA, 25 bp, Homo sapien
gccctccactgctttgccatggaac

SEQ ID NO: 5909710 - DNA, 25 bp, Homo sapien
tgttgccctgttagcaggctgcccc

SEQ ID NO: 5909711 - DNA, 25 bp, Homo sapien
cagccatggcccgtggtacctcctt

SEQ ID NO: 5909712 - DNA, 25 bp, Homo sapien
aaccgtatagcagcccttgccctcc

SEQ ID NO: 5909713 - DNA, 25 bp, Homo sapien
cagtgcccacctggatggcctccac

SEQ ID NO: 5909714 - DNA, 25 bp, Homo sapien
tgtcttccggtccggatggctgtac

SEQ ID NO: 5909715 - DNA, 25 bp, Homo sapien
taagcaggctgccattggcaaaggc

SEQ ID NO: 5909716 - DNA, 25 bp, Homo sapien
tacctcgttgtcaaccgtatagcag

SEQ ID NO: 5909717 - DNA, 25 bp, Homo sapien
ctgggggcccagcacggctgaggta

SEQ ID NO: 5909718 - DNA, 25 bp, Homo sapien
ccttgccctccactgctttgccatg

SEQ ID NO: 5909719 - DNA, 25 bp, Homo sapien
caggcctcccgtctgctgctattgc

SEQ ID NO: 5909720 - DNA, 25 bp, Homo sapien
gttgtcttccggtccggatggctgt

SEQ ID NO: 5909721 - DNA, 25 bp, Homo sapien
tgatttccatatctcatcagagagc

SEQ ID NO: 5909722 - DNA, 25 bp, Homo sapien
gggggagttaggaagccctggagct

SEQ ID NO: 5909723 - DNA, 25 bp, Homo sapien
aggcacatgctgtggggcttggggt

SEQ ID NO: 5909724 - DNA, 25 bp, Homo sapien
gagggatgatttccatatctcatca

SEQ ID NO: 5909725 - DNA, 25 bp, Homo sapien
atatctcatcagagagcatctaaaa

SEQ ID NO: 5909726 - DNA, 25 bp, Homo sapien
ggaagccctggagctgctctagcca

SEQ ID NO: 5909727 - DNA, 25 bp, Homo sapien
cggatggctgtacctcgttgtcaac

SEQ ID NO: 5909728 - DNA, 25 bp, Homo sapien
tttcggcactgcctagctcattggt

SEQ ID NO: 5909729 - DNA, 25 bp, Homo sapien
agaggcaggcacatgctgtggggct

SEQ ID NO: 5909730 - DNA, 25 bp, Homo sapien
cctagctgctagttctgagcagatc

SEQ ID NO: 5909731 - DNA, 25 bp, Homo sapien
actagagatgatgagttttgggata

SEQ ID NO: 5909732 - DNA, 25 bp, Homo sapien
tctaaaaacaggaaagcttttagcc

SEQ ID NO: 5909733 - DNA, 25 bp, Homo sapien
gcacatgctgtggggcttggggtga

SEQ ID NO: 5909734 - DNA, 25 bp, Homo sapien
aggctttggcctagcagaagtatgc

SEQ ID NO: 5909735 - DNA, 25 bp, Homo sapien
tgctaggagcacaggcaatgctgtt

SEQ ID NO: 5909736 - DNA, 25 bp, Homo sapien
gccccagtgcccacctggatggcct

SEQ ID NO: 5909737 - DNA, 25 bp, Homo sapien
atctcatcagagagcatctaaaaac

SEQ ID NO: 5909738 - DNA, 25 bp, Homo sapien
cggctgaggtaaatgataaccacgt

SEQ ID NO: 5909739 - DNA, 25 bp, Homo sapien
aaggtgataggaaaatgtgaagtcc

SEQ ID NO: 5909740 - DNA, 25 bp, Homo sapien
gttagcagcaactagcactagagat

SEQ ID NO: 5909741 - DNA, 25 bp, Homo sapien
tgcccctgctaggagcacaggcaat

SEQ ID NO: 5909742 - DNA, 25 bp, Homo sapien
aaaggagagaacaagcaggctttgg

SEQ ID NO: 5909743 - DNA, 25 bp, Homo sapien
gagttaggaagccctggagctgctc

SEQ ID NO: 5909744 - DNA, 25 bp, Homo sapien
atggcctccacaagctctttacctc

SEQ ID NO: 5909745 - DNA, 25 bp, Homo sapien
gtctcaagaggcaggcacatgctgt

SEQ ID NO: 5909746 - DNA, 25 bp, Homo sapien
caggctgccattggcaaaggcctgg

SEQ ID NO: 5909747 - DNA, 25 bp, Homo sapien
gcttgccaaagtcagggataagcag

SEQ ID NO: 5909748 - DNA, 25 bp, Homo sapien
cctgcccagccatggcccgtggtac

SEQ ID NO: 5909749 - DNA, 25 bp, Homo sapien
aatgagcggcctggatgagcttaga

SEQ ID NO: 5909750 - DNA, 25 bp, Homo sapien
gaaagcttttagcctgcccagccat

SEQ ID NO: 5909751 - DNA, 25 bp, Homo sapien
cctccacaagctctttacctccatg

SEQ ID NO: 5909752 - DNA, 25 bp, Homo sapien
ttagaagtagaaaaaggagagaaca

SEQ ID NO: 5909753 - DNA, 25 bp, Homo sapien
ctaacctcaggcctcaccaattcca

SEQ ID NO: 5909754 - DNA, 25 bp, Homo sapien
ttctgggggcccagcacggctgagg

SEQ ID NO: 5909755 - DNA, 25 bp, Homo sapien
tgccctcctccagcttgccaaagtc

SEQ ID NO: 5909756 - DNA, 25 bp, Homo sapien
ttaagacattgttgttgccctgtta

SEQ ID NO: 5909757 - DNA, 25 bp, Homo sapien
ttccagacctcgtggtgttaagacg

SEQ ID NO: 5909758 - DNA, 25 bp, Homo sapien
gaggaggagggggagtaagtgtctc

SEQ ID NO: 5909759 - DNA, 25 bp, Homo sapien
tagcagcaactagcactagagatga

SEQ ID NO: 5909760 - DNA, 25 bp, Homo sapien
ctgctgcgcaggcctcccgtctgct

SEQ ID NO: 5909761 - DNA, 25 bp, Homo sapien
gtatagcagcccttgccctccactg

SEQ ID NO: 5909762 - DNA, 25 bp, Homo sapien
gagatgatgagttttgggatatagt

SEQ ID NO: 5909763 - DNA, 25 bp, Homo sapien
atgagcttagaaaaggtgataggaa

SEQ ID NO: 5909764 - DNA, 25 bp, Homo sapien
gccaggcagctataggtgccctcct

SEQ ID NO: 5909765 - DNA, 25 bp, Homo sapien
acctcgtggtgttaagacggaacat

SEQ ID NO: 5909766 - DNA, 25 bp, Homo sapien
gaaaatgtgaagtccccaggctaac

SEQ ID NO: 5909767 - DNA, 25 bp, Homo sapien
tagcaggctgcccctgctaggagca

SEQ ID NO: 5909768 - DNA, 25 bp, Homo sapien
cagggataagcaggctgccattggc

SEQ ID NO: 5909769 - DNA, 25 bp, Homo sapien
ggtacctcctttccagatcctgtac

SEQ ID NO: 5909770 - DNA, 25 bp, Homo sapien
gagagaaaggcccagtgagggatga

SEQ ID NO: 5909771 - DNA, 25 bp, Homo sapien
cacaagctctttacctccatggcta

SEQ ID NO: 5909772 - DNA, 25 bp, Homo sapien
gtgtagttagaagtagaaaaaggag

SEQ ID NO: 5909773 - DNA, 25 bp, Homo sapien
ccacgttgtcttccggtccggatgg

SEQ ID NO: 5909774 - DNA, 25 bp, Homo sapien
tttgggatatagttctatcctagct

SEQ ID NO: 5909775 - DNA, 25 bp, Homo sapien
aacattggcaggaacgtgatcaggg

SEQ ID NO: 5909776 - DNA, 25 bp, Homo sapien
atgccacatttacagagctttcggc

SEQ ID NO: 5909777 - DNA, 25 bp, Homo sapien
aagacattgttgttgccctgttagc

SEQ ID NO: 5909778 - DNA, 25 bp, Homo sapien
gtaagtgtctcaagaggcaggcaca

SEQ ID NO: 5909779 - DNA, 25 bp, Homo sapien
ggtggccaggcagctataggtgccc

SEQ ID NO: 5909780 - DNA, 25 bp, Homo sapien
tgtggggcttggggtgagaggagag

SEQ ID NO: 5909781 - DNA, 25 bp, Homo sapien
tactggccactccagacccccttct

SEQ ID NO: 5909782 - DNA, 25 bp, Homo sapien
ttgccctgttagcaggctgcccctg

SEQ ID NO: 5909783 - DNA, 25 bp, Homo sapien
gctgtacctcgttgtcaaccgtata

SEQ ID NO: 5909784 - DNA, 25 bp, Homo sapien
tgataggaaaatgtgaagtccccag

SEQ ID NO: 5909785 - DNA, 25 bp, Homo sapien
aatgctgttagcagcaactagcact

SEQ ID NO: 5909786 - DNA, 25 bp, Homo sapien
ctctttacctccatggctagaactc

SEQ ID NO: 5909787 - DNA, 25 bp, Homo sapien
ccggtccggatggctgtacctcgtt

SEQ ID NO: 5909788 - DNA, 25 bp, Homo sapien
cccagtgcccacctggatggcctcc

SEQ ID NO: 5909789 - DNA, 25 bp, Homo sapien
gcccagccccagtgcccacctggat

SEQ ID NO: 5909790 - DNA, 25 bp, Homo sapien
attggagtaatgagcggcctggatg

SEQ ID NO: 5909791 - DNA, 25 bp, Homo sapien
atcctgtactggccactccagaccc

SEQ ID NO: 5909792 - DNA, 25 bp, Homo sapien
gctgcgcaggcctcccgtctgctgc

SEQ ID NO: 5909793 - DNA, 25 bp, Homo sapien
agaaaaaggagagaacaagcaggct

SEQ ID NO: 5909794 - DNA, 25 bp, Homo sapien
catcagagagcatctaaaaacagga

SEQ ID NO: 5909795 - DNA, 25 bp, Homo sapien
caactagcactagagatgatgagtt

SEQ ID NO: 5909796 - DNA, 25 bp, Homo sapien
cagccccagtgcccacctggatggc

SEQ ID NO: 5909797 - DNA, 25 bp, Homo sapien
gcctggatgagcttagaaaaggtga

SEQ ID NO: 5909798 - DNA, 25 bp, Homo sapien
ggaggagggggagtaagtgtctcaa

SEQ ID NO: 5909799 - DNA, 25 bp, Homo sapien
aagcaggctttggcctagcagaagt

SEQ ID NO: 5909800 - DNA, 25 bp, Homo sapien
agcagaagtatgccagagaactgct

SEQ ID NO: 5909801 - DNA, 25 bp, Homo sapien
gtgttaagacggaacattggcagga

SEQ ID NO: 5909802 - DNA, 25 bp, Homo sapien
tatgccagagaactgctgcgcaggc

SEQ ID NO: 5909803 - DNA, 25 bp, Homo sapien
ttggggtgagaggagagaaaggccc

SEQ ID NO: 5909804 - DNA, 25 bp, Homo sapien
cagctataggtgccctcctccagct

SEQ ID NO: 5909805 - DNA, 25 bp, Homo sapien
atcctagctgctagttctgagcaga

SEQ ID NO: 5909806 - DNA, 25 bp, Homo sapien
gttaggaagccctggagctgctcta

SEQ ID NO: 5909807 - DNA, 25 bp, Homo sapien
agttctgagcagatctgcaaattgg

SEQ ID NO: 5909808 - DNA, 25 bp, Homo sapien
cagaagtatgccagagaactgctgc

SEQ ID NO: 5909809 - DNA, 25 bp, Homo sapien
aaacaggaaagcttttagcctgccc

SEQ ID NO: 5909810 - DNA, 25 bp, Homo sapien
gccatggcccgtggtacctcctttc

SEQ ID NO: 5909811 - DNA, 25 bp, Homo sapien
aaaaggtgataggaaaatgtgaagt

SEQ ID NO: 5909812 - DNA, 25 bp, Homo sapien
aaccagggcagggtgtagttagaag

SEQ ID NO: 5909813 - DNA, 25 bp, Homo sapien
tgctctagccaaccagggcagggtg

SEQ ID NO: 5909814 - DNA, 25 bp, Homo sapien
cagggggagttaggaagccctggag

SEQ ID NO: 5909815 - DNA, 25 bp, Homo sapien
aggagggggagtaagtgtctcaaga

SEQ ID NO: 5909816 - DNA, 25 bp, Homo sapien
acctccatggctagaactctcaaag

SEQ ID NO: 5909817 - DNA, 25 bp, Homo sapien
ccagggcagggtgtagttagaagta

SEQ ID NO: 5909818 - DNA, 25 bp, Homo sapien
gcctcaccaattccagacctcgtgg

SEQ ID NO: 5909819 - DNA, 25 bp, Homo sapien
aagccctggagctgctctagccaac

SEQ ID NO: 5909820 - DNA, 25 bp, Homo sapien
gtaggtcaggttaagacattgttgt

SEQ ID NO: 5909821 - DNA, 25 bp, Homo sapien
ataggaaaatgtgaagtccccaggc

SEQ ID NO: 5909822 - DNA, 25 bp, Homo sapien
attgcagcttctgggggcccagcac

SEQ ID NO: 5909823 - DNA, 25 bp, Homo sapien
cacggctgaggtaaatgataaccac

SEQ ID NO: 5909824 - DNA, 25 bp, Homo sapien
tggagtaatgagcggcctggatgag

SEQ ID NO: 5909825 - DNA, 25 bp, Homo sapien
cactgcctagctcattggtggccag

SEQ ID NO: 5909826 - DNA, 25 bp, Homo sapien
atagttctatcctagctgctagttc

SEQ ID NO: 5909827 - DNA, 25 bp, Homo sapien
ctggggtggccaatgccacatttac

SEQ ID NO: 5909828 - DNA, 25 bp, Homo sapien
ttacctccatggctagaactctcaa

SEQ ID NO: 5909829 - DNA, 25 bp, Homo sapien
gcttggggtgagaggagagaaaggc

SEQ ID NO: 5909830 - DNA, 25 bp, Homo sapien
ctctcaaagtaggtcaggttaagac

SEQ ID NO: 5909831 - DNA, 25 bp, Homo sapien
gctgctattgcagcttctgggggcc

SEQ ID NO: 5909832 - DNA, 25 bp, Homo sapien
cacatttacagagctttcggcactg

SEQ ID NO: 5909833 - DNA, 25 bp, Homo sapien
gttttgggatatagttctatcctag

SEQ ID NO: 5909834 - DNA, 25 bp, Homo sapien
ttgttgttgccctgttagcaggctg

SEQ ID NO: 5909835 - DNA, 25 bp, Homo sapien
gtagaaaaaggagagaacaagcagg

SEQ ID NO: 5909836 - DNA, 25 bp, Homo sapien
gatgatgagttttgggatatagttc

SEQ ID NO: 5909837 - DNA, 25 bp, Homo sapien
aagtcagggataagcaggctgccat

SEQ ID NO: 5909838 - DNA, 25 bp, Homo sapien
gctttggcctagcagaagtatgcca

SEQ ID NO: 5909839 - DNA, 25 bp, Homo sapien
cctccagcttgccaaagtcagggat

SEQ ID NO: 5909840 - DNA, 25 bp, Homo sapien
actagcactagagatgatgagtttt

SEQ ID NO: 5909841 - DNA, 25 bp, Homo sapien
cttgtgccccacagcatcctctccc

SEQ ID NO: 5909842 - DNA, 25 bp, Homo sapien
taagacggaacattggcaggaacgt

SEQ ID NO: 5909843 - DNA, 25 bp, Homo sapien
tcctttccagatcctgtactggcca

SEQ ID NO: 5909844 - DNA, 25 bp, Homo sapien
acctggatggcctccacaagctctt

SEQ ID NO: 5909845 - DNA, 25 bp, Homo sapien
ggatgagcttagaaaaggtgatagg

SEQ ID NO: 5909846 - DNA, 25 bp, Homo sapien
tccagcttgccaaagtcagggataa

SEQ ID NO: 5909847 - DNA, 25 bp, Homo sapien
agctctttacctccatggctagaac

SEQ ID NO: 5909848 - DNA, 25 bp, Homo sapien
tcgttgtcaaccgtatagcagccct

SEQ ID NO: 5909849 - DNA, 25 bp, Homo sapien
tggtgttaagacggaacattggcag

SEQ ID NO: 5909850 - DNA, 25 bp, Homo sapien
ccagcacggctgaggtaaatgataa

SEQ ID NO: 5909851 - DNA, 25 bp, Homo sapien
tcggcactgcctagctcattggtgg

SEQ ID NO: 5909852 - DNA, 25 bp, Homo sapien
catggcccgtggtacctcctttcca

SEQ ID NO: 5909853 - DNA, 25 bp, Homo sapien
tggctgtacctcgttgtcaaccgta

SEQ ID NO: 5909854 - DNA, 25 bp, Homo sapien
caccaattccagacctcgtggtgtt

SEQ ID NO: 5909855 - DNA, 25 bp, Homo sapien
ctcctccagcttgccaaagtcaggg

SEQ ID NO: 5909856 - DNA, 25 bp, Homo sapien
ctagttctgagcagatctgcaaatt

SEQ ID NO: 5909857 - DNA, 25 bp, Homo sapien
gcttctgggggcccagcacggctga

SEQ ID NO: 5909858 - DNA, 25 bp, Homo sapien
gggataagcaggctgccattggcaa

SEQ ID NO: 5909859 - DNA, 25 bp, Homo sapien
ccgtggtacctcctttccagatcct

SEQ ID NO: 5909860 - DNA, 25 bp, Homo sapien
ttttagcctgcccagccatggcccg

SEQ ID NO: 5909861 - DNA, 25 bp, Homo sapien
agcctgcccagccatggcccgtggt

SEQ ID NO: 5909862 - DNA, 25 bp, Homo sapien
agcatctaaaaacaggaaagctttt

SEQ ID NO: 5909863 - DNA, 25 bp, Homo sapien
cagaggaggagggggagtaagtgtc

SEQ ID NO: 5909864 - DNA, 25 bp, Homo sapien
gccaatgccacatttacagagcttt

SEQ ID NO: 5909865 - DNA, 25 bp, Homo sapien
gagaaaggcccagtgagggatgatt

SEQ ID NO: 5909866 - DNA, 25 bp, Homo sapien
ggttaagacattgttgttgccctgt

SEQ ID NO: 5909867 - DNA, 25 bp, Homo sapien
tgtcaaccgtatagcagcccttgcc

SEQ ID NO: 5909868 - DNA, 25 bp, Homo sapien
ttagcctgcccagccatggcccgtg

SEQ ID NO: 5909869 - DNA, 25 bp, Homo sapien
cccttctagcccagccccagtgccc

SEQ ID NO: 5909870 - DNA, 25 bp, Homo sapien
tcaaccgtatagcagcccttgccct

SEQ ID NO: 5909871 - DNA, 25 bp, Homo sapien
gagttttgggatatagttctatcct

SEQ ID NO: 5909872 - DNA, 25 bp, Homo sapien
tccccaggctaacctcaggcctcac

SEQ ID NO: 5909873 - DNA, 25 bp, Homo sapien
gtaaatgataaccacgttgtcttcc

SEQ ID NO: 5909874 - DNA, 25 bp, Homo sapien
ccagagaactgctgcgcaggcctcc

SEQ ID NO: 5909875 - DNA, 25 bp, Homo sapien
caagctctttacctccatggctaga

SEQ ID NO: 5909876 - DNA, 25 bp, Homo sapien
aagcttttagcctgcccagccatgg

SEQ ID NO: 5909877 - DNA, 25 bp, Homo sapien
acggaacattggcaggaacgtgatc

SEQ ID NO: 5909878 - DNA, 25 bp, Homo sapien
agaaaaggtgataggaaaatgtgaa

SEQ ID NO: 5909879 - DNA, 25 bp, Homo sapien
ggcctcccgtctgctgctattgcag

SEQ ID NO: 5909880 - DNA, 25 bp, Homo sapien
catttacagagctttcggcactgcc

SEQ ID NO: 5909881 - DNA, 25 bp, Homo sapien
agaagtagaaaaaggagagaacaag

SEQ ID NO: 5909882 - DNA, 25 bp, Homo sapien
gccacatttacagagctttcggcac

SEQ ID NO: 5909883 - DNA, 25 bp, Homo sapien
gttaagacggaacattggcaggaac

SEQ ID NO: 5909884 - DNA, 25 bp, Homo sapien
tccggatggctgtacctcgttgtca

SEQ ID NO: 5909885 - DNA, 25 bp, Homo sapien
cccctcacctggggtggccaatgcc

SEQ ID NO: 5909886 - DNA, 25 bp, Homo sapien
gcaggctttggcctagcagaagtat

SEQ ID NO: 5909887 - DNA, 25 bp, Homo sapien
ctgcaaattggagtaatgagcggcc

SEQ ID NO: 5909888 - DNA, 25 bp, Homo sapien
catctaaaaacaggaaagcttttag

SEQ ID NO: 5909889 - DNA, 25 bp, Homo sapien
gagctttcggcactgcctagctcat

SEQ ID NO: 5909890 - DNA, 25 bp, Homo sapien
caggttaagacattgttgttgccct

SEQ ID NO: 5909891 - DNA, 25 bp, Homo sapien
ctattgcagcttctgggggcccagc

SEQ ID NO: 5909892 - DNA, 25 bp, Homo sapien
agatctgcaaattggagtaatgagc

SEQ ID NO: 5909893 - DNA, 25 bp, Homo sapien
ttccatatctcatcagagagcatct

SEQ ID NO: 5909894 - DNA, 25 bp, Homo sapien
caaagtcagggataagcaggctgcc

SEQ ID NO: 5909895 - DNA, 25 bp, Homo sapien
gagcttagaaaaggtgataggaaaa

SEQ ID NO: 5909896 - DNA, 25 bp, Homo sapien
caggctaacctcaggcctcaccaat

SEQ ID NO: 5909897 - DNA, 25 bp, Homo sapien
ctggatgagcttagaaaaggtgata

SEQ ID NO: 5909898 - DNA, 25 bp, Homo sapien
tcagagagcatctaaaaacaggaaa

SEQ ID NO: 5909899 - DNA, 25 bp, Homo sapien
ctgttagcagcaactagcactagag

SEQ ID NO: 5909900 - DNA, 25 bp, Homo sapien
ctaggagcacaggcaatgctgttag

SEQ ID NO: 5909901 - DNA, 25 bp, Homo sapien
aggctgcccctgctaggagcacagg

SEQ ID NO: 5909902 - DNA, 25 bp, Homo sapien
tggcctagcagaagtatgccagaga

SEQ ID NO: 5909903 - DNA, 25 bp, Homo sapien
ggcctccacaagctctttacctcca

SEQ ID NO: 5909904 - DNA, 25 bp, Homo sapien
ggctagaactctcaaagtaggtcag

SEQ ID NO: 5909905 - DNA, 25 bp, Homo sapien
tttgccatggaacttgtgccccaca

SEQ ID NO: 5909906 - DNA, 25 bp, Homo sapien
acaagcaggctttggcctagcagaa

SEQ ID NO: 5909907 - DNA, 25 bp, Homo sapien
tgatcagggggagttaggaagccct

SEQ ID NO: 5909908 - DNA, 25 bp, Homo sapien
gatgatttccatatctcatcagaga

SEQ ID NO: 5909909 - DNA, 25 bp, Homo sapien
tcttccggtccggatggctgtacct

SEQ ID NO: 5909910 - DNA, 25 bp, Homo sapien
gagtaagtgtctcaagaggcaggca

SEQ ID NO: 5909911 - DNA, 25 bp, Homo sapien
gccctgttagcaggctgcccctgct

SEQ ID NO: 5909912 - DNA, 25 bp, Homo sapien
caatgccacatttacagagctttcg

SEQ ID NO: 5909913 - DNA, 25 bp, Homo sapien
gggagtaagtgtctcaagaggcagg

SEQ ID NO: 5909914 - DNA, 25 bp, Homo sapien
gctttcggcactgcctagctcattg

SEQ ID NO: 5909915 - DNA, 25 bp, Homo sapien
gtgagggatgatttccatatctcat

SEQ ID NO: 5909916 - DNA, 25 bp, Homo sapien
gtgcccacctggatggcctccacaa

SEQ ID NO: 5909917 - DNA, 25 bp, Homo sapien
ctcgtggtgttaagacggaacattg

SEQ ID NO: 5909918 - DNA, 25 bp, Homo sapien
agaggagagaaaggcccagtgaggg

SEQ ID NO: 5909919 - DNA, 25 bp, Homo sapien
tataggtgccctcctccagcttgcc

SEQ ID NO: 5909920 - DNA, 25 bp, Homo sapien
cagggtgtagttagaagtagaaaaa

SEQ ID NO: 5909921 - DNA, 25 bp, Homo sapien
gccaaagtcagggataagcaggctg

SEQ ID NO: 5909922 - DNA, 25 bp, Homo sapien
acgttgtcttccggtccggatggct

SEQ ID NO: 5909923 - DNA, 25 bp, Homo sapien
tcacctggggtggccaatgccacat

SEQ ID NO: 5909924 - DNA, 25 bp, Homo sapien
gggggagtaagtgtctcaagaggca

SEQ ID NO: 5909925 - DNA, 25 bp, Homo sapien
gagaacaagcaggctttggcctagc

SEQ ID NO: 5909926 - DNA, 25 bp, Homo sapien
ctcatcagagagcatctaaaaacag

SEQ ID NO: 5909927 - DNA, 25 bp, Homo sapien
aggagagaaaggcccagtgagggat

SEQ ID NO: 5909928 - DNA, 25 bp, Homo sapien
ttctgagcagatctgcaaattggag

SEQ ID NO: 5909929 - DNA, 25 bp, Homo sapien
ctcaccaattccagacctcgtggtg

SEQ ID NO: 5909930 - DNA, 25 bp, Homo sapien
cagcttctgggggcccagcacggct

SEQ ID NO: 5909931 - DNA, 25 bp, Homo sapien
aactctcaaagtaggtcaggttaag

SEQ ID NO: 5909932 - DNA, 25 bp, Homo sapien
ggggtgagaggagagaaaggcccag

SEQ ID NO: 5909933 - DNA, 25 bp, Homo sapien
ggctgccattggcaaaggcctggaa

SEQ ID NO: 5909934 - DNA, 25 bp, Homo sapien
gaagtccccaggctaacctcaggcc

SEQ ID NO: 5909935 - DNA, 25 bp, Homo sapien
atcagggggagttaggaagccctgg

SEQ ID NO: 5909936 - DNA, 25 bp, Homo sapien
gaaaggcccagtgagggatgatttc

SEQ ID NO: 5909937 - DNA, 25 bp, Homo sapien
tgagaggagagaaaggcccagtgag

SEQ ID NO: 5909938 - DNA, 25 bp, Homo sapien
gaacaagcaggctttggcctagcag

SEQ ID NO: 5909939 - DNA, 25 bp, Homo sapien
tccacaagctctttacctccatggc

SEQ ID NO: 5909940 - DNA, 25 bp, Homo sapien
agaactgctgcgcaggcctcccgtc

SEQ ID NO: 5909941 - DNA, 25 bp, Homo sapien
agcacggctgaggtaaatgataacc

SEQ ID NO: 5909942 - DNA, 25 bp, Homo sapien
caaagtaggtcaggttaagacattg

SEQ ID NO: 5909943 - DNA, 25 bp, Homo sapien
aattccagacctcgtggtgttaaga

SEQ ID NO: 5909944 - DNA, 25 bp, Homo sapien
atgtgaagtccccaggctaacctca

SEQ ID NO: 5909945 - DNA, 25 bp, Homo sapien
cgtgatcagggggagttaggaagcc

SEQ ID NO: 5909946 - DNA, 25 bp, Homo sapien
acaggaaagcttttagcctgcccag

SEQ ID NO: 5909947 - DNA, 25 bp, Homo sapien
gctgctctagccaaccagggcaggg

SEQ ID NO: 5909948 - DNA, 25 bp, Homo sapien
tgcagcttctgggggcccagcacgg

SEQ ID NO: 5909949 - DNA, 25 bp, Homo sapien
cctcgttgtcaaccgtatagcagcc

SEQ ID NO: 5909950 - DNA, 25 bp, Homo sapien
agagcatctaaaaacaggaaagctt

SEQ ID NO: 5909951 - DNA, 25 bp, Homo sapien
tggggcttggggtgagaggagagaa

SEQ ID NO: 5909952 - DNA, 25 bp, Homo sapien
ctgctgctattgcagcttctggggg

SEQ ID NO: 5909953 - DNA, 25 bp, Homo sapien
aggaaagcttttagcctgcccagcc

SEQ ID NO: 5909954 - DNA, 25 bp, Homo sapien
aggagagaacaagcaggctttggcc

SEQ ID NO: 5909955 - DNA, 25 bp, Homo sapien
tggccaatgccacatttacagagct

SEQ ID NO: 5909956 - DNA, 25 bp, Homo sapien
agccaaccagggcagggtgtagtta

SEQ ID NO: 5909957 - DNA, 25 bp, Homo sapien
tggccactccagacccccttctagc

SEQ ID NO: 5909958 - DNA, 25 bp, Homo sapien
gataagcaggctgccattggcaaag

SEQ ID NO: 5909959 - DNA, 25 bp, Homo sapien
ctcaaagtaggtcaggttaagacat

SEQ ID NO: 5909960 - DNA, 25 bp, Homo sapien
ccctcctccagcttgccaaagtcag

SEQ ID NO: 5909961 - DNA, 25 bp, Homo sapien
cctcctttccagatcctgtactggc

SEQ ID NO: 5909962 - DNA, 25 bp, Homo sapien
gccctggagctgctctagccaacca

SEQ ID NO: 5909963 - DNA, 25 bp, Homo sapien
aagtagaaaaaggagagaacaagca

SEQ ID NO: 5909964 - DNA, 25 bp, Homo sapien
agtatgccagagaactgctgcgcag

SEQ ID NO: 5909965 - DNA, 25 bp, Homo sapien
ctgctttgccatggaacttgtgccc

SEQ ID NO: 5909966 - DNA, 25 bp, Homo sapien
ccgtctgctgctattgcagcttctg

SEQ ID NO: 5909967 - DNA, 25 bp, Homo sapien
ccagatcctgtactggccactccag

SEQ ID NO: 5909968 - DNA, 25 bp, Homo sapien
caggcagctataggtgccctcctcc

SEQ ID NO: 5909969 - DNA, 25 bp, Homo sapien
ggtgccctcctccagcttgccaaag

SEQ ID NO: 5909970 - DNA, 25 bp, Homo sapien
taggtgccctcctccagcttgccaa

SEQ ID NO: 5909971 - DNA, 25 bp, Homo sapien
ctcattggtggccaggcagctatag

SEQ ID NO: 5909972 - DNA, 25 bp, Homo sapien
cctgtactggccactccagaccccc

SEQ ID NO: 5909973 - DNA, 25 bp, Homo sapien
cgtggtgttaagacggaacattggc

SEQ ID NO: 5909974 - DNA, 25 bp, Homo sapien
tggccaggcagctataggtgccctc

SEQ ID NO: 5909975 - DNA, 25 bp, Homo sapien
aaaaaggagagaacaagcaggcttt

SEQ ID NO: 5909976 - DNA, 25 bp, Homo sapien
ggtggccaatgccacatttacagag

SEQ ID NO: 5909977 - DNA, 25 bp, Homo sapien
ctccatggctagaactctcaaagta

SEQ ID NO: 5909978 - DNA, 25 bp, Homo sapien
tggcccgtggtacctcctttccaga

SEQ ID NO: 5909979 - DNA, 25 bp, Homo sapien
gcctagctcattggtggccaggcag

SEQ ID NO: 5909980 - DNA, 25 bp, Homo sapien
ttccagatcctgtactggccactcc

SEQ ID NO: 5909981 - DNA, 25 bp, Homo sapien
ggctaacctcaggcctcaccaattc

SEQ ID NO: 5909982 - DNA, 25 bp, Homo sapien
ggcagggtgtagttagaagtagaaa

SEQ ID NO: 5909983 - DNA, 25 bp, Homo sapien
gcccttgccctccactgctttgcca

SEQ ID NO: 5909984 - DNA, 25 bp, Homo sapien
acaggcaatgctgttagcagcaact

SEQ ID NO: 5909985 - DNA, 25 bp, Homo sapien
ggtgataggaaaatgtgaagtcccc

SEQ ID NO: 5909986 - DNA, 25 bp, Homo sapien
gtcagggataagcaggctgccattg

SEQ ID NO: 5909987 - DNA, 25 bp, Homo sapien
agatcctgtactggccactccagac

SEQ ID NO: 5909988 - DNA, 25 bp, Homo sapien
ttggcaggaacgtgatcagggggag

SEQ ID NO: 5909989 - DNA, 25 bp, Homo sapien
agcaggctgccattggcaaaggcct

SEQ ID NO: 5909990 - DNA, 25 bp, Homo sapien
aggtaaatgataaccacgttgtctt

SEQ ID NO: 5909991 - DNA, 25 bp, Homo sapien
gtaatgagcggcctggatgagctta

SEQ ID NO: 5909992 - DNA, 25 bp, Homo sapien
caagaggcaggcacatgctgtgggg

SEQ ID NO: 5909993 - DNA, 25 bp, Homo sapien
tctagcccagccccagtgcccacct

SEQ ID NO: 5909994 - DNA, 25 bp, Homo sapien
ctttacctccatggctagaactctc

SEQ ID NO: 5909995 - DNA, 25 bp, Homo sapien
acatgctgtggggcttggggtgaga

SEQ ID NO: 5909996 - DNA, 25 bp, Homo sapien
tgctagttctgagcagatctgcaaa

SEQ ID NO: 5909997 - DNA, 25 bp, Homo sapien
atagcagcccttgccctccactgct

SEQ ID NO: 5909998 - DNA, 25 bp, Homo sapien
cattgttgttgccctgttagcaggc

SEQ ID NO: 5909999 - DNA, 25 bp, Homo sapien
gctgaggtaaatgataaccacgttg

SEQ ID NO: 5910000 - DNA, 25 bp, Homo sapien
cccagtgagggatgatttccatatc

SEQ ID NO: 5910001 - DNA, 25 bp, Homo sapien
ttgccaaagtcagggataagcaggc

SEQ ID NO: 5910002 - DNA, 25 bp, Homo sapien
aacgtgatcagggggagttaggaag

SEQ ID NO: 5910003 - DNA, 25 bp, Homo sapien
ctgagcagatctgcaaattggagta

SEQ ID NO: 5910004 - DNA, 25 bp, Homo sapien
ctagctcattggtggccaggcagct

SEQ ID NO: 5910005 - DNA, 25 bp, Homo sapien
gtctgctgctattgcagcttctggg

SEQ ID NO: 5910006 - DNA, 25 bp, Homo sapien
gagagaacaagcaggctttggccta

SEQ ID NO: 5910007 - DNA, 25 bp, Homo sapien
cagagctttcggcactgcctagctc

SEQ ID NO: 5910008 - DNA, 25 bp, Homo sapien
gcacaggcaatgctgttagcagcaa

SEQ ID NO: 5910009 - DNA, 25 bp, Homo sapien
tgcgcaggcctcccgtctgctgcta

SEQ ID NO: 5910010 - DNA, 25 bp, Homo sapien
gataaccacgttgtcttccggtccg

SEQ ID NO: 5910011 - DNA, 25 bp, Homo sapien
gagctgctctagccaaccagggcag

SEQ ID NO: 5910012 - DNA, 25 bp, Homo sapien
ctgcctagctcattggtggccaggc

SEQ ID NO: 5910013 - DNA, 25 bp, Homo sapien
gtcaggttaagacattgttgttgcc

SEQ ID NO: 5910014 - DNA, 25 bp, Homo sapien
cctccactgctttgccatggaactt

SEQ ID NO: 5910015 - DNA, 25 bp, Homo sapien
tgccatggaacttgtgccccacagc

SEQ ID NO: 5910016 - DNA, 25 bp, Homo sapien
aagtaggtcaggttaagacattgtt

SEQ ID NO: 5910017 - DNA, 25 bp, Homo sapien
tagcactagagatgatgagttttgg

SEQ ID NO: 5910018 - DNA, 25 bp, Homo sapien
ttagaaaaggtgataggaaaatgtg

SEQ ID NO: 5910019 - DNA, 25 bp, Homo sapien
gtgaagtccccaggctaacctcagg

SEQ ID NO: 5910020 - DNA, 25 bp, Homo sapien
ggcccagtgagggatgatttccata

SEQ ID NO: 5910021 - DNA, 25 bp, Homo sapien
ggcaggaacgtgatcagggggagtt

SEQ ID NO: 5910022 - DNA, 25 bp, Homo sapien
ctagaactctcaaagtaggtcaggt

SEQ ID NO: 5910023 - DNA, 25 bp, Homo sapien
agaactctcaaagtaggtcaggtta

SEQ ID NO: 5910024 - DNA, 25 bp, Homo sapien
gagtaatgagcggcctggatgagct

SEQ ID NO: 5910025 - DNA, 25 bp, Homo sapien
gggatgatttccatatctcatcaga

SEQ ID NO: 5910026 - DNA, 25 bp, Homo sapien
gcaaattggagtaatgagcggcctg

SEQ ID NO: 5910027 - DNA, 25 bp, Homo sapien
ccgtatagcagcccttgccctccac

SEQ ID NO: 5910028 - DNA, 25 bp, Homo sapien
atttccatatctcatcagagagcat

SEQ ID NO: 5910029 - DNA, 25 bp, Homo sapien
ggatatagttctatcctagctgcta

SEQ ID NO: 5910030 - DNA, 25 bp, Homo sapien
gagcacaggcaatgctgttagcagc

SEQ ID NO: 5910031 - DNA, 25 bp, Homo sapien
atgataaccacgttgtcttccggtc

SEQ ID NO: 5910032 - DNA, 25 bp, Homo sapien
gcaggcacatgctgtggggcttggg

SEQ ID NO: 5910033 - DNA, 25 bp, Homo sapien
aagtgtctcaagaggcaggcacatg

SEQ ID NO: 5910034 - DNA, 25 bp, Homo sapien
agttctatcctagctgctagttctg

SEQ ID NO: 5910035 - DNA, 25 bp, Homo sapien
cccctgctaggagcacaggcaatgc

SEQ ID NO: 5910036 - DNA, 25 bp, Homo sapien
ctggatggcctccacaagctcttta

SEQ ID NO: 5910037 - DNA, 25 bp, Homo sapien
gctgctagttctgagcagatctgca

SEQ ID NO: 5910038 - DNA, 25 bp, Homo sapien
gctataggtgccctcctccagcttg

SEQ ID NO: 5910039 - DNA, 25 bp, Homo sapien
ggtccggatggctgtacctcgttgt

SEQ ID NO: 5910040 - DNA, 25 bp, Homo sapien
tgtacctcgttgtcaaccgtatagc

SEQ ID NO: 5910041 - DNA, 25 bp, Homo sapien
ccaaccagggcagggtgtagttaga

SEQ ID NO: 5910042 - DNA, 25 bp, Homo sapien
caggaacgtgatcagggggagttag

SEQ ID NO: 5910043 - DNA, 25 bp, Homo sapien
cccaggctaacctcaggcctcacca

SEQ ID NO: 5910044 - DNA, 25 bp, Homo sapien
ccacctggatggcctccacaagctc

SEQ ID NO: 5910045 - DNA, 25 bp, Homo sapien
aaatgataaccacgttgtcttccgg

SEQ ID NO: 5910046 - DNA, 25 bp, Homo sapien
gcttagaaaaggtgataggaaaatg

SEQ ID NO: 5910047 - DNA, 25 bp, Homo sapien
ctttccagatcctgtactggccact

SEQ ID NO: 5910048 - DNA, 25 bp, Homo sapien
cattggcaggaacgtgatcaggggg

SEQ ID NO: 5910049 - DNA, 25 bp, Homo sapien
aacctcaggcctcaccaattccaga

SEQ ID NO: 5910050 - DNA, 25 bp, Homo sapien
aacttgtgccccacagcatcctctc

SEQ ID NO: 5910051 - DNA, 25 bp, Homo sapien
gcccagcacggctgaggtaaatgat

SEQ ID NO: 5910052 - DNA, 25 bp, Homo sapien
gtggtacctcctttccagatcctgt

SEQ ID NO: 5910053 - DNA, 25 bp, Homo sapien
aggcaggcacatgctgtggggcttg

SEQ ID NO: 5910054 - DNA, 25 bp, Homo sapien
agacggaacattggcaggaacgtga

SEQ ID NO: 5910055 - DNA, 25 bp, Homo sapien
ggtgagaggagagaaaggcccagtg

SEQ ID NO: 5910056 - DNA, 25 bp, Homo sapien
aggaaaatgtgaagtccccaggcta

SEQ ID NO: 5910057 - DNA, 25 bp, Homo sapien
gggggcccagcacggctgaggtaaa

SEQ ID NO: 5910058 - DNA, 25 bp, Homo sapien
ggaacttgtgccccacagcatcctc

SEQ ID NO: 5910059 - DNA, 25 bp, Homo sapien
agagaactgctgcgcaggcctcccg

SEQ ID NO: 5910060 - DNA, 25 bp, Homo sapien
cctggagctgctctagccaaccagg

SEQ ID NO: 5910061 - DNA, 25 bp, Homo sapien
ccatggaacttgtgccccacagcat

SEQ ID NO: 5910062 - DNA, 25 bp, Homo sapien
ttctatcctagctgctagttctgag

SEQ ID NO: 5910063 - DNA, 25 bp, Homo sapien
agctcattggtggccaggcagctat

SEQ ID NO: 5910064 - DNA, 25 bp, Homo sapien
gaagtatgccagagaactgctgcgc

SEQ ID NO: 5910065 - DNA, 25 bp, Homo sapien
ccatggctagaactctcaaagtagg

SEQ ID NO: 5910066 - DNA, 25 bp, Homo sapien
atggctagaactctcaaagtaggtc

SEQ ID NO: 5910067 - DNA, 25 bp, Homo sapien
gcctagcagaagtatgccagagaac

SEQ ID NO: 5910068 - DNA, 25 bp, Homo sapien
tgctattgcagcttctgggggccca

SEQ ID NO: 5910069 - DNA, 25 bp, Homo sapien
taaccacgttgtcttccggtccgga

SEQ ID NO: 5910070 - DNA, 25 bp, Homo sapien
tagagatgatgagttttgggatata

SEQ ID NO: 5910071 - DNA, 25 bp, Homo sapien
ctctagccaaccagggcagggtgta

SEQ ID NO: 5910072 - DNA, 25 bp, Homo sapien
cctcacctggggtggccaatgccac

SEQ ID NO: 5910073 - DNA, 25 bp, Homo sapien
tgtactggccactccagaccccctt

SEQ ID NO: 5910074 - DNA, 25 bp, Homo sapien
aaaaacaggaaagcttttagcctgc

SEQ ID NO: 5910075 - DNA, 25 bp, Homo sapien
cagcccttgccctccactgctttgc

SEQ ID NO: 5910076 - DNA, 25 bp, Homo sapien
aaggcccagtgagggatgatttcca

SEQ ID NO: 5910077 - DNA, 25 bp, Homo sapien
gcccacctggatggcctccacaagc

SEQ ID NO: 5910078 - DNA, 25 bp, Homo sapien
gctgcccctgctaggagcacaggca

SEQ ID NO: 5910079 - DNA, 25 bp, Homo sapien
gagcagatctgcaaattggagtaat

SEQ ID NO: 5910080 - DNA, 25 bp, Homo sapien
cgcaggcctcccgtctgctgctatt

SEQ ID NO: 5910081 - DNA, 25 bp, Homo sapien
ggaacgtgatcagggggagttagga

SEQ ID NO: 5910082 - DNA, 25 bp, Homo sapien
cattggtggccaggcagctataggt

SEQ ID NO: 5910083 - DNA, 25 bp, Homo sapien
tagctgctagttctgagcagatctg

SEQ ID NO: 5910084 - DNA, 25 bp, Homo sapien
gcttttagcctgcccagccatggcc

SEQ ID NO: 5910085 - DNA, 25 bp, Homo sapien
gctttgccatggaacttgtgcccca

SEQ ID NO: 5910086 - DNA, 25 bp, Homo sapien
gcactagagatgatgagttttggga

SEQ ID NO: 5910087 - DNA, 25 bp, Homo sapien
ggggtggccaatgccacatttacag

SEQ ID NO: 5910088 - DNA, 25 bp, Homo sapien
gcagatctgcaaattggagtaatga

SEQ ID NO: 5910089 - DNA, 25 bp, Homo sapien
aactgctgcgcaggcctcccgtctg

SEQ ID NO: 5910090 - DNA, 25 bp, Homo sapien
tagcccagccccagtgcccacctgg

SEQ ID NO: 5910091 - DNA, 25 bp, Homo sapien
ctatcctagctgctagttctgagca

SEQ ID NO: 5910092 - DNA, 25 bp, Homo sapien
gctgtggggcttggggtgagaggag

SEQ ID NO: 5910093 - DNA, 25 bp, Homo sapien
gggcccagcacggctgaggtaaatg

SEQ ID NO: 5910094 - DNA, 25 bp, Homo sapien
tttggcctagcagaagtatgccaga

SEQ ID NO: 5910095 - DNA, 25 bp, Homo sapien
gtagttagaagtagaaaaaggagag

SEQ ID NO: 5910096 - DNA, 25 bp, Homo sapien
aactgagccagatgtgatgagccac

SEQ ID NO: 5910097 - DNA, 25 bp, Homo sapien
taaagtgtaaacatggctgttttgt

SEQ ID NO: 5910098 - DNA, 25 bp, Homo sapien
cttagaggctggctcctcaagtttt

SEQ ID NO: 5910099 - DNA, 25 bp, Homo sapien
atggtgcccccaccacagaatggca

SEQ ID NO: 5910100 - DNA, 25 bp, Homo sapien
ccacagaatggcaccttagaggctg

SEQ ID NO: 5910101 - DNA, 25 bp, Homo sapien
tttggattaatatttggtatttctt

SEQ ID NO: 5910102 - DNA, 25 bp, Homo sapien
tggaattaggtgaactacccccacg

SEQ ID NO: 5910103 - DNA, 25 bp, Homo sapien
tcagtgaacttaaagaaaagtcctc

SEQ ID NO: 5910104 - DNA, 25 bp, Homo sapien
tcctcattatggtgcccccaccaca

SEQ ID NO: 5910105 - DNA, 25 bp, Homo sapien
aacgaatcagtgaacttaaagaaaa

SEQ ID NO: 5910106 - DNA, 25 bp, Homo sapien
gccctgaagcagggccagctacttg

SEQ ID NO: 5910107 - DNA, 25 bp, Homo sapien
ctacccccacgtggcagaccaccag

SEQ ID NO: 5910108 - DNA, 25 bp, Homo sapien
gaccatgacgtgtgtctgtgtgttt

SEQ ID NO: 5910109 - DNA, 25 bp, Homo sapien
agctgagaaatacatctggttcatg

SEQ ID NO: 5910110 - DNA, 25 bp, Homo sapien
tgtgtctgtgtgtttaagttatcat

SEQ ID NO: 5910111 - DNA, 25 bp, Homo sapien
aagcaacccccattcagctcaaaaa

SEQ ID NO: 5910112 - DNA, 25 bp, Homo sapien
ctcattatggtgcccccaccacaga

SEQ ID NO: 5910113 - DNA, 25 bp, Homo sapien
ttttctcctctggttgttttgtttg

SEQ ID NO: 5910114 - DNA, 25 bp, Homo sapien
ttatggtgcccccaccacagaatgg

SEQ ID NO: 5910115 - DNA, 25 bp, Homo sapien
ggttctctttgaagaaactggagaa

SEQ ID NO: 5910116 - DNA, 25 bp, Homo sapien
gttttgttacgccactctgtaccag

SEQ ID NO: 5910117 - DNA, 25 bp, Homo sapien
ctgtttgaattctgtctgttgtttg

SEQ ID NO: 5910118 - DNA, 25 bp, Homo sapien
tgtgtgtttaagttatcatgaatat

SEQ ID NO: 5910119 - DNA, 25 bp, Homo sapien
gccccagccctgaagcagggccagc

SEQ ID NO: 5910120 - DNA, 25 bp, Homo sapien
ggctgttttgttacgccactctgta

SEQ ID NO: 5910121 - DNA, 25 bp, Homo sapien
ttttttgtgctgtgaacgttttctg

SEQ ID NO: 5910122 - DNA, 25 bp, Homo sapien
gcaccaggttctctttgaagaaact

SEQ ID NO: 5910123 - DNA, 25 bp, Homo sapien
tttggttataaactgagccagatgt

SEQ ID NO: 5910124 - DNA, 25 bp, Homo sapien
aacttaaagaaaagtcctcattatg

SEQ ID NO: 5910125 - DNA, 25 bp, Homo sapien
tctctgcatttcctttttaaacatt

SEQ ID NO: 5910126 - DNA, 25 bp, Homo sapien
gtcttaaagcaacccccattcagct

SEQ ID NO: 5910127 - DNA, 25 bp, Homo sapien
gctgtgaacgttttctgccaaagac

SEQ ID NO: 5910128 - DNA, 25 bp, Homo sapien
tttcccctatgtaaagctgagaaat

SEQ ID NO: 5910129 - DNA, 25 bp, Homo sapien
aactacccccacgtggcagaccacc

SEQ ID NO: 5910130 - DNA, 25 bp, Homo sapien
caaagaccatgacgtgtgtctgtgt

SEQ ID NO: 5910131 - DNA, 25 bp, Homo sapien
tctgtctgttgtttgttccattccc

SEQ ID NO: 5910132 - DNA, 25 bp, Homo sapien
tctgttgtttgttccattcccatag

SEQ ID NO: 5910133 - DNA, 25 bp, Homo sapien
aaagtcctcattatggtgcccccac

SEQ ID NO: 5910134 - DNA, 25 bp, Homo sapien
cccattcagctcaaaaagcgattgg

SEQ ID NO: 5910135 - DNA, 25 bp, Homo sapien
ttaaaacgaatcagtgaacttaaag

SEQ ID NO: 5910136 - DNA, 25 bp, Homo sapien
atcctgtcagtttggttataaactg

SEQ ID NO: 5910137 - DNA, 25 bp, Homo sapien
accagcagggactgggagagggagc

SEQ ID NO: 5910138 - DNA, 25 bp, Homo sapien
aagaccatgacgtgtgtctgtgtgt

SEQ ID NO: 5910139 - DNA, 25 bp, Homo sapien
gagaaatacatctggttcatgtacg

SEQ ID NO: 5910140 - DNA, 25 bp, Homo sapien
catgcccagcaccaggttctctttg

SEQ ID NO: 5910141 - DNA, 25 bp, Homo sapien
agaaactggagaaattgttctcata

SEQ ID NO: 5910142 - DNA, 25 bp, Homo sapien
ttgaattctgtctgttgtttgttcc

SEQ ID NO: 5910143 - DNA, 25 bp, Homo sapien
cagcagggactgggagagggagcta

SEQ ID NO: 5910144 - DNA, 25 bp, Homo sapien
tgtgaacgttttctgccaaagacca

SEQ ID NO: 5910145 - DNA, 25 bp, Homo sapien
aaacatttgcatttgctgggcaatt

SEQ ID NO: 5910146 - DNA, 25 bp, Homo sapien
ccctatgtaaagctgagaaatacat

SEQ ID NO: 5910147 - DNA, 25 bp, Homo sapien
tcatgtacgttgtttacaaagataa

SEQ ID NO: 5910148 - DNA, 25 bp, Homo sapien
tccctgtgtttcgtgcccatgggat

SEQ ID NO: 5910149 - DNA, 25 bp, Homo sapien
gccagatgtgatgagccaccacaag

SEQ ID NO: 5910150 - DNA, 25 bp, Homo sapien
ttttgtgctgtgaacgttttctgcc

SEQ ID NO: 5910151 - DNA, 25 bp, Homo sapien
tgttaaaacgaatcagtgaacttaa

SEQ ID NO: 5910152 - DNA, 25 bp, Homo sapien
ccatgacgtgtgtctgtgtgtttaa

SEQ ID NO: 5910153 - DNA, 25 bp, Homo sapien
cagcaccaggttctctttgaagaaa

SEQ ID NO: 5910154 - DNA, 25 bp, Homo sapien
ccaccagcagcagtgactttgactt

SEQ ID NO: 5910155 - DNA, 25 bp, Homo sapien
cctgtgtttcgtgcccatgggattc

SEQ ID NO: 5910156 - DNA, 25 bp, Homo sapien
gaatggctccacagctcctatccct

SEQ ID NO: 5910157 - DNA, 25 bp, Homo sapien
atgttgttaaaacgaatcagtgaac

SEQ ID NO: 5910158 - DNA, 25 bp, Homo sapien
ctttgaagaaactggagaaattgtt

SEQ ID NO: 5910159 - DNA, 25 bp, Homo sapien
gaaatacatctggttcatgtacgtt

SEQ ID NO: 5910160 - DNA, 25 bp, Homo sapien
ggcagaccaccagcagcagtgactt

SEQ ID NO: 5910161 - DNA, 25 bp, Homo sapien
tttgttacgccactctgtaccagga

SEQ ID NO: 5910162 - DNA, 25 bp, Homo sapien
tctctctgcatttcctttttaaaca

SEQ ID NO: 5910163 - DNA, 25 bp, Homo sapien
tgaatatttaaagtgtaaacatggc

SEQ ID NO: 5910164 - DNA, 25 bp, Homo sapien
gtggattttgatactggttggcttt

SEQ ID NO: 5910165 - DNA, 25 bp, Homo sapien
aaacaacttaatatattttggatta

SEQ ID NO: 5910166 - DNA, 25 bp, Homo sapien
tggctttcctctgctttttaaatcc

SEQ ID NO: 5910167 - DNA, 25 bp, Homo sapien
cattatggtgcccccaccacagaat

SEQ ID NO: 5910168 - DNA, 25 bp, Homo sapien
gtgtaaacatggctgttttgttacg

SEQ ID NO: 5910169 - DNA, 25 bp, Homo sapien
caccacagaatggcaccttagaggc

SEQ ID NO: 5910170 - DNA, 25 bp, Homo sapien
gttccattcccatagttctctctgc

SEQ ID NO: 5910171 - DNA, 25 bp, Homo sapien
ttgacttctggtcttaaagcaaccc

SEQ ID NO: 5910172 - DNA, 25 bp, Homo sapien
agggagctatgttgttaaaacgaat

SEQ ID NO: 5910173 - DNA, 25 bp, Homo sapien
tttaaagtattttttttgtgctgtg

SEQ ID NO: 5910174 - DNA, 25 bp, Homo sapien
tagaggctggctcctcaagttttgg

SEQ ID NO: 5910175 - DNA, 25 bp, Homo sapien
tgaactacccccacgtggcagacca

SEQ ID NO: 5910176 - DNA, 25 bp, Homo sapien
cagcctttgtgaatggctccacagc

SEQ ID NO: 5910177 - DNA, 25 bp, Homo sapien
gaaaagtcctcattatggtgccccc

SEQ ID NO: 5910178 - DNA, 25 bp, Homo sapien
gacttctggtcttaaagcaaccccc

SEQ ID NO: 5910179 - DNA, 25 bp, Homo sapien
aaatgtattcgttcccaccagcagg

SEQ ID NO: 5910180 - DNA, 25 bp, Homo sapien
ttgtttttctttcactgtttgaatt

SEQ ID NO: 5910181 - DNA, 25 bp, Homo sapien
tcttttgtgtttttctcctctggtt

SEQ ID NO: 5910182 - DNA, 25 bp, Homo sapien
gtttttctttcactgtttgaattct

SEQ ID NO: 5910183 - DNA, 25 bp, Homo sapien
ttcccatagttctctctgcatttcc

SEQ ID NO: 5910184 - DNA, 25 bp, Homo sapien
gtgactttgacttctggtcttaaag

SEQ ID NO: 5910185 - DNA, 25 bp, Homo sapien
cattcagctcaaaaagcgattggtg

SEQ ID NO: 5910186 - DNA, 25 bp, Homo sapien
cctttcccctatgtaaagctgagaa

SEQ ID NO: 5910187 - DNA, 25 bp, Homo sapien
actgggagagggagctatgttgtta

SEQ ID NO: 5910188 - DNA, 25 bp, Homo sapien
tttaaagtgtaaacatggctgtttt

SEQ ID NO: 5910189 - DNA, 25 bp, Homo sapien
acaagcggacatctgtcatgcccag

SEQ ID NO: 5910190 - DNA, 25 bp, Homo sapien
tggttcatgtacgttgtttacaaag

SEQ ID NO: 5910191 - DNA, 25 bp, Homo sapien
tttcctttttaaacatttgcatttg

SEQ ID NO: 5910192 - DNA, 25 bp, Homo sapien
cagtgactttgacttctggtcttaa

SEQ ID NO: 5910193 - DNA, 25 bp, Homo sapien
ctctttgaagaaactggagaaattg

SEQ ID NO: 5910194 - DNA, 25 bp, Homo sapien
gattaatatttggtatttcttttaa

SEQ ID NO: 5910195 - DNA, 25 bp, Homo sapien
ggactgggagagggagctatgttgt

SEQ ID NO: 5910196 - DNA, 25 bp, Homo sapien
gtgtttttctcctctggttgttttg

SEQ ID NO: 5910197 - DNA, 25 bp, Homo sapien
ctatgtaaagctgagaaatacatct

SEQ ID NO: 5910198 - DNA, 25 bp, Homo sapien
tgcccagcaccaggttctctttgaa

SEQ ID NO: 5910199 - DNA, 25 bp, Homo sapien
gttttggtgccccagccctgaagca

SEQ ID NO: 5910200 - DNA, 25 bp, Homo sapien
tctgcatttcctttttaaacatttg

SEQ ID NO: 5910201 - DNA, 25 bp, Homo sapien
gaggctggctcctcaagttttggtg

SEQ ID NO: 5910202 - DNA, 25 bp, Homo sapien
cagatcttttgtgtttttctcctct

SEQ ID NO: 5910203 - DNA, 25 bp, Homo sapien
ctgttttgttacgccactctgtacc

SEQ ID NO: 5910204 - DNA, 25 bp, Homo sapien
tgttgtttgttccattcccatagtt

SEQ ID NO: 5910205 - DNA, 25 bp, Homo sapien
tgggacatcctgtcagtttggttat

SEQ ID NO: 5910206 - DNA, 25 bp, Homo sapien
tatccctgggacatcctgtcagttt

SEQ ID NO: 5910207 - DNA, 25 bp, Homo sapien
ctgtggattttgatactggttggct

SEQ ID NO: 5910208 - DNA, 25 bp, Homo sapien
ttgtgaatggctccacagctcctat

SEQ ID NO: 5910209 - DNA, 25 bp, Homo sapien
tctcataaatgtattcgttcccacc

SEQ ID NO: 5910210 - DNA, 25 bp, Homo sapien
ttctgccaaagaccatgacgtgtgt

SEQ ID NO: 5910211 - DNA, 25 bp, Homo sapien
cttatcaccagcctttgtgaatggc

SEQ ID NO: 5910212 - DNA, 25 bp, Homo sapien
ctatgttgttaaaacgaatcagtga

SEQ ID NO: 5910213 - DNA, 25 bp, Homo sapien
atgtattcgttcccaccagcaggga

SEQ ID NO: 5910214 - DNA, 25 bp, Homo sapien
agggactgggagagggagctatgtt

SEQ ID NO: 5910215 - DNA, 25 bp, Homo sapien
gcagggactgggagagggagctatg

SEQ ID NO: 5910216 - DNA, 25 bp, Homo sapien
tctggtcttaaagcaacccccattc

SEQ ID NO: 5910217 - DNA, 25 bp, Homo sapien
tggtggatttcagatcttttgtgtt

SEQ ID NO: 5910218 - DNA, 25 bp, Homo sapien
gtttgaattctgtctgttgtttgtt

SEQ ID NO: 5910219 - DNA, 25 bp, Homo sapien
acatggctgttttgttacgccactc

SEQ ID NO: 5910220 - DNA, 25 bp, Homo sapien
tgttacgccactctgtaccaggatt

SEQ ID NO: 5910221 - DNA, 25 bp, Homo sapien
accttagaggctggctcctcaagtt

SEQ ID NO: 5910222 - DNA, 25 bp, Homo sapien
ggctccacagctcctatccctggga

SEQ ID NO: 5910223 - DNA, 25 bp, Homo sapien
gcagggccagctacttggaattagg

SEQ ID NO: 5910224 - DNA, 25 bp, Homo sapien
tggttggctttcctctgctttttaa

SEQ ID NO: 5910225 - DNA, 25 bp, Homo sapien
tttaaatccctgtgtttcgtgccca

SEQ ID NO: 5910226 - DNA, 25 bp, Homo sapien
cagcagcagtgactttgacttctgg

SEQ ID NO: 5910227 - DNA, 25 bp, Homo sapien
ctcctatccctgggacatcctgtca

SEQ ID NO: 5910228 - DNA, 25 bp, Homo sapien
ggctcctcaagttttggtgccccag

SEQ ID NO: 5910229 - DNA, 25 bp, Homo sapien
actggttggctttcctctgcttttt

SEQ ID NO: 5910230 - DNA, 25 bp, Homo sapien
tctggttcatgtacgttgtttacaa

SEQ ID NO: 5910231 - DNA, 25 bp, Homo sapien
tccctgggacatcctgtcagtttgg

SEQ ID NO: 5910232 - DNA, 25 bp, Homo sapien
taaagtattttttttgtgctgtgaa

SEQ ID NO: 5910233 - DNA, 25 bp, Homo sapien
gagccagatgtgatgagccaccaca

SEQ ID NO: 5910234 - DNA, 25 bp, Homo sapien
gtgaatggctccacagctcctatcc

SEQ ID NO: 5910235 - DNA, 25 bp, Homo sapien
accaggttctctttgaagaaactgg

SEQ ID NO: 5910236 - DNA, 25 bp, Homo sapien
ttttctttcactgtttgaattctgt

SEQ ID NO: 5910237 - DNA, 25 bp, Homo sapien
aatacatctggttcatgtacgttgt

SEQ ID NO: 5910238 - DNA, 25 bp, Homo sapien
cctcaagttttggtgccccagccct

SEQ ID NO: 5910239 - DNA, 25 bp, Homo sapien
attccctttcccctatgtaaagctg

SEQ ID NO: 5910240 - DNA, 25 bp, Homo sapien
gaaattgttctcataaatgtattcg

SEQ ID NO: 5910241 - DNA, 25 bp, Homo sapien
tgcccccaccacagaatggcacctt

SEQ ID NO: 5910242 - DNA, 25 bp, Homo sapien
tggattaatatttggtatttctttt

SEQ ID NO: 5910243 - DNA, 25 bp, Homo sapien
gaattaggtgaactacccccacgtg

SEQ ID NO: 5910244 - DNA, 25 bp, Homo sapien
ctccacagctcctatccctgggaca

SEQ ID NO: 5910245 - DNA, 25 bp, Homo sapien
cgaatcagtgaacttaaagaaaagt

SEQ ID NO: 5910246 - DNA, 25 bp, Homo sapien
ttgctgggcaattgcgtattttttt

SEQ ID NO: 5910247 - DNA, 25 bp, Homo sapien
caccacaagcggacatctgtcatgc

SEQ ID NO: 5910248 - DNA, 25 bp, Homo sapien
acatcctgtcagtttggttataaac

SEQ ID NO: 5910249 - DNA, 25 bp, Homo sapien
tggcaccttagaggctggctcctca

SEQ ID NO: 5910250 - DNA, 25 bp, Homo sapien
tgcatttcctttttaaacatttgca

SEQ ID NO: 5910251 - DNA, 25 bp, Homo sapien
atgacgtgtgtctgtgtgtttaagt

SEQ ID NO: 5910252 - DNA, 25 bp, Homo sapien
cgattggtggatttcagatcttttg

SEQ ID NO: 5910253 - DNA, 25 bp, Homo sapien
gttctcataaatgtattcgttccca

SEQ ID NO: 5910254 - DNA, 25 bp, Homo sapien
tgttttgtttgtttttctttcactg

SEQ ID NO: 5910255 - DNA, 25 bp, Homo sapien
gtttgtttttctttcactgtttgaa

SEQ ID NO: 5910256 - DNA, 25 bp, Homo sapien
tcccctatgtaaagctgagaaatac

SEQ ID NO: 5910257 - DNA, 25 bp, Homo sapien
acatttgcatttgctgggcaattgc

SEQ ID NO: 5910258 - DNA, 25 bp, Homo sapien
ttgtttgtttttctttcactgtttg

SEQ ID NO: 5910259 - DNA, 25 bp, Homo sapien
ataaatgtattcgttcccaccagca

SEQ ID NO: 5910260 - DNA, 25 bp, Homo sapien
ttgttctcataaatgtattcgttcc

SEQ ID NO: 5910261 - DNA, 25 bp, Homo sapien
ttgtgtttttctcctctggttgttt

SEQ ID NO: 5910262 - DNA, 25 bp, Homo sapien
gttctctctgcatttcctttttaaa

SEQ ID NO: 5910263 - DNA, 25 bp, Homo sapien
attaggtgaactacccccacgtggc

SEQ ID NO: 5910264 - DNA, 25 bp, Homo sapien
tggtcttaaagcaacccccattcag

SEQ ID NO: 5910265 - DNA, 25 bp, Homo sapien
agggccagctacttggaattaggtg

SEQ ID NO: 5910266 - DNA, 25 bp, Homo sapien
gcatttgctgggcaattgcgtattt

SEQ ID NO: 5910267 - DNA, 25 bp, Homo sapien
cccagcaccaggttctctttgaaga

SEQ ID NO: 5910268 - DNA, 25 bp, Homo sapien
ccacgtggcagaccaccagcagcag

SEQ ID NO: 5910269 - DNA, 25 bp, Homo sapien
gctttttaaatccctgtgtttcgtg

SEQ ID NO: 5910270 - DNA, 25 bp, Homo sapien
ggccagctacttggaattaggtgaa

SEQ ID NO: 5910271 - DNA, 25 bp, Homo sapien
atgggattcttatcaccagcctttg

SEQ ID NO: 5910272 - DNA, 25 bp, Homo sapien
accagcctttgtgaatggctccaca

SEQ ID NO: 5910273 - DNA, 25 bp, Homo sapien
cagctcaaaaagcgattggtggatt

SEQ ID NO: 5910274 - DNA, 25 bp, Homo sapien
atttgctgggcaattgcgtattttt

SEQ ID NO: 5910275 - DNA, 25 bp, Homo sapien
taaagcaacccccattcagctcaaa

SEQ ID NO: 5910276 - DNA, 25 bp, Homo sapien
aagcggacatctgtcatgcccagca

SEQ ID NO: 5910277 - DNA, 25 bp, Homo sapien
ttaaacatttgcatttgctgggcaa

SEQ ID NO: 5910278 - DNA, 25 bp, Homo sapien
gttataaactgagccagatgtgatg

SEQ ID NO: 5910279 - DNA, 25 bp, Homo sapien
tcctttttaaacatttgcatttgct

SEQ ID NO: 5910280 - DNA, 25 bp, Homo sapien
tcgtgcccatgggattcttatcacc

SEQ ID NO: 5910281 - DNA, 25 bp, Homo sapien
gaccaccagcagcagtgactttgac

SEQ ID NO: 5910282 - DNA, 25 bp, Homo sapien
gcctttgtgaatggctccacagctc

SEQ ID NO: 5910283 - DNA, 25 bp, Homo sapien
aatcagtgaacttaaagaaaagtcc

SEQ ID NO: 5910284 - DNA, 25 bp, Homo sapien
aagaaaagtcctcattatggtgccc

SEQ ID NO: 5910285 - DNA, 25 bp, Homo sapien
gttcctggctgtggattttgatact

SEQ ID NO: 5910286 - DNA, 25 bp, Homo sapien
tcataaatgtattcgttcccaccag

SEQ ID NO: 5910287 - DNA, 25 bp, Homo sapien
tttcgtgcccatgggattcttatca

SEQ ID NO: 5910288 - DNA, 25 bp, Homo sapien
ttctctttgaagaaactggagaaat

SEQ ID NO: 5910289 - DNA, 25 bp, Homo sapien
gttcccaccagcagggactgggaga

SEQ ID NO: 5910290 - DNA, 25 bp, Homo sapien
catttcctttttaaacatttgcatt

SEQ ID NO: 5910291 - DNA, 25 bp, Homo sapien
ctttgtgaatggctccacagctcct

SEQ ID NO: 5910292 - DNA, 25 bp, Homo sapien
ttgcatttgctgggcaattgcgtat

SEQ ID NO: 5910293 - DNA, 25 bp, Homo sapien
tgaacttaaagaaaagtcctcatta

SEQ ID NO: 5910294 - DNA, 25 bp, Homo sapien
attcgttcccaccagcagggactgg

SEQ ID NO: 5910295 - DNA, 25 bp, Homo sapien
aagttttggtgccccagccctgaag

SEQ ID NO: 5910296 - DNA, 25 bp, Homo sapien
tgtgatgagccaccacaagcggaca

SEQ ID NO: 5910297 - DNA, 25 bp, Homo sapien
tttggtgccccagccctgaagcagg

SEQ ID NO: 5910298 - DNA, 25 bp, Homo sapien
cagttcctggctgtggattttgata

SEQ ID NO: 5910299 - DNA, 25 bp, Homo sapien
aatatttaaagtgtaaacatggctg

SEQ ID NO: 5910300 - DNA, 25 bp, Homo sapien
tcagtttggttataaactgagccag

SEQ ID NO: 5910301 - DNA, 25 bp, Homo sapien
cagatgtgatgagccaccacaagcg

SEQ ID NO: 5910302 - DNA, 25 bp, Homo sapien
ggtgaactacccccacgtggcagac

SEQ ID NO: 5910303 - DNA, 25 bp, Homo sapien
aaaaagcgattggtggatttcagat

SEQ ID NO: 5910304 - DNA, 25 bp, Homo sapien
gcagcagtgactttgacttctggtc

SEQ ID NO: 5910305 - DNA, 25 bp, Homo sapien
gcaccttagaggctggctcctcaag

SEQ ID NO: 5910306 - DNA, 25 bp, Homo sapien
tgtgtttcgtgcccatgggattctt

SEQ ID NO: 5910307 - DNA, 25 bp, Homo sapien
aagtattttttttgtgctgtgaacg

SEQ ID NO: 5910308 - DNA, 25 bp, Homo sapien
ggacatctgtcatgcccagcaccag

SEQ ID NO: 5910309 - DNA, 25 bp, Homo sapien
aaagctgagaaatacatctggttca

SEQ ID NO: 5910310 - DNA, 25 bp, Homo sapien
cctgtcagtttggttataaactgag

SEQ ID NO: 5910311 - DNA, 25 bp, Homo sapien
agcgattggtggatttcagatcttt

SEQ ID NO: 5910312 - DNA, 25 bp, Homo sapien
agagggagctatgttgttaaaacga

SEQ ID NO: 5910313 - DNA, 25 bp, Homo sapien
aattgttctcataaatgtattcgtt

SEQ ID NO: 5910314 - DNA, 25 bp, Homo sapien
taaactgagccagatgtgatgagcc

SEQ ID NO: 5910315 - DNA, 25 bp, Homo sapien
aacccccattcagctcaaaaagcga

SEQ ID NO: 5910316 - DNA, 25 bp, Homo sapien
cttctggtcttaaagcaacccccat

SEQ ID NO: 5910317 - DNA, 25 bp, Homo sapien
tgtcagtttggttataaactgagcc

SEQ ID NO: 5910318 - DNA, 25 bp, Homo sapien
gtttgttccattcccatagttctct

SEQ ID NO: 5910319 - DNA, 25 bp, Homo sapien
ttcactgtttgaattctgtctgttg

SEQ ID NO: 5910320 - DNA, 25 bp, Homo sapien
ctgtcatgcccagcaccaggttctc

SEQ ID NO: 5910321 - DNA, 25 bp, Homo sapien
gctgggcaattgcgtatttttttaa

SEQ ID NO: 5910322 - DNA, 25 bp, Homo sapien
cgtgtgtctgtgtgtttaagttatc

SEQ ID NO: 5910323 - DNA, 25 bp, Homo sapien
tggttataaactgagccagatgtga

SEQ ID NO: 5910324 - DNA, 25 bp, Homo sapien
gtaaacatggctgttttgttacgcc

SEQ ID NO: 5910325 - DNA, 25 bp, Homo sapien
ggattttgatactggttggctttcc

SEQ ID NO: 5910326 - DNA, 25 bp, Homo sapien
gctcaaaaagcgattggtggatttc

SEQ ID NO: 5910327 - DNA, 25 bp, Homo sapien
tacatctggttcatgtacgttgttt

SEQ ID NO: 5910328 - DNA, 25 bp, Homo sapien
cccccattcagctcaaaaagcgatt

SEQ ID NO: 5910329 - DNA, 25 bp, Homo sapien
ctttttaaacatttgcatttgctgg

SEQ ID NO: 5910330 - DNA, 25 bp, Homo sapien
aagcagggccagctacttggaatta

SEQ ID NO: 5910331 - DNA, 25 bp, Homo sapien
ctggctgtggattttgatactggtt

SEQ ID NO: 5910332 - DNA, 25 bp, Homo sapien
accagcagcagtgactttgacttct

SEQ ID NO: 5910333 - DNA, 25 bp, Homo sapien
atttcagatcttttgtgtttttctc

SEQ ID NO: 5910334 - DNA, 25 bp, Homo sapien
ttgtttgttccattcccatagttct

SEQ ID NO: 5910335 - DNA, 25 bp, Homo sapien
gacgtgtgtctgtgtgtttaagtta

SEQ ID NO: 5910336 - DNA, 25 bp, Homo sapien
gtgcccatgggattcttatcaccag

SEQ ID NO: 5910337 - DNA, 25 bp, Homo sapien
ctttcactgtttgaattctgtctgt

SEQ ID NO: 5910338 - DNA, 25 bp, Homo sapien
gccaccacaagcggacatctgtcat

SEQ ID NO: 5910339 - DNA, 25 bp, Homo sapien
ttgttccattcccatagttctctct

SEQ ID NO: 5910340 - DNA, 25 bp, Homo sapien
agcagtgactttgacttctggtctt

SEQ ID NO: 5910341 - DNA, 25 bp, Homo sapien
ttgaagaaactggagaaattgttct

SEQ ID NO: 5910342 - DNA, 25 bp, Homo sapien
ccacagctcctatccctgggacatc

SEQ ID NO: 5910343 - DNA, 25 bp, Homo sapien
ctacttggaattaggtgaactaccc

SEQ ID NO: 5910344 - DNA, 25 bp, Homo sapien
acccccacgtggcagaccaccagca

SEQ ID NO: 5910345 - DNA, 25 bp, Homo sapien
gagccaccacaagcggacatctgtc

SEQ ID NO: 5910346 - DNA, 25 bp, Homo sapien
gtcatgcccagcaccaggttctctt

SEQ ID NO: 5910347 - DNA, 25 bp, Homo sapien
cagccctgaagcagggccagctact

SEQ ID NO: 5910348 - DNA, 25 bp, Homo sapien
agtcctcattatggtgcccccacca

SEQ ID NO: 5910349 - DNA, 25 bp, Homo sapien
ctgagaaatacatctggttcatgta

SEQ ID NO: 5910350 - DNA, 25 bp, Homo sapien
cttaaagaaaagtcctcattatggt

SEQ ID NO: 5910351 - DNA, 25 bp, Homo sapien
tgaagcagggccagctacttggaat

SEQ ID NO: 5910352 - DNA, 25 bp, Homo sapien
ttcagctcaaaaagcgattggtgga

SEQ ID NO: 5910353 - DNA, 25 bp, Homo sapien
gttggctttcctctgctttttaaat

SEQ ID NO: 5910354 - DNA, 25 bp, Homo sapien
gttcatgtacgttgtttacaaagat

SEQ ID NO: 5910355 - DNA, 25 bp, Homo sapien
cattcccatagttctctctgcattt

SEQ ID NO: 5910356 - DNA, 25 bp, Homo sapien
taattccctttcccctatgtaaagc

SEQ ID NO: 5910357 - DNA, 25 bp, Homo sapien
ggcaattgcgtatttttttaattcc

SEQ ID NO: 5910358 - DNA, 25 bp, Homo sapien
ctgagccagatgtgatgagccacca

SEQ ID NO: 5910359 - DNA, 25 bp, Homo sapien
gtgccccagccctgaagcagggcca

SEQ ID NO: 5910360 - DNA, 25 bp, Homo sapien
ggacatcctgtcagtttggttataa

SEQ ID NO: 5910361 - DNA, 25 bp, Homo sapien
ctgctttttaaatccctgtgtttcg

SEQ ID NO: 5910362 - DNA, 25 bp, Homo sapien
cctgggacatcctgtcagtttggtt

SEQ ID NO: 5910363 - DNA, 25 bp, Homo sapien
tccattcccatagttctctctgcat

SEQ ID NO: 5910364 - DNA, 25 bp, Homo sapien
ttctcctctggttgttttgtttgtt

SEQ ID NO: 5910365 - DNA, 25 bp, Homo sapien
aaaacgaatcagtgaacttaaagaa

SEQ ID NO: 5910366 - DNA, 25 bp, Homo sapien
ttttctgccaaagaccatgacgtgt

SEQ ID NO: 5910367 - DNA, 25 bp, Homo sapien
tcaccagcctttgtgaatggctcca

SEQ ID NO: 5910368 - DNA, 25 bp, Homo sapien
tgggcaattgcgtatttttttaatt

SEQ ID NO: 5910369 - DNA, 25 bp, Homo sapien
tcgttcccaccagcagggactggga

SEQ ID NO: 5910370 - DNA, 25 bp, Homo sapien
gaattctgtctgttgtttgttccat

SEQ ID NO: 5910371 - DNA, 25 bp, Homo sapien
tcctctgctttttaaatccctgtgt

SEQ ID NO: 5910372 - DNA, 25 bp, Homo sapien
cctatccctgggacatcctgtcagt

SEQ ID NO: 5910373 - DNA, 25 bp, Homo sapien
agtgaacttaaagaaaagtcctcat

SEQ ID NO: 5910374 - DNA, 25 bp, Homo sapien
attctgtctgttgtttgttccattc

SEQ ID NO: 5910375 - DNA, 25 bp, Homo sapien
tatcaccagcctttgtgaatggctc

SEQ ID NO: 5910376 - DNA, 25 bp, Homo sapien
taggtgaactacccccacgtggcag

SEQ ID NO: 5910377 - DNA, 25 bp, Homo sapien
taaatccctgtgtttcgtgcccatg

SEQ ID NO: 5910378 - DNA, 25 bp, Homo sapien
ctctgctttttaaatccctgtgttt

SEQ ID NO: 5910379 - DNA, 25 bp, Homo sapien
aatccctgtgtttcgtgcccatggg

SEQ ID NO: 5910380 - DNA, 25 bp, Homo sapien
acgtggcagaccaccagcagcagtg

SEQ ID NO: 5910381 - DNA, 25 bp, Homo sapien
agctcctatccctgggacatcctgt

SEQ ID NO: 5910382 - DNA, 25 bp, Homo sapien
atggctgttttgttacgccactctg

SEQ ID NO: 5910383 - DNA, 25 bp, Homo sapien
ccacaagcggacatctgtcatgccc

SEQ ID NO: 5910384 - DNA, 25 bp, Homo sapien
ctggctcctcaagttttggtgcccc

SEQ ID NO: 5910385 - DNA, 25 bp, Homo sapien
attggtggatttcagatcttttgtg

SEQ ID NO: 5910386 - DNA, 25 bp, Homo sapien
gccaaagaccatgacgtgtgtctgt

SEQ ID NO: 5910387 - DNA, 25 bp, Homo sapien
tggagaaattgttctcataaatgta

SEQ ID NO: 5910388 - DNA, 25 bp, Homo sapien
acatctgtcatgcccagcaccaggt

SEQ ID NO: 5910389 - DNA, 25 bp, Homo sapien
agctatgttgttaaaacgaatcagt

SEQ ID NO: 5910390 - DNA, 25 bp, Homo sapien
aatggcaccttagaggctggctcct

SEQ ID NO: 5910391 - DNA, 25 bp, Homo sapien
tgggagagggagctatgttgttaaa

SEQ ID NO: 5910392 - DNA, 25 bp, Homo sapien
tggtgccccagccctgaagcagggc

SEQ ID NO: 5910393 - DNA, 25 bp, Homo sapien
gagaaattgttctcataaatgtatt

SEQ ID NO: 5910394 - DNA, 25 bp, Homo sapien
aaacatggctgttttgttacgccac

SEQ ID NO: 5910395 - DNA, 25 bp, Homo sapien
acagctcctatccctgggacatcct

SEQ ID NO: 5910396 - DNA, 25 bp, Homo sapien
cgttttctgccaaagaccatgacgt

SEQ ID NO: 5910397 - DNA, 25 bp, Homo sapien
ggatttcagatcttttgtgtttttc

SEQ ID NO: 5910398 - DNA, 25 bp, Homo sapien
taaagaaaagtcctcattatggtgc

SEQ ID NO: 5910399 - DNA, 25 bp, Homo sapien
gttgttaaaacgaatcagtgaactt

SEQ ID NO: 5910400 - DNA, 25 bp, Homo sapien
atggctccacagctcctatccctgg

SEQ ID NO: 5910401 - DNA, 25 bp, Homo sapien
atgagccaccacaagcggacatctg

SEQ ID NO: 5910402 - DNA, 25 bp, Homo sapien
tagttctctctgcatttccttttta

SEQ ID NO: 5910403 - DNA, 25 bp, Homo sapien
ccaccagcagggactgggagaggga

SEQ ID NO: 5910404 - DNA, 25 bp, Homo sapien
cttaaagcaacccccattcagctca

SEQ ID NO: 5910405 - DNA, 25 bp, Homo sapien
ttttgtgtttttctcctctggttgt

SEQ ID NO: 5910406 - DNA, 25 bp, Homo sapien
aaactggagaaattgttctcataaa

SEQ ID NO: 5910407 - DNA, 25 bp, Homo sapien
gtggcagaccaccagcagcagtgac

SEQ ID NO: 5910408 - DNA, 25 bp, Homo sapien
aagtgtaaacatggctgttttgtta

SEQ ID NO: 5910409 - DNA, 25 bp, Homo sapien
aacgttttctgccaaagaccatgac

SEQ ID NO: 5910410 - DNA, 25 bp, Homo sapien
tctgtgtgtttaagttatcatgaat

SEQ ID NO: 5910411 - DNA, 25 bp, Homo sapien
ggtgcccccaccacagaatggcacc

SEQ ID NO: 5910412 - DNA, 25 bp, Homo sapien
tgtgtttaagttatcatgaatattt

SEQ ID NO: 5910413 - DNA, 25 bp, Homo sapien
tttttaaatccctgtgtttcgtgcc

SEQ ID NO: 5910414 - DNA, 25 bp, Homo sapien
agttatcatgaatatttaaagtgta

SEQ ID NO: 5910415 - DNA, 25 bp, Homo sapien
tttcctctgctttttaaatccctgt

SEQ ID NO: 5910416 - DNA, 25 bp, Homo sapien
cccatagttctctctgcatttcctt

SEQ ID NO: 5910417 - DNA, 25 bp, Homo sapien
tgtttcgtgcccatgggattcttat

SEQ ID NO: 5910418 - DNA, 25 bp, Homo sapien
gggattcttatcaccagcctttgtg

SEQ ID NO: 5910419 - DNA, 25 bp, Homo sapien
ttgtgctgtgaacgttttctgccaa

SEQ ID NO: 5910420 - DNA, 25 bp, Homo sapien
catctggttcatgtacgttgtttac

SEQ ID NO: 5910421 - DNA, 25 bp, Homo sapien
gctttcctctgctttttaaatccct

SEQ ID NO: 5910422 - DNA, 25 bp, Homo sapien
ccatgggattcttatcaccagcctt

SEQ ID NO: 5910423 - DNA, 25 bp, Homo sapien
gtaaagctgagaaatacatctggtt

SEQ ID NO: 5910424 - DNA, 25 bp, Homo sapien
gatgtgatgagccaccacaagcgga

SEQ ID NO: 5910425 - DNA, 25 bp, Homo sapien
ctgccaaagaccatgacgtgtgtct

SEQ ID NO: 5910426 - DNA, 25 bp, Homo sapien
agctacttggaattaggtgaactac

SEQ ID NO: 5910427 - DNA, 25 bp, Homo sapien
agaatggcaccttagaggctggctc

SEQ ID NO: 5910428 - DNA, 25 bp, Homo sapien
actggagaaattgttctcataaatg

SEQ ID NO: 5910429 - DNA, 25 bp, Homo sapien
tcaagttttggtgccccagccctga

SEQ ID NO: 5910430 - DNA, 25 bp, Homo sapien
gtattttttttgtgctgtgaacgtt

SEQ ID NO: 5910431 - DNA, 25 bp, Homo sapien
atttgcatttgctgggcaattgcgt

SEQ ID NO: 5910432 - DNA, 25 bp, Homo sapien
tcaaaaagcgattggtggatttcag

SEQ ID NO: 5910433 - DNA, 25 bp, Homo sapien
ttcagatcttttgtgtttttctcct

SEQ ID NO: 5910434 - DNA, 25 bp, Homo sapien
tatttaaagtgtaaacatggctgtt

SEQ ID NO: 5910435 - DNA, 25 bp, Homo sapien
gtggatttcagatcttttgtgtttt

SEQ ID NO: 5910436 - DNA, 25 bp, Homo sapien
atgtaaagctgagaaatacatctgg

SEQ ID NO: 5910437 - DNA, 25 bp, Homo sapien
cactgtttgaattctgtctgttgtt

SEQ ID NO: 5910438 - DNA, 25 bp, Homo sapien
gcccatgggattcttatcaccagcc

SEQ ID NO: 5910439 - DNA, 25 bp, Homo sapien
aaagcgattggtggatttcagatct

SEQ ID NO: 5910440 - DNA, 25 bp, Homo sapien
tataaactgagccagatgtgatgag

SEQ ID NO: 5910441 - DNA, 25 bp, Homo sapien
ttttaaacatttgcatttgctgggc

SEQ ID NO: 5910442 - DNA, 25 bp, Homo sapien
ggagctatgttgttaaaacgaatca

SEQ ID NO: 5910443 - DNA, 25 bp, Homo sapien
atgtacgttgtttacaaagataaaa

SEQ ID NO: 5910444 - DNA, 25 bp, Homo sapien
gactttgacttctggtcttaaagca

SEQ ID NO: 5910445 - DNA, 25 bp, Homo sapien
gattcttatcaccagcctttgtgaa

SEQ ID NO: 5910446 - DNA, 25 bp, Homo sapien
agtttggttataaactgagccagat

SEQ ID NO: 5910447 - DNA, 25 bp, Homo sapien
tcccaccagcagggactgggagagg

SEQ ID NO: 5910448 - DNA, 25 bp, Homo sapien
gaagaaactggagaaattgttctca

SEQ ID NO: 5910449 - DNA, 25 bp, Homo sapien
tgtctgtgtgtttaagttatcatga

SEQ ID NO: 5910450 - DNA, 25 bp, Homo sapien
gatcttttgtgtttttctcctctgg

SEQ ID NO: 5910451 - DNA, 25 bp, Homo sapien
atactggttggctttcctctgcttt

SEQ ID NO: 5910452 - DNA, 25 bp, Homo sapien
cagaccaccagcagcagtgactttg

SEQ ID NO: 5910453 - DNA, 25 bp, Homo sapien
ctttgacttctggtcttaaagcaac

SEQ ID NO: 5910454 - DNA, 25 bp, Homo sapien
gcggacatctgtcatgcccagcacc

SEQ ID NO: 5910455 - DNA, 25 bp, Homo sapien
ctcctcaagttttggtgccccagcc

SEQ ID NO: 5910456 - DNA, 25 bp, Homo sapien
tcctggctgtggattttgatactgg

SEQ ID NO: 5910457 - DNA, 25 bp, Homo sapien
tgtctgttgtttgttccattcccat

SEQ ID NO: 5910458 - DNA, 25 bp, Homo sapien
acagaatggcaccttagaggctggc

SEQ ID NO: 5910459 - DNA, 25 bp, Homo sapien
ccagctacttggaattaggtgaact

SEQ ID NO: 5910460 - DNA, 25 bp, Homo sapien
ttttttttgtgctgtgaacgttttc

SEQ ID NO: 5910461 - DNA, 25 bp, Homo sapien
caggttctctttgaagaaactggag

SEQ ID NO: 5910462 - DNA, 25 bp, Homo sapien
cccaccacagaatggcaccttagag

SEQ ID NO: 5910463 - DNA, 25 bp, Homo sapien
ggagagggagctatgttgttaaaac

SEQ ID NO: 5910464 - DNA, 25 bp, Homo sapien
tgaacgttttctgccaaagaccatg

SEQ ID NO: 5910465 - DNA, 25 bp, Homo sapien
ggctgtggattttgatactggttgg

SEQ ID NO: 5910466 - DNA, 25 bp, Homo sapien
cccccaccacagaatggcaccttag

SEQ ID NO: 5910467 - DNA, 25 bp, Homo sapien
ttctttcactgtttgaattctgtct

SEQ ID NO: 5910468 - DNA, 25 bp, Homo sapien
attttgatactggttggctttcctc

SEQ ID NO: 5910469 - DNA, 25 bp, Homo sapien
gcaacccccattcagctcaaaaagc

SEQ ID NO: 5910470 - DNA, 25 bp, Homo sapien
catagttctctctgcatttcctttt

SEQ ID NO: 5910471 - DNA, 25 bp, Homo sapien
tttgatactggttggctttcctctg

SEQ ID NO: 5910472 - DNA, 25 bp, Homo sapien
tccctttcccctatgtaaagctgag

SEQ ID NO: 5910473 - DNA, 25 bp, Homo sapien
ccccacgtggcagaccaccagcagc

SEQ ID NO: 5910474 - DNA, 25 bp, Homo sapien
cttggaattaggtgaactaccccca

SEQ ID NO: 5910475 - DNA, 25 bp, Homo sapien
tgatgagccaccacaagcggacatc

SEQ ID NO: 5910476 - DNA, 25 bp, Homo sapien
cctgaagcagggccagctacttgga

SEQ ID NO: 5910477 - DNA, 25 bp, Homo sapien
ggctggctcctcaagttttggtgcc

SEQ ID NO: 5910478 - DNA, 25 bp, Homo sapien
gtgctgtgaacgttttctgccaaag

SEQ ID NO: 5910479 - DNA, 25 bp, Homo sapien
tgatactggttggctttcctctgct

SEQ ID NO: 5910480 - DNA, 25 bp, Homo sapien
atctgtcatgcccagcaccaggttc

SEQ ID NO: 5910481 - DNA, 25 bp, Homo sapien
gtattcgttcccaccagcagggact

SEQ ID NO: 5910482 - DNA, 25 bp, Homo sapien
cccagccctgaagcagggccagcta

SEQ ID NO: 5910483 - DNA, 25 bp, Homo sapien
ttcttatcaccagcctttgtgaatg

SEQ ID NO: 5910484 - DNA, 25 bp, Homo sapien
taagttatcatgaatatttaaagtg

SEQ ID NO: 5910485 - DNA, 25 bp, Homo sapien
attttggattaatatttggtatttc

SEQ ID NO: 5910486 - DNA, 25 bp, Homo sapien
aattaaaaaaatacgcaattgccca

SEQ ID NO: 5910487 - DNA, 25 bp, Homo sapien
tgtggagccattcacaaaggctggt

SEQ ID NO: 5910488 - DNA, 25 bp, Homo sapien
agaacaatttctccagtttcttcaa

SEQ ID NO: 5910489 - DNA, 25 bp, Homo sapien
taacaaaacagccatgtttacactt

SEQ ID NO: 5910490 - DNA, 25 bp, Homo sapien
gggttgctttaagaccagaagtcaa

SEQ ID NO: 5910491 - DNA, 25 bp, Homo sapien
acttttctttaagttcactgattcg

SEQ ID NO: 5910492 - DNA, 25 bp, Homo sapien
acaggatgtcccagggataggagct

SEQ ID NO: 5910493 - DNA, 25 bp, Homo sapien
tgtttaaaaaggaaatgcagagaga

SEQ ID NO: 5910494 - DNA, 25 bp, Homo sapien
gtcatggtctttggcagaaaacgtt

SEQ ID NO: 5910495 - DNA, 25 bp, Homo sapien
ttaagttcactgattcgttttaaca

SEQ ID NO: 5910496 - DNA, 25 bp, Homo sapien
tttatgagaacaatttctccagttt

SEQ ID NO: 5910497 - DNA, 25 bp, Homo sapien
aaacacagggatttaaaaagcagag

SEQ ID NO: 5910498 - DNA, 25 bp, Homo sapien
caccaatcgctttttgagctgaatg

SEQ ID NO: 5910499 - DNA, 25 bp, Homo sapien
acagacagaattcaaacagtgaaag

SEQ ID NO: 5910500 - DNA, 25 bp, Homo sapien
atctttgtaaacaacgtacatgaac

SEQ ID NO: 5910501 - DNA, 25 bp, Homo sapien
agagagaactatgggaatggaacaa

SEQ ID NO: 5910502 - DNA, 25 bp, Homo sapien
acctggtgctgggcatgacagatgt

SEQ ID NO: 5910503 - DNA, 25 bp, Homo sapien
aagaaataccaaatattaatccaaa

SEQ ID NO: 5910504 - DNA, 25 bp, Homo sapien
ctggctcagtttataaccaaactga

SEQ ID NO: 5910505 - DNA, 25 bp, Homo sapien
taatgaggacttttctttaagttca

SEQ ID NO: 5910506 - DNA, 25 bp, Homo sapien
ggatttaaaaagcagaggaaagcca

SEQ ID NO: 5910507 - DNA, 25 bp, Homo sapien
tgcaaatgtttaaaaaggaaatgca

SEQ ID NO: 5910508 - DNA, 25 bp, Homo sapien
ttggcagaaaacgttcacagcacaa

SEQ ID NO: 5910509 - DNA, 25 bp, Homo sapien
ttctccagtttcttcaaagagaacc

SEQ ID NO: 5910510 - DNA, 25 bp, Homo sapien
caaagtcactgctgctggtggtctg

SEQ ID NO: 5910511 - DNA, 25 bp, Homo sapien
catcacatctggctcagtttataac

SEQ ID NO: 5910512 - DNA, 25 bp, Homo sapien
tgtccgcttgtggtggctcatcaca

SEQ ID NO: 5910513 - DNA, 25 bp, Homo sapien
ttgcccagcaaatgcaaatgtttaa

SEQ ID NO: 5910514 - DNA, 25 bp, Homo sapien
tacactttaaatattcatgataact

SEQ ID NO: 5910515 - DNA, 25 bp, Homo sapien
acaacatagctccctctcccagtcc

SEQ ID NO: 5910516 - DNA, 25 bp, Homo sapien
ggctcagtttataaccaaactgaca

SEQ ID NO: 5910517 - DNA, 25 bp, Homo sapien
aaaacttgaggagccagcctctaag

SEQ ID NO: 5910518 - DNA, 25 bp, Homo sapien
ctggtacagagtggcgtaacaaaac

SEQ ID NO: 5910519 - DNA, 25 bp, Homo sapien
ttaaaaaaatacgcaattgcccagc

SEQ ID NO: 5910520 - DNA, 25 bp, Homo sapien
aacacaaaagatctgaaatccacca

SEQ ID NO: 5910521 - DNA, 25 bp, Homo sapien
aagaatcccatgggcacgaaacaca

SEQ ID NO: 5910522 - DNA, 25 bp, Homo sapien
ctatgggaatggaacaaacaacaga

SEQ ID NO: 5910523 - DNA, 25 bp, Homo sapien
ccagtccctgctggtgggaacgaat

SEQ ID NO: 5910524 - DNA, 25 bp, Homo sapien
gccattcacaaaggctggtgataag

SEQ ID NO: 5910525 - DNA, 25 bp, Homo sapien
tcttcaaagagaacctggtgctggg

SEQ ID NO: 5910526 - DNA, 25 bp, Homo sapien
tggtctgccacgtgggggtagttca

SEQ ID NO: 5910527 - DNA, 25 bp, Homo sapien
cgtgggggtagttcacctaattcca

SEQ ID NO: 5910528 - DNA, 25 bp, Homo sapien
acagaattcaaacagtgaaagaaaa

SEQ ID NO: 5910529 - DNA, 25 bp, Homo sapien
cgcttgtggtggctcatcacatctg

SEQ ID NO: 5910530 - DNA, 25 bp, Homo sapien
acaacgtacatgaaccagatgtatt

SEQ ID NO: 5910531 - DNA, 25 bp, Homo sapien
cataatgaggacttttctttaagtt

SEQ ID NO: 5910532 - DNA, 25 bp, Homo sapien
atgaggacttttctttaagttcact

SEQ ID NO: 5910533 - DNA, 25 bp, Homo sapien
aggatgtcccagggataggagctgt

SEQ ID NO: 5910534 - DNA, 25 bp, Homo sapien
caaaacaaccagaggagaaaaacac

SEQ ID NO: 5910535 - DNA, 25 bp, Homo sapien
taatccaaaatatattaagttgttt

SEQ ID NO: 5910536 - DNA, 25 bp, Homo sapien
aaggtgccattctgtggtgggggca

SEQ ID NO: 5910537 - DNA, 25 bp, Homo sapien
tttgagctgaatgggggttgcttta

SEQ ID NO: 5910538 - DNA, 25 bp, Homo sapien
gagctgtggagccattcacaaaggc

SEQ ID NO: 5910539 - DNA, 25 bp, Homo sapien
catgaaccagatgtatttctcagct

SEQ ID NO: 5910540 - DNA, 25 bp, Homo sapien
aaagatctgaaatccaccaatcgct

SEQ ID NO: 5910541 - DNA, 25 bp, Homo sapien
ctggtgataagaatcccatgggcac

SEQ ID NO: 5910542 - DNA, 25 bp, Homo sapien
tgcttcagggctggggcaccaaaac

SEQ ID NO: 5910543 - DNA, 25 bp, Homo sapien
gctgctggtggtctgccacgtgggg

SEQ ID NO: 5910544 - DNA, 25 bp, Homo sapien
tggtggctcatcacatctggctcag

SEQ ID NO: 5910545 - DNA, 25 bp, Homo sapien
agaactatgggaatggaacaaacaa

SEQ ID NO: 5910546 - DNA, 25 bp, Homo sapien
aaacaacgtacatgaaccagatgta

SEQ ID NO: 5910547 - DNA, 25 bp, Homo sapien
tctcccagtccctgctggtgggaac

SEQ ID NO: 5910548 - DNA, 25 bp, Homo sapien
ggaacgaatacatttatgagaacaa

SEQ ID NO: 5910549 - DNA, 25 bp, Homo sapien
ctttaagaccagaagtcaaagtcac

SEQ ID NO: 5910550 - DNA, 25 bp, Homo sapien
gcctctaaggtgccattctgtggtg

SEQ ID NO: 5910551 - DNA, 25 bp, Homo sapien
atttaaaaagcagaggaaagccaac

SEQ ID NO: 5910552 - DNA, 25 bp, Homo sapien
aacaaacaaaacaaccagaggagaa

SEQ ID NO: 5910553 - DNA, 25 bp, Homo sapien
atgtatttctcagctttacataggg

SEQ ID NO: 5910554 - DNA, 25 bp, Homo sapien
tttaacaacatagctccctctccca

SEQ ID NO: 5910555 - DNA, 25 bp, Homo sapien
ggacttttctttaagttcactgatt

SEQ ID NO: 5910556 - DNA, 25 bp, Homo sapien
cgtaacaaaacagccatgtttacac

SEQ ID NO: 5910557 - DNA, 25 bp, Homo sapien
caaacaaaacaaccagaggagaaaa

SEQ ID NO: 5910558 - DNA, 25 bp, Homo sapien
gtctgccacgtgggggtagttcacc

SEQ ID NO: 5910559 - DNA, 25 bp, Homo sapien
gggcatgacagatgtccgcttgtgg

SEQ ID NO: 5910560 - DNA, 25 bp, Homo sapien
agtagctggccctgcttcagggctg

SEQ ID NO: 5910561 - DNA, 25 bp, Homo sapien
aagttcactgattcgttttaacaac

SEQ ID NO: 5910562 - DNA, 25 bp, Homo sapien
acagacacacgtcatggtctttggc

SEQ ID NO: 5910563 - DNA, 25 bp, Homo sapien
catggtctttggcagaaaacgttca

SEQ ID NO: 5910564 - DNA, 25 bp, Homo sapien
atgggggttgctttaagaccagaag

SEQ ID NO: 5910565 - DNA, 25 bp, Homo sapien
ctttaagttcactgattcgttttaa

SEQ ID NO: 5910566 - DNA, 25 bp, Homo sapien
gcaccataatgaggacttttcttta

SEQ ID NO: 5910567 - DNA, 25 bp, Homo sapien
aaaaaaatacgcaattgcccagcaa

SEQ ID NO: 5910568 - DNA, 25 bp, Homo sapien
aatgtttaaaaaggaaatgcagaga

SEQ ID NO: 5910569 - DNA, 25 bp, Homo sapien
gcatgacagatgtccgcttgtggtg

SEQ ID NO: 5910570 - DNA, 25 bp, Homo sapien
gtatttctcagctttacatagggga

SEQ ID NO: 5910571 - DNA, 25 bp, Homo sapien
ccagggataggagctgtggagccat

SEQ ID NO: 5910572 - DNA, 25 bp, Homo sapien
ggtacagagtggcgtaacaaaacag

SEQ ID NO: 5910573 - DNA, 25 bp, Homo sapien
acacagggatttaaaaagcagagga

SEQ ID NO: 5910574 - DNA, 25 bp, Homo sapien
attccaagtagctggccctgcttca

SEQ ID NO: 5910575 - DNA, 25 bp, Homo sapien
acacgtcatggtctttggcagaaaa

SEQ ID NO: 5910576 - DNA, 25 bp, Homo sapien
gaatggaacaaacaacagacagaat

SEQ ID NO: 5910577 - DNA, 25 bp, Homo sapien
agtttcttcaaagagaacctggtgc

SEQ ID NO: 5910578 - DNA, 25 bp, Homo sapien
cgaaacacagggatttaaaaagcag

SEQ ID NO: 5910579 - DNA, 25 bp, Homo sapien
aaatgcagagagaactatgggaatg

SEQ ID NO: 5910580 - DNA, 25 bp, Homo sapien
accataatgaggacttttctttaag

SEQ ID NO: 5910581 - DNA, 25 bp, Homo sapien
aatcgctttttgagctgaatggggg

SEQ ID NO: 5910582 - DNA, 25 bp, Homo sapien
gaaaacgttcacagcacaaaaaaaa

SEQ ID NO: 5910583 - DNA, 25 bp, Homo sapien
cagcctctaaggtgccattctgtgg

SEQ ID NO: 5910584 - DNA, 25 bp, Homo sapien
caagtagctggccctgcttcagggc

SEQ ID NO: 5910585 - DNA, 25 bp, Homo sapien
cagagtggcgtaacaaaacagccat

SEQ ID NO: 5910586 - DNA, 25 bp, Homo sapien
aatacatttatgagaacaatttctc

SEQ ID NO: 5910587 - DNA, 25 bp, Homo sapien
ttcacagcacaaaaaaaatacttta

SEQ ID NO: 5910588 - DNA, 25 bp, Homo sapien
gatgtcccagggataggagctgtgg

SEQ ID NO: 5910589 - DNA, 25 bp, Homo sapien
ggctggtgataagaatcccatgggc

SEQ ID NO: 5910590 - DNA, 25 bp, Homo sapien
ctggtgggaacgaatacatttatga

SEQ ID NO: 5910591 - DNA, 25 bp, Homo sapien
aaaaatacgcaattgcccagcaaat

SEQ ID NO: 5910592 - DNA, 25 bp, Homo sapien
tgaaccagatgtatttctcagcttt

SEQ ID NO: 5910593 - DNA, 25 bp, Homo sapien
ctccagtttcttcaaagagaacctg

SEQ ID NO: 5910594 - DNA, 25 bp, Homo sapien
cttgaggagccagcctctaaggtgc

SEQ ID NO: 5910595 - DNA, 25 bp, Homo sapien
agggataggagctgtggagccattc

SEQ ID NO: 5910596 - DNA, 25 bp, Homo sapien
caatttctccagtttcttcaaagag

SEQ ID NO: 5910597 - DNA, 25 bp, Homo sapien
ctggggcaccaaaacttgaggagcc

SEQ ID NO: 5910598 - DNA, 25 bp, Homo sapien
attcgttttaacaacatagctccct

SEQ ID NO: 5910599 - DNA, 25 bp, Homo sapien
ttataaccaaactgacaggatgtcc

SEQ ID NO: 5910600 - DNA, 25 bp, Homo sapien
ttgtaaacaacgtacatgaaccaga

SEQ ID NO: 5910601 - DNA, 25 bp, Homo sapien
aacaatttctccagtttcttcaaag

SEQ ID NO: 5910602 - DNA, 25 bp, Homo sapien
acgtcatggtctttggcagaaaacg

SEQ ID NO: 5910603 - DNA, 25 bp, Homo sapien
cctgcttcagggctggggcaccaaa

SEQ ID NO: 5910604 - DNA, 25 bp, Homo sapien
tcgttttaacaacatagctccctct

SEQ ID NO: 5910605 - DNA, 25 bp, Homo sapien
atacgcaattgcccagcaaatgcaa

SEQ ID NO: 5910606 - DNA, 25 bp, Homo sapien
agatctgaaatccaccaatcgcttt

SEQ ID NO: 5910607 - DNA, 25 bp, Homo sapien
gttttaacaacatagctccctctcc

SEQ ID NO: 5910608 - DNA, 25 bp, Homo sapien
gccacgtgggggtagttcacctaat

SEQ ID NO: 5910609 - DNA, 25 bp, Homo sapien
tggtgggggcaccataatgaggact

SEQ ID NO: 5910610 - DNA, 25 bp, Homo sapien
gtttataaccaaactgacaggatgt

SEQ ID NO: 5910611 - DNA, 25 bp, Homo sapien
ggcgtaacaaaacagccatgtttac

SEQ ID NO: 5910612 - DNA, 25 bp, Homo sapien
ccagaagtcaaagtcactgctgctg

SEQ ID NO: 5910613 - DNA, 25 bp, Homo sapien
agttcacctaattccaagtagctgg

SEQ ID NO: 5910614 - DNA, 25 bp, Homo sapien
gggggttgctttaagaccagaagtc

SEQ ID NO: 5910615 - DNA, 25 bp, Homo sapien
ttcacctaattccaagtagctggcc

SEQ ID NO: 5910616 - DNA, 25 bp, Homo sapien
gaatcccatgggcacgaaacacagg

SEQ ID NO: 5910617 - DNA, 25 bp, Homo sapien
ggataggagctgtggagccattcac

SEQ ID NO: 5910618 - DNA, 25 bp, Homo sapien
aagtcactgctgctggtggtctgcc

SEQ ID NO: 5910619 - DNA, 25 bp, Homo sapien
aagagaacctggtgctgggcatgac

SEQ ID NO: 5910620 - DNA, 25 bp, Homo sapien
aatcctggtacagagtggcgtaaca

SEQ ID NO: 5910621 - DNA, 25 bp, Homo sapien
caacagacagaattcaaacagtgaa

SEQ ID NO: 5910622 - DNA, 25 bp, Homo sapien
aacatagctccctctcccagtccct

SEQ ID NO: 5910623 - DNA, 25 bp, Homo sapien
agctgaatgggggttgctttaagac

SEQ ID NO: 5910624 - DNA, 25 bp, Homo sapien
agcaaatgcaaatgtttaaaaagga

SEQ ID NO: 5910625 - DNA, 25 bp, Homo sapien
aaagcagaggaaagccaaccagtat

SEQ ID NO: 5910626 - DNA, 25 bp, Homo sapien
ggtgctgggcatgacagatgtccgc

SEQ ID NO: 5910627 - DNA, 25 bp, Homo sapien
attctgtggtgggggcaccataatg

SEQ ID NO: 5910628 - DNA, 25 bp, Homo sapien
ggcacgaaacacagggatttaaaaa

SEQ ID NO: 5910629 - DNA, 25 bp, Homo sapien
ggggcaccaaaacttgaggagccag

SEQ ID NO: 5910630 - DNA, 25 bp, Homo sapien
ccattctgtggtgggggcaccataa

SEQ ID NO: 5910631 - DNA, 25 bp, Homo sapien
attcatgataacttaaacacacaga

SEQ ID NO: 5910632 - DNA, 25 bp, Homo sapien
ggtgataagaatcccatgggcacga

SEQ ID NO: 5910633 - DNA, 25 bp, Homo sapien
tgagctgaatgggggttgctttaag

SEQ ID NO: 5910634 - DNA, 25 bp, Homo sapien
gccctgcttcagggctggggcacca

SEQ ID NO: 5910635 - DNA, 25 bp, Homo sapien
tgtcccagggataggagctgtggag

SEQ ID NO: 5910636 - DNA, 25 bp, Homo sapien
ctggtggtctgccacgtgggggtag

SEQ ID NO: 5910637 - DNA, 25 bp, Homo sapien
gaccagaagtcaaagtcactgctgc

SEQ ID NO: 5910638 - DNA, 25 bp, Homo sapien
ccagaggagaaaaacacaaaagatc

SEQ ID NO: 5910639 - DNA, 25 bp, Homo sapien
catttatgagaacaatttctccagt

SEQ ID NO: 5910640 - DNA, 25 bp, Homo sapien
aaatacgcaattgcccagcaaatgc

SEQ ID NO: 5910641 - DNA, 25 bp, Homo sapien
aaggaaatgcagagagaactatggg

SEQ ID NO: 5910642 - DNA, 25 bp, Homo sapien
aaacacacagacacacgtcatggtc

SEQ ID NO: 5910643 - DNA, 25 bp, Homo sapien
caaatgtttaaaaaggaaatgcaga

SEQ ID NO: 5910644 - DNA, 25 bp, Homo sapien
actgacaggatgtcccagggatagg

SEQ ID NO: 5910645 - DNA, 25 bp, Homo sapien
ccagcaaatgcaaatgtttaaaaag

SEQ ID NO: 5910646 - DNA, 25 bp, Homo sapien
atgcagagagaactatgggaatgga

SEQ ID NO: 5910647 - DNA, 25 bp, Homo sapien
tgctggtggtctgccacgtgggggt

SEQ ID NO: 5910648 - DNA, 25 bp, Homo sapien
cacgtgggggtagttcacctaattc

SEQ ID NO: 5910649 - DNA, 25 bp, Homo sapien
actgattcgttttaacaacatagct

SEQ ID NO: 5910650 - DNA, 25 bp, Homo sapien
aaacaaccagaggagaaaaacacaa

SEQ ID NO: 5910651 - DNA, 25 bp, Homo sapien
acacacgtcatggtctttggcagaa

SEQ ID NO: 5910652 - DNA, 25 bp, Homo sapien
ggtggtctgccacgtgggggtagtt

SEQ ID NO: 5910653 - DNA, 25 bp, Homo sapien
gaggaaagccaaccagtatcaaaat

SEQ ID NO: 5910654 - DNA, 25 bp, Homo sapien
tgctttaagaccagaagtcaaagtc

SEQ ID NO: 5910655 - DNA, 25 bp, Homo sapien
tacatgaaccagatgtatttctcag

SEQ ID NO: 5910656 - DNA, 25 bp, Homo sapien
aaccagatgtatttctcagctttac

SEQ ID NO: 5910657 - DNA, 25 bp, Homo sapien
tgctggtgggaacgaatacatttat

SEQ ID NO: 5910658 - DNA, 25 bp, Homo sapien
ttctttaagttcactgattcgtttt

SEQ ID NO: 5910659 - DNA, 25 bp, Homo sapien
tgggggtagttcacctaattccaag

SEQ ID NO: 5910660 - DNA, 25 bp, Homo sapien
cagatgtccgcttgtggtggctcat

SEQ ID NO: 5910661 - DNA, 25 bp, Homo sapien
gccagcctctaaggtgccattctgt

SEQ ID NO: 5910662 - DNA, 25 bp, Homo sapien
tatcaaaatccacagccaggaactg

SEQ ID NO: 5910663 - DNA, 25 bp, Homo sapien
agccaaccagtatcaaaatccacag

SEQ ID NO: 5910664 - DNA, 25 bp, Homo sapien
ggcagaaaacgttcacagcacaaaa

SEQ ID NO: 5910665 - DNA, 25 bp, Homo sapien
taaaaaggaaatgcagagagaacta

SEQ ID NO: 5910666 - DNA, 25 bp, Homo sapien
tgtggtgggggcaccataatgagga

SEQ ID NO: 5910667 - DNA, 25 bp, Homo sapien
atctgaaatccaccaatcgcttttt

SEQ ID NO: 5910668 - DNA, 25 bp, Homo sapien
gctgtggagccattcacaaaggctg

SEQ ID NO: 5910669 - DNA, 25 bp, Homo sapien
catagctccctctcccagtccctgc

SEQ ID NO: 5910670 - DNA, 25 bp, Homo sapien
ggaaatgcagagagaactatgggaa

SEQ ID NO: 5910671 - DNA, 25 bp, Homo sapien
caaagagaacctggtgctgggcatg

SEQ ID NO: 5910672 - DNA, 25 bp, Homo sapien
ttttctttaagttcactgattcgtt

SEQ ID NO: 5910673 - DNA, 25 bp, Homo sapien
ctcagtttataaccaaactgacagg

SEQ ID NO: 5910674 - DNA, 25 bp, Homo sapien
gggtagttcacctaattccaagtag

SEQ ID NO: 5910675 - DNA, 25 bp, Homo sapien
gtggctcatcacatctggctcagtt

SEQ ID NO: 5910676 - DNA, 25 bp, Homo sapien
ataagaatcccatgggcacgaaaca

SEQ ID NO: 5910677 - DNA, 25 bp, Homo sapien
aaaaagcagaggaaagccaaccagt

SEQ ID NO: 5910678 - DNA, 25 bp, Homo sapien
aggagctgtggagccattcacaaag

SEQ ID NO: 5910679 - DNA, 25 bp, Homo sapien
tggccctgcttcagggctggggcac

SEQ ID NO: 5910680 - DNA, 25 bp, Homo sapien
cacaaaagatctgaaatccaccaat

SEQ ID NO: 5910681 - DNA, 25 bp, Homo sapien
taacaacatagctccctctcccagt

SEQ ID NO: 5910682 - DNA, 25 bp, Homo sapien
ctgaatgggggttgctttaagacca

SEQ ID NO: 5910683 - DNA, 25 bp, Homo sapien
tcatgataacttaaacacacagaca

SEQ ID NO: 5910684 - DNA, 25 bp, Homo sapien
ttaagaccagaagtcaaagtcactg

SEQ ID NO: 5910685 - DNA, 25 bp, Homo sapien
cagccatgtttacactttaaatatt

SEQ ID NO: 5910686 - DNA, 25 bp, Homo sapien
aacgttcacagcacaaaaaaaatac

SEQ ID NO: 5910687 - DNA, 25 bp, Homo sapien
ttttatctttgtaaacaacgtacat

SEQ ID NO: 5910688 - DNA, 25 bp, Homo sapien
tcctggtacagagtggcgtaacaaa

SEQ ID NO: 5910689 - DNA, 25 bp, Homo sapien
ctcatcacatctggctcagtttata

SEQ ID NO: 5910690 - DNA, 25 bp, Homo sapien
tcactgattcgttttaacaacatag

SEQ ID NO: 5910691 - DNA, 25 bp, Homo sapien
gtgggggcaccataatgaggacttt

SEQ ID NO: 5910692 - DNA, 25 bp, Homo sapien
aaccagaggagaaaaacacaaaaga

SEQ ID NO: 5910693 - DNA, 25 bp, Homo sapien
catgggcacgaaacacagggattta

SEQ ID NO: 5910694 - DNA, 25 bp, Homo sapien
ggtgggaacgaatacatttatgaga

SEQ ID NO: 5910695 - DNA, 25 bp, Homo sapien
atcccatgggcacgaaacacaggga

SEQ ID NO: 5910696 - DNA, 25 bp, Homo sapien
cttgtggtggctcatcacatctggc

SEQ ID NO: 5910697 - DNA, 25 bp, Homo sapien
tttaaaaaggaaatgcagagagaac

SEQ ID NO: 5910698 - DNA, 25 bp, Homo sapien
aaatattcatgataacttaaacaca

SEQ ID NO: 5910699 - DNA, 25 bp, Homo sapien
cctaattccaagtagctggccctgc

SEQ ID NO: 5910700 - DNA, 25 bp, Homo sapien
ggaacaaacaacagacagaattcaa

SEQ ID NO: 5910701 - DNA, 25 bp, Homo sapien
aaagccaaccagtatcaaaatccac

SEQ ID NO: 5910702 - DNA, 25 bp, Homo sapien
gaggacttttctttaagttcactga

SEQ ID NO: 5910703 - DNA, 25 bp, Homo sapien
tgggaacgaatacatttatgagaac

SEQ ID NO: 5910704 - DNA, 25 bp, Homo sapien
tccaccaatcgctttttgagctgaa

SEQ ID NO: 5910705 - DNA, 25 bp, Homo sapien
aacttgaggagccagcctctaaggt

SEQ ID NO: 5910706 - DNA, 25 bp, Homo sapien
aacgaatacatttatgagaacaatt

SEQ ID NO: 5910707 - DNA, 25 bp, Homo sapien
atattcatgataacttaaacacaca

SEQ ID NO: 5910708 - DNA, 25 bp, Homo sapien
gtcaaagtcactgctgctggtggtc

SEQ ID NO: 5910709 - DNA, 25 bp, Homo sapien
ggctggggcaccaaaacttgaggag

SEQ ID NO: 5910710 - DNA, 25 bp, Homo sapien
aacagccatgtttacactttaaata

SEQ ID NO: 5910711 - DNA, 25 bp, Homo sapien
agatgtatttctcagctttacatag

SEQ ID NO: 5910712 - DNA, 25 bp, Homo sapien
aattcaaacagtgaaagaaaaacaa

SEQ ID NO: 5910713 - DNA, 25 bp, Homo sapien
atttctccagtttcttcaaagagaa

SEQ ID NO: 5910714 - DNA, 25 bp, Homo sapien
tccctgctggtgggaacgaatacat

SEQ ID NO: 5910715 - DNA, 25 bp, Homo sapien
caaacagtgaaagaaaaacaaacaa

SEQ ID NO: 5910716 - DNA, 25 bp, Homo sapien
gtagttcacctaattccaagtagct

SEQ ID NO: 5910717 - DNA, 25 bp, Homo sapien
tctgtggtgggggcaccataatgag

SEQ ID NO: 5910718 - DNA, 25 bp, Homo sapien
gagtggcgtaacaaaacagccatgt

SEQ ID NO: 5910719 - DNA, 25 bp, Homo sapien
gggcaccataatgaggacttttctt

SEQ ID NO: 5910720 - DNA, 25 bp, Homo sapien
gtctttggcagaaaacgttcacagc

SEQ ID NO: 5910721 - DNA, 25 bp, Homo sapien
ggaattaaaaaaatacgcaattgcc

SEQ ID NO: 5910722 - DNA, 25 bp, Homo sapien
gaatgggggttgctttaagaccaga

SEQ ID NO: 5910723 - DNA, 25 bp, Homo sapien
gcccagcaaatgcaaatgtttaaaa

SEQ ID NO: 5910724 - DNA, 25 bp, Homo sapien
gttcactgattcgttttaacaacat

SEQ ID NO: 5910725 - DNA, 25 bp, Homo sapien
atctggctcagtttataaccaaact

SEQ ID NO: 5910726 - DNA, 25 bp, Homo sapien
tggagccattcacaaaggctggtga

SEQ ID NO: 5910727 - DNA, 25 bp, Homo sapien
cctctcccagtccctgctggtggga

SEQ ID NO: 5910728 - DNA, 25 bp, Homo sapien
aaaagaaataccaaatattaatcca

SEQ ID NO: 5910729 - DNA, 25 bp, Homo sapien
tgagaacaatttctccagtttcttc

SEQ ID NO: 5910730 - DNA, 25 bp, Homo sapien
ctgccacgtgggggtagttcaccta

SEQ ID NO: 5910731 - DNA, 25 bp, Homo sapien
tcccagtccctgctggtgggaacga

SEQ ID NO: 5910732 - DNA, 25 bp, Homo sapien
gagccattcacaaaggctggtgata

SEQ ID NO: 5910733 - DNA, 25 bp, Homo sapien
caaacaacagacagaattcaaacag

SEQ ID NO: 5910734 - DNA, 25 bp, Homo sapien
tgctgggcatgacagatgtccgctt

SEQ ID NO: 5910735 - DNA, 25 bp, Homo sapien
cagaggaaagccaaccagtatcaaa

SEQ ID NO: 5910736 - DNA, 25 bp, Homo sapien
atgacagatgtccgcttgtggtggc

SEQ ID NO: 5910737 - DNA, 25 bp, Homo sapien
aagaccagaagtcaaagtcactgct

SEQ ID NO: 5910738 - DNA, 25 bp, Homo sapien
ttaaaaagcagaggaaagccaacca

SEQ ID NO: 5910739 - DNA, 25 bp, Homo sapien
agagaactatgggaatggaacaaac

SEQ ID NO: 5910740 - DNA, 25 bp, Homo sapien
cacgaaacacagggatttaaaaagc

SEQ ID NO: 5910741 - DNA, 25 bp, Homo sapien
gctttacataggggaaagggaatta

SEQ ID NO: 5910742 - DNA, 25 bp, Homo sapien
gcagagagaactatgggaatggaac

SEQ ID NO: 5910743 - DNA, 25 bp, Homo sapien
gggggcaccataatgaggacttttc

SEQ ID NO: 5910744 - DNA, 25 bp, Homo sapien
acaaaacagccatgtttacacttta

SEQ ID NO: 5910745 - DNA, 25 bp, Homo sapien
gttgctttaagaccagaagtcaaag

SEQ ID NO: 5910746 - DNA, 25 bp, Homo sapien
ttatctttgtaaacaacgtacatga

SEQ ID NO: 5910747 - DNA, 25 bp, Homo sapien
agacacacgtcatggtctttggcag

SEQ ID NO: 5910748 - DNA, 25 bp, Homo sapien
cttcagggctggggcaccaaaactt

SEQ ID NO: 5910749 - DNA, 25 bp, Homo sapien
taattccaagtagctggccctgctt

SEQ ID NO: 5910750 - DNA, 25 bp, Homo sapien
tacatttatgagaacaatttctcca

SEQ ID NO: 5910751 - DNA, 25 bp, Homo sapien
ttcaaacagtgaaagaaaaacaaac

SEQ ID NO: 5910752 - DNA, 25 bp, Homo sapien
tacagagtggcgtaacaaaacagcc

SEQ ID NO: 5910753 - DNA, 25 bp, Homo sapien
tcacatctggctcagtttataacca

SEQ ID NO: 5910754 - DNA, 25 bp, Homo sapien
agaagtcaaagtcactgctgctggt

SEQ ID NO: 5910755 - DNA, 25 bp, Homo sapien
ttctcagctttacataggggaaagg

SEQ ID NO: 5910756 - DNA, 25 bp, Homo sapien
cactttaaatattcatgataactta

SEQ ID NO: 5910757 - DNA, 25 bp, Homo sapien
aaaaggaaatgcagagagaactatg

SEQ ID NO: 5910758 - DNA, 25 bp, Homo sapien
tcgctttttgagctgaatgggggtt

SEQ ID NO: 5910759 - DNA, 25 bp, Homo sapien
ataaccaaactgacaggatgtccca

SEQ ID NO: 5910760 - DNA, 25 bp, Homo sapien
gctccctctcccagtccctgctggt

SEQ ID NO: 5910761 - DNA, 25 bp, Homo sapien
gagaaaaacacaaaagatctgaaat

SEQ ID NO: 5910762 - DNA, 25 bp, Homo sapien
gtaaacaacgtacatgaaccagatg

SEQ ID NO: 5910763 - DNA, 25 bp, Homo sapien
cccatgggcacgaaacacagggatt

SEQ ID NO: 5910764 - DNA, 25 bp, Homo sapien
gggaatggaacaaacaacagacaga

SEQ ID NO: 5910765 - DNA, 25 bp, Homo sapien
cagaaaacgttcacagcacaaaaaa

SEQ ID NO: 5910766 - DNA, 25 bp, Homo sapien
ccagatgtatttctcagctttacat

SEQ ID NO: 5910767 - DNA, 25 bp, Homo sapien
gacagatgtccgcttgtggtggctc

SEQ ID NO: 5910768 - DNA, 25 bp, Homo sapien
ttcaaagagaacctggtgctgggca

SEQ ID NO: 5910769 - DNA, 25 bp, Homo sapien
aatgcaaatgtttaaaaaggaaatg

SEQ ID NO: 5910770 - DNA, 25 bp, Homo sapien
gtggcgtaacaaaacagccatgttt

SEQ ID NO: 5910771 - DNA, 25 bp, Homo sapien
cattcacaaaggctggtgataagaa

SEQ ID NO: 5910772 - DNA, 25 bp, Homo sapien
aattgcccagcaaatgcaaatgttt

SEQ ID NO: 5910773 - DNA, 25 bp, Homo sapien
caaatgcaaatgtttaaaaaggaaa

SEQ ID NO: 5910774 - DNA, 25 bp, Homo sapien
ctgctgctggtggtctgccacgtgg

SEQ ID NO: 5910775 - DNA, 25 bp, Homo sapien
tggtctttggcagaaaacgttcaca

SEQ ID NO: 5910776 - DNA, 25 bp, Homo sapien
gatgtccgcttgtggtggctcatca

SEQ ID NO: 5910777 - DNA, 25 bp, Homo sapien
aagtcaaagtcactgctgctggtgg

SEQ ID NO: 5910778 - DNA, 25 bp, Homo sapien
aggagaaaaacacaaaagatctgaa

SEQ ID NO: 5910779 - DNA, 25 bp, Homo sapien
ctttggcagaaaacgttcacagcac

SEQ ID NO: 5910780 - DNA, 25 bp, Homo sapien
aaccagtatcaaaatccacagccag

SEQ ID NO: 5910781 - DNA, 25 bp, Homo sapien
tgataagaatcccatgggcacgaaa

SEQ ID NO: 5910782 - DNA, 25 bp, Homo sapien
aaccaaactgacaggatgtcccagg

SEQ ID NO: 5910783 - DNA, 25 bp, Homo sapien
tgattcgttttaacaacatagctcc

SEQ ID NO: 5910784 - DNA, 25 bp, Homo sapien
ccaaccagtatcaaaatccacagcc

SEQ ID NO: 5910785 - DNA, 25 bp, Homo sapien
aatccaccaatcgctttttgagctg

SEQ ID NO: 5910786 - DNA, 25 bp, Homo sapien
tgccattctgtggtgggggcaccat

SEQ ID NO: 5910787 - DNA, 25 bp, Homo sapien
ttcacaaaggctggtgataagaatc

SEQ ID NO: 5910788 - DNA, 25 bp, Homo sapien
atgataacttaaacacacagacaca

SEQ ID NO: 5910789 - DNA, 25 bp, Homo sapien
agcagaggaaagccaaccagtatca

SEQ ID NO: 5910790 - DNA, 25 bp, Homo sapien
gcaattgcccagcaaatgcaaatgt

SEQ ID NO: 5910791 - DNA, 25 bp, Homo sapien
acacacagacacacgtcatggtctt

SEQ ID NO: 5910792 - DNA, 25 bp, Homo sapien
gaaataccaaatattaatccaaaat

SEQ ID NO: 5910793 - DNA, 25 bp, Homo sapien
cacaaaggctggtgataagaatccc

SEQ ID NO: 5910794 - DNA, 25 bp, Homo sapien
tccgcttgtggtggctcatcacatc

SEQ ID NO: 5910795 - DNA, 25 bp, Homo sapien
caccaaaacttgaggagccagcctc

SEQ ID NO: 5910796 - DNA, 25 bp, Homo sapien
tccctctcccagtccctgctggtgg

SEQ ID NO: 5910797 - DNA, 25 bp, Homo sapien
cacctaattccaagtagctggccct

SEQ ID NO: 5910798 - DNA, 25 bp, Homo sapien
ctttgtaaacaacgtacatgaacca

SEQ ID NO: 5910799 - DNA, 25 bp, Homo sapien
ggaaagccaaccagtatcaaaatcc

SEQ ID NO: 5910800 - DNA, 25 bp, Homo sapien
agtccctgctggtgggaacgaatac

SEQ ID NO: 5910801 - DNA, 25 bp, Homo sapien
acagggatttaaaaagcagaggaaa

SEQ ID NO: 5910802 - DNA, 25 bp, Homo sapien
aaaacacaaaagatctgaaatccac

SEQ ID NO: 5910803 - DNA, 25 bp, Homo sapien
cgtacatgaaccagatgtatttctc

SEQ ID NO: 5910804 - DNA, 25 bp, Homo sapien
tatgagaacaatttctccagtttct

SEQ ID NO: 5910805 - DNA, 25 bp, Homo sapien
acttaaacacacagacacacgtcat

SEQ ID NO: 5910806 - DNA, 25 bp, Homo sapien
acaaccagaggagaaaaacacaaaa

SEQ ID NO: 5910807 - DNA, 25 bp, Homo sapien
agtatcaaaatccacagccaggaac

SEQ ID NO: 5910808 - DNA, 25 bp, Homo sapien
agacagaattcaaacagtgaaagaa

SEQ ID NO: 5910809 - DNA, 25 bp, Homo sapien
cgaatacatttatgagaacaatttc

SEQ ID NO: 5910810 - DNA, 25 bp, Homo sapien
aacaaacaacagacagaattcaaac

SEQ ID NO: 5910811 - DNA, 25 bp, Homo sapien
atgggaatggaacaaacaacagaca

SEQ ID NO: 5910812 - DNA, 25 bp, Homo sapien
gataacttaaacacacagacacacg

SEQ ID NO: 5910813 - DNA, 25 bp, Homo sapien
gctttttgagctgaatgggggttgc

SEQ ID NO: 5910814 - DNA, 25 bp, Homo sapien
aaactgacaggatgtcccagggata

SEQ ID NO: 5910815 - DNA, 25 bp, Homo sapien
gtcactgctgctggtggtctgccac

SEQ ID NO: 5910816 - DNA, 25 bp, Homo sapien
cgttcacagcacaaaaaaaatactt

SEQ ID NO: 5910817 - DNA, 25 bp, Homo sapien
acgcaattgcccagcaaatgcaaat

SEQ ID NO: 5910818 - DNA, 25 bp, Homo sapien
gaaaaacacaaaagatctgaaatcc

SEQ ID NO: 5910819 - DNA, 25 bp, Homo sapien
gaacctggtgctgggcatgacagat

SEQ ID NO: 5910820 - DNA, 25 bp, Homo sapien
ataggagctgtggagccattcacaa

SEQ ID NO: 5910821 - DNA, 25 bp, Homo sapien
ctgggcatgacagatgtccgcttgt

SEQ ID NO: 5910822 - DNA, 25 bp, Homo sapien
aaggctggtgataagaatcccatgg

SEQ ID NO: 5910823 - DNA, 25 bp, Homo sapien
ggctcatcacatctggctcagttta

SEQ ID NO: 5910824 - DNA, 25 bp, Homo sapien
aacaacagacagaattcaaacagtg

SEQ ID NO: 5910825 - DNA, 25 bp, Homo sapien
caaaagatctgaaatccaccaatcg

SEQ ID NO: 5910826 - DNA, 25 bp, Homo sapien
acatctggctcagtttataaccaaa

SEQ ID NO: 5910827 - DNA, 25 bp, Homo sapien
atttctcagctttacataggggaaa

SEQ ID NO: 5910828 - DNA, 25 bp, Homo sapien
gctggccctgcttcagggctggggc

SEQ ID NO: 5910829 - DNA, 25 bp, Homo sapien
cagtgaaagaaaaacaaacaaaaca

SEQ ID NO: 5910830 - DNA, 25 bp, Homo sapien
ttaaacacacagacacacgtcatgg

SEQ ID NO: 5910831 - DNA, 25 bp, Homo sapien
tgtggtggctcatcacatctggctc

SEQ ID NO: 5910832 - DNA, 25 bp, Homo sapien
atggaacaaacaacagacagaattc

SEQ ID NO: 5910833 - DNA, 25 bp, Homo sapien
gagaacctggtgctgggcatgacag

SEQ ID NO: 5910834 - DNA, 25 bp, Homo sapien
cagctttacataggggaaagggaat

SEQ ID NO: 5910835 - DNA, 25 bp, Homo sapien
ccaatcgctttttgagctgaatggg

SEQ ID NO: 5910836 - DNA, 25 bp, Homo sapien
tgacaggatgtcccagggataggag

SEQ ID NO: 5910837 - DNA, 25 bp, Homo sapien
ccaaaacttgaggagccagcctcta

SEQ ID NO: 5910838 - DNA, 25 bp, Homo sapien
agaattcaaacagtgaaagaaaaac

SEQ ID NO: 5910839 - DNA, 25 bp, Homo sapien
agggatttaaaaagcagaggaaagc

SEQ ID NO: 5910840 - DNA, 25 bp, Homo sapien
ttaaaagaaataccaaatattaatc

SEQ ID NO: 5910841 - DNA, 25 bp, Homo sapien
gccatgtttacactttaaatattca

SEQ ID NO: 5910842 - DNA, 25 bp, Homo sapien
ctgaaatccaccaatcgctttttga

SEQ ID NO: 5910843 - DNA, 25 bp, Homo sapien
agggctggggcaccaaaacttgagg

SEQ ID NO: 5910844 - DNA, 25 bp, Homo sapien
cctgctggtgggaacgaatacattt

SEQ ID NO: 5910845 - DNA, 25 bp, Homo sapien
ctctaaggtgccattctgtggtggg

SEQ ID NO: 5910846 - DNA, 25 bp, Homo sapien
cacagcacaaaaaaaatactttaaa

SEQ ID NO: 5910847 - DNA, 25 bp, Homo sapien
taacttaaacacacagacacacgtc

SEQ ID NO: 5910848 - DNA, 25 bp, Homo sapien
gagccagcctctaaggtgccattct

SEQ ID NO: 5910849 - DNA, 25 bp, Homo sapien
cagtttataaccaaactgacaggat

SEQ ID NO: 5910850 - DNA, 25 bp, Homo sapien
ggtgccattctgtggtgggggcacc

SEQ ID NO: 5910851 - DNA, 25 bp, Homo sapien
aaaacagccatgtttacactttaaa

SEQ ID NO: 5910852 - DNA, 25 bp, Homo sapien
tagctggccctgcttcagggctggg

SEQ ID NO: 5910853 - DNA, 25 bp, Homo sapien
aacgtacatgaaccagatgtatttc

SEQ ID NO: 5910854 - DNA, 25 bp, Homo sapien
agaggagaaaaacacaaaagatctg

SEQ ID NO: 5910855 - DNA, 25 bp, Homo sapien
tgggcacgaaacacagggatttaaa

SEQ ID NO: 5910856 - DNA, 25 bp, Homo sapien
ctggtgctgggcatgacagatgtcc

SEQ ID NO: 5910857 - DNA, 25 bp, Homo sapien
tcagggctggggcaccaaaacttga

SEQ ID NO: 5910858 - DNA, 25 bp, Homo sapien
ctcagctttacataggggaaaggga

SEQ ID NO: 5910859 - DNA, 25 bp, Homo sapien
caaaggctggtgataagaatcccat

SEQ ID NO: 5910860 - DNA, 25 bp, Homo sapien
tgaggagccagcctctaaggtgcca

SEQ ID NO: 5910861 - DNA, 25 bp, Homo sapien
ccagtttcttcaaagagaacctggt

SEQ ID NO: 5910862 - DNA, 25 bp, Homo sapien
tttcttcaaagagaacctggtgctg

SEQ ID NO: 5910863 - DNA, 25 bp, Homo sapien
acacagacacacgtcatggtctttg

SEQ ID NO: 5910864 - DNA, 25 bp, Homo sapien
ctaaggtgccattctgtggtggggg

SEQ ID NO: 5910865 - DNA, 25 bp, Homo sapien
ggcaccaaaacttgaggagccagcc

SEQ ID NO: 5910866 - DNA, 25 bp, Homo sapien
aggagccagcctctaaggtgccatt

SEQ ID NO: 5910867 - DNA, 25 bp, Homo sapien
ccaaactgacaggatgtcccaggga

SEQ ID NO: 5910868 - DNA, 25 bp, Homo sapien
aactatgggaatggaacaaacaaca

SEQ ID NO: 5910869 - DNA, 25 bp, Homo sapien
cactgctgctggtggtctgccacgt

SEQ ID NO: 5910870 - DNA, 25 bp, Homo sapien
tccaagtagctggccctgcttcagg

SEQ ID NO: 5910871 - DNA, 25 bp, Homo sapien
ccagtatcaaaatccacagccagga

SEQ ID NO: 5910872 - DNA, 25 bp, Homo sapien
tttttgagctgaatgggggttgctt

SEQ ID NO: 5910873 - DNA, 25 bp, Homo sapien
tagctccctctcccagtccctgctg

SEQ ID NO: 5910874 - DNA, 25 bp, Homo sapien
gaaatccaccaatcgctttttgagc

SEQ ID NO: 5910875 - DNA, 25 bp, Homo sapien
tcccagggataggagctgtggagcc

SEQ ID NO: 5910876 - DNA, 25 bp, Homo sapien
ccaggagactagtgaccgtcttggt

SEQ ID NO: 5910877 - DNA, 25 bp, Homo sapien
tccttgggctctgggccaggcctcg

SEQ ID NO: 5910878 - DNA, 25 bp, Homo sapien
actttcctgtgctgggagcaggctg

SEQ ID NO: 5910879 - DNA, 25 bp, Homo sapien
ggaattccagggaaatgaaagtggg

SEQ ID NO: 5910880 - DNA, 25 bp, Homo sapien
gcccatgggtgtgtttgttccttgt

SEQ ID NO: 5910881 - DNA, 25 bp, Homo sapien
ctggccagcagtacacacacaacac

SEQ ID NO: 5910882 - DNA, 25 bp, Homo sapien
tctggaatacgatgcttaaatgata

SEQ ID NO: 5910883 - DNA, 25 bp, Homo sapien
ctgttttgttcttctgaaagctgtt

SEQ ID NO: 5910884 - DNA, 25 bp, Homo sapien
tgtaggaaaagttctggaatacgat

SEQ ID NO: 5910885 - DNA, 25 bp, Homo sapien
acaggaaaggggccagctctgccca

SEQ ID NO: 5910886 - DNA, 25 bp, Homo sapien
gcctgtcccagaggctgcatcccag

SEQ ID NO: 5910887 - DNA, 25 bp, Homo sapien
cattactttcctgtgctgggagcag

SEQ ID NO: 5910888 - DNA, 25 bp, Homo sapien
agctcattactttcctgtgctggga

SEQ ID NO: 5910889 - DNA, 25 bp, Homo sapien
caagcagagtctggccagatggtgg

SEQ ID NO: 5910890 - DNA, 25 bp, Homo sapien
gaaggagggctgtgtaggaaaagtt

SEQ ID NO: 5910891 - DNA, 25 bp, Homo sapien
ctacagagctgtgcctctggccagc

SEQ ID NO: 5910892 - DNA, 25 bp, Homo sapien
ctagcttcttgggctctcaagacac

SEQ ID NO: 5910893 - DNA, 25 bp, Homo sapien
atttgattggaattccagggaaatg

SEQ ID NO: 5910894 - DNA, 25 bp, Homo sapien
ccagcagtacacacacaacacacac

SEQ ID NO: 5910895 - DNA, 25 bp, Homo sapien
cccctgacaggtgctcctacgcagg

SEQ ID NO: 5910896 - DNA, 25 bp, Homo sapien
atacattattccccggggtgtgagc

SEQ ID NO: 5910897 - DNA, 25 bp, Homo sapien
ctgcccatgggtgtgtttgttcctt

SEQ ID NO: 5910898 - DNA, 25 bp, Homo sapien
agccggcctcaagctcatagcgagc

SEQ ID NO: 5910899 - DNA, 25 bp, Homo sapien
acagaccctgcccaggttggactgt

SEQ ID NO: 5910900 - DNA, 25 bp, Homo sapien
tagtagaggcaggggcctgagccct

SEQ ID NO: 5910901 - DNA, 25 bp, Homo sapien
atacgatgcttaaatgatacattat

SEQ ID NO: 5910902 - DNA, 25 bp, Homo sapien
gtggcctctccttgggctctgggcc

SEQ ID NO: 5910903 - DNA, 25 bp, Homo sapien
aattctacccagaccgctagtagag

SEQ ID NO: 5910904 - DNA, 25 bp, Homo sapien
cagcctgtcccagaggctgcatccc

SEQ ID NO: 5910905 - DNA, 25 bp, Homo sapien
acgcaggtaggcagtgactgagcta

SEQ ID NO: 5910906 - DNA, 25 bp, Homo sapien
gagactagtgaccgtcttggtggct

SEQ ID NO: 5910907 - DNA, 25 bp, Homo sapien
ggctgttttgttcttctgaaagctg

SEQ ID NO: 5910908 - DNA, 25 bp, Homo sapien
ggctctgggccaggcctcgcaaaaa

SEQ ID NO: 5910909 - DNA, 25 bp, Homo sapien
tcctagattcagaccctgaagtgct

SEQ ID NO: 5910910 - DNA, 25 bp, Homo sapien
ggcctcaagctcatagcgagcctcc

SEQ ID NO: 5910911 - DNA, 25 bp, Homo sapien
atgggtgtgtttgttccttgttact

SEQ ID NO: 5910912 - DNA, 25 bp, Homo sapien
ggacaggatggggcacagaaggaac

SEQ ID NO: 5910913 - DNA, 25 bp, Homo sapien
ctgagccctgggggtggtagctcat

SEQ ID NO: 5910914 - DNA, 25 bp, Homo sapien
gctgacctgctccctggtctagcac

SEQ ID NO: 5910915 - DNA, 25 bp, Homo sapien
tgggcccctgacaggtgctcctacg

SEQ ID NO: 5910916 - DNA, 25 bp, Homo sapien
cacctgaatctggtgtacagaccct

SEQ ID NO: 5910917 - DNA, 25 bp, Homo sapien
ctgggccaggcctcgcaaaaacaca

SEQ ID NO: 5910918 - DNA, 25 bp, Homo sapien
ctacccagaccgctagtagaggcag

SEQ ID NO: 5910919 - DNA, 25 bp, Homo sapien
caggttggactgtggcggggcagcc

SEQ ID NO: 5910920 - DNA, 25 bp, Homo sapien
ccaccaccagtgtttgtcccggaac

SEQ ID NO: 5910921 - DNA, 25 bp, Homo sapien
ttccccggggtgtgagctacgcttt

SEQ ID NO: 5910922 - DNA, 25 bp, Homo sapien
gcctgagccctgggggtggtagctc

SEQ ID NO: 5910923 - DNA, 25 bp, Homo sapien
agctacgctttggctagttagtggc

SEQ ID NO: 5910924 - DNA, 25 bp, Homo sapien
agtgactgttatctcacctgaatct

SEQ ID NO: 5910925 - DNA, 25 bp, Homo sapien
ttaccctaggagcttcggttgcaag

SEQ ID NO: 5910926 - DNA, 25 bp, Homo sapien
ctgaaggagggctgtgtaggaaaag

SEQ ID NO: 5910927 - DNA, 25 bp, Homo sapien
ggggccagctctgcccatgggtgtg

SEQ ID NO: 5910928 - DNA, 25 bp, Homo sapien
cttccagaggccaccctcctagatt

SEQ ID NO: 5910929 - DNA, 25 bp, Homo sapien
gcaggtaggcagtgactgagctaca

SEQ ID NO: 5910930 - DNA, 25 bp, Homo sapien
actgggcccctgacaggtgctccta

SEQ ID NO: 5910931 - DNA, 25 bp, Homo sapien
tccctggtctagcacagccagtggg

SEQ ID NO: 5910932 - DNA, 25 bp, Homo sapien
ctggctgttttgttcttctgaaagc

SEQ ID NO: 5910933 - DNA, 25 bp, Homo sapien
ttctacccagaccgctagtagaggc

SEQ ID NO: 5910934 - DNA, 25 bp, Homo sapien
cagtacacacacaacacacacacac

SEQ ID NO: 5910935 - DNA, 25 bp, Homo sapien
agtgactgagctacagagctgtgcc

SEQ ID NO: 5910936 - DNA, 25 bp, Homo sapien
aaatcccctgccaggagactagtga

SEQ ID NO: 5910937 - DNA, 25 bp, Homo sapien
gcagtgactgagctacagagctgtg

SEQ ID NO: 5910938 - DNA, 25 bp, Homo sapien
ctggccagatggtggccagccatgg

SEQ ID NO: 5910939 - DNA, 25 bp, Homo sapien
gcttctagcttcttgggctctcaag

SEQ ID NO: 5910940 - DNA, 25 bp, Homo sapien
ccccggggtgtgagctacgctttgg

SEQ ID NO: 5910941 - DNA, 25 bp, Homo sapien
gctagttagtggcctctccttgggc

SEQ ID NO: 5910942 - DNA, 25 bp, Homo sapien
accactgctcctggctgttttgttc

SEQ ID NO: 5910943 - DNA, 25 bp, Homo sapien
gaatacgatgcttaaatgatacatt

SEQ ID NO: 5910944 - DNA, 25 bp, Homo sapien
agagagcaagctagattacaagcag

SEQ ID NO: 5910945 - DNA, 25 bp, Homo sapien
agctacagagctgtgcctctggcca

SEQ ID NO: 5910946 - DNA, 25 bp, Homo sapien
tacaagcagagtctggccagatggt

SEQ ID NO: 5910947 - DNA, 25 bp, Homo sapien
gtgtgcaccactgctcctggctgtt

SEQ ID NO: 5910948 - DNA, 25 bp, Homo sapien
tgggggtggtagctcattactttcc

SEQ ID NO: 5910949 - DNA, 25 bp, Homo sapien
gtcccggaacccccacctccatagc

SEQ ID NO: 5910950 - DNA, 25 bp, Homo sapien
cccaagccggcctcaagctcatagc

SEQ ID NO: 5910951 - DNA, 25 bp, Homo sapien
gctcactgggcccctgacaggtgct

SEQ ID NO: 5910952 - DNA, 25 bp, Homo sapien
cgagcctcccttaccctaggagctt

SEQ ID NO: 5910953 - DNA, 25 bp, Homo sapien
gggctgtgtaggaaaagttctggaa

SEQ ID NO: 5910954 - DNA, 25 bp, Homo sapien
tgaaagctgttttgctcagctcctg

SEQ ID NO: 5910955 - DNA, 25 bp, Homo sapien
cctgaatctggtgtacagaccctgc

SEQ ID NO: 5910956 - DNA, 25 bp, Homo sapien
ctgccaaaatcccctgccaggagac

SEQ ID NO: 5910957 - DNA, 25 bp, Homo sapien
ttgggctctcaagacactaggaaca

SEQ ID NO: 5910958 - DNA, 25 bp, Homo sapien
gggccaggcctcgcaaaaacacaaa

SEQ ID NO: 5910959 - DNA, 25 bp, Homo sapien
ctggggagagagcaagctagattac

SEQ ID NO: 5910960 - DNA, 25 bp, Homo sapien
gttttgttcttctgaaagctgtttt

SEQ ID NO: 5910961 - DNA, 25 bp, Homo sapien
gaacccccacctccatagctgttag

SEQ ID NO: 5910962 - DNA, 25 bp, Homo sapien
agcttcggttgcaagtgtgcaccac

SEQ ID NO: 5910963 - DNA, 25 bp, Homo sapien
ttcttctgaaagctgttttgctcag

SEQ ID NO: 5910964 - DNA, 25 bp, Homo sapien
catgggctgctgtgcttccagaggc

SEQ ID NO: 5910965 - DNA, 25 bp, Homo sapien
tttggctagttagtggcctctcctt

SEQ ID NO: 5910966 - DNA, 25 bp, Homo sapien
cttaaatgatacattattccccggg

SEQ ID NO: 5910967 - DNA, 25 bp, Homo sapien
atcccctgccaggagactagtgacc

SEQ ID NO: 5910968 - DNA, 25 bp, Homo sapien
gattggaattccagggaaatgaaag

SEQ ID NO: 5910969 - DNA, 25 bp, Homo sapien
cttgggctctgggccaggcctcgca

SEQ ID NO: 5910970 - DNA, 25 bp, Homo sapien
gttagtggcctctccttgggctctg

SEQ ID NO: 5910971 - DNA, 25 bp, Homo sapien
acgatgcttaaatgatacattattc

SEQ ID NO: 5910972 - DNA, 25 bp, Homo sapien
ctgtcccagaggctgcatcccagga

SEQ ID NO: 5910973 - DNA, 25 bp, Homo sapien
agattacaagcagagtctggccaga

SEQ ID NO: 5910974 - DNA, 25 bp, Homo sapien
ttgtcccggaacccccacctccata

SEQ ID NO: 5910975 - DNA, 25 bp, Homo sapien
ggaacgaacaccccctgcttctagc

SEQ ID NO: 5910976 - DNA, 25 bp, Homo sapien
gtgtgtttgttccttgttactatgt

SEQ ID NO: 5910977 - DNA, 25 bp, Homo sapien
tggtagctcattactttcctgtgct

SEQ ID NO: 5910978 - DNA, 25 bp, Homo sapien
gtctggccagatggtggccagccat

SEQ ID NO: 5910979 - DNA, 25 bp, Homo sapien
gccaggcctcgcaaaaacacaaaac

SEQ ID NO: 5910980 - DNA, 25 bp, Homo sapien
aacaagacgggactgtatttgattg

SEQ ID NO: 5910981 - DNA, 25 bp, Homo sapien
ctaggaacaggaaaggggccagctc

SEQ ID NO: 5910982 - DNA, 25 bp, Homo sapien
acaggatggggcacagaaggaacga

SEQ ID NO: 5910983 - DNA, 25 bp, Homo sapien
ccttaccctaggagcttcggttgca

SEQ ID NO: 5910984 - DNA, 25 bp, Homo sapien
tccttgttactatgttttaaacctg

SEQ ID NO: 5910985 - DNA, 25 bp, Homo sapien
ctgctccctggtctagcacagccag

SEQ ID NO: 5910986 - DNA, 25 bp, Homo sapien
tgccaggagactagtgaccgtcttg

SEQ ID NO: 5910987 - DNA, 25 bp, Homo sapien
ggccaccctcctagattcagaccct

SEQ ID NO: 5910988 - DNA, 25 bp, Homo sapien
aggcagtgactgagctacagagctg

SEQ ID NO: 5910989 - DNA, 25 bp, Homo sapien
agagcaagctagattacaagcagag

SEQ ID NO: 5910990 - DNA, 25 bp, Homo sapien
cttgttactatgttttaaacctgaa

SEQ ID NO: 5910991 - DNA, 25 bp, Homo sapien
cctgggggtggtagctcattacttt

SEQ ID NO: 5910992 - DNA, 25 bp, Homo sapien
tcccaggacaggatggggcacagaa

SEQ ID NO: 5910993 - DNA, 25 bp, Homo sapien
gtttgttccttgttactatgtttta

SEQ ID NO: 5910994 - DNA, 25 bp, Homo sapien
gcaggctgacctgctccctggtcta

SEQ ID NO: 5910995 - DNA, 25 bp, Homo sapien
agcactgccaaaatcccctgccagg

SEQ ID NO: 5910996 - DNA, 25 bp, Homo sapien
ttatctcacctgaatctggtgtaca

SEQ ID NO: 5910997 - DNA, 25 bp, Homo sapien
ctgtatttgattggaattccaggga

SEQ ID NO: 5910998 - DNA, 25 bp, Homo sapien
tcaagctcatagcgagcctccctta

SEQ ID NO: 5910999 - DNA, 25 bp, Homo sapien
tgaagtgctcactgggcccctgaca

SEQ ID NO: 5911000 - DNA, 25 bp, Homo sapien
agcctcccttaccctaggagcttcg

SEQ ID NO: 5911001 - DNA, 25 bp, Homo sapien
tggggcacagaaggaacgaacaccc

SEQ ID NO: 5911002 - DNA, 25 bp, Homo sapien
ggcctctccttgggctctgggccag

SEQ ID NO: 5911003 - DNA, 25 bp, Homo sapien
ggcccctgacaggtgctcctacgca

SEQ ID NO: 5911004 - DNA, 25 bp, Homo sapien
gtgtacagaccctgcccaggttgga

SEQ ID NO: 5911005 - DNA, 25 bp, Homo sapien
ctctggccagcagtacacacacaac

SEQ ID NO: 5911006 - DNA, 25 bp, Homo sapien
caagctagattacaagcagagtctg

SEQ ID NO: 5911007 - DNA, 25 bp, Homo sapien
actatgttttaaacctgaatagagc

SEQ ID NO: 5911008 - DNA, 25 bp, Homo sapien
gttggactgtggcggggcagccacc

SEQ ID NO: 5911009 - DNA, 25 bp, Homo sapien
tttgctcagctcctgtaattctacc

SEQ ID NO: 5911010 - DNA, 25 bp, Homo sapien
tgcttaaatgatacattattccccg

SEQ ID NO: 5911011 - DNA, 25 bp, Homo sapien
aaaacaagacgggactgtatttgat

SEQ ID NO: 5911012 - DNA, 25 bp, Homo sapien
ctagcacagccagtgggaatctggg

SEQ ID NO: 5911013 - DNA, 25 bp, Homo sapien
tggctagttagtggcctctccttgg

SEQ ID NO: 5911014 - DNA, 25 bp, Homo sapien
ttttggctttttgggatacggtctc

SEQ ID NO: 5911015 - DNA, 25 bp, Homo sapien
attattccccggggtgtgagctacg

SEQ ID NO: 5911016 - DNA, 25 bp, Homo sapien
aaggggccagctctgcccatgggtg

SEQ ID NO: 5911017 - DNA, 25 bp, Homo sapien
aagacactaggaacaggaaaggggc

SEQ ID NO: 5911018 - DNA, 25 bp, Homo sapien
ctcactctagcccaagccggcctca

SEQ ID NO: 5911019 - DNA, 25 bp, Homo sapien
gactgtggcggggcagccaccacca

SEQ ID NO: 5911020 - DNA, 25 bp, Homo sapien
ctcacctgaatctggtgtacagacc

SEQ ID NO: 5911021 - DNA, 25 bp, Homo sapien
ctgtggcggggcagccaccaccagt

SEQ ID NO: 5911022 - DNA, 25 bp, Homo sapien
atctcacctgaatctggtgtacaga

SEQ ID NO: 5911023 - DNA, 25 bp, Homo sapien
gactagtgaccgtcttggtggctga

SEQ ID NO: 5911024 - DNA, 25 bp, Homo sapien
tcgcaaaaacacaaaacaagacggg

SEQ ID NO: 5911025 - DNA, 25 bp, Homo sapien
gtctcactctagcccaagccggcct

SEQ ID NO: 5911026 - DNA, 25 bp, Homo sapien
ctgcttctagcttcttgggctctca

SEQ ID NO: 5911027 - DNA, 25 bp, Homo sapien
cccagaggctgcatcccaggacagg

SEQ ID NO: 5911028 - DNA, 25 bp, Homo sapien
attcagaccctgaagtgctcactgg

SEQ ID NO: 5911029 - DNA, 25 bp, Homo sapien
gtgctgggagcaggctgacctgctc

SEQ ID NO: 5911030 - DNA, 25 bp, Homo sapien
gcaagtgtgcaccactgctcctggc

SEQ ID NO: 5911031 - DNA, 25 bp, Homo sapien
actaaatgcagcctgtcccagaggc

SEQ ID NO: 5911032 - DNA, 25 bp, Homo sapien
cactgctcctggctgttttgttctt

SEQ ID NO: 5911033 - DNA, 25 bp, Homo sapien
ccatagctgttagtggctgaaggag

SEQ ID NO: 5911034 - DNA, 25 bp, Homo sapien
gtgctcactgggcccctgacaggtg

SEQ ID NO: 5911035 - DNA, 25 bp, Homo sapien
tcaagacactaggaacaggaaaggg

SEQ ID NO: 5911036 - DNA, 25 bp, Homo sapien
agattcagaccctgaagtgctcact

SEQ ID NO: 5911037 - DNA, 25 bp, Homo sapien
caggcctcgcaaaaacacaaaacaa

SEQ ID NO: 5911038 - DNA, 25 bp, Homo sapien
tgtttgtttttggctttttgggata

SEQ ID NO: 5911039 - DNA, 25 bp, Homo sapien
ccagatggtggccagccatgggctg

SEQ ID NO: 5911040 - DNA, 25 bp, Homo sapien
ctgaatagagcactgccaaaatccc

SEQ ID NO: 5911041 - DNA, 25 bp, Homo sapien
gaggctgcatcccaggacaggatgg

SEQ ID NO: 5911042 - DNA, 25 bp, Homo sapien
gctcatagcgagcctcccttaccct

SEQ ID NO: 5911043 - DNA, 25 bp, Homo sapien
accgtcttggtggctgagtgactgt

SEQ ID NO: 5911044 - DNA, 25 bp, Homo sapien
taaatgcagcctgtcccagaggctg

SEQ ID NO: 5911045 - DNA, 25 bp, Homo sapien
tagtggctgaaggagggctgtgtag

SEQ ID NO: 5911046 - DNA, 25 bp, Homo sapien
cacagccagtgggaatctggggaga

SEQ ID NO: 5911047 - DNA, 25 bp, Homo sapien
cctcctagattcagaccctgaagtg

SEQ ID NO: 5911048 - DNA, 25 bp, Homo sapien
aggatggggcacagaaggaacgaac

SEQ ID NO: 5911049 - DNA, 25 bp, Homo sapien
tgtgtaggaaaagttctggaatacg

SEQ ID NO: 5911050 - DNA, 25 bp, Homo sapien
tcggttgcaagtgtgcaccactgct

SEQ ID NO: 5911051 - DNA, 25 bp, Homo sapien
gcctctggccagcagtacacacaca

SEQ ID NO: 5911052 - DNA, 25 bp, Homo sapien
tgtgcttccagaggccaccctccta

SEQ ID NO: 5911053 - DNA, 25 bp, Homo sapien
cactaggaacaggaaaggggccagc

SEQ ID NO: 5911054 - DNA, 25 bp, Homo sapien
cctggtctagcacagccagtgggaa

SEQ ID NO: 5911055 - DNA, 25 bp, Homo sapien
cgtcttggtggctgagtgactgtta

SEQ ID NO: 5911056 - DNA, 25 bp, Homo sapien
ctccatagctgttagtggctgaagg

SEQ ID NO: 5911057 - DNA, 25 bp, Homo sapien
aagctcatagcgagcctcccttacc

SEQ ID NO: 5911058 - DNA, 25 bp, Homo sapien
ccctgcttctagcttcttgggctct

SEQ ID NO: 5911059 - DNA, 25 bp, Homo sapien
ctgttttgctcagctcctgtaattc

SEQ ID NO: 5911060 - DNA, 25 bp, Homo sapien
tacggtctcactctagcccaagccg

SEQ ID NO: 5911061 - DNA, 25 bp, Homo sapien
agctgttttgctcagctcctgtaat

SEQ ID NO: 5911062 - DNA, 25 bp, Homo sapien
agacgggactgtatttgattggaat

SEQ ID NO: 5911063 - DNA, 25 bp, Homo sapien
ccccctgcttctagcttcttgggct

SEQ ID NO: 5911064 - DNA, 25 bp, Homo sapien
gaacaggaaaggggccagctctgcc

SEQ ID NO: 5911065 - DNA, 25 bp, Homo sapien
agctgtgcctctggccagcagtaca

SEQ ID NO: 5911066 - DNA, 25 bp, Homo sapien
gtacacacacaacacacacacaccc

SEQ ID NO: 5911067 - DNA, 25 bp, Homo sapien
acacacacaacacacacacacccct

SEQ ID NO: 5911068 - DNA, 25 bp, Homo sapien
gaatagagcactgccaaaatcccct

SEQ ID NO: 5911069 - DNA, 25 bp, Homo sapien
gagtctggccagatggtggccagcc

SEQ ID NO: 5911070 - DNA, 25 bp, Homo sapien
atagctgttagtggctgaaggaggg

SEQ ID NO: 5911071 - DNA, 25 bp, Homo sapien
cactctagcccaagccggcctcaag

SEQ ID NO: 5911072 - DNA, 25 bp, Homo sapien
tggtctagcacagccagtgggaatc

SEQ ID NO: 5911073 - DNA, 25 bp, Homo sapien
gctgtgcttccagaggccaccctcc

SEQ ID NO: 5911074 - DNA, 25 bp, Homo sapien
gaatctggggagagagcaagctaga

SEQ ID NO: 5911075 - DNA, 25 bp, Homo sapien
tgagtgactgttatctcacctgaat

SEQ ID NO: 5911076 - DNA, 25 bp, Homo sapien
gctttggctagttagtggcctctcc

SEQ ID NO: 5911077 - DNA, 25 bp, Homo sapien
ggctttttgggatacggtctcactc

SEQ ID NO: 5911078 - DNA, 25 bp, Homo sapien
gagggctgtgtaggaaaagttctgg

SEQ ID NO: 5911079 - DNA, 25 bp, Homo sapien
aatgatacattattccccggggtgt

SEQ ID NO: 5911080 - DNA, 25 bp, Homo sapien
tcttgggctctcaagacactaggaa

SEQ ID NO: 5911081 - DNA, 25 bp, Homo sapien
gggctctcaagacactaggaacagg

SEQ ID NO: 5911082 - DNA, 25 bp, Homo sapien
ggagagagcaagctagattacaagc

SEQ ID NO: 5911083 - DNA, 25 bp, Homo sapien
ggaaaagttctggaatacgatgctt

SEQ ID NO: 5911084 - DNA, 25 bp, Homo sapien
tcagaccctgaagtgctcactgggc

SEQ ID NO: 5911085 - DNA, 25 bp, Homo sapien
gtaggcagtgactgagctacagagc

SEQ ID NO: 5911086 - DNA, 25 bp, Homo sapien
ctcattactttcctgtgctgggagc

SEQ ID NO: 5911087 - DNA, 25 bp, Homo sapien
ctgctgtgcttccagaggccaccct

SEQ ID NO: 5911088 - DNA, 25 bp, Homo sapien
accctgaagtgctcactgggcccct

SEQ ID NO: 5911089 - DNA, 25 bp, Homo sapien
tcatagcgagcctcccttaccctag

SEQ ID NO: 5911090 - DNA, 25 bp, Homo sapien
ggcggggcagccaccaccagtgttt

SEQ ID NO: 5911091 - DNA, 25 bp, Homo sapien
cttcttgggctctcaagacactagg

SEQ ID NO: 5911092 - DNA, 25 bp, Homo sapien
ctttttgggatacggtctcactcta

SEQ ID NO: 5911093 - DNA, 25 bp, Homo sapien
caagccggcctcaagctcatagcga

SEQ ID NO: 5911094 - DNA, 25 bp, Homo sapien
aagtgtgcaccactgctcctggctg

SEQ ID NO: 5911095 - DNA, 25 bp, Homo sapien
atagagcactgccaaaatcccctgc

SEQ ID NO: 5911096 - DNA, 25 bp, Homo sapien
gatgcttaaatgatacattattccc

SEQ ID NO: 5911097 - DNA, 25 bp, Homo sapien
tgagctacagagctgtgcctctggc

SEQ ID NO: 5911098 - DNA, 25 bp, Homo sapien
acagaaggaacgaacaccccctgct

SEQ ID NO: 5911099 - DNA, 25 bp, Homo sapien
ggtgtgagctacgctttggctagtt

SEQ ID NO: 5911100 - DNA, 25 bp, Homo sapien
gtgctcctacgcaggtaggcagtga

SEQ ID NO: 5911101 - DNA, 25 bp, Homo sapien
ccacctccatagctgttagtggctg

SEQ ID NO: 5911102 - DNA, 25 bp, Homo sapien
gatacggtctcactctagcccaagc

SEQ ID NO: 5911103 - DNA, 25 bp, Homo sapien
aaacctgaatagagcactgccaaaa

SEQ ID NO: 5911104 - DNA, 25 bp, Homo sapien
acaaaacaagacgggactgtatttg

SEQ ID NO: 5911105 - DNA, 25 bp, Homo sapien
tcctacgcaggtaggcagtgactga

SEQ ID NO: 5911106 - DNA, 25 bp, Homo sapien
ccagaccgctagtagaggcaggggc

SEQ ID NO: 5911107 - DNA, 25 bp, Homo sapien
gagccctgggggtggtagctcatta

SEQ ID NO: 5911108 - DNA, 25 bp, Homo sapien
aggtgctcctacgcaggtaggcagt

SEQ ID NO: 5911109 - DNA, 25 bp, Homo sapien
ggccagctctgcccatgggtgtgtt

SEQ ID NO: 5911110 - DNA, 25 bp, Homo sapien
agaccctgaagtgctcactgggccc

SEQ ID NO: 5911111 - DNA, 25 bp, Homo sapien
gggcacagaaggaacgaacaccccc

SEQ ID NO: 5911112 - DNA, 25 bp, Homo sapien
gttctggaatacgatgcttaaatga

SEQ ID NO: 5911113 - DNA, 25 bp, Homo sapien
gtggctgaaggagggctgtgtagga

SEQ ID NO: 5911114 - DNA, 25 bp, Homo sapien
ctagattacaagcagagtctggcca

SEQ ID NO: 5911115 - DNA, 25 bp, Homo sapien
tctcaagacactaggaacaggaaag

SEQ ID NO: 5911116 - DNA, 25 bp, Homo sapien
aggtaggcagtgactgagctacaga

SEQ ID NO: 5911117 - DNA, 25 bp, Homo sapien
cctgcccaggttggactgtggcggg

SEQ ID NO: 5911118 - DNA, 25 bp, Homo sapien
ttctagcttcttgggctctcaagac

SEQ ID NO: 5911119 - DNA, 25 bp, Homo sapien
cttcggttgcaagtgtgcaccactg

SEQ ID NO: 5911120 - DNA, 25 bp, Homo sapien
acattattccccggggtgtgagcta

SEQ ID NO: 5911121 - DNA, 25 bp, Homo sapien
taggaaaagttctggaatacgatgc

SEQ ID NO: 5911122 - DNA, 25 bp, Homo sapien
attacaagcagagtctggccagatg

SEQ ID NO: 5911123 - DNA, 25 bp, Homo sapien
accctaggagcttcggttgcaagtg

SEQ ID NO: 5911124 - DNA, 25 bp, Homo sapien
acctgaatagagcactgccaaaatc

SEQ ID NO: 5911125 - DNA, 25 bp, Homo sapien
cggggcagccaccaccagtgtttgt

SEQ ID NO: 5911126 - DNA, 25 bp, Homo sapien
aaacacaaaacaagacgggactgta

SEQ ID NO: 5911127 - DNA, 25 bp, Homo sapien
gaaaggggccagctctgcccatggg

SEQ ID NO: 5911128 - DNA, 25 bp, Homo sapien
ggctgctgtgcttccagaggccacc

SEQ ID NO: 5911129 - DNA, 25 bp, Homo sapien
aggctgacctgctccctggtctagc

SEQ ID NO: 5911130 - DNA, 25 bp, Homo sapien
ggtggccagccatgggctgctgtgc

SEQ ID NO: 5911131 - DNA, 25 bp, Homo sapien
agctgttagtggctgaaggagggct

SEQ ID NO: 5911132 - DNA, 25 bp, Homo sapien
ccccacctccatagctgttagtggc

SEQ ID NO: 5911133 - DNA, 25 bp, Homo sapien
agcagtacacacacaacacacacac

SEQ ID NO: 5911134 - DNA, 25 bp, Homo sapien
acacaaaacaagacgggactgtatt

SEQ ID NO: 5911135 - DNA, 25 bp, Homo sapien
gtacagaccctgcccaggttggact

SEQ ID NO: 5911136 - DNA, 25 bp, Homo sapien
agcccaagccggcctcaagctcata

SEQ ID NO: 5911137 - DNA, 25 bp, Homo sapien
gccagccatgggctgctgtgcttcc

SEQ ID NO: 5911138 - DNA, 25 bp, Homo sapien
ttgcaagtgtgcaccactgctcctg

SEQ ID NO: 5911139 - DNA, 25 bp, Homo sapien
gagcaggctgacctgctccctggtc

SEQ ID NO: 5911140 - DNA, 25 bp, Homo sapien
tgactgagctacagagctgtgcctc

SEQ ID NO: 5911141 - DNA, 25 bp, Homo sapien
gccatgggctgctgtgcttccagag

SEQ ID NO: 5911142 - DNA, 25 bp, Homo sapien
taggagcttcggttgcaagtgtgca

SEQ ID NO: 5911143 - DNA, 25 bp, Homo sapien
tggccagccatgggctgctgtgctt

SEQ ID NO: 5911144 - DNA, 25 bp, Homo sapien
caggacaggatggggcacagaagga

SEQ ID NO: 5911145 - DNA, 25 bp, Homo sapien
cagaggctgcatcccaggacaggat

SEQ ID NO: 5911146 - DNA, 25 bp, Homo sapien
gctcctgtaattctacccagaccgc

SEQ ID NO: 5911147 - DNA, 25 bp, Homo sapien
acctccatagctgttagtggctgaa

SEQ ID NO: 5911148 - DNA, 25 bp, Homo sapien
tgcagcctgtcccagaggctgcatc

SEQ ID NO: 5911149 - DNA, 25 bp, Homo sapien
aagtgctcactgggcccctgacagg

SEQ ID NO: 5911150 - DNA, 25 bp, Homo sapien
ttgattggaattccagggaaatgaa

SEQ ID NO: 5911151 - DNA, 25 bp, Homo sapien
acctgctccctggtctagcacagcc

SEQ ID NO: 5911152 - DNA, 25 bp, Homo sapien
tgactgttatctcacctgaatctgg

SEQ ID NO: 5911153 - DNA, 25 bp, Homo sapien
tattccccggggtgtgagctacgct

SEQ ID NO: 5911154 - DNA, 25 bp, Homo sapien
ctctagcccaagccggcctcaagct

SEQ ID NO: 5911155 - DNA, 25 bp, Homo sapien
ttttgggatacggtctcactctagc

SEQ ID NO: 5911156 - DNA, 25 bp, Homo sapien
tggtgtacagaccctgcccaggttg

SEQ ID NO: 5911157 - DNA, 25 bp, Homo sapien
gttagtggctgaaggagggctgtgt

SEQ ID NO: 5911158 - DNA, 25 bp, Homo sapien
tggactgtggcggggcagccaccac

SEQ ID NO: 5911159 - DNA, 25 bp, Homo sapien
gttttgctcagctcctgtaattcta

SEQ ID NO: 5911160 - DNA, 25 bp, Homo sapien
gggcagccaccaccagtgtttgtcc

SEQ ID NO: 5911161 - DNA, 25 bp, Homo sapien
tccagaggccaccctcctagattca

SEQ ID NO: 5911162 - DNA, 25 bp, Homo sapien
cagaggccaccctcctagattcaga

SEQ ID NO: 5911163 - DNA, 25 bp, Homo sapien
actgagctacagagctgtgcctctg

SEQ ID NO: 5911164 - DNA, 25 bp, Homo sapien
tgaccgtcttggtggctgagtgact

SEQ ID NO: 5911165 - DNA, 25 bp, Homo sapien
agaaggaacgaacaccccctgcttc

SEQ ID NO: 5911166 - DNA, 25 bp, Homo sapien
acgggactgtatttgattggaattc

SEQ ID NO: 5911167 - DNA, 25 bp, Homo sapien
ctgtgcctctggccagcagtacaca

SEQ ID NO: 5911168 - DNA, 25 bp, Homo sapien
gactgtatttgattggaattccagg

SEQ ID NO: 5911169 - DNA, 25 bp, Homo sapien
gcaaaaacacaaaacaagacgggac

SEQ ID NO: 5911170 - DNA, 25 bp, Homo sapien
aggaaaggggccagctctgcccatg

SEQ ID NO: 5911171 - DNA, 25 bp, Homo sapien
ctgttagtggctgaaggagggctgt

SEQ ID NO: 5911172 - DNA, 25 bp, Homo sapien
gtctagcacagccagtgggaatctg

SEQ ID NO: 5911173 - DNA, 25 bp, Homo sapien
gctgtgtaggaaaagttctggaata

SEQ ID NO: 5911174 - DNA, 25 bp, Homo sapien
cggtctcactctagcccaagccggc

SEQ ID NO: 5911175 - DNA, 25 bp, Homo sapien
ggcctcgcaaaaacacaaaacaaga

SEQ ID NO: 5911176 - DNA, 25 bp, Homo sapien
ggccagatggtggccagccatgggc

SEQ ID NO: 5911177 - DNA, 25 bp, Homo sapien
ctgtgctgggagcaggctgacctgc

SEQ ID NO: 5911178 - DNA, 25 bp, Homo sapien
accctcctagattcagaccctgaag

SEQ ID NO: 5911179 - DNA, 25 bp, Homo sapien
agaccgctagtagaggcaggggcct

SEQ ID NO: 5911180 - DNA, 25 bp, Homo sapien
cttctgaaagctgttttgctcagct

SEQ ID NO: 5911181 - DNA, 25 bp, Homo sapien
tgaatctggtgtacagaccctgccc

SEQ ID NO: 5911182 - DNA, 25 bp, Homo sapien
tctgaaagctgttttgctcagctcc

SEQ ID NO: 5911183 - DNA, 25 bp, Homo sapien
aaagctgttttgctcagctcctgta

SEQ ID NO: 5911184 - DNA, 25 bp, Homo sapien
cgaacaccccctgcttctagcttct

SEQ ID NO: 5911185 - DNA, 25 bp, Homo sapien
gtagctcattactttcctgtgctgg

SEQ ID NO: 5911186 - DNA, 25 bp, Homo sapien
ttgttccttgttactatgttttaaa

SEQ ID NO: 5911187 - DNA, 25 bp, Homo sapien
acccagaccgctagtagaggcaggg

SEQ ID NO: 5911188 - DNA, 25 bp, Homo sapien
cagccatgggctgctgtgcttccag

SEQ ID NO: 5911189 - DNA, 25 bp, Homo sapien
tcctgtaattctacccagaccgcta

SEQ ID NO: 5911190 - DNA, 25 bp, Homo sapien
tgttactatgttttaaacctgaata

SEQ ID NO: 5911191 - DNA, 25 bp, Homo sapien
aagttctggaatacgatgcttaaat

SEQ ID NO: 5911192 - DNA, 25 bp, Homo sapien
taaatgatacattattccccggggt

SEQ ID NO: 5911193 - DNA, 25 bp, Homo sapien
aatgcagcctgtcccagaggctgca

SEQ ID NO: 5911194 - DNA, 25 bp, Homo sapien
aatctggtgtacagaccctgcccag

SEQ ID NO: 5911195 - DNA, 25 bp, Homo sapien
cctaggagcttcggttgcaagtgtg

SEQ ID NO: 5911196 - DNA, 25 bp, Homo sapien
tgatacattattccccggggtgtga

SEQ ID NO: 5911197 - DNA, 25 bp, Homo sapien
aacaccccctgcttctagcttcttg

SEQ ID NO: 5911198 - DNA, 25 bp, Homo sapien
ctagcccaagccggcctcaagctca

SEQ ID NO: 5911199 - DNA, 25 bp, Homo sapien
tgggctgctgtgcttccagaggcca

SEQ ID NO: 5911200 - DNA, 25 bp, Homo sapien
ctagattcagaccctgaagtgctca

SEQ ID NO: 5911201 - DNA, 25 bp, Homo sapien
tggctgagtgactgttatctcacct

SEQ ID NO: 5911202 - DNA, 25 bp, Homo sapien
gccctgggggtggtagctcattact

SEQ ID NO: 5911203 - DNA, 25 bp, Homo sapien
cctgccaggagactagtgaccgtct

SEQ ID NO: 5911204 - DNA, 25 bp, Homo sapien
gtgtttgttccttgttactatgttt

SEQ ID NO: 5911205 - DNA, 25 bp, Homo sapien
agctctgcccatgggtgtgtttgtt

SEQ ID NO: 5911206 - DNA, 25 bp, Homo sapien
gtcccagaggctgcatcccaggaca

SEQ ID NO: 5911207 - DNA, 25 bp, Homo sapien
ggttgcaagtgtgcaccactgctcc

SEQ ID NO: 5911208 - DNA, 25 bp, Homo sapien
tctccttgggctctgggccaggcct

SEQ ID NO: 5911209 - DNA, 25 bp, Homo sapien
cagagtctggccagatggtggccag

SEQ ID NO: 5911210 - DNA, 25 bp, Homo sapien
acactaaatgcagcctgtcccagag

SEQ ID NO: 5911211 - DNA, 25 bp, Homo sapien
aggagactagtgaccgtcttggtgg

SEQ ID NO: 5911212 - DNA, 25 bp, Homo sapien
ccggggtgtgagctacgctttggct

SEQ ID NO: 5911213 - DNA, 25 bp, Homo sapien
aaaagttctggaatacgatgcttaa

SEQ ID NO: 5911214 - DNA, 25 bp, Homo sapien
ttggaattccagggaaatgaaagtg

SEQ ID NO: 5911215 - DNA, 25 bp, Homo sapien
gtgcaccactgctcctggctgtttt

SEQ ID NO: 5911216 - DNA, 25 bp, Homo sapien
gtaattctacccagaccgctagtag

SEQ ID NO: 5911217 - DNA, 25 bp, Homo sapien
aggagggctgtgtaggaaaagttct

SEQ ID NO: 5911218 - DNA, 25 bp, Homo sapien
ggggtggtagctcattactttcctg

SEQ ID NO: 5911219 - DNA, 25 bp, Homo sapien
cctctccttgggctctgggccaggc

SEQ ID NO: 5911220 - DNA, 25 bp, Homo sapien
ccaccctcctagattcagaccctga

SEQ ID NO: 5911221 - DNA, 25 bp, Homo sapien
tggaatacgatgcttaaatgataca

SEQ ID NO: 5911222 - DNA, 25 bp, Homo sapien
gggcctgagccctgggggtggtagc

SEQ ID NO: 5911223 - DNA, 25 bp, Homo sapien
cccggaacccccacctccatagctg

SEQ ID NO: 5911224 - DNA, 25 bp, Homo sapien
gacactaggaacaggaaaggggcca

SEQ ID NO: 5911225 - DNA, 25 bp, Homo sapien
agcttcttgggctctcaagacacta

SEQ ID NO: 5911226 - DNA, 25 bp, Homo sapien
aggaacaggaaaggggccagctctg

SEQ ID NO: 5911227 - DNA, 25 bp, Homo sapien
cagctcctgtaattctacccagacc

SEQ ID NO: 5911228 - DNA, 25 bp, Homo sapien
ctacgcaggtaggcagtgactgagc

SEQ ID NO: 5911229 - DNA, 25 bp, Homo sapien
tttgttcttctgaaagctgttttgc

SEQ ID NO: 5911230 - DNA, 25 bp, Homo sapien
ttactttcctgtgctgggagcaggc

SEQ ID NO: 5911231 - DNA, 25 bp, Homo sapien
ctagtgaccgtcttggtggctgagt

SEQ ID NO: 5911232 - DNA, 25 bp, Homo sapien
gtatttgattggaattccagggaaa

SEQ ID NO: 5911233 - DNA, 25 bp, Homo sapien
tgttttaaacctgaatagagcactg

SEQ ID NO: 5911234 - DNA, 25 bp, Homo sapien
aacgaacaccccctgcttctagctt

SEQ ID NO: 5911235 - DNA, 25 bp, Homo sapien
tgggctctgggccaggcctcgcaaa

SEQ ID NO: 5911236 - DNA, 25 bp, Homo sapien
agatggtggccagccatgggctgct

SEQ ID NO: 5911237 - DNA, 25 bp, Homo sapien
ggctgaaggagggctgtgtaggaaa

SEQ ID NO: 5911238 - DNA, 25 bp, Homo sapien
gctctcaagacactaggaacaggaa

SEQ ID NO: 5911239 - DNA, 25 bp, Homo sapien
gctccctggtctagcacagccagtg

SEQ ID NO: 5911240 - DNA, 25 bp, Homo sapien
atctggggagagagcaagctagatt

SEQ ID NO: 5911241 - DNA, 25 bp, Homo sapien
acaggtgctcctacgcaggtaggca

SEQ ID NO: 5911242 - DNA, 25 bp, Homo sapien
ttaaacctgaatagagcactgccaa

SEQ ID NO: 5911243 - DNA, 25 bp, Homo sapien
tcctggctgttttgttcttctgaaa

SEQ ID NO: 5911244 - DNA, 25 bp, Homo sapien
ggccagcagtacacacacaacacac

SEQ ID NO: 5911245 - DNA, 25 bp, Homo sapien
agccaccaccagtgtttgtcccgga

SEQ ID NO: 5911246 - DNA, 25 bp, Homo sapien
caaaatcccctgccaggagactagt

SEQ ID NO: 5911247 - DNA, 25 bp, Homo sapien
tgctcagctcctgtaattctaccca

SEQ ID NO: 5911248 - DNA, 25 bp, Homo sapien
tgttcttctgaaagctgttttgctc

SEQ ID NO: 5911249 - DNA, 25 bp, Homo sapien
ggtggctgagtgactgttatctcac

SEQ ID NO: 5911250 - DNA, 25 bp, Homo sapien
cccctgccaggagactagtgaccgt

SEQ ID NO: 5911251 - DNA, 25 bp, Homo sapien
tcccttaccctaggagcttcggttg

SEQ ID NO: 5911252 - DNA, 25 bp, Homo sapien
gcaccactgctcctggctgttttgt

SEQ ID NO: 5911253 - DNA, 25 bp, Homo sapien
ccggcctcaagctcatagcgagcct

SEQ ID NO: 5911254 - DNA, 25 bp, Homo sapien
gccaaaatcccctgccaggagacta

SEQ ID NO: 5911255 - DNA, 25 bp, Homo sapien
agcgagcctcccttaccctaggagc

SEQ ID NO: 5911256 - DNA, 25 bp, Homo sapien
agctagattacaagcagagtctggc

SEQ ID NO: 5911257 - DNA, 25 bp, Homo sapien
tttcctgtgctgggagcaggctgac

SEQ ID NO: 5911258 - DNA, 25 bp, Homo sapien
gggatacggtctcactctagcccaa

SEQ ID NO: 5911259 - DNA, 25 bp, Homo sapien
cccaggttggactgtggcggggcag

SEQ ID NO: 5911260 - DNA, 25 bp, Homo sapien
gggagcaggctgacctgctccctgg

SEQ ID NO: 5911261 - DNA, 25 bp, Homo sapien
agcagagtctggccagatggtggcc

SEQ ID NO: 5911262 - DNA, 25 bp, Homo sapien
ttggctttttgggatacggtctcac

SEQ ID NO: 5911263 - DNA, 25 bp, Homo sapien
agcaagctagattacaagcagagtc

SEQ ID NO: 5911264 - DNA, 25 bp, Homo sapien
gggaatctggggagagagcaagcta

SEQ ID NO: 5911265 - DNA, 25 bp, Homo sapien
accctgcccaggttggactgtggcg

SEQ ID NO: 5911266 - DNA, 25 bp, Homo sapien
tgagctacgctttggctagttagtg

SEQ ID NO: 5911267 - DNA, 25 bp, Homo sapien
acccccacctccatagctgttagtg

SEQ ID NO: 5911268 - DNA, 25 bp, Homo sapien
tgtgagctacgctttggctagttag

SEQ ID NO: 5911269 - DNA, 25 bp, Homo sapien
acagagctgtgcctctggccagcag

SEQ ID NO: 5911270 - DNA, 25 bp, Homo sapien
ttttaaacctgaatagagcactgcc

SEQ ID NO: 5911271 - DNA, 25 bp, Homo sapien
tagtggcctctccttgggctctggg

SEQ ID NO: 5911272 - DNA, 25 bp, Homo sapien
cctcgcaaaaacacaaaacaagacg

SEQ ID NO: 5911273 - DNA, 25 bp, Homo sapien
agagctgtgcctctggccagcagta

SEQ ID NO: 5911274 - DNA, 25 bp, Homo sapien
acacacaacacacacacacccctct

SEQ ID NO: 5911275 - DNA, 25 bp, Homo sapien
agagcactgccaaaatcccctgcca

SEQ ID NO: 5911276 - DNA, 25 bp, Homo sapien
ccatgggtgtgtttgttccttgtta

SEQ ID NO: 5911277 - DNA, 25 bp, Homo sapien
gctcctggctgttttgttcttctga

SEQ ID NO: 5911278 - DNA, 25 bp, Homo sapien
acgctttggctagttagtggcctct

SEQ ID NO: 5911279 - DNA, 25 bp, Homo sapien
gcagccaccaccagtgtttgtcccg

SEQ ID NO: 5911280 - DNA, 25 bp, Homo sapien
ctacgctttggctagttagtggcct

SEQ ID NO: 5911281 - DNA, 25 bp, Homo sapien
gggactgtatttgattggaattcca

SEQ ID NO: 5911282 - DNA, 25 bp, Homo sapien
gctcctacgcaggtaggcagtgact

SEQ ID NO: 5911283 - DNA, 25 bp, Homo sapien
actgttatctcacctgaatctggtg

SEQ ID NO: 5911284 - DNA, 25 bp, Homo sapien
cctgacaggtgctcctacgcaggta

SEQ ID NO: 5911285 - DNA, 25 bp, Homo sapien
cctgaagtgctcactgggcccctga

SEQ ID NO: 5911286 - DNA, 25 bp, Homo sapien
aaggaacgaacaccccctgcttcta

SEQ ID NO: 5911287 - DNA, 25 bp, Homo sapien
tcactgggcccctgacaggtgctcc

SEQ ID NO: 5911288 - DNA, 25 bp, Homo sapien
ggtggtagctcattactttcctgtg

SEQ ID NO: 5911289 - DNA, 25 bp, Homo sapien
atggtggccagccatgggctgctgt

SEQ ID NO: 5911290 - DNA, 25 bp, Homo sapien
cactgccaaaatcccctgccaggag

SEQ ID NO: 5911291 - DNA, 25 bp, Homo sapien
atagcgagcctcccttaccctagga

SEQ ID NO: 5911292 - DNA, 25 bp, Homo sapien
gctgagtgactgttatctcacctga

SEQ ID NO: 5911293 - DNA, 25 bp, Homo sapien
ttggtggctgagtgactgttatctc

SEQ ID NO: 5911294 - DNA, 25 bp, Homo sapien
caccccctgcttctagcttcttggg

SEQ ID NO: 5911295 - DNA, 25 bp, Homo sapien
ggctgcatcccaggacaggatgggg

SEQ ID NO: 5911296 - DNA, 25 bp, Homo sapien
tcttggtggctgagtgactgttatc

SEQ ID NO: 5911297 - DNA, 25 bp, Homo sapien
tgacctgctccctggtctagcacag

SEQ ID NO: 5911298 - DNA, 25 bp, Homo sapien
ctgctcctggctgttttgttcttct

SEQ ID NO: 5911299 - DNA, 25 bp, Homo sapien
tgttatctcacctgaatctggtgta

SEQ ID NO: 5911300 - DNA, 25 bp, Homo sapien
gatggggcacagaaggaacgaacac

SEQ ID NO: 5911301 - DNA, 25 bp, Homo sapien
gtggcggggcagccaccaccagtgt

SEQ ID NO: 5911302 - DNA, 25 bp, Homo sapien
caagacgggactgtatttgattgga

SEQ ID NO: 5911303 - DNA, 25 bp, Homo sapien
gcacagaaggaacgaacaccccctg

SEQ ID NO: 5911304 - DNA, 25 bp, Homo sapien
gaggccaccctcctagattcagacc

SEQ ID NO: 5911305 - DNA, 25 bp, Homo sapien
agaccctgcccaggttggactgtgg

SEQ ID NO: 5911306 - DNA, 25 bp, Homo sapien
tagttagtggcctctccttgggctc

SEQ ID NO: 5911307 - DNA, 25 bp, Homo sapien
tgcttccagaggccaccctcctaga

SEQ ID NO: 5911308 - DNA, 25 bp, Homo sapien
ggagcttcggttgcaagtgtgcacc

SEQ ID NO: 5911309 - DNA, 25 bp, Homo sapien
ggggtgtgagctacgctttggctag

SEQ ID NO: 5911310 - DNA, 25 bp, Homo sapien
gtgcctctggccagcagtacacaca

SEQ ID NO: 5911311 - DNA, 25 bp, Homo sapien
ctgtaattctacccagaccgctagt

SEQ ID NO: 5911312 - DNA, 25 bp, Homo sapien
cggaacccccacctccatagctgtt

SEQ ID NO: 5911313 - DNA, 25 bp, Homo sapien
ccagctctgcccatgggtgtgtttg

SEQ ID NO: 5911314 - DNA, 25 bp, Homo sapien
tgacaggtgctcctacgcaggtagg

SEQ ID NO: 5911315 - DNA, 25 bp, Homo sapien
agtgaccgtcttggtggctgagtga

SEQ ID NO: 5911316 - DNA, 25 bp, Homo sapien
ctcagctcctgtaattctacccaga

SEQ ID NO: 5911317 - DNA, 25 bp, Homo sapien
ctctgcccatgggtgtgtttgttcc

SEQ ID NO: 5911318 - DNA, 25 bp, Homo sapien
ttactatgttttaaacctgaataga

SEQ ID NO: 5911319 - DNA, 25 bp, Homo sapien
cctcaagctcatagcgagcctccct

SEQ ID NO: 5911320 - DNA, 25 bp, Homo sapien
ttgggatacggtctcactctagccc

SEQ ID NO: 5911321 - DNA, 25 bp, Homo sapien
ctctgggccaggcctcgcaaaaaca

SEQ ID NO: 5911322 - DNA, 25 bp, Homo sapien
tcctgtgctgggagcaggctgacct

SEQ ID NO: 5911323 - DNA, 25 bp, Homo sapien
tctggtgtacagaccctgcccaggt

SEQ ID NO: 5911324 - DNA, 25 bp, Homo sapien
gggtgtgtttgttccttgttactat

SEQ ID NO: 5911325 - DNA, 25 bp, Homo sapien
tatgttttaaacctgaatagagcac

SEQ ID NO: 5911326 - DNA, 25 bp, Homo sapien
ggggagagagcaagctagattacaa

SEQ ID NO: 5911327 - DNA, 25 bp, Homo sapien
cctgcgtaggagcacctgtcagggg

SEQ ID NO: 5911328 - DNA, 25 bp, Homo sapien
tttcctacacagccctccttcagcc

SEQ ID NO: 5911329 - DNA, 25 bp, Homo sapien
tcaggtgagataacagtcactcagc

SEQ ID NO: 5911330 - DNA, 25 bp, Homo sapien
gccagaggcacagctctgtagctca

SEQ ID NO: 5911331 - DNA, 25 bp, Homo sapien
aggggtgtgtgtgtgttgtgtgtgt

SEQ ID NO: 5911332 - DNA, 25 bp, Homo sapien
cagcctctgggacaggctgcattta

SEQ ID NO: 5911333 - DNA, 25 bp, Homo sapien
tctgaatctaggagggtggcctctg

SEQ ID NO: 5911334 - DNA, 25 bp, Homo sapien
cttgcaaccgaagctcctagggtaa

SEQ ID NO: 5911335 - DNA, 25 bp, Homo sapien
attcaggtgagataacagtcactca

SEQ ID NO: 5911336 - DNA, 25 bp, Homo sapien
tatcatttaagcatcgtattccaga

SEQ ID NO: 5911337 - DNA, 25 bp, Homo sapien
gtgttcgttccttctgtgccccatc

SEQ ID NO: 5911338 - DNA, 25 bp, Homo sapien
aactagccaaagcgtagctcacacc

SEQ ID NO: 5911339 - DNA, 25 bp, Homo sapien
ccagggagcaggtcagcctgctccc

SEQ ID NO: 5911340 - DNA, 25 bp, Homo sapien
gtgagaccgtatcccaaaaagccaa

SEQ ID NO: 5911341 - DNA, 25 bp, Homo sapien
cacagctctgtagctcagtcactgc

SEQ ID NO: 5911342 - DNA, 25 bp, Homo sapien
ctctgggacaggctgcatttagtgt

SEQ ID NO: 5911343 - DNA, 25 bp, Homo sapien
ggagctgagcaaaacagctttcaga

SEQ ID NO: 5911344 - DNA, 25 bp, Homo sapien
ggagcacctgtcaggggcccagtga

SEQ ID NO: 5911345 - DNA, 25 bp, Homo sapien
actgcctacctgcgtaggagcacct

SEQ ID NO: 5911346 - DNA, 25 bp, Homo sapien
tccgggacaaacactggtggtggct

SEQ ID NO: 5911347 - DNA, 25 bp, Homo sapien
cagccactaacagctatggaggtgg

SEQ ID NO: 5911348 - DNA, 25 bp, Homo sapien
aagcacagcagcccatggctggcca

SEQ ID NO: 5911349 - DNA, 25 bp, Homo sapien
agccaccaagacggtcactagtctc

SEQ ID NO: 5911350 - DNA, 25 bp, Homo sapien
aggggcccagtgagcacttcagggt

SEQ ID NO: 5911351 - DNA, 25 bp, Homo sapien
tgggtagaattacaggagctgagca

SEQ ID NO: 5911352 - DNA, 25 bp, Homo sapien
gcccaaggagaggccactaactagc

SEQ ID NO: 5911353 - DNA, 25 bp, Homo sapien
actagtctcctggcaggggattttg

SEQ ID NO: 5911354 - DNA, 25 bp, Homo sapien
ggcagagctggcccctttcctgttc

SEQ ID NO: 5911355 - DNA, 25 bp, Homo sapien
ccttcagccactaacagctatggag

SEQ ID NO: 5911356 - DNA, 25 bp, Homo sapien
tctggccagactctgcttgtaatct

SEQ ID NO: 5911357 - DNA, 25 bp, Homo sapien
ttgtaatctagcttgctctctcccc

SEQ ID NO: 5911358 - DNA, 25 bp, Homo sapien
ccaccatctggccagactctgcttg

SEQ ID NO: 5911359 - DNA, 25 bp, Homo sapien
cctagtgtcttgagagcccaagaag

SEQ ID NO: 5911360 - DNA, 25 bp, Homo sapien
atcctgtcctgggatgcagcctctg

SEQ ID NO: 5911361 - DNA, 25 bp, Homo sapien
ccatcctgtcctgggatgcagcctc

SEQ ID NO: 5911362 - DNA, 25 bp, Homo sapien
aaacatagtaacaaggaacaaacac

SEQ ID NO: 5911363 - DNA, 25 bp, Homo sapien
gcttgtaatctagcttgctctctcc

SEQ ID NO: 5911364 - DNA, 25 bp, Homo sapien
acaaacactggtggtggctgccccg

SEQ ID NO: 5911365 - DNA, 25 bp, Homo sapien
aggtcagcctgctcccagcacagga

SEQ ID NO: 5911366 - DNA, 25 bp, Homo sapien
tggtggtggctgccccgccacagtc

SEQ ID NO: 5911367 - DNA, 25 bp, Homo sapien
gtgtgttgtgtgtgtactgctggcc

SEQ ID NO: 5911368 - DNA, 25 bp, Homo sapien
tggaattccaatcaaatacagtccc

SEQ ID NO: 5911369 - DNA, 25 bp, Homo sapien
tcactcagccaccaagacggtcact

SEQ ID NO: 5911370 - DNA, 25 bp, Homo sapien
acaaaacagccaggagcagtggtgc

SEQ ID NO: 5911371 - DNA, 25 bp, Homo sapien
aacacacccatgggcagagctggcc

SEQ ID NO: 5911372 - DNA, 25 bp, Homo sapien
agaggggtgtgtgtgtgttgtgtgt

SEQ ID NO: 5911373 - DNA, 25 bp, Homo sapien
gcccatggctggccaccatctggcc

SEQ ID NO: 5911374 - DNA, 25 bp, Homo sapien
gtggtgcacacttgcaaccgaagct

SEQ ID NO: 5911375 - DNA, 25 bp, Homo sapien
aacaaacacacccatgggcagagct

SEQ ID NO: 5911376 - DNA, 25 bp, Homo sapien
tgagcacttcagggtctgaatctag

SEQ ID NO: 5911377 - DNA, 25 bp, Homo sapien
agcagggggtgttcgttccttctgt

SEQ ID NO: 5911378 - DNA, 25 bp, Homo sapien
gaccagggagcaggtcagcctgctc

SEQ ID NO: 5911379 - DNA, 25 bp, Homo sapien
aggcccctgcctctactagcggtct

SEQ ID NO: 5911380 - DNA, 25 bp, Homo sapien
gaattacaggagctgagcaaaacag

SEQ ID NO: 5911381 - DNA, 25 bp, Homo sapien
aagcatcgtattccagaacttttcc

SEQ ID NO: 5911382 - DNA, 25 bp, Homo sapien
tcctgggatgcagcctctgggacag

SEQ ID NO: 5911383 - DNA, 25 bp, Homo sapien
cactggctgtgctagaccagggagc

SEQ ID NO: 5911384 - DNA, 25 bp, Homo sapien
actagcggtctgggtagaattacag

SEQ ID NO: 5911385 - DNA, 25 bp, Homo sapien
gccactaacagctatggaggtgggg

SEQ ID NO: 5911386 - DNA, 25 bp, Homo sapien
tagaccagggagcaggtcagcctgc

SEQ ID NO: 5911387 - DNA, 25 bp, Homo sapien
aacttttcctacacagccctccttc

SEQ ID NO: 5911388 - DNA, 25 bp, Homo sapien
tttaaaacatagtaacaaggaacaa

SEQ ID NO: 5911389 - DNA, 25 bp, Homo sapien
gttccttctgtgccccatcctgtcc

SEQ ID NO: 5911390 - DNA, 25 bp, Homo sapien
gctggcccctttcctgttcctagtg

SEQ ID NO: 5911391 - DNA, 25 bp, Homo sapien
gattcccactggctgtgctagacca

SEQ ID NO: 5911392 - DNA, 25 bp, Homo sapien
gggctagagtgagaccgtatcccaa

SEQ ID NO: 5911393 - DNA, 25 bp, Homo sapien
ctgggcagggtctgtacaccagatt

SEQ ID NO: 5911394 - DNA, 25 bp, Homo sapien
tacaccagattcaggtgagataaca

SEQ ID NO: 5911395 - DNA, 25 bp, Homo sapien
gagtgagaccgtatcccaaaaagcc

SEQ ID NO: 5911396 - DNA, 25 bp, Homo sapien
gcacagcagcccatggctggccacc

SEQ ID NO: 5911397 - DNA, 25 bp, Homo sapien
aatacagtcccgtcttgttttgtgt

SEQ ID NO: 5911398 - DNA, 25 bp, Homo sapien
ccccatcctgtcctgggatgcagcc

SEQ ID NO: 5911399 - DNA, 25 bp, Homo sapien
catgggcagagctggcccctttcct

SEQ ID NO: 5911400 - DNA, 25 bp, Homo sapien
atttaagcatcgtattccagaactt

SEQ ID NO: 5911401 - DNA, 25 bp, Homo sapien
aggcctggcccagagcccaaggaga

SEQ ID NO: 5911402 - DNA, 25 bp, Homo sapien
tcgctatgagcttgaggccggcttg

SEQ ID NO: 5911403 - DNA, 25 bp, Homo sapien
gcctctactagcggtctgggtagaa

SEQ ID NO: 5911404 - DNA, 25 bp, Homo sapien
gcggtctgggtagaattacaggagc

SEQ ID NO: 5911405 - DNA, 25 bp, Homo sapien
aacagccaggagcagtggtgcacac

SEQ ID NO: 5911406 - DNA, 25 bp, Homo sapien
cctggcaggggattttggcagtgct

SEQ ID NO: 5911407 - DNA, 25 bp, Homo sapien
tgcaaccgaagctcctagggtaagg

SEQ ID NO: 5911408 - DNA, 25 bp, Homo sapien
cctacctgcgtaggagcacctgtca

SEQ ID NO: 5911409 - DNA, 25 bp, Homo sapien
aggccggcttgggctagagtgagac

SEQ ID NO: 5911410 - DNA, 25 bp, Homo sapien
gtgagataacagtcactcagccacc

SEQ ID NO: 5911411 - DNA, 25 bp, Homo sapien
tacctgcgtaggagcacctgtcagg

SEQ ID NO: 5911412 - DNA, 25 bp, Homo sapien
ctctactagcggtctgggtagaatt

SEQ ID NO: 5911413 - DNA, 25 bp, Homo sapien
cgggacaaacactggtggtggctgc

SEQ ID NO: 5911414 - DNA, 25 bp, Homo sapien
cagggggtgttcgttccttctgtgc

SEQ ID NO: 5911415 - DNA, 25 bp, Homo sapien
ctgcttgtaatctagcttgctctct

SEQ ID NO: 5911416 - DNA, 25 bp, Homo sapien
cctggaattccaatcaaatacagtc

SEQ ID NO: 5911417 - DNA, 25 bp, Homo sapien
agccaaagcgtagctcacaccccgg

SEQ ID NO: 5911418 - DNA, 25 bp, Homo sapien
ggaaagtaatgagctaccaccccca

SEQ ID NO: 5911419 - DNA, 25 bp, Homo sapien
tcagggtctgaatctaggagggtgg

SEQ ID NO: 5911420 - DNA, 25 bp, Homo sapien
gggtgtgtgtgtgttgtgtgtgtac

SEQ ID NO: 5911421 - DNA, 25 bp, Homo sapien
agtcactcagccaccaagacggtca

SEQ ID NO: 5911422 - DNA, 25 bp, Homo sapien
ccaaagcgtagctcacaccccgggg

SEQ ID NO: 5911423 - DNA, 25 bp, Homo sapien
tagaattacaggagctgagcaaaac

SEQ ID NO: 5911424 - DNA, 25 bp, Homo sapien
agaagaacaaaacagccaggagcag

SEQ ID NO: 5911425 - DNA, 25 bp, Homo sapien
tgtcctgggatgcagcctctgggac

SEQ ID NO: 5911426 - DNA, 25 bp, Homo sapien
cagccaggagcagtggtgcacactt

SEQ ID NO: 5911427 - DNA, 25 bp, Homo sapien
tagaagcagggggtgttcgttcctt

SEQ ID NO: 5911428 - DNA, 25 bp, Homo sapien
gcctgctcccagcacaggaaagtaa

SEQ ID NO: 5911429 - DNA, 25 bp, Homo sapien
cctgtcctgggatgcagcctctggg

SEQ ID NO: 5911430 - DNA, 25 bp, Homo sapien
ctgctggccagaggcacagctctgt

SEQ ID NO: 5911431 - DNA, 25 bp, Homo sapien
gaataatgtatcatttaagcatcgt

SEQ ID NO: 5911432 - DNA, 25 bp, Homo sapien
ggacaaacactggtggtggctgccc

SEQ ID NO: 5911433 - DNA, 25 bp, Homo sapien
tttttgcgaggcctggcccagagcc

SEQ ID NO: 5911434 - DNA, 25 bp, Homo sapien
agggaggctcgctatgagcttgagg

SEQ ID NO: 5911435 - DNA, 25 bp, Homo sapien
agcttgaggccggcttgggctagag

SEQ ID NO: 5911436 - DNA, 25 bp, Homo sapien
ggcacagctctgtagctcagtcact

SEQ ID NO: 5911437 - DNA, 25 bp, Homo sapien
tttgtgtttttgcgaggcctggccc

SEQ ID NO: 5911438 - DNA, 25 bp, Homo sapien
tccctggaattccaatcaaatacag

SEQ ID NO: 5911439 - DNA, 25 bp, Homo sapien
tattcaggtttaaaacatagtaaca

SEQ ID NO: 5911440 - DNA, 25 bp, Homo sapien
ggtggcctctggaagcacagcagcc

SEQ ID NO: 5911441 - DNA, 25 bp, Homo sapien
ggctgtgctagaccagggagcaggt

SEQ ID NO: 5911442 - DNA, 25 bp, Homo sapien
gtgtgtgttgtgtgtgtactgctgg

SEQ ID NO: 5911443 - DNA, 25 bp, Homo sapien
tacaggagctgagcaaaacagcttt

SEQ ID NO: 5911444 - DNA, 25 bp, Homo sapien
agaacttttcctacacagccctcct

SEQ ID NO: 5911445 - DNA, 25 bp, Homo sapien
aatctaggagggtggcctctggaag

SEQ ID NO: 5911446 - DNA, 25 bp, Homo sapien
cacaggaaagtaatgagctaccacc

SEQ ID NO: 5911447 - DNA, 25 bp, Homo sapien
agaggccactaactagccaaagcgt

SEQ ID NO: 5911448 - DNA, 25 bp, Homo sapien
gggtgttcgttccttctgtgcccca

SEQ ID NO: 5911449 - DNA, 25 bp, Homo sapien
gctcagtcactgcctacctgcgtag

SEQ ID NO: 5911450 - DNA, 25 bp, Homo sapien
gctcctagggtaagggaggctcgct

SEQ ID NO: 5911451 - DNA, 25 bp, Homo sapien
cacacttgcaaccgaagctcctagg

SEQ ID NO: 5911452 - DNA, 25 bp, Homo sapien
ctgtgctagaccagggagcaggtca

SEQ ID NO: 5911453 - DNA, 25 bp, Homo sapien
caacctgggcagggtctgtacacca

SEQ ID NO: 5911454 - DNA, 25 bp, Homo sapien
gtgctagaccagggagcaggtcagc

SEQ ID NO: 5911455 - DNA, 25 bp, Homo sapien
tagctcagtcactgcctacctgcgt

SEQ ID NO: 5911456 - DNA, 25 bp, Homo sapien
agctgagcaaaacagctttcagaag

SEQ ID NO: 5911457 - DNA, 25 bp, Homo sapien
tcagccaccaagacggtcactagtc

SEQ ID NO: 5911458 - DNA, 25 bp, Homo sapien
tctgtagctcagtcactgcctacct

SEQ ID NO: 5911459 - DNA, 25 bp, Homo sapien
ccctgcctctactagcggtctgggt

SEQ ID NO: 5911460 - DNA, 25 bp, Homo sapien
ccctccttcagccactaacagctat

SEQ ID NO: 5911461 - DNA, 25 bp, Homo sapien
agggtggcctctggaagcacagcag

SEQ ID NO: 5911462 - DNA, 25 bp, Homo sapien
cttgagagcccaagaagctagaagc

SEQ ID NO: 5911463 - DNA, 25 bp, Homo sapien
ttggcagtgctctattcaggtttaa

SEQ ID NO: 5911464 - DNA, 25 bp, Homo sapien
tcatttaagcatcgtattccagaac

SEQ ID NO: 5911465 - DNA, 25 bp, Homo sapien
ggccaccatctggccagactctgct

SEQ ID NO: 5911466 - DNA, 25 bp, Homo sapien
agccctccttcagccactaacagct

SEQ ID NO: 5911467 - DNA, 25 bp, Homo sapien
ccaaggagaggccactaactagcca

SEQ ID NO: 5911468 - DNA, 25 bp, Homo sapien
ttcctagtgtcttgagagcccaaga

SEQ ID NO: 5911469 - DNA, 25 bp, Homo sapien
aaaacagctttcagaagaacaaaac

SEQ ID NO: 5911470 - DNA, 25 bp, Homo sapien
tgtgtgtgtactgctggccagaggc

SEQ ID NO: 5911471 - DNA, 25 bp, Homo sapien
tgtactgctggccagaggcacagct

SEQ ID NO: 5911472 - DNA, 25 bp, Homo sapien
tccttctgtgccccatcctgtcctg

SEQ ID NO: 5911473 - DNA, 25 bp, Homo sapien
gctatgagcttgaggccggcttggg

SEQ ID NO: 5911474 - DNA, 25 bp, Homo sapien
agggctcaggcccctgcctctacta

SEQ ID NO: 5911475 - DNA, 25 bp, Homo sapien
gagctggcccctttcctgttcctag

SEQ ID NO: 5911476 - DNA, 25 bp, Homo sapien
agagcccaagaagctagaagcaggg

SEQ ID NO: 5911477 - DNA, 25 bp, Homo sapien
cccatgggcagagctggcccctttc

SEQ ID NO: 5911478 - DNA, 25 bp, Homo sapien
ataatgtatcatttaagcatcgtat

SEQ ID NO: 5911479 - DNA, 25 bp, Homo sapien
tgtgtactgctggccagaggcacag

SEQ ID NO: 5911480 - DNA, 25 bp, Homo sapien
taagggaggctcgctatgagcttga

SEQ ID NO: 5911481 - DNA, 25 bp, Homo sapien
cagcccatggctggccaccatctgg

SEQ ID NO: 5911482 - DNA, 25 bp, Homo sapien
agtccaacctgggcagggtctgtac

SEQ ID NO: 5911483 - DNA, 25 bp, Homo sapien
gataacagtcactcagccaccaaga

SEQ ID NO: 5911484 - DNA, 25 bp, Homo sapien
cccaagaagctagaagcagggggtg

SEQ ID NO: 5911485 - DNA, 25 bp, Homo sapien
aaaacagccaggagcagtggtgcac

SEQ ID NO: 5911486 - DNA, 25 bp, Homo sapien
taacaaggaacaaacacacccatgg

SEQ ID NO: 5911487 - DNA, 25 bp, Homo sapien
ctacacagccctccttcagccacta

SEQ ID NO: 5911488 - DNA, 25 bp, Homo sapien
ttcagccactaacagctatggaggt

SEQ ID NO: 5911489 - DNA, 25 bp, Homo sapien
gctaccacccccagggctcaggccc

SEQ ID NO: 5911490 - DNA, 25 bp, Homo sapien
acaccccggggaataatgtatcatt

SEQ ID NO: 5911491 - DNA, 25 bp, Homo sapien
ttctgtgccccatcctgtcctggga

SEQ ID NO: 5911492 - DNA, 25 bp, Homo sapien
ggtctgggtagaattacaggagctg

SEQ ID NO: 5911493 - DNA, 25 bp, Homo sapien
accatctggccagactctgcttgta

SEQ ID NO: 5911494 - DNA, 25 bp, Homo sapien
gctcgctatgagcttgaggccggct

SEQ ID NO: 5911495 - DNA, 25 bp, Homo sapien
ccagaacttttcctacacagccctc

SEQ ID NO: 5911496 - DNA, 25 bp, Homo sapien
tcaggggcccagtgagcacttcagg

SEQ ID NO: 5911497 - DNA, 25 bp, Homo sapien
tactgctggccagaggcacagctct

SEQ ID NO: 5911498 - DNA, 25 bp, Homo sapien
cggggaataatgtatcatttaagca

SEQ ID NO: 5911499 - DNA, 25 bp, Homo sapien
gtgctctattcaggtttaaaacata

SEQ ID NO: 5911500 - DNA, 25 bp, Homo sapien
ccatggctggccaccatctggccag

SEQ ID NO: 5911501 - DNA, 25 bp, Homo sapien
attccaatcaaatacagtcccgtct

SEQ ID NO: 5911502 - DNA, 25 bp, Homo sapien
gaattccaatcaaatacagtcccgt

SEQ ID NO: 5911503 - DNA, 25 bp, Homo sapien
gagcaggtcagcctgctcccagcac

SEQ ID NO: 5911504 - DNA, 25 bp, Homo sapien
cgaagctcctagggtaagggaggct

SEQ ID NO: 5911505 - DNA, 25 bp, Homo sapien
gtaatctagcttgctctctccccag

SEQ ID NO: 5911506 - DNA, 25 bp, Homo sapien
acagcagcccatggctggccaccat

SEQ ID NO: 5911507 - DNA, 25 bp, Homo sapien
gcagggtctgtacaccagattcagg

SEQ ID NO: 5911508 - DNA, 25 bp, Homo sapien
agtaatgagctaccacccccagggc

SEQ ID NO: 5911509 - DNA, 25 bp, Homo sapien
gctagaagcagggggtgttcgttcc

SEQ ID NO: 5911510 - DNA, 25 bp, Homo sapien
gctagaccagggagcaggtcagcct

SEQ ID NO: 5911511 - DNA, 25 bp, Homo sapien
ggtctgaatctaggagggtggcctc

SEQ ID NO: 5911512 - DNA, 25 bp, Homo sapien
caagaagctagaagcagggggtgtt

SEQ ID NO: 5911513 - DNA, 25 bp, Homo sapien
cttgaggccggcttgggctagagtg

SEQ ID NO: 5911514 - DNA, 25 bp, Homo sapien
ctggaagcacagcagcccatggctg

SEQ ID NO: 5911515 - DNA, 25 bp, Homo sapien
gcaggtcagcctgctcccagcacag

SEQ ID NO: 5911516 - DNA, 25 bp, Homo sapien
gaacaaaacagccaggagcagtggt

SEQ ID NO: 5911517 - DNA, 25 bp, Homo sapien
ctaacagctatggaggtgggggttc

SEQ ID NO: 5911518 - DNA, 25 bp, Homo sapien
acatagtaacaaggaacaaacacac

SEQ ID NO: 5911519 - DNA, 25 bp, Homo sapien
ctaactagccaaagcgtagctcaca

SEQ ID NO: 5911520 - DNA, 25 bp, Homo sapien
cccgtcttgttttgtgtttttgcga

SEQ ID NO: 5911521 - DNA, 25 bp, Homo sapien
gccggcttgggctagagtgagaccg

SEQ ID NO: 5911522 - DNA, 25 bp, Homo sapien
acctgggcagggtctgtacaccaga

SEQ ID NO: 5911523 - DNA, 25 bp, Homo sapien
gttcgttccttctgtgccccatcct

SEQ ID NO: 5911524 - DNA, 25 bp, Homo sapien
ctgctcccagcacaggaaagtaatg

SEQ ID NO: 5911525 - DNA, 25 bp, Homo sapien
ctccttcagccactaacagctatgg

SEQ ID NO: 5911526 - DNA, 25 bp, Homo sapien
aacagctatggaggtgggggttccg

SEQ ID NO: 5911527 - DNA, 25 bp, Homo sapien
tatggaggtgggggttccgggacaa

SEQ ID NO: 5911528 - DNA, 25 bp, Homo sapien
ggaacaaacacacccatgggcagag

SEQ ID NO: 5911529 - DNA, 25 bp, Homo sapien
tgcgtaggagcacctgtcaggggcc

SEQ ID NO: 5911530 - DNA, 25 bp, Homo sapien
aatctagcttgctctctccccagat

SEQ ID NO: 5911531 - DNA, 25 bp, Homo sapien
gagaccgtatcccaaaaagccaaaa

SEQ ID NO: 5911532 - DNA, 25 bp, Homo sapien
gtgtgtgtgttgtgtgtgtactgct

SEQ ID NO: 5911533 - DNA, 25 bp, Homo sapien
ttgggctagagtgagaccgtatccc

SEQ ID NO: 5911534 - DNA, 25 bp, Homo sapien
tgtacaccagattcaggtgagataa

SEQ ID NO: 5911535 - DNA, 25 bp, Homo sapien
catttccctggaattccaatcaaat

SEQ ID NO: 5911536 - DNA, 25 bp, Homo sapien
cccgccacagtccaacctgggcagg

SEQ ID NO: 5911537 - DNA, 25 bp, Homo sapien
ttcaggtttaaaacatagtaacaag

SEQ ID NO: 5911538 - DNA, 25 bp, Homo sapien
gggggtgttcgttccttctgtgccc

SEQ ID NO: 5911539 - DNA, 25 bp, Homo sapien
caaacacacccatgggcagagctgg

SEQ ID NO: 5911540 - DNA, 25 bp, Homo sapien
acagccctccttcagccactaacag

SEQ ID NO: 5911541 - DNA, 25 bp, Homo sapien
ggtagaattacaggagctgagcaaa

SEQ ID NO: 5911542 - DNA, 25 bp, Homo sapien
tagagtgagaccgtatcccaaaaag

SEQ ID NO: 5911543 - DNA, 25 bp, Homo sapien
gtgttgtgtgtgtactgctggccag

SEQ ID NO: 5911544 - DNA, 25 bp, Homo sapien
ggtcactagtctcctggcaggggat

SEQ ID NO: 5911545 - DNA, 25 bp, Homo sapien
aagctagaagcagggggtgttcgtt

SEQ ID NO: 5911546 - DNA, 25 bp, Homo sapien
cttttcctacacagccctccttcag

SEQ ID NO: 5911547 - DNA, 25 bp, Homo sapien
atggctggccaccatctggccagac

SEQ ID NO: 5911548 - DNA, 25 bp, Homo sapien
ggagcagtggtgcacacttgcaacc

SEQ ID NO: 5911549 - DNA, 25 bp, Homo sapien
actggtggtggctgccccgccacag

SEQ ID NO: 5911550 - DNA, 25 bp, Homo sapien
gctggccagaggcacagctctgtag

SEQ ID NO: 5911551 - DNA, 25 bp, Homo sapien
aggccactaactagccaaagcgtag

SEQ ID NO: 5911552 - DNA, 25 bp, Homo sapien
aacagctttcagaagaacaaaacag

SEQ ID NO: 5911553 - DNA, 25 bp, Homo sapien
aaagcgtagctcacaccccggggaa

SEQ ID NO: 5911554 - DNA, 25 bp, Homo sapien
gttccgggacaaacactggtggtgg

SEQ ID NO: 5911555 - DNA, 25 bp, Homo sapien
gctatggaggtgggggttccgggac

SEQ ID NO: 5911556 - DNA, 25 bp, Homo sapien
atagtaacaaggaacaaacacaccc

SEQ ID NO: 5911557 - DNA, 25 bp, Homo sapien
cctgttcctagtgtcttgagagccc

SEQ ID NO: 5911558 - DNA, 25 bp, Homo sapien
ccagcacaggaaagtaatgagctac

SEQ ID NO: 5911559 - DNA, 25 bp, Homo sapien
agggtctgaatctaggagggtggcc

SEQ ID NO: 5911560 - DNA, 25 bp, Homo sapien
ctggccaccatctggccagactctg

SEQ ID NO: 5911561 - DNA, 25 bp, Homo sapien
gtggtggctgccccgccacagtcca

SEQ ID NO: 5911562 - DNA, 25 bp, Homo sapien
tagtgtcttgagagcccaagaagct

SEQ ID NO: 5911563 - DNA, 25 bp, Homo sapien
ctgcctctactagcggtctgggtag

SEQ ID NO: 5911564 - DNA, 25 bp, Homo sapien
tttccctggaattccaatcaaatac

SEQ ID NO: 5911565 - DNA, 25 bp, Homo sapien
gattttggcagtgctctattcaggt

SEQ ID NO: 5911566 - DNA, 25 bp, Homo sapien
acactggtggtggctgccccgccac

SEQ ID NO: 5911567 - DNA, 25 bp, Homo sapien
ttccagaacttttcctacacagccc

SEQ ID NO: 5911568 - DNA, 25 bp, Homo sapien
tgaggccggcttgggctagagtgag

SEQ ID NO: 5911569 - DNA, 25 bp, Homo sapien
ctggctgtgctagaccagggagcag

SEQ ID NO: 5911570 - DNA, 25 bp, Homo sapien
ttcctgttcctagtgtcttgagagc

SEQ ID NO: 5911571 - DNA, 25 bp, Homo sapien
tcactagtctcctggcaggggattt

SEQ ID NO: 5911572 - DNA, 25 bp, Homo sapien
tagcttgctctctccccagattccc

SEQ ID NO: 5911573 - DNA, 25 bp, Homo sapien
gggattttggcagtgctctattcag

SEQ ID NO: 5911574 - DNA, 25 bp, Homo sapien
ctgagcaaaacagctttcagaagaa

SEQ ID NO: 5911575 - DNA, 25 bp, Homo sapien
ggcagtgctctattcaggtttaaaa

SEQ ID NO: 5911576 - DNA, 25 bp, Homo sapien
tcactgcctacctgcgtaggagcac

SEQ ID NO: 5911577 - DNA, 25 bp, Homo sapien
ttttggcagtgctctattcaggttt

SEQ ID NO: 5911578 - DNA, 25 bp, Homo sapien
gcctggcccagagcccaaggagagg

SEQ ID NO: 5911579 - DNA, 25 bp, Homo sapien
gctagagtgagaccgtatcccaaaa

SEQ ID NO: 5911580 - DNA, 25 bp, Homo sapien
cgtattccagaacttttcctacaca

SEQ ID NO: 5911581 - DNA, 25 bp, Homo sapien
tcccagcacaggaaagtaatgagct

SEQ ID NO: 5911582 - DNA, 25 bp, Homo sapien
tgtcaggggcccagtgagcacttca

SEQ ID NO: 5911583 - DNA, 25 bp, Homo sapien
gcaaaacagctttcagaagaacaaa

SEQ ID NO: 5911584 - DNA, 25 bp, Homo sapien
tcagtcactgcctacctgcgtagga

SEQ ID NO: 5911585 - DNA, 25 bp, Homo sapien
acggtcactagtctcctggcagggg

SEQ ID NO: 5911586 - DNA, 25 bp, Homo sapien
gtgtgtgtgtgttgtgtgtgtactg

SEQ ID NO: 5911587 - DNA, 25 bp, Homo sapien
aaggaacaaacacacccatgggcag

SEQ ID NO: 5911588 - DNA, 25 bp, Homo sapien
gagataacagtcactcagccaccaa

SEQ ID NO: 5911589 - DNA, 25 bp, Homo sapien
gtcccgtcttgttttgtgtttttgc

SEQ ID NO: 5911590 - DNA, 25 bp, Homo sapien
cagctttcagaagaacaaaacagcc

SEQ ID NO: 5911591 - DNA, 25 bp, Homo sapien
aatgtatcatttaagcatcgtattc

SEQ ID NO: 5911592 - DNA, 25 bp, Homo sapien
aggctcgctatgagcttgaggccgg

SEQ ID NO: 5911593 - DNA, 25 bp, Homo sapien
ggtaagggaggctcgctatgagctt

SEQ ID NO: 5911594 - DNA, 25 bp, Homo sapien
cactaacagctatggaggtgggggt

SEQ ID NO: 5911595 - DNA, 25 bp, Homo sapien
tgtgtttttgcgaggcctggcccag

SEQ ID NO: 5911596 - DNA, 25 bp, Homo sapien
caggagctgagcaaaacagctttca

SEQ ID NO: 5911597 - DNA, 25 bp, Homo sapien
tattccagaacttttcctacacagc

SEQ ID NO: 5911598 - DNA, 25 bp, Homo sapien
gagcccaaggagaggccactaacta

SEQ ID NO: 5911599 - DNA, 25 bp, Homo sapien
aagctcctagggtaagggaggctcg

SEQ ID NO: 5911600 - DNA, 25 bp, Homo sapien
tctaggagggtggcctctggaagca

SEQ ID NO: 5911601 - DNA, 25 bp, Homo sapien
gctctattcaggtttaaaacatagt

SEQ ID NO: 5911602 - DNA, 25 bp, Homo sapien
tctgtacaccagattcaggtgagat

SEQ ID NO: 5911603 - DNA, 25 bp, Homo sapien
tgagagcccaagaagctagaagcag

SEQ ID NO: 5911604 - DNA, 25 bp, Homo sapien
accaagacggtcactagtctcctgg

SEQ ID NO: 5911605 - DNA, 25 bp, Homo sapien
cagctatggaggtgggggttccggg

SEQ ID NO: 5911606 - DNA, 25 bp, Homo sapien
ctgggatgcagcctctgggacaggc

SEQ ID NO: 5911607 - DNA, 25 bp, Homo sapien
gggatgcagcctctgggacaggctg

SEQ ID NO: 5911608 - DNA, 25 bp, Homo sapien
caaatacagtcccgtcttgttttgt

SEQ ID NO: 5911609 - DNA, 25 bp, Homo sapien
tagctcacaccccggggaataatgt

SEQ ID NO: 5911610 - DNA, 25 bp, Homo sapien
ttgttttgtgtttttgcgaggcctg

SEQ ID NO: 5911611 - DNA, 25 bp, Homo sapien
tgtagctcagtcactgcctacctgc

SEQ ID NO: 5911612 - DNA, 25 bp, Homo sapien
cagagcccaaggagaggccactaac

SEQ ID NO: 5911613 - DNA, 25 bp, Homo sapien
gtctcctggcaggggattttggcag

SEQ ID NO: 5911614 - DNA, 25 bp, Homo sapien
cctgtcaggggcccagtgagcactt

SEQ ID NO: 5911615 - DNA, 25 bp, Homo sapien
gctcccagcacaggaaagtaatgag

SEQ ID NO: 5911616 - DNA, 25 bp, Homo sapien
tgcacacttgcaaccgaagctccta

SEQ ID NO: 5911617 - DNA, 25 bp, Homo sapien
gctctgtagctcagtcactgcctac

SEQ ID NO: 5911618 - DNA, 25 bp, Homo sapien
cccactttcatttccctggaattcc

SEQ ID NO: 5911619 - DNA, 25 bp, Homo sapien
cacctgtcaggggcccagtgagcac

SEQ ID NO: 5911620 - DNA, 25 bp, Homo sapien
gagcaaaacagctttcagaagaaca

SEQ ID NO: 5911621 - DNA, 25 bp, Homo sapien
cgtagctcacaccccggggaataat

SEQ ID NO: 5911622 - DNA, 25 bp, Homo sapien
agtaacaaggaacaaacacacccat

SEQ ID NO: 5911623 - DNA, 25 bp, Homo sapien
gcccagtgagcacttcagggtctga

SEQ ID NO: 5911624 - DNA, 25 bp, Homo sapien
cacccatgggcagagctggcccctt

SEQ ID NO: 5911625 - DNA, 25 bp, Homo sapien
acagtccaacctgggcagggtctgt

SEQ ID NO: 5911626 - DNA, 25 bp, Homo sapien
ggagggtggcctctggaagcacagc

SEQ ID NO: 5911627 - DNA, 25 bp, Homo sapien
tcctacacagccctccttcagccac

SEQ ID NO: 5911628 - DNA, 25 bp, Homo sapien
ggtggctgccccgccacagtccaac

SEQ ID NO: 5911629 - DNA, 25 bp, Homo sapien
attacaggagctgagcaaaacagct

SEQ ID NO: 5911630 - DNA, 25 bp, Homo sapien
ctcctggcaggggattttggcagtg

SEQ ID NO: 5911631 - DNA, 25 bp, Homo sapien
ggaagcacagcagcccatggctggc

SEQ ID NO: 5911632 - DNA, 25 bp, Homo sapien
gccagactctgcttgtaatctagct

SEQ ID NO: 5911633 - DNA, 25 bp, Homo sapien
gcctctggaagcacagcagcccatg

SEQ ID NO: 5911634 - DNA, 25 bp, Homo sapien
gttttgtgtttttgcgaggcctggc

SEQ ID NO: 5911635 - DNA, 25 bp, Homo sapien
aaacactggtggtggctgccccgcc

SEQ ID NO: 5911636 - DNA, 25 bp, Homo sapien
ctttcctgttcctagtgtcttgaga

SEQ ID NO: 5911637 - DNA, 25 bp, Homo sapien
tggccagactctgcttgtaatctag

SEQ ID NO: 5911638 - DNA, 25 bp, Homo sapien
taggagggtggcctctggaagcaca

SEQ ID NO: 5911639 - DNA, 25 bp, Homo sapien
gctcacaccccggggaataatgtat

SEQ ID NO: 5911640 - DNA, 25 bp, Homo sapien
caccagattcaggtgagataacagt

SEQ ID NO: 5911641 - DNA, 25 bp, Homo sapien
gcttgggctagagtgagaccgtatc

SEQ ID NO: 5911642 - DNA, 25 bp, Homo sapien
gaagcagggggtgttcgttccttct

SEQ ID NO: 5911643 - DNA, 25 bp, Homo sapien
tgttcctagtgtcttgagagcccaa

SEQ ID NO: 5911644 - DNA, 25 bp, Homo sapien
agattcaggtgagataacagtcact

SEQ ID NO: 5911645 - DNA, 25 bp, Homo sapien
tcacaccccggggaataatgtatca

SEQ ID NO: 5911646 - DNA, 25 bp, Homo sapien
acaaggaacaaacacacccatgggc

SEQ ID NO: 5911647 - DNA, 25 bp, Homo sapien
tccaacctgggcagggtctgtacac

SEQ ID NO: 5911648 - DNA, 25 bp, Homo sapien
aaagtaatgagctaccacccccagg

SEQ ID NO: 5911649 - DNA, 25 bp, Homo sapien
tggccagaggcacagctctgtagct

SEQ ID NO: 5911650 - DNA, 25 bp, Homo sapien
tagcggtctgggtagaattacagga

SEQ ID NO: 5911651 - DNA, 25 bp, Homo sapien
ttaagcatcgtattccagaactttt

SEQ ID NO: 5911652 - DNA, 25 bp, Homo sapien
taaaacatagtaacaaggaacaaac

SEQ ID NO: 5911653 - DNA, 25 bp, Homo sapien
ctactagcggtctgggtagaattac

SEQ ID NO: 5911654 - DNA, 25 bp, Homo sapien
ggaggctcgctatgagcttgaggcc

SEQ ID NO: 5911655 - DNA, 25 bp, Homo sapien
cgaggcctggcccagagcccaagga

SEQ ID NO: 5911656 - DNA, 25 bp, Homo sapien
cagactctgcttgtaatctagcttg

SEQ ID NO: 5911657 - DNA, 25 bp, Homo sapien
tctagcttgctctctccccagattc

SEQ ID NO: 5911658 - DNA, 25 bp, Homo sapien
gaggcacagctctgtagctcagtca

SEQ ID NO: 5911659 - DNA, 25 bp, Homo sapien
gccactaactagccaaagcgtagct

SEQ ID NO: 5911660 - DNA, 25 bp, Homo sapien
cggcttgggctagagtgagaccgta

SEQ ID NO: 5911661 - DNA, 25 bp, Homo sapien
gtcagcctgctcccagcacaggaaa

SEQ ID NO: 5911662 - DNA, 25 bp, Homo sapien
taggagcacctgtcaggggcccagt

SEQ ID NO: 5911663 - DNA, 25 bp, Homo sapien
gcccctttcctgttcctagtgtctt

SEQ ID NO: 5911664 - DNA, 25 bp, Homo sapien
ctggcccagagcccaaggagaggcc

SEQ ID NO: 5911665 - DNA, 25 bp, Homo sapien
gggcagggtctgtacaccagattca

SEQ ID NO: 5911666 - DNA, 25 bp, Homo sapien
accccggggaataatgtatcattta

SEQ ID NO: 5911667 - DNA, 25 bp, Homo sapien
agcacttcagggtctgaatctagga

SEQ ID NO: 5911668 - DNA, 25 bp, Homo sapien
tcttgttttgtgtttttgcgaggcc

SEQ ID NO: 5911669 - DNA, 25 bp, Homo sapien
tctgggtagaattacaggagctgag

SEQ ID NO: 5911670 - DNA, 25 bp, Homo sapien
tgggcagagctggcccctttcctgt

SEQ ID NO: 5911671 - DNA, 25 bp, Homo sapien
aagaacaaaacagccaggagcagtg

SEQ ID NO: 5911672 - DNA, 25 bp, Homo sapien
ggctgccccgccacagtccaacctg

SEQ ID NO: 5911673 - DNA, 25 bp, Homo sapien
acacagccctccttcagccactaac

SEQ ID NO: 5911674 - DNA, 25 bp, Homo sapien
agtgagcacttcagggtctgaatct

SEQ ID NO: 5911675 - DNA, 25 bp, Homo sapien
gctttcagaagaacaaaacagccag

SEQ ID NO: 5911676 - DNA, 25 bp, Homo sapien
ggtctgtacaccagattcaggtgag

SEQ ID NO: 5911677 - DNA, 25 bp, Homo sapien
tgtttttgcgaggcctggcccagag

SEQ ID NO: 5911678 - DNA, 25 bp, Homo sapien
cactaactagccaaagcgtagctca

SEQ ID NO: 5911679 - DNA, 25 bp, Homo sapien
ggtgcacacttgcaaccgaagctcc

SEQ ID NO: 5911680 - DNA, 25 bp, Homo sapien
gggcccagtgagcacttcagggtct

SEQ ID NO: 5911681 - DNA, 25 bp, Homo sapien
ccagtgagcacttcagggtctgaat

SEQ ID NO: 5911682 - DNA, 25 bp, Homo sapien
agggtaagggaggctcgctatgagc

SEQ ID NO: 5911683 - DNA, 25 bp, Homo sapien
cgccacagtccaacctgggcagggt

SEQ ID NO: 5911684 - DNA, 25 bp, Homo sapien
tccaatcaaatacagtcccgtcttg

SEQ ID NO: 5911685 - DNA, 25 bp, Homo sapien
ctttcatttccctggaattccaatc

SEQ ID NO: 5911686 - DNA, 25 bp, Homo sapien
caggaaagtaatgagctaccacccc

SEQ ID NO: 5911687 - DNA, 25 bp, Homo sapien
ccacagtccaacctgggcagggtct

SEQ ID NO: 5911688 - DNA, 25 bp, Homo sapien
cacttcagggtctgaatctaggagg

SEQ ID NO: 5911689 - DNA, 25 bp, Homo sapien
gatgcagcctctgggacaggctgca

SEQ ID NO: 5911690 - DNA, 25 bp, Homo sapien
cagaggcacagctctgtagctcagt

SEQ ID NO: 5911691 - DNA, 25 bp, Homo sapien
cgtaggagcacctgtcaggggccca

SEQ ID NO: 5911692 - DNA, 25 bp, Homo sapien
cccggggaataatgtatcatttaag

SEQ ID NO: 5911693 - DNA, 25 bp, Homo sapien
aggggattttggcagtgctctattc

SEQ ID NO: 5911694 - DNA, 25 bp, Homo sapien
caggtttaaaacatagtaacaagga

SEQ ID NO: 5911695 - DNA, 25 bp, Homo sapien
gggaataatgtatcatttaagcatc

SEQ ID NO: 5911696 - DNA, 25 bp, Homo sapien
cagcctgctcccagcacaggaaagt

SEQ ID NO: 5911697 - DNA, 25 bp, Homo sapien
gagctaccacccccagggctcaggc

SEQ ID NO: 5911698 - DNA, 25 bp, Homo sapien
tcgttccttctgtgccccatcctgt

SEQ ID NO: 5911699 - DNA, 25 bp, Homo sapien
ctctggaagcacagcagcccatggc

SEQ ID NO: 5911700 - DNA, 25 bp, Homo sapien
tgcctacctgcgtaggagcacctgt

SEQ ID NO: 5911701 - DNA, 25 bp, Homo sapien
taacagtcactcagccaccaagacg

SEQ ID NO: 5911702 - DNA, 25 bp, Homo sapien
ggctggccaccatctggccagactc

SEQ ID NO: 5911703 - DNA, 25 bp, Homo sapien
cagctctgtagctcagtcactgcct

SEQ ID NO: 5911704 - DNA, 25 bp, Homo sapien
gcccctgcctctactagcggtctgg

SEQ ID NO: 5911705 - DNA, 25 bp, Homo sapien
tttgcgaggcctggcccagagccca

SEQ ID NO: 5911706 - DNA, 25 bp, Homo sapien
caatcaaatacagtcccgtcttgtt

SEQ ID NO: 5911707 - DNA, 25 bp, Homo sapien
gccaggagcagtggtgcacacttgc

SEQ ID NO: 5911708 - DNA, 25 bp, Homo sapien
agcgtagctcacaccccggggaata

SEQ ID NO: 5911709 - DNA, 25 bp, Homo sapien
tcctagggtaagggaggctcgctat

SEQ ID NO: 5911710 - DNA, 25 bp, Homo sapien
cccagattcccactggctgtgctag

SEQ ID NO: 5911711 - DNA, 25 bp, Homo sapien
gtcttgagagcccaagaagctagaa

SEQ ID NO: 5911712 - DNA, 25 bp, Homo sapien
tggcctctggaagcacagcagccca

SEQ ID NO: 5911713 - DNA, 25 bp, Homo sapien
agaagctagaagcagggggtgttcg

SEQ ID NO: 5911714 - DNA, 25 bp, Homo sapien
tgcgaggcctggcccagagcccaag

SEQ ID NO: 5911715 - DNA, 25 bp, Homo sapien
atgagctaccacccccagggctcag

SEQ ID NO: 5911716 - DNA, 25 bp, Homo sapien
aaggagaggccactaactagccaaa

SEQ ID NO: 5911717 - DNA, 25 bp, Homo sapien
acagtcactcagccaccaagacggt

SEQ ID NO: 5911718 - DNA, 25 bp, Homo sapien
cttcagggtctgaatctaggagggt

SEQ ID NO: 5911719 - DNA, 25 bp, Homo sapien
tagtctcctggcaggggattttggc

SEQ ID NO: 5911720 - DNA, 25 bp, Homo sapien
ccctttcctgttcctagtgtcttga

SEQ ID NO: 5911721 - DNA, 25 bp, Homo sapien
agcacctgtcaggggcccagtgagc

SEQ ID NO: 5911722 - DNA, 25 bp, Homo sapien
cagattcccactggctgtgctagac

SEQ ID NO: 5911723 - DNA, 25 bp, Homo sapien
tgtgtgtactgctggccagaggcac

SEQ ID NO: 5911724 - DNA, 25 bp, Homo sapien
tgtatcatttaagcatcgtattcca

SEQ ID NO: 5911725 - DNA, 25 bp, Homo sapien
caagacggtcactagtctcctggca

SEQ ID NO: 5911726 - DNA, 25 bp, Homo sapien
agcagcccatggctggccaccatct

SEQ ID NO: 5911727 - DNA, 25 bp, Homo sapien
agtcactgcctacctgcgtaggagc

SEQ ID NO: 5911728 - DNA, 25 bp, Homo sapien
tgaatctaggagggtggcctctgga

SEQ ID NO: 5911729 - DNA, 25 bp, Homo sapien
ctagggtaagggaggctcgctatga

SEQ ID NO: 5911730 - DNA, 25 bp, Homo sapien
catctggccagactctgcttgtaat

SEQ ID NO: 5911731 - DNA, 25 bp, Homo sapien
ggcccagagcccaaggagaggccac

SEQ ID NO: 5911732 - DNA, 25 bp, Homo sapien
taatgagctaccacccccagggctc

SEQ ID NO: 5911733 - DNA, 25 bp, Homo sapien
tatgagcttgaggccggcttgggct

SEQ ID NO: 5911734 - DNA, 25 bp, Homo sapien
tctccccagattcccactggctgtg

SEQ ID NO: 5911735 - DNA, 25 bp, Homo sapien
agcacaggaaagtaatgagctacca

SEQ ID NO: 5911736 - DNA, 25 bp, Homo sapien
atcgtattccagaacttttcctaca

SEQ ID NO: 5911737 - DNA, 25 bp, Homo sapien
ctctgcttgtaatctagcttgctct

SEQ ID NO: 5911738 - DNA, 25 bp, Homo sapien
cagtggtgcacacttgcaaccgaag

SEQ ID NO: 5911739 - DNA, 25 bp, Homo sapien
agggtctgtacaccagattcaggtg

SEQ ID NO: 5911740 - DNA, 25 bp, Homo sapien
tggcccctttcctgttcctagtgtc

SEQ ID NO: 5911741 - DNA, 25 bp, Homo sapien
gactctgcttgtaatctagcttgct

SEQ ID NO: 5911742 - DNA, 25 bp, Homo sapien
cacacccatgggcagagctggcccc

SEQ ID NO: 5911743 - DNA, 25 bp, Homo sapien
agacggtcactagtctcctggcagg

SEQ ID NO: 5911744 - DNA, 25 bp, Homo sapien
gtgtcttgagagcccaagaagctag

SEQ ID NO: 5911745 - DNA, 25 bp, Homo sapien
ttcatttccctggaattccaatcaa

SEQ ID NO: 5911746 - DNA, 25 bp, Homo sapien
gcctctgggacaggctgcatttagt

SEQ ID NO: 5911747 - DNA, 25 bp, Homo sapien
actcagccaccaagacggtcactag

SEQ ID NO: 5911748 - DNA, 25 bp, Homo sapien
ggagaggccactaactagccaaagc

SEQ ID NO: 5911749 - DNA, 25 bp, Homo sapien
atcaaatacagtcccgtcttgtttt

SEQ ID NO: 5911750 - DNA, 25 bp, Homo sapien
cgtcttgttttgtgtttttgcgagg

SEQ ID NO: 5911751 - DNA, 25 bp, Homo sapien
aggtgagataacagtcactcagcca

SEQ ID NO: 5911752 - DNA, 25 bp, Homo sapien
tttcagaagaacaaaacagccagga

SEQ ID NO: 5911753 - DNA, 25 bp, Homo sapien
ctgccccgccacagtccaacctggg

SEQ ID NO: 5911754 - DNA, 25 bp, Homo sapien
cccagagcccaaggagaggccacta

SEQ ID NO: 5911755 - DNA, 25 bp, Homo sapien
agcagtggtgcacacttgcaaccga

SEQ ID NO: 5911756 - DNA, 25 bp, Homo sapien
tggcaggggattttggcagtgctct

SEQ ID NO: 5911757 - DNA, 25 bp, Homo sapien
cacttgcaaccgaagctcctagggt

SEQ ID NO: 5911758 - DNA, 25 bp, Homo sapien
caggagcagtggtgcacacttgcaa

SEQ ID NO: 5911759 - DNA, 25 bp, Homo sapien
tcagaagaacaaaacagccaggagc

SEQ ID NO: 5911760 - DNA, 25 bp, Homo sapien
ctagccaaagcgtagctcacacccc

SEQ ID NO: 5911761 - DNA, 25 bp, Homo sapien
gcatcgtattccagaacttttccta

SEQ ID NO: 5911762 - DNA, 25 bp, Homo sapien
caaccgaagctcctagggtaaggga

SEQ ID NO: 5911763 - DNA, 25 bp, Homo sapien
cagtgctctattcaggtttaaaaca

SEQ ID NO: 5911764 - DNA, 25 bp, Homo sapien
ttcccactggctgtgctagaccagg

SEQ ID NO: 5911765 - DNA, 25 bp, Homo sapien
gttgtgtgtgtactgctggccagag

SEQ ID NO: 5911766 - DNA, 25 bp, Homo sapien
ccaccaagacggtcactagtctcct

SEQ ID NO: 5911767 - DNA, 25 bp, Homo sapien
tgcagcctctgggacaggctgcatt

SEQ ID NO: 5911768 - DNA, 25 bp, Homo sapien
cactttcatttccctggaattccaa

SEQ ID NO: 5911769 - DNA, 25 bp, Homo sapien
cccactggctgtgctagaccaggga

SEQ ID NO: 5911770 - DNA, 25 bp, Homo sapien
cagagctggcccctttcctgttcct

SEQ ID NO: 5911771 - DNA, 25 bp, Homo sapien
tctattcaggtttaaaacatagtaa

SEQ ID NO: 5911772 - DNA, 25 bp, Homo sapien
gcaggggattttggcagtgctctat

SEQ ID NO: 5911773 - DNA, 25 bp, Homo sapien
tatcccaaaaagccaaaaacaaaca

SEQ ID NO: 5911774 - DNA, 25 bp, Homo sapien
ccagattcaggtgagataacagtca

SEQ ID NO: 5911775 - DNA, 25 bp, Homo sapien
agcccaagaagctagaagcaggggg

SEQ ID NO: 5911776 - DNA, 25 bp, Homo sapien
tacagtcccgtcttgttttgtgttt

SEQ ID NO: 5911777 - DNA, 25 bp, Homo sapien
tgagcttgaggccggcttgggctag

SEQ ID NO: 5911778 - DNA, 25 bp, Homo sapien
ggatccagtctacctgcctcacttc

SEQ ID NO: 5911779 - DNA, 25 bp, Homo sapien
gaattcacccaaggccactatggga

SEQ ID NO: 5911780 - DNA, 25 bp, Homo sapien
ctagattgggtgtatggctggctgt

SEQ ID NO: 5911781 - DNA, 25 bp, Homo sapien
gagccaaccctactgttaaatcccc

SEQ ID NO: 5911782 - DNA, 25 bp, Homo sapien
actgtgtagaggcaagaagtgaccg

SEQ ID NO: 5911783 - DNA, 25 bp, Homo sapien
tgttaggctccagttttagcttctg

SEQ ID NO: 5911784 - DNA, 25 bp, Homo sapien
caatttcattttgtggaggcatcgg

SEQ ID NO: 5911785 - DNA, 25 bp, Homo sapien
gcctgggccatcctgctagggtcca

SEQ ID NO: 5911786 - DNA, 25 bp, Homo sapien
cacaccatgggtcacacaggcacta

SEQ ID NO: 5911787 - DNA, 25 bp, Homo sapien
ctacatcgtcccaagagtgctgaac

SEQ ID NO: 5911788 - DNA, 25 bp, Homo sapien
ttctgcttgagccaaccctactgtt

SEQ ID NO: 5911789 - DNA, 25 bp, Homo sapien
ttctttcagattgtggtttatatgg

SEQ ID NO: 5911790 - DNA, 25 bp, Homo sapien
tggctggctgtcactttctgaccta

SEQ ID NO: 5911791 - DNA, 25 bp, Homo sapien
gtgaccggctcatgtcaatgctgtc

SEQ ID NO: 5911792 - DNA, 25 bp, Homo sapien
ggggagctgaatggacaagcagcca

SEQ ID NO: 5911793 - DNA, 25 bp, Homo sapien
atccagtctacctgcctcacttctg

SEQ ID NO: 5911794 - DNA, 25 bp, Homo sapien
actgtgagagactgaactagattgg

SEQ ID NO: 5911795 - DNA, 25 bp, Homo sapien
ccggctcatgtcaatgctgtctaca

SEQ ID NO: 5911796 - DNA, 25 bp, Homo sapien
cagtctgtactctctgttctcaagg

SEQ ID NO: 5911797 - DNA, 25 bp, Homo sapien
ttttgtggaggcatcgggtttgagg

SEQ ID NO: 5911798 - DNA, 25 bp, Homo sapien
cacagctagactacatcgtcccaag

SEQ ID NO: 5911799 - DNA, 25 bp, Homo sapien
aaattgttcatggtccccagcctct

SEQ ID NO: 5911800 - DNA, 25 bp, Homo sapien
cctcacttctgagtgcctgggccat

SEQ ID NO: 5911801 - DNA, 25 bp, Homo sapien
ctcattggcccaggaaggatccagt

SEQ ID NO: 5911802 - DNA, 25 bp, Homo sapien
caggaaggatccagtctacctgcct

SEQ ID NO: 5911803 - DNA, 25 bp, Homo sapien
agtctacctgcctcacttctgagtg

SEQ ID NO: 5911804 - DNA, 25 bp, Homo sapien
agagactgaactagattgggtgtat

SEQ ID NO: 5911805 - DNA, 25 bp, Homo sapien
gggtcacacaggcactagctcaggc

SEQ ID NO: 5911806 - DNA, 25 bp, Homo sapien
atggaccacatcctgaggaaggcac

SEQ ID NO: 5911807 - DNA, 25 bp, Homo sapien
aggttatgaactggatgaccatact

SEQ ID NO: 5911808 - DNA, 25 bp, Homo sapien
tagcttctgcttgagccaaccctac

SEQ ID NO: 5911809 - DNA, 25 bp, Homo sapien
gcttctgcttgagccaaccctactg

SEQ ID NO: 5911810 - DNA, 25 bp, Homo sapien
catcctgaggaaggcacagctagac

SEQ ID NO: 5911811 - DNA, 25 bp, Homo sapien
ggcatagccttaacttccagtagcc

SEQ ID NO: 5911812 - DNA, 25 bp, Homo sapien
agatgtcactcacaccatgggtcac

SEQ ID NO: 5911813 - DNA, 25 bp, Homo sapien
attgttcatggtccccagcctctca

SEQ ID NO: 5911814 - DNA, 25 bp, Homo sapien
caggcactagctcaggcatagcctt

SEQ ID NO: 5911815 - DNA, 25 bp, Homo sapien
cctctcaatgtatgtctgtagatgc

SEQ ID NO: 5911816 - DNA, 25 bp, Homo sapien
tttctgacctaggtcagtctgtact

SEQ ID NO: 5911817 - DNA, 25 bp, Homo sapien
cattttgtggaggcatcgggtttga

SEQ ID NO: 5911818 - DNA, 25 bp, Homo sapien
tatatgggaaattgttcatggtccc

SEQ ID NO: 5911819 - DNA, 25 bp, Homo sapien
atgggtcacacaggcactagctcag

SEQ ID NO: 5911820 - DNA, 25 bp, Homo sapien
tttagcttctgcttgagccaaccct

SEQ ID NO: 5911821 - DNA, 25 bp, Homo sapien
cagaaggcctttgctcatttgaact

SEQ ID NO: 5911822 - DNA, 25 bp, Homo sapien
ccatctcattggcccaggaaggatc

SEQ ID NO: 5911823 - DNA, 25 bp, Homo sapien
gagggaattcacccaaggccactat

SEQ ID NO: 5911824 - DNA, 25 bp, Homo sapien
ggtgtatggctggctgtcactttct

SEQ ID NO: 5911825 - DNA, 25 bp, Homo sapien
tcctgaggaaggcacagctagacta

SEQ ID NO: 5911826 - DNA, 25 bp, Homo sapien
gtcactcacaccatgggtcacacag

SEQ ID NO: 5911827 - DNA, 25 bp, Homo sapien
tatggctggctgtcactttctgacc

SEQ ID NO: 5911828 - DNA, 25 bp, Homo sapien
tcctgctagggtccactggaaagga

SEQ ID NO: 5911829 - DNA, 25 bp, Homo sapien
ggcccaggaaggatccagtctacct

SEQ ID NO: 5911830 - DNA, 25 bp, Homo sapien
gtcaatttcattttgtggaggcatc

SEQ ID NO: 5911831 - DNA, 25 bp, Homo sapien
ttgagggaattcacccaaggccact

SEQ ID NO: 5911832 - DNA, 25 bp, Homo sapien
gagtgctgaacaacaggcagctgag

SEQ ID NO: 5911833 - DNA, 25 bp, Homo sapien
ctactgttaaatccccggggagctg

SEQ ID NO: 5911834 - DNA, 25 bp, Homo sapien
tcacccaaggccactatgggatgaa

SEQ ID NO: 5911835 - DNA, 25 bp, Homo sapien
aggtcagtctgtactctctgttctc

SEQ ID NO: 5911836 - DNA, 25 bp, Homo sapien
ccagcctctcaatgtatgtctgtag

SEQ ID NO: 5911837 - DNA, 25 bp, Homo sapien
tatgggatgaaggttatgaactgga

SEQ ID NO: 5911838 - DNA, 25 bp, Homo sapien
tagaggcaagaagtgaccggctcat

SEQ ID NO: 5911839 - DNA, 25 bp, Homo sapien
gtactctctgttctcaaggaacagt

SEQ ID NO: 5911840 - DNA, 25 bp, Homo sapien
acaggcagctgagaatgtcaatttc

SEQ ID NO: 5911841 - DNA, 25 bp, Homo sapien
gggaattcacccaaggccactatgg

SEQ ID NO: 5911842 - DNA, 25 bp, Homo sapien
ccagtctacctgcctcacttctgag

SEQ ID NO: 5911843 - DNA, 25 bp, Homo sapien
tctacctgcctcacttctgagtgcc

SEQ ID NO: 5911844 - DNA, 25 bp, Homo sapien
ctgaggaaggcacagctagactaca

SEQ ID NO: 5911845 - DNA, 25 bp, Homo sapien
ccgactccatctcattggcccagga

SEQ ID NO: 5911846 - DNA, 25 bp, Homo sapien
ctgtctacaaacgagtatgatccta

SEQ ID NO: 5911847 - DNA, 25 bp, Homo sapien
ttctcaaggaacagtggcagatggg

SEQ ID NO: 5911848 - DNA, 25 bp, Homo sapien
caagaagtgaccggctcatgtcaat

SEQ ID NO: 5911849 - DNA, 25 bp, Homo sapien
gagaatgtcaatttcattttgtgga

SEQ ID NO: 5911850 - DNA, 25 bp, Homo sapien
ctgggccatcctgctagggtccact

SEQ ID NO: 5911851 - DNA, 25 bp, Homo sapien
gaaggcctttgctcatttgaactgt

SEQ ID NO: 5911852 - DNA, 25 bp, Homo sapien
ttgagccaaccctactgttaaatcc

SEQ ID NO: 5911853 - DNA, 25 bp, Homo sapien
ttccagtagcccctgcttgagacta

SEQ ID NO: 5911854 - DNA, 25 bp, Homo sapien
tggtccccagcctctcaatgtatgt

SEQ ID NO: 5911855 - DNA, 25 bp, Homo sapien
tatgggaaattgttcatggtcccca

SEQ ID NO: 5911856 - DNA, 25 bp, Homo sapien
gattgtggtttatatgggaaattgt

SEQ ID NO: 5911857 - DNA, 25 bp, Homo sapien
aggcagctgagaatgtcaatttcat

SEQ ID NO: 5911858 - DNA, 25 bp, Homo sapien
gttatgaactggatgaccatactgt

SEQ ID NO: 5911859 - DNA, 25 bp, Homo sapien
tgcattgtgaacgcatgctgcagaa

SEQ ID NO: 5911860 - DNA, 25 bp, Homo sapien
atgtcactcacaccatgggtcacac

SEQ ID NO: 5911861 - DNA, 25 bp, Homo sapien
gatgcattgtgaacgcatgctgcag

SEQ ID NO: 5911862 - DNA, 25 bp, Homo sapien
tccagttttagcttctgcttgagcc

SEQ ID NO: 5911863 - DNA, 25 bp, Homo sapien
gaggcaagaagtgaccggctcatgt

SEQ ID NO: 5911864 - DNA, 25 bp, Homo sapien
acttccagtagcccctgcttgagac

SEQ ID NO: 5911865 - DNA, 25 bp, Homo sapien
ttgagactatgctgttaggctccag

SEQ ID NO: 5911866 - DNA, 25 bp, Homo sapien
caaggaacagtggcagatgggagga

SEQ ID NO: 5911867 - DNA, 25 bp, Homo sapien
cagagatcatggaccacatcctgag

SEQ ID NO: 5911868 - DNA, 25 bp, Homo sapien
agactgaactagattgggtgtatgg

SEQ ID NO: 5911869 - DNA, 25 bp, Homo sapien
ttctgagtgcctgggccatcctgct

SEQ ID NO: 5911870 - DNA, 25 bp, Homo sapien
agctgaatggacaagcagccagaga

SEQ ID NO: 5911871 - DNA, 25 bp, Homo sapien
gcccctgcttgagactatgctgtta

SEQ ID NO: 5911872 - DNA, 25 bp, Homo sapien
cctgccgactccatctcattggccc

SEQ ID NO: 5911873 - DNA, 25 bp, Homo sapien
ctgctagggtccactggaaaggaaa

SEQ ID NO: 5911874 - DNA, 25 bp, Homo sapien
acagtggcagatgggaggagagctg

SEQ ID NO: 5911875 - DNA, 25 bp, Homo sapien
ctgcttgagactatgctgttaggct

SEQ ID NO: 5911876 - DNA, 25 bp, Homo sapien
gtgaacgcatgctgcagaaggcctt

SEQ ID NO: 5911877 - DNA, 25 bp, Homo sapien
atcgggtttgagggaattcacccaa

SEQ ID NO: 5911878 - DNA, 25 bp, Homo sapien
tcccaagagtgctgaacaacaggca

SEQ ID NO: 5911879 - DNA, 25 bp, Homo sapien
tatgaactggatgaccatactgtga

SEQ ID NO: 5911880 - DNA, 25 bp, Homo sapien
ctgagtgcctgggccatcctgctag

SEQ ID NO: 5911881 - DNA, 25 bp, Homo sapien
gggcaattctttcagattgtggttt

SEQ ID NO: 5911882 - DNA, 25 bp, Homo sapien
cttctacagagatcatggaccacat

SEQ ID NO: 5911883 - DNA, 25 bp, Homo sapien
gcagccagagagtcctctttcagag

SEQ ID NO: 5911884 - DNA, 25 bp, Homo sapien
ccatactgtgagagactgaactaga

SEQ ID NO: 5911885 - DNA, 25 bp, Homo sapien
gcaattctttcagattgtggtttat

SEQ ID NO: 5911886 - DNA, 25 bp, Homo sapien
aactagattgggtgtatggctggct

SEQ ID NO: 5911887 - DNA, 25 bp, Homo sapien
gcttgagactatgctgttaggctcc

SEQ ID NO: 5911888 - DNA, 25 bp, Homo sapien
aagcagccagagagtcctctttcag

SEQ ID NO: 5911889 - DNA, 25 bp, Homo sapien
tgagagactgaactagattgggtgt

SEQ ID NO: 5911890 - DNA, 25 bp, Homo sapien
actgaactagattgggtgtatggct

SEQ ID NO: 5911891 - DNA, 25 bp, Homo sapien
agctcaggcatagccttaacttcca

SEQ ID NO: 5911892 - DNA, 25 bp, Homo sapien
tcaatgctgtctacaaacgagtatg

SEQ ID NO: 5911893 - DNA, 25 bp, Homo sapien
agagagtcctctttcagagagcaca

SEQ ID NO: 5911894 - DNA, 25 bp, Homo sapien
gccttctacagagatcatggaccac

SEQ ID NO: 5911895 - DNA, 25 bp, Homo sapien
ctgaatggacaagcagccagagagt

SEQ ID NO: 5911896 - DNA, 25 bp, Homo sapien
tgaactagattgggtgtatggctgg

SEQ ID NO: 5911897 - DNA, 25 bp, Homo sapien
aactctggcctgccgactccatctc

SEQ ID NO: 5911898 - DNA, 25 bp, Homo sapien
gtctgtactctctgttctcaaggaa

SEQ ID NO: 5911899 - DNA, 25 bp, Homo sapien
gctccagttttagcttctgcttgag

SEQ ID NO: 5911900 - DNA, 25 bp, Homo sapien
ctttgctcatttgaactgtgtagag

SEQ ID NO: 5911901 - DNA, 25 bp, Homo sapien
tgttaaatccccggggagctgaatg

SEQ ID NO: 5911902 - DNA, 25 bp, Homo sapien
catggtccccagcctctcaatgtat

SEQ ID NO: 5911903 - DNA, 25 bp, Homo sapien
agcctctcaatgtatgtctgtagat

SEQ ID NO: 5911904 - DNA, 25 bp, Homo sapien
aggagagctggggcaattctttcag

SEQ ID NO: 5911905 - DNA, 25 bp, Homo sapien
acatctaactctggcctgccgactc

SEQ ID NO: 5911906 - DNA, 25 bp, Homo sapien
ggccactatgggatgaaggttatga

SEQ ID NO: 5911907 - DNA, 25 bp, Homo sapien
atgctgttaggctccagttttagct

SEQ ID NO: 5911908 - DNA, 25 bp, Homo sapien
tctcaatgtatgtctgtagatgcat

SEQ ID NO: 5911909 - DNA, 25 bp, Homo sapien
ctgcttgagccaaccctactgttaa

SEQ ID NO: 5911910 - DNA, 25 bp, Homo sapien
gggccatcctgctagggtccactgg

SEQ ID NO: 5911911 - DNA, 25 bp, Homo sapien
ttcatggtccccagcctctcaatgt

SEQ ID NO: 5911912 - DNA, 25 bp, Homo sapien
aaatgccttctacagagatcatgga

SEQ ID NO: 5911913 - DNA, 25 bp, Homo sapien
tagggtccactggaaaggaaaaatg

SEQ ID NO: 5911914 - DNA, 25 bp, Homo sapien
ttgtggaggcatcgggtttgaggga

SEQ ID NO: 5911915 - DNA, 25 bp, Homo sapien
aaggcacagctagactacatcgtcc

SEQ ID NO: 5911916 - DNA, 25 bp, Homo sapien
ctcacaccatgggtcacacaggcac

SEQ ID NO: 5911917 - DNA, 25 bp, Homo sapien
gaggaaggcacagctagactacatc

SEQ ID NO: 5911918 - DNA, 25 bp, Homo sapien
aggcctttgctcatttgaactgtgt

SEQ ID NO: 5911919 - DNA, 25 bp, Homo sapien
ttgctcatttgaactgtgtagaggc

SEQ ID NO: 5911920 - DNA, 25 bp, Homo sapien
tcctctttcagagagcacatctaac

SEQ ID NO: 5911921 - DNA, 25 bp, Homo sapien
ccatgggtcacacaggcactagctc

SEQ ID NO: 5911922 - DNA, 25 bp, Homo sapien
atggacaagcagccagagagtcctc

SEQ ID NO: 5911923 - DNA, 25 bp, Homo sapien
gaaggttatgaactggatgaccata

SEQ ID NO: 5911924 - DNA, 25 bp, Homo sapien
ggaggcatcgggtttgagggaattc

SEQ ID NO: 5911925 - DNA, 25 bp, Homo sapien
acgcatgctgcagaaggcctttgct

SEQ ID NO: 5911926 - DNA, 25 bp, Homo sapien
tgggtgtatggctggctgtcacttt

SEQ ID NO: 5911927 - DNA, 25 bp, Homo sapien
gtggtttatatgggaaattgttcat

SEQ ID NO: 5911928 - DNA, 25 bp, Homo sapien
ccagagagtcctctttcagagagca

SEQ ID NO: 5911929 - DNA, 25 bp, Homo sapien
atgaccatactgtgagagactgaac

SEQ ID NO: 5911930 - DNA, 25 bp, Homo sapien
catagccttaacttccagtagcccc

SEQ ID NO: 5911931 - DNA, 25 bp, Homo sapien
ttcattttgtggaggcatcgggttt

SEQ ID NO: 5911932 - DNA, 25 bp, Homo sapien
cagattgtggtttatatgggaaatt

SEQ ID NO: 5911933 - DNA, 25 bp, Homo sapien
tggctgtcactttctgacctaggtc

SEQ ID NO: 5911934 - DNA, 25 bp, Homo sapien
aatgtatgtctgtagatgcattgtg

SEQ ID NO: 5911935 - DNA, 25 bp, Homo sapien
acccaaggccactatgggatgaagg

SEQ ID NO: 5911936 - DNA, 25 bp, Homo sapien
gccttaacttccagtagcccctgct

SEQ ID NO: 5911937 - DNA, 25 bp, Homo sapien
ccactatgggatgaaggttatgaac

SEQ ID NO: 5911938 - DNA, 25 bp, Homo sapien
gatcatggaccacatcctgaggaag

SEQ ID NO: 5911939 - DNA, 25 bp, Homo sapien
tgaactggatgaccatactgtgaga

SEQ ID NO: 5911940 - DNA, 25 bp, Homo sapien
gtccactggaaaggaaaaatgcctt

SEQ ID NO: 5911941 - DNA, 25 bp, Homo sapien
gagatcatggaccacatcctgagga

SEQ ID NO: 5911942 - DNA, 25 bp, Homo sapien
tctacagagatcatggaccacatcc

SEQ ID NO: 5911943 - DNA, 25 bp, Homo sapien
tgggatgaaggttatgaactggatg

SEQ ID NO: 5911944 - DNA, 25 bp, Homo sapien
gctggggcaattctttcagattgtg

SEQ ID NO: 5911945 - DNA, 25 bp, Homo sapien
gtcacacaggcactagctcaggcat

SEQ ID NO: 5911946 - DNA, 25 bp, Homo sapien
gatgggaggagagctggggcaattc

SEQ ID NO: 5911947 - DNA, 25 bp, Homo sapien
actatgggatgaaggttatgaactg

SEQ ID NO: 5911948 - DNA, 25 bp, Homo sapien
gactatgctgttaggctccagtttt

SEQ ID NO: 5911949 - DNA, 25 bp, Homo sapien
ttaaatccccggggagctgaatgga

SEQ ID NO: 5911950 - DNA, 25 bp, Homo sapien
tgcctcacttctgagtgcctgggcc

SEQ ID NO: 5911951 - DNA, 25 bp, Homo sapien
tgacctaggtcagtctgtactctct

SEQ ID NO: 5911952 - DNA, 25 bp, Homo sapien
gggtccactggaaaggaaaaatgcc

SEQ ID NO: 5911953 - DNA, 25 bp, Homo sapien
aaggatccagtctacctgcctcact

SEQ ID NO: 5911954 - DNA, 25 bp, Homo sapien
aggctccagttttagcttctgcttg

SEQ ID NO: 5911955 - DNA, 25 bp, Homo sapien
ctctttcagagagcacatctaactc

SEQ ID NO: 5911956 - DNA, 25 bp, Homo sapien
tgctgtctacaaacgagtatgatcc

SEQ ID NO: 5911957 - DNA, 25 bp, Homo sapien
atgaaggttatgaactggatgacca

SEQ ID NO: 5911958 - DNA, 25 bp, Homo sapien
gcttgagccaaccctactgttaaat

SEQ ID NO: 5911959 - DNA, 25 bp, Homo sapien
atttcattttgtggaggcatcgggt

SEQ ID NO: 5911960 - DNA, 25 bp, Homo sapien
actgttaaatccccggggagctgaa

SEQ ID NO: 5911961 - DNA, 25 bp, Homo sapien
aggcatcgggtttgagggaattcac

SEQ ID NO: 5911962 - DNA, 25 bp, Homo sapien
gcatgctgcagaaggcctttgctca

SEQ ID NO: 5911963 - DNA, 25 bp, Homo sapien
ggaaaaatgccttctacagagatca

SEQ ID NO: 5911964 - DNA, 25 bp, Homo sapien
caacaggcagctgagaatgtcaatt

SEQ ID NO: 5911965 - DNA, 25 bp, Homo sapien
cagagagcacatctaactctggcct

SEQ ID NO: 5911966 - DNA, 25 bp, Homo sapien
ctaggtcagtctgtactctctgttc

SEQ ID NO: 5911967 - DNA, 25 bp, Homo sapien
ggatgaaggttatgaactggatgac

SEQ ID NO: 5911968 - DNA, 25 bp, Homo sapien
aaggccactatgggatgaaggttat

SEQ ID NO: 5911969 - DNA, 25 bp, Homo sapien
atctcattggcccaggaaggatcca

SEQ ID NO: 5911970 - DNA, 25 bp, Homo sapien
gcctttgctcatttgaactgtgtag

SEQ ID NO: 5911971 - DNA, 25 bp, Homo sapien
tgttctcaaggaacagtggcagatg

SEQ ID NO: 5911972 - DNA, 25 bp, Homo sapien
agtcctctttcagagagcacatcta

SEQ ID NO: 5911973 - DNA, 25 bp, Homo sapien
ggcactagctcaggcatagccttaa

SEQ ID NO: 5911974 - DNA, 25 bp, Homo sapien
cttaacttccagtagcccctgcttg

SEQ ID NO: 5911975 - DNA, 25 bp, Homo sapien
tcacttctgagtgcctgggccatcc

SEQ ID NO: 5911976 - DNA, 25 bp, Homo sapien
ctgtactctctgttctcaaggaaca

SEQ ID NO: 5911977 - DNA, 25 bp, Homo sapien
gcacatctaactctggcctgccgac

SEQ ID NO: 5911978 - DNA, 25 bp, Homo sapien
tcatttgaactgtgtagaggcaaga

SEQ ID NO: 5911979 - DNA, 25 bp, Homo sapien
gctagactacatcgtcccaagagtg

SEQ ID NO: 5911980 - DNA, 25 bp, Homo sapien
ctcatgtcaatgctgtctacaaacg

SEQ ID NO: 5911981 - DNA, 25 bp, Homo sapien
tcaatgtatgtctgtagatgcattg

SEQ ID NO: 5911982 - DNA, 25 bp, Homo sapien
ctctggcctgccgactccatctcat

SEQ ID NO: 5911983 - DNA, 25 bp, Homo sapien
gctgtcactttctgacctaggtcag

SEQ ID NO: 5911984 - DNA, 25 bp, Homo sapien
tgcagaaggcctttgctcatttgaa

SEQ ID NO: 5911985 - DNA, 25 bp, Homo sapien
gcagctgagaatgtcaatttcattt

SEQ ID NO: 5911986 - DNA, 25 bp, Homo sapien
ggtttatatgggaaattgttcatgg

SEQ ID NO: 5911987 - DNA, 25 bp, Homo sapien
actctctgttctcaaggaacagtgg

SEQ ID NO: 5911988 - DNA, 25 bp, Homo sapien
ttggcccaggaaggatccagtctac

SEQ ID NO: 5911989 - DNA, 25 bp, Homo sapien
cacacaggcactagctcaggcatag

SEQ ID NO: 5911990 - DNA, 25 bp, Homo sapien
tgaacaacaggcagctgagaatgtc

SEQ ID NO: 5911991 - DNA, 25 bp, Homo sapien
gctagggtccactggaaaggaaaaa

SEQ ID NO: 5911992 - DNA, 25 bp, Homo sapien
actggaaaggaaaaatgccttctac

SEQ ID NO: 5911993 - DNA, 25 bp, Homo sapien
gaccatactgtgagagactgaacta

SEQ ID NO: 5911994 - DNA, 25 bp, Homo sapien
ctgagaatgtcaatttcattttgtg

SEQ ID NO: 5911995 - DNA, 25 bp, Homo sapien
atactgtgagagactgaactagatt

SEQ ID NO: 5911996 - DNA, 25 bp, Homo sapien
gaatgtcaatttcattttgtggagg

SEQ ID NO: 5911997 - DNA, 25 bp, Homo sapien
agaagtgaccggctcatgtcaatgc

SEQ ID NO: 5911998 - DNA, 25 bp, Homo sapien
gcatcgggtttgagggaattcaccc

SEQ ID NO: 5911999 - DNA, 25 bp, Homo sapien
ggaaggcacagctagactacatcgt

SEQ ID NO: 5912000 - DNA, 25 bp, Homo sapien
aagagtgctgaacaacaggcagctg

SEQ ID NO: 5912001 - DNA, 25 bp, Homo sapien
ccaagagtgctgaacaacaggcagc

SEQ ID NO: 5912002 - DNA, 25 bp, Homo sapien
gaacgcatgctgcagaaggcctttg

SEQ ID NO: 5912003 - DNA, 25 bp, Homo sapien
tctgacctaggtcagtctgtactct

SEQ ID NO: 5912004 - DNA, 25 bp, Homo sapien
gtggaggcatcgggtttgagggaat

SEQ ID NO: 5912005 - DNA, 25 bp, Homo sapien
cgtcccaagagtgctgaacaacagg

SEQ ID NO: 5912006 - DNA, 25 bp, Homo sapien
acttctgagtgcctgggccatcctg

SEQ ID NO: 5912007 - DNA, 25 bp, Homo sapien
tatgtctgtagatgcattgtgaacg

SEQ ID NO: 5912008 - DNA, 25 bp, Homo sapien
tggggcaattctttcagattgtggt

SEQ ID NO: 5912009 - DNA, 25 bp, Homo sapien
acgagtatgatcctaactgttttgg

SEQ ID NO: 5912010 - DNA, 25 bp, Homo sapien
ccaaggccactatgggatgaaggtt

SEQ ID NO: 5912011 - DNA, 25 bp, Homo sapien
agctgagaatgtcaatttcattttg

SEQ ID NO: 5912012 - DNA, 25 bp, Homo sapien
gaatggacaagcagccagagagtcc

SEQ ID NO: 5912013 - DNA, 25 bp, Homo sapien
attgggtgtatggctggctgtcact

SEQ ID NO: 5912014 - DNA, 25 bp, Homo sapien
acctaggtcagtctgtactctctgt

SEQ ID NO: 5912015 - DNA, 25 bp, Homo sapien
cccaggaaggatccagtctacctgc

SEQ ID NO: 5912016 - DNA, 25 bp, Homo sapien
gttttagcttctgcttgagccaacc

SEQ ID NO: 5912017 - DNA, 25 bp, Homo sapien
cagttttagcttctgcttgagccaa

SEQ ID NO: 5912018 - DNA, 25 bp, Homo sapien
tggaaaggaaaaatgccttctacag

SEQ ID NO: 5912019 - DNA, 25 bp, Homo sapien
gtgcctgggccatcctgctagggtc

SEQ ID NO: 5912020 - DNA, 25 bp, Homo sapien
agtagcccctgcttgagactatgct

SEQ ID NO: 5912021 - DNA, 25 bp, Homo sapien
gagtgcctgggccatcctgctaggg

SEQ ID NO: 5912022 - DNA, 25 bp, Homo sapien
tacagagatcatggaccacatcctg

SEQ ID NO: 5912023 - DNA, 25 bp, Homo sapien
gagctggggcaattctttcagattg

SEQ ID NO: 5912024 - DNA, 25 bp, Homo sapien
ggctcatgtcaatgctgtctacaaa

SEQ ID NO: 5912025 - DNA, 25 bp, Homo sapien
ctttcagattgtggtttatatggga

SEQ ID NO: 5912026 - DNA, 25 bp, Homo sapien
gaacagtggcagatgggaggagagc

SEQ ID NO: 5912027 - DNA, 25 bp, Homo sapien
tagcccctgcttgagactatgctgt

SEQ ID NO: 5912028 - DNA, 25 bp, Homo sapien
tgccgactccatctcattggcccag

SEQ ID NO: 5912029 - DNA, 25 bp, Homo sapien
ttgtgaacgcatgctgcagaaggcc

SEQ ID NO: 5912030 - DNA, 25 bp, Homo sapien
gctgcagaaggcctttgctcatttg

SEQ ID NO: 5912031 - DNA, 25 bp, Homo sapien
agagtcctctttcagagagcacatc

SEQ ID NO: 5912032 - DNA, 25 bp, Homo sapien
tagatgcattgtgaacgcatgctgc

SEQ ID NO: 5912033 - DNA, 25 bp, Homo sapien
ggagctgaatggacaagcagccaga

SEQ ID NO: 5912034 - DNA, 25 bp, Homo sapien
caccatgggtcacacaggcactagc

SEQ ID NO: 5912035 - DNA, 25 bp, Homo sapien
tagccttaacttccagtagcccctg

SEQ ID NO: 5912036 - DNA, 25 bp, Homo sapien
gctgaacaacaggcagctgagaatg

SEQ ID NO: 5912037 - DNA, 25 bp, Homo sapien
ctttcagagagcacatctaactctg

SEQ ID NO: 5912038 - DNA, 25 bp, Homo sapien
attcacccaaggccactatgggatg

SEQ ID NO: 5912039 - DNA, 25 bp, Homo sapien
gagcacatctaactctggcctgccg

SEQ ID NO: 5912040 - DNA, 25 bp, Homo sapien
gactacatcgtcccaagagtgctga

SEQ ID NO: 5912041 - DNA, 25 bp, Homo sapien
tacctgcctcacttctgagtgcctg

SEQ ID NO: 5912042 - DNA, 25 bp, Homo sapien
tgtcaatgctgtctacaaacgagta

SEQ ID NO: 5912043 - DNA, 25 bp, Homo sapien
accacatcctgaggaaggcacagct

SEQ ID NO: 5912044 - DNA, 25 bp, Homo sapien
gccatcctgctagggtccactggaa

SEQ ID NO: 5912045 - DNA, 25 bp, Homo sapien
ctcaaggaacagtggcagatgggag

SEQ ID NO: 5912046 - DNA, 25 bp, Homo sapien
cattggcccaggaaggatccagtct

SEQ ID NO: 5912047 - DNA, 25 bp, Homo sapien
ccactggaaaggaaaaatgccttct

SEQ ID NO: 5912048 - DNA, 25 bp, Homo sapien
tgtatgtctgtagatgcattgtgaa

SEQ ID NO: 5912049 - DNA, 25 bp, Homo sapien
cacatcctgaggaaggcacagctag

SEQ ID NO: 5912050 - DNA, 25 bp, Homo sapien
ttcagagagcacatctaactctggc

SEQ ID NO: 5912051 - DNA, 25 bp, Homo sapien
aacaacaggcagctgagaatgtcaa

SEQ ID NO: 5912052 - DNA, 25 bp, Homo sapien
gggtttgagggaattcacccaaggc

SEQ ID NO: 5912053 - DNA, 25 bp, Homo sapien
atgccttctacagagatcatggacc

SEQ ID NO: 5912054 - DNA, 25 bp, Homo sapien
tgggaggagagctggggcaattctt

SEQ ID NO: 5912055 - DNA, 25 bp, Homo sapien
aactggatgaccatactgtgagaga

SEQ ID NO: 5912056 - DNA, 25 bp, Homo sapien
tgtagatgcattgtgaacgcatgct

SEQ ID NO: 5912057 - DNA, 25 bp, Homo sapien
ggacaagcagccagagagtcctctt

SEQ ID NO: 5912058 - DNA, 25 bp, Homo sapien
aaacgagtatgatcctaactgtttt

SEQ ID NO: 5912059 - DNA, 25 bp, Homo sapien
aggaacagtggcagatgggaggaga

SEQ ID NO: 5912060 - DNA, 25 bp, Homo sapien
ttgaactgtgtagaggcaagaagtg

SEQ ID NO: 5912061 - DNA, 25 bp, Homo sapien
gactccatctcattggcccaggaag

SEQ ID NO: 5912062 - DNA, 25 bp, Homo sapien
acaaacgagtatgatcctaactgtt

SEQ ID NO: 5912063 - DNA, 25 bp, Homo sapien
tctgtagatgcattgtgaacgcatg

SEQ ID NO: 5912064 - DNA, 25 bp, Homo sapien
cacaggcactagctcaggcatagcc

SEQ ID NO: 5912065 - DNA, 25 bp, Homo sapien
caggcatagccttaacttccagtag

SEQ ID NO: 5912066 - DNA, 25 bp, Homo sapien
tgtgtagaggcaagaagtgaccggc

SEQ ID NO: 5912067 - DNA, 25 bp, Homo sapien
ccagtagcccctgcttgagactatg

SEQ ID NO: 5912068 - DNA, 25 bp, Homo sapien
acaagcagccagagagtcctctttc

SEQ ID NO: 5912069 - DNA, 25 bp, Homo sapien
catcctgctagggtccactggaaag

SEQ ID NO: 5912070 - DNA, 25 bp, Homo sapien
atctaactctggcctgccgactcca

SEQ ID NO: 5912071 - DNA, 25 bp, Homo sapien
aaatccccggggagctgaatggaca

SEQ ID NO: 5912072 - DNA, 25 bp, Homo sapien
aaaaatgccttctacagagatcatg

SEQ ID NO: 5912073 - DNA, 25 bp, Homo sapien
cactcacaccatgggtcacacaggc

SEQ ID NO: 5912074 - DNA, 25 bp, Homo sapien
atccccggggagctgaatggacaag

SEQ ID NO: 5912075 - DNA, 25 bp, Homo sapien
gaccggctcatgtcaatgctgtcta

SEQ ID NO: 5912076 - DNA, 25 bp, Homo sapien
ctggatgaccatactgtgagagact

SEQ ID NO: 5912077 - DNA, 25 bp, Homo sapien
ggcacagctagactacatcgtccca

SEQ ID NO: 5912078 - DNA, 25 bp, Homo sapien
ggcctgccgactccatctcattggc

SEQ ID NO: 5912079 - DNA, 25 bp, Homo sapien
ggaccacatcctgaggaaggcacag

SEQ ID NO: 5912080 - DNA, 25 bp, Homo sapien
atcgtcccaagagtgctgaacaaca

SEQ ID NO: 5912081 - DNA, 25 bp, Homo sapien
ccccggggagctgaatggacaagca

SEQ ID NO: 5912082 - DNA, 25 bp, Homo sapien
tgtgagagactgaactagattgggt

SEQ ID NO: 5912083 - DNA, 25 bp, Homo sapien
gtccccagcctctcaatgtatgtct

SEQ ID NO: 5912084 - DNA, 25 bp, Homo sapien
tgtctgtagatgcattgtgaacgca

SEQ ID NO: 5912085 - DNA, 25 bp, Homo sapien
tcatggaccacatcctgaggaaggc

SEQ ID NO: 5912086 - DNA, 25 bp, Homo sapien
ctagctcaggcatagccttaacttc

SEQ ID NO: 5912087 - DNA, 25 bp, Homo sapien
agccagagagtcctctttcagagag

SEQ ID NO: 5912088 - DNA, 25 bp, Homo sapien
atgtcaatttcattttgtggaggca

SEQ ID NO: 5912089 - DNA, 25 bp, Homo sapien
cctgcctcacttctgagtgcctggg

SEQ ID NO: 5912090 - DNA, 25 bp, Homo sapien
actttctgacctaggtcagtctgta

SEQ ID NO: 5912091 - DNA, 25 bp, Homo sapien
ctaactctggcctgccgactccatc

SEQ ID NO: 5912092 - DNA, 25 bp, Homo sapien
gaactgtgtagaggcaagaagtgac

SEQ ID NO: 5912093 - DNA, 25 bp, Homo sapien
gtttgagggaattcacccaaggcca

SEQ ID NO: 5912094 - DNA, 25 bp, Homo sapien
ccctgcttgagactatgctgttagg

SEQ ID NO: 5912095 - DNA, 25 bp, Homo sapien
gctgttaggctccagttttagcttc

SEQ ID NO: 5912096 - DNA, 25 bp, Homo sapien
gagagctggggcaattctttcagat

SEQ ID NO: 5912097 - DNA, 25 bp, Homo sapien
acatcgtcccaagagtgctgaacaa

SEQ ID NO: 5912098 - DNA, 25 bp, Homo sapien
tgtcactttctgacctaggtcagtc

SEQ ID NO: 5912099 - DNA, 25 bp, Homo sapien
atgctgcagaaggcctttgctcatt

SEQ ID NO: 5912100 - DNA, 25 bp, Homo sapien
ctcaggcatagccttaacttccagt

SEQ ID NO: 5912101 - DNA, 25 bp, Homo sapien
ccccagcctctcaatgtatgtctgt

SEQ ID NO: 5912102 - DNA, 25 bp, Homo sapien
gtctacaaacgagtatgatcctaac

SEQ ID NO: 5912103 - DNA, 25 bp, Homo sapien
aaggaaaaatgccttctacagagat

SEQ ID NO: 5912104 - DNA, 25 bp, Homo sapien
gagagcacatctaactctggcctgc

SEQ ID NO: 5912105 - DNA, 25 bp, Homo sapien
tgggaaattgttcatggtccccagc

SEQ ID NO: 5912106 - DNA, 25 bp, Homo sapien
ctatgctgttaggctccagttttag

SEQ ID NO: 5912107 - DNA, 25 bp, Homo sapien
gtcagtctgtactctctgttctcaa

SEQ ID NO: 5912108 - DNA, 25 bp, Homo sapien
tttatatgggaaattgttcatggtc

SEQ ID NO: 5912109 - DNA, 25 bp, Homo sapien
ggaggagagctggggcaattctttc

SEQ ID NO: 5912110 - DNA, 25 bp, Homo sapien
agattgggtgtatggctggctgtca

SEQ ID NO: 5912111 - DNA, 25 bp, Homo sapien
ttaggctccagttttagcttctgct

SEQ ID NO: 5912112 - DNA, 25 bp, Homo sapien
atttgaactgtgtagaggcaagaag

SEQ ID NO: 5912113 - DNA, 25 bp, Homo sapien
tgtatggctggctgtcactttctga

SEQ ID NO: 5912114 - DNA, 25 bp, Homo sapien
aatgctgtctacaaacgagtatgat

SEQ ID NO: 5912115 - DNA, 25 bp, Homo sapien
ggaaattgttcatggtccccagcct

SEQ ID NO: 5912116 - DNA, 25 bp, Homo sapien
gctcatttgaactgtgtagaggcaa

SEQ ID NO: 5912117 - DNA, 25 bp, Homo sapien
ggatgaccatactgtgagagactga

SEQ ID NO: 5912118 - DNA, 25 bp, Homo sapien
tctgttctcaaggaacagtggcaga

SEQ ID NO: 5912119 - DNA, 25 bp, Homo sapien
ccggggagctgaatggacaagcagc

SEQ ID NO: 5912120 - DNA, 25 bp, Homo sapien
gctggctgtcactttctgacctagg

SEQ ID NO: 5912121 - DNA, 25 bp, Homo sapien
cactagctcaggcatagccttaact

SEQ ID NO: 5912122 - DNA, 25 bp, Homo sapien
gagactatgctgttaggctccagtt

SEQ ID NO: 5912123 - DNA, 25 bp, Homo sapien
tagactacatcgtcccaagagtgct

SEQ ID NO: 5912124 - DNA, 25 bp, Homo sapien
tgttcatggtccccagcctctcaat

SEQ ID NO: 5912125 - DNA, 25 bp, Homo sapien
ctacaaacgagtatgatcctaactg

SEQ ID NO: 5912126 - DNA, 25 bp, Homo sapien
gaaaggaaaaatgccttctacagag

SEQ ID NO: 5912127 - DNA, 25 bp, Homo sapien
ttgtggtttatatgggaaattgttc

SEQ ID NO: 5912128 - DNA, 25 bp, Homo sapien
ggcaagaagtgaccggctcatgtca

SEQ ID NO: 5912129 - DNA, 25 bp, Homo sapien
cattgtgaacgcatgctgcagaagg

SEQ ID NO: 5912130 - DNA, 25 bp, Homo sapien
tctctgttctcaaggaacagtggca

SEQ ID NO: 5912131 - DNA, 25 bp, Homo sapien
gtgctgaacaacaggcagctgagaa

SEQ ID NO: 5912132 - DNA, 25 bp, Homo sapien
ctggcctgccgactccatctcattg

SEQ ID NO: 5912133 - DNA, 25 bp, Homo sapien
aagtgaccggctcatgtcaatgctg

SEQ ID NO: 5912134 - DNA, 25 bp, Homo sapien
cagctagactacatcgtcccaagag

SEQ ID NO: 5912135 - DNA, 25 bp, Homo sapien
tcactttctgacctaggtcagtctg

SEQ ID NO: 5912136 - DNA, 25 bp, Homo sapien
aattctttcagattgtggtttatat

SEQ ID NO: 5912137 - DNA, 25 bp, Homo sapien
tgtagaggcaagaagtgaccggctc

SEQ ID NO: 5912138 - DNA, 25 bp, Homo sapien
ggaaggatccagtctacctgcctca

SEQ ID NO: 5912139 - DNA, 25 bp, Homo sapien
ttcagattgtggtttatatgggaaa

SEQ ID NO: 5912140 - DNA, 25 bp, Homo sapien
ctccatctcattggcccaggaagga

SEQ ID NO: 5912141 - DNA, 25 bp, Homo sapien
catgtcaatgctgtctacaaacgag

SEQ ID NO: 5912142 - DNA, 25 bp, Homo sapien
taacttccagtagcccctgcttgag

SEQ ID NO: 5912143 - DNA, 25 bp, Homo sapien
tcctgggccaatgagatggagtcgg

SEQ ID NO: 5912144 - DNA, 25 bp, Homo sapien
ggtcagaaagtgacagccagccata

SEQ ID NO: 5912145 - DNA, 25 bp, Homo sapien
gtcatccagttcataaccttcatcc

SEQ ID NO: 5912146 - DNA, 25 bp, Homo sapien
gccggtcacttcttgcctctacaca

SEQ ID NO: 5912147 - DNA, 25 bp, Homo sapien
gttcataaccttcatcccatagtgg

SEQ ID NO: 5912148 - DNA, 25 bp, Homo sapien
tcacagtatggtcatccagttcata

SEQ ID NO: 5912149 - DNA, 25 bp, Homo sapien
gtagactggatccttcctgggccaa

SEQ ID NO: 5912150 - DNA, 25 bp, Homo sapien
ccaaaacagttaggatcatactcgt

SEQ ID NO: 5912151 - DNA, 25 bp, Homo sapien
gtggtccatgatctctgtagaaggc

SEQ ID NO: 5912152 - DNA, 25 bp, Homo sapien
tggaccctagcaggatggcccaggc

SEQ ID NO: 5912153 - DNA, 25 bp, Homo sapien
ctcccatctgccactgttccttgag

SEQ ID NO: 5912154 - DNA, 25 bp, Homo sapien
aacagtagggttggctcaagcagaa

SEQ ID NO: 5912155 - DNA, 25 bp, Homo sapien
ggggctactggaagttaaggctatg

SEQ ID NO: 5912156 - DNA, 25 bp, Homo sapien
gttaggatcatactcgtttgtagac

SEQ ID NO: 5912157 - DNA, 25 bp, Homo sapien
tggggaccatgaacaatttcccata

SEQ ID NO: 5912158 - DNA, 25 bp, Homo sapien
tctcacagtatggtcatccagttca

SEQ ID NO: 5912159 - DNA, 25 bp, Homo sapien
gagccggtcacttcttgcctctaca

SEQ ID NO: 5912160 - DNA, 25 bp, Homo sapien
ctgcagcatgcgttcacaatgcatc

SEQ ID NO: 5912161 - DNA, 25 bp, Homo sapien
tccttcctgggccaatgagatggag

SEQ ID NO: 5912162 - DNA, 25 bp, Homo sapien
gaagtgaggcaggtagactggatcc

SEQ ID NO: 5912163 - DNA, 25 bp, Homo sapien
gttagatgtgctctctgaaagagga

SEQ ID NO: 5912164 - DNA, 25 bp, Homo sapien
caaaggccttctgcagcatgcgttc

SEQ ID NO: 5912165 - DNA, 25 bp, Homo sapien
aaagtgacagccagccatacaccca

SEQ ID NO: 5912166 - DNA, 25 bp, Homo sapien
aagaattgccccagctctcctccca

SEQ ID NO: 5912167 - DNA, 25 bp, Homo sapien
tgaggcaggtagactggatccttcc

SEQ ID NO: 5912168 - DNA, 25 bp, Homo sapien
atctacagacatacattgagaggct

SEQ ID NO: 5912169 - DNA, 25 bp, Homo sapien
tgccactgttccttgagaacagaga

SEQ ID NO: 5912170 - DNA, 25 bp, Homo sapien
ttcacaatgcatctacagacataca

SEQ ID NO: 5912171 - DNA, 25 bp, Homo sapien
gaattgccccagctctcctcccatc

SEQ ID NO: 5912172 - DNA, 25 bp, Homo sapien
tggctgcttgtccattcagctcccc

SEQ ID NO: 5912173 - DNA, 25 bp, Homo sapien
acgatgtagtctagctgtgccttcc

SEQ ID NO: 5912174 - DNA, 25 bp, Homo sapien
gtgccttcctcaggatgtggtccat

SEQ ID NO: 5912175 - DNA, 25 bp, Homo sapien
tgagcaaaggccttctgcagcatgc

SEQ ID NO: 5912176 - DNA, 25 bp, Homo sapien
gagctagtgcctgtgtgacccatgg

SEQ ID NO: 5912177 - DNA, 25 bp, Homo sapien
ctgtgtgacccatggtgtgagtgac

SEQ ID NO: 5912178 - DNA, 25 bp, Homo sapien
agtggccttgggtgaattccctcaa

SEQ ID NO: 5912179 - DNA, 25 bp, Homo sapien
gctgcctgttgttcagcactcttgg

SEQ ID NO: 5912180 - DNA, 25 bp, Homo sapien
agttaaggctatgcctgagctagtg

SEQ ID NO: 5912181 - DNA, 25 bp, Homo sapien
tttgtagacagcattgacatgagcc

SEQ ID NO: 5912182 - DNA, 25 bp, Homo sapien
agactggatccttcctgggccaatg

SEQ ID NO: 5912183 - DNA, 25 bp, Homo sapien
cagtagggttggctcaagcagaagc

SEQ ID NO: 5912184 - DNA, 25 bp, Homo sapien
gggaccatgaacaatttcccatata

SEQ ID NO: 5912185 - DNA, 25 bp, Homo sapien
atgtggtccatgatctctgtagaag

SEQ ID NO: 5912186 - DNA, 25 bp, Homo sapien
ttgacattctcagctgcctgttgtt

SEQ ID NO: 5912187 - DNA, 25 bp, Homo sapien
ttctcagctgcctgttgttcagcac

SEQ ID NO: 5912188 - DNA, 25 bp, Homo sapien
ctgaaagaattgccccagctctcct

SEQ ID NO: 5912189 - DNA, 25 bp, Homo sapien
agaaggcatttttcctttccagtgg

SEQ ID NO: 5912190 - DNA, 25 bp, Homo sapien
aggcaggtagactggatccttcctg

SEQ ID NO: 5912191 - DNA, 25 bp, Homo sapien
tcagtctctcacagtatggtcatcc

SEQ ID NO: 5912192 - DNA, 25 bp, Homo sapien
aactggagcctaacagcatagtctc

SEQ ID NO: 5912193 - DNA, 25 bp, Homo sapien
atataaaccacaatctgaaagaatt

SEQ ID NO: 5912194 - DNA, 25 bp, Homo sapien
cagaagtgaggcaggtagactggat

SEQ ID NO: 5912195 - DNA, 25 bp, Homo sapien
gatggagtcggcaggccagagttag

SEQ ID NO: 5912196 - DNA, 25 bp, Homo sapien
ctacacagttcaaatgagcaaaggc

SEQ ID NO: 5912197 - DNA, 25 bp, Homo sapien
tgtgctctctgaaagaggactctct

SEQ ID NO: 5912198 - DNA, 25 bp, Homo sapien
agttcaaatgagcaaaggccttctg

SEQ ID NO: 5912199 - DNA, 25 bp, Homo sapien
agagagtacagactgacctaggtca

SEQ ID NO: 5912200 - DNA, 25 bp, Homo sapien
ccttgagaacagagagtacagactg

SEQ ID NO: 5912201 - DNA, 25 bp, Homo sapien
tcaaacccgatgcctccacaaaatg

SEQ ID NO: 5912202 - DNA, 25 bp, Homo sapien
cttgtccattcagctccccggggat

SEQ ID NO: 5912203 - DNA, 25 bp, Homo sapien
aaggcatttttcctttccagtggac

SEQ ID NO: 5912204 - DNA, 25 bp, Homo sapien
tagtctcaagcaggggctactggaa

SEQ ID NO: 5912205 - DNA, 25 bp, Homo sapien
gtcacttcttgcctctacacagttc

SEQ ID NO: 5912206 - DNA, 25 bp, Homo sapien
acacagttcaaatgagcaaaggcct

SEQ ID NO: 5912207 - DNA, 25 bp, Homo sapien
gcctgagctagtgcctgtgtgaccc

SEQ ID NO: 5912208 - DNA, 25 bp, Homo sapien
ctctacacagttcaaatgagcaaag

SEQ ID NO: 5912209 - DNA, 25 bp, Homo sapien
gagtcggcaggccagagttagatgt

SEQ ID NO: 5912210 - DNA, 25 bp, Homo sapien
ggctatgcctgagctagtgcctgtg

SEQ ID NO: 5912211 - DNA, 25 bp, Homo sapien
ggatttaacagtagggttggctcaa

SEQ ID NO: 5912212 - DNA, 25 bp, Homo sapien
agacatacattgagaggctggggac

SEQ ID NO: 5912213 - DNA, 25 bp, Homo sapien
cagaagctaaaactggagcctaaca

SEQ ID NO: 5912214 - DNA, 25 bp, Homo sapien
cagttaggatcatactcgtttgtag

SEQ ID NO: 5912215 - DNA, 25 bp, Homo sapien
gaaagaggactctctggctgcttgt

SEQ ID NO: 5912216 - DNA, 25 bp, Homo sapien
ataaaccacaatctgaaagaattgc

SEQ ID NO: 5912217 - DNA, 25 bp, Homo sapien
agtacagactgacctaggtcagaaa

SEQ ID NO: 5912218 - DNA, 25 bp, Homo sapien
cagcattgacatgagccggtcactt

SEQ ID NO: 5912219 - DNA, 25 bp, Homo sapien
cttcctcaggatgtggtccatgatc

SEQ ID NO: 5912220 - DNA, 25 bp, Homo sapien
catactcgtttgtagacagcattga

SEQ ID NO: 5912221 - DNA, 25 bp, Homo sapien
aggccagagttagatgtgctctctg

SEQ ID NO: 5912222 - DNA, 25 bp, Homo sapien
tgtagacagcattgacatgagccgg

SEQ ID NO: 5912223 - DNA, 25 bp, Homo sapien
tcttgcctctacacagttcaaatga

SEQ ID NO: 5912224 - DNA, 25 bp, Homo sapien
ctgggccaatgagatggagtcggca

SEQ ID NO: 5912225 - DNA, 25 bp, Homo sapien
agcaaaggccttctgcagcatgcgt

SEQ ID NO: 5912226 - DNA, 25 bp, Homo sapien
tgacatgagccggtcacttcttgcc

SEQ ID NO: 5912227 - DNA, 25 bp, Homo sapien
caggcactcagaagtgaggcaggta

SEQ ID NO: 5912228 - DNA, 25 bp, Homo sapien
ggctactggaagttaaggctatgcc

SEQ ID NO: 5912229 - DNA, 25 bp, Homo sapien
cggcaggccagagttagatgtgctc

SEQ ID NO: 5912230 - DNA, 25 bp, Homo sapien
agcatagtctcaagcaggggctact

SEQ ID NO: 5912231 - DNA, 25 bp, Homo sapien
atggcccaggcactcagaagtgagg

SEQ ID NO: 5912232 - DNA, 25 bp, Homo sapien
tctctggctgcttgtccattcagct

SEQ ID NO: 5912233 - DNA, 25 bp, Homo sapien
caatgcatctacagacatacattga

SEQ ID NO: 5912234 - DNA, 25 bp, Homo sapien
ctggagcctaacagcatagtctcaa

SEQ ID NO: 5912235 - DNA, 25 bp, Homo sapien
ggcatttttcctttccagtggaccc

SEQ ID NO: 5912236 - DNA, 25 bp, Homo sapien
agcactcttgggacgatgtagtcta

SEQ ID NO: 5912237 - DNA, 25 bp, Homo sapien
ccatagtggccttgggtgaattccc

SEQ ID NO: 5912238 - DNA, 25 bp, Homo sapien
ggatgtggtccatgatctctgtaga

SEQ ID NO: 5912239 - DNA, 25 bp, Homo sapien
tgttgttcagcactcttgggacgat

SEQ ID NO: 5912240 - DNA, 25 bp, Homo sapien
ggtccatgatctctgtagaaggcat

SEQ ID NO: 5912241 - DNA, 25 bp, Homo sapien
ctgacctaggtcagaaagtgacagc

SEQ ID NO: 5912242 - DNA, 25 bp, Homo sapien
gactgacctaggtcagaaagtgaca

SEQ ID NO: 5912243 - DNA, 25 bp, Homo sapien
ccatacacccaatctagttcagtct

SEQ ID NO: 5912244 - DNA, 25 bp, Homo sapien
ccactgttccttgagaacagagagt

SEQ ID NO: 5912245 - DNA, 25 bp, Homo sapien
aaaactggagcctaacagcatagtc

SEQ ID NO: 5912246 - DNA, 25 bp, Homo sapien
ctagctgtgccttcctcaggatgtg

SEQ ID NO: 5912247 - DNA, 25 bp, Homo sapien
gcatctacagacatacattgagagg

SEQ ID NO: 5912248 - DNA, 25 bp, Homo sapien
cgtttgtagacagcattgacatgag

SEQ ID NO: 5912249 - DNA, 25 bp, Homo sapien
catagtctcaagcaggggctactgg

SEQ ID NO: 5912250 - DNA, 25 bp, Homo sapien
cagactgacctaggtcagaaagtga

SEQ ID NO: 5912251 - DNA, 25 bp, Homo sapien
cacttcttgcctctacacagttcaa

SEQ ID NO: 5912252 - DNA, 25 bp, Homo sapien
cagctgcctgttgttcagcactctt

SEQ ID NO: 5912253 - DNA, 25 bp, Homo sapien
cattctcagctgcctgttgttcagc

SEQ ID NO: 5912254 - DNA, 25 bp, Homo sapien
tggtcatccagttcataaccttcat

SEQ ID NO: 5912255 - DNA, 25 bp, Homo sapien
cattcagctccccggggatttaaca

SEQ ID NO: 5912256 - DNA, 25 bp, Homo sapien
ccttctgcagcatgcgttcacaatg

SEQ ID NO: 5912257 - DNA, 25 bp, Homo sapien
ctaaaactggagcctaacagcatag

SEQ ID NO: 5912258 - DNA, 25 bp, Homo sapien
acccaatctagttcagtctctcaca

SEQ ID NO: 5912259 - DNA, 25 bp, Homo sapien
gatgtgctctctgaaagaggactct

SEQ ID NO: 5912260 - DNA, 25 bp, Homo sapien
ggatggcccaggcactcagaagtga

SEQ ID NO: 5912261 - DNA, 25 bp, Homo sapien
cagctccccggggatttaacagtag

SEQ ID NO: 5912262 - DNA, 25 bp, Homo sapien
gctggggaccatgaacaatttccca

SEQ ID NO: 5912263 - DNA, 25 bp, Homo sapien
agctgtgccttcctcaggatgtggt

SEQ ID NO: 5912264 - DNA, 25 bp, Homo sapien
ctgagctagtgcctgtgtgacccat

SEQ ID NO: 5912265 - DNA, 25 bp, Homo sapien
ctgtgccttcctcaggatgtggtcc

SEQ ID NO: 5912266 - DNA, 25 bp, Homo sapien
ttaaggctatgcctgagctagtgcc

SEQ ID NO: 5912267 - DNA, 25 bp, Homo sapien
ctactggaagttaaggctatgcctg

SEQ ID NO: 5912268 - DNA, 25 bp, Homo sapien
cacaatctgaaagaattgccccagc

SEQ ID NO: 5912269 - DNA, 25 bp, Homo sapien
ggttggctcaagcagaagctaaaac

SEQ ID NO: 5912270 - DNA, 25 bp, Homo sapien
agagtacagactgacctaggtcaga

SEQ ID NO: 5912271 - DNA, 25 bp, Homo sapien
ttccagtggaccctagcaggatggc

SEQ ID NO: 5912272 - DNA, 25 bp, Homo sapien
tgggacgatgtagtctagctgtgcc

SEQ ID NO: 5912273 - DNA, 25 bp, Homo sapien
gcaggccagagttagatgtgctctc

SEQ ID NO: 5912274 - DNA, 25 bp, Homo sapien
acagcatagtctcaagcaggggcta

SEQ ID NO: 5912275 - DNA, 25 bp, Homo sapien
gtgaattccctcaaacccgatgcct

SEQ ID NO: 5912276 - DNA, 25 bp, Homo sapien
aattgacattctcagctgcctgttg

SEQ ID NO: 5912277 - DNA, 25 bp, Homo sapien
aaggccttctgcagcatgcgttcac

SEQ ID NO: 5912278 - DNA, 25 bp, Homo sapien
tgcgttcacaatgcatctacagaca

SEQ ID NO: 5912279 - DNA, 25 bp, Homo sapien
aacagttaggatcatactcgtttgt

SEQ ID NO: 5912280 - DNA, 25 bp, Homo sapien
ttaacagtagggttggctcaagcag

SEQ ID NO: 5912281 - DNA, 25 bp, Homo sapien
gcagcatgcgttcacaatgcatcta

SEQ ID NO: 5912282 - DNA, 25 bp, Homo sapien
atacattgagaggctggggaccatg

SEQ ID NO: 5912283 - DNA, 25 bp, Homo sapien
tcagaaagtgacagccagccataca

SEQ ID NO: 5912284 - DNA, 25 bp, Homo sapien
cctcaaacccgatgcctccacaaaa

SEQ ID NO: 5912285 - DNA, 25 bp, Homo sapien
gaccctagcaggatggcccaggcac

SEQ ID NO: 5912286 - DNA, 25 bp, Homo sapien
aatctagttcagtctctcacagtat

SEQ ID NO: 5912287 - DNA, 25 bp, Homo sapien
cacaaaatgaaattgacattctcag

SEQ ID NO: 5912288 - DNA, 25 bp, Homo sapien
caatgagatggagtcggcaggccag

SEQ ID NO: 5912289 - DNA, 25 bp, Homo sapien
atagtggccttgggtgaattccctc

SEQ ID NO: 5912290 - DNA, 25 bp, Homo sapien
tagttcagtctctcacagtatggtc

SEQ ID NO: 5912291 - DNA, 25 bp, Homo sapien
tactcgtttgtagacagcattgaca

SEQ ID NO: 5912292 - DNA, 25 bp, Homo sapien
atctctgtagaaggcatttttcctt

SEQ ID NO: 5912293 - DNA, 25 bp, Homo sapien
tcataaccttcatcccatagtggcc

SEQ ID NO: 5912294 - DNA, 25 bp, Homo sapien
gatgtagtctagctgtgccttcctc

SEQ ID NO: 5912295 - DNA, 25 bp, Homo sapien
gaacaatttcccatataaaccacaa

SEQ ID NO: 5912296 - DNA, 25 bp, Homo sapien
gtagggttggctcaagcagaagcta

SEQ ID NO: 5912297 - DNA, 25 bp, Homo sapien
tctagttcagtctctcacagtatgg

SEQ ID NO: 5912298 - DNA, 25 bp, Homo sapien
tctggctgcttgtccattcagctcc

SEQ ID NO: 5912299 - DNA, 25 bp, Homo sapien
gtctcaagcaggggctactggaagt

SEQ ID NO: 5912300 - DNA, 25 bp, Homo sapien
ggactctctggctgcttgtccattc

SEQ ID NO: 5912301 - DNA, 25 bp, Homo sapien
ggcactcagaagtgaggcaggtaga

SEQ ID NO: 5912302 - DNA, 25 bp, Homo sapien
cccatctgccactgttccttgagaa

SEQ ID NO: 5912303 - DNA, 25 bp, Homo sapien
aaggctatgcctgagctagtgcctg

SEQ ID NO: 5912304 - DNA, 25 bp, Homo sapien
agccatacacccaatctagttcagt

SEQ ID NO: 5912305 - DNA, 25 bp, Homo sapien
aggtagactggatccttcctgggcc

SEQ ID NO: 5912306 - DNA, 25 bp, Homo sapien
catccagttcataaccttcatccca

SEQ ID NO: 5912307 - DNA, 25 bp, Homo sapien
acacccaatctagttcagtctctca

SEQ ID NO: 5912308 - DNA, 25 bp, Homo sapien
ctgtagaaggcatttttcctttcca

SEQ ID NO: 5912309 - DNA, 25 bp, Homo sapien
atgaacaatttcccatataaaccac

SEQ ID NO: 5912310 - DNA, 25 bp, Homo sapien
ttgagaacagagagtacagactgac

SEQ ID NO: 5912311 - DNA, 25 bp, Homo sapien
agcagaagctaaaactggagcctaa

SEQ ID NO: 5912312 - DNA, 25 bp, Homo sapien
aaccttcatcccatagtggccttgg

SEQ ID NO: 5912313 - DNA, 25 bp, Homo sapien
tcagcactcttgggacgatgtagtc

SEQ ID NO: 5912314 - DNA, 25 bp, Homo sapien
cagagttagatgtgctctctgaaag

SEQ ID NO: 5912315 - DNA, 25 bp, Homo sapien
gtagaaggcatttttcctttccagt

SEQ ID NO: 5912316 - DNA, 25 bp, Homo sapien
tcctttccagtggaccctagcagga

SEQ ID NO: 5912317 - DNA, 25 bp, Homo sapien
tgcttgtccattcagctccccgggg

SEQ ID NO: 5912318 - DNA, 25 bp, Homo sapien
ctcaagcaggggctactggaagtta

SEQ ID NO: 5912319 - DNA, 25 bp, Homo sapien
catgcgttcacaatgcatctacaga

SEQ ID NO: 5912320 - DNA, 25 bp, Homo sapien
cactcttgggacgatgtagtctagc

SEQ ID NO: 5912321 - DNA, 25 bp, Homo sapien
atacacccaatctagttcagtctct

SEQ ID NO: 5912322 - DNA, 25 bp, Homo sapien
gaagttaaggctatgcctgagctag

SEQ ID NO: 5912323 - DNA, 25 bp, Homo sapien
aaaccacaatctgaaagaattgccc

SEQ ID NO: 5912324 - DNA, 25 bp, Homo sapien
caggatggcccaggcactcagaagt

SEQ ID NO: 5912325 - DNA, 25 bp, Homo sapien
tcctcaggatgtggtccatgatctc

SEQ ID NO: 5912326 - DNA, 25 bp, Homo sapien
caagcagaagctaaaactggagcct

SEQ ID NO: 5912327 - DNA, 25 bp, Homo sapien
agcctaacagcatagtctcaagcag

SEQ ID NO: 5912328 - DNA, 25 bp, Homo sapien
attgagaggctggggaccatgaaca

SEQ ID NO: 5912329 - DNA, 25 bp, Homo sapien
gaccatgaacaatttcccatataaa

SEQ ID NO: 5912330 - DNA, 25 bp, Homo sapien
atctgaaagaattgccccagctctc

SEQ ID NO: 5912331 - DNA, 25 bp, Homo sapien
cagttcataaccttcatcccatagt

SEQ ID NO: 5912332 - DNA, 25 bp, Homo sapien
ctttccagtggaccctagcaggatg

SEQ ID NO: 5912333 - DNA, 25 bp, Homo sapien
catttttcctttccagtggacccta

SEQ ID NO: 5912334 - DNA, 25 bp, Homo sapien
tccctcaaacccgatgcctccacaa

SEQ ID NO: 5912335 - DNA, 25 bp, Homo sapien
tggagtcggcaggccagagttagat

SEQ ID NO: 5912336 - DNA, 25 bp, Homo sapien
gaggactctctggctgcttgtccat

SEQ ID NO: 5912337 - DNA, 25 bp, Homo sapien
actggaagttaaggctatgcctgag

SEQ ID NO: 5912338 - DNA, 25 bp, Homo sapien
caggatgtggtccatgatctctgta

SEQ ID NO: 5912339 - DNA, 25 bp, Homo sapien
gccagagttagatgtgctctctgaa

SEQ ID NO: 5912340 - DNA, 25 bp, Homo sapien
gttcagcactcttgggacgatgtag

SEQ ID NO: 5912341 - DNA, 25 bp, Homo sapien
caatctgaaagaattgccccagctc

SEQ ID NO: 5912342 - DNA, 25 bp, Homo sapien
ctcttgggacgatgtagtctagctg

SEQ ID NO: 5912343 - DNA, 25 bp, Homo sapien
accacaatctgaaagaattgcccca

SEQ ID NO: 5912344 - DNA, 25 bp, Homo sapien
gagatggagtcggcaggccagagtt

SEQ ID NO: 5912345 - DNA, 25 bp, Homo sapien
gccttcctcaggatgtggtccatga

SEQ ID NO: 5912346 - DNA, 25 bp, Homo sapien
aatttcccatataaaccacaatctg

SEQ ID NO: 5912347 - DNA, 25 bp, Homo sapien
catcccatagtggccttgggtgaat

SEQ ID NO: 5912348 - DNA, 25 bp, Homo sapien
tctcctcccatctgccactgttcct

SEQ ID NO: 5912349 - DNA, 25 bp, Homo sapien
gctctcctcccatctgccactgttc

SEQ ID NO: 5912350 - DNA, 25 bp, Homo sapien
gcaggtagactggatccttcctggg

SEQ ID NO: 5912351 - DNA, 25 bp, Homo sapien
agtggaccctagcaggatggcccag

SEQ ID NO: 5912352 - DNA, 25 bp, Homo sapien
caaatgagcaaaggccttctgcagc

SEQ ID NO: 5912353 - DNA, 25 bp, Homo sapien
caaaatgaaattgacattctcagct

SEQ ID NO: 5912354 - DNA, 25 bp, Homo sapien
tagatgtgctctctgaaagaggact

SEQ ID NO: 5912355 - DNA, 25 bp, Homo sapien
gcctgtgtgacccatggtgtgagtg

SEQ ID NO: 5912356 - DNA, 25 bp, Homo sapien
cctccacaaaatgaaattgacattc

SEQ ID NO: 5912357 - DNA, 25 bp, Homo sapien
ctctgtagaaggcatttttcctttc

SEQ ID NO: 5912358 - DNA, 25 bp, Homo sapien
ctacagacatacattgagaggctgg

SEQ ID NO: 5912359 - DNA, 25 bp, Homo sapien
tatggtcatccagttcataaccttc

SEQ ID NO: 5912360 - DNA, 25 bp, Homo sapien
ccatgaacaatttcccatataaacc

SEQ ID NO: 5912361 - DNA, 25 bp, Homo sapien
ggagcctaacagcatagtctcaagc

SEQ ID NO: 5912362 - DNA, 25 bp, Homo sapien
ccttcatcccatagtggccttgggt

SEQ ID NO: 5912363 - DNA, 25 bp, Homo sapien
gcctctacacagttcaaatgagcaa

SEQ ID NO: 5912364 - DNA, 25 bp, Homo sapien
tttcctttccagtggaccctagcag

SEQ ID NO: 5912365 - DNA, 25 bp, Homo sapien
atgcatctacagacatacattgaga

SEQ ID NO: 5912366 - DNA, 25 bp, Homo sapien
attgacatgagccggtcacttcttg

SEQ ID NO: 5912367 - DNA, 25 bp, Homo sapien
atgagccggtcacttcttgcctcta

SEQ ID NO: 5912368 - DNA, 25 bp, Homo sapien
actctctggctgcttgtccattcag

SEQ ID NO: 5912369 - DNA, 25 bp, Homo sapien
gatccttcctgggccaatgagatgg

SEQ ID NO: 5912370 - DNA, 25 bp, Homo sapien
tagtctagctgtgccttcctcagga

SEQ ID NO: 5912371 - DNA, 25 bp, Homo sapien
gtgcctgtgtgacccatggtgtgag

SEQ ID NO: 5912372 - DNA, 25 bp, Homo sapien
tctgccactgttccttgagaacaga

SEQ ID NO: 5912373 - DNA, 25 bp, Homo sapien
ctcgtttgtagacagcattgacatg

SEQ ID NO: 5912374 - DNA, 25 bp, Homo sapien
acagccagccatacacccaatctag

SEQ ID NO: 5912375 - DNA, 25 bp, Homo sapien
ctatgcctgagctagtgcctgtgtg

SEQ ID NO: 5912376 - DNA, 25 bp, Homo sapien
atttaacagtagggttggctcaagc

SEQ ID NO: 5912377 - DNA, 25 bp, Homo sapien
tccacaaaatgaaattgacattctc

SEQ ID NO: 5912378 - DNA, 25 bp, Homo sapien
tgtccattcagctccccggggattt

SEQ ID NO: 5912379 - DNA, 25 bp, Homo sapien
gacattctcagctgcctgttgttca

SEQ ID NO: 5912380 - DNA, 25 bp, Homo sapien
ttgcctctacacagttcaaatgagc

SEQ ID NO: 5912381 - DNA, 25 bp, Homo sapien
gaaagaattgccccagctctcctcc

SEQ ID NO: 5912382 - DNA, 25 bp, Homo sapien
gtctagctgtgccttcctcaggatg

SEQ ID NO: 5912383 - DNA, 25 bp, Homo sapien
tttcccatataaaccacaatctgaa

SEQ ID NO: 5912384 - DNA, 25 bp, Homo sapien
tggatccttcctgggccaatgagat

SEQ ID NO: 5912385 - DNA, 25 bp, Homo sapien
ctcagctgcctgttgttcagcactc

SEQ ID NO: 5912386 - DNA, 25 bp, Homo sapien
ctagcaggatggcccaggcactcag

SEQ ID NO: 5912387 - DNA, 25 bp, Homo sapien
atcatactcgtttgtagacagcatt

SEQ ID NO: 5912388 - DNA, 25 bp, Homo sapien
aaatgaaattgacattctcagctgc

SEQ ID NO: 5912389 - DNA, 25 bp, Homo sapien
cctgttgttcagcactcttgggacg

SEQ ID NO: 5912390 - DNA, 25 bp, Homo sapien
tggccttgggtgaattccctcaaac

SEQ ID NO: 5912391 - DNA, 25 bp, Homo sapien
attccctcaaacccgatgcctccac

SEQ ID NO: 5912392 - DNA, 25 bp, Homo sapien
ctcagaagtgaggcaggtagactgg

SEQ ID NO: 5912393 - DNA, 25 bp, Homo sapien
cttcctgggccaatgagatggagtc

SEQ ID NO: 5912394 - DNA, 25 bp, Homo sapien
tgatctctgtagaaggcatttttcc

SEQ ID NO: 5912395 - DNA, 25 bp, Homo sapien
gaattccctcaaacccgatgcctcc

SEQ ID NO: 5912396 - DNA, 25 bp, Homo sapien
gaaattgacattctcagctgcctgt

SEQ ID NO: 5912397 - DNA, 25 bp, Homo sapien
acagttcaaatgagcaaaggccttc

SEQ ID NO: 5912398 - DNA, 25 bp, Homo sapien
acagacatacattgagaggctgggg

SEQ ID NO: 5912399 - DNA, 25 bp, Homo sapien
gccttgggtgaattccctcaaaccc

SEQ ID NO: 5912400 - DNA, 25 bp, Homo sapien
catctgccactgttccttgagaaca

SEQ ID NO: 5912401 - DNA, 25 bp, Homo sapien
acagagagtacagactgacctaggt

SEQ ID NO: 5912402 - DNA, 25 bp, Homo sapien
ggatcatactcgtttgtagacagca

SEQ ID NO: 5912403 - DNA, 25 bp, Homo sapien
agcaggatggcccaggcactcagaa

SEQ ID NO: 5912404 - DNA, 25 bp, Homo sapien
tgtagtctagctgtgccttcctcag

SEQ ID NO: 5912405 - DNA, 25 bp, Homo sapien
tgttccttgagaacagagagtacag

SEQ ID NO: 5912406 - DNA, 25 bp, Homo sapien
aatgagcaaaggccttctgcagcat

SEQ ID NO: 5912407 - DNA, 25 bp, Homo sapien
caagcaggggctactggaagttaag

SEQ ID NO: 5912408 - DNA, 25 bp, Homo sapien
agtgacagccagccatacacccaat

SEQ ID NO: 5912409 - DNA, 25 bp, Homo sapien
ttggctcaagcagaagctaaaactg

SEQ ID NO: 5912410 - DNA, 25 bp, Homo sapien
cgttcacaatgcatctacagacata

SEQ ID NO: 5912411 - DNA, 25 bp, Homo sapien
tagacagcattgacatgagccggtc

SEQ ID NO: 5912412 - DNA, 25 bp, Homo sapien
tccatgatctctgtagaaggcattt

SEQ ID NO: 5912413 - DNA, 25 bp, Homo sapien
acccgatgcctccacaaaatgaaat

SEQ ID NO: 5912414 - DNA, 25 bp, Homo sapien
cctaacagcatagtctcaagcaggg

SEQ ID NO: 5912415 - DNA, 25 bp, Homo sapien
gacagcattgacatgagccggtcac

SEQ ID NO: 5912416 - DNA, 25 bp, Homo sapien
gtcggcaggccagagttagatgtgc

SEQ ID NO: 5912417 - DNA, 25 bp, Homo sapien
tcccatataaaccacaatctgaaag

SEQ ID NO: 5912418 - DNA, 25 bp, Homo sapien
gagaacagagagtacagactgacct

SEQ ID NO: 5912419 - DNA, 25 bp, Homo sapien
ccagtggaccctagcaggatggccc

SEQ ID NO: 5912420 - DNA, 25 bp, Homo sapien
agccagccatacacccaatctagtt

SEQ ID NO: 5912421 - DNA, 25 bp, Homo sapien
tgagaggctggggaccatgaacaat

SEQ ID NO: 5912422 - DNA, 25 bp, Homo sapien
catgatctctgtagaaggcattttt

SEQ ID NO: 5912423 - DNA, 25 bp, Homo sapien
ttgggtgaattccctcaaacccgat

SEQ ID NO: 5912424 - DNA, 25 bp, Homo sapien
ttcatcccatagtggccttgggtga

SEQ ID NO: 5912425 - DNA, 25 bp, Homo sapien
gatgcctccacaaaatgaaattgac

SEQ ID NO: 5912426 - DNA, 25 bp, Homo sapien
gaacagagagtacagactgacctag

SEQ ID NO: 5912427 - DNA, 25 bp, Homo sapien
gaagctaaaactggagcctaacagc

SEQ ID NO: 5912428 - DNA, 25 bp, Homo sapien
ttcaaatgagcaaaggccttctgca

SEQ ID NO: 5912429 - DNA, 25 bp, Homo sapien
acaatttcccatataaaccacaatc

SEQ ID NO: 5912430 - DNA, 25 bp, Homo sapien
agaggctggggaccatgaacaattt

SEQ ID NO: 5912431 - DNA, 25 bp, Homo sapien
gtgacccatggtgtgagtgacatct

SEQ ID NO: 5912432 - DNA, 25 bp, Homo sapien
tcctcccatctgccactgttccttg

SEQ ID NO: 5912433 - DNA, 25 bp, Homo sapien
ttcagctccccggggatttaacagt

SEQ ID NO: 5912434 - DNA, 25 bp, Homo sapien
tccattcagctccccggggatttaa

SEQ ID NO: 5912435 - DNA, 25 bp, Homo sapien
ctctctgaaagaggactctctggct

SEQ ID NO: 5912436 - DNA, 25 bp, Homo sapien
gggccaatgagatggagtcggcagg

SEQ ID NO: 5912437 - DNA, 25 bp, Homo sapien
gctgcttgtccattcagctccccgg

SEQ ID NO: 5912438 - DNA, 25 bp, Homo sapien
gttcagtctctcacagtatggtcat

SEQ ID NO: 5912439 - DNA, 25 bp, Homo sapien
ggcccaggcactcagaagtgaggca

SEQ ID NO: 5912440 - DNA, 25 bp, Homo sapien
ttccttgagaacagagagtacagac

SEQ ID NO: 5912441 - DNA, 25 bp, Homo sapien
cactcagaagtgaggcaggtagact

SEQ ID NO: 5912442 - DNA, 25 bp, Homo sapien
ctctgaaagaggactctctggctgc

SEQ ID NO: 5912443 - DNA, 25 bp, Homo sapien
gcattgacatgagccggtcacttct

SEQ ID NO: 5912444 - DNA, 25 bp, Homo sapien
acattgagaggctggggaccatgaa

SEQ ID NO: 5912445 - DNA, 25 bp, Homo sapien
caggggctactggaagttaaggcta

SEQ ID NO: 5912446 - DNA, 25 bp, Homo sapien
ccaatctagttcagtctctcacagt

SEQ ID NO: 5912447 - DNA, 25 bp, Homo sapien
tacagactgacctaggtcagaaagt

SEQ ID NO: 5912448 - DNA, 25 bp, Homo sapien
gagttagatgtgctctctgaaagag

SEQ ID NO: 5912449 - DNA, 25 bp, Homo sapien
agtatggtcatccagttcataacct

SEQ ID NO: 5912450 - DNA, 25 bp, Homo sapien
agaaagtgacagccagccatacacc

SEQ ID NO: 5912451 - DNA, 25 bp, Homo sapien
tagtgcctgtgtgacccatggtgtg

SEQ ID NO: 5912452 - DNA, 25 bp, Homo sapien
ctgaaagaggactctctggctgctt

SEQ ID NO: 5912453 - DNA, 25 bp, Homo sapien
ataaccttcatcccatagtggcctt

SEQ ID NO: 5912454 - DNA, 25 bp, Homo sapien
ctcaggatgtggtccatgatctctg

SEQ ID NO: 5912455 - DNA, 25 bp, Homo sapien
atgaaattgacattctcagctgcct

SEQ ID NO: 5912456 - DNA, 25 bp, Homo sapien
aaacccgatgcctccacaaaatgaa

SEQ ID NO: 5912457 - DNA, 25 bp, Homo sapien
taggtcagaaagtgacagccagcca

SEQ ID NO: 5912458 - DNA, 25 bp, Homo sapien
ttgttcagcactcttgggacgatgt

SEQ ID NO: 5912459 - DNA, 25 bp, Homo sapien
cccaggcactcagaagtgaggcagg

SEQ ID NO: 5912460 - DNA, 25 bp, Homo sapien
acagtatggtcatccagttcataac

SEQ ID NO: 5912461 - DNA, 25 bp, Homo sapien
ctcaagcagaagctaaaactggagc

SEQ ID NO: 5912462 - DNA, 25 bp, Homo sapien
aagaggactctctggctgcttgtcc

SEQ ID NO: 5912463 - DNA, 25 bp, Homo sapien
ggccttctgcagcatgcgttcacaa

SEQ ID NO: 5912464 - DNA, 25 bp, Homo sapien
tgcctccacaaaatgaaattgacat

SEQ ID NO: 5912465 - DNA, 25 bp, Homo sapien
tttttcctttccagtggaccctagc

SEQ ID NO: 5912466 - DNA, 25 bp, Homo sapien
cagctctcctcccatctgccactgt

SEQ ID NO: 5912467 - DNA, 25 bp, Homo sapien
tgctctctgaaagaggactctctgg

SEQ ID NO: 5912468 - DNA, 25 bp, Homo sapien
agcatgcgttcacaatgcatctaca

SEQ ID NO: 5912469 - DNA, 25 bp, Homo sapien
agtgaggcaggtagactggatcctt

SEQ ID NO: 5912470 - DNA, 25 bp, Homo sapien
cctaggtcagaaagtgacagccagc

SEQ ID NO: 5912471 - DNA, 25 bp, Homo sapien
gacctaggtcagaaagtgacagcca

SEQ ID NO: 5912472 - DNA, 25 bp, Homo sapien
aggctggggaccatgaacaatttcc

SEQ ID NO: 5912473 - DNA, 25 bp, Homo sapien
actgttccttgagaacagagagtac

SEQ ID NO: 5912474 - DNA, 25 bp, Homo sapien
taggatcatactcgtttgtagacag

SEQ ID NO: 5912475 - DNA, 25 bp, Homo sapien
cttcttgcctctacacagttcaaat

SEQ ID NO: 5912476 - DNA, 25 bp, Homo sapien
agtctctcacagtatggtcatccag

SEQ ID NO: 5912477 - DNA, 25 bp, Homo sapien
cacaatgcatctacagacatacatt

SEQ ID NO: 5912478 - DNA, 25 bp, Homo sapien
ccatataaaccacaatctgaaagaa

SEQ ID NO: 5912479 - DNA, 25 bp, Homo sapien
ttctgcagcatgcgttcacaatgca

SEQ ID NO: 5912480 - DNA, 25 bp, Homo sapien
tcccatagtggccttgggtgaattc

SEQ ID NO: 5912481 - DNA, 25 bp, Homo sapien
tgacagccagccatacacccaatct

SEQ ID NO: 5912482 - DNA, 25 bp, Homo sapien
actggatccttcctgggccaatgag

SEQ ID NO: 5912483 - DNA, 25 bp, Homo sapien
gccaatgagatggagtcggcaggcc

SEQ ID NO: 5912484 - DNA, 25 bp, Homo sapien
ggctcaagcagaagctaaaactgga

SEQ ID NO: 5912485 - DNA, 25 bp, Homo sapien
ccctagcaggatggcccaggcactc

SEQ ID NO: 5912486 - DNA, 25 bp, Homo sapien
agcaggggctactggaagttaaggc

SEQ ID NO: 5912487 - DNA, 25 bp, Homo sapien
taacagcatagtctcaagcaggggc

SEQ ID NO: 5912488 - DNA, 25 bp, Homo sapien
atgcctgagctagtgcctgtgtgac

SEQ ID NO: 5912489 - DNA, 25 bp, Homo sapien
cggtcacttcttgcctctacacagt

SEQ ID NO: 5912490 - DNA, 25 bp, Homo sapien
gtgtgacccatggtgtgagtgacat

SEQ ID NO: 5912491 - DNA, 25 bp, Homo sapien
ggacgatgtagtctagctgtgcctt

SEQ ID NO: 5912492 - DNA, 25 bp, Homo sapien
atgagatggagtcggcaggccagag

SEQ ID NO: 5912493 - DNA, 25 bp, Homo sapien
tctctcacagtatggtcatccagtt

SEQ ID NO: 5912494 - DNA, 25 bp, Homo sapien
tccagttcataaccttcatcccata

SEQ ID NO: 5912495 - DNA, 25 bp, Homo sapien
ccagccatacacccaatctagttca

SEQ ID NO: 5912496 - DNA, 25 bp, Homo sapien
acatgagccggtcacttcttgcctc

SEQ ID NO: 5912497 - DNA, 25 bp, Homo sapien
agggttggctcaagcagaagctaaa

SEQ ID NO: 5912498 - DNA, 25 bp, Homo sapien
gggtgaattccctcaaacccgatgc

SEQ ID NO: 5912499 - DNA, 25 bp, Homo sapien
acatacattgagaggctggggacca

SEQ ID NO: 5912500 - DNA, 25 bp, Homo sapien
gctagtgcctgtgtgacccatggtg

SEQ ID NO: 5912501 - DNA, 25 bp, Homo sapien
agctaaaactggagcctaacagcat

SEQ ID NO: 5912502 - DNA, 25 bp, Homo sapien
tggaagttaaggctatgcctgagct

SEQ ID NO: 5912503 - DNA, 25 bp, Homo sapien
tgcctgttgttcagcactcttggga

SEQ ID NO: 5912504 - DNA, 25 bp, Homo sapien
ggggatttaacagtagggttggctc

SEQ ID NO: 5912505 - DNA, 25 bp, Homo sapien
ccgatgcctccacaaaatgaaattg

SEQ ID NO: 5912506 - DNA, 25 bp, Homo sapien
aaaacagttaggatcatactcgttt

SEQ ID NO: 5912507 - DNA, 25 bp, Homo sapien
cttgggacgatgtagtctagctgtg

SEQ ID NO: 5912508 - DNA, 25 bp, Homo sapien
tctctgtggcttactcaactggttt

SEQ ID NO: 5912509 - DNA, 25 bp, Homo sapien
taaaggtgagagagcagactgcaca

SEQ ID NO: 5912510 - DNA, 25 bp, Homo sapien
agcaactcagaggggaagggtttgt

SEQ ID NO: 5912511 - DNA, 25 bp, Homo sapien
tctggtggtttctcgcactttgcgg

SEQ ID NO: 5912512 - DNA, 25 bp, Homo sapien
ctgtgtgaggctggtaaacccagag

SEQ ID NO: 5912513 - DNA, 25 bp, Homo sapien
cttcttaggccgtgtcctactttga

SEQ ID NO: 5912514 - DNA, 25 bp, Homo sapien
ctccaagtaaaacaacctgagatca

SEQ ID NO: 5912515 - DNA, 25 bp, Homo sapien
atattataaacgagtgcagttcttg

SEQ ID NO: 5912516 - DNA, 25 bp, Homo sapien
gctgatgcagaccgtgtgggaacac

SEQ ID NO: 5912517 - DNA, 25 bp, Homo sapien
ctatatactttggtgtttggagaga

SEQ ID NO: 5912518 - DNA, 25 bp, Homo sapien
tgaaatgtattgatttttaggccag

SEQ ID NO: 5912519 - DNA, 25 bp, Homo sapien
ggaacactgcttgctgacttcatct

SEQ ID NO: 5912520 - DNA, 25 bp, Homo sapien
gaggcggttcatcagctgagtccca

SEQ ID NO: 5912521 - DNA, 25 bp, Homo sapien
aggtgactctgtgtgaggctggtaa

SEQ ID NO: 5912522 - DNA, 25 bp, Homo sapien
atgcagaccgtgtgggaacactgct

SEQ ID NO: 5912523 - DNA, 25 bp, Homo sapien
gtgataaaacactgggcaggagcaa

SEQ ID NO: 5912524 - DNA, 25 bp, Homo sapien
agggttgcattaaatcacttttagg

SEQ ID NO: 5912525 - DNA, 25 bp, Homo sapien
ttgtatgtaactgatattccaaatg

SEQ ID NO: 5912526 - DNA, 25 bp, Homo sapien
ggtcaagggaagcgaggccagaacc

SEQ ID NO: 5912527 - DNA, 25 bp, Homo sapien
gtattgatttttaggccagataatt

SEQ ID NO: 5912528 - DNA, 25 bp, Homo sapien
ggccacctggccaggggtgacactg

SEQ ID NO: 5912529 - DNA, 25 bp, Homo sapien
accatgctccaagtaaaacaacctg

SEQ ID NO: 5912530 - DNA, 25 bp, Homo sapien
ttttaggtctgtcttcttaggccgt

SEQ ID NO: 5912531 - DNA, 25 bp, Homo sapien
gactctgtgtgaggctggtaaaccc

SEQ ID NO: 5912532 - DNA, 25 bp, Homo sapien
gcactctgggtgtttgccatctctt

SEQ ID NO: 5912533 - DNA, 25 bp, Homo sapien
taaacgagtgcagttcttgtatgta

SEQ ID NO: 5912534 - DNA, 25 bp, Homo sapien
cggaaagctgcagtgttgctgtaag

SEQ ID NO: 5912535 - DNA, 25 bp, Homo sapien
agacggacattgtacccagataatc

SEQ ID NO: 5912536 - DNA, 25 bp, Homo sapien
tcacaacaaaaacagacaaggccca

SEQ ID NO: 5912537 - DNA, 25 bp, Homo sapien
cttctggtggtttctcgcactttgc

SEQ ID NO: 5912538 - DNA, 25 bp, Homo sapien
ctgcgagacagagaaccaacctata

SEQ ID NO: 5912539 - DNA, 25 bp, Homo sapien
gcattaaatcacttttaggtctgtc

SEQ ID NO: 5912540 - DNA, 25 bp, Homo sapien
cactgctcacaacaaaaacagacaa

SEQ ID NO: 5912541 - DNA, 25 bp, Homo sapien
tggtattaaggctttagaatattat

SEQ ID NO: 5912542 - DNA, 25 bp, Homo sapien
gactgcacagagctgtccacacgtg

SEQ ID NO: 5912543 - DNA, 25 bp, Homo sapien
atgtattgatttttaggccagataa

SEQ ID NO: 5912544 - DNA, 25 bp, Homo sapien
catgctccaagtaaaacaacctgag

SEQ ID NO: 5912545 - DNA, 25 bp, Homo sapien
gagacagagaaccaacctatatact

SEQ ID NO: 5912546 - DNA, 25 bp, Homo sapien
gcgaatcttggctctgaaatgtatt

SEQ ID NO: 5912547 - DNA, 25 bp, Homo sapien
attgatttttaggccagataattct

SEQ ID NO: 5912548 - DNA, 25 bp, Homo sapien
atactttggtgtttggagagacgga

SEQ ID NO: 5912549 - DNA, 25 bp, Homo sapien
aaatacaaccaacctcacaaacacc

SEQ ID NO: 5912550 - DNA, 25 bp, Homo sapien
cgagtgcagttcttgtatgtaactg

SEQ ID NO: 5912551 - DNA, 25 bp, Homo sapien
gtgtctccctgcactctgggtgttt

SEQ ID NO: 5912552 - DNA, 25 bp, Homo sapien
ccacccagggccacctggccagggg

SEQ ID NO: 5912553 - DNA, 25 bp, Homo sapien
aggtcgaggcgaatcttggctctga

SEQ ID NO: 5912554 - DNA, 25 bp, Homo sapien
cagtgtgtctccctgcactctgggt

SEQ ID NO: 5912555 - DNA, 25 bp, Homo sapien
aacagacaaggcccacaggtgcatc

SEQ ID NO: 5912556 - DNA, 25 bp, Homo sapien
agcagtgttcaatccccaaaaccta

SEQ ID NO: 5912557 - DNA, 25 bp, Homo sapien
gcgagacagagaaccaacctatata

SEQ ID NO: 5912558 - DNA, 25 bp, Homo sapien
taaatcacttttaggtctgtcttct

SEQ ID NO: 5912559 - DNA, 25 bp, Homo sapien
ctggtaaacccagaggaggatagat

SEQ ID NO: 5912560 - DNA, 25 bp, Homo sapien
aggcccacaggtgcatcggttagag

SEQ ID NO: 5912561 - DNA, 25 bp, Homo sapien
atcagtggcgaatgcagtgtgtctc

SEQ ID NO: 5912562 - DNA, 25 bp, Homo sapien
acaggtgcatcggttagaggcggtt

SEQ ID NO: 5912563 - DNA, 25 bp, Homo sapien
gccagaacccagaggcaagagctga

SEQ ID NO: 5912564 - DNA, 25 bp, Homo sapien
cgaggccagaacccagaggcaagag

SEQ ID NO: 5912565 - DNA, 25 bp, Homo sapien
actctgggtgtttgccatctcttct

SEQ ID NO: 5912566 - DNA, 25 bp, Homo sapien
accgtgtgggaacactgcttgctga

SEQ ID NO: 5912567 - DNA, 25 bp, Homo sapien
agagctgtccacacgtgcccatcat

SEQ ID NO: 5912568 - DNA, 25 bp, Homo sapien
gaacccagaggcaagagctgatgca

SEQ ID NO: 5912569 - DNA, 25 bp, Homo sapien
ccacacgtgcccatcatcaacaata

SEQ ID NO: 5912570 - DNA, 25 bp, Homo sapien
ccaggggtgacactgctcacaacaa

SEQ ID NO: 5912571 - DNA, 25 bp, Homo sapien
tctgggtgtttgccatctcttctgg

SEQ ID NO: 5912572 - DNA, 25 bp, Homo sapien
gctcacaacaaaaacagacaaggcc

SEQ ID NO: 5912573 - DNA, 25 bp, Homo sapien
ggatcacgcttcaccatgctccaag

SEQ ID NO: 5912574 - DNA, 25 bp, Homo sapien
aaccaacctcacaaacacctgcgag

SEQ ID NO: 5912575 - DNA, 25 bp, Homo sapien
acggacattgtacccagataatcag

SEQ ID NO: 5912576 - DNA, 25 bp, Homo sapien
gcaccagcatggtcaagggaagcga

SEQ ID NO: 5912577 - DNA, 25 bp, Homo sapien
acagagctgtccacacgtgcccatc

SEQ ID NO: 5912578 - DNA, 25 bp, Homo sapien
cagtgttcaatccccaaaacctacg

SEQ ID NO: 5912579 - DNA, 25 bp, Homo sapien
ccaacctcacaaacacctgcgagac

SEQ ID NO: 5912580 - DNA, 25 bp, Homo sapien
tgtagtgataaaacactgggcagga

SEQ ID NO: 5912581 - DNA, 25 bp, Homo sapien
gtattaaggctttagaatattataa

SEQ ID NO: 5912582 - DNA, 25 bp, Homo sapien
actcaactggttttcttacaccacc

SEQ ID NO: 5912583 - DNA, 25 bp, Homo sapien
aaaacctacgtaaaggtgagagagc

SEQ ID NO: 5912584 - DNA, 25 bp, Homo sapien
ctgtccacacgtgcccatcatcaac

SEQ ID NO: 5912585 - DNA, 25 bp, Homo sapien
attaaggctttagaatattataaac

SEQ ID NO: 5912586 - DNA, 25 bp, Homo sapien
tcaggtcgaggcgaatcttggctct

SEQ ID NO: 5912587 - DNA, 25 bp, Homo sapien
ccagggttgcattaaatcactttta

SEQ ID NO: 5912588 - DNA, 25 bp, Homo sapien
ctgagatcagagctgggaagcctca

SEQ ID NO: 5912589 - DNA, 25 bp, Homo sapien
gcactttgcggaaagctgcagtgtt

SEQ ID NO: 5912590 - DNA, 25 bp, Homo sapien
caggccacgcgcgcaccagcatggt

SEQ ID NO: 5912591 - DNA, 25 bp, Homo sapien
gggaagcctcaggtcgaggcgaatc

SEQ ID NO: 5912592 - DNA, 25 bp, Homo sapien
gataattcttccagggttgcattaa

SEQ ID NO: 5912593 - DNA, 25 bp, Homo sapien
cttacaccacccagggccacctggc

SEQ ID NO: 5912594 - DNA, 25 bp, Homo sapien
cagagaaccaacctatatactttgg

SEQ ID NO: 5912595 - DNA, 25 bp, Homo sapien
acaaacacctgcgagacagagaacc

SEQ ID NO: 5912596 - DNA, 25 bp, Homo sapien
gtccacacgtgcccatcatcaacaa

SEQ ID NO: 5912597 - DNA, 25 bp, Homo sapien
gatggttttctctggtattaaggct

SEQ ID NO: 5912598 - DNA, 25 bp, Homo sapien
aatcacttttaggtctgtcttctta

SEQ ID NO: 5912599 - DNA, 25 bp, Homo sapien
gtgcccatcatcaacaataagaaac

SEQ ID NO: 5912600 - DNA, 25 bp, Homo sapien
aaatgatgtgtatggcggggtgggc

SEQ ID NO: 5912601 - DNA, 25 bp, Homo sapien
atcacgcttcaccatgctccaagta

SEQ ID NO: 5912602 - DNA, 25 bp, Homo sapien
gttcatcagctgagtcccacatcca

SEQ ID NO: 5912603 - DNA, 25 bp, Homo sapien
cggttcatcagctgagtcccacatc

SEQ ID NO: 5912604 - DNA, 25 bp, Homo sapien
gtaactgatattccaaatgatgtgt

SEQ ID NO: 5912605 - DNA, 25 bp, Homo sapien
aatgcagtgtgtctccctgcactct

SEQ ID NO: 5912606 - DNA, 25 bp, Homo sapien
ccatctcttctggtggtttctcgca

SEQ ID NO: 5912607 - DNA, 25 bp, Homo sapien
agggtttgtctccactcacaggcca

SEQ ID NO: 5912608 - DNA, 25 bp, Homo sapien
ttaggtctgtcttcttaggccgtgt

SEQ ID NO: 5912609 - DNA, 25 bp, Homo sapien
ccagggccacctggccaggggtgac

SEQ ID NO: 5912610 - DNA, 25 bp, Homo sapien
ttgcattaaatcacttttaggtctg

SEQ ID NO: 5912611 - DNA, 25 bp, Homo sapien
tttgccatctcttctggtggtttct

SEQ ID NO: 5912612 - DNA, 25 bp, Homo sapien
attataaacgagtgcagttcttgta

SEQ ID NO: 5912613 - DNA, 25 bp, Homo sapien
ttttggatcacgcttcaccatgctc

SEQ ID NO: 5912614 - DNA, 25 bp, Homo sapien
gatagatggttttctctggtattaa

SEQ ID NO: 5912615 - DNA, 25 bp, Homo sapien
gaggaggatagatggttttctctgg

SEQ ID NO: 5912616 - DNA, 25 bp, Homo sapien
atcttggctctgaaatgtattgatt

SEQ ID NO: 5912617 - DNA, 25 bp, Homo sapien
cacacaggccacgcgcgcaccagca

SEQ ID NO: 5912618 - DNA, 25 bp, Homo sapien
acattgtacccagataatcagtggc

SEQ ID NO: 5912619 - DNA, 25 bp, Homo sapien
gccagataattcttccagggttgca

SEQ ID NO: 5912620 - DNA, 25 bp, Homo sapien
taaggctttagaatattataaacga

SEQ ID NO: 5912621 - DNA, 25 bp, Homo sapien
cagactgcacagagctgtccacacg

SEQ ID NO: 5912622 - DNA, 25 bp, Homo sapien
aacaaaaacagacaaggcccacagg

SEQ ID NO: 5912623 - DNA, 25 bp, Homo sapien
tgagagagcagactgcacagagctg

SEQ ID NO: 5912624 - DNA, 25 bp, Homo sapien
ggccacgcgcgcaccagcatggtca

SEQ ID NO: 5912625 - DNA, 25 bp, Homo sapien
ggtttgtctccactcacaggccacg

SEQ ID NO: 5912626 - DNA, 25 bp, Homo sapien
aagaccttttggatcacgcttcacc

SEQ ID NO: 5912627 - DNA, 25 bp, Homo sapien
gtgcatcggttagaggcggttcatc

SEQ ID NO: 5912628 - DNA, 25 bp, Homo sapien
aggggtgacactgctcacaacaaaa

SEQ ID NO: 5912629 - DNA, 25 bp, Homo sapien
tctgtggcttactcaactggttttc

SEQ ID NO: 5912630 - DNA, 25 bp, Homo sapien
ccacatccaggtgactctgtgtgag

SEQ ID NO: 5912631 - DNA, 25 bp, Homo sapien
gaagggtttgtctccactcacaggc

SEQ ID NO: 5912632 - DNA, 25 bp, Homo sapien
tcttgtatgtaactgatattccaaa

SEQ ID NO: 5912633 - DNA, 25 bp, Homo sapien
gtttggagagacggacattgtaccc

SEQ ID NO: 5912634 - DNA, 25 bp, Homo sapien
gtcgaggcgaatcttggctctgaaa

SEQ ID NO: 5912635 - DNA, 25 bp, Homo sapien
gtgaggctggtaaacccagaggagg

SEQ ID NO: 5912636 - DNA, 25 bp, Homo sapien
ctggttttcttacaccacccagggc

SEQ ID NO: 5912637 - DNA, 25 bp, Homo sapien
gtggcgaatgcagtgtgtctccctg

SEQ ID NO: 5912638 - DNA, 25 bp, Homo sapien
catctctgtggcttactcaactggt

SEQ ID NO: 5912639 - DNA, 25 bp, Homo sapien
tagatggttttctctggtattaagg

SEQ ID NO: 5912640 - DNA, 25 bp, Homo sapien
tgctccaagtaaaacaacctgagat

SEQ ID NO: 5912641 - DNA, 25 bp, Homo sapien
ttttaggccagataattcttccagg

SEQ ID NO: 5912642 - DNA, 25 bp, Homo sapien
cacaggccacgggtcacacacaggc

SEQ ID NO: 5912643 - DNA, 25 bp, Homo sapien
tcttccagggttgcattaaatcact

SEQ ID NO: 5912644 - DNA, 25 bp, Homo sapien
gtcttcttaggccgtgtcctacttt

SEQ ID NO: 5912645 - DNA, 25 bp, Homo sapien
gtatgtaactgatattccaaatgat

SEQ ID NO: 5912646 - DNA, 25 bp, Homo sapien
gagctgatgcagaccgtgtgggaac

SEQ ID NO: 5912647 - DNA, 25 bp, Homo sapien
ggtgtttgccatctcttctggtggt

SEQ ID NO: 5912648 - DNA, 25 bp, Homo sapien
cctcacaaacacctgcgagacagag

SEQ ID NO: 5912649 - DNA, 25 bp, Homo sapien
cccagaggaggatagatggttttct

SEQ ID NO: 5912650 - DNA, 25 bp, Homo sapien
atacaaccaacctcacaaacacctg

SEQ ID NO: 5912651 - DNA, 25 bp, Homo sapien
cgtaaaggtgagagagcagactgca

SEQ ID NO: 5912652 - DNA, 25 bp, Homo sapien
aggccgtgtcctactttgattcatt

SEQ ID NO: 5912653 - DNA, 25 bp, Homo sapien
gtgttgctgtaagaccttttggatc

SEQ ID NO: 5912654 - DNA, 25 bp, Homo sapien
aacactgcttgctgacttcatctct

SEQ ID NO: 5912655 - DNA, 25 bp, Homo sapien
tgacttcatctctgtggcttactca

SEQ ID NO: 5912656 - DNA, 25 bp, Homo sapien
gcttactcaactggttttcttacac

SEQ ID NO: 5912657 - DNA, 25 bp, Homo sapien
actttgcggaaagctgcagtgttgc

SEQ ID NO: 5912658 - DNA, 25 bp, Homo sapien
taaaacactgggcaggagcaactca

SEQ ID NO: 5912659 - DNA, 25 bp, Homo sapien
ccttttggatcacgcttcaccatgc

SEQ ID NO: 5912660 - DNA, 25 bp, Homo sapien
tattccaaatgatgtgtatggcggg

SEQ ID NO: 5912661 - DNA, 25 bp, Homo sapien
ggctggtaaacccagaggaggatag

SEQ ID NO: 5912662 - DNA, 25 bp, Homo sapien
aagtaaaacaacctgagatcagagc

SEQ ID NO: 5912663 - DNA, 25 bp, Homo sapien
acgtgcccatcatcaacaataagaa

SEQ ID NO: 5912664 - DNA, 25 bp, Homo sapien
cacaggccacgcgcgcaccagcatg

SEQ ID NO: 5912665 - DNA, 25 bp, Homo sapien
ctggccaggggtgacactgctcaca

SEQ ID NO: 5912666 - DNA, 25 bp, Homo sapien
attgtagtgataaaacactgggcag

SEQ ID NO: 5912667 - DNA, 25 bp, Homo sapien
agagagcagactgcacagagctgtc

SEQ ID NO: 5912668 - DNA, 25 bp, Homo sapien
ttcatctctgtggcttactcaactg

SEQ ID NO: 5912669 - DNA, 25 bp, Homo sapien
atcggttagaggcggttcatcagct

SEQ ID NO: 5912670 - DNA, 25 bp, Homo sapien
gatcagagctgggaagcctcaggtc

SEQ ID NO: 5912671 - DNA, 25 bp, Homo sapien
gtggtttctcgcactttgcggaaag

SEQ ID NO: 5912672 - DNA, 25 bp, Homo sapien
tcaccatgctccaagtaaaacaacc

SEQ ID NO: 5912673 - DNA, 25 bp, Homo sapien
agaggggaagggtttgtctccactc

SEQ ID NO: 5912674 - DNA, 25 bp, Homo sapien
atctcttctggtggtttctcgcact

SEQ ID NO: 5912675 - DNA, 25 bp, Homo sapien
ctgggaagcctcaggtcgaggcgaa

SEQ ID NO: 5912676 - DNA, 25 bp, Homo sapien
tcagagctgggaagcctcaggtcga

SEQ ID NO: 5912677 - DNA, 25 bp, Homo sapien
gatattccaaatgatgtgtatggcg

SEQ ID NO: 5912678 - DNA, 25 bp, Homo sapien
gaggctggtaaacccagaggaggat

SEQ ID NO: 5912679 - DNA, 25 bp, Homo sapien
cagataattcttccagggttgcatt

SEQ ID NO: 5912680 - DNA, 25 bp, Homo sapien
tgcagtgtgtctccctgcactctgg

SEQ ID NO: 5912681 - DNA, 25 bp, Homo sapien
tcctactttgattcattgtagtgat

SEQ ID NO: 5912682 - DNA, 25 bp, Homo sapien
gtaaaacaacctgagatcagagctg

SEQ ID NO: 5912683 - DNA, 25 bp, Homo sapien
ccaggtgactctgtgtgaggctggt

SEQ ID NO: 5912684 - DNA, 25 bp, Homo sapien
atggtcaagggaagcgaggccagaa

SEQ ID NO: 5912685 - DNA, 25 bp, Homo sapien
ggacattgtacccagataatcagtg

SEQ ID NO: 5912686 - DNA, 25 bp, Homo sapien
acacgtgcccatcatcaacaataag

SEQ ID NO: 5912687 - DNA, 25 bp, Homo sapien
aagggaagcgaggccagaacccaga

SEQ ID NO: 5912688 - DNA, 25 bp, Homo sapien
tataaacgagtgcagttcttgtatg

SEQ ID NO: 5912689 - DNA, 25 bp, Homo sapien
ttccaaatgatgtgtatggcggggt

SEQ ID NO: 5912690 - DNA, 25 bp, Homo sapien
acccagaggcaagagctgatgcaga

SEQ ID NO: 5912691 - DNA, 25 bp, Homo sapien
cagcatggtcaagggaagcgaggcc

SEQ ID NO: 5912692 - DNA, 25 bp, Homo sapien
gagcagcagtgttcaatccccaaaa

SEQ ID NO: 5912693 - DNA, 25 bp, Homo sapien
ctccctgcactctgggtgtttgcca

SEQ ID NO: 5912694 - DNA, 25 bp, Homo sapien
gtgttcaatccccaaaacctacgta

SEQ ID NO: 5912695 - DNA, 25 bp, Homo sapien
actcagaggggaagggtttgtctcc

SEQ ID NO: 5912696 - DNA, 25 bp, Homo sapien
gagatcagagctgggaagcctcagg

SEQ ID NO: 5912697 - DNA, 25 bp, Homo sapien
cgcttcaccatgctccaagtaaaac

SEQ ID NO: 5912698 - DNA, 25 bp, Homo sapien
ggtttctcgcactttgcggaaagct

SEQ ID NO: 5912699 - DNA, 25 bp, Homo sapien
caccacccagggccacctggccagg

SEQ ID NO: 5912700 - DNA, 25 bp, Homo sapien
tgtttgccatctcttctggtggttt

SEQ ID NO: 5912701 - DNA, 25 bp, Homo sapien
acgcgcgcaccagcatggtcaaggg

SEQ ID NO: 5912702 - DNA, 25 bp, Homo sapien
agtcccacatccaggtgactctgtg

SEQ ID NO: 5912703 - DNA, 25 bp, Homo sapien
gacactgctcacaacaaaaacagac

SEQ ID NO: 5912704 - DNA, 25 bp, Homo sapien
taatcagtggcgaatgcagtgtgtc

SEQ ID NO: 5912705 - DNA, 25 bp, Homo sapien
cctacgtaaaggtgagagagcagac

SEQ ID NO: 5912706 - DNA, 25 bp, Homo sapien
tcattgtagtgataaaacactgggc

SEQ ID NO: 5912707 - DNA, 25 bp, Homo sapien
ccatcatcaacaataagaaacaagt

SEQ ID NO: 5912708 - DNA, 25 bp, Homo sapien
cgtgtgggaacactgcttgctgact

SEQ ID NO: 5912709 - DNA, 25 bp, Homo sapien
agctgtccacacgtgcccatcatca

SEQ ID NO: 5912710 - DNA, 25 bp, Homo sapien
gaatcttggctctgaaatgtattga

SEQ ID NO: 5912711 - DNA, 25 bp, Homo sapien
tgagtcccacatccaggtgactctg

SEQ ID NO: 5912712 - DNA, 25 bp, Homo sapien
acctgcgagacagagaaccaaccta

SEQ ID NO: 5912713 - DNA, 25 bp, Homo sapien
ctgatattccaaatgatgtgtatgg

SEQ ID NO: 5912714 - DNA, 25 bp, Homo sapien
attgtacccagataatcagtggcga

SEQ ID NO: 5912715 - DNA, 25 bp, Homo sapien
ctgctcacaacaaaaacagacaagg

SEQ ID NO: 5912716 - DNA, 25 bp, Homo sapien
ggttttcttacaccacccagggcca

SEQ ID NO: 5912717 - DNA, 25 bp, Homo sapien
gagaaccaacctatatactttggtg

SEQ ID NO: 5912718 - DNA, 25 bp, Homo sapien
cactcacaggccacgggtcacacac

SEQ ID NO: 5912719 - DNA, 25 bp, Homo sapien
ggtgagagagcagactgcacagagc

SEQ ID NO: 5912720 - DNA, 25 bp, Homo sapien
cggttagaggcggttcatcagctga

SEQ ID NO: 5912721 - DNA, 25 bp, Homo sapien
tctcgcactttgcggaaagctgcag

SEQ ID NO: 5912722 - DNA, 25 bp, Homo sapien
aacctcacaaacacctgcgagacag

SEQ ID NO: 5912723 - DNA, 25 bp, Homo sapien
gcagcagtgttcaatccccaaaacc

SEQ ID NO: 5912724 - DNA, 25 bp, Homo sapien
acttttaggtctgtcttcttaggcc

SEQ ID NO: 5912725 - DNA, 25 bp, Homo sapien
ttccagggttgcattaaatcacttt

SEQ ID NO: 5912726 - DNA, 25 bp, Homo sapien
cgaatgcagtgtgtctccctgcact

SEQ ID NO: 5912727 - DNA, 25 bp, Homo sapien
tgtcctactttgattcattgtagtg

SEQ ID NO: 5912728 - DNA, 25 bp, Homo sapien
tgcagttcttgtatgtaactgatat

SEQ ID NO: 5912729 - DNA, 25 bp, Homo sapien
aggatagatggttttctctggtatt

SEQ ID NO: 5912730 - DNA, 25 bp, Homo sapien
tggttttctctggtattaaggcttt

SEQ ID NO: 5912731 - DNA, 25 bp, Homo sapien
acttcatctctgtggcttactcaac

SEQ ID NO: 5912732 - DNA, 25 bp, Homo sapien
agtgcagttcttgtatgtaactgat

SEQ ID NO: 5912733 - DNA, 25 bp, Homo sapien
acaacaaaaacagacaaggcccaca

SEQ ID NO: 5912734 - DNA, 25 bp, Homo sapien
aagctgcagtgttgctgtaagacct

SEQ ID NO: 5912735 - DNA, 25 bp, Homo sapien
tcgcactttgcggaaagctgcagtg

SEQ ID NO: 5912736 - DNA, 25 bp, Homo sapien
agcagactgcacagagctgtccaca

SEQ ID NO: 5912737 - DNA, 25 bp, Homo sapien
tggctctgaaatgtattgattttta

SEQ ID NO: 5912738 - DNA, 25 bp, Homo sapien
tacccagataatcagtggcgaatgc

SEQ ID NO: 5912739 - DNA, 25 bp, Homo sapien
aagagctgatgcagaccgtgtggga

SEQ ID NO: 5912740 - DNA, 25 bp, Homo sapien
tgatgcagaccgtgtgggaacactg

SEQ ID NO: 5912741 - DNA, 25 bp, Homo sapien
gtgtttggagagacggacattgtac

SEQ ID NO: 5912742 - DNA, 25 bp, Homo sapien
acccagggccacctggccaggggtg

SEQ ID NO: 5912743 - DNA, 25 bp, Homo sapien
cactgcttgctgacttcatctctgt

SEQ ID NO: 5912744 - DNA, 25 bp, Homo sapien
agcgaggccagaacccagaggcaag

SEQ ID NO: 5912745 - DNA, 25 bp, Homo sapien
ggcgaatgcagtgtgtctccctgca

SEQ ID NO: 5912746 - DNA, 25 bp, Homo sapien
tgctgtaagaccttttggatcacgc

SEQ ID NO: 5912747 - DNA, 25 bp, Homo sapien
tgtctccactcacaggccacgggtc

SEQ ID NO: 5912748 - DNA, 25 bp, Homo sapien
ttggatcacgcttcaccatgctcca

SEQ ID NO: 5912749 - DNA, 25 bp, Homo sapien
agctgggaagcctcaggtcgaggcg

SEQ ID NO: 5912750 - DNA, 25 bp, Homo sapien
ttaggccagataattcttccagggt

SEQ ID NO: 5912751 - DNA, 25 bp, Homo sapien
agaggcaagagctgatgcagaccgt

SEQ ID NO: 5912752 - DNA, 25 bp, Homo sapien
ggttgcattaaatcacttttaggtc

SEQ ID NO: 5912753 - DNA, 25 bp, Homo sapien
gctctgaaatgtattgatttttagg

SEQ ID NO: 5912754 - DNA, 25 bp, Homo sapien
tacaccacccagggccacctggcca

SEQ ID NO: 5912755 - DNA, 25 bp, Homo sapien
ggccaggggtgacactgctcacaac

SEQ ID NO: 5912756 - DNA, 25 bp, Homo sapien
taattcttccagggttgcattaaat

SEQ ID NO: 5912757 - DNA, 25 bp, Homo sapien
tctctggtattaaggctttagaata

SEQ ID NO: 5912758 - DNA, 25 bp, Homo sapien
ttttcttacaccacccagggccacc

SEQ ID NO: 5912759 - DNA, 25 bp, Homo sapien
gtgtgaggctggtaaacccagagga

SEQ ID NO: 5912760 - DNA, 25 bp, Homo sapien
cacacacaggccacgcgcgcaccag

SEQ ID NO: 5912761 - DNA, 25 bp, Homo sapien
tgggcaggagcaactcagaggggaa

SEQ ID NO: 5912762 - DNA, 25 bp, Homo sapien
tcatcagctgagtcccacatccagg

SEQ ID NO: 5912763 - DNA, 25 bp, Homo sapien
taaacccagaggaggatagatggtt

SEQ ID NO: 5912764 - DNA, 25 bp, Homo sapien
ttggagagacggacattgtacccag

SEQ ID NO: 5912765 - DNA, 25 bp, Homo sapien
gaccttttggatcacgcttcaccat

SEQ ID NO: 5912766 - DNA, 25 bp, Homo sapien
gtctgtcttcttaggccgtgtccta

SEQ ID NO: 5912767 - DNA, 25 bp, Homo sapien
gcttgctgacttcatctctgtggct

SEQ ID NO: 5912768 - DNA, 25 bp, Homo sapien
actgggcaggagcaactcagagggg

SEQ ID NO: 5912769 - DNA, 25 bp, Homo sapien
cccagataatcagtggcgaatgcag

SEQ ID NO: 5912770 - DNA, 25 bp, Homo sapien
gcccatcatcaacaataagaaacaa

SEQ ID NO: 5912771 - DNA, 25 bp, Homo sapien
aaggtgagagagcagactgcacaga

SEQ ID NO: 5912772 - DNA, 25 bp, Homo sapien
tcttaggccgtgtcctactttgatt

SEQ ID NO: 5912773 - DNA, 25 bp, Homo sapien
cacgcttcaccatgctccaagtaaa

SEQ ID NO: 5912774 - DNA, 25 bp, Homo sapien
aacaacctgagatcagagctgggaa

SEQ ID NO: 5912775 - DNA, 25 bp, Homo sapien
tctgaaatgtattgatttttaggcc

SEQ ID NO: 5912776 - DNA, 25 bp, Homo sapien
ccagaggcaagagctgatgcagacc

SEQ ID NO: 5912777 - DNA, 25 bp, Homo sapien
aaaaatacaaccaacctcacaaaca

SEQ ID NO: 5912778 - DNA, 25 bp, Homo sapien
caactcagaggggaagggtttgtct

SEQ ID NO: 5912779 - DNA, 25 bp, Homo sapien
cctcaggtcgaggcgaatcttggct

SEQ ID NO: 5912780 - DNA, 25 bp, Homo sapien
tggtggtttctcgcactttgcggaa

SEQ ID NO: 5912781 - DNA, 25 bp, Homo sapien
tgtggcttactcaactggttttctt

SEQ ID NO: 5912782 - DNA, 25 bp, Homo sapien
cagctgagtcccacatccaggtgac

SEQ ID NO: 5912783 - DNA, 25 bp, Homo sapien
agggccacctggccaggggtgacac

SEQ ID NO: 5912784 - DNA, 25 bp, Homo sapien
tttgtctccactcacaggccacggg

SEQ ID NO: 5912785 - DNA, 25 bp, Homo sapien
ctcacaggccacgggtcacacacag

SEQ ID NO: 5912786 - DNA, 25 bp, Homo sapien
gttcttgtatgtaactgatattcca

SEQ ID NO: 5912787 - DNA, 25 bp, Homo sapien
tttgcggaaagctgcagtgttgctg

SEQ ID NO: 5912788 - DNA, 25 bp, Homo sapien
ctgtaagaccttttggatcacgctt

SEQ ID NO: 5912789 - DNA, 25 bp, Homo sapien
gttttctctggtattaaggctttag

SEQ ID NO: 5912790 - DNA, 25 bp, Homo sapien
atttttaggccagataattcttcca

SEQ ID NO: 5912791 - DNA, 25 bp, Homo sapien
gcatcggttagaggcggttcatcag

SEQ ID NO: 5912792 - DNA, 25 bp, Homo sapien
gcgcaccagcatggtcaagggaagc

SEQ ID NO: 5912793 - DNA, 25 bp, Homo sapien
tgggaacactgcttgctgacttcat

SEQ ID NO: 5912794 - DNA, 25 bp, Homo sapien
tggcttactcaactggttttcttac

SEQ ID NO: 5912795 - DNA, 25 bp, Homo sapien
gtaagaccttttggatcacgcttca

SEQ ID NO: 5912796 - DNA, 25 bp, Homo sapien
ctgcactctgggtgtttgccatctc

SEQ ID NO: 5912797 - DNA, 25 bp, Homo sapien
cagttcttgtatgtaactgatattc

SEQ ID NO: 5912798 - DNA, 25 bp, Homo sapien
gtctccctgcactctgggtgtttgc

SEQ ID NO: 5912799 - DNA, 25 bp, Homo sapien
ttgctgacttcatctctgtggctta

SEQ ID NO: 5912800 - DNA, 25 bp, Homo sapien
gctgacttcatctctgtggcttact

SEQ ID NO: 5912801 - DNA, 25 bp, Homo sapien
aggtctgtcttcttaggccgtgtcc

SEQ ID NO: 5912802 - DNA, 25 bp, Homo sapien
gccgtgtcctactttgattcattgt

SEQ ID NO: 5912803 - DNA, 25 bp, Homo sapien
ggcggttcatcagctgagtcccaca

SEQ ID NO: 5912804 - DNA, 25 bp, Homo sapien
attcttccagggttgcattaaatca

SEQ ID NO: 5912805 - DNA, 25 bp, Homo sapien
ccctgcactctgggtgtttgccatc

SEQ ID NO: 5912806 - DNA, 25 bp, Homo sapien
acctatatactttggtgtttggaga

SEQ ID NO: 5912807 - DNA, 25 bp, Homo sapien
gctgagtcccacatccaggtgactc

SEQ ID NO: 5912808 - DNA, 25 bp, Homo sapien
tccactcacaggccacgggtcacac

SEQ ID NO: 5912809 - DNA, 25 bp, Homo sapien
tcagaggggaagggtttgtctccac

SEQ ID NO: 5912810 - DNA, 25 bp, Homo sapien
aacccagaggaggatagatggtttt

SEQ ID NO: 5912811 - DNA, 25 bp, Homo sapien
cttcaccatgctccaagtaaaacaa

SEQ ID NO: 5912812 - DNA, 25 bp, Homo sapien
tgattcattgtagtgataaaacact

SEQ ID NO: 5912813 - DNA, 25 bp, Homo sapien
tagaggcggttcatcagctgagtcc

SEQ ID NO: 5912814 - DNA, 25 bp, Homo sapien
acctgagatcagagctgggaagcct

SEQ ID NO: 5912815 - DNA, 25 bp, Homo sapien
tgtacccagataatcagtggcgaat

SEQ ID NO: 5912816 - DNA, 25 bp, Homo sapien
cagtgttgctgtaagaccttttgga

SEQ ID NO: 5912817 - DNA, 25 bp, Homo sapien
cttggctctgaaatgtattgatttt

SEQ ID NO: 5912818 - DNA, 25 bp, Homo sapien
ctcttctggtggtttctcgcacttt

SEQ ID NO: 5912819 - DNA, 25 bp, Homo sapien
tcaagggaagcgaggccagaaccca

SEQ ID NO: 5912820 - DNA, 25 bp, Homo sapien
ttactcaactggttttcttacacca

SEQ ID NO: 5912821 - DNA, 25 bp, Homo sapien
actttggtgtttggagagacggaca

SEQ ID NO: 5912822 - DNA, 25 bp, Homo sapien
gcacagagctgtccacacgtgccca

SEQ ID NO: 5912823 - DNA, 25 bp, Homo sapien
ctgcttgctgacttcatctctgtgg

SEQ ID NO: 5912824 - DNA, 25 bp, Homo sapien
gaaccaacctatatactttggtgtt

SEQ ID NO: 5912825 - DNA, 25 bp, Homo sapien
tagtgataaaacactgggcaggagc

SEQ ID NO: 5912826 - DNA, 25 bp, Homo sapien
ccacgggtcacacacaggccacgcg

SEQ ID NO: 5912827 - DNA, 25 bp, Homo sapien
acctggccaggggtgacactgctca

SEQ ID NO: 5912828 - DNA, 25 bp, Homo sapien
attcattgtagtgataaaacactgg

SEQ ID NO: 5912829 - DNA, 25 bp, Homo sapien
cagaggaggatagatggttttctct

SEQ ID NO: 5912830 - DNA, 25 bp, Homo sapien
tgcagtgttgctgtaagaccttttg

SEQ ID NO: 5912831 - DNA, 25 bp, Homo sapien
aaacacctgcgagacagagaaccaa

SEQ ID NO: 5912832 - DNA, 25 bp, Homo sapien
gcatggtcaagggaagcgaggccag

SEQ ID NO: 5912833 - DNA, 25 bp, Homo sapien
aggtgcatcggttagaggcggttca

SEQ ID NO: 5912834 - DNA, 25 bp, Homo sapien
ccacaggtgcatcggttagaggcgg

SEQ ID NO: 5912835 - DNA, 25 bp, Homo sapien
gataatcagtggcgaatgcagtgtg

SEQ ID NO: 5912836 - DNA, 25 bp, Homo sapien
cagacaaggcccacaggtgcatcgg

SEQ ID NO: 5912837 - DNA, 25 bp, Homo sapien
gggaagcgaggccagaacccagagg

SEQ ID NO: 5912838 - DNA, 25 bp, Homo sapien
aaatgtattgatttttaggccagat

SEQ ID NO: 5912839 - DNA, 25 bp, Homo sapien
ttcttacaccacccagggccacctg

SEQ ID NO: 5912840 - DNA, 25 bp, Homo sapien
tacgtaaaggtgagagagcagactg

SEQ ID NO: 5912841 - DNA, 25 bp, Homo sapien
aggctttagaatattataaacgagt

SEQ ID NO: 5912842 - DNA, 25 bp, Homo sapien
gacagagaaccaacctatatacttt

SEQ ID NO: 5912843 - DNA, 25 bp, Homo sapien
aggcaagagctgatgcagaccgtgt

SEQ ID NO: 5912844 - DNA, 25 bp, Homo sapien
gtgtgtctccctgcactctgggtgt

SEQ ID NO: 5912845 - DNA, 25 bp, Homo sapien
cagataatcagtggcgaatgcagtg

SEQ ID NO: 5912846 - DNA, 25 bp, Homo sapien
acgggtcacacacaggccacgcgcg

SEQ ID NO: 5912847 - DNA, 25 bp, Homo sapien
ctctgtgtgaggctggtaaacccag

SEQ ID NO: 5912848 - DNA, 25 bp, Homo sapien
ccaagtaaaacaacctgagatcaga

SEQ ID NO: 5912849 - DNA, 25 bp, Homo sapien
gttgctgtaagaccttttggatcac

SEQ ID NO: 5912850 - DNA, 25 bp, Homo sapien
tttctcgcactttgcggaaagctgc

SEQ ID NO: 5912851 - DNA, 25 bp, Homo sapien
atcagctgagtcccacatccaggtg

SEQ ID NO: 5912852 - DNA, 25 bp, Homo sapien
gggaagggtttgtctccactcacag

SEQ ID NO: 5912853 - DNA, 25 bp, Homo sapien
caaaaacagacaaggcccacaggtg

SEQ ID NO: 5912854 - DNA, 25 bp, Homo sapien
gttagaggcggttcatcagctgagt

SEQ ID NO: 5912855 - DNA, 25 bp, Homo sapien
ggaggatagatggttttctctggta

SEQ ID NO: 5912856 - DNA, 25 bp, Homo sapien
aacgagtgcagttcttgtatgtaac

SEQ ID NO: 5912857 - DNA, 25 bp, Homo sapien
tttctctggtattaaggctttagaa

SEQ ID NO: 5912858 - DNA, 25 bp, Homo sapien
gcccacaggtgcatcggttagaggc

SEQ ID NO: 5912859 - DNA, 25 bp, Homo sapien
atgatgtgtatggcggggtgggctt

SEQ ID NO: 5912860 - DNA, 25 bp, Homo sapien
caacctatatactttggtgtttgga

SEQ ID NO: 5912861 - DNA, 25 bp, Homo sapien
aggcgaatcttggctctgaaatgta

SEQ ID NO: 5912862 - DNA, 25 bp, Homo sapien
gggtcacacacaggccacgcgcgca

SEQ ID NO: 5912863 - DNA, 25 bp, Homo sapien
ggagagacggacattgtacccagat

SEQ ID NO: 5912864 - DNA, 25 bp, Homo sapien
tttagaatattataaacgagtgcag

SEQ ID NO: 5912865 - DNA, 25 bp, Homo sapien
gtgtatggcggggtgggcttaaggt

SEQ ID NO: 5912866 - DNA, 25 bp, Homo sapien
tgatttttaggccagataattcttc

SEQ ID NO: 5912867 - DNA, 25 bp, Homo sapien
cagaacccagaggcaagagctgatg

SEQ ID NO: 5912868 - DNA, 25 bp, Homo sapien
gcaagagctgatgcagaccgtgtgg

SEQ ID NO: 5912869 - DNA, 25 bp, Homo sapien
caggccacgggtcacacacaggcca

SEQ ID NO: 5912870 - DNA, 25 bp, Homo sapien
attaaatcacttttaggtctgtctt

SEQ ID NO: 5912871 - DNA, 25 bp, Homo sapien
aaaacaacctgagatcagagctggg

SEQ ID NO: 5912872 - DNA, 25 bp, Homo sapien
aggccagaacccagaggcaagagct

SEQ ID NO: 5912873 - DNA, 25 bp, Homo sapien
gggtgacactgctcacaacaaaaac

SEQ ID NO: 5912874 - DNA, 25 bp, Homo sapien
tagaatattataaacgagtgcagtt

SEQ ID NO: 5912875 - DNA, 25 bp, Homo sapien
ggtaaacccagaggaggatagatgg

SEQ ID NO: 5912876 - DNA, 25 bp, Homo sapien
ccaaaacctacgtaaaggtgagaga

SEQ ID NO: 5912877 - DNA, 25 bp, Homo sapien
tttgattcattgtagtgataaaaca

SEQ ID NO: 5912878 - DNA, 25 bp, Homo sapien
gcagaccgtgtgggaacactgcttg

SEQ ID NO: 5912879 - DNA, 25 bp, Homo sapien
ggccacgggtcacacacaggccacg

SEQ ID NO: 5912880 - DNA, 25 bp, Homo sapien
agaccgtgtgggaacactgcttgct

SEQ ID NO: 5912881 - DNA, 25 bp, Homo sapien
aaacactgggcaggagcaactcaga

SEQ ID NO: 5912882 - DNA, 25 bp, Homo sapien
cagtggcgaatgcagtgtgtctccc

SEQ ID NO: 5912883 - DNA, 25 bp, Homo sapien
gaagcgaggccagaacccagaggca

SEQ ID NO: 5912884 - DNA, 25 bp, Homo sapien
gaagcctcaggtcgaggcgaatctt

SEQ ID NO: 5912885 - DNA, 25 bp, Homo sapien
ccacgcgcgcaccagcatggtcaag

SEQ ID NO: 5912886 - DNA, 25 bp, Homo sapien
atatactttggtgtttggagagacg

SEQ ID NO: 5912887 - DNA, 25 bp, Homo sapien
tgccatctcttctggtggtttctcg

SEQ ID NO: 5912888 - DNA, 25 bp, Homo sapien
aactgatattccaaatgatgtgtat

SEQ ID NO: 5912889 - DNA, 25 bp, Homo sapien
ctgcacagagctgtccacacgtgcc

SEQ ID NO: 5912890 - DNA, 25 bp, Homo sapien
acaaccaacctcacaaacacctgcg

SEQ ID NO: 5912891 - DNA, 25 bp, Homo sapien
tctggtattaaggctttagaatatt

SEQ ID NO: 5912892 - DNA, 25 bp, Homo sapien
caacctgagatcagagctgggaagc

SEQ ID NO: 5912893 - DNA, 25 bp, Homo sapien
actttgattcattgtagtgataaaa

SEQ ID NO: 5912894 - DNA, 25 bp, Homo sapien
gctgcagtgttgctgtaagaccttt

SEQ ID NO: 5912895 - DNA, 25 bp, Homo sapien
gtcacacacaggccacgcgcgcacc

SEQ ID NO: 5912896 - DNA, 25 bp, Homo sapien
aaaacagacaaggcccacaggtgca

SEQ ID NO: 5912897 - DNA, 25 bp, Homo sapien
tttggtgtttggagagacggacatt

SEQ ID NO: 5912898 - DNA, 25 bp, Homo sapien
gaaagctgcagtgttgctgtaagac

SEQ ID NO: 5912899 - DNA, 25 bp, Homo sapien
tcacttttaggtctgtcttcttagg

SEQ ID NO: 5912900 - DNA, 25 bp, Homo sapien
tcacaaacacctgcgagacagagaa

SEQ ID NO: 5912901 - DNA, 25 bp, Homo sapien
tgggtgtttgccatctcttctggtg

SEQ ID NO: 5912902 - DNA, 25 bp, Homo sapien
cgaggcgaatcttggctctgaaatg

SEQ ID NO: 5912903 - DNA, 25 bp, Homo sapien
agagctgggaagcctcaggtcgagg

SEQ ID NO: 5912904 - DNA, 25 bp, Homo sapien
aggggaagggtttgtctccactcac

SEQ ID NO: 5912905 - DNA, 25 bp, Homo sapien
agagacggacattgtacccagataa

SEQ ID NO: 5912906 - DNA, 25 bp, Homo sapien
tggtgtttggagagacggacattgt

SEQ ID NO: 5912907 - DNA, 25 bp, Homo sapien
aacctacgtaaaggtgagagagcag

SEQ ID NO: 5912908 - DNA, 25 bp, Homo sapien
tgtgggaacactgcttgctgacttc

SEQ ID NO: 5912909 - DNA, 25 bp, Homo sapien
tctccactcacaggccacgggtcac

SEQ ID NO: 5912910 - DNA, 25 bp, Homo sapien
gtgacactgctcacaacaaaaacag

SEQ ID NO: 5912911 - DNA, 25 bp, Homo sapien
ccacctggccaggggtgacactgct

SEQ ID NO: 5912912 - DNA, 25 bp, Homo sapien
aggccagataattcttccagggttg

SEQ ID NO: 5912913 - DNA, 25 bp, Homo sapien
caaggcccacaggtgcatcggttag

SEQ ID NO: 5912914 - DNA, 25 bp, Homo sapien
acactgggcaggagcaactcagagg

SEQ ID NO: 5912915 - DNA, 25 bp, Homo sapien
gacaaggcccacaggtgcatcggtt

SEQ ID NO: 5912916 - DNA, 25 bp, Homo sapien
gataaaacactgggcaggagcaact

SEQ ID NO: 5912917 - DNA, 25 bp, Homo sapien
accagcatggtcaagggaagcgagg

SEQ ID NO: 5912918 - DNA, 25 bp, Homo sapien
ttaggccgtgtcctactttgattca

SEQ ID NO: 5912919 - DNA, 25 bp, Homo sapien
ctactttgattcattgtagtgataa

SEQ ID NO: 5912920 - DNA, 25 bp, Homo sapien
gaatattataaacgagtgcagttct

SEQ ID NO: 5912921 - DNA, 25 bp, Homo sapien
gcgcgcaccagcatggtcaagggaa

SEQ ID NO: 5912922 - DNA, 25 bp, Homo sapien
agcctcaggtcgaggcgaatcttgg

SEQ ID NO: 5912923 - DNA, 25 bp, Homo sapien
tgcggaaagctgcagtgttgctgta

SEQ ID NO: 5912924 - DNA, 25 bp, Homo sapien
atccaggtgactctgtgtgaggctg

SEQ ID NO: 5912925 - DNA, 25 bp, Homo sapien
cgtgtcctactttgattcattgtag

SEQ ID NO: 5912926 - DNA, 25 bp, Homo sapien
acatccaggtgactctgtgtgaggc

SEQ ID NO: 5912927 - DNA, 25 bp, Homo sapien
tcaactggttttcttacaccaccca

SEQ ID NO: 5912928 - DNA, 25 bp, Homo sapien
accaacctatatactttggtgtttg

SEQ ID NO: 5912929 - DNA, 25 bp, Homo sapien
gctttagaatattataaacgagtgc

SEQ ID NO: 5912930 - DNA, 25 bp, Homo sapien
tcccacatccaggtgactctgtgtg

SEQ ID NO: 5912931 - DNA, 25 bp, Homo sapien
atgtaactgatattccaaatgatgt

SEQ ID NO: 5912932 - DNA, 25 bp, Homo sapien
gtgactctgtgtgaggctggtaaac

SEQ ID NO: 5912933 - DNA, 25 bp, Homo sapien
ctgtcttcttaggccgtgtcctact

SEQ ID NO: 5912934 - DNA, 25 bp, Homo sapien
acacctgcgagacagagaaccaacc

SEQ ID NO: 5912935 - DNA, 25 bp, Homo sapien
gatgtgtatggcggggtgggcttaa

SEQ ID NO: 5912936 - DNA, 25 bp, Homo sapien
agagcagactgcacagagctgtcca

SEQ ID NO: 5912937 - DNA, 25 bp, Homo sapien
tggacagctctgtgcagtctgctct

SEQ ID NO: 5912938 - DNA, 25 bp, Homo sapien
cgagaaaccaccagaagagatggca

SEQ ID NO: 5912939 - DNA, 25 bp, Homo sapien
tccgtctctccaaacaccaaagtat

SEQ ID NO: 5912940 - DNA, 25 bp, Homo sapien
gagcatggtgaagcgtgatccaaaa

SEQ ID NO: 5912941 - DNA, 25 bp, Homo sapien
ggttttggggattgaacactgctgc

SEQ ID NO: 5912942 - DNA, 25 bp, Homo sapien
ccatctatcctcctctgggtttacc

SEQ ID NO: 5912943 - DNA, 25 bp, Homo sapien
ccttgtctgtttttgttgtgagcag

SEQ ID NO: 5912944 - DNA, 25 bp, Homo sapien
gcttcccagctctgatctcaggttg

SEQ ID NO: 5912945 - DNA, 25 bp, Homo sapien
cactgcattcgccactgattatctg

SEQ ID NO: 5912946 - DNA, 25 bp, Homo sapien
agaattatctggcctaaaaatcaat

SEQ ID NO: 5912947 - DNA, 25 bp, Homo sapien
caggttgttttacttggagcatggt

SEQ ID NO: 5912948 - DNA, 25 bp, Homo sapien
ctgtctcgcaggtgtttgtgaggtt

SEQ ID NO: 5912949 - DNA, 25 bp, Homo sapien
aattatctggcctaaaaatcaatac

SEQ ID NO: 5912950 - DNA, 25 bp, Homo sapien
cagcctcacacagagtcacctggat

SEQ ID NO: 5912951 - DNA, 25 bp, Homo sapien
agaagacagacctaaaagtgattta

SEQ ID NO: 5912952 - DNA, 25 bp, Homo sapien
caccaaagtatataggttggttctc

SEQ ID NO: 5912953 - DNA, 25 bp, Homo sapien
ctgggtttaccagcctcacacagag

SEQ ID NO: 5912954 - DNA, 25 bp, Homo sapien
gtctgtttttgttgtgagcagtgtc

SEQ ID NO: 5912955 - DNA, 25 bp, Homo sapien
tggccctgggtggtgtaagaaaacc

SEQ ID NO: 5912956 - DNA, 25 bp, Homo sapien
agtaagccacagagatgaagtcagc

SEQ ID NO: 5912957 - DNA, 25 bp, Homo sapien
taaaagtgatttaatgcaaccctgg

SEQ ID NO: 5912958 - DNA, 25 bp, Homo sapien
ggccttgtctgtttttgttgtgagc

SEQ ID NO: 5912959 - DNA, 25 bp, Homo sapien
aagagatggcaaacacccagagtgc

SEQ ID NO: 5912960 - DNA, 25 bp, Homo sapien
tgggttctggcctcgcttcccttga

SEQ ID NO: 5912961 - DNA, 25 bp, Homo sapien
atggtgaagcgtgatccaaaaggtc

SEQ ID NO: 5912962 - DNA, 25 bp, Homo sapien
gggtttaccagcctcacacagagtc

SEQ ID NO: 5912963 - DNA, 25 bp, Homo sapien
acacatcatttggaatatcagttac

SEQ ID NO: 5912964 - DNA, 25 bp, Homo sapien
ccacacggtctgcatcagctcttgc

SEQ ID NO: 5912965 - DNA, 25 bp, Homo sapien
ctcaggttgttttacttggagcatg

SEQ ID NO: 5912966 - DNA, 25 bp, Homo sapien
cactacaatgaatcaaagtaggaca

SEQ ID NO: 5912967 - DNA, 25 bp, Homo sapien
ctgctctctcacctttacgtaggtt

SEQ ID NO: 5912968 - DNA, 25 bp, Homo sapien
aagcgtgatccaaaaggtcttacag

SEQ ID NO: 5912969 - DNA, 25 bp, Homo sapien
catacaagaactgcactcgtttata

SEQ ID NO: 5912970 - DNA, 25 bp, Homo sapien
agagccaagattcgcctcgacctga

SEQ ID NO: 5912971 - DNA, 25 bp, Homo sapien
tacttggagcatggtgaagcgtgat

SEQ ID NO: 5912972 - DNA, 25 bp, Homo sapien
tggaagaattatctggcctaaaaat

SEQ ID NO: 5912973 - DNA, 25 bp, Homo sapien
agcagtgtcacccctggccaggtgg

SEQ ID NO: 5912974 - DNA, 25 bp, Homo sapien
gtgtaagaaaaccagttgagtaagc

SEQ ID NO: 5912975 - DNA, 25 bp, Homo sapien
ttccgcaaagtgcgagaaaccacca

SEQ ID NO: 5912976 - DNA, 25 bp, Homo sapien
gtcttacagcaacactgcagctttc

SEQ ID NO: 5912977 - DNA, 25 bp, Homo sapien
cactgcagctttccgcaaagtgcga

SEQ ID NO: 5912978 - DNA, 25 bp, Homo sapien
caccagaagagatggcaaacaccca

SEQ ID NO: 5912979 - DNA, 25 bp, Homo sapien
aatacatttcagagccaagattcgc

SEQ ID NO: 5912980 - DNA, 25 bp, Homo sapien
tacaagaactgcactcgtttataat

SEQ ID NO: 5912981 - DNA, 25 bp, Homo sapien
gctctgtgcagtctgctctctcacc

SEQ ID NO: 5912982 - DNA, 25 bp, Homo sapien
gtctcgcaggtgtttgtgaggttgg

SEQ ID NO: 5912983 - DNA, 25 bp, Homo sapien
tgggccttgtctgtttttgttgtga

SEQ ID NO: 5912984 - DNA, 25 bp, Homo sapien
ctgcactcgtttataatattctaaa

SEQ ID NO: 5912985 - DNA, 25 bp, Homo sapien
tgagtaagccacagagatgaagtca

SEQ ID NO: 5912986 - DNA, 25 bp, Homo sapien
acggtctgcatcagctcttgcctct

SEQ ID NO: 5912987 - DNA, 25 bp, Homo sapien
aaagtaggacacggcctaagaagac

SEQ ID NO: 5912988 - DNA, 25 bp, Homo sapien
tacagcaacactgcagctttccgca

SEQ ID NO: 5912989 - DNA, 25 bp, Homo sapien
ccgcctctaaccgatgcacctgtgg

SEQ ID NO: 5912990 - DNA, 25 bp, Homo sapien
cacctggatgtgggactcagctgat

SEQ ID NO: 5912991 - DNA, 25 bp, Homo sapien
cctaaaagtgatttaatgcaaccct

SEQ ID NO: 5912992 - DNA, 25 bp, Homo sapien
ccttaataccagagaaaaccatcta

SEQ ID NO: 5912993 - DNA, 25 bp, Homo sapien
gtttcttattgttgatgatgggcac

SEQ ID NO: 5912994 - DNA, 25 bp, Homo sapien
atctatcctcctctgggtttaccag

SEQ ID NO: 5912995 - DNA, 25 bp, Homo sapien
gtgttcccacacggtctgcatcagc

SEQ ID NO: 5912996 - DNA, 25 bp, Homo sapien
ataatattctaaagccttaatacca

SEQ ID NO: 5912997 - DNA, 25 bp, Homo sapien
tctccaaacaccaaagtatataggt

SEQ ID NO: 5912998 - DNA, 25 bp, Homo sapien
cctaaaaatcaatacatttcagagc

SEQ ID NO: 5912999 - DNA, 25 bp, Homo sapien
cctggatgtgggactcagctgatga

SEQ ID NO: 5913000 - DNA, 25 bp, Homo sapien
accagttgagtaagccacagagatg

SEQ ID NO: 5913001 - DNA, 25 bp, Homo sapien
cctgaggcttcccagctctgatctc

SEQ ID NO: 5913002 - DNA, 25 bp, Homo sapien
tgaccatgctggtgcgcgcgtggcc

SEQ ID NO: 5913003 - DNA, 25 bp, Homo sapien
aatgtccgtctctccaaacaccaaa

SEQ ID NO: 5913004 - DNA, 25 bp, Homo sapien
aatcaatacatttcagagccaagat

SEQ ID NO: 5913005 - DNA, 25 bp, Homo sapien
agctcttgcctctgggttctggcct

SEQ ID NO: 5913006 - DNA, 25 bp, Homo sapien
tggcctgtgagtggagacaaaccct

SEQ ID NO: 5913007 - DNA, 25 bp, Homo sapien
accttaagcccaccccgccatacac

SEQ ID NO: 5913008 - DNA, 25 bp, Homo sapien
cttacagcaacactgcagctttccg

SEQ ID NO: 5913009 - DNA, 25 bp, Homo sapien
tggcaaacacccagagtgcagggag

SEQ ID NO: 5913010 - DNA, 25 bp, Homo sapien
ttaagcccaccccgccatacacatc

SEQ ID NO: 5913011 - DNA, 25 bp, Homo sapien
gtttttgttgtgagcagtgtcaccc

SEQ ID NO: 5913012 - DNA, 25 bp, Homo sapien
tgcagggagacacactgcattcgcc

SEQ ID NO: 5913013 - DNA, 25 bp, Homo sapien
ttcttattgttgatgatgggcacgt

SEQ ID NO: 5913014 - DNA, 25 bp, Homo sapien
gtttaccagcctcacacagagtcac

SEQ ID NO: 5913015 - DNA, 25 bp, Homo sapien
agagaaaaccatctatcctcctctg

SEQ ID NO: 5913016 - DNA, 25 bp, Homo sapien
ttcccagctctgatctcaggttgtt

SEQ ID NO: 5913017 - DNA, 25 bp, Homo sapien
tcctgcccagtgttttatcactaca

SEQ ID NO: 5913018 - DNA, 25 bp, Homo sapien
agtcagcaagcagtgttcccacacg

SEQ ID NO: 5913019 - DNA, 25 bp, Homo sapien
aacaccaaagtatataggttggttc

SEQ ID NO: 5913020 - DNA, 25 bp, Homo sapien
ccagaagagatggcaaacacccaga

SEQ ID NO: 5913021 - DNA, 25 bp, Homo sapien
gtgagtggagacaaacccttcccct

SEQ ID NO: 5913022 - DNA, 25 bp, Homo sapien
gttgatgatgggcacgtgtggacag

SEQ ID NO: 5913023 - DNA, 25 bp, Homo sapien
ttcccttgaccatgctggtgcgcgc

SEQ ID NO: 5913024 - DNA, 25 bp, Homo sapien
gagtggagacaaacccttcccctct

SEQ ID NO: 5913025 - DNA, 25 bp, Homo sapien
gttttacttggagcatggtgaagcg

SEQ ID NO: 5913026 - DNA, 25 bp, Homo sapien
acacggcctaagaagacagacctaa

SEQ ID NO: 5913027 - DNA, 25 bp, Homo sapien
gcaaagtgcgagaaaccaccagaag

SEQ ID NO: 5913028 - DNA, 25 bp, Homo sapien
gtcacccctggccaggtggccctgg

SEQ ID NO: 5913029 - DNA, 25 bp, Homo sapien
ttttggggattgaacactgctgctc

SEQ ID NO: 5913030 - DNA, 25 bp, Homo sapien
caaccctggaagaattatctggcct

SEQ ID NO: 5913031 - DNA, 25 bp, Homo sapien
gttgtgagcagtgtcacccctggcc

SEQ ID NO: 5913032 - DNA, 25 bp, Homo sapien
acttgtttcttattgttgatgatgg

SEQ ID NO: 5913033 - DNA, 25 bp, Homo sapien
agtgatttaatgcaaccctggaaga

SEQ ID NO: 5913034 - DNA, 25 bp, Homo sapien
ttgtttcttattgttgatgatgggc

SEQ ID NO: 5913035 - DNA, 25 bp, Homo sapien
gagatggcaaacacccagagtgcag

SEQ ID NO: 5913036 - DNA, 25 bp, Homo sapien
aaaatcaatacatttcagagccaag

SEQ ID NO: 5913037 - DNA, 25 bp, Homo sapien
taccagagaaaaccatctatcctcc

SEQ ID NO: 5913038 - DNA, 25 bp, Homo sapien
taagaagacagacctaaaagtgatt

SEQ ID NO: 5913039 - DNA, 25 bp, Homo sapien
gcttcccttgaccatgctggtgcgc

SEQ ID NO: 5913040 - DNA, 25 bp, Homo sapien
aatgcaaccctggaagaattatctg

SEQ ID NO: 5913041 - DNA, 25 bp, Homo sapien
gacagacctaaaagtgatttaatgc

SEQ ID NO: 5913042 - DNA, 25 bp, Homo sapien
atgatgggcacgtgtggacagctct

SEQ ID NO: 5913043 - DNA, 25 bp, Homo sapien
ggtgtttgtgaggttggttgtattt

SEQ ID NO: 5913044 - DNA, 25 bp, Homo sapien
ttataatattctaaagccttaatac

SEQ ID NO: 5913045 - DNA, 25 bp, Homo sapien
tcagctcttgcctctgggttctggc

SEQ ID NO: 5913046 - DNA, 25 bp, Homo sapien
gatgaaccgcctctaaccgatgcac

SEQ ID NO: 5913047 - DNA, 25 bp, Homo sapien
agagatgaagtcagcaagcagtgtt

SEQ ID NO: 5913048 - DNA, 25 bp, Homo sapien
ctgattatctgggtacaatgtccgt

SEQ ID NO: 5913049 - DNA, 25 bp, Homo sapien
gcactcgtttataatattctaaagc

SEQ ID NO: 5913050 - DNA, 25 bp, Homo sapien
cgccatacacatcatttggaatatc

SEQ ID NO: 5913051 - DNA, 25 bp, Homo sapien
tttggaatatcagttacatacaaga

SEQ ID NO: 5913052 - DNA, 25 bp, Homo sapien
gttgagtaagccacagagatgaagt

SEQ ID NO: 5913053 - DNA, 25 bp, Homo sapien
acccagagtgcagggagacacactg

SEQ ID NO: 5913054 - DNA, 25 bp, Homo sapien
gagacacactgcattcgccactgat

SEQ ID NO: 5913055 - DNA, 25 bp, Homo sapien
tctgtgcagtctgctctctcacctt

SEQ ID NO: 5913056 - DNA, 25 bp, Homo sapien
catgctggtgcgcgcgtggcctgtg

SEQ ID NO: 5913057 - DNA, 25 bp, Homo sapien
ctggcctaaaaatcaatacatttca

SEQ ID NO: 5913058 - DNA, 25 bp, Homo sapien
cccttgaccatgctggtgcgcgcgt

SEQ ID NO: 5913059 - DNA, 25 bp, Homo sapien
ggcctaagaagacagacctaaaagt

SEQ ID NO: 5913060 - DNA, 25 bp, Homo sapien
agaactgcactcgtttataatattc

SEQ ID NO: 5913061 - DNA, 25 bp, Homo sapien
agtaggacacggcctaagaagacag

SEQ ID NO: 5913062 - DNA, 25 bp, Homo sapien
aactgcactcgtttataatattcta

SEQ ID NO: 5913063 - DNA, 25 bp, Homo sapien
gatccaaaaggtcttacagcaacac

SEQ ID NO: 5913064 - DNA, 25 bp, Homo sapien
tatataggttggttctctgtctcgc

SEQ ID NO: 5913065 - DNA, 25 bp, Homo sapien
gtgtgtgacccgtggcctgtgagtg

SEQ ID NO: 5913066 - DNA, 25 bp, Homo sapien
gcctgtgagtggagacaaacccttc

SEQ ID NO: 5913067 - DNA, 25 bp, Homo sapien
ccagagaaaaccatctatcctcctc

SEQ ID NO: 5913068 - DNA, 25 bp, Homo sapien
cactgattatctgggtacaatgtcc

SEQ ID NO: 5913069 - DNA, 25 bp, Homo sapien
ctctgtctcgcaggtgtttgtgagg

SEQ ID NO: 5913070 - DNA, 25 bp, Homo sapien
ctaaccgatgcacctgtgggccttg

SEQ ID NO: 5913071 - DNA, 25 bp, Homo sapien
atctcaggttgttttacttggagca

SEQ ID NO: 5913072 - DNA, 25 bp, Homo sapien
cctggccaggtggccctgggtggtg

SEQ ID NO: 5913073 - DNA, 25 bp, Homo sapien
tgtgggactcagctgatgaaccgcc

SEQ ID NO: 5913074 - DNA, 25 bp, Homo sapien
tgcaaccctggaagaattatctggc

SEQ ID NO: 5913075 - DNA, 25 bp, Homo sapien
tgatttaatgcaaccctggaagaat

SEQ ID NO: 5913076 - DNA, 25 bp, Homo sapien
gctctgatctcaggttgttttactt

SEQ ID NO: 5913077 - DNA, 25 bp, Homo sapien
ttatcactacaatgaatcaaagtag

SEQ ID NO: 5913078 - DNA, 25 bp, Homo sapien
gatgggcacgtgtggacagctctgt

SEQ ID NO: 5913079 - DNA, 25 bp, Homo sapien
agcagtgttcccacacggtctgcat

SEQ ID NO: 5913080 - DNA, 25 bp, Homo sapien
ggtgcgcgcgtggcctgtgtgtgac

SEQ ID NO: 5913081 - DNA, 25 bp, Homo sapien
tgatgatgggcacgtgtggacagct

SEQ ID NO: 5913082 - DNA, 25 bp, Homo sapien
agttgctcctgcccagtgttttatc

SEQ ID NO: 5913083 - DNA, 25 bp, Homo sapien
gtcacctggatgtgggactcagctg

SEQ ID NO: 5913084 - DNA, 25 bp, Homo sapien
tgcacctgtgggccttgtctgtttt

SEQ ID NO: 5913085 - DNA, 25 bp, Homo sapien
tgtttgtgaggttggttgtattttt

SEQ ID NO: 5913086 - DNA, 25 bp, Homo sapien
cccgccatacacatcatttggaata

SEQ ID NO: 5913087 - DNA, 25 bp, Homo sapien
tgatctcaggttgttttacttggag

SEQ ID NO: 5913088 - DNA, 25 bp, Homo sapien
accaccagaagagatggcaaacacc

SEQ ID NO: 5913089 - DNA, 25 bp, Homo sapien
ctaaagccttaataccagagaaaac

SEQ ID NO: 5913090 - DNA, 25 bp, Homo sapien
cgtggcctgtgagtggagacaaacc

SEQ ID NO: 5913091 - DNA, 25 bp, Homo sapien
caagcagtgttcccacacggtctgc

SEQ ID NO: 5913092 - DNA, 25 bp, Homo sapien
cagggagacacactgcattcgccac

SEQ ID NO: 5913093 - DNA, 25 bp, Homo sapien
agcaagcagtgttcccacacggtct

SEQ ID NO: 5913094 - DNA, 25 bp, Homo sapien
ttaataccagagaaaaccatctatc

SEQ ID NO: 5913095 - DNA, 25 bp, Homo sapien
gacccgtggcctgtgagtggagaca

SEQ ID NO: 5913096 - DNA, 25 bp, Homo sapien
aaagccttaataccagagaaaacca

SEQ ID NO: 5913097 - DNA, 25 bp, Homo sapien
gacacactgcattcgccactgatta

SEQ ID NO: 5913098 - DNA, 25 bp, Homo sapien
tctgcatcagctcttgcctctgggt

SEQ ID NO: 5913099 - DNA, 25 bp, Homo sapien
tgcatcagctcttgcctctgggttc

SEQ ID NO: 5913100 - DNA, 25 bp, Homo sapien
atcatttggaatatcagttacatac

SEQ ID NO: 5913101 - DNA, 25 bp, Homo sapien
ggtctgcatcagctcttgcctctgg

SEQ ID NO: 5913102 - DNA, 25 bp, Homo sapien
cagtgttcccacacggtctgcatca

SEQ ID NO: 5913103 - DNA, 25 bp, Homo sapien
aaaggtcttacagcaacactgcagc

SEQ ID NO: 5913104 - DNA, 25 bp, Homo sapien
aatcaaagtaggacacggcctaaga

SEQ ID NO: 5913105 - DNA, 25 bp, Homo sapien
gatgcacctgtgggccttgtctgtt

SEQ ID NO: 5913106 - DNA, 25 bp, Homo sapien
cacacagagtcacctggatgtggga

SEQ ID NO: 5913107 - DNA, 25 bp, Homo sapien
tgtgagcagtgtcacccctggccag

SEQ ID NO: 5913108 - DNA, 25 bp, Homo sapien
agaagagatggcaaacacccagagt

SEQ ID NO: 5913109 - DNA, 25 bp, Homo sapien
tctgggttctggcctcgcttccctt

SEQ ID NO: 5913110 - DNA, 25 bp, Homo sapien
tcaaagtaggacacggcctaagaag

SEQ ID NO: 5913111 - DNA, 25 bp, Homo sapien
ttctggcctcgcttcccttgaccat

SEQ ID NO: 5913112 - DNA, 25 bp, Homo sapien
gcctcacacagagtcacctggatgt

SEQ ID NO: 5913113 - DNA, 25 bp, Homo sapien
tcgtttataatattctaaagcctta

SEQ ID NO: 5913114 - DNA, 25 bp, Homo sapien
gtacaatgtccgtctctccaaacac

SEQ ID NO: 5913115 - DNA, 25 bp, Homo sapien
aatgaatcaaagtaggacacggcct

SEQ ID NO: 5913116 - DNA, 25 bp, Homo sapien
ggttctggcctcgcttcccttgacc

SEQ ID NO: 5913117 - DNA, 25 bp, Homo sapien
agccaagattcgcctcgacctgagg

SEQ ID NO: 5913118 - DNA, 25 bp, Homo sapien
gggagacacactgcattcgccactg

SEQ ID NO: 5913119 - DNA, 25 bp, Homo sapien
tggagcatggtgaagcgtgatccaa

SEQ ID NO: 5913120 - DNA, 25 bp, Homo sapien
cctaagaagacagacctaaaagtga

SEQ ID NO: 5913121 - DNA, 25 bp, Homo sapien
ctcacacagagtcacctggatgtgg

SEQ ID NO: 5913122 - DNA, 25 bp, Homo sapien
cagctctgtgcagtctgctctctca

SEQ ID NO: 5913123 - DNA, 25 bp, Homo sapien
tggccaggtggccctgggtggtgta

SEQ ID NO: 5913124 - DNA, 25 bp, Homo sapien
gcctgtgtgtgacccgtggcctgtg

SEQ ID NO: 5913125 - DNA, 25 bp, Homo sapien
caggtgtttgtgaggttggttgtat

SEQ ID NO: 5913126 - DNA, 25 bp, Homo sapien
tgagcagtgtcacccctggccaggt

SEQ ID NO: 5913127 - DNA, 25 bp, Homo sapien
gctctctcacctttacgtaggtttt

SEQ ID NO: 5913128 - DNA, 25 bp, Homo sapien
catcagctcttgcctctgggttctg

SEQ ID NO: 5913129 - DNA, 25 bp, Homo sapien
ctgtgagtggagacaaacccttccc

SEQ ID NO: 5913130 - DNA, 25 bp, Homo sapien
ctgtgtgtgacccgtggcctgtgag

SEQ ID NO: 5913131 - DNA, 25 bp, Homo sapien
cagtgtcacccctggccaggtggcc

SEQ ID NO: 5913132 - DNA, 25 bp, Homo sapien
aaaccaccagaagagatggcaaaca

SEQ ID NO: 5913133 - DNA, 25 bp, Homo sapien
agaaaccaccagaagagatggcaaa

SEQ ID NO: 5913134 - DNA, 25 bp, Homo sapien
ctgggtacaatgtccgtctctccaa

SEQ ID NO: 5913135 - DNA, 25 bp, Homo sapien
gccctgggtggtgtaagaaaaccag

SEQ ID NO: 5913136 - DNA, 25 bp, Homo sapien
cgcctcgacctgaggcttcccagct

SEQ ID NO: 5913137 - DNA, 25 bp, Homo sapien
cacagagtcacctggatgtgggact

SEQ ID NO: 5913138 - DNA, 25 bp, Homo sapien
cagacctaaaagtgatttaatgcaa

SEQ ID NO: 5913139 - DNA, 25 bp, Homo sapien
agtgttttatcactacaatgaatca

SEQ ID NO: 5913140 - DNA, 25 bp, Homo sapien
cacccctggccaggtggccctgggt

SEQ ID NO: 5913141 - DNA, 25 bp, Homo sapien
tctgatctcaggttgttttacttgg

SEQ ID NO: 5913142 - DNA, 25 bp, Homo sapien
tgaatcaaagtaggacacggcctaa

SEQ ID NO: 5913143 - DNA, 25 bp, Homo sapien
ggttggttctctgtctcgcaggtgt

SEQ ID NO: 5913144 - DNA, 25 bp, Homo sapien
ctgatgaaccgcctctaaccgatgc

SEQ ID NO: 5913145 - DNA, 25 bp, Homo sapien
cttgcctctgggttctggcctcgct

SEQ ID NO: 5913146 - DNA, 25 bp, Homo sapien
cagctctgatctcaggttgttttac

SEQ ID NO: 5913147 - DNA, 25 bp, Homo sapien
cgcgcgtggcctgtgtgtgacccgt

SEQ ID NO: 5913148 - DNA, 25 bp, Homo sapien
tccaaacaccaaagtatataggttg

SEQ ID NO: 5913149 - DNA, 25 bp, Homo sapien
ttaccagcctcacacagagtcacct

SEQ ID NO: 5913150 - DNA, 25 bp, Homo sapien
gacctaaaagtgatttaatgcaacc

SEQ ID NO: 5913151 - DNA, 25 bp, Homo sapien
tgcctctgggttctggcctcgcttc

SEQ ID NO: 5913152 - DNA, 25 bp, Homo sapien
cagagtcacctggatgtgggactca

SEQ ID NO: 5913153 - DNA, 25 bp, Homo sapien
tgaaccgcctctaaccgatgcacct

SEQ ID NO: 5913154 - DNA, 25 bp, Homo sapien
ttatctgggtacaatgtccgtctct

SEQ ID NO: 5913155 - DNA, 25 bp, Homo sapien
ggcctaaaaatcaatacatttcaga

SEQ ID NO: 5913156 - DNA, 25 bp, Homo sapien
tggaatatcagttacatacaagaac

SEQ ID NO: 5913157 - DNA, 25 bp, Homo sapien
ctctgggtttaccagcctcacacag

SEQ ID NO: 5913158 - DNA, 25 bp, Homo sapien
cgtggcctgtgtgtgacccgtggcc

SEQ ID NO: 5913159 - DNA, 25 bp, Homo sapien
gaagaattatctggcctaaaaatca

SEQ ID NO: 5913160 - DNA, 25 bp, Homo sapien
tataggttggttctctgtctcgcag

SEQ ID NO: 5913161 - DNA, 25 bp, Homo sapien
cagttgagtaagccacagagatgaa

SEQ ID NO: 5913162 - DNA, 25 bp, Homo sapien
tctgagttgctcctgcccagtgttt

SEQ ID NO: 5913163 - DNA, 25 bp, Homo sapien
ttgtctgtttttgttgtgagcagtg

SEQ ID NO: 5913164 - DNA, 25 bp, Homo sapien
agctttccgcaaagtgcgagaaacc

SEQ ID NO: 5913165 - DNA, 25 bp, Homo sapien
gtgatccaaaaggtcttacagcaac

SEQ ID NO: 5913166 - DNA, 25 bp, Homo sapien
agagtgcagggagacacactgcatt

SEQ ID NO: 5913167 - DNA, 25 bp, Homo sapien
gatgtgggactcagctgatgaaccg

SEQ ID NO: 5913168 - DNA, 25 bp, Homo sapien
gaatatcagttacatacaagaactg

SEQ ID NO: 5913169 - DNA, 25 bp, Homo sapien
gcaaacacccagagtgcagggagac

SEQ ID NO: 5913170 - DNA, 25 bp, Homo sapien
ctcttgcctctgggttctggcctcg

SEQ ID NO: 5913171 - DNA, 25 bp, Homo sapien
cagcaacactgcagctttccgcaaa

SEQ ID NO: 5913172 - DNA, 25 bp, Homo sapien
taagccacagagatgaagtcagcaa

SEQ ID NO: 5913173 - DNA, 25 bp, Homo sapien
tcagctgatgaaccgcctctaaccg

SEQ ID NO: 5913174 - DNA, 25 bp, Homo sapien
agccacagagatgaagtcagcaagc

SEQ ID NO: 5913175 - DNA, 25 bp, Homo sapien
catttcagagccaagattcgcctcg

SEQ ID NO: 5913176 - DNA, 25 bp, Homo sapien
tcctctgggtttaccagcctcacac

SEQ ID NO: 5913177 - DNA, 25 bp, Homo sapien
aggcttcccagctctgatctcaggt

SEQ ID NO: 5913178 - DNA, 25 bp, Homo sapien
cctctgggttctggcctcgcttccc

SEQ ID NO: 5913179 - DNA, 25 bp, Homo sapien
atttaatgcaaccctggaagaatta

SEQ ID NO: 5913180 - DNA, 25 bp, Homo sapien
gtgtgacccgtggcctgtgagtgga

SEQ ID NO: 5913181 - DNA, 25 bp, Homo sapien
ctcgcaggtgtttgtgaggttggtt

SEQ ID NO: 5913182 - DNA, 25 bp, Homo sapien
tcccacacggtctgcatcagctctt

SEQ ID NO: 5913183 - DNA, 25 bp, Homo sapien
catttggaatatcagttacatacaa

SEQ ID NO: 5913184 - DNA, 25 bp, Homo sapien
tgaggcttcccagctctgatctcag

SEQ ID NO: 5913185 - DNA, 25 bp, Homo sapien
tcgacctgaggcttcccagctctga

SEQ ID NO: 5913186 - DNA, 25 bp, Homo sapien
ccagtgttttatcactacaatgaat

SEQ ID NO: 5913187 - DNA, 25 bp, Homo sapien
ttaatgcaaccctggaagaattatc

SEQ ID NO: 5913188 - DNA, 25 bp, Homo sapien
gtaagaaaaccagttgagtaagcca

SEQ ID NO: 5913189 - DNA, 25 bp, Homo sapien
accccgccatacacatcatttggaa

SEQ ID NO: 5913190 - DNA, 25 bp, Homo sapien
tgggtggtgtaagaaaaccagttga

SEQ ID NO: 5913191 - DNA, 25 bp, Homo sapien
taggttggttctctgtctcgcaggt

SEQ ID NO: 5913192 - DNA, 25 bp, Homo sapien
gattcgcctcgacctgaggcttccc

SEQ ID NO: 5913193 - DNA, 25 bp, Homo sapien
ttatctggcctaaaaatcaatacat

SEQ ID NO: 5913194 - DNA, 25 bp, Homo sapien
cgtaggttttggggattgaacactg

SEQ ID NO: 5913195 - DNA, 25 bp, Homo sapien
gcctctaaccgatgcacctgtgggc

SEQ ID NO: 5913196 - DNA, 25 bp, Homo sapien
taaaaatcaatacatttcagagcca

SEQ ID NO: 5913197 - DNA, 25 bp, Homo sapien
tgcgagaaaccaccagaagagatgg

SEQ ID NO: 5913198 - DNA, 25 bp, Homo sapien
aaccatctatcctcctctgggttta

SEQ ID NO: 5913199 - DNA, 25 bp, Homo sapien
tttcagagccaagattcgcctcgac

SEQ ID NO: 5913200 - DNA, 25 bp, Homo sapien
ctctaaccgatgcacctgtgggcct

SEQ ID NO: 5913201 - DNA, 25 bp, Homo sapien
cccctctgagttgctcctgcccagt

SEQ ID NO: 5913202 - DNA, 25 bp, Homo sapien
gaagtcagcaagcagtgttcccaca

SEQ ID NO: 5913203 - DNA, 25 bp, Homo sapien
cgcgtggcctgtgtgtgacccgtgg

SEQ ID NO: 5913204 - DNA, 25 bp, Homo sapien
ttctaaagccttaataccagagaaa

SEQ ID NO: 5913205 - DNA, 25 bp, Homo sapien
acacggtctgcatcagctcttgcct

SEQ ID NO: 5913206 - DNA, 25 bp, Homo sapien
ggttgttttacttggagcatggtga

SEQ ID NO: 5913207 - DNA, 25 bp, Homo sapien
cctgtgggccttgtctgtttttgtt

SEQ ID NO: 5913208 - DNA, 25 bp, Homo sapien
acacccagagtgcagggagacacac

SEQ ID NO: 5913209 - DNA, 25 bp, Homo sapien
gacagctctgtgcagtctgctctct

SEQ ID NO: 5913210 - DNA, 25 bp, Homo sapien
ttgttgtgagcagtgtcacccctgg

SEQ ID NO: 5913211 - DNA, 25 bp, Homo sapien
cagtctgctctctcacctttacgta

SEQ ID NO: 5913212 - DNA, 25 bp, Homo sapien
ggactcagctgatgaaccgcctcta

SEQ ID NO: 5913213 - DNA, 25 bp, Homo sapien
tgagttgctcctgcccagtgtttta

SEQ ID NO: 5913214 - DNA, 25 bp, Homo sapien
tcaatacatttcagagccaagattc

SEQ ID NO: 5913215 - DNA, 25 bp, Homo sapien
aaaaccatctatcctcctctgggtt

SEQ ID NO: 5913216 - DNA, 25 bp, Homo sapien
tattgttgatgatgggcacgtgtgg

SEQ ID NO: 5913217 - DNA, 25 bp, Homo sapien
aagattcgcctcgacctgaggcttc

SEQ ID NO: 5913218 - DNA, 25 bp, Homo sapien
acaaacccttcccctctgagttgct

SEQ ID NO: 5913219 - DNA, 25 bp, Homo sapien
accagcctcacacagagtcacctgg

SEQ ID NO: 5913220 - DNA, 25 bp, Homo sapien
gtgacccgtggcctgtgagtggaga

SEQ ID NO: 5913221 - DNA, 25 bp, Homo sapien
tgaagcgtgatccaaaaggtcttac

SEQ ID NO: 5913222 - DNA, 25 bp, Homo sapien
gcccagtgttttatcactacaatga

SEQ ID NO: 5913223 - DNA, 25 bp, Homo sapien
ggacacggcctaagaagacagacct

SEQ ID NO: 5913224 - DNA, 25 bp, Homo sapien
ttttgttgtgagcagtgtcacccct

SEQ ID NO: 5913225 - DNA, 25 bp, Homo sapien
gttcccacacggtctgcatcagctc

SEQ ID NO: 5913226 - DNA, 25 bp, Homo sapien
atgaagtcagcaagcagtgttccca

SEQ ID NO: 5913227 - DNA, 25 bp, Homo sapien
tcgccactgattatctgggtacaat

SEQ ID NO: 5913228 - DNA, 25 bp, Homo sapien
aatattctaaagccttaataccaga

SEQ ID NO: 5913229 - DNA, 25 bp, Homo sapien
agaaaaccatctatcctcctctggg

SEQ ID NO: 5913230 - DNA, 25 bp, Homo sapien
tgggcacgtgtggacagctctgtgc

SEQ ID NO: 5913231 - DNA, 25 bp, Homo sapien
ctgcccagtgttttatcactacaat

SEQ ID NO: 5913232 - DNA, 25 bp, Homo sapien
aagcccaccccgccatacacatcat

SEQ ID NO: 5913233 - DNA, 25 bp, Homo sapien
ccagagtgcagggagacacactgca

SEQ ID NO: 5913234 - DNA, 25 bp, Homo sapien
cctcgcttcccttgaccatgctggt

SEQ ID NO: 5913235 - DNA, 25 bp, Homo sapien
ctacaatgaatcaaagtaggacacg

SEQ ID NO: 5913236 - DNA, 25 bp, Homo sapien
tggcctgtgtgtgacccgtggcctg

SEQ ID NO: 5913237 - DNA, 25 bp, Homo sapien
tgtgggccttgtctgtttttgttgt

SEQ ID NO: 5913238 - DNA, 25 bp, Homo sapien
agccttaataccagagaaaaccatc

SEQ ID NO: 5913239 - DNA, 25 bp, Homo sapien
aggtcttacagcaacactgcagctt

SEQ ID NO: 5913240 - DNA, 25 bp, Homo sapien
gcgtgatccaaaaggtcttacagca

SEQ ID NO: 5913241 - DNA, 25 bp, Homo sapien
cttgaccatgctggtgcgcgcgtgg

SEQ ID NO: 5913242 - DNA, 25 bp, Homo sapien
gcattcgccactgattatctgggta

SEQ ID NO: 5913243 - DNA, 25 bp, Homo sapien
cgtgtggacagctctgtgcagtctg

SEQ ID NO: 5913244 - DNA, 25 bp, Homo sapien
gcatggtgaagcgtgatccaaaagg

SEQ ID NO: 5913245 - DNA, 25 bp, Homo sapien
acggcctaagaagacagacctaaaa

SEQ ID NO: 5913246 - DNA, 25 bp, Homo sapien
cttattgttgatgatgggcacgtgt

SEQ ID NO: 5913247 - DNA, 25 bp, Homo sapien
agatgaagtcagcaagcagtgttcc

SEQ ID NO: 5913248 - DNA, 25 bp, Homo sapien
ccgcaaagtgcgagaaaccaccaga

SEQ ID NO: 5913249 - DNA, 25 bp, Homo sapien
tgggactcagctgatgaaccgcctc

SEQ ID NO: 5913250 - DNA, 25 bp, Homo sapien
ttcccctctgagttgctcctgccca

SEQ ID NO: 5913251 - DNA, 25 bp, Homo sapien
aaagtgatttaatgcaaccctggaa

SEQ ID NO: 5913252 - DNA, 25 bp, Homo sapien
cacgtgtggacagctctgtgcagtc

SEQ ID NO: 5913253 - DNA, 25 bp, Homo sapien
ctggtgcgcgcgtggcctgtgtgtg

SEQ ID NO: 5913254 - DNA, 25 bp, Homo sapien
gccaggtggccctgggtggtgtaag

SEQ ID NO: 5913255 - DNA, 25 bp, Homo sapien
ccacagagatgaagtcagcaagcag

SEQ ID NO: 5913256 - DNA, 25 bp, Homo sapien
gtggagacaaacccttcccctctga

SEQ ID NO: 5913257 - DNA, 25 bp, Homo sapien
cctggaagaattatctggcctaaaa

SEQ ID NO: 5913258 - DNA, 25 bp, Homo sapien
agacaaacccttcccctctgagttg

SEQ ID NO: 5913259 - DNA, 25 bp, Homo sapien
gctcctgcccagtgttttatcacta

SEQ ID NO: 5913260 - DNA, 25 bp, Homo sapien
gcccaccccgccatacacatcattt

SEQ ID NO: 5913261 - DNA, 25 bp, Homo sapien
tacatacaagaactgcactcgttta

SEQ ID NO: 5913262 - DNA, 25 bp, Homo sapien
cctctgagttgctcctgcccagtgt

SEQ ID NO: 5913263 - DNA, 25 bp, Homo sapien
tgctggtgcgcgcgtggcctgtgtg

SEQ ID NO: 5913264 - DNA, 25 bp, Homo sapien
gtttataatattctaaagccttaat

SEQ ID NO: 5913265 - DNA, 25 bp, Homo sapien
ggttctctgtctcgcaggtgtttgt

SEQ ID NO: 5913266 - DNA, 25 bp, Homo sapien
tgtccgtctctccaaacaccaaagt

SEQ ID NO: 5913267 - DNA, 25 bp, Homo sapien
gacctgaggcttcccagctctgatc

SEQ ID NO: 5913268 - DNA, 25 bp, Homo sapien
cccgtggcctgtgagtggagacaaa

SEQ ID NO: 5913269 - DNA, 25 bp, Homo sapien
tccaaaaggtcttacagcaacactg

SEQ ID NO: 5913270 - DNA, 25 bp, Homo sapien
ttcgcctcgacctgaggcttcccag

SEQ ID NO: 5913271 - DNA, 25 bp, Homo sapien
gcaacactgcagctttccgcaaagt

SEQ ID NO: 5913272 - DNA, 25 bp, Homo sapien
aagacagacctaaaagtgatttaat

SEQ ID NO: 5913273 - DNA, 25 bp, Homo sapien
aaagtatataggttggttctctgtc

SEQ ID NO: 5913274 - DNA, 25 bp, Homo sapien
tctctcacctttacgtaggttttgg

SEQ ID NO: 5913275 - DNA, 25 bp, Homo sapien
ttgttgatgatgggcacgtgtggac

SEQ ID NO: 5913276 - DNA, 25 bp, Homo sapien
ggtggccctgggtggtgtaagaaaa

SEQ ID NO: 5913277 - DNA, 25 bp, Homo sapien
gccactgattatctgggtacaatgt

SEQ ID NO: 5913278 - DNA, 25 bp, Homo sapien
aataccagagaaaaccatctatcct

SEQ ID NO: 5913279 - DNA, 25 bp, Homo sapien
cacactgcattcgccactgattatc

SEQ ID NO: 5913280 - DNA, 25 bp, Homo sapien
tggtgtaagaaaaccagttgagtaa

SEQ ID NO: 5913281 - DNA, 25 bp, Homo sapien
ttttatcactacaatgaatcaaagt

SEQ ID NO: 5913282 - DNA, 25 bp, Homo sapien
ggagacaaacccttcccctctgagt

SEQ ID NO: 5913283 - DNA, 25 bp, Homo sapien
ctttccgcaaagtgcgagaaaccac

SEQ ID NO: 5913284 - DNA, 25 bp, Homo sapien
gatggcaaacacccagagtgcaggg

SEQ ID NO: 5913285 - DNA, 25 bp, Homo sapien
cgtctctccaaacaccaaagtatat

SEQ ID NO: 5913286 - DNA, 25 bp, Homo sapien
atcctcctctgggtttaccagcctc

SEQ ID NO: 5913287 - DNA, 25 bp, Homo sapien
agtgcgagaaaccaccagaagagat

SEQ ID NO: 5913288 - DNA, 25 bp, Homo sapien
caaaaggtcttacagcaacactgca

SEQ ID NO: 5913289 - DNA, 25 bp, Homo sapien
gtgtcacccctggccaggtggccct

SEQ ID NO: 5913290 - DNA, 25 bp, Homo sapien
ctggcctcgcttcccttgaccatgc

SEQ ID NO: 5913291 - DNA, 25 bp, Homo sapien
tcagcaagcagtgttcccacacggt

SEQ ID NO: 5913292 - DNA, 25 bp, Homo sapien
caagaactgcactcgtttataatat

SEQ ID NO: 5913293 - DNA, 25 bp, Homo sapien
ttgttttacttggagcatggtgaag

SEQ ID NO: 5913294 - DNA, 25 bp, Homo sapien
tacatttcagagccaagattcgcct

SEQ ID NO: 5913295 - DNA, 25 bp, Homo sapien
tattctaaagccttaataccagaga

SEQ ID NO: 5913296 - DNA, 25 bp, Homo sapien
ccatacacatcatttggaatatcag

SEQ ID NO: 5913297 - DNA, 25 bp, Homo sapien
ctgcattcgccactgattatctggg

SEQ ID NO: 5913298 - DNA, 25 bp, Homo sapien
taggttttggggattgaacactgct

SEQ ID NO: 5913299 - DNA, 25 bp, Homo sapien
tgcagtctgctctctcacctttacg

SEQ ID NO: 5913300 - DNA, 25 bp, Homo sapien
ccgatgcacctgtgggccttgtctg

SEQ ID NO: 5913301 - DNA, 25 bp, Homo sapien
agctgatgaaccgcctctaaccgat

SEQ ID NO: 5913302 - DNA, 25 bp, Homo sapien
cttggagcatggtgaagcgtgatcc

SEQ ID NO: 5913303 - DNA, 25 bp, Homo sapien
taggacacggcctaagaagacagac

SEQ ID NO: 5913304 - DNA, 25 bp, Homo sapien
ttgctcctgcccagtgttttatcac

SEQ ID NO: 5913305 - DNA, 25 bp, Homo sapien
tcagagccaagattcgcctcgacct

SEQ ID NO: 5913306 - DNA, 25 bp, Homo sapien
cagttacatacaagaactgcactcg

SEQ ID NO: 5913307 - DNA, 25 bp, Homo sapien
gattatctgggtacaatgtccgtct

SEQ ID NO: 5913308 - DNA, 25 bp, Homo sapien
gtctgctctctcacctttacgtagg

SEQ ID NO: 5913309 - DNA, 25 bp, Homo sapien
acatcatttggaatatcagttacat

SEQ ID NO: 5913310 - DNA, 25 bp, Homo sapien
gagtcacctggatgtgggactcagc

SEQ ID NO: 5913311 - DNA, 25 bp, Homo sapien
aaaccagttgagtaagccacagaga

SEQ ID NO: 5913312 - DNA, 25 bp, Homo sapien
ggcctcgcttcccttgaccatgctg

SEQ ID NO: 5913313 - DNA, 25 bp, Homo sapien
cccctggccaggtggccctgggtgg

SEQ ID NO: 5913314 - DNA, 25 bp, Homo sapien
attcgccactgattatctgggtaca

SEQ ID NO: 5913315 - DNA, 25 bp, Homo sapien
atatcagttacatacaagaactgca

SEQ ID NO: 5913316 - DNA, 25 bp, Homo sapien
acaatgaatcaaagtaggacacggc

SEQ ID NO: 5913317 - DNA, 25 bp, Homo sapien
cctcctctgggtttaccagcctcac

SEQ ID NO: 5913318 - DNA, 25 bp, Homo sapien
atcactacaatgaatcaaagtagga

SEQ ID NO: 5913319 - DNA, 25 bp, Homo sapien
atcagttacatacaagaactgcact

SEQ ID NO: 5913320 - DNA, 25 bp, Homo sapien
accatgctggtgcgcgcgtggcctg

SEQ ID NO: 5913321 - DNA, 25 bp, Homo sapien
actcagctgatgaaccgcctctaac

SEQ ID NO: 5913322 - DNA, 25 bp, Homo sapien
gttacatacaagaactgcactcgtt

SEQ ID NO: 5913323 - DNA, 25 bp, Homo sapien
ggtggtgtaagaaaaccagttgagt

SEQ ID NO: 5913324 - DNA, 25 bp, Homo sapien
ggcacgtgtggacagctctgtgcag

SEQ ID NO: 5913325 - DNA, 25 bp, Homo sapien
atctgggtacaatgtccgtctctcc

SEQ ID NO: 5913326 - DNA, 25 bp, Homo sapien
atacacatcatttggaatatcagtt

SEQ ID NO: 5913327 - DNA, 25 bp, Homo sapien
cctcgacctgaggcttcccagctct

SEQ ID NO: 5913328 - DNA, 25 bp, Homo sapien
tctctccaaacaccaaagtatatag

SEQ ID NO: 5913329 - DNA, 25 bp, Homo sapien
caaacaccaaagtatataggttggt

SEQ ID NO: 5913330 - DNA, 25 bp, Homo sapien
ctatcctcctctgggtttaccagcc

SEQ ID NO: 5913331 - DNA, 25 bp, Homo sapien
agtgcagggagacacactgcattcg

SEQ ID NO: 5913332 - DNA, 25 bp, Homo sapien
ttctctgtctcgcaggtgtttgtga

SEQ ID NO: 5913333 - DNA, 25 bp, Homo sapien
gggtacaatgtccgtctctccaaac

SEQ ID NO: 5913334 - DNA, 25 bp, Homo sapien
atctggcctaaaaatcaatacattt

SEQ ID NO: 5913335 - DNA, 25 bp, Homo sapien
accctggaagaattatctggcctaa

SEQ ID NO: 5913336 - DNA, 25 bp, Homo sapien
tttacttggagcatggtgaagcgtg

SEQ ID NO: 5913337 - DNA, 25 bp, Homo sapien
tcgcttcccttgaccatgctggtgc

SEQ ID NO: 5913338 - DNA, 25 bp, Homo sapien
acagagatgaagtcagcaagcagtg

SEQ ID NO: 5913339 - DNA, 25 bp, Homo sapien
cgcaggtgtttgtgaggttggttgt

SEQ ID NO: 5913340 - DNA, 25 bp, Homo sapien
ctgcagctttccgcaaagtgcgaga

SEQ ID NO: 5913341 - DNA, 25 bp, Homo sapien
acaatgtccgtctctccaaacacca

SEQ ID NO: 5913342 - DNA, 25 bp, Homo sapien
ccaagattcgcctcgacctgaggct

SEQ ID NO: 5913343 - DNA, 25 bp, Homo sapien
aaagtgcgagaaaccaccagaagag

SEQ ID NO: 5913344 - DNA, 25 bp, Homo sapien
tgtggacagctctgtgcagtctgct

SEQ ID NO: 5913345 - DNA, 25 bp, Homo sapien
ccaaagtatataggttggttctctg

SEQ ID NO: 5913346 - DNA, 25 bp, Homo sapien
aaccgatgcacctgtgggccttgtc

SEQ ID NO: 5913347 - DNA, 25 bp, Homo sapien
tgttttatcactacaatgaatcaaa

SEQ ID NO: 5913348 - DNA, 25 bp, Homo sapien
tgcgcgcgtggcctgtgtgtgaccc

SEQ ID NO: 5913349 - DNA, 25 bp, Homo sapien
tgtgcagtctgctctctcaccttta

SEQ ID NO: 5913350 - DNA, 25 bp, Homo sapien
tacgtaggttttggggattgaacac

SEQ ID NO: 5913351 - DNA, 25 bp, Homo sapien
actcgtttataatattctaaagcct

SEQ ID NO: 5913352 - DNA, 25 bp, Homo sapien
gcagctttccgcaaagtgcgagaaa

SEQ ID NO: 5913353 - DNA, 25 bp, Homo sapien
gaaaaccagttgagtaagccacaga

SEQ ID NO: 5913354 - DNA, 25 bp, Homo sapien
tggatgtgggactcagctgatgaac

SEQ ID NO: 5913355 - DNA, 25 bp, Homo sapien
agtatataggttggttctctgtctc

SEQ ID NO: 5913356 - DNA, 25 bp, Homo sapien
cccagctctgatctcaggttgtttt

SEQ ID NO: 5913357 - DNA, 25 bp, Homo sapien
aacactgcagctttccgcaaagtgc

SEQ ID NO: 5913358 - DNA, 25 bp, Homo sapien
ctgtttttgttgtgagcagtgtcac

SEQ ID NO: 5913359 - DNA, 25 bp, Homo sapien
ggtgaagcgtgatccaaaaggtctt

SEQ ID NO: 5913360 - DNA, 25 bp, Homo sapien
caggtggccctgggtggtgtaagaa

SEQ ID NO: 5913361 - DNA, 25 bp, Homo sapien
aagaaaaccagttgagtaagccaca

SEQ ID NO: 5913362 - DNA, 25 bp, Homo sapien
aaacacccagagtgcagggagacac

SEQ ID NO: 5913363 - DNA, 25 bp, Homo sapien
aaccgcctctaaccgatgcacctgt

SEQ ID NO: 5913364 - DNA, 25 bp, Homo sapien
cacctgtgggccttgtctgtttttg

SEQ ID NO: 5913365 - DNA, 25 bp, Homo sapien
ttggttctctgtctcgcaggtgttt

SEQ ID NO: 5913366 - DNA, 25 bp, Homo sapien
ttgctagagatgtattttgattact

SEQ ID NO: 5913367 - DNA, 25 bp, Homo sapien
gattactgaaaatttctatataaac

SEQ ID NO: 5913368 - DNA, 25 bp, Homo sapien
ggctggctgaatattcctttgttca

SEQ ID NO: 5913369 - DNA, 25 bp, Homo sapien
cctgacctcattatggggattaggg

SEQ ID NO: 5913370 - DNA, 25 bp, Homo sapien
tttttttataatgagttcaacttaa

SEQ ID NO: 5913371 - DNA, 25 bp, Homo sapien
gttcaacttaaggtagaaggcttgg

SEQ ID NO: 5913372 - DNA, 25 bp, Homo sapien
ctctttaacaagccacaagaataaa

SEQ ID NO: 5913373 - DNA, 25 bp, Homo sapien
caaagccacccgggcagaagctttt

SEQ ID NO: 5913374 - DNA, 25 bp, Homo sapien
atggggattagggtgatcttcaagg

SEQ ID NO: 5913375 - DNA, 25 bp, Homo sapien
gccaggagataggagaacctgtctg

SEQ ID NO: 5913376 - DNA, 25 bp, Homo sapien
gatgcctgtgacagtgccccaggaa

SEQ ID NO: 5913377 - DNA, 25 bp, Homo sapien
caaatcagaaaggtgaaattgcttg

SEQ ID NO: 5913378 - DNA, 25 bp, Homo sapien
ggctgctagtgtttaattggaaaat

SEQ ID NO: 5913379 - DNA, 25 bp, Homo sapien
ggctgaggcgctgggctgcagtagc

SEQ ID NO: 5913380 - DNA, 25 bp, Homo sapien
ctgacacctgtcggctgggagagca

SEQ ID NO: 5913381 - DNA, 25 bp, Homo sapien
ccaggaaactctccttcccaagaga

SEQ ID NO: 5913382 - DNA, 25 bp, Homo sapien
attttgattactgaaaatttctata

SEQ ID NO: 5913383 - DNA, 25 bp, Homo sapien
aaggagttttcttaaggaggctggc

SEQ ID NO: 5913384 - DNA, 25 bp, Homo sapien
ttttgccccaggctgtttagctgcc

SEQ ID NO: 5913385 - DNA, 25 bp, Homo sapien
gaaattgcttgctgggaagagggct

SEQ ID NO: 5913386 - DNA, 25 bp, Homo sapien
acattctaaattttgctagagatgt

SEQ ID NO: 5913387 - DNA, 25 bp, Homo sapien
ccttcccaagagatgccaggagata

SEQ ID NO: 5913388 - DNA, 25 bp, Homo sapien
ctgtcttaagtctgaaatggtactg

SEQ ID NO: 5913389 - DNA, 25 bp, Homo sapien
tagagatgtattttgattactgaaa

SEQ ID NO: 5913390 - DNA, 25 bp, Homo sapien
ttgccatacagtgtttcaaaacgta

SEQ ID NO: 5913391 - DNA, 25 bp, Homo sapien
atctgacacctgtcggctgggagag

SEQ ID NO: 5913392 - DNA, 25 bp, Homo sapien
aacactggcagagagaggctgaggc

SEQ ID NO: 5913393 - DNA, 25 bp, Homo sapien
tttaacattctaaattttgctagag

SEQ ID NO: 5913394 - DNA, 25 bp, Homo sapien
tccttccttcctctttaacaagcca

SEQ ID NO: 5913395 - DNA, 25 bp, Homo sapien
caaagttgatgactccttccttcct

SEQ ID NO: 5913396 - DNA, 25 bp, Homo sapien
aagccacccgggcagaagctttttg

SEQ ID NO: 5913397 - DNA, 25 bp, Homo sapien
cctttgttatctgacacctgtcggc

SEQ ID NO: 5913398 - DNA, 25 bp, Homo sapien
attctaaattttgctagagatgtat

SEQ ID NO: 5913399 - DNA, 25 bp, Homo sapien
gagcacatgcaagtacctctgttgg

SEQ ID NO: 5913400 - DNA, 25 bp, Homo sapien
gaaactctccttcccaagagatgcc

SEQ ID NO: 5913401 - DNA, 25 bp, Homo sapien
gaagctggtcacagggctgctgtga

SEQ ID NO: 5913402 - DNA, 25 bp, Homo sapien
gattggccagtactgtcatttccat

SEQ ID NO: 5913403 - DNA, 25 bp, Homo sapien
tccttccttccttccttcctcttta

SEQ ID NO: 5913404 - DNA, 25 bp, Homo sapien
tcctttgttcaaaagaagttttagc

SEQ ID NO: 5913405 - DNA, 25 bp, Homo sapien
cttccttcctctttaacaagccaca

SEQ ID NO: 5913406 - DNA, 25 bp, Homo sapien
ccctgacccaccgtgttgcctctgt

SEQ ID NO: 5913407 - DNA, 25 bp, Homo sapien
tgtgagcccagagctcctgacaaag

SEQ ID NO: 5913408 - DNA, 25 bp, Homo sapien
gcctcctgaagatggatgtagacac

SEQ ID NO: 5913409 - DNA, 25 bp, Homo sapien
tccttcctctttaacaagccacaag

SEQ ID NO: 5913410 - DNA, 25 bp, Homo sapien
caagccacaagaataaaaggaagcc

SEQ ID NO: 5913411 - DNA, 25 bp, Homo sapien
ctgaagtctccttttctattggtct

SEQ ID NO: 5913412 - DNA, 25 bp, Homo sapien
gagagaggctgaggcgctgggctgc

SEQ ID NO: 5913413 - DNA, 25 bp, Homo sapien
cgttctcccatgcagggcaatttgg

SEQ ID NO: 5913414 - DNA, 25 bp, Homo sapien
ttgttttggccaaagttgatgactc

SEQ ID NO: 5913415 - DNA, 25 bp, Homo sapien
gacacctgtcggctgggagagcaca

SEQ ID NO: 5913416 - DNA, 25 bp, Homo sapien
aagtacctctgttggaagctggtca

SEQ ID NO: 5913417 - DNA, 25 bp, Homo sapien
gtcatttccatcctggagaatgtgt

SEQ ID NO: 5913418 - DNA, 25 bp, Homo sapien
caaatcgtcctttgttatctgacac

SEQ ID NO: 5913419 - DNA, 25 bp, Homo sapien
ggaagcctcctgaagatggatgtag

SEQ ID NO: 5913420 - DNA, 25 bp, Homo sapien
ttatctgacacctgtcggctgggag

SEQ ID NO: 5913421 - DNA, 25 bp, Homo sapien
tgaagatggatgtagacacagattg

SEQ ID NO: 5913422 - DNA, 25 bp, Homo sapien
ggggattagggtgatcttcaaggcc

SEQ ID NO: 5913423 - DNA, 25 bp, Homo sapien
tggaagctggtcacagggctgctgt

SEQ ID NO: 5913424 - DNA, 25 bp, Homo sapien
tgtagacacagattgttgctagcct

SEQ ID NO: 5913425 - DNA, 25 bp, Homo sapien
cagggcaatttggactgtttttgcc

SEQ ID NO: 5913426 - DNA, 25 bp, Homo sapien
cagagagaggctgaggcgctgggct

SEQ ID NO: 5913427 - DNA, 25 bp, Homo sapien
aagttgatgactccttccttccttc

SEQ ID NO: 5913428 - DNA, 25 bp, Homo sapien
ctttctggtctccgttctcccatgc

SEQ ID NO: 5913429 - DNA, 25 bp, Homo sapien
ggtcacagggctgctgtgagcccag

SEQ ID NO: 5913430 - DNA, 25 bp, Homo sapien
gaatcagcattttataaaaaaccca

SEQ ID NO: 5913431 - DNA, 25 bp, Homo sapien
tgacagtgccccaggaaggttttca

SEQ ID NO: 5913432 - DNA, 25 bp, Homo sapien
aaggcttgggctgctagtgtttaat

SEQ ID NO: 5913433 - DNA, 25 bp, Homo sapien
acagtgccccaggaaggttttcagg

SEQ ID NO: 5913434 - DNA, 25 bp, Homo sapien
ctgtcatttccatcctggagaatgt

SEQ ID NO: 5913435 - DNA, 25 bp, Homo sapien
gtgaaattgcttgctgggaagaggg

SEQ ID NO: 5913436 - DNA, 25 bp, Homo sapien
gtgatcttcaaggcctttctggtct

SEQ ID NO: 5913437 - DNA, 25 bp, Homo sapien
tgtaaatatattgccatacagtgtt

SEQ ID NO: 5913438 - DNA, 25 bp, Homo sapien
gctccctggaccctgacccaccgtg

SEQ ID NO: 5913439 - DNA, 25 bp, Homo sapien
cccaagagatgccaggagataggag

SEQ ID NO: 5913440 - DNA, 25 bp, Homo sapien
tagacacagattgttgctagcctga

SEQ ID NO: 5913441 - DNA, 25 bp, Homo sapien
cttttctattggtcttgcttatttt

SEQ ID NO: 5913442 - DNA, 25 bp, Homo sapien
ctggctgaatattcctttgttcaaa

SEQ ID NO: 5913443 - DNA, 25 bp, Homo sapien
acaacactggcagagagaggctgag

SEQ ID NO: 5913444 - DNA, 25 bp, Homo sapien
tctgaaatggtactgaagtctcctt

SEQ ID NO: 5913445 - DNA, 25 bp, Homo sapien
cccaggctgtttagctgccaggaca

SEQ ID NO: 5913446 - DNA, 25 bp, Homo sapien
tattggtcttgcttattttataaaa

SEQ ID NO: 5913447 - DNA, 25 bp, Homo sapien
caggctgtttagctgccaggacaac

SEQ ID NO: 5913448 - DNA, 25 bp, Homo sapien
gcctttctggtctccgttctcccat

SEQ ID NO: 5913449 - DNA, 25 bp, Homo sapien
gtttttgccccaggctgtttagctg

SEQ ID NO: 5913450 - DNA, 25 bp, Homo sapien
agtctccttttctattggtcttgct

SEQ ID NO: 5913451 - DNA, 25 bp, Homo sapien
ctgggagagcacatgcaagtacctc

SEQ ID NO: 5913452 - DNA, 25 bp, Homo sapien
gcctgatgcctgtgacagtgcccca

SEQ ID NO: 5913453 - DNA, 25 bp, Homo sapien
gatgtattttgattactgaaaattt

SEQ ID NO: 5913454 - DNA, 25 bp, Homo sapien
ctttaacaagccacaagaataaaag

SEQ ID NO: 5913455 - DNA, 25 bp, Homo sapien
tttctattggtcttgcttattttat

SEQ ID NO: 5913456 - DNA, 25 bp, Homo sapien
tgcctgtgacagtgccccaggaagg

SEQ ID NO: 5913457 - DNA, 25 bp, Homo sapien
ccgggcagaagctttttgttttggc

SEQ ID NO: 5913458 - DNA, 25 bp, Homo sapien
gtttaattggaaaataccagtagta

SEQ ID NO: 5913459 - DNA, 25 bp, Homo sapien
caagagatgccaggagataggagaa

SEQ ID NO: 5913460 - DNA, 25 bp, Homo sapien
ttttcttaaggaggctggctgaata

SEQ ID NO: 5913461 - DNA, 25 bp, Homo sapien
ttaattggaaaataccagtagtaaa

SEQ ID NO: 5913462 - DNA, 25 bp, Homo sapien
gattgttgctagcctgacctcatta

SEQ ID NO: 5913463 - DNA, 25 bp, Homo sapien
gccacccgggcagaagctttttgtt

SEQ ID NO: 5913464 - DNA, 25 bp, Homo sapien
aacagcctgatgcctgtgacagtgc

SEQ ID NO: 5913465 - DNA, 25 bp, Homo sapien
cagcctgatgcctgtgacagtgccc

SEQ ID NO: 5913466 - DNA, 25 bp, Homo sapien
agtgccccaggaaggttttcaggca

SEQ ID NO: 5913467 - DNA, 25 bp, Homo sapien
ctgatgcctgtgacagtgccccagg

SEQ ID NO: 5913468 - DNA, 25 bp, Homo sapien
aatgtgtttggaatcagcattttat

SEQ ID NO: 5913469 - DNA, 25 bp, Homo sapien
aggcctttctggtctccgttctccc

SEQ ID NO: 5913470 - DNA, 25 bp, Homo sapien
tttataatgagttcaacttaaggta

SEQ ID NO: 5913471 - DNA, 25 bp, Homo sapien
tgtgacagtgccccaggaaggtttt

SEQ ID NO: 5913472 - DNA, 25 bp, Homo sapien
atgactccttccttccttccttcct

SEQ ID NO: 5913473 - DNA, 25 bp, Homo sapien
ttgttgctagcctgacctcattatg

SEQ ID NO: 5913474 - DNA, 25 bp, Homo sapien
gaggctgaggcgctgggctgcagta

SEQ ID NO: 5913475 - DNA, 25 bp, Homo sapien
ttcttaaggaggctggctgaatatt

SEQ ID NO: 5913476 - DNA, 25 bp, Homo sapien
cacaaatcgtcctttgttatctgac

SEQ ID NO: 5913477 - DNA, 25 bp, Homo sapien
aggtgaaattgcttgctgggaagag

SEQ ID NO: 5913478 - DNA, 25 bp, Homo sapien
ctgccaggacaacactggcagagag

SEQ ID NO: 5913479 - DNA, 25 bp, Homo sapien
gagagcacatgcaagtacctctgtt

SEQ ID NO: 5913480 - DNA, 25 bp, Homo sapien
tattgccatacagtgtttcaaaacg

SEQ ID NO: 5913481 - DNA, 25 bp, Homo sapien
gtttagctgccaggacaacactggc

SEQ ID NO: 5913482 - DNA, 25 bp, Homo sapien
acctgtctgtcttaagtctgaaatg

SEQ ID NO: 5913483 - DNA, 25 bp, Homo sapien
gttggaagctggtcacagggctgct

SEQ ID NO: 5913484 - DNA, 25 bp, Homo sapien
aggtagaaggcttgggctgctagtg

SEQ ID NO: 5913485 - DNA, 25 bp, Homo sapien
taatgagttcaacttaaggtagaag

SEQ ID NO: 5913486 - DNA, 25 bp, Homo sapien
gaatattcctttgttcaaaagaagt

SEQ ID NO: 5913487 - DNA, 25 bp, Homo sapien
gacccaccgtgttgcctctgttgat

SEQ ID NO: 5913488 - DNA, 25 bp, Homo sapien
gggctctgacccaggaaactctcct

SEQ ID NO: 5913489 - DNA, 25 bp, Homo sapien
tcctgacaaagccacccgggcagaa

SEQ ID NO: 5913490 - DNA, 25 bp, Homo sapien
aggttttcaggcagtgccttgctcc

SEQ ID NO: 5913491 - DNA, 25 bp, Homo sapien
ggattagggtgatcttcaaggcctt

SEQ ID NO: 5913492 - DNA, 25 bp, Homo sapien
cctgaagatggatgtagacacagat

SEQ ID NO: 5913493 - DNA, 25 bp, Homo sapien
cgctgggctgcagtagcagcaggca

SEQ ID NO: 5913494 - DNA, 25 bp, Homo sapien
cagacacaaatcgtcctttgttatc

SEQ ID NO: 5913495 - DNA, 25 bp, Homo sapien
aacaagccacaagaataaaaggaag

SEQ ID NO: 5913496 - DNA, 25 bp, Homo sapien
tggccaaagttgatgactccttcct

SEQ ID NO: 5913497 - DNA, 25 bp, Homo sapien
atggtactgaagtctccttttctat

SEQ ID NO: 5913498 - DNA, 25 bp, Homo sapien
atataaactgtaaatatattgccat

SEQ ID NO: 5913499 - DNA, 25 bp, Homo sapien
gttttcaggcagtgccttgctccct

SEQ ID NO: 5913500 - DNA, 25 bp, Homo sapien
tgccccaggaaggttttcaggcagt

SEQ ID NO: 5913501 - DNA, 25 bp, Homo sapien
tgatgactccttccttccttccttc

SEQ ID NO: 5913502 - DNA, 25 bp, Homo sapien
gatcttcaaggcctttctggtctcc

SEQ ID NO: 5913503 - DNA, 25 bp, Homo sapien
taagtctgaaatggtactgaagtct

SEQ ID NO: 5913504 - DNA, 25 bp, Homo sapien
ctgtttttgccccaggctgtttagc

SEQ ID NO: 5913505 - DNA, 25 bp, Homo sapien
ttatggggattagggtgatcttcaa

SEQ ID NO: 5913506 - DNA, 25 bp, Homo sapien
tgtattttgattactgaaaatttct

SEQ ID NO: 5913507 - DNA, 25 bp, Homo sapien
cactggcagagagaggctgaggcgc

SEQ ID NO: 5913508 - DNA, 25 bp, Homo sapien
aagaataaaaggaagcctcctgaag

SEQ ID NO: 5913509 - DNA, 25 bp, Homo sapien
gggagagcacatgcaagtacctctg

SEQ ID NO: 5913510 - DNA, 25 bp, Homo sapien
ccagtactgtcatttccatcctgga

SEQ ID NO: 5913511 - DNA, 25 bp, Homo sapien
tggaatcagcattttataaaaaacc

SEQ ID NO: 5913512 - DNA, 25 bp, Homo sapien
ttttgctagagatgtattttgatta

SEQ ID NO: 5913513 - DNA, 25 bp, Homo sapien
ggagataggagaacctgtctgtctt

SEQ ID NO: 5913514 - DNA, 25 bp, Homo sapien
gatgtagacacagattgttgctagc

SEQ ID NO: 5913515 - DNA, 25 bp, Homo sapien
tatttttttataatgagttcaactt

SEQ ID NO: 5913516 - DNA, 25 bp, Homo sapien
cttaagtctgaaatggtactgaagt

SEQ ID NO: 5913517 - DNA, 25 bp, Homo sapien
aatcgtcctttgttatctgacacct

SEQ ID NO: 5913518 - DNA, 25 bp, Homo sapien
ataaactgtaaatatattgccatac

SEQ ID NO: 5913519 - DNA, 25 bp, Homo sapien
ctctgttggaagctggtcacagggc

SEQ ID NO: 5913520 - DNA, 25 bp, Homo sapien
tccctggaccctgacccaccgtgtt

SEQ ID NO: 5913521 - DNA, 25 bp, Homo sapien
ttccttccttccttcctctttaaca

SEQ ID NO: 5913522 - DNA, 25 bp, Homo sapien
ggacaacactggcagagagaggctg

SEQ ID NO: 5913523 - DNA, 25 bp, Homo sapien
taaattttgctagagatgtattttg

SEQ ID NO: 5913524 - DNA, 25 bp, Homo sapien
agcctgacctcattatggggattag

SEQ ID NO: 5913525 - DNA, 25 bp, Homo sapien
ggtgacttcagacacaaatcgtcct

SEQ ID NO: 5913526 - DNA, 25 bp, Homo sapien
cagagctcctgacaaagccacccgg

SEQ ID NO: 5913527 - DNA, 25 bp, Homo sapien
ccccaggaaggttttcaggcagtgc

SEQ ID NO: 5913528 - DNA, 25 bp, Homo sapien
aatcagaaaggtgaaattgcttgct

SEQ ID NO: 5913529 - DNA, 25 bp, Homo sapien
cccatgcagggcaatttggactgtt

SEQ ID NO: 5913530 - DNA, 25 bp, Homo sapien
ttcccaagagatgccaggagatagg

SEQ ID NO: 5913531 - DNA, 25 bp, Homo sapien
agctttttgttttggccaaagttga

SEQ ID NO: 5913532 - DNA, 25 bp, Homo sapien
tttggaatcagcattttataaaaaa

SEQ ID NO: 5913533 - DNA, 25 bp, Homo sapien
agtgccttgctccctggaccctgac

SEQ ID NO: 5913534 - DNA, 25 bp, Homo sapien
acagggctgctgtgagcccagagct

SEQ ID NO: 5913535 - DNA, 25 bp, Homo sapien
tttttataatgagttcaacttaagg

SEQ ID NO: 5913536 - DNA, 25 bp, Homo sapien
ctcctgaagatggatgtagacacag

SEQ ID NO: 5913537 - DNA, 25 bp, Homo sapien
gttgatgactccttccttccttcct

SEQ ID NO: 5913538 - DNA, 25 bp, Homo sapien
tgaaatggtactgaagtctcctttt

SEQ ID NO: 5913539 - DNA, 25 bp, Homo sapien
aactctccttcccaagagatgccag

SEQ ID NO: 5913540 - DNA, 25 bp, Homo sapien
ataaaaggaagcctcctgaagatgg

SEQ ID NO: 5913541 - DNA, 25 bp, Homo sapien
cctgtcggctgggagagcacatgca

SEQ ID NO: 5913542 - DNA, 25 bp, Homo sapien
aggaaggttttcaggcagtgccttg

SEQ ID NO: 5913543 - DNA, 25 bp, Homo sapien
agaaggcttgggctgctagtgttta

SEQ ID NO: 5913544 - DNA, 25 bp, Homo sapien
agaatgtgtttggaatcagcatttt

SEQ ID NO: 5913545 - DNA, 25 bp, Homo sapien
ctgtctgtcttaagtctgaaatggt

SEQ ID NO: 5913546 - DNA, 25 bp, Homo sapien
tatattgccatacagtgtttcaaaa

SEQ ID NO: 5913547 - DNA, 25 bp, Homo sapien
agcagcaggcaacagcctgatgcct

SEQ ID NO: 5913548 - DNA, 25 bp, Homo sapien
ttaacaagccacaagaataaaagga

SEQ ID NO: 5913549 - DNA, 25 bp, Homo sapien
catttccatcctggagaatgtgttt

SEQ ID NO: 5913550 - DNA, 25 bp, Homo sapien
gaggctggctgaatattcctttgtt

SEQ ID NO: 5913551 - DNA, 25 bp, Homo sapien
catacagtgtttcaaaacgtatttt

SEQ ID NO: 5913552 - DNA, 25 bp, Homo sapien
gacacagattgttgctagcctgacc

SEQ ID NO: 5913553 - DNA, 25 bp, Homo sapien
tgacctcattatggggattagggtg

SEQ ID NO: 5913554 - DNA, 25 bp, Homo sapien
ataggagaacctgtctgtcttaagt

SEQ ID NO: 5913555 - DNA, 25 bp, Homo sapien
ggcttgggctgctagtgtttaattg

SEQ ID NO: 5913556 - DNA, 25 bp, Homo sapien
cccaccgtgttgcctctgttgattg

SEQ ID NO: 5913557 - DNA, 25 bp, Homo sapien
tctaaattttgctagagatgtattt

SEQ ID NO: 5913558 - DNA, 25 bp, Homo sapien
tgacccaggaaactctccttcccaa

SEQ ID NO: 5913559 - DNA, 25 bp, Homo sapien
ttagctgccaggacaacactggcag

SEQ ID NO: 5913560 - DNA, 25 bp, Homo sapien
acttcagacacaaatcgtcctttgt

SEQ ID NO: 5913561 - DNA, 25 bp, Homo sapien
atgagttcaacttaaggtagaaggc

SEQ ID NO: 5913562 - DNA, 25 bp, Homo sapien
gggcagaagctttttgttttggcca

SEQ ID NO: 5913563 - DNA, 25 bp, Homo sapien
tagggtgatcttcaaggcctttctg

SEQ ID NO: 5913564 - DNA, 25 bp, Homo sapien
gggcaatttggactgtttttgcccc

SEQ ID NO: 5913565 - DNA, 25 bp, Homo sapien
taacattctaaattttgctagagat

SEQ ID NO: 5913566 - DNA, 25 bp, Homo sapien
gctcctgacaaagccacccgggcag

SEQ ID NO: 5913567 - DNA, 25 bp, Homo sapien
acctctgttggaagctggtcacagg

SEQ ID NO: 5913568 - DNA, 25 bp, Homo sapien
cattatggggattagggtgatcttc

SEQ ID NO: 5913569 - DNA, 25 bp, Homo sapien
tgtttggaatcagcattttataaaa

SEQ ID NO: 5913570 - DNA, 25 bp, Homo sapien
gcaacagcctgatgcctgtgacagt

SEQ ID NO: 5913571 - DNA, 25 bp, Homo sapien
gacaaagccacccgggcagaagctt

SEQ ID NO: 5913572 - DNA, 25 bp, Homo sapien
ccttgctccctggaccctgacccac

SEQ ID NO: 5913573 - DNA, 25 bp, Homo sapien
tgcagtagcagcaggcaacagcctg

SEQ ID NO: 5913574 - DNA, 25 bp, Homo sapien
taaatatattgccatacagtgtttc

SEQ ID NO: 5913575 - DNA, 25 bp, Homo sapien
cttgggctgctagtgtttaattgga

SEQ ID NO: 5913576 - DNA, 25 bp, Homo sapien
ggagaatgtgtttggaatcagcatt

SEQ ID NO: 5913577 - DNA, 25 bp, Homo sapien
tgttatctgacacctgtcggctggg

SEQ ID NO: 5913578 - DNA, 25 bp, Homo sapien
ggctgctgtgagcccagagctcctg

SEQ ID NO: 5913579 - DNA, 25 bp, Homo sapien
ttgattggccagtactgtcatttcc

SEQ ID NO: 5913580 - DNA, 25 bp, Homo sapien
aggaaactctccttcccaagagatg

SEQ ID NO: 5913581 - DNA, 25 bp, Homo sapien
gtcctttgttatctgacacctgtcg

SEQ ID NO: 5913582 - DNA, 25 bp, Homo sapien
ctgctgtgagcccagagctcctgac

SEQ ID NO: 5913583 - DNA, 25 bp, Homo sapien
cagtagcagcaggcaacagcctgat

SEQ ID NO: 5913584 - DNA, 25 bp, Homo sapien
tcttcaaggcctttctggtctccgt

SEQ ID NO: 5913585 - DNA, 25 bp, Homo sapien
ctgaatattcctttgttcaaaagaa

SEQ ID NO: 5913586 - DNA, 25 bp, Homo sapien
cccaaatcagaaaggtgaaattgct

SEQ ID NO: 5913587 - DNA, 25 bp, Homo sapien
tgggaagagggctctgacccaggaa

SEQ ID NO: 5913588 - DNA, 25 bp, Homo sapien
gagaacctgtctgtcttaagtctga

SEQ ID NO: 5913589 - DNA, 25 bp, Homo sapien
ctcattatggggattagggtgatct

SEQ ID NO: 5913590 - DNA, 25 bp, Homo sapien
gtagcagcaggcaacagcctgatgc

SEQ ID NO: 5913591 - DNA, 25 bp, Homo sapien
ctctccttcccaagagatgccagga

SEQ ID NO: 5913592 - DNA, 25 bp, Homo sapien
gtctgtcttaagtctgaaatggtac

SEQ ID NO: 5913593 - DNA, 25 bp, Homo sapien
aagcctcctgaagatggatgtagac

SEQ ID NO: 5913594 - DNA, 25 bp, Homo sapien
aaggaagcctcctgaagatggatgt

SEQ ID NO: 5913595 - DNA, 25 bp, Homo sapien
tggaaaataccagtagtaaagtctt

SEQ ID NO: 5913596 - DNA, 25 bp, Homo sapien
atgccaggagataggagaacctgtc

SEQ ID NO: 5913597 - DNA, 25 bp, Homo sapien
gcacatgcaagtacctctgttggaa

SEQ ID NO: 5913598 - DNA, 25 bp, Homo sapien
agctggtcacagggctgctgtgagc

SEQ ID NO: 5913599 - DNA, 25 bp, Homo sapien
gaaaatttctatataaactgtaaat

SEQ ID NO: 5913600 - DNA, 25 bp, Homo sapien
aatttggactgtttttgccccaggc

SEQ ID NO: 5913601 - DNA, 25 bp, Homo sapien
gctgcagtagcagcaggcaacagcc

SEQ ID NO: 5913602 - DNA, 25 bp, Homo sapien
ttgctgggaagagggctctgaccca

SEQ ID NO: 5913603 - DNA, 25 bp, Homo sapien
ggcgctgggctgcagtagcagcagg

SEQ ID NO: 5913604 - DNA, 25 bp, Homo sapien
tactgaaaatttctatataaactgt

SEQ ID NO: 5913605 - DNA, 25 bp, Homo sapien
cttccttccttcctctttaacaagc

SEQ ID NO: 5913606 - DNA, 25 bp, Homo sapien
gaggcgctgggctgcagtagcagca

SEQ ID NO: 5913607 - DNA, 25 bp, Homo sapien
aatttaacattctaaattttgctag

SEQ ID NO: 5913608 - DNA, 25 bp, Homo sapien
gcaagtacctctgttggaagctggt

SEQ ID NO: 5913609 - DNA, 25 bp, Homo sapien
cttaaggaggctggctgaatattcc

SEQ ID NO: 5913610 - DNA, 25 bp, Homo sapien
tctattggtcttgcttattttataa

SEQ ID NO: 5913611 - DNA, 25 bp, Homo sapien
gagatgtattttgattactgaaaat

SEQ ID NO: 5913612 - DNA, 25 bp, Homo sapien
aagatggatgtagacacagattgtt

SEQ ID NO: 5913613 - DNA, 25 bp, Homo sapien
tgcctctgttgattggccagtactg

SEQ ID NO: 5913614 - DNA, 25 bp, Homo sapien
tgagcccagagctcctgacaaagcc

SEQ ID NO: 5913615 - DNA, 25 bp, Homo sapien
gacacaaatcgtcctttgttatctg

SEQ ID NO: 5913616 - DNA, 25 bp, Homo sapien
tctgttgattggccagtactgtcat

SEQ ID NO: 5913617 - DNA, 25 bp, Homo sapien
gtagaaggcttgggctgctagtgtt

SEQ ID NO: 5913618 - DNA, 25 bp, Homo sapien
cctgtgacagtgccccaggaaggtt

SEQ ID NO: 5913619 - DNA, 25 bp, Homo sapien
ttgccccaggctgtttagctgccag

SEQ ID NO: 5913620 - DNA, 25 bp, Homo sapien
agttttcttaaggaggctggctgaa

SEQ ID NO: 5913621 - DNA, 25 bp, Homo sapien
aaactgtaaatatattgccatacag

SEQ ID NO: 5913622 - DNA, 25 bp, Homo sapien
gcaggcaacagcctgatgcctgtga

SEQ ID NO: 5913623 - DNA, 25 bp, Homo sapien
ggcagagagaggctgaggcgctggg

SEQ ID NO: 5913624 - DNA, 25 bp, Homo sapien
aattgcttgctgggaagagggctct

SEQ ID NO: 5913625 - DNA, 25 bp, Homo sapien
aggcagtgccttgctccctggaccc

SEQ ID NO: 5913626 - DNA, 25 bp, Homo sapien
ctgggctgcagtagcagcaggcaac

SEQ ID NO: 5913627 - DNA, 25 bp, Homo sapien
agagatgccaggagataggagaacc

SEQ ID NO: 5913628 - DNA, 25 bp, Homo sapien
tataatgagttcaacttaaggtaga

SEQ ID NO: 5913629 - DNA, 25 bp, Homo sapien
ctgctagtgtttaattggaaaatac

SEQ ID NO: 5913630 - DNA, 25 bp, Homo sapien
ggctgaatattcctttgttcaaaag

SEQ ID NO: 5913631 - DNA, 25 bp, Homo sapien
attagggtgatcttcaaggcctttc

SEQ ID NO: 5913632 - DNA, 25 bp, Homo sapien
caaggcctttctggtctccgttctc

SEQ ID NO: 5913633 - DNA, 25 bp, Homo sapien
gaccctgacccaccgtgttgcctct

SEQ ID NO: 5913634 - DNA, 25 bp, Homo sapien
gggtgatcttcaaggcctttctggt

SEQ ID NO: 5913635 - DNA, 25 bp, Homo sapien
agggctgctgtgagcccagagctcc

SEQ ID NO: 5913636 - DNA, 25 bp, Homo sapien
aaaggtgaaattgcttgctgggaag

SEQ ID NO: 5913637 - DNA, 25 bp, Homo sapien
agctgccaggacaacactggcagag

SEQ ID NO: 5913638 - DNA, 25 bp, Homo sapien
cacagattgttgctagcctgacctc

SEQ ID NO: 5913639 - DNA, 25 bp, Homo sapien
tgtgtttggaatcagcattttataa

SEQ ID NO: 5913640 - DNA, 25 bp, Homo sapien
tccgttctcccatgcagggcaattt

SEQ ID NO: 5913641 - DNA, 25 bp, Homo sapien
tagtgtttaattggaaaataccagt

SEQ ID NO: 5913642 - DNA, 25 bp, Homo sapien
ggctgggagagcacatgcaagtacc

SEQ ID NO: 5913643 - DNA, 25 bp, Homo sapien
acctcattatggggattagggtgat

SEQ ID NO: 5913644 - DNA, 25 bp, Homo sapien
ctccttcccaagagatgccaggaga

SEQ ID NO: 5913645 - DNA, 25 bp, Homo sapien
cccagagctcctgacaaagccaccc

SEQ ID NO: 5913646 - DNA, 25 bp, Homo sapien
tactgtcatttccatcctggagaat

SEQ ID NO: 5913647 - DNA, 25 bp, Homo sapien
actgtaaatatattgccatacagtg

SEQ ID NO: 5913648 - DNA, 25 bp, Homo sapien
ttgctccctggaccctgacccaccg

SEQ ID NO: 5913649 - DNA, 25 bp, Homo sapien
agaaaggtgaaattgcttgctggga

SEQ ID NO: 5913650 - DNA, 25 bp, Homo sapien
tcacagggctgctgtgagcccagag

SEQ ID NO: 5913651 - DNA, 25 bp, Homo sapien
ctgacaaagccacccgggcagaagc

SEQ ID NO: 5913652 - DNA, 25 bp, Homo sapien
ggaagagggctctgacccaggaaac

SEQ ID NO: 5913653 - DNA, 25 bp, Homo sapien
cgtatttttttataatgagttcaac

SEQ ID NO: 5913654 - DNA, 25 bp, Homo sapien
aggaggctggctgaatattcctttg

SEQ ID NO: 5913655 - DNA, 25 bp, Homo sapien
taaaaaacccaaatcagaaaggtga

SEQ ID NO: 5913656 - DNA, 25 bp, Homo sapien
tgacttcagacacaaatcgtccttt

SEQ ID NO: 5913657 - DNA, 25 bp, Homo sapien
tggatgtagacacagattgttgcta

SEQ ID NO: 5913658 - DNA, 25 bp, Homo sapien
gttgcctctgttgattggccagtac

SEQ ID NO: 5913659 - DNA, 25 bp, Homo sapien
aagagggctctgacccaggaaactc

SEQ ID NO: 5913660 - DNA, 25 bp, Homo sapien
ttctggtctccgttctcccatgcag

SEQ ID NO: 5913661 - DNA, 25 bp, Homo sapien
gcttgctgggaagagggctctgacc

SEQ ID NO: 5913662 - DNA, 25 bp, Homo sapien
agatgccaggagataggagaacctg

SEQ ID NO: 5913663 - DNA, 25 bp, Homo sapien
cagcattttataaaaaacccaaatc

SEQ ID NO: 5913664 - DNA, 25 bp, Homo sapien
gctagagatgtattttgattactga

SEQ ID NO: 5913665 - DNA, 25 bp, Homo sapien
ctgacccaccgtgttgcctctgttg

SEQ ID NO: 5913666 - DNA, 25 bp, Homo sapien
ggtactgaagtctccttttctattg

SEQ ID NO: 5913667 - DNA, 25 bp, Homo sapien
ggctgtttagctgccaggacaacac

SEQ ID NO: 5913668 - DNA, 25 bp, Homo sapien
ctgtttagctgccaggacaacactg

SEQ ID NO: 5913669 - DNA, 25 bp, Homo sapien
aacccaaatcagaaaggtgaaattg

SEQ ID NO: 5913670 - DNA, 25 bp, Homo sapien
ctgaggcgctgggctgcagtagcag

SEQ ID NO: 5913671 - DNA, 25 bp, Homo sapien
taaggaggctggctgaatattcctt

SEQ ID NO: 5913672 - DNA, 25 bp, Homo sapien
ctgaaaatttctatataaactgtaa

SEQ ID NO: 5913673 - DNA, 25 bp, Homo sapien
caccgtgttgcctctgttgattggc

SEQ ID NO: 5913674 - DNA, 25 bp, Homo sapien
ccgtgttgcctctgttgattggcca

SEQ ID NO: 5913675 - DNA, 25 bp, Homo sapien
gcagtgccttgctccctggaccctg

SEQ ID NO: 5913676 - DNA, 25 bp, Homo sapien
tttccatcctggagaatgtgtttgg

SEQ ID NO: 5913677 - DNA, 25 bp, Homo sapien
gaacctgtctgtcttaagtctgaaa

SEQ ID NO: 5913678 - DNA, 25 bp, Homo sapien
taaggtagaaggcttgggctgctag

SEQ ID NO: 5913679 - DNA, 25 bp, Homo sapien
ctggagaatgtgtttggaatcagca

SEQ ID NO: 5913680 - DNA, 25 bp, Homo sapien
gtacctctgttggaagctggtcaca

SEQ ID NO: 5913681 - DNA, 25 bp, Homo sapien
gcaatttggactgtttttgccccag

SEQ ID NO: 5913682 - DNA, 25 bp, Homo sapien
aacttaaggtagaaggcttgggctg

SEQ ID NO: 5913683 - DNA, 25 bp, Homo sapien
tgttgattggccagtactgtcattt

SEQ ID NO: 5913684 - DNA, 25 bp, Homo sapien
ttcaaaacgtatttttttataatga

SEQ ID NO: 5913685 - DNA, 25 bp, Homo sapien
agtctgaaatggtactgaagtctcc

SEQ ID NO: 5913686 - DNA, 25 bp, Homo sapien
acatgcaagtacctctgttggaagc

SEQ ID NO: 5913687 - DNA, 25 bp, Homo sapien
acccaggaaactctccttcccaaga

SEQ ID NO: 5913688 - DNA, 25 bp, Homo sapien
ggccagtactgtcatttccatcctg

SEQ ID NO: 5913689 - DNA, 25 bp, Homo sapien
tgcagggcaatttggactgtttttg

SEQ ID NO: 5913690 - DNA, 25 bp, Homo sapien
ctggtcacagggctgctgtgagccc

SEQ ID NO: 5913691 - DNA, 25 bp, Homo sapien
tctccgttctcccatgcagggcaat

SEQ ID NO: 5913692 - DNA, 25 bp, Homo sapien
tccttttctattggtcttgcttatt

SEQ ID NO: 5913693 - DNA, 25 bp, Homo sapien
attggaaaataccagtagtaaagtc

SEQ ID NO: 5913694 - DNA, 25 bp, Homo sapien
tcggctgggagagcacatgcaagta

SEQ ID NO: 5913695 - DNA, 25 bp, Homo sapien
ttcagacacaaatcgtcctttgtta

SEQ ID NO: 5913696 - DNA, 25 bp, Homo sapien
tggaccctgacccaccgtgttgcct

SEQ ID NO: 5913697 - DNA, 25 bp, Homo sapien
aatatattgccatacagtgtttcaa

SEQ ID NO: 5913698 - DNA, 25 bp, Homo sapien
gaaggttttcaggcagtgccttgct

SEQ ID NO: 5913699 - DNA, 25 bp, Homo sapien
gctctgacccaggaaactctccttc

SEQ ID NO: 5913700 - DNA, 25 bp, Homo sapien
ttgcttgctgggaagagggctctga

SEQ ID NO: 5913701 - DNA, 25 bp, Homo sapien
tactgaagtctccttttctattggt

SEQ ID NO: 5913702 - DNA, 25 bp, Homo sapien
aaaaggaagcctcctgaagatggat

SEQ ID NO: 5913703 - DNA, 25 bp, Homo sapien
acaagaataaaaggaagcctcctga

SEQ ID NO: 5913704 - DNA, 25 bp, Homo sapien
tttggactgtttttgccccaggctg

SEQ ID NO: 5913705 - DNA, 25 bp, Homo sapien
gactgtttttgccccaggctgttta

SEQ ID NO: 5913706 - DNA, 25 bp, Homo sapien
tcaacttaaggtagaaggcttgggc

SEQ ID NO: 5913707 - DNA, 25 bp, Homo sapien
gagaggctgaggcgctgggctgcag

SEQ ID NO: 5913708 - DNA, 25 bp, Homo sapien
aacgtatttttttataatgagttca

SEQ ID NO: 5913709 - DNA, 25 bp, Homo sapien
gtcttaagtctgaaatggtactgaa

SEQ ID NO: 5913710 - DNA, 25 bp, Homo sapien
agggtgacttcagacacaaatcgtc

SEQ ID NO: 5913711 - DNA, 25 bp, Homo sapien
tttcaggcagtgccttgctccctgg

SEQ ID NO: 5913712 - DNA, 25 bp, Homo sapien
ccacaagaataaaaggaagcctcct

SEQ ID NO: 5913713 - DNA, 25 bp, Homo sapien
agtactgtcatttccatcctggaga

SEQ ID NO: 5913714 - DNA, 25 bp, Homo sapien
gtgtttaattggaaaataccagtag

SEQ ID NO: 5913715 - DNA, 25 bp, Homo sapien
gagggctctgacccaggaaactctc

SEQ ID NO: 5913716 - DNA, 25 bp, Homo sapien
ttttgttttggccaaagttgatgac

SEQ ID NO: 5913717 - DNA, 25 bp, Homo sapien
gcattttataaaaaacccaaatcag

SEQ ID NO: 5913718 - DNA, 25 bp, Homo sapien
tcctctttaacaagccacaagaata

SEQ ID NO: 5913719 - DNA, 25 bp, Homo sapien
tttgttatctgacacctgtcggctg

SEQ ID NO: 5913720 - DNA, 25 bp, Homo sapien
tcagaaaggtgaaattgcttgctgg

SEQ ID NO: 5913721 - DNA, 25 bp, Homo sapien
gttgctagcctgacctcattatggg

SEQ ID NO: 5913722 - DNA, 25 bp, Homo sapien
aggagaacctgtctgtcttaagtct

SEQ ID NO: 5913723 - DNA, 25 bp, Homo sapien
catcctggagaatgtgtttggaatc

SEQ ID NO: 5913724 - DNA, 25 bp, Homo sapien
cctctgttgattggccagtactgtc

SEQ ID NO: 5913725 - DNA, 25 bp, Homo sapien
aggcaacagcctgatgcctgtgaca

SEQ ID NO: 5913726 - DNA, 25 bp, Homo sapien
tcgtcctttgttatctgacacctgt

SEQ ID NO: 5913727 - DNA, 25 bp, Homo sapien
cagcaggcaacagcctgatgcctgt

SEQ ID NO: 5913728 - DNA, 25 bp, Homo sapien
aaatggtactgaagtctccttttct

SEQ ID NO: 5913729 - DNA, 25 bp, Homo sapien
caggagataggagaacctgtctgtc

SEQ ID NO: 5913730 - DNA, 25 bp, Homo sapien
ctcccatgcagggcaatttggactg

SEQ ID NO: 5913731 - DNA, 25 bp, Homo sapien
atgcaagtacctctgttggaagctg

SEQ ID NO: 5913732 - DNA, 25 bp, Homo sapien
tcaggcagtgccttgctccctggac

SEQ ID NO: 5913733 - DNA, 25 bp, Homo sapien
ttggtcttgcttattttataaaaat

SEQ ID NO: 5913734 - DNA, 25 bp, Homo sapien
gccccaggctgtttagctgccagga

SEQ ID NO: 5913735 - DNA, 25 bp, Homo sapien
aattttgctagagatgtattttgat

SEQ ID NO: 5913736 - DNA, 25 bp, Homo sapien
gctgtgagcccagagctcctgacaa

SEQ ID NO: 5913737 - DNA, 25 bp, Homo sapien
tcctggagaatgtgtttggaatcag

SEQ ID NO: 5913738 - DNA, 25 bp, Homo sapien
tctccttttctattggtcttgctta

SEQ ID NO: 5913739 - DNA, 25 bp, Homo sapien
gatggatgtagacacagattgttgc

SEQ ID NO: 5913740 - DNA, 25 bp, Homo sapien
gccaggacaacactggcagagagag

SEQ ID NO: 5913741 - DNA, 25 bp, Homo sapien
gaataaaaggaagcctcctgaagat

SEQ ID NO: 5913742 - DNA, 25 bp, Homo sapien
ttcaaggcctttctggtctccgttc

SEQ ID NO: 5913743 - DNA, 25 bp, Homo sapien
caggacaacactggcagagagaggc

SEQ ID NO: 5913744 - DNA, 25 bp, Homo sapien
catgcagggcaatttggactgtttt

SEQ ID NO: 5913745 - DNA, 25 bp, Homo sapien
cttaaggtagaaggcttgggctgct

SEQ ID NO: 5913746 - DNA, 25 bp, Homo sapien
gccatacagtgtttcaaaacgtatt

SEQ ID NO: 5913747 - DNA, 25 bp, Homo sapien
tggactgtttttgccccaggctgtt

SEQ ID NO: 5913748 - DNA, 25 bp, Homo sapien
gccaaagttgatgactccttccttc

SEQ ID NO: 5913749 - DNA, 25 bp, Homo sapien
ctgttggaagctggtcacagggctg

SEQ ID NO: 5913750 - DNA, 25 bp, Homo sapien
gagttcaacttaaggtagaaggctt

SEQ ID NO: 5913751 - DNA, 25 bp, Homo sapien
ccaggaaggttttcaggcagtgcct

SEQ ID NO: 5913752 - DNA, 25 bp, Homo sapien
ttaaggagttttcttaaggaggctg

SEQ ID NO: 5913753 - DNA, 25 bp, Homo sapien
atcagcattttataaaaaacccaaa

SEQ ID NO: 5913754 - DNA, 25 bp, Homo sapien
gagctcctgacaaagccacccgggc

SEQ ID NO: 5913755 - DNA, 25 bp, Homo sapien
cagattgttgctagcctgacctcat

SEQ ID NO: 5913756 - DNA, 25 bp, Homo sapien
gaagtctccttttctattggtcttg

SEQ ID NO: 5913757 - DNA, 25 bp, Homo sapien
ggagttttcttaaggaggctggctg

SEQ ID NO: 5913758 - DNA, 25 bp, Homo sapien
tccatcctggagaatgtgtttggaa

SEQ ID NO: 5913759 - DNA, 25 bp, Homo sapien
agccacaagaataaaaggaagcctc

SEQ ID NO: 5913760 - DNA, 25 bp, Homo sapien
gactccttccttccttccttcctct

SEQ ID NO: 5913761 - DNA, 25 bp, Homo sapien
tgctagcctgacctcattatgggga

SEQ ID NO: 5913762 - DNA, 25 bp, Homo sapien
gcagaagctttttgttttggccaaa

SEQ ID NO: 5913763 - DNA, 25 bp, Homo sapien
gtgttgcctctgttgattggccagt

SEQ ID NO: 5913764 - DNA, 25 bp, Homo sapien
ctggcagagagaggctgaggcgctg

SEQ ID NO: 5913765 - DNA, 25 bp, Homo sapien
cctggaccctgacccaccgtgttgc

SEQ ID NO: 5913766 - DNA, 25 bp, Homo sapien
ttggccagtactgtcatttccatcc

SEQ ID NO: 5913767 - DNA, 25 bp, Homo sapien
ctggtctccgttctcccatgcaggg

SEQ ID NO: 5913768 - DNA, 25 bp, Homo sapien
ctagcctgacctcattatggggatt

SEQ ID NO: 5913769 - DNA, 25 bp, Homo sapien
ctttttgttttggccaaagttgatg

SEQ ID NO: 5913770 - DNA, 25 bp, Homo sapien
tttggccaaagttgatgactccttc

SEQ ID NO: 5913771 - DNA, 25 bp, Homo sapien
tgggctgctagtgtttaattggaaa

SEQ ID NO: 5913772 - DNA, 25 bp, Homo sapien
gctagtgtttaattggaaaatacca

SEQ ID NO: 5913773 - DNA, 25 bp, Homo sapien
gctgggaagagggctctgacccagg

SEQ ID NO: 5913774 - DNA, 25 bp, Homo sapien
tctgacccaggaaactctccttccc

SEQ ID NO: 5913775 - DNA, 25 bp, Homo sapien
taccagtagtaaagtcttttaagga

SEQ ID NO: 5913776 - DNA, 25 bp, Homo sapien
agcccagagctcctgacaaagccac

SEQ ID NO: 5913777 - DNA, 25 bp, Homo sapien
cacctgtcggctgggagagcacatg

SEQ ID NO: 5913778 - DNA, 25 bp, Homo sapien
agataggagaacctgtctgtcttaa

SEQ ID NO: 5913779 - DNA, 25 bp, Homo sapien
ttctcccatgcagggcaatttggac

SEQ ID NO: 5913780 - DNA, 25 bp, Homo sapien
tgccttgctccctggaccctgaccc

SEQ ID NO: 5913781 - DNA, 25 bp, Homo sapien
ggtctccgttctcccatgcagggca

SEQ ID NO: 5913782 - DNA, 25 bp, Homo sapien
gttttggccaaagttgatgactcct

SEQ ID NO: 5913783 - DNA, 25 bp, Homo sapien
tgtcggctgggagagcacatgcaag

SEQ ID NO: 5913784 - DNA, 25 bp, Homo sapien
cttcctctttaacaagccacaagaa

SEQ ID NO: 5913785 - DNA, 25 bp, Homo sapien
gggctgcagtagcagcaggcaacag

SEQ ID NO: 5913786 - DNA, 25 bp, Homo sapien
aatattcagccagcctccttaagaa

SEQ ID NO: 5913787 - DNA, 25 bp, Homo sapien
tggccaatcaacagaggcaacacgg

SEQ ID NO: 5913788 - DNA, 25 bp, Homo sapien
agcagcccaagccttctaccttaag

SEQ ID NO: 5913789 - DNA, 25 bp, Homo sapien
gtcaggagctctgggctcacagcag

SEQ ID NO: 5913790 - DNA, 25 bp, Homo sapien
tgaacaaaggaatattcagccagcc

SEQ ID NO: 5913791 - DNA, 25 bp, Homo sapien
ttgaaacactgtatggcaatatatt

SEQ ID NO: 5913792 - DNA, 25 bp, Homo sapien
tcaactttggccaaaacaaaaagct

SEQ ID NO: 5913793 - DNA, 25 bp, Homo sapien
tgctgattccaaacacattctccag

SEQ ID NO: 5913794 - DNA, 25 bp, Homo sapien
taatcaaaatacatctctagcaaaa

SEQ ID NO: 5913795 - DNA, 25 bp, Homo sapien
atgggagaacggagaccagaaaggc

SEQ ID NO: 5913796 - DNA, 25 bp, Homo sapien
gtcatcaactttggccaaaacaaaa

SEQ ID NO: 5913797 - DNA, 25 bp, Homo sapien
gcatgggagaacggagaccagaaag

SEQ ID NO: 5913798 - DNA, 25 bp, Homo sapien
aggtgtcagataacaaaggacgatt

SEQ ID NO: 5913799 - DNA, 25 bp, Homo sapien
tggccaaaacaaaaagcttctgccc

SEQ ID NO: 5913800 - DNA, 25 bp, Homo sapien
cgacaggtgtcagataacaaaggac

SEQ ID NO: 5913801 - DNA, 25 bp, Homo sapien
agaggcaacacggtgggtcagggtc

SEQ ID NO: 5913802 - DNA, 25 bp, Homo sapien
acttcttttgaacaaaggaatattc

SEQ ID NO: 5913803 - DNA, 25 bp, Homo sapien
ttttgaaacactgtatggcaatata

SEQ ID NO: 5913804 - DNA, 25 bp, Homo sapien
acatctctagcaaaatttagaatgt

SEQ ID NO: 5913805 - DNA, 25 bp, Homo sapien
ctactggtattttccaattaaacac

SEQ ID NO: 5913806 - DNA, 25 bp, Homo sapien
ggcatctcttgggaaggagagtttc

SEQ ID NO: 5913807 - DNA, 25 bp, Homo sapien
acttcagtaccatttcagacttaag

SEQ ID NO: 5913808 - DNA, 25 bp, Homo sapien
gtttatatagaaattttcagtaatc

SEQ ID NO: 5913809 - DNA, 25 bp, Homo sapien
cagcctggggcaaaaacagtccaaa

SEQ ID NO: 5913810 - DNA, 25 bp, Homo sapien
accagcttccaacagaggtacttgc

SEQ ID NO: 5913811 - DNA, 25 bp, Homo sapien
tcagtaatcaaaatacatctctagc

SEQ ID NO: 5913812 - DNA, 25 bp, Homo sapien
acagcagccctgtgaccagcttcca

SEQ ID NO: 5913813 - DNA, 25 bp, Homo sapien
aatccccataatgaggtcaggctag

SEQ ID NO: 5913814 - DNA, 25 bp, Homo sapien
cagtactggccaatcaacagaggca

SEQ ID NO: 5913815 - DNA, 25 bp, Homo sapien
atcaggctgttgcctgctgctactg

SEQ ID NO: 5913816 - DNA, 25 bp, Homo sapien
catctcttgggaaggagagtttcct

SEQ ID NO: 5913817 - DNA, 25 bp, Homo sapien
ctgtatggcaatatatttacagttt

SEQ ID NO: 5913818 - DNA, 25 bp, Homo sapien
aggaaggaaggaaggaaggagtcat

SEQ ID NO: 5913819 - DNA, 25 bp, Homo sapien
ttataaaatgctgattccaaacaca

SEQ ID NO: 5913820 - DNA, 25 bp, Homo sapien
agtaatcaaaatacatctctagcaa

SEQ ID NO: 5913821 - DNA, 25 bp, Homo sapien
gtcagggtccagggagcaaggcact

SEQ ID NO: 5913822 - DNA, 25 bp, Homo sapien
ggccttgaagatcaccctaatcccc

SEQ ID NO: 5913823 - DNA, 25 bp, Homo sapien
ctctgggctcacagcagccctgtga

SEQ ID NO: 5913824 - DNA, 25 bp, Homo sapien
caatctgtgtctacatccatcttca

SEQ ID NO: 5913825 - DNA, 25 bp, Homo sapien
ccttgaagatcaccctaatccccat

SEQ ID NO: 5913826 - DNA, 25 bp, Homo sapien
ttaagacagacaggttctcctatct

SEQ ID NO: 5913827 - DNA, 25 bp, Homo sapien
ggttttttataaaatgctgattcca

SEQ ID NO: 5913828 - DNA, 25 bp, Homo sapien
aggcaacacggtgggtcagggtcca

SEQ ID NO: 5913829 - DNA, 25 bp, Homo sapien
caccctaatccccataatgaggtca

SEQ ID NO: 5913830 - DNA, 25 bp, Homo sapien
atctctagcaaaatttagaatgtta

SEQ ID NO: 5913831 - DNA, 25 bp, Homo sapien
tactgcagcccagcgcctcagcctc

SEQ ID NO: 5913832 - DNA, 25 bp, Homo sapien
agacttaagacagacaggttctcct

SEQ ID NO: 5913833 - DNA, 25 bp, Homo sapien
cagcccaagccttctaccttaagtt

SEQ ID NO: 5913834 - DNA, 25 bp, Homo sapien
tgggttttttataaaatgctgattc

SEQ ID NO: 5913835 - DNA, 25 bp, Homo sapien
catgtgctctcccagccgacaggtg

SEQ ID NO: 5913836 - DNA, 25 bp, Homo sapien
agaggaaggaaggaaggaaggagtc

SEQ ID NO: 5913837 - DNA, 25 bp, Homo sapien
tcacagcagccctgtgaccagcttc

SEQ ID NO: 5913838 - DNA, 25 bp, Homo sapien
cagaggtacttgcatgtgctctccc

SEQ ID NO: 5913839 - DNA, 25 bp, Homo sapien
cttttattcttgtggcttgttaaag

SEQ ID NO: 5913840 - DNA, 25 bp, Homo sapien
aacactagcagcccaagccttctac

SEQ ID NO: 5913841 - DNA, 25 bp, Homo sapien
gaaggaaggaaggaaggagtcatca

SEQ ID NO: 5913842 - DNA, 25 bp, Homo sapien
gagagtttcctgggtcagagccctc

SEQ ID NO: 5913843 - DNA, 25 bp, Homo sapien
ggagacttcagtaccatttcagact

SEQ ID NO: 5913844 - DNA, 25 bp, Homo sapien
gaaacactgtatggcaatatattta

SEQ ID NO: 5913845 - DNA, 25 bp, Homo sapien
ggaaatgacagtactggccaatcaa

SEQ ID NO: 5913846 - DNA, 25 bp, Homo sapien
tgtgctctcccagccgacaggtgtc

SEQ ID NO: 5913847 - DNA, 25 bp, Homo sapien
ggatggaaatgacagtactggccaa

SEQ ID NO: 5913848 - DNA, 25 bp, Homo sapien
aacaaaaagcttctgcccgggtggc

SEQ ID NO: 5913849 - DNA, 25 bp, Homo sapien
cccagccgacaggtgtcagataaca

SEQ ID NO: 5913850 - DNA, 25 bp, Homo sapien
aacacggtgggtcagggtccaggga

SEQ ID NO: 5913851 - DNA, 25 bp, Homo sapien
agaaattttcagtaatcaaaataca

SEQ ID NO: 5913852 - DNA, 25 bp, Homo sapien
tctcctggcatctcttgggaaggag

SEQ ID NO: 5913853 - DNA, 25 bp, Homo sapien
tagcaacaatctgtgtctacatcca

SEQ ID NO: 5913854 - DNA, 25 bp, Homo sapien
ataaaatgctgattccaaacacatt

SEQ ID NO: 5913855 - DNA, 25 bp, Homo sapien
tttattcttgtggcttgttaaagag

SEQ ID NO: 5913856 - DNA, 25 bp, Homo sapien
ctgcccgggtggctttgtcaggagc

SEQ ID NO: 5913857 - DNA, 25 bp, Homo sapien
taagcaagaccaatagaaaaggaga

SEQ ID NO: 5913858 - DNA, 25 bp, Homo sapien
acaggtgtcagataacaaaggacga

SEQ ID NO: 5913859 - DNA, 25 bp, Homo sapien
tatctcctggcatctcttgggaagg

SEQ ID NO: 5913860 - DNA, 25 bp, Homo sapien
acaggcatcaggctgttgcctgctg

SEQ ID NO: 5913861 - DNA, 25 bp, Homo sapien
aaaatgctgattccaaacacattct

SEQ ID NO: 5913862 - DNA, 25 bp, Homo sapien
cctgtgaccagcttccaacagaggt

SEQ ID NO: 5913863 - DNA, 25 bp, Homo sapien
gcctctctctgccagtgttgtcctg

SEQ ID NO: 5913864 - DNA, 25 bp, Homo sapien
cataatgaggtcaggctagcaacaa

SEQ ID NO: 5913865 - DNA, 25 bp, Homo sapien
ctgctactgcagcccagcgcctcag

SEQ ID NO: 5913866 - DNA, 25 bp, Homo sapien
taaagaggaaggaaggaaggaagga

SEQ ID NO: 5913867 - DNA, 25 bp, Homo sapien
ggagcaaggcactgcctgaaaacct

SEQ ID NO: 5913868 - DNA, 25 bp, Homo sapien
tcacaggcatcaggctgttgcctgc

SEQ ID NO: 5913869 - DNA, 25 bp, Homo sapien
gaggtcaggctagcaacaatctgtg

SEQ ID NO: 5913870 - DNA, 25 bp, Homo sapien
tgtcctggcagctaaacagcctggg

SEQ ID NO: 5913871 - DNA, 25 bp, Homo sapien
tggcttgttaaagaggaaggaagga

SEQ ID NO: 5913872 - DNA, 25 bp, Homo sapien
ccttcctggggcactgtcacaggca

SEQ ID NO: 5913873 - DNA, 25 bp, Homo sapien
ggaatattcagccagcctccttaag

SEQ ID NO: 5913874 - DNA, 25 bp, Homo sapien
gaaggagtcatcaactttggccaaa

SEQ ID NO: 5913875 - DNA, 25 bp, Homo sapien
ttcttttgaacaaaggaatattcag

SEQ ID NO: 5913876 - DNA, 25 bp, Homo sapien
aggcatcaggctgttgcctgctgct

SEQ ID NO: 5913877 - DNA, 25 bp, Homo sapien
gccttctaccttaagttgaactcat

SEQ ID NO: 5913878 - DNA, 25 bp, Homo sapien
actgcctgaaaaccttcctggggca

SEQ ID NO: 5913879 - DNA, 25 bp, Homo sapien
tgaccagcttccaacagaggtactt

SEQ ID NO: 5913880 - DNA, 25 bp, Homo sapien
ccctaatccccataatgaggtcagg

SEQ ID NO: 5913881 - DNA, 25 bp, Homo sapien
atcaccctaatccccataatgaggt

SEQ ID NO: 5913882 - DNA, 25 bp, Homo sapien
acttaagacagacaggttctcctat

SEQ ID NO: 5913883 - DNA, 25 bp, Homo sapien
tctccaggatggaaatgacagtact

SEQ ID NO: 5913884 - DNA, 25 bp, Homo sapien
gcctcagcctctctctgccagtgtt

SEQ ID NO: 5913885 - DNA, 25 bp, Homo sapien
cagcctccttaagaaaactccttaa

SEQ ID NO: 5913886 - DNA, 25 bp, Homo sapien
tgctctcccagccgacaggtgtcag

SEQ ID NO: 5913887 - DNA, 25 bp, Homo sapien
aagcttctgcccgggtggctttgtc

SEQ ID NO: 5913888 - DNA, 25 bp, Homo sapien
aggagagtttcctgggtcagagccc

SEQ ID NO: 5913889 - DNA, 25 bp, Homo sapien
ttccaaacacattctccaggatgga

SEQ ID NO: 5913890 - DNA, 25 bp, Homo sapien
agcaagaccaatagaaaaggagact

SEQ ID NO: 5913891 - DNA, 25 bp, Homo sapien
ctctagcaaaatttagaatgttaaa

SEQ ID NO: 5913892 - DNA, 25 bp, Homo sapien
attctccaggatggaaatgacagta

SEQ ID NO: 5913893 - DNA, 25 bp, Homo sapien
cttcaggaggcttccttttattctt

SEQ ID NO: 5913894 - DNA, 25 bp, Homo sapien
cggtgggtcagggtccagggagcaa

SEQ ID NO: 5913895 - DNA, 25 bp, Homo sapien
tccttaaaagactttactactggta

SEQ ID NO: 5913896 - DNA, 25 bp, Homo sapien
cagtaccatttcagacttaagacag

SEQ ID NO: 5913897 - DNA, 25 bp, Homo sapien
agggagcaaggcactgcctgaaaac

SEQ ID NO: 5913898 - DNA, 25 bp, Homo sapien
caaggcactgcctgaaaaccttcct

SEQ ID NO: 5913899 - DNA, 25 bp, Homo sapien
tgaactcattataaaaaaatacgtt

SEQ ID NO: 5913900 - DNA, 25 bp, Homo sapien
aagactttactactggtattttcca

SEQ ID NO: 5913901 - DNA, 25 bp, Homo sapien
atttacagtttatatagaaattttc

SEQ ID NO: 5913902 - DNA, 25 bp, Homo sapien
tttactactggtattttccaattaa

SEQ ID NO: 5913903 - DNA, 25 bp, Homo sapien
gacaggttctcctatctcctggcat

SEQ ID NO: 5913904 - DNA, 25 bp, Homo sapien
aatgctgattccaaacacattctcc

SEQ ID NO: 5913905 - DNA, 25 bp, Homo sapien
ggttctcctatctcctggcatctct

SEQ ID NO: 5913906 - DNA, 25 bp, Homo sapien
caggatggaaatgacagtactggcc

SEQ ID NO: 5913907 - DNA, 25 bp, Homo sapien
ccaacagaggtacttgcatgtgctc

SEQ ID NO: 5913908 - DNA, 25 bp, Homo sapien
gccagtgttgtcctggcagctaaac

SEQ ID NO: 5913909 - DNA, 25 bp, Homo sapien
tcacctttctgatttgggtttttta

SEQ ID NO: 5913910 - DNA, 25 bp, Homo sapien
ttcctggggcactgtcacaggcatc

SEQ ID NO: 5913911 - DNA, 25 bp, Homo sapien
aggaaggaaggaaggagtcatcaac

SEQ ID NO: 5913912 - DNA, 25 bp, Homo sapien
acattctccaggatggaaatgacag

SEQ ID NO: 5913913 - DNA, 25 bp, Homo sapien
aggcactgcctgaaaaccttcctgg

SEQ ID NO: 5913914 - DNA, 25 bp, Homo sapien
ctgtgtctacatccatcttcaggag

SEQ ID NO: 5913915 - DNA, 25 bp, Homo sapien
tttcagacttaagacagacaggttc

SEQ ID NO: 5913916 - DNA, 25 bp, Homo sapien
gggaaggagagtttcctgggtcaga

SEQ ID NO: 5913917 - DNA, 25 bp, Homo sapien
tgcatgtgctctcccagccgacagg

SEQ ID NO: 5913918 - DNA, 25 bp, Homo sapien
ttttataaaatgctgattccaaaca

SEQ ID NO: 5913919 - DNA, 25 bp, Homo sapien
agcccagcgcctcagcctctctctg

SEQ ID NO: 5913920 - DNA, 25 bp, Homo sapien
gtattttccaattaaacactagcag

SEQ ID NO: 5913921 - DNA, 25 bp, Homo sapien
tacttgcatgtgctctcccagccga

SEQ ID NO: 5913922 - DNA, 25 bp, Homo sapien
gtcagataacaaaggacgatttgtg

SEQ ID NO: 5913923 - DNA, 25 bp, Homo sapien
cctatctcctggcatctcttgggaa

SEQ ID NO: 5913924 - DNA, 25 bp, Homo sapien
aggctagcaacaatctgtgtctaca

SEQ ID NO: 5913925 - DNA, 25 bp, Homo sapien
gactttactactggtattttccaat

SEQ ID NO: 5913926 - DNA, 25 bp, Homo sapien
aagacagacaggttctcctatctcc

SEQ ID NO: 5913927 - DNA, 25 bp, Homo sapien
gtccaaattgccctgcatgggagaa

SEQ ID NO: 5913928 - DNA, 25 bp, Homo sapien
atgaggtcaggctagcaacaatctg

SEQ ID NO: 5913929 - DNA, 25 bp, Homo sapien
aacaatctgtgtctacatccatctt

SEQ ID NO: 5913930 - DNA, 25 bp, Homo sapien
gtttcctgggtcagagccctcttcc

SEQ ID NO: 5913931 - DNA, 25 bp, Homo sapien
cttcccagcaagcaatttcaccttt

SEQ ID NO: 5913932 - DNA, 25 bp, Homo sapien
ttgaagatcaccctaatccccataa

SEQ ID NO: 5913933 - DNA, 25 bp, Homo sapien
gctcacagcagccctgtgaccagct

SEQ ID NO: 5913934 - DNA, 25 bp, Homo sapien
gaagatcaccctaatccccataatg

SEQ ID NO: 5913935 - DNA, 25 bp, Homo sapien
cgttttgaaacactgtatggcaata

SEQ ID NO: 5913936 - DNA, 25 bp, Homo sapien
aaaatacgttttgaaacactgtatg

SEQ ID NO: 5913937 - DNA, 25 bp, Homo sapien
gagtcatcaactttggccaaaacaa

SEQ ID NO: 5913938 - DNA, 25 bp, Homo sapien
aaccttcctggggcactgtcacagg

SEQ ID NO: 5913939 - DNA, 25 bp, Homo sapien
cccagcgcctcagcctctctctgcc

SEQ ID NO: 5913940 - DNA, 25 bp, Homo sapien
ggcttccttttattcttgtggcttg

SEQ ID NO: 5913941 - DNA, 25 bp, Homo sapien
gcatcaggctgttgcctgctgctac

SEQ ID NO: 5913942 - DNA, 25 bp, Homo sapien
cagccctgtgaccagcttccaacag

SEQ ID NO: 5913943 - DNA, 25 bp, Homo sapien
gcaacaatctgtgtctacatccatc

SEQ ID NO: 5913944 - DNA, 25 bp, Homo sapien
ccagggagcaaggcactgcctgaaa

SEQ ID NO: 5913945 - DNA, 25 bp, Homo sapien
tttgggttttttataaaatgctgat

SEQ ID NO: 5913946 - DNA, 25 bp, Homo sapien
taaacagcctggggcaaaaacagtc

SEQ ID NO: 5913947 - DNA, 25 bp, Homo sapien
cacggtgggtcagggtccagggagc

SEQ ID NO: 5913948 - DNA, 25 bp, Homo sapien
ttgggaaggagagtttcctgggtca

SEQ ID NO: 5913949 - DNA, 25 bp, Homo sapien
atcaacagaggcaacacggtgggtc

SEQ ID NO: 5913950 - DNA, 25 bp, Homo sapien
atacatctctagcaaaatttagaat

SEQ ID NO: 5913951 - DNA, 25 bp, Homo sapien
ctggcagctaaacagcctggggcaa

SEQ ID NO: 5913952 - DNA, 25 bp, Homo sapien
aaaataagcaagaccaatagaaaag

SEQ ID NO: 5913953 - DNA, 25 bp, Homo sapien
tactactggtattttccaattaaac

SEQ ID NO: 5913954 - DNA, 25 bp, Homo sapien
gctaaaacttcttttgaacaaagga

SEQ ID NO: 5913955 - DNA, 25 bp, Homo sapien
aacagcctggggcaaaaacagtcca

SEQ ID NO: 5913956 - DNA, 25 bp, Homo sapien
attttccaattaaacactagcagcc

SEQ ID NO: 5913957 - DNA, 25 bp, Homo sapien
accaatagaaaaggagacttcagta

SEQ ID NO: 5913958 - DNA, 25 bp, Homo sapien
ctttgtcaggagctctgggctcaca

SEQ ID NO: 5913959 - DNA, 25 bp, Homo sapien
gcagcccagcgcctcagcctctctc

SEQ ID NO: 5913960 - DNA, 25 bp, Homo sapien
aacaaaggaatattcagccagcctc

SEQ ID NO: 5913961 - DNA, 25 bp, Homo sapien
atagaaaaggagacttcagtaccat

SEQ ID NO: 5913962 - DNA, 25 bp, Homo sapien
acagaggcaacacggtgggtcaggg

SEQ ID NO: 5913963 - DNA, 25 bp, Homo sapien
gggctcacagcagccctgtgaccag

SEQ ID NO: 5913964 - DNA, 25 bp, Homo sapien
gtatggcaatatatttacagtttat

SEQ ID NO: 5913965 - DNA, 25 bp, Homo sapien
gggtggctttgtcaggagctctggg

SEQ ID NO: 5913966 - DNA, 25 bp, Homo sapien
acaaaggacgatttgtgtctgaagt

SEQ ID NO: 5913967 - DNA, 25 bp, Homo sapien
gccgacaggtgtcagataacaaagg

SEQ ID NO: 5913968 - DNA, 25 bp, Homo sapien
gtgtctacatccatcttcaggaggc

SEQ ID NO: 5913969 - DNA, 25 bp, Homo sapien
gccaatcaacagaggcaacacggtg

SEQ ID NO: 5913970 - DNA, 25 bp, Homo sapien
gcaacacggtgggtcagggtccagg

SEQ ID NO: 5913971 - DNA, 25 bp, Homo sapien
tcctggcatctcttgggaaggagag

SEQ ID NO: 5913972 - DNA, 25 bp, Homo sapien
cttgtggcttgttaaagaggaagga

SEQ ID NO: 5913973 - DNA, 25 bp, Homo sapien
atggaaatgacagtactggccaatc

SEQ ID NO: 5913974 - DNA, 25 bp, Homo sapien
ggagctctgggctcacagcagccct

SEQ ID NO: 5913975 - DNA, 25 bp, Homo sapien
caacagaggcaacacggtgggtcag

SEQ ID NO: 5913976 - DNA, 25 bp, Homo sapien
cttttgaacaaaggaatattcagcc

SEQ ID NO: 5913977 - DNA, 25 bp, Homo sapien
cagcttccaacagaggtacttgcat

SEQ ID NO: 5913978 - DNA, 25 bp, Homo sapien
cctgggtcagagccctcttcccagc

SEQ ID NO: 5913979 - DNA, 25 bp, Homo sapien
tgcctgaaaaccttcctggggcact

SEQ ID NO: 5913980 - DNA, 25 bp, Homo sapien
actggtattttccaattaaacacta

SEQ ID NO: 5913981 - DNA, 25 bp, Homo sapien
caattaaacactagcagcccaagcc

SEQ ID NO: 5913982 - DNA, 25 bp, Homo sapien
cagaaaggccttgaagatcacccta

SEQ ID NO: 5913983 - DNA, 25 bp, Homo sapien
gggagaacggagaccagaaaggcct

SEQ ID NO: 5913984 - DNA, 25 bp, Homo sapien
gggtccagggagcaaggcactgcct

SEQ ID NO: 5913985 - DNA, 25 bp, Homo sapien
gttgtcctggcagctaaacagcctg

SEQ ID NO: 5913986 - DNA, 25 bp, Homo sapien
gaacggagaccagaaaggccttgaa

SEQ ID NO: 5913987 - DNA, 25 bp, Homo sapien
tggtattttccaattaaacactagc

SEQ ID NO: 5913988 - DNA, 25 bp, Homo sapien
ggtacttgcatgtgctctcccagcc

SEQ ID NO: 5913989 - DNA, 25 bp, Homo sapien
tttccaattaaacactagcagccca

SEQ ID NO: 5913990 - DNA, 25 bp, Homo sapien
acggagaccagaaaggccttgaaga

SEQ ID NO: 5913991 - DNA, 25 bp, Homo sapien
atgacagtactggccaatcaacaga

SEQ ID NO: 5913992 - DNA, 25 bp, Homo sapien
tcccagcaagcaatttcacctttct

SEQ ID NO: 5913993 - DNA, 25 bp, Homo sapien
acatccatcttcaggaggcttcctt

SEQ ID NO: 5913994 - DNA, 25 bp, Homo sapien
taaacactagcagcccaagccttct

SEQ ID NO: 5913995 - DNA, 25 bp, Homo sapien
cagacaggttctcctatctcctggc

SEQ ID NO: 5913996 - DNA, 25 bp, Homo sapien
gatttgggttttttataaaatgctg

SEQ ID NO: 5913997 - DNA, 25 bp, Homo sapien
atcaaaatacatctctagcaaaatt

SEQ ID NO: 5913998 - DNA, 25 bp, Homo sapien
agcaatttcacctttctgatttggg

SEQ ID NO: 5913999 - DNA, 25 bp, Homo sapien
gttgcctgctgctactgcagcccag

SEQ ID NO: 5914000 - DNA, 25 bp, Homo sapien
caagaccaatagaaaaggagacttc

SEQ ID NO: 5914001 - DNA, 25 bp, Homo sapien
cttctaccttaagttgaactcatta

SEQ ID NO: 5914002 - DNA, 25 bp, Homo sapien
gcttccaacagaggtacttgcatgt

SEQ ID NO: 5914003 - DNA, 25 bp, Homo sapien
ctcttcccagcaagcaatttcacct

SEQ ID NO: 5914004 - DNA, 25 bp, Homo sapien
ggggcaaaaacagtccaaattgccc

SEQ ID NO: 5914005 - DNA, 25 bp, Homo sapien
aaggagacttcagtaccatttcaga

SEQ ID NO: 5914006 - DNA, 25 bp, Homo sapien
gctaaacagcctggggcaaaaacag

SEQ ID NO: 5914007 - DNA, 25 bp, Homo sapien
agcagccctgtgaccagcttccaac

SEQ ID NO: 5914008 - DNA, 25 bp, Homo sapien
aagccttctaccttaagttgaactc

SEQ ID NO: 5914009 - DNA, 25 bp, Homo sapien
gcttctgcccgggtggctttgtcag

SEQ ID NO: 5914010 - DNA, 25 bp, Homo sapien
cttgcatgtgctctcccagccgaca

SEQ ID NO: 5914011 - DNA, 25 bp, Homo sapien
gggcactgtcacaggcatcaggctg

SEQ ID NO: 5914012 - DNA, 25 bp, Homo sapien
cagccgacaggtgtcagataacaaa

SEQ ID NO: 5914013 - DNA, 25 bp, Homo sapien
aaattttcagtaatcaaaatacatc

SEQ ID NO: 5914014 - DNA, 25 bp, Homo sapien
gccagcctccttaagaaaactcctt

SEQ ID NO: 5914015 - DNA, 25 bp, Homo sapien
tttcagtaatcaaaatacatctcta

SEQ ID NO: 5914016 - DNA, 25 bp, Homo sapien
aggaggcttccttttattcttgtgg

SEQ ID NO: 5914017 - DNA, 25 bp, Homo sapien
cagtccaaattgccctgcatgggag

SEQ ID NO: 5914018 - DNA, 25 bp, Homo sapien
actggccaatcaacagaggcaacac

SEQ ID NO: 5914019 - DNA, 25 bp, Homo sapien
ttcctgggtcagagccctcttccca

SEQ ID NO: 5914020 - DNA, 25 bp, Homo sapien
gctagcaacaatctgtgtctacatc

SEQ ID NO: 5914021 - DNA, 25 bp, Homo sapien
ccaaattgccctgcatgggagaacg

SEQ ID NO: 5914022 - DNA, 25 bp, Homo sapien
tccaattaaacactagcagcccaag

SEQ ID NO: 5914023 - DNA, 25 bp, Homo sapien
tggggcactgtcacaggcatcaggc

SEQ ID NO: 5914024 - DNA, 25 bp, Homo sapien
taatgaggtcaggctagcaacaatc

SEQ ID NO: 5914025 - DNA, 25 bp, Homo sapien
caatcaacagaggcaacacggtggg

SEQ ID NO: 5914026 - DNA, 25 bp, Homo sapien
tgccctgcatgggagaacggagacc

SEQ ID NO: 5914027 - DNA, 25 bp, Homo sapien
ttccaacagaggtacttgcatgtgc

SEQ ID NO: 5914028 - DNA, 25 bp, Homo sapien
catcaactttggccaaaacaaaaag

SEQ ID NO: 5914029 - DNA, 25 bp, Homo sapien
caaaggaatattcagccagcctcct

SEQ ID NO: 5914030 - DNA, 25 bp, Homo sapien
cagcgcctcagcctctctctgccag

SEQ ID NO: 5914031 - DNA, 25 bp, Homo sapien
cagcctctctctgccagtgttgtcc

SEQ ID NO: 5914032 - DNA, 25 bp, Homo sapien
gattccaaacacattctccaggatg

SEQ ID NO: 5914033 - DNA, 25 bp, Homo sapien
cagctaaacagcctggggcaaaaac

SEQ ID NO: 5914034 - DNA, 25 bp, Homo sapien
gagaacggagaccagaaaggccttg

SEQ ID NO: 5914035 - DNA, 25 bp, Homo sapien
aaggaatattcagccagcctcctta

SEQ ID NO: 5914036 - DNA, 25 bp, Homo sapien
gaaggaaggaaggagtcatcaactt

SEQ ID NO: 5914037 - DNA, 25 bp, Homo sapien
caatttcacctttctgatttgggtt

SEQ ID NO: 5914038 - DNA, 25 bp, Homo sapien
tccttttattcttgtggcttgttaa

SEQ ID NO: 5914039 - DNA, 25 bp, Homo sapien
gcactgtcacaggcatcaggctgtt

SEQ ID NO: 5914040 - DNA, 25 bp, Homo sapien
gtgtcagataacaaaggacgatttg

SEQ ID NO: 5914041 - DNA, 25 bp, Homo sapien
ccaaacacattctccaggatggaaa

SEQ ID NO: 5914042 - DNA, 25 bp, Homo sapien
catttcagacttaagacagacaggt

SEQ ID NO: 5914043 - DNA, 25 bp, Homo sapien
cttccttttattcttgtggcttgtt

SEQ ID NO: 5914044 - DNA, 25 bp, Homo sapien
tcttgggaaggagagtttcctgggt

SEQ ID NO: 5914045 - DNA, 25 bp, Homo sapien
ttctgcccgggtggctttgtcagga

SEQ ID NO: 5914046 - DNA, 25 bp, Homo sapien
ctctctgccagtgttgtcctggcag

SEQ ID NO: 5914047 - DNA, 25 bp, Homo sapien
ctcctatctcctggcatctcttggg

SEQ ID NO: 5914048 - DNA, 25 bp, Homo sapien
tcagacttaagacagacaggttctc

SEQ ID NO: 5914049 - DNA, 25 bp, Homo sapien
gaggcttccttttattcttgtggct

SEQ ID NO: 5914050 - DNA, 25 bp, Homo sapien
ctgttgcctgctgctactgcagccc

SEQ ID NO: 5914051 - DNA, 25 bp, Homo sapien
gaaggagagtttcctgggtcagagc

SEQ ID NO: 5914052 - DNA, 25 bp, Homo sapien
gcctggggcaaaaacagtccaaatt

SEQ ID NO: 5914053 - DNA, 25 bp, Homo sapien
caatagaaaaggagacttcagtacc

SEQ ID NO: 5914054 - DNA, 25 bp, Homo sapien
agcaagcaatttcacctttctgatt

SEQ ID NO: 5914055 - DNA, 25 bp, Homo sapien
aagttgaactcattataaaaaaata

SEQ ID NO: 5914056 - DNA, 25 bp, Homo sapien
ttcagtaccatttcagacttaagac

SEQ ID NO: 5914057 - DNA, 25 bp, Homo sapien
aaattgccctgcatgggagaacgga

SEQ ID NO: 5914058 - DNA, 25 bp, Homo sapien
ttataaaataagcaagaccaataga

SEQ ID NO: 5914059 - DNA, 25 bp, Homo sapien
ccatcttcaggaggcttccttttat

SEQ ID NO: 5914060 - DNA, 25 bp, Homo sapien
cagtgttgtcctggcagctaaacag

SEQ ID NO: 5914061 - DNA, 25 bp, Homo sapien
gtactggccaatcaacagaggcaac

SEQ ID NO: 5914062 - DNA, 25 bp, Homo sapien
agacttcagtaccatttcagactta

SEQ ID NO: 5914063 - DNA, 25 bp, Homo sapien
agcaaggcactgcctgaaaaccttc

SEQ ID NO: 5914064 - DNA, 25 bp, Homo sapien
atttttataaaataagcaagaccaa

SEQ ID NO: 5914065 - DNA, 25 bp, Homo sapien
ggcagctaaacagcctggggcaaaa

SEQ ID NO: 5914066 - DNA, 25 bp, Homo sapien
caagcaatttcacctttctgatttg

SEQ ID NO: 5914067 - DNA, 25 bp, Homo sapien
tattcagccagcctccttaagaaaa

SEQ ID NO: 5914068 - DNA, 25 bp, Homo sapien
tctcttgggaaggagagtttcctgg

SEQ ID NO: 5914069 - DNA, 25 bp, Homo sapien
gcttgttaaagaggaaggaaggaag

SEQ ID NO: 5914070 - DNA, 25 bp, Homo sapien
aaggccttgaagatcaccctaatcc

SEQ ID NO: 5914071 - DNA, 25 bp, Homo sapien
aacactgtatggcaatatatttaca

SEQ ID NO: 5914072 - DNA, 25 bp, Homo sapien
accagaaaggccttgaagatcaccc

SEQ ID NO: 5914073 - DNA, 25 bp, Homo sapien
gggtcagggtccagggagcaaggca

SEQ ID NO: 5914074 - DNA, 25 bp, Homo sapien
cactgtatggcaatatatttacagt

SEQ ID NO: 5914075 - DNA, 25 bp, Homo sapien
ctgccagtgttgtcctggcagctaa

SEQ ID NO: 5914076 - DNA, 25 bp, Homo sapien
aggacgatttgtgtctgaagtcacc

SEQ ID NO: 5914077 - DNA, 25 bp, Homo sapien
acagtttatatagaaattttcagta

SEQ ID NO: 5914078 - DNA, 25 bp, Homo sapien
tattcttgtggcttgttaaagagga

SEQ ID NO: 5914079 - DNA, 25 bp, Homo sapien
tcattataaaaaaatacgttttgaa

SEQ ID NO: 5914080 - DNA, 25 bp, Homo sapien
tgttaaagaggaaggaaggaaggaa

SEQ ID NO: 5914081 - DNA, 25 bp, Homo sapien
gacagtactggccaatcaacagagg

SEQ ID NO: 5914082 - DNA, 25 bp, Homo sapien
ttttataaaataagcaagaccaata

SEQ ID NO: 5914083 - DNA, 25 bp, Homo sapien
tgtggcttgttaaagaggaaggaag

SEQ ID NO: 5914084 - DNA, 25 bp, Homo sapien
taccttaagttgaactcattataaa

SEQ ID NO: 5914085 - DNA, 25 bp, Homo sapien
aggaaggagtcatcaactttggcca

SEQ ID NO: 5914086 - DNA, 25 bp, Homo sapien
aaaaccttcctggggcactgtcaca

SEQ ID NO: 5914087 - DNA, 25 bp, Homo sapien
ctagcagcccaagccttctacctta

SEQ ID NO: 5914088 - DNA, 25 bp, Homo sapien
acacattctccaggatggaaatgac

SEQ ID NO: 5914089 - DNA, 25 bp, Homo sapien
gtgttgtcctggcagctaaacagcc

SEQ ID NO: 5914090 - DNA, 25 bp, Homo sapien
agatcaccctaatccccataatgag

SEQ ID NO: 5914091 - DNA, 25 bp, Homo sapien
tgggtcagagccctcttcccagcaa

SEQ ID NO: 5914092 - DNA, 25 bp, Homo sapien
tgctgctactgcagcccagcgcctc

SEQ ID NO: 5914093 - DNA, 25 bp, Homo sapien
cctgaaaaccttcctggggcactgt

SEQ ID NO: 5914094 - DNA, 25 bp, Homo sapien
cctgctgctactgcagcccagcgcc

SEQ ID NO: 5914095 - DNA, 25 bp, Homo sapien
tccaggatggaaatgacagtactgg

SEQ ID NO: 5914096 - DNA, 25 bp, Homo sapien
ctaatccccataatgaggtcaggct

SEQ ID NO: 5914097 - DNA, 25 bp, Homo sapien
ctcagcctctctctgccagtgttgt

SEQ ID NO: 5914098 - DNA, 25 bp, Homo sapien
ggctgttgcctgctgctactgcagc

SEQ ID NO: 5914099 - DNA, 25 bp, Homo sapien
attgccctgcatgggagaacggaga

SEQ ID NO: 5914100 - DNA, 25 bp, Homo sapien
attaaacactagcagcccaagcctt

SEQ ID NO: 5914101 - DNA, 25 bp, Homo sapien
ctagcaaaatttagaatgttaaatt

SEQ ID NO: 5914102 - DNA, 25 bp, Homo sapien
tttgaacaaaggaatattcagccag

SEQ ID NO: 5914103 - DNA, 25 bp, Homo sapien
tatagaaattttcagtaatcaaaat

SEQ ID NO: 5914104 - DNA, 25 bp, Homo sapien
taacaaaggacgatttgtgtctgaa

SEQ ID NO: 5914105 - DNA, 25 bp, Homo sapien
aaaagcttctgcccgggtggctttg

SEQ ID NO: 5914106 - DNA, 25 bp, Homo sapien
gagtttcctgggtcagagccctctt

SEQ ID NO: 5914107 - DNA, 25 bp, Homo sapien
ctgcatgggagaacggagaccagaa

SEQ ID NO: 5914108 - DNA, 25 bp, Homo sapien
agaccaatagaaaaggagacttcag

SEQ ID NO: 5914109 - DNA, 25 bp, Homo sapien
ctctctctgccagtgttgtcctggc

SEQ ID NO: 5914110 - DNA, 25 bp, Homo sapien
aggaaggaaggagtcatcaactttg

SEQ ID NO: 5914111 - DNA, 25 bp, Homo sapien
aaaggacgatttgtgtctgaagtca

SEQ ID NO: 5914112 - DNA, 25 bp, Homo sapien
cctggggcactgtcacaggcatcag

SEQ ID NO: 5914113 - DNA, 25 bp, Homo sapien
gaaaggccttgaagatcaccctaat

SEQ ID NO: 5914114 - DNA, 25 bp, Homo sapien
ttcttgtggcttgttaaagaggaag

SEQ ID NO: 5914115 - DNA, 25 bp, Homo sapien
tgcctgctgctactgcagcccagcg

SEQ ID NO: 5914116 - DNA, 25 bp, Homo sapien
caggagctctgggctcacagcagcc

SEQ ID NO: 5914117 - DNA, 25 bp, Homo sapien
ttacagtttatatagaaattttcag

SEQ ID NO: 5914118 - DNA, 25 bp, Homo sapien
ctcccagccgacaggtgtcagataa

SEQ ID NO: 5914119 - DNA, 25 bp, Homo sapien
ctgggctcacagcagccctgtgacc

SEQ ID NO: 5914120 - DNA, 25 bp, Homo sapien
agaccagaaaggccttgaagatcac

SEQ ID NO: 5914121 - DNA, 25 bp, Homo sapien
tacgttttgaaacactgtatggcaa

SEQ ID NO: 5914122 - DNA, 25 bp, Homo sapien
gacgatttgtgtctgaagtcaccct

SEQ ID NO: 5914123 - DNA, 25 bp, Homo sapien
aacagaggtacttgcatgtgctctc

SEQ ID NO: 5914124 - DNA, 25 bp, Homo sapien
cagccagcctccttaagaaaactcc

SEQ ID NO: 5914125 - DNA, 25 bp, Homo sapien
caggttctcctatctcctggcatct

SEQ ID NO: 5914126 - DNA, 25 bp, Homo sapien
gccctgtgaccagcttccaacagag

SEQ ID NO: 5914127 - DNA, 25 bp, Homo sapien
accatttcagacttaagacagacag

SEQ ID NO: 5914128 - DNA, 25 bp, Homo sapien
actgtcacaggcatcaggctgttgc

SEQ ID NO: 5914129 - DNA, 25 bp, Homo sapien
aaacacattctccaggatggaaatg

SEQ ID NO: 5914130 - DNA, 25 bp, Homo sapien
gcgcctcagcctctctctgccagtg

SEQ ID NO: 5914131 - DNA, 25 bp, Homo sapien
tccccataatgaggtcaggctagca

SEQ ID NO: 5914132 - DNA, 25 bp, Homo sapien
tctaccttaagttgaactcattata

SEQ ID NO: 5914133 - DNA, 25 bp, Homo sapien
ttgtcaggagctctgggctcacagc

SEQ ID NO: 5914134 - DNA, 25 bp, Homo sapien
ggtcaggctagcaacaatctgtgtc

SEQ ID NO: 5914135 - DNA, 25 bp, Homo sapien
ctacatccatcttcaggaggcttcc

SEQ ID NO: 5914136 - DNA, 25 bp, Homo sapien
gctactgcagcccagcgcctcagcc

SEQ ID NO: 5914137 - DNA, 25 bp, Homo sapien
agccctcttcccagcaagcaatttc

SEQ ID NO: 5914138 - DNA, 25 bp, Homo sapien
ctggcatctcttgggaaggagagtt

SEQ ID NO: 5914139 - DNA, 25 bp, Homo sapien
atcttcaggaggcttccttttattc

SEQ ID NO: 5914140 - DNA, 25 bp, Homo sapien
ggtcagagccctcttcccagcaagc

SEQ ID NO: 5914141 - DNA, 25 bp, Homo sapien
caaaaacagtccaaattgccctgca

SEQ ID NO: 5914142 - DNA, 25 bp, Homo sapien
ataaaataagcaagaccaatagaaa

SEQ ID NO: 5914143 - DNA, 25 bp, Homo sapien
agctctgggctcacagcagccctgt

SEQ ID NO: 5914144 - DNA, 25 bp, Homo sapien
atggcaatatatttacagtttatat

SEQ ID NO: 5914145 - DNA, 25 bp, Homo sapien
aacagtccaaattgccctgcatggg

SEQ ID NO: 5914146 - DNA, 25 bp, Homo sapien
gcccgggtggctttgtcaggagctc

SEQ ID NO: 5914147 - DNA, 25 bp, Homo sapien
tcaggaggcttccttttattcttgt

SEQ ID NO: 5914148 - DNA, 25 bp, Homo sapien
ggcaaaaacagtccaaattgccctg

SEQ ID NO: 5914149 - DNA, 25 bp, Homo sapien
aatacgttttgaaacactgtatggc

SEQ ID NO: 5914150 - DNA, 25 bp, Homo sapien
gtaccatttcagacttaagacagac

SEQ ID NO: 5914151 - DNA, 25 bp, Homo sapien
gacagacaggttctcctatctcctg

SEQ ID NO: 5914152 - DNA, 25 bp, Homo sapien
aaaaggagacttcagtaccatttca

SEQ ID NO: 5914153 - DNA, 25 bp, Homo sapien
tgtgaccagcttccaacagaggtac

SEQ ID NO: 5914154 - DNA, 25 bp, Homo sapien
gataacaaaggacgatttgtgtctg

SEQ ID NO: 5914155 - DNA, 25 bp, Homo sapien
agaaaaggagacttcagtaccattt

SEQ ID NO: 5914156 - DNA, 25 bp, Homo sapien
gccaaaacaaaaagcttctgcccgg

SEQ ID NO: 5914157 - DNA, 25 bp, Homo sapien
atccatcttcaggaggcttcctttt

SEQ ID NO: 5914158 - DNA, 25 bp, Homo sapien
ccgggtggctttgtcaggagctctg

SEQ ID NO: 5914159 - DNA, 25 bp, Homo sapien
gtgggtcagggtccagggagcaagg

SEQ ID NO: 5914160 - DNA, 25 bp, Homo sapien
ttctcctatctcctggcatctcttg

SEQ ID NO: 5914161 - DNA, 25 bp, Homo sapien
caaaatacatctctagcaaaattta

SEQ ID NO: 5914162 - DNA, 25 bp, Homo sapien
tttggccaaaacaaaaagcttctgc

SEQ ID NO: 5914163 - DNA, 25 bp, Homo sapien
ctctcccagccgacaggtgtcagat

SEQ ID NO: 5914164 - DNA, 25 bp, Homo sapien
agagccctcttcccagcaagcaatt

SEQ ID NO: 5914165 - DNA, 25 bp, Homo sapien
ggagaccagaaaggccttgaagatc

SEQ ID NO: 5914166 - DNA, 25 bp, Homo sapien
ccctgcatgggagaacggagaccag

SEQ ID NO: 5914167 - DNA, 25 bp, Homo sapien
aataagcaagaccaatagaaaagga

SEQ ID NO: 5914168 - DNA, 25 bp, Homo sapien
tcagagccctcttcccagcaagcaa

SEQ ID NO: 5914169 - DNA, 25 bp, Homo sapien
ctctgccagtgttgtcctggcagct

SEQ ID NO: 5914170 - DNA, 25 bp, Homo sapien
ccagcaagcaatttcacctttctga

SEQ ID NO: 5914171 - DNA, 25 bp, Homo sapien
ccttaagttgaactcattataaaaa

SEQ ID NO: 5914172 - DNA, 25 bp, Homo sapien
ccaagccttctaccttaagttgaac

SEQ ID NO: 5914173 - DNA, 25 bp, Homo sapien
tgtcacaggcatcaggctgttgcct

SEQ ID NO: 5914174 - DNA, 25 bp, Homo sapien
gtctacatccatcttcaggaggctt

SEQ ID NO: 5914175 - DNA, 25 bp, Homo sapien
ctgattccaaacacattctccagga

SEQ ID NO: 5914176 - DNA, 25 bp, Homo sapien
ttcagccagcctccttaagaaaact

SEQ ID NO: 5914177 - DNA, 25 bp, Homo sapien
gttgaactcattataaaaaaatacg

SEQ ID NO: 5914178 - DNA, 25 bp, Homo sapien
gcactgcctgaaaaccttcctgggg

SEQ ID NO: 5914179 - DNA, 25 bp, Homo sapien
gaggtacttgcatgtgctctcccag

SEQ ID NO: 5914180 - DNA, 25 bp, Homo sapien
ctgatttgggttttttataaaatgc

SEQ ID NO: 5914181 - DNA, 25 bp, Homo sapien
aaatacatctctagcaaaatttaga

SEQ ID NO: 5914182 - DNA, 25 bp, Homo sapien
ctggggcaaaaacagtccaaattgc

SEQ ID NO: 5914183 - DNA, 25 bp, Homo sapien
cagggtccagggagcaaggcactgc

SEQ ID NO: 5914184 - DNA, 25 bp, Homo sapien
cagataacaaaggacgatttgtgtc

SEQ ID NO: 5914185 - DNA, 25 bp, Homo sapien
caggctgttgcctgctgctactgca

SEQ ID NO: 5914186 - DNA, 25 bp, Homo sapien
ttttttataaaatgctgattccaaa

SEQ ID NO: 5914187 - DNA, 25 bp, Homo sapien
gtggctttgtcaggagctctgggct

SEQ ID NO: 5914188 - DNA, 25 bp, Homo sapien
caaaaagcttctgcccgggtggctt

SEQ ID NO: 5914189 - DNA, 25 bp, Homo sapien
ggctttgtcaggagctctgggctca

SEQ ID NO: 5914190 - DNA, 25 bp, Homo sapien
ctgcagcccagcgcctcagcctctc

SEQ ID NO: 5914191 - DNA, 25 bp, Homo sapien
tcaggctagcaacaatctgtgtcta

SEQ ID NO: 5914192 - DNA, 25 bp, Homo sapien
gcccaagccttctaccttaagttga

SEQ ID NO: 5914193 - DNA, 25 bp, Homo sapien
aaatgacagtactggccaatcaaca

SEQ ID NO: 5914194 - DNA, 25 bp, Homo sapien
gtccagggagcaaggcactgcctga

SEQ ID NO: 5914195 - DNA, 25 bp, Homo sapien
gaaggaaggagtcatcaactttggc

SEQ ID NO: 5914196 - DNA, 25 bp, Homo sapien
ccctcttcccagcaagcaatttcac

SEQ ID NO: 5914197 - DNA, 25 bp, Homo sapien
tgaaaaccttcctggggcactgtca

SEQ ID NO: 5914198 - DNA, 25 bp, Homo sapien
atctgtgtctacatccatcttcagg

SEQ ID NO: 5914199 - DNA, 25 bp, Homo sapien
tcctggcagctaaacagcctggggc

SEQ ID NO: 5914200 - DNA, 25 bp, Homo sapien
aggagtcatcaactttggccaaaac

SEQ ID NO: 5914201 - DNA, 25 bp, Homo sapien
cccataatgaggtcaggctagcaac

SEQ ID NO: 5914202 - DNA, 25 bp, Homo sapien
cactagcagcccaagccttctacct

SEQ ID NO: 5914203 - DNA, 25 bp, Homo sapien
ttaagttgaactcattataaaaaaa

SEQ ID NO: 5914204 - DNA, 25 bp, Homo sapien
attttcagtaatcaaaatacatctc

SEQ ID NO: 5914205 - DNA, 25 bp, Homo sapien
aaaacagtccaaattgccctgcatg

SEQ ID NO: 5914206 - DNA, 25 bp, Homo sapien
catgaataagggcccatgtcttggg

SEQ ID NO: 5914207 - DNA, 25 bp, Homo sapien
gtgcttcctctggacacctgggcag

SEQ ID NO: 5914208 - DNA, 25 bp, Homo sapien
tcaagaagtttccctcctcactgtg

SEQ ID NO: 5914209 - DNA, 25 bp, Homo sapien
cactgtgaaatagggagaaacctag

SEQ ID NO: 5914210 - DNA, 25 bp, Homo sapien
gtgtgtgtctttgatggtgttttct

SEQ ID NO: 5914211 - DNA, 25 bp, Homo sapien
ttctctgtagtcccttgggggcggt

SEQ ID NO: 5914212 - DNA, 25 bp, Homo sapien
gtaacctaagaggccccatgaataa

SEQ ID NO: 5914213 - DNA, 25 bp, Homo sapien
ccctttctgtccttgagccccttta

SEQ ID NO: 5914214 - DNA, 25 bp, Homo sapien
ctggagcatggcaggaatgcccatg

SEQ ID NO: 5914215 - DNA, 25 bp, Homo sapien
gggaatgagaccacagcccatagga

SEQ ID NO: 5914216 - DNA, 25 bp, Homo sapien
tagccaagtcttccattagaggtct

SEQ ID NO: 5914217 - DNA, 25 bp, Homo sapien
cccaaacctgcactgcattgagatg

SEQ ID NO: 5914218 - DNA, 25 bp, Homo sapien
attgagatgactttcaggaaccttt

SEQ ID NO: 5914219 - DNA, 25 bp, Homo sapien
tctggacacctgggcaggaccactg

SEQ ID NO: 5914220 - DNA, 25 bp, Homo sapien
cccgaggcctcacattcaaaattgg

SEQ ID NO: 5914221 - DNA, 25 bp, Homo sapien
gtggccaaattcctcaagcaaggag

SEQ ID NO: 5914222 - DNA, 25 bp, Homo sapien
caaacggagccaatcactacagcca

SEQ ID NO: 5914223 - DNA, 25 bp, Homo sapien
cctctcacccacgctgtcctgacgg

SEQ ID NO: 5914224 - DNA, 25 bp, Homo sapien
agtttccctcctcactgtgaaatag

SEQ ID NO: 5914225 - DNA, 25 bp, Homo sapien
ctgtctgagcttaacaactagagcc

SEQ ID NO: 5914226 - DNA, 25 bp, Homo sapien
actgctgagctagcgtggtagggca

SEQ ID NO: 5914227 - DNA, 25 bp, Homo sapien
gcccatgggagaacagaccgaggag

SEQ ID NO: 5914228 - DNA, 25 bp, Homo sapien
cttgggggcggttactgtgtgtgtc

SEQ ID NO: 5914229 - DNA, 25 bp, Homo sapien
agggcccatgtcttgggcatttgta

SEQ ID NO: 5914230 - DNA, 25 bp, Homo sapien
agcaaggagactctgggaatgagac

SEQ ID NO: 5914231 - DNA, 25 bp, Homo sapien
ccacgctgtcctgacggggctcctg

SEQ ID NO: 5914232 - DNA, 25 bp, Homo sapien
cggccctctcacccacgctgtcctg

SEQ ID NO: 5914233 - DNA, 25 bp, Homo sapien
aacaactagagccactcggccctct

SEQ ID NO: 5914234 - DNA, 25 bp, Homo sapien
ggggcggttactgtgtgtgtctttg

SEQ ID NO: 5914235 - DNA, 25 bp, Homo sapien
gaccaccagccccaaacctgcactg

SEQ ID NO: 5914236 - DNA, 25 bp, Homo sapien
cagtgaccaagtcacaagtggctgg

SEQ ID NO: 5914237 - DNA, 25 bp, Homo sapien
ttctgtccttgagcccctttaacct

SEQ ID NO: 5914238 - DNA, 25 bp, Homo sapien
ggacttctctgtagtcccttggggg

SEQ ID NO: 5914239 - DNA, 25 bp, Homo sapien
gactaaaggcctgtctgagcttaac

SEQ ID NO: 5914240 - DNA, 25 bp, Homo sapien
tgggcaggcccagccaagcactctc

SEQ ID NO: 5914241 - DNA, 25 bp, Homo sapien
cattcaaaattggctgtgctggctt

SEQ ID NO: 5914242 - DNA, 25 bp, Homo sapien
cacaagtggctgggcaggcccagcc

SEQ ID NO: 5914243 - DNA, 25 bp, Homo sapien
accgaggagcccgtctctcaagatt

SEQ ID NO: 5914244 - DNA, 25 bp, Homo sapien
cccagccaagcactctcttcctggg

SEQ ID NO: 5914245 - DNA, 25 bp, Homo sapien
cacattcaaaattggctgtgctggc

SEQ ID NO: 5914246 - DNA, 25 bp, Homo sapien
tgtgctggcttggcactgctgagct

SEQ ID NO: 5914247 - DNA, 25 bp, Homo sapien
gggtgggactttctgttactaacag

SEQ ID NO: 5914248 - DNA, 25 bp, Homo sapien
gagaccacagcccataggacagaag

SEQ ID NO: 5914249 - DNA, 25 bp, Homo sapien
ccaaagatttgtttactagggccca

SEQ ID NO: 5914250 - DNA, 25 bp, Homo sapien
cggactcagactctgactaaaggcc

SEQ ID NO: 5914251 - DNA, 25 bp, Homo sapien
gcccccaccgaagcacacatcaaac

SEQ ID NO: 5914252 - DNA, 25 bp, Homo sapien
tagggcacgttgacaagccttcctt

SEQ ID NO: 5914253 - DNA, 25 bp, Homo sapien
aaacaatgtaacaaatggtcttttc

SEQ ID NO: 5914254 - DNA, 25 bp, Homo sapien
gtctctcaagattacactcccgagg

SEQ ID NO: 5914255 - DNA, 25 bp, Homo sapien
gcattgagatgactttcaggaacct

SEQ ID NO: 5914256 - DNA, 25 bp, Homo sapien
tcagaaacggacccaaagatttgtt

SEQ ID NO: 5914257 - DNA, 25 bp, Homo sapien
acaagccttccttctcccctttctg

SEQ ID NO: 5914258 - DNA, 25 bp, Homo sapien
cttggcactgctgagctagcgtggt

SEQ ID NO: 5914259 - DNA, 25 bp, Homo sapien
atttgtttactagggcccagagaca

SEQ ID NO: 5914260 - DNA, 25 bp, Homo sapien
aggagcccgtctctcaagattacac

SEQ ID NO: 5914261 - DNA, 25 bp, Homo sapien
cctgggcaggaccactggtgacatg

SEQ ID NO: 5914262 - DNA, 25 bp, Homo sapien
aaatggtcttttctgtaacctaaga

SEQ ID NO: 5914263 - DNA, 25 bp, Homo sapien
ctggtgacatggacttctctgtagt

SEQ ID NO: 5914264 - DNA, 25 bp, Homo sapien
aaattggctgtgctggcttggcact

SEQ ID NO: 5914265 - DNA, 25 bp, Homo sapien
aggagactctgggaatgagaccaca

SEQ ID NO: 5914266 - DNA, 25 bp, Homo sapien
gaacagaccgaggagcccgtctctc

SEQ ID NO: 5914267 - DNA, 25 bp, Homo sapien
gccaagtcttccattagaggtctga

SEQ ID NO: 5914268 - DNA, 25 bp, Homo sapien
tggggtgggactttctgttactaac

SEQ ID NO: 5914269 - DNA, 25 bp, Homo sapien
ccctaaaagacaaagtgcttcctct

SEQ ID NO: 5914270 - DNA, 25 bp, Homo sapien
aacggagccaatcactacagccaat

SEQ ID NO: 5914271 - DNA, 25 bp, Homo sapien
ggagccaaccagtatagtggcagtg

SEQ ID NO: 5914272 - DNA, 25 bp, Homo sapien
catgtcttgggcatttgtaaccttt

SEQ ID NO: 5914273 - DNA, 25 bp, Homo sapien
actagggcccagagacagggagcca

SEQ ID NO: 5914274 - DNA, 25 bp, Homo sapien
cactcccgaggcctcacattcaaaa

SEQ ID NO: 5914275 - DNA, 25 bp, Homo sapien
cttccttctcccctttctgtccttg

SEQ ID NO: 5914276 - DNA, 25 bp, Homo sapien
gaagtttccctcctcactgtgaaat

SEQ ID NO: 5914277 - DNA, 25 bp, Homo sapien
gtgaaatagggagaaacctagctag

SEQ ID NO: 5914278 - DNA, 25 bp, Homo sapien
ctcaagcaaggagactctgggaatg

SEQ ID NO: 5914279 - DNA, 25 bp, Homo sapien
aacagggacagataaaaccacagca

SEQ ID NO: 5914280 - DNA, 25 bp, Homo sapien
caggcccagccaagcactctcttcc

SEQ ID NO: 5914281 - DNA, 25 bp, Homo sapien
gacacctgggcaggaccactggtga

SEQ ID NO: 5914282 - DNA, 25 bp, Homo sapien
gcccctttaacctcactgcccccac

SEQ ID NO: 5914283 - DNA, 25 bp, Homo sapien
ctaaaagacaaagtgcttcctctgg

SEQ ID NO: 5914284 - DNA, 25 bp, Homo sapien
agtcttccattagaggtctgaggcc

SEQ ID NO: 5914285 - DNA, 25 bp, Homo sapien
atgagaccacagcccataggacaga

SEQ ID NO: 5914286 - DNA, 25 bp, Homo sapien
gccccaaacctgcactgcattgaga

SEQ ID NO: 5914287 - DNA, 25 bp, Homo sapien
taaaaccacagcaggctggaccacc

SEQ ID NO: 5914288 - DNA, 25 bp, Homo sapien
atggtcttttctgtaacctaagagg

SEQ ID NO: 5914289 - DNA, 25 bp, Homo sapien
aggaatgcccatgggagaacagacc

SEQ ID NO: 5914290 - DNA, 25 bp, Homo sapien
tttcagaaacggacccaaagatttg

SEQ ID NO: 5914291 - DNA, 25 bp, Homo sapien
cctgcactgcattgagatgactttc

SEQ ID NO: 5914292 - DNA, 25 bp, Homo sapien
gacagataaaaccacagcaggctgg

SEQ ID NO: 5914293 - DNA, 25 bp, Homo sapien
aaaggcctgtctgagcttaacaact

SEQ ID NO: 5914294 - DNA, 25 bp, Homo sapien
tagagccactcggccctctcaccca

SEQ ID NO: 5914295 - DNA, 25 bp, Homo sapien
cactgcccccaccgaagcacacatc

SEQ ID NO: 5914296 - DNA, 25 bp, Homo sapien
gttactaacagggacagataaaacc

SEQ ID NO: 5914297 - DNA, 25 bp, Homo sapien
atggacttctctgtagtcccttggg

SEQ ID NO: 5914298 - DNA, 25 bp, Homo sapien
tgaggccttttcagaaacggaccca

SEQ ID NO: 5914299 - DNA, 25 bp, Homo sapien
ggcggttactgtgtgtgtctttgat

SEQ ID NO: 5914300 - DNA, 25 bp, Homo sapien
ccccaccgaagcacacatcaaacgg

SEQ ID NO: 5914301 - DNA, 25 bp, Homo sapien
gttgacaagccttccttctcccctt

SEQ ID NO: 5914302 - DNA, 25 bp, Homo sapien
ctccaactcggactcagactctgac

SEQ ID NO: 5914303 - DNA, 25 bp, Homo sapien
gataaaaccacagcaggctggacca

SEQ ID NO: 5914304 - DNA, 25 bp, Homo sapien
attcaagaagtttccctcctcactg

SEQ ID NO: 5914305 - DNA, 25 bp, Homo sapien
ttcaaaattggctgtgctggcttgg

SEQ ID NO: 5914306 - DNA, 25 bp, Homo sapien
gaccctaaaagacaaagtgcttcct

SEQ ID NO: 5914307 - DNA, 25 bp, Homo sapien
cccttgggggcggttactgtgtgtg

SEQ ID NO: 5914308 - DNA, 25 bp, Homo sapien
acatggacttctctgtagtcccttg

SEQ ID NO: 5914309 - DNA, 25 bp, Homo sapien
gggcccagagacagggagccaacca

SEQ ID NO: 5914310 - DNA, 25 bp, Homo sapien
gggagaacagaccgaggagcccgtc

SEQ ID NO: 5914311 - DNA, 25 bp, Homo sapien
gtgggactttctgttactaacaggg

SEQ ID NO: 5914312 - DNA, 25 bp, Homo sapien
aacctaagaggccccatgaataagg

SEQ ID NO: 5914313 - DNA, 25 bp, Homo sapien
caactagagccactcggccctctca

SEQ ID NO: 5914314 - DNA, 25 bp, Homo sapien
tgacaagccttccttctcccctttc

SEQ ID NO: 5914315 - DNA, 25 bp, Homo sapien
agatttgtttactagggcccagaga

SEQ ID NO: 5914316 - DNA, 25 bp, Homo sapien
aaaagacaaagtgcttcctctggac

SEQ ID NO: 5914317 - DNA, 25 bp, Homo sapien
ctctcaagattacactcccgaggcc

SEQ ID NO: 5914318 - DNA, 25 bp, Homo sapien
ccaagtcacaagtggctgggcaggc

SEQ ID NO: 5914319 - DNA, 25 bp, Homo sapien
ctgcattgagatgactttcaggaac

SEQ ID NO: 5914320 - DNA, 25 bp, Homo sapien
acctcactgcccccaccgaagcaca

SEQ ID NO: 5914321 - DNA, 25 bp, Homo sapien
ccaccgaagcacacatcaaacggag

SEQ ID NO: 5914322 - DNA, 25 bp, Homo sapien
tttccctcctcactgtgaaataggg

SEQ ID NO: 5914323 - DNA, 25 bp, Homo sapien
gagcccctttaacctcactgccccc

SEQ ID NO: 5914324 - DNA, 25 bp, Homo sapien
ctctcttcctggggaccctaaaaga

SEQ ID NO: 5914325 - DNA, 25 bp, Homo sapien
ggcccagccaagcactctcttcctg

SEQ ID NO: 5914326 - DNA, 25 bp, Homo sapien
ggagcatggcaggaatgcccatggg

SEQ ID NO: 5914327 - DNA, 25 bp, Homo sapien
gtgtgtctttgatggtgttttctaa

SEQ ID NO: 5914328 - DNA, 25 bp, Homo sapien
ctgtccttgagcccctttaacctca

SEQ ID NO: 5914329 - DNA, 25 bp, Homo sapien
cccatgaataagggcccatgtcttg

SEQ ID NO: 5914330 - DNA, 25 bp, Homo sapien
ctgtgtgtgtctttgatggtgtttt

SEQ ID NO: 5914331 - DNA, 25 bp, Homo sapien
agacagggagccaaccagtatagtg

SEQ ID NO: 5914332 - DNA, 25 bp, Homo sapien
acagcccataggacagaagaagaga

SEQ ID NO: 5914333 - DNA, 25 bp, Homo sapien
attacactcccgaggcctcacattc

SEQ ID NO: 5914334 - DNA, 25 bp, Homo sapien
ctcccgaggcctcacattcaaaatt

SEQ ID NO: 5914335 - DNA, 25 bp, Homo sapien
gtgaccaagtcacaagtggctgggc

SEQ ID NO: 5914336 - DNA, 25 bp, Homo sapien
tagtcccttgggggcggttactgtg

SEQ ID NO: 5914337 - DNA, 25 bp, Homo sapien
gctgggcaggcccagccaagcactc

SEQ ID NO: 5914338 - DNA, 25 bp, Homo sapien
gagcttaacaactagagccactcgg

SEQ ID NO: 5914339 - DNA, 25 bp, Homo sapien
ccagagacagggagccaaccagtat

SEQ ID NO: 5914340 - DNA, 25 bp, Homo sapien
tgagatgactttcaggaacctttta

SEQ ID NO: 5914341 - DNA, 25 bp, Homo sapien
ctcacattcaaaattggctgtgctg

SEQ ID NO: 5914342 - DNA, 25 bp, Homo sapien
caagattacactcccgaggcctcac

SEQ ID NO: 5914343 - DNA, 25 bp, Homo sapien
gttactgtgtgtgtctttgatggtg

SEQ ID NO: 5914344 - DNA, 25 bp, Homo sapien
agagaactccaactcggactcagac

SEQ ID NO: 5914345 - DNA, 25 bp, Homo sapien
aaaccacagcaggctggaccaccag

SEQ ID NO: 5914346 - DNA, 25 bp, Homo sapien
acaatgtaacaaatggtcttttctg

SEQ ID NO: 5914347 - DNA, 25 bp, Homo sapien
gggacagataaaaccacagcaggct

SEQ ID NO: 5914348 - DNA, 25 bp, Homo sapien
accactggtgacatggacttctctg

SEQ ID NO: 5914349 - DNA, 25 bp, Homo sapien
gtccttgagcccctttaacctcact

SEQ ID NO: 5914350 - DNA, 25 bp, Homo sapien
ttgagcccctttaacctcactgccc

SEQ ID NO: 5914351 - DNA, 25 bp, Homo sapien
ttccattagaggtctgaggcctttt

SEQ ID NO: 5914352 - DNA, 25 bp, Homo sapien
tgggggcggttactgtgtgtgtctt

SEQ ID NO: 5914353 - DNA, 25 bp, Homo sapien
aggcctcacattcaaaattggctgt

SEQ ID NO: 5914354 - DNA, 25 bp, Homo sapien
tcctggagcatggcaggaatgccca

SEQ ID NO: 5914355 - DNA, 25 bp, Homo sapien
agcccataggacagaagaagagaac

SEQ ID NO: 5914356 - DNA, 25 bp, Homo sapien
gtctgagcttaacaactagagccac

SEQ ID NO: 5914357 - DNA, 25 bp, Homo sapien
cggttactgtgtgtgtctttgatgg

SEQ ID NO: 5914358 - DNA, 25 bp, Homo sapien
ggcttggcactgctgagctagcgtg

SEQ ID NO: 5914359 - DNA, 25 bp, Homo sapien
atcaaacggagccaatcactacagc

SEQ ID NO: 5914360 - DNA, 25 bp, Homo sapien
ctgcccccaccgaagcacacatcaa

SEQ ID NO: 5914361 - DNA, 25 bp, Homo sapien
gaagagaactccaactcggactcag

SEQ ID NO: 5914362 - DNA, 25 bp, Homo sapien
gagccaatcactacagccaatcatg

SEQ ID NO: 5914363 - DNA, 25 bp, Homo sapien
tgctggcttggcactgctgagctag

SEQ ID NO: 5914364 - DNA, 25 bp, Homo sapien
ctcactgcccccaccgaagcacaca

SEQ ID NO: 5914365 - DNA, 25 bp, Homo sapien
ctgagctagcgtggtagggcacgtt

SEQ ID NO: 5914366 - DNA, 25 bp, Homo sapien
ctctgactaaaggcctgtctgagct

SEQ ID NO: 5914367 - DNA, 25 bp, Homo sapien
ccaaccagtatagtggcagtgacca

SEQ ID NO: 5914368 - DNA, 25 bp, Homo sapien
aagaagagaactccaactcggactc

SEQ ID NO: 5914369 - DNA, 25 bp, Homo sapien
tagaggtctgaggccttttcagaaa

SEQ ID NO: 5914370 - DNA, 25 bp, Homo sapien
ggtgacatggacttctctgtagtcc

SEQ ID NO: 5914371 - DNA, 25 bp, Homo sapien
attagaggtctgaggccttttcaga

SEQ ID NO: 5914372 - DNA, 25 bp, Homo sapien
acgttgacaagccttccttctcccc

SEQ ID NO: 5914373 - DNA, 25 bp, Homo sapien
ggccaaattcctcaagcaaggagac

SEQ ID NO: 5914374 - DNA, 25 bp, Homo sapien
agccaaccagtatagtggcagtgac

SEQ ID NO: 5914375 - DNA, 25 bp, Homo sapien
cccatgtcttgggcatttgtaacct

SEQ ID NO: 5914376 - DNA, 25 bp, Homo sapien
tcacccacgctgtcctgacggggct

SEQ ID NO: 5914377 - DNA, 25 bp, Homo sapien
gctgtcctgacggggctcctggagc

SEQ ID NO: 5914378 - DNA, 25 bp, Homo sapien
tggctgggcaggcccagccaagcac

SEQ ID NO: 5914379 - DNA, 25 bp, Homo sapien
cagactctgactaaaggcctgtctg

SEQ ID NO: 5914380 - DNA, 25 bp, Homo sapien
cacctgggcaggaccactggtgaca

SEQ ID NO: 5914381 - DNA, 25 bp, Homo sapien
ctggcttggcactgctgagctagcg

SEQ ID NO: 5914382 - DNA, 25 bp, Homo sapien
atgcccatgggagaacagaccgagg

SEQ ID NO: 5914383 - DNA, 25 bp, Homo sapien
aagccttccttctcccctttctgtc

SEQ ID NO: 5914384 - DNA, 25 bp, Homo sapien
cccataggacagaagaagagaactc

SEQ ID NO: 5914385 - DNA, 25 bp, Homo sapien
ttgatggtgttttctaactttttta

SEQ ID NO: 5914386 - DNA, 25 bp, Homo sapien
tcccctttctgtccttgagcccctt

SEQ ID NO: 5914387 - DNA, 25 bp, Homo sapien
gaaatagggagaaacctagctagcc

SEQ ID NO: 5914388 - DNA, 25 bp, Homo sapien
cataggacagaagaagagaactcca

SEQ ID NO: 5914389 - DNA, 25 bp, Homo sapien
ccattagaggtctgaggccttttca

SEQ ID NO: 5914390 - DNA, 25 bp, Homo sapien
agaggccccatgaataagggcccat

SEQ ID NO: 5914391 - DNA, 25 bp, Homo sapien
ctctgtagtcccttgggggcggtta

SEQ ID NO: 5914392 - DNA, 25 bp, Homo sapien
gagccactcggccctctcacccacg

SEQ ID NO: 5914393 - DNA, 25 bp, Homo sapien
tactgtgtgtgtctttgatggtgtt

SEQ ID NO: 5914394 - DNA, 25 bp, Homo sapien
ggtagggcacgttgacaagccttcc

SEQ ID NO: 5914395 - DNA, 25 bp, Homo sapien
tggctgtgctggcttggcactgctg

SEQ ID NO: 5914396 - DNA, 25 bp, Homo sapien
agatgactttcaggaaccttttatt

SEQ ID NO: 5914397 - DNA, 25 bp, Homo sapien
acatcaaacggagccaatcactaca

SEQ ID NO: 5914398 - DNA, 25 bp, Homo sapien
ctgttactaacagggacagataaaa

SEQ ID NO: 5914399 - DNA, 25 bp, Homo sapien
agtatagtggcagtgaccaagtcac

SEQ ID NO: 5914400 - DNA, 25 bp, Homo sapien
gacggggctcctggagcatggcagg

SEQ ID NO: 5914401 - DNA, 25 bp, Homo sapien
acacatcaaacggagccaatcacta

SEQ ID NO: 5914402 - DNA, 25 bp, Homo sapien
taacctcactgcccccaccgaagca

SEQ ID NO: 5914403 - DNA, 25 bp, Homo sapien
tgaataagggcccatgtcttgggca

SEQ ID NO: 5914404 - DNA, 25 bp, Homo sapien
gagctagcgtggtagggcacgttga

SEQ ID NO: 5914405 - DNA, 25 bp, Homo sapien
acaaaaacaatgtaacaaatggtct

SEQ ID NO: 5914406 - DNA, 25 bp, Homo sapien
gactcagactctgactaaaggcctg

SEQ ID NO: 5914407 - DNA, 25 bp, Homo sapien
cagggacagataaaaccacagcagg

SEQ ID NO: 5914408 - DNA, 25 bp, Homo sapien
tcctgacggggctcctggagcatgg

SEQ ID NO: 5914409 - DNA, 25 bp, Homo sapien
gaccacagcccataggacagaagaa

SEQ ID NO: 5914410 - DNA, 25 bp, Homo sapien
caagtggctgggcaggcccagccaa

SEQ ID NO: 5914411 - DNA, 25 bp, Homo sapien
atgggagaacagaccgaggagcccg

SEQ ID NO: 5914412 - DNA, 25 bp, Homo sapien
tagggcccagagacagggagccaac

SEQ ID NO: 5914413 - DNA, 25 bp, Homo sapien
ctggggaccctaaaagacaaagtgc

SEQ ID NO: 5914414 - DNA, 25 bp, Homo sapien
gactttcaggaaccttttattcaag

SEQ ID NO: 5914415 - DNA, 25 bp, Homo sapien
aatgtaacaaatggtcttttctgta

SEQ ID NO: 5914416 - DNA, 25 bp, Homo sapien
accgaagcacacatcaaacggagcc

SEQ ID NO: 5914417 - DNA, 25 bp, Homo sapien
gcgtggtagggcacgttgacaagcc

SEQ ID NO: 5914418 - DNA, 25 bp, Homo sapien
gccactcggccctctcacccacgct

SEQ ID NO: 5914419 - DNA, 25 bp, Homo sapien
gcactgctgagctagcgtggtaggg

SEQ ID NO: 5914420 - DNA, 25 bp, Homo sapien
taacaaatggtcttttctgtaacct

SEQ ID NO: 5914421 - DNA, 25 bp, Homo sapien
ctcaagattacactcccgaggcctc

SEQ ID NO: 5914422 - DNA, 25 bp, Homo sapien
cctaagaggccccatgaataagggc

SEQ ID NO: 5914423 - DNA, 25 bp, Homo sapien
cagccaagcactctcttcctgggga

SEQ ID NO: 5914424 - DNA, 25 bp, Homo sapien
gtgtctttgatggtgttttctaact

SEQ ID NO: 5914425 - DNA, 25 bp, Homo sapien
ctgactaaaggcctgtctgagctta

SEQ ID NO: 5914426 - DNA, 25 bp, Homo sapien
tcttccattagaggtctgaggcctt

SEQ ID NO: 5914427 - DNA, 25 bp, Homo sapien
tctcccctttctgtccttgagcccc

SEQ ID NO: 5914428 - DNA, 25 bp, Homo sapien
tccttctcccctttctgtccttgag

SEQ ID NO: 5914429 - DNA, 25 bp, Homo sapien
tggcactgctgagctagcgtggtag

SEQ ID NO: 5914430 - DNA, 25 bp, Homo sapien
taggacagaagaagagaactccaac

SEQ ID NO: 5914431 - DNA, 25 bp, Homo sapien
tgtagtcccttgggggcggttactg

SEQ ID NO: 5914432 - DNA, 25 bp, Homo sapien
tcttttctgtaacctaagaggcccc

SEQ ID NO: 5914433 - DNA, 25 bp, Homo sapien
gacaaagtgcttcctctggacacct

SEQ ID NO: 5914434 - DNA, 25 bp, Homo sapien
acccacgctgtcctgacggggctcc

SEQ ID NO: 5914435 - DNA, 25 bp, Homo sapien
tggaccaccagccccaaacctgcac

SEQ ID NO: 5914436 - DNA, 25 bp, Homo sapien
aggctggaccaccagccccaaacct

SEQ ID NO: 5914437 - DNA, 25 bp, Homo sapien
ggtggggtgggactttctgttacta

SEQ ID NO: 5914438 - DNA, 25 bp, Homo sapien
gcaggaatgcccatgggagaacaga

SEQ ID NO: 5914439 - DNA, 25 bp, Homo sapien
aagtggccaaattcctcaagcaagg

SEQ ID NO: 5914440 - DNA, 25 bp, Homo sapien
taagaggccccatgaataagggccc

SEQ ID NO: 5914441 - DNA, 25 bp, Homo sapien
caaacctgcactgcattgagatgac

SEQ ID NO: 5914442 - DNA, 25 bp, Homo sapien
gctagccaagtcttccattagaggt

SEQ ID NO: 5914443 - DNA, 25 bp, Homo sapien
gatggtgttttctaacttttttata

SEQ ID NO: 5914444 - DNA, 25 bp, Homo sapien
ggtctgaggccttttcagaaacgga

SEQ ID NO: 5914445 - DNA, 25 bp, Homo sapien
tagtggcagtgaccaagtcacaagt

SEQ ID NO: 5914446 - DNA, 25 bp, Homo sapien
gctcctggagcatggcaggaatgcc

SEQ ID NO: 5914447 - DNA, 25 bp, Homo sapien
tccctcctcactgtgaaatagggag

SEQ ID NO: 5914448 - DNA, 25 bp, Homo sapien
gccctctcacccacgctgtcctgac

SEQ ID NO: 5914449 - DNA, 25 bp, Homo sapien
ccaactcggactcagactctgacta

SEQ ID NO: 5914450 - DNA, 25 bp, Homo sapien
gctgtgctggcttggcactgctgag

SEQ ID NO: 5914451 - DNA, 25 bp, Homo sapien
ctaaaggcctgtctgagcttaacaa

SEQ ID NO: 5914452 - DNA, 25 bp, Homo sapien
aactccaactcggactcagactctg

SEQ ID NO: 5914453 - DNA, 25 bp, Homo sapien
tatagtggcagtgaccaagtcacaa

SEQ ID NO: 5914454 - DNA, 25 bp, Homo sapien
gggactttctgttactaacagggac

SEQ ID NO: 5914455 - DNA, 25 bp, Homo sapien
ctgtaacctaagaggccccatgaat

SEQ ID NO: 5914456 - DNA, 25 bp, Homo sapien
ttctgttactaacagggacagataa

SEQ ID NO: 5914457 - DNA, 25 bp, Homo sapien
gccttccttctcccctttctgtcct

SEQ ID NO: 5914458 - DNA, 25 bp, Homo sapien
aagaagtttccctcctcactgtgaa

SEQ ID NO: 5914459 - DNA, 25 bp, Homo sapien
caatcactacagccaatcatgtggc

SEQ ID NO: 5914460 - DNA, 25 bp, Homo sapien
cgaagcacacatcaaacggagccaa

SEQ ID NO: 5914461 - DNA, 25 bp, Homo sapien
caaggagactctgggaatgagacca

SEQ ID NO: 5914462 - DNA, 25 bp, Homo sapien
ccatgggagaacagaccgaggagcc

SEQ ID NO: 5914463 - DNA, 25 bp, Homo sapien
ccaccagccccaaacctgcactgca

SEQ ID NO: 5914464 - DNA, 25 bp, Homo sapien
aggccccatgaataagggcccatgt

SEQ ID NO: 5914465 - DNA, 25 bp, Homo sapien
acttctctgtagtcccttgggggcg

SEQ ID NO: 5914466 - DNA, 25 bp, Homo sapien
ggaccactggtgacatggacttctc

SEQ ID NO: 5914467 - DNA, 25 bp, Homo sapien
ctttctgtccttgagcccctttaac

SEQ ID NO: 5914468 - DNA, 25 bp, Homo sapien
actagagccactcggccctctcacc

SEQ ID NO: 5914469 - DNA, 25 bp, Homo sapien
cctttaacctcactgcccccaccga

SEQ ID NO: 5914470 - DNA, 25 bp, Homo sapien
ggtcttttctgtaacctaagaggcc

SEQ ID NO: 5914471 - DNA, 25 bp, Homo sapien
tctcacccacgctgtcctgacgggg

SEQ ID NO: 5914472 - DNA, 25 bp, Homo sapien
ttactagggcccagagacagggagc

SEQ ID NO: 5914473 - DNA, 25 bp, Homo sapien
aataagggcccatgtcttgggcatt

SEQ ID NO: 5914474 - DNA, 25 bp, Homo sapien
ctgggaatgagaccacagcccatag

SEQ ID NO: 5914475 - DNA, 25 bp, Homo sapien
ctgagcttaacaactagagccactc

SEQ ID NO: 5914476 - DNA, 25 bp, Homo sapien
ccgtctctcaagattacactcccga

SEQ ID NO: 5914477 - DNA, 25 bp, Homo sapien
aaattcctcaagcaaggagactctg

SEQ ID NO: 5914478 - DNA, 25 bp, Homo sapien
gaaacctagctagccaagtcttcca

SEQ ID NO: 5914479 - DNA, 25 bp, Homo sapien
tagctagccaagtcttccattagag

SEQ ID NO: 5914480 - DNA, 25 bp, Homo sapien
tgacatggacttctctgtagtccct

SEQ ID NO: 5914481 - DNA, 25 bp, Homo sapien
aagtcacaagtggctgggcaggccc

SEQ ID NO: 5914482 - DNA, 25 bp, Homo sapien
gcacacatcaaacggagccaatcac

SEQ ID NO: 5914483 - DNA, 25 bp, Homo sapien
aaagatttgtttactagggcccaga

SEQ ID NO: 5914484 - DNA, 25 bp, Homo sapien
tgctgagctagcgtggtagggcacg

SEQ ID NO: 5914485 - DNA, 25 bp, Homo sapien
gaggtctgaggccttttcagaaacg

SEQ ID NO: 5914486 - DNA, 25 bp, Homo sapien
cttctcccctttctgtccttgagcc

SEQ ID NO: 5914487 - DNA, 25 bp, Homo sapien
attcctcaagcaaggagactctggg

SEQ ID NO: 5914488 - DNA, 25 bp, Homo sapien
gggcacgttgacaagccttccttct

SEQ ID NO: 5914489 - DNA, 25 bp, Homo sapien
tgggcaggaccactggtgacatgga

SEQ ID NO: 5914490 - DNA, 25 bp, Homo sapien
agaactccaactcggactcagactc

SEQ ID NO: 5914491 - DNA, 25 bp, Homo sapien
cactgcattgagatgactttcagga

SEQ ID NO: 5914492 - DNA, 25 bp, Homo sapien
gcttcctctggacacctgggcagga

SEQ ID NO: 5914493 - DNA, 25 bp, Homo sapien
gacccaaagatttgtttactagggc

SEQ ID NO: 5914494 - DNA, 25 bp, Homo sapien
aagtgcttcctctggacacctgggc

SEQ ID NO: 5914495 - DNA, 25 bp, Homo sapien
cctctggacacctgggcaggaccac

SEQ ID NO: 5914496 - DNA, 25 bp, Homo sapien
gcctgtctgagcttaacaactagag

SEQ ID NO: 5914497 - DNA, 25 bp, Homo sapien
gcaggctggaccaccagccccaaac

SEQ ID NO: 5914498 - DNA, 25 bp, Homo sapien
tacactcccgaggcctcacattcaa

SEQ ID NO: 5914499 - DNA, 25 bp, Homo sapien
cctagctagccaagtcttccattag

SEQ ID NO: 5914500 - DNA, 25 bp, Homo sapien
gctggaccaccagccccaaacctgc

SEQ ID NO: 5914501 - DNA, 25 bp, Homo sapien
caagtcttccattagaggtctgagg

SEQ ID NO: 5914502 - DNA, 25 bp, Homo sapien
accacagcaggctggaccaccagcc

SEQ ID NO: 5914503 - DNA, 25 bp, Homo sapien
caagcactctcttcctggggaccct

SEQ ID NO: 5914504 - DNA, 25 bp, Homo sapien
caggaccactggtgacatggacttc

SEQ ID NO: 5914505 - DNA, 25 bp, Homo sapien
ggcccatgtcttgggcatttgtaac

SEQ ID NO: 5914506 - DNA, 25 bp, Homo sapien
aaccagtatagtggcagtgaccaag

SEQ ID NO: 5914507 - DNA, 25 bp, Homo sapien
gccaatcactacagccaatcatgtg

SEQ ID NO: 5914508 - DNA, 25 bp, Homo sapien
ggcagtgaccaagtcacaagtggct

SEQ ID NO: 5914509 - DNA, 25 bp, Homo sapien
agggagccaaccagtatagtggcag

SEQ ID NO: 5914510 - DNA, 25 bp, Homo sapien
gctagcgtggtagggcacgttgaca

SEQ ID NO: 5914511 - DNA, 25 bp, Homo sapien
ttgtttactagggcccagagacagg

SEQ ID NO: 5914512 - DNA, 25 bp, Homo sapien
gcctcacattcaaaattggctgtgc

SEQ ID NO: 5914513 - DNA, 25 bp, Homo sapien
ttcaggaaccttttattcaagaagt

SEQ ID NO: 5914514 - DNA, 25 bp, Homo sapien
gcccgtctctcaagattacactccc

SEQ ID NO: 5914515 - DNA, 25 bp, Homo sapien
acaaatggtcttttctgtaacctaa

SEQ ID NO: 5914516 - DNA, 25 bp, Homo sapien
tgtcctgacggggctcctggagcat

SEQ ID NO: 5914517 - DNA, 25 bp, Homo sapien
tactaacagggacagataaaaccac

SEQ ID NO: 5914518 - DNA, 25 bp, Homo sapien
ccagtatagtggcagtgaccaagtc

SEQ ID NO: 5914519 - DNA, 25 bp, Homo sapien
tctgaggccttttcagaaacggacc

SEQ ID NO: 5914520 - DNA, 25 bp, Homo sapien
acagaccgaggagcccgtctctcaa

SEQ ID NO: 5914521 - DNA, 25 bp, Homo sapien
agagacagggagccaaccagtatag

SEQ ID NO: 5914522 - DNA, 25 bp, Homo sapien
ggcaggcccagccaagcactctctt

SEQ ID NO: 5914523 - DNA, 25 bp, Homo sapien
ctcggactcagactctgactaaagg

SEQ ID NO: 5914524 - DNA, 25 bp, Homo sapien
aagcacacatcaaacggagccaatc

SEQ ID NO: 5914525 - DNA, 25 bp, Homo sapien
cactctcttcctggggaccctaaaa

SEQ ID NO: 5914526 - DNA, 25 bp, Homo sapien
gcccagagacagggagccaaccagt

SEQ ID NO: 5914527 - DNA, 25 bp, Homo sapien
aggcctgtctgagcttaacaactag

SEQ ID NO: 5914528 - DNA, 25 bp, Homo sapien
caaaattggctgtgctggcttggca

SEQ ID NO: 5914529 - DNA, 25 bp, Homo sapien
gaatgagaccacagcccataggaca

SEQ ID NO: 5914530 - DNA, 25 bp, Homo sapien
acgctgtcctgacggggctcctgga

SEQ ID NO: 5914531 - DNA, 25 bp, Homo sapien
ctcttcctggggaccctaaaagaca

SEQ ID NO: 5914532 - DNA, 25 bp, Homo sapien
ctcggccctctcacccacgctgtcc

SEQ ID NO: 5914533 - DNA, 25 bp, Homo sapien
aacctagctagccaagtcttccatt

SEQ ID NO: 5914534 - DNA, 25 bp, Homo sapien
acagggagccaaccagtatagtggc

SEQ ID NO: 5914535 - DNA, 25 bp, Homo sapien
gagactctgggaatgagaccacagc

SEQ ID NO: 5914536 - DNA, 25 bp, Homo sapien
agattacactcccgaggcctcacat

SEQ ID NO: 5914537 - DNA, 25 bp, Homo sapien
accagccccaaacctgcactgcatt

SEQ ID NO: 5914538 - DNA, 25 bp, Homo sapien
cgaggagcccgtctctcaagattac

SEQ ID NO: 5914539 - DNA, 25 bp, Homo sapien
gccaagcactctcttcctggggacc

SEQ ID NO: 5914540 - DNA, 25 bp, Homo sapien
ccaaattcctcaagcaaggagactc

SEQ ID NO: 5914541 - DNA, 25 bp, Homo sapien
tcctcactgtgaaatagggagaaac

SEQ ID NO: 5914542 - DNA, 25 bp, Homo sapien
gccttttcagaaacggacccaaaga

SEQ ID NO: 5914543 - DNA, 25 bp, Homo sapien
ggcaggaccactggtgacatggact

SEQ ID NO: 5914544 - DNA, 25 bp, Homo sapien
gagaaacctagctagccaagtcttc

SEQ ID NO: 5914545 - DNA, 25 bp, Homo sapien
ctacagccaatcatgtggcagcatg

SEQ ID NO: 5914546 - DNA, 25 bp, Homo sapien
tgaagtggccaaattcctcaagcaa

SEQ ID NO: 5914547 - DNA, 25 bp, Homo sapien
gcacgttgacaagccttccttctcc

SEQ ID NO: 5914548 - DNA, 25 bp, Homo sapien
gtcacaagtggctgggcaggcccag

SEQ ID NO: 5914549 - DNA, 25 bp, Homo sapien
aagacaaagtgcttcctctggacac

SEQ ID NO: 5914550 - DNA, 25 bp, Homo sapien
cactggtgacatggacttctctgta

SEQ ID NO: 5914551 - DNA, 25 bp, Homo sapien
gtggtagggcacgttgacaagcctt

SEQ ID NO: 5914552 - DNA, 25 bp, Homo sapien
cactcggccctctcacccacgctgt

SEQ ID NO: 5914553 - DNA, 25 bp, Homo sapien
ctctgggaatgagaccacagcccat

SEQ ID NO: 5914554 - DNA, 25 bp, Homo sapien
attggctgtgctggcttggcactgc

SEQ ID NO: 5914555 - DNA, 25 bp, Homo sapien
ggacagaagaagagaactccaactc

SEQ ID NO: 5914556 - DNA, 25 bp, Homo sapien
cctcctcactgtgaaatagggagaa

SEQ ID NO: 5914557 - DNA, 25 bp, Homo sapien
tgtcttgggcatttgtaaccttttt

SEQ ID NO: 5914558 - DNA, 25 bp, Homo sapien
cacagcaggctggaccaccagcccc

SEQ ID NO: 5914559 - DNA, 25 bp, Homo sapien
taagggcccatgtcttgggcatttg

SEQ ID NO: 5914560 - DNA, 25 bp, Homo sapien
gtcccttgggggcggttactgtgtg

SEQ ID NO: 5914561 - DNA, 25 bp, Homo sapien
gggctcctggagcatggcaggaatg

SEQ ID NO: 5914562 - DNA, 25 bp, Homo sapien
gactctgactaaaggcctgtctgag

SEQ ID NO: 5914563 - DNA, 25 bp, Homo sapien
gagcccgtctctcaagattacactc

SEQ ID NO: 5914564 - DNA, 25 bp, Homo sapien
tggacacctgggcaggaccactggt

SEQ ID NO: 5914565 - DNA, 25 bp, Homo sapien
caagcaaggagactctgggaatgag

SEQ ID NO: 5914566 - DNA, 25 bp, Homo sapien
cagataaaaccacagcaggctggac

SEQ ID NO: 5914567 - DNA, 25 bp, Homo sapien
aatagggagaaacctagctagccaa

SEQ ID NO: 5914568 - DNA, 25 bp, Homo sapien
gactctgggaatgagaccacagccc

SEQ ID NO: 5914569 - DNA, 25 bp, Homo sapien
tggcaggaatgcccatgggagaaca

SEQ ID NO: 5914570 - DNA, 25 bp, Homo sapien
catggcaggaatgcccatgggagaa

SEQ ID NO: 5914571 - DNA, 25 bp, Homo sapien
atcactacagccaatcatgtggcag

SEQ ID NO: 5914572 - DNA, 25 bp, Homo sapien
gcttaacaactagagccactcggcc

SEQ ID NO: 5914573 - DNA, 25 bp, Homo sapien
cagccccaaacctgcactgcattga

SEQ ID NO: 5914574 - DNA, 25 bp, Homo sapien
cactacagccaatcatgtggcagca

SEQ ID NO: 5914575 - DNA, 25 bp, Homo sapien
ctttcaggaaccttttattcaagaa

SEQ ID NO: 5914576 - DNA, 25 bp, Homo sapien
ctcagactctgactaaaggcctgtc

SEQ ID NO: 5914577 - DNA, 25 bp, Homo sapien
ctcactgtgaaatagggagaaacct

SEQ ID NO: 5914578 - DNA, 25 bp, Homo sapien
tagggagaaacctagctagccaagt

SEQ ID NO: 5914579 - DNA, 25 bp, Homo sapien
ctgtgaaatagggagaaacctagct

SEQ ID NO: 5914580 - DNA, 25 bp, Homo sapien
aatgaagtggccaaattcctcaagc

SEQ ID NO: 5914581 - DNA, 25 bp, Homo sapien
ccttgagcccctttaacctcactgc

SEQ ID NO: 5914582 - DNA, 25 bp, Homo sapien
tagcgtggtagggcacgttgacaag

SEQ ID NO: 5914583 - DNA, 25 bp, Homo sapien
atgactttcaggaaccttttattca

SEQ ID NO: 5914584 - DNA, 25 bp, Homo sapien
gggaccctaaaagacaaagtgcttc

SEQ ID NO: 5914585 - DNA, 25 bp, Homo sapien
ttttctgtaacctaagaggccccat

SEQ ID NO: 5914586 - DNA, 25 bp, Homo sapien
cggggctcctggagcatggcaggaa

SEQ ID NO: 5914587 - DNA, 25 bp, Homo sapien
ttaacaactagagccactcggccct

SEQ ID NO: 5914588 - DNA, 25 bp, Homo sapien
gaatgcccatgggagaacagaccga

SEQ ID NO: 5914589 - DNA, 25 bp, Homo sapien
caaagtgcttcctctggacacctgg

SEQ ID NO: 5914590 - DNA, 25 bp, Homo sapien
gtctttgatggtgttttctaacttt

SEQ ID NO: 5914591 - DNA, 25 bp, Homo sapien
ttcctctggacacctgggcaggacc

SEQ ID NO: 5914592 - DNA, 25 bp, Homo sapien
agaccgaggagcccgtctctcaaga

SEQ ID NO: 5914593 - DNA, 25 bp, Homo sapien
tttaacctcactgcccccaccgaag

SEQ ID NO: 5914594 - DNA, 25 bp, Homo sapien
gtttactagggcccagagacaggga

SEQ ID NO: 5914595 - DNA, 25 bp, Homo sapien
gtggcagtgaccaagtcacaagtgg

SEQ ID NO: 5914596 - DNA, 25 bp, Homo sapien
agcactctcttcctggggaccctaa

SEQ ID NO: 5914597 - DNA, 25 bp, Homo sapien
ctgacggggctcctggagcatggca

SEQ ID NO: 5914598 - DNA, 25 bp, Homo sapien
acagccaatcatgtggcagcatggg

SEQ ID NO: 5914599 - DNA, 25 bp, Homo sapien
ttttattcaagaagtttccctcctc

SEQ ID NO: 5914600 - DNA, 25 bp, Homo sapien
aacctgcactgcattgagatgactt

SEQ ID NO: 5914601 - DNA, 25 bp, Homo sapien
agtggctgggcaggcccagccaagc

SEQ ID NO: 5914602 - DNA, 25 bp, Homo sapien
gaccaagtcacaagtggctgggcag

SEQ ID NO: 5914603 - DNA, 25 bp, Homo sapien
aactcggactcagactctgactaaa

SEQ ID NO: 5914604 - DNA, 25 bp, Homo sapien
agaagaagagaactccaactcggac

SEQ ID NO: 5914605 - DNA, 25 bp, Homo sapien
gagaacagaccgaggagcccgtctc

SEQ ID NO: 5914606 - DNA, 25 bp, Homo sapien
ctaacagggacagataaaaccacag

SEQ ID NO: 5914607 - DNA, 25 bp, Homo sapien
gccccatgaataagggcccatgtct

SEQ ID NO: 5914608 - DNA, 25 bp, Homo sapien
ccacagcccataggacagaagaaga

SEQ ID NO: 5914609 - DNA, 25 bp, Homo sapien
agcatggcaggaatgcccatgggag

SEQ ID NO: 5914610 - DNA, 25 bp, Homo sapien
ttattcaagaagtttccctcctcac

SEQ ID NO: 5914611 - DNA, 25 bp, Homo sapien
tgtaacaaatggtcttttctgtaac

SEQ ID NO: 5914612 - DNA, 25 bp, Homo sapien
tgcactgcattgagatgactttcag

SEQ ID NO: 5914613 - DNA, 25 bp, Homo sapien
ctttctgttactaacagggacagat

SEQ ID NO: 5914614 - DNA, 25 bp, Homo sapien
cggagccaatcactacagccaatca

SEQ ID NO: 5914615 - DNA, 25 bp, Homo sapien
ttaatgaagtggccaaattcctcaa

SEQ ID NO: 5914616 - DNA, 25 bp, Homo sapien
tcctcaagcaaggagactctgggaa

SEQ ID NO: 5914617 - DNA, 25 bp, Homo sapien
gactttctgttactaacagggacag

SEQ ID NO: 5914618 - DNA, 25 bp, Homo sapien
cgaggcctcacattcaaaattggct

SEQ ID NO: 5914619 - DNA, 25 bp, Homo sapien
gggagaaacctagctagccaagtct

SEQ ID NO: 5914620 - DNA, 25 bp, Homo sapien
cagcaggctggaccaccagccccaa

SEQ ID NO: 5914621 - DNA, 25 bp, Homo sapien
acagaagaagagaactccaactcgg

SEQ ID NO: 5914622 - DNA, 25 bp, Homo sapien
ttctgtaacctaagaggccccatga

SEQ ID NO: 5914623 - DNA, 25 bp, Homo sapien
gtctgagtccgagttggagttctct

SEQ ID NO: 5914624 - DNA, 25 bp, Homo sapien
ctcattcccagagtctccttgcttg

SEQ ID NO: 5914625 - DNA, 25 bp, Homo sapien
cttggtcactgccactatactggtt

SEQ ID NO: 5914626 - DNA, 25 bp, Homo sapien
agggactacagagaagtccatgtca

SEQ ID NO: 5914627 - DNA, 25 bp, Homo sapien
agctaggtttctccctatttcacag

SEQ ID NO: 5914628 - DNA, 25 bp, Homo sapien
aagccagcacagccaattttgaatg

SEQ ID NO: 5914629 - DNA, 25 bp, Homo sapien
ttcttgaataaaaggttcctgaaag

SEQ ID NO: 5914630 - DNA, 25 bp, Homo sapien
catgggcattcctgccatgctccag

SEQ ID NO: 5914631 - DNA, 25 bp, Homo sapien
ctccgtttgatgtgtgcttcggtgg

SEQ ID NO: 5914632 - DNA, 25 bp, Homo sapien
ggggctggtggtccagcctgctgtg

SEQ ID NO: 5914633 - DNA, 25 bp, Homo sapien
ggctctagttgttaagctcagacag

SEQ ID NO: 5914634 - DNA, 25 bp, Homo sapien
gccactatactggttggctccctgt

SEQ ID NO: 5914635 - DNA, 25 bp, Homo sapien
cagtggtcctgcccaggtgtccaga

SEQ ID NO: 5914636 - DNA, 25 bp, Homo sapien
gaggcctcgggagtgtaatcttgag

SEQ ID NO: 5914637 - DNA, 25 bp, Homo sapien
gagacgggctcctcggtctgttctc

SEQ ID NO: 5914638 - DNA, 25 bp, Homo sapien
agggtccccaggaagagagtgcttg

SEQ ID NO: 5914639 - DNA, 25 bp, Homo sapien
cagagtctgagtccgagttggagtt

SEQ ID NO: 5914640 - DNA, 25 bp, Homo sapien
gcagtgccaagccagcacagccaat

SEQ ID NO: 5914641 - DNA, 25 bp, Homo sapien
tccccaggaagagagtgcttggctg

SEQ ID NO: 5914642 - DNA, 25 bp, Homo sapien
tagtaacagaaagtcccaccccacc

SEQ ID NO: 5914643 - DNA, 25 bp, Homo sapien
aatggaagacttggctagctaggtt

SEQ ID NO: 5914644 - DNA, 25 bp, Homo sapien
ggtcctgcccaggtgtccagaggaa

SEQ ID NO: 5914645 - DNA, 25 bp, Homo sapien
ggcattcctgccatgctccaggagc

SEQ ID NO: 5914646 - DNA, 25 bp, Homo sapien
cctgtctctgggccctagtaaacaa

SEQ ID NO: 5914647 - DNA, 25 bp, Homo sapien
ccaagccagcacagccaattttgaa

SEQ ID NO: 5914648 - DNA, 25 bp, Homo sapien
ctcagcagtgccaagccagcacagc

SEQ ID NO: 5914649 - DNA, 25 bp, Homo sapien
gagagacgggctcctcggtctgttc

SEQ ID NO: 5914650 - DNA, 25 bp, Homo sapien
gaaaggggagaaggaaggcttgtca

SEQ ID NO: 5914651 - DNA, 25 bp, Homo sapien
tgtggtctcattcccagagtctcct

SEQ ID NO: 5914652 - DNA, 25 bp, Homo sapien
gtgcaggtttggggctggtggtcca

SEQ ID NO: 5914653 - DNA, 25 bp, Homo sapien
atcaaagacacacacagtaaccgcc

SEQ ID NO: 5914654 - DNA, 25 bp, Homo sapien
ctaatggaagacttggctagctagg

SEQ ID NO: 5914655 - DNA, 25 bp, Homo sapien
aaaggttcctgaaagtcatctcaat

SEQ ID NO: 5914656 - DNA, 25 bp, Homo sapien
tgtcctatgggctgtggtctcattc

SEQ ID NO: 5914657 - DNA, 25 bp, Homo sapien
taaccgcccccaagggactacagag

SEQ ID NO: 5914658 - DNA, 25 bp, Homo sapien
agaaggaaggcttgtcaacgtgccc

SEQ ID NO: 5914659 - DNA, 25 bp, Homo sapien
tcaccagtggtcctgcccaggtgtc

SEQ ID NO: 5914660 - DNA, 25 bp, Homo sapien
cctgctgtggttttatctgtccctg

SEQ ID NO: 5914661 - DNA, 25 bp, Homo sapien
cctttagtcagagtctgagtccgag

SEQ ID NO: 5914662 - DNA, 25 bp, Homo sapien
ggcctttagtcagagtctgagtccg

SEQ ID NO: 5914663 - DNA, 25 bp, Homo sapien
agtgaggttaaaggggctcaaggac

SEQ ID NO: 5914664 - DNA, 25 bp, Homo sapien
cattcccagagtctccttgcttgag

SEQ ID NO: 5914665 - DNA, 25 bp, Homo sapien
taaaaaagttagaaaacaccatcaa

SEQ ID NO: 5914666 - DNA, 25 bp, Homo sapien
ccatcaaagacacacacagtaaccg

SEQ ID NO: 5914667 - DNA, 25 bp, Homo sapien
gattggctccgtttgatgtgtgctt

SEQ ID NO: 5914668 - DNA, 25 bp, Homo sapien
accgcccccaagggactacagagaa

SEQ ID NO: 5914669 - DNA, 25 bp, Homo sapien
ttctcccatgggcattcctgccatg

SEQ ID NO: 5914670 - DNA, 25 bp, Homo sapien
ctgagtccgagttggagttctcttc

SEQ ID NO: 5914671 - DNA, 25 bp, Homo sapien
gggctgtggtctcattcccagagtc

SEQ ID NO: 5914672 - DNA, 25 bp, Homo sapien
tcctgaaagtcatctcaatgcagtg

SEQ ID NO: 5914673 - DNA, 25 bp, Homo sapien
cccatgggcattcctgccatgctcc

SEQ ID NO: 5914674 - DNA, 25 bp, Homo sapien
ctctaatggaagacttggctagcta

SEQ ID NO: 5914675 - DNA, 25 bp, Homo sapien
tttagtcagagtctgagtccgagtt

SEQ ID NO: 5914676 - DNA, 25 bp, Homo sapien
ggccgagtggctctagttgttaagc

SEQ ID NO: 5914677 - DNA, 25 bp, Homo sapien
ggaaggcttgtcaacgtgccctacc

SEQ ID NO: 5914678 - DNA, 25 bp, Homo sapien
cttgtcaacgtgccctaccacgcta

SEQ ID NO: 5914679 - DNA, 25 bp, Homo sapien
aacaaatctttgggtccgtttctga

SEQ ID NO: 5914680 - DNA, 25 bp, Homo sapien
tgggccctagtaaacaaatctttgg

SEQ ID NO: 5914681 - DNA, 25 bp, Homo sapien
aggaagcactttgtcttttagggtc

SEQ ID NO: 5914682 - DNA, 25 bp, Homo sapien
gaaaagaccatttgttacattgttt

SEQ ID NO: 5914683 - DNA, 25 bp, Homo sapien
aggttacaaatgcccaagacatggg

SEQ ID NO: 5914684 - DNA, 25 bp, Homo sapien
agcgtgggtgagagggccgagtggc

SEQ ID NO: 5914685 - DNA, 25 bp, Homo sapien
ttgtgacttggtcactgccactata

SEQ ID NO: 5914686 - DNA, 25 bp, Homo sapien
gagtgtaatcttgagagacgggctc

SEQ ID NO: 5914687 - DNA, 25 bp, Homo sapien
ccctgttagtaacagaaagtcccac

SEQ ID NO: 5914688 - DNA, 25 bp, Homo sapien
aatcttgagagacgggctcctcggt

SEQ ID NO: 5914689 - DNA, 25 bp, Homo sapien
gtctcattcccagagtctccttgct

SEQ ID NO: 5914690 - DNA, 25 bp, Homo sapien
cagcagtgccaagccagcacagcca

SEQ ID NO: 5914691 - DNA, 25 bp, Homo sapien
gttagtaacagaaagtcccacccca

SEQ ID NO: 5914692 - DNA, 25 bp, Homo sapien
gcacagccaattttgaatgtgaggc

SEQ ID NO: 5914693 - DNA, 25 bp, Homo sapien
cattcctgccatgctccaggagccc

SEQ ID NO: 5914694 - DNA, 25 bp, Homo sapien
aaaaaggttacaaatgcccaagaca

SEQ ID NO: 5914695 - DNA, 25 bp, Homo sapien
atggggcctcttaggttacagaaaa

SEQ ID NO: 5914696 - DNA, 25 bp, Homo sapien
aaggcctcagacctctaatggaaga

SEQ ID NO: 5914697 - DNA, 25 bp, Homo sapien
ccttgcttgaggaatttggccactt

SEQ ID NO: 5914698 - DNA, 25 bp, Homo sapien
tctgttctcccatgggcattcctgc

SEQ ID NO: 5914699 - DNA, 25 bp, Homo sapien
ggttttatctgtccctgttagtaac

SEQ ID NO: 5914700 - DNA, 25 bp, Homo sapien
agacttggctagctaggtttctccc

SEQ ID NO: 5914701 - DNA, 25 bp, Homo sapien
ttggctagctaggtttctccctatt

SEQ ID NO: 5914702 - DNA, 25 bp, Homo sapien
ccttattcatggggcctcttaggtt

SEQ ID NO: 5914703 - DNA, 25 bp, Homo sapien
gtttggggctggtggtccagcctgc

SEQ ID NO: 5914704 - DNA, 25 bp, Homo sapien
tctgaaaaggcctcagacctctaat

SEQ ID NO: 5914705 - DNA, 25 bp, Homo sapien
tacagaaaagaccatttgttacatt

SEQ ID NO: 5914706 - DNA, 25 bp, Homo sapien
ctgccactatactggttggctccct

SEQ ID NO: 5914707 - DNA, 25 bp, Homo sapien
ggacagcgtgggtgagagggccgag

SEQ ID NO: 5914708 - DNA, 25 bp, Homo sapien
gttaaaggggctcaaggacagaaag

SEQ ID NO: 5914709 - DNA, 25 bp, Homo sapien
ggtggtccagcctgctgtggtttta

SEQ ID NO: 5914710 - DNA, 25 bp, Homo sapien
tgccctaccacgctagctcagcagt

SEQ ID NO: 5914711 - DNA, 25 bp, Homo sapien
ggctggtggtccagcctgctgtggt

SEQ ID NO: 5914712 - DNA, 25 bp, Homo sapien
gtccagcctgctgtggttttatctg

SEQ ID NO: 5914713 - DNA, 25 bp, Homo sapien
tgagagggccgagtggctctagttg

SEQ ID NO: 5914714 - DNA, 25 bp, Homo sapien
cacacacagtaaccgcccccaaggg

SEQ ID NO: 5914715 - DNA, 25 bp, Homo sapien
ggcctcttaggttacagaaaagacc

SEQ ID NO: 5914716 - DNA, 25 bp, Homo sapien
atgctccaggagccccgtcaggaca

SEQ ID NO: 5914717 - DNA, 25 bp, Homo sapien
cactatactggttggctccctgtct

SEQ ID NO: 5914718 - DNA, 25 bp, Homo sapien
cccaagggactacagagaagtccat

SEQ ID NO: 5914719 - DNA, 25 bp, Homo sapien
ctcctcggtctgttctcccatgggc

SEQ ID NO: 5914720 - DNA, 25 bp, Homo sapien
ttttagggtccccaggaagagagtg

SEQ ID NO: 5914721 - DNA, 25 bp, Homo sapien
ccctaccacgctagctcagcagtgc

SEQ ID NO: 5914722 - DNA, 25 bp, Homo sapien
ggtccgtttctgaaaaggcctcaga

SEQ ID NO: 5914723 - DNA, 25 bp, Homo sapien
gggcagtgaggttaaaggggctcaa

SEQ ID NO: 5914724 - DNA, 25 bp, Homo sapien
aagtcatctcaatgcagtgcaggtt

SEQ ID NO: 5914725 - DNA, 25 bp, Homo sapien
cgctagctcagcagtgccaagccag

SEQ ID NO: 5914726 - DNA, 25 bp, Homo sapien
actacagagaagtccatgtcaccag

SEQ ID NO: 5914727 - DNA, 25 bp, Homo sapien
acagccaattttgaatgtgaggcct

SEQ ID NO: 5914728 - DNA, 25 bp, Homo sapien
cacatgattggctgtagtgattggc

SEQ ID NO: 5914729 - DNA, 25 bp, Homo sapien
agctcagcagtgccaagccagcaca

SEQ ID NO: 5914730 - DNA, 25 bp, Homo sapien
ctccctatttcacagtgaggaggga

SEQ ID NO: 5914731 - DNA, 25 bp, Homo sapien
ttaggttacagaaaagaccatttgt

SEQ ID NO: 5914732 - DNA, 25 bp, Homo sapien
aaggggagaaggaaggcttgtcaac

SEQ ID NO: 5914733 - DNA, 25 bp, Homo sapien
aacaccatcaaagacacacacagta

SEQ ID NO: 5914734 - DNA, 25 bp, Homo sapien
tggtccagcctgctgtggttttatc

SEQ ID NO: 5914735 - DNA, 25 bp, Homo sapien
ggctcaaggacagaaaggggagaag

SEQ ID NO: 5914736 - DNA, 25 bp, Homo sapien
tcatggggcctcttaggttacagaa

SEQ ID NO: 5914737 - DNA, 25 bp, Homo sapien
gcaggtttggggctggtggtccagc

SEQ ID NO: 5914738 - DNA, 25 bp, Homo sapien
aaggaaggcttgtcaacgtgcccta

SEQ ID NO: 5914739 - DNA, 25 bp, Homo sapien
gaatgtgaggcctcgggagtgtaat

SEQ ID NO: 5914740 - DNA, 25 bp, Homo sapien
gacacacacagtaaccgcccccaag

SEQ ID NO: 5914741 - DNA, 25 bp, Homo sapien
cctcgggagtgtaatcttgagagac

SEQ ID NO: 5914742 - DNA, 25 bp, Homo sapien
ctagttgttaagctcagacaggcct

SEQ ID NO: 5914743 - DNA, 25 bp, Homo sapien
tgccatgctccaggagccccgtcag

SEQ ID NO: 5914744 - DNA, 25 bp, Homo sapien
aaaaggcctcagacctctaatggaa

SEQ ID NO: 5914745 - DNA, 25 bp, Homo sapien
gagtccgagttggagttctcttctt

SEQ ID NO: 5914746 - DNA, 25 bp, Homo sapien
gagtctgagtccgagttggagttct

SEQ ID NO: 5914747 - DNA, 25 bp, Homo sapien
acttgtgacttggtcactgccacta

SEQ ID NO: 5914748 - DNA, 25 bp, Homo sapien
ctccttgcttgaggaatttggccac

SEQ ID NO: 5914749 - DNA, 25 bp, Homo sapien
cccagagtctccttgcttgaggaat

SEQ ID NO: 5914750 - DNA, 25 bp, Homo sapien
ggctcctcggtctgttctcccatgg

SEQ ID NO: 5914751 - DNA, 25 bp, Homo sapien
gccacatgattggctgtagtgattg

SEQ ID NO: 5914752 - DNA, 25 bp, Homo sapien
cctgccatgctccaggagccccgtc

SEQ ID NO: 5914753 - DNA, 25 bp, Homo sapien
gctgtagtgattggctccgtttgat

SEQ ID NO: 5914754 - DNA, 25 bp, Homo sapien
ggtctgttctcccatgggcattcct

SEQ ID NO: 5914755 - DNA, 25 bp, Homo sapien
gacttggtcactgccactatactgg

SEQ ID NO: 5914756 - DNA, 25 bp, Homo sapien
ttagggtccccaggaagagagtgct

SEQ ID NO: 5914757 - DNA, 25 bp, Homo sapien
atctgtccctgttagtaacagaaag

SEQ ID NO: 5914758 - DNA, 25 bp, Homo sapien
acttggctagctaggtttctcccta

SEQ ID NO: 5914759 - DNA, 25 bp, Homo sapien
gagtggctctagttgttaagctcag

SEQ ID NO: 5914760 - DNA, 25 bp, Homo sapien
tgggtgagagggccgagtggctcta

SEQ ID NO: 5914761 - DNA, 25 bp, Homo sapien
ttcacagtgaggagggaaacttctt

SEQ ID NO: 5914762 - DNA, 25 bp, Homo sapien
aaggggctcaaggacagaaagggga

SEQ ID NO: 5914763 - DNA, 25 bp, Homo sapien
aggtttctccctatttcacagtgag

SEQ ID NO: 5914764 - DNA, 25 bp, Homo sapien
tagtgattggctccgtttgatgtgt

SEQ ID NO: 5914765 - DNA, 25 bp, Homo sapien
cccatgctgccacatgattggctgt

SEQ ID NO: 5914766 - DNA, 25 bp, Homo sapien
tcttgagagacgggctcctcggtct

SEQ ID NO: 5914767 - DNA, 25 bp, Homo sapien
attcatggggcctcttaggttacag

SEQ ID NO: 5914768 - DNA, 25 bp, Homo sapien
actggttggctccctgtctctgggc

SEQ ID NO: 5914769 - DNA, 25 bp, Homo sapien
ggtgagagggccgagtggctctagt

SEQ ID NO: 5914770 - DNA, 25 bp, Homo sapien
gggcctgcccagccacttgtgactt

SEQ ID NO: 5914771 - DNA, 25 bp, Homo sapien
ctatttcacagtgaggagggaaact

SEQ ID NO: 5914772 - DNA, 25 bp, Homo sapien
gggcccttattcatggggcctctta

SEQ ID NO: 5914773 - DNA, 25 bp, Homo sapien
caggaagagagtgcttggctgggcc

SEQ ID NO: 5914774 - DNA, 25 bp, Homo sapien
aaggcttgtcaacgtgccctaccac

SEQ ID NO: 5914775 - DNA, 25 bp, Homo sapien
ctggtggtccagcctgctgtggttt

SEQ ID NO: 5914776 - DNA, 25 bp, Homo sapien
aggttaaaggggctcaaggacagaa

SEQ ID NO: 5914777 - DNA, 25 bp, Homo sapien
gcccagccacttgtgacttggtcac

SEQ ID NO: 5914778 - DNA, 25 bp, Homo sapien
gaaagtcatctcaatgcagtgcagg

SEQ ID NO: 5914779 - DNA, 25 bp, Homo sapien
cttctgtcctatgggctgtggtctc

SEQ ID NO: 5914780 - DNA, 25 bp, Homo sapien
tgggtccgtttctgaaaaggcctca

SEQ ID NO: 5914781 - DNA, 25 bp, Homo sapien
tcgggagtgtaatcttgagagacgg

SEQ ID NO: 5914782 - DNA, 25 bp, Homo sapien
ttttatctgtccctgttagtaacag

SEQ ID NO: 5914783 - DNA, 25 bp, Homo sapien
caggagccccgtcaggacagcgtgg

SEQ ID NO: 5914784 - DNA, 25 bp, Homo sapien
gttacagaaaagaccatttgttaca

SEQ ID NO: 5914785 - DNA, 25 bp, Homo sapien
taaaaggttcctgaaagtcatctca

SEQ ID NO: 5914786 - DNA, 25 bp, Homo sapien
cacagtaaccgcccccaagggacta

SEQ ID NO: 5914787 - DNA, 25 bp, Homo sapien
ttattcatggggcctcttaggttac

SEQ ID NO: 5914788 - DNA, 25 bp, Homo sapien
gtcagagtctgagtccgagttggag

SEQ ID NO: 5914789 - DNA, 25 bp, Homo sapien
ggagccccgtcaggacagcgtgggt

SEQ ID NO: 5914790 - DNA, 25 bp, Homo sapien
tacaaatgcccaagacatgggccct

SEQ ID NO: 5914791 - DNA, 25 bp, Homo sapien
catgtcaccagtggtcctgcccagg

SEQ ID NO: 5914792 - DNA, 25 bp, Homo sapien
cagagaagtccatgtcaccagtggt

SEQ ID NO: 5914793 - DNA, 25 bp, Homo sapien
gccagcacagccaattttgaatgtg

SEQ ID NO: 5914794 - DNA, 25 bp, Homo sapien
cccccaagggactacagagaagtcc

SEQ ID NO: 5914795 - DNA, 25 bp, Homo sapien
gagttggagttctcttcttctgtcc

SEQ ID NO: 5914796 - DNA, 25 bp, Homo sapien
ttagaaaacaccatcaaagacacac

SEQ ID NO: 5914797 - DNA, 25 bp, Homo sapien
ggctgggcctgcccagccacttgtg

SEQ ID NO: 5914798 - DNA, 25 bp, Homo sapien
gcttgaggaatttggccacttcatt

SEQ ID NO: 5914799 - DNA, 25 bp, Homo sapien
caggacagcgtgggtgagagggccg

SEQ ID NO: 5914800 - DNA, 25 bp, Homo sapien
tccaggagccccgtcaggacagcgt

SEQ ID NO: 5914801 - DNA, 25 bp, Homo sapien
ttgttaagctcagacaggcctttag

SEQ ID NO: 5914802 - DNA, 25 bp, Homo sapien
cttcggtgggggcagtgaggttaaa

SEQ ID NO: 5914803 - DNA, 25 bp, Homo sapien
gtgggggcagtgaggttaaaggggc

SEQ ID NO: 5914804 - DNA, 25 bp, Homo sapien
cagaaaagaccatttgttacattgt

SEQ ID NO: 5914805 - DNA, 25 bp, Homo sapien
ctgaaagtcatctcaatgcagtgca

SEQ ID NO: 5914806 - DNA, 25 bp, Homo sapien
agggccgagtggctctagttgttaa

SEQ ID NO: 5914807 - DNA, 25 bp, Homo sapien
gcctgcccagccacttgtgacttgg

SEQ ID NO: 5914808 - DNA, 25 bp, Homo sapien
tggctccctgtctctgggccctagt

SEQ ID NO: 5914809 - DNA, 25 bp, Homo sapien
ccagcctgctgtggttttatctgtc

SEQ ID NO: 5914810 - DNA, 25 bp, Homo sapien
gttctcttcttctgtcctatgggct

SEQ ID NO: 5914811 - DNA, 25 bp, Homo sapien
ccagaggaagcactttgtcttttag

SEQ ID NO: 5914812 - DNA, 25 bp, Homo sapien
tgaggttaaaggggctcaaggacag

SEQ ID NO: 5914813 - DNA, 25 bp, Homo sapien
gtgattggctccgtttgatgtgtgc

SEQ ID NO: 5914814 - DNA, 25 bp, Homo sapien
tgtcaacgtgccctaccacgctagc

SEQ ID NO: 5914815 - DNA, 25 bp, Homo sapien
cttgaataaaaggttcctgaaagtc

SEQ ID NO: 5914816 - DNA, 25 bp, Homo sapien
ctcccatgggcattcctgccatgct

SEQ ID NO: 5914817 - DNA, 25 bp, Homo sapien
acagcgtgggtgagagggccgagtg

SEQ ID NO: 5914818 - DNA, 25 bp, Homo sapien
gatgtgtgcttcggtgggggcagtg

SEQ ID NO: 5914819 - DNA, 25 bp, Homo sapien
tgtctctgggccctagtaaacaaat

SEQ ID NO: 5914820 - DNA, 25 bp, Homo sapien
gtgacttggtcactgccactatact

SEQ ID NO: 5914821 - DNA, 25 bp, Homo sapien
agaaaacaccatcaaagacacacac

SEQ ID NO: 5914822 - DNA, 25 bp, Homo sapien
ccacttgtgacttggtcactgccac

SEQ ID NO: 5914823 - DNA, 25 bp, Homo sapien
tgaaaaggcctcagacctctaatgg

SEQ ID NO: 5914824 - DNA, 25 bp, Homo sapien
agccacttgtgacttggtcactgcc

SEQ ID NO: 5914825 - DNA, 25 bp, Homo sapien
ttgcttgaggaatttggccacttca

SEQ ID NO: 5914826 - DNA, 25 bp, Homo sapien
gagtctccttgcttgaggaatttgg

SEQ ID NO: 5914827 - DNA, 25 bp, Homo sapien
ctcaaggacagaaaggggagaagga

SEQ ID NO: 5914828 - DNA, 25 bp, Homo sapien
gttggagttctcttcttctgtccta

SEQ ID NO: 5914829 - DNA, 25 bp, Homo sapien
aatgcccaagacatgggcccttatt

SEQ ID NO: 5914830 - DNA, 25 bp, Homo sapien
aaaacaccatcaaagacacacacag

SEQ ID NO: 5914831 - DNA, 25 bp, Homo sapien
tggagttctcttcttctgtcctatg

SEQ ID NO: 5914832 - DNA, 25 bp, Homo sapien
cgcccccaagggactacagagaagt

SEQ ID NO: 5914833 - DNA, 25 bp, Homo sapien
ggggcctcttaggttacagaaaaga

SEQ ID NO: 5914834 - DNA, 25 bp, Homo sapien
ctgggcctgcccagccacttgtgac

SEQ ID NO: 5914835 - DNA, 25 bp, Homo sapien
tctgtcctatgggctgtggtctcat

SEQ ID NO: 5914836 - DNA, 25 bp, Homo sapien
tcctatgggctgtggtctcattccc

SEQ ID NO: 5914837 - DNA, 25 bp, Homo sapien
gcccttattcatggggcctcttagg

SEQ ID NO: 5914838 - DNA, 25 bp, Homo sapien
agccaattttgaatgtgaggcctcg

SEQ ID NO: 5914839 - DNA, 25 bp, Homo sapien
ggcctcagacctctaatggaagact

SEQ ID NO: 5914840 - DNA, 25 bp, Homo sapien
cagtgcaggtttggggctggtggtc

SEQ ID NO: 5914841 - DNA, 25 bp, Homo sapien
agaccatttgttacattgtttttgt

SEQ ID NO: 5914842 - DNA, 25 bp, Homo sapien
tcttcttctgtcctatgggctgtgg

SEQ ID NO: 5914843 - DNA, 25 bp, Homo sapien
ttttgaatgtgaggcctcgggagtg

SEQ ID NO: 5914844 - DNA, 25 bp, Homo sapien
tgtcttttagggtccccaggaagag

SEQ ID NO: 5914845 - DNA, 25 bp, Homo sapien
tgcttcggtgggggcagtgaggtta

SEQ ID NO: 5914846 - DNA, 25 bp, Homo sapien
ttgagagacgggctcctcggtctgt

SEQ ID NO: 5914847 - DNA, 25 bp, Homo sapien
gctgtggtctcattcccagagtctc

SEQ ID NO: 5914848 - DNA, 25 bp, Homo sapien
caaatgcccaagacatgggccctta

SEQ ID NO: 5914849 - DNA, 25 bp, Homo sapien
gtcatctcaatgcagtgcaggtttg

SEQ ID NO: 5914850 - DNA, 25 bp, Homo sapien
ggcctcgggagtgtaatcttgagag

SEQ ID NO: 5914851 - DNA, 25 bp, Homo sapien
ggcttgtcaacgtgccctaccacgc

SEQ ID NO: 5914852 - DNA, 25 bp, Homo sapien
ctatactggttggctccctgtctct

SEQ ID NO: 5914853 - DNA, 25 bp, Homo sapien
acatgggcccttattcatggggcct

SEQ ID NO: 5914854 - DNA, 25 bp, Homo sapien
caccatcaaagacacacacagtaac

SEQ ID NO: 5914855 - DNA, 25 bp, Homo sapien
cacagtgaggagggaaacttcttga

SEQ ID NO: 5914856 - DNA, 25 bp, Homo sapien
gtaatcttgagagacgggctcctcg

SEQ ID NO: 5914857 - DNA, 25 bp, Homo sapien
cagtaaccgcccccaagggactaca

SEQ ID NO: 5914858 - DNA, 25 bp, Homo sapien
caaatctttgggtccgtttctgaaa

SEQ ID NO: 5914859 - DNA, 25 bp, Homo sapien
tgccaagccagcacagccaattttg

SEQ ID NO: 5914860 - DNA, 25 bp, Homo sapien
ccagccacttgtgacttggtcactg

SEQ ID NO: 5914861 - DNA, 25 bp, Homo sapien
gcttggctgggcctgcccagccact

SEQ ID NO: 5914862 - DNA, 25 bp, Homo sapien
gccctagtaaacaaatctttgggtc

SEQ ID NO: 5914863 - DNA, 25 bp, Homo sapien
acctctaatggaagacttggctagc

SEQ ID NO: 5914864 - DNA, 25 bp, Homo sapien
caggcctttagtcagagtctgagtc

SEQ ID NO: 5914865 - DNA, 25 bp, Homo sapien
cgtgccctaccacgctagctcagca

SEQ ID NO: 5914866 - DNA, 25 bp, Homo sapien
tgggcattcctgccatgctccagga

SEQ ID NO: 5914867 - DNA, 25 bp, Homo sapien
taaaggggctcaaggacagaaaggg

SEQ ID NO: 5914868 - DNA, 25 bp, Homo sapien
gaagcactttgtcttttagggtccc

SEQ ID NO: 5914869 - DNA, 25 bp, Homo sapien
atactggttggctccctgtctctgg

SEQ ID NO: 5914870 - DNA, 25 bp, Homo sapien
ctgcccagccacttgtgacttggtc

SEQ ID NO: 5914871 - DNA, 25 bp, Homo sapien
gggagtgtaatcttgagagacgggc

SEQ ID NO: 5914872 - DNA, 25 bp, Homo sapien
ttgaatgtgaggcctcgggagtgta

SEQ ID NO: 5914873 - DNA, 25 bp, Homo sapien
gtgtccagaggaagcactttgtctt

SEQ ID NO: 5914874 - DNA, 25 bp, Homo sapien
gtgcttggctgggcctgcccagcca

SEQ ID NO: 5914875 - DNA, 25 bp, Homo sapien
aattttgaatgtgaggcctcgggag

SEQ ID NO: 5914876 - DNA, 25 bp, Homo sapien
ccatgctccaggagccccgtcagga

SEQ ID NO: 5914877 - DNA, 25 bp, Homo sapien
tctctgggccctagtaaacaaatct

SEQ ID NO: 5914878 - DNA, 25 bp, Homo sapien
gtgaggagggaaacttcttgaataa

SEQ ID NO: 5914879 - DNA, 25 bp, Homo sapien
ttggctgggcctgcccagccacttg

SEQ ID NO: 5914880 - DNA, 25 bp, Homo sapien
cctcttaggttacagaaaagaccat

SEQ ID NO: 5914881 - DNA, 25 bp, Homo sapien
gctccaggagccccgtcaggacagc

SEQ ID NO: 5914882 - DNA, 25 bp, Homo sapien
ctcagacaggcctttagtcagagtc

SEQ ID NO: 5914883 - DNA, 25 bp, Homo sapien
aagacacacacagtaaccgccccca

SEQ ID NO: 5914884 - DNA, 25 bp, Homo sapien
agtccatgtcaccagtggtcctgcc

SEQ ID NO: 5914885 - DNA, 25 bp, Homo sapien
ccccgtcaggacagcgtgggtgaga

SEQ ID NO: 5914886 - DNA, 25 bp, Homo sapien
tttctgaaaaggcctcagacctcta

SEQ ID NO: 5914887 - DNA, 25 bp, Homo sapien
tgattggctgtagtgattggctccg

SEQ ID NO: 5914888 - DNA, 25 bp, Homo sapien
ctgtccctgttagtaacagaaagtc

SEQ ID NO: 5914889 - DNA, 25 bp, Homo sapien
gtctccttgcttgaggaatttggcc

SEQ ID NO: 5914890 - DNA, 25 bp, Homo sapien
gtggttttatctgtccctgttagta

SEQ ID NO: 5914891 - DNA, 25 bp, Homo sapien
ttcttctgtcctatgggctgtggtc

SEQ ID NO: 5914892 - DNA, 25 bp, Homo sapien
ctagctcagcagtgccaagccagca

SEQ ID NO: 5914893 - DNA, 25 bp, Homo sapien
caaagacacacacagtaaccgcccc

SEQ ID NO: 5914894 - DNA, 25 bp, Homo sapien
tgtcaccagtggtcctgcccaggtg

SEQ ID NO: 5914895 - DNA, 25 bp, Homo sapien
tgtgtgcttcggtgggggcagtgag

SEQ ID NO: 5914896 - DNA, 25 bp, Homo sapien
aggtgtccagaggaagcactttgtc

SEQ ID NO: 5914897 - DNA, 25 bp, Homo sapien
atgggcccttattcatggggcctct

SEQ ID NO: 5914898 - DNA, 25 bp, Homo sapien
agctcagacaggcctttagtcagag

SEQ ID NO: 5914899 - DNA, 25 bp, Homo sapien
ggagaaggaaggcttgtcaacgtgc

SEQ ID NO: 5914900 - DNA, 25 bp, Homo sapien
tgtagtgattggctccgtttgatgt

SEQ ID NO: 5914901 - DNA, 25 bp, Homo sapien
cctcagacctctaatggaagacttg

SEQ ID NO: 5914902 - DNA, 25 bp, Homo sapien
ttggctccgtttgatgtgtgcttcg

SEQ ID NO: 5914903 - DNA, 25 bp, Homo sapien
tctcttcttctgtcctatgggctgt

SEQ ID NO: 5914904 - DNA, 25 bp, Homo sapien
cactgccactatactggttggctcc

SEQ ID NO: 5914905 - DNA, 25 bp, Homo sapien
gtttgatgtgtgcttcggtgggggc

SEQ ID NO: 5914906 - DNA, 25 bp, Homo sapien
accacgctagctcagcagtgccaag

SEQ ID NO: 5914907 - DNA, 25 bp, Homo sapien
cagcacagccaattttgaatgtgag

SEQ ID NO: 5914908 - DNA, 25 bp, Homo sapien
gttcctgaaagtcatctcaatgcag

SEQ ID NO: 5914909 - DNA, 25 bp, Homo sapien
tataaaaaagttagaaaacaccatc

SEQ ID NO: 5914910 - DNA, 25 bp, Homo sapien
caaggacagaaaggggagaaggaag

SEQ ID NO: 5914911 - DNA, 25 bp, Homo sapien
gggggcagtgaggttaaaggggctc

SEQ ID NO: 5914912 - DNA, 25 bp, Homo sapien
gaagacttggctagctaggtttctc

SEQ ID NO: 5914913 - DNA, 25 bp, Homo sapien
atttcacagtgaggagggaaacttc

SEQ ID NO: 5914914 - DNA, 25 bp, Homo sapien
ctgcccaggtgtccagaggaagcac

SEQ ID NO: 5914915 - DNA, 25 bp, Homo sapien
aaagttagaaaacaccatcaaagac

SEQ ID NO: 5914916 - DNA, 25 bp, Homo sapien
ggctagctaggtttctccctatttc

SEQ ID NO: 5914917 - DNA, 25 bp, Homo sapien
gagtgcttggctgggcctgcccagc

SEQ ID NO: 5914918 - DNA, 25 bp, Homo sapien
catctcaatgcagtgcaggtttggg

SEQ ID NO: 5914919 - DNA, 25 bp, Homo sapien
ttcctgccatgctccaggagccccg

SEQ ID NO: 5914920 - DNA, 25 bp, Homo sapien
ggaagagagtgcttggctgggcctg

SEQ ID NO: 5914921 - DNA, 25 bp, Homo sapien
tcaacgtgccctaccacgctagctc

SEQ ID NO: 5914922 - DNA, 25 bp, Homo sapien
gagaagtccatgtcaccagtggtcc

SEQ ID NO: 5914923 - DNA, 25 bp, Homo sapien
gtggtcctgcccaggtgtccagagg

SEQ ID NO: 5914924 - DNA, 25 bp, Homo sapien
gtggctctagttgttaagctcagac

SEQ ID NO: 5914925 - DNA, 25 bp, Homo sapien
tacagagaagtccatgtcaccagtg

SEQ ID NO: 5914926 - DNA, 25 bp, Homo sapien
gagagtgcttggctgggcctgccca

SEQ ID NO: 5914927 - DNA, 25 bp, Homo sapien
agaggaagcactttgtcttttaggg

SEQ ID NO: 5914928 - DNA, 25 bp, Homo sapien
gtccgagttggagttctcttcttct

SEQ ID NO: 5914929 - DNA, 25 bp, Homo sapien
tcctgcccaggtgtccagaggaagc

SEQ ID NO: 5914930 - DNA, 25 bp, Homo sapien
tggttggctccctgtctctgggccc

SEQ ID NO: 5914931 - DNA, 25 bp, Homo sapien
cgtgggtgagagggccgagtggctc

SEQ ID NO: 5914932 - DNA, 25 bp, Homo sapien
ggggagaaggaaggcttgtcaacgt

SEQ ID NO: 5914933 - DNA, 25 bp, Homo sapien
ggggctcaaggacagaaaggggaga

SEQ ID NO: 5914934 - DNA, 25 bp, Homo sapien
gttacaaatgcccaagacatgggcc

SEQ ID NO: 5914935 - DNA, 25 bp, Homo sapien
gtgtaatcttgagagacgggctcct

SEQ ID NO: 5914936 - DNA, 25 bp, Homo sapien
attggctgtagtgattggctccgtt

SEQ ID NO: 5914937 - DNA, 25 bp, Homo sapien
tccatgtcaccagtggtcctgccca

SEQ ID NO: 5914938 - DNA, 25 bp, Homo sapien
tgcagtgcaggtttggggctggtgg

SEQ ID NO: 5914939 - DNA, 25 bp, Homo sapien
ggctccgtttgatgtgtgcttcggt

SEQ ID NO: 5914940 - DNA, 25 bp, Homo sapien
tggaagacttggctagctaggtttc

SEQ ID NO: 5914941 - DNA, 25 bp, Homo sapien
aggtttggggctggtggtccagcct

SEQ ID NO: 5914942 - DNA, 25 bp, Homo sapien
gaggagggaaacttcttgaataaaa

SEQ ID NO: 5914943 - DNA, 25 bp, Homo sapien
cagtgaggagggaaacttcttgaat

SEQ ID NO: 5914944 - DNA, 25 bp, Homo sapien
ggtccccaggaagagagtgcttggc

SEQ ID NO: 5914945 - DNA, 25 bp, Homo sapien
tggctgtagtgattggctccgtttg

SEQ ID NO: 5914946 - DNA, 25 bp, Homo sapien
ttgatgtgtgcttcggtgggggcag

SEQ ID NO: 5914947 - DNA, 25 bp, Homo sapien
ccgagtggctctagttgttaagctc

SEQ ID NO: 5914948 - DNA, 25 bp, Homo sapien
agccccgtcaggacagcgtgggtga

SEQ ID NO: 5914949 - DNA, 25 bp, Homo sapien
gcccaggtgtccagaggaagcactt

SEQ ID NO: 5914950 - DNA, 25 bp, Homo sapien
ccaattttgaatgtgaggcctcggg

SEQ ID NO: 5914951 - DNA, 25 bp, Homo sapien
tcggtgggggcagtgaggttaaagg

SEQ ID NO: 5914952 - DNA, 25 bp, Homo sapien
tgctgtggttttatctgtccctgtt

SEQ ID NO: 5914953 - DNA, 25 bp, Homo sapien
agtgccaagccagcacagccaattt

SEQ ID NO: 5914954 - DNA, 25 bp, Homo sapien
ctgtggttttatctgtccctgttag

SEQ ID NO: 5914955 - DNA, 25 bp, Homo sapien
ctgttagtaacagaaagtcccaccc

SEQ ID NO: 5914956 - DNA, 25 bp, Homo sapien
gtccctgttagtaacagaaagtccc

SEQ ID NO: 5914957 - DNA, 25 bp, Homo sapien
aggttcctgaaagtcatctcaatgc

SEQ ID NO: 5914958 - DNA, 25 bp, Homo sapien
tcttaggttacagaaaagaccattt

SEQ ID NO: 5914959 - DNA, 25 bp, Homo sapien
ccgtcaggacagcgtgggtgagagg

SEQ ID NO: 5914960 - DNA, 25 bp, Homo sapien
tgaataaaaggttcctgaaagtcat

SEQ ID NO: 5914961 - DNA, 25 bp, Homo sapien
gttaagctcagacaggcctttagtc

SEQ ID NO: 5914962 - DNA, 25 bp, Homo sapien
atgggctgtggtctcattcccagag

SEQ ID NO: 5914963 - DNA, 25 bp, Homo sapien
ccgtttgatgtgtgcttcggtgggg

SEQ ID NO: 5914964 - DNA, 25 bp, Homo sapien
cctcggtctgttctcccatgggcat

SEQ ID NO: 5914965 - DNA, 25 bp, Homo sapien
tccctgtctctgggccctagtaaac

SEQ ID NO: 5914966 - DNA, 25 bp, Homo sapien
acttcttgaataaaaggttcctgaa

SEQ ID NO: 5914967 - DNA, 25 bp, Homo sapien
caagacatgggcccttattcatggg

SEQ ID NO: 5914968 - DNA, 25 bp, Homo sapien
tcaatgcagtgcaggtttggggctg

SEQ ID NO: 5914969 - DNA, 25 bp, Homo sapien
aagagagtgcttggctgggcctgcc

SEQ ID NO: 5914970 - DNA, 25 bp, Homo sapien
gtcactgccactatactggttggct

SEQ ID NO: 5914971 - DNA, 25 bp, Homo sapien
ttctccctatttcacagtgaggagg

SEQ ID NO: 5914972 - DNA, 25 bp, Homo sapien
tccgtttctgaaaaggcctcagacc

SEQ ID NO: 5914973 - DNA, 25 bp, Homo sapien
accagtggtcctgcccaggtgtcca

SEQ ID NO: 5914974 - DNA, 25 bp, Homo sapien
tgttctcccatgggcattcctgcca

SEQ ID NO: 5914975 - DNA, 25 bp, Homo sapien
ctgccacatgattggctgtagtgat

SEQ ID NO: 5914976 - DNA, 25 bp, Homo sapien
atgtgaggcctcgggagtgtaatct

SEQ ID NO: 5914977 - DNA, 25 bp, Homo sapien
gagttctcttcttctgtcctatggg

SEQ ID NO: 5914978 - DNA, 25 bp, Homo sapien
agcctgctgtggttttatctgtccc

SEQ ID NO: 5914979 - DNA, 25 bp, Homo sapien
ccgagttggagttctcttcttctgt

SEQ ID NO: 5914980 - DNA, 25 bp, Homo sapien
ccaggtgtccagaggaagcactttg

SEQ ID NO: 5914981 - DNA, 25 bp, Homo sapien
aataaaaggttcctgaaagtcatct

SEQ ID NO: 5914982 - DNA, 25 bp, Homo sapien
gtccagaggaagcactttgtctttt

SEQ ID NO: 5914983 - DNA, 25 bp, Homo sapien
cccaggaagagagtgcttggctggg

SEQ ID NO: 5914984 - DNA, 25 bp, Homo sapien
agacctctaatggaagacttggcta

SEQ ID NO: 5914985 - DNA, 25 bp, Homo sapien
tgctgccacatgattggctgtagtg

SEQ ID NO: 5914986 - DNA, 25 bp, Homo sapien
catgctgccacatgattggctgtag

SEQ ID NO: 5914987 - DNA, 25 bp, Homo sapien
ctaggtttctccctatttcacagtg

SEQ ID NO: 5914988 - DNA, 25 bp, Homo sapien
tcttttagggtccccaggaagagag

SEQ ID NO: 5914989 - DNA, 25 bp, Homo sapien
tctcaatgcagtgcaggtttggggc

SEQ ID NO: 5914990 - DNA, 25 bp, Homo sapien
caagggactacagagaagtccatgt

SEQ ID NO: 5914991 - DNA, 25 bp, Homo sapien
tggtctcattcccagagtctccttg

SEQ ID NO: 5914992 - DNA, 25 bp, Homo sapien
cacacagtaaccgcccccaagggac

SEQ ID NO: 5914993 - DNA, 25 bp, Homo sapien
cagagtctccttgcttgaggaattt

SEQ ID NO: 5914994 - DNA, 25 bp, Homo sapien
catgattggctgtagtgattggctc

SEQ ID NO: 5914995 - DNA, 25 bp, Homo sapien
tgcccaagacatgggcccttattca

SEQ ID NO: 5914996 - DNA, 25 bp, Homo sapien
aggttacagaaaagaccatttgtta

SEQ ID NO: 5914997 - DNA, 25 bp, Homo sapien
aaaggttacaaatgcccaagacatg

SEQ ID NO: 5914998 - DNA, 25 bp, Homo sapien
ttgaggaatttggccacttcattaa

SEQ ID NO: 5914999 - DNA, 25 bp, Homo sapien
aggacagaaaggggagaaggaaggc

SEQ ID NO: 5915000 - DNA, 25 bp, Homo sapien
ttggggctggtggtccagcctgctg

SEQ ID NO: 5915001 - DNA, 25 bp, Homo sapien
tgtgcttcggtgggggcagtgaggt

SEQ ID NO: 5915002 - DNA, 25 bp, Homo sapien
gtgaggcctcgggagtgtaatcttg

SEQ ID NO: 5915003 - DNA, 25 bp, Homo sapien
gctccctgtctctgggccctagtaa

SEQ ID NO: 5915004 - DNA, 25 bp, Homo sapien
ggactacagagaagtccatgtcacc

SEQ ID NO: 5915005 - DNA, 25 bp, Homo sapien
aatgcagtgcaggtttggggctggt

SEQ ID NO: 5915006 - DNA, 25 bp, Homo sapien
cgggctcctcggtctgttctcccat

SEQ ID NO: 5915007 - DNA, 25 bp, Homo sapien
tctgggccctagtaaacaaatcttt

SEQ ID NO: 5915008 - DNA, 25 bp, Homo sapien
cacgctagctcagcagtgccaagcc

SEQ ID NO: 5915009 - DNA, 25 bp, Homo sapien
cccaagacatgggcccttattcatg

SEQ ID NO: 5915010 - DNA, 25 bp, Homo sapien
gcactttgtcttttagggtccccag

SEQ ID NO: 5915011 - DNA, 25 bp, Homo sapien
ttcccagagtctccttgcttgagga

SEQ ID NO: 5915012 - DNA, 25 bp, Homo sapien
cagaaaggggagaaggaaggcttgt

SEQ ID NO: 5915013 - DNA, 25 bp, Homo sapien
agttagaaaacaccatcaaagacac

SEQ ID NO: 5915014 - DNA, 25 bp, Homo sapien
ctctagttgttaagctcagacaggc

SEQ ID NO: 5915015 - DNA, 25 bp, Homo sapien
taagctcagacaggcctttagtcag

SEQ ID NO: 5915016 - DNA, 25 bp, Homo sapien
ccctatttcacagtgaggagggaaa

SEQ ID NO: 5915017 - DNA, 25 bp, Homo sapien
agagggccgagtggctctagttgtt

SEQ ID NO: 5915018 - DNA, 25 bp, Homo sapien
cgtttctgaaaaggcctcagacctc

SEQ ID NO: 5915019 - DNA, 25 bp, Homo sapien
gacgggctcctcggtctgttctccc

SEQ ID NO: 5915020 - DNA, 25 bp, Homo sapien
ctagctaggtttctccctatttcac

SEQ ID NO: 5915021 - DNA, 25 bp, Homo sapien
aacgtgccctaccacgctagctcag

SEQ ID NO: 5915022 - DNA, 25 bp, Homo sapien
gacagaaaggggagaaggaaggctt

SEQ ID NO: 5915023 - DNA, 25 bp, Homo sapien
tcggtctgttctcccatgggcattc

SEQ ID NO: 5915024 - DNA, 25 bp, Homo sapien
tcagacctctaatggaagacttggc

SEQ ID NO: 5915025 - DNA, 25 bp, Homo sapien
gtcaggacagcgtgggtgagagggc

SEQ ID NO: 5915026 - DNA, 25 bp, Homo sapien
tctttgggtccgtttctgaaaaggc

SEQ ID NO: 5915027 - DNA, 25 bp, Homo sapien
gttggctccctgtctctgggcccta

SEQ ID NO: 5915028 - DNA, 25 bp, Homo sapien
gcagtgaggttaaaggggctcaagg

SEQ ID NO: 5915029 - DNA, 25 bp, Homo sapien
ctaccacgctagctcagcagtgcca

SEQ ID NO: 5915030 - DNA, 25 bp, Homo sapien
gacaggcctttagtcagagtctgag

SEQ ID NO: 5915031 - DNA, 25 bp, Homo sapien
tggtcactgccactatactggttgg

SEQ ID NO: 5915032 - DNA, 25 bp, Homo sapien
ctatgggctgtggtctcattcccag

SEQ ID NO: 5915033 - DNA, 25 bp, Homo sapien
ttatctgtccctgttagtaacagaa

SEQ ID NO: 5915034 - DNA, 25 bp, Homo sapien
gaagtccatgtcaccagtggtcctg

SEQ ID NO: 5915035 - DNA, 25 bp, Homo sapien
agttgttaagctcagacaggccttt

SEQ ID NO: 5915036 - DNA, 25 bp, Homo sapien
gtttctccctatttcacagtgagga

SEQ ID NO: 5915037 - DNA, 25 bp, Homo sapien
tagtcagagtctgagtccgagttgg

SEQ ID NO: 5915038 - DNA, 25 bp, Homo sapien
cagacaggcctttagtcagagtctg

SEQ ID NO: 5915039 - DNA, 25 bp, Homo sapien
agacatgggcccttattcatggggc

SEQ ID NO: 5915040 - DNA, 25 bp, Homo sapien
tggtcgatgtttgccacgtgcaaac

SEQ ID NO: 5915041 - DNA, 25 bp, Homo sapien
tgataaacaacgcggcagggaactt

SEQ ID NO: 5915042 - DNA, 25 bp, Homo sapien
atttctgtcaggtgaattcaactct

SEQ ID NO: 5915043 - DNA, 25 bp, Homo sapien
aagacaaaaggctcctaagatgacc

SEQ ID NO: 5915044 - DNA, 25 bp, Homo sapien
tgaattcaactctctaaagaaggtc

SEQ ID NO: 5915045 - DNA, 25 bp, Homo sapien
ggtgataaacaacgcggcagggaac

SEQ ID NO: 5915046 - DNA, 25 bp, Homo sapien
gacaaaaggctcctaagatgaccac

SEQ ID NO: 5915047 - DNA, 25 bp, Homo sapien
atgaataagtcacttgcagctgaat

SEQ ID NO: 5915048 - DNA, 25 bp, Homo sapien
ggacctatcaaaaccaaaggagcct

SEQ ID NO: 5915049 - DNA, 25 bp, Homo sapien
ggatcaaacccagagtgtctgctct

SEQ ID NO: 5915050 - DNA, 25 bp, Homo sapien
cagtgattatgcctcttggattaat

SEQ ID NO: 5915051 - DNA, 25 bp, Homo sapien
gccatcactaccatctatgctgaga

SEQ ID NO: 5915052 - DNA, 25 bp, Homo sapien
ggatgtggtgataaacaacgcggca

SEQ ID NO: 5915053 - DNA, 25 bp, Homo sapien
gtgattatgcctcttggattaatgg

SEQ ID NO: 5915054 - DNA, 25 bp, Homo sapien
gaggaagtatttctgtcaggtgaat

SEQ ID NO: 5915055 - DNA, 25 bp, Homo sapien
tcttccacttgtcttgggggttaat

SEQ ID NO: 5915056 - DNA, 25 bp, Homo sapien
aaggaggagtgggatataatcgaag

SEQ ID NO: 5915057 - DNA, 25 bp, Homo sapien
aaaatggtcgatgtttgccacgtgc

SEQ ID NO: 5915058 - DNA, 25 bp, Homo sapien
ctttagccgtttggacccgactgga

SEQ ID NO: 5915059 - DNA, 25 bp, Homo sapien
tattgaagggtaaattggacaggat

SEQ ID NO: 5915060 - DNA, 25 bp, Homo sapien
tctaaagaaggtcaccaaggaggag

SEQ ID NO: 5915061 - DNA, 25 bp, Homo sapien
attcttgtgttgtttcgcagtagat

SEQ ID NO: 5915062 - DNA, 25 bp, Homo sapien
gtcacttgcagctgaatggggtaga

SEQ ID NO: 5915063 - DNA, 25 bp, Homo sapien
gtttgcttgatgatttctgtagttc

SEQ ID NO: 5915064 - DNA, 25 bp, Homo sapien
gtctgggaactatggaggaacttgc

SEQ ID NO: 5915065 - DNA, 25 bp, Homo sapien
tgaaacactaaagttagggactaga

SEQ ID NO: 5915066 - DNA, 25 bp, Homo sapien
gatataatcgaagggctcatcagga

SEQ ID NO: 5915067 - DNA, 25 bp, Homo sapien
agttcttcagccaaatcaggcgtgg

SEQ ID NO: 5915068 - DNA, 25 bp, Homo sapien
gagatgattgacagaatcccctgtg

SEQ ID NO: 5915069 - DNA, 25 bp, Homo sapien
ctgtagttctgaggatcaaacccag

SEQ ID NO: 5915070 - DNA, 25 bp, Homo sapien
cgtgcaaacagtgtgccaggtcagg

SEQ ID NO: 5915071 - DNA, 25 bp, Homo sapien
ttattcttgtgttgtttcgcagtag

SEQ ID NO: 5915072 - DNA, 25 bp, Homo sapien
gggaactatggaggaacttgcaaat

SEQ ID NO: 5915073 - DNA, 25 bp, Homo sapien
agagtggatcaggctttgtaatgcc

SEQ ID NO: 5915074 - DNA, 25 bp, Homo sapien
ggaacttcatttcccccagtgagag

SEQ ID NO: 5915075 - DNA, 25 bp, Homo sapien
gctaattaaagcacagaaaggagct

SEQ ID NO: 5915076 - DNA, 25 bp, Homo sapien
caaaaggctcctaagatgaccacaa

SEQ ID NO: 5915077 - DNA, 25 bp, Homo sapien
gtgtgccaggtcaggggtggccact

SEQ ID NO: 5915078 - DNA, 25 bp, Homo sapien
tcgcagtagataaaggtgaaagatg

SEQ ID NO: 5915079 - DNA, 25 bp, Homo sapien
cctcagccctaaaaaatggtcgatg

SEQ ID NO: 5915080 - DNA, 25 bp, Homo sapien
ctctgagttgcacctcagccctaaa

SEQ ID NO: 5915081 - DNA, 25 bp, Homo sapien
cgaagggctcatcaggaagacaaaa

SEQ ID NO: 5915082 - DNA, 25 bp, Homo sapien
gtgttgtttcgcagtagataaaggt

SEQ ID NO: 5915083 - DNA, 25 bp, Homo sapien
tggatcaggctttgtaatgccaagt

SEQ ID NO: 5915084 - DNA, 25 bp, Homo sapien
agtcattagatttgacggtggagag

SEQ ID NO: 5915085 - DNA, 25 bp, Homo sapien
ggtcttccacttgtcttgggggtta

SEQ ID NO: 5915086 - DNA, 25 bp, Homo sapien
gaccgtggtcttccacttgtcttgg

SEQ ID NO: 5915087 - DNA, 25 bp, Homo sapien
cagatggaccgtggtcttccacttg

SEQ ID NO: 5915088 - DNA, 25 bp, Homo sapien
gctcctaagatgaccacaacttcat

SEQ ID NO: 5915089 - DNA, 25 bp, Homo sapien
tcaggggtggccactctgtattgaa

SEQ ID NO: 5915090 - DNA, 25 bp, Homo sapien
ggtggagaggaagtatttctgtcag

SEQ ID NO: 5915091 - DNA, 25 bp, Homo sapien
caggtcaggggtggccactctgtat

SEQ ID NO: 5915092 - DNA, 25 bp, Homo sapien
cgcggcagggaacttcatttccccc

SEQ ID NO: 5915093 - DNA, 25 bp, Homo sapien
gggtggccactctgtattgaagggt

SEQ ID NO: 5915094 - DNA, 25 bp, Homo sapien
tctcaatggcacagcctatgtgaca

SEQ ID NO: 5915095 - DNA, 25 bp, Homo sapien
aacgcggcagggaacttcatttccc

SEQ ID NO: 5915096 - DNA, 25 bp, Homo sapien
ataattcagccaggacctatcaaaa

SEQ ID NO: 5915097 - DNA, 25 bp, Homo sapien
gaatggggtagatatggaatgcgtt

SEQ ID NO: 5915098 - DNA, 25 bp, Homo sapien
caactctctaaagaaggtcaccaag

SEQ ID NO: 5915099 - DNA, 25 bp, Homo sapien
gattatgcctcttggattaatggag

SEQ ID NO: 5915100 - DNA, 25 bp, Homo sapien
cgtttcttgccatcactaccatcta

SEQ ID NO: 5915101 - DNA, 25 bp, Homo sapien
cacttgcagctgaatggggtagata

SEQ ID NO: 5915102 - DNA, 25 bp, Homo sapien
atgccaagttcttcagccaaatcag

SEQ ID NO: 5915103 - DNA, 25 bp, Homo sapien
cttgcaaatctggccactttcctat

SEQ ID NO: 5915104 - DNA, 25 bp, Homo sapien
atggctggaagaccataactgacat

SEQ ID NO: 5915105 - DNA, 25 bp, Homo sapien
tgggggttaataaattgtttgcttg

SEQ ID NO: 5915106 - DNA, 25 bp, Homo sapien
gaatgcgtttcaacataattcagcc

SEQ ID NO: 5915107 - DNA, 25 bp, Homo sapien
ataagtcacttgcagctgaatgggg

SEQ ID NO: 5915108 - DNA, 25 bp, Homo sapien
cgtggaagccatgaataagtcactt

SEQ ID NO: 5915109 - DNA, 25 bp, Homo sapien
caaatctggccactttcctatgcag

SEQ ID NO: 5915110 - DNA, 25 bp, Homo sapien
gggctcatcaggaagacaaaaggct

SEQ ID NO: 5915111 - DNA, 25 bp, Homo sapien
atttgagaaggagatgattgacaga

SEQ ID NO: 5915112 - DNA, 25 bp, Homo sapien
ttcaactctctaaagaaggtcacca

SEQ ID NO: 5915113 - DNA, 25 bp, Homo sapien
cgactggaagatttgagaaggagat

SEQ ID NO: 5915114 - DNA, 25 bp, Homo sapien
gaccataactgacatagttctcaat

SEQ ID NO: 5915115 - DNA, 25 bp, Homo sapien
ttgccacgtgcaaacagtgtgccag

SEQ ID NO: 5915116 - DNA, 25 bp, Homo sapien
ttctttttcaaattattcttgtgtt

SEQ ID NO: 5915117 - DNA, 25 bp, Homo sapien
gactgactcccaatggctggaagac

SEQ ID NO: 5915118 - DNA, 25 bp, Homo sapien
ctttttcaaattattcttgtgttgt

SEQ ID NO: 5915119 - DNA, 25 bp, Homo sapien
gatttgacggtggagaggaagtatt

SEQ ID NO: 5915120 - DNA, 25 bp, Homo sapien
ttttcgatctctgagttgcacctca

SEQ ID NO: 5915121 - DNA, 25 bp, Homo sapien
aaaaaatggtcgatgtttgccacgt

SEQ ID NO: 5915122 - DNA, 25 bp, Homo sapien
tctgtattgaagggtaaattggaca

SEQ ID NO: 5915123 - DNA, 25 bp, Homo sapien
tggaagccatgaataagtcacttgc

SEQ ID NO: 5915124 - DNA, 25 bp, Homo sapien
tgtgaaacactaaagttagggacta

SEQ ID NO: 5915125 - DNA, 25 bp, Homo sapien
ttggacaggatatcttttctttaaa

SEQ ID NO: 5915126 - DNA, 25 bp, Homo sapien
ccatgaataagtcacttgcagctga

SEQ ID NO: 5915127 - DNA, 25 bp, Homo sapien
gctttgtaatgccaagttcttcagc

SEQ ID NO: 5915128 - DNA, 25 bp, Homo sapien
taccatctatgctgagagtggatca

SEQ ID NO: 5915129 - DNA, 25 bp, Homo sapien
gatgatttctgtagttctgaggatc

SEQ ID NO: 5915130 - DNA, 25 bp, Homo sapien
agtggatcaggctttgtaatgccaa

SEQ ID NO: 5915131 - DNA, 25 bp, Homo sapien
aatcccctgtggtcgtctgggaact

SEQ ID NO: 5915132 - DNA, 25 bp, Homo sapien
tcccctgtggtcgtctgggaactat

SEQ ID NO: 5915133 - DNA, 25 bp, Homo sapien
gtcaccaaggaggagtgggatataa

SEQ ID NO: 5915134 - DNA, 25 bp, Homo sapien
actggaagatttgagaaggagatga

SEQ ID NO: 5915135 - DNA, 25 bp, Homo sapien
ggttaataaattgtttgcttgatga

SEQ ID NO: 5915136 - DNA, 25 bp, Homo sapien
acagaatcccctgtggtcgtctggg

SEQ ID NO: 5915137 - DNA, 25 bp, Homo sapien
ctatgctgagagtggatcaggcttt

SEQ ID NO: 5915138 - DNA, 25 bp, Homo sapien
ttgaagggtaaattggacaggatat

SEQ ID NO: 5915139 - DNA, 25 bp, Homo sapien
atccggatgtggtgataaacaacgc

SEQ ID NO: 5915140 - DNA, 25 bp, Homo sapien
gccacgtgcaaacagtgtgccaggt

SEQ ID NO: 5915141 - DNA, 25 bp, Homo sapien
tgaccacaacttcatctgtgaaaca

SEQ ID NO: 5915142 - DNA, 25 bp, Homo sapien
ttcaaattattcttgtgttgtttcg

SEQ ID NO: 5915143 - DNA, 25 bp, Homo sapien
ctcccaatggctggaagaccataac

SEQ ID NO: 5915144 - DNA, 25 bp, Homo sapien
accacaacttcatctgtgaaacact

SEQ ID NO: 5915145 - DNA, 25 bp, Homo sapien
aggagatgattgacagaatcccctg

SEQ ID NO: 5915146 - DNA, 25 bp, Homo sapien
ctaaagttagggactagagtgctac

SEQ ID NO: 5915147 - DNA, 25 bp, Homo sapien
agcagctaattaaagcacagaaagg

SEQ ID NO: 5915148 - DNA, 25 bp, Homo sapien
caacttcatctgtgaaacactaaag

SEQ ID NO: 5915149 - DNA, 25 bp, Homo sapien
gaggatcaaacccagagtgtctgct

SEQ ID NO: 5915150 - DNA, 25 bp, Homo sapien
ttatgcctcttggattaatggagca

SEQ ID NO: 5915151 - DNA, 25 bp, Homo sapien
catctgtgaaacactaaagttaggg

SEQ ID NO: 5915152 - DNA, 25 bp, Homo sapien
gatgattgacagaatcccctgtggt

SEQ ID NO: 5915153 - DNA, 25 bp, Homo sapien
agggactagagtgctacagatggac

SEQ ID NO: 5915154 - DNA, 25 bp, Homo sapien
acagcctatgtgacactagaaattg

SEQ ID NO: 5915155 - DNA, 25 bp, Homo sapien
attagatttgacggtggagaggaag

SEQ ID NO: 5915156 - DNA, 25 bp, Homo sapien
ccctaaaaaatggtcgatgtttgcc

SEQ ID NO: 5915157 - DNA, 25 bp, Homo sapien
gagagactgactcccaatggctgga

SEQ ID NO: 5915158 - DNA, 25 bp, Homo sapien
aagtcacttgcagctgaatggggta

SEQ ID NO: 5915159 - DNA, 25 bp, Homo sapien
ctgggaactatggaggaacttgcaa

SEQ ID NO: 5915160 - DNA, 25 bp, Homo sapien
cactttcctatgcagtgattatgcc

SEQ ID NO: 5915161 - DNA, 25 bp, Homo sapien
cccgactggaagatttgagaaggag

SEQ ID NO: 5915162 - DNA, 25 bp, Homo sapien
catcactaccatctatgctgagagt

SEQ ID NO: 5915163 - DNA, 25 bp, Homo sapien
tgatttctgtagttctgaggatcaa

SEQ ID NO: 5915164 - DNA, 25 bp, Homo sapien
gtttcaacataattcagccaggacc

SEQ ID NO: 5915165 - DNA, 25 bp, Homo sapien
cagtgagagactgactcccaatggc

SEQ ID NO: 5915166 - DNA, 25 bp, Homo sapien
aattcagccaggacctatcaaaacc

SEQ ID NO: 5915167 - DNA, 25 bp, Homo sapien
aattattcttgtgttgtttcgcagt

SEQ ID NO: 5915168 - DNA, 25 bp, Homo sapien
ttaataaattgtttgcttgatgatt

SEQ ID NO: 5915169 - DNA, 25 bp, Homo sapien
agccatgaataagtcacttgcagct

SEQ ID NO: 5915170 - DNA, 25 bp, Homo sapien
ttgcttgatgatttctgtagttctg

SEQ ID NO: 5915171 - DNA, 25 bp, Homo sapien
tttgacggtggagaggaagtatttc

SEQ ID NO: 5915172 - DNA, 25 bp, Homo sapien
ttcatctgtgaaacactaaagttag

SEQ ID NO: 5915173 - DNA, 25 bp, Homo sapien
tagttctcaatggcacagcctatgt

SEQ ID NO: 5915174 - DNA, 25 bp, Homo sapien
gatatggaatgcgtttcaacataat

SEQ ID NO: 5915175 - DNA, 25 bp, Homo sapien
aaacaacgcggcagggaacttcatt

SEQ ID NO: 5915176 - DNA, 25 bp, Homo sapien
ttcccccagtgagagactgactccc

SEQ ID NO: 5915177 - DNA, 25 bp, Homo sapien
ctaagatgaccacaacttcatctgt

SEQ ID NO: 5915178 - DNA, 25 bp, Homo sapien
ccataactgacatagttctcaatgg

SEQ ID NO: 5915179 - DNA, 25 bp, Homo sapien
agatttgagaaggagatgattgaca

SEQ ID NO: 5915180 - DNA, 25 bp, Homo sapien
acggtggagaggaagtatttctgtc

SEQ ID NO: 5915181 - DNA, 25 bp, Homo sapien
gattaatggagcagtcattagattt

SEQ ID NO: 5915182 - DNA, 25 bp, Homo sapien
aacagtgtgccaggtcaggggtggc

SEQ ID NO: 5915183 - DNA, 25 bp, Homo sapien
ttcctatgcagtgattatgcctctt

SEQ ID NO: 5915184 - DNA, 25 bp, Homo sapien
tgctcattttcgatctctgagttgc

SEQ ID NO: 5915185 - DNA, 25 bp, Homo sapien
gtctgctctgctcattttcgatctc

SEQ ID NO: 5915186 - DNA, 25 bp, Homo sapien
actctgtattgaagggtaaattgga

SEQ ID NO: 5915187 - DNA, 25 bp, Homo sapien
gatggaccgtggtcttccacttgtc

SEQ ID NO: 5915188 - DNA, 25 bp, Homo sapien
aagaccataactgacatagttctca

SEQ ID NO: 5915189 - DNA, 25 bp, Homo sapien
ttgtttgcttgatgatttctgtagt

SEQ ID NO: 5915190 - DNA, 25 bp, Homo sapien
cttcatttcccccagtgagagactg

SEQ ID NO: 5915191 - DNA, 25 bp, Homo sapien
gccaggtcaggggtggccactctgt

SEQ ID NO: 5915192 - DNA, 25 bp, Homo sapien
actatggaggaacttgcaaatctgg

SEQ ID NO: 5915193 - DNA, 25 bp, Homo sapien
aggtcaccaaggaggagtgggatat

SEQ ID NO: 5915194 - DNA, 25 bp, Homo sapien
agccctaaaaaatggtcgatgtttg

SEQ ID NO: 5915195 - DNA, 25 bp, Homo sapien
gagcagtcattagatttgacggtgg

SEQ ID NO: 5915196 - DNA, 25 bp, Homo sapien
tctctaaagaaggtcaccaaggagg

SEQ ID NO: 5915197 - DNA, 25 bp, Homo sapien
agtagataaaggtgaaagatgcttg

SEQ ID NO: 5915198 - DNA, 25 bp, Homo sapien
tagatatggaatgcgtttcaacata

SEQ ID NO: 5915199 - DNA, 25 bp, Homo sapien
tcatcaggaagacaaaaggctccta

SEQ ID NO: 5915200 - DNA, 25 bp, Homo sapien
acactagaaattggaaagcagctaa

SEQ ID NO: 5915201 - DNA, 25 bp, Homo sapien
ggagcctttagccgtttggacccga

SEQ ID NO: 5915202 - DNA, 25 bp, Homo sapien
atctctgagttgcacctcagcccta

SEQ ID NO: 5915203 - DNA, 25 bp, Homo sapien
tttgtaatgccaagttcttcagcca

SEQ ID NO: 5915204 - DNA, 25 bp, Homo sapien
ttccacttgtcttgggggttaataa

SEQ ID NO: 5915205 - DNA, 25 bp, Homo sapien
ccggatgtggtgataaacaacgcgg

SEQ ID NO: 5915206 - DNA, 25 bp, Homo sapien
gagtgctacagatggaccgtggtct

SEQ ID NO: 5915207 - DNA, 25 bp, Homo sapien
gcctcttggattaatggagcagtca

SEQ ID NO: 5915208 - DNA, 25 bp, Homo sapien
atcaggcgtggaagccatgaataag

SEQ ID NO: 5915209 - DNA, 25 bp, Homo sapien
acaacgcggcagggaacttcatttc

SEQ ID NO: 5915210 - DNA, 25 bp, Homo sapien
gttctcaatggcacagcctatgtga

SEQ ID NO: 5915211 - DNA, 25 bp, Homo sapien
tatcaaaaccaaaggagcctttagc

SEQ ID NO: 5915212 - DNA, 25 bp, Homo sapien
caaacccagagtgtctgctctgctc

SEQ ID NO: 5915213 - DNA, 25 bp, Homo sapien
aagatgaccacaacttcatctgtga

SEQ ID NO: 5915214 - DNA, 25 bp, Homo sapien
gaaggagatgattgacagaatcccc

SEQ ID NO: 5915215 - DNA, 25 bp, Homo sapien
taattaaagcacagaaaggagctgc

SEQ ID NO: 5915216 - DNA, 25 bp, Homo sapien
aactgacatagttctcaatggcaca

SEQ ID NO: 5915217 - DNA, 25 bp, Homo sapien
gatcaggctttgtaatgccaagttc

SEQ ID NO: 5915218 - DNA, 25 bp, Homo sapien
tgcacctcagccctaaaaaatggtc

SEQ ID NO: 5915219 - DNA, 25 bp, Homo sapien
gtgggatataatcgaagggctcatc

SEQ ID NO: 5915220 - DNA, 25 bp, Homo sapien
gagtgtctgctctgctcattttcga

SEQ ID NO: 5915221 - DNA, 25 bp, Homo sapien
tcaaaaccaaaggagcctttagccg

SEQ ID NO: 5915222 - DNA, 25 bp, Homo sapien
tgtaatgccaagttcttcagccaaa

SEQ ID NO: 5915223 - DNA, 25 bp, Homo sapien
tggagcagtcattagatttgacggt

SEQ ID NO: 5915224 - DNA, 25 bp, Homo sapien
tcattagatttgacggtggagagga

SEQ ID NO: 5915225 - DNA, 25 bp, Homo sapien
tgtgacactagaaattggaaagcag

SEQ ID NO: 5915226 - DNA, 25 bp, Homo sapien
attgacagaatcccctgtggtcgtc

SEQ ID NO: 5915227 - DNA, 25 bp, Homo sapien
gtcaggtgaattcaactctctaaag

SEQ ID NO: 5915228 - DNA, 25 bp, Homo sapien
ccaaaggagcctttagccgtttgga

SEQ ID NO: 5915229 - DNA, 25 bp, Homo sapien
gttgtttcgcagtagataaaggtga

SEQ ID NO: 5915230 - DNA, 25 bp, Homo sapien
aacttgcaaatctggccactttcct

SEQ ID NO: 5915231 - DNA, 25 bp, Homo sapien
gttgcacctcagccctaaaaaatgg

SEQ ID NO: 5915232 - DNA, 25 bp, Homo sapien
tgacactagaaattggaaagcagct

SEQ ID NO: 5915233 - DNA, 25 bp, Homo sapien
ggactagagtgctacagatggaccg

SEQ ID NO: 5915234 - DNA, 25 bp, Homo sapien
ggatatcttttctttaaaacacgtg

SEQ ID NO: 5915235 - DNA, 25 bp, Homo sapien
aattggacaggatatcttttcttta

SEQ ID NO: 5915236 - DNA, 25 bp, Homo sapien
gtgagagactgactcccaatggctg

SEQ ID NO: 5915237 - DNA, 25 bp, Homo sapien
agggaacttcatttcccccagtgag

SEQ ID NO: 5915238 - DNA, 25 bp, Homo sapien
tcttgccatcactaccatctatgct

SEQ ID NO: 5915239 - DNA, 25 bp, Homo sapien
ctgagttgcacctcagccctaaaaa

SEQ ID NO: 5915240 - DNA, 25 bp, Homo sapien
ctgtcaggtgaattcaactctctaa

SEQ ID NO: 5915241 - DNA, 25 bp, Homo sapien
ttcagccaggacctatcaaaaccaa

SEQ ID NO: 5915242 - DNA, 25 bp, Homo sapien
tgcgtttcttgccatcactaccatc

SEQ ID NO: 5915243 - DNA, 25 bp, Homo sapien
ggaacttgcaaatctggccactttc

SEQ ID NO: 5915244 - DNA, 25 bp, Homo sapien
gactcccaatggctggaagaccata

SEQ ID NO: 5915245 - DNA, 25 bp, Homo sapien
cttgcagctgaatggggtagatatg

SEQ ID NO: 5915246 - DNA, 25 bp, Homo sapien
caggtgaattcaactctctaaagaa

SEQ ID NO: 5915247 - DNA, 25 bp, Homo sapien
agttagggactagagtgctacagat

SEQ ID NO: 5915248 - DNA, 25 bp, Homo sapien
tgtattgaagggtaaattggacagg

SEQ ID NO: 5915249 - DNA, 25 bp, Homo sapien
aattgtttgcttgatgatttctgta

SEQ ID NO: 5915250 - DNA, 25 bp, Homo sapien
aagcacagaaaggagctgcgtttct

SEQ ID NO: 5915251 - DNA, 25 bp, Homo sapien
acttcatctgtgaaacactaaagtt

SEQ ID NO: 5915252 - DNA, 25 bp, Homo sapien
gctcatcaggaagacaaaaggctcc

SEQ ID NO: 5915253 - DNA, 25 bp, Homo sapien
gctacagatggaccgtggtcttcca

SEQ ID NO: 5915254 - DNA, 25 bp, Homo sapien
cctatcaaaaccaaaggagccttta

SEQ ID NO: 5915255 - DNA, 25 bp, Homo sapien
tatgcagtgattatgcctcttggat

SEQ ID NO: 5915256 - DNA, 25 bp, Homo sapien
agccgtttggacccgactggaagat

SEQ ID NO: 5915257 - DNA, 25 bp, Homo sapien
tcctaagatgaccacaacttcatct

SEQ ID NO: 5915258 - DNA, 25 bp, Homo sapien
ttaatggagcagtcattagatttga

SEQ ID NO: 5915259 - DNA, 25 bp, Homo sapien
aggagctgcgtttcttgccatcact

SEQ ID NO: 5915260 - DNA, 25 bp, Homo sapien
ggtaaattggacaggatatcttttc

SEQ ID NO: 5915261 - DNA, 25 bp, Homo sapien
taaattggacaggatatcttttctt

SEQ ID NO: 5915262 - DNA, 25 bp, Homo sapien
tggaatgcgtttcaacataattcag

SEQ ID NO: 5915263 - DNA, 25 bp, Homo sapien
tgacagaatcccctgtggtcgtctg

SEQ ID NO: 5915264 - DNA, 25 bp, Homo sapien
gaaattggaaagcagctaattaaag

SEQ ID NO: 5915265 - DNA, 25 bp, Homo sapien
gccaagttcttcagccaaatcaggc

SEQ ID NO: 5915266 - DNA, 25 bp, Homo sapien
ctaaaaaatggtcgatgtttgccac

SEQ ID NO: 5915267 - DNA, 25 bp, Homo sapien
tcatttcccccagtgagagactgac

SEQ ID NO: 5915268 - DNA, 25 bp, Homo sapien
agaatcccctgtggtcgtctgggaa

SEQ ID NO: 5915269 - DNA, 25 bp, Homo sapien
gaactatggaggaacttgcaaatct

SEQ ID NO: 5915270 - DNA, 25 bp, Homo sapien
tataatcgaagggctcatcaggaag

SEQ ID NO: 5915271 - DNA, 25 bp, Homo sapien
cctatgtgacactagaaattggaaa

SEQ ID NO: 5915272 - DNA, 25 bp, Homo sapien
gaaggtcaccaaggaggagtgggat

SEQ ID NO: 5915273 - DNA, 25 bp, Homo sapien
gtttgccacgtgcaaacagtgtgcc

SEQ ID NO: 5915274 - DNA, 25 bp, Homo sapien
ttgagaaggagatgattgacagaat

SEQ ID NO: 5915275 - DNA, 25 bp, Homo sapien
gtgctacagatggaccgtggtcttc

SEQ ID NO: 5915276 - DNA, 25 bp, Homo sapien
cagccaggacctatcaaaaccaaag

SEQ ID NO: 5915277 - DNA, 25 bp, Homo sapien
cacctcagccctaaaaaatggtcga

SEQ ID NO: 5915278 - DNA, 25 bp, Homo sapien
ttctgtagttctgaggatcaaaccc

SEQ ID NO: 5915279 - DNA, 25 bp, Homo sapien
tgcaaacagtgtgccaggtcagggg

SEQ ID NO: 5915280 - DNA, 25 bp, Homo sapien
ttggaaagcagctaattaaagcaca

SEQ ID NO: 5915281 - DNA, 25 bp, Homo sapien
aattcaactctctaaagaaggtcac

SEQ ID NO: 5915282 - DNA, 25 bp, Homo sapien
acataattcagccaggacctatcaa

SEQ ID NO: 5915283 - DNA, 25 bp, Homo sapien
gcagtagataaaggtgaaagatgct

SEQ ID NO: 5915284 - DNA, 25 bp, Homo sapien
ggaggagtgggatataatcgaaggg

SEQ ID NO: 5915285 - DNA, 25 bp, Homo sapien
ccaaatcaggcgtggaagccatgaa

SEQ ID NO: 5915286 - DNA, 25 bp, Homo sapien
atgcgtttcaacataattcagccag

SEQ ID NO: 5915287 - DNA, 25 bp, Homo sapien
cttggattaatggagcagtcattag

SEQ ID NO: 5915288 - DNA, 25 bp, Homo sapien
tgtttcgcagtagataaaggtgaaa

SEQ ID NO: 5915289 - DNA, 25 bp, Homo sapien
gcacagcctatgtgacactagaaat

SEQ ID NO: 5915290 - DNA, 25 bp, Homo sapien
tagagtgctacagatggaccgtggt

SEQ ID NO: 5915291 - DNA, 25 bp, Homo sapien
tgagagtggatcaggctttgtaatg

SEQ ID NO: 5915292 - DNA, 25 bp, Homo sapien
ctgctctgctcattttcgatctctg

SEQ ID NO: 5915293 - DNA, 25 bp, Homo sapien
cacgtgcaaacagtgtgccaggtca

SEQ ID NO: 5915294 - DNA, 25 bp, Homo sapien
atctatgctgagagtggatcaggct

SEQ ID NO: 5915295 - DNA, 25 bp, Homo sapien
aacactaaagttagggactagagtg

SEQ ID NO: 5915296 - DNA, 25 bp, Homo sapien
aagtatttctgtcaggtgaattcaa

SEQ ID NO: 5915297 - DNA, 25 bp, Homo sapien
gagaggaagtatttctgtcaggtga

SEQ ID NO: 5915298 - DNA, 25 bp, Homo sapien
ataaacaacgcggcagggaacttca

SEQ ID NO: 5915299 - DNA, 25 bp, Homo sapien
cagagtgtctgctctgctcattttc

SEQ ID NO: 5915300 - DNA, 25 bp, Homo sapien
tgcagtgattatgcctcttggatta

SEQ ID NO: 5915301 - DNA, 25 bp, Homo sapien
tagataaaggtgaaagatgcttgtt

SEQ ID NO: 5915302 - DNA, 25 bp, Homo sapien
ctcttggattaatggagcagtcatt

SEQ ID NO: 5915303 - DNA, 25 bp, Homo sapien
aatggcacagcctatgtgacactag

SEQ ID NO: 5915304 - DNA, 25 bp, Homo sapien
gtcgatgtttgccacgtgcaaacag

SEQ ID NO: 5915305 - DNA, 25 bp, Homo sapien
atggggtagatatggaatgcgtttc

SEQ ID NO: 5915306 - DNA, 25 bp, Homo sapien
taatgccaagttcttcagccaaatc

SEQ ID NO: 5915307 - DNA, 25 bp, Homo sapien
gcagggaacttcatttcccccagtg

SEQ ID NO: 5915308 - DNA, 25 bp, Homo sapien
tctgtgaaacactaaagttagggac

SEQ ID NO: 5915309 - DNA, 25 bp, Homo sapien
ttcttcagccaaatcaggcgtggaa

SEQ ID NO: 5915310 - DNA, 25 bp, Homo sapien
gtggtcttccacttgtcttgggggt

SEQ ID NO: 5915311 - DNA, 25 bp, Homo sapien
gagactgactcccaatggctggaag

SEQ ID NO: 5915312 - DNA, 25 bp, Homo sapien
ggaagtatttctgtcaggtgaattc

SEQ ID NO: 5915313 - DNA, 25 bp, Homo sapien
aggctcctaagatgaccacaacttc

SEQ ID NO: 5915314 - DNA, 25 bp, Homo sapien
gctctgctcattttcgatctctgag

SEQ ID NO: 5915315 - DNA, 25 bp, Homo sapien
taatcgaagggctcatcaggaagac

SEQ ID NO: 5915316 - DNA, 25 bp, Homo sapien
tggccactttcctatgcagtgatta

SEQ ID NO: 5915317 - DNA, 25 bp, Homo sapien
agggtaaattggacaggatatcttt

SEQ ID NO: 5915318 - DNA, 25 bp, Homo sapien
aaaggagctgcgtttcttgccatca

SEQ ID NO: 5915319 - DNA, 25 bp, Homo sapien
tttcgcagtagataaaggtgaaaga

SEQ ID NO: 5915320 - DNA, 25 bp, Homo sapien
gcagtcattagatttgacggtggag

SEQ ID NO: 5915321 - DNA, 25 bp, Homo sapien
ataactgacatagttctcaatggca

SEQ ID NO: 5915322 - DNA, 25 bp, Homo sapien
taaagcacagaaaggagctgcgttt

SEQ ID NO: 5915323 - DNA, 25 bp, Homo sapien
tggagaggaagtatttctgtcaggt

SEQ ID NO: 5915324 - DNA, 25 bp, Homo sapien
gcgtttcaacataattcagccagga

SEQ ID NO: 5915325 - DNA, 25 bp, Homo sapien
tagatttgacggtggagaggaagta

SEQ ID NO: 5915326 - DNA, 25 bp, Homo sapien
ttcgatctctgagttgcacctcagc

SEQ ID NO: 5915327 - DNA, 25 bp, Homo sapien
gacatagttctcaatggcacagcct

SEQ ID NO: 5915328 - DNA, 25 bp, Homo sapien
cccaatggctggaagaccataactg

SEQ ID NO: 5915329 - DNA, 25 bp, Homo sapien
tggacccgactggaagatttgagaa

SEQ ID NO: 5915330 - DNA, 25 bp, Homo sapien
tgattgacagaatcccctgtggtcg

SEQ ID NO: 5915331 - DNA, 25 bp, Homo sapien
tttcttgccatcactaccatctatg

SEQ ID NO: 5915332 - DNA, 25 bp, Homo sapien
ctgacatagttctcaatggcacagc

SEQ ID NO: 5915333 - DNA, 25 bp, Homo sapien
ccatctatgctgagagtggatcagg

SEQ ID NO: 5915334 - DNA, 25 bp, Homo sapien
gcacagaaaggagctgcgtttcttg

SEQ ID NO: 5915335 - DNA, 25 bp, Homo sapien
ttgtgttgtttcgcagtagataaag

SEQ ID NO: 5915336 - DNA, 25 bp, Homo sapien
gaggaacttgcaaatctggccactt

SEQ ID NO: 5915337 - DNA, 25 bp, Homo sapien
tggaagatttgagaaggagatgatt

SEQ ID NO: 5915338 - DNA, 25 bp, Homo sapien
atcaggaagacaaaaggctcctaag

SEQ ID NO: 5915339 - DNA, 25 bp, Homo sapien
ttctgtcaggtgaattcaactctct

SEQ ID NO: 5915340 - DNA, 25 bp, Homo sapien
cctatgcagtgattatgcctcttgg

SEQ ID NO: 5915341 - DNA, 25 bp, Homo sapien
actagaaattggaaagcagctaatt

SEQ ID NO: 5915342 - DNA, 25 bp, Homo sapien
aagggctcatcaggaagacaaaagg

SEQ ID NO: 5915343 - DNA, 25 bp, Homo sapien
gatgaccacaacttcatctgtgaaa

SEQ ID NO: 5915344 - DNA, 25 bp, Homo sapien
gccactttcctatgcagtgattatg

SEQ ID NO: 5915345 - DNA, 25 bp, Homo sapien
gcttgatgatttctgtagttctgag

SEQ ID NO: 5915346 - DNA, 25 bp, Homo sapien
ccactctgtattgaagggtaaattg

SEQ ID NO: 5915347 - DNA, 25 bp, Homo sapien
cagctgaatggggtagatatggaat

SEQ ID NO: 5915348 - DNA, 25 bp, Homo sapien
tttggacccgactggaagatttgag

SEQ ID NO: 5915349 - DNA, 25 bp, Homo sapien
atgctgagagtggatcaggctttgt

SEQ ID NO: 5915350 - DNA, 25 bp, Homo sapien
tggattaatggagcagtcattagat

SEQ ID NO: 5915351 - DNA, 25 bp, Homo sapien
taaagaaggtcaccaaggaggagtg

SEQ ID NO: 5915352 - DNA, 25 bp, Homo sapien
gtgtctgctctgctcattttcgatc

SEQ ID NO: 5915353 - DNA, 25 bp, Homo sapien
cccagtgagagactgactcccaatg

SEQ ID NO: 5915354 - DNA, 25 bp, Homo sapien
aattggaaagcagctaattaaagca

SEQ ID NO: 5915355 - DNA, 25 bp, Homo sapien
tgacggtggagaggaagtatttctg

SEQ ID NO: 5915356 - DNA, 25 bp, Homo sapien
tggaccgtggtcttccacttgtctt

SEQ ID NO: 5915357 - DNA, 25 bp, Homo sapien
atcaaacccagagtgtctgctctgc

SEQ ID NO: 5915358 - DNA, 25 bp, Homo sapien
gaagggtaaattggacaggatatct

SEQ ID NO: 5915359 - DNA, 25 bp, Homo sapien
tatggaatgcgtttcaacataattc

SEQ ID NO: 5915360 - DNA, 25 bp, Homo sapien
atcgaagggctcatcaggaagacaa

SEQ ID NO: 5915361 - DNA, 25 bp, Homo sapien
gctgagagtggatcaggctttgtaa

SEQ ID NO: 5915362 - DNA, 25 bp, Homo sapien
cgatgtttgccacgtgcaaacagtg

SEQ ID NO: 5915363 - DNA, 25 bp, Homo sapien
taaattgtttgcttgatgatttctg

SEQ ID NO: 5915364 - DNA, 25 bp, Homo sapien
aggggtggccactctgtattgaagg

SEQ ID NO: 5915365 - DNA, 25 bp, Homo sapien
tcagccctaaaaaatggtcgatgtt

SEQ ID NO: 5915366 - DNA, 25 bp, Homo sapien
ggaagacaaaaggctcctaagatga

SEQ ID NO: 5915367 - DNA, 25 bp, Homo sapien
agttctgaggatcaaacccagagtg

SEQ ID NO: 5915368 - DNA, 25 bp, Homo sapien
gccaggacctatcaaaaccaaagga

SEQ ID NO: 5915369 - DNA, 25 bp, Homo sapien
gaataagtcacttgcagctgaatgg

SEQ ID NO: 5915370 - DNA, 25 bp, Homo sapien
gagaaggagatgattgacagaatcc

SEQ ID NO: 5915371 - DNA, 25 bp, Homo sapien
aatggtcgatgtttgccacgtgcaa

SEQ ID NO: 5915372 - DNA, 25 bp, Homo sapien
aaaggctcctaagatgaccacaact

SEQ ID NO: 5915373 - DNA, 25 bp, Homo sapien
atatcttttctttaaaacacgtgaa

SEQ ID NO: 5915374 - DNA, 25 bp, Homo sapien
attaaagcacagaaaggagctgcgt

SEQ ID NO: 5915375 - DNA, 25 bp, Homo sapien
ctcattttcgatctctgagttgcac

SEQ ID NO: 5915376 - DNA, 25 bp, Homo sapien
ggctggaagaccataactgacatag

SEQ ID NO: 5915377 - DNA, 25 bp, Homo sapien
gagttgcacctcagccctaaaaaat

SEQ ID NO: 5915378 - DNA, 25 bp, Homo sapien
cagtgtgccaggtcaggggtggcca

SEQ ID NO: 5915379 - DNA, 25 bp, Homo sapien
aacttcatttcccccagtgagagac

SEQ ID NO: 5915380 - DNA, 25 bp, Homo sapien
ttcaacataattcagccaggaccta

SEQ ID NO: 5915381 - DNA, 25 bp, Homo sapien
gaagatttgagaaggagatgattga

SEQ ID NO: 5915382 - DNA, 25 bp, Homo sapien
cgtttggacccgactggaagatttg

SEQ ID NO: 5915383 - DNA, 25 bp, Homo sapien
cgatctctgagttgcacctcagccc

SEQ ID NO: 5915384 - DNA, 25 bp, Homo sapien
cccccagtgagagactgactcccaa

SEQ ID NO: 5915385 - DNA, 25 bp, Homo sapien
acagaaaggagctgcgtttcttgcc

SEQ ID NO: 5915386 - DNA, 25 bp, Homo sapien
cactaaagttagggactagagtgct

SEQ ID NO: 5915387 - DNA, 25 bp, Homo sapien
ctgtggtcgtctgggaactatggag

SEQ ID NO: 5915388 - DNA, 25 bp, Homo sapien
cttcagccaaatcaggcgtggaagc

SEQ ID NO: 5915389 - DNA, 25 bp, Homo sapien
ttagccgtttggacccgactggaag

SEQ ID NO: 5915390 - DNA, 25 bp, Homo sapien
tggcacagcctatgtgacactagaa

SEQ ID NO: 5915391 - DNA, 25 bp, Homo sapien
ggtcgtctgggaactatggaggaac

SEQ ID NO: 5915392 - DNA, 25 bp, Homo sapien
ttgccatcactaccatctatgctga

SEQ ID NO: 5915393 - DNA, 25 bp, Homo sapien
aaatcaggcgtggaagccatgaata

SEQ ID NO: 5915394 - DNA, 25 bp, Homo sapien
gtggtcgtctgggaactatggagga

SEQ ID NO: 5915395 - DNA, 25 bp, Homo sapien
aataaattgtttgcttgatgatttc

SEQ ID NO: 5915396 - DNA, 25 bp, Homo sapien
tcaggctttgtaatgccaagttctt

SEQ ID NO: 5915397 - DNA, 25 bp, Homo sapien
aggctttgtaatgccaagttcttca

SEQ ID NO: 5915398 - DNA, 25 bp, Homo sapien
tcactaccatctatgctgagagtgg

SEQ ID NO: 5915399 - DNA, 25 bp, Homo sapien
tcttgggggttaataaattgtttgc

SEQ ID NO: 5915400 - DNA, 25 bp, Homo sapien
gtagttctgaggatcaaacccagag

SEQ ID NO: 5915401 - DNA, 25 bp, Homo sapien
gagctgcgtttcttgccatcactac

SEQ ID NO: 5915402 - DNA, 25 bp, Homo sapien
ggtgaattcaactctctaaagaagg

SEQ ID NO: 5915403 - DNA, 25 bp, Homo sapien
caaacagtgtgccaggtcaggggtg

SEQ ID NO: 5915404 - DNA, 25 bp, Homo sapien
gtgccaggtcaggggtggccactct

SEQ ID NO: 5915405 - DNA, 25 bp, Homo sapien
gctgcgtttcttgccatcactacca

SEQ ID NO: 5915406 - DNA, 25 bp, Homo sapien
acaggatatcttttctttaaaacac

SEQ ID NO: 5915407 - DNA, 25 bp, Homo sapien
tgcaaatctggccactttcctatgc

SEQ ID NO: 5915408 - DNA, 25 bp, Homo sapien
agaaaggagctgcgtttcttgccat

SEQ ID NO: 5915409 - DNA, 25 bp, Homo sapien
ctggaagaccataactgacatagtt

SEQ ID NO: 5915410 - DNA, 25 bp, Homo sapien
ggggttaataaattgtttgcttgat

SEQ ID NO: 5915411 - DNA, 25 bp, Homo sapien
cccagagtgtctgctctgctcattt

SEQ ID NO: 5915412 - DNA, 25 bp, Homo sapien
ccctgtggtcgtctgggaactatgg

SEQ ID NO: 5915413 - DNA, 25 bp, Homo sapien
ggacaggatatcttttctttaaaac

SEQ ID NO: 5915414 - DNA, 25 bp, Homo sapien
ggaagaccataactgacatagttct

SEQ ID NO: 5915415 - DNA, 25 bp, Homo sapien
caagttcttcagccaaatcaggcgt

SEQ ID NO: 5915416 - DNA, 25 bp, Homo sapien
aggagtgggatataatcgaagggct

SEQ ID NO: 5915417 - DNA, 25 bp, Homo sapien
gagtgggatataatcgaagggctca

SEQ ID NO: 5915418 - DNA, 25 bp, Homo sapien
cggcagggaacttcatttcccccag

SEQ ID NO: 5915419 - DNA, 25 bp, Homo sapien
gcctttagccgtttggacccgactg

SEQ ID NO: 5915420 - DNA, 25 bp, Homo sapien
caatggctggaagaccataactgac

SEQ ID NO: 5915421 - DNA, 25 bp, Homo sapien
ttctgaggatcaaacccagagtgtc

SEQ ID NO: 5915422 - DNA, 25 bp, Homo sapien
tatgtgacactagaaattggaaagc

SEQ ID NO: 5915423 - DNA, 25 bp, Homo sapien
ttgatgatttctgtagttctgagga

SEQ ID NO: 5915424 - DNA, 25 bp, Homo sapien
tagaaattggaaagcagctaattaa

SEQ ID NO: 5915425 - DNA, 25 bp, Homo sapien
atgcctcttggattaatggagcagt

SEQ ID NO: 5915426 - DNA, 25 bp, Homo sapien
caggacctatcaaaaccaaaggagc

SEQ ID NO: 5915427 - DNA, 25 bp, Homo sapien
ttttcaaattattcttgtgttgttt

SEQ ID NO: 5915428 - DNA, 25 bp, Homo sapien
tggaggaacttgcaaatctggccac

SEQ ID NO: 5915429 - DNA, 25 bp, Homo sapien
ccgtggtcttccacttgtcttgggg

SEQ ID NO: 5915430 - DNA, 25 bp, Homo sapien
aaagcagctaattaaagcacagaaa

SEQ ID NO: 5915431 - DNA, 25 bp, Homo sapien
tctgctcattttcgatctctgagtt

SEQ ID NO: 5915432 - DNA, 25 bp, Homo sapien
actctctaaagaaggtcaccaagga

SEQ ID NO: 5915433 - DNA, 25 bp, Homo sapien
catagttctcaatggcacagcctat

SEQ ID NO: 5915434 - DNA, 25 bp, Homo sapien
caggcgtggaagccatgaataagtc

SEQ ID NO: 5915435 - DNA, 25 bp, Homo sapien
aaagttagggactagagtgctacag

SEQ ID NO: 5915436 - DNA, 25 bp, Homo sapien
ttttctttttcaaattattcttgtg

SEQ ID NO: 5915437 - DNA, 25 bp, Homo sapien
atgtggtgataaacaacgcggcagg

SEQ ID NO: 5915438 - DNA, 25 bp, Homo sapien
actaccatctatgctgagagtggat

SEQ ID NO: 5915439 - DNA, 25 bp, Homo sapien
tcttgtgttgtttcgcagtagataa

SEQ ID NO: 5915440 - DNA, 25 bp, Homo sapien
ctgaggatcaaacccagagtgtctg

SEQ ID NO: 5915441 - DNA, 25 bp, Homo sapien
cagctaattaaagcacagaaaggag

SEQ ID NO: 5915442 - DNA, 25 bp, Homo sapien
tacagatggaccgtggtcttccact

SEQ ID NO: 5915443 - DNA, 25 bp, Homo sapien
atttctgtagttctgaggatcaaac

SEQ ID NO: 5915444 - DNA, 25 bp, Homo sapien
aatctggccactttcctatgcagtg

SEQ ID NO: 5915445 - DNA, 25 bp, Homo sapien
ttagggactagagtgctacagatgg

SEQ ID NO: 5915446 - DNA, 25 bp, Homo sapien
atgtttgccacgtgcaaacagtgtg

SEQ ID NO: 5915447 - DNA, 25 bp, Homo sapien
aagaaggtcaccaaggaggagtggg

SEQ ID NO: 5915448 - DNA, 25 bp, Homo sapien
agcctatgtgacactagaaattgga

SEQ ID NO: 5915449 - DNA, 25 bp, Homo sapien
atttcccccagtgagagactgactc

SEQ ID NO: 5915450 - DNA, 25 bp, Homo sapien
ctttcctatgcagtgattatgcctc

SEQ ID NO: 5915451 - DNA, 25 bp, Homo sapien
ggccactctgtattgaagggtaaat

SEQ ID NO: 5915452 - DNA, 25 bp, Homo sapien
agccaaatcaggcgtggaagccatg

SEQ ID NO: 5915453 - DNA, 25 bp, Homo sapien
tatggaggaacttgcaaatctggcc

SEQ ID NO: 5915454 - DNA, 25 bp, Homo sapien
tctggccactttcctatgcagtgat

SEQ ID NO: 5915455 - DNA, 25 bp, Homo sapien
tcaatggcacagcctatgtgacact

SEQ ID NO: 5915456 - DNA, 25 bp, Homo sapien
gacccgactggaagatttgagaagg

SEQ ID NO: 5915457 - DNA, 25 bp, Homo sapien
caggaagacaaaaggctcctaagat

SEQ ID NO: 5915458 - DNA, 25 bp, Homo sapien
aacccagagtgtctgctctgctcat

SEQ ID NO: 5915459 - DNA, 25 bp, Homo sapien
actagagtgctacagatggaccgtg

SEQ ID NO: 5915460 - DNA, 25 bp, Homo sapien
ggggtagatatggaatgcgtttcaa

SEQ ID NO: 5915461 - DNA, 25 bp, Homo sapien
gtggccactctgtattgaagggtaa

SEQ ID NO: 5915462 - DNA, 25 bp, Homo sapien
ggaaagcagctaattaaagcacaga

SEQ ID NO: 5915463 - DNA, 25 bp, Homo sapien
ggtagatatggaatgcgtttcaaca

SEQ ID NO: 5915464 - DNA, 25 bp, Homo sapien
gaagccatgaataagtcacttgcag

SEQ ID NO: 5915465 - DNA, 25 bp, Homo sapien
tcagccaaatcaggcgtggaagcca

SEQ ID NO: 5915466 - DNA, 25 bp, Homo sapien
ccaaggaggagtgggatataatcga

SEQ ID NO: 5915467 - DNA, 25 bp, Homo sapien
ctgactcccaatggctggaagacca

SEQ ID NO: 5915468 - DNA, 25 bp, Homo sapien
caccaaggaggagtgggatataatc

SEQ ID NO: 5915469 - DNA, 25 bp, Homo sapien
tcgtctgggaactatggaggaactt

SEQ ID NO: 5915470 - DNA, 25 bp, Homo sapien
gggatataatcgaagggctcatcag

SEQ ID NO: 5915471 - DNA, 25 bp, Homo sapien
aatggagcagtcattagatttgacg

SEQ ID NO: 5915472 - DNA, 25 bp, Homo sapien
cattttcgatctctgagttgcacct

SEQ ID NO: 5915473 - DNA, 25 bp, Homo sapien
cacaacttcatctgtgaaacactaa

SEQ ID NO: 5915474 - DNA, 25 bp, Homo sapien
caacataattcagccaggacctatc

SEQ ID NO: 5915475 - DNA, 25 bp, Homo sapien
ggtcaggggtggccactctgtattg

SEQ ID NO: 5915476 - DNA, 25 bp, Homo sapien
gtggtgataaacaacgcggcaggga

SEQ ID NO: 5915477 - DNA, 25 bp, Homo sapien
caaattattcttgtgttgtttcgca

SEQ ID NO: 5915478 - DNA, 25 bp, Homo sapien
gtatttctgtcaggtgaattcaact

SEQ ID NO: 5915479 - DNA, 25 bp, Homo sapien
ggcgtggaagccatgaataagtcac

SEQ ID NO: 5915480 - DNA, 25 bp, Homo sapien
cactctgggtttgatcctcagaact

SEQ ID NO: 5915481 - DNA, 25 bp, Homo sapien
cagaactacagaaatcatcaagcaa

SEQ ID NO: 5915482 - DNA, 25 bp, Homo sapien
gcagagcagacactctgggtttgat

SEQ ID NO: 5915483 - DNA, 25 bp, Homo sapien
ccattgagaactatgtcagttatgg

SEQ ID NO: 5915484 - DNA, 25 bp, Homo sapien
gaaaatgagcagagcagacactctg

SEQ ID NO: 5915485 - DNA, 25 bp, Homo sapien
ctgtagcactctagtccctaacttt

SEQ ID NO: 5915486 - DNA, 25 bp, Homo sapien
tggtcttccagccattgggagtcag

SEQ ID NO: 5915487 - DNA, 25 bp, Homo sapien
gattatatcccactcctccttggtg

SEQ ID NO: 5915488 - DNA, 25 bp, Homo sapien
gtgaccttctttagagagttgaatt

SEQ ID NO: 5915489 - DNA, 25 bp, Homo sapien
aaagatatcctgtccaatttaccct

SEQ ID NO: 5915490 - DNA, 25 bp, Homo sapien
agttgtggtcatcttaggagccttt

SEQ ID NO: 5915491 - DNA, 25 bp, Homo sapien
ttctcaaatcttccagtcgggtcca

SEQ ID NO: 5915492 - DNA, 25 bp, Homo sapien
ttctagtgtcacataggctgtgcca

SEQ ID NO: 5915493 - DNA, 25 bp, Homo sapien
ctctccaccgtcaaatctaatgact

SEQ ID NO: 5915494 - DNA, 25 bp, Homo sapien
atctccttctcaaatcttccagtcg

SEQ ID NO: 5915495 - DNA, 25 bp, Homo sapien
tggcttccacgcctgatttggctga

SEQ ID NO: 5915496 - DNA, 25 bp, Homo sapien
gaccattttttagggctgaggtgca

SEQ ID NO: 5915497 - DNA, 25 bp, Homo sapien
ctgtttgcacgtggcaaacatcgac

SEQ ID NO: 5915498 - DNA, 25 bp, Homo sapien
tacagaaatcatcaagcaaacaatt

SEQ ID NO: 5915499 - DNA, 25 bp, Homo sapien
tcacagatgaagttgtggtcatctt

SEQ ID NO: 5915500 - DNA, 25 bp, Homo sapien
ttgaattcacctgacagaaatactt

SEQ ID NO: 5915501 - DNA, 25 bp, Homo sapien
atccactctcagcatagatggtagt

SEQ ID NO: 5915502 - DNA, 25 bp, Homo sapien
tgatggcaagaaacgcagctccttt

SEQ ID NO: 5915503 - DNA, 25 bp, Homo sapien
ttaattagctgctttccaatttcta

SEQ ID NO: 5915504 - DNA, 25 bp, Homo sapien
agctcctttctgtgctttaattagc

SEQ ID NO: 5915505 - DNA, 25 bp, Homo sapien
cactcctccttggtgaccttcttta

SEQ ID NO: 5915506 - DNA, 25 bp, Homo sapien
aagaaaagatatcctgtccaattta

SEQ ID NO: 5915507 - DNA, 25 bp, Homo sapien
aaatgagcagagcagacactctggg

SEQ ID NO: 5915508 - DNA, 25 bp, Homo sapien
ttagctgctttccaatttctagtgt

SEQ ID NO: 5915509 - DNA, 25 bp, Homo sapien
ttgataggtcctggctgaattatgt

SEQ ID NO: 5915510 - DNA, 25 bp, Homo sapien
ctctgggtttgatcctcagaactac

SEQ ID NO: 5915511 - DNA, 25 bp, Homo sapien
tgttgaaacgcattccatatctacc

SEQ ID NO: 5915512 - DNA, 25 bp, Homo sapien
atcaagcaaacaatttattaacccc

SEQ ID NO: 5915513 - DNA, 25 bp, Homo sapien
ttgggagtcagtctctcactggggg

SEQ ID NO: 5915514 - DNA, 25 bp, Homo sapien
acaacacaagaataatttgaaaaag

SEQ ID NO: 5915515 - DNA, 25 bp, Homo sapien
gatttggctgaagaacttggcatta

SEQ ID NO: 5915516 - DNA, 25 bp, Homo sapien
gccattgggagtcagtctctcactg

SEQ ID NO: 5915517 - DNA, 25 bp, Homo sapien
actgcgaaacaacacaagaataatt

SEQ ID NO: 5915518 - DNA, 25 bp, Homo sapien
ggttttgataggtcctggctgaatt

SEQ ID NO: 5915519 - DNA, 25 bp, Homo sapien
agtgatggcaagaaacgcagctcct

SEQ ID NO: 5915520 - DNA, 25 bp, Homo sapien
ggcacactgtttgcacgtggcaaac

SEQ ID NO: 5915521 - DNA, 25 bp, Homo sapien
gcaactcagagatcgaaaatgagca

SEQ ID NO: 5915522 - DNA, 25 bp, Homo sapien
ttgtcttcctgatgagcccttcgat

SEQ ID NO: 5915523 - DNA, 25 bp, Homo sapien
agtgtttcacagatgaagttgtggt

SEQ ID NO: 5915524 - DNA, 25 bp, Homo sapien
atatcccactcctccttggtgacct

SEQ ID NO: 5915525 - DNA, 25 bp, Homo sapien
gaaacgcattccatatctaccccat

SEQ ID NO: 5915526 - DNA, 25 bp, Homo sapien
cactgggggaaatgaagttccctgc

SEQ ID NO: 5915527 - DNA, 25 bp, Homo sapien
cttcgattatatcccactcctcctt

SEQ ID NO: 5915528 - DNA, 25 bp, Homo sapien
aacatcgaccattttttagggctga

SEQ ID NO: 5915529 - DNA, 25 bp, Homo sapien
gacgaccacaggggattctgtcaat

SEQ ID NO: 5915530 - DNA, 25 bp, Homo sapien
caagtggaagaccacggtccatctg

SEQ ID NO: 5915531 - DNA, 25 bp, Homo sapien
ctcctccttggtgaccttctttaga

SEQ ID NO: 5915532 - DNA, 25 bp, Homo sapien
tctttcacctttatctactgcgaaa

SEQ ID NO: 5915533 - DNA, 25 bp, Homo sapien
cacaagaataatttgaaaaagaaaa

SEQ ID NO: 5915534 - DNA, 25 bp, Homo sapien
cactgcataggaaagtggccagatt

SEQ ID NO: 5915535 - DNA, 25 bp, Homo sapien
tctaccccattcagctgcaagtgac

SEQ ID NO: 5915536 - DNA, 25 bp, Homo sapien
gaaatgaagttccctgccgcgttgt

SEQ ID NO: 5915537 - DNA, 25 bp, Homo sapien
gtcagtctctcactgggggaaatga

SEQ ID NO: 5915538 - DNA, 25 bp, Homo sapien
cctgacctggcacactgtttgcacg

SEQ ID NO: 5915539 - DNA, 25 bp, Homo sapien
attcagctgcaagtgacttattcat

SEQ ID NO: 5915540 - DNA, 25 bp, Homo sapien
cccagacgaccacaggggattctgt

SEQ ID NO: 5915541 - DNA, 25 bp, Homo sapien
aaacaacacaagaataatttgaaaa

SEQ ID NO: 5915542 - DNA, 25 bp, Homo sapien
taatccaagaggcataatcactgca

SEQ ID NO: 5915543 - DNA, 25 bp, Homo sapien
tgaggtgcaactcagagatcgaaaa

SEQ ID NO: 5915544 - DNA, 25 bp, Homo sapien
gagtcagtctctcactgggggaaat

SEQ ID NO: 5915545 - DNA, 25 bp, Homo sapien
aatgaagttccctgccgcgttgttt

SEQ ID NO: 5915546 - DNA, 25 bp, Homo sapien
ctttggttttgataggtcctggctg

SEQ ID NO: 5915547 - DNA, 25 bp, Homo sapien
aggtgcaactcagagatcgaaaatg

SEQ ID NO: 5915548 - DNA, 25 bp, Homo sapien
aaacgcagctcctttctgtgcttta

SEQ ID NO: 5915549 - DNA, 25 bp, Homo sapien
tcctgatgagcccttcgattatatc

SEQ ID NO: 5915550 - DNA, 25 bp, Homo sapien
gcaagtgacttattcatggcttcca

SEQ ID NO: 5915551 - DNA, 25 bp, Homo sapien
gaagttgtggtcatcttaggagcct

SEQ ID NO: 5915552 - DNA, 25 bp, Homo sapien
aagacaagtggaagaccacggtcca

SEQ ID NO: 5915553 - DNA, 25 bp, Homo sapien
cattgggagtcagtctctcactggg

SEQ ID NO: 5915554 - DNA, 25 bp, Homo sapien
tattcatggcttccacgcctgattt

SEQ ID NO: 5915555 - DNA, 25 bp, Homo sapien
tcctcagaactacagaaatcatcaa

SEQ ID NO: 5915556 - DNA, 25 bp, Homo sapien
cctgccgcgttgtttatcaccacat

SEQ ID NO: 5915557 - DNA, 25 bp, Homo sapien
acagagtggccacccctgacctggc

SEQ ID NO: 5915558 - DNA, 25 bp, Homo sapien
atcttaggagccttttgtcttcctg

SEQ ID NO: 5915559 - DNA, 25 bp, Homo sapien
tttctgtgctttaattagctgcttt

SEQ ID NO: 5915560 - DNA, 25 bp, Homo sapien
tgtttcacagatgaagttgtggtca

SEQ ID NO: 5915561 - DNA, 25 bp, Homo sapien
atctgtagcactctagtccctaact

SEQ ID NO: 5915562 - DNA, 25 bp, Homo sapien
caggggattctgtcaatcatctcct

SEQ ID NO: 5915563 - DNA, 25 bp, Homo sapien
ctcagagatcgaaaatgagcagagc

SEQ ID NO: 5915564 - DNA, 25 bp, Homo sapien
gctttccaatttctagtgtcacata

SEQ ID NO: 5915565 - DNA, 25 bp, Homo sapien
ccttctcaaatcttccagtcgggtc

SEQ ID NO: 5915566 - DNA, 25 bp, Homo sapien
attaatccaagaggcataatcactg

SEQ ID NO: 5915567 - DNA, 25 bp, Homo sapien
atcccactcctccttggtgaccttc

SEQ ID NO: 5915568 - DNA, 25 bp, Homo sapien
ttgatcctcagaactacagaaatca

SEQ ID NO: 5915569 - DNA, 25 bp, Homo sapien
ttcaatacagagtggccacccctga

SEQ ID NO: 5915570 - DNA, 25 bp, Homo sapien
atccaagaggcataatcactgcata

SEQ ID NO: 5915571 - DNA, 25 bp, Homo sapien
ccctaactttagtgtttcacagatg

SEQ ID NO: 5915572 - DNA, 25 bp, Homo sapien
ccacgcctgatttggctgaagaact

SEQ ID NO: 5915573 - DNA, 25 bp, Homo sapien
ttttgtcttcctgatgagcccttcg

SEQ ID NO: 5915574 - DNA, 25 bp, Homo sapien
gagatcgaaaatgagcagagcagac

SEQ ID NO: 5915575 - DNA, 25 bp, Homo sapien
tttagggctgaggtgcaactcagag

SEQ ID NO: 5915576 - DNA, 25 bp, Homo sapien
ctttagtgtttcacagatgaagttg

SEQ ID NO: 5915577 - DNA, 25 bp, Homo sapien
gaactacagaaatcatcaagcaaac

SEQ ID NO: 5915578 - DNA, 25 bp, Homo sapien
atgagcagagcagacactctgggtt

SEQ ID NO: 5915579 - DNA, 25 bp, Homo sapien
ttagtgtttcacagatgaagttgtg

SEQ ID NO: 5915580 - DNA, 25 bp, Homo sapien
tcgaccattttttagggctgaggtg

SEQ ID NO: 5915581 - DNA, 25 bp, Homo sapien
atcttccagtcgggtccaaacggct

SEQ ID NO: 5915582 - DNA, 25 bp, Homo sapien
caatttacccttcaatacagagtgg

SEQ ID NO: 5915583 - DNA, 25 bp, Homo sapien
cagaaatcatcaagcaaacaattta

SEQ ID NO: 5915584 - DNA, 25 bp, Homo sapien
cagttatggtcttccagccattggg

SEQ ID NO: 5915585 - DNA, 25 bp, Homo sapien
ctgcaagtgacttattcatggcttc

SEQ ID NO: 5915586 - DNA, 25 bp, Homo sapien
catagatggtagtgatggcaagaaa

SEQ ID NO: 5915587 - DNA, 25 bp, Homo sapien
aaatctaatgactgctccattaatc

SEQ ID NO: 5915588 - DNA, 25 bp, Homo sapien
ttgaaacgcattccatatctacccc

SEQ ID NO: 5915589 - DNA, 25 bp, Homo sapien
taatcactgcataggaaagtggcca

SEQ ID NO: 5915590 - DNA, 25 bp, Homo sapien
tggccacccctgacctggcacactg

SEQ ID NO: 5915591 - DNA, 25 bp, Homo sapien
caagcaaacaatttattaaccccca

SEQ ID NO: 5915592 - DNA, 25 bp, Homo sapien
ccccaagacaagtggaagaccacgg

SEQ ID NO: 5915593 - DNA, 25 bp, Homo sapien
ctgacagaaatacttcctctccacc

SEQ ID NO: 5915594 - DNA, 25 bp, Homo sapien
ctgcataggaaagtggccagatttg

SEQ ID NO: 5915595 - DNA, 25 bp, Homo sapien
tgactgctccattaatccaagaggc

SEQ ID NO: 5915596 - DNA, 25 bp, Homo sapien
agtggccacccctgacctggcacac

SEQ ID NO: 5915597 - DNA, 25 bp, Homo sapien
tggaagaccacggtccatctgtagc

SEQ ID NO: 5915598 - DNA, 25 bp, Homo sapien
tgagcccttcgattatatcccactc

SEQ ID NO: 5915599 - DNA, 25 bp, Homo sapien
cggtccatctgtagcactctagtcc

SEQ ID NO: 5915600 - DNA, 25 bp, Homo sapien
acataggctgtgccattgagaacta

SEQ ID NO: 5915601 - DNA, 25 bp, Homo sapien
gtcagttatggtcttccagccattg

SEQ ID NO: 5915602 - DNA, 25 bp, Homo sapien
ctgatttggctgaagaacttggcat

SEQ ID NO: 5915603 - DNA, 25 bp, Homo sapien
cttccagccattgggagtcagtctc

SEQ ID NO: 5915604 - DNA, 25 bp, Homo sapien
ataggaaagtggccagatttgcaag

SEQ ID NO: 5915605 - DNA, 25 bp, Homo sapien
ctggcacactgtttgcacgtggcaa

SEQ ID NO: 5915606 - DNA, 25 bp, Homo sapien
catcgaccattttttagggctgagg

SEQ ID NO: 5915607 - DNA, 25 bp, Homo sapien
aactcagagatcgaaaatgagcaga

SEQ ID NO: 5915608 - DNA, 25 bp, Homo sapien
attctgtcaatcatctccttctcaa

SEQ ID NO: 5915609 - DNA, 25 bp, Homo sapien
tcgaaaatgagcagagcagacactc

SEQ ID NO: 5915610 - DNA, 25 bp, Homo sapien
tccaatttacccttcaatacagagt

SEQ ID NO: 5915611 - DNA, 25 bp, Homo sapien
agcccttcgattatatcccactcct

SEQ ID NO: 5915612 - DNA, 25 bp, Homo sapien
tgaagaacttggcattacaaagcct

SEQ ID NO: 5915613 - DNA, 25 bp, Homo sapien
agatatcctgtccaatttacccttc

SEQ ID NO: 5915614 - DNA, 25 bp, Homo sapien
tccagtcgggtccaaacggctaaag

SEQ ID NO: 5915615 - DNA, 25 bp, Homo sapien
ccttttgtcttcctgatgagccctt

SEQ ID NO: 5915616 - DNA, 25 bp, Homo sapien
aaagcctgatccactctcagcatag

SEQ ID NO: 5915617 - DNA, 25 bp, Homo sapien
gctgtgccattgagaactatgtcag

SEQ ID NO: 5915618 - DNA, 25 bp, Homo sapien
gaaagtggccagatttgcaagttcc

SEQ ID NO: 5915619 - DNA, 25 bp, Homo sapien
ggcattacaaagcctgatccactct

SEQ ID NO: 5915620 - DNA, 25 bp, Homo sapien
agtgtcacataggctgtgccattga

SEQ ID NO: 5915621 - DNA, 25 bp, Homo sapien
agcactctagtccctaactttagtg

SEQ ID NO: 5915622 - DNA, 25 bp, Homo sapien
aggctgtgccattgagaactatgtc

SEQ ID NO: 5915623 - DNA, 25 bp, Homo sapien
ttatctactgcgaaacaacacaaga

SEQ ID NO: 5915624 - DNA, 25 bp, Homo sapien
cgaccacaggggattctgtcaatca

SEQ ID NO: 5915625 - DNA, 25 bp, Homo sapien
cctgtccaatttacccttcaataca

SEQ ID NO: 5915626 - DNA, 25 bp, Homo sapien
cccctgacctggcacactgtttgca

SEQ ID NO: 5915627 - DNA, 25 bp, Homo sapien
ctctcactgggggaaatgaagttcc

SEQ ID NO: 5915628 - DNA, 25 bp, Homo sapien
gctaaaggctcctttggttttgata

SEQ ID NO: 5915629 - DNA, 25 bp, Homo sapien
acgtggcaaacatcgaccatttttt

SEQ ID NO: 5915630 - DNA, 25 bp, Homo sapien
gaacttggcattacaaagcctgatc

SEQ ID NO: 5915631 - DNA, 25 bp, Homo sapien
caagaaacgcagctcctttctgtgc

SEQ ID NO: 5915632 - DNA, 25 bp, Homo sapien
cactctagtccctaactttagtgtt

SEQ ID NO: 5915633 - DNA, 25 bp, Homo sapien
attccatatctaccccattcagctg

SEQ ID NO: 5915634 - DNA, 25 bp, Homo sapien
caaatcttccagtcgggtccaaacg

SEQ ID NO: 5915635 - DNA, 25 bp, Homo sapien
ttttgataggtcctggctgaattat

SEQ ID NO: 5915636 - DNA, 25 bp, Homo sapien
cagacgaccacaggggattctgtca

SEQ ID NO: 5915637 - DNA, 25 bp, Homo sapien
agagtggccacccctgacctggcac

SEQ ID NO: 5915638 - DNA, 25 bp, Homo sapien
tacttcctctccaccgtcaaatcta

SEQ ID NO: 5915639 - DNA, 25 bp, Homo sapien
cccactcctccttggtgaccttctt

SEQ ID NO: 5915640 - DNA, 25 bp, Homo sapien
tccttggtgaccttctttagagagt

SEQ ID NO: 5915641 - DNA, 25 bp, Homo sapien
cctccttggtgaccttctttagaga

SEQ ID NO: 5915642 - DNA, 25 bp, Homo sapien
ctgaattatgttgaaacgcattcca

SEQ ID NO: 5915643 - DNA, 25 bp, Homo sapien
gggctgaggtgcaactcagagatcg

SEQ ID NO: 5915644 - DNA, 25 bp, Homo sapien
actgctccattaatccaagaggcat

SEQ ID NO: 5915645 - DNA, 25 bp, Homo sapien
atctactgcgaaacaacacaagaat

SEQ ID NO: 5915646 - DNA, 25 bp, Homo sapien
tttccaatttctagtgtcacatagg

SEQ ID NO: 5915647 - DNA, 25 bp, Homo sapien
ctgggggaaatgaagttccctgccg

SEQ ID NO: 5915648 - DNA, 25 bp, Homo sapien
aagttccctgccgcgttgtttatca

SEQ ID NO: 5915649 - DNA, 25 bp, Homo sapien
gtggcaaacatcgaccattttttag

SEQ ID NO: 5915650 - DNA, 25 bp, Homo sapien
tagggctgaggtgcaactcagagat

SEQ ID NO: 5915651 - DNA, 25 bp, Homo sapien
gatgagcccttcgattatatcccac

SEQ ID NO: 5915652 - DNA, 25 bp, Homo sapien
accgtcaaatctaatgactgctcca

SEQ ID NO: 5915653 - DNA, 25 bp, Homo sapien
agaccacggtccatctgtagcactc

SEQ ID NO: 5915654 - DNA, 25 bp, Homo sapien
aattagctgctttccaatttctagt

SEQ ID NO: 5915655 - DNA, 25 bp, Homo sapien
acctgacagaaatacttcctctcca

SEQ ID NO: 5915656 - DNA, 25 bp, Homo sapien
actctcagcatagatggtagtgatg

SEQ ID NO: 5915657 - DNA, 25 bp, Homo sapien
tctcagcatagatggtagtgatggc

SEQ ID NO: 5915658 - DNA, 25 bp, Homo sapien
atcactgcataggaaagtggccaga

SEQ ID NO: 5915659 - DNA, 25 bp, Homo sapien
cgaaacaacacaagaataatttgaa

SEQ ID NO: 5915660 - DNA, 25 bp, Homo sapien
ataggctgtgccattgagaactatg

SEQ ID NO: 5915661 - DNA, 25 bp, Homo sapien
ctgggtttgatcctcagaactacag

SEQ ID NO: 5915662 - DNA, 25 bp, Homo sapien
gcagctcctttctgtgctttaatta

SEQ ID NO: 5915663 - DNA, 25 bp, Homo sapien
aatcatctccttctcaaatcttcca

SEQ ID NO: 5915664 - DNA, 25 bp, Homo sapien
atagttcccagacgaccacagggga

SEQ ID NO: 5915665 - DNA, 25 bp, Homo sapien
gtccatctgtagcactctagtccct

SEQ ID NO: 5915666 - DNA, 25 bp, Homo sapien
ttggttttgataggtcctggctgaa

SEQ ID NO: 5915667 - DNA, 25 bp, Homo sapien
ccattcagctgcaagtgacttattc

SEQ ID NO: 5915668 - DNA, 25 bp, Homo sapien
cacggtccatctgtagcactctagt

SEQ ID NO: 5915669 - DNA, 25 bp, Homo sapien
ttgtggtcatcttaggagccttttg

SEQ ID NO: 5915670 - DNA, 25 bp, Homo sapien
gcataggaaagtggccagatttgca

SEQ ID NO: 5915671 - DNA, 25 bp, Homo sapien
tgccgcgttgtttatcaccacatcc

SEQ ID NO: 5915672 - DNA, 25 bp, Homo sapien
attgagaactatgtcagttatggtc

SEQ ID NO: 5915673 - DNA, 25 bp, Homo sapien
taccccattcagctgcaagtgactt

SEQ ID NO: 5915674 - DNA, 25 bp, Homo sapien
gatggtagtgatggcaagaaacgca

SEQ ID NO: 5915675 - DNA, 25 bp, Homo sapien
attaacccccaagacaagtggaaga

SEQ ID NO: 5915676 - DNA, 25 bp, Homo sapien
taggagccttttgtcttcctgatga

SEQ ID NO: 5915677 - DNA, 25 bp, Homo sapien
tgcgaaacaacacaagaataatttg

SEQ ID NO: 5915678 - DNA, 25 bp, Homo sapien
agctgctttccaatttctagtgtca

SEQ ID NO: 5915679 - DNA, 25 bp, Homo sapien
ctagtgtcacataggctgtgccatt

SEQ ID NO: 5915680 - DNA, 25 bp, Homo sapien
cgtcaaatctaatgactgctccatt

SEQ ID NO: 5915681 - DNA, 25 bp, Homo sapien
cattacaaagcctgatccactctca

SEQ ID NO: 5915682 - DNA, 25 bp, Homo sapien
taacccccaagacaagtggaagacc

SEQ ID NO: 5915683 - DNA, 25 bp, Homo sapien
tgtcaatcatctccttctcaaatct

SEQ ID NO: 5915684 - DNA, 25 bp, Homo sapien
gaaatcatcaagcaaacaatttatt

SEQ ID NO: 5915685 - DNA, 25 bp, Homo sapien
tctagtccctaactttagtgtttca

SEQ ID NO: 5915686 - DNA, 25 bp, Homo sapien
agttgaattcacctgacagaaatac

SEQ ID NO: 5915687 - DNA, 25 bp, Homo sapien
ctcactgggggaaatgaagttccct

SEQ ID NO: 5915688 - DNA, 25 bp, Homo sapien
attttttagggctgaggtgcaactc

SEQ ID NO: 5915689 - DNA, 25 bp, Homo sapien
atggcaagaaacgcagctcctttct

SEQ ID NO: 5915690 - DNA, 25 bp, Homo sapien
ttctttagagagttgaattcacctg

SEQ ID NO: 5915691 - DNA, 25 bp, Homo sapien
tgtgccattgagaactatgtcagtt

SEQ ID NO: 5915692 - DNA, 25 bp, Homo sapien
ccttctttagagagttgaattcacc

SEQ ID NO: 5915693 - DNA, 25 bp, Homo sapien
tccctgccgcgttgtttatcaccac

SEQ ID NO: 5915694 - DNA, 25 bp, Homo sapien
gggagtcagtctctcactgggggaa

SEQ ID NO: 5915695 - DNA, 25 bp, Homo sapien
actacagaaatcatcaagcaaacaa

SEQ ID NO: 5915696 - DNA, 25 bp, Homo sapien
cttaggagccttttgtcttcctgat

SEQ ID NO: 5915697 - DNA, 25 bp, Homo sapien
acttggcattacaaagcctgatcca

SEQ ID NO: 5915698 - DNA, 25 bp, Homo sapien
cacgtgttttaaagaaaagatatcc

SEQ ID NO: 5915699 - DNA, 25 bp, Homo sapien
catatctaccccattcagctgcaag

SEQ ID NO: 5915700 - DNA, 25 bp, Homo sapien
tgctccattaatccaagaggcataa

SEQ ID NO: 5915701 - DNA, 25 bp, Homo sapien
tttcacagatgaagttgtggtcatc

SEQ ID NO: 5915702 - DNA, 25 bp, Homo sapien
gttccctgccgcgttgtttatcacc

SEQ ID NO: 5915703 - DNA, 25 bp, Homo sapien
cactgtttgcacgtggcaaacatcg

SEQ ID NO: 5915704 - DNA, 25 bp, Homo sapien
acctggcacactgtttgcacgtggc

SEQ ID NO: 5915705 - DNA, 25 bp, Homo sapien
tatctaccccattcagctgcaagtg

SEQ ID NO: 5915706 - DNA, 25 bp, Homo sapien
tgaagttccctgccgcgttgtttat

SEQ ID NO: 5915707 - DNA, 25 bp, Homo sapien
tttcacctttatctactgcgaaaca

SEQ ID NO: 5915708 - DNA, 25 bp, Homo sapien
aggctcctttggttttgataggtcc

SEQ ID NO: 5915709 - DNA, 25 bp, Homo sapien
atgtcagttatggtcttccagccat

SEQ ID NO: 5915710 - DNA, 25 bp, Homo sapien
ccagatttgcaagttcctccatagt

SEQ ID NO: 5915711 - DNA, 25 bp, Homo sapien
ccactctcagcatagatggtagtga

SEQ ID NO: 5915712 - DNA, 25 bp, Homo sapien
ctgatgagcccttcgattatatccc

SEQ ID NO: 5915713 - DNA, 25 bp, Homo sapien
cttcctctccaccgtcaaatctaat

SEQ ID NO: 5915714 - DNA, 25 bp, Homo sapien
cagacactctgggtttgatcctcag

SEQ ID NO: 5915715 - DNA, 25 bp, Homo sapien
tgatccactctcagcatagatggta

SEQ ID NO: 5915716 - DNA, 25 bp, Homo sapien
gttttaaagaaaagatatcctgtcc

SEQ ID NO: 5915717 - DNA, 25 bp, Homo sapien
tggtgaccttctttagagagttgaa

SEQ ID NO: 5915718 - DNA, 25 bp, Homo sapien
gtgttttaaagaaaagatatcctgt

SEQ ID NO: 5915719 - DNA, 25 bp, Homo sapien
caatacagagtggccacccctgacc

SEQ ID NO: 5915720 - DNA, 25 bp, Homo sapien
gtgacttattcatggcttccacgcc

SEQ ID NO: 5915721 - DNA, 25 bp, Homo sapien
acagatgaagttgtggtcatcttag

SEQ ID NO: 5915722 - DNA, 25 bp, Homo sapien
tttggctgaagaacttggcattaca

SEQ ID NO: 5915723 - DNA, 25 bp, Homo sapien
cacactgtttgcacgtggcaaacat

SEQ ID NO: 5915724 - DNA, 25 bp, Homo sapien
cggctaaaggctcctttggttttga

SEQ ID NO: 5915725 - DNA, 25 bp, Homo sapien
aactatgtcagttatggtcttccag

SEQ ID NO: 5915726 - DNA, 25 bp, Homo sapien
gtagcactctagtccctaactttag

SEQ ID NO: 5915727 - DNA, 25 bp, Homo sapien
atttacccttcaatacagagtggcc

SEQ ID NO: 5915728 - DNA, 25 bp, Homo sapien
tcctccatagttcccagacgaccac

SEQ ID NO: 5915729 - DNA, 25 bp, Homo sapien
ccaagaggcataatcactgcatagg

SEQ ID NO: 5915730 - DNA, 25 bp, Homo sapien
ttcatggcttccacgcctgatttgg

SEQ ID NO: 5915731 - DNA, 25 bp, Homo sapien
cctttctgtgctttaattagctgct

SEQ ID NO: 5915732 - DNA, 25 bp, Homo sapien
gaaatacttcctctccaccgtcaaa

SEQ ID NO: 5915733 - DNA, 25 bp, Homo sapien
gacagaaatacttcctctccaccgt

SEQ ID NO: 5915734 - DNA, 25 bp, Homo sapien
ctgctttccaatttctagtgtcaca

SEQ ID NO: 5915735 - DNA, 25 bp, Homo sapien
gtctctcactgggggaaatgaagtt

SEQ ID NO: 5915736 - DNA, 25 bp, Homo sapien
atacagagtggccacccctgacctg

SEQ ID NO: 5915737 - DNA, 25 bp, Homo sapien
gtggtcatcttaggagccttttgtc

SEQ ID NO: 5915738 - DNA, 25 bp, Homo sapien
taaaggctcctttggttttgatagg

SEQ ID NO: 5915739 - DNA, 25 bp, Homo sapien
gggaaatgaagttccctgccgcgtt

SEQ ID NO: 5915740 - DNA, 25 bp, Homo sapien
ccattttttagggctgaggtgcaac

SEQ ID NO: 5915741 - DNA, 25 bp, Homo sapien
acccttcaatacagagtggccaccc

SEQ ID NO: 5915742 - DNA, 25 bp, Homo sapien
gaaaagatatcctgtccaatttacc

SEQ ID NO: 5915743 - DNA, 25 bp, Homo sapien
tagatggtagtgatggcaagaaacg

SEQ ID NO: 5915744 - DNA, 25 bp, Homo sapien
ggggattctgtcaatcatctccttc

SEQ ID NO: 5915745 - DNA, 25 bp, Homo sapien
ccatagttcccagacgaccacaggg

SEQ ID NO: 5915746 - DNA, 25 bp, Homo sapien
aatacttcctctccaccgtcaaatc

SEQ ID NO: 5915747 - DNA, 25 bp, Homo sapien
ccaagacaagtggaagaccacggtc

SEQ ID NO: 5915748 - DNA, 25 bp, Homo sapien
tcgattatatcccactcctccttgg

SEQ ID NO: 5915749 - DNA, 25 bp, Homo sapien
gaggcataatcactgcataggaaag

SEQ ID NO: 5915750 - DNA, 25 bp, Homo sapien
tctgtgctttaattagctgctttcc

SEQ ID NO: 5915751 - DNA, 25 bp, Homo sapien
agagagttgaattcacctgacagaa

SEQ ID NO: 5915752 - DNA, 25 bp, Homo sapien
cacccctgacctggcacactgtttg

SEQ ID NO: 5915753 - DNA, 25 bp, Homo sapien
accacggtccatctgtagcactcta

SEQ ID NO: 5915754 - DNA, 25 bp, Homo sapien
atttgcaagttcctccatagttccc

SEQ ID NO: 5915755 - DNA, 25 bp, Homo sapien
gatcctcagaactacagaaatcatc

SEQ ID NO: 5915756 - DNA, 25 bp, Homo sapien
catctttcacctttatctactgcga

SEQ ID NO: 5915757 - DNA, 25 bp, Homo sapien
atctaatgactgctccattaatcca

SEQ ID NO: 5915758 - DNA, 25 bp, Homo sapien
tcctctccaccgtcaaatctaatga

SEQ ID NO: 5915759 - DNA, 25 bp, Homo sapien
gaagaccacggtccatctgtagcac

SEQ ID NO: 5915760 - DNA, 25 bp, Homo sapien
agcctgatccactctcagcatagat

SEQ ID NO: 5915761 - DNA, 25 bp, Homo sapien
gatcgaaaatgagcagagcagacac

SEQ ID NO: 5915762 - DNA, 25 bp, Homo sapien
cagaaatacttcctctccaccgtca

SEQ ID NO: 5915763 - DNA, 25 bp, Homo sapien
tcgggtccaaacggctaaaggctcc

SEQ ID NO: 5915764 - DNA, 25 bp, Homo sapien
tcatctccttctcaaatcttccagt

SEQ ID NO: 5915765 - DNA, 25 bp, Homo sapien
atcctgtccaatttacccttcaata

SEQ ID NO: 5915766 - DNA, 25 bp, Homo sapien
accacaggggattctgtcaatcatc

SEQ ID NO: 5915767 - DNA, 25 bp, Homo sapien
ctccatagttcccagacgaccacag

SEQ ID NO: 5915768 - DNA, 25 bp, Homo sapien
agtggaagaccacggtccatctgta

SEQ ID NO: 5915769 - DNA, 25 bp, Homo sapien
tttaaagaaaagatatcctgtccaa

SEQ ID NO: 5915770 - DNA, 25 bp, Homo sapien
ggtcctggctgaattatgttgaaac

SEQ ID NO: 5915771 - DNA, 25 bp, Homo sapien
tgctttaattagctgctttccaatt

SEQ ID NO: 5915772 - DNA, 25 bp, Homo sapien
tttttagggctgaggtgcaactcag

SEQ ID NO: 5915773 - DNA, 25 bp, Homo sapien
ctccattaatccaagaggcataatc

SEQ ID NO: 5915774 - DNA, 25 bp, Homo sapien
ttccacgcctgatttggctgaagaa

SEQ ID NO: 5915775 - DNA, 25 bp, Homo sapien
gctgaggtgcaactcagagatcgaa

SEQ ID NO: 5915776 - DNA, 25 bp, Homo sapien
taggtcctggctgaattatgttgaa

SEQ ID NO: 5915777 - DNA, 25 bp, Homo sapien
catggcttccacgcctgatttggct

SEQ ID NO: 5915778 - DNA, 25 bp, Homo sapien
ggattctgtcaatcatctccttctc

SEQ ID NO: 5915779 - DNA, 25 bp, Homo sapien
gacactctgggtttgatcctcagaa

SEQ ID NO: 5915780 - DNA, 25 bp, Homo sapien
aagtgacttattcatggcttccacg

SEQ ID NO: 5915781 - DNA, 25 bp, Homo sapien
attcacctgacagaaatacttcctc

SEQ ID NO: 5915782 - DNA, 25 bp, Homo sapien
gtgcaactcagagatcgaaaatgag

SEQ ID NO: 5915783 - DNA, 25 bp, Homo sapien
tggtagtgatggcaagaaacgcagc

SEQ ID NO: 5915784 - DNA, 25 bp, Homo sapien
ctcagaactacagaaatcatcaagc

SEQ ID NO: 5915785 - DNA, 25 bp, Homo sapien
ttcccagacgaccacaggggattct

SEQ ID NO: 5915786 - DNA, 25 bp, Homo sapien
ccgcgttgtttatcaccacatccgg

SEQ ID NO: 5915787 - DNA, 25 bp, Homo sapien
tccaaacggctaaaggctcctttgg

SEQ ID NO: 5915788 - DNA, 25 bp, Homo sapien
tatgttgaaacgcattccatatcta

SEQ ID NO: 5915789 - DNA, 25 bp, Homo sapien
caatttctagtgtcacataggctgt

SEQ ID NO: 5915790 - DNA, 25 bp, Homo sapien
agttcccagacgaccacaggggatt

SEQ ID NO: 5915791 - DNA, 25 bp, Homo sapien
aacgcattccatatctaccccattc

SEQ ID NO: 5915792 - DNA, 25 bp, Homo sapien
agctgcaagtgacttattcatggct

SEQ ID NO: 5915793 - DNA, 25 bp, Homo sapien
ctactgcgaaacaacacaagaataa

SEQ ID NO: 5915794 - DNA, 25 bp, Homo sapien
acaaagcctgatccactctcagcat

SEQ ID NO: 5915795 - DNA, 25 bp, Homo sapien
gttcctccatagttcccagacgacc

SEQ ID NO: 5915796 - DNA, 25 bp, Homo sapien
cagagatcgaaaatgagcagagcag

SEQ ID NO: 5915797 - DNA, 25 bp, Homo sapien
agatttgcaagttcctccatagttc

SEQ ID NO: 5915798 - DNA, 25 bp, Homo sapien
tctgtcaatcatctccttctcaaat

SEQ ID NO: 5915799 - DNA, 25 bp, Homo sapien
gataggtcctggctgaattatgttg

SEQ ID NO: 5915800 - DNA, 25 bp, Homo sapien
cataatcactgcataggaaagtggc

SEQ ID NO: 5915801 - DNA, 25 bp, Homo sapien
ggtcatcttaggagccttttgtctt

SEQ ID NO: 5915802 - DNA, 25 bp, Homo sapien
tcctggctgaattatgttgaaacgc

SEQ ID NO: 5915803 - DNA, 25 bp, Homo sapien
ggcaaacatcgaccattttttaggg

SEQ ID NO: 5915804 - DNA, 25 bp, Homo sapien
aagtggccagatttgcaagttcctc

SEQ ID NO: 5915805 - DNA, 25 bp, Homo sapien
cttggtgaccttctttagagagttg

SEQ ID NO: 5915806 - DNA, 25 bp, Homo sapien
caaacatcgaccattttttagggct

SEQ ID NO: 5915807 - DNA, 25 bp, Homo sapien
ctcctttctgtgctttaattagctg

SEQ ID NO: 5915808 - DNA, 25 bp, Homo sapien
ctccaccgtcaaatctaatgactgc

SEQ ID NO: 5915809 - DNA, 25 bp, Homo sapien
tagtccctaactttagtgtttcaca

SEQ ID NO: 5915810 - DNA, 25 bp, Homo sapien
ctttaattagctgctttccaatttc

SEQ ID NO: 5915811 - DNA, 25 bp, Homo sapien
tatggtcttccagccattgggagtc

SEQ ID NO: 5915812 - DNA, 25 bp, Homo sapien
ggcaagaaacgcagctcctttctgt

SEQ ID NO: 5915813 - DNA, 25 bp, Homo sapien
gaattatgttgaaacgcattccata

SEQ ID NO: 5915814 - DNA, 25 bp, Homo sapien
agccttttgtcttcctgatgagccc

SEQ ID NO: 5915815 - DNA, 25 bp, Homo sapien
ctttagagagttgaattcacctgac

SEQ ID NO: 5915816 - DNA, 25 bp, Homo sapien
tcaatcatctccttctcaaatcttc

SEQ ID NO: 5915817 - DNA, 25 bp, Homo sapien
cttattcatggcttccacgcctgat

SEQ ID NO: 5915818 - DNA, 25 bp, Homo sapien
tcacctttatctactgcgaaacaac

SEQ ID NO: 5915819 - DNA, 25 bp, Homo sapien
tcctttggttttgataggtcctggc

SEQ ID NO: 5915820 - DNA, 25 bp, Homo sapien
ttattaacccccaagacaagtggaa

SEQ ID NO: 5915821 - DNA, 25 bp, Homo sapien
gtggccagatttgcaagttcctcca

SEQ ID NO: 5915822 - DNA, 25 bp, Homo sapien
cagtctctcactgggggaaatgaag

SEQ ID NO: 5915823 - DNA, 25 bp, Homo sapien
ctaatgactgctccattaatccaag

SEQ ID NO: 5915824 - DNA, 25 bp, Homo sapien
gctgaagaacttggcattacaaagc

SEQ ID NO: 5915825 - DNA, 25 bp, Homo sapien
tggctgaagaacttggcattacaaa

SEQ ID NO: 5915826 - DNA, 25 bp, Homo sapien
gagcagagcagacactctgggtttg

SEQ ID NO: 5915827 - DNA, 25 bp, Homo sapien
tcacctgacagaaatacttcctctc

SEQ ID NO: 5915828 - DNA, 25 bp, Homo sapien
acccccaagacaagtggaagaccac

SEQ ID NO: 5915829 - DNA, 25 bp, Homo sapien
ccttcaatacagagtggccacccct

SEQ ID NO: 5915830 - DNA, 25 bp, Homo sapien
gaattcacctgacagaaatacttcc

SEQ ID NO: 5915831 - DNA, 25 bp, Homo sapien
aacaagcatctttcacctttatcta

SEQ ID NO: 5915832 - DNA, 25 bp, Homo sapien
ctggctgaattatgttgaaacgcat

SEQ ID NO: 5915833 - DNA, 25 bp, Homo sapien
tgagaactatgtcagttatggtctt

SEQ ID NO: 5915834 - DNA, 25 bp, Homo sapien
ggagccttttgtcttcctgatgagc

SEQ ID NO: 5915835 - DNA, 25 bp, Homo sapien
gcgttgtttatcaccacatccggat

SEQ ID NO: 5915836 - DNA, 25 bp, Homo sapien
gtagtgatggcaagaaacgcagctc

SEQ ID NO: 5915837 - DNA, 25 bp, Homo sapien
agcatctttcacctttatctactgc

SEQ ID NO: 5915838 - DNA, 25 bp, Homo sapien
gcttccacgcctgatttggctgaag

SEQ ID NO: 5915839 - DNA, 25 bp, Homo sapien
ctttatctactgcgaaacaacacaa

SEQ ID NO: 5915840 - DNA, 25 bp, Homo sapien
gcaagttcctccatagttcccagac

SEQ ID NO: 5915841 - DNA, 25 bp, Homo sapien
gacttattcatggcttccacgcctg

SEQ ID NO: 5915842 - DNA, 25 bp, Homo sapien
gggggaaatgaagttccctgccgcg

SEQ ID NO: 5915843 - DNA, 25 bp, Homo sapien
gcaaacaatttattaacccccaaga

SEQ ID NO: 5915844 - DNA, 25 bp, Homo sapien
cctgatccactctcagcatagatgg

SEQ ID NO: 5915845 - DNA, 25 bp, Homo sapien
gccacccctgacctggcacactgtt

SEQ ID NO: 5915846 - DNA, 25 bp, Homo sapien
atatcctgtccaatttacccttcaa

SEQ ID NO: 5915847 - DNA, 25 bp, Homo sapien
gacaagtggaagaccacggtccatc

SEQ ID NO: 5915848 - DNA, 25 bp, Homo sapien
acgcagctcctttctgtgctttaat

SEQ ID NO: 5915849 - DNA, 25 bp, Homo sapien
agcatagatggtagtgatggcaaga

SEQ ID NO: 5915850 - DNA, 25 bp, Homo sapien
tgccattgagaactatgtcagttat

SEQ ID NO: 5915851 - DNA, 25 bp, Homo sapien
agcagacactctgggtttgatcctc

SEQ ID NO: 5915852 - DNA, 25 bp, Homo sapien
agatgaagttgtggtcatcttagga

SEQ ID NO: 5915853 - DNA, 25 bp, Homo sapien
acgcctgatttggctgaagaacttg

SEQ ID NO: 5915854 - DNA, 25 bp, Homo sapien
ttatatcccactcctccttggtgac

SEQ ID NO: 5915855 - DNA, 25 bp, Homo sapien
gctcctttggttttgataggtcctg

SEQ ID NO: 5915856 - DNA, 25 bp, Homo sapien
tccagccattgggagtcagtctctc

SEQ ID NO: 5915857 - DNA, 25 bp, Homo sapien
aagaggcataatcactgcataggaa

SEQ ID NO: 5915858 - DNA, 25 bp, Homo sapien
ggccagatttgcaagttcctccata

SEQ ID NO: 5915859 - DNA, 25 bp, Homo sapien
ccatctgtagcactctagtccctaa

SEQ ID NO: 5915860 - DNA, 25 bp, Homo sapien
agagcagacactctgggtttgatcc

SEQ ID NO: 5915861 - DNA, 25 bp, Homo sapien
aactttagtgtttcacagatgaagt

SEQ ID NO: 5915862 - DNA, 25 bp, Homo sapien
cttcctgatgagcccttcgattata

SEQ ID NO: 5915863 - DNA, 25 bp, Homo sapien
ttgcacgtggcaaacatcgaccatt

SEQ ID NO: 5915864 - DNA, 25 bp, Homo sapien
tgtgctttaattagctgctttccaa

SEQ ID NO: 5915865 - DNA, 25 bp, Homo sapien
tcatcttaggagccttttgtcttcc

SEQ ID NO: 5915866 - DNA, 25 bp, Homo sapien
gtcttccagccattgggagtcagtc

SEQ ID NO: 5915867 - DNA, 25 bp, Homo sapien
gtttgcacgtggcaaacatcgacca

SEQ ID NO: 5915868 - DNA, 25 bp, Homo sapien
tcatcaagcaaacaatttattaacc

SEQ ID NO: 5915869 - DNA, 25 bp, Homo sapien
cacaggggattctgtcaatcatctc

SEQ ID NO: 5915870 - DNA, 25 bp, Homo sapien
acctttatctactgcgaaacaacac

SEQ ID NO: 5915871 - DNA, 25 bp, Homo sapien
ttagagagttgaattcacctgacag

SEQ ID NO: 5915872 - DNA, 25 bp, Homo sapien
taaagaaaagatatcctgtccaatt

SEQ ID NO: 5915873 - DNA, 25 bp, Homo sapien
aagaacttggcattacaaagcctga

SEQ ID NO: 5915874 - DNA, 25 bp, Homo sapien
ttacaaagcctgatccactctcagc

SEQ ID NO: 5915875 - DNA, 25 bp, Homo sapien
atgaagttgtggtcatcttaggagc

SEQ ID NO: 5915876 - DNA, 25 bp, Homo sapien
ttacccttcaatacagagtggccac

SEQ ID NO: 5915877 - DNA, 25 bp, Homo sapien
agaactatgtcagttatggtcttcc

SEQ ID NO: 5915878 - DNA, 25 bp, Homo sapien
tgacctggcacactgtttgcacgtg

SEQ ID NO: 5915879 - DNA, 25 bp, Homo sapien
gtccctaactttagtgtttcacaga

SEQ ID NO: 5915880 - DNA, 25 bp, Homo sapien
cagccattgggagtcagtctctcac

SEQ ID NO: 5915881 - DNA, 25 bp, Homo sapien
ccattaatccaagaggcataatcac

SEQ ID NO: 5915882 - DNA, 25 bp, Homo sapien
gtcttcctgatgagcccttcgatta

SEQ ID NO: 5915883 - DNA, 25 bp, Homo sapien
tcagcatagatggtagtgatggcaa

SEQ ID NO: 5915884 - DNA, 25 bp, Homo sapien
gttatggtcttccagccattgggag

SEQ ID NO: 5915885 - DNA, 25 bp, Homo sapien
ttgcaagttcctccatagttcccag

SEQ ID NO: 5915886 - DNA, 25 bp, Homo sapien
ccaccgtcaaatctaatgactgctc

SEQ ID NO: 5915887 - DNA, 25 bp, Homo sapien
tcacataggctgtgccattgagaac

SEQ ID NO: 5915888 - DNA, 25 bp, Homo sapien
cttccagtcgggtccaaacggctaa

SEQ ID NO: 5915889 - DNA, 25 bp, Homo sapien
atttctagtgtcacataggctgtgc

SEQ ID NO: 5915890 - DNA, 25 bp, Homo sapien
ggctgaattatgttgaaacgcattc

SEQ ID NO: 5915891 - DNA, 25 bp, Homo sapien
cccttcgattatatcccactcctcc

SEQ ID NO: 5915892 - DNA, 25 bp, Homo sapien
aatcatcaagcaaacaatttattaa

SEQ ID NO: 5915893 - DNA, 25 bp, Homo sapien
ccccattcagctgcaagtgacttat

SEQ ID NO: 5915894 - DNA, 25 bp, Homo sapien
agaaacgcagctcctttctgtgctt

SEQ ID NO: 5915895 - DNA, 25 bp, Homo sapien
tgtccaatttacccttcaatacaga

SEQ ID NO: 5915896 - DNA, 25 bp, Homo sapien
ttggcattacaaagcctgatccact

SEQ ID NO: 5915897 - DNA, 25 bp, Homo sapien
tgtcacataggctgtgccattgaga

SEQ ID NO: 5915898 - DNA, 25 bp, Homo sapien
gtttgatcctcagaactacagaaat

SEQ ID NO: 5915899 - DNA, 25 bp, Homo sapien
caagcatctttcacctttatctact

SEQ ID NO: 5915900 - DNA, 25 bp, Homo sapien
tcagctgcaagtgacttattcatgg

SEQ ID NO: 5915901 - DNA, 25 bp, Homo sapien
aacacaagaataatttgaaaaagaa

SEQ ID NO: 5915902 - DNA, 25 bp, Homo sapien
agagttgaattcacctgacagaaat

SEQ ID NO: 5915903 - DNA, 25 bp, Homo sapien
gaccttctttagagagttgaattca

SEQ ID NO: 5915904 - DNA, 25 bp, Homo sapien
tccaatttctagtgtcacataggct

SEQ ID NO: 5915905 - DNA, 25 bp, Homo sapien
gcacgtggcaaacatcgaccatttt

SEQ ID NO: 5915906 - DNA, 25 bp, Homo sapien
ggcataatcactgcataggaaagtg

SEQ ID NO: 5915907 - DNA, 25 bp, Homo sapien
ttcacgtgttttaaagaaaagatat

SEQ ID NO: 5915908 - DNA, 25 bp, Homo sapien
gcctgatttggctgaagaacttggc

SEQ ID NO: 5915909 - DNA, 25 bp, Homo sapien
ctccttctcaaatcttccagtcggg

SEQ ID NO: 5915910 - DNA, 25 bp, Homo sapien
ctatgtcagttatggtcttccagcc

SEQ ID NO: 5915911 - DNA, 25 bp, Homo sapien
aggaaagtggccagatttgcaagtt

SEQ ID NO: 5915912 - DNA, 25 bp, Homo sapien
aatgactgctccattaatccaagag

SEQ ID NO: 5915913 - DNA, 25 bp, Homo sapien
ctaactttagtgtttcacagatgaa

SEQ ID NO: 5915914 - DNA, 25 bp, Homo sapien
aagttcctccatagttcccagacga

SEQ ID NO: 5915915 - DNA, 25 bp, Homo sapien
gggtttgatcctcagaactacagaa

SEQ ID NO: 5915916 - DNA, 25 bp, Homo sapien
cagtcgggtccaaacggctaaaggc

SEQ ID NO: 5915917 - DNA, 25 bp, Homo sapien
ctcaaatcttccagtcgggtccaaa

SEQ ID NO: 5915918 - DNA, 25 bp, Homo sapien
tcaaatctaatgactgctccattaa

SEQ ID NO: 5915919 - DNA, 25 bp, Homo sapien
attatgttgaaacgcattccatatc

SEQ ID NO: 5915920 - DNA, 25 bp, Homo sapien
caggatcaggaggtccacctacctg

SEQ ID NO: 5915921 - DNA, 25 bp, Homo sapien
cggttgcgcatagtgctgcaggctg

SEQ ID NO: 5915922 - DNA, 25 bp, Homo sapien
tacttaacaaaaggctcacactcct

SEQ ID NO: 5915923 - DNA, 25 bp, Homo sapien
tgcaggctgtgcgagactgtgtgga

SEQ ID NO: 5915924 - DNA, 25 bp, Homo sapien
cagcgatggacatcatggcctgtgt

SEQ ID NO: 5915925 - DNA, 25 bp, Homo sapien
agactgtagagctctaggaagggga

SEQ ID NO: 5915926 - DNA, 25 bp, Homo sapien
acacagagcccattggccccaggcc

SEQ ID NO: 5915927 - DNA, 25 bp, Homo sapien
tcctctatcctggggcctcctctct

SEQ ID NO: 5915928 - DNA, 25 bp, Homo sapien
gaggaacacaaactgagcctgctga

SEQ ID NO: 5915929 - DNA, 25 bp, Homo sapien
cactcctgttaatggagaaccatcc

SEQ ID NO: 5915930 - DNA, 25 bp, Homo sapien
ggtggcacccgtgctctaccagctg

SEQ ID NO: 5915931 - DNA, 25 bp, Homo sapien
aaggctcacactcctgttaatggag

SEQ ID NO: 5915932 - DNA, 25 bp, Homo sapien
tgaattcggacgggatcggtcatcc

SEQ ID NO: 5915933 - DNA, 25 bp, Homo sapien
taccagctgcatctggaggccctgg

SEQ ID NO: 5915934 - DNA, 25 bp, Homo sapien
gagcagtcagccttattagttggtg

SEQ ID NO: 5915935 - DNA, 25 bp, Homo sapien
cagagcctagccacctgtgaattca

SEQ ID NO: 5915936 - DNA, 25 bp, Homo sapien
gcagcatgacaaggtggcacccgtg

SEQ ID NO: 5915937 - DNA, 25 bp, Homo sapien
gatcacactctggcccccaattaca

SEQ ID NO: 5915938 - DNA, 25 bp, Homo sapien
ggtttttggataccaatgaccagct

SEQ ID NO: 5915939 - DNA, 25 bp, Homo sapien
ttggacaacgggcgcgggtttggga

SEQ ID NO: 5915940 - DNA, 25 bp, Homo sapien
ggacgatgggtgtcaagacactaca

SEQ ID NO: 5915941 - DNA, 25 bp, Homo sapien
caaactgagcctgctgatggccgag

SEQ ID NO: 5915942 - DNA, 25 bp, Homo sapien
gagactgcagctgctggccaaagag

SEQ ID NO: 5915943 - DNA, 25 bp, Homo sapien
tggcacccgtgctctaccagctgca

SEQ ID NO: 5915944 - DNA, 25 bp, Homo sapien
aggggagacagcgatggacatcatg

SEQ ID NO: 5915945 - DNA, 25 bp, Homo sapien
cgctgctgcagagcagtcagcctta

SEQ ID NO: 5915946 - DNA, 25 bp, Homo sapien
gagacagcgatggacatcatggcct

SEQ ID NO: 5915947 - DNA, 25 bp, Homo sapien
acagagcctccacggagaggtagtg

SEQ ID NO: 5915948 - DNA, 25 bp, Homo sapien
ggcctgtgtcggagcagatgggcac

SEQ ID NO: 5915949 - DNA, 25 bp, Homo sapien
ccattctcgctcctcttcatcagtg

SEQ ID NO: 5915950 - DNA, 25 bp, Homo sapien
actgtagagctctaggaaggggaga

SEQ ID NO: 5915951 - DNA, 25 bp, Homo sapien
cacttcaaggaccttctatgatgtg

SEQ ID NO: 5915952 - DNA, 25 bp, Homo sapien
ggaacacaaactgagcctgctgatg

SEQ ID NO: 5915953 - DNA, 25 bp, Homo sapien
ttcggacgggatcggtcatccccat

SEQ ID NO: 5915954 - DNA, 25 bp, Homo sapien
agagcccattggccccaggccagca

SEQ ID NO: 5915955 - DNA, 25 bp, Homo sapien
atcctggggcctcctctctcaaaga

SEQ ID NO: 5915956 - DNA, 25 bp, Homo sapien
gcatctggaggccctggaccggcgg

SEQ ID NO: 5915957 - DNA, 25 bp, Homo sapien
attctcgctcctcttcatcagtgct

SEQ ID NO: 5915958 - DNA, 25 bp, Homo sapien
actcactattttgtacttaacaaaa

SEQ ID NO: 5915959 - DNA, 25 bp, Homo sapien
atcagtgctgcaggatcaggaggtc

SEQ ID NO: 5915960 - DNA, 25 bp, Homo sapien
ctgtgtggagaaggacgggctgagc

SEQ ID NO: 5915961 - DNA, 25 bp, Homo sapien
cactacacagagcccattggcccca

SEQ ID NO: 5915962 - DNA, 25 bp, Homo sapien
ttggacgatgggtgtcaagacacta

SEQ ID NO: 5915963 - DNA, 25 bp, Homo sapien
cctctctcaaagactgtagagctct

SEQ ID NO: 5915964 - DNA, 25 bp, Homo sapien
aactgagcctgctgatggccgagtc

SEQ ID NO: 5915965 - DNA, 25 bp, Homo sapien
caggctgtgcgagactgtgtggaga

SEQ ID NO: 5915966 - DNA, 25 bp, Homo sapien
caggaggtccacctacctgagactg

SEQ ID NO: 5915967 - DNA, 25 bp, Homo sapien
tgagctttccattctcgctcctctt

SEQ ID NO: 5915968 - DNA, 25 bp, Homo sapien
ccatagggagggacctttaactcac

SEQ ID NO: 5915969 - DNA, 25 bp, Homo sapien
aaggaccttctatgatgtgatcaca

SEQ ID NO: 5915970 - DNA, 25 bp, Homo sapien
ctgcatctggaggccctggaccggc

SEQ ID NO: 5915971 - DNA, 25 bp, Homo sapien
gatgtatgggcctccaattccagca

SEQ ID NO: 5915972 - DNA, 25 bp, Homo sapien
cagagataacctctgagccacttca

SEQ ID NO: 5915973 - DNA, 25 bp, Homo sapien
aaagactgtagagctctaggaaggg

SEQ ID NO: 5915974 - DNA, 25 bp, Homo sapien
atctggaggccctggaccggcggtt

SEQ ID NO: 5915975 - DNA, 25 bp, Homo sapien
caaagaggaacacaaactgagcctg

SEQ ID NO: 5915976 - DNA, 25 bp, Homo sapien
acctctgagccacttcaaggacctt

SEQ ID NO: 5915977 - DNA, 25 bp, Homo sapien
tcaaggaccttctatgatgtgatca

SEQ ID NO: 5915978 - DNA, 25 bp, Homo sapien
agcccattggccccaggccagcagg

SEQ ID NO: 5915979 - DNA, 25 bp, Homo sapien
tgggtgtcaagacactacacagagc

SEQ ID NO: 5915980 - DNA, 25 bp, Homo sapien
atgtgatcacactctggcccccaat

SEQ ID NO: 5915981 - DNA, 25 bp, Homo sapien
tctaccagctgcatctggaggccct

SEQ ID NO: 5915982 - DNA, 25 bp, Homo sapien
agccttattagttggtggtgggcac

SEQ ID NO: 5915983 - DNA, 25 bp, Homo sapien
cacttgtccgctgctgcagagcagt

SEQ ID NO: 5915984 - DNA, 25 bp, Homo sapien
ggccgagtccctgcagcatgacaag

SEQ ID NO: 5915985 - DNA, 25 bp, Homo sapien
gagataacctctgagccacttcaag

SEQ ID NO: 5915986 - DNA, 25 bp, Homo sapien
gtggtgggcaccgcctgccttggct

SEQ ID NO: 5915987 - DNA, 25 bp, Homo sapien
gctgagctttggacgatgggtgtca

SEQ ID NO: 5915988 - DNA, 25 bp, Homo sapien
gataccaatgaccagctatgcactt

SEQ ID NO: 5915989 - DNA, 25 bp, Homo sapien
tcactattttgtacttaacaaaagg

SEQ ID NO: 5915990 - DNA, 25 bp, Homo sapien
tagttggtggtgggcaccgcctgcc

SEQ ID NO: 5915991 - DNA, 25 bp, Homo sapien
cagggagcatggggtctccctcatg

SEQ ID NO: 5915992 - DNA, 25 bp, Homo sapien
gatggacatcatggcctgtgtcgga

SEQ ID NO: 5915993 - DNA, 25 bp, Homo sapien
cttcatcagtgctgcaggatcagga

SEQ ID NO: 5915994 - DNA, 25 bp, Homo sapien
tggacatcatggcctgtgtcggagc

SEQ ID NO: 5915995 - DNA, 25 bp, Homo sapien
acaaggtggcacccgtgctctacca

SEQ ID NO: 5915996 - DNA, 25 bp, Homo sapien
agagtggccagcgctccgtccttcc

SEQ ID NO: 5915997 - DNA, 25 bp, Homo sapien
cagcagaccagagataacctctgag

SEQ ID NO: 5915998 - DNA, 25 bp, Homo sapien
ggatcaggaggtccacctacctgag

SEQ ID NO: 5915999 - DNA, 25 bp, Homo sapien
tctctcaaagactgtagagctctag

SEQ ID NO: 5916000 - DNA, 25 bp, Homo sapien
gttgcgcatagtgctgcaggctgtg

SEQ ID NO: 5916001 - DNA, 25 bp, Homo sapien
caattccagcagaaaccagacaaag

SEQ ID NO: 5916002 - DNA, 25 bp, Homo sapien
gggtgacctgcggcagggagcatgg

SEQ ID NO: 5916003 - DNA, 25 bp, Homo sapien
ggggtctccctcatggttctgatag

SEQ ID NO: 5916004 - DNA, 25 bp, Homo sapien
ccacctacctgagactgcagctgct

SEQ ID NO: 5916005 - DNA, 25 bp, Homo sapien
gacctttaactcactattttgtact

SEQ ID NO: 5916006 - DNA, 25 bp, Homo sapien
ggatcggtcatccccatagggtgac

SEQ ID NO: 5916007 - DNA, 25 bp, Homo sapien
ttacaacccaccttctgctcctcta

SEQ ID NO: 5916008 - DNA, 25 bp, Homo sapien
agctttggacgatgggtgtcaagac

SEQ ID NO: 5916009 - DNA, 25 bp, Homo sapien
tgttaatggagaaccatccagcaga

SEQ ID NO: 5916010 - DNA, 25 bp, Homo sapien
gagaggtagtgaccaggctgcccat

SEQ ID NO: 5916011 - DNA, 25 bp, Homo sapien
ggagcagatgggcacccaagaatgg

SEQ ID NO: 5916012 - DNA, 25 bp, Homo sapien
tctcgctcctcttcatcagtgctgc

SEQ ID NO: 5916013 - DNA, 25 bp, Homo sapien
cctcatggttctgatagggatgtat

SEQ ID NO: 5916014 - DNA, 25 bp, Homo sapien
aacccaccttctgctcctctatcct

SEQ ID NO: 5916015 - DNA, 25 bp, Homo sapien
tagccactgagcacagagcctccac

SEQ ID NO: 5916016 - DNA, 25 bp, Homo sapien
aattcggacgggatcggtcatcccc

SEQ ID NO: 5916017 - DNA, 25 bp, Homo sapien
atggggtctccctcatggttctgat

SEQ ID NO: 5916018 - DNA, 25 bp, Homo sapien
gagaaccatccagcagaccagagat

SEQ ID NO: 5916019 - DNA, 25 bp, Homo sapien
ggaggtccacctacctgagactgca

SEQ ID NO: 5916020 - DNA, 25 bp, Homo sapien
ctttccattctcgctcctcttcatc

SEQ ID NO: 5916021 - DNA, 25 bp, Homo sapien
tgcaggatcaggaggtccacctacc

SEQ ID NO: 5916022 - DNA, 25 bp, Homo sapien
aaggtggcacccgtgctctaccagc

SEQ ID NO: 5916023 - DNA, 25 bp, Homo sapien
ctgctcctctatcctggggcctcct

SEQ ID NO: 5916024 - DNA, 25 bp, Homo sapien
gggcctcctctctcaaagactgtag

SEQ ID NO: 5916025 - DNA, 25 bp, Homo sapien
ttctgctcctctatcctggggcctc

SEQ ID NO: 5916026 - DNA, 25 bp, Homo sapien
gcctagccacctgtgaattcagtga

SEQ ID NO: 5916027 - DNA, 25 bp, Homo sapien
ggccccaggccagcaggccagcctt

SEQ ID NO: 5916028 - DNA, 25 bp, Homo sapien
tagtgctgcaggctgtgcgagactg

SEQ ID NO: 5916029 - DNA, 25 bp, Homo sapien
atcggtcatccccatagggtgacct

SEQ ID NO: 5916030 - DNA, 25 bp, Homo sapien
accagacaaagcactctgaacatgc

SEQ ID NO: 5916031 - DNA, 25 bp, Homo sapien
gggagacagcgatggacatcatggc

SEQ ID NO: 5916032 - DNA, 25 bp, Homo sapien
ctcctctctcaaagactgtagagct

SEQ ID NO: 5916033 - DNA, 25 bp, Homo sapien
tggctgagctttggacgatgggtgt

SEQ ID NO: 5916034 - DNA, 25 bp, Homo sapien
cttgtccgctgctgcagagcagtca

SEQ ID NO: 5916035 - DNA, 25 bp, Homo sapien
gccactgagcacagagcctccacgg

SEQ ID NO: 5916036 - DNA, 25 bp, Homo sapien
gcctgccttggctgagctttggacg

SEQ ID NO: 5916037 - DNA, 25 bp, Homo sapien
cctttaactcactattttgtactta

SEQ ID NO: 5916038 - DNA, 25 bp, Homo sapien
ctcttcatcagtgctgcaggatcag

SEQ ID NO: 5916039 - DNA, 25 bp, Homo sapien
acactctggcccccaattacaaccc

SEQ ID NO: 5916040 - DNA, 25 bp, Homo sapien
tggataccaatgaccagctatgcac

SEQ ID NO: 5916041 - DNA, 25 bp, Homo sapien
gaggagcacagagcctagccacctg

SEQ ID NO: 5916042 - DNA, 25 bp, Homo sapien
gctgcaggctgtgcgagactgtgtg

SEQ ID NO: 5916043 - DNA, 25 bp, Homo sapien
gcactctgaacatgcagcagagtgg

SEQ ID NO: 5916044 - DNA, 25 bp, Homo sapien
ccggcggttgcgcatagtgctgcag

SEQ ID NO: 5916045 - DNA, 25 bp, Homo sapien
acaacccaccttctgctcctctatc

SEQ ID NO: 5916046 - DNA, 25 bp, Homo sapien
caccgcctgccttggctgagctttg

SEQ ID NO: 5916047 - DNA, 25 bp, Homo sapien
tgggtttttggataccaatgaccag

SEQ ID NO: 5916048 - DNA, 25 bp, Homo sapien
gacctagccactgagcacagagcct

SEQ ID NO: 5916049 - DNA, 25 bp, Homo sapien
gcagtcagccttattagttggtggt

SEQ ID NO: 5916050 - DNA, 25 bp, Homo sapien
tggccaaagaggaacacaaactgag

SEQ ID NO: 5916051 - DNA, 25 bp, Homo sapien
gctcctctatcctggggcctcctct

SEQ ID NO: 5916052 - DNA, 25 bp, Homo sapien
agagcctccacggagaggtagtgac

SEQ ID NO: 5916053 - DNA, 25 bp, Homo sapien
ctcctgttaatggagaaccatccag

SEQ ID NO: 5916054 - DNA, 25 bp, Homo sapien
cgggatcggtcatccccatagggtg

SEQ ID NO: 5916055 - DNA, 25 bp, Homo sapien
ttccattctcgctcctcttcatcag

SEQ ID NO: 5916056 - DNA, 25 bp, Homo sapien
gaccggcggttgcgcatagtgctgc

SEQ ID NO: 5916057 - DNA, 25 bp, Homo sapien
catgcagcagagtggccagcgctcc

SEQ ID NO: 5916058 - DNA, 25 bp, Homo sapien
ctgcagcatgacaaggtggcacccg

SEQ ID NO: 5916059 - DNA, 25 bp, Homo sapien
gtgtggtggaggacgacctagccac

SEQ ID NO: 5916060 - DNA, 25 bp, Homo sapien
tgggcacccaagaatgggtttttgg

SEQ ID NO: 5916061 - DNA, 25 bp, Homo sapien
cacggagaggtagtgaccaggctgc

SEQ ID NO: 5916062 - DNA, 25 bp, Homo sapien
cacttggacaacgggcgcgggtttg

SEQ ID NO: 5916063 - DNA, 25 bp, Homo sapien
agtcagccttattagttggtggtgg

SEQ ID NO: 5916064 - DNA, 25 bp, Homo sapien
acctgagactgcagctgctggccaa

SEQ ID NO: 5916065 - DNA, 25 bp, Homo sapien
catccagcagaccagagataacctc

SEQ ID NO: 5916066 - DNA, 25 bp, Homo sapien
gataacctctgagccacttcaagga

SEQ ID NO: 5916067 - DNA, 25 bp, Homo sapien
tgggcctccaattccagcagaaacc

SEQ ID NO: 5916068 - DNA, 25 bp, Homo sapien
cttctatgatgtgatcacactctgg

SEQ ID NO: 5916069 - DNA, 25 bp, Homo sapien
cctccacggagaggtagtgaccagg

SEQ ID NO: 5916070 - DNA, 25 bp, Homo sapien
ctacacagagcccattggccccagg

SEQ ID NO: 5916071 - DNA, 25 bp, Homo sapien
ttaatggagaaccatccagcagacc

SEQ ID NO: 5916072 - DNA, 25 bp, Homo sapien
gacaaagcactctgaacatgcagca

SEQ ID NO: 5916073 - DNA, 25 bp, Homo sapien
tcccatagggagggacctttaactc

SEQ ID NO: 5916074 - DNA, 25 bp, Homo sapien
tagagctctaggaaggggagacagc

SEQ ID NO: 5916075 - DNA, 25 bp, Homo sapien
tttggataccaatgaccagctatgc

SEQ ID NO: 5916076 - DNA, 25 bp, Homo sapien
acgatgggtgtcaagacactacaca

SEQ ID NO: 5916077 - DNA, 25 bp, Homo sapien
gtccctgcagcatgacaaggtggca

SEQ ID NO: 5916078 - DNA, 25 bp, Homo sapien
cctgtgtcggagcagatgggcaccc

SEQ ID NO: 5916079 - DNA, 25 bp, Homo sapien
tccgtccttcccatagggagggacc

SEQ ID NO: 5916080 - DNA, 25 bp, Homo sapien
gagctctaggaaggggagacagcga

SEQ ID NO: 5916081 - DNA, 25 bp, Homo sapien
tccagcagaccagagataacctctg

SEQ ID NO: 5916082 - DNA, 25 bp, Homo sapien
tttaactcactattttgtacttaac

SEQ ID NO: 5916083 - DNA, 25 bp, Homo sapien
gtgcgagactgtgtggagaaggacg

SEQ ID NO: 5916084 - DNA, 25 bp, Homo sapien
atggttctgatagggatgtatgggc

SEQ ID NO: 5916085 - DNA, 25 bp, Homo sapien
ccacctgtgaattcagtgaattcgg

SEQ ID NO: 5916086 - DNA, 25 bp, Homo sapien
actctggcccccaattacaacccac

SEQ ID NO: 5916087 - DNA, 25 bp, Homo sapien
gctatgcacttgtccgctgctgcag

SEQ ID NO: 5916088 - DNA, 25 bp, Homo sapien
ctattttgtacttaacaaaaggctc

SEQ ID NO: 5916089 - DNA, 25 bp, Homo sapien
tcacactctggcccccaattacaac

SEQ ID NO: 5916090 - DNA, 25 bp, Homo sapien
ggcaccgcctgccttggctgagctt

SEQ ID NO: 5916091 - DNA, 25 bp, Homo sapien
ggtttgggaaatactcacacgatga

SEQ ID NO: 5916092 - DNA, 25 bp, Homo sapien
aggaggagcacagagcctagccacc

SEQ ID NO: 5916093 - DNA, 25 bp, Homo sapien
tggcccccaattacaacccaccttc

SEQ ID NO: 5916094 - DNA, 25 bp, Homo sapien
tcaagacactacacagagcccattg

SEQ ID NO: 5916095 - DNA, 25 bp, Homo sapien
aaaaggctcacactcctgttaatgg

SEQ ID NO: 5916096 - DNA, 25 bp, Homo sapien
acaaaaggctcacactcctgttaat

SEQ ID NO: 5916097 - DNA, 25 bp, Homo sapien
aatgggtttttggataccaatgacc

SEQ ID NO: 5916098 - DNA, 25 bp, Homo sapien
agcagatgggcacccaagaatgggt

SEQ ID NO: 5916099 - DNA, 25 bp, Homo sapien
tcagtgaattcggacgggatcggtc

SEQ ID NO: 5916100 - DNA, 25 bp, Homo sapien
agtgaattcggacgggatcggtcat

SEQ ID NO: 5916101 - DNA, 25 bp, Homo sapien
aaaccagacaaagcactctgaacat

SEQ ID NO: 5916102 - DNA, 25 bp, Homo sapien
tcggagcagatgggcacccaagaat

SEQ ID NO: 5916103 - DNA, 25 bp, Homo sapien
gcgatggacatcatggcctgtgtcg

SEQ ID NO: 5916104 - DNA, 25 bp, Homo sapien
gtgctgcaggctgtgcgagactgtg

SEQ ID NO: 5916105 - DNA, 25 bp, Homo sapien
gggctgagcagtgtggtggaggacg

SEQ ID NO: 5916106 - DNA, 25 bp, Homo sapien
gcctcctctctcaaagactgtagag

SEQ ID NO: 5916107 - DNA, 25 bp, Homo sapien
cacagagcctagccacctgtgaatt

SEQ ID NO: 5916108 - DNA, 25 bp, Homo sapien
acgggctgagcagtgtggtggagga

SEQ ID NO: 5916109 - DNA, 25 bp, Homo sapien
cggacgggatcggtcatccccatag

SEQ ID NO: 5916110 - DNA, 25 bp, Homo sapien
aggaaggaggagcacagagcctagc

SEQ ID NO: 5916111 - DNA, 25 bp, Homo sapien
tcaaagactgtagagctctaggaag

SEQ ID NO: 5916112 - DNA, 25 bp, Homo sapien
cggagaggtagtgaccaggctgccc

SEQ ID NO: 5916113 - DNA, 25 bp, Homo sapien
attagttggtggtgggcaccgcctg

SEQ ID NO: 5916114 - DNA, 25 bp, Homo sapien
ggtggaggacgacctagccactgag

SEQ ID NO: 5916115 - DNA, 25 bp, Homo sapien
aagaggaacacaaactgagcctgct

SEQ ID NO: 5916116 - DNA, 25 bp, Homo sapien
cctgttaatggagaaccatccagca

SEQ ID NO: 5916117 - DNA, 25 bp, Homo sapien
tgggaaatactcacacgatgagctt

SEQ ID NO: 5916118 - DNA, 25 bp, Homo sapien
gcagagtggccagcgctccgtcctt

SEQ ID NO: 5916119 - DNA, 25 bp, Homo sapien
tctccctcatggttctgatagggat

SEQ ID NO: 5916120 - DNA, 25 bp, Homo sapien
ggcgcgggtttgggaaatactcaca

SEQ ID NO: 5916121 - DNA, 25 bp, Homo sapien
ggagaaggacgggctgagcagtgtg

SEQ ID NO: 5916122 - DNA, 25 bp, Homo sapien
gatgggtgtcaagacactacacaga

SEQ ID NO: 5916123 - DNA, 25 bp, Homo sapien
atactcacacgatgagctttccatt

SEQ ID NO: 5916124 - DNA, 25 bp, Homo sapien
acgacctagccactgagcacagagc

SEQ ID NO: 5916125 - DNA, 25 bp, Homo sapien
tagtgaccaggctgcccatgaggaa

SEQ ID NO: 5916126 - DNA, 25 bp, Homo sapien
tgaccagctatgcacttgtccgctg

SEQ ID NO: 5916127 - DNA, 25 bp, Homo sapien
cagcgctccgtccttcccataggga

SEQ ID NO: 5916128 - DNA, 25 bp, Homo sapien
tccaattccagcagaaaccagacaa

SEQ ID NO: 5916129 - DNA, 25 bp, Homo sapien
gacagcgatggacatcatggcctgt

SEQ ID NO: 5916130 - DNA, 25 bp, Homo sapien
acagagcccattggccccaggccag

SEQ ID NO: 5916131 - DNA, 25 bp, Homo sapien
gttggtggtgggcaccgcctgcctt

SEQ ID NO: 5916132 - DNA, 25 bp, Homo sapien
gcagaaaccagacaaagcactctga

SEQ ID NO: 5916133 - DNA, 25 bp, Homo sapien
gcccccaattacaacccaccttctg

SEQ ID NO: 5916134 - DNA, 25 bp, Homo sapien
gctgagcagtgtggtggaggacgac

SEQ ID NO: 5916135 - DNA, 25 bp, Homo sapien
caaagcactctgaacatgcagcaga

SEQ ID NO: 5916136 - DNA, 25 bp, Homo sapien
accatccagcagaccagagataacc

SEQ ID NO: 5916137 - DNA, 25 bp, Homo sapien
ggcctccaattccagcagaaaccag

SEQ ID NO: 5916138 - DNA, 25 bp, Homo sapien
ccaggctgcccatgaggaaggagga

SEQ ID NO: 5916139 - DNA, 25 bp, Homo sapien
acccgtgctctaccagctgcatctg

SEQ ID NO: 5916140 - DNA, 25 bp, Homo sapien
ggacgacctagccactgagcacaga

SEQ ID NO: 5916141 - DNA, 25 bp, Homo sapien
gagggacctttaactcactattttg

SEQ ID NO: 5916142 - DNA, 25 bp, Homo sapien
gcgctccgtccttcccatagggagg

SEQ ID NO: 5916143 - DNA, 25 bp, Homo sapien
ctgcggcagggagcatggggtctcc

SEQ ID NO: 5916144 - DNA, 25 bp, Homo sapien
tcatccacttggacaacgggcgcgg

SEQ ID NO: 5916145 - DNA, 25 bp, Homo sapien
gcgagactgtgtggagaaggacggg

SEQ ID NO: 5916146 - DNA, 25 bp, Homo sapien
ttattagttggtggtgggcaccgcc

SEQ ID NO: 5916147 - DNA, 25 bp, Homo sapien
gaggacgacctagccactgagcaca

SEQ ID NO: 5916148 - DNA, 25 bp, Homo sapien
gaaggaggagcacagagcctagcca

SEQ ID NO: 5916149 - DNA, 25 bp, Homo sapien
cattggccccaggccagcaggccag

SEQ ID NO: 5916150 - DNA, 25 bp, Homo sapien
ctctatcctggggcctcctctctca

SEQ ID NO: 5916151 - DNA, 25 bp, Homo sapien
gtgctctaccagctgcatctggagg

SEQ ID NO: 5916152 - DNA, 25 bp, Homo sapien
ctacctgagactgcagctgctggcc

SEQ ID NO: 5916153 - DNA, 25 bp, Homo sapien
cagtgctgcaggatcaggaggtcca

SEQ ID NO: 5916154 - DNA, 25 bp, Homo sapien
gccaaagaggaacacaaactgagcc

SEQ ID NO: 5916155 - DNA, 25 bp, Homo sapien
tccctcatggttctgatagggatgt

SEQ ID NO: 5916156 - DNA, 25 bp, Homo sapien
cagagcagtcagccttattagttgg

SEQ ID NO: 5916157 - DNA, 25 bp, Homo sapien
catcatggcctgtgtcggagcagat

SEQ ID NO: 5916158 - DNA, 25 bp, Homo sapien
ctgctgatggccgagtccctgcagc

SEQ ID NO: 5916159 - DNA, 25 bp, Homo sapien
tagggtgacctgcggcagggagcat

SEQ ID NO: 5916160 - DNA, 25 bp, Homo sapien
catcatccacttggacaacgggcgc

SEQ ID NO: 5916161 - DNA, 25 bp, Homo sapien
agcatgacaaggtggcacccgtgct

SEQ ID NO: 5916162 - DNA, 25 bp, Homo sapien
aagacactacacagagcccattggc

SEQ ID NO: 5916163 - DNA, 25 bp, Homo sapien
gccagcgctccgtccttcccatagg

SEQ ID NO: 5916164 - DNA, 25 bp, Homo sapien
cagatgggcacccaagaatgggttt

SEQ ID NO: 5916165 - DNA, 25 bp, Homo sapien
gctggccaaagaggaacacaaactg

SEQ ID NO: 5916166 - DNA, 25 bp, Homo sapien
ggtagtgaccaggctgcccatgagg

SEQ ID NO: 5916167 - DNA, 25 bp, Homo sapien
tgagcagtgtggtggaggacgacct

SEQ ID NO: 5916168 - DNA, 25 bp, Homo sapien
tatgatgtgatcacactctggcccc

SEQ ID NO: 5916169 - DNA, 25 bp, Homo sapien
cagctatgcacttgtccgctgctgc

SEQ ID NO: 5916170 - DNA, 25 bp, Homo sapien
tctcaaagactgtagagctctagga

SEQ ID NO: 5916171 - DNA, 25 bp, Homo sapien
ccgagtccctgcagcatgacaaggt

SEQ ID NO: 5916172 - DNA, 25 bp, Homo sapien
cacccaagaatgggtttttggatac

SEQ ID NO: 5916173 - DNA, 25 bp, Homo sapien
ctgtgaattcagtgaattcggacgg

SEQ ID NO: 5916174 - DNA, 25 bp, Homo sapien
tttttggataccaatgaccagctat

SEQ ID NO: 5916175 - DNA, 25 bp, Homo sapien
gtgaattcagtgaattcggacggga

SEQ ID NO: 5916176 - DNA, 25 bp, Homo sapien
cagtgtggtggaggacgacctagcc

SEQ ID NO: 5916177 - DNA, 25 bp, Homo sapien
gtgatcacactctggcccccaatta

SEQ ID NO: 5916178 - DNA, 25 bp, Homo sapien
catagggtgacctgcggcagggagc

SEQ ID NO: 5916179 - DNA, 25 bp, Homo sapien
ccgtgctctaccagctgcatctgga

SEQ ID NO: 5916180 - DNA, 25 bp, Homo sapien
ggctgtgcgagactgtgtggagaag

SEQ ID NO: 5916181 - DNA, 25 bp, Homo sapien
catagtgctgcaggctgtgcgagac

SEQ ID NO: 5916182 - DNA, 25 bp, Homo sapien
catccccatagggtgacctgcggca

SEQ ID NO: 5916183 - DNA, 25 bp, Homo sapien
gatgagctttccattctcgctcctc

SEQ ID NO: 5916184 - DNA, 25 bp, Homo sapien
gaaggggagacagcgatggacatca

SEQ ID NO: 5916185 - DNA, 25 bp, Homo sapien
attcagtgaattcggacgggatcgg

SEQ ID NO: 5916186 - DNA, 25 bp, Homo sapien
cagcagagtggccagcgctccgtcc

SEQ ID NO: 5916187 - DNA, 25 bp, Homo sapien
aatggagaaccatccagcagaccag

SEQ ID NO: 5916188 - DNA, 25 bp, Homo sapien
tgtatgggcctccaattccagcaga

SEQ ID NO: 5916189 - DNA, 25 bp, Homo sapien
tatgcacttgtccgctgctgcagag

SEQ ID NO: 5916190 - DNA, 25 bp, Homo sapien
acctgtgaattcagtgaattcggac

SEQ ID NO: 5916191 - DNA, 25 bp, Homo sapien
catgacaaggtggcacccgtgctct

SEQ ID NO: 5916192 - DNA, 25 bp, Homo sapien
taactcactattttgtacttaacaa

SEQ ID NO: 5916193 - DNA, 25 bp, Homo sapien
tccacggagaggtagtgaccaggct

SEQ ID NO: 5916194 - DNA, 25 bp, Homo sapien
tgaggaaggaggagcacagagccta

SEQ ID NO: 5916195 - DNA, 25 bp, Homo sapien
tatgggcctccaattccagcagaaa

SEQ ID NO: 5916196 - DNA, 25 bp, Homo sapien
agcacagagcctagccacctgtgaa

SEQ ID NO: 5916197 - DNA, 25 bp, Homo sapien
caccttctgctcctctatcctgggg

SEQ ID NO: 5916198 - DNA, 25 bp, Homo sapien
ctgagactgcagctgctggccaaag

SEQ ID NO: 5916199 - DNA, 25 bp, Homo sapien
cggtcatccccatagggtgacctgc

SEQ ID NO: 5916200 - DNA, 25 bp, Homo sapien
ttctgatagggatgtatgggcctcc

SEQ ID NO: 5916201 - DNA, 25 bp, Homo sapien
atcaggaggtccacctacctgagac

SEQ ID NO: 5916202 - DNA, 25 bp, Homo sapien
agcagtgtggtggaggacgacctag

SEQ ID NO: 5916203 - DNA, 25 bp, Homo sapien
agctgctggccaaagaggaacacaa

SEQ ID NO: 5916204 - DNA, 25 bp, Homo sapien
agcctccacggagaggtagtgacca

SEQ ID NO: 5916205 - DNA, 25 bp, Homo sapien
ctgctgcagagcagtcagccttatt

SEQ ID NO: 5916206 - DNA, 25 bp, Homo sapien
aggaaggggagacagcgatggacat

SEQ ID NO: 5916207 - DNA, 25 bp, Homo sapien
taacaaaaggctcacactcctgtta

SEQ ID NO: 5916208 - DNA, 25 bp, Homo sapien
aacacaaactgagcctgctgatggc

SEQ ID NO: 5916209 - DNA, 25 bp, Homo sapien
tttgtacttaacaaaaggctcacac

SEQ ID NO: 5916210 - DNA, 25 bp, Homo sapien
gtcatccccatagggtgacctgcgg

SEQ ID NO: 5916211 - DNA, 25 bp, Homo sapien
tggtggtgggcaccgcctgccttgg

SEQ ID NO: 5916212 - DNA, 25 bp, Homo sapien
cctggggcctcctctctcaaagact

SEQ ID NO: 5916213 - DNA, 25 bp, Homo sapien
tgatgtgatcacactctggccccca

SEQ ID NO: 5916214 - DNA, 25 bp, Homo sapien
cgcatagtgctgcaggctgtgcgag

SEQ ID NO: 5916215 - DNA, 25 bp, Homo sapien
ccccaattacaacccaccttctgct

SEQ ID NO: 5916216 - DNA, 25 bp, Homo sapien
gtgctgcaggatcaggaggtccacc

SEQ ID NO: 5916217 - DNA, 25 bp, Homo sapien
gaccaggctgcccatgaggaaggag

SEQ ID NO: 5916218 - DNA, 25 bp, Homo sapien
agaatgggtttttggataccaatga

SEQ ID NO: 5916219 - DNA, 25 bp, Homo sapien
tgcacttgtccgctgctgcagagca

SEQ ID NO: 5916220 - DNA, 25 bp, Homo sapien
tctgaacatgcagcagagtggccag

SEQ ID NO: 5916221 - DNA, 25 bp, Homo sapien
gtgtggagaaggacgggctgagcag

SEQ ID NO: 5916222 - DNA, 25 bp, Homo sapien
agtggccagcgctccgtccttccca

SEQ ID NO: 5916223 - DNA, 25 bp, Homo sapien
tcacacgatgagctttccattctcg

SEQ ID NO: 5916224 - DNA, 25 bp, Homo sapien
agaaaccagacaaagcactctgaac

SEQ ID NO: 5916225 - DNA, 25 bp, Homo sapien
gtgaccaggctgcccatgaggaagg

SEQ ID NO: 5916226 - DNA, 25 bp, Homo sapien
tgtgtcggagcagatgggcacccaa

SEQ ID NO: 5916227 - DNA, 25 bp, Homo sapien
gcctgctgatggccgagtccctgca

SEQ ID NO: 5916228 - DNA, 25 bp, Homo sapien
accagagataacctctgagccactt

SEQ ID NO: 5916229 - DNA, 25 bp, Homo sapien
ccaatgaccagctatgcacttgtcc

SEQ ID NO: 5916230 - DNA, 25 bp, Homo sapien
atggccgagtccctgcagcatgaca

SEQ ID NO: 5916231 - DNA, 25 bp, Homo sapien
ccttctgctcctctatcctggggcc

SEQ ID NO: 5916232 - DNA, 25 bp, Homo sapien
tgcccatgaggaaggaggagcacag

SEQ ID NO: 5916233 - DNA, 25 bp, Homo sapien
acctacctgagactgcagctgctgg

SEQ ID NO: 5916234 - DNA, 25 bp, Homo sapien
ctgcagctgctggccaaagaggaac

SEQ ID NO: 5916235 - DNA, 25 bp, Homo sapien
gaggtagtgaccaggctgcccatga

SEQ ID NO: 5916236 - DNA, 25 bp, Homo sapien
accagctatgcacttgtccgctgct

SEQ ID NO: 5916237 - DNA, 25 bp, Homo sapien
ggctcacactcctgttaatggagaa

SEQ ID NO: 5916238 - DNA, 25 bp, Homo sapien
ctatcctggggcctcctctctcaaa

SEQ ID NO: 5916239 - DNA, 25 bp, Homo sapien
cctggaccggcggttgcgcatagtg

SEQ ID NO: 5916240 - DNA, 25 bp, Homo sapien
tccttcccatagggagggaccttta

SEQ ID NO: 5916241 - DNA, 25 bp, Homo sapien
agaccagagataacctctgagccac

SEQ ID NO: 5916242 - DNA, 25 bp, Homo sapien
ctggaggccctggaccggcggttgc

SEQ ID NO: 5916243 - DNA, 25 bp, Homo sapien
caagaatgggtttttggataccaat

SEQ ID NO: 5916244 - DNA, 25 bp, Homo sapien
ctgagccacttcaaggaccttctat

SEQ ID NO: 5916245 - DNA, 25 bp, Homo sapien
gatagggatgtatgggcctccaatt

SEQ ID NO: 5916246 - DNA, 25 bp, Homo sapien
ctgtgcgagactgtgtggagaagga

SEQ ID NO: 5916247 - DNA, 25 bp, Homo sapien
aattacaacccaccttctgctcctc

SEQ ID NO: 5916248 - DNA, 25 bp, Homo sapien
ctgagcacagagcctccacggagag

SEQ ID NO: 5916249 - DNA, 25 bp, Homo sapien
attttgtacttaacaaaaggctcac

SEQ ID NO: 5916250 - DNA, 25 bp, Homo sapien
gcagctgctggccaaagaggaacac

SEQ ID NO: 5916251 - DNA, 25 bp, Homo sapien
aagcactctgaacatgcagcagagt

SEQ ID NO: 5916252 - DNA, 25 bp, Homo sapien
ggtctccctcatggttctgataggg

SEQ ID NO: 5916253 - DNA, 25 bp, Homo sapien
tctatgatgtgatcacactctggcc

SEQ ID NO: 5916254 - DNA, 25 bp, Homo sapien
ctctgagccacttcaaggaccttct

SEQ ID NO: 5916255 - DNA, 25 bp, Homo sapien
gacatcatggcctgtgtcggagcag

SEQ ID NO: 5916256 - DNA, 25 bp, Homo sapien
gggacctttaactcactattttgta

SEQ ID NO: 5916257 - DNA, 25 bp, Homo sapien
tttgggaaatactcacacgatgagc

SEQ ID NO: 5916258 - DNA, 25 bp, Homo sapien
cccattggccccaggccagcaggcc

SEQ ID NO: 5916259 - DNA, 25 bp, Homo sapien
agccacctgtgaattcagtgaattc

SEQ ID NO: 5916260 - DNA, 25 bp, Homo sapien
cctccaattccagcagaaaccagac

SEQ ID NO: 5916261 - DNA, 25 bp, Homo sapien
ggcacccaagaatgggtttttggat

SEQ ID NO: 5916262 - DNA, 25 bp, Homo sapien
gccctggaccggcggttgcgcatag

SEQ ID NO: 5916263 - DNA, 25 bp, Homo sapien
ctgctggccaaagaggaacacaaac

SEQ ID NO: 5916264 - DNA, 25 bp, Homo sapien
gctctaccagctgcatctggaggcc

SEQ ID NO: 5916265 - DNA, 25 bp, Homo sapien
acctgcggcagggagcatggggtct

SEQ ID NO: 5916266 - DNA, 25 bp, Homo sapien
cttcaaggaccttctatgatgtgat

SEQ ID NO: 5916267 - DNA, 25 bp, Homo sapien
cacactcctgttaatggagaaccat

SEQ ID NO: 5916268 - DNA, 25 bp, Homo sapien
aacatgcagcagagtggccagcgct

SEQ ID NO: 5916269 - DNA, 25 bp, Homo sapien
gtggtggaggacgacctagccactg

SEQ ID NO: 5916270 - DNA, 25 bp, Homo sapien
ctcacactcctgttaatggagaacc

SEQ ID NO: 5916271 - DNA, 25 bp, Homo sapien
actcacacgatgagctttccattct

SEQ ID NO: 5916272 - DNA, 25 bp, Homo sapien
cttaacaaaaggctcacactcctgt

SEQ ID NO: 5916273 - DNA, 25 bp, Homo sapien
accttctatgatgtgatcacactct

SEQ ID NO: 5916274 - DNA, 25 bp, Homo sapien
cagcagaaaccagacaaagcactct

SEQ ID NO: 5916275 - DNA, 25 bp, Homo sapien
gctgcaggatcaggaggtccaccta

SEQ ID NO: 5916276 - DNA, 25 bp, Homo sapien
ggaggccctggaccggcggttgcgc

SEQ ID NO: 5916277 - DNA, 25 bp, Homo sapien
ggtgggcaccgcctgccttggctga

SEQ ID NO: 5916278 - DNA, 25 bp, Homo sapien
ggttctgatagggatgtatgggcct

SEQ ID NO: 5916279 - DNA, 25 bp, Homo sapien
tccccatagggtgacctgcggcagg

SEQ ID NO: 5916280 - DNA, 25 bp, Homo sapien
ggagcacagagcctagccacctgtg

SEQ ID NO: 5916281 - DNA, 25 bp, Homo sapien
ccaattacaacccaccttctgctcc

SEQ ID NO: 5916282 - DNA, 25 bp, Homo sapien
tccagcagaaaccagacaaagcact

SEQ ID NO: 5916283 - DNA, 25 bp, Homo sapien
taccaatgaccagctatgcacttgt

SEQ ID NO: 5916284 - DNA, 25 bp, Homo sapien
tgtacttaacaaaaggctcacactc

SEQ ID NO: 5916285 - DNA, 25 bp, Homo sapien
tgatggccgagtccctgcagcatga

SEQ ID NO: 5916286 - DNA, 25 bp, Homo sapien
gagcctgctgatggccgagtccctg

SEQ ID NO: 5916287 - DNA, 25 bp, Homo sapien
gtccacctacctgagactgcagctg

SEQ ID NO: 5916288 - DNA, 25 bp, Homo sapien
tgggcaccgcctgccttggctgagc

SEQ ID NO: 5916289 - DNA, 25 bp, Homo sapien
ggtgtcaagacactacacagagccc

SEQ ID NO: 5916290 - DNA, 25 bp, Homo sapien
aggctgcccatgaggaaggaggagc

SEQ ID NO: 5916291 - DNA, 25 bp, Homo sapien
gtggagaaggacgggctgagcagtg

SEQ ID NO: 5916292 - DNA, 25 bp, Homo sapien
gagcctagccacctgtgaattcagt

SEQ ID NO: 5916293 - DNA, 25 bp, Homo sapien
tggaccggcggttgcgcatagtgct

SEQ ID NO: 5916294 - DNA, 25 bp, Homo sapien
tgtccgctgctgcagagcagtcagc

SEQ ID NO: 5916295 - DNA, 25 bp, Homo sapien
aaatactcacacgatgagctttcca

SEQ ID NO: 5916296 - DNA, 25 bp, Homo sapien
ggaccttctatgatgtgatcacact

SEQ ID NO: 5916297 - DNA, 25 bp, Homo sapien
tcgctcctcttcatcagtgctgcag

SEQ ID NO: 5916298 - DNA, 25 bp, Homo sapien
atggcctgtgtcggagcagatgggc

SEQ ID NO: 5916299 - DNA, 25 bp, Homo sapien
tggagaaccatccagcagaccagag

SEQ ID NO: 5916300 - DNA, 25 bp, Homo sapien
ccgcctgccttggctgagctttgga

SEQ ID NO: 5916301 - DNA, 25 bp, Homo sapien
cttggctgagctttggacgatgggt

SEQ ID NO: 5916302 - DNA, 25 bp, Homo sapien
gactgcagctgctggccaaagagga

SEQ ID NO: 5916303 - DNA, 25 bp, Homo sapien
tgtcggagcagatgggcacccaaga

SEQ ID NO: 5916304 - DNA, 25 bp, Homo sapien
agctttccattctcgctcctcttca

SEQ ID NO: 5916305 - DNA, 25 bp, Homo sapien
gagccacttcaaggaccttctatga

SEQ ID NO: 5916306 - DNA, 25 bp, Homo sapien
gaattcagtgaattcggacgggatc

SEQ ID NO: 5916307 - DNA, 25 bp, Homo sapien
acacgatgagctttccattctcgct

SEQ ID NO: 5916308 - DNA, 25 bp, Homo sapien
tcatcagtgctgcaggatcaggagg

SEQ ID NO: 5916309 - DNA, 25 bp, Homo sapien
gcacagagcctccacggagaggtag

SEQ ID NO: 5916310 - DNA, 25 bp, Homo sapien
gccacttcaaggaccttctatgatg

SEQ ID NO: 5916311 - DNA, 25 bp, Homo sapien
cagacaaagcactctgaacatgcag

SEQ ID NO: 5916312 - DNA, 25 bp, Homo sapien
ggcagggagcatggggtctccctca

SEQ ID NO: 5916313 - DNA, 25 bp, Homo sapien
tcatggcctgtgtcggagcagatgg

SEQ ID NO: 5916314 - DNA, 25 bp, Homo sapien
gctcctcttcatcagtgctgcagga

SEQ ID NO: 5916315 - DNA, 25 bp, Homo sapien
gatgggcacccaagaatgggttttt

SEQ ID NO: 5916316 - DNA, 25 bp, Homo sapien
cacaaactgagcctgctgatggccg

SEQ ID NO: 5916317 - DNA, 25 bp, Homo sapien
catgaggaaggaggagcacagagcc

SEQ ID NO: 5916318 - DNA, 25 bp, Homo sapien
gggatgtatgggcctccaattccag

SEQ ID NO: 5916319 - DNA, 25 bp, Homo sapien
cccaagaatgggtttttggatacca

SEQ ID NO: 5916320 - DNA, 25 bp, Homo sapien
ctttggacgatgggtgtcaagacac

SEQ ID NO: 5916321 - DNA, 25 bp, Homo sapien
aaggacgggctgagcagtgtggtgg

SEQ ID NO: 5916322 - DNA, 25 bp, Homo sapien
ctgagcctgctgatggccgagtccc

SEQ ID NO: 5916323 - DNA, 25 bp, Homo sapien
cgggtttgggaaatactcacacgat

SEQ ID NO: 5916324 - DNA, 25 bp, Homo sapien
cgcgggtttgggaaatactcacacg

SEQ ID NO: 5916325 - DNA, 25 bp, Homo sapien
agctgcatctggaggccctggaccg

SEQ ID NO: 5916326 - DNA, 25 bp, Homo sapien
tccgctgctgcagagcagtcagcct

SEQ ID NO: 5916327 - DNA, 25 bp, Homo sapien
gagcatggggtctccctcatggttc

SEQ ID NO: 5916328 - DNA, 25 bp, Homo sapien
ctagccacctgtgaattcagtgaat

SEQ ID NO: 5916329 - DNA, 25 bp, Homo sapien
tcatggttctgatagggatgtatgg

SEQ ID NO: 5916330 - DNA, 25 bp, Homo sapien
tgaacatgcagcagagtggccagcg

SEQ ID NO: 5916331 - DNA, 25 bp, Homo sapien
ggaaatactcacacgatgagctttc

SEQ ID NO: 5916332 - DNA, 25 bp, Homo sapien
tctggcccccaattacaacccacct

SEQ ID NO: 5916333 - DNA, 25 bp, Homo sapien
tgcgcatagtgctgcaggctgtgcg

SEQ ID NO: 5916334 - DNA, 25 bp, Homo sapien
attccagcagaaaccagacaaagca

SEQ ID NO: 5916335 - DNA, 25 bp, Homo sapien
tgcagagcagtcagccttattagtt

SEQ ID NO: 5916336 - DNA, 25 bp, Homo sapien
ccttattagttggtggtgggcaccg

SEQ ID NO: 5916337 - DNA, 25 bp, Homo sapien
gagcacagagcctccacggagaggt

SEQ ID NO: 5916338 - DNA, 25 bp, Homo sapien
gagtccctgcagcatgacaaggtgg

SEQ ID NO: 5916339 - DNA, 25 bp, Homo sapien
tgagctttggacgatgggtgtcaag

SEQ ID NO: 5916340 - DNA, 25 bp, Homo sapien
cactgagcacagagcctccacggag

SEQ ID NO: 5916341 - DNA, 25 bp, Homo sapien
ccagctgcatctggaggccctggac

SEQ ID NO: 5916342 - DNA, 25 bp, Homo sapien
gcacccgtgctctaccagctgcatc

SEQ ID NO: 5916343 - DNA, 25 bp, Homo sapien
gctgatggccgagtccctgcagcat

SEQ ID NO: 5916344 - DNA, 25 bp, Homo sapien
tagggatgtatgggcctccaattcc

SEQ ID NO: 5916345 - DNA, 25 bp, Homo sapien
taacctctgagccacttcaaggacc

SEQ ID NO: 5916346 - DNA, 25 bp, Homo sapien
gagactgtgtggagaaggacgggct

SEQ ID NO: 5916347 - DNA, 25 bp, Homo sapien
gacactacacagagcccattggccc

SEQ ID NO: 5916348 - DNA, 25 bp, Homo sapien
gactgtgtggagaaggacgggctga

SEQ ID NO: 5916349 - DNA, 25 bp, Homo sapien
tcctcttcatcagtgctgcaggatc

SEQ ID NO: 5916350 - DNA, 25 bp, Homo sapien
tgacaaggtggcacccgtgctctac

SEQ ID NO: 5916351 - DNA, 25 bp, Homo sapien
tggggcctcctctctcaaagactgt

SEQ ID NO: 5916352 - DNA, 25 bp, Homo sapien
cctagccactgagcacagagcctcc

SEQ ID NO: 5916353 - DNA, 25 bp, Homo sapien
gacgggatcggtcatccccataggg

SEQ ID NO: 5916354 - DNA, 25 bp, Homo sapien
ctgccttggctgagctttggacgat

SEQ ID NO: 5916355 - DNA, 25 bp, Homo sapien
tcagccttattagttggtggtgggc

SEQ ID NO: 5916356 - DNA, 25 bp, Homo sapien
ccctgcagcatgacaaggtggcacc

SEQ ID NO: 5916357 - DNA, 25 bp, Homo sapien
tggaggacgacctagccactgagca

SEQ ID NO: 5916358 - DNA, 25 bp, Homo sapien
ggcggttgcgcatagtgctgcaggc

SEQ ID NO: 5916359 - DNA, 25 bp, Homo sapien
aatgaccagctatgcacttgtccgc

SEQ ID NO: 5916360 - DNA, 25 bp, Homo sapien
aggtccacctacctgagactgcagc

SEQ ID NO: 5916361 - DNA, 25 bp, Homo sapien
gctgcccatgaggaaggaggagcac

SEQ ID NO: 5916362 - DNA, 25 bp, Homo sapien
gctccgtccttcccatagggaggga

SEQ ID NO: 5916363 - DNA, 25 bp, Homo sapien
aggccctggaccggcggttgcgcat

SEQ ID NO: 5916364 - DNA, 25 bp, Homo sapien
cccatagggtgacctgcggcaggga

SEQ ID NO: 5916365 - DNA, 25 bp, Homo sapien
atccacttggacaacgggcgcgggt

SEQ ID NO: 5916366 - DNA, 25 bp, Homo sapien
tggccagcgctccgtccttcccata

SEQ ID NO: 5916367 - DNA, 25 bp, Homo sapien
gggagcatggggtctccctcatggt

SEQ ID NO: 5916368 - DNA, 25 bp, Homo sapien
ggacgggctgagcagtgtggtggag

SEQ ID NO: 5916369 - DNA, 25 bp, Homo sapien
cccatgaggaaggaggagcacagag

SEQ ID NO: 5916370 - DNA, 25 bp, Homo sapien
tgcagcagagtggccagcgctccgt

SEQ ID NO: 5916371 - DNA, 25 bp, Homo sapien
atagggagggacctttaactcacta

SEQ ID NO: 5916372 - DNA, 25 bp, Homo sapien
cgggcgcgggtttgggaaatactca

SEQ ID NO: 5916373 - DNA, 25 bp, Homo sapien
gcagaccagagataacctctgagcc

SEQ ID NO: 5916374 - DNA, 25 bp, Homo sapien
gaaccatccagcagaccagagataa

SEQ ID NO: 5916375 - DNA, 25 bp, Homo sapien
ctaggaaggggagacagcgatggac

SEQ ID NO: 5916376 - DNA, 25 bp, Homo sapien
ttggccccaggccagcaggccagcc

SEQ ID NO: 5916377 - DNA, 25 bp, Homo sapien
tgtcaagacactacacagagcccat

SEQ ID NO: 5916378 - DNA, 25 bp, Homo sapien
gccttggctgagctttggacgatgg

SEQ ID NO: 5916379 - DNA, 25 bp, Homo sapien
agaaggacgggctgagcagtgtggt

SEQ ID NO: 5916380 - DNA, 25 bp, Homo sapien
acgatgagctttccattctcgctcc

SEQ ID NO: 5916381 - DNA, 25 bp, Homo sapien
actctgaacatgcagcagagtggcc

SEQ ID NO: 5916382 - DNA, 25 bp, Homo sapien
ctgatagggatgtatgggcctccaa

SEQ ID NO: 5916383 - DNA, 25 bp, Homo sapien
gcatggggtctccctcatggttctg

SEQ ID NO: 5916384 - DNA, 25 bp, Homo sapien
cccaccttctgctcctctatcctgg

SEQ ID NO: 5916385 - DNA, 25 bp, Homo sapien
gctgcagagcagtcagccttattag

SEQ ID NO: 5916386 - DNA, 25 bp, Homo sapien
gtctggtttctgctggaattggagg

SEQ ID NO: 5916387 - DNA, 25 bp, Homo sapien
gtgagccttttgttaagtacaaaat

SEQ ID NO: 5916388 - DNA, 25 bp, Homo sapien
acccgcgcccgttgtccaagtggat

SEQ ID NO: 5916389 - DNA, 25 bp, Homo sapien
gcccatctgctccgacacaggccat

SEQ ID NO: 5916390 - DNA, 25 bp, Homo sapien
ccgatcccgtccgaattcactgaat

SEQ ID NO: 5916391 - DNA, 25 bp, Homo sapien
ggagcagaaggtgggttgtaattgg

SEQ ID NO: 5916392 - DNA, 25 bp, Homo sapien
gggctctgtgtagtgtcttgacacc

SEQ ID NO: 5916393 - DNA, 25 bp, Homo sapien
agcagcggacaagtgcatagctggt

SEQ ID NO: 5916394 - DNA, 25 bp, Homo sapien
gaggccccaggatagaggagcagaa

SEQ ID NO: 5916395 - DNA, 25 bp, Homo sapien
gtatccaaaaacccattcttgggtg

SEQ ID NO: 5916396 - DNA, 25 bp, Homo sapien
tcctccaccacactgctcagcccgt

SEQ ID NO: 5916397 - DNA, 25 bp, Homo sapien
tcctgcagcactgatgaagaggagc

SEQ ID NO: 5916398 - DNA, 25 bp, Homo sapien
ctcagaggttatctctggtctgctg

SEQ ID NO: 5916399 - DNA, 25 bp, Homo sapien
ctgcagcactatgcgcaaccgccgg

SEQ ID NO: 5916400 - DNA, 25 bp, Homo sapien
ctgatgaagaggagcgagaatggaa

SEQ ID NO: 5916401 - DNA, 25 bp, Homo sapien
ctccaccacactgctcagcccgtcc

SEQ ID NO: 5916402 - DNA, 25 bp, Homo sapien
gcaaccgccggtccagggcctccag

SEQ ID NO: 5916403 - DNA, 25 bp, Homo sapien
tctccccttcctagagctctacagt

SEQ ID NO: 5916404 - DNA, 25 bp, Homo sapien
cgctggccactctgctgcatgttca

SEQ ID NO: 5916405 - DNA, 25 bp, Homo sapien
ggatgaccgatcccgtccgaattca

SEQ ID NO: 5916406 - DNA, 25 bp, Homo sapien
cagtctcgcacagcctgcagcacta

SEQ ID NO: 5916407 - DNA, 25 bp, Homo sapien
gagttaaaggtccctccctatggga

SEQ ID NO: 5916408 - DNA, 25 bp, Homo sapien
agcgagaatggaaagctcatcgtgt

SEQ ID NO: 5916409 - DNA, 25 bp, Homo sapien
attaacaggagtgtgagccttttgt

SEQ ID NO: 5916410 - DNA, 25 bp, Homo sapien
ttcacaggtggctaggctctgtgct

SEQ ID NO: 5916411 - DNA, 25 bp, Homo sapien
ggaattggaggcccatacatcccta

SEQ ID NO: 5916412 - DNA, 25 bp, Homo sapien
gctcatcgtgtgagtatttcccaaa

SEQ ID NO: 5916413 - DNA, 25 bp, Homo sapien
ggtgccaccttgtcatgctgcaggg

SEQ ID NO: 5916414 - DNA, 25 bp, Homo sapien
tggtatccaaaaacccattcttggg

SEQ ID NO: 5916415 - DNA, 25 bp, Homo sapien
tgcagtctcaggtaggtggacctcc

SEQ ID NO: 5916416 - DNA, 25 bp, Homo sapien
ttctccattaacaggagtgtgagcc

SEQ ID NO: 5916417 - DNA, 25 bp, Homo sapien
ccagagtgtgatcacatcatagaag

SEQ ID NO: 5916418 - DNA, 25 bp, Homo sapien
gtcactacctctccgtggaggctct

SEQ ID NO: 5916419 - DNA, 25 bp, Homo sapien
tcagcccgtccttctccacacagtc

SEQ ID NO: 5916420 - DNA, 25 bp, Homo sapien
atcagaaccatgagggagaccccat

SEQ ID NO: 5916421 - DNA, 25 bp, Homo sapien
cgtgtgagtatttcccaaacccgcg

SEQ ID NO: 5916422 - DNA, 25 bp, Homo sapien
ccgaattcactgaattcacaggtgg

SEQ ID NO: 5916423 - DNA, 25 bp, Homo sapien
ttgtctggtttctgctggaattgga

SEQ ID NO: 5916424 - DNA, 25 bp, Homo sapien
ggctctgtgctcctccttcctcatg

SEQ ID NO: 5916425 - DNA, 25 bp, Homo sapien
ctccattaacaggagtgtgagcctt

SEQ ID NO: 5916426 - DNA, 25 bp, Homo sapien
cggtgcccaccaccaactaataagg

SEQ ID NO: 5916427 - DNA, 25 bp, Homo sapien
atccaaaaacccattcttgggtgcc

SEQ ID NO: 5916428 - DNA, 25 bp, Homo sapien
gtgcccaccaccaactaataaggct

SEQ ID NO: 5916429 - DNA, 25 bp, Homo sapien
ggtcattggtatccaaaaacccatt

SEQ ID NO: 5916430 - DNA, 25 bp, Homo sapien
caccaactaataaggctgactgctc

SEQ ID NO: 5916431 - DNA, 25 bp, Homo sapien
gatgaagaggagcgagaatggaaag

SEQ ID NO: 5916432 - DNA, 25 bp, Homo sapien
cctcatgggcagcctggtcactacc

SEQ ID NO: 5916433 - DNA, 25 bp, Homo sapien
gcagcactatgcgcaaccgccggtc

SEQ ID NO: 5916434 - DNA, 25 bp, Homo sapien
atgctccctgccgcaggtcacccta

SEQ ID NO: 5916435 - DNA, 25 bp, Homo sapien
agccaaggcaggcggtgcccaccac

SEQ ID NO: 5916436 - DNA, 25 bp, Homo sapien
ttttgttaagtacaaaatagtgagt

SEQ ID NO: 5916437 - DNA, 25 bp, Homo sapien
tgaattcacaggtggctaggctctg

SEQ ID NO: 5916438 - DNA, 25 bp, Homo sapien
ccagcagctgcagtctcaggtaggt

SEQ ID NO: 5916439 - DNA, 25 bp, Homo sapien
aattcacaggtggctaggctctgtg

SEQ ID NO: 5916440 - DNA, 25 bp, Homo sapien
cctcctgatcctgcagcactgatga

SEQ ID NO: 5916441 - DNA, 25 bp, Homo sapien
gtttgtgttcctctttggccagcag

SEQ ID NO: 5916442 - DNA, 25 bp, Homo sapien
ctggcctgctggcctggggccaatg

SEQ ID NO: 5916443 - DNA, 25 bp, Homo sapien
tgatgtccatcgctgtctccccttc

SEQ ID NO: 5916444 - DNA, 25 bp, Homo sapien
acctctccgtggaggctctgtgctc

SEQ ID NO: 5916445 - DNA, 25 bp, Homo sapien
cagctggtagagcacgggtgccacc

SEQ ID NO: 5916446 - DNA, 25 bp, Homo sapien
gcagcagcggacaagtgcatagctg

SEQ ID NO: 5916447 - DNA, 25 bp, Homo sapien
gctctgtgtagtgtcttgacaccca

SEQ ID NO: 5916448 - DNA, 25 bp, Homo sapien
ccagggcctccagatgcagctggta

SEQ ID NO: 5916449 - DNA, 25 bp, Homo sapien
gtgagttaaaggtccctccctatgg

SEQ ID NO: 5916450 - DNA, 25 bp, Homo sapien
tccttgaagtggctcagaggttatc

SEQ ID NO: 5916451 - DNA, 25 bp, Homo sapien
cgcacagcctgcagcactatgcgca

SEQ ID NO: 5916452 - DNA, 25 bp, Homo sapien
ggccactctgctgcatgttcagagt

SEQ ID NO: 5916453 - DNA, 25 bp, Homo sapien
caccctatggggatgaccgatcccg

SEQ ID NO: 5916454 - DNA, 25 bp, Homo sapien
agaggaggccccaggatagaggagc

SEQ ID NO: 5916455 - DNA, 25 bp, Homo sapien
caggtggctaggctctgtgctcctc

SEQ ID NO: 5916456 - DNA, 25 bp, Homo sapien
agagcacgggtgccaccttgtcatg

SEQ ID NO: 5916457 - DNA, 25 bp, Homo sapien
ggctggcctgctggcctggggccaa

SEQ ID NO: 5916458 - DNA, 25 bp, Homo sapien
ggaggcccatacatccctatcagaa

SEQ ID NO: 5916459 - DNA, 25 bp, Homo sapien
gccatcagcaggctcagtttgtgtt

SEQ ID NO: 5916460 - DNA, 25 bp, Homo sapien
acaagtgcatagctggtcattggta

SEQ ID NO: 5916461 - DNA, 25 bp, Homo sapien
ggagcgagaatggaaagctcatcgt

SEQ ID NO: 5916462 - DNA, 25 bp, Homo sapien
ccatacatccctatcagaaccatga

SEQ ID NO: 5916463 - DNA, 25 bp, Homo sapien
gtgcatagctggtcattggtatcca

SEQ ID NO: 5916464 - DNA, 25 bp, Homo sapien
acccattcttgggtgcccatctgct

SEQ ID NO: 5916465 - DNA, 25 bp, Homo sapien
ccctatcagaaccatgagggagacc

SEQ ID NO: 5916466 - DNA, 25 bp, Homo sapien
acagtctttgagagaggaggcccca

SEQ ID NO: 5916467 - DNA, 25 bp, Homo sapien
tcctagagctctacagtctttgaga

SEQ ID NO: 5916468 - DNA, 25 bp, Homo sapien
cctccctatgggaaggacggagcgc

SEQ ID NO: 5916469 - DNA, 25 bp, Homo sapien
acccatcgtccaaagctcagccaag

SEQ ID NO: 5916470 - DNA, 25 bp, Homo sapien
aattggaggcccatacatccctatc

SEQ ID NO: 5916471 - DNA, 25 bp, Homo sapien
tggggccaatgggctctgtgtagtg

SEQ ID NO: 5916472 - DNA, 25 bp, Homo sapien
tcctccttcctcatgggcagcctgg

SEQ ID NO: 5916473 - DNA, 25 bp, Homo sapien
ggacaagtgcatagctggtcattgg

SEQ ID NO: 5916474 - DNA, 25 bp, Homo sapien
ttggaggcccatacatccctatcag

SEQ ID NO: 5916475 - DNA, 25 bp, Homo sapien
tctgtgtagtgtcttgacacccatc

SEQ ID NO: 5916476 - DNA, 25 bp, Homo sapien
ttcctcatgggcagcctggtcacta

SEQ ID NO: 5916477 - DNA, 25 bp, Homo sapien
ttggccagcagctgcagtctcaggt

SEQ ID NO: 5916478 - DNA, 25 bp, Homo sapien
ggaaggacggagcgctggccactct

SEQ ID NO: 5916479 - DNA, 25 bp, Homo sapien
tgagtatttcccaaacccgcgcccg

SEQ ID NO: 5916480 - DNA, 25 bp, Homo sapien
cactgctcagcccgtccttctccac

SEQ ID NO: 5916481 - DNA, 25 bp, Homo sapien
ctatggggatgaccgatcccgtccg

SEQ ID NO: 5916482 - DNA, 25 bp, Homo sapien
ccaactaataaggctgactgctctg

SEQ ID NO: 5916483 - DNA, 25 bp, Homo sapien
cgtccttctccacacagtctcgcac

SEQ ID NO: 5916484 - DNA, 25 bp, Homo sapien
aataaggctgactgctctgcagcag

SEQ ID NO: 5916485 - DNA, 25 bp, Homo sapien
caggcggtgcccaccaccaactaat

SEQ ID NO: 5916486 - DNA, 25 bp, Homo sapien
ctgatcctgcagcactgatgaagag

SEQ ID NO: 5916487 - DNA, 25 bp, Homo sapien
ctttgtctggtttctgctggaattg

SEQ ID NO: 5916488 - DNA, 25 bp, Homo sapien
cccttcctagagctctacagtcttt

SEQ ID NO: 5916489 - DNA, 25 bp, Homo sapien
atctgctccgacacaggccatgatg

SEQ ID NO: 5916490 - DNA, 25 bp, Homo sapien
ctgctccgacacaggccatgatgtc

SEQ ID NO: 5916491 - DNA, 25 bp, Homo sapien
gtcgtcctccaccacactgctcagc

SEQ ID NO: 5916492 - DNA, 25 bp, Homo sapien
tccctccctatgggaaggacggagc

SEQ ID NO: 5916493 - DNA, 25 bp, Homo sapien
ttgttaagtacaaaatagtgagtta

SEQ ID NO: 5916494 - DNA, 25 bp, Homo sapien
tccttctccacacagtctcgcacag

SEQ ID NO: 5916495 - DNA, 25 bp, Homo sapien
taaaggtccctccctatgggaagga

SEQ ID NO: 5916496 - DNA, 25 bp, Homo sapien
tgacacccatcgtccaaagctcagc

SEQ ID NO: 5916497 - DNA, 25 bp, Homo sapien
cctccagatgcagctggtagagcac

SEQ ID NO: 5916498 - DNA, 25 bp, Homo sapien
agcaggctcagtttgtgttcctctt

SEQ ID NO: 5916499 - DNA, 25 bp, Homo sapien
accatgagggagaccccatgctccc

SEQ ID NO: 5916500 - DNA, 25 bp, Homo sapien
ctcagtggctaggtcgtcctccacc

SEQ ID NO: 5916501 - DNA, 25 bp, Homo sapien
ggccagcagctgcagtctcaggtag

SEQ ID NO: 5916502 - DNA, 25 bp, Homo sapien
atggggatgaccgatcccgtccgaa

SEQ ID NO: 5916503 - DNA, 25 bp, Homo sapien
ggacggagcgctggccactctgctg

SEQ ID NO: 5916504 - DNA, 25 bp, Homo sapien
acacaggccatgatgtccatcgctg

SEQ ID NO: 5916505 - DNA, 25 bp, Homo sapien
ggtttctgctggaattggaggccca

SEQ ID NO: 5916506 - DNA, 25 bp, Homo sapien
aaggacggagcgctggccactctgc

SEQ ID NO: 5916507 - DNA, 25 bp, Homo sapien
cttgaagtggctcagaggttatctc

SEQ ID NO: 5916508 - DNA, 25 bp, Homo sapien
gcggacaagtgcatagctggtcatt

SEQ ID NO: 5916509 - DNA, 25 bp, Homo sapien
ggctcagaggttatctctggtctgc

SEQ ID NO: 5916510 - DNA, 25 bp, Homo sapien
atgaccgatcccgtccgaattcact

SEQ ID NO: 5916511 - DNA, 25 bp, Homo sapien
aaacccattcttgggtgcccatctg

SEQ ID NO: 5916512 - DNA, 25 bp, Homo sapien
cacactgctcagcccgtccttctcc

SEQ ID NO: 5916513 - DNA, 25 bp, Homo sapien
tgatcacatcatagaaggtccttga

SEQ ID NO: 5916514 - DNA, 25 bp, Homo sapien
ctggccactctgctgcatgttcaga

SEQ ID NO: 5916515 - DNA, 25 bp, Homo sapien
ctctgtgctcctccttcctcatggg

SEQ ID NO: 5916516 - DNA, 25 bp, Homo sapien
tcatcgtgtgagtatttcccaaacc

SEQ ID NO: 5916517 - DNA, 25 bp, Homo sapien
gtagagcacgggtgccaccttgtca

SEQ ID NO: 5916518 - DNA, 25 bp, Homo sapien
tagtgagttaaaggtccctccctat

SEQ ID NO: 5916519 - DNA, 25 bp, Homo sapien
ccgcaggtcaccctatggggatgac

SEQ ID NO: 5916520 - DNA, 25 bp, Homo sapien
tccccttcctagagctctacagtct

SEQ ID NO: 5916521 - DNA, 25 bp, Homo sapien
tttgagagaggaggccccaggatag

SEQ ID NO: 5916522 - DNA, 25 bp, Homo sapien
tgtgctcagtggctaggtcgtcctc

SEQ ID NO: 5916523 - DNA, 25 bp, Homo sapien
aggctctgtgctcagtggctaggtc

SEQ ID NO: 5916524 - DNA, 25 bp, Homo sapien
agcgctggccactctgctgcatgtt

SEQ ID NO: 5916525 - DNA, 25 bp, Homo sapien
gggactcggccatcagcaggctcag

SEQ ID NO: 5916526 - DNA, 25 bp, Homo sapien
tcactgaattcacaggtggctaggc

SEQ ID NO: 5916527 - DNA, 25 bp, Homo sapien
ctgcatgttcagagtgctttgtctg

SEQ ID NO: 5916528 - DNA, 25 bp, Homo sapien
gatagaggagcagaaggtgggttgt

SEQ ID NO: 5916529 - DNA, 25 bp, Homo sapien
gtctcgcacagcctgcagcactatg

SEQ ID NO: 5916530 - DNA, 25 bp, Homo sapien
ccaccacactgctcagcccgtcctt

SEQ ID NO: 5916531 - DNA, 25 bp, Homo sapien
attggtatccaaaaacccattcttg

SEQ ID NO: 5916532 - DNA, 25 bp, Homo sapien
gctgactgctctgcagcagcggaca

SEQ ID NO: 5916533 - DNA, 25 bp, Homo sapien
aggccatgatgtccatcgctgtctc

SEQ ID NO: 5916534 - DNA, 25 bp, Homo sapien
aaggtccttgaagtggctcagaggt

SEQ ID NO: 5916535 - DNA, 25 bp, Homo sapien
gtccatcgctgtctccccttcctag

SEQ ID NO: 5916536 - DNA, 25 bp, Homo sapien
tgctggcctggggccaatgggctct

SEQ ID NO: 5916537 - DNA, 25 bp, Homo sapien
cagatgcagctggtagagcacgggt

SEQ ID NO: 5916538 - DNA, 25 bp, Homo sapien
cctgccgcaggtcaccctatgggga

SEQ ID NO: 5916539 - DNA, 25 bp, Homo sapien
ggcctggggccaatgggctctgtgt

SEQ ID NO: 5916540 - DNA, 25 bp, Homo sapien
ctagagctctacagtctttgagaga

SEQ ID NO: 5916541 - DNA, 25 bp, Homo sapien
tggacctcctgatcctgcagcactg

SEQ ID NO: 5916542 - DNA, 25 bp, Homo sapien
gctgcagggactcggccatcagcag

SEQ ID NO: 5916543 - DNA, 25 bp, Homo sapien
attcttgggtgcccatctgctccga

SEQ ID NO: 5916544 - DNA, 25 bp, Homo sapien
ctatgcgcaaccgccggtccagggc

SEQ ID NO: 5916545 - DNA, 25 bp, Homo sapien
tgctttgtctggtttctgctggaat

SEQ ID NO: 5916546 - DNA, 25 bp, Homo sapien
gcaggtcaccctatggggatgaccg

SEQ ID NO: 5916547 - DNA, 25 bp, Homo sapien
ccccaggatagaggagcagaaggtg

SEQ ID NO: 5916548 - DNA, 25 bp, Homo sapien
cagtggctaggtcgtcctccaccac

SEQ ID NO: 5916549 - DNA, 25 bp, Homo sapien
tcagagtgctttgtctggtttctgc

SEQ ID NO: 5916550 - DNA, 25 bp, Homo sapien
gaccgatcccgtccgaattcactga

SEQ ID NO: 5916551 - DNA, 25 bp, Homo sapien
gatcctgcagcactgatgaagagga

SEQ ID NO: 5916552 - DNA, 25 bp, Homo sapien
ggtggctaggctctgtgctcctcct

SEQ ID NO: 5916553 - DNA, 25 bp, Homo sapien
atacatccctatcagaaccatgagg

SEQ ID NO: 5916554 - DNA, 25 bp, Homo sapien
ctatcagaaccatgagggagacccc

SEQ ID NO: 5916555 - DNA, 25 bp, Homo sapien
ccttttgttaagtacaaaatagtga

SEQ ID NO: 5916556 - DNA, 25 bp, Homo sapien
gtcttgacacccatcgtccaaagct

SEQ ID NO: 5916557 - DNA, 25 bp, Homo sapien
tgaagtggctcagaggttatctctg

SEQ ID NO: 5916558 - DNA, 25 bp, Homo sapien
cacgggtgccaccttgtcatgctgc

SEQ ID NO: 5916559 - DNA, 25 bp, Homo sapien
gctggtagagcacgggtgccacctt

SEQ ID NO: 5916560 - DNA, 25 bp, Homo sapien
tatgggaaggacggagcgctggcca

SEQ ID NO: 5916561 - DNA, 25 bp, Homo sapien
agaccccatgctccctgccgcaggt

SEQ ID NO: 5916562 - DNA, 25 bp, Homo sapien
gctgtctccccttcctagagctcta

SEQ ID NO: 5916563 - DNA, 25 bp, Homo sapien
catgatgtccatcgctgtctcccct

SEQ ID NO: 5916564 - DNA, 25 bp, Homo sapien
cttctccacacagtctcgcacagcc

SEQ ID NO: 5916565 - DNA, 25 bp, Homo sapien
gctaggctctgtgctcctccttcct

SEQ ID NO: 5916566 - DNA, 25 bp, Homo sapien
tctgctggaattggaggcccataca

SEQ ID NO: 5916567 - DNA, 25 bp, Homo sapien
tgtaattgggggccagagtgtgatc

SEQ ID NO: 5916568 - DNA, 25 bp, Homo sapien
tctccacacagtctcgcacagcctg

SEQ ID NO: 5916569 - DNA, 25 bp, Homo sapien
gggtgcccatctgctccgacacagg

SEQ ID NO: 5916570 - DNA, 25 bp, Homo sapien
gctcctccttcctcatgggcagcct

SEQ ID NO: 5916571 - DNA, 25 bp, Homo sapien
caatgggctctgtgtagtgtcttga

SEQ ID NO: 5916572 - DNA, 25 bp, Homo sapien
cacagtctcgcacagcctgcagcac

SEQ ID NO: 5916573 - DNA, 25 bp, Homo sapien
ccatctgctccgacacaggccatga

SEQ ID NO: 5916574 - DNA, 25 bp, Homo sapien
ctggtttctgctggaattggaggcc

SEQ ID NO: 5916575 - DNA, 25 bp, Homo sapien
cacaggtggctaggctctgtgctcc

SEQ ID NO: 5916576 - DNA, 25 bp, Homo sapien
ctctacagtctttgagagaggaggc

SEQ ID NO: 5916577 - DNA, 25 bp, Homo sapien
cctatgggaaggacggagcgctggc

SEQ ID NO: 5916578 - DNA, 25 bp, Homo sapien
atagctggtcattggtatccaaaaa

SEQ ID NO: 5916579 - DNA, 25 bp, Homo sapien
ctggcctggggccaatgggctctgt

SEQ ID NO: 5916580 - DNA, 25 bp, Homo sapien
actgctctgcagcagcggacaagtg

SEQ ID NO: 5916581 - DNA, 25 bp, Homo sapien
agcccgtccttctccacacagtctc

SEQ ID NO: 5916582 - DNA, 25 bp, Homo sapien
cggtccagggcctccagatgcagct

SEQ ID NO: 5916583 - DNA, 25 bp, Homo sapien
gcccaccaccaactaataaggctga

SEQ ID NO: 5916584 - DNA, 25 bp, Homo sapien
accacactgctcagcccgtccttct

SEQ ID NO: 5916585 - DNA, 25 bp, Homo sapien
atggttctccattaacaggagtgtg

SEQ ID NO: 5916586 - DNA, 25 bp, Homo sapien
gtctcaggtaggtggacctcctgat

SEQ ID NO: 5916587 - DNA, 25 bp, Homo sapien
cagggactcggccatcagcaggctc

SEQ ID NO: 5916588 - DNA, 25 bp, Homo sapien
aaccgccggtccagggcctccagat

SEQ ID NO: 5916589 - DNA, 25 bp, Homo sapien
gctccctgccgcaggtcaccctatg

SEQ ID NO: 5916590 - DNA, 25 bp, Homo sapien
ccaaggcaggcggtgcccaccacca

SEQ ID NO: 5916591 - DNA, 25 bp, Homo sapien
caaagctcagccaaggcaggcggtg

SEQ ID NO: 5916592 - DNA, 25 bp, Homo sapien
tgactgctctgcagcagcggacaag

SEQ ID NO: 5916593 - DNA, 25 bp, Homo sapien
ctggtctgctggatggttctccatt

SEQ ID NO: 5916594 - DNA, 25 bp, Homo sapien
ggttctccattaacaggagtgtgag

SEQ ID NO: 5916595 - DNA, 25 bp, Homo sapien
gtggctcagaggttatctctggtct

SEQ ID NO: 5916596 - DNA, 25 bp, Homo sapien
ggtggacctcctgatcctgcagcac

SEQ ID NO: 5916597 - DNA, 25 bp, Homo sapien
agggcctccagatgcagctggtaga

SEQ ID NO: 5916598 - DNA, 25 bp, Homo sapien
cactacctctccgtggaggctctgt

SEQ ID NO: 5916599 - DNA, 25 bp, Homo sapien
ctcgcacagcctgcagcactatgcg

SEQ ID NO: 5916600 - DNA, 25 bp, Homo sapien
ctggtcattggtatccaaaaaccca

SEQ ID NO: 5916601 - DNA, 25 bp, Homo sapien
ggcctccagatgcagctggtagagc

SEQ ID NO: 5916602 - DNA, 25 bp, Homo sapien
ctacagtctttgagagaggaggccc

SEQ ID NO: 5916603 - DNA, 25 bp, Homo sapien
tgcagggactcggccatcagcaggc

SEQ ID NO: 5916604 - DNA, 25 bp, Homo sapien
tcccgtccgaattcactgaattcac

SEQ ID NO: 5916605 - DNA, 25 bp, Homo sapien
ctctggtctgctggatggttctcca

SEQ ID NO: 5916606 - DNA, 25 bp, Homo sapien
tgctgcatgttcagagtgctttgtc

SEQ ID NO: 5916607 - DNA, 25 bp, Homo sapien
ctccttcctcatgggcagcctggtc

SEQ ID NO: 5916608 - DNA, 25 bp, Homo sapien
tgctggaattggaggcccatacatc

SEQ ID NO: 5916609 - DNA, 25 bp, Homo sapien
gtggaggctctgtgctcagtggcta

SEQ ID NO: 5916610 - DNA, 25 bp, Homo sapien
tcattggtatccaaaaacccattct

SEQ ID NO: 5916611 - DNA, 25 bp, Homo sapien
tggtagagcacgggtgccaccttgt

SEQ ID NO: 5916612 - DNA, 25 bp, Homo sapien
ggaggctctgtgctcagtggctagg

SEQ ID NO: 5916613 - DNA, 25 bp, Homo sapien
cttgtcatgctgcagggactcggcc

SEQ ID NO: 5916614 - DNA, 25 bp, Homo sapien
gctccgacacaggccatgatgtcca

SEQ ID NO: 5916615 - DNA, 25 bp, Homo sapien
ctctccgtggaggctctgtgctcag

SEQ ID NO: 5916616 - DNA, 25 bp, Homo sapien
ctcaggtaggtggacctcctgatcc

SEQ ID NO: 5916617 - DNA, 25 bp, Homo sapien
tagtgtcttgacacccatcgtccaa

SEQ ID NO: 5916618 - DNA, 25 bp, Homo sapien
tcagccaaggcaggcggtgcccacc

SEQ ID NO: 5916619 - DNA, 25 bp, Homo sapien
attgggggccagagtgtgatcacat

SEQ ID NO: 5916620 - DNA, 25 bp, Homo sapien
gtgttcctctttggccagcagctgc

SEQ ID NO: 5916621 - DNA, 25 bp, Homo sapien
gctctgtgctcagtggctaggtcgt

SEQ ID NO: 5916622 - DNA, 25 bp, Homo sapien
tcatgctgcagggactcggccatca

SEQ ID NO: 5916623 - DNA, 25 bp, Homo sapien
gagccttttgttaagtacaaaatag

SEQ ID NO: 5916624 - DNA, 25 bp, Homo sapien
ctttggccagcagctgcagtctcag

SEQ ID NO: 5916625 - DNA, 25 bp, Homo sapien
gcgcccgttgtccaagtggatgatg

SEQ ID NO: 5916626 - DNA, 25 bp, Homo sapien
atgcgcaaccgccggtccagggcct

SEQ ID NO: 5916627 - DNA, 25 bp, Homo sapien
tcttgggtgcccatctgctccgaca

SEQ ID NO: 5916628 - DNA, 25 bp, Homo sapien
gcctgcagcactatgcgcaaccgcc

SEQ ID NO: 5916629 - DNA, 25 bp, Homo sapien
taaggctgactgctctgcagcagcg

SEQ ID NO: 5916630 - DNA, 25 bp, Homo sapien
ctggatggttctccattaacaggag

SEQ ID NO: 5916631 - DNA, 25 bp, Homo sapien
tcgctgtctccccttcctagagctc

SEQ ID NO: 5916632 - DNA, 25 bp, Homo sapien
gttgtaattgggggccagagtgtga

SEQ ID NO: 5916633 - DNA, 25 bp, Homo sapien
gatgcagctggtagagcacgggtgc

SEQ ID NO: 5916634 - DNA, 25 bp, Homo sapien
ggatggttctccattaacaggagtg

SEQ ID NO: 5916635 - DNA, 25 bp, Homo sapien
agcactatgcgcaaccgccggtcca

SEQ ID NO: 5916636 - DNA, 25 bp, Homo sapien
gaggttatctctggtctgctggatg

SEQ ID NO: 5916637 - DNA, 25 bp, Homo sapien
ctctgcagcagcggacaagtgcata

SEQ ID NO: 5916638 - DNA, 25 bp, Homo sapien
tgagggagaccccatgctccctgcc

SEQ ID NO: 5916639 - DNA, 25 bp, Homo sapien
acggagcgctggccactctgctgca

SEQ ID NO: 5916640 - DNA, 25 bp, Homo sapien
aggtgggttgtaattgggggccaga

SEQ ID NO: 5916641 - DNA, 25 bp, Homo sapien
gcagcactgatgaagaggagcgaga

SEQ ID NO: 5916642 - DNA, 25 bp, Homo sapien
cccgtccttctccacacagtctcgc

SEQ ID NO: 5916643 - DNA, 25 bp, Homo sapien
cgtcctccaccacactgctcagccc

SEQ ID NO: 5916644 - DNA, 25 bp, Homo sapien
gggcagcctggtcactacctctccg

SEQ ID NO: 5916645 - DNA, 25 bp, Homo sapien
ggcctgctggcctggggccaatggg

SEQ ID NO: 5916646 - DNA, 25 bp, Homo sapien
aagctcatcgtgtgagtatttccca

SEQ ID NO: 5916647 - DNA, 25 bp, Homo sapien
agaaggtccttgaagtggctcagag

SEQ ID NO: 5916648 - DNA, 25 bp, Homo sapien
taggtggacctcctgatcctgcagc

SEQ ID NO: 5916649 - DNA, 25 bp, Homo sapien
tgtgatcacatcatagaaggtcctt

SEQ ID NO: 5916650 - DNA, 25 bp, Homo sapien
tccagatgcagctggtagagcacgg

SEQ ID NO: 5916651 - DNA, 25 bp, Homo sapien
tcctgatcctgcagcactgatgaag

SEQ ID NO: 5916652 - DNA, 25 bp, Homo sapien
atcacatcatagaaggtccttgaag

SEQ ID NO: 5916653 - DNA, 25 bp, Homo sapien
ctgctcagcccgtccttctccacac

SEQ ID NO: 5916654 - DNA, 25 bp, Homo sapien
aggagtgtgagccttttgttaagta

SEQ ID NO: 5916655 - DNA, 25 bp, Homo sapien
tacaaaatagtgagttaaaggtccc

SEQ ID NO: 5916656 - DNA, 25 bp, Homo sapien
agctggtcattggtatccaaaaacc

SEQ ID NO: 5916657 - DNA, 25 bp, Homo sapien
gccaatgggctctgtgtagtgtctt

SEQ ID NO: 5916658 - DNA, 25 bp, Homo sapien
ccgcgcccgttgtccaagtggatga

SEQ ID NO: 5916659 - DNA, 25 bp, Homo sapien
agcactgatgaagaggagcgagaat

SEQ ID NO: 5916660 - DNA, 25 bp, Homo sapien
tggaaagctcatcgtgtgagtattt

SEQ ID NO: 5916661 - DNA, 25 bp, Homo sapien
cgagaatggaaagctcatcgtgtga

SEQ ID NO: 5916662 - DNA, 25 bp, Homo sapien
ggtctgctggatggttctccattaa

SEQ ID NO: 5916663 - DNA, 25 bp, Homo sapien
tggctaggctctgtgctcctccttc

SEQ ID NO: 5916664 - DNA, 25 bp, Homo sapien
gcatagctggtcattggtatccaaa

SEQ ID NO: 5916665 - DNA, 25 bp, Homo sapien
tgaagaggagcgagaatggaaagct

SEQ ID NO: 5916666 - DNA, 25 bp, Homo sapien
ctccgtggaggctctgtgctcagtg

SEQ ID NO: 5916667 - DNA, 25 bp, Homo sapien
aggatagaggagcagaaggtgggtt

SEQ ID NO: 5916668 - DNA, 25 bp, Homo sapien
cgtccaaagctcagccaaggcaggc

SEQ ID NO: 5916669 - DNA, 25 bp, Homo sapien
atgttcagagtgctttgtctggttt

SEQ ID NO: 5916670 - DNA, 25 bp, Homo sapien
catgagggagaccccatgctccctg

SEQ ID NO: 5916671 - DNA, 25 bp, Homo sapien
ctcagtttgtgttcctctttggcca

SEQ ID NO: 5916672 - DNA, 25 bp, Homo sapien
ggccccaggatagaggagcagaagg

SEQ ID NO: 5916673 - DNA, 25 bp, Homo sapien
gctcagcccgtccttctccacacag

SEQ ID NO: 5916674 - DNA, 25 bp, Homo sapien
gtgtcttgacacccatcgtccaaag

SEQ ID NO: 5916675 - DNA, 25 bp, Homo sapien
cctggggccaatgggctctgtgtag

SEQ ID NO: 5916676 - DNA, 25 bp, Homo sapien
gtccagggcctccagatgcagctgg

SEQ ID NO: 5916677 - DNA, 25 bp, Homo sapien
accaccaactaataaggctgactgc

SEQ ID NO: 5916678 - DNA, 25 bp, Homo sapien
tgctcagtggctaggtcgtcctcca

SEQ ID NO: 5916679 - DNA, 25 bp, Homo sapien
atgctgcagggactcggccatcagc

SEQ ID NO: 5916680 - DNA, 25 bp, Homo sapien
aggctgactgctctgcagcagcgga

SEQ ID NO: 5916681 - DNA, 25 bp, Homo sapien
attcactgaattcacaggtggctag

SEQ ID NO: 5916682 - DNA, 25 bp, Homo sapien
atcgtgtgagtatttcccaaacccg

SEQ ID NO: 5916683 - DNA, 25 bp, Homo sapien
tcctctttggccagcagctgcagtc

SEQ ID NO: 5916684 - DNA, 25 bp, Homo sapien
gcatgttcagagtgctttgtctggt

SEQ ID NO: 5916685 - DNA, 25 bp, Homo sapien
gtgcccatctgctccgacacaggcc

SEQ ID NO: 5916686 - DNA, 25 bp, Homo sapien
ccactctgctgcatgttcagagtgc

SEQ ID NO: 5916687 - DNA, 25 bp, Homo sapien
ggtccttgaagtggctcagaggtta

SEQ ID NO: 5916688 - DNA, 25 bp, Homo sapien
cactgatgaagaggagcgagaatgg

SEQ ID NO: 5916689 - DNA, 25 bp, Homo sapien
ctgcagcactgatgaagaggagcga

SEQ ID NO: 5916690 - DNA, 25 bp, Homo sapien
agtctttgagagaggaggccccagg

SEQ ID NO: 5916691 - DNA, 25 bp, Homo sapien
acaggagtgtgagccttttgttaag

SEQ ID NO: 5916692 - DNA, 25 bp, Homo sapien
agcctggtcactacctctccgtgga

SEQ ID NO: 5916693 - DNA, 25 bp, Homo sapien
ccaccaccaactaataaggctgact

SEQ ID NO: 5916694 - DNA, 25 bp, Homo sapien
caggctcagtttgtgttcctctttg

SEQ ID NO: 5916695 - DNA, 25 bp, Homo sapien
cagcctgcagcactatgcgcaaccg

SEQ ID NO: 5916696 - DNA, 25 bp, Homo sapien
ccgccggtccagggcctccagatgc

SEQ ID NO: 5916697 - DNA, 25 bp, Homo sapien
ctctttggccagcagctgcagtctc

SEQ ID NO: 5916698 - DNA, 25 bp, Homo sapien
tcatgggcagcctggtcactacctc

SEQ ID NO: 5916699 - DNA, 25 bp, Homo sapien
gctcagccaaggcaggcggtgccca

SEQ ID NO: 5916700 - DNA, 25 bp, Homo sapien
ggccagagtgtgatcacatcataga

SEQ ID NO: 5916701 - DNA, 25 bp, Homo sapien
caggtaggtggacctcctgatcctg

SEQ ID NO: 5916702 - DNA, 25 bp, Homo sapien
tagaggagcagaaggtgggttgtaa

SEQ ID NO: 5916703 - DNA, 25 bp, Homo sapien
atctctggtctgctggatggttctc

SEQ ID NO: 5916704 - DNA, 25 bp, Homo sapien
ggctaggtcgtcctccaccacactg

SEQ ID NO: 5916705 - DNA, 25 bp, Homo sapien
tgccgcaggtcaccctatggggatg

SEQ ID NO: 5916706 - DNA, 25 bp, Homo sapien
agagaggaggccccaggatagagga

SEQ ID NO: 5916707 - DNA, 25 bp, Homo sapien
cagctgcagtctcaggtaggtggac

SEQ ID NO: 5916708 - DNA, 25 bp, Homo sapien
catcatagaaggtccttgaagtggc

SEQ ID NO: 5916709 - DNA, 25 bp, Homo sapien
catcagcaggctcagtttgtgttcc

SEQ ID NO: 5916710 - DNA, 25 bp, Homo sapien
atgggcagcctggtcactacctctc

SEQ ID NO: 5916711 - DNA, 25 bp, Homo sapien
ccttcctcatgggcagcctggtcac

SEQ ID NO: 5916712 - DNA, 25 bp, Homo sapien
taggctctgtgctcctccttcctca

SEQ ID NO: 5916713 - DNA, 25 bp, Homo sapien
ccattcttgggtgcccatctgctcc

SEQ ID NO: 5916714 - DNA, 25 bp, Homo sapien
taacaggagtgtgagccttttgtta

SEQ ID NO: 5916715 - DNA, 25 bp, Homo sapien
tcatagaaggtccttgaagtggctc

SEQ ID NO: 5916716 - DNA, 25 bp, Homo sapien
ccatcgtccaaagctcagccaaggc

SEQ ID NO: 5916717 - DNA, 25 bp, Homo sapien
cagaggttatctctggtctgctgga

SEQ ID NO: 5916718 - DNA, 25 bp, Homo sapien
gggccaatgggctctgtgtagtgtc

SEQ ID NO: 5916719 - DNA, 25 bp, Homo sapien
gtggctaggtcgtcctccaccacac

SEQ ID NO: 5916720 - DNA, 25 bp, Homo sapien
atgtccatcgctgtctccccttcct

SEQ ID NO: 5916721 - DNA, 25 bp, Homo sapien
gtgtgagccttttgttaagtacaaa

SEQ ID NO: 5916722 - DNA, 25 bp, Homo sapien
agtgctttgtctggtttctgctgga

SEQ ID NO: 5916723 - DNA, 25 bp, Homo sapien
agtacaaaatagtgagttaaaggtc

SEQ ID NO: 5916724 - DNA, 25 bp, Homo sapien
ccaaaaacccattcttgggtgccca

SEQ ID NO: 5916725 - DNA, 25 bp, Homo sapien
ctcggccatcagcaggctcagtttg

SEQ ID NO: 5916726 - DNA, 25 bp, Homo sapien
actctgctgcatgttcagagtgctt

SEQ ID NO: 5916727 - DNA, 25 bp, Homo sapien
aatggaaagctcatcgtgtgagtat

SEQ ID NO: 5916728 - DNA, 25 bp, Homo sapien
gttcagagtgctttgtctggtttct

SEQ ID NO: 5916729 - DNA, 25 bp, Homo sapien
aaaaacccattcttgggtgcccatc

SEQ ID NO: 5916730 - DNA, 25 bp, Homo sapien
aggcccatacatccctatcagaacc

SEQ ID NO: 5916731 - DNA, 25 bp, Homo sapien
cggccatcagcaggctcagtttgtg

SEQ ID NO: 5916732 - DNA, 25 bp, Homo sapien
ggttatctctggtctgctggatggt

SEQ ID NO: 5916733 - DNA, 25 bp, Homo sapien
gaggagcgagaatggaaagctcatc

SEQ ID NO: 5916734 - DNA, 25 bp, Homo sapien
cagtctcaggtaggtggacctcctg

SEQ ID NO: 5916735 - DNA, 25 bp, Homo sapien
aagaggagcgagaatggaaagctca

SEQ ID NO: 5916736 - DNA, 25 bp, Homo sapien
ggagcgctggccactctgctgcatg

SEQ ID NO: 5916737 - DNA, 25 bp, Homo sapien
gcgcaaccgccggtccagggcctcc

SEQ ID NO: 5916738 - DNA, 25 bp, Homo sapien
tctttgagagaggaggccccaggat

SEQ ID NO: 5916739 - DNA, 25 bp, Homo sapien
tgctggatggttctccattaacagg

SEQ ID NO: 5916740 - DNA, 25 bp, Homo sapien
cttgacacccatcgtccaaagctca

SEQ ID NO: 5916741 - DNA, 25 bp, Homo sapien
cgggtgccaccttgtcatgctgcag

SEQ ID NO: 5916742 - DNA, 25 bp, Homo sapien
cagaaccatgagggagaccccatgc

SEQ ID NO: 5916743 - DNA, 25 bp, Homo sapien
gttcctctttggccagcagctgcag

SEQ ID NO: 5916744 - DNA, 25 bp, Homo sapien
aactaataaggctgactgctctgca

SEQ ID NO: 5916745 - DNA, 25 bp, Homo sapien
cactatgcgcaaccgccggtccagg

SEQ ID NO: 5916746 - DNA, 25 bp, Homo sapien
gccggtccagggcctccagatgcag

SEQ ID NO: 5916747 - DNA, 25 bp, Homo sapien
gtcaccctatggggatgaccgatcc

SEQ ID NO: 5916748 - DNA, 25 bp, Homo sapien
gagtgtgagccttttgttaagtaca

SEQ ID NO: 5916749 - DNA, 25 bp, Homo sapien
tccaaagctcagccaaggcaggcgg

SEQ ID NO: 5916750 - DNA, 25 bp, Homo sapien
agtgtgatcacatcatagaaggtcc

SEQ ID NO: 5916751 - DNA, 25 bp, Homo sapien
cacacagtctcgcacagcctgcagc

SEQ ID NO: 5916752 - DNA, 25 bp, Homo sapien
cagtttgtgttcctctttggccagc

SEQ ID NO: 5916753 - DNA, 25 bp, Homo sapien
tgctctgcagcagcggacaagtgca

SEQ ID NO: 5916754 - DNA, 25 bp, Homo sapien
caaacccgcgcccgttgtccaagtg

SEQ ID NO: 5916755 - DNA, 25 bp, Homo sapien
tctgctgcatgttcagagtgctttg

SEQ ID NO: 5916756 - DNA, 25 bp, Homo sapien
tggtcactacctctccgtggaggct

SEQ ID NO: 5916757 - DNA, 25 bp, Homo sapien
ctaataaggctgactgctctgcagc

SEQ ID NO: 5916758 - DNA, 25 bp, Homo sapien
tccgacacaggccatgatgtccatc

SEQ ID NO: 5916759 - DNA, 25 bp, Homo sapien
ctaggtcgtcctccaccacactgct

SEQ ID NO: 5916760 - DNA, 25 bp, Homo sapien
ttgggtgcccatctgctccgacaca

SEQ ID NO: 5916761 - DNA, 25 bp, Homo sapien
gttaagtacaaaatagtgagttaaa

SEQ ID NO: 5916762 - DNA, 25 bp, Homo sapien
ttgtgttcctctttggccagcagct

SEQ ID NO: 5916763 - DNA, 25 bp, Homo sapien
agagctctacagtctttgagagagg

SEQ ID NO: 5916764 - DNA, 25 bp, Homo sapien
cttcctagagctctacagtctttga

SEQ ID NO: 5916765 - DNA, 25 bp, Homo sapien
gaggagcagaaggtgggttgtaatt

SEQ ID NO: 5916766 - DNA, 25 bp, Homo sapien
taagtacaaaatagtgagttaaagg

SEQ ID NO: 5916767 - DNA, 25 bp, Homo sapien
cacagcctgcagcactatgcgcaac

SEQ ID NO: 5916768 - DNA, 25 bp, Homo sapien
taattgggggccagagtgtgatcac

SEQ ID NO: 5916769 - DNA, 25 bp, Homo sapien
agagtgctttgtctggtttctgctg

SEQ ID NO: 5916770 - DNA, 25 bp, Homo sapien
tccctgccgcaggtcaccctatggg

SEQ ID NO: 5916771 - DNA, 25 bp, Homo sapien
ccgtggaggctctgtgctcagtggc

SEQ ID NO: 5916772 - DNA, 25 bp, Homo sapien
agaatggaaagctcatcgtgtgagt

SEQ ID NO: 5916773 - DNA, 25 bp, Homo sapien
gccatgatgtccatcgctgtctccc

SEQ ID NO: 5916774 - DNA, 25 bp, Homo sapien
agcagctgcagtctcaggtaggtgg

SEQ ID NO: 5916775 - DNA, 25 bp, Homo sapien
gtgggttgtaattgggggccagagt

SEQ ID NO: 5916776 - DNA, 25 bp, Homo sapien
tcccaaacccgcgcccgttgtccaa

SEQ ID NO: 5916777 - DNA, 25 bp, Homo sapien
tctgtgctcagtggctaggtcgtcc

SEQ ID NO: 5916778 - DNA, 25 bp, Homo sapien
tccctatgggaaggacggagcgctg

SEQ ID NO: 5916779 - DNA, 25 bp, Homo sapien
atccctatcagaaccatgagggaga

SEQ ID NO: 5916780 - DNA, 25 bp, Homo sapien
ccaggatagaggagcagaaggtggg

SEQ ID NO: 5916781 - DNA, 25 bp, Homo sapien
gggttgtaattgggggccagagtgt

SEQ ID NO: 5916782 - DNA, 25 bp, Homo sapien
gtgctcctccttcctcatgggcagc

SEQ ID NO: 5916783 - DNA, 25 bp, Homo sapien
gactcggccatcagcaggctcagtt

SEQ ID NO: 5916784 - DNA, 25 bp, Homo sapien
atagaaggtccttgaagtggctcag

SEQ ID NO: 5916785 - DNA, 25 bp, Homo sapien
tccacacagtctcgcacagcctgca

SEQ ID NO: 5916786 - DNA, 25 bp, Homo sapien
cacatcatagaaggtccttgaagtg

SEQ ID NO: 5916787 - DNA, 25 bp, Homo sapien
aagtggctcagaggttatctctggt

SEQ ID NO: 5916788 - DNA, 25 bp, Homo sapien
ggagaccccatgctccctgccgcag

SEQ ID NO: 5916789 - DNA, 25 bp, Homo sapien
cagcggacaagtgcatagctggtca

SEQ ID NO: 5916790 - DNA, 25 bp, Homo sapien
ctgtgctcctccttcctcatgggca

SEQ ID NO: 5916791 - DNA, 25 bp, Homo sapien
tgtgtagtgtcttgacacccatcgt

SEQ ID NO: 5916792 - DNA, 25 bp, Homo sapien
cgacacaggccatgatgtccatcgc

SEQ ID NO: 5916793 - DNA, 25 bp, Homo sapien
tgggaaggacggagcgctggccact

SEQ ID NO: 5916794 - DNA, 25 bp, Homo sapien
atcgtccaaagctcagccaaggcag

SEQ ID NO: 5916795 - DNA, 25 bp, Homo sapien
aaggctggcctgctggcctggggcc

SEQ ID NO: 5916796 - DNA, 25 bp, Homo sapien
gcagcctggtcactacctctccgtg

SEQ ID NO: 5916797 - DNA, 25 bp, Homo sapien
agctctacagtctttgagagaggag

SEQ ID NO: 5916798 - DNA, 25 bp, Homo sapien
actgaattcacaggtggctaggctc

SEQ ID NO: 5916799 - DNA, 25 bp, Homo sapien
aggtcaccctatggggatgaccgat

SEQ ID NO: 5916800 - DNA, 25 bp, Homo sapien
ggggatgaccgatcccgtccgaatt

SEQ ID NO: 5916801 - DNA, 25 bp, Homo sapien
cagaaggtgggttgtaattgggggc

SEQ ID NO: 5916802 - DNA, 25 bp, Homo sapien
accttgtcatgctgcagggactcgg

SEQ ID NO: 5916803 - DNA, 25 bp, Homo sapien
gaaccatgagggagaccccatgctc

SEQ ID NO: 5916804 - DNA, 25 bp, Homo sapien
gctgcagtctcaggtaggtggacct

SEQ ID NO: 5916805 - DNA, 25 bp, Homo sapien
acatccctatcagaaccatgaggga

SEQ ID NO: 5916806 - DNA, 25 bp, Homo sapien
gcccatacatccctatcagaaccat

SEQ ID NO: 5916807 - DNA, 25 bp, Homo sapien
ccatgctccctgccgcaggtcaccc

SEQ ID NO: 5916808 - DNA, 25 bp, Homo sapien
ccgtccgaattcactgaattcacag

SEQ ID NO: 5916809 - DNA, 25 bp, Homo sapien
cctggtcactacctctccgtggagg

SEQ ID NO: 5916810 - DNA, 25 bp, Homo sapien
tgccaccttgtcatgctgcagggac

SEQ ID NO: 5916811 - DNA, 25 bp, Homo sapien
agagtgtgatcacatcatagaaggt

SEQ ID NO: 5916812 - DNA, 25 bp, Homo sapien
tgagagaggaggccccaggatagag

SEQ ID NO: 5916813 - DNA, 25 bp, Homo sapien
ctgcagcagcggacaagtgcatagc

SEQ ID NO: 5916814 - DNA, 25 bp, Homo sapien
gaattcactgaattcacaggtggct

SEQ ID NO: 5916815 - DNA, 25 bp, Homo sapien
caaaatagtgagttaaaggtccctc

SEQ ID NO: 5916816 - DNA, 25 bp, Homo sapien
aggaggccccaggatagaggagcag

SEQ ID NO: 5916817 - DNA, 25 bp, Homo sapien
ctacctctccgtggaggctctgtgc

SEQ ID NO: 5916818 - DNA, 25 bp, Homo sapien
gatcccgtccgaattcactgaattc

SEQ ID NO: 5916819 - DNA, 25 bp, Homo sapien
tcagcaggctcagtttgtgttcctc

SEQ ID NO: 5916820 - DNA, 25 bp, Homo sapien
tgggggccagagtgtgatcacatca

SEQ ID NO: 5916821 - DNA, 25 bp, Homo sapien
gacctcctgatcctgcagcactgat

SEQ ID NO: 5916822 - DNA, 25 bp, Homo sapien
gtccgaattcactgaattcacaggt

SEQ ID NO: 5916823 - DNA, 25 bp, Homo sapien
gaaggtgggttgtaattgggggcca

SEQ ID NO: 5916824 - DNA, 25 bp, Homo sapien
ccattaacaggagtgtgagcctttt

SEQ ID NO: 5916825 - DNA, 25 bp, Homo sapien
aagtgcatagctggtcattggtatc

SEQ ID NO: 5916826 - DNA, 25 bp, Homo sapien
tgtcatgctgcagggactcggccat

SEQ ID NO: 5916827 - DNA, 25 bp, Homo sapien
ccaccttgtcatgctgcagggactc

SEQ ID NO: 5916828 - DNA, 25 bp, Homo sapien
ggggccagagtgtgatcacatcata

SEQ ID NO: 5916829 - DNA, 25 bp, Homo sapien
aagctcagccaaggcaggcggtgcc

SEQ ID NO: 5916830 - DNA, 25 bp, Homo sapien
ttatctctggtctgctggatggttc

SEQ ID NO: 5916831 - DNA, 25 bp, Homo sapien
ggtaggtggacctcctgatcctgca

SEQ ID NO: 5916832 - DNA, 25 bp, Homo sapien
ctggaattggaggcccatacatccc

SEQ ID NO: 5916833 - DNA, 25 bp, Homo sapien
ggcggtgcccaccaccaactaataa

SEQ ID NO: 5916834 - DNA, 25 bp, Homo sapien
tctgctggatggttctccattaaca

SEQ ID NO: 5916835 - DNA, 25 bp, Homo sapien
tgcagctggtagagcacgggtgcca

SEQ ID NO: 5916836 - DNA, 25 bp, Homo sapien
aaggcaggcggtgcccaccaccaac

SEQ ID NO: 5916837 - DNA, 25 bp, Homo sapien
tgtagtgtcttgacacccatcgtcc

SEQ ID NO: 5916838 - DNA, 25 bp, Homo sapien
acacccatcgtccaaagctcagcca

SEQ ID NO: 5916839 - DNA, 25 bp, Homo sapien
aggtcgtcctccaccacactgctca

SEQ ID NO: 5916840 - DNA, 25 bp, Homo sapien
ggctcagtttgtgttcctctttggc

SEQ ID NO: 5916841 - DNA, 25 bp, Homo sapien
tgtgagtatttcccaaacccgcgcc

SEQ ID NO: 5916842 - DNA, 25 bp, Homo sapien
cctgctggcctggggccaatgggct

SEQ ID NO: 5916843 - DNA, 25 bp, Homo sapien
ccctatggggatgaccgatcccgtc

SEQ ID NO: 5916844 - DNA, 25 bp, Homo sapien
ggtccctccctatgggaaggacgga

SEQ ID NO: 5916845 - DNA, 25 bp, Homo sapien
acaggccatgatgtccatcgctgtc

SEQ ID NO: 5916846 - DNA, 25 bp, Homo sapien
tttctgctggaattggaggcccata

SEQ ID NO: 5916847 - DNA, 25 bp, Homo sapien
agcacgggtgccaccttgtcatgct

SEQ ID NO: 5916848 - DNA, 25 bp, Homo sapien
agcagaaggtgggttgtaattgggg

SEQ ID NO: 5916849 - DNA, 25 bp, Homo sapien
gaaagctcatcgtgtgagtatttcc

SEQ ID NO: 5916850 - DNA, 25 bp, Homo sapien
ggcaggcggtgcccaccaccaacta

SEQ ID NO: 5916851 - DNA, 25 bp, Homo sapien
atgggctctgtgtagtgtcttgaca

SEQ ID NO: 5916852 - DNA, 25 bp, Homo sapien
gttttgcgtatcgtaacgtattcga

SEQ ID NO: 5916853 - DNA, 25 bp, Homo sapien
atgttgtaactgtcgcgagaagttt

SEQ ID NO: 5916854 - DNA, 25 bp, Homo sapien
accaccatagatcgtcgcaatttaa

SEQ ID NO: 5916855 - DNA, 25 bp, Homo sapien
ctgtaatcgcgatatgtagctaaac

SEQ ID NO: 5916856 - DNA, 25 bp, Homo sapien
aaatcttctatccgctacgtcaatc

SEQ ID NO: 5916857 - DNA, 25 bp, Homo sapien
ttctcacgatacgtccgtaactata

SEQ ID NO: 5916858 - DNA, 25 bp, Homo sapien
ttagttactcgcgacgtattaactc

SEQ ID NO: 5916859 - DNA, 25 bp, Homo sapien
tcttttcgtcggatagtagaatgac

SEQ ID NO: 5916860 - DNA, 25 bp, Homo sapien
tgttacgatgcgcgattaacatcta

SEQ ID NO: 5916861 - DNA, 25 bp, Homo sapien
tcatttcatcgagcgatagtaggaa

SEQ ID NO: 5916862 - DNA, 25 bp, Homo sapien
cattatatagttcgaccgttcgagt

SEQ ID NO: 5916863 - DNA, 25 bp, Homo sapien
tctactaccattgaacgcgttgtta

SEQ ID NO: 5916864 - DNA, 25 bp, Homo sapien
tattacacggttccgcgttatgata

SEQ ID NO: 5916865 - DNA, 25 bp, Homo sapien
ttaaaacgcaaccgtagtataggac

SEQ ID NO: 5916866 - DNA, 25 bp, Homo sapien
gagattcgtataggtcgcgaaaata

SEQ ID NO: 5916867 - DNA, 25 bp, Homo sapien
catacagtacgatacggtagattgt

SEQ ID NO: 5916868 - DNA, 25 bp, Homo sapien
catgtattgtcgcgaacgatcatat

SEQ ID NO: 5916869 - DNA, 25 bp, Homo sapien
ctctttgtcgatccgttatatcatg

SEQ ID NO: 5916870 - DNA, 25 bp, Homo sapien
attatctagtattccgcgagtatgc

SEQ ID NO: 5916871 - DNA, 25 bp, Homo sapien
tagtagatcgaacgtcgtaacacta

SEQ ID NO: 5916872 - DNA, 25 bp, Homo sapien
agtaattacggcgctactactactt

SEQ ID NO: 5916873 - DNA, 25 bp, Homo sapien
taaaaacacgtcgtatagcatccga

SEQ ID NO: 5916874 - DNA, 25 bp, Homo sapien
caaaccttacctcgacgtatactta

SEQ ID NO: 5916875 - DNA, 25 bp, Homo sapien
tcaagcattacgatcgcctaagaaa

SEQ ID NO: 5916876 - DNA, 25 bp, Homo sapien
ttctgttcgcgaacaatcatacgat

SEQ ID NO: 5916877 - DNA, 25 bp, Homo sapien
taacattaatcgttacccgagagtc

SEQ ID NO: 5916878 - DNA, 25 bp, Homo sapien
actttagtatcgactagcgtagtac

SEQ ID NO: 5916879 - DNA, 25 bp, Homo sapien
atagtcctactaacgcgatttctag

SEQ ID NO: 5916880 - DNA, 25 bp, Homo sapien
ttagtagatagtcgctacgtgatgt

SEQ ID NO: 5916881 - DNA, 25 bp, Homo sapien
aaatccaccggtatatcgcattaac

SEQ ID NO: 5916882 - DNA, 25 bp, Homo sapien
gtcttatagtcacgattcgactaga

SEQ ID NO: 5916883 - DNA, 25 bp, Homo sapien
attagtgtcgtctaacgcataagga

SEQ ID NO: 5916884 - DNA, 25 bp, Homo sapien
aactaaacgatatgtcgcgaagaca

SEQ ID NO: 5916885 - DNA, 25 bp, Homo sapien
aatctgcgcgctattaatgatcaga

SEQ ID NO: 5916886 - DNA, 25 bp, Homo sapien
atactaatcacgcgcgtaaaatcct

SEQ ID NO: 5916887 - DNA, 25 bp, Homo sapien
gtctgccgtgcgttaatctatattt

SEQ ID NO: 5916888 - DNA, 25 bp, Homo sapien
gcaaagcgcgttagatagttaaatg

SEQ ID NO: 5916889 - DNA, 25 bp, Homo sapien
tgtatggttcgaatagtcgaatcga

SEQ ID NO: 5916890 - DNA, 25 bp, Homo sapien
aggatcgtattacggcgtagtttaa

SEQ ID NO: 5916891 - DNA, 25 bp, Homo sapien
atacactcgcgacagactagataaa

SEQ ID NO: 5916892 - DNA, 25 bp, Homo sapien
agctacgatcgctacgtattatatc

SEQ ID NO: 5916893 - DNA, 25 bp, Homo sapien
gttatgtagtatacgcgcactactt

SEQ ID NO: 5916894 - DNA, 25 bp, Homo sapien
acactatggtatcgcgtatttctct

SEQ ID NO: 5916895 - DNA, 25 bp, Homo sapien
ttccctctaatatgcgtcgtttcta

SEQ ID NO: 5916896 - DNA, 25 bp, Homo sapien
tgaagtcttacgatactcgctcttt

SEQ ID NO: 5916897 - DNA, 25 bp, Homo sapien
atacaagtatcgacgttgtgtgaga

SEQ ID NO: 5916898 - DNA, 25 bp, Homo sapien
agactatactattcgcgcgtatgtt

SEQ ID NO: 5916899 - DNA, 25 bp, Homo sapien
aaacagtactagagtcgcgattatc

SEQ ID NO: 5916900 - DNA, 25 bp, Homo sapien
agtacccgactgtatagcgttatta

SEQ ID NO: 5916901 - DNA, 25 bp, Homo sapien
aagtaatagaacgcgatacaggctt

SEQ ID NO: 5916902 - DNA, 25 bp, Homo sapien
aaatgttacacgacgcgtatcagat

SEQ ID NO: 5916903 - DNA, 25 bp, Homo sapien
cacattacgcgtagaacgatattgt

SEQ ID NO: 5916904 - DNA, 25 bp, Homo sapien
gtcatgttacgatacctcgtagatt

SEQ ID NO: 5916905 - DNA, 25 bp, Homo sapien
tagttttatagctgacgcgcattca

SEQ ID NO: 5916906 - DNA, 25 bp, Homo sapien
taaacaggtacgtatccgaccttta

SEQ ID NO: 5916907 - DNA, 25 bp, Homo sapien
ggtatacgcgattatacgcgtttaa

SEQ ID NO: 5916908 - DNA, 25 bp, Homo sapien
accttacgacgtaacgatatagaga

SEQ ID NO: 5916909 - DNA, 25 bp, Homo sapien
ttgtctgttctccgttacgactata

SEQ ID NO: 5916910 - DNA, 25 bp, Homo sapien
aattcgtacgcccgaatagagtata

SEQ ID NO: 5916911 - DNA, 25 bp, Homo sapien
atagatgtatacgcttcgactgtag

SEQ ID NO: 5916912 - DNA, 25 bp, Homo sapien
tatctacccgctcgattcaatgatt

SEQ ID NO: 5916913 - DNA, 25 bp, Homo sapien
atattgtaacgctagacgctatacc

SEQ ID NO: 5916914 - DNA, 25 bp, Homo sapien
aggaatctcgcgttaagacgaaata

SEQ ID NO: 5916915 - DNA, 25 bp, Homo sapien
ataatagaatctcgtacgctacctc

SEQ ID NO: 5916916 - DNA, 25 bp, Homo sapien
catagtcgcggatttagtaatcaag

SEQ ID NO: 5916917 - DNA, 25 bp, Homo sapien
caaatagttcgacgtacgacgattt

SEQ ID NO: 5916918 - DNA, 25 bp, Homo sapien
ctgttttcgctaagtacgattctag

SEQ ID NO: 5916919 - DNA, 25 bp, Homo sapien
gtttcagtactatagcgcgtgttta

SEQ ID NO: 5916920 - DNA, 25 bp, Homo sapien
gcctttatattacgtcgcgttgtta

SEQ ID NO: 5916921 - DNA, 25 bp, Homo sapien
aagcttcgagtaacgatattctcga

SEQ ID NO: 5916922 - DNA, 25 bp, Homo sapien
gcagctcggacgattatattaaaga

SEQ ID NO: 5916923 - DNA, 25 bp, Homo sapien
aaatgacgatactagacgttctcca

SEQ ID NO: 5916924 - DNA, 25 bp, Homo sapien
ctcgatatacagtatcgcgatgatt

SEQ ID NO: 5916925 - DNA, 25 bp, Homo sapien
cttattgtagttcgtacgctcacat

SEQ ID NO: 5916926 - DNA, 25 bp, Homo sapien
gaaaacaatcgcggataaccactat

SEQ ID NO: 5916927 - DNA, 25 bp, Homo sapien
gaaatatacgacgctagtagatcac

SEQ ID NO: 5916928 - DNA, 25 bp, Homo sapien
gaccagcgcgcttagtataattaat

SEQ ID NO: 5916929 - DNA, 25 bp, Homo sapien
aaaagaggagtacgcgtaacatgta

SEQ ID NO: 5916930 - DNA, 25 bp, Homo sapien
aatcttcgcgtcaacctatacgaaa

SEQ ID NO: 5916931 - DNA, 25 bp, Homo sapien
ttagtgttatacgcgtaggtttgac

SEQ ID NO: 5916932 - DNA, 25 bp, Homo sapien
ttacaaacgacgatacgaccgtaat

SEQ ID NO: 5916933 - DNA, 25 bp, Homo sapien
ttcatttaatcgaccgtcgcaatag

SEQ ID NO: 5916934 - DNA, 25 bp, Homo sapien
tataattacgccgtattcggcttct

SEQ ID NO: 5916935 - DNA, 25 bp, Homo sapien
aaaagtcgtccatagtcgatcatag

SEQ ID NO: 5916936 - DNA, 25 bp, Homo sapien
catgatatactaccgcgtaattcga

SEQ ID NO: 5916937 - DNA, 25 bp, Homo sapien
gttagttcgtatacgcgcaaaaaac

SEQ ID NO: 5916938 - DNA, 25 bp, Homo sapien
tttattcttacgtcggacggatctt

SEQ ID NO: 5916939 - DNA, 25 bp, Homo sapien
gatacccgttcgtactaatagtgtt

SEQ ID NO: 5916940 - DNA, 25 bp, Homo sapien
ctttttcttataacgcgcatgaacg

SEQ ID NO: 5916941 - DNA, 25 bp, Homo sapien
atcaattgtcgcgatctaatgcctt

SEQ ID NO: 5916942 - DNA, 25 bp, Homo sapien
tgtttacgtatactatgcgacgatg

SEQ ID NO: 5916943 - DNA, 25 bp, Homo sapien
ttctgacgttactacggattagtac

SEQ ID NO: 5916944 - DNA, 25 bp, Homo sapien
agattactacgtccgtagataagca

SEQ ID NO: 5916945 - DNA, 25 bp, Homo sapien
gatttaatatgtcgatccggactag

SEQ ID NO: 5916946 - DNA, 25 bp, Homo sapien
acactgtacggaccgtataattatg

SEQ ID NO: 5916947 - DNA, 25 bp, Homo sapien
tcttaataacgtacgatcgaaggga

SEQ ID NO: 5916948 - DNA, 25 bp, Homo sapien
tggatagttacgagcgctaaagaat

SEQ ID NO: 5916949 - DNA, 25 bp, Homo sapien
accgaaagttatcgctcgtttgtta

SEQ ID NO: 5916950 - DNA, 25 bp, Homo sapien
cgaattttacgtacacgcgataatg

SEQ ID NO: 5916951 - DNA, 25 bp, Homo sapien
caagaagcgcgtattgtaactgatt

SEQ ID NO: 5916952 - DNA, 25 bp, Homo sapien
tatcgtgtttagtcgccgatatcaa

SEQ ID NO: 5916953 - DNA, 25 bp, Homo sapien
tattatctatactcgaacgagccga

SEQ ID NO: 5916954 - DNA, 25 bp, Homo sapien
acatagcctacttacgtcgagtatt

SEQ ID NO: 5916955 - DNA, 25 bp, Homo sapien
tactgacgcgaactagttaacagaa

SEQ ID NO: 5916956 - DNA, 25 bp, Homo sapien
agcattattcgcgcgataataacac

SEQ ID NO: 5916957 - DNA, 25 bp, Homo sapien
aaaagagttagtcgtcgcagatcta

SEQ ID NO: 5916958 - DNA, 25 bp, Homo sapien
ttgatttcgcgtcttagatgaagca

SEQ ID NO: 5916959 - DNA, 25 bp, Homo sapien
tgttaaaataccctcgcgtttcgaa

SEQ ID NO: 5916960 - DNA, 25 bp, Homo sapien
aaatagagcgacgatagtagagttc

SEQ ID NO: 5916961 - DNA, 25 bp, Homo sapien
acatctcggataacgccttgtttaa

SEQ ID NO: 5916962 - DNA, 25 bp, Homo sapien
aaaatttcgtccgattaggagtgtc

SEQ ID NO: 5916963 - DNA, 25 bp, Homo sapien
ataaagtatcgcgaatcctgctatc

SEQ ID NO: 5916964 - DNA, 25 bp, Homo sapien
tattcataacgtccaatcgaaggac

SEQ ID NO: 5916965 - DNA, 25 bp, Homo sapien
taagttgtatcgcgccgatttagat

SEQ ID NO: 5916966 - DNA, 25 bp, Homo sapien
ttagatacgcgcatattacttggac

SEQ ID NO: 5916967 - DNA, 25 bp, Homo sapien
tatcaaatatagtccgcgacactct

SEQ ID NO: 5916968 - DNA, 25 bp, Homo sapien
caataagatatacgcgtcgctttca

SEQ ID NO: 5916969 - DNA, 25 bp, Homo sapien
aaactcttattcgcgagagattagg

SEQ ID NO: 5916970 - DNA, 25 bp, Homo sapien
aacacagggtaatcgtcgtacaaat

SEQ ID NO: 5916971 - DNA, 25 bp, Homo sapien
tccattctacgtcgatagtatcact

SEQ ID NO: 5916972 - DNA, 25 bp, Homo sapien
attgaacattgtatcgcgtctttgg

SEQ ID NO: 5916973 - DNA, 25 bp, Homo sapien
ggcaatgtgtaatcgacgtttacta

SEQ ID NO: 5916974 - DNA, 25 bp, Homo sapien
aatagcttcgcgtaactacagatga

SEQ ID NO: 5916975 - DNA, 25 bp, Homo sapien
gtaatcgcgcgacgtaataattgaa

SEQ ID NO: 5916976 - DNA, 25 bp, Homo sapien
ctgttgttcgcgaatcctaactaaa

SEQ ID NO: 5916977 - DNA, 25 bp, Homo sapien
aaccaataacgtatgccgcattgaa

SEQ ID NO: 5916978 - DNA, 25 bp, Homo sapien
tctatcacgagcgcgtataaagatt

SEQ ID NO: 5916979 - DNA, 25 bp, Homo sapien
tatcagagtccgacgtaaattccat

SEQ ID NO: 5916980 - DNA, 25 bp, Homo sapien
aaggtattcgacgagtaactagaag

SEQ ID NO: 5916981 - DNA, 25 bp, Homo sapien
caattaacatcgcgctaaacatgga

SEQ ID NO: 5916982 - DNA, 25 bp, Homo sapien
tgtaggccgataattcgcgtaataa

SEQ ID NO: 5916983 - DNA, 25 bp, Homo sapien
ttgtactcgaagtaacgcgtatgtt

SEQ ID NO: 5916984 - DNA, 25 bp, Homo sapien
acgctatatacgtcaatcggattca

SEQ ID NO: 5916985 - DNA, 25 bp, Homo sapien
agccgatcggaccgtaataaattta

SEQ ID NO: 5916986 - DNA, 25 bp, Homo sapien
aacattcctatacgtcgcgactata

SEQ ID NO: 5916987 - DNA, 25 bp, Homo sapien
aatccacgtaggtattacgtcagtt

SEQ ID NO: 5916988 - DNA, 25 bp, Homo sapien
tttgcgtatctagtcgcgtacttaa

SEQ ID NO: 5916989 - DNA, 25 bp, Homo sapien
tttactcggcgtccgatattactta

SEQ ID NO: 5916990 - DNA, 25 bp, Homo sapien
actcacggtattaacgcggataatt

SEQ ID NO: 5916991 - DNA, 25 bp, Homo sapien
aagtcatagcgttatcgcaccatta

SEQ ID NO: 5916992 - DNA, 25 bp, Homo sapien
aactgaagcgcgattataccctata

SEQ ID NO: 5916993 - DNA, 25 bp, Homo sapien
tagaattcgcctatacgagttcctt

SEQ ID NO: 5916994 - DNA, 25 bp, Homo sapien
caatttaacgggtcgtaaggtatca

SEQ ID NO: 5916995 - DNA, 25 bp, Homo sapien
taatgatcctacgcgactaatacga

SEQ ID NO: 5916996 - DNA, 25 bp, Homo sapien
gtgttagtcgtctagtacgtaactt

SEQ ID NO: 5916997 - DNA, 25 bp, Homo sapien
tgactacgacgttcgtacagtattt

SEQ ID NO: 5916998 - DNA, 25 bp, Homo sapien
gcaaaccgtcgaaatactaagttca

SEQ ID NO: 5916999 - DNA, 25 bp, Homo sapien
tacaaacgatagtacgaccctatca

SEQ ID NO: 5917000 - DNA, 25 bp, Homo sapien
ttctcacgcttattcgacatatcca

SEQ ID NO: 5917001 - DNA, 25 bp, Homo sapien
tttgcctacgcacgattgtttttca

SEQ ID NO: 5917002 - DNA, 25 bp, Homo sapien
attgcctatacgtccgatcgaaaat

SEQ ID NO: 5917003 - DNA, 25 bp, Homo sapien
ctagtaagtacgttacgctttgtct

SEQ ID NO: 5917004 - DNA, 25 bp, Homo sapien
tcccaaatcgaaccgcataaatttc

SEQ ID NO: 5917005 - DNA, 25 bp, Homo sapien
aaaactacgatctcgcgtatactag

SEQ ID NO: 5917006 - DNA, 25 bp, Homo sapien
tatgtgtcgttcgcgattaactaag

SEQ ID NO: 5917007 - DNA, 25 bp, Homo sapien
tatcttttaccacttcgcgttgagt

SEQ ID NO: 5917008 - DNA, 25 bp, Homo sapien
tatcctcgtccgttatacgatacta

SEQ ID NO: 5917009 - DNA, 25 bp, Homo sapien
cccaaagcgtaactacgtaatatag

SEQ ID NO: 5917010 - DNA, 25 bp, Homo sapien
attactgtatatcgtgcgagctaca

SEQ ID NO: 5917011 - DNA, 25 bp, Homo sapien
tattaaaatctatacggcgcccgat

SEQ ID NO: 5917012 - DNA, 25 bp, Homo sapien
ctcgtacgacgtaaagctattttct

SEQ ID NO: 5917013 - DNA, 25 bp, Homo sapien
agttaatagcgatcgttcgtcaagt

SEQ ID NO: 5917014 - DNA, 25 bp, Homo sapien
caatttgcgcgaagtcttaattctg

SEQ ID NO: 5917015 - DNA, 25 bp, Homo sapien
ttttaggataaccgtacgacgcaaa

SEQ ID NO: 5917016 - DNA, 25 bp, Homo sapien
ggttatcgcggataactatgctttt

SEQ ID NO: 5917017 - DNA, 25 bp, Homo sapien
ctagttgatctacgcgctattgtta

SEQ ID NO: 5917018 - DNA, 25 bp, Homo sapien
attagaacgtctgttacgcgtctaa

SEQ ID NO: 5917019 - DNA, 25 bp, Homo sapien
tccttatatcggccgtatatggtaa

SEQ ID NO: 5917020 - DNA, 25 bp, Homo sapien
aacatttagtatcaacgcgtaccct

SEQ ID NO: 5917021 - DNA, 25 bp, Homo sapien
tgtaccatacgaccgttacattcta

SEQ ID NO: 5917022 - DNA, 25 bp, Homo sapien
ccatataattacgacgcgctagaaa

SEQ ID NO: 5917023 - DNA, 25 bp, Homo sapien
gaatttgtcgacacgatactgaaca

SEQ ID NO: 5917024 - DNA, 25 bp, Homo sapien
gttattagcgtattaccgacgtagt

SEQ ID NO: 5917025 - DNA, 25 bp, Homo sapien
cttaaactaacgacgcttaccgata

SEQ ID NO: 5917026 - DNA, 25 bp, Homo sapien
aatatttatccgaacgcgtactctc

SEQ ID NO: 5917027 - DNA, 25 bp, Homo sapien
gaggatttagcgtcgactaattttc

SEQ ID NO: 5917028 - DNA, 25 bp, Homo sapien
ttttgggtatgtatcgcgcttcttt

SEQ ID NO: 5917029 - DNA, 25 bp, Homo sapien
attataccgtcgaactaagtagtgg

SEQ ID NO: 5917030 - DNA, 25 bp, Homo sapien
ttgataggtccgataacgtcattac

SEQ ID NO: 5917031 - DNA, 25 bp, Homo sapien
tataacccgcgtagtaatatcttcg

SEQ ID NO: 5917032 - DNA, 25 bp, Homo sapien
cctataatctatcgcgcgtcaaatt

SEQ ID NO: 5917033 - DNA, 25 bp, Homo sapien
actcaatatttaccgcggatatcac

SEQ ID NO: 5917034 - DNA, 25 bp, Homo sapien
agtagatcgactatgtacgcgataa

SEQ ID NO: 5917035 - DNA, 25 bp, Homo sapien
cacaaaacgcggtatcgagaaatat

SEQ ID NO: 5917036 - DNA, 25 bp, Homo sapien
acgtattattagcgactcgctagtt

SEQ ID NO: 5917037 - DNA, 25 bp, Homo sapien
aaaatttatcggtctcacgtacagc

SEQ ID NO: 5917038 - DNA, 25 bp, Homo sapien
ccaagaacgtccgttagtataatga

SEQ ID NO: 5917039 - DNA, 25 bp, Homo sapien
aattaagtctacggcgtcacaagat

SEQ ID NO: 5917040 - DNA, 25 bp, Homo sapien
acttgaatacgctcgtatcttgctt

SEQ ID NO: 5917041 - DNA, 25 bp, Homo sapien
tttatgatcccgcaacgatgataag

SEQ ID NO: 5917042 - DNA, 25 bp, Homo sapien
ataactcgtactcgattagaatggc

SEQ ID NO: 5917043 - DNA, 25 bp, Homo sapien
taattgtatcgagaacgcgtagtag

SEQ ID NO: 5917044 - DNA, 25 bp, Homo sapien
tgacttacgcgtttagctaatctag

SEQ ID NO: 5917045 - DNA, 25 bp, Homo sapien
atcacttcggtcgacaagaatagta

SEQ ID NO: 5917046 - DNA, 25 bp, Homo sapien
aagctaccgcgcgtaaaattaacta

SEQ ID NO: 5917047 - DNA, 25 bp, Homo sapien
tgaaaatgcgatccggttaatgcat

SEQ ID NO: 5917048 - DNA, 25 bp, Homo sapien
atcaaatgtcggtcgtagtactatc

SEQ ID NO: 5917049 - DNA, 25 bp, Homo sapien
acttaccagctattacgcgaactaa

SEQ ID NO: 5917050 - DNA, 25 bp, Homo sapien
catagctactatcgcgaacaagatt

SEQ ID NO: 5917051 - DNA, 25 bp, Homo sapien
cgatttcatcgtaatacgactagga

SEQ ID NO: 5917052 - DNA, 25 bp, Homo sapien
agtattgagcggtacgttagtagta

SEQ ID NO: 5917053 - DNA, 25 bp, Homo sapien
aaactagtaacgccgatacctgtat

SEQ ID NO: 5917054 - DNA, 25 bp, Homo sapien
agttttcggcgcactagtaaagata

SEQ ID NO: 5917055 - DNA, 25 bp, Homo sapien
ttttctcgcgcaatacgtatttggt

SEQ ID NO: 5917056 - DNA, 25 bp, Homo sapien
gtttactaggtcgcgtaatgtaagt

SEQ ID NO: 5917057 - DNA, 25 bp, Homo sapien
aggactcgtcctatctacgaatatt

SEQ ID NO: 5917058 - DNA, 25 bp, Homo sapien
attcagttcgctaggacgtttctat

SEQ ID NO: 5917059 - DNA, 25 bp, Homo sapien
taactgcgcgtctagtagttaatca

SEQ ID NO: 5917060 - DNA, 25 bp, Homo sapien
agaaaattacgcgcggaactctaaa

SEQ ID NO: 5917061 - DNA, 25 bp, Homo sapien
aatgtctagcgatcgcgtatttttc

SEQ ID NO: 5917062 - DNA, 25 bp, Homo sapien
taataatttcgcgcgtaaggcgaaa

SEQ ID NO: 5917063 - DNA, 25 bp, Homo sapien
ggtcactagtatcgtgcgttaatat

SEQ ID NO: 5917064 - DNA, 25 bp, Homo sapien
gtagaactactcgcgttaacgattt

SEQ ID NO: 5917065 - DNA, 25 bp, Homo sapien
ttcacacgtaacgcgttaactctaa

SEQ ID NO: 5917066 - DNA, 25 bp, Homo sapien
atatcatgcgaccgatataggtagt

SEQ ID NO: 5917067 - DNA, 25 bp, Homo sapien
agtttgtacgcgttactacattcga

SEQ ID NO: 5917068 - DNA, 25 bp, Homo sapien
tattgtcgcgtagttagtttagtcc

SEQ ID NO: 5917069 - DNA, 25 bp, Homo sapien
aattgaccgcgactagtactattca

SEQ ID NO: 5917070 - DNA, 25 bp, Homo sapien
taagcttagacgatcggaaaggatt

SEQ ID NO: 5917071 - DNA, 25 bp, Homo sapien
atctgaatcgtattggacgtgtcta

SEQ ID NO: 5917072 - DNA, 25 bp, Homo sapien
tcaaatacgtataggacgctcgtat

SEQ ID NO: 5917073 - DNA, 25 bp, Homo sapien
tactaatagttcgtacgacattcgc

SEQ ID NO: 5917074 - DNA, 25 bp, Homo sapien
aatcatatcgcggatctatcttgca

SEQ ID NO: 5917075 - DNA, 25 bp, Homo sapien
atctagtaagttcgcgtacttcgaa

SEQ ID NO: 5917076 - DNA, 25 bp, Homo sapien
acgtgacggtcgtatgatagataat

SEQ ID NO: 5917077 - DNA, 25 bp, Homo sapien
ctgataaagttacggctcgtaatgt

SEQ ID NO: 5917078 - DNA, 25 bp, Homo sapien
ataggataggatcgtacgaagtaac

SEQ ID NO: 5917079 - DNA, 25 bp, Homo sapien
aagaacgcgataggacgtattatac

SEQ ID NO: 5917080 - DNA, 25 bp, Homo sapien
tctttacgcgacctatacatttgag

SEQ ID NO: 5917081 - DNA, 25 bp, Homo sapien
aatagtcttaccgcacgattagctt

SEQ ID NO: 5917082 - DNA, 25 bp, Homo sapien
ttctttcgacccgatattattcgca

SEQ ID NO: 5917083 - DNA, 25 bp, Homo sapien
ttgttgattcctacgcgtaaacagt

SEQ ID NO: 5917084 - DNA, 25 bp, Homo sapien
acaattagacgattgcgtagcaaga

SEQ ID NO: 5917085 - DNA, 25 bp, Homo sapien
tcatataatccggcgtattggaact

SEQ ID NO: 5917086 - DNA, 25 bp, Homo sapien
taaataggtatcgcacgaatcaacg

SEQ ID NO: 5917087 - DNA, 25 bp, Homo sapien
aactcatatggtgcgacgattacat

SEQ ID NO: 5917088 - DNA, 25 bp, Homo sapien
atattaatcgtcgcttatgggcaca

SEQ ID NO: 5917089 - DNA, 25 bp, Homo sapien
taatggcgatccgttatagtctaag

SEQ ID NO: 5917090 - DNA, 25 bp, Homo sapien
tgaatatccgcgaatagtccaattc

SEQ ID NO: 5917091 - DNA, 25 bp, Homo sapien
cctcgaacgacgcttaatcaaaata

SEQ ID NO: 5917092 - DNA, 25 bp, Homo sapien
tacatctactaatcgcgcatgtatc

SEQ ID NO: 5917093 - DNA, 25 bp, Homo sapien
cgactacgcgtagatatactaactt

SEQ ID NO: 5917094 - DNA, 25 bp, Homo sapien
tcatttcatgatacggcgaccttaa

SEQ ID NO: 5917095 - DNA, 25 bp, Homo sapien
acattgacccgatcgtttaactcta

SEQ ID NO: 5917096 - DNA, 25 bp, Homo sapien
aggaaatcgatataccgtctgcaaa

SEQ ID NO: 5917097 - DNA, 25 bp, Homo sapien
attaaagtcgagcccgatagtattg

SEQ ID NO: 5917098 - DNA, 25 bp, Homo sapien
atactgtaacgatccgatagaggaa

SEQ ID NO: 5917099 - DNA, 25 bp, Homo sapien
aaaatccggtgtaacatcgataacc

SEQ ID NO: 5917100 - DNA, 25 bp, Homo sapien
atatagcgacgtcctaatattcgct

SEQ ID NO: 5917101 - DNA, 25 bp, Homo sapien
ccgtaatacgctactaacgacttaa

SEQ ID NO: 5917102 - DNA, 25 bp, Homo sapien
atcttaaccgtaccagtcgaacaaa

SEQ ID NO: 5917103 - DNA, 25 bp, Homo sapien
tgtttacgcgactatgaacaagttg

SEQ ID NO: 5917104 - DNA, 25 bp, Homo sapien
tatgtgaagtccgtcgatagttagt

SEQ ID NO: 5917105 - DNA, 25 bp, Homo sapien
acaattgataccggtcgaataagca

SEQ ID NO: 5917106 - DNA, 25 bp, Homo sapien
tgtttaccgcgttcgtaattaaagc

SEQ ID NO: 5917107 - DNA, 25 bp, Homo sapien
gtcaaacgttaaccatacgtccaaa

SEQ ID NO: 5917108 - DNA, 25 bp, Homo sapien
acataccgtatcgcggtttaataca

SEQ ID NO: 5917109 - DNA, 25 bp, Homo sapien
tagttttactcgcgtatcggtgaaa

SEQ ID NO: 5917110 - DNA, 25 bp, Homo sapien
gatgattacggaccgataaaatacg

SEQ ID NO: 5917111 - DNA, 25 bp, Homo sapien
ctaggcttacattacgcgctaaata

SEQ ID NO: 5917112 - DNA, 25 bp, Homo sapien
tacatttagcgtattcgaccccaat

SEQ ID NO: 5917113 - DNA, 25 bp, Homo sapien
tctcatgttgacgcgttaggttaaa

SEQ ID NO: 5917114 - DNA, 25 bp, Homo sapien
ttagccaatagttatcgcgtggatt

SEQ ID NO: 5917115 - DNA, 25 bp, Homo sapien
aactctcgacgaaacttagacaaac

SEQ ID NO: 5917116 - DNA, 25 bp, Homo sapien
aaagaataacgcgcgcatatttcca

SEQ ID NO: 5917117 - DNA, 25 bp, Homo sapien
actaaccgcacgataagtaagagtt

SEQ ID NO: 5917118 - DNA, 25 bp, Homo sapien
cagcataccgttttacggaagtaat

SEQ ID NO: 5917119 - DNA, 25 bp, Homo sapien
ttttcgcggcgcaagttaagaaaaa

SEQ ID NO: 5917120 - DNA, 25 bp, Homo sapien
atacaaactagtcgcgtaacgtcta

SEQ ID NO: 5917121 - DNA, 25 bp, Homo sapien
tctgtcacgttacgaatagttttgc

SEQ ID NO: 5917122 - DNA, 25 bp, Homo sapien
tataaacgtcagattaccgacttgc

SEQ ID NO: 5917123 - DNA, 25 bp, Homo sapien
agttatggttcgaacgtaggtctaa

SEQ ID NO: 5917124 - DNA, 25 bp, Homo sapien
acaataaatacgccggattatcgct

SEQ ID NO: 5917125 - DNA, 25 bp, Homo sapien
tccaatgcgtcatatcgtaattctc

SEQ ID NO: 5917126 - DNA, 25 bp, Homo sapien
gtgatagcgagtcgtaactaatcaa

SEQ ID NO: 5917127 - DNA, 25 bp, Homo sapien
tgagagacgttagatagcgacaatt

SEQ ID NO: 5917128 - DNA, 25 bp, Homo sapien
tttttggcgtagtatcgcttaccat

SEQ ID NO: 5917129 - DNA, 25 bp, Homo sapien
tataacatctatcgcgcaaagtgac

SEQ ID NO: 5917130 - DNA, 25 bp, Homo sapien
gttggctcgcgtaactatatcaaat

SEQ ID NO: 5917131 - DNA, 25 bp, Homo sapien
gataagttcgtaaaacgcgatctca

SEQ ID NO: 5917132 - DNA, 25 bp, Homo sapien
tacataataccgcgtcgtagtttca

SEQ ID NO: 5917133 - DNA, 25 bp, Homo sapien
gtacaattagtatccgcgcatctta

SEQ ID NO: 5917134 - DNA, 25 bp, Homo sapien
ttaagtcgaacggttatagacgtga

SEQ ID NO: 5917135 - DNA, 25 bp, Homo sapien
aattgtccgttcgtactaggaatag

SEQ ID NO: 5917136 - DNA, 25 bp, Homo sapien
cgctagcgcgaataggtatttatat

SEQ ID NO: 5917137 - DNA, 25 bp, Homo sapien
ctttctaagattagtcgcgcttaac

SEQ ID NO: 5917138 - DNA, 25 bp, Homo sapien
actgtccgttatatacccgatagaa

SEQ ID NO: 5917139 - DNA, 25 bp, Homo sapien
tttgatttgatgtcgcgagtaatgg

SEQ ID NO: 5917140 - DNA, 25 bp, Homo sapien
tacatgtcgcgtagtaatcaaccat

SEQ ID NO: 5917141 - DNA, 25 bp, Homo sapien
tcagtactcgcgtattgtgcattta

SEQ ID NO: 5917142 - DNA, 25 bp, Homo sapien
tttccgatattagtcgcgcttatga

SEQ ID NO: 5917143 - DNA, 25 bp, Homo sapien
cagacatacgcataagtcggtatat

SEQ ID NO: 5917144 - DNA, 25 bp, Homo sapien
ataatgtaccggtatcgcaaacatg

SEQ ID NO: 5917145 - DNA, 25 bp, Homo sapien
aataaatgcgacgttacgaggtatg

SEQ ID NO: 5917146 - DNA, 25 bp, Homo sapien
agtgactcgcgactaagtttacaat

SEQ ID NO: 5917147 - DNA, 25 bp, Homo sapien
tatgccgacgattgcgtattatagt

SEQ ID NO: 5917148 - DNA, 25 bp, Homo sapien
aagagtgatatctcgcgtaagatga

SEQ ID NO: 5917149 - DNA, 25 bp, Homo sapien
attatttccgtatacgccgtagctt

SEQ ID NO: 5917150 - DNA, 25 bp, Homo sapien
ctaatcgtataccgtcgtaattcac

SEQ ID NO: 5917151 - DNA, 25 bp, Homo sapien
tttcacctcgatcgtacgttaagat

SEQ ID NO: 5917152 - DNA, 25 bp, Homo sapien
ctcatattgcgcgatagatagagat

SEQ ID NO: 5917153 - DNA, 25 bp, Homo sapien
atcatactattcgcgatacgtgttc

SEQ ID NO: 5917154 - DNA, 25 bp, Homo sapien
tagtagcgatacgtcgttcaaaatc

SEQ ID NO: 5917155 - DNA, 25 bp, Homo sapien
attaatcgcgtacaacgttatcctg

SEQ ID NO: 5917156 - DNA, 25 bp, Homo sapien
gtacaagcgtacgatagactagtaa

SEQ ID NO: 5917157 - DNA, 25 bp, Homo sapien
aataaacgctctagtacgtcctatg

SEQ ID NO: 5917158 - DNA, 25 bp, Homo sapien
tacccacgctatattagcgaaaaag

SEQ ID NO: 5917159 - DNA, 25 bp, Homo sapien
tactttgcgcccgtattagttttgt

SEQ ID NO: 5917160 - DNA, 25 bp, Homo sapien
ttcatcatctagtccgcgaacatta

SEQ ID NO: 5917161 - DNA, 25 bp, Homo sapien
aatacacgcgacataactaaacgag

SEQ ID NO: 5917162 - DNA, 25 bp, Homo sapien
aatcagtacgcgaagttccttttac

SEQ ID NO: 5917163 - DNA, 25 bp, Homo sapien
acagaggtatagttacgcggattat

SEQ ID NO: 5917164 - DNA, 25 bp, Homo sapien
aatacaatatcgggtgcgaatctac

SEQ ID NO: 5917165 - DNA, 25 bp, Homo sapien
tttttctaaccgcgtcaagtccaaa

SEQ ID NO: 5917166 - DNA, 25 bp, Homo sapien
aaattcgacgaccgtatacgaattc

SEQ ID NO: 5917167 - DNA, 25 bp, Homo sapien
atagttttacggaatcgcgtgagtt

SEQ ID NO: 5917168 - DNA, 25 bp, Homo sapien
taatgttacgacgtaaggtaccact

SEQ ID NO: 5917169 - DNA, 25 bp, Homo sapien
tgtttcgccgattacgttatagtca

SEQ ID NO: 5917170 - DNA, 25 bp, Homo sapien
taaatccgttgccatacggttgata

SEQ ID NO: 5917171 - DNA, 25 bp, Homo sapien
tttggagtaacgataagcgcattct

SEQ ID NO: 5917172 - DNA, 25 bp, Homo sapien
cacaatatgtcgcgagatagtatgt

SEQ ID NO: 5917173 - DNA, 25 bp, Homo sapien
attagactatacgttcggtcttggt

SEQ ID NO: 5917174 - DNA, 25 bp, Homo sapien
caacagtaacgtaaaggcgttgata

SEQ ID NO: 5917175 - DNA, 25 bp, Homo sapien
gtatctcgcgtaatagactccaaat

SEQ ID NO: 5917176 - DNA, 25 bp, Homo sapien
atcctgtgtcgatccgttaaaatga

SEQ ID NO: 5917177 - DNA, 25 bp, Homo sapien
atatgtacgtatctaggcggacata

SEQ ID NO: 5917178 - DNA, 25 bp, Homo sapien
tataacaggtacgttacgcagtttg

SEQ ID NO: 5917179 - DNA, 25 bp, Homo sapien
aatcgtcatagtatcggcgatattc

SEQ ID NO: 5917180 - DNA, 25 bp, Homo sapien
cgtaaaacgcgtaactatcactatg

SEQ ID NO: 5917181 - DNA, 25 bp, Homo sapien
cagataggacgtattaacgatgttg

SEQ ID NO: 5917182 - DNA, 25 bp, Homo sapien
gatctgcgttacgcgttattaaatg

SEQ ID NO: 5917183 - DNA, 25 bp, Homo sapien
agattcttactatccgcgctagatt

SEQ ID NO: 5917184 - DNA, 25 bp, Homo sapien
aaaaagaccgcgtaaagtgtcaatc

SEQ ID NO: 5917185 - DNA, 25 bp, Homo sapien
tacaaatcgtataacgctggtatgg

SEQ ID NO: 5917186 - DNA, 25 bp, Homo sapien
tagttctgcggttacgatagcaatt

SEQ ID NO: 5917187 - DNA, 25 bp, Homo sapien
ctctaccggcttaatacgaatactt

SEQ ID NO: 5917188 - DNA, 25 bp, Homo sapien
attccataacgcgaatacgcaatag

SEQ ID NO: 5917189 - DNA, 25 bp, Homo sapien
atcatgggtcgtaatacgtaagtag

SEQ ID NO: 5917190 - DNA, 25 bp, Homo sapien
ttctagacgtcgtgcgttatactaa

SEQ ID NO: 5917191 - DNA, 25 bp, Homo sapien
caagatagtctattacgcgcataag

SEQ ID NO: 5917192 - DNA, 25 bp, Homo sapien
aaaaaagaactaatcgcgactggtg

SEQ ID NO: 5917193 - DNA, 25 bp, Homo sapien
tttgtccgtatgacgaaccaataag

SEQ ID NO: 5917194 - DNA, 25 bp, Homo sapien
aagccttcgcgcaagtataataagt

SEQ ID NO: 5917195 - DNA, 25 bp, Homo sapien
cgtttttcacgacccgtatattgta

SEQ ID NO: 5917196 - DNA, 25 bp, Homo sapien
gaaagtctaatcggcgttgtagttt

SEQ ID NO: 5917197 - DNA, 25 bp, Homo sapien
atcattgtacgtggcgtaagtattc

SEQ ID NO: 5917198 - DNA, 25 bp, Homo sapien
caaattgtacctatcgacgtcaagt

SEQ ID NO: 5917199 - DNA, 25 bp, Homo sapien
ccatatcttagttcgcgaaccaata

SEQ ID NO: 5917200 - DNA, 25 bp, Homo sapien
tatgaataattcgcgcgtactctct

SEQ ID NO: 5917201 - DNA, 25 bp, Homo sapien
tgctctacgtacgttacgagtaaaa

SEQ ID NO: 5917202 - DNA, 25 bp, Homo sapien
tgtaagcaatacggcgttagttcat

SEQ ID NO: 5917203 - DNA, 25 bp, Homo sapien
aacaagacggttatacgtcaacaca

SEQ ID NO: 5917204 - DNA, 25 bp, Homo sapien
gtatcagtacggatcgtatattgga

SEQ ID NO: 5917205 - DNA, 25 bp, Homo sapien
tagttgacgtaaggtcgtaagtttg

SEQ ID NO: 5917206 - DNA, 25 bp, Homo sapien
atattctcgcgcgtactatagagat

SEQ ID NO: 5917207 - DNA, 25 bp, Homo sapien
tactagcgcgattatagtcacactt

SEQ ID NO: 5917208 - DNA, 25 bp, Homo sapien
gtaaaacgcacgaactttatcgaac

SEQ ID NO: 5917209 - DNA, 25 bp, Homo sapien
tttcgttatcgctcgatagcttatc

SEQ ID NO: 5917210 - DNA, 25 bp, Homo sapien
attggaccgctcgttataaatcttg

SEQ ID NO: 5917211 - DNA, 25 bp, Homo sapien
gattaaatatgacgcgcgaaagatg

SEQ ID NO: 5917212 - DNA, 25 bp, Homo sapien
cagacattcgcgcgataattcaatt

SEQ ID NO: 5917213 - DNA, 25 bp, Homo sapien
aaatcaataggcgacgtaacatagc

SEQ ID NO: 5917214 - DNA, 25 bp, Homo sapien
taggtgttaacgtcgcgatttactt

SEQ ID NO: 5917215 - DNA, 25 bp, Homo sapien
aaggtccgcgaattagtgacatttt

SEQ ID NO: 5917216 - DNA, 25 bp, Homo sapien
tcttaatgcgtatcgactaaatgcc

SEQ ID NO: 5917217 - DNA, 25 bp, Homo sapien
actaatgcgtatatcgatcccctat

SEQ ID NO: 5917218 - DNA, 25 bp, Homo sapien
agtcaattataacgcgcggtgatta

SEQ ID NO: 5917219 - DNA, 25 bp, Homo sapien
taactgtacgcgatctaagtagtag

SEQ ID NO: 5917220 - DNA, 25 bp, Homo sapien
tttgtggactcgttatacgtaacga

SEQ ID NO: 5917221 - DNA, 25 bp, Homo sapien
aatgttcttatagcgcggtcacata

SEQ ID NO: 5917222 - DNA, 25 bp, Homo sapien
tactaattagatcgcgcatcagctt

SEQ ID NO: 5917223 - DNA, 25 bp, Homo sapien
aaggtgaatatgcgcgtcgtaaata

SEQ ID NO: 5917224 - DNA, 25 bp, Homo sapien
attctttatcgcgtagtacgtgaac

SEQ ID NO: 5917225 - DNA, 25 bp, Homo sapien
cttttgcttattagcgcgacttagt

SEQ ID NO: 5917226 - DNA, 25 bp, Homo sapien
atataagggtcgacgagtaagttag

SEQ ID NO: 5917227 - DNA, 25 bp, Homo sapien
attgccccgaacgtacttattatag

SEQ ID NO: 5917228 - DNA, 25 bp, Homo sapien
tttatatatgtacgagcggactcga

SEQ ID NO: 5917229 - DNA, 25 bp, Homo sapien
ttataaaccgagtagatcggatacg

SEQ ID NO: 5917230 - DNA, 25 bp, Homo sapien
ccattagtaacgcgacgtttgataa

SEQ ID NO: 5917231 - DNA, 25 bp, Homo sapien
agatctgcgacctttcgtactaata

SEQ ID NO: 5917232 - DNA, 25 bp, Homo sapien
ttagtatcgacgaaccacgaataag

SEQ ID NO: 5917233 - DNA, 25 bp, Homo sapien
gagaatacgcacgatactaaactca

SEQ ID NO: 5917234 - DNA, 25 bp, Homo sapien
ttatcttaaggtcggcgtatgacat

SEQ ID NO: 5917235 - DNA, 25 bp, Homo sapien
accatcatacgcaatcgtcttaagt

SEQ ID NO: 5917236 - DNA, 25 bp, Homo sapien
tatatccactagtcgtacgaaaggt

SEQ ID NO: 5917237 - DNA, 25 bp, Homo sapien
gagagacgcgctagtatataagttt

SEQ ID NO: 5917238 - DNA, 25 bp, Homo sapien
ttaacggggtcgtatatcgaaatgt

SEQ ID NO: 5917239 - DNA, 25 bp, Homo sapien
cattattacggtcggtacagattac

SEQ ID NO: 5917240 - DNA, 25 bp, Homo sapien
ctagttacctatcgcgttgctttta

SEQ ID NO: 5917241 - DNA, 25 bp, Homo sapien
agaatgcgtaacgttacggaatctt

SEQ ID NO: 5917242 - DNA, 25 bp, Homo sapien
tctacatcgcgaatatacgtgtgat

SEQ ID NO: 5917243 - DNA, 25 bp, Homo sapien
agttagtgtcggttagacgttatac

SEQ ID NO: 5917244 - DNA, 25 bp, Homo sapien
aatgcctattacgcctcgtgttatt

SEQ ID NO: 5917245 - DNA, 25 bp, Homo sapien
gttagaatattcgatcgcgttcgat

SEQ ID NO: 5917246 - DNA, 25 bp, Homo sapien
aaatcaattctttagcgcggccttt

SEQ ID NO: 5917247 - DNA, 25 bp, Homo sapien
caacagcgcgtaactcgaaaaaaat

SEQ ID NO: 5917248 - DNA, 25 bp, Homo sapien
caatgaagcttcggtcgtaattcaa

SEQ ID NO: 5917249 - DNA, 25 bp, Homo sapien
ataaaaggcgttagtcgaagcatca

SEQ ID NO: 5917250 - DNA, 25 bp, Homo sapien
tgcgctttatgtccgatcgtaataa

SEQ ID NO: 5917251 - DNA, 25 bp, Homo sapien
tagatttagagcgttacgccatcta

SEQ ID NO: 5917252 - DNA, 25 bp, Homo sapien
ttcaatgtataagcgcgactattgc

SEQ ID NO: 5917253 - DNA, 25 bp, Homo sapien
gaaacacgtattacgacctcacaat

SEQ ID NO: 5917254 - DNA, 25 bp, Homo sapien
ttactctcgcgcgacataatagtat

SEQ ID NO: 5917255 - DNA, 25 bp, Homo sapien
cgaataagattagtcgcgaacattc

SEQ ID NO: 5917256 - DNA, 25 bp, Homo sapien
ctctaagtacgatccgctataacaa

SEQ ID NO: 5917257 - DNA, 25 bp, Homo sapien
gaaaccacgattgatacgctgtaat

SEQ ID NO: 5917258 - DNA, 25 bp, Homo sapien
gaatatcgccgaacgtttatcagtt

SEQ ID NO: 5917259 - DNA, 25 bp, Homo sapien
ctgtgttagtacgagcgattgattt

SEQ ID NO: 5917260 - DNA, 25 bp, Homo sapien
tgaagactttacgctacgactcaaa

SEQ ID NO: 5917261 - DNA, 25 bp, Homo sapien
agcaaacgtactataacggctctaa

SEQ ID NO: 5917262 - DNA, 25 bp, Homo sapien
catcttcgcgcttaatgtacaaaga

SEQ ID NO: 5917263 - DNA, 25 bp, Homo sapien
atttacaacgtacgatcgaccatga

SEQ ID NO: 5917264 - DNA, 25 bp, Homo sapien
taggcatgcgcgataatagtatact

SEQ ID NO: 5917265 - DNA, 25 bp, Homo sapien
tgagtaggacgcgttatatgaatca

SEQ ID NO: 5917266 - DNA, 25 bp, Homo sapien
tttttccggcgtaatactatacctg

SEQ ID NO: 5917267 - DNA, 25 bp, Homo sapien
tattggcgcgtcgttattagaagaa

SEQ ID NO: 5917268 - DNA, 25 bp, Homo sapien
gaccatattaacgattcggtgttct

SEQ ID NO: 5917269 - DNA, 25 bp, Homo sapien
gcattattcatacgacgcagtactt

SEQ ID NO: 5917270 - DNA, 25 bp, Homo sapien
acataatcgcacccgtttatgtcta

SEQ ID NO: 5917271 - DNA, 25 bp, Homo sapien
atttcttctaccgttgcgaaccaaa

SEQ ID NO: 5917272 - DNA, 25 bp, Homo sapien
attgaacacgtaaggcgtaccttta

SEQ ID NO: 5917273 - DNA, 25 bp, Homo sapien
gtaataaccgcgatctaagtatctc

SEQ ID NO: 5917274 - DNA, 25 bp, Homo sapien
tttagcacgtaatacgcggtttatc

SEQ ID NO: 5917275 - DNA, 25 bp, Homo sapien
taatccttatatcgtcgcgtgaatg

SEQ ID NO: 5917276 - DNA, 25 bp, Homo sapien
acgtatcgttaacggtacggatata

SEQ ID NO: 5917277 - DNA, 25 bp, Homo sapien
acgaagacgaataacgcgtatacat

SEQ ID NO: 5917278 - DNA, 25 bp, Homo sapien
tatgcttatctcgcgattagtgatg

SEQ ID NO: 5917279 - DNA, 25 bp, Homo sapien
atagtaatagttcgcgaggtacgat

SEQ ID NO: 5917280 - DNA, 25 bp, Homo sapien
tgtttggtatcgggcgttagttatt

SEQ ID NO: 5917281 - DNA, 25 bp, Homo sapien
agaagagattcgcgatagttttgtg

SEQ ID NO: 5917282 - DNA, 25 bp, Homo sapien
tcaagatcgattaacgacgccttaa

SEQ ID NO: 5917283 - DNA, 25 bp, Homo sapien
tataagctcgcgcgagtatctattt

SEQ ID NO: 5917284 - DNA, 25 bp, Homo sapien
taagtacggcgcaagtatatgtatc

SEQ ID NO: 5917285 - DNA, 25 bp, Homo sapien
aaagattgcgcgacctataaaggta

SEQ ID NO: 5917286 - DNA, 25 bp, Homo sapien
gattctgattgcgcccataatgtaa

SEQ ID NO: 5917287 - DNA, 25 bp, Homo sapien
ctaatcccggtacgcataataagta

SEQ ID NO: 5917288 - DNA, 25 bp, Homo sapien
taattatccgttccgacgtgactat

SEQ ID NO: 5917289 - DNA, 25 bp, Homo sapien
taaaacacgctagtgcgaataagag

SEQ ID NO: 5917290 - DNA, 25 bp, Homo sapien
gataaagtatcgtaacggctctcta

SEQ ID NO: 5917291 - DNA, 25 bp, Homo sapien
ttgatctagttgcgcgttgtaaaca

SEQ ID NO: 5917292 - DNA, 25 bp, Homo sapien
aataagaacgcgtactcgtcaaaac

SEQ ID NO: 5917293 - DNA, 25 bp, Homo sapien
cttctgcgttcggatctaaaaagat

SEQ ID NO: 5917294 - DNA, 25 bp, Homo sapien
atcatttcgcgaacgtaaacagaag

SEQ ID NO: 5917295 - DNA, 25 bp, Homo sapien
cttcgataacgcccgatagaaaatt

SEQ ID NO: 5917296 - DNA, 25 bp, Homo sapien
tacataacgcgactagttagtctgt

SEQ ID NO: 5917297 - DNA, 25 bp, Homo sapien
tataaaaatcgcgccagatcttggt

SEQ ID NO: 5917298 - DNA, 25 bp, Homo sapien
gacataatattcgacggacagatag

SEQ ID NO: 5917299 - DNA, 25 bp, Homo sapien
ttgtcaatcgcgaggtatctgaaaa

SEQ ID NO: 5917300 - DNA, 25 bp, Homo sapien
atgtgagtaacgatcgacaaacagt

SEQ ID NO: 5917301 - DNA, 25 bp, Homo sapien
gaaaaacgtaatcgacgtaatcgga

SEQ ID NO: 5917302 - DNA, 25 bp, Homo sapien
gtatcttatatgctcgcggaaaagt

SEQ ID NO: 5917303 - DNA, 25 bp, Homo sapien
tgatttttatcgtggtacgaatccc

SEQ ID NO: 5917304 - DNA, 25 bp, Homo sapien
actcatctacgggacgtaattcata

SEQ ID NO: 5917305 - DNA, 25 bp, Homo sapien
attgagatacgcgacttcgatatag

SEQ ID NO: 5917306 - DNA, 25 bp, Homo sapien
gtatctcgttatcgacgctgtataa

SEQ ID NO: 5917307 - DNA, 25 bp, Homo sapien
ttggcctagtataatcgcgacttta

SEQ ID NO: 5917308 - DNA, 25 bp, Homo sapien
attagtcgccgttataaccaccaaa

SEQ ID NO: 5917309 - DNA, 25 bp, Homo sapien
tttctttacgttacgtcgcaaggaa

SEQ ID NO: 5917310 - DNA, 25 bp, Homo sapien
catacttacgattagcgcgagaata

SEQ ID NO: 5917311 - DNA, 25 bp, Homo sapien
ttgatctagtaccgcgcttttacta

SEQ ID NO: 5917312 - DNA, 25 bp, Homo sapien
agtaaagcgttattgcgaacttcct

SEQ ID NO: 5917313 - DNA, 25 bp, Homo sapien
gatctcctatcgttcgctaaatcaa

SEQ ID NO: 5917314 - DNA, 25 bp, Homo sapien
atctacatgcgacgcagtacaatta

SEQ ID NO: 5917315 - DNA, 25 bp, Homo sapien
tcaagtctcgcgaataggtttagat

SEQ ID NO: 5917316 - DNA, 25 bp, Homo sapien
gatattcagtataacgcgcgtgttt

SEQ ID NO: 5917317 - DNA, 25 bp, Homo sapien
ataactcgatattaggcgtagagca

SEQ ID NO: 5917318 - DNA, 25 bp, Homo sapien
ctgaaatcgcgcacgattaaaaatg

SEQ ID NO: 5917319 - DNA, 25 bp, Homo sapien
ttggatatgcgcgtactaacactat

SEQ ID NO: 5917320 - DNA, 25 bp, Homo sapien
taaaagcaacgcgataggtaactag

SEQ ID NO: 5917321 - DNA, 25 bp, Homo sapien
attctttagcgctcgtaactatcca

SEQ ID NO: 5917322 - DNA, 25 bp, Homo sapien
aaatatagattaacgcacggcagac

SEQ ID NO: 5917323 - DNA, 25 bp, Homo sapien
acattacgagccgtaactttatcag

SEQ ID NO: 5917324 - DNA, 25 bp, Homo sapien
ttttactcgtaacgtacgtagagca

SEQ ID NO: 5917325 - DNA, 25 bp, Homo sapien
catcgtcgcatagtatacgtaaaca

SEQ ID NO: 5917326 - DNA, 25 bp, Homo sapien
catctttcgcgcgtcatatttaatc

SEQ ID NO: 5917327 - DNA, 25 bp, Homo sapien
tcctagtcgtattacgatgaaatcg

SEQ ID NO: 5917328 - DNA, 25 bp, Homo sapien
gaaatttatgcggttcgatttggga

SEQ ID NO: 5917329 - DNA, 25 bp, Homo sapien
gaatatcgccgatactatgacgatt

SEQ ID NO: 5917330 - DNA, 25 bp, Homo sapien
ttatcaaacgtcgcgttactaatgg

SEQ ID NO: 5917331 - DNA, 25 bp, Homo sapien
aaacacgcgcgttatactgaatatc

SEQ ID NO: 5917332 - DNA, 25 bp, Homo sapien
gataagctatcgagcgataacgaaa

SEQ ID NO: 5917333 - DNA, 25 bp, Homo sapien
tgatagggtcgtactatcgtttgta

SEQ ID NO: 5917334 - DNA, 25 bp, Homo sapien
ttcgaaacgcgagggtattttaaca

SEQ ID NO: 5917335 - DNA, 25 bp, Homo sapien
gtgatctactagcgtcgtatatttc

SEQ ID NO: 5917336 - DNA, 25 bp, Homo sapien
tttagagttccgcgcgtaattttct

SEQ ID NO: 5917337 - DNA, 25 bp, Homo sapien
tatcggtaagcgtcgttagtttaag

SEQ ID NO: 5917338 - DNA, 25 bp, Homo sapien
actaagtcgcgctaataagcaaaag

SEQ ID NO: 5917339 - DNA, 25 bp, Homo sapien
aggattttacgcgcgtgattagtat

SEQ ID NO: 5917340 - DNA, 25 bp, Homo sapien
atgtgagcgtacgaactacaataag

SEQ ID NO: 5917341 - DNA, 25 bp, Homo sapien
tagtatcgtataacggacgaggata

SEQ ID NO: 5917342 - DNA, 25 bp, Homo sapien
catgtttgcgataccggtacattat

SEQ ID NO: 5917343 - DNA, 25 bp, Homo sapien
agagaaatacgcgataccatagtgt

SEQ ID NO: 5917344 - DNA, 25 bp, Homo sapien
atagtggttatccgcgattgttttc

SEQ ID NO: 5917345 - DNA, 25 bp, Homo sapien
ccataccagcgttatacgatttgta

SEQ ID NO: 5917346 - DNA, 25 bp, Homo sapien
aagcaagatacgagcgtattcaagt

SEQ ID NO: 5917347 - DNA, 25 bp, Homo sapien
tccaatatacgatccgtactgatac

SEQ ID NO: 5917348 - DNA, 25 bp, Homo sapien
atggttgattactacgcgacatgta

SEQ ID NO: 5917349 - DNA, 25 bp, Homo sapien
tatagtcgtaacggagaacagacaa

SEQ ID NO: 5917350 - DNA, 25 bp, Homo sapien
gttacttcgtacgatcctatcctat

SEQ ID NO: 5917351 - DNA, 25 bp, Homo sapien
tattctcgcgctaatcgtaagtatg

SEQ ID NO: 5917352 - DNA, 25 bp, Homo sapien
ttatcgcgtacatagtcgatctact

SEQ ID NO: 5917353 - DNA, 25 bp, Homo sapien
attgtaaacttagtcgcgagtcact

SEQ ID NO: 5917354 - DNA, 25 bp, Homo sapien
tgataccttacgacccgttaaattg

SEQ ID NO: 5917355 - DNA, 25 bp, Homo sapien
aatcatcgcgatactgtatatcgag

SEQ ID NO: 5917356 - DNA, 25 bp, Homo sapien
agtggtaccttacgtcgtaacatta

SEQ ID NO: 5917357 - DNA, 25 bp, Homo sapien
ttaccatatacggccgatataagga

SEQ ID NO: 5917358 - DNA, 25 bp, Homo sapien
agaatgcgcttatcgttactccaaa

SEQ ID NO: 5917359 - DNA, 25 bp, Homo sapien
atggtaagcgatactacgccaaaaa

SEQ ID NO: 5917360 - DNA, 25 bp, Homo sapien
gataaaccgcgtattacgtgctaaa

SEQ ID NO: 5917361 - DNA, 25 bp, Homo sapien
aattgctatcgtaaccgcagaacta

SEQ ID NO: 5917362 - DNA, 25 bp, Homo sapien
gtactacgctagtcgatactaaagt

SEQ ID NO: 5917363 - DNA, 25 bp, Homo sapien
taaacacgcgctatagtactgaaac

SEQ ID NO: 5917364 - DNA, 25 bp, Homo sapien
gcaagtcggtaatctgacgtttata

SEQ ID NO: 5917365 - DNA, 25 bp, Homo sapien
tgtattaaaccgcgatacggtatgt

SEQ ID NO: 5917366 - DNA, 25 bp, Homo sapien
atttggagtctattacgcgagatac

SEQ ID NO: 5917367 - DNA, 25 bp, Homo sapien
ttctgttaactagttcgcgtcagta

SEQ ID NO: 5917368 - DNA, 25 bp, Homo sapien
taaagtcgcgattatactaggccaa

SEQ ID NO: 5917369 - DNA, 25 bp, Homo sapien
gttaatgcgatataccggtggattt

SEQ ID NO: 5917370 - DNA, 25 bp, Homo sapien
aaaagcatagttatccgcgataacc

SEQ ID NO: 5917371 - DNA, 25 bp, Homo sapien
taatggtgcgataacgctatgactt

SEQ ID NO: 5917372 - DNA, 25 bp, Homo sapien
tgagatcgcgttttacgaacttatc

SEQ ID NO: 5917373 - DNA, 25 bp, Homo sapien
aactcttacttatcgtgcggttagt

SEQ ID NO: 5917374 - DNA, 25 bp, Homo sapien
agaacaccgaatcgttaatatggtc

SEQ ID NO: 5917375 - DNA, 25 bp, Homo sapien
actcaacgcgaagtggtaaaagata

SEQ ID NO: 5917376 - DNA, 25 bp, Homo sapien
tgcaagatagatccgcgatatgatt

SEQ ID NO: 5917377 - DNA, 25 bp, Homo sapien
aaaatgtcactaattcgcggacctt

SEQ ID NO: 5917378 - DNA, 25 bp, Homo sapien
ttcttctaataacgacgcgccaata

SEQ ID NO: 5917379 - DNA, 25 bp, Homo sapien
atcgtatgattgttcgcgaacagaa

SEQ ID NO: 5917380 - DNA, 25 bp, Homo sapien
ctactacttagatcgcgtacagtta

SEQ ID NO: 5917381 - DNA, 25 bp, Homo sapien
ttgatatcggcgactaaacacgata

SEQ ID NO: 5917382 - DNA, 25 bp, Homo sapien
agttccaatacgccggattatatga

SEQ ID NO: 5917383 - DNA, 25 bp, Homo sapien
attacggtcgtatcgtcgtttgtaa

SEQ ID NO: 5917384 - DNA, 25 bp, Homo sapien
aaggcattagatcgcgacaattgat

SEQ ID NO: 5917385 - DNA, 25 bp, Homo sapien
caaacttacgaccttacgtcaacta

SEQ ID NO: 5917386 - DNA, 25 bp, Homo sapien
tcgtattagtcgcgtaggatcatta

SEQ ID NO: 5917387 - DNA, 25 bp, Homo sapien
atctaaatcggcgcgatacaactta

SEQ ID NO: 5917388 - DNA, 25 bp, Homo sapien
actaactatcgacggacttcacata

SEQ ID NO: 5917389 - DNA, 25 bp, Homo sapien
taacaacgcgttcaatggtagtaga

SEQ ID NO: 5917390 - DNA, 25 bp, Homo sapien
ttagacgcgtaacagacgttctaat

SEQ ID NO: 5917391 - DNA, 25 bp, Homo sapien
atctctatctatcgcgcaatatgag

SEQ ID NO: 5917392 - DNA, 25 bp, Homo sapien
ctttttcgctaatatagcgtgggta

SEQ ID NO: 5917393 - DNA, 25 bp, Homo sapien
tacctttataggtcgcgcaatcttt

SEQ ID NO: 5917394 - DNA, 25 bp, Homo sapien
gaaaattagtcgacgctaaatcctc

SEQ ID NO: 5917395 - DNA, 25 bp, Homo sapien
tttatctagtctgtcgcgagtgtat

SEQ ID NO: 5917396 - DNA, 25 bp, Homo sapien
ctagtatacgcgagatcgtagtttt

SEQ ID NO: 5917397 - DNA, 25 bp, Homo sapien
ctattgcgacggtcgattaaatgaa

SEQ ID NO: 5917398 - DNA, 25 bp, Homo sapien
accaagaccgaacgtatagtctaat

SEQ ID NO: 5917399 - DNA, 25 bp, Homo sapien
aagtagtagtagcgccgtaattact

SEQ ID NO: 5917400 - DNA, 25 bp, Homo sapien
catttaactatctaacgcgctttgc

SEQ ID NO: 5917401 - DNA, 25 bp, Homo sapien
gcgaatgtcgtacgaactattagta

SEQ ID NO: 5917402 - DNA, 25 bp, Homo sapien
ttcgaagtacgcgaacttactagat

SEQ ID NO: 5917403 - DNA, 25 bp, Homo sapien
catttttaatcgtgcgcgatttcag

SEQ ID NO: 5917404 - DNA, 25 bp, Homo sapien
acctttcgtacgactagtggatata

SEQ ID NO: 5917405 - DNA, 25 bp, Homo sapien
tttagttaggattcgcgaacaacag

SEQ ID NO: 5917406 - DNA, 25 bp, Homo sapien
gtaaaaggaacttcgcgtactgatt

SEQ ID NO: 5917407 - DNA, 25 bp, Homo sapien
tcgaatacgttacgatacgcaaaac

SEQ ID NO: 5917408 - DNA, 25 bp, Homo sapien
accaaatacgtattgcgcgagaaaa

SEQ ID NO: 5917409 - DNA, 25 bp, Homo sapien
aagcctgtatcgcgttctattactt

SEQ ID NO: 5917410 - DNA, 25 bp, Homo sapien
taaatttattacggtccgatcggct

SEQ ID NO: 5917411 - DNA, 25 bp, Homo sapien
tgaaactacgacgcggtattatgta

SEQ ID NO: 5917412 - DNA, 25 bp, Homo sapien
tttgcagacggtatatcgatttcct

SEQ ID NO: 5917413 - DNA, 25 bp, Homo sapien
catcactaatcgcgagataagcata

SEQ ID NO: 5917414 - DNA, 25 bp, Homo sapien
tgaaagcgacgcgtatatcttattg

SEQ ID NO: 5917415 - DNA, 25 bp, Homo sapien
gagaattacgatatgacgcattgga

SEQ ID NO: 5917416 - DNA, 25 bp, Homo sapien
gaggtagcgtacgagattctattat

SEQ ID NO: 5917417 - DNA, 25 bp, Homo sapien
aattttctatcgggcgttatcgaag

SEQ ID NO: 5917418 - DNA, 25 bp, Homo sapien
aagttagtatatctacgcgtagtcg

SEQ ID NO: 5917419 - DNA, 25 bp, Homo sapien
aaatactgtacgaacgtcgtagtca

SEQ ID NO: 5917420 - DNA, 25 bp, Homo sapien
gtaatgacgttatcggacctatcaa

SEQ ID NO: 5917421 - DNA, 25 bp, Homo sapien
aagctgatgcgcgatctaattagta

SEQ ID NO: 5917422 - DNA, 25 bp, Homo sapien
agtatactattatcgcgcatgccta

SEQ ID NO: 5917423 - DNA, 25 bp, Homo sapien
tgttcagtatcgtgtcgacaaattc

SEQ ID NO: 5917424 - DNA, 25 bp, Homo sapien
ttagtataacgcacgacgtctagaa

SEQ ID NO: 5917425 - DNA, 25 bp, Homo sapien
gtgttattatcgcgcgaataatgct

SEQ ID NO: 5917426 - DNA, 25 bp, Homo sapien
gtcattctactatccgacgaaaaga

SEQ ID NO: 5917427 - DNA, 25 bp, Homo sapien
ctatattacgtagttacgctttggg

SEQ ID NO: 5917428 - DNA, 25 bp, Homo sapien
tattttgattaagcgtcgttcgagg

SEQ ID NO: 5917429 - DNA, 25 bp, Homo sapien
ttaaacaaggcgttatccgagatgt

SEQ ID NO: 5917430 - DNA, 25 bp, Homo sapien
tgaatccgattgacgtatatagcgt

SEQ ID NO: 5917431 - DNA, 25 bp, Homo sapien
tttcaccgatacgcgagtaaaacta

SEQ ID NO: 5917432 - DNA, 25 bp, Homo sapien
tttttcttaacttgcgccgcgaaaa

SEQ ID NO: 5917433 - DNA, 25 bp, Homo sapien
aatcttgttcgcgatagtagctatg

SEQ ID NO: 5917434 - DNA, 25 bp, Homo sapien
ctagtccggatcgacatattaaatc

SEQ ID NO: 5917435 - DNA, 25 bp, Homo sapien
gttaagcgcgactaatcttagaaag

SEQ ID NO: 5917436 - DNA, 25 bp, Homo sapien
caatactatcgggctcgactttaat

SEQ ID NO: 5917437 - DNA, 25 bp, Homo sapien
gaactctactatcgtcgctctattt

SEQ ID NO: 5917438 - DNA, 25 bp, Homo sapien
tcacgtctataaccgttcgacttaa

SEQ ID NO: 5917439 - DNA, 25 bp, Homo sapien
tagatgttaatcgcgcatcgtaaca

SEQ ID NO: 5917440 - DNA, 25 bp, Homo sapien
tatgaattacgtcccgtagatgagt

SEQ ID NO: 5917441 - DNA, 25 bp, Homo sapien
tggatatgtcgaataagcgtgagaa

SEQ ID NO: 5917442 - DNA, 25 bp, Homo sapien
cgtatccgatctactcggtttataa

SEQ ID NO: 5917443 - DNA, 25 bp, Homo sapien
aagctaatcgtgcggtaagactatt

SEQ ID NO: 5917444 - DNA, 25 bp, Homo sapien
cttatgcgcgtaatagactatcttg

SEQ ID NO: 5917445 - DNA, 25 bp, Homo sapien
ggtatagcgtctagcgttacaatat

SEQ ID NO: 5917446 - DNA, 25 bp, Homo sapien
tatagtcgcgacgtataggaatgtt

SEQ ID NO: 5917447 - DNA, 25 bp, Homo sapien
ttaaacgcgtataatcgcgtatacc

SEQ ID NO: 5917448 - DNA, 25 bp, Homo sapien
tttgttcgactggtacggttaagat

SEQ ID NO: 5917449 - DNA, 25 bp, Homo sapien
ggttatcgatgttacaccggatttt

SEQ ID NO: 5917450 - DNA, 25 bp, Homo sapien
aacactattagtacgaacgggtatc

SEQ ID NO: 5917451 - DNA, 25 bp, Homo sapien
cttctagttactcgtcgaatacctt

SEQ ID NO: 5917452 - DNA, 25 bp, Homo sapien
aaatcgtcgtacgtcgaactatttg

SEQ ID NO: 5917453 - DNA, 25 bp, Homo sapien
gggattcgtaccacgataaaaatca

SEQ ID NO: 5917454 - DNA, 25 bp, Homo sapien
cttagttaatcgcgaacgacacata

SEQ ID NO: 5917455 - DNA, 25 bp, Homo sapien
tacttattatgcgtaccgggattag

SEQ ID NO: 5917456 - DNA, 25 bp, Homo sapien
catttaataacgcgtaacgcagatc

SEQ ID NO: 5917457 - DNA, 25 bp, Homo sapien
aatcattgaatcgagcgggtagata

SEQ ID NO: 5917458 - DNA, 25 bp, Homo sapien
ttaagtcgttagtagcgtattacgg

SEQ ID NO: 5917459 - DNA, 25 bp, Homo sapien
ttattacgcgaattatcggcctaca

SEQ ID NO: 5917460 - DNA, 25 bp, Homo sapien
tatactctattcgggcgtacgaatt

SEQ ID NO: 5917461 - DNA, 25 bp, Homo sapien
aattgtcgctatctaacgtctctca

SEQ ID NO: 5917462 - DNA, 25 bp, Homo sapien
tttggtggttataacggcgactaat

SEQ ID NO: 5917463 - DNA, 25 bp, Homo sapien
gatataatacgtagcgatcgtagct

SEQ ID NO: 5917464 - DNA, 25 bp, Homo sapien
attggggtcgaatacgctaaatgta

SEQ ID NO: 5917465 - DNA, 25 bp, Homo sapien
tatttacgacgcgcatattcacctt

SEQ ID NO: 5917466 - DNA, 25 bp, Homo sapien
aatctagcgcggatagtaagaatct

SEQ ID NO: 5917467 - DNA, 25 bp, Homo sapien
gtgaattacgacggtatacgattag

SEQ ID NO: 5917468 - DNA, 25 bp, Homo sapien
taaatgcacaatacgcgagtactga

SEQ ID NO: 5917469 - DNA, 25 bp, Homo sapien
cttatcatcgttgcgggatcataaa

SEQ ID NO: 5917470 - DNA, 25 bp, Homo sapien
tatcaacgcctttacgttactgttg

SEQ ID NO: 5917471 - DNA, 25 bp, Homo sapien
tagtgttacgacgttcgatctacta

SEQ ID NO: 5917472 - DNA, 25 bp, Homo sapien
ctagaaatcgcgttagtaggactat

SEQ ID NO: 5917473 - DNA, 25 bp, Homo sapien
atcacacgtatattcgcgatgtaga

SEQ ID NO: 5917474 - DNA, 25 bp, Homo sapien
actacctatatcggtcgcatgatat

SEQ ID NO: 5917475 - DNA, 25 bp, Homo sapien
tagaaacgacgcatattagagggaa

SEQ ID NO: 5917476 - DNA, 25 bp, Homo sapien
tcgattcgactattcgaaccataca

SEQ ID NO: 5917477 - DNA, 25 bp, Homo sapien
tccatgtttagcgcgatgttaattg

SEQ ID NO: 5917478 - DNA, 25 bp, Homo sapien
taagatgcgcggatactaattgtac

SEQ ID NO: 5917479 - DNA, 25 bp, Homo sapien
ttactagtctatcgtacgcttgtac

SEQ ID NO: 5917480 - DNA, 25 bp, Homo sapien
atataaatacctattcgcgctagcg

SEQ ID NO: 5917481 - DNA, 25 bp, Homo sapien
agaagccgaatacggcgtaattata

SEQ ID NO: 5917482 - DNA, 25 bp, Homo sapien
tatctttactagtgcgccgaaaact

SEQ ID NO: 5917483 - DNA, 25 bp, Homo sapien
tgtttacaacgcgcaactagatcaa

SEQ ID NO: 5917484 - DNA, 25 bp, Homo sapien
tacatgttacgcgtactcctctttt

SEQ ID NO: 5917485 - DNA, 25 bp, Homo sapien
tagacataaacgggtgcgattatgt

SEQ ID NO: 5917486 - DNA, 25 bp, Homo sapien
cttagactataacggatcgccatta

SEQ ID NO: 5917487 - DNA, 25 bp, Homo sapien
ttgattagttacgactcgctatcac

SEQ ID NO: 5917488 - DNA, 25 bp, Homo sapien
tatgtccgcctagatacgtacatat

SEQ ID NO: 5917489 - DNA, 25 bp, Homo sapien
ttaagtacgcgactagatacgcaaa

SEQ ID NO: 5917490 - DNA, 25 bp, Homo sapien
caagatttataacgagcggtccaat

SEQ ID NO: 5917491 - DNA, 25 bp, Homo sapien
taatcaccgcgcgttataattgact

SEQ ID NO: 5917492 - DNA, 25 bp, Homo sapien
atttgatatagttacgcgagccaac

SEQ ID NO: 5917493 - DNA, 25 bp, Homo sapien
gttttttgcgcgtatacgaactaac

SEQ ID NO: 5917494 - DNA, 25 bp, Homo sapien
gattttgaacgacgtatcgctacta

SEQ ID NO: 5917495 - DNA, 25 bp, Homo sapien
ccaaagacgcgatacaatgttcaat

SEQ ID NO: 5917496 - DNA, 25 bp, Homo sapien
acttaagacgattgcgtatgatggt

SEQ ID NO: 5917497 - DNA, 25 bp, Homo sapien
aacatacgcgttacttcgagtacaa

SEQ ID NO: 5917498 - DNA, 25 bp, Homo sapien
aagattccgtaacgttacgcattct

SEQ ID NO: 5917499 - DNA, 25 bp, Homo sapien
atcgtacctcgcgaactattactat

SEQ ID NO: 5917500 - DNA, 25 bp, Homo sapien
acatactatctcgcgacatattgtg

SEQ ID NO: 5917501 - DNA, 25 bp, Homo sapien
gttcgataaagttcgtgcgttttac

SEQ ID NO: 5917502 - DNA, 25 bp, Homo sapien
ttcctctatcggatcgttacagtat

SEQ ID NO: 5917503 - DNA, 25 bp, Homo sapien
tcttgctacgcaatcgtctaattgt

SEQ ID NO: 5917504 - DNA, 25 bp, Homo sapien
tctttgtacattaagcgcgaagatg

SEQ ID NO: 5917505 - DNA, 25 bp, Homo sapien
agaaaatagctttacgtcgtacgag

SEQ ID NO: 5917506 - DNA, 25 bp, Homo sapien
ttccttgcgacgtaacgtaaagaaa

SEQ ID NO: 5917507 - DNA, 25 bp, Homo sapien
aaatcaatcgctcgtactaacacag

SEQ ID NO: 5917508 - DNA, 25 bp, Homo sapien
atattaacgcacgatactagtgacc

SEQ ID NO: 5917509 - DNA, 25 bp, Homo sapien
tagtaaaagcgcggtactagatcaa

SEQ ID NO: 5917510 - DNA, 25 bp, Homo sapien
atagtgttagtacgcgcatatccaa

SEQ ID NO: 5917511 - DNA, 25 bp, Homo sapien
tgattaactactagacgcgcagtta

SEQ ID NO: 5917512 - DNA, 25 bp, Homo sapien
tcgagtccgctcgtacatatataaa

SEQ ID NO: 5917513 - DNA, 25 bp, Homo sapien
tagagagccgttacgatactttatc

SEQ ID NO: 5917514 - DNA, 25 bp, Homo sapien
taacaacgcgacgtaatataaaggc

SEQ ID NO: 5917515 - DNA, 25 bp, Homo sapien
aaaggccgcgctaaagaattgattt

SEQ ID NO: 5917516 - DNA, 25 bp, Homo sapien
cattatcgcgtgtacgtaaaattcg

SEQ ID NO: 5917517 - DNA, 25 bp, Homo sapien
attgtgaggtcgtaatacgtgtttc

SEQ ID NO: 5917518 - DNA, 25 bp, Homo sapien
cattcacgcgacgatataaggatta

SEQ ID NO: 5917519 - DNA, 25 bp, Homo sapien
gcatactcgcggaatactagataat

SEQ ID NO: 5917520 - DNA, 25 bp, Homo sapien
acttgacgtcgataggtacaatttg

SEQ ID NO: 5917521 - DNA, 25 bp, Homo sapien
tcatggtcgatcgtacgttgtaaat

SEQ ID NO: 5917522 - DNA, 25 bp, Homo sapien
tgaaaaacaatcgtgcgtaggcaaa

SEQ ID NO: 5917523 - DNA, 25 bp, Homo sapien
aactcacgcgattccgtaaaactat

SEQ ID NO: 5917524 - DNA, 25 bp, Homo sapien
atacgagcgtcctatacgtatttga

SEQ ID NO: 5917525 - DNA, 25 bp, Homo sapien
aatttgacgcgcgatagattatagg

SEQ ID NO: 5917526 - DNA, 25 bp, Homo sapien
tattttcgcgacctatacgaatctc

SEQ ID NO: 5917527 - DNA, 25 bp, Homo sapien
tgtgcccataagcgacgattaatat

SEQ ID NO: 5917528 - DNA, 25 bp, Homo sapien
ttaaactacgccgtaatacgatcct

SEQ ID NO: 5917529 - DNA, 25 bp, Homo sapien
ctactacgcgttctcgatacaatta

SEQ ID NO: 5917530 - DNA, 25 bp, Homo sapien
tccttatgcgttagacgacactaat

SEQ ID NO: 5917531 - DNA, 25 bp, Homo sapien
cgttcatgcgcgttataagaaaaag

SEQ ID NO: 5917532 - DNA, 25 bp, Homo sapien
tttcgtataggttgacgcgaagatt

SEQ ID NO: 5917533 - DNA, 25 bp, Homo sapien
caacatcgttaatacgtcctatctg

SEQ ID NO: 5917534 - DNA, 25 bp, Homo sapien
ctagaatcgtacttagcgaaaacag

SEQ ID NO: 5917535 - DNA, 25 bp, Homo sapien
gtcctatactacggttgcgttttaa

SEQ ID NO: 5917536 - DNA, 25 bp, Homo sapien
ttctatcgggtatataacggacagt

SEQ ID NO: 5917537 - DNA, 25 bp, Homo sapien
gttcacgtactacgcgataaagaat

SEQ ID NO: 5917538 - DNA, 25 bp, Homo sapien
tacaatatacgggtcgtgaaaaacg

SEQ ID NO: 5917539 - DNA, 25 bp, Homo sapien
ctacttacgtattacgacccatgat

SEQ ID NO: 5917540 - DNA, 25 bp, Homo sapien
cagaattaagacttcgcgcaaattg

SEQ ID NO: 5917541 - DNA, 25 bp, Homo sapien
cttgattactaaatccgcgactatg

SEQ ID NO: 5917542 - DNA, 25 bp, Homo sapien
acttacattacgcgacctagtaaac

SEQ ID NO: 5917543 - DNA, 25 bp, Homo sapien
aaagaagcgcgatacatacccaaaa

SEQ ID NO: 5917544 - DNA, 25 bp, Homo sapien
ccactacttagttcgacggtataat

SEQ ID NO: 5917545 - DNA, 25 bp, Homo sapien
taaaggtcggatacgtacctgttta

SEQ ID NO: 5917546 - DNA, 25 bp, Homo sapien
aaactacaacgccgattagactttc

SEQ ID NO: 5917547 - DNA, 25 bp, Homo sapien
agagagtacgcgcgaattattcata

SEQ ID NO: 5917548 - DNA, 25 bp, Homo sapien
ggactaaactaactacgcgacaata

SEQ ID NO: 5917549 - DNA, 25 bp, Homo sapien
gtcactttgcgcgatagatgttata

SEQ ID NO: 5917550 - DNA, 25 bp, Homo sapien
taacaatagcgcgtagatcaactag

SEQ ID NO: 5917551 - DNA, 25 bp, Homo sapien
ttagttcgcgtaatagctggtaagt

SEQ ID NO: 5917552 - DNA, 25 bp, Homo sapien
tttgagtcgtagcgtaaagtcttca

SEQ ID NO: 5917553 - DNA, 25 bp, Homo sapien
tcgttacgtataacgagtccacaaa

SEQ ID NO: 5917554 - DNA, 25 bp, Homo sapien
agtgatactatcgacgtagaatgga

SEQ ID NO: 5917555 - DNA, 25 bp, Homo sapien
tatagggtataatcgcgcttcagtt

SEQ ID NO: 5917556 - DNA, 25 bp, Homo sapien
attacttccgtaaaacggtatgctg

SEQ ID NO: 5917557 - DNA, 25 bp, Homo sapien
aagatccgtccgacgtaagaataaa

SEQ ID NO: 5917558 - DNA, 25 bp, Homo sapien
gtataatacgtcctatcgcgttctt

SEQ ID NO: 5917559 - DNA, 25 bp, Homo sapien
aatcctttccgatcgtctaagctta

SEQ ID NO: 5917560 - DNA, 25 bp, Homo sapien
gctatgttacgtcgcctattgattt

SEQ ID NO: 5917561 - DNA, 25 bp, Homo sapien
caggtatagtattacgccggaaaaa

SEQ ID NO: 5917562 - DNA, 25 bp, Homo sapien
attaattatactaagcgcgctggtc

SEQ ID NO: 5917563 - DNA, 25 bp, Homo sapien
acaaaactaatacgggcgcaaagta

SEQ ID NO: 5917564 - DNA, 25 bp, Homo sapien
acaatctaccgtatcgtactgtatg

SEQ ID NO: 5917565 - DNA, 25 bp, Homo sapien
tagtaaacgtcgattacacattgcc

SEQ ID NO: 5917566 - DNA, 25 bp, Homo sapien
ttgttatagcggatcgtacttagag

SEQ ID NO: 5917567 - DNA, 25 bp, Homo sapien
gacactcctaatcggacgaaatttt

SEQ ID NO: 5917568 - DNA, 25 bp, Homo sapien
cgaagatattactacgcgggttata

SEQ ID NO: 5917569 - DNA, 25 bp, Homo sapien
acatttcgatatacgaccccgttaa

SEQ ID NO: 5917570 - DNA, 25 bp, Homo sapien
tatagttacggacgtatcgtgagaa

SEQ ID NO: 5917571 - DNA, 25 bp, Homo sapien
gactctcgggtaacgattaatgtta

SEQ ID NO: 5917572 - DNA, 25 bp, Homo sapien
tctctatatcgttacgtcgtaaggt

SEQ ID NO: 5917573 - DNA, 25 bp, Homo sapien
gatacatgcgcgattagtagatgta

SEQ ID NO: 5917574 - DNA, 25 bp, Homo sapien
ttattacgatcggacataaagcgca

SEQ ID NO: 5917575 - DNA, 25 bp, Homo sapien
tactactaacgtaccgctcaatact

SEQ ID NO: 5917576 - DNA, 25 bp, Homo sapien
tttcttaggcgatcgtaatgcttga

SEQ ID NO: 5917577 - DNA, 25 bp, Homo sapien
cataggacgtactagagcgtttatt

SEQ ID NO: 5917578 - DNA, 25 bp, Homo sapien
atgtatacgcgttattcgtcttcgt

SEQ ID NO: 5917579 - DNA, 25 bp, Homo sapien
tatcaaccgtatggcaacggattta

SEQ ID NO: 5917580 - DNA, 25 bp, Homo sapien
tgattcatataacgcgtcctactca

SEQ ID NO: 5917581 - DNA, 25 bp, Homo sapien
tattagtacgaaaggtcgcagatct

SEQ ID NO: 5917582 - DNA, 25 bp, Homo sapien
gattgacgtagcggatagaagattt

SEQ ID NO: 5917583 - DNA, 25 bp, Homo sapien
tgaacttagtatttcgacggtttgc

SEQ ID NO: 5917584 - DNA, 25 bp, Homo sapien
tgagtttagtatcgtgcgtattctc

SEQ ID NO: 5917585 - DNA, 25 bp, Homo sapien
gattgacactttacgcggtcttttt

SEQ ID NO: 5917586 - DNA, 25 bp, Homo sapien
gctgtacgtgagaccgataaatttt

SEQ ID NO: 5917587 - DNA, 25 bp, Homo sapien
tttaacctaacgcgtcaacatgaga

SEQ ID NO: 5917588 - DNA, 25 bp, Homo sapien
cttattcgtggttcgtcgatactaa

SEQ ID NO: 5917589 - DNA, 25 bp, Homo sapien
actacgtcggtaatacgctaataac

SEQ ID NO: 5917590 - DNA, 25 bp, Homo sapien
caaactgcgtaacgtacctgttata

SEQ ID NO: 5917591 - DNA, 25 bp, Homo sapien
cctaatctctcgcgaataagagttt

SEQ ID NO: 5917592 - DNA, 25 bp, Homo sapien
atcttaacgtacgatcgaggtgaaa

SEQ ID NO: 5917593 - DNA, 25 bp, Homo sapien
caggataacgttgtacgcgattaat

SEQ ID NO: 5917594 - DNA, 25 bp, Homo sapien
gaattcgtatacggtcgtcgaattt

SEQ ID NO: 5917595 - DNA, 25 bp, Homo sapien
gttttgacgagtacgcgttcttatt

SEQ ID NO: 5917596 - DNA, 25 bp, Homo sapien
aagtaaatcgcgacgttaacaccta

SEQ ID NO: 5917597 - DNA, 25 bp, Homo sapien
aatccacgcgataactattggctaa

SEQ ID NO: 5917598 - DNA, 25 bp, Homo sapien
aggaagttcgcaataacgctttact

SEQ ID NO: 5917599 - DNA, 25 bp, Homo sapien
gtttagctacatatcgcgattacag

SEQ ID NO: 5917600 - DNA, 25 bp, Homo sapien
ggcatttagtcgatacgcattaaga

SEQ ID NO: 5917601 - DNA, 25 bp, Homo sapien
ttaaattgcgacgatctatggtggt

SEQ ID NO: 5917602 - DNA, 25 bp, Homo sapien
atacaggtatcggcgttactagttt

SEQ ID NO: 5917603 - DNA, 25 bp, Homo sapien
cttctgtttacgttcgcgaaatgat

SEQ ID NO: 5917604 - DNA, 25 bp, Homo sapien
agagtgtcgcggactatatttgata

SEQ ID NO: 5917605 - DNA, 25 bp, Homo sapien
acaatatcgttctacgcgtaatgtg

SEQ ID NO: 5917606 - DNA, 25 bp, Homo sapien
aataacacgaggcgtaataggcatt

SEQ ID NO: 5917607 - DNA, 25 bp, Homo sapien
tctttaatataatcgtccgagctgc

SEQ ID NO: 5917608 - DNA, 25 bp, Homo sapien
ctcttattcgcactagcgtgtttta

SEQ ID NO: 5917609 - DNA, 25 bp, Homo sapien
gtaatctgtaccgaccgtaataatg

SEQ ID NO: 5917610 - DNA, 25 bp, Homo sapien
taatgttcgcggactagatgatgaa

SEQ ID NO: 5917611 - DNA, 25 bp, Homo sapien
aaatcgttaacgcgagtagttctac

SEQ ID NO: 5917612 - DNA, 25 bp, Homo sapien
tagatctgcgacgactaactctttt

SEQ ID NO: 5917613 - DNA, 25 bp, Homo sapien
ttagacctacgttcgaaccataact

SEQ ID NO: 5917614 - DNA, 25 bp, Homo sapien
catagtgatagttacgcgttttacg

SEQ ID NO: 5917615 - DNA, 25 bp, Homo sapien
cgtattttatcggtccgtaatcatc

SEQ ID NO: 5917616 - DNA, 25 bp, Homo sapien
aaacttctcgcgacagttacaacat

SEQ ID NO: 5917617 - DNA, 25 bp, Homo sapien
gtttgtctaagtttcgtcgagagtt

SEQ ID NO: 5917618 - DNA, 25 bp, Homo sapien
aatctttatacgcgctcgtgataga

SEQ ID NO: 5917619 - DNA, 25 bp, Homo sapien
accaagatctggcgcgatttttata

SEQ ID NO: 5917620 - DNA, 25 bp, Homo sapien
atttgtacgacgattaccctgtgtt

SEQ ID NO: 5917621 - DNA, 25 bp, Homo sapien
atagtcacgtcggaacggataatta

SEQ ID NO: 5917622 - DNA, 25 bp, Homo sapien
catacctcgtaacgtcgcatttatt

SEQ ID NO: 5917623 - DNA, 25 bp, Homo sapien
cttattggttcgtcatacggacaaa

SEQ ID NO: 5917624 - DNA, 25 bp, Homo sapien
ataatccgcgtaactatacctctgt

SEQ ID NO: 5917625 - DNA, 25 bp, Homo sapien
tgatgcttcgactaacgccttttat

SEQ ID NO: 5917626 - DNA, 25 bp, Homo sapien
ttcaatgcggcatacgttattggtt

SEQ ID NO: 5917627 - DNA, 25 bp, Homo sapien
tcgagaatatcgttactcgaagctt

SEQ ID NO: 5917628 - DNA, 25 bp, Homo sapien
attttcgatcggacgtataggcaat

SEQ ID NO: 5917629 - DNA, 25 bp, Homo sapien
taattgtactgcgtcgcatgtagat

SEQ ID NO: 5917630 - DNA, 25 bp, Homo sapien
atgaactaacgccgtattgcttaca

SEQ ID NO: 5917631 - DNA, 25 bp, Homo sapien
tttggacttgacgcggttagaaaaa

SEQ ID NO: 5917632 - DNA, 25 bp, Homo sapien
aaacttatatactagcgcgtctctc

SEQ ID NO: 5917633 - DNA, 25 bp, Homo sapien
agcgataatccggcgtatttattgt

SEQ ID NO: 5917634 - DNA, 25 bp, Homo sapien
gaaaaatacgcgatcgctagacatt

SEQ ID NO: 5917635 - DNA, 25 bp, Homo sapien
taaaggtacgccttacgtgttcaat

SEQ ID NO: 5917636 - DNA, 25 bp, Homo sapien
aactgacgtaatacctacgtggatt

SEQ ID NO: 5917637 - DNA, 25 bp, Homo sapien
tcgaatgtagtaacgcgtacaaact

SEQ ID NO: 5917638 - DNA, 25 bp, Homo sapien
gagagtacgcgttcggataaatatt

SEQ ID NO: 5917639 - DNA, 25 bp, Homo sapien
atctttttagatccgaacgcagaag

SEQ ID NO: 5917640 - DNA, 25 bp, Homo sapien
atggaatttacgtcggactctgata

SEQ ID NO: 5917641 - DNA, 25 bp, Homo sapien
taataacgctatacagtcgggtact

SEQ ID NO: 5917642 - DNA, 25 bp, Homo sapien
tatttcgtcttaacgcgagattcct

SEQ ID NO: 5917643 - DNA, 25 bp, Homo sapien
aactgataaacgttcggcgatattc

SEQ ID NO: 5917644 - DNA, 25 bp, Homo sapien
atactattatgtcgcgcgagagtaa

SEQ ID NO: 5917645 - DNA, 25 bp, Homo sapien
gtataacgtctaaccgacactaact

SEQ ID NO: 5917646 - DNA, 25 bp, Homo sapien
gccattctaatcgagtacgagttat

SEQ ID NO: 5917647 - DNA, 25 bp, Homo sapien
tcatcttacgcgagatatcactctt

SEQ ID NO: 5917648 - DNA, 25 bp, Homo sapien
gatagcaggattcgcgatactttat

SEQ ID NO: 5917649 - DNA, 25 bp, Homo sapien
atcgaacgcgatcgaatattctaac

SEQ ID NO: 5917650 - DNA, 25 bp, Homo sapien
atctaaacctattcgcgagacttga

SEQ ID NO: 5917651 - DNA, 25 bp, Homo sapien
atatttctcgataccgcgttttgtg

SEQ ID NO: 5917652 - DNA, 25 bp, Homo sapien
actcgaacggtcgaactatataatg

SEQ ID NO: 5917653 - DNA, 25 bp, Homo sapien
attatctatcatacgaccgtcacgt

SEQ ID NO: 5917654 - DNA, 25 bp, Homo sapien
cgttgattcgtgcgatacctattta

SEQ ID NO: 5917655 - DNA, 25 bp, Homo sapien
tatttagcgcgtaatgtaagcctag

SEQ ID NO: 5917656 - DNA, 25 bp, Homo sapien
aatattcgtagataggacgagtcct

SEQ ID NO: 5917657 - DNA, 25 bp, Homo sapien
tcggatgctatacgacgtgttttta

SEQ ID NO: 5917658 - DNA, 25 bp, Homo sapien
acttattatacttgcgcgaaggctt

SEQ ID NO: 5917659 - DNA, 25 bp, Homo sapien
tcataagcgcgactaatatcggaaa

SEQ ID NO: 5917660 - DNA, 25 bp, Homo sapien
tagatggcgtaacgctctaaatcta

SEQ ID NO: 5917661 - DNA, 25 bp, Homo sapien
actataatacgcaatcgtcggcata

SEQ ID NO: 5917662 - DNA, 25 bp, Homo sapien
gctttaattacgaacgcggtaaaca

SEQ ID NO: 5917663 - DNA, 25 bp, Homo sapien
taagtatacgtcgaggtaaggtttg

SEQ ID NO: 5917664 - DNA, 25 bp, Homo sapien
actgtttacgcgtaggaatcaacaa

SEQ ID NO: 5917665 - DNA, 25 bp, Homo sapien
atgtcatacgccgaccttaagataa

SEQ ID NO: 5917666 - DNA, 25 bp, Homo sapien
tatcataacgcggaaccgtgtaata

SEQ ID NO: 5917667 - DNA, 25 bp, Homo sapien
atgtaatcgtcgcaccatatgagtt

SEQ ID NO: 5917668 - DNA, 25 bp, Homo sapien
aagtattcgtattaagccggtagag

SEQ ID NO: 5917669 - DNA, 25 bp, Homo sapien
tggaaatatgcgcgcgttattcttt

SEQ ID NO: 5917670 - DNA, 25 bp, Homo sapien
gaacacgtatcgcgaatagtatgat

SEQ ID NO: 5917671 - DNA, 25 bp, Homo sapien
tttgcgtcgtacggttatcctaaaa

SEQ ID NO: 5917672 - DNA, 25 bp, Homo sapien
ctatgatcgactatggacgactttt

SEQ ID NO: 5917673 - DNA, 25 bp, Homo sapien
atatgatcgttcgcgacaatacatg

SEQ ID NO: 5917674 - DNA, 25 bp, Homo sapien
taagtaatatcggacgccgagtaaa

SEQ ID NO: 5917675 - DNA, 25 bp, Homo sapien
atcgggcgccgtatagattttaata

SEQ ID NO: 5917676 - DNA, 25 bp, Homo sapien
gatagtactacgaccgacatttgat

SEQ ID NO: 5917677 - DNA, 25 bp, Homo sapien
ttgatttagcgaacgataggagatc

SEQ ID NO: 5917678 - DNA, 25 bp, Homo sapien
ctattcctagtacgaacggacaatt

SEQ ID NO: 5917679 - DNA, 25 bp, Homo sapien
ttagagttaacgcgttacgtgtgaa

SEQ ID NO: 5917680 - DNA, 25 bp, Homo sapien
gtcaaacctacgcgtataacactaa

SEQ ID NO: 5917681 - DNA, 25 bp, Homo sapien
tctgatcattaatagcgcgcagatt

SEQ ID NO: 5917682 - DNA, 25 bp, Homo sapien
caccagtcgcgattagttctttttt

SEQ ID NO: 5917683 - DNA, 25 bp, Homo sapien
actgtttgtcgatcgttactcacat

SEQ ID NO: 5917684 - DNA, 25 bp, Homo sapien
ttaaggtcgccgtatcatgaaatga

SEQ ID NO: 5917685 - DNA, 25 bp, Homo sapien
gataatcgcgactctagtactgttt

SEQ ID NO: 5917686 - DNA, 25 bp, Homo sapien
tgctctacgcctaatatcgagttat

SEQ ID NO: 5917687 - DNA, 25 bp, Homo sapien
ataggggatcgatatacgcattagt

SEQ ID NO: 5917688 - DNA, 25 bp, Homo sapien
gatacatatacttgcgccgtactta

SEQ ID NO: 5917689 - DNA, 25 bp, Homo sapien
aagtgtgactataatcgcgctagta

SEQ ID NO: 5917690 - DNA, 25 bp, Homo sapien
gcaatagtcgcgcttatacattgaa

SEQ ID NO: 5917691 - DNA, 25 bp, Homo sapien
agcgaatattaggacgtcgctatat

SEQ ID NO: 5917692 - DNA, 25 bp, Homo sapien
ttttcagatacctcgcgattgacaa

SEQ ID NO: 5917693 - DNA, 25 bp, Homo sapien
ctatctgtccgtcgaatattatgtc

SEQ ID NO: 5917694 - DNA, 25 bp, Homo sapien
tgactataacgtaatcggcgaaaca

SEQ ID NO: 5917695 - DNA, 25 bp, Homo sapien
tgcttattcgaccggtatcaattgt

SEQ ID NO: 5917696 - DNA, 25 bp, Homo sapien
aagctacggcgtatacggaaataat

SEQ ID NO: 5917697 - DNA, 25 bp, Homo sapien
ctagattagctaaacgcgtaagtca

SEQ ID NO: 5917698 - DNA, 25 bp, Homo sapien
tttggacgtatggttaacgtttgac

SEQ ID NO: 5917699 - DNA, 25 bp, Homo sapien
atgcattaaccggatcgcattttca

SEQ ID NO: 5917700 - DNA, 25 bp, Homo sapien
gcaaaactattcgtaacgtgacaga

SEQ ID NO: 5917701 - DNA, 25 bp, Homo sapien
gagatacttagatcgcggttattac

SEQ ID NO: 5917702 - DNA, 25 bp, Homo sapien
tttggttcgcaacggtagaagaaat

SEQ ID NO: 5917703 - DNA, 25 bp, Homo sapien
tggagaacgtctagtatcgtcattt

SEQ ID NO: 5917704 - DNA, 25 bp, Homo sapien
aatactcgacgtaagtaggctatgt

SEQ ID NO: 5917705 - DNA, 25 bp, Homo sapien
tcggctcgttcgagtatagataata

SEQ ID NO: 5917706 - DNA, 25 bp, Homo sapien
gagttaatacgtcgcgagtaactaa

SEQ ID NO: 5917707 - DNA, 25 bp, Homo sapien
ttcctactatcgctcgatgaaatga

SEQ ID NO: 5917708 - DNA, 25 bp, Homo sapien
aataactaacgcccgataccaaaca

SEQ ID NO: 5917709 - DNA, 25 bp, Homo sapien
attacagcgtatcaatcgtggtttc

SEQ ID NO: 5917710 - DNA, 25 bp, Homo sapien
tgcttatctacggacgtagtaatct

SEQ ID NO: 5917711 - DNA, 25 bp, Homo sapien
aagtagtgcgcgtatactacataac

SEQ ID NO: 5917712 - DNA, 25 bp, Homo sapien
acttttccgcgagcatataagatac

SEQ ID NO: 5917713 - DNA, 25 bp, Homo sapien
aatctacgaggtatcgtaacatgac

SEQ ID NO: 5917714 - DNA, 25 bp, Homo sapien
tgaatgcgcgtcagctataaaacta

SEQ ID NO: 5917715 - DNA, 25 bp, Homo sapien
tactattcttgtcgaccgaagtgat

SEQ ID NO: 5917716 - DNA, 25 bp, Homo sapien
tagagttaaacgatcgggtcaatgt

SEQ ID NO: 5917717 - DNA, 25 bp, Homo sapien
ttaaggcgtcgttaatcgatcttga

SEQ ID NO: 5917718 - DNA, 25 bp, Homo sapien
atagaaacgtcctagcgaactgaat

SEQ ID NO: 5917719 - DNA, 25 bp, Homo sapien
tttctagcgcgtcgtaattatatgg

SEQ ID NO: 5917720 - DNA, 25 bp, Homo sapien
tagacacgtccaatacgattcagat

SEQ ID NO: 5917721 - DNA, 25 bp, Homo sapien
tcgaattacgcggtagtatatcatg

SEQ ID NO: 5917722 - DNA, 25 bp, Homo sapien
aaggaactcgtataggcgaattcta

SEQ ID NO: 5917723 - DNA, 25 bp, Homo sapien
gtccaagtaatatgcgcgtatctaa

SEQ ID NO: 5917724 - DNA, 25 bp, Homo sapien
tccgattacgtcgattacgtttttc

SEQ ID NO: 5917725 - DNA, 25 bp, Homo sapien
tgtcttcgcgacatatcgtttagtt

SEQ ID NO: 5917726 - DNA, 25 bp, Homo sapien
catgatataacggatcgacaaagag

SEQ ID NO: 5917727 - DNA, 25 bp, Homo sapien
aattatccgcgttaataccgtgagt

SEQ ID NO: 5917728 - DNA, 25 bp, Homo sapien
gaatgttcgcgactaatcttattcg

SEQ ID NO: 5917729 - DNA, 25 bp, Homo sapien
tattggttcgcgaactaagatatgg

SEQ ID NO: 5917730 - DNA, 25 bp, Homo sapien
ttacattatgggcgcaatcagaatc

SEQ ID NO: 5917731 - DNA, 25 bp, Homo sapien
gtactaatccgtagtaacgtcagaa

SEQ ID NO: 5917732 - DNA, 25 bp, Homo sapien
tgtgttgacgtataaccgtcttgtt

SEQ ID NO: 5917733 - DNA, 25 bp, Homo sapien
tgcgaataatatcgggtcgaaagaa

SEQ ID NO: 5917734 - DNA, 25 bp, Homo sapien
gaattggactattcgcggatattca

SEQ ID NO: 5917735 - DNA, 25 bp, Homo sapien
ctattgcgtattcgcgttatggaat

SEQ ID NO: 5917736 - DNA, 25 bp, Homo sapien
tagaatgtaacggtcgtatggtaca

SEQ ID NO: 5917737 - DNA, 25 bp, Homo sapien
ctcaaatgtataggtcgcgtaaaga

SEQ ID NO: 5917738 - DNA, 25 bp, Homo sapien
tcattatactaacggacgttcttgg

SEQ ID NO: 5917739 - DNA, 25 bp, Homo sapien
ctatatcgaagtcgcgtatctcaat

SEQ ID NO: 5917740 - DNA, 25 bp, Homo sapien
ctacagtcgaagcgtatacatctat

SEQ ID NO: 5917741 - DNA, 25 bp, Homo sapien
ctcgtttagttatgtcgcgtgtatt

SEQ ID NO: 5917742 - DNA, 25 bp, Homo sapien
ttagagccgttatagtacgtttgct

SEQ ID NO: 5917743 - DNA, 25 bp, Homo sapien
tcattttaacggatcgacacaggat

SEQ ID NO: 5917744 - DNA, 25 bp, Homo sapien
ctaacttactcgtcgacccttatat

SEQ ID NO: 5917745 - DNA, 25 bp, Homo sapien
aacatacgcgcgaatagtatagtct

SEQ ID NO: 5917746 - DNA, 25 bp, Homo sapien
atctctatagtacgcgcgagaatat

SEQ ID NO: 5917747 - DNA, 25 bp, Homo sapien
tcatctgtagttacgcgaagctatt

SEQ ID NO: 5917748 - DNA, 25 bp, Homo sapien
aatcagttacaatacgcgcttcttg

SEQ ID NO: 5917749 - DNA, 25 bp, Homo sapien
aactagcgagtcgctaataatacgt

SEQ ID NO: 5917750 - DNA, 25 bp, Homo sapien
agggtacgcgttgatactaaatgtt

SEQ ID NO: 5917751 - DNA, 25 bp, Homo sapien
aagtactgcgtcgtatgaataatgc

SEQ ID NO: 5917752 - DNA, 25 bp, Homo sapien
atttttttcgagttacgcgctgttg

SEQ ID NO: 5917753 - DNA, 25 bp, Homo sapien
tagacgttacgcgactagtttgtat

SEQ ID NO: 5917754 - DNA, 25 bp, Homo sapien
gtgatatccgcggtaaatattgagt

SEQ ID NO: 5917755 - DNA, 25 bp, Homo sapien
aaatagatactcgcgcgagcttata

SEQ ID NO: 5917756 - DNA, 25 bp, Homo sapien
atcttgtgacgccgtagacttaatt

SEQ ID NO: 5917757 - DNA, 25 bp, Homo sapien
agacaaagcgtaacgtacttactag

SEQ ID NO: 5917758 - DNA, 25 bp, Homo sapien
cacaaaactatcgcgaatctcttct

SEQ ID NO: 5917759 - DNA, 25 bp, Homo sapien
ccattactcgcgacatcaaatcaaa

SEQ ID NO: 5917760 - DNA, 25 bp, Homo sapien
tgcttcatctaagacgcgaaatcaa

SEQ ID NO: 5917761 - DNA, 25 bp, Homo sapien
tatgtgaccgcgctataagaacatt

SEQ ID NO: 5917762 - DNA, 25 bp, Homo sapien
ttatacagcgtcgataacgagatac

SEQ ID NO: 5917763 - DNA, 25 bp, Homo sapien
tctagtcgaatcgtgactataagac

SEQ ID NO: 5917764 - DNA, 25 bp, Homo sapien
aaagagcgagtatcgtaagacttca

SEQ ID NO: 5917765 - DNA, 25 bp, Homo sapien
ctataataagtacgttcggggcaat

SEQ ID NO: 5917766 - DNA, 25 bp, Homo sapien
tctcacacaacgtcgatacttgtat

SEQ ID NO: 5917767 - DNA, 25 bp, Homo sapien
gaatacttacgccacgtacaatgat

SEQ ID NO: 5917768 - DNA, 25 bp, Homo sapien
acttgacgaacgatcgctattaact

SEQ ID NO: 5917769 - DNA, 25 bp, Homo sapien
tatatccgtaccgttaacgatacgt

SEQ ID NO: 5917770 - DNA, 25 bp, Homo sapien
gtccttcgattggacgttatgaata

SEQ ID NO: 5917771 - DNA, 25 bp, Homo sapien
atctgatacgcgtcgtgtaacattt

SEQ ID NO: 5917772 - DNA, 25 bp, Homo sapien
ttgaattacgaccgaagcttcattg

SEQ ID NO: 5917773 - DNA, 25 bp, Homo sapien
tcccttcgatcgtacgttattaaga

SEQ ID NO: 5917774 - DNA, 25 bp, Homo sapien
tgtagctcgcacgatatacagtaat

SEQ ID NO: 5917775 - DNA, 25 bp, Homo sapien
caacttgttcatagtcgcgtaaaca

SEQ ID NO: 5917776 - DNA, 25 bp, Homo sapien
ttcaattattacgtcgcgcgattac

SEQ ID NO: 5917777 - DNA, 25 bp, Homo sapien
taacaaacgagcgataactttcggt

SEQ ID NO: 5917778 - DNA, 25 bp, Homo sapien
cataattatacggtccgtacagtgt

SEQ ID NO: 5917779 - DNA, 25 bp, Homo sapien
atataccgacttatgcgtatgtctg

SEQ ID NO: 5917780 - DNA, 25 bp, Homo sapien
aagttacgtactagacgactaacac

SEQ ID NO: 5917781 - DNA, 25 bp, Homo sapien
acagactaactagtcgcgttatgta

SEQ ID NO: 5917782 - DNA, 25 bp, Homo sapien
tgaatagtactagtcgcggtcaatt

SEQ ID NO: 5917783 - DNA, 25 bp, Homo sapien
tttcgccttacgcgcgaaattatta

SEQ ID NO: 5917784 - DNA, 25 bp, Homo sapien
aattgaattatcgcgcgaatgtctg

SEQ ID NO: 5917785 - DNA, 25 bp, Homo sapien
tagttaattttacgcgcggtagctt

SEQ ID NO: 5917786 - DNA, 25 bp, Homo sapien
acatcacgtagcgactatctactaa

SEQ ID NO: 5917787 - DNA, 25 bp, Homo sapien
gtagattcgcacccgatattgtatt

SEQ ID NO: 5917788 - DNA, 25 bp, Homo sapien
tacaacgatcgactatacgacacca

SEQ ID NO: 5917789 - DNA, 25 bp, Homo sapien
ctgatgtcgtactacggctacatat

SEQ ID NO: 5917790 - DNA, 25 bp, Homo sapien
tacttctaactacggtcgagtaagc

SEQ ID NO: 5917791 - DNA, 25 bp, Homo sapien
tgtacctagcgcgatgttagaatac

SEQ ID NO: 5917792 - DNA, 25 bp, Homo sapien
catagaacgagcggtaatggctata

SEQ ID NO: 5917793 - DNA, 25 bp, Homo sapien
aaaactcaacgttcgatcgtcacag

SEQ ID NO: 5917794 - DNA, 25 bp, Homo sapien
aacttaaactatctcgcgaagccac

SEQ ID NO: 5917795 - DNA, 25 bp, Homo sapien
tgaatttcttacgcgcggttcatac

SEQ ID NO: 5917796 - DNA, 25 bp, Homo sapien
taagatcgtagccgtatattagcgg

SEQ ID NO: 5917797 - DNA, 25 bp, Homo sapien
tgcttacgtacatcgaacctagtac

SEQ ID NO: 5917798 - DNA, 25 bp, Homo sapien
aatcttgaccgcggtcatacaaaac

SEQ ID NO: 5917799 - DNA, 25 bp, Homo sapien
acacttcgcgcgattatacaaagtg

SEQ ID NO: 5917800 - DNA, 25 bp, Homo sapien
tgatatagtatcgcgcattgacctg

SEQ ID NO: 5917801 - DNA, 25 bp, Homo sapien
tcctgttacacgcgacatcataagt

SEQ ID NO: 5917802 - DNA, 25 bp, Homo sapien
acaaaaggccgatagatcgttcagt

SEQ ID NO: 5917803 - DNA, 25 bp, Homo sapien
aagtttcgcattggtcgtaaacgga

SEQ ID NO: 5917804 - DNA, 25 bp, Homo sapien
aatgaagtcgcgaatatactgcgtc

SEQ ID NO: 5917805 - DNA, 25 bp, Homo sapien
ggtttagcgtaccatagcgaatatc

SEQ ID NO: 5917806 - DNA, 25 bp, Homo sapien
acacattacgcgataggtggcatta

SEQ ID NO: 5917807 - DNA, 25 bp, Homo sapien
aagagggcgctacgattgattcaaa

SEQ ID NO: 5917808 - DNA, 25 bp, Homo sapien
ttacgagacctatatcgcgaagttc

SEQ ID NO: 5917809 - DNA, 25 bp, Homo sapien
gcttttccgaatgataccgtcttct

SEQ ID NO: 5917810 - DNA, 25 bp, Homo sapien
taaagtcgacccgactagtataagc

SEQ ID NO: 5917811 - DNA, 25 bp, Homo sapien
cttgattacgcatagagcggtctta

SEQ ID NO: 5917812 - DNA, 25 bp, Homo sapien
ttgtatatcgcgttactcggcgata

SEQ ID NO: 5917813 - DNA, 25 bp, Homo sapien
attcccttagctattcgcggttgta

SEQ ID NO: 5917814 - DNA, 25 bp, Homo sapien
ttttcggtatcgtaacgcgtcgaaa

SEQ ID NO: 5917815 - DNA, 25 bp, Homo sapien
tcaagagcgtaattcgacgagacta

SEQ ID NO: 5917816 - DNA, 25 bp, Homo sapien
gatcacacgctagaccgatttctat

SEQ ID NO: 5917817 - DNA, 25 bp, Homo sapien
cgtgaagacagttcgcgtaaatgta

SEQ ID NO: 5917818 - DNA, 25 bp, Homo sapien
caaaaagcgtacgaactaggtcttg

SEQ ID NO: 5917819 - DNA, 25 bp, Homo sapien
cgatcttcggcgtttaacggttata

SEQ ID NO: 5917820 - DNA, 25 bp, Homo sapien
gtgaagcgatataacggtctatcga

SEQ ID NO: 5917821 - DNA, 25 bp, Homo sapien
agtaaccgggacgtaatacactcaa

SEQ ID NO: 5917822 - DNA, 25 bp, Homo sapien
ggatcctatcgactagcgattatag

SEQ ID NO: 5917823 - DNA, 25 bp, Homo sapien
tagacaaactccgcgcgataataga

SEQ ID NO: 5917824 - DNA, 25 bp, Homo sapien
actagagctagaacgtcgtactctt

SEQ ID NO: 5917825 - DNA, 25 bp, Homo sapien
agtagtctagtacgcttcgatatcg

SEQ ID NO: 5917826 - DNA, 25 bp, Homo sapien
agaatttccgcgttgatcggatttg

SEQ ID NO: 5917827 - DNA, 25 bp, Homo sapien
tgaatacgacgcgtattatggcatc

SEQ ID NO: 5917828 - DNA, 25 bp, Homo sapien
ccattagcgcccgtatatagatatc

SEQ ID NO: 5917829 - DNA, 25 bp, Homo sapien
agttacttccgatacgctacgtctt

SEQ ID NO: 5917830 - DNA, 25 bp, Homo sapien
tatttctaccgctcgttagatgagg

SEQ ID NO: 5917831 - DNA, 25 bp, Homo sapien
gtttcctagtgcgacggtaactaaa

SEQ ID NO: 5917832 - DNA, 25 bp, Homo sapien
atctcagctcgatagaacgggaaat

SEQ ID NO: 5917833 - DNA, 25 bp, Homo sapien
gtaaggtatcatccgcgcaactata

SEQ ID NO: 5917834 - DNA, 25 bp, Homo sapien
actaggtacgttcggtactagatac

SEQ ID NO: 5917835 - DNA, 25 bp, Homo sapien
attatatatacgcgggatccaagcg

SEQ ID NO: 5917836 - DNA, 25 bp, Homo sapien
atcataaatccgtagtacgccttcc

SEQ ID NO: 5917837 - DNA, 25 bp, Homo sapien
gacgtgcgcgtattatcgtatcatt

SEQ ID NO: 5917838 - DNA, 25 bp, Homo sapien
tactcacggactagtcgacaatcaa

SEQ ID NO: 5917839 - DNA, 25 bp, Homo sapien
ctctcataaacgtcgcgctaaaatg

SEQ ID NO: 5917840 - DNA, 25 bp, Homo sapien
agaatgcgcgatactatagtgcaca

SEQ ID NO: 5917841 - DNA, 25 bp, Homo sapien
actactcgacgtatcttcggagaat

SEQ ID NO: 5917842 - DNA, 25 bp, Homo sapien
caactccgttagcgtacgattagaa

SEQ ID NO: 5917843 - DNA, 25 bp, Homo sapien
ggggattaacgcgcctgttaaatat

SEQ ID NO: 5917844 - DNA, 25 bp, Homo sapien
gcatataccggcgttatatatgctg

SEQ ID NO: 5917845 - DNA, 25 bp, Homo sapien
atcatcgattctagcgcgaactcta

SEQ ID NO: 5917846 - DNA, 25 bp, Homo sapien
ggactattacgaccgaagctcttaa

SEQ ID NO: 5917847 - DNA, 25 bp, Homo sapien
taacggtgcgcgttataagacattg

SEQ ID NO: 5917848 - DNA, 25 bp, Homo sapien
atagagaatccgatcgcgtaatgga

SEQ ID NO: 5917849 - DNA, 25 bp, Homo sapien
tctgcttagacttatcgcgaggaaa

SEQ ID NO: 5917850 - DNA, 25 bp, Homo sapien
gatcttaacgcgacgttagttaagc

SEQ ID NO: 5917851 - DNA, 25 bp, Homo sapien
gttttttcggacgtaatcggatcag

SEQ ID NO: 5917852 - DNA, 25 bp, Homo sapien
gtacattatcggcgcttactccttt

SEQ ID NO: 5917853 - DNA, 25 bp, Homo sapien
aaaggccgtcgactagtaatgtaac

SEQ ID NO: 5917854 - DNA, 25 bp, Homo sapien
tatcattcggactcgcgaataacct

SEQ ID NO: 5917855 - DNA, 25 bp, Homo sapien
gatactatcgcgcacgtatctttca

SEQ ID NO: 5917856 - DNA, 25 bp, Homo sapien
atcacacgtaacgtctcgaagtcat

SEQ ID NO: 5917857 - DNA, 25 bp, Homo sapien
cctgaactatccgctacgatatgaa

SEQ ID NO: 5917858 - DNA, 25 bp, Homo sapien
ttcaatgtacgtatcgacgatgggt

SEQ ID NO: 5917859 - DNA, 25 bp, Homo sapien
cctatgtaacgcatgtcgtacctaa

SEQ ID NO: 5917860 - DNA, 25 bp, Homo sapien
tgaaaatatcgttcgcgaggttgca

SEQ ID NO: 5917861 - DNA, 25 bp, Homo sapien
actttacgcgatgtacgatcgtttc

SEQ ID NO: 5917862 - DNA, 25 bp, Homo sapien
taaccccgacgtcgctttatattag

SEQ ID NO: 5917863 - DNA, 25 bp, Homo sapien
tcaattctacgatcggctcactaca

SEQ ID NO: 5917864 - DNA, 25 bp, Homo sapien
caaggtaccgatagttccgtctaat

SEQ ID NO: 5917865 - DNA, 25 bp, Homo sapien
caaagtgtaggacgccgtatcttaa

SEQ ID NO: 5917866 - DNA, 25 bp, Homo sapien
atacgctattcgtaccgacctagaa

SEQ ID NO: 5917867 - DNA, 25 bp, Homo sapien
ctagtgctagtattcgacgaactca

SEQ ID NO: 5917868 - DNA, 25 bp, Homo sapien
gacaaacgggttagtacgtatgcat

SEQ ID NO: 5917869 - DNA, 25 bp, Homo sapien
ctaaactagcgtaccgatctgtgtt

SEQ ID NO: 5917870 - DNA, 25 bp, Homo sapien
cctattcgcgaaagtaccaacctta

SEQ ID NO: 5917871 - DNA, 25 bp, Homo sapien
agtttttagtatgaccgcgacagga

SEQ ID NO: 5917872 - DNA, 25 bp, Homo sapien
ggttaacgcgataactacgcacata

SEQ ID NO: 5917873 - DNA, 25 bp, Homo sapien
aatactaacgctatcggacccatac

SEQ ID NO: 5917874 - DNA, 25 bp, Homo sapien
tcactatcgacggttaaaccttcgt

SEQ ID NO: 5917875 - DNA, 25 bp, Homo sapien
gagatttcgcgattagtgacctctt

SEQ ID NO: 5917876 - DNA, 25 bp, Homo sapien
tttgtacgtacgttcgatccaactc

SEQ ID NO: 5917877 - DNA, 25 bp, Homo sapien
gaataagcgtcagacgtatgagatg

SEQ ID NO: 5917878 - DNA, 25 bp, Homo sapien
aagaaagaccgcgatcaatctgtca

SEQ ID NO: 5917879 - DNA, 25 bp, Homo sapien
tgcgcatcactaattcgcggttttt

SEQ ID NO: 5917880 - DNA, 25 bp, Homo sapien
aacaactagaccgtacgcgtacatt

SEQ ID NO: 5917881 - DNA, 25 bp, Homo sapien
atctgtatacgcgtcgtgttaaagc

SEQ ID NO: 5917882 - DNA, 25 bp, Homo sapien
tgcggatcgactagtacgtgtatat

SEQ ID NO: 5917883 - DNA, 25 bp, Homo sapien
gcatgttaggcgacgtaaagatgta

SEQ ID NO: 5917884 - DNA, 25 bp, Homo sapien
gctttttataagtcgcgactccact

SEQ ID NO: 5917885 - DNA, 25 bp, Homo sapien
gcactatatacgactagcggtaaca

SEQ ID NO: 5917886 - DNA, 25 bp, Homo sapien
ctaactctccgatactcgatctgtt

SEQ ID NO: 5917887 - DNA, 25 bp, Homo sapien
aaatcaagtcggtcgactagttgac

SEQ ID NO: 5917888 - DNA, 25 bp, Homo sapien
cgatcatctaccgcgtaatactttc

SEQ ID NO: 5917889 - DNA, 25 bp, Homo sapien
tgaaacaccgtacgttacgctaaac

SEQ ID NO: 5917890 - DNA, 25 bp, Homo sapien
ttggttcttagttcgtccgacctta

SEQ ID NO: 5917891 - DNA, 25 bp, Homo sapien
tcgtctgtacgctattacgtaaagc

SEQ ID NO: 5917892 - DNA, 25 bp, Homo sapien
atcttacgcgagaattaggtgttcc

SEQ ID NO: 5917893 - DNA, 25 bp, Homo sapien
aagtattcgagtcgtaaccagggta

SEQ ID NO: 5917894 - DNA, 25 bp, Homo sapien
tataaacgaactagtgtcgcgagca

SEQ ID NO: 5917895 - DNA, 25 bp, Homo sapien
gaacccatataatcgcgtccaatca

SEQ ID NO: 5917896 - DNA, 25 bp, Homo sapien
ctattcgatctagcgtcgttacctt

SEQ ID NO: 5917897 - DNA, 25 bp, Homo sapien
gaatttgtacgcggttaagcctatc

SEQ ID NO: 5917898 - DNA, 25 bp, Homo sapien
ctttcggattacgtacgcgaaacaa

SEQ ID NO: 5917899 - DNA, 25 bp, Homo sapien
tttgtatcgataccggacaccaatc

SEQ ID NO: 5917900 - DNA, 25 bp, Homo sapien
ttcgattcctagttcgacgtaatgc

SEQ ID NO: 5917901 - DNA, 25 bp, Homo sapien
tgagtcagtatcggcgtatcttctt

SEQ ID NO: 5917902 - DNA, 25 bp, Homo sapien
tactactacctcgacgtaaggtaga

SEQ ID NO: 5917903 - DNA, 25 bp, Homo sapien
atgcacatacaccgcgctataacta

SEQ ID NO: 5917904 - DNA, 25 bp, Homo sapien
actcatatagttcgcggtctaggaa

SEQ ID NO: 5917905 - DNA, 25 bp, Homo sapien
ttctgtatcgctcttagcggctaat

SEQ ID NO: 5917906 - DNA, 25 bp, Homo sapien
atggaaatctagcgacgtattgcca

SEQ ID NO: 5917907 - DNA, 25 bp, Homo sapien
tccatacggtcgtattacgaccatt

SEQ ID NO: 5917908 - DNA, 25 bp, Homo sapien
ccgtgttaacgcgatatcgttattg

SEQ ID NO: 5917909 - DNA, 25 bp, Homo sapien
aatttagtattggcgtacccgatgg

SEQ ID NO: 5917910 - DNA, 25 bp, Homo sapien
aattccagtcgcgtaactaacctac

SEQ ID NO: 5917911 - DNA, 25 bp, Homo sapien
cttgagggctaatcgcgtagtttat

SEQ ID NO: 5917912 - DNA, 25 bp, Homo sapien
aactagcgttagtactcgacattcg

SEQ ID NO: 5917913 - DNA, 25 bp, Homo sapien
aactatcgatacgcggaattcacac

SEQ ID NO: 5917914 - DNA, 25 bp, Homo sapien
atgaactcggagcggattaagtagt

SEQ ID NO: 5917915 - DNA, 25 bp, Homo sapien
atttgacgcgatatacagggaccat

SEQ ID NO: 5917916 - DNA, 25 bp, Homo sapien
ttgatcagtacgttcgctagtttcc

SEQ ID NO: 5917917 - DNA, 25 bp, Homo sapien
ctggttgacgcgttatacacttctt

SEQ ID NO: 5917918 - DNA, 25 bp, Homo sapien
tggtgacgataacgcgaatactttg

SEQ ID NO: 5917919 - DNA, 25 bp, Homo sapien
caatttccccgatcgcgtttattca

SEQ ID NO: 5917920 - DNA, 25 bp, Homo sapien
tgattccctaacgcgagtagaaatg

SEQ ID NO: 5917921 - DNA, 25 bp, Homo sapien
aatttttacactacgaccgcgtgca

SEQ ID NO: 5917922 - DNA, 25 bp, Homo sapien
gagaaattatcgcgacgtgcaatca

SEQ ID NO: 5917923 - DNA, 25 bp, Homo sapien
ctgtgacgatgttacgtacatagtc

SEQ ID NO: 5917924 - DNA, 25 bp, Homo sapien
tttacccgaccgttcgtacattatg

SEQ ID NO: 5917925 - DNA, 25 bp, Homo sapien
ataccatattgccggtgcgtaacaa

SEQ ID NO: 5917926 - DNA, 25 bp, Homo sapien
catattttacaaccgcggacagtct

SEQ ID NO: 5917927 - DNA, 25 bp, Homo sapien
ttctctactaattcgcggatgcact

SEQ ID NO: 5917928 - DNA, 25 bp, Homo sapien
gtcctttaattccggcgtatgactt

SEQ ID NO: 5917929 - DNA, 25 bp, Homo sapien
gaacttcgaataccgtcgtagtgtt

SEQ ID NO: 5917930 - DNA, 25 bp, Homo sapien
cactcacgtacgaagttagattcca

SEQ ID NO: 5917931 - DNA, 25 bp, Homo sapien
gtccaacgctacgtactacacataa

SEQ ID NO: 5917932 - DNA, 25 bp, Homo sapien
acatctttaacgctacggagctttc

SEQ ID NO: 5917933 - DNA, 25 bp, Homo sapien
cctagatcgcgagtaaccattaatc

SEQ ID NO: 5917934 - DNA, 25 bp, Homo sapien
tgcaagattgatcgcggactaatag

SEQ ID NO: 5917935 - DNA, 25 bp, Homo sapien
ttagatattctgtcgcgtagtgagc

SEQ ID NO: 5917936 - DNA, 25 bp, Homo sapien
tgcacttaaggtcgatcggaatatg

SEQ ID NO: 5917937 - DNA, 25 bp, Homo sapien
ccaattgttcgcgatagtaatggtc

SEQ ID NO: 5917938 - DNA, 25 bp, Homo sapien
aaaggtgtacgcgactaatacgttg

SEQ ID NO: 5917939 - DNA, 25 bp, Homo sapien
aaagtgaccgactactcgactgtaa

SEQ ID NO: 5917940 - DNA, 25 bp, Homo sapien
tgtatctatcacgcgaccctgatat

SEQ ID NO: 5917941 - DNA, 25 bp, Homo sapien
gtgacagtaacggaatgcggatata

SEQ ID NO: 5917942 - DNA, 25 bp, Homo sapien
tcaagtcgcgctaaagaatggcata

SEQ ID NO: 5917943 - DNA, 25 bp, Homo sapien
gagaactcgaccaatacgcattaac

SEQ ID NO: 5917944 - DNA, 25 bp, Homo sapien
atctagctaatagacgccgagttga

SEQ ID NO: 5917945 - DNA, 25 bp, Homo sapien
atcgctgtcggtcgtatattttagc

SEQ ID NO: 5917946 - DNA, 25 bp, Homo sapien
tatttctacacgatacgcgcctaca

SEQ ID NO: 5917947 - DNA, 25 bp, Homo sapien
attcgataagtcgcgtaagtgcgat

SEQ ID NO: 5917948 - DNA, 25 bp, Homo sapien
atttaaccgttagtcgctatcctgc

SEQ ID NO: 5917949 - DNA, 25 bp, Homo sapien
acgttacgcgtaaactagtgtcaga

SEQ ID NO: 5917950 - DNA, 25 bp, Homo sapien
aaaatgggttcgacgtaccctatca

SEQ ID NO: 5917951 - DNA, 25 bp, Homo sapien
ccgataattgcgcgattacagttga

SEQ ID NO: 5917952 - DNA, 25 bp, Homo sapien
aatctcatatggcgtcccgagattt

SEQ ID NO: 5917953 - DNA, 25 bp, Homo sapien
gcattcatgactaacgcgacatagt

SEQ ID NO: 5917954 - DNA, 25 bp, Homo sapien
aacatatacgtcaacgcaccccatt

SEQ ID NO: 5917955 - DNA, 25 bp, Homo sapien
ggtgatcgacgatacgtaaaactca

SEQ ID NO: 5917956 - DNA, 25 bp, Homo sapien
accaattcgactatggacggatttc

SEQ ID NO: 5917957 - DNA, 25 bp, Homo sapien
attcttcgtatgcgctagtactcga

SEQ ID NO: 5917958 - DNA, 25 bp, Homo sapien
gcatcttacgtacgcgaaaagttct

SEQ ID NO: 5917959 - DNA, 25 bp, Homo sapien
gtgtaatcggcatacgaagtaactc

SEQ ID NO: 5917960 - DNA, 25 bp, Homo sapien
actctatagaccgtacgaggcaata

SEQ ID NO: 5917961 - DNA, 25 bp, Homo sapien
tcgatcgcgtagtacggtactataa

SEQ ID NO: 5917962 - DNA, 25 bp, Homo sapien
tgatagtagtacgccgttagaacac

SEQ ID NO: 5917963 - DNA, 25 bp, Homo sapien
tagaacgtagaacgcgagtccaaaa

SEQ ID NO: 5917964 - DNA, 25 bp, Homo sapien
gctaaatattacggcccgtttgcta

SEQ ID NO: 5917965 - DNA, 25 bp, Homo sapien
cgcatgagactaatacgcgctataa

SEQ ID NO: 5917966 - DNA, 25 bp, Homo sapien
gtttgtgcgtctagtatcgcgttaa

SEQ ID NO: 5917967 - DNA, 25 bp, Homo sapien
cgattagcgtccgtctagatatgta

SEQ ID NO: 5917968 - DNA, 25 bp, Homo sapien
tgagagccgttagtagacgtaattg

SEQ ID NO: 5917969 - DNA, 25 bp, Homo sapien
tacttaccgattaggcgaactcaca

SEQ ID NO: 5917970 - DNA, 25 bp, Homo sapien
ctgtaatactctcgcgtagtctttc

SEQ ID NO: 5917971 - DNA, 25 bp, Homo sapien
tactatgacgtcgcgtatatctacg

SEQ ID NO: 5917972 - DNA, 25 bp, Homo sapien
tgaccgcgtattacgtcgtatgtaa

SEQ ID NO: 5917973 - DNA, 25 bp, Homo sapien
catcacatcgaacgtacggttagaa

SEQ ID NO: 5917974 - DNA, 25 bp, Homo sapien
tacatctatacgcgttccgattctc

SEQ ID NO: 5917975 - DNA, 25 bp, Homo sapien
caaatacgacgatccgtaagtacag

SEQ ID NO: 5917976 - DNA, 25 bp, Homo sapien
agactttcgacgtatgtcgacatgt

SEQ ID NO: 5917977 - DNA, 25 bp, Homo sapien
caagtatacgcgatcggttcactaa

SEQ ID NO: 5917978 - DNA, 25 bp, Homo sapien
gatattatcgacccgttgaatcgct

SEQ ID NO: 5917979 - DNA, 25 bp, Homo sapien
tagcatatcgcgaataacgacgcat

SEQ ID NO: 5917980 - DNA, 25 bp, Homo sapien
atcaggcgatagtgcgttatagcta

SEQ ID NO: 5917981 - DNA, 25 bp, Homo sapien
ctagtgtcgtatacgttcgttacca

SEQ ID NO: 5917982 - DNA, 25 bp, Homo sapien
tgcaacacgagcgataactgtaatc

SEQ ID NO: 5917983 - DNA, 25 bp, Homo sapien
ggttaagcgttccgatacggataat

SEQ ID NO: 5917984 - DNA, 25 bp, Homo sapien
tctaaacgttcggctagtcctgaaa

SEQ ID NO: 5917985 - DNA, 25 bp, Homo sapien
aaagattagacgcgtaatcggcatg

SEQ ID NO: 5917986 - DNA, 25 bp, Homo sapien
tacagacgtaactacgcgaaattcg

SEQ ID NO: 5917987 - DNA, 25 bp, Homo sapien
gctcatacggtcgcgtatatctaat

SEQ ID NO: 5917988 - DNA, 25 bp, Homo sapien
tcggctatagggcgcgtaattaatt

SEQ ID NO: 5917989 - DNA, 25 bp, Homo sapien
aacaacacgttcgcgctattcttca

SEQ ID NO: 5917990 - DNA, 25 bp, Homo sapien
aaaacccgctatatgtcgctctaga

SEQ ID NO: 5917991 - DNA, 25 bp, Homo sapien
tttcaacgcaacgttaagcgtcgtt

SEQ ID NO: 5917992 - DNA, 25 bp, Homo sapien
atcattgaccggatacgtttcagca

SEQ ID NO: 5917993 - DNA, 25 bp, Homo sapien
atctatacgataggcgaacagtggt

SEQ ID NO: 5917994 - DNA, 25 bp, Homo sapien
agtactcgtcgaatcgtgatctagt

SEQ ID NO: 5917995 - DNA, 25 bp, Homo sapien
tcgttcgttacccgcgaataaacat

SEQ ID NO: 5917996 - DNA, 25 bp, Homo sapien
cgcatagttcgcgaacgttctaaaa

SEQ ID NO: 5917997 - DNA, 25 bp, Homo sapien
tcacttctaatacgatcgctccagt

SEQ ID NO: 5917998 - DNA, 25 bp, Homo sapien
aaagcggattacgcgtctagtcatt

SEQ ID NO: 5917999 - DNA, 25 bp, Homo sapien
tcatcaatgcgcgacttagattcgt

SEQ ID NO: 5918000 - DNA, 25 bp, Homo sapien
ttcctccgtacgctatctataactc

SEQ ID NO: 5918001 - DNA, 25 bp, Homo sapien
tttgaggatatctcgcgaccaatga

SEQ ID NO: 5918002 - DNA, 25 bp, Homo sapien
ctgattactagtcgcgcttgagtta

SEQ ID NO: 5918003 - DNA, 25 bp, Homo sapien
tattcctacgacgcatcgttctcat

SEQ ID NO: 5918004 - DNA, 25 bp, Homo sapien
ggctttatatagtcgcgaatcttgg

SEQ ID NO: 5918005 - DNA, 25 bp, Homo sapien
aataccacgtatacggacgcataca

SEQ ID NO: 5918006 - DNA, 25 bp, Homo sapien
tatagacttatacgtcgcgcgttac

SEQ ID NO: 5918007 - DNA, 25 bp, Homo sapien
taaattacggaaccgcgtacgcata

SEQ ID NO: 5918008 - DNA, 25 bp, Homo sapien
agtgtacgttcgcgacatacaatgt

SEQ ID NO: 5918009 - DNA, 25 bp, Homo sapien
tgaaaactcgcgtaatgagtcctct

SEQ ID NO: 5918010 - DNA, 25 bp, Homo sapien
catagtagtcgataccgtcccaaaa

SEQ ID NO: 5918011 - DNA, 25 bp, Homo sapien
ctaactttcgcgtatagcgtcacat

SEQ ID NO: 5918012 - DNA, 25 bp, Homo sapien
gtttaagatcgaccgtcaacgcatt

SEQ ID NO: 5918013 - DNA, 25 bp, Homo sapien
atctacgatcgcgcactaagaatca

SEQ ID NO: 5918014 - DNA, 25 bp, Homo sapien
ttggaaagatattgcgtcggaagct

SEQ ID NO: 5918015 - DNA, 25 bp, Homo sapien
agaagggagcgtagtacgaatcata

SEQ ID NO: 5918016 - DNA, 25 bp, Homo sapien
acactttcgtttacgccgatactct

SEQ ID NO: 5918017 - DNA, 25 bp, Homo sapien
gcattatcgtacgataggcgttttg

SEQ ID NO: 5918018 - DNA, 25 bp, Homo sapien
attctggatcgtacggataatccca

SEQ ID NO: 5918019 - DNA, 25 bp, Homo sapien
ccagtaaccgcgtataatctactct

SEQ ID NO: 5918020 - DNA, 25 bp, Homo sapien
tcactacctacgcgacttatctaac

SEQ ID NO: 5918021 - DNA, 25 bp, Homo sapien
tgttctttgcgcgaatagacaccta

SEQ ID NO: 5918022 - DNA, 25 bp, Homo sapien
atatcagacgtcggtcgttactcaa

SEQ ID NO: 5918023 - DNA, 25 bp, Homo sapien
tataattagcggtacgcttaagccg

SEQ ID NO: 5918024 - DNA, 25 bp, Homo sapien
aggaagggtcgacgctaaatgttaa

SEQ ID NO: 5918025 - DNA, 25 bp, Homo sapien
attgaagatcgtgcgatcaatgtgc

SEQ ID NO: 5918026 - DNA, 25 bp, Homo sapien
tggactctacgctgatcgtaaattg

SEQ ID NO: 5918027 - DNA, 25 bp, Homo sapien
taaatccgtatacgagggtattgcg

SEQ ID NO: 5918028 - DNA, 25 bp, Homo sapien
ctttaccgtataatcgcgatgaagg

SEQ ID NO: 5918029 - DNA, 25 bp, Homo sapien
tgactatattcccgcgcgtatacaa

SEQ ID NO: 5918030 - DNA, 25 bp, Homo sapien
ggacttgcgcacgagtattaaattg

SEQ ID NO: 5918031 - DNA, 25 bp, Homo sapien
gcaatcgtcgcaacggattaaattg

SEQ ID NO: 5918032 - DNA, 25 bp, Homo sapien
agcttgcccgcgcataatgttttta

SEQ ID NO: 5918033 - DNA, 25 bp, Homo sapien
atgcaccgcgatactaaagactcaa

SEQ ID NO: 5918034 - DNA, 25 bp, Homo sapien
actatatgcgtatcgacgtgacatg

SEQ ID NO: 5918035 - DNA, 25 bp, Homo sapien
agttattcgatctactccggtcatg

SEQ ID NO: 5918036 - DNA, 25 bp, Homo sapien
agctggctagtactacgcgtataaa

SEQ ID NO: 5918037 - DNA, 25 bp, Homo sapien
tgatagtctatcgtaccggccaata

SEQ ID NO: 5918038 - DNA, 25 bp, Homo sapien
taaccgtagtcgattacgctgaaac

SEQ ID NO: 5918039 - DNA, 25 bp, Homo sapien
ttggacatagttcgcggcctatttt

SEQ ID NO: 5918040 - DNA, 25 bp, Homo sapien
gtacactatcgtcgtacctttgttg

SEQ ID NO: 5918041 - DNA, 25 bp, Homo sapien
tcagacgcgattaccggataatgta

SEQ ID NO: 5918042 - DNA, 25 bp, Homo sapien
tctgtatttagtcgcggacagtgtt

SEQ ID NO: 5918043 - DNA, 25 bp, Homo sapien
tttgttcgtacgctacacgaacaag

SEQ ID NO: 5918044 - DNA, 25 bp, Homo sapien
ccaagtcgattaggcgtacgaaata

SEQ ID NO: 5918045 - DNA, 25 bp, Homo sapien
gagtcttcgctatacgagaggaaaa

SEQ ID NO: 5918046 - DNA, 25 bp, Homo sapien
atcagactatattcgtccgggtttg

SEQ ID NO: 5918047 - DNA, 25 bp, Homo sapien
tctcggcgcgcaacttagaaataaa

SEQ ID NO: 5918048 - DNA, 25 bp, Homo sapien
caagatccgcgttatacgacgtaat

SEQ ID NO: 5918049 - DNA, 25 bp, Homo sapien
atgatcgtcgacgcaagtagtaagt

SEQ ID NO: 5918050 - DNA, 25 bp, Homo sapien
tgtattgtcgcgtacgaatgcatac

SEQ ID NO: 5918051 - DNA, 25 bp, Homo sapien
aagccgtacgacctatacgcaataa

SEQ ID NO: 5918052 - DNA, 25 bp, Homo sapien
tagtgactagcgcaacgcatatact

SEQ ID NO: 5918053 - DNA, 25 bp, Homo sapien
actagtcgcatcggtaatattgctc

SEQ ID NO: 5918054 - DNA, 25 bp, Homo sapien
gtatgaacgaacgacgtacttgcat

SEQ ID NO: 5918055 - DNA, 25 bp, Homo sapien
catcgtcgacgagcgctaattaaat

SEQ ID NO: 5918056 - DNA, 25 bp, Homo sapien
tagccgtcgtgcgaccatatattaa

SEQ ID NO: 5918057 - DNA, 25 bp, Homo sapien
tcggatagcgcgactagtactaatt

SEQ ID NO: 5918058 - DNA, 25 bp, Homo sapien
tttcttagcgcgcattatatagcgc

SEQ ID NO: 5918059 - DNA, 25 bp, Homo sapien
agtagcgtctaacgacgtattgcat

SEQ ID NO: 5918060 - DNA, 25 bp, Homo sapien
atcctaacgcgtattcgtttaagcg

SEQ ID NO: 5918061 - DNA, 25 bp, Homo sapien
atcaaagcgcgacttaaggtaccaa

SEQ ID NO: 5918062 - DNA, 25 bp, Homo sapien
ctttactagcgtacaacggtttctg

SEQ ID NO: 5918063 - DNA, 25 bp, Homo sapien
agccaagtcgcgaaacaacgttata

SEQ ID NO: 5918064 - DNA, 25 bp, Homo sapien
agacaacgagcgtacaacggaattt

SEQ ID NO: 5918065 - DNA, 25 bp, Homo sapien
ggattattcgtacgatacggtttcg

SEQ ID NO: 5918066 - DNA, 25 bp, Homo sapien
aatactgattagtcggacgtcctca

SEQ ID NO: 5918067 - DNA, 25 bp, Homo sapien
attccgagaacgagcggtaatttgt

SEQ ID NO: 5918068 - DNA, 25 bp, Homo sapien
attcaatcgatcgtacgcctttgga

SEQ ID NO: 5918069 - DNA, 25 bp, Homo sapien
acaggtggttctactacgctctata

SEQ ID NO: 5918070 - DNA, 25 bp, Homo sapien
acccaacgcgtaactatacttttgc

SEQ ID NO: 5918071 - DNA, 25 bp, Homo sapien
ccatttgcgttatacgaagcgacat

SEQ ID NO: 5918072 - DNA, 25 bp, Homo sapien
ttctactactatcgcgctatctagg

SEQ ID NO: 5918073 - DNA, 25 bp, Homo sapien
ccatttcgcgatagacgataagaga

SEQ ID NO: 5918074 - DNA, 25 bp, Homo sapien
ttagttatacgatcgtcaggggtgt

SEQ ID NO: 5918075 - DNA, 25 bp, Homo sapien
ccttatgacgtccgacatacttcaa

SEQ ID NO: 5918076 - DNA, 25 bp, Homo sapien
tcagttctagcgcgatataaagcgt

SEQ ID NO: 5918077 - DNA, 25 bp, Homo sapien
aagaaaacaatcgtgcgtacggctt

SEQ ID NO: 5918078 - DNA, 25 bp, Homo sapien
cccttttacgcgtagtaattcgtca

SEQ ID NO: 5918079 - DNA, 25 bp, Homo sapien
gcagatcgcctttacgttagttctt

SEQ ID NO: 5918080 - DNA, 25 bp, Homo sapien
ctgatcaatcgcgctaacgatgata

SEQ ID NO: 5918081 - DNA, 25 bp, Homo sapien
accgttcgtatgattcggaaaatgg

SEQ ID NO: 5918082 - DNA, 25 bp, Homo sapien
taaatgtcgtaccggcatagaagca

SEQ ID NO: 5918083 - DNA, 25 bp, Homo sapien
ttttggatcgcgatacgactattgg

SEQ ID NO: 5918084 - DNA, 25 bp, Homo sapien
gttcacgagtatactcgcgacatta

SEQ ID NO: 5918085 - DNA, 25 bp, Homo sapien
aaagtcacatatcgtcgcttccgat

SEQ ID NO: 5918086 - DNA, 25 bp, Homo sapien
ttatatgtcgcgtccttatccgact

SEQ ID NO: 5918087 - DNA, 25 bp, Homo sapien
aatctgcgctacgattaactgacgt

SEQ ID NO: 5918088 - DNA, 25 bp, Homo sapien
tttccgcgcgtgttatagttggatt

SEQ ID NO: 5918089 - DNA, 25 bp, Homo sapien
cacacttcgtagcacgatctgaaat

SEQ ID NO: 5918090 - DNA, 25 bp, Homo sapien
taacgtcgtatacgttcgtgtttcg

SEQ ID NO: 5918091 - DNA, 25 bp, Homo sapien
tatggactaccgcggttatgtgtta

SEQ ID NO: 5918092 - DNA, 25 bp, Homo sapien
gcggaaacgtatagtcgcctattaa

SEQ ID NO: 5918093 - DNA, 25 bp, Homo sapien
actatatagcgacgcgagtttacac

SEQ ID NO: 5918094 - DNA, 25 bp, Homo sapien
cctatgcgtctaagatcggaattct

SEQ ID NO: 5918095 - DNA, 25 bp, Homo sapien
gaactactagtaacgcgaagtagct

SEQ ID NO: 5918096 - DNA, 25 bp, Homo sapien
tatatatagggcggtatcgcgatga

SEQ ID NO: 5918097 - DNA, 25 bp, Homo sapien
ctttgttcgtatcgtgcgggttatt

SEQ ID NO: 5918098 - DNA, 25 bp, Homo sapien
agaaaaactatgcggtacgactagc

SEQ ID NO: 5918099 - DNA, 25 bp, Homo sapien
taaaggtatgttcgccgtatccaca

SEQ ID NO: 5918100 - DNA, 25 bp, Homo sapien
atcaatcgttacgtcccgacaacat

SEQ ID NO: 5918101 - DNA, 25 bp, Homo sapien
gatactaccgcggtattacatttgc

SEQ ID NO: 5918102 - DNA, 25 bp, Homo sapien
tagattattggcgtcgtactagcac

SEQ ID NO: 5918103 - DNA, 25 bp, Homo sapien
tcggtctataggttcgcgacaataa

SEQ ID NO: 5918104 - DNA, 25 bp, Homo sapien
attaacaccgttattagcgcctagc

SEQ ID NO: 5918105 - DNA, 25 bp, Homo sapien
acgttagcgttcgactaacacattg

SEQ ID NO: 5918106 - DNA, 25 bp, Homo sapien
atgtaacgcgtaatatcgccacatg

SEQ ID NO: 5918107 - DNA, 25 bp, Homo sapien
ctacgtcgtgacgattcgttattct

SEQ ID NO: 5918108 - DNA, 25 bp, Homo sapien
tactcatacgttatgacgcgacctt

SEQ ID NO: 5918109 - DNA, 25 bp, Homo sapien
actctggacgattataccgcattga

SEQ ID NO: 5918110 - DNA, 25 bp, Homo sapien
tgatattcgcgctacgttaagtcct

SEQ ID NO: 5918111 - DNA, 25 bp, Homo sapien
tagtacgtatcagcgtacgctgtaa

SEQ ID NO: 5918112 - DNA, 25 bp, Homo sapien
atttgcttatcggcgtcgtactcat

SEQ ID NO: 5918113 - DNA, 25 bp, Homo sapien
acttaatagctcgtacgcggtatac

SEQ ID NO: 5918114 - DNA, 25 bp, Homo sapien
ctaatccgatcctagatcgttccaa

SEQ ID NO: 5918115 - DNA, 25 bp, Homo sapien
tcacttcgcgaccaatagtacattg

SEQ ID NO: 5918116 - DNA, 25 bp, Homo sapien
ttcaaccggtcgtaagctttaatcc

SEQ ID NO: 5918117 - DNA, 25 bp, Homo sapien
atgaccccgtatcgctagttatttc

SEQ ID NO: 5918118 - DNA, 25 bp, Homo sapien
gctaattccgttatacgtgccagta

SEQ ID NO: 5918119 - DNA, 25 bp, Homo sapien
ttctcaattaacgacgcgtgtgtag

SEQ ID NO: 5918120 - DNA, 25 bp, Homo sapien
ccggttgcgtaatatgtcgattatc

SEQ ID NO: 5918121 - DNA, 25 bp, Homo sapien
cattcgaattacgtacgcggaaatc

SEQ ID NO: 5918122 - DNA, 25 bp, Homo sapien
caaagagcgtacgacgaaattttcg

SEQ ID NO: 5918123 - DNA, 25 bp, Homo sapien
acctatagtcgtaaccgcgcatata

SEQ ID NO: 5918124 - DNA, 25 bp, Homo sapien
agatcctcgtacgcgctaatttaag

SEQ ID NO: 5918125 - DNA, 25 bp, Homo sapien
atgtttcgaccgtactatgctccat

SEQ ID NO: 5918126 - DNA, 25 bp, Homo sapien
tgcacactatagtatcgcgactaga

SEQ ID NO: 5918127 - DNA, 25 bp, Homo sapien
gattgtcgcgcattagatactgctt

SEQ ID NO: 5918128 - DNA, 25 bp, Homo sapien
atactgaacgcggtatcggatttga

SEQ ID NO: 5918129 - DNA, 25 bp, Homo sapien
cttaagtaagcgcgtaatcgctgaa

SEQ ID NO: 5918130 - DNA, 25 bp, Homo sapien
ctttgatcggacctagacgttatac

SEQ ID NO: 5918131 - DNA, 25 bp, Homo sapien
cctatcatacgacgcgcttatcttt

SEQ ID NO: 5918132 - DNA, 25 bp, Homo sapien
ttttacgtagtacgacgctctccaa

SEQ ID NO: 5918133 - DNA, 25 bp, Homo sapien
atccattagtccgacgcaaatgttg

SEQ ID NO: 5918134 - DNA, 25 bp, Homo sapien
aacgggcgcgattcgtataattgtt

SEQ ID NO: 5918135 - DNA, 25 bp, Homo sapien
ttatagtcgcatacgacctgtttgg

SEQ ID NO: 5918136 - DNA, 25 bp, Homo sapien
tgtatggtattaggtcgcgtacatg

SEQ ID NO: 5918137 - DNA, 25 bp, Homo sapien
agccaacgtatacgacctaagttct

SEQ ID NO: 5918138 - DNA, 25 bp, Homo sapien
gcctaatacgacgcgtataaagaac

SEQ ID NO: 5918139 - DNA, 25 bp, Homo sapien
gctgttgtaacgttcggtctaaaac

SEQ ID NO: 5918140 - DNA, 25 bp, Homo sapien
aataccatcaccgtacgggctttat

SEQ ID NO: 5918141 - DNA, 25 bp, Homo sapien
taggtttcgtacggtcctatcgtta

SEQ ID NO: 5918142 - DNA, 25 bp, Homo sapien
aaaggaatcggagtcgtacttccaa

SEQ ID NO: 5918143 - DNA, 25 bp, Homo sapien
agttggatacgcgtacgaatatgtc

SEQ ID NO: 5918144 - DNA, 25 bp, Homo sapien
ggcattcgcgactaatctttacttg

SEQ ID NO: 5918145 - DNA, 25 bp, Homo sapien
agtcatatacgccgccctatgtaaa

SEQ ID NO: 5918146 - DNA, 25 bp, Homo sapien
ggctagcgaattagtagcgatagta

SEQ ID NO: 5918147 - DNA, 25 bp, Homo sapien
tagtctcgcaatatgtccggttcat

SEQ ID NO: 5918148 - DNA, 25 bp, Homo sapien
tgtccaatttaacgtcgcgtgaatc

SEQ ID NO: 5918149 - DNA, 25 bp, Homo sapien
tttttcagtatcgacgcgtgtgtga

SEQ ID NO: 5918150 - DNA, 25 bp, Homo sapien
tgaaagtgacgtactacggtagaca

SEQ ID NO: 5918151 - DNA, 25 bp, Homo sapien
ctcctttattaccgcggtcatgtat

SEQ ID NO: 5918152 - DNA, 25 bp, Homo sapien
gttaacaaacgtcgcgagtatccta

SEQ ID NO: 5918153 - DNA, 25 bp, Homo sapien
accagtgtacgcgttatggagtatt

SEQ ID NO: 5918154 - DNA, 25 bp, Homo sapien
gtcttcatacgtacgacggtatgat

SEQ ID NO: 5918155 - DNA, 25 bp, Homo sapien
agatatcttcgtacgaacgacgcat

SEQ ID NO: 5918156 - DNA, 25 bp, Homo sapien
ctactatacgcaggatcgattggtt

SEQ ID NO: 5918157 - DNA, 25 bp, Homo sapien
aaattttcgtagaatcacggggctc

SEQ ID NO: 5918158 - DNA, 25 bp, Homo sapien
ccatagcgttacgtacgactagaaa

SEQ ID NO: 5918159 - DNA, 25 bp, Homo sapien
ctaaatcgataacggtcggtaatcg

SEQ ID NO: 5918160 - DNA, 25 bp, Homo sapien
tattcacgacgaagctacgaactac

SEQ ID NO: 5918161 - DNA, 25 bp, Homo sapien
taccgtatatcgcgtagggatatgt

SEQ ID NO: 5918162 - DNA, 25 bp, Homo sapien
gaaaatcggacgtaaggtatctctc

SEQ ID NO: 5918163 - DNA, 25 bp, Homo sapien
gaatgtcgcggtacatacgattgaa

SEQ ID NO: 5918164 - DNA, 25 bp, Homo sapien
tttgaccgttacacggtcgatgtta

SEQ ID NO: 5918165 - DNA, 25 bp, Homo sapien
tcctctttagtacgccgtttcacaa

SEQ ID NO: 5918166 - DNA, 25 bp, Homo sapien
tcgttattgacggtcgatctacgat

SEQ ID NO: 5918167 - DNA, 25 bp, Homo sapien
ctttcgtactagacgcacggttaaa

SEQ ID NO: 5918168 - DNA, 25 bp, Homo sapien
aaattaactcgcgttctacgggcta

SEQ ID NO: 5918169 - DNA, 25 bp, Homo sapien
ttcactgcgcgataatacgtcatca

SEQ ID NO: 5918170 - DNA, 25 bp, Homo sapien
tagtcagtagcgtcgtatgtgtaac

SEQ ID NO: 5918171 - DNA, 25 bp, Homo sapien
gtttcgagtaatatgcgcgtaatcc

SEQ ID NO: 5918172 - DNA, 25 bp, Homo sapien
caatcgtagcgcgttaaggcatatt

SEQ ID NO: 5918173 - DNA, 25 bp, Homo sapien
gtcaaacgcgacgatataaacgatg

SEQ ID NO: 5918174 - DNA, 25 bp, Homo sapien
ttctaatagaccggtacgaccaatg

SEQ ID NO: 5918175 - DNA, 25 bp, Homo sapien
tgaaagagcgtactagcggacataa

SEQ ID NO: 5918176 - DNA, 25 bp, Homo sapien
aagtagatccgctattgcgacgtaa

SEQ ID NO: 5918177 - DNA, 25 bp, Homo sapien
aacagaccgcctattacgaggtaat

SEQ ID NO: 5918178 - DNA, 25 bp, Homo sapien
atgtgaggtcgcgaaatacagtaca

SEQ ID NO: 5918179 - DNA, 25 bp, Homo sapien
ttttagtaattcgcgctacacccgt

SEQ ID NO: 5918180 - DNA, 25 bp, Homo sapien
cttcgtttagcgtcgatcgtaaagt

SEQ ID NO: 5918181 - DNA, 25 bp, Homo sapien
tctaacctcatatctcgcgatatgc

SEQ ID NO: 5918182 - DNA, 25 bp, Homo sapien
atctcatcgcgctacactaatcagt

SEQ ID NO: 5918183 - DNA, 25 bp, Homo sapien
tccagggcgtcgtattatctagtat

SEQ ID NO: 5918184 - DNA, 25 bp, Homo sapien
tgctttccgcgagtaactaagtaca

SEQ ID NO: 5918185 - DNA, 25 bp, Homo sapien
ttatgcgtcgcgcgttaacagtaaa

SEQ ID NO: 5918186 - DNA, 25 bp, Homo sapien
cttacatcgtatggtaccggttttc

SEQ ID NO: 5918187 - DNA, 25 bp, Homo sapien
tttggtctcgcgaacgatatgaaac

SEQ ID NO: 5918188 - DNA, 25 bp, Homo sapien
tggaaatatcgacgttacgagtacc

SEQ ID NO: 5918189 - DNA, 25 bp, Homo sapien
caaatccggctatacgcgattgtta

SEQ ID NO: 5918190 - DNA, 25 bp, Homo sapien
ttcctatagatcggtagcggaaaga

SEQ ID NO: 5918191 - DNA, 25 bp, Homo sapien
ctgatactcgcgtcttacacgaatt

SEQ ID NO: 5918192 - DNA, 25 bp, Homo sapien
catcatcccgaattacgatttcgtg

SEQ ID NO: 5918193 - DNA, 25 bp, Homo sapien
tatccgcgcctaatacgtatggtta

SEQ ID NO: 5918194 - DNA, 25 bp, Homo sapien
gcggatgtacgtaacatcgacatat

SEQ ID NO: 5918195 - DNA, 25 bp, Homo sapien
aacacttacgcgactagtcgatatc

SEQ ID NO: 5918196 - DNA, 25 bp, Homo sapien
ggtatccgtataaccggtatagtga

SEQ ID NO: 5918197 - DNA, 25 bp, Homo sapien
tagcataacgatagcccgtcgaatt

SEQ ID NO: 5918198 - DNA, 25 bp, Homo sapien
atcaagtaatagcggatcggtacct

SEQ ID NO: 5918199 - DNA, 25 bp, Homo sapien
tttactgtcacgacgtatgacctca

SEQ ID NO: 5918200 - DNA, 25 bp, Homo sapien
atcagtaccgcgcataatggttttg

SEQ ID NO: 5918201 - DNA, 25 bp, Homo sapien
tttgtagttaaggtacgcgaaccac

SEQ ID NO: 5918202 - DNA, 25 bp, Homo sapien
gcttgccagttagtacgcgtaataa

SEQ ID NO: 5918203 - DNA, 25 bp, Homo sapien
tgaccttaccgtagcgaataaacgt

SEQ ID NO: 5918204 - DNA, 25 bp, Homo sapien
taattgttacgtcgtgcgaaccctt

SEQ ID NO: 5918205 - DNA, 25 bp, Homo sapien
gagataccgttcgactagtggttat

SEQ ID NO: 5918206 - DNA, 25 bp, Homo sapien
cctagtgcgttcgacgtataataac

SEQ ID NO: 5918207 - DNA, 25 bp, Homo sapien
catagtagtacgacgctagggttta

SEQ ID NO: 5918208 - DNA, 25 bp, Homo sapien
atgcattactattacgcgcgaaagc

SEQ ID NO: 5918209 - DNA, 25 bp, Homo sapien
gtttctcgcccgatagtatctgttt

SEQ ID NO: 5918210 - DNA, 25 bp, Homo sapien
tggctttaacgcgcaatagtcaaca

SEQ ID NO: 5918211 - DNA, 25 bp, Homo sapien
gaataaccgtgcgtaatagtgagag

SEQ ID NO: 5918212 - DNA, 25 bp, Homo sapien
tccagatctaagcgcgcgatttaat

SEQ ID NO: 5918213 - DNA, 25 bp, Homo sapien
ttacatcccgcgtaaacaacacaac

SEQ ID NO: 5918214 - DNA, 25 bp, Homo sapien
agatctggcgtaatacgacacgaat

SEQ ID NO: 5918215 - DNA, 25 bp, Homo sapien
tctccccgactattcgaacacaatt

SEQ ID NO: 5918216 - DNA, 25 bp, Homo sapien
acattgcgacgtctatcgacatcaa

SEQ ID NO: 5918217 - DNA, 25 bp, Homo sapien
cacatgtcgcgacacgtattataag

SEQ ID NO: 5918218 - DNA, 25 bp, Homo sapien
accagactcgcaattcgtagttagt

SEQ ID NO: 5918219 - DNA, 25 bp, Homo sapien
gccatccgcgattagtcctttatat

SEQ ID NO: 5918220 - DNA, 25 bp, Homo sapien
atctagtcgttgtacgaacggctat

SEQ ID NO: 5918221 - DNA, 25 bp, Homo sapien
gcctgtactattcgacgcattatac

SEQ ID NO: 5918222 - DNA, 25 bp, Homo sapien
cctactatgcgcgatctaactaact

SEQ ID NO: 5918223 - DNA, 25 bp, Homo sapien
atttaccgtacggagtattcacgtg

SEQ ID NO: 5918224 - DNA, 25 bp, Homo sapien
cttgtttacgccgaccttaaacaga

SEQ ID NO: 5918225 - DNA, 25 bp, Homo sapien
agatcctagctagttcgcggaattt

SEQ ID NO: 5918226 - DNA, 25 bp, Homo sapien
atcaacacgcgatacaatgatctgc

SEQ ID NO: 5918227 - DNA, 25 bp, Homo sapien
acaaaatcgttcggatacgcttggt

SEQ ID NO: 5918228 - DNA, 25 bp, Homo sapien
tgtaagatacggcgcttacgactta

SEQ ID NO: 5918229 - DNA, 25 bp, Homo sapien
tttgtctgcgatattcgaccggaat

SEQ ID NO: 5918230 - DNA, 25 bp, Homo sapien
ctatatcgcgtagtacgattcgtag

SEQ ID NO: 5918231 - DNA, 25 bp, Homo sapien
gtatcaccgtatgcgatagtgttca

SEQ ID NO: 5918232 - DNA, 25 bp, Homo sapien
ctcaaatcgatatacgctcccttac

SEQ ID NO: 5918233 - DNA, 25 bp, Homo sapien
tattgttagtccgtcgcaaggttag

SEQ ID NO: 5918234 - DNA, 25 bp, Homo sapien
agtctactagtatcggcgcatcaat

SEQ ID NO: 5918235 - DNA, 25 bp, Homo sapien
caatcacgtacgcgtagaaccattt

SEQ ID NO: 5918236 - DNA, 25 bp, Homo sapien
ttgagttacctatgcgcgaaaagtg

SEQ ID NO: 5918237 - DNA, 25 bp, Homo sapien
tcgaatgtgacgtagtcggaataga

SEQ ID NO: 5918238 - DNA, 25 bp, Homo sapien
tggttgcgcgttaagatattgagga

SEQ ID NO: 5918239 - DNA, 25 bp, Homo sapien
tagttggacgcgttaatcgtgtgaa

SEQ ID NO: 5918240 - DNA, 25 bp, Homo sapien
aataatgacgtctatccgacaacgg

SEQ ID NO: 5918241 - DNA, 25 bp, Homo sapien
attatgacgattctacgcggggaaa

SEQ ID NO: 5918242 - DNA, 25 bp, Homo sapien
ccctatcgcaatacgtcgattatac

SEQ ID NO: 5918243 - DNA, 25 bp, Homo sapien
cgtaaatagtatcgcggtatccatg

SEQ ID NO: 5918244 - DNA, 25 bp, Homo sapien
ctttatggttacgttatcggtgagc

SEQ ID NO: 5918245 - DNA, 25 bp, Homo sapien
tcttcaacgtaagtacgcggcttta

SEQ ID NO: 5918246 - DNA, 25 bp, Homo sapien
tggattaacgatcgcgctacataac

SEQ ID NO: 5918247 - DNA, 25 bp, Homo sapien
aaaggttcgatccgctattttggca

SEQ ID NO: 5918248 - DNA, 25 bp, Homo sapien
ctcgtgcgacgttacgtctaattta

SEQ ID NO: 5918249 - DNA, 25 bp, Homo sapien
agttatgcccttacgcgtaaggtaa

SEQ ID NO: 5918250 - DNA, 25 bp, Homo sapien
tatggccgccgttctagtaatttga

SEQ ID NO: 5918251 - DNA, 25 bp, Homo sapien
ctttcaggtttaacgcgacgaattc

SEQ ID NO: 5918252 - DNA, 25 bp, Homo sapien
tcaggacgtggtagtatcgaaatga

SEQ ID NO: 5918253 - DNA, 25 bp, Homo sapien
cgtgatatacgcgaccgatagttta

SEQ ID NO: 5918254 - DNA, 25 bp, Homo sapien
ataaaggcgttatacgtgcgaatgg

SEQ ID NO: 5918255 - DNA, 25 bp, Homo sapien
catcatttacggggcgaatctttgt

SEQ ID NO: 5918256 - DNA, 25 bp, Homo sapien
gatacttacgccgatagactcaaca

SEQ ID NO: 5918257 - DNA, 25 bp, Homo sapien
cgtgatatatagggcgcgtgatata

SEQ ID NO: 5918258 - DNA, 25 bp, Homo sapien
aatacacgatcacgcgtatgatacg

SEQ ID NO: 5918259 - DNA, 25 bp, Homo sapien
tggatgcgtcgatagatcattcttc

SEQ ID NO: 5918260 - DNA, 25 bp, Homo sapien
acaatatcgtacgggttaggtgtca

SEQ ID NO: 5918261 - DNA, 25 bp, Homo sapien
agttaataacgcggttacctcgatc

SEQ ID NO: 5918262 - DNA, 25 bp, Homo sapien
ttgataacgtagcgtactgcgaatc

SEQ ID NO: 5918263 - DNA, 25 bp, Homo sapien
tcatatgtcgcgtaacaatcactgc

SEQ ID NO: 5918264 - DNA, 25 bp, Homo sapien
tgaagttacgcgttaaaccatcagc

SEQ ID NO: 5918265 - DNA, 25 bp, Homo sapien
gttgttccgcgtacataagtgagtt

SEQ ID NO: 5918266 - DNA, 25 bp, Homo sapien
gataggcggtaatacgcgttttcat

SEQ ID NO: 5918267 - DNA, 25 bp, Homo sapien
tttaccattagtccgacgccgtaat

SEQ ID NO: 5918268 - DNA, 25 bp, Homo sapien
gctaggcgctaataacggtgttaat

SEQ ID NO: 5918269 - DNA, 25 bp, Homo sapien
tatagttgcgcggatgataccttac

SEQ ID NO: 5918270 - DNA, 25 bp, Homo sapien
tgacacctaacccgtacgatattgt

SEQ ID NO: 5918271 - DNA, 25 bp, Homo sapien
ttcctagaccgcgaactatatgagt

SEQ ID NO: 5918272 - DNA, 25 bp, Homo sapien
ttgagtaacgaccgacgtctgatat

SEQ ID NO: 5918273 - DNA, 25 bp, Homo sapien
gaattcgtcgcgttaaacctgaaag

SEQ ID NO: 5918274 - DNA, 25 bp, Homo sapien
gtcaactagtcgaccgacttgattt

SEQ ID NO: 5918275 - DNA, 25 bp, Homo sapien
agactgtccgcggttgtaaaatatg

SEQ ID NO: 5918276 - DNA, 25 bp, Homo sapien
gttacacatacgacgctactgacta

SEQ ID NO: 5918277 - DNA, 25 bp, Homo sapien
ctaaccttgcgacggactaacaata

SEQ ID NO: 5918278 - DNA, 25 bp, Homo sapien
tcatcgcgataccgccctatatata

SEQ ID NO: 5918279 - DNA, 25 bp, Homo sapien
tactggcacgtataacggaattagc

SEQ ID NO: 5918280 - DNA, 25 bp, Homo sapien
tcaactgtaatcgcgcaattatcgg

SEQ ID NO: 5918281 - DNA, 25 bp, Homo sapien
tttacatagggcggcgtatatgact

SEQ ID NO: 5918282 - DNA, 25 bp, Homo sapien
gcagtgattgttacgcgacatatga

SEQ ID NO: 5918283 - DNA, 25 bp, Homo sapien
aagtcatacgccggaattaaaggac

SEQ ID NO: 5918284 - DNA, 25 bp, Homo sapien
acaaagattcgccccgtaaatgatg

SEQ ID NO: 5918285 - DNA, 25 bp, Homo sapien
tcattggtcgcgagatatcctcaaa

SEQ ID NO: 5918286 - DNA, 25 bp, Homo sapien
gaaagtattacgcggtagatgatcg

SEQ ID NO: 5918287 - DNA, 25 bp, Homo sapien
ttggaagtacgactccgattccttt

SEQ ID NO: 5918288 - DNA, 25 bp, Homo sapien
taaaaacattatgcgcgggcaagct

SEQ ID NO: 5918289 - DNA, 25 bp, Homo sapien
ctataatcgctagtcgataggatcc

SEQ ID NO: 5918290 - DNA, 25 bp, Homo sapien
ttatagcgcgtattagtctcatgcg

SEQ ID NO: 5918291 - DNA, 25 bp, Homo sapien
atgcgtcgttcgtacgaagatatct

SEQ ID NO: 5918292 - DNA, 25 bp, Homo sapien
ttttagaacgttcgcgaactatgcg

SEQ ID NO: 5918293 - DNA, 25 bp, Homo sapien
tagttatagcgcggtgtatgtgcat

SEQ ID NO: 5918294 - DNA, 25 bp, Homo sapien
tacatttacgcgaactgtcttcacg

SEQ ID NO: 5918295 - DNA, 25 bp, Homo sapien
tctattatcgcgcggagtttgtcta

SEQ ID NO: 5918296 - DNA, 25 bp, Homo sapien
cataatgtacgaacggtcgggtaaa

SEQ ID NO: 5918297 - DNA, 25 bp, Homo sapien
actgaacgatctatcggccttttgt

SEQ ID NO: 5918298 - DNA, 25 bp, Homo sapien
aattagtactagtcgcgctatccga

SEQ ID NO: 5918299 - DNA, 25 bp, Homo sapien
atcgcacttacgcgacttatcgaat

SEQ ID NO: 5918300 - DNA, 25 bp, Homo sapien
catgccgattacgcgtctaatcttt

SEQ ID NO: 5918301 - DNA, 25 bp, Homo sapien
tataacgttgtttcgcgacttggct

SEQ ID NO: 5918302 - DNA, 25 bp, Homo sapien
tttctagtcgtacgtaacgctatgg

SEQ ID NO: 5918303 - DNA, 25 bp, Homo sapien
attccggtcgaatatcgcagacaaa

SEQ ID NO: 5918304 - DNA, 25 bp, Homo sapien
attacggcgtcggactaatggtaaa

SEQ ID NO: 5918305 - DNA, 25 bp, Homo sapien
tgatagggtacgtcgaacccatttt

SEQ ID NO: 5918306 - DNA, 25 bp, Homo sapien
ataaccactagtcgaacggtatctc

SEQ ID NO: 5918307 - DNA, 25 bp, Homo sapien
tgattggacgcgattatatgggttc

SEQ ID NO: 5918308 - DNA, 25 bp, Homo sapien
gctttacgtaatagcgtacagacga

SEQ ID NO: 5918309 - DNA, 25 bp, Homo sapien
tgaataaacgcgatcggggaaattg

SEQ ID NO: 5918310 - DNA, 25 bp, Homo sapien
cgatatcgaagcgtactagactact

SEQ ID NO: 5918311 - DNA, 25 bp, Homo sapien
gttctttatacgcgtcgtattaggc

SEQ ID NO: 5918312 - DNA, 25 bp, Homo sapien
accaagcgtatccgaacgattttgt

SEQ ID NO: 5918313 - DNA, 25 bp, Homo sapien
ttatgtgtagtacgtagcgttggac

SEQ ID NO: 5918314 - DNA, 25 bp, Homo sapien
gtggcttcgcgagatagtttaagtt

SEQ ID NO: 5918315 - DNA, 25 bp, Homo sapien
aacaattatacgaatcgcgcccgtt

SEQ ID NO: 5918316 - DNA, 25 bp, Homo sapien
aagaagatacgccgatactgactca

SEQ ID NO: 5918317 - DNA, 25 bp, Homo sapien
atatacacgtactagtcgatccgca

SEQ ID NO: 5918318 - DNA, 25 bp, Homo sapien
ttgagtctttagtatcgcggtgcat

SEQ ID NO: 5918319 - DNA, 25 bp, Homo sapien
gatgccataatacgcgtcgtattca

SEQ ID NO: 5918320 - DNA, 25 bp, Homo sapien
gagcaatattaccgatgcgactagt

SEQ ID NO: 5918321 - DNA, 25 bp, Homo sapien
taacaatcgcgtatagccggatttg

SEQ ID NO: 5918322 - DNA, 25 bp, Homo sapien
ttgtgaaacggcgtactaaagagga

SEQ ID NO: 5918323 - DNA, 25 bp, Homo sapien
ataaagcccgtacggtgatggtatt

SEQ ID NO: 5918324 - DNA, 25 bp, Homo sapien
acgtcagttaatcgtagcgcagatt

SEQ ID NO: 5918325 - DNA, 25 bp, Homo sapien
tatgtgcgtagttatcgcgttaacc

SEQ ID NO: 5918326 - DNA, 25 bp, Homo sapien
ttcagcgattacgcgcttacttaag

SEQ ID NO: 5918327 - DNA, 25 bp, Homo sapien
caataacgatatcgcgttaacacgg

SEQ ID NO: 5918328 - DNA, 25 bp, Homo sapien
taaccatacgtattaggcgcggata

SEQ ID NO: 5918329 - DNA, 25 bp, Homo sapien
gttttagaccgaacgttacaacagc

SEQ ID NO: 5918330 - DNA, 25 bp, Homo sapien
tatgccattctttagcgcgacttga

SEQ ID NO: 5918331 - DNA, 25 bp, Homo sapien
ttctaggtcggtacgaatagcgtat

SEQ ID NO: 5918332 - DNA, 25 bp, Homo sapien
catggataccgcgatactatttacg

SEQ ID NO: 5918333 - DNA, 25 bp, Homo sapien
gctaaaatatacgaccgacagcgat

SEQ ID NO: 5918334 - DNA, 25 bp, Homo sapien
atgtgacgctatacgcgaaagttag

SEQ ID NO: 5918335 - DNA, 25 bp, Homo sapien
caaagtattcgcgttatcgtcacca

SEQ ID NO: 5918336 - DNA, 25 bp, Homo sapien
tatttcgtacgcctaatcgacttgg

SEQ ID NO: 5918337 - DNA, 25 bp, Homo sapien
gcgctatataatgcgcgctaagaaa

SEQ ID NO: 5918338 - DNA, 25 bp, Homo sapien
ttacgtcgcaatagcggatctactt

SEQ ID NO: 5918339 - DNA, 25 bp, Homo sapien
catttctactcgcgttagggaatca

SEQ ID NO: 5918340 - DNA, 25 bp, Homo sapien
aatggtcgtaatacgaccgtatgga

SEQ ID NO: 5918341 - DNA, 25 bp, Homo sapien
ccgttgtcggatagacgtcattatt

SEQ ID NO: 5918342 - DNA, 25 bp, Homo sapien
tttgaatcaatcgtagcgccctctt

SEQ ID NO: 5918343 - DNA, 25 bp, Homo sapien
tcctcaatatcttaacgcgcaacca

SEQ ID NO: 5918344 - DNA, 25 bp, Homo sapien
atagccgttcgtacaacgactagat

SEQ ID NO: 5918345 - DNA, 25 bp, Homo sapien
ttaagagcttcggtcgtaatagtcc

SEQ ID NO: 5918346 - DNA, 25 bp, Homo sapien
taatgccacctatcgcgtaatgtgt

SEQ ID NO: 5918347 - DNA, 25 bp, Homo sapien
agtgcatccgcgaattagtagagaa

SEQ ID NO: 5918348 - DNA, 25 bp, Homo sapien
attaaatcgcgcgcttagatctgga

SEQ ID NO: 5918349 - DNA, 25 bp, Homo sapien
aggttattcgcgagtccgaatgata

SEQ ID NO: 5918350 - DNA, 25 bp, Homo sapien
gattaatggttactcgcgatctagg

SEQ ID NO: 5918351 - DNA, 25 bp, Homo sapien
atgagaacgatgcgtcgtaggaata

SEQ ID NO: 5918352 - DNA, 25 bp, Homo sapien
tagcaaacgggccgtaatatttagc

SEQ ID NO: 5918353 - DNA, 25 bp, Homo sapien
taacacataaccgcggtagtccata

SEQ ID NO: 5918354 - DNA, 25 bp, Homo sapien
tttaaccgtgcgtctagtacgaaag

SEQ ID NO: 5918355 - DNA, 25 bp, Homo sapien
aaattccgcgaactagctaggatct

SEQ ID NO: 5918356 - DNA, 25 bp, Homo sapien
tttcgacgcgttacgataccgaaaa

SEQ ID NO: 5918357 - DNA, 25 bp, Homo sapien
actttacgatcgacgctaaacgaag

SEQ ID NO: 5918358 - DNA, 25 bp, Homo sapien
aactcacttatgtacgcggaacaac

SEQ ID NO: 5918359 - DNA, 25 bp, Homo sapien
gttgtgttgtttacgcgggatgtaa

SEQ ID NO: 5918360 - DNA, 25 bp, Homo sapien
agtatatgcgttgcgctagtcacta

SEQ ID NO: 5918361 - DNA, 25 bp, Homo sapien
ttgtttcgcgtacgtaatccgaaag

SEQ ID NO: 5918362 - DNA, 25 bp, Homo sapien
aaggtcgcgtcataacgtatgagta

SEQ ID NO: 5918363 - DNA, 25 bp, Homo sapien
caggtcaatgcgcgatactatatca

SEQ ID NO: 5918364 - DNA, 25 bp, Homo sapien
gataggcttaaccgcgtacaaattc

SEQ ID NO: 5918365 - DNA, 25 bp, Homo sapien
tacatatctagacggacgctaatcg

SEQ ID NO: 5918366 - DNA, 25 bp, Homo sapien
tcactataccggttatacggatacc

SEQ ID NO: 5918367 - DNA, 25 bp, Homo sapien
gttattatacgtcgaacgcactagg

SEQ ID NO: 5918368 - DNA, 25 bp, Homo sapien
attatccgtatcggaacgcttaacc

SEQ ID NO: 5918369 - DNA, 25 bp, Homo sapien
tctattccgactacgtcacattcga

SEQ ID NO: 5918370 - DNA, 25 bp, Homo sapien
gaaagctccgtagcgttaaagatgt

SEQ ID NO: 5918371 - DNA, 25 bp, Homo sapien
cgcttggatcccgcgtatatataat

SEQ ID NO: 5918372 - DNA, 25 bp, Homo sapien
aaatctcgggacgccatatgagatt

SEQ ID NO: 5918373 - DNA, 25 bp, Homo sapien
atgcatacgtactaacccgtttgtc

SEQ ID NO: 5918374 - DNA, 25 bp, Homo sapien
aaaaaccgcgaattagtgatgcgca

SEQ ID NO: 5918375 - DNA, 25 bp, Homo sapien
ctgtgacgatcgaacgttgagtttt

SEQ ID NO: 5918376 - DNA, 25 bp, Homo sapien
gatttccgcgtacgtaattcgaatg

SEQ ID NO: 5918377 - DNA, 25 bp, Homo sapien
ttcaatcgtatgtaccgcgacattc

SEQ ID NO: 5918378 - DNA, 25 bp, Homo sapien
tgaggacgtccgactaatcagtatt

SEQ ID NO: 5918379 - DNA, 25 bp, Homo sapien
aatggggtgcgttgacgtatatgtt

SEQ ID NO: 5918380 - DNA, 25 bp, Homo sapien
cttataatacgtgtcgcgacatgtg

SEQ ID NO: 5918381 - DNA, 25 bp, Homo sapien
ttcatatcgtagcggatagttcagg

SEQ ID NO: 5918382 - DNA, 25 bp, Homo sapien
tatagccattaccgctcgttctatg

SEQ ID NO: 5918383 - DNA, 25 bp, Homo sapien
gtgtaaactcgcgtcgctatatagt

SEQ ID NO: 5918384 - DNA, 25 bp, Homo sapien
attagccgctaagagcgatacagaa

SEQ ID NO: 5918385 - DNA, 25 bp, Homo sapien
taagtcgtaagcgccgtatcttaca

SEQ ID NO: 5918386 - DNA, 25 bp, Homo sapien
caaaacgcctatcgtacgataatgc

SEQ ID NO: 5918387 - DNA, 25 bp, Homo sapien
ttatgtccgctagtacgctctttca

SEQ ID NO: 5918388 - DNA, 25 bp, Homo sapien
tgtaggcgcgtatcgtgtagaaata

SEQ ID NO: 5918389 - DNA, 25 bp, Homo sapien
agtcggataaggacgcgacatataa

SEQ ID NO: 5918390 - DNA, 25 bp, Homo sapien
ctgtacttacggatcgtcgtatttg

SEQ ID NO: 5918391 - DNA, 25 bp, Homo sapien
gcatatcgcgagatatgaggttaga

SEQ ID NO: 5918392 - DNA, 25 bp, Homo sapien
catgtcacgtcgatacgcatatagt

SEQ ID NO: 5918393 - DNA, 25 bp, Homo sapien
caattacgtctactaacggctctca

SEQ ID NO: 5918394 - DNA, 25 bp, Homo sapien
ttaacatttagcgtcgacccttcct

SEQ ID NO: 5918395 - DNA, 25 bp, Homo sapien
ttacatacgacgtaatacgcggtca

SEQ ID NO: 5918396 - DNA, 25 bp, Homo sapien
atactagataatacgacgccctgga

SEQ ID NO: 5918397 - DNA, 25 bp, Homo sapien
gcttatactagtcgggtcgacttta

SEQ ID NO: 5918398 - DNA, 25 bp, Homo sapien
tctttccgctaccgatctataggaa

SEQ ID NO: 5918399 - DNA, 25 bp, Homo sapien
ccaatagtcgtatcgcgatccaaaa

SEQ ID NO: 5918400 - DNA, 25 bp, Homo sapien
caaacccggacgaatatagtctgat

SEQ ID NO: 5918401 - DNA, 25 bp, Homo sapien
tttcctcgcgataagtctaagcaga

SEQ ID NO: 5918402 - DNA, 25 bp, Homo sapien
tcgagtactagcgcatacgaagaat

SEQ ID NO: 5918403 - DNA, 25 bp, Homo sapien
aaccaatcgatcctgcgtatagtag

SEQ ID NO: 5918404 - DNA, 25 bp, Homo sapien
attctccgaagatacgtcgagtagt

SEQ ID NO: 5918405 - DNA, 25 bp, Homo sapien
aaatggttctacgcgtacgtgattg

SEQ ID NO: 5918406 - DNA, 25 bp, Homo sapien
ctattagtccgcgatcaatcttgca

SEQ ID NO: 5918407 - DNA, 25 bp, Homo sapien
gtactaggttcgatgtacgtaagca

SEQ ID NO: 5918408 - DNA, 25 bp, Homo sapien
taactcaagcgcgactagtaatcag

SEQ ID NO: 5918409 - DNA, 25 bp, Homo sapien
tgcacgcggtcgtagtgtaaaaatt

SEQ ID NO: 5918410 - DNA, 25 bp, Homo sapien
cactttgtataatcgcgcgaagtgt

SEQ ID NO: 5918411 - DNA, 25 bp, Homo sapien
tctcttatcgtctatcgcgaaatgg

SEQ ID NO: 5918412 - DNA, 25 bp, Homo sapien
tggaatctaacttcgtacgtgagtg

SEQ ID NO: 5918413 - DNA, 25 bp, Homo sapien
gtggttcgcgtaccttaactacaaa

SEQ ID NO: 5918414 - DNA, 25 bp, Homo sapien
ccattttccgaatcatacgaacggt

SEQ ID NO: 5918415 - DNA, 25 bp, Homo sapien
gtataatcgacgtattgcgataggg

SEQ ID NO: 5918416 - DNA, 25 bp, Homo sapien
atgcaagtacgtcgttcgttcatac

SEQ ID NO: 5918417 - DNA, 25 bp, Homo sapien
ttaggtacgacatgcgttacatagg

SEQ ID NO: 5918418 - DNA, 25 bp, Homo sapien
tgacagattgatcgcggtctttctt

SEQ ID NO: 5918419 - DNA, 25 bp, Homo sapien
gatatctatatacgggcgctaatgg

SEQ ID NO: 5918420 - DNA, 25 bp, Homo sapien
catgtacgcgacctaataccataca

SEQ ID NO: 5918421 - DNA, 25 bp, Homo sapien
ccaaacaggtcgtatgcgactataa

SEQ ID NO: 5918422 - DNA, 25 bp, Homo sapien
atacatgaccgcggtaataaaggag

SEQ ID NO: 5918423 - DNA, 25 bp, Homo sapien
ttggaacgatctaggatcggattag

SEQ ID NO: 5918424 - DNA, 25 bp, Homo sapien
ttaacgcgatactagacgcacaaac

SEQ ID NO: 5918425 - DNA, 25 bp, Homo sapien
cggcttaagcgtaccgctaattata

SEQ ID NO: 5918426 - DNA, 25 bp, Homo sapien
caacgtattagtcgcgtacaccttt

SEQ ID NO: 5918427 - DNA, 25 bp, Homo sapien
atgaaaacgcgtattaccgcctatc

SEQ ID NO: 5918428 - DNA, 25 bp, Homo sapien
atggtccctgtatatcgcgtcaaat

SEQ ID NO: 5918429 - DNA, 25 bp, Homo sapien
caaaaccattatgcgcggtactgat

SEQ ID NO: 5918430 - DNA, 25 bp, Homo sapien
gctttaacacgacgcgtatacagat

SEQ ID NO: 5918431 - DNA, 25 bp, Homo sapien
ttaatatatggtcgcacgacggcta

SEQ ID NO: 5918432 - DNA, 25 bp, Homo sapien
agaattccgatcttagacgcatagg

SEQ ID NO: 5918433 - DNA, 25 bp, Homo sapien
tcgatagaccgttatatcgcttcac

SEQ ID NO: 5918434 - DNA, 25 bp, Homo sapien
actggagcgatcgtattagaagtga

SEQ ID NO: 5918435 - DNA, 25 bp, Homo sapien
tgtatgcgtccgtatacgtggtatt

SEQ ID NO: 5918436 - DNA, 25 bp, Homo sapien
aagagtacgacgttctagctctagt

SEQ ID NO: 5918437 - DNA, 25 bp, Homo sapien
aataacccgcacgatacgaacaaag

SEQ ID NO: 5918438 - DNA, 25 bp, Homo sapien
tttccccgcgtagaatcgtcataat

SEQ ID NO: 5918439 - DNA, 25 bp, Homo sapien
aagaggtcactaatcgcgaaatctc

SEQ ID NO: 5918440 - DNA, 25 bp, Homo sapien
tgtggatacggcgaacataccttta

SEQ ID NO: 5918441 - DNA, 25 bp, Homo sapien
tgtgagttcgcctaatcggtaagta

SEQ ID NO: 5918442 - DNA, 25 bp, Homo sapien
tctagagcgacatatagcgggtttt

SEQ ID NO: 5918443 - DNA, 25 bp, Homo sapien
tgtactgtatttcgcgacctcacat

SEQ ID NO: 5918444 - DNA, 25 bp, Homo sapien
acgaatctaagtcgcgcattgatga

SEQ ID NO: 5918445 - DNA, 25 bp, Homo sapien
gactatgtacgtaacatcgtcacag

SEQ ID NO: 5918446 - DNA, 25 bp, Homo sapien
atatgtcgatgttacgtacatccgc

SEQ ID NO: 5918447 - DNA, 25 bp, Homo sapien
acgaaggtttaaccgtcgatagtga

SEQ ID NO: 5918448 - DNA, 25 bp, Homo sapien
aagacgtagcgtatcggaagtaact

SEQ ID NO: 5918449 - DNA, 25 bp, Homo sapien
caagtaaagattagtcgcgaatgcc

SEQ ID NO: 5918450 - DNA, 25 bp, Homo sapien
cacgaaatcgtaattcgggatgatg

SEQ ID NO: 5918451 - DNA, 25 bp, Homo sapien
ttagtgaaccgatcgcgtatacttg

SEQ ID NO: 5918452 - DNA, 25 bp, Homo sapien
caatgtactattggtcgcgaagtga

SEQ ID NO: 5918453 - DNA, 25 bp, Homo sapien
tctagtcgcgatactatagtgtgca

SEQ ID NO: 5918454 - DNA, 25 bp, Homo sapien
actaactacgaattgcgagtctggt

SEQ ID NO: 5918455 - DNA, 25 bp, Homo sapien
tgagttcgtcgaatactagcactag

SEQ ID NO: 5918456 - DNA, 25 bp, Homo sapien
tagagttcgcgctagaatcgatgat

SEQ ID NO: 5918457 - DNA, 25 bp, Homo sapien
ttacagcgtacgctgatacgtacta

SEQ ID NO: 5918458 - DNA, 25 bp, Homo sapien
gattacagttatcgctcgtgttgca

SEQ ID NO: 5918459 - DNA, 25 bp, Homo sapien
gacgcagtatattcgcgacttcatt

SEQ ID NO: 5918460 - DNA, 25 bp, Homo sapien
tggtgtcgtatagtcgatcgttgta

SEQ ID NO: 5918461 - DNA, 25 bp, Homo sapien
aatgatacgataatacgcgcacgtc

SEQ ID NO: 5918462 - DNA, 25 bp, Homo sapien
atttcccgttctatcgagctgagat

SEQ ID NO: 5918463 - DNA, 25 bp, Homo sapien
atttcagatcgtgctacgaagtgtg

SEQ ID NO: 5918464 - DNA, 25 bp, Homo sapien
tctgtttaaggtcggcgtaaacaag

SEQ ID NO: 5918465 - DNA, 25 bp, Homo sapien
gattggtgtccggtatcgatacaaa

SEQ ID NO: 5918466 - DNA, 25 bp, Homo sapien
tgatgacgtattatcgcgcagtgaa

SEQ ID NO: 5918467 - DNA, 25 bp, Homo sapien
caatttaatactcgtgcgcaagtcc

SEQ ID NO: 5918468 - DNA, 25 bp, Homo sapien
acttactacttgcgtcgacgatcat

SEQ ID NO: 5918469 - DNA, 25 bp, Homo sapien
gcttaactaacgtcgcgttaagatc

SEQ ID NO: 5918470 - DNA, 25 bp, Homo sapien
aaagataagcgcgtcgtatgatagg

SEQ ID NO: 5918471 - DNA, 25 bp, Homo sapien
tgccaaaatagcggatcgaaccttt

SEQ ID NO: 5918472 - DNA, 25 bp, Homo sapien
catattccgatcgaccttaagtgca

SEQ ID NO: 5918473 - DNA, 25 bp, Homo sapien
gcaggatagcgactaacggttaaat

SEQ ID NO: 5918474 - DNA, 25 bp, Homo sapien
gacatattcgtacgcgtatccaact

SEQ ID NO: 5918475 - DNA, 25 bp, Homo sapien
tgttgagtctatcggcgtaagtatc

SEQ ID NO: 5918476 - DNA, 25 bp, Homo sapien
actagatcacgattcgacgagtact

SEQ ID NO: 5918477 - DNA, 25 bp, Homo sapien
atataaaggactaatcgcggatggc

SEQ ID NO: 5918478 - DNA, 25 bp, Homo sapien
aacactacgacggtattcgaagttc

SEQ ID NO: 5918479 - DNA, 25 bp, Homo sapien
aattaattacgcgccctatagccga

SEQ ID NO: 5918480 - DNA, 25 bp, Homo sapien
caacaaaggtacgacgatagtgtac

SEQ ID NO: 5918481 - DNA, 25 bp, Homo sapien
ctacacacgcgtcgttaattgagaa

SEQ ID NO: 5918482 - DNA, 25 bp, Homo sapien
tatcgccgagtaacgcgatatacaa

SEQ ID NO: 5918483 - DNA, 25 bp, Homo sapien
cacttttcgcgcataggtaactcaa

SEQ ID NO: 5918484 - DNA, 25 bp, Homo sapien
gtgttctaacggcgtactactatca

SEQ ID NO: 5918485 - DNA, 25 bp, Homo sapien
cattggtcgtaccggtctattagaa

SEQ ID NO: 5918486 - DNA, 25 bp, Homo sapien
cttgttcgtgtagcgtacgaacaaa

SEQ ID NO: 5918487 - DNA, 25 bp, Homo sapien
catcgtttatatcgtcgcgtttgac

SEQ ID NO: 5918488 - DNA, 25 bp, Homo sapien
gatattcgctatggtacgctaaacc

SEQ ID NO: 5918489 - DNA, 25 bp, Homo sapien
tagtctcgtcgaattacgctcttga

SEQ ID NO: 5918490 - DNA, 25 bp, Homo sapien
gatatcgactagtcgcgtaagtgtt

SEQ ID NO: 5918491 - DNA, 25 bp, Homo sapien
ttgttacgcaccggcaatatggtat

SEQ ID NO: 5918492 - DNA, 25 bp, Homo sapien
ttgagtgtattacgtcccggttact

SEQ ID NO: 5918493 - DNA, 25 bp, Homo sapien
caagacctagttcgtacgctttttg

SEQ ID NO: 5918494 - DNA, 25 bp, Homo sapien
agagtagattatacgcggttactgg

SEQ ID NO: 5918495 - DNA, 25 bp, Homo sapien
cgcttaaacgaatacgcgttaggat

SEQ ID NO: 5918496 - DNA, 25 bp, Homo sapien
cacgtgaatactccgtacggtaaat

SEQ ID NO: 5918497 - DNA, 25 bp, Homo sapien
tgaaagatacgtgcgcgatagtatc

SEQ ID NO: 5918498 - DNA, 25 bp, Homo sapien
tccaaaggcgtacgatcgattgaat

SEQ ID NO: 5918499 - DNA, 25 bp, Homo sapien
tgtctaccgtagtacgtcactttca

SEQ ID NO: 5918500 - DNA, 25 bp, Homo sapien
ggattacgcgcatattactcgaaac

SEQ ID NO: 5918501 - DNA, 25 bp, Homo sapien
tgagttttacgtatcgtcgatcacc

SEQ ID NO: 5918502 - DNA, 25 bp, Homo sapien
gtaacgcgcgacgtataagtctata

SEQ ID NO: 5918503 - DNA, 25 bp, Homo sapien
tctgacactagtttacgcgtaacgt

SEQ ID NO: 5918504 - DNA, 25 bp, Homo sapien
gttttgtatgaccgcggtcaagatt

SEQ ID NO: 5918505 - DNA, 25 bp, Homo sapien
tgattcttagtgcgcgatcgtagat

SEQ ID NO: 5918506 - DNA, 25 bp, Homo sapien
ttaccttacgcgtaagggcataact

SEQ ID NO: 5918507 - DNA, 25 bp, Homo sapien
acaaattaccgctcgttctcggaat

SEQ ID NO: 5918508 - DNA, 25 bp, Homo sapien
aattcgacgggctatcgttatgcta

SEQ ID NO: 5918509 - DNA, 25 bp, Homo sapien
ctctcactattacgcacggttattc

SEQ ID NO: 5918510 - DNA, 25 bp, Homo sapien
tgtacttagttactcgcggaaagca

SEQ ID NO: 5918511 - DNA, 25 bp, Homo sapien
ttggagagcgtcgtactacgtaaaa

SEQ ID NO: 5918512 - DNA, 25 bp, Homo sapien
ttttgggacggtatcgactactatg

SEQ ID NO: 5918513 - DNA, 25 bp, Homo sapien
ggaaggcgtactacggatttatgat

SEQ ID NO: 5918514 - DNA, 25 bp, Homo sapien
tactatcgctactaattcgctagcc

SEQ ID NO: 5918515 - DNA, 25 bp, Homo sapien
agaggactcattacgcgagttttca

SEQ ID NO: 5918516 - DNA, 25 bp, Homo sapien
actatgtcgcgttagtcatgaatgc

SEQ ID NO: 5918517 - DNA, 25 bp, Homo sapien
tacatctttacgtcgcctaacatgc

SEQ ID NO: 5918518 - DNA, 25 bp, Homo sapien
gcaaatgtaataccgcggtagtatc

SEQ ID NO: 5918519 - DNA, 25 bp, Homo sapien
ttatagtaccgtactacgcgatcga

SEQ ID NO: 5918520 - DNA, 25 bp, Homo sapien
cctcatctaacgagcggtagaaata

SEQ ID NO: 5918521 - DNA, 25 bp, Homo sapien
atggagcatagtacggtcgaaacat

SEQ ID NO: 5918522 - DNA, 25 bp, Homo sapien
ttctaaccgtacgttcgatgtgatg

SEQ ID NO: 5918523 - DNA, 25 bp, Homo sapien
gctagtcgtaccgcatagtttttct

SEQ ID NO: 5918524 - DNA, 25 bp, Homo sapien
atatcagggtcgcgtgatagataca

SEQ ID NO: 5918525 - DNA, 25 bp, Homo sapien
ttaataggcgactatacgtttccgc

SEQ ID NO: 5918526 - DNA, 25 bp, Homo sapien
gtatctagtaccgaacgtacctagt

SEQ ID NO: 5918527 - DNA, 25 bp, Homo sapien
tgacgaattactacgcgtaaaaggg

SEQ ID NO: 5918528 - DNA, 25 bp, Homo sapien
gctgatggtttaacgcgtaacttca

SEQ ID NO: 5918529 - DNA, 25 bp, Homo sapien
gcttactcgaccgtagttagaagta

SEQ ID NO: 5918530 - DNA, 25 bp, Homo sapien
ataaactacgcgattagccctcaag

SEQ ID NO: 5918531 - DNA, 25 bp, Homo sapien
tggtaacgaacgtatacgacactag

SEQ ID NO: 5918532 - DNA, 25 bp, Homo sapien
gtatgcattcgtacgcgacaataca

SEQ ID NO: 5918533 - DNA, 25 bp, Homo sapien
taacatcgaccgtgtaacggtcaaa

SEQ ID NO: 5918534 - DNA, 25 bp, Homo sapien
accactgttcgcctatcgtatagat

SEQ ID NO: 5918535 - DNA, 25 bp, Homo sapien
cgattaccgaccgttatcgatttag

SEQ ID NO: 5918536 - DNA, 25 bp, Homo sapien
cgtagatatacgcgacgtcatagta

SEQ ID NO: 5918537 - DNA, 25 bp, Homo sapien
ccattcgcacgtataacgcctttat

SEQ ID NO: 5918538 - DNA, 25 bp, Homo sapien
acattgtatgtcgcgaacgtacact

SEQ ID NO: 5918539 - DNA, 25 bp, Homo sapien
ttacagtcgagtagtcggtcacttt

SEQ ID NO: 5918540 - DNA, 25 bp, Homo sapien
tcaatgcggtataatcgtccagagt

SEQ ID NO: 5918541 - DNA, 25 bp, Homo sapien
tatatccgcattccgttactgtcac

SEQ ID NO: 5918542 - DNA, 25 bp, Homo sapien
aaacagatactatcgggcgagaaac

SEQ ID NO: 5918543 - DNA, 25 bp, Homo sapien
aagcagtatctaatgcgcgacaatc

SEQ ID NO: 5918544 - DNA, 25 bp, Homo sapien
caatgtgttagtcgaacgctaacgt

SEQ ID NO: 5918545 - DNA, 25 bp, Homo sapien
attcgtgtcgtattacgccagatct

SEQ ID NO: 5918546 - DNA, 25 bp, Homo sapien
aaggtaacgacgctagatcgaatag

SEQ ID NO: 5918547 - DNA, 25 bp, Homo sapien
ttttggactcgcgttctacgttcta

SEQ ID NO: 5918548 - DNA, 25 bp, Homo sapien
gtttcagcgtaatcgactacggtta

SEQ ID NO: 5918549 - DNA, 25 bp, Homo sapien
gttatgtagcgcgatcgttaatcca

SEQ ID NO: 5918550 - DNA, 25 bp, Homo sapien
gtataccgcgtacgagctattaagt

SEQ ID NO: 5918551 - DNA, 25 bp, Homo sapien
agaataacgaatcgtcacgacgtag

SEQ ID NO: 5918552 - DNA, 25 bp, Homo sapien
tcctgtcgcggtcatactaaaaact

SEQ ID NO: 5918553 - DNA, 25 bp, Homo sapien
acttatgatgtcgcgtgtaacagga

SEQ ID NO: 5918554 - DNA, 25 bp, Homo sapien
taaagccgcgtacttacgttgaaga

SEQ ID NO: 5918555 - DNA, 25 bp, Homo sapien
gaaagactacgcgagagtattacag

SEQ ID NO: 5918556 - DNA, 25 bp, Homo sapien
gcacattgatcgcacgatcttcaat

SEQ ID NO: 5918557 - DNA, 25 bp, Homo sapien
atgtcgcttcgtataacgcaaatgg

SEQ ID NO: 5918558 - DNA, 25 bp, Homo sapien
attacgtcgtataacgcggatcttg

SEQ ID NO: 5918559 - DNA, 25 bp, Homo sapien
gataatcgacatattacgcaaccgg

SEQ ID NO: 5918560 - DNA, 25 bp, Homo sapien
taacgataggaccgtacgaaaccta

SEQ ID NO: 5918561 - DNA, 25 bp, Homo sapien
cagaaaccgttgtacgctagtaaag

SEQ ID NO: 5918562 - DNA, 25 bp, Homo sapien
gaacttcgcgatataggtctcgtaa

SEQ ID NO: 5918563 - DNA, 25 bp, Homo sapien
ctaatataaagcgacgtcggggtta

SEQ ID NO: 5918564 - DNA, 25 bp, Homo sapien
aattcgtgtaagacgcgagtatcag

SEQ ID NO: 5918565 - DNA, 25 bp, Homo sapien
agcttccgacgcaatatctttccaa

SEQ ID NO: 5918566 - DNA, 25 bp, Homo sapien
tcacacacgcgtcgatactgaaaaa

SEQ ID NO: 5918567 - DNA, 25 bp, Homo sapien
acgtttattcgctacggtaaggtca

SEQ ID NO: 5918568 - DNA, 25 bp, Homo sapien
aggacttaacgtagcgcgaatatca

SEQ ID NO: 5918569 - DNA, 25 bp, Homo sapien
cgcaataccctcgtatacggattta

SEQ ID NO: 5918570 - DNA, 25 bp, Homo sapien
tattgcctcgtacggtctatagagt

SEQ ID NO: 5918571 - DNA, 25 bp, Homo sapien
taaggtcggacgaactaagaaccaa

SEQ ID NO: 5918572 - DNA, 25 bp, Homo sapien
taaattagacgtaacgtcgcacgag

SEQ ID NO: 5918573 - DNA, 25 bp, Homo sapien
atcggaagcgacgatatgtgacttt

SEQ ID NO: 5918574 - DNA, 25 bp, Homo sapien
catctcatacgtctgacgcttattc

SEQ ID NO: 5918575 - DNA, 25 bp, Homo sapien
tttactgttaacgcgcgacgcataa

SEQ ID NO: 5918576 - DNA, 25 bp, Homo sapien
tcaactcggcgtctattagctagat

SEQ ID NO: 5918577 - DNA, 25 bp, Homo sapien
acgctttatatcgcgctagaactga

SEQ ID NO: 5918578 - DNA, 25 bp, Homo sapien
attacctcgtaataggcggtctgtt

SEQ ID NO: 5918579 - DNA, 25 bp, Homo sapien
atgaaccggacatattgcgagacta

SEQ ID NO: 5918580 - DNA, 25 bp, Homo sapien
gctcaccgataacgtaaccataaag

SEQ ID NO: 5918581 - DNA, 25 bp, Homo sapien
taggtgtctattcgcgcaaagaaca

SEQ ID NO: 5918582 - DNA, 25 bp, Homo sapien
ttgaagtatgtcggacgtcataagg

SEQ ID NO: 5918583 - DNA, 25 bp, Homo sapien
caatttaatccgttgcgacgattgc

SEQ ID NO: 5918584 - DNA, 25 bp, Homo sapien
gtaggttagttacgcgactggaatt

SEQ ID NO: 5918585 - DNA, 25 bp, Homo sapien
aagccgtacgcacgattgttttctt

SEQ ID NO: 5918586 - DNA, 25 bp, Homo sapien
gctcactacgcgacagaatatctaa

SEQ ID NO: 5918587 - DNA, 25 bp, Homo sapien
tagcccgtagaacgcgagttaattt

SEQ ID NO: 5918588 - DNA, 25 bp, Homo sapien
attagacggaactatcggtaccttg

SEQ ID NO: 5918589 - DNA, 25 bp, Homo sapien
aacgacgcttaacgttgcgttgaaa

SEQ ID NO: 5918590 - DNA, 25 bp, Homo sapien
gttaatgcgtattggtcgagttctc

SEQ ID NO: 5918591 - DNA, 25 bp, Homo sapien
aacacagatcggtacgctagtttag

SEQ ID NO: 5918592 - DNA, 25 bp, Homo sapien
ggaaactagcgaacgtactgatcaa

SEQ ID NO: 5918593 - DNA, 25 bp, Homo sapien
aagggttcgcacgacgtaacaatta

SEQ ID NO: 5918594 - DNA, 25 bp, Homo sapien
ggattaaagcttacgaccggttgaa

SEQ ID NO: 5918595 - DNA, 25 bp, Homo sapien
tatatgcgcggttacgactataggt

SEQ ID NO: 5918596 - DNA, 25 bp, Homo sapien
tgttgactattgcgcgttaaagcca

SEQ ID NO: 5918597 - DNA, 25 bp, Homo sapien
taggatactcgcgacgtttgttaac

SEQ ID NO: 5918598 - DNA, 25 bp, Homo sapien
ccttcatcgcgattatacggtaaag

SEQ ID NO: 5918599 - DNA, 25 bp, Homo sapien
tcaaatccgataccgcgttcagtat

SEQ ID NO: 5918600 - DNA, 25 bp, Homo sapien
ccaagattcgcgactatataaagcc

SEQ ID NO: 5918601 - DNA, 25 bp, Homo sapien
gaagaatgatctatcgacgcatcca

SEQ ID NO: 5918602 - DNA, 25 bp, Homo sapien
ttgatgtcgatagacgtcgcaatgt

SEQ ID NO: 5918603 - DNA, 25 bp, Homo sapien
atgttgtcgggacgtaacgattgat

SEQ ID NO: 5918604 - DNA, 25 bp, Homo sapien
agaacttaggtcgtatacgttggct

SEQ ID NO: 5918605 - DNA, 25 bp, Homo sapien
gattcgcagtacgctacgttatcaa

SEQ ID NO: 5918606 - DNA, 25 bp, Homo sapien
aagaactaacgtaaaggcgatctgc

SEQ ID NO: 5918607 - DNA, 25 bp, Homo sapien
ttctaatcgtacgctaacggagttg

SEQ ID NO: 5918608 - DNA, 25 bp, Homo sapien
taaggttggtactttcgcgaatagg

SEQ ID NO: 5918609 - DNA, 25 bp, Homo sapien
ggtactcgtaacgtcgatatttcca

SEQ ID NO: 5918610 - DNA, 25 bp, Homo sapien
acgggtgtagcgcgaattactaaaa

SEQ ID NO: 5918611 - DNA, 25 bp, Homo sapien
atcgtagatcgaccgtcaataacga

SEQ ID NO: 5918612 - DNA, 25 bp, Homo sapien
aggtaccgatccgctattacttgat

SEQ ID NO: 5918613 - DNA, 25 bp, Homo sapien
agaagacggtatcattcggaaaagc

SEQ ID NO: 5918614 - DNA, 25 bp, Homo sapien
gtgtgaattccgcgtatcgatagtt

SEQ ID NO: 5918615 - DNA, 25 bp, Homo sapien
gtgctagtacgacgccaataatcta

SEQ ID NO: 5918616 - DNA, 25 bp, Homo sapien
gagagataccttacgtccgattttc

SEQ ID NO: 5918617 - DNA, 25 bp, Homo sapien
atgcgtcgttattcgcgatatgcta

SEQ ID NO: 5918618 - DNA, 25 bp, Homo sapien
tgtgcactatagtatcgcgcattct

SEQ ID NO: 5918619 - DNA, 25 bp, Homo sapien
tattggccggtacgatagactatca

SEQ ID NO: 5918620 - DNA, 25 bp, Homo sapien
taaaccctagcgtcgtactactatg

SEQ ID NO: 5918621 - DNA, 25 bp, Homo sapien
gagccccgtgattctacgaaaattt

SEQ ID NO: 5918622 - DNA, 25 bp, Homo sapien
caaatccgatcaacgcggaaattct

SEQ ID NO: 5918623 - DNA, 25 bp, Homo sapien
acatatccctacgcgatatacggta

SEQ ID NO: 5918624 - DNA, 25 bp, Homo sapien
gaaaaccggtaccatacgatgtaag

SEQ ID NO: 5918625 - DNA, 25 bp, Homo sapien
tgaggtcatacgtcgtgacagtaaa

SEQ ID NO: 5918626 - DNA, 25 bp, Homo sapien
gagttggatcgaacgtacgtacaaa

SEQ ID NO: 5918627 - DNA, 25 bp, Homo sapien
gaaatccgtccatagtcgaattggt

SEQ ID NO: 5918628 - DNA, 25 bp, Homo sapien
tttatttctaagttgcgcgccgaga

SEQ ID NO: 5918629 - DNA, 25 bp, Homo sapien
tgctcgcgacactagttcgtttata

SEQ ID NO: 5918630 - DNA, 25 bp, Homo sapien
tcaaattactagaacggcggccata

SEQ ID NO: 5918631 - DNA, 25 bp, Homo sapien
gtataacgtctaggtccgatcaaag

SEQ ID NO: 5918632 - DNA, 25 bp, Homo sapien
aatatgccttaacgcgctacgattg

SEQ ID NO: 5918633 - DNA, 25 bp, Homo sapien
tagctataacgcactatcgcctgat

SEQ ID NO: 5918634 - DNA, 25 bp, Homo sapien
atcataccgtcgtacgtatgaagac

SEQ ID NO: 5918635 - DNA, 25 bp, Homo sapien
cgtatcatacgcgtgatcgtgtatt

SEQ ID NO: 5918636 - DNA, 25 bp, Homo sapien
acacccctgacgatcgtataactaa

SEQ ID NO: 5918637 - DNA, 25 bp, Homo sapien
aattgtgttcgaatagtcggggaga

SEQ ID NO: 5918638 - DNA, 25 bp, Homo sapien
cagcatatataacgccggtatatgc

SEQ ID NO: 5918639 - DNA, 25 bp, Homo sapien
aaaataggccgcgaactatgtccaa

SEQ ID NO: 5918640 - DNA, 25 bp, Homo sapien
gaaacgatcgtacatcgcgtaaagt

SEQ ID NO: 5918641 - DNA, 25 bp, Homo sapien
cgaatgtcgagtactaacgctagtt

SEQ ID NO: 5918642 - DNA, 25 bp, Homo sapien
agtggagtcgcgacttataaaaagc

SEQ ID NO: 5918643 - DNA, 25 bp, Homo sapien
cgaaaccgtatcgtacgaataatcc

SEQ ID NO: 5918644 - DNA, 25 bp, Homo sapien
tccgtttacgaccaatgcgaaactt

SEQ ID NO: 5918645 - DNA, 25 bp, Homo sapien
catgaccggagtagatcgaataact

SEQ ID NO: 5918646 - DNA, 25 bp, Homo sapien
gaccattactatcgcgaacaattgg

SEQ ID NO: 5918647 - DNA, 25 bp, Homo sapien
attagatatacgcgaccgtatgagc

SEQ ID NO: 5918648 - DNA, 25 bp, Homo sapien
aatactccataacgcgtacactggt

SEQ ID NO: 5918649 - DNA, 25 bp, Homo sapien
ccatcgggtacgccaatactaaatt

SEQ ID NO: 5918650 - DNA, 25 bp, Homo sapien
ctgatccgattacgtccgaaaaaac

SEQ ID NO: 5918651 - DNA, 25 bp, Homo sapien
atttaattagcgctcgtcgacgatg

SEQ ID NO: 5918652 - DNA, 25 bp, Homo sapien
atgacttcgagacgttacgtgtgat

SEQ ID NO: 5918653 - DNA, 25 bp, Homo sapien
gagttacttcgtatgccgattacac

SEQ ID NO: 5918654 - DNA, 25 bp, Homo sapien
gttagataagtcgcgtaggtagtga

SEQ ID NO: 5918655 - DNA, 25 bp, Homo sapien
tgcaacctcgcgaacgatattttca

SEQ ID NO: 5918656 - DNA, 25 bp, Homo sapien
ttattacgcgtactaactggcaagc

SEQ ID NO: 5918657 - DNA, 25 bp, Homo sapien
gtagttcgtagcttcgtcgtgaata

SEQ ID NO: 5918658 - DNA, 25 bp, Homo sapien
ggaacacctaattctcgcgtaagat

SEQ ID NO: 5918659 - DNA, 25 bp, Homo sapien
tggcaatacgtcgctagatttccat

SEQ ID NO: 5918660 - DNA, 25 bp, Homo sapien
attgatgcgccgatactagtagact

SEQ ID NO: 5918661 - DNA, 25 bp, Homo sapien
tatcatcgttagcgcgattgatcag

SEQ ID NO: 5918662 - DNA, 25 bp, Homo sapien
cgaatttcgcgtagttacgtctgta

SEQ ID NO: 5918663 - DNA, 25 bp, Homo sapien
ttgtatacgcgcgggaatatagtca

SEQ ID NO: 5918664 - DNA, 25 bp, Homo sapien
aacagatcgagtatcggagagttag

SEQ ID NO: 5918665 - DNA, 25 bp, Homo sapien
tacattatccggtaatcgcgtctga

SEQ ID NO: 5918666 - DNA, 25 bp, Homo sapien
cttaaattagcgcgtacgaggatct

SEQ ID NO: 5918667 - DNA, 25 bp, Homo sapien
ttttcctctcgtatagcgaagactc

SEQ ID NO: 5918668 - DNA, 25 bp, Homo sapien
caatttacgatcagcgtagagtcca

SEQ ID NO: 5918669 - DNA, 25 bp, Homo sapien
agagtatcggcgtaaacgaaagtgt

SEQ ID NO: 5918670 - DNA, 25 bp, Homo sapien
aaattccgttgtacgctcgttgtct

SEQ ID NO: 5918671 - DNA, 25 bp, Homo sapien
gtattctaacatcgcgctaggtaca

SEQ ID NO: 5918672 - DNA, 25 bp, Homo sapien
caatgtcttataacgcgcaccgtta

SEQ ID NO: 5918673 - DNA, 25 bp, Homo sapien
atgcaatacgtcgttagacgctact

SEQ ID NO: 5918674 - DNA, 25 bp, Homo sapien
gattcacgcgacgttaaattggaca

SEQ ID NO: 5918675 - DNA, 25 bp, Homo sapien
ttattgcgtataggtcgtacggctt

SEQ ID NO: 5918676 - DNA, 25 bp, Homo sapien
tataaccgttaaacgccgaagatcg

SEQ ID NO: 5918677 - DNA, 25 bp, Homo sapien
ttaagatacggcgtcctacactttg

SEQ ID NO: 5918678 - DNA, 25 bp, Homo sapien
atagaaatcggtctagcgtgtgatc

SEQ ID NO: 5918679 - DNA, 25 bp, Homo sapien
gcattacgtcgaactaggaatcgaa

SEQ ID NO: 5918680 - DNA, 25 bp, Homo sapien
agctacttcgcgttactagtagttc

SEQ ID NO: 5918681 - DNA, 25 bp, Homo sapien
taccctggttacgactcgaatactt

SEQ ID NO: 5918682 - DNA, 25 bp, Homo sapien
atgagtacgacgccgataagcaaat

SEQ ID NO: 5918683 - DNA, 25 bp, Homo sapien
actgattagtgtagcgcgatgagat

SEQ ID NO: 5918684 - DNA, 25 bp, Homo sapien
taaactatcggtcgcgtatatcacg

SEQ ID NO: 5918685 - DNA, 25 bp, Homo sapien
gagttatagatagcgtacggaggaa

SEQ ID NO: 5918686 - DNA, 25 bp, Homo sapien
cctagatagcgcgatagtagtagaa

SEQ ID NO: 5918687 - DNA, 25 bp, Homo sapien
aatccaactataacacgcgcggaaa

SEQ ID NO: 5918688 - DNA, 25 bp, Homo sapien
catgtggcgatattacgcgttacat

SEQ ID NO: 5918689 - DNA, 25 bp, Homo sapien
taagaccgctctatgcgtaatcaag

SEQ ID NO: 5918690 - DNA, 25 bp, Homo sapien
ttattgtcgcgaacctatagaccga

SEQ ID NO: 5918691 - DNA, 25 bp, Homo sapien
tgtagtgagccgatcgtagaattga

SEQ ID NO: 5918692 - DNA, 25 bp, Homo sapien
gagaatcggaacgcgtatagatgta

SEQ ID NO: 5918693 - DNA, 25 bp, Homo sapien
gtatgaaccgcgcgtaagaaattca

SEQ ID NO: 5918694 - DNA, 25 bp, Homo sapien
cgaaaatttcgtcgtacgctctttg

SEQ ID NO: 5918695 - DNA, 25 bp, Homo sapien
atatgtagccgtagtacgacatcag

SEQ ID NO: 5918696 - DNA, 25 bp, Homo sapien
tgaacactatcgcatacggtgatac

SEQ ID NO: 5918697 - DNA, 25 bp, Homo sapien
gtaagggagcgtatatcgatttgag

SEQ ID NO: 5918698 - DNA, 25 bp, Homo sapien
aagaagtgtataacgcgtcaaccag

SEQ ID NO: 5918699 - DNA, 25 bp, Homo sapien
tttcaggactagccgaacgtttaga

SEQ ID NO: 5918700 - DNA, 25 bp, Homo sapien
tcatttcgatactaccacgtcctga

SEQ ID NO: 5918701 - DNA, 25 bp, Homo sapien
gcaaaagtatagttacgcgttgggt

SEQ ID NO: 5918702 - DNA, 25 bp, Homo sapien
aatgactagacgcgtaatccgcttt

SEQ ID NO: 5918703 - DNA, 25 bp, Homo sapien
ttgattgtcgactagtccgtgagta

SEQ ID NO: 5918704 - DNA, 25 bp, Homo sapien
tttatacgcgtagtactagccagct

SEQ ID NO: 5918705 - DNA, 25 bp, Homo sapien
agttagttagatcgcgcatagtagg

SEQ ID NO: 5918706 - DNA, 25 bp, Homo sapien
tatatcacgcgccctatatatcacg

SEQ ID NO: 5918707 - DNA, 25 bp, Homo sapien
gctttcgcgcgtaatagtaatgcat

SEQ ID NO: 5918708 - DNA, 25 bp, Homo sapien
tgggattatccgtacgatccagaat

SEQ ID NO: 5918709 - DNA, 25 bp, Homo sapien
gtttagcgtaacgtacggtgtttca

SEQ ID NO: 5918710 - DNA, 25 bp, Homo sapien
aatgcgttgacggtcgatcttaaac

SEQ ID NO: 5918711 - DNA, 25 bp, Homo sapien
acatgtcgacatacgtcgaaagtct

SEQ ID NO: 5918712 - DNA, 25 bp, Homo sapien
ctacgaatcgtactacgcgatatag

SEQ ID NO: 5918713 - DNA, 25 bp, Homo sapien
ttggtaccttaagtcgcgctttgat

SEQ ID NO: 5918714 - DNA, 25 bp, Homo sapien
gtataatgcgtcgaatagtacaggc

SEQ ID NO: 5918715 - DNA, 25 bp, Homo sapien
tgctgaaacgtatccggtcaatgat

SEQ ID NO: 5918716 - DNA, 25 bp, Homo sapien
tctaccttacgtcgaggtagtagta

SEQ ID NO: 5918717 - DNA, 25 bp, Homo sapien
gtttcatatcgttcgcgagaccaaa

SEQ ID NO: 5918718 - DNA, 25 bp, Homo sapien
aacactgtccgcgactaaatacaga

SEQ ID NO: 5918719 - DNA, 25 bp, Homo sapien
aatgtacgcgtacggtctagttgtt

SEQ ID NO: 5918720 - DNA, 25 bp, Homo sapien
taatgtcgcgagtatactcgtgaac

SEQ ID NO: 5918721 - DNA, 25 bp, Homo sapien
tatgcgtacgcggttccgtaattta

SEQ ID NO: 5918722 - DNA, 25 bp, Homo sapien
acccatcgtcgatacgtacattgaa

SEQ ID NO: 5918723 - DNA, 25 bp, Homo sapien
gatcgaggtaaccgcgttattaact

SEQ ID NO: 5918724 - DNA, 25 bp, Homo sapien
tacaaccgcgaatagctaagggaat

SEQ ID NO: 5918725 - DNA, 25 bp, Homo sapien
tgattgcacgtcgcgataatttctc

SEQ ID NO: 5918726 - DNA, 25 bp, Homo sapien
atgtttattcgcgggtaacgaacga

SEQ ID NO: 5918727 - DNA, 25 bp, Homo sapien
cgaaacacgaacgtatacgacgtta

SEQ ID NO: 5918728 - DNA, 25 bp, Homo sapien
aaaggagtaagcgccgataatgtac

SEQ ID NO: 5918729 - DNA, 25 bp, Homo sapien
tatgattcgtactacgctcccttct

SEQ ID NO: 5918730 - DNA, 25 bp, Homo sapien
gaaataactagcgatacggggtcat

SEQ ID NO: 5918731 - DNA, 25 bp, Homo sapien
tgttaccgctagtcgtatatagtgc

SEQ ID NO: 5918732 - DNA, 25 bp, Homo sapien
agaacttttcgcgtacgtaagatgc

SEQ ID NO: 5918733 - DNA, 25 bp, Homo sapien
actacttaatccgctccgagttcat

SEQ ID NO: 5918734 - DNA, 25 bp, Homo sapien
tgcttctatgccggtacgacattta

SEQ ID NO: 5918735 - DNA, 25 bp, Homo sapien
cattttagcgcgacgtttatgagag

SEQ ID NO: 5918736 - DNA, 25 bp, Homo sapien
tgaagaatagcgcgaacgtgttgtt

SEQ ID NO: 5918737 - DNA, 25 bp, Homo sapien
tccattacgcgatcggattctctat

SEQ ID NO: 5918738 - DNA, 25 bp, Homo sapien
tatagagcgtagtagaaccacctgt

SEQ ID NO: 5918739 - DNA, 25 bp, Homo sapien
ttcacacgattaacgcgtccaacta

SEQ ID NO: 5918740 - DNA, 25 bp, Homo sapien
atatttaacaggcgcgttaatcccc

SEQ ID NO: 5918741 - DNA, 25 bp, Homo sapien
agcgattcaacgggtcgataatatc

SEQ ID NO: 5918742 - DNA, 25 bp, Homo sapien
caacatttgcgtcggactaatggat

SEQ ID NO: 5918743 - DNA, 25 bp, Homo sapien
gcagatcattgtatcgcgtgttgat

SEQ ID NO: 5918744 - DNA, 25 bp, Homo sapien
ccgctaatatacggctacgatctta

SEQ ID NO: 5918745 - DNA, 25 bp, Homo sapien
gtatgggtccgatagcgttagtatt

SEQ ID NO: 5918746 - DNA, 25 bp, Homo sapien
tttagttaccgtcgcactaggaaac

SEQ ID NO: 5918747 - DNA, 25 bp, Homo sapien
gttacattactagtcgacggccttt

SEQ ID NO: 5918748 - DNA, 25 bp, Homo sapien
ttgagatcacgacgcgatattctcc

SEQ ID NO: 5918749 - DNA, 25 bp, Homo sapien
atacgattcgcgcatggataacgtg

SEQ ID NO: 5918750 - DNA, 25 bp, Homo sapien
tatccgtcgcgttagcctattacac

SEQ ID NO: 5918751 - DNA, 25 bp, Homo sapien
gtatctgacgatacgccgagaacat

SEQ ID NO: 5918752 - DNA, 25 bp, Homo sapien
tggtgatacggtacgtaagccgtaa

SEQ ID NO: 5918753 - DNA, 25 bp, Homo sapien
acttgttatcatacgccggccgtaa

SEQ ID NO: 5918754 - DNA, 25 bp, Homo sapien
ggtctgattcgcgtccgatataagt

SEQ ID NO: 5918755 - DNA, 25 bp, Homo sapien
gtgtatgtgcgttatgtcgccagat

SEQ ID NO: 5918756 - DNA, 25 bp, Homo sapien
agtgagcgtagatcggtctaatgga

SEQ ID NO: 5918757 - DNA, 25 bp, Homo sapien
atgaagtaagcgggcgtaatctgac

SEQ ID NO: 5918758 - DNA, 25 bp, Homo sapien
ttactgatagcgtcgaccaagcgtt

SEQ ID NO: 5918759 - DNA, 25 bp, Homo sapien
aagtccctagtacacgcgagagtat

SEQ ID NO: 5918760 - DNA, 25 bp, Homo sapien
atgtgaggtcgtaacgaactggtca

SEQ ID NO: 5918761 - DNA, 25 bp, Homo sapien
ctgtcataataagtccgcggcaaga

SEQ ID NO: 5918762 - DNA, 25 bp, Homo sapien
gcaatcacttgcgcgaacgtattac

SEQ ID NO: 5918763 - DNA, 25 bp, Homo sapien
tatttacgcttcgtataccccgcgt

SEQ ID NO: 5918764 - DNA, 25 bp, Homo sapien
agtgtggatacgtcgcgaacaacta

SEQ ID NO: 5918765 - DNA, 25 bp, Homo sapien
gacagaactcgtgcgacgtttagta

SEQ ID NO: 5918766 - DNA, 25 bp, Homo sapien
acatctttcgcgcgcatagttgctt

SEQ ID NO: 5918767 - DNA, 25 bp, Homo sapien
tatccacggacgtactaggtaacct

SEQ ID NO: 5918768 - DNA, 25 bp, Homo sapien
aacaacggcgcgagtattacgatag

SEQ ID NO: 5918769 - DNA, 25 bp, Homo sapien
tacggcgaccgtcgtactatatgta

SEQ ID NO: 5918770 - DNA, 25 bp, Homo sapien
aaccgtccgatagtcggtaatgatg

SEQ ID NO: 5918771 - DNA, 25 bp, Homo sapien
ttagttgtccgatatagcgggctag

SEQ ID NO: 5918772 - DNA, 25 bp, Homo sapien
aatacagcgttaccgcgttcgaaga

SEQ ID NO: 5918773 - DNA, 25 bp, Homo sapien
taccgactagttagacgcgtaaggt

SEQ ID NO: 5918774 - DNA, 25 bp, Homo sapien
gcgtaactattagtcgcgggaagtt

SEQ ID NO: 5918775 - DNA, 25 bp, Homo sapien
tcggttttcggataggacgctatac

SEQ ID NO: 5918776 - DNA, 25 bp, Homo sapien
atcgtctagtaaaccgcggattgac

SEQ ID NO: 5918777 - DNA, 25 bp, Homo sapien
tcccaattatagccgcgtattagcg

SEQ ID NO: 5918778 - DNA, 25 bp, Homo sapien
taaacggcgagacgttatagagtgc

SEQ ID NO: 5918779 - DNA, 25 bp, Homo sapien
ttagaacgcgctacgtctagaagtc

SEQ ID NO: 5918780 - DNA, 25 bp, Homo sapien
atcgtaaacgtccggacgatcagat

SEQ ID NO: 5918781 - DNA, 25 bp, Homo sapien
acttcttaaacggctgtcgcatcct

SEQ ID NO: 5918782 - DNA, 25 bp, Homo sapien
aagaactcatcgtaccgacggctta

SEQ ID NO: 5918783 - DNA, 25 bp, Homo sapien
tcgcgttatcgtactacgccaatct

SEQ ID NO: 5918784 - DNA, 25 bp, Homo sapien
tgtggtcatacgccgattaagaggt

SEQ ID NO: 5918785 - DNA, 25 bp, Homo sapien
attagacgctaggaccgatctgttc

SEQ ID NO: 5918786 - DNA, 25 bp, Homo sapien
ggttatgttcacgcgtacatagcac

SEQ ID NO: 5918787 - DNA, 25 bp, Homo sapien
taaccattcgcgacgggtactcatt

SEQ ID NO: 5918788 - DNA, 25 bp, Homo sapien
ttaccgccgcggttgtataaattcg

SEQ ID NO: 5918789 - DNA, 25 bp, Homo sapien
acgttcgcgtatacgatactggatc

SEQ ID NO: 5918790 - DNA, 25 bp, Homo sapien
tacaagggacgatacgcgatacgat

SEQ ID NO: 5918791 - DNA, 25 bp, Homo sapien
ggctttcgtctactaacggttcagt

SEQ ID NO: 5918792 - DNA, 25 bp, Homo sapien
ctcaaaatagggacgatcgttctgg

SEQ ID NO: 5918793 - DNA, 25 bp, Homo sapien
ttccagcgtaacgcgtttacatgtc

SEQ ID NO: 5918794 - DNA, 25 bp, Homo sapien
agcataatagtacgcgcgatcaagg

SEQ ID NO: 5918795 - DNA, 25 bp, Homo sapien
ttgcactagtaaggtcgcgacagat

SEQ ID NO: 5918796 - DNA, 25 bp, Homo sapien
ataaataaggtacgacgcgagcggt

SEQ ID NO: 5918797 - DNA, 25 bp, Homo sapien
gtcgctgacttcgcgacgttattta

SEQ ID NO: 5918798 - DNA, 25 bp, Homo sapien
tcgagcatacgctaacccgtttgtt

SEQ ID NO: 5918799 - DNA, 25 bp, Homo sapien
ttctactagacgcggttgatttggc

SEQ ID NO: 5918800 - DNA, 25 bp, Homo sapien
atagcatagcgctacgagacatggt

SEQ ID NO: 5918801 - DNA, 25 bp, Homo sapien
cttttggaaattacgcgcgagatcg

SEQ ID NO: 5918802 - DNA, 25 bp, Homo sapien
gcaagttgtcgacgctattaatgcc

SEQ ID NO: 5918803 - DNA, 25 bp, Homo sapien
actgacggtaaccgcgttagttgta

SEQ ID NO: 5918804 - DNA, 25 bp, Homo sapien
attgctacgcgtctatacccgatct

SEQ ID NO: 5918805 - DNA, 25 bp, Homo sapien
cgaattcgctcgtatagtgtatcgg

SEQ ID NO: 5918806 - DNA, 25 bp, Homo sapien
acttagtcggttatagcgatgtggc

SEQ ID NO: 5918807 - DNA, 25 bp, Homo sapien
ttccttactctagcgcgaatgtacg

SEQ ID NO: 5918808 - DNA, 25 bp, Homo sapien
tagtttcgcgagcgttagtatgagg

SEQ ID NO: 5918809 - DNA, 25 bp, Homo sapien
tacttaagtcgcgaacattcgccgt

SEQ ID NO: 5918810 - DNA, 25 bp, Homo sapien
tgattataacgttcgcgcaagcctc

SEQ ID NO: 5918811 - DNA, 25 bp, Homo sapien
ttggatcgcgctatctagtcgtttc

SEQ ID NO: 5918812 - DNA, 25 bp, Homo sapien
tcagcgcatacgagcgacctattat

SEQ ID NO: 5918813 - DNA, 25 bp, Homo sapien
acccctgatcgacgttacactaaac

SEQ ID NO: 5918814 - DNA, 25 bp, Homo sapien
gtgtaaactaatatcgcgcggatcg

SEQ ID NO: 5918815 - DNA, 25 bp, Homo sapien
aacttgttacgtcgcgaacatccga

SEQ ID NO: 5918816 - DNA, 25 bp, Homo sapien
agcaacttgacgccgctatactcat

SEQ ID NO: 5918817 - DNA, 25 bp, Homo sapien
atgcaccgcggatttactcattacg

SEQ ID NO: 5918818 - DNA, 25 bp, Homo sapien
gtattctaccggacgactgtgcaaa

SEQ ID NO: 5918819 - DNA, 25 bp, Homo sapien
attgatcgtaatcgcgtacgggaag

SEQ ID NO: 5918820 - DNA, 25 bp, Homo sapien
aggattggttcgtaccgtaacgatg

SEQ ID NO: 5918821 - DNA, 25 bp, Homo sapien
acaatgtaaatacgcgcggaagcac

SEQ ID NO: 5918822 - DNA, 25 bp, Homo sapien
atctcaagccgaccgtaatagccat

SEQ ID NO: 5918823 - DNA, 25 bp, Homo sapien
ttggaccgcgttaatccaacgtcaa

SEQ ID NO: 5918824 - DNA, 25 bp, Homo sapien
aattacataaggacgcgacggatcg

SEQ ID NO: 5918825 - DNA, 25 bp, Homo sapien
agaatgttagggtgacgcgtctatc

SEQ ID NO: 5918826 - DNA, 25 bp, Homo sapien
atcctgtcggacatacgtctagatg

SEQ ID NO: 5918827 - DNA, 25 bp, Homo sapien
tgtgtcaatacgtcgtccggatcta

SEQ ID NO: 5918828 - DNA, 25 bp, Homo sapien
cgaatacaatcgcgtagcgtatgct

SEQ ID NO: 5918829 - DNA, 25 bp, Homo sapien
cctatagaccgtctagcgttgatgt

SEQ ID NO: 5918830 - DNA, 25 bp, Homo sapien
tgtgtagactatgttcgcgcgacat

SEQ ID NO: 5918831 - DNA, 25 bp, Homo sapien
ataggcgaccggtattgcgaagaaa

SEQ ID NO: 5918832 - DNA, 25 bp, Homo sapien
aagaaggtcgctcgatacagtatcg

SEQ ID NO: 5918833 - DNA, 25 bp, Homo sapien
caactatatggtcgaccgactcgtt

SEQ ID NO: 5918834 - DNA, 25 bp, Homo sapien
ctcagatacgcgtcgtgtacagatt

SEQ ID NO: 5918835 - DNA, 25 bp, Homo sapien
gtaactttaacgcgcgtactgtcac

SEQ ID NO: 5918836 - DNA, 25 bp, Homo sapien
cggttttatcgactagcgtagagga

SEQ ID NO: 5918837 - DNA, 25 bp, Homo sapien
actggaaccctacgaatcggttatc

SEQ ID NO: 5918838 - DNA, 25 bp, Homo sapien
acttgttcgcgtaacggatcgaact

SEQ ID NO: 5918839 - DNA, 25 bp, Homo sapien
ctcactcctattacgcgtcgttatc

SEQ ID NO: 5918840 - DNA, 25 bp, Homo sapien
gagttcataacgcgcctaggtcaat

SEQ ID NO: 5918841 - DNA, 25 bp, Homo sapien
gacggtcgcggcttagatatcaaaa

SEQ ID NO: 5918842 - DNA, 25 bp, Homo sapien
gctcaataccactaccgcgattaag

SEQ ID NO: 5918843 - DNA, 25 bp, Homo sapien
ggattttcgcgacgtaactggtgat

SEQ ID NO: 5918844 - DNA, 25 bp, Homo sapien
tggagctgcgtatgtcgacaaatga

SEQ ID NO: 5918845 - DNA, 25 bp, Homo sapien
tgcactctacgatacgcgagatcta

SEQ ID NO: 5918846 - DNA, 25 bp, Homo sapien
acaacacgttattcgcgatcccatg

SEQ ID NO: 5918847 - DNA, 25 bp, Homo sapien
gcagatgatatcgtgccggaatttc

SEQ ID NO: 5918848 - DNA, 25 bp, Homo sapien
caccccccattataacgcgaagtat

SEQ ID NO: 5918849 - DNA, 25 bp, Homo sapien
ccacttgtgtgcgacgtaacagata

SEQ ID NO: 5918850 - DNA, 25 bp, Homo sapien
acacatacgccgttaggtctcgtat

SEQ ID NO: 5918851 - DNA, 25 bp, Homo sapien
cgagccgtacgatcgtatgattgaa

SEQ ID NO: 5918852 - DNA, 25 bp, Homo sapien
gagagagggtataccgtcgataaca

SEQ ID NO: 5918853 - DNA, 25 bp, Homo sapien
tgactgatacgagcgcggaaagtaa

SEQ ID NO: 5918854 - DNA, 25 bp, Homo sapien
gtcacagaccgcgtagtaccatata

SEQ ID NO: 5918855 - DNA, 25 bp, Homo sapien
gcaactggtatttacgccgtatggt

SEQ ID NO: 5918856 - DNA, 25 bp, Homo sapien
tacaggacgcgcaacgtattaacac

SEQ ID NO: 5918857 - DNA, 25 bp, Homo sapien
ctaagtgacgtcgataagtcgagct

SEQ ID NO: 5918858 - DNA, 25 bp, Homo sapien
tggacttcgcgtcgtaatgccaaat

SEQ ID NO: 5918859 - DNA, 25 bp, Homo sapien
agtaggcgctatctaaccgtaacag

SEQ ID NO: 5918860 - DNA, 25 bp, Homo sapien
tgctcttactaacgcgtagccagat

SEQ ID NO: 5918861 - DNA, 25 bp, Homo sapien
cacagtgtccacgcgatattgattg

SEQ ID NO: 5918862 - DNA, 25 bp, Homo sapien
tgtacttaacggatcgcgtcaagtg

SEQ ID NO: 5918863 - DNA, 25 bp, Homo sapien
gtccaacgttcgacggtatactcat

SEQ ID NO: 5918864 - DNA, 25 bp, Homo sapien
agcttagtacaaccggtcgctttct

SEQ ID NO: 5918865 - DNA, 25 bp, Homo sapien
gtattcatagtgcgttacggcacac

SEQ ID NO: 5918866 - DNA, 25 bp, Homo sapien
aggcagcggtcgcgttatatatgaa

SEQ ID NO: 5918867 - DNA, 25 bp, Homo sapien
gatagaatacgtgacgcggctactt

SEQ ID NO: 5918868 - DNA, 25 bp, Homo sapien
tgtataacgaggtatcccgaccaag

SEQ ID NO: 5918869 - DNA, 25 bp, Homo sapien
gtatctactacacggttcgttctcg

SEQ ID NO: 5918870 - DNA, 25 bp, Homo sapien
atactgctagcgtcgtaacggtctt

SEQ ID NO: 5918871 - DNA, 25 bp, Homo sapien
taattttcgcggcaggtaaaggctc

SEQ ID NO: 5918872 - DNA, 25 bp, Homo sapien
cacgtatcgcaacgtatacgaatcc

SEQ ID NO: 5918873 - DNA, 25 bp, Homo sapien
tcttctacccgcgtatacgacagta

SEQ ID NO: 5918874 - DNA, 25 bp, Homo sapien
cctaaacgataccgtcgtatcatcg

SEQ ID NO: 5918875 - DNA, 25 bp, Homo sapien
gcagttacgctaatcgtcgcctaaa

SEQ ID NO: 5918876 - DNA, 25 bp, Homo sapien
gaggtgctaacgttcgcgttaatac

SEQ ID NO: 5918877 - DNA, 25 bp, Homo sapien
ttctctacggacgcgaatcctctta

SEQ ID NO: 5918878 - DNA, 25 bp, Homo sapien
ctttgattgacgtcgcgaaagctga

SEQ ID NO: 5918879 - DNA, 25 bp, Homo sapien
aaaggtcgcgtattgaggtgacctt

SEQ ID NO: 5918880 - DNA, 25 bp, Homo sapien
tgaacaggttacgcgtaacctgcat

SEQ ID NO: 5918881 - DNA, 25 bp, Homo sapien
gaaaaccgaatgtcgcgtaccacta

SEQ ID NO: 5918882 - DNA, 25 bp, Homo sapien
tgctgttaaccgcgcaacatcacaa

SEQ ID NO: 5918883 - DNA, 25 bp, Homo sapien
agatgaatcgtacgaacgcggtgaa

SEQ ID NO: 5918884 - DNA, 25 bp, Homo sapien
cgctaatatcgcgtacgttttccga

SEQ ID NO: 5918885 - DNA, 25 bp, Homo sapien
ctgaaacgtatctcgtacggaaagg

SEQ ID NO: 5918886 - DNA, 25 bp, Homo sapien
tggctatgacgcgagcttaaagagt

SEQ ID NO: 5918887 - DNA, 25 bp, Homo sapien
caaacatcgacgtctaacgggtaac

SEQ ID NO: 5918888 - DNA, 25 bp, Homo sapien
aaaggttaacttcgcgtcgcgatgt

SEQ ID NO: 5918889 - DNA, 25 bp, Homo sapien
ggtttccgaagtcggtacgaataga

SEQ ID NO: 5918890 - DNA, 25 bp, Homo sapien
actcaaagtacgataccgccctact

SEQ ID NO: 5918891 - DNA, 25 bp, Homo sapien
atagtgatacgtcgttcggtggtgt

SEQ ID NO: 5918892 - DNA, 25 bp, Homo sapien
aggtgtcgataactcgcgctatgaa

SEQ ID NO: 5918893 - DNA, 25 bp, Homo sapien
taaatacgacgtgtacgtttggccc

SEQ ID NO: 5918894 - DNA, 25 bp, Homo sapien
ttgccctacggcgtagtacctatat

SEQ ID NO: 5918895 - DNA, 25 bp, Homo sapien
gaaagaactacgatacgccaacctg

SEQ ID NO: 5918896 - DNA, 25 bp, Homo sapien
gaatgccggtaacgtcgtacatcta

SEQ ID NO: 5918897 - DNA, 25 bp, Homo sapien
agactgtacgaccgtgtcgataatg

SEQ ID NO: 5918898 - DNA, 25 bp, Homo sapien
agacatcgatactgcggtaaccact

SEQ ID NO: 5918899 - DNA, 25 bp, Homo sapien
gtttttagtccgcgaatagtcgctg

SEQ ID NO: 5918900 - DNA, 25 bp, Homo sapien
ccagaagtcgcgaccttatgctaat

SEQ ID NO: 5918901 - DNA, 25 bp, Homo sapien
aggacctaagatgaccgcgaacatt

SEQ ID NO: 5918902 - DNA, 25 bp, Homo sapien
tagaaggcgtactaccggacaaaag

SEQ ID NO: 5918903 - DNA, 25 bp, Homo sapien
ctgcgtttacggtacgcgatatttg

SEQ ID NO: 5918904 - DNA, 25 bp, Homo sapien
tactcggtacgatagacgcgttatg

SEQ ID NO: 5918905 - DNA, 25 bp, Homo sapien
tgaatgcgttataccgacgctgatg

SEQ ID NO: 5918906 - DNA, 25 bp, Homo sapien
gatcttgtcgaaccgttacttcgct

SEQ ID NO: 5918907 - DNA, 25 bp, Homo sapien
gaacagagaacgcgacgtacaattc

SEQ ID NO: 5918908 - DNA, 25 bp, Homo sapien
gactatagcgcgactattggcatga

SEQ ID NO: 5918909 - DNA, 25 bp, Homo sapien
cctactatatacgtcgccttcgaca

SEQ ID NO: 5918910 - DNA, 25 bp, Homo sapien
agcatcgtgcgatcgtacgttctta

SEQ ID NO: 5918911 - DNA, 25 bp, Homo sapien
agtctagatacgctcggtaaactcg

SEQ ID NO: 5918912 - DNA, 25 bp, Homo sapien
cataagctactcgctaacgtcctag

SEQ ID NO: 5918913 - DNA, 25 bp, Homo sapien
cactggtctcgcgtcttagcttttt

SEQ ID NO: 5918914 - DNA, 25 bp, Homo sapien
atttgctatcgacgcggtacacgat

SEQ ID NO: 5918915 - DNA, 25 bp, Homo sapien
gctagactaagtcgcgcatagagaa

SEQ ID NO: 5918916 - DNA, 25 bp, Homo sapien
tttcgcttatgtctcgcgctcttgt

SEQ ID NO: 5918917 - DNA, 25 bp, Homo sapien
tttgaaatatgttcgcgccagaccc

SEQ ID NO: 5918918 - DNA, 25 bp, Homo sapien
ggtgattatacgtccgcaacagaac

SEQ ID NO: 5918919 - DNA, 25 bp, Homo sapien
attacggccgcgactaatactcaca

SEQ ID NO: 5918920 - DNA, 25 bp, Homo sapien
accccacctcgcgtaatacataaga

SEQ ID NO: 5918921 - DNA, 25 bp, Homo sapien
tgaagcatgtaatacgccggatagg

SEQ ID NO: 5918922 - DNA, 25 bp, Homo sapien
taagcatgggttcgcgtacacaaac

SEQ ID NO: 5918923 - DNA, 25 bp, Homo sapien
tgtcccacccgctattcgttaaatg

SEQ ID NO: 5918924 - DNA, 25 bp, Homo sapien
acagcgcgtattcgcggaaaaatac

SEQ ID NO: 5918925 - DNA, 25 bp, Homo sapien
aacgtctctattacggcgcgaaaag

SEQ ID NO: 5918926 - DNA, 25 bp, Homo sapien
tcgattgtcgcgtagtatccctttg

SEQ ID NO: 5918927 - DNA, 25 bp, Homo sapien
agattttacgtccggataccgcttg

SEQ ID NO: 5918928 - DNA, 25 bp, Homo sapien
ttatgttacgtacgagcgcactacg

SEQ ID NO: 5918929 - DNA, 25 bp, Homo sapien
tataatcgtccgaataacggcgtgg

SEQ ID NO: 5918930 - DNA, 25 bp, Homo sapien
ccttaggtacgttacgcgtgacata

SEQ ID NO: 5918931 - DNA, 25 bp, Homo sapien
tcgcagtcgtaacggactaccttaa

SEQ ID NO: 5918932 - DNA, 25 bp, Homo sapien
cggtggtatatcggcgtcgattttt

SEQ ID NO: 5918933 - DNA, 25 bp, Homo sapien
gattaaggttcgcgcgtaacggaaa

SEQ ID NO: 5918934 - DNA, 25 bp, Homo sapien
tgatcagtcgcgctattacgagaac

SEQ ID NO: 5918935 - DNA, 25 bp, Homo sapien
gactgctataatcgacccgtctgaa

SEQ ID NO: 5918936 - DNA, 25 bp, Homo sapien
atacaggcgcgtagacttagttgga

SEQ ID NO: 5918937 - DNA, 25 bp, Homo sapien
atagagcgctagatcgcccttgaaa

SEQ ID NO: 5918938 - DNA, 25 bp, Homo sapien
cgtttggcttataacgcgacattgg

SEQ ID NO: 5918939 - DNA, 25 bp, Homo sapien
ctttcacacgtcgatcgctccttta

SEQ ID NO: 5918940 - DNA, 25 bp, Homo sapien
taatgtcggtcgtcttacgccaagt

SEQ ID NO: 5918941 - DNA, 25 bp, Homo sapien
tcagtggtccggcgtataagttaca

SEQ ID NO: 5918942 - DNA, 25 bp, Homo sapien
gttgagcgcggatggtatcataaga

SEQ ID NO: 5918943 - DNA, 25 bp, Homo sapien
taatatattcgcggcgactgaccag

SEQ ID NO: 5918944 - DNA, 25 bp, Homo sapien
cgtatctcgcgacgtttccatttct

SEQ ID NO: 5918945 - DNA, 25 bp, Homo sapien
ccatgtggtaccgcgatatctcttt

SEQ ID NO: 5918946 - DNA, 25 bp, Homo sapien
tgcttctcggcgcgatttaatacac

SEQ ID NO: 5918947 - DNA, 25 bp, Homo sapien
gaatcgatatggcgtatcggtaacg

SEQ ID NO: 5918948 - DNA, 25 bp, Homo sapien
ttctcttcagtcgcgaatcatgtgg

SEQ ID NO: 5918949 - DNA, 25 bp, Homo sapien
agagcgtctcgtacgacgaaattag

SEQ ID NO: 5918950 - DNA, 25 bp, Homo sapien
ccgacccgatcgctatactcaaata

SEQ ID NO: 5918951 - DNA, 25 bp, Homo sapien
caatgctagccgtcgctaaattctg

SEQ ID NO: 5918952 - DNA, 25 bp, Homo sapien
caccttcgcaatcccgctattgaaa

SEQ ID NO: 5918953 - DNA, 25 bp, Homo sapien
atagtagtaccctacgccgagcatt

SEQ ID NO: 5918954 - DNA, 25 bp, Homo sapien
agcgtccgatcgaacgttgattgat

SEQ ID NO: 5918955 - DNA, 25 bp, Homo sapien
gttatccgcgatcgaacgaatctgt

SEQ ID NO: 5918956 - DNA, 25 bp, Homo sapien
gaggtattacgcgtagggaagaagt

SEQ ID NO: 5918957 - DNA, 25 bp, Homo sapien
ctcggtgcgtaaacgactaacatct

SEQ ID NO: 5918958 - DNA, 25 bp, Homo sapien
acactctcgtacgtcggctgaatat

SEQ ID NO: 5918959 - DNA, 25 bp, Homo sapien
attgtaatcgtacatcgcggcagac

SEQ ID NO: 5918960 - DNA, 25 bp, Homo sapien
tcccacagcgcgagtacttgataat

SEQ ID NO: 5918961 - DNA, 25 bp, Homo sapien
caccactaccggacgctaatatagt

SEQ ID NO: 5918962 - DNA, 25 bp, Homo sapien
aagctgacacccgtcgatactaagt

SEQ ID NO: 5918963 - DNA, 25 bp, Homo sapien
aaaatatagcgcgcaacgaccttcc

SEQ ID NO: 5918964 - DNA, 25 bp, Homo sapien
acattgcgagtcgcatacgcatact

SEQ ID NO: 5918965 - DNA, 25 bp, Homo sapien
ggtgttcgaatatacggcgaacgaa

SEQ ID NO: 5918966 - DNA, 25 bp, Homo sapien
tgaatttacgaccggcgatttgcgt

SEQ ID NO: 5918967 - DNA, 25 bp, Homo sapien
gtgaaacgactacgctttagactgg

SEQ ID NO: 5918968 - DNA, 25 bp, Homo sapien
acaactcggtcgacaatagaacgac

SEQ ID NO: 5918969 - DNA, 25 bp, Homo sapien
tagggctagttatccggcgattcta

SEQ ID NO: 5918970 - DNA, 25 bp, Homo sapien
ggaatcttcgcgaatacagaccgta

SEQ ID NO: 5918971 - DNA, 25 bp, Homo sapien
ctagtccgctacgcataactacatg

SEQ ID NO: 5918972 - DNA, 25 bp, Homo sapien
ctaagagcgcgattatactagggtc

SEQ ID NO: 5918973 - DNA, 25 bp, Homo sapien
actctggtcacgagcgtactttgta

SEQ ID NO: 5918974 - DNA, 25 bp, Homo sapien
agacacgcgcgataggtaaatttcg

SEQ ID NO: 5918975 - DNA, 25 bp, Homo sapien
aactagcgcgttcctactacttacc

SEQ ID NO: 5918976 - DNA, 25 bp, Homo sapien
aagacgtgatacgtcgtgccatttg

SEQ ID NO: 5918977 - DNA, 25 bp, Homo sapien
tcacatacttatacgcgcttgcacc

SEQ ID NO: 5918978 - DNA, 25 bp, Homo sapien
gtggtatatacgaccgacaaagcca

SEQ ID NO: 5918979 - DNA, 25 bp, Homo sapien
atcccagtcgtttcgcgatcaaaca

SEQ ID NO: 5918980 - DNA, 25 bp, Homo sapien
gagtttttacgcgatggacgatcct

SEQ ID NO: 5918981 - DNA, 25 bp, Homo sapien
tagagcgatcgtacgcagaacaaag

SEQ ID NO: 5918982 - DNA, 25 bp, Homo sapien
gatccagcggtccgaattattgtga

SEQ ID NO: 5918983 - DNA, 25 bp, Homo sapien
gacgattacgtctcgacgttgagaa

SEQ ID NO: 5918984 - DNA, 25 bp, Homo sapien
atactctcgtaactcgcgttggcat

SEQ ID NO: 5918985 - DNA, 25 bp, Homo sapien
gtctatcgtacggcactatatgtgc

SEQ ID NO: 5918986 - DNA, 25 bp, Homo sapien
tagattcgcgtataatcgagcgggt

SEQ ID NO: 5918987 - DNA, 25 bp, Homo sapien
agatgggtagtacgacgtactgtgt

SEQ ID NO: 5918988 - DNA, 25 bp, Homo sapien
ttattgacgtaggggcgaagcttac

SEQ ID NO: 5918989 - DNA, 25 bp, Homo sapien
ggtagagataagcgttcgaagaggt

SEQ ID NO: 5918990 - DNA, 25 bp, Homo sapien
aagccgctatcggccgttaaatctt

SEQ ID NO: 5918991 - DNA, 25 bp, Homo sapien
ctatgctaccgttcggacgaaatag

SEQ ID NO: 5918992 - DNA, 25 bp, Homo sapien
atcacctgcgcccgatatatactac

SEQ ID NO: 5918993 - DNA, 25 bp, Homo sapien
caaaatcgtcgtataaggccgagac

SEQ ID NO: 5918994 - DNA, 25 bp, Homo sapien
cagttacgctcgacgtatgttgtca

SEQ ID NO: 5918995 - DNA, 25 bp, Homo sapien
gttatacgacgcgtaatactgccga

SEQ ID NO: 5918996 - DNA, 25 bp, Homo sapien
aacagagacggatcgctaagctgta

SEQ ID NO: 5918997 - DNA, 25 bp, Homo sapien
aatagaacgctagtcgaactcagcg

SEQ ID NO: 5918998 - DNA, 25 bp, Homo sapien
gctttaaacgatagtccgccgagat

SEQ ID NO: 5918999 - DNA, 25 bp, Homo sapien
aagtgggttagtgcgcgatgtgtaa

SEQ ID NO: 5919000 - DNA, 25 bp, Homo sapien
tacggccgagtacgcttgaatagta

SEQ ID NO: 5919001 - DNA, 25 bp, Homo sapien
taagtctacgccgaaacgctcatga

SEQ ID NO: 5919002 - DNA, 25 bp, Homo sapien
gttcttgcgtcgtatacgaaaggca

SEQ ID NO: 5919003 - DNA, 25 bp, Homo sapien
cagggatggcgaccttacgtattat

SEQ ID NO: 5919004 - DNA, 25 bp, Homo sapien
taataaattacgtcccgcgccacag

SEQ ID NO: 5919005 - DNA, 25 bp, Homo sapien
cagagcccgtcggtaactatttgta

SEQ ID NO: 5919006 - DNA, 25 bp, Homo sapien
tagcattaacgacgggctacctgta

SEQ ID NO: 5919007 - DNA, 25 bp, Homo sapien
tttgattatcgcgctagttctcccg

SEQ ID NO: 5919008 - DNA, 25 bp, Homo sapien
cgcagttacgaagtaacgctactga

SEQ ID NO: 5919009 - DNA, 25 bp, Homo sapien
cctactcgtatcgacacgataggta

SEQ ID NO: 5919010 - DNA, 25 bp, Homo sapien
aattgccgatacgggctaaaggatg

SEQ ID NO: 5919011 - DNA, 25 bp, Homo sapien
cactgttatagattcgcgcgtgaag

SEQ ID NO: 5919012 - DNA, 25 bp, Homo sapien
tctcattcacgattcgacgctactg

SEQ ID NO: 5919013 - DNA, 25 bp, Homo sapien
ttcaagcggtccgtactaacctcaa

SEQ ID NO: 5919014 - DNA, 25 bp, Homo sapien
tcattccgcaatcatgcgctgaatc

SEQ ID NO: 5919015 - DNA, 25 bp, Homo sapien
ttacaatatcgcgcatcgttcgacg

SEQ ID NO: 5919016 - DNA, 25 bp, Homo sapien
ctcatgtacgatagatcgcaatcgg

SEQ ID NO: 5919017 - DNA, 25 bp, Homo sapien
cccctttcgtacgatggttgaatag

SEQ ID NO: 5919018 - DNA, 25 bp, Homo sapien
attggcctatgcgccgcattcataa

SEQ ID NO: 5919019 - DNA, 25 bp, Homo sapien
gggacgtatagttacgcgaataacg

SEQ ID NO: 5919020 - DNA, 25 bp, Homo sapien
cgacaactcgtaacgggtataactc

SEQ ID NO: 5919021 - DNA, 25 bp, Homo sapien
gtatagacgttcgcgctaaagacca

SEQ ID NO: 5919022 - DNA, 25 bp, Homo sapien
cctcatgcgtaacgggattctgata

SEQ ID NO: 5919023 - DNA, 25 bp, Homo sapien
ataactcgtacgagcgataagtccg

SEQ ID NO: 5919024 - DNA, 25 bp, Homo sapien
agattaatcccggtcgatcctgcta

SEQ ID NO: 5919025 - DNA, 25 bp, Homo sapien
atcaatgccgacggtataagctctc

SEQ ID NO: 5919026 - DNA, 25 bp, Homo sapien
cacgaagacgccgtacttatgaact

SEQ ID NO: 5919027 - DNA, 25 bp, Homo sapien
catggtgatacgacgtacgaatggt

SEQ ID NO: 5919028 - DNA, 25 bp, Homo sapien
tctataccgcgcgaaactatgttcc

SEQ ID NO: 5919029 - DNA, 25 bp, Homo sapien
taacttcgcatcgcgtagtcttagg

SEQ ID NO: 5919030 - DNA, 25 bp, Homo sapien
agattccgacgtcgatagtgattcc

SEQ ID NO: 5919031 - DNA, 25 bp, Homo sapien
taggaatacgtcgttagactggtcg

SEQ ID NO: 5919032 - DNA, 25 bp, Homo sapien
ccccttacgctataagacgttctct

SEQ ID NO: 5919033 - DNA, 25 bp, Homo sapien
acacgctagtatcgggtcggataaa

SEQ ID NO: 5919034 - DNA, 25 bp, Homo sapien
tagttttcgcaaccgacccagaaac

SEQ ID NO: 5919035 - DNA, 25 bp, Homo sapien
gtgaggtaggtcgaccgtatagata

SEQ ID NO: 5919036 - DNA, 25 bp, Homo sapien
cttgggcggttatgcggtctaaata

SEQ ID NO: 5919037 - DNA, 25 bp, Homo sapien
caaaactctacgcgatactccgttg

SEQ ID NO: 5919038 - DNA, 25 bp, Homo sapien
cttataagcgcgataacgttaccgc

SEQ ID NO: 5919039 - DNA, 25 bp, Homo sapien
ttgcttcgctacaggcgtactagta

SEQ ID NO: 5919040 - DNA, 25 bp, Homo sapien
cggacgagtatgtttcgcgcataat

SEQ ID NO: 5919041 - DNA, 25 bp, Homo sapien
tccattcgtaccgttgtatggtagc

SEQ ID NO: 5919042 - DNA, 25 bp, Homo sapien
ttgataacgtttccgatcgccttgc

SEQ ID NO: 5919043 - DNA, 25 bp, Homo sapien
aacatgaataccgcgctaccatgtc

SEQ ID NO: 5919044 - DNA, 25 bp, Homo sapien
ttacttcgtgactagcgactgttcg

SEQ ID NO: 5919045 - DNA, 25 bp, Homo sapien
taagctcgatcgtcggagttttcca

SEQ ID NO: 5919046 - DNA, 25 bp, Homo sapien
ggctagcaccgacgtaataatacgt

SEQ ID NO: 5919047 - DNA, 25 bp, Homo sapien
cacatatacgctacgcgttcttctg

SEQ ID NO: 5919048 - DNA, 25 bp, Homo sapien
gttgaatataactcgcgcctttgcg

SEQ ID NO: 5919049 - DNA, 25 bp, Homo sapien
cagcacgcgataagtgtcgacttaa

SEQ ID NO: 5919050 - DNA, 25 bp, Homo sapien
tgtgtcgtcgtaacgtacgtttcct

SEQ ID NO: 5919051 - DNA, 25 bp, Homo sapien
acaacgtacgcaatctcgcaacgta

SEQ ID NO: 5919052 - DNA, 25 bp, Homo sapien
gtttggtacgcggcagttactgatt

SEQ ID NO: 5919053 - DNA, 25 bp, Homo sapien
agttatgacgcttgacgtagctggt

SEQ ID NO: 5919054 - DNA, 25 bp, Homo sapien
acatcacgactacgctgtacctaag

SEQ ID NO: 5919055 - DNA, 25 bp, Homo sapien
acctcggtcgacatacgcatagttt

SEQ ID NO: 5919056 - DNA, 25 bp, Homo sapien
gcctcgtattaggcgatcgcaaata

SEQ ID NO: 5919057 - DNA, 25 bp, Homo sapien
cttccttgtcgtgttacggatcttc

SEQ ID NO: 5919058 - DNA, 25 bp, Homo sapien
ctcaagcttaacgcgagacgttcta

SEQ ID NO: 5919059 - DNA, 25 bp, Homo sapien
ggaaatgtacgaacgtcgggtaaga

SEQ ID NO: 5919060 - DNA, 25 bp, Homo sapien
aagtgtggttatcgcgctaagtcag

SEQ ID NO: 5919061 - DNA, 25 bp, Homo sapien
cgacgactacgcacgttagtcttaa

SEQ ID NO: 5919062 - DNA, 25 bp, Homo sapien
caacgaggtacgcgatagttgttga

SEQ ID NO: 5919063 - DNA, 25 bp, Homo sapien
cttgcttctagtacgagcgacaact

SEQ ID NO: 5919064 - DNA, 25 bp, Homo sapien
acttaactagaccgtacgcctccaa

SEQ ID NO: 5919065 - DNA, 25 bp, Homo sapien
ttgcatccgcactacgtacagttct

SEQ ID NO: 5919066 - DNA, 25 bp, Homo sapien
ttaactatcacgctagtcgggtgtc

SEQ ID NO: 5919067 - DNA, 25 bp, Homo sapien
aggaaggtacgtcattcggagtgtt

SEQ ID NO: 5919068 - DNA, 25 bp, Homo sapien
gcacatgcgcgatacttatatacgg

SEQ ID NO: 5919069 - DNA, 25 bp, Homo sapien
tctgcgatacgatccgtacgatagt

SEQ ID NO: 5919070 - DNA, 25 bp, Homo sapien
agggcttaccgagcgtatcttctat

SEQ ID NO: 5919071 - DNA, 25 bp, Homo sapien
ccgaaacgcatacgttcgaatatgg

SEQ ID NO: 5919072 - DNA, 25 bp, Homo sapien
taagtaggagtcgcgactagctttg

SEQ ID NO: 5919073 - DNA, 25 bp, Homo sapien
gtaagtgacctagcgacgtacttca

SEQ ID NO: 5919074 - DNA, 25 bp, Homo sapien
acatccgctcgcgtcgataacatat

SEQ ID NO: 5919075 - DNA, 25 bp, Homo sapien
atcgcccgataccgtacgtttatag

SEQ ID NO: 5919076 - DNA, 25 bp, Homo sapien
acccaatcgttacgtccgaatccta

SEQ ID NO: 5919077 - DNA, 25 bp, Homo sapien
tatcccgtagtagttcgcgagtact

SEQ ID NO: 5919078 - DNA, 25 bp, Homo sapien
ccaggtgcgttacgcgttattgtaa

SEQ ID NO: 5919079 - DNA, 25 bp, Homo sapien
gtatttgactaatagcgcgtcccgt

SEQ ID NO: 5919080 - DNA, 25 bp, Homo sapien
caagggttatacgcgacgaaatagc

SEQ ID NO: 5919081 - DNA, 25 bp, Homo sapien
gttactcgtaacacgacgtggcaaa

SEQ ID NO: 5919082 - DNA, 25 bp, Homo sapien
gaaatcctagtcgcgacgtggttta

SEQ ID NO: 5919083 - DNA, 25 bp, Homo sapien
caagggatcgaataccgcgttagta

SEQ ID NO: 5919084 - DNA, 25 bp, Homo sapien
accacgccgctcgttatacactata

SEQ ID NO: 5919085 - DNA, 25 bp, Homo sapien
atctccatagcgcccgttaagaaca

SEQ ID NO: 5919086 - DNA, 25 bp, Homo sapien
gagttttgatacgtcgcgatacctg

SEQ ID NO: 5919087 - DNA, 25 bp, Homo sapien
tagaacgcgcgtacaatcaggcatt

SEQ ID NO: 5919088 - DNA, 25 bp, Homo sapien
ctatagacgtcgtatcggtccacat

SEQ ID NO: 5919089 - DNA, 25 bp, Homo sapien
cacattaccgtacgcgatactagct

SEQ ID NO: 5919090 - DNA, 25 bp, Homo sapien
caggagagtagttgcgcgattaaag

SEQ ID NO: 5919091 - DNA, 25 bp, Homo sapien
gagggattcggccgtacgataattt

SEQ ID NO: 5919092 - DNA, 25 bp, Homo sapien
tgaagtcgaagtgcgctatttgcga

SEQ ID NO: 5919093 - DNA, 25 bp, Homo sapien
tgaatctggtcgcgtatagcaagag

SEQ ID NO: 5919094 - DNA, 25 bp, Homo sapien
ctaatacgaacggtcgcgtaatcgt

SEQ ID NO: 5919095 - DNA, 25 bp, Homo sapien
aatatgacatgctacgtcggcatgc

SEQ ID NO: 5919096 - DNA, 25 bp, Homo sapien
ctctaaatggtttgacgcgctacgt

SEQ ID NO: 5919097 - DNA, 25 bp, Homo sapien
gattatcgcgacatactgtgcagtc

SEQ ID NO: 5919098 - DNA, 25 bp, Homo sapien
caaagatcgcgcaggtatagttcac

SEQ ID NO: 5919099 - DNA, 25 bp, Homo sapien
atagggcttcgtacgagcgtaacat

SEQ ID NO: 5919100 - DNA, 25 bp, Homo sapien
ggtcaaatcgcgacgtataaggagt

SEQ ID NO: 5919101 - DNA, 25 bp, Homo sapien
cacgcacttcgacttacggatgttt

SEQ ID NO: 5919102 - DNA, 25 bp, Homo sapien
cttatagtgatttcgtccggtccac

SEQ ID NO: 5919103 - DNA, 25 bp, Homo sapien
aatttcagtccgcgataacaggcgt

SEQ ID NO: 5919104 - DNA, 25 bp, Homo sapien
cttattccgcgcatacgttctctga

SEQ ID NO: 5919105 - DNA, 25 bp, Homo sapien
tctaagtcgacgcgggataattcga

SEQ ID NO: 5919106 - DNA, 25 bp, Homo sapien
atttggtgacgaagcgatagcctag

SEQ ID NO: 5919107 - DNA, 25 bp, Homo sapien
aaatggctatacgcgaccaaacgtg

SEQ ID NO: 5919108 - DNA, 25 bp, Homo sapien
ccaaatttgcgcggactattggaac

SEQ ID NO: 5919109 - DNA, 25 bp, Homo sapien
agaaagagcttatgcgcgcaatagc

SEQ ID NO: 5919110 - DNA, 25 bp, Homo sapien
tcgaaacgacggacgtcaaacaagt

SEQ ID NO: 5919111 - DNA, 25 bp, Homo sapien
agtttacgcccgaatactacaacgc

SEQ ID NO: 5919112 - DNA, 25 bp, Homo sapien
catcacgttctatccgcgatcatga

SEQ ID NO: 5919113 - DNA, 25 bp, Homo sapien
gattcaatacggctatcgccaatgc

SEQ ID NO: 5919114 - DNA, 25 bp, Homo sapien
ttacccatgtcgtatagcggaaagg

SEQ ID NO: 5919115 - DNA, 25 bp, Homo sapien
attatcacgcgtactatcgctcgct

SEQ ID NO: 5919116 - DNA, 25 bp, Homo sapien
tatgcgacgtatacggtcgtacatg

SEQ ID NO: 5919117 - DNA, 25 bp, Homo sapien
actacacggttgcgcgtaatcagtt

SEQ ID NO: 5919118 - DNA, 25 bp, Homo sapien
gtttcaatacgcgttggacgtagac

SEQ ID NO: 5919119 - DNA, 25 bp, Homo sapien
tgacctacgcatcgcgtaatgaaga

SEQ ID NO: 5919120 - DNA, 25 bp, Homo sapien
ctttgcatatatccccgcgatgcaa

SEQ ID NO: 5919121 - DNA, 25 bp, Homo sapien
tacagcgcgacgttcgaactactat

SEQ ID NO: 5919122 - DNA, 25 bp, Homo sapien
tccttccgtaaggacgtattcacca

SEQ ID NO: 5919123 - DNA, 25 bp, Homo sapien
gcgctttagtagcgtaacggatgtt

SEQ ID NO: 5919124 - DNA, 25 bp, Homo sapien
ctacacaccgcgtaataggtgatgt

SEQ ID NO: 5919125 - DNA, 25 bp, Homo sapien
tcctcgcgcgatactaagttacaac

SEQ ID NO: 5919126 - DNA, 25 bp, Homo sapien
tatagccgatacgccttgtcgtttc

SEQ ID NO: 5919127 - DNA, 25 bp, Homo sapien
gtcacaacgcgtattaccgattcga

SEQ ID NO: 5919128 - DNA, 25 bp, Homo sapien
ggaaatcgcgtcagtactacagttc

SEQ ID NO: 5919129 - DNA, 25 bp, Homo sapien
cttataaatgatccgcgcatccagc

SEQ ID NO: 5919130 - DNA, 25 bp, Homo sapien
ggtcttcgtatcatgcgcgtaactt

SEQ ID NO: 5919131 - DNA, 25 bp, Homo sapien
caaaacgtctcgcgttatgcagttc

SEQ ID NO: 5919132 - DNA, 25 bp, Homo sapien
tacagacgcggtatgtatcatgacg

SEQ ID NO: 5919133 - DNA, 25 bp, Homo sapien
accagagagcgtcgacaatatcagt

SEQ ID NO: 5919134 - DNA, 25 bp, Homo sapien
gggacacgtcgaatacgctaaactt

SEQ ID NO: 5919135 - DNA, 25 bp, Homo sapien
cgtatatagcgctcgtaacccatga

SEQ ID NO: 5919136 - DNA, 25 bp, Homo sapien
cagacagtaacggacgtactttgtg

SEQ ID NO: 5919137 - DNA, 25 bp, Homo sapien
tgtgtagcgagactatcgtctttgg

SEQ ID NO: 5919138 - DNA, 25 bp, Homo sapien
ttatattctcaacgcgcctagtggc

SEQ ID NO: 5919139 - DNA, 25 bp, Homo sapien
ttcgaatatgtcgttcgcgttgcca

SEQ ID NO: 5919140 - DNA, 25 bp, Homo sapien
cattactagggcgtacgtatgacca

SEQ ID NO: 5919141 - DNA, 25 bp, Homo sapien
cattctacgtcgtaccatctatggc

SEQ ID NO: 5919142 - DNA, 25 bp, Homo sapien
taccagcgcgatatgtacgtacgat

SEQ ID NO: 5919143 - DNA, 25 bp, Homo sapien
tggtgtagaacgcgcgtataacttc

SEQ ID NO: 5919144 - DNA, 25 bp, Homo sapien
catcatcttatcgcgttgatacgcc

SEQ ID NO: 5919145 - DNA, 25 bp, Homo sapien
tggatcacgccgattagggttttca

SEQ ID NO: 5919146 - DNA, 25 bp, Homo sapien
ggagctcgtattcgagcgttttaag

SEQ ID NO: 5919147 - DNA, 25 bp, Homo sapien
cttagatagcgtctaacgcagacag

SEQ ID NO: 5919148 - DNA, 25 bp, Homo sapien
ttctatgatagttcgcgcgcaagct

SEQ ID NO: 5919149 - DNA, 25 bp, Homo sapien
ccgatatacgatcggtccctatcaa

SEQ ID NO: 5919150 - DNA, 25 bp, Homo sapien
atagaacggtcgtcgtattgccttg

SEQ ID NO: 5919151 - DNA, 25 bp, Homo sapien
tactgtgtatcgcgtaccaacgttg

SEQ ID NO: 5919152 - DNA, 25 bp, Homo sapien
atgtttgtctcgcgttaaggaccgt

SEQ ID NO: 5919153 - DNA, 25 bp, Homo sapien
gtcacgcgcgttactcgagttaata

SEQ ID NO: 5919154 - DNA, 25 bp, Homo sapien
attagtgtaataggtcgcgaccacc

SEQ ID NO: 5919155 - DNA, 25 bp, Homo sapien
agtttatcgactcgcgctaccctta

SEQ ID NO: 5919156 - DNA, 25 bp, Homo sapien
acttgatacgaatcgacggccaagt

SEQ ID NO: 5919157 - DNA, 25 bp, Homo sapien
gtttgtgaacgatcgtacgaaaccc

SEQ ID NO: 5919158 - DNA, 25 bp, Homo sapien
tagaaccgacacgactagttatcgc

SEQ ID NO: 5919159 - DNA, 25 bp, Homo sapien
tgcactagtaccgtacgctcactat

SEQ ID NO: 5919160 - DNA, 25 bp, Homo sapien
tttctcttcgcgctcggtacatgta

SEQ ID NO: 5919161 - DNA, 25 bp, Homo sapien
atactgtactcgacggtcgaacact

SEQ ID NO: 5919162 - DNA, 25 bp, Homo sapien
tgtgcaacggttcgctaaccgttaa

SEQ ID NO: 5919163 - DNA, 25 bp, Homo sapien
ttccgatagtacgttgccgtgacaa

SEQ ID NO: 5919164 - DNA, 25 bp, Homo sapien
taggttcgcgtcgtaccttttgtct

SEQ ID NO: 5919165 - DNA, 25 bp, Homo sapien
actcagtacctaacgatcgccttga

SEQ ID NO: 5919166 - DNA, 25 bp, Homo sapien
ggctaactacgacgtatcgtgtaac

SEQ ID NO: 5919167 - DNA, 25 bp, Homo sapien
tgacatcgtactaaacggctctgga

SEQ ID NO: 5919168 - DNA, 25 bp, Homo sapien
gcgtaacgcctatcgtacagtctaa

SEQ ID NO: 5919169 - DNA, 25 bp, Homo sapien
taaatatatcgcgtcgggtacccac

SEQ ID NO: 5919170 - DNA, 25 bp, Homo sapien
ttgcaggactattcgacgcttagga

SEQ ID NO: 5919171 - DNA, 25 bp, Homo sapien
cccataatataccggatcggtgatc

SEQ ID NO: 5919172 - DNA, 25 bp, Homo sapien
ttctctcttcgcgaactaggcgaaa

SEQ ID NO: 5919173 - DNA, 25 bp, Homo sapien
cgtttgcgcaacgggtatcttcaaa

SEQ ID NO: 5919174 - DNA, 25 bp, Homo sapien
ataacccgtacgatacccacagcta

SEQ ID NO: 5919175 - DNA, 25 bp, Homo sapien
cgttctgtcgcgaattagatgtctg

SEQ ID NO: 5919176 - DNA, 25 bp, Homo sapien
gcaaagcgtatcgctaggagtttac

SEQ ID NO: 5919177 - DNA, 25 bp, Homo sapien
gtgattgacctattcgcgtgcaaca

SEQ ID NO: 5919178 - DNA, 25 bp, Homo sapien
ctgtttgtatattcgcgacccagag

SEQ ID NO: 5919179 - DNA, 25 bp, Homo sapien
aattcgccgtagcgcattactacct

SEQ ID NO: 5919180 - DNA, 25 bp, Homo sapien
aactttcgcgattcgtacggagatg

SEQ ID NO: 5919181 - DNA, 25 bp, Homo sapien
taactgtcgcgatcatgcgcaaatg

SEQ ID NO: 5919182 - DNA, 25 bp, Homo sapien
gaacaacctacgtcgaacttgagac

SEQ ID NO: 5919183 - DNA, 25 bp, Homo sapien
tttactgcgcgacatacgaacggtt

SEQ ID NO: 5919184 - DNA, 25 bp, Homo sapien
cagaccccgacgtgtaatgtgtaat

SEQ ID NO: 5919185 - DNA, 25 bp, Homo sapien
attcacagtcgttccgtagcagcaa

SEQ ID NO: 5919186 - DNA, 25 bp, Homo sapien
agataccgcggtacgtaaatactgc

SEQ ID NO: 5919187 - DNA, 25 bp, Homo sapien
cgcataaacgagtcgtatctgcatc

SEQ ID NO: 5919188 - DNA, 25 bp, Homo sapien
tcttcactcgtattacgcggtgcta

SEQ ID NO: 5919189 - DNA, 25 bp, Homo sapien
gctgttaagcgatcgacgtcataac

SEQ ID NO: 5919190 - DNA, 25 bp, Homo sapien
agagtctaagacgtcgcgaattgtg

SEQ ID NO: 5919191 - DNA, 25 bp, Homo sapien
caagtggttacgatcggtcagttag

SEQ ID NO: 5919192 - DNA, 25 bp, Homo sapien
accatttacgacgtagtactgaggg

SEQ ID NO: 5919193 - DNA, 25 bp, Homo sapien
ggatcacggcatacgactattcaac

SEQ ID NO: 5919194 - DNA, 25 bp, Homo sapien
gtacgtcgttcgtcgaactctgttt

SEQ ID NO: 5919195 - DNA, 25 bp, Homo sapien
aaggatagatcgtaccgcgtatcac

SEQ ID NO: 5919196 - DNA, 25 bp, Homo sapien
gcttacgcgcctaattcgtttctac

SEQ ID NO: 5919197 - DNA, 25 bp, Homo sapien
cacagctcgcggataatagtaatgc

SEQ ID NO: 5919198 - DNA, 25 bp, Homo sapien
gcaagaatgatcgcgcgtattgcta

SEQ ID NO: 5919199 - DNA, 25 bp, Homo sapien
tgagcttcgcgcgaataaatccttg

SEQ ID NO: 5919200 - DNA, 25 bp, Homo sapien
cgaaagatcgtctagtcggaagtca

SEQ ID NO: 5919201 - DNA, 25 bp, Homo sapien
aaagagaccgtacgctacgccataa

SEQ ID NO: 5919202 - DNA, 25 bp, Homo sapien
gagattacttatcgggcgaatgctc

SEQ ID NO: 5919203 - DNA, 25 bp, Homo sapien
tgttctaacgtagcgctcgcatcta

SEQ ID NO: 5919204 - DNA, 25 bp, Homo sapien
tccgatgtcgcgttaatacccacat

SEQ ID NO: 5919205 - DNA, 25 bp, Homo sapien
caactgagtaccgaacgtaggcata

SEQ ID NO: 5919206 - DNA, 25 bp, Homo sapien
gacacttaatcggcgtatggggaat

SEQ ID NO: 5919207 - DNA, 25 bp, Homo sapien
gacgttgtcctacgcgaatttctct

SEQ ID NO: 5919208 - DNA, 25 bp, Homo sapien
ctcatggatatacgtgcgccttagt

SEQ ID NO: 5919209 - DNA, 25 bp, Homo sapien
gaatactaacgggtccgaaccgata

SEQ ID NO: 5919210 - DNA, 25 bp, Homo sapien
gcatgataggcgcgttactttaggt

SEQ ID NO: 5919211 - DNA, 25 bp, Homo sapien
atttctccgctatgcgctttgaacc

SEQ ID NO: 5919212 - DNA, 25 bp, Homo sapien
tcggaaccgtagtccgatagactta

SEQ ID NO: 5919213 - DNA, 25 bp, Homo sapien
tgtcccctcgatacgtcgagaattt

SEQ ID NO: 5919214 - DNA, 25 bp, Homo sapien
gtttacacgcgcgaactatgcgaaa

SEQ ID NO: 5919215 - DNA, 25 bp, Homo sapien
ccatatcgcgcgaatcaacacaaca

SEQ ID NO: 5919216 - DNA, 25 bp, Homo sapien
ctaatgttataccgcgcgtgcgatt

SEQ ID NO: 5919217 - DNA, 25 bp, Homo sapien
ttttcacgaaccgcgagtaatctgg

SEQ ID NO: 5919218 - DNA, 25 bp, Homo sapien
cagtccatacgcgtcgaatctacta

SEQ ID NO: 5919219 - DNA, 25 bp, Homo sapien
ttcagcacgtacgatacgccgtata

SEQ ID NO: 5919220 - DNA, 25 bp, Homo sapien
acacgtgtagcgattcgcgaataac

SEQ ID NO: 5919221 - DNA, 25 bp, Homo sapien
acggaaccgcggaatgtagatactt

SEQ ID NO: 5919222 - DNA, 25 bp, Homo sapien
agactagtcgacgataagtccggaa

SEQ ID NO: 5919223 - DNA, 25 bp, Homo sapien
tccactccgcgccgaattattattg

SEQ ID NO: 5919224 - DNA, 25 bp, Homo sapien
tattttcgtaccgaagcgtggcaga

SEQ ID NO: 5919225 - DNA, 25 bp, Homo sapien
cctgatcgtataaagcgtcactcga

SEQ ID NO: 5919226 - DNA, 25 bp, Homo sapien
ggagaattggatatcgcgcttggaa

SEQ ID NO: 5919227 - DNA, 25 bp, Homo sapien
agaacgcgcgaacgatattgctcat

SEQ ID NO: 5919228 - DNA, 25 bp, Homo sapien
gactaacgatacgcaaggtttccac

SEQ ID NO: 5919229 - DNA, 25 bp, Homo sapien
gcggttcgactaacgcgttttttca

SEQ ID NO: 5919230 - DNA, 25 bp, Homo sapien
aaggttgtcgcgcttatacagtcca

SEQ ID NO: 5919231 - DNA, 25 bp, Homo sapien
agaaaacgtcgtatacggactgcct

SEQ ID NO: 5919232 - DNA, 25 bp, Homo sapien
agatcacgcgccgtaatgatgtcta

SEQ ID NO: 5919233 - DNA, 25 bp, Homo sapien
cgagtttgtatccgaccgcttgtat

SEQ ID NO: 5919234 - DNA, 25 bp, Homo sapien
taactggacgcgcaataccgatgaa

SEQ ID NO: 5919235 - DNA, 25 bp, Homo sapien
attaccgccgcatatacggtgtcaa

SEQ ID NO: 5919236 - DNA, 25 bp, Homo sapien
gtaagggcggtcgacgtaatttcaa

SEQ ID NO: 5919237 - DNA, 25 bp, Homo sapien
caataataattcggcgcggagtgga

SEQ ID NO: 5919238 - DNA, 25 bp, Homo sapien
tagcaccgcgtaatacgagtgaaga

SEQ ID NO: 5919239 - DNA, 25 bp, Homo sapien
ttactttccgcgctcgtatcagtca

SEQ ID NO: 5919240 - DNA, 25 bp, Homo sapien
aggcagtccgtatacgacgttttct

SEQ ID NO: 5919241 - DNA, 25 bp, Homo sapien
caaagctagtcgcgactcctactta

SEQ ID NO: 5919242 - DNA, 25 bp, Homo sapien
atgtcgcgcgaacatagtctacaca

SEQ ID NO: 5919243 - DNA, 25 bp, Homo sapien
tttcaagggcgatctagcgctctat

SEQ ID NO: 5919244 - DNA, 25 bp, Homo sapien
atataggtactacgccgtagggcaa

SEQ ID NO: 5919245 - DNA, 25 bp, Homo sapien
aaccgttcgtatgtcgcgcagtaaa

SEQ ID NO: 5919246 - DNA, 25 bp, Homo sapien
ataatacgtaaggtcgccatccctg

SEQ ID NO: 5919247 - DNA, 25 bp, Homo sapien
tagcaatacgcgcgatcattcttgc

SEQ ID NO: 5919248 - DNA, 25 bp, Homo sapien
atgtggaccgatacgacgtctatag

SEQ ID NO: 5919249 - DNA, 25 bp, Homo sapien
tcggcagtattacgcgtcgtataac

SEQ ID NO: 5919250 - DNA, 25 bp, Homo sapien
atgcaggttacgcgtaacctgttca

SEQ ID NO: 5919251 - DNA, 25 bp, Homo sapien
atgttctcggcgtatcgtcagatac

SEQ ID NO: 5919252 - DNA, 25 bp, Homo sapien
tccaactaagtctacgcgcctgtat

SEQ ID NO: 5919253 - DNA, 25 bp, Homo sapien
gacatggtagcgcggtattcatgtt

SEQ ID NO: 5919254 - DNA, 25 bp, Homo sapien
tatgtcacgcgtaacgtacctaagg

SEQ ID NO: 5919255 - DNA, 25 bp, Homo sapien
gtagaaacgaattaggcgcgtaagc

SEQ ID NO: 5919256 - DNA, 25 bp, Homo sapien
tactagtacgcctgtagcgaagcaa

SEQ ID NO: 5919257 - DNA, 25 bp, Homo sapien
ctatttcgtccgaacggtagcatag

SEQ ID NO: 5919258 - DNA, 25 bp, Homo sapien
gttctcgtaatagcgcgactgatca

SEQ ID NO: 5919259 - DNA, 25 bp, Homo sapien
tcagagaacgtatgcgcggaataag

SEQ ID NO: 5919260 - DNA, 25 bp, Homo sapien
aatctgtacacgacgcgtatctgag

SEQ ID NO: 5919261 - DNA, 25 bp, Homo sapien
tatatggtactacgcggtctgtgac

SEQ ID NO: 5919262 - DNA, 25 bp, Homo sapien
tagttgttcgcgacgtatccacact

SEQ ID NO: 5919263 - DNA, 25 bp, Homo sapien
caaagggatactacgcgacaatcga

SEQ ID NO: 5919264 - DNA, 25 bp, Homo sapien
cttcccgtacgcgattacgatcaat

SEQ ID NO: 5919265 - DNA, 25 bp, Homo sapien
tttaggcgacgattagcgtaactgc

SEQ ID NO: 5919266 - DNA, 25 bp, Homo sapien
atctgatcgtccggacgtttacgat

SEQ ID NO: 5919267 - DNA, 25 bp, Homo sapien
aagtagccgcgtcacgtattctatc

SEQ ID NO: 5919268 - DNA, 25 bp, Homo sapien
ctataaacgtacggtatcgggcgat

SEQ ID NO: 5919269 - DNA, 25 bp, Homo sapien
ttcatagcgcgagttatcgacacct

SEQ ID NO: 5919270 - DNA, 25 bp, Homo sapien
tatcagaatcccgttacgcatgagg

SEQ ID NO: 5919271 - DNA, 25 bp, Homo sapien
ttctctatgcgcgacttagtctagc

SEQ ID NO: 5919272 - DNA, 25 bp, Homo sapien
cttggtcgggatacctcgttataca

SEQ ID NO: 5919273 - DNA, 25 bp, Homo sapien
cggacttatcgctcgtacgagttat

SEQ ID NO: 5919274 - DNA, 25 bp, Homo sapien
catcagcgtcggtataacgcattca

SEQ ID NO: 5919275 - DNA, 25 bp, Homo sapien
ccatattcgaacgtatgcgtttcgg

SEQ ID NO: 5919276 - DNA, 25 bp, Homo sapien
gtctacgtccaacgcgtattgaaac

SEQ ID NO: 5919277 - DNA, 25 bp, Homo sapien
taagaacgtacgatcgcacgatgct

SEQ ID NO: 5919278 - DNA, 25 bp, Homo sapien
ccaatgtcgcgttataagccaaacg

SEQ ID NO: 5919279 - DNA, 25 bp, Homo sapien
ctggtcagtcgccgcgaatatatta

SEQ ID NO: 5919280 - DNA, 25 bp, Homo sapien
tgttcttaacgggcgctatggagat

SEQ ID NO: 5919281 - DNA, 25 bp, Homo sapien
ttcatatataacgcgaccgctgcct

SEQ ID NO: 5919282 - DNA, 25 bp, Homo sapien
agcttgcgcgcgaactatcatagaa

SEQ ID NO: 5919283 - DNA, 25 bp, Homo sapien
ttgaggttagtacggaccgcttgaa

SEQ ID NO: 5919284 - DNA, 25 bp, Homo sapien
cagacatctaattcgcgacagaacg

SEQ ID NO: 5919285 - DNA, 25 bp, Homo sapien
aatgcctgattgtacgcgcgttcta

SEQ ID NO: 5919286 - DNA, 25 bp, Homo sapien
tacgttgcgagattgcgtacgttgt

SEQ ID NO: 5919287 - DNA, 25 bp, Homo sapien
aagtatctacattccgcggttccgt

SEQ ID NO: 5919288 - DNA, 25 bp, Homo sapien
cctcatactaacgctcgcgaaacta

SEQ ID NO: 5919289 - DNA, 25 bp, Homo sapien
attagcataaggtcgcgacttctgg

SEQ ID NO: 5919290 - DNA, 25 bp, Homo sapien
acttatatcggacgcgaatcagacc

SEQ ID NO: 5919291 - DNA, 25 bp, Homo sapien
gtgtaataggctaacgcgacggata

SEQ ID NO: 5919292 - DNA, 25 bp, Homo sapien
aacgagtcggtcgaccatatagttg

SEQ ID NO: 5919293 - DNA, 25 bp, Homo sapien
acctaaagtaacgcgcctatcatgc

SEQ ID NO: 5919294 - DNA, 25 bp, Homo sapien
gccatagatggtacgacgtagaatg

SEQ ID NO: 5919295 - DNA, 25 bp, Homo sapien
tccagagccgtttagtacgatgtca

SEQ ID NO: 5919296 - DNA, 25 bp, Homo sapien
tgacaacatacgtcgagcgtaactg

SEQ ID NO: 5919297 - DNA, 25 bp, Homo sapien
agtagggcggtatcgtactttgagt

SEQ ID NO: 5919298 - DNA, 25 bp, Homo sapien
ctgtggcgcgggacgtaatttatta

SEQ ID NO: 5919299 - DNA, 25 bp, Homo sapien
gatgcagatacgactcgtttatgcg

SEQ ID NO: 5919300 - DNA, 25 bp, Homo sapien
tttccgttacgcgcgaaccttaatc

SEQ ID NO: 5919301 - DNA, 25 bp, Homo sapien
actgaaccgttagtagacgaaagcc

SEQ ID NO: 5919302 - DNA, 25 bp, Homo sapien
ttgatagggaccgatcgtatatcgg

SEQ ID NO: 5919303 - DNA, 25 bp, Homo sapien
gtatttttccgcgaatacgcgctgt

SEQ ID NO: 5919304 - DNA, 25 bp, Homo sapien
ttacacatcgcgcactaacccactt

SEQ ID NO: 5919305 - DNA, 25 bp, Homo sapien
tcctctacgctagtcgataaaaccg

SEQ ID NO: 5919306 - DNA, 25 bp, Homo sapien
accattcgtacgtcgtatcaccatg

SEQ ID NO: 5919307 - DNA, 25 bp, Homo sapien
aagttacgcgcatgatacgaagacc

SEQ ID NO: 5919308 - DNA, 25 bp, Homo sapien
tagctgtgggtatcgtacgggttat

SEQ ID NO: 5919309 - DNA, 25 bp, Homo sapien
atctggctacgcgttagtaagagca

SEQ ID NO: 5919310 - DNA, 25 bp, Homo sapien
attatgcgcgaaacatactcgtccg

SEQ ID NO: 5919311 - DNA, 25 bp, Homo sapien
ttcaatcatacgatcgtacggctcg

SEQ ID NO: 5919312 - DNA, 25 bp, Homo sapien
cacaaagtacgtccgttactgtctg

SEQ ID NO: 5919313 - DNA, 25 bp, Homo sapien
tcatgccaatagtcgcgctatagtc

SEQ ID NO: 5919314 - DNA, 25 bp, Homo sapien
cgtacattcgcgctagagtaaggaa

SEQ ID NO: 5919315 - DNA, 25 bp, Homo sapien
tttgaagatacccgttgcgcaaacg

SEQ ID NO: 5919316 - DNA, 25 bp, Homo sapien
atcgtatcgcgtatcgtcccttgta

SEQ ID NO: 5919317 - DNA, 25 bp, Homo sapien
gtctcggccttatacgacgattttg

SEQ ID NO: 5919318 - DNA, 25 bp, Homo sapien
ccacatgattcgcgactgaagagaa

SEQ ID NO: 5919319 - DNA, 25 bp, Homo sapien
ttaagtcgacacttatcgcgtgctg

SEQ ID NO: 5919320 - DNA, 25 bp, Homo sapien
cttaatcgcggtagtggtattgagc

SEQ ID NO: 5919321 - DNA, 25 bp, Homo sapien
gacttctagacgtagcgcgttctaa

SEQ ID NO: 5919322 - DNA, 25 bp, Homo sapien
ccgattgcgatctatcgtacatgag

SEQ ID NO: 5919323 - DNA, 25 bp, Homo sapien
ctaggctatcgcttcgtcaccaaat

SEQ ID NO: 5919324 - DNA, 25 bp, Homo sapien
ccagattactcgcggttcgtgaaaa

SEQ ID NO: 5919325 - DNA, 25 bp, Homo sapien
tcttatgtattacgcgaggtggggt

SEQ ID NO: 5919326 - DNA, 25 bp, Homo sapien
acgattacgcgaccgttcgtattag

SEQ ID NO: 5919327 - DNA, 25 bp, Homo sapien
tgttatcgacggtataccctctctc

SEQ ID NO: 5919328 - DNA, 25 bp, Homo sapien
tcagctttcgcgacgtcaatcaaag

SEQ ID NO: 5919329 - DNA, 25 bp, Homo sapien
ttagactgtacgataggcgttacgc

SEQ ID NO: 5919330 - DNA, 25 bp, Homo sapien
cgtagtgcgctcgtacgtaacataa

SEQ ID NO: 5919331 - DNA, 25 bp, Homo sapien
gagagcttataccgtcggcattgat

SEQ ID NO: 5919332 - DNA, 25 bp, Homo sapien
cgggagaactagcgcgataatcaaa

SEQ ID NO: 5919333 - DNA, 25 bp, Homo sapien
aactgattacgcgcaaccgtgtagt

SEQ ID NO: 5919334 - DNA, 25 bp, Homo sapien
tgtgagtattagtcgcggccgtaat

SEQ ID NO: 5919335 - DNA, 25 bp, Homo sapien
gcatgccgacgtagcatgtcatatt

SEQ ID NO: 5919336 - DNA, 25 bp, Homo sapien
actctttaagctcgcgtcatagcca

SEQ ID NO: 5919337 - DNA, 25 bp, Homo sapien
tttgccacgtcgtgttacgagtaac

SEQ ID NO: 5919338 - DNA, 25 bp, Homo sapien
tggcaacgcgaacgacatattcgaa

SEQ ID NO: 5919339 - DNA, 25 bp, Homo sapien
gaattgtacgtcgcgttctctgttc

SEQ ID NO: 5919340 - DNA, 25 bp, Homo sapien
aacaaacgggttagcgtatgctcga

SEQ ID NO: 5919341 - DNA, 25 bp, Homo sapien
cctatccggcgtattacatgcttca

SEQ ID NO: 5919342 - DNA, 25 bp, Homo sapien
atgttacgctcgtacgaagccctat

SEQ ID NO: 5919343 - DNA, 25 bp, Homo sapien
tacaaagtacgctcgtgaccagagt

SEQ ID NO: 5919344 - DNA, 25 bp, Homo sapien
gcggtaacgttatcgcgcttataag

SEQ ID NO: 5919345 - DNA, 25 bp, Homo sapien
tttcgcctagttcgcgaagagagaa

SEQ ID NO: 5919346 - DNA, 25 bp, Homo sapien
ctctgggtcgcgaatatacaaacag

SEQ ID NO: 5919347 - DNA, 25 bp, Homo sapien
ttacggccggcgtatgataacaagt

SEQ ID NO: 5919348 - DNA, 25 bp, Homo sapien
gtttctgggtcggttgcgaaaacta

SEQ ID NO: 5919349 - DNA, 25 bp, Homo sapien
taggattcggacgtaacgattgggt

SEQ ID NO: 5919350 - DNA, 25 bp, Homo sapien
gctatttcgtcgcgtataacccttg

SEQ ID NO: 5919351 - DNA, 25 bp, Homo sapien
cgaacagtcgctagtcacgaagtaa

SEQ ID NO: 5919352 - DNA, 25 bp, Homo sapien
gtgaactatacctgcgcgatctttg

SEQ ID NO: 5919353 - DNA, 25 bp, Homo sapien
cttttcgcgccgtaatagagacgtt

SEQ ID NO: 5919354 - DNA, 25 bp, Homo sapien
cctttccgtacgagatacgtttcag

SEQ ID NO: 5919355 - DNA, 25 bp, Homo sapien
cgatactgtatcgagcgaccttctt

SEQ ID NO: 5919356 - DNA, 25 bp, Homo sapien
acatcgcgacgcgaagttaaccttt

SEQ ID NO: 5919357 - DNA, 25 bp, Homo sapien
atcaatcaacgttcgatcggacgct

SEQ ID NO: 5919358 - DNA, 25 bp, Homo sapien
tagacatcattacggcgcgtgatct

SEQ ID NO: 5919359 - DNA, 25 bp, Homo sapien
tatctatacggtcgacctacctcac

SEQ ID NO: 5919360 - DNA, 25 bp, Homo sapien
tactaacgcggtattcgatcccttg

SEQ ID NO: 5919361 - DNA, 25 bp, Homo sapien
aaattctcgacgtatcgaggggaca

SEQ ID NO: 5919362 - DNA, 25 bp, Homo sapien
acaccaccgaacgacgtatcactat

SEQ ID NO: 5919363 - DNA, 25 bp, Homo sapien
tgttgcacgcgaataggtcaatcac

SEQ ID NO: 5919364 - DNA, 25 bp, Homo sapien
cataacgcgtctatcgtaccgagta

SEQ ID NO: 5919365 - DNA, 25 bp, Homo sapien
ctaggacgttagcgagtagcttatg

SEQ ID NO: 5919366 - DNA, 25 bp, Homo sapien
ctaatttcgtcgtacgagacgctct

SEQ ID NO: 5919367 - DNA, 25 bp, Homo sapien
agagaaattcgcgtaggacaacgtc

SEQ ID NO: 5919368 - DNA, 25 bp, Homo sapien
tagaatcgccggataactagcccta

SEQ ID NO: 5919369 - DNA, 25 bp, Homo sapien
ttggaggcgtacggtctagttaagt

SEQ ID NO: 5919370 - DNA, 25 bp, Homo sapien
cgttaccgatacgccatatcgattc

SEQ ID NO: 5919371 - DNA, 25 bp, Homo sapien
gagcattcgcccgataagtaatctc

SEQ ID NO: 5919372 - DNA, 25 bp, Homo sapien
gtgtattaaatcgcgccgagaagca

SEQ ID NO: 5919373 - DNA, 25 bp, Homo sapien
ttctcaacgtcgagacgtaatcgtc

SEQ ID NO: 5919374 - DNA, 25 bp, Homo sapien
actaaggcgcacgtatatccatgag

SEQ ID NO: 5919375 - DNA, 25 bp, Homo sapien
tggctttgtcggtcgtatataccac

SEQ ID NO: 5919376 - DNA, 25 bp, Homo sapien
aggatgcgacagccgtttaagaagt

SEQ ID NO: 5919377 - DNA, 25 bp, Homo sapien
tttatccgacccgatactagcgtgt

SEQ ID NO: 5919378 - DNA, 25 bp, Homo sapien
tatttgagtatagcgatcgggtcgg

SEQ ID NO: 5919379 - DNA, 25 bp, Homo sapien
aaggtcacctcaatacgcgaccttt

SEQ ID NO: 5919380 - DNA, 25 bp, Homo sapien
acttcttccctacgcgtaatacctc

SEQ ID NO: 5919381 - DNA, 25 bp, Homo sapien
gactgcacagtatgtcgcgataatc

SEQ ID NO: 5919382 - DNA, 25 bp, Homo sapien
gccaaatcaaccgcgtctagtagaa

SEQ ID NO: 5919383 - DNA, 25 bp, Homo sapien
caacggagtatcgcgtagagttttg

SEQ ID NO: 5919384 - DNA, 25 bp, Homo sapien
agattggcgtagtacgataacgcga

SEQ ID NO: 5919385 - DNA, 25 bp, Homo sapien
caatcaatatcgcgtggacactgtg

SEQ ID NO: 5919386 - DNA, 25 bp, Homo sapien
agaactgtacgtagtgcggatgcaa

SEQ ID NO: 5919387 - DNA, 25 bp, Homo sapien
tgtttgatcgcgaaacgactgggat

SEQ ID NO: 5919388 - DNA, 25 bp, Homo sapien
ttcgttcgccgtatattcgaacacc

SEQ ID NO: 5919389 - DNA, 25 bp, Homo sapien
gtatagcgtcctatccgaaaaccga

SEQ ID NO: 5919390 - DNA, 25 bp, Homo sapien
taagtctatcggactacggttccga

SEQ ID NO: 5919391 - DNA, 25 bp, Homo sapien
agcgagcgatagtacgcgtgataat

SEQ ID NO: 5919392 - DNA, 25 bp, Homo sapien
caggttggcgtatcgtagttctttc

SEQ ID NO: 5919393 - DNA, 25 bp, Homo sapien
ctattcaaccatcgtacgaaagggg

SEQ ID NO: 5919394 - DNA, 25 bp, Homo sapien
catctccgtacgaatcgcgaaagtt

SEQ ID NO: 5919395 - DNA, 25 bp, Homo sapien
tcttcattacgcgatgcgtaggtca

SEQ ID NO: 5919396 - DNA, 25 bp, Homo sapien
gtcagattacgcccgcttacttcat

SEQ ID NO: 5919397 - DNA, 25 bp, Homo sapien
tatttagaccgcataaccgcccaag

SEQ ID NO: 5919398 - DNA, 25 bp, Homo sapien
tcatgatcgcggatagaacgtgatg

SEQ ID NO: 5919399 - DNA, 25 bp, Homo sapien
gaaacgactagatagcgcgatccaa

SEQ ID NO: 5919400 - DNA, 25 bp, Homo sapien
acccgctcgattatacgcgaatcta

SEQ ID NO: 5919401 - DNA, 25 bp, Homo sapien
agttgtcgctcgtactagaagcaag

SEQ ID NO: 5919402 - DNA, 25 bp, Homo sapien
attgacctaggcgcgttatgaactc

SEQ ID NO: 5919403 - DNA, 25 bp, Homo sapien
gctattgcgcgcataagctctttct

SEQ ID NO: 5919404 - DNA, 25 bp, Homo sapien
tcctaagcgtcgaatagtcctgcaa

SEQ ID NO: 5919405 - DNA, 25 bp, Homo sapien
tatctgttacgtcgcacacaagtgg

SEQ ID NO: 5919406 - DNA, 25 bp, Homo sapien
gaacagatcggtcctagcgtctaat

SEQ ID NO: 5919407 - DNA, 25 bp, Homo sapien
ataataggtcgctcgtatgcgctga

SEQ ID NO: 5919408 - DNA, 25 bp, Homo sapien
tttcaatagcgggattgcgaaggtg

SEQ ID NO: 5919409 - DNA, 25 bp, Homo sapien
atatgttatcgacgcgagcggatgt

SEQ ID NO: 5919410 - DNA, 25 bp, Homo sapien
tcgaatcggtaatacgcgttgtgac

SEQ ID NO: 5919411 - DNA, 25 bp, Homo sapien
tcatttgtcgacatacgcagctcca

SEQ ID NO: 5919412 - DNA, 25 bp, Homo sapien
cgtaatgagtaaatccgcggtgcat

SEQ ID NO: 5919413 - DNA, 25 bp, Homo sapien
atactctcgcgtgtactagggactt

SEQ ID NO: 5919414 - DNA, 25 bp, Homo sapien
aaagagatatcgcggtaccacatgg

SEQ ID NO: 5919415 - DNA, 25 bp, Homo sapien
agtgttcgaccgtcgagtacagtat

SEQ ID NO: 5919416 - DNA, 25 bp, Homo sapien
acttagtatcgacgggtgtcagctt

SEQ ID NO: 5919417 - DNA, 25 bp, Homo sapien
tactattcaagcgtactcggccgta

SEQ ID NO: 5919418 - DNA, 25 bp, Homo sapien
ctttgttctgcgtacgatcgctcta

SEQ ID NO: 5919419 - DNA, 25 bp, Homo sapien
accttacgcgtctaactagtcggta

SEQ ID NO: 5919420 - DNA, 25 bp, Homo sapien
atacgagacctaacggcgtatgtgt

SEQ ID NO: 5919421 - DNA, 25 bp, Homo sapien
tacatatagtacgacggtcgccgta

SEQ ID NO: 5919422 - DNA, 25 bp, Homo sapien
gccacatcgctataaccgactaagt

SEQ ID NO: 5919423 - DNA, 25 bp, Homo sapien
catttaacgaatagcgggtgggaca

SEQ ID NO: 5919424 - DNA, 25 bp, Homo sapien
tggtcatacgtacgccctagtaatg

SEQ ID NO: 5919425 - DNA, 25 bp, Homo sapien
ggagaatatcgcgtcgtgatctcaa

SEQ ID NO: 5919426 - DNA, 25 bp, Homo sapien
ggtaagtagtaggaacgcgctagtt

SEQ ID NO: 5919427 - DNA, 25 bp, Homo sapien
aatgctcggcgtagggtactactat

SEQ ID NO: 5919428 - DNA, 25 bp, Homo sapien
tcggaaaacgtacgcgatattagcg

SEQ ID NO: 5919429 - DNA, 25 bp, Homo sapien
ccacgccgttattcggacgattata

SEQ ID NO: 5919430 - DNA, 25 bp, Homo sapien
gagttatacccgttacgagttgtcg

SEQ ID NO: 5919431 - DNA, 25 bp, Homo sapien
gtttgtgtacgcgaacccatgctta

SEQ ID NO: 5919432 - DNA, 25 bp, Homo sapien
gtttagtgtaacgtcgatcaggggt

SEQ ID NO: 5919433 - DNA, 25 bp, Homo sapien
gtgacagtacgcgcgttaaagttac

SEQ ID NO: 5919434 - DNA, 25 bp, Homo sapien
cgctgagttcgactagcgttctatt

SEQ ID NO: 5919435 - DNA, 25 bp, Homo sapien
accatgtctcgtagcgctatgctat

SEQ ID NO: 5919436 - DNA, 25 bp, Homo sapien
gtaatacgttcgcgcaagtgattgc

SEQ ID NO: 5919437 - DNA, 25 bp, Homo sapien
tcacaataattcggaccgctggatc

SEQ ID NO: 5919438 - DNA, 25 bp, Homo sapien
gatccagtatcgtatacgcgaacgt

SEQ ID NO: 5919439 - DNA, 25 bp, Homo sapien
attccccatacgccgattaagtgtc

SEQ ID NO: 5919440 - DNA, 25 bp, Homo sapien
agcgaagtaacggttcgacaagatc

SEQ ID NO: 5919441 - DNA, 25 bp, Homo sapien
atctggcgacataacgcacatacac

SEQ ID NO: 5919442 - DNA, 25 bp, Homo sapien
atagtgagcgtacggtactagtgca

SEQ ID NO: 5919443 - DNA, 25 bp, Homo sapien
catcctttagcccgtatcggcaatt

SEQ ID NO: 5919444 - DNA, 25 bp, Homo sapien
tatagtgtataacgagcggcgtggt

SEQ ID NO: 5919445 - DNA, 25 bp, Homo sapien
gctggatgcgcggatcatttataag

SEQ ID NO: 5919446 - DNA, 25 bp, Homo sapien
agatgttagtcgtttacgcaccgag

SEQ ID NO: 5919447 - DNA, 25 bp, Homo sapien
acgtagcgcgtcaaaccatttagag

SEQ ID NO: 5919448 - DNA, 25 bp, Homo sapien
atagtagttcgaacgtcgcgctgta

SEQ ID NO: 5919449 - DNA, 25 bp, Homo sapien
tcggatgttcgcgacgtaacaagtt

SEQ ID NO: 5919450 - DNA, 25 bp, Homo sapien
tggtgaatacgtccttacggaagga

SEQ ID NO: 5919451 - DNA, 25 bp, Homo sapien
acttggccgtcgattcgtatcaagt

SEQ ID NO: 5919452 - DNA, 25 bp, Homo sapien
ttgtgatgttgcgcggttaacagca

SEQ ID NO: 5919453 - DNA, 25 bp, Homo sapien
aagaccgttacgacgctagcagtat

SEQ ID NO: 5919454 - DNA, 25 bp, Homo sapien
aggatcgtccatcgcgtaaaaactc

SEQ ID NO: 5919455 - DNA, 25 bp, Homo sapien
tacaggtagcccgtcgttaatgcta

SEQ ID NO: 5919456 - DNA, 25 bp, Homo sapien
gtctcaagttcgacgtaggttgttc

SEQ ID NO: 5919457 - DNA, 25 bp, Homo sapien
tatgcctacgttcggtactcagttg

SEQ ID NO: 5919458 - DNA, 25 bp, Homo sapien
tggaaaactccgacgatcgagctta

SEQ ID NO: 5919459 - DNA, 25 bp, Homo sapien
cttcacgcgcgaatctataacagtg

SEQ ID NO: 5919460 - DNA, 25 bp, Homo sapien
tacatgtaccgagcgcgaagagaaa

SEQ ID NO: 5919461 - DNA, 25 bp, Homo sapien
gtaagcttcgcccctacgtcaataa

SEQ ID NO: 5919462 - DNA, 25 bp, Homo sapien
agagaacgtcttatagcgtaagggg

SEQ ID NO: 5919463 - DNA, 25 bp, Homo sapien
cctaagactacgcgatgcgaagtta

SEQ ID NO: 5919464 - DNA, 25 bp, Homo sapien
gataaccgattcgtagggttccagt

SEQ ID NO: 5919465 - DNA, 25 bp, Homo sapien
actccttatacgtcgcgatttgacc

SEQ ID NO: 5919466 - DNA, 25 bp, Homo sapien
tgacttccgactagacgatctttcg

SEQ ID NO: 5919467 - DNA, 25 bp, Homo sapien
acttgtttgacgtccgtcgtttcga

SEQ ID NO: 5919468 - DNA, 25 bp, Homo sapien
ttatggcgtagcgtacggtctcttt

SEQ ID NO: 5919469 - DNA, 25 bp, Homo sapien
tcatgggttacgagcgctatatacg

SEQ ID NO: 5919470 - DNA, 25 bp, Homo sapien
gaccctagtataatcgcgctcttag

SEQ ID NO: 5919471 - DNA, 25 bp, Homo sapien
gcgttgtagtattcgggcgtaaact

SEQ ID NO: 5919472 - DNA, 25 bp, Homo sapien
cagaatttagcgacggctagcattg

SEQ ID NO: 5919473 - DNA, 25 bp, Homo sapien
gggtttcgtacgatcgttcacaaac

SEQ ID NO: 5919474 - DNA, 25 bp, Homo sapien
ggcgtatcaacgcgataagatgatg

SEQ ID NO: 5919475 - DNA, 25 bp, Homo sapien
gctaccatacaacggtacgaatgga

SEQ ID NO: 5919476 - DNA, 25 bp, Homo sapien
caaggcaatacgacgaccgttctat

SEQ ID NO: 5919477 - DNA, 25 bp, Homo sapien
agtggttaccgcagtatcgatgtct

SEQ ID NO: 5919478 - DNA, 25 bp, Homo sapien
gtggaccggacgaaatcactataag

SEQ ID NO: 5919479 - DNA, 25 bp, Homo sapien
ctagcccgctatatcggacaactaa

SEQ ID NO: 5919480 - DNA, 25 bp, Homo sapien
acatcaacgctagacggtctatagg

SEQ ID NO: 5919481 - DNA, 25 bp, Homo sapien
atgagtatagcggcgtcaagttgct

SEQ ID NO: 5919482 - DNA, 25 bp, Homo sapien
tgaccagttcgttacgacctcacat

SEQ ID NO: 5919483 - DNA, 25 bp, Homo sapien
catcgttacggtacgaaccaatcct

SEQ ID NO: 5919484 - DNA, 25 bp, Homo sapien
gtaaactcctagcgatacgctttgc

SEQ ID NO: 5919485 - DNA, 25 bp, Homo sapien
aaactatgcgtatgtcgaccgaggt

SEQ ID NO: 5919486 - DNA, 25 bp, Homo sapien
acacagtacgtcgtactacccatct

SEQ ID NO: 5919487 - DNA, 25 bp, Homo sapien
ttgacaccgtatatgcggcggtaat

SEQ ID NO: 5919488 - DNA, 25 bp, Homo sapien
ttccggacttatcgtcgactagtct

SEQ ID NO: 5919489 - DNA, 25 bp, Homo sapien
tgtaacttatacgccggaccactga

SEQ ID NO: 5919490 - DNA, 25 bp, Homo sapien
gacatgtaaacgcgttacgctggaa

SEQ ID NO: 5919491 - DNA, 25 bp, Homo sapien
agttcgatccgttacgcgaacaagt

SEQ ID NO: 5919492 - DNA, 25 bp, Homo sapien
atgtgggtattaacgcgacatcgga

SEQ ID NO: 5919493 - DNA, 25 bp, Homo sapien
atagaagatacgctcggtaagccct

SEQ ID NO: 5919494 - DNA, 25 bp, Homo sapien
cctttccgctatacgacatgggtaa

SEQ ID NO: 5919495 - DNA, 25 bp, Homo sapien
atctgtcgcgaccttactagtgcaa

SEQ ID NO: 5919496 - DNA, 25 bp, Homo sapien
tacggtctgtattcgcgaagattcc

SEQ ID NO: 5919497 - DNA, 25 bp, Homo sapien
agatcgggtatagacgcgtagcaat

SEQ ID NO: 5919498 - DNA, 25 bp, Homo sapien
cttaaaacgctcgaatacgagctcc

SEQ ID NO: 5919499 - DNA, 25 bp, Homo sapien
atgagtataccgtcgaacgttggac

SEQ ID NO: 5919500 - DNA, 25 bp, Homo sapien
ttatgaatgcggcgcataggccaat

SEQ ID NO: 5919501 - DNA, 25 bp, Homo sapien
acgcggggtatacgaagcgtaaata

SEQ ID NO: 5919502 - DNA, 25 bp, Homo sapien
caggtatcgcgacgtatcaaaactc

SEQ ID NO: 5919503 - DNA, 25 bp, Homo sapien
agttcataagtacggcgtcttcgtg

SEQ ID NO: 5919504 - DNA, 25 bp, Homo sapien
gtctgccgcgatgtacgattacaat

SEQ ID NO: 5919505 - DNA, 25 bp, Homo sapien
cgcaaaggcgcgagttatattcaac

SEQ ID NO: 5919506 - DNA, 25 bp, Homo sapien
caacgttggtacgcgatacacagta

SEQ ID NO: 5919507 - DNA, 25 bp, Homo sapien
accgctcgcgtcgtaccttatttat

SEQ ID NO: 5919508 - DNA, 25 bp, Homo sapien
tctgccacgcttcggtacgaaaata

SEQ ID NO: 5919509 - DNA, 25 bp, Homo sapien
acttggcgtaagacgaccgacatta

SEQ ID NO: 5919510 - DNA, 25 bp, Homo sapien
tagatctcgcgtatcgtagagtgca

SEQ ID NO: 5919511 - DNA, 25 bp, Homo sapien
tcgcaaatagcgcacttcgacttca

SEQ ID NO: 5919512 - DNA, 25 bp, Homo sapien
ttttgatatctaagccgcgaccgtc

SEQ ID NO: 5919513 - DNA, 25 bp, Homo sapien
taagccgtcggtacgatgagttctt

SEQ ID NO: 5919514 - DNA, 25 bp, Homo sapien
gtagtatatatcgggcgcaggtgat

SEQ ID NO: 5919515 - DNA, 25 bp, Homo sapien
gaagatccgtaacacgacaaggaag

SEQ ID NO: 5919516 - DNA, 25 bp, Homo sapien
ggaaggtcgttgcgcgctatatttt

SEQ ID NO: 5919517 - DNA, 25 bp, Homo sapien
gtggaaaccttgcgtatcgttagtc

SEQ ID NO: 5919518 - DNA, 25 bp, Homo sapien
tttgcacagtcgtccggtagaatac

SEQ ID NO: 5919519 - DNA, 25 bp, Homo sapien
aacatccgttacgctactaaagcgc

SEQ ID NO: 5919520 - DNA, 25 bp, Homo sapien
cacttgacgcgatccgttaagtaca

SEQ ID NO: 5919521 - DNA, 25 bp, Homo sapien
agctagtatcgcgtacggtaatgtg

SEQ ID NO: 5919522 - DNA, 25 bp, Homo sapien
tgaaaaccctaatcggcgtgatcca

SEQ ID NO: 5919523 - DNA, 25 bp, Homo sapien
agctcgacttatcgacgtcacttag

SEQ ID NO: 5919524 - DNA, 25 bp, Homo sapien
gtcgttctattgtcgaccgagttgt

SEQ ID NO: 5919525 - DNA, 25 bp, Homo sapien
tttcgcatagttcgcgcgtgtaaac

SEQ ID NO: 5919526 - DNA, 25 bp, Homo sapien
aggtagtaatgcgctacggcgaatt

SEQ ID NO: 5919527 - DNA, 25 bp, Homo sapien
acggtccttaacgcgagacaaacat

SEQ ID NO: 5919528 - DNA, 25 bp, Homo sapien
gtgctatgtacgcgtgaacataacc

SEQ ID NO: 5919529 - DNA, 25 bp, Homo sapien
gaggcttgcgcgaacgttataatca

SEQ ID NO: 5919530 - DNA, 25 bp, Homo sapien
gatagacgcgtcaccctaacattct

SEQ ID NO: 5919531 - DNA, 25 bp, Homo sapien
tgaaaaaacgcgttagtcgaaccgc

SEQ ID NO: 5919532 - DNA, 25 bp, Homo sapien
gttacccgttagacgtcgatgtttg

SEQ ID NO: 5919533 - DNA, 25 bp, Homo sapien
acggcgaatgttcgcgacttaagta

SEQ ID NO: 5919534 - DNA, 25 bp, Homo sapien
gtgtgccgtaacgcactatgaatac

SEQ ID NO: 5919535 - DNA, 25 bp, Homo sapien
tggtctttagcgcgaacgtctatac

SEQ ID NO: 5919536 - DNA, 25 bp, Homo sapien
ggaacatagtttcgcgcggtataga

SEQ ID NO: 5919537 - DNA, 25 bp, Homo sapien
ggtgcaagcgcgtataagtatgtga

SEQ ID NO: 5919538 - DNA, 25 bp, Homo sapien
tcagtagcgttacttcgtaactgcg

SEQ ID NO: 5919539 - DNA, 25 bp, Homo sapien
tccattagaccgatctacgctcact

SEQ ID NO: 5919540 - DNA, 25 bp, Homo sapien
gtgcttccgcgcgtatttacattgt

SEQ ID NO: 5919541 - DNA, 25 bp, Homo sapien
tatttgcgatcgcctaatacgaggc

SEQ ID NO: 5919542 - DNA, 25 bp, Homo sapien
taagaggattcgcgtccgtagagaa

SEQ ID NO: 5919543 - DNA, 25 bp, Homo sapien
agacaaaaggtacgacgcgaaccta

SEQ ID NO: 5919544 - DNA, 25 bp, Homo sapien
catgtacgaccgtatacgtcgcata

SEQ ID NO: 5919545 - DNA, 25 bp, Homo sapien
ttgcatcgcggggatatatgcaaag

SEQ ID NO: 5919546 - DNA, 25 bp, Homo sapien
cgatgatacgacggtatcgtttagg

SEQ ID NO: 5919547 - DNA, 25 bp, Homo sapien
ggattcgtatacgttgcgatacgtg

SEQ ID NO: 5919548 - DNA, 25 bp, Homo sapien
gataacgacgcgtaataggagtgag

SEQ ID NO: 5919549 - DNA, 25 bp, Homo sapien
tatacggcgtatcgtacgtgctgaa

SEQ ID NO: 5919550 - DNA, 25 bp, Homo sapien
atgagcaatatcgttcgcgcgttct

SEQ ID NO: 5919551 - DNA, 25 bp, Homo sapien
acatcacctattacgcggtgtgtag

SEQ ID NO: 5919552 - DNA, 25 bp, Homo sapien
caagcggtatccggacgtaaaatct

SEQ ID NO: 5919553 - DNA, 25 bp, Homo sapien
tagatgcgagcgctacgttagaaca

SEQ ID NO: 5919554 - DNA, 25 bp, Homo sapien
gtgatacgcggtacgatctatcctt

SEQ ID NO: 5919555 - DNA, 25 bp, Homo sapien
taaaccacgtcgcgactaggatttc

SEQ ID NO: 5919556 - DNA, 25 bp, Homo sapien
tcttcgaacgcggtaacgctgtatt

SEQ ID NO: 5919557 - DNA, 25 bp, Homo sapien
gcattggcgatagccgtattgaatc

SEQ ID NO: 5919558 - DNA, 25 bp, Homo sapien
aagatttaacggccgatagcggctt

SEQ ID NO: 5919559 - DNA, 25 bp, Homo sapien
ttgaaattacgtcgaccgcccttac

SEQ ID NO: 5919560 - DNA, 25 bp, Homo sapien
ttccaagcgcgatatccaattctcc

SEQ ID NO: 5919561 - DNA, 25 bp, Homo sapien
gtgttaatacgttgcgcgtcctgta

SEQ ID NO: 5919562 - DNA, 25 bp, Homo sapien
acctcttcgaacgcttatctctacc

SEQ ID NO: 5919563 - DNA, 25 bp, Homo sapien
tacagcttagcgatccgtctctgtt

SEQ ID NO: 5919564 - DNA, 25 bp, Homo sapien
ctaactgaccgatcgtaaccacttg

SEQ ID NO: 5919565 - DNA, 25 bp, Homo sapien
aagtttagcgtattcgacgtgtccc

SEQ ID NO: 5919566 - DNA, 25 bp, Homo sapien
tcttacccgacgttcgtacatttcc

SEQ ID NO: 5919567 - DNA, 25 bp, Homo sapien
tagtagattcgacgcgtatggactg

SEQ ID NO: 5919568 - DNA, 25 bp, Homo sapien
ttcaccgcgttcgtacgattcatct

SEQ ID NO: 5919569 - DNA, 25 bp, Homo sapien
cattatcgacacggtcgtacagtct

SEQ ID NO: 5919570 - DNA, 25 bp, Homo sapien
agtatgcgtatgcgactcgcaatgt

SEQ ID NO: 5919571 - DNA, 25 bp, Homo sapien
acctcttaatcggcgtatgaccaca

SEQ ID NO: 5919572 - DNA, 25 bp, Homo sapien
tgaagtacgtcgctaggtcacttac

SEQ ID NO: 5919573 - DNA, 25 bp, Homo sapien
cacgttatccatgcgcgaatcgtat

SEQ ID NO: 5919574 - DNA, 25 bp, Homo sapien
atggctattacggtcggcttgagat

SEQ ID NO: 5919575 - DNA, 25 bp, Homo sapien
tcgagtgacgctttatacgatcagg

SEQ ID NO: 5919576 - DNA, 25 bp, Homo sapien
gggccaaacgtacacgtcgtattta

SEQ ID NO: 5919577 - DNA, 25 bp, Homo sapien
atcgtacgtacatatcgcgctggta

SEQ ID NO: 5919578 - DNA, 25 bp, Homo sapien
gcaaggcgatcggaaacgttatcaa

SEQ ID NO: 5919579 - DNA, 25 bp, Homo sapien
aaacatccgtaagtcgaagtgcgtg

SEQ ID NO: 5919580 - DNA, 25 bp, Homo sapien
atctcggcggactatcgtttaaagc

SEQ ID NO: 5919581 - DNA, 25 bp, Homo sapien
aatgagtacccgtcgcgaatggtta

SEQ ID NO: 5919582 - DNA, 25 bp, Homo sapien
taaaggagcgatcgacgtgtgaaag

SEQ ID NO: 5919583 - DNA, 25 bp, Homo sapien
acgcctgttatcgcggactgaaatt

SEQ ID NO: 5919584 - DNA, 25 bp, Homo sapien
cttaggtacagcgtagtcgtgatgt

SEQ ID NO: 5919585 - DNA, 25 bp, Homo sapien
tcaaggcgatcgttaggtactgagt

SEQ ID NO: 5919586 - DNA, 25 bp, Homo sapien
gcagtatttacgtaccgcggtatct

SEQ ID NO: 5919587 - DNA, 25 bp, Homo sapien
catcattaccgactatcggacggtt

SEQ ID NO: 5919588 - DNA, 25 bp, Homo sapien
tgttgtgttgattcgcgcgatatgg

SEQ ID NO: 5919589 - DNA, 25 bp, Homo sapien
gaactgtagtactgacgcgatttcc

SEQ ID NO: 5919590 - DNA, 25 bp, Homo sapien
gacacccgactagcgtgatagttaa

SEQ ID NO: 5919591 - DNA, 25 bp, Homo sapien
atgccaacgcgagttacgagagtat

SEQ ID NO: 5919592 - DNA, 25 bp, Homo sapien
cgaaatttacctatcgcgcgtgtct

SEQ ID NO: 5919593 - DNA, 25 bp, Homo sapien
caaatggcacgacgtatcacgtctt

SEQ ID NO: 5919594 - DNA, 25 bp, Homo sapien
ttaaggtagtccgttacgactgcga

SEQ ID NO: 5919595 - DNA, 25 bp, Homo sapien
tattaactcgagtaacgcgcgtgac

SEQ ID NO: 5919596 - DNA, 25 bp, Homo sapien
aaacagagttcgacgaacgacgtac

SEQ ID NO: 5919597 - DNA, 25 bp, Homo sapien
tgcctttcgtatacgacgcaagaac

SEQ ID NO: 5919598 - DNA, 25 bp, Homo sapien
ttgtcacggcaacgtactatcggaa

SEQ ID NO: 5919599 - DNA, 25 bp, Homo sapien
tactaaacgtcgcacgagttctgtc

SEQ ID NO: 5919600 - DNA, 25 bp, Homo sapien
ccctcagtactacgtcgtaaatggt

SEQ ID NO: 5919601 - DNA, 25 bp, Homo sapien
tcaacaactatcgcgtacctcgttg

SEQ ID NO: 5919602 - DNA, 25 bp, Homo sapien
ttgacgttggattaacgcggtccaa

SEQ ID NO: 5919603 - DNA, 25 bp, Homo sapien
ggtggtcgcgacctattacactaat

SEQ ID NO: 5919604 - DNA, 25 bp, Homo sapien
ctcttgctatacgcgaccagattca

SEQ ID NO: 5919605 - DNA, 25 bp, Homo sapien
tcatgagcgtttcggcgtagactta

SEQ ID NO: 5919606 - DNA, 25 bp, Homo sapien
caaggatttattcgcgcgaagctca

SEQ ID NO: 5919607 - DNA, 25 bp, Homo sapien
cgtcgaacgatgcgcgatattgtaa

SEQ ID NO: 5919608 - DNA, 25 bp, Homo sapien
ttcagacgggtcgattatagcagtc

SEQ ID NO: 5919609 - DNA, 25 bp, Homo sapien
taaataacgtcgcgaagtcagcgac

SEQ ID NO: 5919610 - DNA, 25 bp, Homo sapien
tcgaattatcccgcgtcgacttaga

SEQ ID NO: 5919611 - DNA, 25 bp, Homo sapien
ccttgatcgcgcgtactattatgct

SEQ ID NO: 5919612 - DNA, 25 bp, Homo sapien
ccagaacgatcgtccctattttgag

SEQ ID NO: 5919613 - DNA, 25 bp, Homo sapien
gatcaccgatccggtatattatggg

SEQ ID NO: 5919614 - DNA, 25 bp, Homo sapien
ggaatcactatcgacgtcggaatct

SEQ ID NO: 5919615 - DNA, 25 bp, Homo sapien
atacttcgcgttataatggggggtg

SEQ ID NO: 5919616 - DNA, 25 bp, Homo sapien
actgatattgtcgacgctctctggt

SEQ ID NO: 5919617 - DNA, 25 bp, Homo sapien
cagaagaacgcgtagcgtatatgtg

SEQ ID NO: 5919618 - DNA, 25 bp, Homo sapien
aaaaatcgacgccgatataccaccg

SEQ ID NO: 5919619 - DNA, 25 bp, Homo sapien
cgatccgtcgcgtccttatgtaatt

SEQ ID NO: 5919620 - DNA, 25 bp, Homo sapien
cgatccgcgcgatattagtttacac

SEQ ID NO: 5919621 - DNA, 25 bp, Homo sapien
tagcaggatcgaccgggattaatct

SEQ ID NO: 5919622 - DNA, 25 bp, Homo sapien
atttggcattacgacgcgaagtcca

SEQ ID NO: 5919623 - DNA, 25 bp, Homo sapien
attacacattacacgtcggggtctg

SEQ ID NO: 5919624 - DNA, 25 bp, Homo sapien
gagcctttacctgccgcgaaaatta

SEQ ID NO: 5919625 - DNA, 25 bp, Homo sapien
aacttcccgcgactaatagttacgc

SEQ ID NO: 5919626 - DNA, 25 bp, Homo sapien
cgctaatacgcggctataattggga

SEQ ID NO: 5919627 - DNA, 25 bp, Homo sapien
accatacggcgtaaataccagttgc

SEQ ID NO: 5919628 - DNA, 25 bp, Homo sapien
aagcaactatgcgcgcgaaagatgt

SEQ ID NO: 5919629 - DNA, 25 bp, Homo sapien
actatattagcgtccggtagtggtg

SEQ ID NO: 5919630 - DNA, 25 bp, Homo sapien
aggaaacgtacgttacgacgacaca

SEQ ID NO: 5919631 - DNA, 25 bp, Homo sapien
ccgtatataagtatcgcgcatgtgc

SEQ ID NO: 5919632 - DNA, 25 bp, Homo sapien
cgtcatgatacataccgcgtctgta

SEQ ID NO: 5919633 - DNA, 25 bp, Homo sapien
gtgggtacccgacgcgatatattta

SEQ ID NO: 5919634 - DNA, 25 bp, Homo sapien
tactgtcgtatacgcgggtagaaga

SEQ ID NO: 5919635 - DNA, 25 bp, Homo sapien
gcgataactagtcgtgtcggttcta

SEQ ID NO: 5919636 - DNA, 25 bp, Homo sapien
ttaacggttagcgaaccgttgcaca

SEQ ID NO: 5919637 - DNA, 25 bp, Homo sapien
tatcggttcggacccgttagtattc

SEQ ID NO: 5919638 - DNA, 25 bp, Homo sapien
actatcgtacggatcgtatcgcaga

SEQ ID NO: 5919639 - DNA, 25 bp, Homo sapien
gttatgacgtcgatcgcttaacagc

SEQ ID NO: 5919640 - DNA, 25 bp, Homo sapien
gttctgttgcggacgtataatcacc

SEQ ID NO: 5919641 - DNA, 25 bp, Homo sapien
catttgcgcatgatcgcgacagtta

SEQ ID NO: 5919642 - DNA, 25 bp, Homo sapien
gttattcgcgaatcgctacacgtgt

SEQ ID NO: 5919643 - DNA, 25 bp, Homo sapien
atcaccagttacgtcgcgaaaatcc

SEQ ID NO: 5919644 - DNA, 25 bp, Homo sapien
tcttatgataccatccgcgctcaac

SEQ ID NO: 5919645 - DNA, 25 bp, Homo sapien
aggttacctagtacgtccgtggata

SEQ ID NO: 5919646 - DNA, 25 bp, Homo sapien
accagctacgtcaagcgtcataact

SEQ ID NO: 5919647 - DNA, 25 bp, Homo sapien
aatcagtaactgccgcgtaccaaac

SEQ ID NO: 5919648 - DNA, 25 bp, Homo sapien
agtactcgcgaactactacgggata

SEQ ID NO: 5919649 - DNA, 25 bp, Homo sapien
ggcattaatagcgtcgacaacttgc

SEQ ID NO: 5919650 - DNA, 25 bp, Homo sapien
gccactaggcgcgttgagaatataa

SEQ ID NO: 5919651 - DNA, 25 bp, Homo sapien
taagggtagcgcgagtcgataaact

SEQ ID NO: 5919652 - DNA, 25 bp, Homo sapien
gttccaatagtccgcgcaaatttgg

SEQ ID NO: 5919653 - DNA, 25 bp, Homo sapien
tagtggtacgcgacattcggttttc

SEQ ID NO: 5919654 - DNA, 25 bp, Homo sapien
gtattaacgcgaacgttagcacctc

SEQ ID NO: 5919655 - DNA, 25 bp, Homo sapien
ttacggcttacgtaccgtatcacca

SEQ ID NO: 5919656 - DNA, 25 bp, Homo sapien
acgtattattacgtcggtgctagcc

SEQ ID NO: 5919657 - DNA, 25 bp, Homo sapien
tctattcgtaccgacttcggaaacc

SEQ ID NO: 5919658 - DNA, 25 bp, Homo sapien
atcgtgtaccgcgtcgatagcaaat

SEQ ID NO: 5919659 - DNA, 25 bp, Homo sapien
gaactgcataacgcgagacgttttg

SEQ ID NO: 5919660 - DNA, 25 bp, Homo sapien
tacaaatagttaccgacgggctctg

SEQ ID NO: 5919661 - DNA, 25 bp, Homo sapien
cagcgactattcgcggactaaaaac

SEQ ID NO: 5919662 - DNA, 25 bp, Homo sapien
cgttattcgcgtaactatacgtccc

SEQ ID NO: 5919663 - DNA, 25 bp, Homo sapien
ttcatcggtattgcgcgtccagtta

SEQ ID NO: 5919664 - DNA, 25 bp, Homo sapien
cgagaacgaaccgtgtagtagatac

SEQ ID NO: 5919665 - DNA, 25 bp, Homo sapien
gcacatatagtgccgtacgatagac

SEQ ID NO: 5919666 - DNA, 25 bp, Homo sapien
ttaagactaacgtgcgtagtcgtcg

SEQ ID NO: 5919667 - DNA, 25 bp, Homo sapien
ctttaatcgcgcaactactctcctg

SEQ ID NO: 5919668 - DNA, 25 bp, Homo sapien
tggactgtataagcgcgacaacctt

SEQ ID NO: 5919669 - DNA, 25 bp, Homo sapien
ttgctgctacggaacgactgtgaat

SEQ ID NO: 5919670 - DNA, 25 bp, Homo sapien
cgatctcgcgcgtaatttccaaaag

SEQ ID NO: 5919671 - DNA, 25 bp, Homo sapien
gaaacgacaaggcgtatcggctata

SEQ ID NO: 5919672 - DNA, 25 bp, Homo sapien
cagtagcgtcgaatcgtgaatgaga

SEQ ID NO: 5919673 - DNA, 25 bp, Homo sapien
gttgaatagtcgtatgccgtgatcc

SEQ ID NO: 5919674 - DNA, 25 bp, Homo sapien
gggtctggcgcgaacatatttcaaa

SEQ ID NO: 5919675 - DNA, 25 bp, Homo sapien
ccagtctaaagcgtagtcgtttcac

SEQ ID NO: 5919676 - DNA, 25 bp, Homo sapien
acgcaaatcgccggtcgtaaattca

SEQ ID NO: 5919677 - DNA, 25 bp, Homo sapien
agcatacgctacgcgattgtattcg

SEQ ID NO: 5919678 - DNA, 25 bp, Homo sapien
cacaattcgcgacgtcttagactct

SEQ ID NO: 5919679 - DNA, 25 bp, Homo sapien
gcactctataacgtctcgccgttta

SEQ ID NO: 5919680 - DNA, 25 bp, Homo sapien
ggttcaaagcgcatagcggagaaat

SEQ ID NO: 5919681 - DNA, 25 bp, Homo sapien
atacaagcggtcggatacaaactcg

SEQ ID NO: 5919682 - DNA, 25 bp, Homo sapien
gaaattccggcacgatatcatctgc

SEQ ID NO: 5919683 - DNA, 25 bp, Homo sapien
catctagacgtatgtccgacaggat

SEQ ID NO: 5919684 - DNA, 25 bp, Homo sapien
ctgtctgcgttagacgctatctaag

SEQ ID NO: 5919685 - DNA, 25 bp, Homo sapien
gaagttatacgcgcgttctacacca

SEQ ID NO: 5919686 - DNA, 25 bp, Homo sapien
tcttgccgcggacttattatgacag

SEQ ID NO: 5919687 - DNA, 25 bp, Homo sapien
tgtcgaaggcgacgtatatagtagg

SEQ ID NO: 5919688 - DNA, 25 bp, Homo sapien
cttttgtccggtagtacgccttcta

SEQ ID NO: 5919689 - DNA, 25 bp, Homo sapien
acaagagcgcgagacataagcgaaa

SEQ ID NO: 5919690 - DNA, 25 bp, Homo sapien
cgagtttaccgagcgtatctagact

SEQ ID NO: 5919691 - DNA, 25 bp, Homo sapien
ctatcgtaatactcgcgccgttgtt

SEQ ID NO: 5919692 - DNA, 25 bp, Homo sapien
attatcaagtactcgcgctgtggga

SEQ ID NO: 5919693 - DNA, 25 bp, Homo sapien
aaaaagctaagacgcgagaccagtg

SEQ ID NO: 5919694 - DNA, 25 bp, Homo sapien
gcattactattatccgcgagctgtg

SEQ ID NO: 5919695 - DNA, 25 bp, Homo sapien
tagatgtacgacgttaccggcattc

SEQ ID NO: 5919696 - DNA, 25 bp, Homo sapien
tagatccggacgacgtattgacaca

SEQ ID NO: 5919697 - DNA, 25 bp, Homo sapien
tacctatcgtgtcgatacgagtagg

SEQ ID NO: 5919698 - DNA, 25 bp, Homo sapien
atattcagccgacgtacgagagtgt

SEQ ID NO: 5919699 - DNA, 25 bp, Homo sapien
ccgatacactatacgagcgaattcg

SEQ ID NO: 5919700 - DNA, 25 bp, Homo sapien
ttacaataacgcgtaacgcacctgg

SEQ ID NO: 5919701 - DNA, 25 bp, Homo sapien
aatgttcgcggtcatcttaggtcct

SEQ ID NO: 5919702 - DNA, 25 bp, Homo sapien
cgaccagtctaacgacgtattccta

SEQ ID NO: 5919703 - DNA, 25 bp, Homo sapien
tagaacgtctcgcgttaagcttgag

SEQ ID NO: 5919704 - DNA, 25 bp, Homo sapien
aatcgcacgcgcggtataacattag

SEQ ID NO: 5919705 - DNA, 25 bp, Homo sapien
tacaactaacgcggttaccgtcagt

SEQ ID NO: 5919706 - DNA, 25 bp, Homo sapien
aaattatcgtacggccgaatccctc

SEQ ID NO: 5919707 - DNA, 25 bp, Homo sapien
acgggacgcgctattagtcaaatac

SEQ ID NO: 5919708 - DNA, 25 bp, Homo sapien
cacgtttggtcgcgtatagccattt

SEQ ID NO: 5919709 - DNA, 25 bp, Homo sapien
acagattcgttcgatcgcggataac

SEQ ID NO: 5919710 - DNA, 25 bp, Homo sapien
gattcagcgcatgattgcggaatga

SEQ ID NO: 5919711 - DNA, 25 bp, Homo sapien
agaaatggaaacgtcgcgagatacg

SEQ ID NO: 5919712 - DNA, 25 bp, Homo sapien
catgggatcgcgaataacgtgttgt

SEQ ID NO: 5919713 - DNA, 25 bp, Homo sapien
catgtagttatgcgtagcggactag

SEQ ID NO: 5919714 - DNA, 25 bp, Homo sapien
aacgcttggtcgacgctatcagtaa

SEQ ID NO: 5919715 - DNA, 25 bp, Homo sapien
ctgttacggttagatagcgcctact

SEQ ID NO: 5919716 - DNA, 25 bp, Homo sapien
tttcttcgcaataccggtcgcctat

SEQ ID NO: 5919717 - DNA, 25 bp, Homo sapien
gttacacgatacgtcgtagttagcc

SEQ ID NO: 5919718 - DNA, 25 bp, Homo sapien
cgaatttatacaaccgcggcggtaa

SEQ ID NO: 5919719 - DNA, 25 bp, Homo sapien
agaaagcgaccggttgtactaagct

SEQ ID NO: 5919720 - DNA, 25 bp, Homo sapien
ccaaagacgatagtctcgctacaca

SEQ ID NO: 5919721 - DNA, 25 bp, Homo sapien
ctgacttagcgcgataaccacactt

SEQ ID NO: 5919722 - DNA, 25 bp, Homo sapien
gtcaatccgcggtttactagacgat

SEQ ID NO: 5919723 - DNA, 25 bp, Homo sapien
caaatatcgcgtaccgtaaacgcag

SEQ ID NO: 5919724 - DNA, 25 bp, Homo sapien
aacactccgaatgacgtaccttcct

SEQ ID NO: 5919725 - DNA, 25 bp, Homo sapien
gttgtaacttagtatcgcgcgagga

SEQ ID NO: 5919726 - DNA, 25 bp, Homo sapien
agtcaactagcgctccgtattctgc

SEQ ID NO: 5919727 - DNA, 25 bp, Homo sapien
taaaggatacccggacgcttccaga

SEQ ID NO: 5919728 - DNA, 25 bp, Homo sapien
tgttcatacttgcgcggaaccggaa

SEQ ID NO: 5919729 - DNA, 25 bp, Homo sapien
cgtatctagtaacggtcggggagat

SEQ ID NO: 5919730 - DNA, 25 bp, Homo sapien
gaaccttcgagtacgtacgtactgc

SEQ ID NO: 5919731 - DNA, 25 bp, Homo sapien
ggcgatcgcgatacgtatcacttac

SEQ ID NO: 5919732 - DNA, 25 bp, Homo sapien
ggtggcacggtcgggatacataata

SEQ ID NO: 5919733 - DNA, 25 bp, Homo sapien
gatcgaattcgtaccgggtcgctta

SEQ ID NO: 5919734 - DNA, 25 bp, Homo sapien
gcaacattacgcgtctacgtaggag

SEQ ID NO: 5919735 - DNA, 25 bp, Homo sapien
gtgagcgtacgcgttatacgtatgg

SEQ ID NO: 5919736 - DNA, 25 bp, Homo sapien
tctgggccgattcgcctagaataag

SEQ ID NO: 5919737 - DNA, 25 bp, Homo sapien
gaggtgtagcgaatcccgcaattca

SEQ ID NO: 5919738 - DNA, 25 bp, Homo sapien
agcttgccgacgtctagtgatttcc

SEQ ID NO: 5919739 - DNA, 25 bp, Homo sapien
taaggggccgctagacgaagtaatc

SEQ ID NO: 5919740 - DNA, 25 bp, Homo sapien
tgggagtaagtctcgtccgagatct

SEQ ID NO: 5919741 - DNA, 25 bp, Homo sapien
tagaaccgtccgatcggtaacttcc

SEQ ID NO: 5919742 - DNA, 25 bp, Homo sapien
tttgaagtagattgcgacggccgga

SEQ ID NO: 5919743 - DNA, 25 bp, Homo sapien
taagggctatacgcggtgcttgctt

SEQ ID NO: 5919744 - DNA, 25 bp, Homo sapien
acgacagtactataggcggtccaca

SEQ ID NO: 5919745 - DNA, 25 bp, Homo sapien
gcgagctgcgaatcgtagctgtaat

SEQ ID NO: 5919746 - DNA, 25 bp, Homo sapien
ctctagccgttcacgcggattctaa

SEQ ID NO: 5919747 - DNA, 25 bp, Homo sapien
aggacttctcgtgatcgcgtaggaa

SEQ ID NO: 5919748 - DNA, 25 bp, Homo sapien
gcagaacgatagatctacgcgatcc

SEQ ID NO: 5919749 - DNA, 25 bp, Homo sapien
attgtgttcatcgcgctagctcggt

SEQ ID NO: 5919750 - DNA, 25 bp, Homo sapien
cgaagtcgcgacgacttactgtaga

SEQ ID NO: 5919751 - DNA, 25 bp, Homo sapien
tccgaaccgcgacgatataactcgt

SEQ ID NO: 5919752 - DNA, 25 bp, Homo sapien
gtctggtaagtaccggtcgcgtaat

SEQ ID NO: 5919753 - DNA, 25 bp, Homo sapien
gcctatacccgtcgcttaaaacgac

SEQ ID NO: 5919754 - DNA, 25 bp, Homo sapien
gattgttagcgcgttaaccagggtc

SEQ ID NO: 5919755 - DNA, 25 bp, Homo sapien
tttaagacgcacctaacggcctgtc

SEQ ID NO: 5919756 - DNA, 25 bp, Homo sapien
agtaccaacgttcgaccgagagcat

SEQ ID NO: 5919757 - DNA, 25 bp, Homo sapien
ctaataactaacggccgatggcacc

SEQ ID NO: 5919758 - DNA, 25 bp, Homo sapien
accacgccccgttcgattatgaact

SEQ ID NO: 5919759 - DNA, 25 bp, Homo sapien
accgtgtatgtcgcgatacgttagg

SEQ ID NO: 5919760 - DNA, 25 bp, Homo sapien
tcgatatatcgcgtaaggcggtagg

SEQ ID NO: 5919761 - DNA, 25 bp, Homo sapien
gcgttaccgcttattcgagagcatg

SEQ ID NO: 5919762 - DNA, 25 bp, Homo sapien
tttcaacgggtcccgtataaccagc

SEQ ID NO: 5919763 - DNA, 25 bp, Homo sapien
gtcgcttaggcgtaccgtaaatcac

SEQ ID NO: 5919764 - DNA, 25 bp, Homo sapien
cacctatcggacgcgataatctacc

SEQ ID NO: 5919765 - DNA, 25 bp, Homo sapien
cctggtcgttcgtacgaagggatta

SEQ ID NO: 5919766 - DNA, 25 bp, Homo sapien
ctaacttacgacgcgatgggttcct

SEQ ID NO: 5919767 - DNA, 25 bp, Homo sapien
gaaagatagttgatcgcgcaggtgg

SEQ ID NO: 5919768 - DNA, 25 bp, Homo sapien
taggaaaagcgtacggacggaactg

SEQ ID NO: 5919769 - DNA, 25 bp, Homo sapien
gcataaaacacgtctcgcgtctcgt

SEQ ID NO: 5919770 - DNA, 25 bp, Homo sapien
gacatccgcgtagatacgagggttt

SEQ ID NO: 5919771 - DNA, 25 bp, Homo sapien
caaagtcgtaatgcccgtcggttag

SEQ ID NO: 5919772 - DNA, 25 bp, Homo sapien
aagaggtatgtcgcgaccacttgga

SEQ ID NO: 5919773 - DNA, 25 bp, Homo sapien
ggtcatataggtacgcgacgatcag

SEQ ID NO: 5919774 - DNA, 25 bp, Homo sapien
gcctgttcgcggatatagaagctgt

SEQ ID NO: 5919775 - DNA, 25 bp, Homo sapien
gttggtacgtaagcgatcggtcttg

SEQ ID NO: 5919776 - DNA, 25 bp, Homo sapien
ggtaatgtacgatgcgagagatccg

SEQ ID NO: 5919777 - DNA, 25 bp, Homo sapien
gatatgtaatacgtcggggctaggc

SEQ ID NO: 5919778 - DNA, 25 bp, Homo sapien
ggtacgctatatgtcgcgctcattc

SEQ ID NO: 5919779 - DNA, 25 bp, Homo sapien
agcaatcgacgtatcccgtatacgc

SEQ ID NO: 5919780 - DNA, 25 bp, Homo sapien
gtgctacgggcgtactaagtctttc

SEQ ID NO: 5919781 - DNA, 25 bp, Homo sapien
gtcaccaaccgacgcgatataacag

SEQ ID NO: 5919782 - DNA, 25 bp, Homo sapien
gtttcttcttatgcgcgaccgagca

SEQ ID NO: 5919783 - DNA, 25 bp, Homo sapien
ctgacattcgcgatatacgaccgct

SEQ ID NO: 5919784 - DNA, 25 bp, Homo sapien
aagcttcaatacgccgcgtttctgg

SEQ ID NO: 5919785 - DNA, 25 bp, Homo sapien
accaaccgtagtgcgtaacaactcg

SEQ ID NO: 5919786 - DNA, 25 bp, Homo sapien
tgccagcgtcgctagtaatatagcg

SEQ ID NO: 5919787 - DNA, 25 bp, Homo sapien
tcgtcaagcgagtatcgcgtaagtc

SEQ ID NO: 5919788 - DNA, 25 bp, Homo sapien
gcagcttcgcgaacgatattggaac

SEQ ID NO: 5919789 - DNA, 25 bp, Homo sapien
tgtggccctaccgaaacggaaattg

SEQ ID NO: 5919790 - DNA, 25 bp, Homo sapien
tgctcagtacgaccgcatacgaatg

SEQ ID NO: 5919791 - DNA, 25 bp, Homo sapien
tcagacggcttaatcgcgggaaaag

SEQ ID NO: 5919792 - DNA, 25 bp, Homo sapien
gatttaagcctcgtaacgcgtggag

SEQ ID NO: 5919793 - DNA, 25 bp, Homo sapien
cgcagtttcgtatcggccgttgttt

SEQ ID NO: 5919794 - DNA, 25 bp, Homo sapien
cctgaccgtacgctcgtatttaggt

SEQ ID NO: 5919795 - DNA, 25 bp, Homo sapien
gagaggacgacggaagtcgaaacaa

SEQ ID NO: 5919796 - DNA, 25 bp, Homo sapien
ccgttccgttcgcgagtaataacac

SEQ ID NO: 5919797 - DNA, 25 bp, Homo sapien
ccaatttttacgtaccgcgctgcga

SEQ ID NO: 5919798 - DNA, 25 bp, Homo sapien
tcaacggtcgcgtactatacctcgt

SEQ ID NO: 5919799 - DNA, 25 bp, Homo sapien
aactgattcgcgataacggtctgcc

SEQ ID NO: 5919800 - DNA, 25 bp, Homo sapien
gtgtgctatagggcgcgatcaaaac

SEQ ID NO: 5919801 - DNA, 25 bp, Homo sapien
aaaatgtctacccgacgtcccagag

SEQ ID NO: 5919802 - DNA, 25 bp, Homo sapien
ttctgataccggagtacgcaagacc

SEQ ID NO: 5919803 - DNA, 25 bp, Homo sapien
tcctcaagcgcgattgtcgtactca

SEQ ID NO: 5919804 - DNA, 25 bp, Homo sapien
catacctacgagcggcatgtatcag

SEQ ID NO: 5919805 - DNA, 25 bp, Homo sapien
ctttcaggtagcgctcgaatgccat

SEQ ID NO: 5919806 - DNA, 25 bp, Homo sapien
cagagccgcgtcgtacttatctact

SEQ ID NO: 5919807 - DNA, 25 bp, Homo sapien
ccttctccgtatcgcgaattagggt

SEQ ID NO: 5919808 - DNA, 25 bp, Homo sapien
gactcccggtacgttgtagacatac

SEQ ID NO: 5919809 - DNA, 25 bp, Homo sapien
tgccactggaatcgcgcatagactt

SEQ ID NO: 5919810 - DNA, 25 bp, Homo sapien
cctgtacgacggacatacccagatt

SEQ ID NO: 5919811 - DNA, 25 bp, Homo sapien
gaccctcgtaacggatcgttatgga

SEQ ID NO: 5919812 - DNA, 25 bp, Homo sapien
gctatctaacgggttacgcgcttca

SEQ ID NO: 5919813 - DNA, 25 bp, Homo sapien
tagcgatagatcggacgaccatgga

SEQ ID NO: 5919814 - DNA, 25 bp, Homo sapien
gctttctgtcgcgcattggcatcta

SEQ ID NO: 5919815 - DNA, 25 bp, Homo sapien
acggtacgtacaaacgcgttgtctc

SEQ ID NO: 5919816 - DNA, 25 bp, Homo sapien
agtcagcccggttatatcgctatgc

SEQ ID NO: 5919817 - DNA, 25 bp, Homo sapien
tagtcaacggagcgacgtaccgaaa

SEQ ID NO: 5919818 - DNA, 25 bp, Homo sapien
gctccgttatcttaccgcgtctatc

SEQ ID NO: 5919819 - DNA, 25 bp, Homo sapien
tacgcttcgcgcaccgttaatgtct

SEQ ID NO: 5919820 - DNA, 25 bp, Homo sapien
gtagtcatctacggtcgcgttatcg

SEQ ID NO: 5919821 - DNA, 25 bp, Homo sapien
gtgagatacggccgaacgtatctag

SEQ ID NO: 5919822 - DNA, 25 bp, Homo sapien
gtcctccgtatcgcgagattcagat

SEQ ID NO: 5919823 - DNA, 25 bp, Homo sapien
tagtgctcggtactaagcgatccct

SEQ ID NO: 5919824 - DNA, 25 bp, Homo sapien
gagggctataccgttcgcgttacat

SEQ ID NO: 5919825 - DNA, 25 bp, Homo sapien
cgcgctcgaaagacgtatcatcaag

SEQ ID NO: 5919826 - DNA, 25 bp, Homo sapien
tcatgttaccggggcgtaagacgtt

SEQ ID NO: 5919827 - DNA, 25 bp, Homo sapien
gtaggctacggaccggttattatgg

SEQ ID NO: 5919828 - DNA, 25 bp, Homo sapien
ccgctctcgggcgtactacattatt

SEQ ID NO: 5919829 - DNA, 25 bp, Homo sapien
agagcataggtccgtagcgcaaaag

SEQ ID NO: 5919830 - DNA, 25 bp, Homo sapien
ccataccgtaaggcgacttaatggg

SEQ ID NO: 5919831 - DNA, 25 bp, Homo sapien
ttcaggattgcgcggactaaaaccg

SEQ ID NO: 5919832 - DNA, 25 bp, Homo sapien
gcgcactagcaccgctacgaaaaat

SEQ ID NO: 5919833 - DNA, 25 bp, Homo sapien
tcgcgaaatcgttcgggaccgaaaa

SEQ ID NO: 5919834 - DNA, 25 bp, Homo sapien
catgacattccggcccgatattcac

SEQ ID NO: 5919835 - DNA, 25 bp, Homo sapien
attgcctgttccgctacgccttaca

SEQ ID NO: 5919836 - DNA, 25 bp, Homo sapien
cgttaccgctactatccgaatggct

SEQ ID NO: 5919837 - DNA, 25 bp, Homo sapien
atcggaggtaatcggtacgaccttc

SEQ ID NO: 5919838 - DNA, 25 bp, Homo sapien
ggtaaataagtccggtcgaagcgac

SEQ ID NO: 5919839 - DNA, 25 bp, Homo sapien
cattgacgcgataccgtcaaaggtc

SEQ ID NO: 5919840 - DNA, 25 bp, Homo sapien
gacctattaacgtccggacagggta

SEQ ID NO: 5919841 - DNA, 25 bp, Homo sapien
ccattttcgcgcgatacgattcagc

SEQ ID NO: 5919842 - DNA, 25 bp, Homo sapien
gtcgtgccgtataacagcgagttga

SEQ ID NO: 5919843 - DNA, 25 bp, Homo sapien
agatagcgcgtatgcggatactcct

SEQ ID NO: 5919844 - DNA, 25 bp, Homo sapien
gtatcgatacggaccgacgaaagag

SEQ ID NO: 5919845 - DNA, 25 bp, Homo sapien
gtgatgagtactacggtcgtccatg

SEQ ID NO: 5919846 - DNA, 25 bp, Homo sapien
cggttgcgcggtagaatgcgaaata

SEQ ID NO: 5919847 - DNA, 25 bp, Homo sapien
ggctctaaccgattaagcgctcctt

SEQ ID NO: 5919848 - DNA, 25 bp, Homo sapien
tctctagcgttaatcgcccggtaac

SEQ ID NO: 5919849 - DNA, 25 bp, Homo sapien
gtcattcgaacgaccgttgactgga

SEQ ID NO: 5919850 - DNA, 25 bp, Homo sapien
gtaggagatatgccgaccggtagaa

SEQ ID NO: 5919851 - DNA, 25 bp, Homo sapien
atttgctcgagtacgcgacggagtt

SEQ ID NO: 5919852 - DNA, 25 bp, Homo sapien
tggtggcgataccgcgctagaaatt

SEQ ID NO: 5919853 - DNA, 25 bp, Homo sapien
ggaagtcccggtatcgaatgatacg

SEQ ID NO: 5919854 - DNA, 25 bp, Homo sapien
cgttatatacgcccgatacacgcca

SEQ ID NO: 5919855 - DNA, 25 bp, Homo sapien
gagggttatcgacgcgtgagacaaa

SEQ ID NO: 5919856 - DNA, 25 bp, Homo sapien
gtccagccgacgtacgaacttcata

SEQ ID NO: 5919857 - DNA, 25 bp, Homo sapien
tactgagtcaatacgcgcggggtaa

SEQ ID NO: 5919858 - DNA, 25 bp, Homo sapien
cttacctaccaacggacgatcatgg

SEQ ID NO: 5919859 - DNA, 25 bp, Homo sapien
caattgattactagcgcgtcccgac

SEQ ID NO: 5919860 - DNA, 25 bp, Homo sapien
ctacacgcttacgaggtcgaccatt

SEQ ID NO: 5919861 - DNA, 25 bp, Homo sapien
gcgatccgcgctagcgtaagaaatt

SEQ ID NO: 5919862 - DNA, 25 bp, Homo sapien
ctgactacgacccgggtatgaaaac

SEQ ID NO: 5919863 - DNA, 25 bp, Homo sapien
cacagccgatagtatgcggtatgtc

SEQ ID NO: 5919864 - DNA, 25 bp, Homo sapien
ggagatcctactcgcgtcacttctt

SEQ ID NO: 5919865 - DNA, 25 bp, Homo sapien
accgcacctcgagacgtattttcca

SEQ ID NO: 5919866 - DNA, 25 bp, Homo sapien
cggtaccggaacgcgactaagaata

SEQ ID NO: 5919867 - DNA, 25 bp, Homo sapien
ctttcctaccgtatcgcgacatctg

SEQ ID NO: 5919868 - DNA, 25 bp, Homo sapien
atggtcctacgaacgttcggcaaga

SEQ ID NO: 5919869 - DNA, 25 bp, Homo sapien
actttatccgcgcgatagtagcagg

SEQ ID NO: 5919870 - DNA, 25 bp, Homo sapien
ttcctccgattaacccggccattgt

SEQ ID NO: 5919871 - DNA, 25 bp, Homo sapien
agtacgtacgcgtacgaaatgcctg

SEQ ID NO: 5919872 - DNA, 25 bp, Homo sapien
agttccccgtctaatcgcggatatc

SEQ ID NO: 5919873 - DNA, 25 bp, Homo sapien
atcagtttatcgcgtacggtacgcg

SEQ ID NO: 5919874 - DNA, 25 bp, Homo sapien
tgcggttcggtcgtatgagcaaatc

SEQ ID NO: 5919875 - DNA, 25 bp, Homo sapien
atgaaatacgcgcgacataccctcc

SEQ ID NO: 5919876 - DNA, 25 bp, Homo sapien
tacgcgaaccgacgtagtaacatgg

SEQ ID NO: 5919877 - DNA, 25 bp, Homo sapien
gtgatgcgacgatatcggtagagac

SEQ ID NO: 5919878 - DNA, 25 bp, Homo sapien
atttgctgcgccgatatacagaggc

SEQ ID NO: 5919879 - DNA, 25 bp, Homo sapien
atgtaaccgggtacgatcagaggca

SEQ ID NO: 5919880 - DNA, 25 bp, Homo sapien
ccaccattcgcctaatcggtatgca

SEQ ID NO: 5919881 - DNA, 25 bp, Homo sapien
aagcattgcgaacgatacgcccatc

SEQ ID NO: 5919882 - DNA, 25 bp, Homo sapien
gttgatgcgtacgtctgacctgtac

SEQ ID NO: 5919883 - DNA, 25 bp, Homo sapien
ggccaggcgtattacggccataaaa

SEQ ID NO: 5919884 - DNA, 25 bp, Homo sapien
ggtatagctagccgcgtaagctttc

SEQ ID NO: 5919885 - DNA, 25 bp, Homo sapien
aggcgacgacgcgtcaataatagtc

SEQ ID NO: 5919886 - DNA, 25 bp, Homo sapien
actgtgatcggtaccgaaggcacta

SEQ ID NO: 5919887 - DNA, 25 bp, Homo sapien
ttagagcattacacgtcgggcctgt

SEQ ID NO: 5919888 - DNA, 25 bp, Homo sapien
ctagagagcgcgtatgacgcataca

SEQ ID NO: 5919889 - DNA, 25 bp, Homo sapien
caagatatcgttgcgtcgatccgtg

SEQ ID NO: 5919890 - DNA, 25 bp, Homo sapien
ctgaactcggacctatacgctctag

SEQ ID NO: 5919891 - DNA, 25 bp, Homo sapien
agcatttcgtaatacgcgaacccgg

SEQ ID NO: 5919892 - DNA, 25 bp, Homo sapien
caccaatcgccgattacgtgacatc

SEQ ID NO: 5919893 - DNA, 25 bp, Homo sapien
ctagccgtatctcgtacgcccataa

SEQ ID NO: 5919894 - DNA, 25 bp, Homo sapien
ggtcgagtacgtatccgtttcgtga

SEQ ID NO: 5919895 - DNA, 25 bp, Homo sapien
gcaagaacgtatcacgcgcaaaagc

SEQ ID NO: 5919896 - DNA, 25 bp, Homo sapien
taggtgttcgcgtattcggcgcttt

SEQ ID NO: 5919897 - DNA, 25 bp, Homo sapien
ctatgagcgatgctacgtttgctcc

SEQ ID NO: 5919898 - DNA, 25 bp, Homo sapien
ccttgacgtccgaatggtacgtagt

SEQ ID NO: 5919899 - DNA, 25 bp, Homo sapien
ggtcgagagtaatcgcgtagaactc

SEQ ID NO: 5919900 - DNA, 25 bp, Homo sapien
gctctagtactcgctacgaccgata

SEQ ID NO: 5919901 - DNA, 25 bp, Homo sapien
cttagctcatgacgcgctacgcata

SEQ ID NO: 5919902 - DNA, 25 bp, Homo sapien
ggtaaggaccgaatgtacggatctg

SEQ ID NO: 5919903 - DNA, 25 bp, Homo sapien
caaccgcgcctaacgaatccataca

SEQ ID NO: 5919904 - DNA, 25 bp, Homo sapien
acaggacgcgtatgcatagatgtcc

SEQ ID NO: 5919905 - DNA, 25 bp, Homo sapien
tcgttcactacccgtcgagccatta

SEQ ID NO: 5919906 - DNA, 25 bp, Homo sapien
gcctctccgtttcgcggtaaactta

SEQ ID NO: 5919907 - DNA, 25 bp, Homo sapien
caatctcattacggcgcaacggtca

SEQ ID NO: 5919908 - DNA, 25 bp, Homo sapien
gttcgttcggtatcgcaccgcattt

SEQ ID NO: 5919909 - DNA, 25 bp, Homo sapien
aattcctcgatcgacggtcggaatg

SEQ ID NO: 5919910 - DNA, 25 bp, Homo sapien
gtgttgaacggtatgcgcgataacg

SEQ ID NO: 5919911 - DNA, 25 bp, Homo sapien
tgtaagatagggcgccgaactcgtt

SEQ ID NO: 5919912 - DNA, 25 bp, Homo sapien
tggagctatcggacgcctatattgg

SEQ ID NO: 5919913 - DNA, 25 bp, Homo sapien
ggtcacgatagacgccgtcttgaaa

SEQ ID NO: 5919914 - DNA, 25 bp, Homo sapien
caccgacaacgtgcgatacaatggt

SEQ ID NO: 5919915 - DNA, 25 bp, Homo sapien
ttgcatctacgatcggtaggggtag

SEQ ID NO: 5919916 - DNA, 25 bp, Homo sapien
gcgaataggtatcgtacgacagagc

SEQ ID NO: 5919917 - DNA, 25 bp, Homo sapien
gcaggaattacgtccggtctctatg

SEQ ID NO: 5919918 - DNA, 25 bp, Homo sapien
atgtgatgcgaccgtaataccggca

SEQ ID NO: 5919919 - DNA, 25 bp, Homo sapien
agacataatagtcgcgcccttgtcg

SEQ ID NO: 5919920 - DNA, 25 bp, Homo sapien
gactgttacgggtcgacgacataca

SEQ ID NO: 5919921 - DNA, 25 bp, Homo sapien
catcgctgtataggtcgcgtcatga

SEQ ID NO: 5919922 - DNA, 25 bp, Homo sapien
ggtttattcgtcttacgcggcagac

SEQ ID NO: 5919923 - DNA, 25 bp, Homo sapien
caccgaacgtattcgcgagacatac

SEQ ID NO: 5919924 - DNA, 25 bp, Homo sapien
cacgtgccgcttataacggttagac

SEQ ID NO: 5919925 - DNA, 25 bp, Homo sapien
ggtgctcgtaccgacgtataatgca

SEQ ID NO: 5919926 - DNA, 25 bp, Homo sapien
tcgaagtagcgtgtcgaaaccatgg

SEQ ID NO: 5919927 - DNA, 25 bp, Homo sapien
atatcgcgtatacgggaacagggga

SEQ ID NO: 5919928 - DNA, 25 bp, Homo sapien
caggcttcgcgcggatttcagatta

SEQ ID NO: 5919929 - DNA, 25 bp, Homo sapien
cataccctatcgtacgcgactagtc

SEQ ID NO: 5919930 - DNA, 25 bp, Homo sapien
cgaaaatcgcgtcgtatgtcgttcc

SEQ ID NO: 5919931 - DNA, 25 bp, Homo sapien
gacacgcgattcgacgtcctaattg

SEQ ID NO: 5919932 - DNA, 25 bp, Homo sapien
cacttccgatatagcgccttacgga

SEQ ID NO: 5919933 - DNA, 25 bp, Homo sapien
gagatccggccgtgatctaatccta

SEQ ID NO: 5919934 - DNA, 25 bp, Homo sapien
cgtttacgcttggtcgaacgctagt

SEQ ID NO: 5919935 - DNA, 25 bp, Homo sapien
cgtcagtcgtttacggtcgaagaag

SEQ ID NO: 5919936 - DNA, 25 bp, Homo sapien
tcaccatccgtctagcgttcaactc

SEQ ID NO: 5919937 - DNA, 25 bp, Homo sapien
caatagtcgaacggtaccgttgacc

SEQ ID NO: 5919938 - DNA, 25 bp, Homo sapien
tgtgatccgactaacgcggaggttt

SEQ ID NO: 5919939 - DNA, 25 bp, Homo sapien
cagtaccgacctcgtatacctagac

SEQ ID NO: 5919940 - DNA, 25 bp, Homo sapien
gtgtctataccgctacgcgagctaa

SEQ ID NO: 5919941 - DNA, 25 bp, Homo sapien
gacgatttcgtgacggtcctagagt

SEQ ID NO: 5919942 - DNA, 25 bp, Homo sapien
cgcgtttagtcgcgcactaccttat

SEQ ID NO: 5919943 - DNA, 25 bp, Homo sapien
gtgtttatgtaaggcgcgatgctgc

SEQ ID NO: 5919944 - DNA, 25 bp, Homo sapien
aacctataacgcgctagccacacga

SEQ ID NO: 5919945 - DNA, 25 bp, Homo sapien
gcttcttacttgcgcgcgaccttta

SEQ ID NO: 5919946 - DNA, 25 bp, Homo sapien
tgaagccgatctacggatagttggg

SEQ ID NO: 5919947 - DNA, 25 bp, Homo sapien
gcttatgtcgattcggtacccacct

SEQ ID NO: 5919948 - DNA, 25 bp, Homo sapien
cgtggaatacgccgacaacaggtaa

SEQ ID NO: 5919949 - DNA, 25 bp, Homo sapien
gcaatgcgtcgtatcacgcagaaac

SEQ ID NO: 5919950 - DNA, 25 bp, Homo sapien
gtaattcatccgtacgcgagcacct

SEQ ID NO: 5919951 - DNA, 25 bp, Homo sapien
cgactcgacggcgtatagaattggt

SEQ ID NO: 5919952 - DNA, 25 bp, Homo sapien
ccaaatacggtcggtaacagagagc

SEQ ID NO: 5919953 - DNA, 25 bp, Homo sapien
ttgcatgctagacgcgagctagctt

SEQ ID NO: 5919954 - DNA, 25 bp, Homo sapien
gtaaatatacgctaccccgcggagt

SEQ ID NO: 5919955 - DNA, 25 bp, Homo sapien
atcgttcagtacgacgcgaatccca

SEQ ID NO: 5919956 - DNA, 25 bp, Homo sapien
accttttcccgataacgcgtgcgaa

SEQ ID NO: 5919957 - DNA, 25 bp, Homo sapien
tacagacgagcgcgtaactagtcct

SEQ ID NO: 5919958 - DNA, 25 bp, Homo sapien
atccatcgggttcgcctaaacacct

SEQ ID NO: 5919959 - DNA, 25 bp, Homo sapien
agtaagcgatccggtatatagcgcg

SEQ ID NO: 5919960 - DNA, 25 bp, Homo sapien
tgaagtcgtgttcgcgaatagggtc

SEQ ID NO: 5919961 - DNA, 25 bp, Homo sapien
tgagtagttaacgcccgatgcactg

SEQ ID NO: 5919962 - DNA, 25 bp, Homo sapien
accgggccgatagtacgctcaaaaa

SEQ ID NO: 5919963 - DNA, 25 bp, Homo sapien
acaacaccatatccggacgaggatg

SEQ ID NO: 5919964 - DNA, 25 bp, Homo sapien
caatattcggacgtgtacgtcgggt

SEQ ID NO: 5919965 - DNA, 25 bp, Homo sapien
aatcgttcggtgcgacggtttcaga

SEQ ID NO: 5919966 - DNA, 25 bp, Homo sapien
ggcggtcgtacgcgagttacaaatt

SEQ ID NO: 5919967 - DNA, 25 bp, Homo sapien
caagcgtagtttacgccggtgttac

SEQ ID NO: 5919968 - DNA, 25 bp, Homo sapien
gtgtaataccgcgactaacgtcctc

SEQ ID NO: 5919969 - DNA, 25 bp, Homo sapien
cgtgtaactactcgcgatctgcgat

SEQ ID NO: 5919970 - DNA, 25 bp, Homo sapien
gaaccgcgcgttaggctactataag

SEQ ID NO: 5919971 - DNA, 25 bp, Homo sapien
tccgaacctatacggcgcatatagc

SEQ ID NO: 5919972 - DNA, 25 bp, Homo sapien
ctaaggtcctaacgcgcattacgtg

SEQ ID NO: 5919973 - DNA, 25 bp, Homo sapien
cgattactagtgcgatcgttctcgg

SEQ ID NO: 5919974 - DNA, 25 bp, Homo sapien
aatgcgtctatacgccgtctgtgca

SEQ ID NO: 5919975 - DNA, 25 bp, Homo sapien
ccctgagcgtatagttcgcgataca

SEQ ID NO: 5919976 - DNA, 25 bp, Homo sapien
gcacctctatgattgcgcgagctta

SEQ ID NO: 5919977 - DNA, 25 bp, Homo sapien
ctttggccgtacgcatagtaggact

SEQ ID NO: 5919978 - DNA, 25 bp, Homo sapien
gtacttaccgccgcgaataaagagc

SEQ ID NO: 5919979 - DNA, 25 bp, Homo sapien
aaaagacctaatcgcggacgtcctc

SEQ ID NO: 5919980 - DNA, 25 bp, Homo sapien
ttcacggtttgatcgcgcgttgtac

SEQ ID NO: 5919981 - DNA, 25 bp, Homo sapien
tgatagtacgctacgcggaccacat

SEQ ID NO: 5919982 - DNA, 25 bp, Homo sapien
caagtaagtgcgacgtacgcgcaat

SEQ ID NO: 5919983 - DNA, 25 bp, Homo sapien
cgtaattaccgctacggacaagtcc

SEQ ID NO: 5919984 - DNA, 25 bp, Homo sapien
gtttcgcaccatatcgcgtgtccaa

SEQ ID NO: 5919985 - DNA, 25 bp, Homo sapien
tcagattcgacccgcgtatgcaatc

SEQ ID NO: 5919986 - DNA, 25 bp, Homo sapien
tactctccgtacgcgcatatgttgc

SEQ ID NO: 5919987 - DNA, 25 bp, Homo sapien
aatgtaccgtatcgcacgacgtagc

SEQ ID NO: 5919988 - DNA, 25 bp, Homo sapien
ttgcgactcggtagcgcatttgttg

SEQ ID NO: 5919989 - DNA, 25 bp, Homo sapien
tattggtacgcggacgttacggact

SEQ ID NO: 5919990 - DNA, 25 bp, Homo sapien
gaaactagttcccgtatcgtgtccg

SEQ ID NO: 5919991 - DNA, 25 bp, Homo sapien
acctctcgtagttgtccgcatcttc

SEQ ID NO: 5919992 - DNA, 25 bp, Homo sapien
gaactttattgcggagccgacactc

SEQ ID NO: 5919993 - DNA, 25 bp, Homo sapien
cgtaactcgtatcgacgcttaggga

SEQ ID NO: 5919994 - DNA, 25 bp, Homo sapien
ttcctgatcgcgttacacgactgtc

SEQ ID NO: 5919995 - DNA, 25 bp, Homo sapien
tcgctgacttcgcgaagtagctaga

SEQ ID NO: 5919996 - DNA, 25 bp, Homo sapien
gaagaagtaatcgcgtatccgtcgg

SEQ ID NO: 5919997 - DNA, 25 bp, Homo sapien
caagctcgacgctcgatagactcta

SEQ ID NO: 5919998 - DNA, 25 bp, Homo sapien
gtgaggttataccgggccgtaatag

SEQ ID NO: 5919999 - DNA, 25 bp, Homo sapien
agagagtaagcgccttacggagatc

SEQ ID NO: 5920000 - DNA, 25 bp, Homo sapien
ggacgttactcgccgaccgatttat

SEQ ID NO: 5920001 - DNA, 25 bp, Homo sapien
acatagactacggacggtagcgcaa

SEQ ID NO: 5920002 - DNA, 25 bp, Homo sapien
agaacgaatagcgcgcgtagacgaa

SEQ ID NO: 5920003 - DNA, 25 bp, Homo sapien
aagacgatagtagcgcgctgtacct

SEQ ID NO: 5920004 - DNA, 25 bp, Homo sapien
gtcaaatacgtacccgctacaagcc

SEQ ID NO: 5920005 - DNA, 25 bp, Homo sapien
acggagatagttcgacggaagcaga

SEQ ID NO: 5920006 - DNA, 25 bp, Homo sapien
gcaaactaatcggcggacgactgaa

SEQ ID NO: 5920007 - DNA, 25 bp, Homo sapien
cgggtacgacgcgaagttaattgct

SEQ ID NO: 5920008 - DNA, 25 bp, Homo sapien
ataaaggatatatcgcgcgggtggg

SEQ ID NO: 5920009 - DNA, 25 bp, Homo sapien
ctctcacgcggatctaacgtatcga

SEQ ID NO: 5920010 - DNA, 25 bp, Homo sapien
ctacgttgttgcgaccgtcgatttc

SEQ ID NO: 5920011 - DNA, 25 bp, Homo sapien
caatggcgatacgcgttaaacgagc

SEQ ID NO: 5920012 - DNA, 25 bp, Homo sapien
cgttacacgtttagcgcgaccaaga

SEQ ID NO: 5920013 - DNA, 25 bp, Homo sapien
gaaagaacgccgtaattcgcgtcgt

SEQ ID NO: 5920014 - DNA, 25 bp, Homo sapien
tcagaggcgacggctaataactcag

SEQ ID NO: 5920015 - DNA, 25 bp, Homo sapien
accgaacgacgcgctatagcacaaa

SEQ ID NO: 5920016 - DNA, 25 bp, Homo sapien
aatatggcgagactagtcgggcttc

SEQ ID NO: 5920017 - DNA, 25 bp, Homo sapien
gcactcgtatcgctagtcgttccta

SEQ ID NO: 5920018 - DNA, 25 bp, Homo sapien
tcaagcctccgtagtcgactagctt

SEQ ID NO: 5920019 - DNA, 25 bp, Homo sapien
atcggatatcggtagcgaggttagg

SEQ ID NO: 5920020 - DNA, 25 bp, Homo sapien
tccccggcgtacgttaagcatctat

SEQ ID NO: 5920021 - DNA, 25 bp, Homo sapien
ctataggtacgtcgcctaactggtg

SEQ ID NO: 5920022 - DNA, 25 bp, Homo sapien
tatcggtcgcggacgtctataaacc

SEQ ID NO: 5920023 - DNA, 25 bp, Homo sapien
tagtctacgataccgtgcgagactg

SEQ ID NO: 5920024 - DNA, 25 bp, Homo sapien
tcttatatacgcgcgtctgcaacgc

SEQ ID NO: 5920025 - DNA, 25 bp, Homo sapien
ccgcccatatcgcgctaattagatc

SEQ ID NO: 5920026 - DNA, 25 bp, Homo sapien
ttagtttcgcgataaccgccgctac

SEQ ID NO: 5920027 - DNA, 25 bp, Homo sapien
gcagcttatgttgcggacgtttgtc

SEQ ID NO: 5920028 - DNA, 25 bp, Homo sapien
tgcctacgcccgaatacaaacgcaa

SEQ ID NO: 5920029 - DNA, 25 bp, Homo sapien
ttatgccgcgagattagctggtcca

SEQ ID NO: 5920030 - DNA, 25 bp, Homo sapien
acaacgtaggactccgtcgtttgac

SEQ ID NO: 5920031 - DNA, 25 bp, Homo sapien
taacgccgcgatactttcgaatggc

SEQ ID NO: 5920032 - DNA, 25 bp, Homo sapien
gttggggcgatatgtaccgcataga

SEQ ID NO: 5920033 - DNA, 25 bp, Homo sapien
gcggcaccgacaatacgcagttaaa

SEQ ID NO: 5920034 - DNA, 25 bp, Homo sapien
catgcttacgcgtattcgcgcagaa

SEQ ID NO: 5920035 - DNA, 25 bp, Homo sapien
gattcgatcgcggcgtaagaatcca

SEQ ID NO: 5920036 - DNA, 25 bp, Homo sapien
ctatgcgtcttatcgcgcggatagt

SEQ ID NO: 5920037 - DNA, 25 bp, Homo sapien
cgtggctcggctcgcgtatttaaaa

SEQ ID NO: 5920038 - DNA, 25 bp, Homo sapien
aaacctactgcgtacgagtgctagc

SEQ ID NO: 5920039 - DNA, 25 bp, Homo sapien
aagggaacgttagcgcgatgtccaa

SEQ ID NO: 5920040 - DNA, 25 bp, Homo sapien
ctggttcgagcgtagtacgtgattc

SEQ ID NO: 5920041 - DNA, 25 bp, Homo sapien
cgtcctcgcgtaataacccagtgta

SEQ ID NO: 5920042 - DNA, 25 bp, Homo sapien
cggttacaacgtacgcgatctggta

SEQ ID NO: 5920043 - DNA, 25 bp, Homo sapien
gaaggacggacgcccttatggttta

SEQ ID NO: 5920044 - DNA, 25 bp, Homo sapien
tctgactagatagcggacggacgat

SEQ ID NO: 5920045 - DNA, 25 bp, Homo sapien
cataaagcacgacgcgttacagtgg

SEQ ID NO: 5920046 - DNA, 25 bp, Homo sapien
taccgatatagggcgccgtttttgc

SEQ ID NO: 5920047 - DNA, 25 bp, Homo sapien
gctcagctatacgagcggaacattc

SEQ ID NO: 5920048 - DNA, 25 bp, Homo sapien
agacgtattcggcgtacgtgatcca

SEQ ID NO: 5920049 - DNA, 25 bp, Homo sapien
ttggctccgcgtaatgactaccgat

SEQ ID NO: 5920050 - DNA, 25 bp, Homo sapien
acgcgatagtacgcgccgagttatt

SEQ ID NO: 5920051 - DNA, 25 bp, Homo sapien
tgcacacgatagtggacgcgtagtt

SEQ ID NO: 5920052 - DNA, 25 bp, Homo sapien
ttcaagacgacggtatacgtgccag

SEQ ID NO: 5920053 - DNA, 25 bp, Homo sapien
ctgtacgctacgttagacgaacctg

SEQ ID NO: 5920054 - DNA, 25 bp, Homo sapien
tttacgcttactcgccgtacgtacc

SEQ ID NO: 5920055 - DNA, 25 bp, Homo sapien
tcattcccgcctaaccgtatgcttg

SEQ ID NO: 5920056 - DNA, 25 bp, Homo sapien
agagccagattacgtccgcttcgta

SEQ ID NO: 5920057 - DNA, 25 bp, Homo sapien
ttcatatatctcgcgtaccgctcgg

SEQ ID NO: 5920058 - DNA, 25 bp, Homo sapien
ggaacgcgcggtaatatcgataacc

SEQ ID NO: 5920059 - DNA, 25 bp, Homo sapien
aaagcgctcggttcgacgttgttgt

SEQ ID NO: 5920060 - DNA, 25 bp, Homo sapien
aagtgacgcggtatagtagcggctt

SEQ ID NO: 5920061 - DNA, 25 bp, Homo sapien
ggacatgagggtcgtatcgagtctt

SEQ ID NO: 5920062 - DNA, 25 bp, Homo sapien
tgacatcggaccgcgtaaacgtact

SEQ ID NO: 5920063 - DNA, 25 bp, Homo sapien
ccccaacggtacgatcctatcaaac

SEQ ID NO: 5920064 - DNA, 25 bp, Homo sapien
gtctaggtacgctcgtcatagtgac

SEQ ID NO: 5920065 - DNA, 25 bp, Homo sapien
aacgctgcgcgttacgagtaagctt

SEQ ID NO: 5920066 - DNA, 25 bp, Homo sapien
cattcacgcgtccggtatgaaaacc

SEQ ID NO: 5920067 - DNA, 25 bp, Homo sapien
ctcgtggacgttaggtacgttcttc

SEQ ID NO: 5920068 - DNA, 25 bp, Homo sapien
acaacgttgcgtacgcgatgacaac

SEQ ID NO: 5920069 - DNA, 25 bp, Homo sapien
agtatacgctagacggtcggggatt

SEQ ID NO: 5920070 - DNA, 25 bp, Homo sapien
ctactcccgttatcgtccgatacgt

SEQ ID NO: 5920071 - DNA, 25 bp, Homo sapien
acaggccgttgtacgctcgattgtt

SEQ ID NO: 5920072 - DNA, 25 bp, Homo sapien
tatgcgtcgtattgcggacatgtcg

SEQ ID NO: 5920073 - DNA, 25 bp, Homo sapien
gttcgcagtcgtattgcgcgataga

SEQ ID NO: 5920074 - DNA, 25 bp, Homo sapien
ccccccataccgcgtatggataaaa

SEQ ID NO: 5920075 - DNA, 25 bp, Homo sapien
ctttgcacctcgcgtatagtgccaa

SEQ ID NO: 5920076 - DNA, 25 bp, Homo sapien
gcgcagctaatagtacgcggattac

SEQ ID NO: 5920077 - DNA, 25 bp, Homo sapien
catcggatgcgtagcggacaaagaa

SEQ ID NO: 5920078 - DNA, 25 bp, Homo sapien
aggaaccatacgagcggaccaattc

SEQ ID NO: 5920079 - DNA, 25 bp, Homo sapien
gagtattagtacgagcgcggaaagg

SEQ ID NO: 5920080 - DNA, 25 bp, Homo sapien
ttgggttccgtcgtactagtgttgc

SEQ ID NO: 5920081 - DNA, 25 bp, Homo sapien
ctaccgaccgctagtcgtattatgg

SEQ ID NO: 5920082 - DNA, 25 bp, Homo sapien
ttggagagtccgtacgcgtacctta

SEQ ID NO: 5920083 - DNA, 25 bp, Homo sapien
agtcttgtgttcgtcgcgaatgctg

SEQ ID NO: 5920084 - DNA, 25 bp, Homo sapien
ttatcacgagcgtacggtgcacgtt

SEQ ID NO: 5920085 - DNA, 25 bp, Homo sapien
cttactcgacgtactctagcgtgac

SEQ ID NO: 5920086 - DNA, 25 bp, Homo sapien
gcacagcgcgaactagcgtagttta

SEQ ID NO: 5920087 - DNA, 25 bp, Homo sapien
tcctacagtattagtcgcgtaggcg

SEQ ID NO: 5920088 - DNA, 25 bp, Homo sapien
tttgtttctatcgaacgcggccgca

SEQ ID NO: 5920089 - DNA, 25 bp, Homo sapien
caactcgcgatatagcgcctacatg

SEQ ID NO: 5920090 - DNA, 25 bp, Homo sapien
gccacacgtacgctagatttgacac

SEQ ID NO: 5920091 - DNA, 25 bp, Homo sapien
tgacgatatcgcccgtcgacaaaca

SEQ ID NO: 5920092 - DNA, 25 bp, Homo sapien
actccgtattcgcgcggattaatcg

SEQ ID NO: 5920093 - DNA, 25 bp, Homo sapien
agatcacatagcgcgtcgagggttt

SEQ ID NO: 5920094 - DNA, 25 bp, Homo sapien
gcatgtaccgtacgcaagtgtgtga

SEQ ID NO: 5920095 - DNA, 25 bp, Homo sapien
aggagctcaggtcgcgtaatacatg

SEQ ID NO: 5920096 - DNA, 25 bp, Homo sapien
atggtacgcgtcaacgagtctcatc

SEQ ID NO: 5920097 - DNA, 25 bp, Homo sapien
tatggtacgtaactcgcgaggcagt

SEQ ID NO: 5920098 - DNA, 25 bp, Homo sapien
gcgtttgcgagtatgtcgtgccata

SEQ ID NO: 5920099 - DNA, 25 bp, Homo sapien
tacgtaggttagcggcgtagttcag

SEQ ID NO: 5920100 - DNA, 25 bp, Homo sapien
gcgtagagcgcgattcgtacaattc

SEQ ID NO: 5920101 - DNA, 25 bp, Homo sapien
taagataccgcgcgtttcacgctca

SEQ ID NO: 5920102 - DNA, 25 bp, Homo sapien
gttttgaccggggtatacgtcgaga

SEQ ID NO: 5920103 - DNA, 25 bp, Homo sapien
acgctactatcgcggattagccgat

SEQ ID NO: 5920104 - DNA, 25 bp, Homo sapien
gcacctcggccgtagattaactttg

SEQ ID NO: 5920105 - DNA, 25 bp, Homo sapien
gagatattacgtcgcctatggcgtc

SEQ ID NO: 5920106 - DNA, 25 bp, Homo sapien
cggtacgtatcgagcgaacttaagc

SEQ ID NO: 5920107 - DNA, 25 bp, Homo sapien
tcttcacgttaacgaacgccctcag

SEQ ID NO: 5920108 - DNA, 25 bp, Homo sapien
gaactgctaacgagcgatccgattg

SEQ ID NO: 5920109 - DNA, 25 bp, Homo sapien
gacttacgtataggctcgtcttgcc

SEQ ID NO: 5920110 - DNA, 25 bp, Homo sapien
gtatttacgtcgcacgactgctacg

SEQ ID NO: 5920111 - DNA, 25 bp, Homo sapien
tcgcactgacggcgcatagtacata

SEQ ID NO: 5920112 - DNA, 25 bp, Homo sapien
ggatactacgatcggtggcatatgc

SEQ ID NO: 5920113 - DNA, 25 bp, Homo sapien
aaggtggcgcgttatactgtcctgt

SEQ ID NO: 5920114 - DNA, 25 bp, Homo sapien
accattgttcggtcgaccatggaac

SEQ ID NO: 5920115 - DNA, 25 bp, Homo sapien
ataccgcgatacgcgaacttcttcg

SEQ ID NO: 5920116 - DNA, 25 bp, Homo sapien
gtcggtaccgacgcgtttagatgtt

SEQ ID NO: 5920117 - DNA, 25 bp, Homo sapien
gaagagcccggtacgtaaagtaagc

SEQ ID NO: 5920118 - DNA, 25 bp, Homo sapien
acactctcgtccgcgctaaaccttt

SEQ ID NO: 5920119 - DNA, 25 bp, Homo sapien
ccgttgagtgatcgcgacgtataga

SEQ ID NO: 5920120 - DNA, 25 bp, Homo sapien
ctgtaacgtcgcgtatagttgccca

SEQ ID NO: 5920121 - DNA, 25 bp, Homo sapien
gggatggatagcgtaccgtgttaag

SEQ ID NO: 5920122 - DNA, 25 bp, Homo sapien
attcgtacgtcgcgcattgagacca

SEQ ID NO: 5920123 - DNA, 25 bp, Homo sapien
caggatatgtcgcactacgcgattc

SEQ ID NO: 5920124 - DNA, 25 bp, Homo sapien
catatatatacgtcgcgtcggcctc

SEQ ID NO: 5920125 - DNA, 25 bp, Homo sapien
aagcagtctcgcgtatcgttctggt

SEQ ID NO: 5920126 - DNA, 25 bp, Homo sapien
gccaacggacgacgcgttaatcttt

SEQ ID NO: 5920127 - DNA, 25 bp, Homo sapien
gaggtatcgcgttataagcagagcc

SEQ ID NO: 5920128 - DNA, 25 bp, Homo sapien
aggcgcatacaccgtcgcgttatat

SEQ ID NO: 5920129 - DNA, 25 bp, Homo sapien
cctatagtcccgcgattaacggcaa

SEQ ID NO: 5920130 - DNA, 25 bp, Homo sapien
agctcattgtcatacgccgtctggt

SEQ ID NO: 5920131 - DNA, 25 bp, Homo sapien
aattagacgtagcgctctagcgtcg

SEQ ID NO: 5920132 - DNA, 25 bp, Homo sapien
actacacgcgatttagctccgagga

SEQ ID NO: 5920133 - DNA, 25 bp, Homo sapien
ccttccagtcgcgtaacgtaaatgc

SEQ ID NO: 5920134 - DNA, 25 bp, Homo sapien
cagtaccttacatcgacgcgtacct

SEQ ID NO: 5920135 - DNA, 25 bp, Homo sapien
tatggtcgctagatcggtcccacta

SEQ ID NO: 5920136 - DNA, 25 bp, Homo sapien
gtggcgtcgcgtatataggtagcaa

SEQ ID NO: 5920137 - DNA, 25 bp, Homo sapien
ttggcttaaaccgcgtagctgtgtg

SEQ ID NO: 5920138 - DNA, 25 bp, Homo sapien
catctggttacgtcgaccgaaaagc

SEQ ID NO: 5920139 - DNA, 25 bp, Homo sapien
atctggaactcccgtacgctaaagg

SEQ ID NO: 5920140 - DNA, 25 bp, Homo sapien
tgtcaaaaggttatgcgcgtgccgt

SEQ ID NO: 5920141 - DNA, 25 bp, Homo sapien
cattgcgcgcacgattcgatcgtaa

SEQ ID NO: 5920142 - DNA, 25 bp, Homo sapien
tgtcttatgtccggtcgtaccgcat

SEQ ID NO: 5920143 - DNA, 25 bp, Homo sapien
gctaggacgcgtagacgtagattca

SEQ ID NO: 5920144 - DNA, 25 bp, Homo sapien
ctagcgtagttcgacacggcttagt

SEQ ID NO: 5920145 - DNA, 25 bp, Homo sapien
atcgcatacgtaaaccgcgactacg

SEQ ID NO: 5920146 - DNA, 25 bp, Homo sapien
cttttatcacgacggtacgcgttgc

SEQ ID NO: 5920147 - DNA, 25 bp, Homo sapien
cactggataacgtaggcgggaaaga

SEQ ID NO: 5920148 - DNA, 25 bp, Homo sapien
gtgaaaatcggccgtaagcactacg

SEQ ID NO: 5920149 - DNA, 25 bp, Homo sapien
cagccatactatctcgcgagaaagc

SEQ ID NO: 5920150 - DNA, 25 bp, Homo sapien
aagtatacgcgcggcatactcccat

SEQ ID NO: 5920151 - DNA, 25 bp, Homo sapien
gtgttatagaccgcgctacccgatt

SEQ ID NO: 5920152 - DNA, 25 bp, Homo sapien
agtaactcgacggattacgatgcgc

SEQ ID NO: 5920153 - DNA, 25 bp, Homo sapien
cactatgcgtacggacgatgtgagt

SEQ ID NO: 5920154 - DNA, 25 bp, Homo sapien
gaagctataacggtacgcggtgtct

SEQ ID NO: 5920155 - DNA, 25 bp, Homo sapien
aaccggtagatcgcggtcaccaaaa

SEQ ID NO: 5920156 - DNA, 25 bp, Homo sapien
tcgacttcgactagtccgactagag

SEQ ID NO: 5920157 - DNA, 25 bp, Homo sapien
tctcggactcgtacgcagtcgaaaa

SEQ ID NO: 5920158 - DNA, 25 bp, Homo sapien
acgttccgtagtacgaaccatgagc

SEQ ID NO: 5920159 - DNA, 25 bp, Homo sapien
ggattcaatatcgcgcggttgtctc

SEQ ID NO: 5920160 - DNA, 25 bp, Homo sapien
atctggttcgtaccggacagggaat

SEQ ID NO: 5920161 - DNA, 25 bp, Homo sapien
cgtattcgaccgcttaacggtgcta

SEQ ID NO: 5920162 - DNA, 25 bp, Homo sapien
caagatccggatagcgtactccact

SEQ ID NO: 5920163 - DNA, 25 bp, Homo sapien
atactggtaatcgagcgtcggtacc

SEQ ID NO: 5920164 - DNA, 25 bp, Homo sapien
ccgcacatgcgcgattaggtatctt

SEQ ID NO: 5920165 - DNA, 25 bp, Homo sapien
gtcagaaggcctagcgcgattatac

SEQ ID NO: 5920166 - DNA, 25 bp, Homo sapien
agatggcgtcgcgctagtaggttta

SEQ ID NO: 5920167 - DNA, 25 bp, Homo sapien
tcaggactaatgtcgcgagcatgca

SEQ ID NO: 5920168 - DNA, 25 bp, Homo sapien
tcattcgccttaacgcgatcatcgc

SEQ ID NO: 5920169 - DNA, 25 bp, Homo sapien
ctaccaagttagcgatcggttctgc

SEQ ID NO: 5920170 - DNA, 25 bp, Homo sapien
gtcgacattggtacggtcgtaacgt

SEQ ID NO: 5920171 - DNA, 25 bp, Homo sapien
ccatttcccgaacgtagttcaggac

SEQ ID NO: 5920172 - DNA, 25 bp, Homo sapien
ctctcacgccgataatacgcgtaca

SEQ ID NO: 5920173 - DNA, 25 bp, Homo sapien
cacaatgcgtcgatacggactcgaa

SEQ ID NO: 5920174 - DNA, 25 bp, Homo sapien
atgatccgttgcgccgtatgggtta

SEQ ID NO: 5920175 - DNA, 25 bp, Homo sapien
ctcgaggtcgcgaccttaacttgtt

SEQ ID NO: 5920176 - DNA, 25 bp, Homo sapien
cgtaagcgtatacgaggtcaccgat

SEQ ID NO: 5920177 - DNA, 25 bp, Homo sapien
caatgaagcgtagcgttcgcttcct

SEQ ID NO: 5920178 - DNA, 25 bp, Homo sapien
ctctttacctatacgcgactccgac

SEQ ID NO: 5920179 - DNA, 25 bp, Homo sapien
tacgtcgtaatgtctcgcgcatcga

SEQ ID NO: 5920180 - DNA, 25 bp, Homo sapien
tgaatggtagcgcgatacagtggga

SEQ ID NO: 5920181 - DNA, 25 bp, Homo sapien
gttctgccgaatcggtacgtcaatg

SEQ ID NO: 5920182 - DNA, 25 bp, Homo sapien
gagggcgtcgtaatacgacttgatc

SEQ ID NO: 5920183 - DNA, 25 bp, Homo sapien
tttcggcgtataggacgcgcgtatt

SEQ ID NO: 5920184 - DNA, 25 bp, Homo sapien
ctcgttccctagtacgtcgtagact

SEQ ID NO: 5920185 - DNA, 25 bp, Homo sapien
ctatggcgcgtactgaaacgggaat

SEQ ID NO: 5920186 - DNA, 25 bp, Homo sapien
ctagttcgtcgcgtcctaacgatag

SEQ ID NO: 5920187 - DNA, 25 bp, Homo sapien
tcactttacgcgacccgatgtcaga

SEQ ID NO: 5920188 - DNA, 25 bp, Homo sapien
taatacattcacgcgtcgggcccaa

SEQ ID NO: 5920189 - DNA, 25 bp, Homo sapien
actgttgtaacgctagacgtcgcgt

SEQ ID NO: 5920190 - DNA, 25 bp, Homo sapien
tacgactagtacgcgcgatgtcaga

SEQ ID NO: 5920191 - DNA, 25 bp, Homo sapien
gtcttcaatgcgtacgctcgtcgtt

SEQ ID NO: 5920192 - DNA, 25 bp, Homo sapien
accgcgcgtaacgccttattacagt

SEQ ID NO: 5920193 - DNA, 25 bp, Homo sapien
cgtggtactcgcgcgaataacgata

SEQ ID NO: 5920194 - DNA, 25 bp, Homo sapien
cctcctcgttcggtcgatctgtaaa

SEQ ID NO: 5920195 - DNA, 25 bp, Homo sapien
cccattaggatcgcgtaccaggtaa

SEQ ID NO: 5920196 - DNA, 25 bp, Homo sapien
ccaattatccgtcgcgatagttcgg

SEQ ID NO: 5920197 - DNA, 25 bp, Homo sapien
gagaaacgctagatcgtacgagtgc

SEQ ID NO: 5920198 - DNA, 25 bp, Homo sapien
accaaccgttatatccgcgggatga

SEQ ID NO: 5920199 - DNA, 25 bp, Homo sapien
gaatcctagatacgtcgcgtgagca

SEQ ID NO: 5920200 - DNA, 25 bp, Homo sapien
ctgtattcgttagtacgggacgcgt

SEQ ID NO: 5920201 - DNA, 25 bp, Homo sapien
attgacgatcgtacgctacagtccc

SEQ ID NO: 5920202 - DNA, 25 bp, Homo sapien
catctcaacgcggaaccgtggataa

SEQ ID NO: 5920203 - DNA, 25 bp, Homo sapien
atctcacgcgattcgagtagtggct

SEQ ID NO: 5920204 - DNA, 25 bp, Homo sapien
catgcacgtatgcgctacgataggt

SEQ ID NO: 5920205 - DNA, 25 bp, Homo sapien
attaggtagtacgcggtcttgggag

SEQ ID NO: 5920206 - DNA, 25 bp, Homo sapien
gggcagttttagcgtccgcatcttt

SEQ ID NO: 5920207 - DNA, 25 bp, Homo sapien
atgttccgttgcggtaaggacacca

SEQ ID NO: 5920208 - DNA, 25 bp, Homo sapien
ggctgcacgccgaataggaagaata

SEQ ID NO: 5920209 - DNA, 25 bp, Homo sapien
gtgaagccgttatagtacgggtcag

SEQ ID NO: 5920210 - DNA, 25 bp, Homo sapien
cggtcattaggtccgacgattcttg

SEQ ID NO: 5920211 - DNA, 25 bp, Homo sapien
cctaacgtatcgcgacatacacggt

SEQ ID NO: 5920212 - DNA, 25 bp, Homo sapien
gcttactttacgtaccgggctcttc

SEQ ID NO: 5920213 - DNA, 25 bp, Homo sapien
tctgacatcgcgcgtactagtcgta

SEQ ID NO: 5920214 - DNA, 25 bp, Homo sapien
aaacctccgcgttagtcggatcaca

SEQ ID NO: 5920215 - DNA, 25 bp, Homo sapien
tatgtactatgcgccgtcagtgcga

SEQ ID NO: 5920216 - DNA, 25 bp, Homo sapien
ccaatataggcgtccgatagctcca

SEQ ID NO: 5920217 - DNA, 25 bp, Homo sapien
ctctagtcggactagtcgaagtcga

SEQ ID NO: 5920218 - DNA, 25 bp, Homo sapien
ggaagttaccgatcggacggttcta

SEQ ID NO: 5920219 - DNA, 25 bp, Homo sapien
atataacgcgacggtgtatgcgcct

SEQ ID NO: 5920220 - DNA, 25 bp, Homo sapien
aggtgggtaccgaatcgacataagc

SEQ ID NO: 5920221 - DNA, 25 bp, Homo sapien
gatgtcacgtaatcggcgattggtg

SEQ ID NO: 5920222 - DNA, 25 bp, Homo sapien
tccggccgtcgcaatctacttcaaa

SEQ ID NO: 5920223 - DNA, 25 bp, Homo sapien
gtctaggtatacgaggtcggtactg

SEQ ID NO: 5920224 - DNA, 25 bp, Homo sapien
accagacggcgtatgacaatgagct

SEQ ID NO: 5920225 - DNA, 25 bp, Homo sapien
cgcgtaccgtacgcgataaactgat

SEQ ID NO: 5920226 - DNA, 25 bp, Homo sapien
ctcctacgtagacgcgtaatgttgc

SEQ ID NO: 5920227 - DNA, 25 bp, Homo sapien
tccataacgatccgttacgagggtc

SEQ ID NO: 5920228 - DNA, 25 bp, Homo sapien
gtcgttttaagcgacgggtataggc

SEQ ID NO: 5920229 - DNA, 25 bp, Homo sapien
gggactgtagcgtacgatcgtcaat

SEQ ID NO: 5920230 - DNA, 25 bp, Homo sapien
atttttcgtagcggtgctagtgcgc

SEQ ID NO: 5920231 - DNA, 25 bp, Homo sapien
tggaaaatacgtctcgaggtgcggt

SEQ ID NO: 5920232 - DNA, 25 bp, Homo sapien
gcgatgatcgcgttaaggcgaatga

SEQ ID NO: 5920233 - DNA, 25 bp, Homo sapien
gaattgtacgaatcgcgctctacgc

SEQ ID NO: 5920234 - DNA, 25 bp, Homo sapien
caacaaatgcgctaccgagtcgcaa

SEQ ID NO: 5920235 - DNA, 25 bp, Homo sapien
gttccaatatcgttcgcgaagctgc

SEQ ID NO: 5920236 - DNA, 25 bp, Homo sapien
cattcgtatgcggtcgtactgagca

SEQ ID NO: 5920237 - DNA, 25 bp, Homo sapien
atgggagtatgccgcgcgtatactt

SEQ ID NO: 5920238 - DNA, 25 bp, Homo sapien
cagtctcgcacggtatcgtagacta

SEQ ID NO: 5920239 - DNA, 25 bp, Homo sapien
gtcctgaactacgttcgggaaatgg

SEQ ID NO: 5920240 - DNA, 25 bp, Homo sapien
tggatcacgtacgccgaatacgtct

SEQ ID NO: 5920241 - DNA, 25 bp, Homo sapien
ggtacgtacggcgagtaagcgtaaa

SEQ ID NO: 5920242 - DNA, 25 bp, Homo sapien
ttgggcccgacgcgtgaatgtatta

SEQ ID NO: 5920243 - DNA, 25 bp, Homo sapien
tcgatgcgcgagacattacgacgta

SEQ ID NO: 5920244 - DNA, 25 bp, Homo sapien
catgtattacgcgacctgagctcct

SEQ ID NO: 5920245 - DNA, 25 bp, Homo sapien
gactattattgacgcgtcgtcgcct

SEQ ID NO: 5920246 - DNA, 25 bp, Homo sapien
ccagaaacgcggcgtattgaagctt

SEQ ID NO: 5920247 - DNA, 25 bp, Homo sapien
gtttctgcgtgatacgacgcattgc

SEQ ID NO: 5920248 - DNA, 25 bp, Homo sapien
ttatccacggttccgcgttgagatg

SEQ ID NO: 5920249 - DNA, 25 bp, Homo sapien
gaggacgtccgcgattaggtctttt

SEQ ID NO: 5920250 - DNA, 25 bp, Homo sapien
actcacatcgtccgtacgcatagtg

SEQ ID NO: 5920251 - DNA, 25 bp, Homo sapien
aatccccgaccgtctagcgtatact

SEQ ID NO: 5920252 - DNA, 25 bp, Homo sapien
acggcacgcgcataaccttttgaca

SEQ ID NO: 5920253 - DNA, 25 bp, Homo sapien
tacgaagcggacgtaatctggctct

SEQ ID NO: 5920254 - DNA, 25 bp, Homo sapien
cgacgctagagcgctacgtctaatt

SEQ ID NO: 5920255 - DNA, 25 bp, Homo sapien
catagagaccggacgtaattcctgc

SEQ ID NO: 5920256 - DNA, 25 bp, Homo sapien
cggacacgatacgggaactagtttc

SEQ ID NO: 5920257 - DNA, 25 bp, Homo sapien
ggcaagacgagcctatacgtaagtc

SEQ ID NO: 5920258 - DNA, 25 bp, Homo sapien
tcgtgtggctagcgcgttataggtt

SEQ ID NO: 5920259 - DNA, 25 bp, Homo sapien
aaggagcgcttaatcggttagagcc

SEQ ID NO: 5920260 - DNA, 25 bp, Homo sapien
gacaggccgttaggtgcgtcttaaa

SEQ ID NO: 5920261 - DNA, 25 bp, Homo sapien
tcctcggagctaaatcgcgtgtagt

SEQ ID NO: 5920262 - DNA, 25 bp, Homo sapien
actccgcggggtagcgtatatttac

SEQ ID NO: 5920263 - DNA, 25 bp, Homo sapien
aggtgctcgcgtacggatgaattac

SEQ ID NO: 5920264 - DNA, 25 bp, Homo sapien
gtgaatatcgggccggaatgtcatg

SEQ ID NO: 5920265 - DNA, 25 bp, Homo sapien
tgcattatacgtcggtacgagcacc

SEQ ID NO: 5920266 - DNA, 25 bp, Homo sapien
gaagatgcggacaactacgagaggt

SEQ ID NO: 5920267 - DNA, 25 bp, Homo sapien
gttgtcatcgcgtacgcaacgttgt

SEQ ID NO: 5920268 - DNA, 25 bp, Homo sapien
ctctgggacgtcgggtagacatttt

SEQ ID NO: 5920269 - DNA, 25 bp, Homo sapien
ggttttcataccggacgcgtgaatg

SEQ ID NO: 5920270 - DNA, 25 bp, Homo sapien
ttcgcacgcgttatcgggaaaaggt

SEQ ID NO: 5920271 - DNA, 25 bp, Homo sapien
taggattagatcacggccggatctc

SEQ ID NO: 5920272 - DNA, 25 bp, Homo sapien
taagcgacccggtacgaattcgatc

SEQ ID NO: 5920273 - DNA, 25 bp, Homo sapien
taccagatcgcgtacgttgtaaccg

SEQ ID NO: 5920274 - DNA, 25 bp, Homo sapien
cctgctactatcgcgcggataaagt

SEQ ID NO: 5920275 - DNA, 25 bp, Homo sapien
gcagaaccgatcgctaacttggtag

SEQ ID NO: 5920276 - DNA, 25 bp, Homo sapien
taagtttaccgcgaaacggagaggc

SEQ ID NO: 5920277 - DNA, 25 bp, Homo sapien
ttttatccatacgcggtatgggggg

SEQ ID NO: 5920278 - DNA, 25 bp, Homo sapien
ttaccccgcgcgtattgactcagta

SEQ ID NO: 5920279 - DNA, 25 bp, Homo sapien
gactagtcgcgtacgatagggtatg

SEQ ID NO: 5920280 - DNA, 25 bp, Homo sapien
gatttgctcatacgaccgaaccgca

SEQ ID NO: 5920281 - DNA, 25 bp, Homo sapien
acccgacgtacacgtccgaatattg

SEQ ID NO: 5920282 - DNA, 25 bp, Homo sapien
acgttacgaccgtaccaatgtcgac

SEQ ID NO: 5920283 - DNA, 25 bp, Homo sapien
tattatgtatcccgaccgtgccacc

SEQ ID NO: 5920284 - DNA, 25 bp, Homo sapien
agatctcggacgagacttactccca

SEQ ID NO: 5920285 - DNA, 25 bp, Homo sapien
aggtacagcgcgctactatcgtctt

SEQ ID NO: 5920286 - DNA, 25 bp, Homo sapien
cgacaagggcgcgactattatgtct

SEQ ID NO: 5920287 - DNA, 25 bp, Homo sapien
cccattaagtcgccttacggtatgg

SEQ ID NO: 5920288 - DNA, 25 bp, Homo sapien
cccaactatccgtagatcggcttca

SEQ ID NO: 5920289 - DNA, 25 bp, Homo sapien
gtatgtctacaacgtaccgggagtc

SEQ ID NO: 5920290 - DNA, 25 bp, Homo sapien
taaaccataagggcgtccgtccttc

SEQ ID NO: 5920291 - DNA, 25 bp, Homo sapien
gacgccataggcgacgtaatatctc

SEQ ID NO: 5920292 - DNA, 25 bp, Homo sapien
gctatatgcgccgtataggttcgga

SEQ ID NO: 5920293 - DNA, 25 bp, Homo sapien
gatagacgcggtaagataacggagc

SEQ ID NO: 5920294 - DNA, 25 bp, Homo sapien
gtcggagtcgcgtataggtaaagag

SEQ ID NO: 5920295 - DNA, 25 bp, Homo sapien
gcctctgtatatcggcgcagcaaat

SEQ ID NO: 5920296 - DNA, 25 bp, Homo sapien
ttacgatcgaatcgtgcgcgcaatg

SEQ ID NO: 5920297 - DNA, 25 bp, Homo sapien
tattcttcctattcggcgtgcagcc

SEQ ID NO: 5920298 - DNA, 25 bp, Homo sapien
ggagggtatgtcgcgcgtatttcat

SEQ ID NO: 5920299 - DNA, 25 bp, Homo sapien
aacaatcgagcgtacaacggcctgt

SEQ ID NO: 5920300 - DNA, 25 bp, Homo sapien
accattgtatcgcacgttgtcggtg

SEQ ID NO: 5920301 - DNA, 25 bp, Homo sapien
cacgtaatgcgcgttaggaccttag

SEQ ID NO: 5920302 - DNA, 25 bp, Homo sapien
tatttcgcattctaccgcgcaaccg

SEQ ID NO: 5920303 - DNA, 25 bp, Homo sapien
aatggtcgacctcgtaagcgtgtag

SEQ ID NO: 5920304 - DNA, 25 bp, Homo sapien
tgtatggattcgttaggcgcggttg

SEQ ID NO: 5920305 - DNA, 25 bp, Homo sapien
aatttgtaactcgcgtacgaccgcc

SEQ ID NO: 5920306 - DNA, 25 bp, Homo sapien
catgtaggcgctatatcgcgagttg

SEQ ID NO: 5920307 - DNA, 25 bp, Homo sapien
gcaacactagtacgacggaacccaa

SEQ ID NO: 5920308 - DNA, 25 bp, Homo sapien
attcccgtttcagtacgcgccatag

SEQ ID NO: 5920309 - DNA, 25 bp, Homo sapien
gtcgggacgcgctagtaatcaattg

SEQ ID NO: 5920310 - DNA, 25 bp, Homo sapien
aaaccctcgtatctacgcggatgtc

SEQ ID NO: 5920311 - DNA, 25 bp, Homo sapien
acaacaacgtcgaaccgagcgcttt

SEQ ID NO: 5920312 - DNA, 25 bp, Homo sapien
tgtatgtcgtcgacccgtaacagtc

SEQ ID NO: 5920313 - DNA, 25 bp, Homo sapien
ctgatacatgccgctcgtaggtatg

SEQ ID NO: 5920314 - DNA, 25 bp, Homo sapien
attacagctacgattcgcagctcgc

SEQ ID NO: 5920315 - DNA, 25 bp, Homo sapien
atctccccgaccgttactagatacg

SEQ ID NO: 5920316 - DNA, 25 bp, Homo sapien
ccatgatcgtccgttggtaggtaag

SEQ ID NO: 5920317 - DNA, 25 bp, Homo sapien
ataaatcggtcggcgagtaacgtcc

SEQ ID NO: 5920318 - DNA, 25 bp, Homo sapien
gacttacgcgatactcgcttgacga

SEQ ID NO: 5920319 - DNA, 25 bp, Homo sapien
tctgcttccgtcgaactatctccgt

SEQ ID NO: 5920320 - DNA, 25 bp, Homo sapien
ttacctggtacgcgatcctaatggg

SEQ ID NO: 5920321 - DNA, 25 bp, Homo sapien
aggagtatccgcatacgcgctatct

SEQ ID NO: 5920322 - DNA, 25 bp, Homo sapien
ccataataaccggtccgtagcctac

SEQ ID NO: 5920323 - DNA, 25 bp, Homo sapien
tgcacagacggcgtatagacgcatt

SEQ ID NO: 5920324 - DNA, 25 bp, Homo sapien
gagttctacgcgattactctcgacc

SEQ ID NO: 5920325 - DNA, 25 bp, Homo sapien
tatggcacgacatactcgcaaacgc

SEQ ID NO: 5920326 - DNA, 25 bp, Homo sapien
accaattctatacgccgtcgagtcg

SEQ ID NO: 5920327 - DNA, 25 bp, Homo sapien
ccgagcggtacgcgagatatatgaa

SEQ ID NO: 5920328 - DNA, 25 bp, Homo sapien
gcagtacgtacgtactcgaaggttc

SEQ ID NO: 5920329 - DNA, 25 bp, Homo sapien
cttaacacggtacgctatccatccc

SEQ ID NO: 5920330 - DNA, 25 bp, Homo sapien
gttttgatcgcgccctatagcacac

SEQ ID NO: 5920331 - DNA, 25 bp, Homo sapien
gaaagacttagtacgcccgtagcac

SEQ ID NO: 5920332 - DNA, 25 bp, Homo sapien
catggacgaccgtagtactcatcac

SEQ ID NO: 5920333 - DNA, 25 bp, Homo sapien
gaaagcttacgcggctagctatacc

SEQ ID NO: 5920334 - DNA, 25 bp, Homo sapien
cgttatcgcgcataccgttcaacac

SEQ ID NO: 5920335 - DNA, 25 bp, Homo sapien
atcgcagatcgcgagtagttacacg

SEQ ID NO: 5920336 - DNA, 25 bp, Homo sapien
aagatacctaatcgcgcatgtgcgg

SEQ ID NO: 5920337 - DNA, 25 bp, Homo sapien
ggtcaacggtaccgttcgactattg

SEQ ID NO: 5920338 - DNA, 25 bp, Homo sapien
atcggctaatccgcgatagtagcgt

SEQ ID NO: 5920339 - DNA, 25 bp, Homo sapien
gtctctaccgatatcgtcgcatcac

SEQ ID NO: 5920340 - DNA, 25 bp, Homo sapien
aactccgtcgcgtactcgagcaaat

SEQ ID NO: 5920341 - DNA, 25 bp, Homo sapien
ttggcactatacgcgaggtgcaaag

SEQ ID NO: 5920342 - DNA, 25 bp, Homo sapien
aacgagttcggcgccctatcttaca

SEQ ID NO: 5920343 - DNA, 25 bp, Homo sapien
taatcccttcgtacgaacgaccagg

SEQ ID NO: 5920344 - DNA, 25 bp, Homo sapien
aagaagtgacgcgagtaggatctcc

SEQ ID NO: 5920345 - DNA, 25 bp, Homo sapien
tcttgccgaacgttcgtaggaccat

SEQ ID NO: 5920346 - DNA, 25 bp, Homo sapien
ggtagattatcgcgtccgataggtg

SEQ ID NO: 5920347 - DNA, 25 bp, Homo sapien
ctagagcgtataggtccgagttcag

SEQ ID NO: 5920348 - DNA, 25 bp, Homo sapien
tagatgccaatgcgcgacagaaagc

SEQ ID NO: 5920349 - DNA, 25 bp, Homo sapien
cgacatgtccgcaatacgacgcata

SEQ ID NO: 5920350 - DNA, 25 bp, Homo sapien
gtgtcaaatctagcgtacgtgtggc

SEQ ID NO: 5920351 - DNA, 25 bp, Homo sapien
gctgaatcgtatcgcgcgaaaatgg

SEQ ID NO: 5920352 - DNA, 25 bp, Homo sapien
agacattaacggtgcgcgaagcgta

SEQ ID NO: 5920353 - DNA, 25 bp, Homo sapien
tctatcgcgcaatacgactgcgaac

SEQ ID NO: 5920354 - DNA, 25 bp, Homo sapien
ataaggtagtgcgcgactaaacgcg

SEQ ID NO: 5920355 - DNA, 25 bp, Homo sapien
taaaggtcgcgcgcaagtaagaagc

SEQ ID NO: 5920356 - DNA, 25 bp, Homo sapien
tagcaccgttaagcggtcgaatacg

SEQ ID NO: 5920357 - DNA, 25 bp, Homo sapien
gtaatccgcgtactattagctgcgc

SEQ ID NO: 5920358 - DNA, 25 bp, Homo sapien
ctgatcgtcgcgtacctatatgacc

SEQ ID NO: 5920359 - DNA, 25 bp, Homo sapien
ctgagttattagccgtcgcctctga

SEQ ID NO: 5920360 - DNA, 25 bp, Homo sapien
actctaggaccgtcacgaaatcgtc

SEQ ID NO: 5920361 - DNA, 25 bp, Homo sapien
gcttaagttcgctcgatacgtaccg

SEQ ID NO: 5920362 - DNA, 25 bp, Homo sapien
gagacaaccgcgcgatattgaatcc

SEQ ID NO: 5920363 - DNA, 25 bp, Homo sapien
ttttcggtcccgaacgatttcgcga

SEQ ID NO: 5920364 - DNA, 25 bp, Homo sapien
ccataatacgactagcggtcggtag

SEQ ID NO: 5920365 - DNA, 25 bp, Homo sapien
gcagaatacggagcgctagttgact

SEQ ID NO: 5920366 - DNA, 25 bp, Homo sapien
gcaacgcgtaccgtcgtgataaaag

SEQ ID NO: 5920367 - DNA, 25 bp, Homo sapien
ttttatggccgtaatacgcctggcc

SEQ ID NO: 5920368 - DNA, 25 bp, Homo sapien
acctatcgtagcgcatacgtgcatg

SEQ ID NO: 5920369 - DNA, 25 bp, Homo sapien
acgcgtcccgtactaacgaatacag

SEQ ID NO: 5920370 - DNA, 25 bp, Homo sapien
aggtacgcgtcgatgtaaggtactg

SEQ ID NO: 5920371 - DNA, 25 bp, Homo sapien
acgacgcgaattacggcgttctttc

SEQ ID NO: 5920372 - DNA, 25 bp, Homo sapien
cgtagtcgcggtttacgtatgcgat

SEQ ID NO: 5920373 - DNA, 25 bp, Homo sapien
ccatgttactacgtcggttcgcgta

SEQ ID NO: 5920374 - DNA, 25 bp, Homo sapien
gatctccgtaaggcgcttactctct

SEQ ID NO: 5920375 - DNA, 25 bp, Homo sapien
ggagcaaacgtagcatcgctcatag

SEQ ID NO: 5920376 - DNA, 25 bp, Homo sapien
ggtaccgacgctcgattaccagtat

SEQ ID NO: 5920377 - DNA, 25 bp, Homo sapien
agttcataatcgaacggggcgtggt

SEQ ID NO: 5920378 - DNA, 25 bp, Homo sapien
gttccatggtcgaccgaacaatggt

SEQ ID NO: 5920379 - DNA, 25 bp, Homo sapien
gttaccgggcgattaacgctagaga

SEQ ID NO: 5920380 - DNA, 25 bp, Homo sapien
aatacgcgcgtcctatacgccgaaa

SEQ ID NO: 5920381 - DNA, 25 bp, Homo sapien
gcgttgcagacgcgcgtatataaga

SEQ ID NO: 5920382 - DNA, 25 bp, Homo sapien
ggtgccatcggccgttagttattag

SEQ ID NO: 5920383 - DNA, 25 bp, Homo sapien
tcacacacttgcgtacggtacatgc

SEQ ID NO: 5920384 - DNA, 25 bp, Homo sapien
gattgcatacgcgggtcgaatctga

SEQ ID NO: 5920385 - DNA, 25 bp, Homo sapien
tctgacatcgggtcgcgtaaagtga

SEQ ID NO: 5920386 - DNA, 25 bp, Homo sapien
caagaatcgtcggacctaatgaccg

SEQ ID NO: 5920387 - DNA, 25 bp, Homo sapien
actatccgcgcgataagacgcatag

SEQ ID NO: 5920388 - DNA, 25 bp, Homo sapien
gtataatcgcgctaggccttctgac

SEQ ID NO: 5920389 - DNA, 25 bp, Homo sapien
ttctgcgcgaatacgcgtaagcatg

SEQ ID NO: 5920390 - DNA, 25 bp, Homo sapien
tgccggtattacggtcgcatcacat

SEQ ID NO: 5920391 - DNA, 25 bp, Homo sapien
tttaactgcgtattgtcggtgccgc

SEQ ID NO: 5920392 - DNA, 25 bp, Homo sapien
tgaccgttgcgccgtaatgagattg

SEQ ID NO: 5920393 - DNA, 25 bp, Homo sapien
aagcttactcgtaacgcgcagcgtt

SEQ ID NO: 5920394 - DNA, 25 bp, Homo sapien
gaagaacgtacctaacgtccacgag

SEQ ID NO: 5920395 - DNA, 25 bp, Homo sapien
gaattggtccgctcgtatggttcct

SEQ ID NO: 5920396 - DNA, 25 bp, Homo sapien
atgtaacgcgaacggtatagccctc

SEQ ID NO: 5920397 - DNA, 25 bp, Homo sapien
caaagttaatctacggccgaggtgc

SEQ ID NO: 5920398 - DNA, 25 bp, Homo sapien
ggcttgtagcgggtacgtatttgac

SEQ ID NO: 5920399 - DNA, 25 bp, Homo sapien
tctagctacttcgcgaagtcagcga

SEQ ID NO: 5920400 - DNA, 25 bp, Homo sapien
cttatagtagcctaacgcgcggttc

SEQ ID NO: 5920401 - DNA, 25 bp, Homo sapien
aaagatgcggacgctaaaactgccc

SEQ ID NO: 5920402 - DNA, 25 bp, Homo sapien
cattccgaccgtcgatcgaggaatt

SEQ ID NO: 5920403 - DNA, 25 bp, Homo sapien
gtaacaccggcgtaaactacgcttg

SEQ ID NO: 5920404 - DNA, 25 bp, Homo sapien
cgtatcattcgataccgggacttcc

SEQ ID NO: 5920405 - DNA, 25 bp, Homo sapien
tgtggaccgcctatagtactgtcgt

SEQ ID NO: 5920406 - DNA, 25 bp, Homo sapien
taacccatacggcgcaacggatcat

SEQ ID NO: 5920407 - DNA, 25 bp, Homo sapien
ggatcgcgtagatctatcgttctgc

SEQ ID NO: 5920408 - DNA, 25 bp, Homo sapien
tttcggtacgtcgctccgttgacta

SEQ ID NO: 5920409 - DNA, 25 bp, Homo sapien
agtctacgacgtactagggaacgag

SEQ ID NO: 5920410 - DNA, 25 bp, Homo sapien
ttagaatccgcgtgaacggctagag

SEQ ID NO: 5920411 - DNA, 25 bp, Homo sapien
atagatgcttaacgtacgccgggga

SEQ ID NO: 5920412 - DNA, 25 bp, Homo sapien
gcagcatcgcgccttacataaacac

SEQ ID NO: 5920413 - DNA, 25 bp, Homo sapien
cgattaatccgcgcgaatacggagt

SEQ ID NO: 5920414 - DNA, 25 bp, Homo sapien
gcttttgcgcgtgatacgttcttgc

SEQ ID NO: 5920415 - DNA, 25 bp, Homo sapien
ctggcacgtataccgtcgtcttgaa

SEQ ID NO: 5920416 - DNA, 25 bp, Homo sapien
agccattcggatagtagcggtaacg

SEQ ID NO: 5920417 - DNA, 25 bp, Homo sapien
ggttatcgatattaccgcgcgttcc

SEQ ID NO: 5920418 - DNA, 25 bp, Homo sapien
gctttctcgcgagatagtatggctg

SEQ ID NO: 5920419 - DNA, 25 bp, Homo sapien
ttgcgtttgtattcgggcgtaggca

SEQ ID NO: 5920420 - DNA, 25 bp, Homo sapien
ttcctacgcgatcacgagaagtcct

SEQ ID NO: 5920421 - DNA, 25 bp, Homo sapien
actgtaataaggcgttacgcgcggt

SEQ ID NO: 5920422 - DNA, 25 bp, Homo sapien
tctggaagcgtccgggtatccttta

SEQ ID NO: 5920423 - DNA, 25 bp, Homo sapien
atcgtccgtccgctatctagtcaga

SEQ ID NO: 5920424 - DNA, 25 bp, Homo sapien
gctcatggttcgtactacggaacgt

SEQ ID NO: 5920425 - DNA, 25 bp, Homo sapien
actagcgttcgaccaagcgtaaacg

SEQ ID NO: 5920426 - DNA, 25 bp, Homo sapien
cgtagcagtcgtgcgacgtaaatac

SEQ ID NO: 5920427 - DNA, 25 bp, Homo sapien
aacaagttaaggtcgcgacctcgag

SEQ ID NO: 5920428 - DNA, 25 bp, Homo sapien
taccctgtccggacgttaataggtc

SEQ ID NO: 5920429 - DNA, 25 bp, Homo sapien
tcttggtcgcgctaaacgtgtaacg

SEQ ID NO: 5920430 - DNA, 25 bp, Homo sapien
ggaaatcactagacgtcggcaagct

SEQ ID NO: 5920431 - DNA, 25 bp, Homo sapien
agtcctactatgcgtacggccaaag

SEQ ID NO: 5920432 - DNA, 25 bp, Homo sapien
cattgacgtaccgattcggcagaac

SEQ ID NO: 5920433 - DNA, 25 bp, Homo sapien
agtagataagtacgacgcggctctg

SEQ ID NO: 5920434 - DNA, 25 bp, Homo sapien
aaaggtttagcgcggacgagagtgt

SEQ ID NO: 5920435 - DNA, 25 bp, Homo sapien
gaccctggttaacgcgctaacaatc

SEQ ID NO: 5920436 - DNA, 25 bp, Homo sapien
ctaaccgacgggcattacgactttg

SEQ ID NO: 5920437 - DNA, 25 bp, Homo sapien
tgcggccgcgttcgatagaaacaaa

SEQ ID NO: 5920438 - DNA, 25 bp, Homo sapien
ccatacgtataacgcgtacgctcac

SEQ ID NO: 5920439 - DNA, 25 bp, Homo sapien
aactacgcgtccactatcgtgtgca

SEQ ID NO: 5920440 - DNA, 25 bp, Homo sapien
gcgcatcgtaatccgtcgagttact

SEQ ID NO: 5920441 - DNA, 25 bp, Homo sapien
tggaccagctaatctcgcggcataa

SEQ ID NO: 5920442 - DNA, 25 bp, Homo sapien
gctagcactcgtacgcagtaggttt

SEQ ID NO: 5920443 - DNA, 25 bp, Homo sapien
ctacccctaccgatcgtagatgcaa

SEQ ID NO: 5920444 - DNA, 25 bp, Homo sapien
cgataacgcgaccgtagatgactac

SEQ ID NO: 5920445 - DNA, 25 bp, Homo sapien
tcccctgttcccgtatacgcgatat

SEQ ID NO: 5920446 - DNA, 25 bp, Homo sapien
aataatgtagtacgcccgagagcgg

SEQ ID NO: 5920447 - DNA, 25 bp, Homo sapien
cgcgctatataccggatcgcttact

SEQ ID NO: 5920448 - DNA, 25 bp, Homo sapien
cgcctacgcgactaatactgtagga

SEQ ID NO: 5920449 - DNA, 25 bp, Homo sapien
aagctagtcgactacggaggcttga

SEQ ID NO: 5920450 - DNA, 25 bp, Homo sapien
ccacctgcgcgatcaactatctttc

SEQ ID NO: 5920451 - DNA, 25 bp, Homo sapien
accctaattcgcgatacggagaagg

SEQ ID NO: 5920452 - DNA, 25 bp, Homo sapien
aggaagcgaacgctacgcttcattg

SEQ ID NO: 5920453 - DNA, 25 bp, Homo sapien
cgctatattactagcgacgctggca

SEQ ID NO: 5920454 - DNA, 25 bp, Homo sapien
aaacaacggccgatacgaaactgcg

SEQ ID NO: 5920455 - DNA, 25 bp, Homo sapien
acgagacgcgagacgtgttttatgc

SEQ ID NO: 5920456 - DNA, 25 bp, Homo sapien
tgctcacgcgacgtatctaggattc

SEQ ID NO: 5920457 - DNA, 25 bp, Homo sapien
gtcacgctagagtacgtcgagtaag

SEQ ID NO: 5920458 - DNA, 25 bp, Homo sapien
aagccgctactataccgcgtcactt

SEQ ID NO: 5920459 - DNA, 25 bp, Homo sapien
aacgacgagcgtacgcattgaagac

SEQ ID NO: 5920460 - DNA, 25 bp, Homo sapien
taatggctcgacgggtagtgaacga

SEQ ID NO: 5920461 - DNA, 25 bp, Homo sapien
ggcagaccgttatcgcgaatcagtt

SEQ ID NO: 5920462 - DNA, 25 bp, Homo sapien
ttgctacctatatacgcgacgccac

SEQ ID NO: 5920463 - DNA, 25 bp, Homo sapien
cagatgtcgcgatacggtaggaaag

SEQ ID NO: 5920464 - DNA, 25 bp, Homo sapien
tccagtcaacggtcgttcgaatgac

SEQ ID NO: 5920465 - DNA, 25 bp, Homo sapien
aagtctatgcgcgattccagtggca

SEQ ID NO: 5920466 - DNA, 25 bp, Homo sapien
ttgcgctaccgtccgtagtctatgt

SEQ ID NO: 5920467 - DNA, 25 bp, Homo sapien
gtatgtctcgcgaatacgttcggtg

SEQ ID NO: 5920468 - DNA, 25 bp, Homo sapien
accgagctagcgcgatgaacacaat

SEQ ID NO: 5920469 - DNA, 25 bp, Homo sapien
ttcgtctacgcgcgctattcgttct

SEQ ID NO: 5920470 - DNA, 25 bp, Homo sapien
taagctcgcgcaatcatagaggtgc

SEQ ID NO: 5920471 - DNA, 25 bp, Homo sapien
tctatgcggtacatatcgccccaac

SEQ ID NO: 5920472 - DNA, 25 bp, Homo sapien
cctttccgcgctcgtactaatactc

SEQ ID NO: 5920473 - DNA, 25 bp, Homo sapien
gaaatcgacggtcgcaacaacgtag

SEQ ID NO: 5920474 - DNA, 25 bp, Homo sapien
gctcgtttaacgcgtatcgccattg

SEQ ID NO: 5920475 - DNA, 25 bp, Homo sapien
gaagcccgactagtctcgccatatt

SEQ ID NO: 5920476 - DNA, 25 bp, Homo sapien
tgggcaactatacgcgacgttacag

SEQ ID NO: 5920477 - DNA, 25 bp, Homo sapien
tgtttgtcgacgggcgatatcgtca

SEQ ID NO: 5920478 - DNA, 25 bp, Homo sapien
atcggtgacctcgtatacgcttacg

SEQ ID NO: 5920479 - DNA, 25 bp, Homo sapien
aaagcgccgaatacgcgaacaccta

SEQ ID NO: 5920480 - DNA, 25 bp, Homo sapien
agccactactcgaatcgcgtgagat

SEQ ID NO: 5920481 - DNA, 25 bp, Homo sapien
cccacccgcgcgatatatcctttat

SEQ ID NO: 5920482 - DNA, 25 bp, Homo sapien
gtcgcttcgaccggacttatttacc

SEQ ID NO: 5920483 - DNA, 25 bp, Homo sapien
gatctaattagcgcgatatgggcgg

SEQ ID NO: 5920484 - DNA, 25 bp, Homo sapien
aatctgggtatgtccgtcgtacagg

SEQ ID NO: 5920485 - DNA, 25 bp, Homo sapien
acgtatcggacgataacgggagtag

SEQ ID NO: 5920486 - DNA, 25 bp, Homo sapien
tacactgggttattacgcgaggacg

SEQ ID NO: 5920487 - DNA, 25 bp, Homo sapien
tccctaagcgtcgatacgagttacg

SEQ ID NO: 5920488 - DNA, 25 bp, Homo sapien
ttccggttccgcgcaagtatgaaca

SEQ ID NO: 5920489 - DNA, 25 bp, Homo sapien
aggtgtttaggcgaacccgatggat

SEQ ID NO: 5920490 - DNA, 25 bp, Homo sapien
agcggtcgtatatcgcgaatgtcag

SEQ ID NO: 5920491 - DNA, 25 bp, Homo sapien
ctagatacgttcggccgtatctcac

SEQ ID NO: 5920492 - DNA, 25 bp, Homo sapien
ttttaaatacgcgagccgagccacg

SEQ ID NO: 5920493 - DNA, 25 bp, Homo sapien
agcaattaacttcgcgtcgtacccg

SEQ ID NO: 5920494 - DNA, 25 bp, Homo sapien
cagatccgtacattcggtccttacc

SEQ ID NO: 5920495 - DNA, 25 bp, Homo sapien
gtacaacgcgcgatcaaaccgtgaa

SEQ ID NO: 5920496 - DNA, 25 bp, Homo sapien
ttctaccggtcggcatatctcctac

SEQ ID NO: 5920497 - DNA, 25 bp, Homo sapien
aatttctagcgcggtatcgccacca

SEQ ID NO: 5920498 - DNA, 25 bp, Homo sapien
aagactcgatacgaccctcatgtcc

SEQ ID NO: 5920499 - DNA, 25 bp, Homo sapien
tccatggtcgtccgatctatcgcta

SEQ ID NO: 5920500 - DNA, 25 bp, Homo sapien
ttatgggcgtacgagatacggctag

SEQ ID NO: 5920501 - DNA, 25 bp, Homo sapien
tttttgagcgtactatcggcccggt

SEQ ID NO: 5920502 - DNA, 25 bp, Homo sapien
ctgacccgtactataacggcttcac

SEQ ID NO: 5920503 - DNA, 25 bp, Homo sapien
cttattctaggcgaatcggcccaga

SEQ ID NO: 5920504 - DNA, 25 bp, Homo sapien
gtctgccgcgtaagacgaataaacc

SEQ ID NO: 5920505 - DNA, 25 bp, Homo sapien
tctatacgtcgcgatcactcaacgg

SEQ ID NO: 5920506 - DNA, 25 bp, Homo sapien
cctaccgccttacgcgatatatcga

SEQ ID NO: 5920507 - DNA, 25 bp, Homo sapien
aaagattaacgcgtcgtccgttggc

SEQ ID NO: 5920508 - DNA, 25 bp, Homo sapien
tgaattgcgggattcgctacacctc

SEQ ID NO: 5920509 - DNA, 25 bp, Homo sapien
tttcaagacggcgtctatcgtgacc

SEQ ID NO: 5920510 - DNA, 25 bp, Homo sapien
ttgccgttaatcgcgggactatagg

SEQ ID NO: 5920511 - DNA, 25 bp, Homo sapien
aaatgcggtgcgataccgaacgaac

SEQ ID NO: 5920512 - DNA, 25 bp, Homo sapien
atctgaatctcgcgatacggaggac

SEQ ID NO: 5920513 - DNA, 25 bp, Homo sapien
gtcaaacgacggagtcctacgttgt

SEQ ID NO: 5920514 - DNA, 25 bp, Homo sapien
tgtaaggcgtagcggaacaggcaat

SEQ ID NO: 5920515 - DNA, 25 bp, Homo sapien
taaacctactagcgcgacgccatct

SEQ ID NO: 5920516 - DNA, 25 bp, Homo sapien
ttacctgttgtcggcgtattccacg

SEQ ID NO: 5920517 - DNA, 25 bp, Homo sapien
gaccctattcgcgaacacgacttca

SEQ ID NO: 5920518 - DNA, 25 bp, Homo sapien
acaggacagtataacgcgccacctt

SEQ ID NO: 5920519 - DNA, 25 bp, Homo sapien
gaggccgacgcgacgtatatatatg

SEQ ID NO: 5920520 - DNA, 25 bp, Homo sapien
tatcgttattcgcgcgagtaccacg

SEQ ID NO: 5920521 - DNA, 25 bp, Homo sapien
gacagtcgtgtaacgcgatcaggaa

SEQ ID NO: 5920522 - DNA, 25 bp, Homo sapien
tcgcagcgcggtacgtaaaaattgg

SEQ ID NO: 5920523 - DNA, 25 bp, Homo sapien
tctcgacgtataccccggtcaaaac

SEQ ID NO: 5920524 - DNA, 25 bp, Homo sapien
tggcgtgtatcgggcgtatataacg

SEQ ID NO: 5920525 - DNA, 25 bp, Homo sapien
caatcggatcgctcgttagcagttc

SEQ ID NO: 5920526 - DNA, 25 bp, Homo sapien
caccagttaggcgacgtacctatag

SEQ ID NO: 5920527 - DNA, 25 bp, Homo sapien
caatttccgtttcggtagggccaca

SEQ ID NO: 5920528 - DNA, 25 bp, Homo sapien
ccgaactatcgcgacggataattgg

SEQ ID NO: 5920529 - DNA, 25 bp, Homo sapien
cttgatgatacgtctttcgagcgcg

SEQ ID NO: 5920530 - DNA, 25 bp, Homo sapien
tgaatctacgtctacgcgtcctagc

SEQ ID NO: 5920531 - DNA, 25 bp, Homo sapien
gctggttatacgggacccgttgaaa

SEQ ID NO: 5920532 - DNA, 25 bp, Homo sapien
taatctgaaatccgcgcgaagcctg

SEQ ID NO: 5920533 - DNA, 25 bp, Homo sapien
tatgcgtagcgcgtcatgagctaag

SEQ ID NO: 5920534 - DNA, 25 bp, Homo sapien
gaatgttccgctcgtatagctgagc

SEQ ID NO: 5920535 - DNA, 25 bp, Homo sapien
agggatcgcttagtaccgagcacta

SEQ ID NO: 5920536 - DNA, 25 bp, Homo sapien
attccctgtccggtacgaaccagat

SEQ ID NO: 5920537 - DNA, 25 bp, Homo sapien
acgaggtatagtacgcgaccgttga

SEQ ID NO: 5920538 - DNA, 25 bp, Homo sapien
taaggtacgcgtacggactctccaa

SEQ ID NO: 5920539 - DNA, 25 bp, Homo sapien
cctttagcgtacgggagttccagat

SEQ ID NO: 5920540 - DNA, 25 bp, Homo sapien
gacaaacgtccgcaacataagctgc

SEQ ID NO: 5920541 - DNA, 25 bp, Homo sapien
tatcggtcgtagcgagtactagagc

SEQ ID NO: 5920542 - DNA, 25 bp, Homo sapien
ctccacgcgttacgaggcttaaatc

SEQ ID NO: 5920543 - DNA, 25 bp, Homo sapien
ctgagggcgttcgttaacgtgaaga

SEQ ID NO: 5920544 - DNA, 25 bp, Homo sapien
ggctctgcttataacgcgatacctc

SEQ ID NO: 5920545 - DNA, 25 bp, Homo sapien
attgcgcgtacgtcgcacttacttg

SEQ ID NO: 5920546 - DNA, 25 bp, Homo sapien
tccgtaaggcgctatatcggaagtg

SEQ ID NO: 5920547 - DNA, 25 bp, Homo sapien
ccgacggatacgcgattacttcttc

SEQ ID NO: 5920548 - DNA, 25 bp, Homo sapien
gcactcgtacgatctagcgtttctc

SEQ ID NO: 5920549 - DNA, 25 bp, Homo sapien
cggatctctcgcatcgtacattacc

SEQ ID NO: 5920550 - DNA, 25 bp, Homo sapien
gatatccgcgattagacggggaact

SEQ ID NO: 5920551 - DNA, 25 bp, Homo sapien
actacgtaccattcggacgtcaagg

SEQ ID NO: 5920552 - DNA, 25 bp, Homo sapien
cttcttcgaccgtaaacgactgacg

SEQ ID NO: 5920553 - DNA, 25 bp, Homo sapien
ttcagtcgtccgccgattagtttgc

SEQ ID NO: 5920554 - DNA, 25 bp, Homo sapien
gtacaggtcagacgtacgcatcaac

SEQ ID NO: 5920555 - DNA, 25 bp, Homo sapien
accagaacgatacgcgagactgctt

SEQ ID NO: 5920556 - DNA, 25 bp, Homo sapien
gatcaagtcgtattacgacgccctc

SEQ ID NO: 5920557 - DNA, 25 bp, Homo sapien
gtgatttacggtacgcctaagcgac

SEQ ID NO: 5920558 - DNA, 25 bp, Homo sapien
caagcatacggttaggcgggaatga

SEQ ID NO: 5920559 - DNA, 25 bp, Homo sapien
tgtatgcgtcatacgcgctctctag

SEQ ID NO: 5920560 - DNA, 25 bp, Homo sapien
gaaggtcgtaccgattacctccgat

SEQ ID NO: 5920561 - DNA, 25 bp, Homo sapien
gcaaaaacggcgccctatatcggta

SEQ ID NO: 5920562 - DNA, 25 bp, Homo sapien
atgtggtccgcgtagcgtactatca

SEQ ID NO: 5920563 - DNA, 25 bp, Homo sapien
aatttcttacgctagcgcggatcgc

SEQ ID NO: 5920564 - DNA, 25 bp, Homo sapien
ttttcgactgcgtacgagtccgaga

SEQ ID NO: 5920565 - DNA, 25 bp, Homo sapien
atggcattcgagcgctacctgaaag

SEQ ID NO: 5920566 - DNA, 25 bp, Homo sapien
ttggacatcgcgctaacgttccctt

SEQ ID NO: 5920567 - DNA, 25 bp, Homo sapien
ggacatctatgcatacgcgtcctgt

SEQ ID NO: 5920568 - DNA, 25 bp, Homo sapien
tagagtctatcgagcgtcgagcttg

SEQ ID NO: 5920569 - DNA, 25 bp, Homo sapien
tctacagtaagtcgtcgcgacttcg

SEQ ID NO: 5920570 - DNA, 25 bp, Homo sapien
gccattcgaaagtatcgcggcgtta

SEQ ID NO: 5920571 - DNA, 25 bp, Homo sapien
tttgtgctatagcgcgtcgttcggt

SEQ ID NO: 5920572 - DNA, 25 bp, Homo sapien
aacatctaaacgcgtcggtaccgac

SEQ ID NO: 5920573 - DNA, 25 bp, Homo sapien
gagtgtcggctccgcaataaagttc

SEQ ID NO: 5920574 - DNA, 25 bp, Homo sapien
tccaagtggtcgcgacatacctctt

SEQ ID NO: 5920575 - DNA, 25 bp, Homo sapien
ccatggtttcgacacgctacttcga

SEQ ID NO: 5920576 - DNA, 25 bp, Homo sapien
gctctgtcgtacgatacctattcgc

SEQ ID NO: 5920577 - DNA, 25 bp, Homo sapien
tgcctctgatcgtacccggttacat

SEQ ID NO: 5920578 - DNA, 25 bp, Homo sapien
gcctagccccgacgtattacatatc

SEQ ID NO: 5920579 - DNA, 25 bp, Homo sapien
ccgggttcgcgtattacgaaatgct

SEQ ID NO: 5920580 - DNA, 25 bp, Homo sapien
gtagcggcggttatcgcgaaactaa

SEQ ID NO: 5920581 - DNA, 25 bp, Homo sapien
atgctctcggtcgaacgttggtact

SEQ ID NO: 5920582 - DNA, 25 bp, Homo sapien
gcatttacgttacgcgactggaagg

SEQ ID NO: 5920583 - DNA, 25 bp, Homo sapien
cgtagtgcttacggccgattttcac

SEQ ID NO: 5920584 - DNA, 25 bp, Homo sapien
gctacgtcgtgcgatacggtacatt

SEQ ID NO: 5920585 - DNA, 25 bp, Homo sapien
gagttgaacgctagacggatggtga

SEQ ID NO: 5920586 - DNA, 25 bp, Homo sapien
acaggcccgacgtgtaatgctctaa

SEQ ID NO: 5920587 - DNA, 25 bp, Homo sapien
cttttgcgctacggacctatgctct

SEQ ID NO: 5920588 - DNA, 25 bp, Homo sapien
tgaagcgcgtaacccgttagatagc

SEQ ID NO: 5920589 - DNA, 25 bp, Homo sapien
gattacttcgtctagcggcccctta

SEQ ID NO: 5920590 - DNA, 25 bp, Homo sapien
ctcccaagaccgcgtactacctaat

SEQ ID NO: 5920591 - DNA, 25 bp, Homo sapien
cgaagaagttcgcgtatcgcggtat

SEQ ID NO: 5920592 - DNA, 25 bp, Homo sapien
tctgaaaccgtcgcaccgaacgatt

SEQ ID NO: 5920593 - DNA, 25 bp, Homo sapien
acctaaatacgagcgtacggtcagg

SEQ ID NO: 5920594 - DNA, 25 bp, Homo sapien
tgcatgctcgcgacattagtcctga

SEQ ID NO: 5920595 - DNA, 25 bp, Homo sapien
cggttttagtccgcgcaatcctgaa

SEQ ID NO: 5920596 - DNA, 25 bp, Homo sapien
gtaagtgatacgtatcgcgatcgcc

SEQ ID NO: 5920597 - DNA, 25 bp, Homo sapien
tgggattcgcgtcgtactgaacgat

SEQ ID NO: 5920598 - DNA, 25 bp, Homo sapien
ggaacgacatacgacgcgattttcg

SEQ ID NO: 5920599 - DNA, 25 bp, Homo sapien
ggacttgtccgtagcggtaattacg

SEQ ID NO: 5920600 - DNA, 25 bp, Homo sapien
agtacgtttacgcggtccgatgtca

SEQ ID NO: 5920601 - DNA, 25 bp, Homo sapien
tgcataccgattaggcgaatggtgg

SEQ ID NO: 5920602 - DNA, 25 bp, Homo sapien
ttagctcgcgtagcggtatagacac

SEQ ID NO: 5920603 - DNA, 25 bp, Homo sapien
gcttttcggtcgacgtaaccagatg

SEQ ID NO: 5920604 - DNA, 25 bp, Homo sapien
gaggacgttagtcgcggtattacac

SEQ ID NO: 5920605 - DNA, 25 bp, Homo sapien
tttgtctcacgcgtcgataaccctc

SEQ ID NO: 5920606 - DNA, 25 bp, Homo sapien
tgctcggtcgcgcataagaagaaac

SEQ ID NO: 5920607 - DNA, 25 bp, Homo sapien
gagacaacgcgtttgtacgtaccgt

SEQ ID NO: 5920608 - DNA, 25 bp, Homo sapien
ctattacggcccggtataacctcac

SEQ ID NO: 5920609 - DNA, 25 bp, Homo sapien
aggactagttacgcgctcgtctgta

SEQ ID NO: 5920610 - DNA, 25 bp, Homo sapien
tcccactgtatcgcgctaccattca

SEQ ID NO: 5920611 - DNA, 25 bp, Homo sapien
atgcggtacgaccggacataagaca

SEQ ID NO: 5920612 - DNA, 25 bp, Homo sapien
aagcaagcaccgcgtatagccctta

SEQ ID NO: 5920613 - DNA, 25 bp, Homo sapien
cagcattcgcgacgaacacaagact

SEQ ID NO: 5920614 - DNA, 25 bp, Homo sapien
cttttcccgcgattaagccgtctga

SEQ ID NO: 5920615 - DNA, 25 bp, Homo sapien
tagtgccttcggtaccgatcacagt

SEQ ID NO: 5920616 - DNA, 25 bp, Homo sapien
ctgttatatcgcgtcggttggtgac

SEQ ID NO: 5920617 - DNA, 25 bp, Homo sapien
caggttcgtctaacgtagcgtacag

SEQ ID NO: 5920618 - DNA, 25 bp, Homo sapien
ccgagaacgatcgcactagtaatcg

SEQ ID NO: 5920619 - DNA, 25 bp, Homo sapien
agacaccgcgtaccgttatagcttc

SEQ ID NO: 5920620 - DNA, 25 bp, Homo sapien
caattaggacgtcgaatcgcgtgtc

SEQ ID NO: 5920621 - DNA, 25 bp, Homo sapien
gatgagactcgttgacgcgtaccat

SEQ ID NO: 5920622 - DNA, 25 bp, Homo sapien
gaatcacgtactacgctcgaaccag

SEQ ID NO: 5920623 - DNA, 25 bp, Homo sapien
tggtctcaatgcgcgacgtacgaat

SEQ ID NO: 5920624 - DNA, 25 bp, Homo sapien
aacgtgcaccgtacgctcgtgataa

SEQ ID NO: 5920625 - DNA, 25 bp, Homo sapien
caggcatttcgtacgcgtacgtact

SEQ ID NO: 5920626 - DNA, 25 bp, Homo sapien
ctatcgttaggacgcgacgaactag

SEQ ID NO: 5920627 - DNA, 25 bp, Homo sapien
tttacagatcgaccgaacgaggagg

SEQ ID NO: 5920628 - DNA, 25 bp, Homo sapien
acgcgacgtctagcgttacaacagt

SEQ ID NO: 5920629 - DNA, 25 bp, Homo sapien
tcacgaaacggatacgtactcgacc

SEQ ID NO: 5920630 - DNA, 25 bp, Homo sapien
tgagcgtgaaacgcgcggtatctta

SEQ ID NO: 5920631 - DNA, 25 bp, Homo sapien
gatgggcgtatcgttcgcaatgctt

SEQ ID NO: 5920632 - DNA, 25 bp, Homo sapien
aagctagctcgcgtctagcatgcaa

SEQ ID NO: 5920633 - DNA, 25 bp, Homo sapien
tcgatacgttagatccgcgtgagag

SEQ ID NO: 5920634 - DNA, 25 bp, Homo sapien
tgtacgcgtattatcggcgtgagag

SEQ ID NO: 5920635 - DNA, 25 bp, Homo sapien
catgctctcgaataagcggtaacgc

SEQ ID NO: 5920636 - DNA, 25 bp, Homo sapien
cctaacctcgctaccgatatccgat

SEQ ID NO: 5920637 - DNA, 25 bp, Homo sapien
tgtatcgcgaactatacgctcaggg

SEQ ID NO: 5920638 - DNA, 25 bp, Homo sapien
ccactgtaacgcgtcgtgctttatg

SEQ ID NO: 5920639 - DNA, 25 bp, Homo sapien
gctctctgttaccgaccgtatttgg

SEQ ID NO: 5920640 - DNA, 25 bp, Homo sapien
atcggtagtcattacgcggagccaa

SEQ ID NO: 5920641 - DNA, 25 bp, Homo sapien
cacggatcgacgcaacgatatcttg

SEQ ID NO: 5920642 - DNA, 25 bp, Homo sapien
gttttcatacccgggtcgtagtcag

SEQ ID NO: 5920643 - DNA, 25 bp, Homo sapien
agtccgtaacgtccgcgtaccaata

SEQ ID NO: 5920644 - DNA, 25 bp, Homo sapien
tggtgtccttaccgcaacggaacat

SEQ ID NO: 5920645 - DNA, 25 bp, Homo sapien
ttctttgtccgctacgcatccgatg

SEQ ID NO: 5920646 - DNA, 25 bp, Homo sapien
acagcttctatatccgcgaacaggc

SEQ ID NO: 5920647 - DNA, 25 bp, Homo sapien
aaaccctcgacgcgctatgtgatct

SEQ ID NO: 5920648 - DNA, 25 bp, Homo sapien
gcgtatacgggatacgtcgattgct

SEQ ID NO: 5920649 - DNA, 25 bp, Homo sapien
ttttggtgaccgcgatctaccggtt

SEQ ID NO: 5920650 - DNA, 25 bp, Homo sapien
ttggacacgcgatatggtgcgaaac

SEQ ID NO: 5920651 - DNA, 25 bp, Homo sapien
caagaccgatcgcttacgtaccaac

SEQ ID NO: 5920652 - DNA, 25 bp, Homo sapien
tcatcccgcggatataacggttggt

SEQ ID NO: 5920653 - DNA, 25 bp, Homo sapien
actgcctcgcgagttacgtaccata

SEQ ID NO: 5920654 - DNA, 25 bp, Homo sapien
ctctttcgtcggtccgtatcgatac

SEQ ID NO: 5920655 - DNA, 25 bp, Homo sapien
gcatatgccaccgatcgtagtatcc

SEQ ID NO: 5920656 - DNA, 25 bp, Homo sapien
gacctttgacggtatcgcgtcaatg

SEQ ID NO: 5920657 - DNA, 25 bp, Homo sapien
gctctttattcgcggcggtaagtac

SEQ ID NO: 5920658 - DNA, 25 bp, Homo sapien
gtcactatgacgagcgtacctagac

SEQ ID NO: 5920659 - DNA, 25 bp, Homo sapien
cagtgcatcgggcgttaactactca

SEQ ID NO: 5920660 - DNA, 25 bp, Homo sapien
tgagtacgacaatcgcgcttgagga

SEQ ID NO: 5920661 - DNA, 25 bp, Homo sapien
ttgtttcgacttccgtcgtcctctc

SEQ ID NO: 5920662 - DNA, 25 bp, Homo sapien
taaactacgctagttcgcgctgtgc

SEQ ID NO: 5920663 - DNA, 25 bp, Homo sapien
gtttgataggatcgtaccgttgggg

SEQ ID NO: 5920664 - DNA, 25 bp, Homo sapien
tattcttagtcgcgttccggtaccg

SEQ ID NO: 5920665 - DNA, 25 bp, Homo sapien
cgagttgttacgcactacggttggt

SEQ ID NO: 5920666 - DNA, 25 bp, Homo sapien
gacataccgcatactatcggctgtg

SEQ ID NO: 5920667 - DNA, 25 bp, Homo sapien
ggtcttgcgtactccggtatcagaa

SEQ ID NO: 5920668 - DNA, 25 bp, Homo sapien
tggattcttacgccgcgatcgaatc

SEQ ID NO: 5920669 - DNA, 25 bp, Homo sapien
acaatggccgggttaatcggaggaa

SEQ ID NO: 5920670 - DNA, 25 bp, Homo sapien
attacgcgaccggtacttaccagac

SEQ ID NO: 5920671 - DNA, 25 bp, Homo sapien
gtctaaccgttataagcggcacgtg

SEQ ID NO: 5920672 - DNA, 25 bp, Homo sapien
cagttccgtccgtacgcttttccta

SEQ ID NO: 5920673 - DNA, 25 bp, Homo sapien
tagtgggaccgatctagcgaccata

SEQ ID NO: 5920674 - DNA, 25 bp, Homo sapien
ggtttatagacgtccgcgaccgata

SEQ ID NO: 5920675 - DNA, 25 bp, Homo sapien
aataactcggcgcgtactatcgcgt

SEQ ID NO: 5920676 - DNA, 25 bp, Homo sapien
tcaactcgctgttatacggcacgac

SEQ ID NO: 5920677 - DNA, 25 bp, Homo sapien
tctttcccgcctacgttatccagtg

SEQ ID NO: 5920678 - DNA, 25 bp, Homo sapien
agtggagtacgctatccggatcttg

SEQ ID NO: 5920679 - DNA, 25 bp, Homo sapien
ttcgagtccgtatcgacgcattgtg

SEQ ID NO: 5920680 - DNA, 25 bp, Homo sapien
taggaacgactagcgatacgagtgc

SEQ ID NO: 5920681 - DNA, 25 bp, Homo sapien
tatgaagttcgtacgtcggctggac

SEQ ID NO: 5920682 - DNA, 25 bp, Homo sapien
gaatcgcgtagtgcgacatatcctg

SEQ ID NO: 5920683 - DNA, 25 bp, Homo sapien
ctgaactacgccgctaacctacgta

SEQ ID NO: 5920684 - DNA, 25 bp, Homo sapien
tcatgacgcgacctatacagcgatg

SEQ ID NO: 5920685 - DNA, 25 bp, Homo sapien
gaatgagcgcgacatatagcgtacc

SEQ ID NO: 5920686 - DNA, 25 bp, Homo sapien
cacacagctacgcggtttaagccaa

SEQ ID NO: 5920687 - DNA, 25 bp, Homo sapien
acgagttatatcgtcgcggttcgga

SEQ ID NO: 5920688 - DNA, 25 bp, Homo sapien
catcctcgtccggatatggtgttgt

SEQ ID NO: 5920689 - DNA, 25 bp, Homo sapien
aacgtcttacgccccggtaacatga

SEQ ID NO: 5920690 - DNA, 25 bp, Homo sapien
gcaacatatgcgcgtacggagagta

SEQ ID NO: 5920691 - DNA, 25 bp, Homo sapien
aatcgggtagcgcggtctataacac

SEQ ID NO: 5920692 - DNA, 25 bp, Homo sapien
actaagccgtgtcgaactacgctag

SEQ ID NO: 5920693 - DNA, 25 bp, Homo sapien
gcatagcgatataaccgggctgact

SEQ ID NO: 5920694 - DNA, 25 bp, Homo sapien
aggaacccatcgcgtcgtaagttag

SEQ ID NO: 5920695 - DNA, 25 bp, Homo sapien
gtgttattactcgcgaacggaacgg

SEQ ID NO: 5920696 - DNA, 25 bp, Homo sapien
ttgttactgatacgtcgcggggacg

SEQ ID NO: 5920697 - DNA, 25 bp, Homo sapien
tgcccaatacgtacgcgtcgcatga

SEQ ID NO: 5920698 - DNA, 25 bp, Homo sapien
tgtggatcgatacgcggactcccat

SEQ ID NO: 5920699 - DNA, 25 bp, Homo sapien
taagtctaatacgcggtcccgaccg

SEQ ID NO: 5920700 - DNA, 25 bp, Homo sapien
gttgatgtcgtatcgcgatcaccgg

SEQ ID NO: 5920701 - DNA, 25 bp, Homo sapien
acgcaaaccgtcacgcgtagctcta

SEQ ID NO: 5920702 - DNA, 25 bp, Homo sapien
tggagaatccaacgcgcgtagatgc

SEQ ID NO: 5920703 - DNA, 25 bp, Homo sapien
gatatgcatgtcgggttcgaggtgc

SEQ ID NO: 5920704 - DNA, 25 bp, Homo sapien
tcggctcgacgttaacgcacttgtg

SEQ ID NO: 5920705 - DNA, 25 bp, Homo sapien
ctgtctagactcgacgtcgggatgt

SEQ ID NO: 5920706 - DNA, 25 bp, Homo sapien
gttttcatccgccgactatcggagg

SEQ ID NO: 5920707 - DNA, 25 bp, Homo sapien
gcatcaactcggtacgtcgcagaag

SEQ ID NO: 5920708 - DNA, 25 bp, Homo sapien
aggccaaccgcgcgttagatgaaag

SEQ ID NO: 5920709 - DNA, 25 bp, Homo sapien
gtgggacgcaagcggatagttacag

SEQ ID NO: 5920710 - DNA, 25 bp, Homo sapien
ttgaagttcgcgcggctagtcagtc

SEQ ID NO: 5920711 - DNA, 25 bp, Homo sapien
acgacagcgtatcggatcactcgtg

SEQ ID NO: 5920712 - DNA, 25 bp, Homo sapien
accgaaacgcgttcggataaccagc

SEQ ID NO: 5920713 - DNA, 25 bp, Homo sapien
aatcgccccgtcggattcgttgtac

SEQ ID NO: 5920714 - DNA, 25 bp, Homo sapien
accaccatacgcaccggtaatcagc

SEQ ID NO: 5920715 - DNA, 25 bp, Homo sapien
ctatggtcgcgctcatacggcactt

SEQ ID NO: 5920716 - DNA, 25 bp, Homo sapien
ggggagtatgacggaacggcatgtt

SEQ ID NO: 5920717 - DNA, 25 bp, Homo sapien
tagtcagcaatcgcgcctactaccc

SEQ ID NO: 5920718 - DNA, 25 bp, Homo sapien
atatctcgtacgagcgttctgcccg

SEQ ID NO: 5920719 - DNA, 25 bp, Homo sapien
cttttagcgacgcgttgatggtccc

SEQ ID NO: 5920720 - DNA, 25 bp, Homo sapien
cacgcaaacctatcgccgatggtca

SEQ ID NO: 5920721 - DNA, 25 bp, Homo sapien
ttgtgcgtacgccgctatacatgcg

SEQ ID NO: 5920722 - DNA, 25 bp, Homo sapien
cgtgtcgatcggcgctttaacttgc

SEQ ID NO: 5920723 - DNA, 25 bp, Homo sapien
gaccaggcgcacgttactacggtat

SEQ ID NO: 5920724 - DNA, 25 bp, Homo sapien
tgttggacttaccgaggcgctcatg

SEQ ID NO: 5920725 - DNA, 25 bp, Homo sapien
tgtgttgcgcgaaacgacttccgct

SEQ ID NO: 5920726 - DNA, 25 bp, Homo sapien
ctcccgatacggtcgcgtatcattc

SEQ ID NO: 5920727 - DNA, 25 bp, Homo sapien
agcgcagtcgattacgcgtactacc

SEQ ID NO: 5920728 - DNA, 25 bp, Homo sapien
aggcaccgcgacccgtatgattact

SEQ ID NO: 5920729 - DNA, 25 bp, Homo sapien
cttccaccgtcgcattagtcgccta

SEQ ID NO: 5920730 - DNA, 25 bp, Homo sapien
gagtacattacccccgcgtacgcta

SEQ ID NO: 5920731 - DNA, 25 bp, Homo sapien
tctgatgtaacgtagcgcggcctca

SEQ ID NO: 5920732 - DNA, 25 bp, Homo sapien
gtcatgcgaagtacgagcgggttca

SEQ ID NO: 5920733 - DNA, 25 bp, Homo sapien
gagtggtagtcgccgtacgattgca

SEQ ID NO: 5920734 - DNA, 25 bp, Homo sapien
ggctaaggaccgatatgcgtggcaa

SEQ ID NO: 5920735 - DNA, 25 bp, Homo sapien
accgattcgactacgtgcgttcagg

SEQ ID NO: 5920736 - DNA, 25 bp, Homo sapien
gagacccgttgaaccgacctgtaga

SEQ ID NO: 5920737 - DNA, 25 bp, Homo sapien
caggcacggcgactagctactcaaa

SEQ ID NO: 5920738 - DNA, 25 bp, Homo sapien
ggaggccgactactcgaacctcaat

SEQ ID NO: 5920739 - DNA, 25 bp, Homo sapien
gcaggctcggcgtaacactgattca

SEQ ID NO: 5920740 - DNA, 25 bp, Homo sapien
atccagcgatcgggtaatccgtgag

SEQ ID NO: 5920741 - DNA, 25 bp, Homo sapien
tccggaacacgccgtatcgaactca

SEQ ID NO: 5920742 - DNA, 25 bp, Homo sapien
ggcaaggcgtacgacaattccaggt

SEQ ID NO: 5920743 - DNA, 25 bp, Homo sapien
aacgtgtccgcgctcggtatctcta

SEQ ID NO: 5920744 - DNA, 25 bp, Homo sapien
acaccgcgcgaaatagcgtccatct

SEQ ID NO: 5920745 - DNA, 25 bp, Homo sapien
aggttcactacgcgattcggagacc

SEQ ID NO: 5920746 - DNA, 25 bp, Homo sapien
gcacggacccgcgagtaatagcttt

SEQ ID NO: 5920747 - DNA, 25 bp, Homo sapien
gatcgaacctatccgacggatacgg

SEQ ID NO: 5920748 - DNA, 25 bp, Homo sapien
tgtccacgtccgcacgaatcaaacg

SEQ ID NO: 5920749 - DNA, 25 bp, Homo sapien
aggtgttaccgagtcgaccctgctt

SEQ ID NO: 5920750 - DNA, 25 bp, Homo sapien
cttctgccgttcgtttacggcttgg

SEQ ID NO: 5920751 - DNA, 25 bp, Homo sapien
tggtcgcgtataccgtcgtaggtca

SEQ ID NO: 5920752 - DNA, 25 bp, Homo sapien
cgttcgtgcgtttagaccgtgctga

SEQ ID NO: 5920753 - DNA, 25 bp, Homo sapien
cgatagactaccgcgttcggtgtgt

SEQ ID NO: 5920754 - DNA, 25 bp, Homo sapien
acgccttttggactacgcgcacctt

SEQ ID NO: 5920755 - DNA, 25 bp, Homo sapien
ggaccctatcgcgttggcgagaata

SEQ ID NO: 5920756 - DNA, 25 bp, Homo sapien
gtgccttgtatcgcgcgtaagcatc

SEQ ID NO: 5920757 - DNA, 25 bp, Homo sapien
ccttgtcgacgctttactacccctc

SEQ ID NO: 5920758 - DNA, 25 bp, Homo sapien
cgagagtcgtgcgaacgtaacatcc

SEQ ID NO: 5920759 - DNA, 25 bp, Homo sapien
gactacaagcgttacgtccctcgca

SEQ ID NO: 5920760 - DNA, 25 bp, Homo sapien
gaacctccgaacgacctagcgatct

SEQ ID NO: 5920761 - DNA, 25 bp, Homo sapien
ccactacccgtactaacgagcgatc

SEQ ID NO: 5920762 - DNA, 25 bp, Homo sapien
cataccagttcgcgtatcgtggacc

SEQ ID NO: 5920763 - DNA, 25 bp, Homo sapien
agtttccgcacgaacggtctctacg

SEQ ID NO: 5920764 - DNA, 25 bp, Homo sapien
atgctgcgattagtacccgcggagt

SEQ ID NO: 5920765 - DNA, 25 bp, Homo sapien
tctctgtcgtactacggggctcttg

SEQ ID NO: 5920766 - DNA, 25 bp, Homo sapien
tttgcaagtacgcgtcgcgctgttc

SEQ ID NO: 5920767 - DNA, 25 bp, Homo sapien
cccccgtagcgtcgtacgaacatta

SEQ ID NO: 5920768 - DNA, 25 bp, Homo sapien
ctcaccatagtcgtaccggcttgtg

SEQ ID NO: 5920769 - DNA, 25 bp, Homo sapien
ggcctccgaccactcgtagttcata

SEQ ID NO: 5920770 - DNA, 25 bp, Homo sapien
attctatggcgcgccgttatcgtcc

SEQ ID NO: 5920771 - DNA, 25 bp, Homo sapien
ttccgaatagcccgcgcaatggaag

SEQ ID NO: 5920772 - DNA, 25 bp, Homo sapien
cagacgttagacccgacgtcgtcaa

SEQ ID NO: 5920773 - DNA, 25 bp, Homo sapien
atcgcatcgacgtatcgcgagcgtt

SEQ ID NO: 5920774 - DNA, 25 bp, Homo sapien
ttcgagccgcgaagtatagaagcgg

SEQ ID NO: 5920775 - DNA, 25 bp, Homo sapien
tggtcattactcgcggacgacgcta

SEQ ID NO: 5920776 - DNA, 25 bp, Homo sapien
gcaggtcgcgactcgagtatatctc

SEQ ID NO: 5920777 - DNA, 25 bp, Homo sapien
tcccaagttaccgcccgtagctctt

SEQ ID NO: 5920778 - DNA, 25 bp, Homo sapien
gcctagaacgtatcgacgcaagacc

SEQ ID NO: 5920779 - DNA, 25 bp, Homo sapien
actggtacgtagcgtgacctcgttg

SEQ ID NO: 5920780 - DNA, 25 bp, Homo sapien
gccgtttgatcgggacgtctgttac

SEQ ID NO: 5920781 - DNA, 25 bp, Homo sapien
caggagtcagttacgcgcgtcatac

SEQ ID NO: 5920782 - DNA, 25 bp, Homo sapien
gtaatccgtataccggcaagtgccc

SEQ ID NO: 5920783 - DNA, 25 bp, Homo sapien
tcgcaccgctatacgctcggtctaa

SEQ ID NO: 5920784 - DNA, 25 bp, Homo sapien
cgaggggtacggcgctagttcatta

SEQ ID NO: 5920785 - DNA, 25 bp, Homo sapien
acactcacggtctagcgactctagg

SEQ ID NO: 5920786 - DNA, 25 bp, Homo sapien
gcttacgttcgcgataacgcgttgc

SEQ ID NO: 5920787 - DNA, 25 bp, Homo sapien
gcccatgtactgctacgcgtatcag

SEQ ID NO: 5920788 - DNA, 25 bp, Homo sapien
taggcccgtcacgcgtagaaacaac

SEQ ID NO: 5920789 - DNA, 25 bp, Homo sapien
taaccctattcgagacgcgacccca

SEQ ID NO: 5920790 - DNA, 25 bp, Homo sapien
tctctcttagtcgtacgctgtgggg

SEQ ID NO: 5920791 - DNA, 25 bp, Homo sapien
gtgtgatagcgcgagctatctggtg

SEQ ID NO: 5920792 - DNA, 25 bp, Homo sapien
gtttgccgcgctagtataccgagca

SEQ ID NO: 5920793 - DNA, 25 bp, Homo sapien
agcagtatactatgcgccggaccca

SEQ ID NO: 5920794 - DNA, 25 bp, Homo sapien
atgccaagctatcgccggtagtctc

SEQ ID NO: 5920795 - DNA, 25 bp, Homo sapien
gtttcaaatcgtcggacgcgtacgg

SEQ ID NO: 5920796 - DNA, 25 bp, Homo sapien
tgatcacttaggtcgagcggaaccg

SEQ ID NO: 5920797 - DNA, 25 bp, Homo sapien
gttagacgcgcgtattaggctccct

SEQ ID NO: 5920798 - DNA, 25 bp, Homo sapien
ccgtattcgacgtattgtcaccggg

SEQ ID NO: 5920799 - DNA, 25 bp, Homo sapien
ctcatttacgacgcggtatacgggg

SEQ ID NO: 5920800 - DNA, 25 bp, Homo sapien
ttgtaatacggacccgctaggtcgg

SEQ ID NO: 5920801 - DNA, 25 bp, Homo sapien
tacatgccggtcgtttaggtgctgg

SEQ ID NO: 5920802 - DNA, 25 bp, Homo sapien
gtcacttaccgtcgaacgatggctg

SEQ ID NO: 5920803 - DNA, 25 bp, Homo sapien
cttaacccgtattgcgccgagctga

SEQ ID NO: 5920804 - DNA, 25 bp, Homo sapien
ccggtgcgcgcgaactatatcacaa

SEQ ID NO: 5920805 - DNA, 25 bp, Homo sapien
gtccctatacgcggattagcctcgt

SEQ ID NO: 5920806 - DNA, 25 bp, Homo sapien
ctgttcagcggtcgataactctggg

SEQ ID NO: 5920807 - DNA, 25 bp, Homo sapien
cgttgtccattcgcggacgctaagt

SEQ ID NO: 5920808 - DNA, 25 bp, Homo sapien
ggttccgtccgacacgttagatcgt

SEQ ID NO: 5920809 - DNA, 25 bp, Homo sapien
cgttgacgcggtttcgaacgctgat

SEQ ID NO: 5920810 - DNA, 25 bp, Homo sapien
gttcgatagtccgcggtaaaggagc

SEQ ID NO: 5920811 - DNA, 25 bp, Homo sapien
gtgtggtaacaatccggcgcgcaaa

SEQ ID NO: 5920812 - DNA, 25 bp, Homo sapien
ggagtcgcgatcggacctagaaaac

SEQ ID NO: 5920813 - DNA, 25 bp, Homo sapien
ggttcctagtccgtgcgtaaccatc

SEQ ID NO: 5920814 - DNA, 25 bp, Homo sapien
ccttcgacgttagacgacctgtgca

SEQ ID NO: 5920815 - DNA, 25 bp, Homo sapien
tgtgctaaaccgtccgcgcatagtc

SEQ ID NO: 5920816 - DNA, 25 bp, Homo sapien
gtgcctaccgtcgcataagcatggt

SEQ ID NO: 5920817 - DNA, 25 bp, Homo sapien
tagcaacgtacaacccgtcaccgtg

SEQ ID NO: 5920818 - DNA, 25 bp, Homo sapien
tggatcgtatagcgcgacgagaagc

SEQ ID NO: 5920819 - DNA, 25 bp, Homo sapien
cacaccacgccggttagtccttatg

SEQ ID NO: 5920820 - DNA, 25 bp, Homo sapien
ggatcagtcgtataacgcggcctac

SEQ ID NO: 5920821 - DNA, 25 bp, Homo sapien
ctgctcccgtactatcgtgtgaacg

SEQ ID NO: 5920822 - DNA, 25 bp, Homo sapien
tctgtttatgtccgccgagtcgcac

SEQ ID NO: 5920823 - DNA, 25 bp, Homo sapien
attagttacccgcgtcgacctccga

SEQ ID NO: 5920824 - DNA, 25 bp, Homo sapien
aaccatacgccacgagtacccgttc

SEQ ID NO: 5920825 - DNA, 25 bp, Homo sapien
cccttcacgtaaagtcgcggcaaac

SEQ ID NO: 5920826 - DNA, 25 bp, Homo sapien
agcgtgtattatcgcgcccccaagt

SEQ ID NO: 5920827 - DNA, 25 bp, Homo sapien
tctaacggtccgccgtaatctaccg

SEQ ID NO: 5920828 - DNA, 25 bp, Homo sapien
cattggacgcgaaccgtagttacgg

SEQ ID NO: 5920829 - DNA, 25 bp, Homo sapien
tgcacacggcgtataaccgtggatg

SEQ ID NO: 5920830 - DNA, 25 bp, Homo sapien
acgccttacaacgcgtctcacttgg

SEQ ID NO: 5920831 - DNA, 25 bp, Homo sapien
cctatgcctagtacgtcgaccccaa

SEQ ID NO: 5920832 - DNA, 25 bp, Homo sapien
acatcatcttacgagcggcagaggc

SEQ ID NO: 5920833 - DNA, 25 bp, Homo sapien
aaagaggcggttcgcgttagcgtct

SEQ ID NO: 5920834 - DNA, 25 bp, Homo sapien
cgagactcgccctatcggatcaaac

SEQ ID NO: 5920835 - DNA, 25 bp, Homo sapien
gtcgtgatagcgtcgcgcacatatg

SEQ ID NO: 5920836 - DNA, 25 bp, Homo sapien
tcccggcgatagcgcatcttagtga

SEQ ID NO: 5920837 - DNA, 25 bp, Homo sapien
gctcatgcgtatacccgacctagtc

SEQ ID NO: 5920838 - DNA, 25 bp, Homo sapien
agagtacgtagatcgcgttgcccca

SEQ ID NO: 5920839 - DNA, 25 bp, Homo sapien
actggtcttatacgcgacgggctga

SEQ ID NO: 5920840 - DNA, 25 bp, Homo sapien
ttgcgtgacgcgcgctataaacctc

SEQ ID NO: 5920841 - DNA, 25 bp, Homo sapien
actgctcgtagcgctacgaccaagt

SEQ ID NO: 5920842 - DNA, 25 bp, Homo sapien
aggccaaggtcgacgtacgcttatg

SEQ ID NO: 5920843 - DNA, 25 bp, Homo sapien
ctgtgtccgcataagtccgatgcct

SEQ ID NO: 5920844 - DNA, 25 bp, Homo sapien
ccaatcacggattaccgggtgtctc

SEQ ID NO: 5920845 - DNA, 25 bp, Homo sapien
accacaggttcgctcgatagcccta

SEQ ID NO: 5920846 - DNA, 25 bp, Homo sapien
tcgtgggatactgcgtacgatggag

SEQ ID NO: 5920847 - DNA, 25 bp, Homo sapien
gtgcgtatagcgccattcgtgtgga

SEQ ID NO: 5920848 - DNA, 25 bp, Homo sapien
ttggcaccgcgctaagtagaacctc

SEQ ID NO: 5920849 - DNA, 25 bp, Homo sapien
ttcgtctaacgcggggtatgtcgct

SEQ ID NO: 5920850 - DNA, 25 bp, Homo sapien
cgtggtcgtattactcgcgtgcgtt

SEQ ID NO: 5920851 - DNA, 25 bp, Homo sapien
tgggaacgaagttacgcggtcacga

SEQ ID NO: 5920852 - DNA, 25 bp, Homo sapien
cggcaacgcgatagtcgttcttgac

SEQ ID NO: 5920853 - DNA, 25 bp, Homo sapien
tccagttcgtagcgtcgcgttgaca

SEQ ID NO: 5920854 - DNA, 25 bp, Homo sapien
gagtgaattacggcggaccagctga

SEQ ID NO: 5920855 - DNA, 25 bp, Homo sapien
agtcactcgtcgaccggtaaacctc

SEQ ID NO: 5920856 - DNA, 25 bp, Homo sapien
tctagctccgacgtacctaagtcgc

SEQ ID NO: 5920857 - DNA, 25 bp, Homo sapien
tcaggccgacccgacgatttccaat

SEQ ID NO: 5920858 - DNA, 25 bp, Homo sapien
ccctacgtctcgtacgcgaatttgc

SEQ ID NO: 5920859 - DNA, 25 bp, Homo sapien
acaatgcttatgcggaccgtcaccc

SEQ ID NO: 5920860 - DNA, 25 bp, Homo sapien
cccatacgtaggatggccgtgacat

SEQ ID NO: 5920861 - DNA, 25 bp, Homo sapien
gcgttgcgcttacgcgaaaaacacc

SEQ ID NO: 5920862 - DNA, 25 bp, Homo sapien
gcattccgcgtactagtggccacta

SEQ ID NO: 5920863 - DNA, 25 bp, Homo sapien
atcggctaactacgcgacgtcccta

SEQ ID NO: 5920864 - DNA, 25 bp, Homo sapien
tgaggtgactacgcgttcgcatgca

SEQ ID NO: 5920865 - DNA, 25 bp, Homo sapien
aaaaggtcgggacgcaacgtgtgag

SEQ ID NO: 5920866 - DNA, 25 bp, Homo sapien
tagagggttaacgcgcgtaggtgca

SEQ ID NO: 5920867 - DNA, 25 bp, Homo sapien
cagagtatcgcgctatccagcagca

SEQ ID NO: 5920868 - DNA, 25 bp, Homo sapien
ggggtcatcgtgcggtaagatgatg

SEQ ID NO: 5920869 - DNA, 25 bp, Homo sapien
gcacttgaattcgcgcgattgaggc

SEQ ID NO: 5920870 - DNA, 25 bp, Homo sapien
acgcagatcggcgtatcgctatgga

SEQ ID NO: 5920871 - DNA, 25 bp, Homo sapien
ggagtccactagtcgcgacatatgg

SEQ ID NO: 5920872 - DNA, 25 bp, Homo sapien
tgaggacgatacggctggtcgattg

SEQ ID NO: 5920873 - DNA, 25 bp, Homo sapien
aacccgcgcgtccgactaagatatc

SEQ ID NO: 5920874 - DNA, 25 bp, Homo sapien
tgaactcgtactaacgccgagaccg

SEQ ID NO: 5920875 - DNA, 25 bp, Homo sapien
ctcgggcgtgttcggtacctttaca

SEQ ID NO: 5920876 - DNA, 25 bp, Homo sapien
ccctaggttagctcgcgtacaacgt

SEQ ID NO: 5920877 - DNA, 25 bp, Homo sapien
ctaatctcgtaacgtgctcacggcc

SEQ ID NO: 5920878 - DNA, 25 bp, Homo sapien
agggcaatatcgcgacgggaaagga

SEQ ID NO: 5920879 - DNA, 25 bp, Homo sapien
gacctgcggtacgagttagcatacg

SEQ ID NO: 5920880 - DNA, 25 bp, Homo sapien
taacccatcgcgcggtattagccga

SEQ ID NO: 5920881 - DNA, 25 bp, Homo sapien
tgtactgggttatccgcgtgatccc

SEQ ID NO: 5920882 - DNA, 25 bp, Homo sapien
agggttacgcccgttattgacgcac

SEQ ID NO: 5920883 - DNA, 25 bp, Homo sapien
ccgtaacgggccgaataacagtcca

SEQ ID NO: 5920884 - DNA, 25 bp, Homo sapien
gtggttctacaggtcgcgagagaag

SEQ ID NO: 5920885 - DNA, 25 bp, Homo sapien
tggctgggtcgatcgtacaggcaaa

SEQ ID NO: 5920886 - DNA, 25 bp, Homo sapien
tgagctcgcgggatagaaccgtttg

SEQ ID NO: 5920887 - DNA, 25 bp, Homo sapien
gcatataggtatgcgtcgaccggac

SEQ ID NO: 5920888 - DNA, 25 bp, Homo sapien
gcgagaggcgtatcgcgttccataa

SEQ ID NO: 5920889 - DNA, 25 bp, Homo sapien
caagcatcgtatgcgtccggtggtt

SEQ ID NO: 5920890 - DNA, 25 bp, Homo sapien
gttgaccggtatactacgcctgggt

SEQ ID NO: 5920891 - DNA, 25 bp, Homo sapien
cgtatggttgcgactacgtcgggaa

SEQ ID NO: 5920892 - DNA, 25 bp, Homo sapien
gagacgcgcgagcatagacagattc

SEQ ID NO: 5920893 - DNA, 25 bp, Homo sapien
cgttgactacgtcgcgtatgcacca

SEQ ID NO: 5920894 - DNA, 25 bp, Homo sapien
acaggcgttaccgcgcgtaatgttc

SEQ ID NO: 5920895 - DNA, 25 bp, Homo sapien
gagttatggtgcggcgttacgcaag

SEQ ID NO: 5920896 - DNA, 25 bp, Homo sapien
catatgctatcggcgctaaccgctc

SEQ ID NO: 5920897 - DNA, 25 bp, Homo sapien
ctcatgcgcggtatacgactagcac

SEQ ID NO: 5920898 - DNA, 25 bp, Homo sapien
aatacccgccgttcgactagctgca

SEQ ID NO: 5920899 - DNA, 25 bp, Homo sapien
ccctaataggtacgcgggaagctca

SEQ ID NO: 5920900 - DNA, 25 bp, Homo sapien
aatcgatacgctcgtacggagccac

SEQ ID NO: 5920901 - DNA, 25 bp, Homo sapien
tgggtaggtcgcgtataacgtctgc

SEQ ID NO: 5920902 - DNA, 25 bp, Homo sapien
ccccttgttcgtacgcgattgaggt

SEQ ID NO: 5920903 - DNA, 25 bp, Homo sapien
ccacgatactaacgacgcgacccta

SEQ ID NO: 5920904 - DNA, 25 bp, Homo sapien
ccattacacctcgcgtatcgttccg

SEQ ID NO: 5920905 - DNA, 25 bp, Homo sapien
cgtctacacccgttccgtacgtaca

SEQ ID NO: 5920906 - DNA, 25 bp, Homo sapien
gcgctgattagtcgcgcgatgaagt

SEQ ID NO: 5920907 - DNA, 25 bp, Homo sapien
agaggtcggtacgatgcgtagtgtg

SEQ ID NO: 5920908 - DNA, 25 bp, Homo sapien
gtggtacgcgatactcacgtgtgga

SEQ ID NO: 5920909 - DNA, 25 bp, Homo sapien
cgaaagtagcgaccgtacgaagcag

SEQ ID NO: 5920910 - DNA, 25 bp, Homo sapien
tctgttttacgggcgcgcttttccg

SEQ ID NO: 5920911 - DNA, 25 bp, Homo sapien
atacgccttatgacggtcgtggacg

SEQ ID NO: 5920912 - DNA, 25 bp, Homo sapien
ccaaggagatcgtatgtcgggttcc

SEQ ID NO: 5920913 - DNA, 25 bp, Homo sapien
gatcgagtcgcgatagacgcttcct

SEQ ID NO: 5920914 - DNA, 25 bp, Homo sapien
gtcaggcgcacgttcgaaacgcaat

SEQ ID NO: 5920915 - DNA, 25 bp, Homo sapien
cggcaacgatcgacgtacgaatgga

SEQ ID NO: 5920916 - DNA, 25 bp, Homo sapien
gccatttcgctagttgcgcagcaag

SEQ ID NO: 5920917 - DNA, 25 bp, Homo sapien
agttgatatcgctagtgcggggctg

SEQ ID NO: 5920918 - DNA, 25 bp, Homo sapien
tatgcccgcaacatagccgatgacc

SEQ ID NO: 5920919 - DNA, 25 bp, Homo sapien
aacgatgtctatgcgcgacatcggc

SEQ ID NO: 5920920 - DNA, 25 bp, Homo sapien
ggacatcgacgtacatgcggaccta

SEQ ID NO: 5920921 - DNA, 25 bp, Homo sapien
cagttccgcgtccgatacattcgca

SEQ ID NO: 5920922 - DNA, 25 bp, Homo sapien
gtgactccggtaggcgttagctgta

SEQ ID NO: 5920923 - DNA, 25 bp, Homo sapien
gcaccactactcgcgtaacaggtgt

SEQ ID NO: 5920924 - DNA, 25 bp, Homo sapien
ttggggcgtaaccgacgctcattgt

SEQ ID NO: 5920925 - DNA, 25 bp, Homo sapien
aagatatccgcgaactaccgtcggc

SEQ ID NO: 5920926 - DNA, 25 bp, Homo sapien
gatgcgccgagcgtcgtaaatgtag

SEQ ID NO: 5920927 - DNA, 25 bp, Homo sapien
gtaggacatgttacgagcgacgtgc

SEQ ID NO: 5920928 - DNA, 25 bp, Homo sapien
ctaccggactagttccgcggaatag

SEQ ID NO: 5920929 - DNA, 25 bp, Homo sapien
ttgctgtacgcgcgtagtccctaga

SEQ ID NO: 5920930 - DNA, 25 bp, Homo sapien
acaaaagtacgcgctcgtcagagcg

SEQ ID NO: 5920931 - DNA, 25 bp, Homo sapien
acagatttacgatcgtcccctgggg

SEQ ID NO: 5920932 - DNA, 25 bp, Homo sapien
tcaaccaacggctcgtacgtagtcc

SEQ ID NO: 5920933 - DNA, 25 bp, Homo sapien
aatagttcgcgaacccgcttcgcga

SEQ ID NO: 5920934 - DNA, 25 bp, Homo sapien
tgtgaccgtaacagcgataggggac

SEQ ID NO: 5920935 - DNA, 25 bp, Homo sapien
ttgacggacgtgtcgaacccctagt

SEQ ID NO: 5920936 - DNA, 25 bp, Homo sapien
aacacccgccgtacgaactctagtc

SEQ ID NO: 5920937 - DNA, 25 bp, Homo sapien
gaattacgcaacgctagtggctcgc

SEQ ID NO: 5920938 - DNA, 25 bp, Homo sapien
tcaggggcgcgtgacgtatagtatc

SEQ ID NO: 5920939 - DNA, 25 bp, Homo sapien
tacaagtaactacgctcgcgggacc

SEQ ID NO: 5920940 - DNA, 25 bp, Homo sapien
gcacccttctatcgcgagcctgtta

SEQ ID NO: 5920941 - DNA, 25 bp, Homo sapien
gtttacgatcatcgcgctaggccgt

SEQ ID NO: 5920942 - DNA, 25 bp, Homo sapien
aaacgcaacgcacgcgataccacca

SEQ ID NO: 5920943 - DNA, 25 bp, Homo sapien
atgataccgtagcggaacgcctagc

SEQ ID NO: 5920944 - DNA, 25 bp, Homo sapien
gtataccgttacgtgcggcgactac

SEQ ID NO: 5920945 - DNA, 25 bp, Homo sapien
cgtagtgtccgcgcaaaacacccaa

SEQ ID NO: 5920946 - DNA, 25 bp, Homo sapien
tcctcctcgtaacccgcaaagtgga

SEQ ID NO: 5920947 - DNA, 25 bp, Homo sapien
gggcgtcgaccgatatgtgctacat

SEQ ID NO: 5920948 - DNA, 25 bp, Homo sapien
taattccggtcgactgcgtgcgtgt

SEQ ID NO: 5920949 - DNA, 25 bp, Homo sapien
aatgactcgaagtcgcgtagcgacg

SEQ ID NO: 5920950 - DNA, 25 bp, Homo sapien
tattgcgtacgagttagcggcgagg

SEQ ID NO: 5920951 - DNA, 25 bp, Homo sapien
aggctccgcataacgtcgagattcc

SEQ ID NO: 5920952 - DNA, 25 bp, Homo sapien
cgcacacttcgagccgtattcgtag

SEQ ID NO: 5920953 - DNA, 25 bp, Homo sapien
gctcatctatgtctcgcgaacggga

SEQ ID NO: 5920954 - DNA, 25 bp, Homo sapien
accgtggtgtattcggtcggattcc

SEQ ID NO: 5920955 - DNA, 25 bp, Homo sapien
ataatccgggtctcgcgtagggtag

SEQ ID NO: 5920956 - DNA, 25 bp, Homo sapien
cttcgagttacgaccggattgtcgc

SEQ ID NO: 5920957 - DNA, 25 bp, Homo sapien
catgcgtcgacgtacggtaagggta

SEQ ID NO: 5920958 - DNA, 25 bp, Homo sapien
tagactcgcgttagacggttagcgg

SEQ ID NO: 5920959 - DNA, 25 bp, Homo sapien
gtcgcaacgttacggaacgctttgc

SEQ ID NO: 5920960 - DNA, 25 bp, Homo sapien
tgtagtcgtgcgcgttcaaacgtgg

SEQ ID NO: 5920961 - DNA, 25 bp, Homo sapien
tgcgcattacgcgagacgttctgac

SEQ ID NO: 5920962 - DNA, 25 bp, Homo sapien
ggttttcagatacgcgtcggtaggg

SEQ ID NO: 5920963 - DNA, 25 bp, Homo sapien
tgtggttactcgcgactcgaacgtg

SEQ ID NO: 5920964 - DNA, 25 bp, Homo sapien
caaacagtcatctcgcgaacgccac

SEQ ID NO: 5920965 - DNA, 25 bp, Homo sapien
ggatcagcgaacccgtattacggtc

SEQ ID NO: 5920966 - DNA, 25 bp, Homo sapien
tgagcggtatagcgctccgttacct

SEQ ID NO: 5920967 - DNA, 25 bp, Homo sapien
agaagcacacgttacgcggtgcttg

SEQ ID NO: 5920968 - DNA, 25 bp, Homo sapien
tccgtctagctcgcggatagacgta

SEQ ID NO: 5920969 - DNA, 25 bp, Homo sapien
ggtggacggtccgcgatatcacatt

SEQ ID NO: 5920970 - DNA, 25 bp, Homo sapien
agatcctacgcgataacgtgcgtcc

SEQ ID NO: 5920971 - DNA, 25 bp, Homo sapien
tgcgaatcgcgcgtgtaacgcaagt

SEQ ID NO: 5920972 - DNA, 25 bp, Homo sapien
aatccgtccgcgattaggctcgagt

SEQ ID NO: 5920973 - DNA, 25 bp, Homo sapien
ggatagactctaacgcggcactagc

SEQ ID NO: 5920974 - DNA, 25 bp, Homo sapien
gttaggagcgcctatcgagtcgtct

SEQ ID NO: 5920975 - DNA, 25 bp, Homo sapien
tgcctaccgtgcgttcgaagacgta

SEQ ID NO: 5920976 - DNA, 25 bp, Homo sapien
gtccaggtaggacgaccgttgctta

SEQ ID NO: 5920977 - DNA, 25 bp, Homo sapien
agccctgacccgatacgaggtagta

SEQ ID NO: 5920978 - DNA, 25 bp, Homo sapien
ctctatcgtataacgagcggcacgg

SEQ ID NO: 5920979 - DNA, 25 bp, Homo sapien
gcacgcgaacgattcacgctatcct

SEQ ID NO: 5920980 - DNA, 25 bp, Homo sapien
ctgcactcggcgcgacataaccatt

SEQ ID NO: 5920981 - DNA, 25 bp, Homo sapien
gagagctaccgctacgcaacacgta

SEQ ID NO: 5920982 - DNA, 25 bp, Homo sapien
ttgtctcgcgtagtccaaagcaccg

SEQ ID NO: 5920983 - DNA, 25 bp, Homo sapien
gaagatcgagtatcgcgctcaggtg

SEQ ID NO: 5920984 - DNA, 25 bp, Homo sapien
acaagctacgcggacggttacgagt

SEQ ID NO: 5920985 - DNA, 25 bp, Homo sapien
ttccaggctatcgcacgtacaccgt

SEQ ID NO: 5920986 - DNA, 25 bp, Homo sapien
ttcggagggtcgtatacggctgtgt

SEQ ID NO: 5920987 - DNA, 25 bp, Homo sapien
atcaagcgcgatacggcaaggcgat

SEQ ID NO: 5920988 - DNA, 25 bp, Homo sapien
acatctacgatactacgcccgctgg

SEQ ID NO: 5920989 - DNA, 25 bp, Homo sapien
gatgaactatacgcgacgtccggct

SEQ ID NO: 5920990 - DNA, 25 bp, Homo sapien
gctgtacgattcgcgcataacgggt

SEQ ID NO: 5920991 - DNA, 25 bp, Homo sapien
gatgtgatcccgcgcgaatgccaat

SEQ ID NO: 5920992 - DNA, 25 bp, Homo sapien
aacgacacgcggcgtagtaaacgca

SEQ ID NO: 5920993 - DNA, 25 bp, Homo sapien
cccgagcgtcgacggtatacattct

SEQ ID NO: 5920994 - DNA, 25 bp, Homo sapien
gcatttatagtgcgtcggtcgcctg

SEQ ID NO: 5920995 - DNA, 25 bp, Homo sapien
tttaggcggcttacgcgtagtgcct

SEQ ID NO: 5920996 - DNA, 25 bp, Homo sapien
ccggccattggtacgcgaaagagtt

SEQ ID NO: 5920997 - DNA, 25 bp, Homo sapien
tggcttacgaccgttgccttgacct

SEQ ID NO: 5920998 - DNA, 25 bp, Homo sapien
tttgccccgcgtcgtctataacctg

SEQ ID NO: 5920999 - DNA, 25 bp, Homo sapien
gacgcgggcggtataccgtaatatg

SEQ ID NO: 5921000 - DNA, 25 bp, Homo sapien
tcgaggggtaacgtaccgctcttac

SEQ ID NO: 5921001 - DNA, 25 bp, Homo sapien
tgtgagtcgacgcgctaacagactg

SEQ ID NO: 5921002 - DNA, 25 bp, Homo sapien
gttgcatagcgcgacgtcgctctat

SEQ ID NO: 5921003 - DNA, 25 bp, Homo sapien
cggtagtcgcggtagtatagcatgg

SEQ ID NO: 5921004 - DNA, 25 bp, Homo sapien
cggtgtatatcgcgtccggcatagt

SEQ ID NO: 5921005 - DNA, 25 bp, Homo sapien
cagaatggtcgcgatgtagcccaac

SEQ ID NO: 5921006 - DNA, 25 bp, Homo sapien
ggcgtggctattcgcgcgattattc

SEQ ID NO: 5921007 - DNA, 25 bp, Homo sapien
ctcattcccggacgattgagtgagg

SEQ ID NO: 5921008 - DNA, 25 bp, Homo sapien
catcacacgaacgccgtatcacacc

SEQ ID NO: 5921009 - DNA, 25 bp, Homo sapien
ctcaaggctagtagcgcgtctactc

SEQ ID NO: 5921010 - DNA, 25 bp, Homo sapien
cggtagtcgcgtcgtaacgagacaa

SEQ ID NO: 5921011 - DNA, 25 bp, Homo sapien
ttaggatcgcggactctattcgccg

SEQ ID NO: 5921012 - DNA, 25 bp, Homo sapien
aaccctatacgtagtcgcgatcgcc

SEQ ID NO: 5921013 - DNA, 25 bp, Homo sapien
tatcagtgacctagtcgcggagggt

SEQ ID NO: 5921014 - DNA, 25 bp, Homo sapien
ttgagttacgctcgagcgatggacg

SEQ ID NO: 5921015 - DNA, 25 bp, Homo sapien
tctccgctagtacgacggagacaac

SEQ ID NO: 5921016 - DNA, 25 bp, Homo sapien
gttttatccgtgacgcgatgtcccc

SEQ ID NO: 5921017 - DNA, 25 bp, Homo sapien
gaggggtacgtatgtcgcgaatgtg

SEQ ID NO: 5921018 - DNA, 25 bp, Homo sapien
agccgaactaatcgttcgggccatg

SEQ ID NO: 5921019 - DNA, 25 bp, Homo sapien
agccgactagttgaacgcgcacaag

SEQ ID NO: 5921020 - DNA, 25 bp, Homo sapien
tgccactatcgcacgccgacgattt

SEQ ID NO: 5921021 - DNA, 25 bp, Homo sapien
tgacatacgcggctagtcgcacagt

SEQ ID NO: 5921022 - DNA, 25 bp, Homo sapien
gaccagtaacgtcgagtggtaggag

SEQ ID NO: 5921023 - DNA, 25 bp, Homo sapien
atcagatacgtcggttaccgcccac

SEQ ID NO: 5921024 - DNA, 25 bp, Homo sapien
cctgctacgctacgaatcgaacggt

SEQ ID NO: 5921025 - DNA, 25 bp, Homo sapien
gcagaatcgcgcgttcctacgatca

SEQ ID NO: 5921026 - DNA, 25 bp, Homo sapien
gcgatctcgtacgaccacggttaac

SEQ ID NO: 5921027 - DNA, 25 bp, Homo sapien
ggcagcgattccgcgatcactttct

SEQ ID NO: 5921028 - DNA, 25 bp, Homo sapien
tacatgcacgaacgtctcgacaccg

SEQ ID NO: 5921029 - DNA, 25 bp, Homo sapien
acggggttagtcgaatgcgcaaagg

SEQ ID NO: 5921030 - DNA, 25 bp, Homo sapien
gtgccctataacgcgcggatggaat

SEQ ID NO: 5921031 - DNA, 25 bp, Homo sapien
ctcatgcggcgtactcttaccgatc

SEQ ID NO: 5921032 - DNA, 25 bp, Homo sapien
gactcgcgttacggacagggttatc

SEQ ID NO: 5921033 - DNA, 25 bp, Homo sapien
cataccacgtgacgcggtattgacc

SEQ ID NO: 5921034 - DNA, 25 bp, Homo sapien
ttggcttggcgcgacgtactggatt

SEQ ID NO: 5921035 - DNA, 25 bp, Homo sapien
acagccttagcgttacgggcaagtg

SEQ ID NO: 5921036 - DNA, 25 bp, Homo sapien
aactcatatacgaccggtcaccccc

SEQ ID NO: 5921037 - DNA, 25 bp, Homo sapien
ccctatggtaccaaacgcgttggct

SEQ ID NO: 5921038 - DNA, 25 bp, Homo sapien
tcgtattcgtcaatccgcgtgccga

SEQ ID NO: 5921039 - DNA, 25 bp, Homo sapien
agcctgaccgttatgccgccaattg

SEQ ID NO: 5921040 - DNA, 25 bp, Homo sapien
ctggtgacgcggtctaatgacgtgt

SEQ ID NO: 5921041 - DNA, 25 bp, Homo sapien
tcctagcaacgcgtttacgcgtgag

SEQ ID NO: 5921042 - DNA, 25 bp, Homo sapien
atagtctgcgtacgagacgccgtac

SEQ ID NO: 5921043 - DNA, 25 bp, Homo sapien
aacttggacgcatcgtaccggtcac

SEQ ID NO: 5921044 - DNA, 25 bp, Homo sapien
agcggtaattgggctcgcgtcaaag

SEQ ID NO: 5921045 - DNA, 25 bp, Homo sapien
gtagcatggacgatcgaacggaagg

SEQ ID NO: 5921046 - DNA, 25 bp, Homo sapien
tttacgctaacgtccgcgtacggac

SEQ ID NO: 5921047 - DNA, 25 bp, Homo sapien
acaccgccggtcgtcacaaaatgag

SEQ ID NO: 5921048 - DNA, 25 bp, Homo sapien
ggaggtgcgtgacgtatagtatggc

SEQ ID NO: 5921049 - DNA, 25 bp, Homo sapien
gcagcatcgcacgatatacgggtca

SEQ ID NO: 5921050 - DNA, 25 bp, Homo sapien
gcggatgataggtcgctcgtgctaa

SEQ ID NO: 5921051 - DNA, 25 bp, Homo sapien
agacattcggtcatcgcgttagccc

SEQ ID NO: 5921052 - DNA, 25 bp, Homo sapien
gcatgtctgcgcgaatagggtcaac

SEQ ID NO: 5921053 - DNA, 25 bp, Homo sapien
ccattagttcgatagcgcagcaggc

SEQ ID NO: 5921054 - DNA, 25 bp, Homo sapien
cgatagccgatacgacctcctcaga

SEQ ID NO: 5921055 - DNA, 25 bp, Homo sapien
cttagcgcgtaacggtcgtacaagc

SEQ ID NO: 5921056 - DNA, 25 bp, Homo sapien
tggttggtacgcgcgacattaagcc

SEQ ID NO: 5921057 - DNA, 25 bp, Homo sapien
atatgtcacgatatacgcgcgcggc

SEQ ID NO: 5921058 - DNA, 25 bp, Homo sapien
ctccaaagactatcgcgctccaacg

SEQ ID NO: 5921059 - DNA, 25 bp, Homo sapien
gtaagtgtataccggtcggacggac

SEQ ID NO: 5921060 - DNA, 25 bp, Homo sapien
tcttcattatatcgcgggcgcccag

SEQ ID NO: 5921061 - DNA, 25 bp, Homo sapien
tctttgcgcgtaagacgcaggctac

SEQ ID NO: 5921062 - DNA, 25 bp, Homo sapien
tccctataggccgttaacgatcggg

SEQ ID NO: 5921063 - DNA, 25 bp, Homo sapien
aacagtcgtcgtaacacgcctaccc

SEQ ID NO: 5921064 - DNA, 25 bp, Homo sapien
ttcgggtcctagcgatacggttgac

SEQ ID NO: 5921065 - DNA, 25 bp, Homo sapien
gactctctacgcgcgtctaggtttc

SEQ ID NO: 5921066 - DNA, 25 bp, Homo sapien
tgtatccgacgggcgtattgactgc

SEQ ID NO: 5921067 - DNA, 25 bp, Homo sapien
ctgatcacgataccccccgtgttag

SEQ ID NO: 5921068 - DNA, 25 bp, Homo sapien
cttcggaggctatacgcgtgacagt

SEQ ID NO: 5921069 - DNA, 25 bp, Homo sapien
agcagccgtcggttctcgtgataga

SEQ ID NO: 5921070 - DNA, 25 bp, Homo sapien
ggttccgtacgaagtatcgcactgc

SEQ ID NO: 5921071 - DNA, 25 bp, Homo sapien
cgaatggcgaattcggacgttgcct

SEQ ID NO: 5921072 - DNA, 25 bp, Homo sapien
ttgggcatatgccgttccgacggaa

SEQ ID NO: 5921073 - DNA, 25 bp, Homo sapien
cggaatcgtcgttaacgcctagctg

SEQ ID NO: 5921074 - DNA, 25 bp, Homo sapien
acccttgtactcatacgcgcttggc

SEQ ID NO: 5921075 - DNA, 25 bp, Homo sapien
tctccgttgtctcgcgacatgacct

SEQ ID NO: 5921076 - DNA, 25 bp, Homo sapien
cgaggccgacgtgcgatcttttcaa

SEQ ID NO: 5921077 - DNA, 25 bp, Homo sapien
gtaccgaatcgtcgttaggaggagg

SEQ ID NO: 5921078 - DNA, 25 bp, Homo sapien
agaaacccgtacacgcgagtgcttc

SEQ ID NO: 5921079 - DNA, 25 bp, Homo sapien
gcaagcgcgacgtaagattttcccc

SEQ ID NO: 5921080 - DNA, 25 bp, Homo sapien
aaaacctttcgcgcgtctagcaccc

SEQ ID NO: 5921081 - DNA, 25 bp, Homo sapien
gttacaggcgtattagacgccgtgc

SEQ ID NO: 5921082 - DNA, 25 bp, Homo sapien
gcgccccgccgtacgttacttaata

SEQ ID NO: 5921083 - DNA, 25 bp, Homo sapien
acgtgagttcgagtagtcgctcgtg

SEQ ID NO: 5921084 - DNA, 25 bp, Homo sapien
agttaccgagtaatcggcgagtccc

SEQ ID NO: 5921085 - DNA, 25 bp, Homo sapien
cgtcttcgtagatcgacgagtggtg

SEQ ID NO: 5921086 - DNA, 25 bp, Homo sapien
agcaccaacgcaatccgcgaacatg

SEQ ID NO: 5921087 - DNA, 25 bp, Homo sapien
ggaaggtcgtatagacgctgcagtc

SEQ ID NO: 5921088 - DNA, 25 bp, Homo sapien
gttagcgcgcgctaaaccgatctac

SEQ ID NO: 5921089 - DNA, 25 bp, Homo sapien
ccgcatctcgcgcgaatagcactat

SEQ ID NO: 5921090 - DNA, 25 bp, Homo sapien
tgctgaagtacggttcgtctcagcg

SEQ ID NO: 5921091 - DNA, 25 bp, Homo sapien
ggacaccgtgcgatagacgatgttg

SEQ ID NO: 5921092 - DNA, 25 bp, Homo sapien
tgcgaagtacggcgcttaactaccc

SEQ ID NO: 5921093 - DNA, 25 bp, Homo sapien
aacggtctcttagcgcggaaacgac

SEQ ID NO: 5921094 - DNA, 25 bp, Homo sapien
cggcaccggtatcgcgatatcttct

SEQ ID NO: 5921095 - DNA, 25 bp, Homo sapien
cgaattcggatacggtctagcgcct

SEQ ID NO: 5921096 - DNA, 25 bp, Homo sapien
ctcaacctacgtgcgacgtcatcct

SEQ ID NO: 5921097 - DNA, 25 bp, Homo sapien
tgcccgacgcgtaatagcctctaag

SEQ ID NO: 5921098 - DNA, 25 bp, Homo sapien
gtatggcgctatacgaacctgtgcg

SEQ ID NO: 5921099 - DNA, 25 bp, Homo sapien
aagcgtgccgggcgaattatcgcat

SEQ ID NO: 5921100 - DNA, 25 bp, Homo sapien
gcatcccgtgcgtacgaatgcaaca

SEQ ID NO: 5921101 - DNA, 25 bp, Homo sapien
aagcggccggtacgctaatacccat

SEQ ID NO: 5921102 - DNA, 25 bp, Homo sapien
cgtgaacgcacgacgttacatggac

SEQ ID NO: 5921103 - DNA, 25 bp, Homo sapien
gttcgccgcgataggaccttaatcg

SEQ ID NO: 5921104 - DNA, 25 bp, Homo sapien
ttagagacgggacgtatcggtaccc

SEQ ID NO: 5921105 - DNA, 25 bp, Homo sapien
tggtatcggcgtcaatcgtgtggtg

SEQ ID NO: 5921106 - DNA, 25 bp, Homo sapien
cgctactaccgcgcgtaacgtgtta

SEQ ID NO: 5921107 - DNA, 25 bp, Homo sapien
caactaatgtctaggcgcgacccca

SEQ ID NO: 5921108 - DNA, 25 bp, Homo sapien
acagagatgcgggttcggtagccaa

SEQ ID NO: 5921109 - DNA, 25 bp, Homo sapien
gaaacaacgcgtgatgcgaacctgg

SEQ ID NO: 5921110 - DNA, 25 bp, Homo sapien
gggtcacgctagcccgattaagtca

SEQ ID NO: 5921111 - DNA, 25 bp, Homo sapien
gtagtcaagcgccggtacgagaaga

SEQ ID NO: 5921112 - DNA, 25 bp, Homo sapien
ggccatacgattagacgcgctcagt

SEQ ID NO: 5921113 - DNA, 25 bp, Homo sapien
cgaacgatagcgctaaccgagccat

SEQ ID NO: 5921114 - DNA, 25 bp, Homo sapien
gttgcacgcgatacgtgaaggggaa

SEQ ID NO: 5921115 - DNA, 25 bp, Homo sapien
agtgtcatcgtcgcgaccttgtcgt

SEQ ID NO: 5921116 - DNA, 25 bp, Homo sapien
catagtcgcgcgtccaaaaaggcga

SEQ ID NO: 5921117 - DNA, 25 bp, Homo sapien
tggactctatcctacgcgatggcac

SEQ ID NO: 5921118 - DNA, 25 bp, Homo sapien
tctggtttgtcgtaccgcgcttggt

SEQ ID NO: 5921119 - DNA, 25 bp, Homo sapien
gcactcgaccgcggcttaagttcta

SEQ ID NO: 5921120 - DNA, 25 bp, Homo sapien
ctgagcgctagcgtaccgagttatg

SEQ ID NO: 5921121 - DNA, 25 bp, Homo sapien
tgcttatgcgcgataccgttgtcgc

SEQ ID NO: 5921122 - DNA, 25 bp, Homo sapien
gatggacgcgtcggtagctgttcaa

SEQ ID NO: 5921123 - DNA, 25 bp, Homo sapien
actcaagcgctatatgacggccctg

SEQ ID NO: 5921124 - DNA, 25 bp, Homo sapien
cggatgacgcgaacggtatgtaggt

SEQ ID NO: 5921125 - DNA, 25 bp, Homo sapien
aagggaataacgtcggacgcccatg

SEQ ID NO: 5921126 - DNA, 25 bp, Homo sapien
gattcagcgtcggacatagggtgct

SEQ ID NO: 5921127 - DNA, 25 bp, Homo sapien
gcgggtcgtactataccgggcaatt

SEQ ID NO: 5921128 - DNA, 25 bp, Homo sapien
ctgtggacccgcgattcgtgatttc

SEQ ID NO: 5921129 - DNA, 25 bp, Homo sapien
ctcgtccctaccgatagcgtatcac

SEQ ID NO: 5921130 - DNA, 25 bp, Homo sapien
gcgaatcgcgtacgtaacgatcacc

SEQ ID NO: 5921131 - DNA, 25 bp, Homo sapien
gagtcgacgttcgcgcgattgtgaa

SEQ ID NO: 5921132 - DNA, 25 bp, Homo sapien
ctggcgcgtacggcgactataatct

SEQ ID NO: 5921133 - DNA, 25 bp, Homo sapien
gtttcgggcataacacgcgctactg

SEQ ID NO: 5921134 - DNA, 25 bp, Homo sapien
ggaggagcggtcttgtacggcttat

SEQ ID NO: 5921135 - DNA, 25 bp, Homo sapien
aatcgacgcgaacgctatcttccgg

SEQ ID NO: 5921136 - DNA, 25 bp, Homo sapien
cggtatcggcttaatcgacaccgca

SEQ ID NO: 5921137 - DNA, 25 bp, Homo sapien
cattactgttatcggaccgcgaggg

SEQ ID NO: 5921138 - DNA, 25 bp, Homo sapien
cccagggtagtatcgctcgcatcaa

SEQ ID NO: 5921139 - DNA, 25 bp, Homo sapien
catttcccgtaacgcgcaatggtcc

SEQ ID NO: 5921140 - DNA, 25 bp, Homo sapien
acgggctcgacgcgtactaagcaaa

SEQ ID NO: 5921141 - DNA, 25 bp, Homo sapien
tgttctcgcgctagtcgtaaccagg

SEQ ID NO: 5921142 - DNA, 25 bp, Homo sapien
tgggagtaactagcggcgacctgaa

SEQ ID NO: 5921143 - DNA, 25 bp, Homo sapien
gtcgttacgctatttcgcggcccaa

SEQ ID NO: 5921144 - DNA, 25 bp, Homo sapien
agtggtcgtcgattacgcgtctgac

SEQ ID NO: 5921145 - DNA, 25 bp, Homo sapien
cgatactagcgtacgtcgacaacgg

SEQ ID NO: 5921146 - DNA, 25 bp, Homo sapien
agtcatcgcgcgaagctatgggtgt

SEQ ID NO: 5921147 - DNA, 25 bp, Homo sapien
cgtcacaaacgcgcgataggagaga

SEQ ID NO: 5921148 - DNA, 25 bp, Homo sapien
gtaagggaattacgcgtcgtcggag

SEQ ID NO: 5921149 - DNA, 25 bp, Homo sapien
atggagatccgagcgagattgggac

SEQ ID NO: 5921150 - DNA, 25 bp, Homo sapien
actctaccgcggtatcacgcgagat

SEQ ID NO: 5921151 - DNA, 25 bp, Homo sapien
cgtccctctcgcgaacgtaacgata

SEQ ID NO: 5921152 - DNA, 25 bp, Homo sapien
ctcaataggtctatcggcggagctc

SEQ ID NO: 5921153 - DNA, 25 bp, Homo sapien
ctctatacgccaaacgtcgtccacc

SEQ ID NO: 5921154 - DNA, 25 bp, Homo sapien
caaaggctacgtcgcgcatgattcg

SEQ ID NO: 5921155 - DNA, 25 bp, Homo sapien
acagtcacgatgcgctaccaaaggc

SEQ ID NO: 5921156 - DNA, 25 bp, Homo sapien
tcccaataccggcgtataccggctt

SEQ ID NO: 5921157 - DNA, 25 bp, Homo sapien
gcagttcggtcgctaacacggtaag

SEQ ID NO: 5921158 - DNA, 25 bp, Homo sapien
tacaggctacgcgcgaaactcaagc

SEQ ID NO: 5921159 - DNA, 25 bp, Homo sapien
gactcctatgtcggacgtctcgaga

SEQ ID NO: 5921160 - DNA, 25 bp, Homo sapien
cattcgctcgcgtacaagtgtggga

SEQ ID NO: 5921161 - DNA, 25 bp, Homo sapien
agtctgtaactacgtcgcgctcacc

SEQ ID NO: 5921162 - DNA, 25 bp, Homo sapien
gctttgacgatcgtgcgtgtatggc

SEQ ID NO: 5921163 - DNA, 25 bp, Homo sapien
tcttcagatacgggcccgtctatgg

SEQ ID NO: 5921164 - DNA, 25 bp, Homo sapien
tccaagttcggcgctagctcgaatc

SEQ ID NO: 5921165 - DNA, 25 bp, Homo sapien
gcgtttgccctatacgtcgcggtaa

SEQ ID NO: 5921166 - DNA, 25 bp, Homo sapien
tcgtaatcgtccgtcggtaggcatc

SEQ ID NO: 5921167 - DNA, 25 bp, Homo sapien
gccacgacgcgagaccgtatttgat

SEQ ID NO: 5921168 - DNA, 25 bp, Homo sapien
ggcttggttgtagcgcgatcgtgat

SEQ ID NO: 5921169 - DNA, 25 bp, Homo sapien
tgctcttgcgcgaacggtagttggt

SEQ ID NO: 5921170 - DNA, 25 bp, Homo sapien
gtgcgcgtacgacgctatacatacg

SEQ ID NO: 5921171 - DNA, 25 bp, Homo sapien
cgttttgcggataggtcggcggtaa

SEQ ID NO: 5921172 - DNA, 25 bp, Homo sapien
ttgtagccacgcgttaacgacgctg

SEQ ID NO: 5921173 - DNA, 25 bp, Homo sapien
cgaaggtaactcgcgaagtacgcca

SEQ ID NO: 5921174 - DNA, 25 bp, Homo sapien
gctgtgatgtccgcggtaccacata

SEQ ID NO: 5921175 - DNA, 25 bp, Homo sapien
caaacttaaccgctcggattgcgcc

SEQ ID NO: 5921176 - DNA, 25 bp, Homo sapien
ctactatcgcgtcaaaccgggaacg

SEQ ID NO: 5921177 - DNA, 25 bp, Homo sapien
agccaacgcgtttggtaccataggg

SEQ ID NO: 5921178 - DNA, 25 bp, Homo sapien
cctggttacgactagcgcgagaaca

SEQ ID NO: 5921179 - DNA, 25 bp, Homo sapien
gtgcgactcggcggacataaacaga

SEQ ID NO: 5921180 - DNA, 25 bp, Homo sapien
acgacaaggtcgcgacgatgacact

SEQ ID NO: 5921181 - DNA, 25 bp, Homo sapien
atcagcgttcgaaaccgcgtcaacg

SEQ ID NO: 5921182 - DNA, 25 bp, Homo sapien
ggatgttacgttcgcacgactctcg

SEQ ID NO: 5921183 - DNA, 25 bp, Homo sapien
ttgccacgcatatcggtccttagcc

SEQ ID NO: 5921184 - DNA, 25 bp, Homo sapien
cttgctgcgcaactagcgaaatggc

SEQ ID NO: 5921185 - DNA, 25 bp, Homo sapien
gaaacctagacgcgcgtagagagtc

SEQ ID NO: 5921186 - DNA, 25 bp, Homo sapien
tccacacgaatggcgctatacgcac

SEQ ID NO: 5921187 - DNA, 25 bp, Homo sapien
tcagctggtccgccgtaattcactc

SEQ ID NO: 5921188 - DNA, 25 bp, Homo sapien
ccgttgtcgacgtacgctagtatcg

SEQ ID NO: 5921189 - DNA, 25 bp, Homo sapien
ccctaccgacgcgtatctgaaaacc

SEQ ID NO: 5921190 - DNA, 25 bp, Homo sapien
agacgctaacgcgaaccgcctcttt

SEQ ID NO: 5921191 - DNA, 25 bp, Homo sapien
cgtttgattcgtgcggacgtggaca

SEQ ID NO: 5921192 - DNA, 25 bp, Homo sapien
cggtgctttggactacgcgagacaa

SEQ ID NO: 5921193 - DNA, 25 bp, Homo sapien
ccttccgttcgatcgtccatgctac

SEQ ID NO: 5921194 - DNA, 25 bp, Homo sapien
cacctgagcgcgatactcgatcttc

SEQ ID NO: 5921195 - DNA, 25 bp, Homo sapien
actgtgcgactagccgcgtatgtca

SEQ ID NO: 5921196 - DNA, 25 bp, Homo sapien
cgtatgctaactcgtaccgcaggtc

SEQ ID NO: 5921197 - DNA, 25 bp, Homo sapien
cggtagattacggcggaccgttaga

SEQ ID NO: 5921198 - DNA, 25 bp, Homo sapien
tctatcacgagaaccgacggctgct

SEQ ID NO: 5921199 - DNA, 25 bp, Homo sapien
tgcgaatgtatcggacgcggaactg

SEQ ID NO: 5921200 - DNA, 25 bp, Homo sapien
gactaggtcgggtatacgcatgagc

SEQ ID NO: 5921201 - DNA, 25 bp, Homo sapien
ttgaacagctaccgacgcgtccatc

SEQ ID NO: 5921202 - DNA, 25 bp, Homo sapien
gccgatgtcgcgcatagacatcgtt

SEQ ID NO: 5921203 - DNA, 25 bp, Homo sapien
actaggggttcgacacgtccgtcaa

SEQ ID NO: 5921204 - DNA, 25 bp, Homo sapien
gtccatgtaacgtcgtgcgttcacg

SEQ ID NO: 5921205 - DNA, 25 bp, Homo sapien
gcacctcgaacccgacatgcatatc

SEQ ID NO: 5921206 - DNA, 25 bp, Homo sapien
ccccacagcgtacgactaagagaga

SEQ ID NO: 5921207 - DNA, 25 bp, Homo sapien
cataagcgtacgtcgaccttggcct

SEQ ID NO: 5921208 - DNA, 25 bp, Homo sapien
gtatgacgcgcgtaactgactcctg

SEQ ID NO: 5921209 - DNA, 25 bp, Homo sapien
gactgcagcgtctatacgaccttcc

SEQ ID NO: 5921210 - DNA, 25 bp, Homo sapien
gtccgtacgcggacgttagcgtaaa

SEQ ID NO: 5921211 - DNA, 25 bp, Homo sapien
acctcaatcgcgtacgaacaagggg

SEQ ID NO: 5921212 - DNA, 25 bp, Homo sapien
tctctcctatcgcgcgtttgtgacg

SEQ ID NO: 5921213 - DNA, 25 bp, Homo sapien
gaacagcgcgacgcgtacttgcaaa

SEQ ID NO: 5921214 - DNA, 25 bp, Homo sapien
gtgcgtcaataacgggcgtaaccct

SEQ ID NO: 5921215 - DNA, 25 bp, Homo sapien
aaccaccggacgcatacgatgcttg

SEQ ID NO: 5921216 - DNA, 25 bp, Homo sapien
gccaagcgcgtatgagtacaagggt

SEQ ID NO: 5921217 - DNA, 25 bp, Homo sapien
aagtgccgtatgagcgcgaccatag

SEQ ID NO: 5921218 - DNA, 25 bp, Homo sapien
tgagttcgatacggcgtgttccgga

SEQ ID NO: 5921219 - DNA, 25 bp, Homo sapien
cacgttcgagtcgcgagtaaccaca

SEQ ID NO: 5921220 - DNA, 25 bp, Homo sapien
tcgcgaagcgggttcgcgaactatt

SEQ ID NO: 5921221 - DNA, 25 bp, Homo sapien
gtagcctgcgtcttacgcgcaaaga

SEQ ID NO: 5921222 - DNA, 25 bp, Homo sapien
cgaatcatgcgcgacgtagcctttg

SEQ ID NO: 5921223 - DNA, 25 bp, Homo sapien
ggtgatcgttacgtacgcgattcgc

SEQ ID NO: 5921224 - DNA, 25 bp, Homo sapien
cggtgtcgagacgttcgtgcatgta

SEQ ID NO: 5921225 - DNA, 25 bp, Homo sapien
tggtgcatacgcgacgtagtcaacg

SEQ ID NO: 5921226 - DNA, 25 bp, Homo sapien
cttaccgtgttagcgaccgaactgc

SEQ ID NO: 5921227 - DNA, 25 bp, Homo sapien
aagccggtatacgccggtattggga

SEQ ID NO: 5921228 - DNA, 25 bp, Homo sapien
ccgtatccgtcggataggttcgatc

SEQ ID NO: 5921229 - DNA, 25 bp, Homo sapien
atagtgctattcgcgcgagatgcgg

SEQ ID NO: 5921230 - DNA, 25 bp, Homo sapien
tgttgcattcgtacgcacgggatgc

SEQ ID NO: 5921231 - DNA, 25 bp, Homo sapien
gggctaacgcgatgaccgaatgtct

SEQ ID NO: 5921232 - DNA, 25 bp, Homo sapien
taggcgactaatgcgacggtggaag

SEQ ID NO: 5921233 - DNA, 25 bp, Homo sapien
tgcacaggtcgtctaacgtcgaagg

SEQ ID NO: 5921234 - DNA, 25 bp, Homo sapien
gccatactatacgtcacgcacctcc

SEQ ID NO: 5921235 - DNA, 25 bp, Homo sapien
caagcaccgcgtaacgtgtgcttct

SEQ ID NO: 5921236 - DNA, 25 bp, Homo sapien
cgtccacgaccgtcataaggcgtat

SEQ ID NO: 5921237 - DNA, 25 bp, Homo sapien
gataaccctgtccgtaacgcgagtc

SEQ ID NO: 5921238 - DNA, 25 bp, Homo sapien
cggtctcggcgttagtacgagttca

SEQ ID NO: 5921239 - DNA, 25 bp, Homo sapien
catgagcgcctcggtaagtccaaca

SEQ ID NO: 5921240 - DNA, 25 bp, Homo sapien
catcatcttaccgcacgatgacccc

SEQ ID NO: 5921241 - DNA, 25 bp, Homo sapien
ttcaggtcgccgctagttactccca

SEQ ID NO: 5921242 - DNA, 25 bp, Homo sapien
gagtagacgcgctactagccttgag

SEQ ID NO: 5921243 - DNA, 25 bp, Homo sapien
tcggcacgcggattgacgaatacga

SEQ ID NO: 5921244 - DNA, 25 bp, Homo sapien
gatactatacgtcacgcgcccctga

SEQ ID NO: 5921245 - DNA, 25 bp, Homo sapien
tagggctatcgagcgaacctgtggt

SEQ ID NO: 5921246 - DNA, 25 bp, Homo sapien
cataaggactaaccggcgtggtgtg

SEQ ID NO: 5921247 - DNA, 25 bp, Homo sapien
taatgaactagcgccgtacccctcg

SEQ ID NO: 5921248 - DNA, 25 bp, Homo sapien
ttgggtgttttgcgcggacactacg

SEQ ID NO: 5921249 - DNA, 25 bp, Homo sapien
ggtcccgcgagcgtagttacttgta

SEQ ID NO: 5921250 - DNA, 25 bp, Homo sapien
tgcacctacgcgcgttaaccctcta

SEQ ID NO: 5921251 - DNA, 25 bp, Homo sapien
aagagctacgggcggtaacttggga

SEQ ID NO: 5921252 - DNA, 25 bp, Homo sapien
atgcgataattcgcccggcacgctt

SEQ ID NO: 5921253 - DNA, 25 bp, Homo sapien
tgacttaatcgggctagcgtgaccc

SEQ ID NO: 5921254 - DNA, 25 bp, Homo sapien
cgattaaggtcctatcgcggcgaac

SEQ ID NO: 5921255 - DNA, 25 bp, Homo sapien
acgaggctaatccgcgtatagggac

SEQ ID NO: 5921256 - DNA, 25 bp, Homo sapien
gtcccaatctcgctcggatctccat

SEQ ID NO: 5921257 - DNA, 25 bp, Homo sapien
gaccgtaatacgggttcgctgatcc

SEQ ID NO: 5921258 - DNA, 25 bp, Homo sapien
tacagctaacgcctaccggagtcac

SEQ ID NO: 5921259 - DNA, 25 bp, Homo sapien
cacttgcccgtaacgctaaggctgt

SEQ ID NO: 5921260 - DNA, 25 bp, Homo sapien
gtaggccgcgttatacgactgatcc

SEQ ID NO: 5921261 - DNA, 25 bp, Homo sapien
tattaagtaacgtacggcggggcgc

SEQ ID NO: 5921262 - DNA, 25 bp, Homo sapien
ggtcaataccgcgtcacgtggtatg

SEQ ID NO: 5921263 - DNA, 25 bp, Homo sapien
tgtcaacgcgacgctacgaactgga

SEQ ID NO: 5921264 - DNA, 25 bp, Homo sapien
ttgtctcgttacgacgcgactaccg

SEQ ID NO: 5921265 - DNA, 25 bp, Homo sapien
gtaacagacgtcccgatcaaacggc

SEQ ID NO: 5921266 - DNA, 25 bp, Homo sapien
cgtatgtatagcgtcgtacgcgcac

SEQ ID NO: 5921267 - DNA, 25 bp, Homo sapien
ataccgtagtaacgtgcgcctggtc

SEQ ID NO: 5921268 - DNA, 25 bp, Homo sapien
gaggtttaccggtcgacgagtgact

SEQ ID NO: 5921269 - DNA, 25 bp, Homo sapien
ggacgcacgttatcgcgtaggatct

SEQ ID NO: 5921270 - DNA, 25 bp, Homo sapien
catatgtgcgcgacgctatcacgac

SEQ ID NO: 5921271 - DNA, 25 bp, Homo sapien
tcccacacttgtacgcgagcgaatg

SEQ ID NO: 5921272 - DNA, 25 bp, Homo sapien
ctattccgcggaactagtccggtag

SEQ ID NO: 5921273 - DNA, 25 bp, Homo sapien
agcggaagtcgtttcgcgcaacaca

SEQ ID NO: 5921274 - DNA, 25 bp, Homo sapien
ggaccattgcgcgttacgggaaatg

SEQ ID NO: 5921275 - DNA, 25 bp, Homo sapien
gatggttacgcacggactaggaacc

SEQ ID NO: 5921276 - DNA, 25 bp, Homo sapien
ttcacaatcgcgcgaacgtcgactc

SEQ ID NO: 5921277 - DNA, 25 bp, Homo sapien
ccgtaactacggttcgcgtccaatg

SEQ ID NO: 5921278 - DNA, 25 bp, Homo sapien
tgatcgtaggaacgcgcgattctgc

SEQ ID NO: 5921279 - DNA, 25 bp, Homo sapien
attggaaatcgtcgggtcggcctga

SEQ ID NO: 5921280 - DNA, 25 bp, Homo sapien
gaatgatacgcgaccgtatcgggag

SEQ ID NO: 5921281 - DNA, 25 bp, Homo sapien
cccggtgacaatacgtcgaatacgg

SEQ ID NO: 5921282 - DNA, 25 bp, Homo sapien
gtttgatccgatagggcgagtctcg

SEQ ID NO: 5921283 - DNA, 25 bp, Homo sapien
cgttggagcgcgatagtctttggag

SEQ ID NO: 5921284 - DNA, 25 bp, Homo sapien
ctcctaccactcgacgttactggtc

SEQ ID NO: 5921285 - DNA, 25 bp, Homo sapien
ctcacggattacccgatcgctggat

SEQ ID NO: 5921286 - DNA, 25 bp, Homo sapien
acacctgttacgcgagtagtggtgc

SEQ ID NO: 5921287 - DNA, 25 bp, Homo sapien
gagactaccggcgatagcttggcat

SEQ ID NO: 5921288 - DNA, 25 bp, Homo sapien
gattcgagctagcgccgaacttgga

SEQ ID NO: 5921289 - DNA, 25 bp, Homo sapien
cgtcgctacgcgacttcgagtcatt

SEQ ID NO: 5921290 - DNA, 25 bp, Homo sapien
aggcaacgtccgaattcgccattcg

SEQ ID NO: 5921291 - DNA, 25 bp, Homo sapien
cctccgatagtcggcggatgaaaac

SEQ ID NO: 5921292 - DNA, 25 bp, Homo sapien
tctgaggaggtcgtatcggctatcg

SEQ ID NO: 5921293 - DNA, 25 bp, Homo sapien
cttgcgtaacgccgcaccataactc

SEQ ID NO: 5921294 - DNA, 25 bp, Homo sapien
gtagatcggtttagcgcgcgctaac

SEQ ID NO: 5921295 - DNA, 25 bp, Homo sapien
tgcggtgtcgattaagccgataccg

SEQ ID NO: 5921296 - DNA, 25 bp, Homo sapien
gcttgtacgaccgttacgcgctaag

SEQ ID NO: 5921297 - DNA, 25 bp, Homo sapien
gtgccatcgcgtaggatagagtcca

SEQ ID NO: 5921298 - DNA, 25 bp, Homo sapien
accatgcttatgcgacggtaggcac

SEQ ID NO: 5921299 - DNA, 25 bp, Homo sapien
accgttcgattcgtagcgtagcagg

SEQ ID NO: 5921300 - DNA, 25 bp, Homo sapien
acccaggcgtagtataccggtcaac

SEQ ID NO: 5921301 - DNA, 25 bp, Homo sapien
cttctgcgacgtaccgagttgatgc

SEQ ID NO: 5921302 - DNA, 25 bp, Homo sapien
gccatacacgcacgatcgtcaaagc

SEQ ID NO: 5921303 - DNA, 25 bp, Homo sapien
taagcaacggtcgtcctacctggac

SEQ ID NO: 5921304 - DNA, 25 bp, Homo sapien
taacaggctcgcgatagaagggtgc

SEQ ID NO: 5921305 - DNA, 25 bp, Homo sapien
ccaagccgtaaacgaacggcagaag

SEQ ID NO: 5921306 - DNA, 25 bp, Homo sapien
tggactgttattcggcccgttacgg

SEQ ID NO: 5921307 - DNA, 25 bp, Homo sapien
agatcgctaggtcgttcggaggttc

SEQ ID NO: 5921308 - DNA, 25 bp, Homo sapien
gaagcactcgcgtgtacgggtttct

SEQ ID NO: 5921309 - DNA, 25 bp, Homo sapien
caccactcgtcgatctacgaagacg

SEQ ID NO: 5921310 - DNA, 25 bp, Homo sapien
tgcaatcgtacggcgactaccactc

SEQ ID NO: 5921311 - DNA, 25 bp, Homo sapien
ctacatttacgacgctcggcgcatc

SEQ ID NO: 5921312 - DNA, 25 bp, Homo sapien
atcgccttgccgtatcgcgcttgat

SEQ ID NO: 5921313 - DNA, 25 bp, Homo sapien
cataactcggtacgctagcgctcag

SEQ ID NO: 5921314 - DNA, 25 bp, Homo sapien
acacgcacgcagtcgaccggaatta

SEQ ID NO: 5921315 - DNA, 25 bp, Homo sapien
atcaaatacggtctcgcgtcgtggc

SEQ ID NO: 5921316 - DNA, 25 bp, Homo sapien
gcctgctgcgctatcgaactaatgg

SEQ ID NO: 5921317 - DNA, 25 bp, Homo sapien
cgcacaggttcgtatagcgccatac

SEQ ID NO: 5921318 - DNA, 25 bp, Homo sapien
ccatgctatactaccgcgactaccg

SEQ ID NO: 5921319 - DNA, 25 bp, Homo sapien
gcgacttaggtacgtcggagctaga

SEQ ID NO: 5921320 - DNA, 25 bp, Homo sapien
gtcaaccgtatcgctaggacccgaa

SEQ ID NO: 5921321 - DNA, 25 bp, Homo sapien
attgcgtttcgaacgtgcgcctgac

SEQ ID NO: 5921322 - DNA, 25 bp, Homo sapien
gggatcacgcggataacccagtaca

SEQ ID NO: 5921323 - DNA, 25 bp, Homo sapien
gtacggcgtctcgtacgcagactat

SEQ ID NO: 5921324 - DNA, 25 bp, Homo sapien
tcagcccgtcgcgtataagaccagt

SEQ ID NO: 5921325 - DNA, 25 bp, Homo sapien
ttagcacgagcgacctatcatccgc

SEQ ID NO: 5921326 - DNA, 25 bp, Homo sapien
caggttatagacgacgcggggcaaa

SEQ ID NO: 5921327 - DNA, 25 bp, Homo sapien
gcctttggtagcgcatcgtgactgt

SEQ ID NO: 5921328 - DNA, 25 bp, Homo sapien
tgcagctagtcgaacggcgggtatt

SEQ ID NO: 5921329 - DNA, 25 bp, Homo sapien
ccgacctagcgggtccgtattacaa

SEQ ID NO: 5921330 - DNA, 25 bp, Homo sapien
agaagatatcgcgataccggtgccg

SEQ ID NO: 5921331 - DNA, 25 bp, Homo sapien
gcagacgttatacgcgacctaccca

SEQ ID NO: 5921332 - DNA, 25 bp, Homo sapien
cgctctgacgagcgcgtacttttgt

SEQ ID NO: 5921333 - DNA, 25 bp, Homo sapien
ggaacccgacatacgatctccttgg

SEQ ID NO: 5921334 - DNA, 25 bp, Homo sapien
ctaccctacgcgagacccggattat

SEQ ID NO: 5921335 - DNA, 25 bp, Homo sapien
acgttgtacgcgagctaacctaggg

SEQ ID NO: 5921336 - DNA, 25 bp, Homo sapien
catggcccgaacgattagttcggct

SEQ ID NO: 5921337 - DNA, 25 bp, Homo sapien
ggtggacgacgtttggcgtatagag

SEQ ID NO: 5921338 - DNA, 25 bp, Homo sapien
tgcatgcgaacgcgtagtcacctca

SEQ ID NO: 5921339 - DNA, 25 bp, Homo sapien
acaatgagcgtcggttacgccccaa

SEQ ID NO: 5921340 - DNA, 25 bp, Homo sapien
caggcgaccgacgcactataaatgc

SEQ ID NO: 5921341 - DNA, 25 bp, Homo sapien
gtgggcggtaaccgacgtatctgat

SEQ ID NO: 5921342 - DNA, 25 bp, Homo sapien
gccgacggtagttcgcggatatctt

SEQ ID NO: 5921343 - DNA, 25 bp, Homo sapien
acacagccgtatacgaccctccgaa

SEQ ID NO: 5921344 - DNA, 25 bp, Homo sapien
tcagctcggcgcaatacgggttaag

SEQ ID NO: 5921345 - DNA, 25 bp, Homo sapien
gcgacaatccggtcgtaactcgaag

SEQ ID NO: 5921346 - DNA, 25 bp, Homo sapien
cagtctgttagcgcgtcgactcaca

SEQ ID NO: 5921347 - DNA, 25 bp, Homo sapien
tacccttaccgtacgtcgacgcatg

SEQ ID NO: 5921348 - DNA, 25 bp, Homo sapien
cttgtgcgcgttcaactagtcggct

SEQ ID NO: 5921349 - DNA, 25 bp, Homo sapien
gaacgggtactcgtggcgtatggtt

SEQ ID NO: 5921350 - DNA, 25 bp, Homo sapien
gcaaattcgcgtacgagacgtaggg

SEQ ID NO: 5921351 - DNA, 25 bp, Homo sapien
ggtctccgaatcgcgtagtgaacct

SEQ ID NO: 5921352 - DNA, 25 bp, Homo sapien
accctccgcgactaggtcactgata

SEQ ID NO: 5921353 - DNA, 25 bp, Homo sapien
aggatgacgtcgcacgtaggttgag

SEQ ID NO: 5921354 - DNA, 25 bp, Homo sapien
tagcgtacgcgggggtaatgtactc

SEQ ID NO: 5921355 - DNA, 25 bp, Homo sapien
gttgtttctacgcgtgacgggccta

SEQ ID NO: 5921356 - DNA, 25 bp, Homo sapien
ttccccttcacgtatcgcgtgcaac

SEQ ID NO: 5921357 - DNA, 25 bp, Homo sapien
ttgaaaagatcgcacgtcggcctcg

SEQ ID NO: 5921358 - DNA, 25 bp, Homo sapien
ttggggtcgacgtactaggcatagg

SEQ ID NO: 5921359 - DNA, 25 bp, Homo sapien
taggtccgcatgtacgtcgatgtcc

SEQ ID NO: 5921360 - DNA, 25 bp, Homo sapien
attggcattcgcgcgggatcacatc

SEQ ID NO: 5921361 - DNA, 25 bp, Homo sapien
ccaggttcgcatcacgcgttgtttc

SEQ ID NO: 5921362 - DNA, 25 bp, Homo sapien
gcacgtcgctcgtaacatgtcctac

SEQ ID NO: 5921363 - DNA, 25 bp, Homo sapien
tgacccgtatatcgtgcgatgctgc

SEQ ID NO: 5921364 - DNA, 25 bp, Homo sapien
gtgatacgctatcggtagggacgag

SEQ ID NO: 5921365 - DNA, 25 bp, Homo sapien
ctcacgcgtaaacgcgttgctagga

SEQ ID NO: 5921366 - DNA, 25 bp, Homo sapien
cacggtgacgggttgtacgttgcta

SEQ ID NO: 5921367 - DNA, 25 bp, Homo sapien
gatcggtaagagtacgccgcatgag

SEQ ID NO: 5921368 - DNA, 25 bp, Homo sapien
ctttcatctaacgcgcggttggcct

SEQ ID NO: 5921369 - DNA, 25 bp, Homo sapien
tacgtctatccgcgagctagacgga

SEQ ID NO: 5921370 - DNA, 25 bp, Homo sapien
tgtaaaggtaccgaacacgcccgag

SEQ ID NO: 5921371 - DNA, 25 bp, Homo sapien
agggagcctaatacgcgcgtctaac

SEQ ID NO: 5921372 - DNA, 25 bp, Homo sapien
atgtcacggccatcctacgtatggg

SEQ ID NO: 5921373 - DNA, 25 bp, Homo sapien
gttgaccctattcgcgcagacatgc

SEQ ID NO: 5921374 - DNA, 25 bp, Homo sapien
gtgctagtcgtataccgcgcatgag

SEQ ID NO: 5921375 - DNA, 25 bp, Homo sapien
aggatagcgtgaatcgttcgcgtgc

SEQ ID NO: 5921376 - DNA, 25 bp, Homo sapien
cgtagagaccgttcgtgcggaaact

SEQ ID NO: 5921377 - DNA, 25 bp, Homo sapien
gtccggtcgacgcatacctatatgc

SEQ ID NO: 5921378 - DNA, 25 bp, Homo sapien
aggaagcgtctatcgcgactcgatc

SEQ ID NO: 5921379 - DNA, 25 bp, Homo sapien
gttgtctccgtcgtactagcggaga

SEQ ID NO: 5921380 - DNA, 25 bp, Homo sapien
cctcgccgctaactcgtacgcaata

SEQ ID NO: 5921381 - DNA, 25 bp, Homo sapien
tatcgttacgttcgcgagagggacg

SEQ ID NO: 5921382 - DNA, 25 bp, Homo sapien
gcttctcgtcgcgctatacgatcca

SEQ ID NO: 5921383 - DNA, 25 bp, Homo sapien
ggacgataacggcgcgccatagaat

SEQ ID NO: 5921384 - DNA, 25 bp, Homo sapien
acggtgtacgtgcgatagcctggaa

SEQ ID NO: 5921385 - DNA, 25 bp, Homo sapien
atgggagtccgcgtatcgatccaca

SEQ ID NO: 5921386 - DNA, 25 bp, Homo sapien
ccgtacgcgtccgacgatttgaaac

SEQ ID NO: 5921387 - DNA, 25 bp, Homo sapien
tacgtcttcgaacgcacggtaggca

SEQ ID NO: 5921388 - DNA, 25 bp, Homo sapien
acttggtcgtagcgctacgagcagt

SEQ ID NO: 5921389 - DNA, 25 bp, Homo sapien
gactagagttcgtacggcgggtgtt

SEQ ID NO: 5921390 - DNA, 25 bp, Homo sapien
cctttgcgcattcgactaaccccgt

SEQ ID NO: 5921391 - DNA, 25 bp, Homo sapien
tccattcgtacgtcgatcgttgccg

SEQ ID NO: 5921392 - DNA, 25 bp, Homo sapien
gaacattacgcgcggtaacgcctgt

SEQ ID NO: 5921393 - DNA, 25 bp, Homo sapien
ttgggccgcgaaatagcgtaacgac

SEQ ID NO: 5921394 - DNA, 25 bp, Homo sapien
gagatatactcgagtcgcgacctgc

SEQ ID NO: 5921395 - DNA, 25 bp, Homo sapien
cgtccatcgctcgagcgtaactcaa

SEQ ID NO: 5921396 - DNA, 25 bp, Homo sapien
aagcagggtcgactcggtaacacct

SEQ ID NO: 5921397 - DNA, 25 bp, Homo sapien
gcctctgccgctcgtaagatgatgt

SEQ ID NO: 5921398 - DNA, 25 bp, Homo sapien
ggtgagcgcgacgtagttacagact

SEQ ID NO: 5921399 - DNA, 25 bp, Homo sapien
tcagcacggtctaaacgcacgaacg

SEQ ID NO: 5921400 - DNA, 25 bp, Homo sapien
gcaacgcgttatcgcgaacgtaagc

SEQ ID NO: 5921401 - DNA, 25 bp, Homo sapien
atgtagcacatatcggtcgacgccc

SEQ ID NO: 5921402 - DNA, 25 bp, Homo sapien
tttgcctgtacgatcgacccagcca

SEQ ID NO: 5921403 - DNA, 25 bp, Homo sapien
tggggcaacgcgatctacgtactct

SEQ ID NO: 5921404 - DNA, 25 bp, Homo sapien
tcgcctttttggacgcgcgactatg

SEQ ID NO: 5921405 - DNA, 25 bp, Homo sapien
ccccaggggacgatcgtaaatctgt

SEQ ID NO: 5921406 - DNA, 25 bp, Homo sapien
gtcaagaacgactatcgcgttgccg

SEQ ID NO: 5921407 - DNA, 25 bp, Homo sapien
ggggacatcgcgtcacggataaaac

SEQ ID NO: 5921408 - DNA, 25 bp, Homo sapien
tgcgtttactacgccgcgtgtcgtt

SEQ ID NO: 5921409 - DNA, 25 bp, Homo sapien
atcacgatcgcgctacaaccaagcc

SEQ ID NO: 5921410 - DNA, 25 bp, Homo sapien
tccactttgcgggttacgaggagga

SEQ ID NO: 5921411 - DNA, 25 bp, Homo sapien
aggcgctagaccgtatccgaattcg

SEQ ID NO: 5921412 - DNA, 25 bp, Homo sapien
aggcactacgcgtaagccgcctaaa

SEQ ID NO: 5921413 - DNA, 25 bp, Homo sapien
tagagctacgcgtgacggtttgcgt

SEQ ID NO: 5921414 - DNA, 25 bp, Homo sapien
cacgagtgatccgatacgctgtcgt

SEQ ID NO: 5921415 - DNA, 25 bp, Homo sapien
gggtgctagacgcgcgaaaggtttt

SEQ ID NO: 5921416 - DNA, 25 bp, Homo sapien
gtttgccgcgactttacgtgaaggg

SEQ ID NO: 5921417 - DNA, 25 bp, Homo sapien
ttgatgcgagcgatactaccctggg

SEQ ID NO: 5921418 - DNA, 25 bp, Homo sapien
gcatctacgcgcgttggattctcca

SEQ ID NO: 5921419 - DNA, 25 bp, Homo sapien
gcacggcgtctaatacgcctgtaac

SEQ ID NO: 5921420 - DNA, 25 bp, Homo sapien
catccacggttatacgccgtgtgca

SEQ ID NO: 5921421 - DNA, 25 bp, Homo sapien
gcagtcaatacgcccgtcggataca

SEQ ID NO: 5921422 - DNA, 25 bp, Homo sapien
gctaggcgttccgctacggtatcat

SEQ ID NO: 5921423 - DNA, 25 bp, Homo sapien
gtcccctatcgctgttacggtcaca

SEQ ID NO: 5921424 - DNA, 25 bp, Homo sapien
tccatagcgatacgccgatctgcgt

SEQ ID NO: 5921425 - DNA, 25 bp, Homo sapien
tttgagtagctagtcgccgtgcctg

SEQ ID NO: 5921426 - DNA, 25 bp, Homo sapien
tgcgagggacgtaacgcttgtagtc

SEQ ID NO: 5921427 - DNA, 25 bp, Homo sapien
gggaccatcaacgcgtcgctaaaag

SEQ ID NO: 5921428 - DNA, 25 bp, Homo sapien
catattacggtataccgcccgcgtc

SEQ ID NO: 5921429 - DNA, 25 bp, Homo sapien
tcgtgaccgcgtaacttcgttccca

SEQ ID NO: 5921430 - DNA, 25 bp, Homo sapien
aacgctcgcgatacgtcgatgcgat

SEQ ID NO: 5921431 - DNA, 25 bp, Homo sapien
tgctcggtatactagcgcggcaaac

SEQ ID NO: 5921432 - DNA, 25 bp, Homo sapien
aactctttcgcgtaccaatggccgg

SEQ ID NO: 5921433 - DNA, 25 bp, Homo sapien
acttgcgttacacgcgcgattcgca

SEQ ID NO: 5921434 - DNA, 25 bp, Homo sapien
gttttctaggtccgatcgcgactcc

SEQ ID NO: 5921435 - DNA, 25 bp, Homo sapien
tcctttcccgtcgcgatattgccct

SEQ ID NO: 5921436 - DNA, 25 bp, Homo sapien
tgagcttcccgcgtacctattaggg

SEQ ID NO: 5921437 - DNA, 25 bp, Homo sapien
gttgggctacatcgcgaccattctg

SEQ ID NO: 5921438 - DNA, 25 bp, Homo sapien
actcgagcctaatcgcggacggatt

SEQ ID NO: 5921439 - DNA, 25 bp, Homo sapien
ctccatcgtacgcagtatcccacga

SEQ ID NO: 5921440 - DNA, 25 bp, Homo sapien
tagggtcgcgtcgttagtatcgtgg

SEQ ID NO: 5921441 - DNA, 25 bp, Homo sapien
gtcagaacgtctcgcgtaatgcgca

SEQ ID NO: 5921442 - DNA, 25 bp, Homo sapien
tggtggtatcgcgtgcgttgcgttt

SEQ ID NO: 5921443 - DNA, 25 bp, Homo sapien
cggtcgggaccgcgtattagactta

SEQ ID NO: 5921444 - DNA, 25 bp, Homo sapien
gagacacccggtaatccgtgattgg

SEQ ID NO: 5921445 - DNA, 25 bp, Homo sapien
gggggtgaccggtcgtatatgagtt

SEQ ID NO: 5921446 - DNA, 25 bp, Homo sapien
actgtcacgcgtatagcctccgaag

SEQ ID NO: 5921447 - DNA, 25 bp, Homo sapien
tgaatcagtgttacgccgagcctgc

SEQ ID NO: 5921448 - DNA, 25 bp, Homo sapien
tatgtggtaccgcggacatcacagc

SEQ ID NO: 5921449 - DNA, 25 bp, Homo sapien
tcactaagatgcgctatcgccggga

SEQ ID NO: 5921450 - DNA, 25 bp, Homo sapien
gggtgacggtccgcataagcattgt

SEQ ID NO: 5921451 - DNA, 25 bp, Homo sapien
acctggaattgtcgtacgccttgcc

SEQ ID NO: 5921452 - DNA, 25 bp, Homo sapien
acttcatcgcgcgactaatcagcgc

SEQ ID NO: 5921453 - DNA, 25 bp, Homo sapien
cctcctcctaacgacgattcggtac

SEQ ID NO: 5921454 - DNA, 25 bp, Homo sapien
ggtgtgatacggcgttcgtgtgatg

SEQ ID NO: 5921455 - DNA, 25 bp, Homo sapien
agtaatcatacgggtcgcggtgcct

SEQ ID NO: 5921456 - DNA, 25 bp, Homo sapien
agcgacataccccgcgttagacgaa

SEQ ID NO: 5921457 - DNA, 25 bp, Homo sapien
tacgtgttgcgtagcggtagctctc

SEQ ID NO: 5921458 - DNA, 25 bp, Homo sapien
ttaccgccgacctatccgcaaaacg

SEQ ID NO: 5921459 - DNA, 25 bp, Homo sapien
cggcgaatagagtccgcgatcctaa

SEQ ID NO: 5921460 - DNA, 25 bp, Homo sapien
tttgcgcgccggattgttaccacac

SEQ ID NO: 5921461 - DNA, 25 bp, Homo sapien
gctgattaccggtgcgtatggtggt

SEQ ID NO: 5921462 - DNA, 25 bp, Homo sapien
taacacgttacgcgcggtagtagcg

SEQ ID NO: 5921463 - DNA, 25 bp, Homo sapien
ggtcttgcgtcgatacgttctaggc

SEQ ID NO: 5921464 - DNA, 25 bp, Homo sapien
cacaagtgcgttaacgtcgagccga

SEQ ID NO: 5921465 - DNA, 25 bp, Homo sapien
ctgatacgcgtagcagtacatgggc

SEQ ID NO: 5921466 - DNA, 25 bp, Homo sapien
ggaatctcgacgttatgcggagcct

SEQ ID NO: 5921467 - DNA, 25 bp, Homo sapien
gtggcgttcgcgagatgactgtttg

SEQ ID NO: 5921468 - DNA, 25 bp, Homo sapien
ctcattttgtgacgaccggcggtgt

SEQ ID NO: 5921469 - DNA, 25 bp, Homo sapien
caacgaggtcacgctacgtaccagt

SEQ ID NO: 5921470 - DNA, 25 bp, Homo sapien
agaaagtgatcgcggaatcgctgcc

SEQ ID NO: 5921471 - DNA, 25 bp, Homo sapien
caccacacgattgacgccgatacca

SEQ ID NO: 5921472 - DNA, 25 bp, Homo sapien
gggtagtaggcgcgattgctgacta

SEQ ID NO: 5921473 - DNA, 25 bp, Homo sapien
tggggtcgcgcctagacattagttg

SEQ ID NO: 5921474 - DNA, 25 bp, Homo sapien
atctcgcgtgataccgcggtagagt

SEQ ID NO: 5921475 - DNA, 25 bp, Homo sapien
tttgcttagtacgcgtcgagcccgt

SEQ ID NO: 5921476 - DNA, 25 bp, Homo sapien
gtaagagcggtacgttacccctcga

SEQ ID NO: 5921477 - DNA, 25 bp, Homo sapien
gactgactagccgcgcgaacttcaa

SEQ ID NO: 5921478 - DNA, 25 bp, Homo sapien
acggcctagcgcgatgatcgtaaac

SEQ ID NO: 5921479 - DNA, 25 bp, Homo sapien
tatgaactacgagtggtcggaggcc

SEQ ID NO: 5921480 - DNA, 25 bp, Homo sapien
accaagcgcggtacgacaaaccaga

SEQ ID NO: 5921481 - DNA, 25 bp, Homo sapien
cgttcccggtttgacgcgatagtag

SEQ ID NO: 5921482 - DNA, 25 bp, Homo sapien
ggcgatcgcgactacgtatagggtt

SEQ ID NO: 5921483 - DNA, 25 bp, Homo sapien
ttatggaacgcgatacgcctctcgc

SEQ ID NO: 5921484 - DNA, 25 bp, Homo sapien
tctacaggtcggttcaacgggtctc

SEQ ID NO: 5921485 - DNA, 25 bp, Homo sapien
ctacgaatacggctcgaagtgtgcg

SEQ ID NO: 5921486 - DNA, 25 bp, Homo sapien
tgaacccgctcgtacttcgcatgac

SEQ ID NO: 5921487 - DNA, 25 bp, Homo sapien
gctcctttaccgcggactatcgaac

SEQ ID NO: 5921488 - DNA, 25 bp, Homo sapien
cagccatcgttcgacggtaagtgac

SEQ ID NO: 5921489 - DNA, 25 bp, Homo sapien
gggtagttaagcgccgtacttcgca

SEQ ID NO: 5921490 - DNA, 25 bp, Homo sapien
acacgtcattagaccgcgtcaccag

SEQ ID NO: 5921491 - DNA, 25 bp, Homo sapien
ggcgcaatccgagcggttaagtttg

SEQ ID NO: 5921492 - DNA, 25 bp, Homo sapien
cgctgagacgaaccgtacttcagca

SEQ ID NO: 5921493 - DNA, 25 bp, Homo sapien
gaggtttatagcgcgcgtcacgcaa

SEQ ID NO: 5921494 - DNA, 25 bp, Homo sapien
ggactacgtacgagccgttggttga

SEQ ID NO: 5921495 - DNA, 25 bp, Homo sapien
tggggtcgcgtctcgaatagggtta

SEQ ID NO: 5921496 - DNA, 25 bp, Homo sapien
tcatgcgacgcgtacgtattgggca

SEQ ID NO: 5921497 - DNA, 25 bp, Homo sapien
ggaatccgaccgaatacaccacggt

SEQ ID NO: 5921498 - DNA, 25 bp, Homo sapien
tcttctcgtaccggcgcttgactac

SEQ ID NO: 5921499 - DNA, 25 bp, Homo sapien
caattggcggcataacggtcaggct

SEQ ID NO: 5921500 - DNA, 25 bp, Homo sapien
tgggtccggcgcatagtatactgct

SEQ ID NO: 5921501 - DNA, 25 bp, Homo sapien
aggtcaaggcaacggtcgtaagcca

SEQ ID NO: 5921502 - DNA, 25 bp, Homo sapien
gtagtcgccgcacgtaacggtatac

SEQ ID NO: 5921503 - DNA, 25 bp, Homo sapien
aacatgccgttccgtcatactcccc

SEQ ID NO: 5921504 - DNA, 25 bp, Homo sapien
ggtagtacgcgtaatcgactgcgct

SEQ ID NO: 5921505 - DNA, 25 bp, Homo sapien
ttagaccgagcgtatagcggtgcga

SEQ ID NO: 5921506 - DNA, 25 bp, Homo sapien
ccaagtgagacgcgttgtaaggcgt

SEQ ID NO: 5921507 - DNA, 25 bp, Homo sapien
acccgttatgcgcgaatcgtacagc

SEQ ID NO: 5921508 - DNA, 25 bp, Homo sapien
agatggacgctatttcgcgcggtgt

SEQ ID NO: 5921509 - DNA, 25 bp, Homo sapien
aggcatcggacttatgcggacacag

SEQ ID NO: 5921510 - DNA, 25 bp, Homo sapien
ccgtgccgctcgttatacgatagag

SEQ ID NO: 5921511 - DNA, 25 bp, Homo sapien
acgatctaacgtgtcggacggaacc

SEQ ID NO: 5921512 - DNA, 25 bp, Homo sapien
gatatcttagtcggacgcgcgggtt

SEQ ID NO: 5921513 - DNA, 25 bp, Homo sapien
tcccgttcgcgagacatagatgagc

SEQ ID NO: 5921514 - DNA, 25 bp, Homo sapien
aatggttatgtcgcgccgagtgcag

SEQ ID NO: 5921515 - DNA, 25 bp, Homo sapien
gagcggttagcgccgatagcatatg

SEQ ID NO: 5921516 - DNA, 25 bp, Homo sapien
ctgcttcgtacggtcgctactttcg

SEQ ID NO: 5921517 - DNA, 25 bp, Homo sapien
aaggtgcgcgtagtccaaaaggcgt

SEQ ID NO: 5921518 - DNA, 25 bp, Homo sapien
tctagggactacgcgcgtacagcaa

SEQ ID NO: 5921519 - DNA, 25 bp, Homo sapien
tctcgagacgtccgacataggagtc

SEQ ID NO: 5921520 - DNA, 25 bp, Homo sapien
gaataatcgcgcgaatagccacgcc

SEQ ID NO: 5921521 - DNA, 25 bp, Homo sapien
agccggacgtcgcgtatagttcatc

SEQ ID NO: 5921522 - DNA, 25 bp, Homo sapien
acttagcgtccgcgaatggacaacg

SEQ ID NO: 5921523 - DNA, 25 bp, Homo sapien
aacgcacgcgagtaatacgaccacg

SEQ ID NO: 5921524 - DNA, 25 bp, Homo sapien
caaacggttctatcccgcgagctca

SEQ ID NO: 5921525 - DNA, 25 bp, Homo sapien
cttctctcgcgacctgtagaaccac

SEQ ID NO: 5921526 - DNA, 25 bp, Homo sapien
cagcgtcgttaacgcgtggctacaa

SEQ ID NO: 5921527 - DNA, 25 bp, Homo sapien
gccgcgcgcgtatatcgtgacatat

SEQ ID NO: 5921528 - DNA, 25 bp, Homo sapien
gactatgcgcggacggtttagcaca

SEQ ID NO: 5921529 - DNA, 25 bp, Homo sapien
aggtaacggagcgctataccgctca

SEQ ID NO: 5921530 - DNA, 25 bp, Homo sapien
ggtcatcggctatgttgcgggcata

SEQ ID NO: 5921531 - DNA, 25 bp, Homo sapien
gcaaagcgttccgtaacgttgcgac

SEQ ID NO: 5921532 - DNA, 25 bp, Homo sapien
ctgtaactatccgcttgcgtcccac

SEQ ID NO: 5921533 - DNA, 25 bp, Homo sapien
cacattcgcgacatacgtacccctc

SEQ ID NO: 5921534 - DNA, 25 bp, Homo sapien
ctgggcgcccgcgatataatgaaga

SEQ ID NO: 5921535 - DNA, 25 bp, Homo sapien
cttccattgcgcgggctattcggaa

SEQ ID NO: 5921536 - DNA, 25 bp, Homo sapien
ggcttaatgtcgcgcgtaccaacca

SEQ ID NO: 5921537 - DNA, 25 bp, Homo sapien
agcaccctatgtccgacgctgaatc

SEQ ID NO: 5921538 - DNA, 25 bp, Homo sapien
ggccgtgagcacgttacgagattag

SEQ ID NO: 5921539 - DNA, 25 bp, Homo sapien
acatcccgacgtcgagtctagacag

SEQ ID NO: 5921540 - DNA, 25 bp, Homo sapien
caacatcgtctatcgcacggtgtcc

SEQ ID NO: 5921541 - DNA, 25 bp, Homo sapien
gcctcaatcgcgcgaattcaagtgc

SEQ ID NO: 5921542 - DNA, 25 bp, Homo sapien
gcttgagtttcgcgcgtagcctgta

SEQ ID NO: 5921543 - DNA, 25 bp, Homo sapien
ttgacgacgtcgggtctaacgtctg

SEQ ID NO: 5921544 - DNA, 25 bp, Homo sapien
ctccgacgacgcgtaattcccttac

SEQ ID NO: 5921545 - DNA, 25 bp, Homo sapien
cagctaggcgttaacgacgattccg

SEQ ID NO: 5921546 - DNA, 25 bp, Homo sapien
actatgccggacgcgatatacaccg

SEQ ID NO: 5921547 - DNA, 25 bp, Homo sapien
caccagatagctcgcgctatcacac

SEQ ID NO: 5921548 - DNA, 25 bp, Homo sapien
cttagaggctattacgcgtcgggca

SEQ ID NO: 5921549 - DNA, 25 bp, Homo sapien
ttaccgcgacgtatagggcaaacgc

SEQ ID NO: 5921550 - DNA, 25 bp, Homo sapien
cacactacgcatcgtaccgacctct

SEQ ID NO: 5921551 - DNA, 25 bp, Homo sapien
gtacaacgaatccgacggggcgatt

SEQ ID NO: 5921552 - DNA, 25 bp, Homo sapien
gaggttctacttagcgcggtgccaa

SEQ ID NO: 5921553 - DNA, 25 bp, Homo sapien
atagagcgacgtcgcgctatgcaac

SEQ ID NO: 5921554 - DNA, 25 bp, Homo sapien
catgggcgtccgacgttattccctt

SEQ ID NO: 5921555 - DNA, 25 bp, Homo sapien
gaatctgtctatgctcgcgcgtctc

SEQ ID NO: 5921556 - DNA, 25 bp, Homo sapien
gggcacttgccggtatacggattac

SEQ ID NO: 5921557 - DNA, 25 bp, Homo sapien
aggtcatgtcgcgagacaacggaga

SEQ ID NO: 5921558 - DNA, 25 bp, Homo sapien
taatgttcgtacgacgctacggggg

SEQ ID NO: 5921559 - DNA, 25 bp, Homo sapien
tagcgtcgtccgcgagtaatgacca

SEQ ID NO: 5921560 - DNA, 25 bp, Homo sapien
tagggacgtcgcgtagttagccgat

SEQ ID NO: 5921561 - DNA, 25 bp, Homo sapien
ccatatgtcgcgactagtggactcc

SEQ ID NO: 5921562 - DNA, 25 bp, Homo sapien
ctttgacgcgagcccaattaccgct

SEQ ID NO: 5921563 - DNA, 25 bp, Homo sapien
gtcgtttccgcgctaagagaccgtt

SEQ ID NO: 5921564 - DNA, 25 bp, Homo sapien
caatcgaccagccgtatcgtcctca

SEQ ID NO: 5921565 - DNA, 25 bp, Homo sapien
ccccgtataccgcgtcgtaaatgag

SEQ ID NO: 5921566 - DNA, 25 bp, Homo sapien
tattctcgccaacgcgatagggtcc

SEQ ID NO: 5921567 - DNA, 25 bp, Homo sapien
cctgaacgcacgtagtcgaatcggt

SEQ ID NO: 5921568 - DNA, 25 bp, Homo sapien
attgaggttcgagtagtcggcctcc

SEQ ID NO: 5921569 - DNA, 25 bp, Homo sapien
gctagtgccgcgttagagtctatcc

SEQ ID NO: 5921570 - DNA, 25 bp, Homo sapien
aattgcccggtatagtacgacccgc

SEQ ID NO: 5921571 - DNA, 25 bp, Homo sapien
tcggaggtcgacgcgggtaactaat

SEQ ID NO: 5921572 - DNA, 25 bp, Homo sapien
aaagctattactcgcgggtccgtgc

SEQ ID NO: 5921573 - DNA, 25 bp, Homo sapien
gaggggtagtaaagcgtcgacaagg

SEQ ID NO: 5921574 - DNA, 25 bp, Homo sapien
gggactcgccgattactcggtaact

SEQ ID NO: 5921575 - DNA, 25 bp, Homo sapien
cagccccgcactagcgatatcaact

SEQ ID NO: 5921576 - DNA, 25 bp, Homo sapien
cacgagcgactactcgaactcacgt

SEQ ID NO: 5921577 - DNA, 25 bp, Homo sapien
cacaagccggtacgactatggtgag

SEQ ID NO: 5921578 - DNA, 25 bp, Homo sapien
agacgactcgataggcgctcctaac

SEQ ID NO: 5921579 - DNA, 25 bp, Homo sapien
gcagtgcgatacttcgtacggaacc

SEQ ID NO: 5921580 - DNA, 25 bp, Homo sapien
cggttccgctcgacctaagtgatca

SEQ ID NO: 5921581 - DNA, 25 bp, Homo sapien
aatccagtacgtcgcgccaagccaa

SEQ ID NO: 5921582 - DNA, 25 bp, Homo sapien
tgaggccgcgctacgttacatcaga

SEQ ID NO: 5921583 - DNA, 25 bp, Homo sapien
gggtaccgatacgtcccgtctctaa

SEQ ID NO: 5921584 - DNA, 25 bp, Homo sapien
gaaatcacgaatcgcgggtccacag

SEQ ID NO: 5921585 - DNA, 25 bp, Homo sapien
ggtccacgatacgcgaactggtatg

SEQ ID NO: 5921586 - DNA, 25 bp, Homo sapien
cgcatgtatagcggcgtacgcacaa

SEQ ID NO: 5921587 - DNA, 25 bp, Homo sapien
ccagcgggcgtagtatcgtagatgt

SEQ ID NO: 5921588 - DNA, 25 bp, Homo sapien
acacaccgaacgcggtagtctatcg

SEQ ID NO: 5921589 - DNA, 25 bp, Homo sapien
acctacataccgttcgcgtcatccg

SEQ ID NO: 5921590 - DNA, 25 bp, Homo sapien
ccgctaaccgtctaacgcgagtcta

SEQ ID NO: 5921591 - DNA, 25 bp, Homo sapien
gggtaggcgtgttacgacgactgtt

SEQ ID NO: 5921592 - DNA, 25 bp, Homo sapien
gcgacaacggtatcgcgcataagca

SEQ ID NO: 5921593 - DNA, 25 bp, Homo sapien
aaatcgtcggcgtgcgatagtggca

SEQ ID NO: 5921594 - DNA, 25 bp, Homo sapien
actgagcgcgtctaatcgtatggcc

SEQ ID NO: 5921595 - DNA, 25 bp, Homo sapien
tggcgtacttcgcgagttaccttcg

SEQ ID NO: 5921596 - DNA, 25 bp, Homo sapien
ccagcacctaaacgaccggcatgta

SEQ ID NO: 5921597 - DNA, 25 bp, Homo sapien
tagtggccactagtacgcggaatgc

SEQ ID NO: 5921598 - DNA, 25 bp, Homo sapien
ttgtgatatagttcgcgcgcaccgg

SEQ ID NO: 5921599 - DNA, 25 bp, Homo sapien
agattatagtcgccgtacgcgccag

SEQ ID NO: 5921600 - DNA, 25 bp, Homo sapien
ccctcgcggtccgataacagtaatg

SEQ ID NO: 5921601 - DNA, 25 bp, Homo sapien
gttaaccgtggtcgtacgagatcgc

SEQ ID NO: 5921602 - DNA, 25 bp, Homo sapien
ttccgtcggaacggcatatgcccaa

SEQ ID NO: 5921603 - DNA, 25 bp, Homo sapien
atgggtattagcgtaccggccgctt

SEQ ID NO: 5921604 - DNA, 25 bp, Homo sapien
tgtacgtacggaacgggtgtagacg

SEQ ID NO: 5921605 - DNA, 25 bp, Homo sapien
attccatccgcgcgttatagggcac

SEQ ID NO: 5921606 - DNA, 25 bp, Homo sapien
ataagccgtacaagaccgctcctcc

SEQ ID NO: 5921607 - DNA, 25 bp, Homo sapien
tgaccatcggcgataggtttgcgtg

SEQ ID NO: 5921608 - DNA, 25 bp, Homo sapien
gagctccgccgatagacctattgag

SEQ ID NO: 5921609 - DNA, 25 bp, Homo sapien
caagagccccgtagtacgacagaga

SEQ ID NO: 5921610 - DNA, 25 bp, Homo sapien
agaatgtataccgtcgacgctcggg

SEQ ID NO: 5921611 - DNA, 25 bp, Homo sapien
tgctgctggatagcgcgatactctg

SEQ ID NO: 5921612 - DNA, 25 bp, Homo sapien
cagggccgtcatatagcgcttgagt

SEQ ID NO: 5921613 - DNA, 25 bp, Homo sapien
tagagataccgagcgcggacacgtt

SEQ ID NO: 5921614 - DNA, 25 bp, Homo sapien
ccacgtttgaacgcgcacgactaca

SEQ ID NO: 5921615 - DNA, 25 bp, Homo sapien
cgtccccgcgacgtatcagtaacaa

SEQ ID NO: 5921616 - DNA, 25 bp, Homo sapien
acacccatagcttcgcgcgatgact

SEQ ID NO: 5921617 - DNA, 25 bp, Homo sapien
cctcactcaatcgtccgggaatgag

SEQ ID NO: 5921618 - DNA, 25 bp, Homo sapien
gcaagttaaagcgccgatcgacacg

SEQ ID NO: 5921619 - DNA, 25 bp, Homo sapien
tactacctcgtatcgggtcagggct

SEQ ID NO: 5921620 - DNA, 25 bp, Homo sapien
aatgtgatatcgcggaccgtccacc

SEQ ID NO: 5921621 - DNA, 25 bp, Homo sapien
cagtagcgcgtgttatgcccgaaac

SEQ ID NO: 5921622 - DNA, 25 bp, Homo sapien
ctcacacgttgcgtcccgacctttt

SEQ ID NO: 5921623 - DNA, 25 bp, Homo sapien
gtgaccggtacgatgcgtccaagtt

SEQ ID NO: 5921624 - DNA, 25 bp, Homo sapien
cggaaaagcgcgcccgtaaaacaga

SEQ ID NO: 5921625 - DNA, 25 bp, Homo sapien
ttcccgacgtagtcgcaaccatacg

SEQ ID NO: 5921626 - DNA, 25 bp, Homo sapien
atggctcggttagcgctatcgttcg

SEQ ID NO: 5921627 - DNA, 25 bp, Homo sapien
cccgatcgttaacggcctataggga

SEQ ID NO: 5921628 - DNA, 25 bp, Homo sapien
tgacctacgacggtatacgcgacca

SEQ ID NO: 5921629 - DNA, 25 bp, Homo sapien
ccgcttctatacttcgcggctcgaa

SEQ ID NO: 5921630 - DNA, 25 bp, Homo sapien
cgttcacacgatagtacgggagcag

SEQ ID NO: 5921631 - DNA, 25 bp, Homo sapien
gatgcttacgcgcgatacaaggcac

SEQ ID NO: 5921632 - DNA, 25 bp, Homo sapien
tcggctaataccgcgcgatgggtta

SEQ ID NO: 5921633 - DNA, 25 bp, Homo sapien
acttgggggcgcgataatacacgct

SEQ ID NO: 5921634 - DNA, 25 bp, Homo sapien
ccggaagatagcgttcgcgtcgatt

SEQ ID NO: 5921635 - DNA, 25 bp, Homo sapien
ggtgtttttcgcgtaagcgcaacgc

SEQ ID NO: 5921636 - DNA, 25 bp, Homo sapien
ggggaaaatcttacgtcgcgcttgc

SEQ ID NO: 5921637 - DNA, 25 bp, Homo sapien
catgttcgcggattgcgttggtgct

SEQ ID NO: 5921638 - DNA, 25 bp, Homo sapien
actcgtaaccgtccgcgtagcttgt

SEQ ID NO: 5921639 - DNA, 25 bp, Homo sapien
gtccgtccgaccggtatacacttac

SEQ ID NO: 5921640 - DNA, 25 bp, Homo sapien
cgggcagaacgctcgtacgagatat

SEQ ID NO: 5921641 - DNA, 25 bp, Homo sapien
ttggctaccgaacccgcatctctgt

SEQ ID NO: 5921642 - DNA, 25 bp, Homo sapien
tagaacttaagccgcggtcgagtgc

SEQ ID NO: 5921643 - DNA, 25 bp, Homo sapien
gatgcctaccgacggacgattacga

SEQ ID NO: 5921644 - DNA, 25 bp, Homo sapien
gtcagacgcgtaatcgacgaccact

SEQ ID NO: 5921645 - DNA, 25 bp, Homo sapien
ccggtgatcgcgatacgacatcaac

SEQ ID NO: 5921646 - DNA, 25 bp, Homo sapien
tccacacgtgagtatcgcgtaccac

SEQ ID NO: 5921647 - DNA, 25 bp, Homo sapien
actccgcgggtactaatcgcagcat

SEQ ID NO: 5921648 - DNA, 25 bp, Homo sapien
ctaacacggggggtatcgtgatcag

SEQ ID NO: 5921649 - DNA, 25 bp, Homo sapien
gtggctccgtacgagcgtatcgatt

SEQ ID NO: 5921650 - DNA, 25 bp, Homo sapien
gctggttatccgaacgcgtttcggt

SEQ ID NO: 5921651 - DNA, 25 bp, Homo sapien
cccagagttatcgaccgctgaacag

SEQ ID NO: 5921652 - DNA, 25 bp, Homo sapien
gcgagccactagcgttgcgtaattc

SEQ ID NO: 5921653 - DNA, 25 bp, Homo sapien
accaactaccgttcgcgcaagagca

SEQ ID NO: 5921654 - DNA, 25 bp, Homo sapien
cctagagtcgctagaccgtgagtgt

SEQ ID NO: 5921655 - DNA, 25 bp, Homo sapien
ccatagacgggcccgtatctgaaga

SEQ ID NO: 5921656 - DNA, 25 bp, Homo sapien
gatcgctcgttagtacgggtagtgg

SEQ ID NO: 5921657 - DNA, 25 bp, Homo sapien
cggaacgatacgcgaggtgtaatgg

SEQ ID NO: 5921658 - DNA, 25 bp, Homo sapien
ttccctgacttacgccgcgaatccc

SEQ ID NO: 5921659 - DNA, 25 bp, Homo sapien
gagcatcgcgacgatacctcgagga

SEQ ID NO: 5921660 - DNA, 25 bp, Homo sapien
tgggggataggcccgatcgaagaag

SEQ ID NO: 5921661 - DNA, 25 bp, Homo sapien
tcggtgcgcggattgtaccgaacct

SEQ ID NO: 5921662 - DNA, 25 bp, Homo sapien
atgggatcgcgctagagtggctagc

SEQ ID NO: 5921663 - DNA, 25 bp, Homo sapien
cgaacctgcggcgtgtcgttttggt

SEQ ID NO: 5921664 - DNA, 25 bp, Homo sapien
acggccctagtcgtacgctgacgat

SEQ ID NO: 5921665 - DNA, 25 bp, Homo sapien
aacggacgcgtatccgcaagtgctg

SEQ ID NO: 5921666 - DNA, 25 bp, Homo sapien
ccacgttaacgtagggcgagacagg

SEQ ID NO: 5921667 - DNA, 25 bp, Homo sapien
agatgtataacggcgcgccctaggc

SEQ ID NO: 5921668 - DNA, 25 bp, Homo sapien
tacccttaacggatcgccgcgatgc

SEQ ID NO: 5921669 - DNA, 25 bp, Homo sapien
accatctactacgggcgtcgagtcc

SEQ ID NO: 5921670 - DNA, 25 bp, Homo sapien
tacgttggcgacctagtcgttcggg

SEQ ID NO: 5921671 - DNA, 25 bp, Homo sapien
tctccgcgtccgtcgagtaaaacgc

SEQ ID NO: 5921672 - DNA, 25 bp, Homo sapien
tgggagcgtgagcgacgatgtacct

SEQ ID NO: 5921673 - DNA, 25 bp, Homo sapien
actgttccgactcgcgtagcaggtc

SEQ ID NO: 5921674 - DNA, 25 bp, Homo sapien
cagtggtaacggacgggtcgtgtga

SEQ ID NO: 5921675 - DNA, 25 bp, Homo sapien
ccgaagcgatcgcgacgtctcctaa

SEQ ID NO: 5921676 - DNA, 25 bp, Homo sapien
attcagcgcgcgaatacgactggcc

SEQ ID NO: 5921677 - DNA, 25 bp, Homo sapien
ctctcctacgtccgctagcggatgt

SEQ ID NO: 5921678 - DNA, 25 bp, Homo sapien
accggcgcgatataccgctcctgta

SEQ ID NO: 5921679 - DNA, 25 bp, Homo sapien
cgggcaacttattcccgcgtgtcac

SEQ ID NO: 5921680 - DNA, 25 bp, Homo sapien
acagcgacgtggcgtatcgagcagt

SEQ ID NO: 5921681 - DNA, 25 bp, Homo sapien
tatcgtgcgcggcattacgactgcg

SEQ ID NO: 5921682 - DNA, 25 bp, Homo sapien
gccatccgcacggtatacggggttt

SEQ ID NO: 5921683 - DNA, 25 bp, Homo sapien
ggcgtgtacgtaccgctcctaaggt

SEQ ID NO: 5921684 - DNA, 25 bp, Homo sapien
gcaatgctagtcgcgcgtaggggta

SEQ ID NO: 5921685 - DNA, 25 bp, Homo sapien
ctaatttcgggtacgcgcctgagcc

SEQ ID NO: 5921686 - DNA, 25 bp, Homo sapien
tggatacgcgctacgatgtacgggc

SEQ ID NO: 5921687 - DNA, 25 bp, Homo sapien
cacccgcggagttacgacgaagctt

SEQ ID NO: 5921688 - DNA, 25 bp, Homo sapien
ccaaaatacggacgctcgtcccacg

SEQ ID NO: 5921689 - DNA, 25 bp, Homo sapien
cccttacggacctcgatactggctc

SEQ ID NO: 5921690 - DNA, 25 bp, Homo sapien
cgctagtacgcgaccgatcttcacg

SEQ ID NO: 5921691 - DNA, 25 bp, Homo sapien
agccgctatgcgaggcgaaccgatt

SEQ ID NO: 5921692 - DNA, 25 bp, Homo sapien
agtagccgtcgaacgtaggagcggt

SEQ ID NO: 5921693 - DNA, 25 bp, Homo sapien
cacaccgatctacggcccgattgca

SEQ ID NO: 5921694 - DNA, 25 bp, Homo sapien
cgagctcacccgttatacgcactgg

SEQ ID NO: 5921695 - DNA, 25 bp, Homo sapien
ggttttgcgtgtaacgcgaccgcag

SEQ ID NO: 5921696 - DNA, 25 bp, Homo sapien
tccgtttcgccggtctacgcaggtt

SEQ ID NO: 5921697 - DNA, 25 bp, Homo sapien
gcacaagacgcgttaacggggatgg

SEQ ID NO: 5921698 - DNA, 25 bp, Homo sapien
atgcgccgtacgggtacgcctgata

SEQ ID NO: 5921699 - DNA, 25 bp, Homo sapien
gtctgtttacgacgcggtaccagcc

SEQ ID NO: 5921700 - DNA, 25 bp, Homo sapien
tcacgaccgcttatatgcgcggctg

SEQ ID NO: 5921701 - DNA, 25 bp, Homo sapien
cttgctctatgcggcacgaacgacg

SEQ ID NO: 5921702 - DNA, 25 bp, Homo sapien
actcactagcgacgttcggagctgc

SEQ ID NO: 5921703 - DNA, 25 bp, Homo sapien
gcagcaggtacgccaatacgcctca

SEQ ID NO: 5921704 - DNA, 25 bp, Homo sapien
gacagcatttacctcgcgcggtgtc

SEQ ID NO: 5921705 - DNA, 25 bp, Homo sapien
gaacatgcgtaccgcctaagggcga

SEQ ID NO: 5921706 - DNA, 25 bp, Homo sapien
atcctcacggtacgcgttaggcctc

SEQ ID NO: 5921707 - DNA, 25 bp, Homo sapien
tgggatgccgttacgtcggacgtct

SEQ ID NO: 5921708 - DNA, 25 bp, Homo sapien
acctctgcgcgggtcctaacttagc

SEQ ID NO: 5921709 - DNA, 25 bp, Homo sapien
aagcccatgcgacgaaccgtgcgat

SEQ ID NO: 5921710 - DNA, 25 bp, Homo sapien
ggcctggttcggtccgataaagcgt

SEQ ID NO: 5921711 - DNA, 25 bp, Homo sapien
agacggcccgcgttacgaaacagag

SEQ ID NO: 5921712 - DNA, 25 bp, Homo sapien
cgaagatagtcggcccgaaccttgc

SEQ ID NO: 5921713 - DNA, 25 bp, Homo sapien
gtaatcatagcggttcgcgctggcc

SEQ ID NO: 5921714 - DNA, 25 bp, Homo sapien
ggcgacggcaatacgcgacactctt

SEQ ID NO: 5921715 - DNA, 25 bp, Homo sapien
caacaaacggtaatacggcgcgcgg

SEQ ID NO: 5921716 - DNA, 25 bp, Homo sapien
ctgatgccgaccgcgtaaaaaggcc

SEQ ID NO: 5921717 - DNA, 25 bp, Homo sapien
cagtcttacgcgtcgtgattggccg

SEQ ID NO: 5921718 - DNA, 25 bp, Homo sapien
agactggtacgacacgtcgcggtct

SEQ ID NO: 5921719 - DNA, 25 bp, Homo sapien
tatgccgacgtcgcgcataacgcag

SEQ ID NO: 5921720 - DNA, 25 bp, Homo sapien
atcgatctagtacgcgagggggagg

SEQ ID NO: 5921721 - DNA, 25 bp, Homo sapien
cacgattggatcgatccggagcgac

SEQ ID NO: 5921722 - DNA, 25 bp, Homo sapien
tgcgcccgactatccgcgatgttga

SEQ ID NO: 5921723 - DNA, 25 bp, Homo sapien
tcaccgcgcgagtcgttaccgtatg

SEQ ID NO: 5921724 - DNA, 25 bp, Homo sapien
tttggcgttagtcggacgctggctg

SEQ ID NO: 5921725 - DNA, 25 bp, Homo sapien
gcagacttgcgtagcggacgtccat

SEQ ID NO: 5921726 - DNA, 25 bp, Homo sapien
gcggaggcgaaccgtataccatgca

SEQ ID NO: 5921727 - DNA, 25 bp, Homo sapien
tgctcttggatcgcggttaagcgcc

SEQ ID NO: 5921728 - DNA, 25 bp, Homo sapien
agagtgtagtctaccgcgcctctgg

SEQ ID NO: 5921729 - DNA, 25 bp, Homo sapien
gccatctaactcccgcgtagtgacc

SEQ ID NO: 5921730 - DNA, 25 bp, Homo sapien
ttgacgtacgtcggagcgcatcgct

SEQ ID NO: 5921731 - DNA, 25 bp, Homo sapien
tgcacccgaccaacccgatctccat

SEQ ID NO: 5921732 - DNA, 25 bp, Homo sapien
ctgaagccgtaaagtcgcgccaagc

SEQ ID NO: 5921733 - DNA, 25 bp, Homo sapien
aatcgtggcccgtatgcgacgaacc

SEQ ID NO: 5921734 - DNA, 25 bp, Homo sapien
gacgggacgctagacggtctaaggt

SEQ ID NO: 5921735 - DNA, 25 bp, Homo sapien
agcaccattgacaaccgcgcgccaa

SEQ ID NO: 5921736 - DNA, 25 bp, Homo sapien
ctgcgcatgtagcgtcgtagtcgga

SEQ ID NO: 5921737 - DNA, 25 bp, Homo sapien
ctcacgcgtacgcgcgattatgggt

SEQ ID NO: 5921738 - DNA, 25 bp, Homo sapien
cccctattacgcgcgacgtggtctt

SEQ ID NO: 5921739 - DNA, 25 bp, Homo sapien
gcgttaccatacgcgccgaagctga

SEQ ID NO: 5921740 - DNA, 25 bp, Homo sapien
tgccagtatgtcgactccgtggtcg

SEQ ID NO: 5921741 - DNA, 25 bp, Homo sapien
aggaccggtgcgacgtacttgatcc

SEQ ID NO: 5921742 - DNA, 25 bp, Homo sapien
cgtcccacgctagacgtcgtgtgtt

SEQ ID NO: 5921743 - DNA, 25 bp, Homo sapien
cttctgccccgcgttacgactgttc

SEQ ID NO: 5921744 - DNA, 25 bp, Homo sapien
gcttcgtcgtactccgacgctgaac

SEQ ID NO: 5921745 - DNA, 25 bp, Homo sapien
cttcgctccgaacgcggtactagtg

SEQ ID NO: 5921746 - DNA, 25 bp, Homo sapien
ctaggcctagcgtaggtcggtgtag

SEQ ID NO: 5921747 - DNA, 25 bp, Homo sapien
acacacatatagcgggtcgagcgcc

SEQ ID NO: 5921748 - DNA, 25 bp, Homo sapien
ctgtgcaacgcgtgatcgctagtcc

SEQ ID NO: 5921749 - DNA, 25 bp, Homo sapien
gtctgacgtagttcgtgcgcgagga

SEQ ID NO: 5921750 - DNA, 25 bp, Homo sapien
gccgaacggtcgataagcgtcttgg

SEQ ID NO: 5921751 - DNA, 25 bp, Homo sapien
gctccatatcgccggcgtatgtctc

SEQ ID NO: 5921752 - DNA, 25 bp, Homo sapien
cgactgtacgcgaaagcatgcgagg

SEQ ID NO: 5921753 - DNA, 25 bp, Homo sapien
atcatgacggcctacgtcggcttgg

SEQ ID NO: 5921754 - DNA, 25 bp, Homo sapien
agagttgccgtaccgtgatcggagc

SEQ ID NO: 5921755 - DNA, 25 bp, Homo sapien
ggatgccgtatcgtgcgaccaatcg

SEQ ID NO: 5921756 - DNA, 25 bp, Homo sapien
caagagggcgtatcgtcgagaagcg

SEQ ID NO: 5921757 - DNA, 25 bp, Homo sapien
gggtatcgtaaggcgtagtcgagcc

SEQ ID NO: 5921758 - DNA, 25 bp, Homo sapien
cttgcgtggccgacgtataatcgcg

SEQ ID NO: 5921759 - DNA, 25 bp, Homo sapien
gtccttcgcacgctacgatcgcgaa

SEQ ID NO: 5921760 - DNA, 25 bp, Homo sapien
ccatcggtccggtcgcaaactgttc

SEQ ID NO: 5921761 - DNA, 25 bp, Homo sapien
tacctctaggttcgcgagcttcggg

SEQ ID NO: 5921762 - DNA, 25 bp, Homo sapien
aaccaccttagttcgcgccacccca

SEQ ID NO: 5921763 - DNA, 25 bp, Homo sapien
tccccatgcgtaccggctattgcac

SEQ ID NO: 5921764 - DNA, 25 bp, Homo sapien
gaacggtcgtccgtagtacgactcc

SEQ ID NO: 5921765 - DNA, 25 bp, Homo sapien
acaagccggtacacgtcgtgcatcg

SEQ ID NO: 5921766 - DNA, 25 bp, Homo sapien
gggtgcgcgtctagacgactatcag

SEQ ID NO: 5921767 - DNA, 25 bp, Homo sapien
gagcggtatcggtacccgatcacct

SEQ ID NO: 5921768 - DNA, 25 bp, Homo sapien
cgaggatcgtgacgcgggaatggtt

SEQ ID NO: 5921769 - DNA, 25 bp, Homo sapien
cacagcgacatacgcgcctgagatc

SEQ ID NO: 5921770 - DNA, 25 bp, Homo sapien
gcagaatacgtagacgcgcggacga

SEQ ID NO: 5921771 - DNA, 25 bp, Homo sapien
tgaccgttggcggtacgcgctactt

SEQ ID NO: 5921772 - DNA, 25 bp, Homo sapien
gtggtcaacgttcgcgctaccttcg

SEQ ID NO: 5921773 - DNA, 25 bp, Homo sapien
ctgccgcgtatcgtacgggctcatt

SEQ ID NO: 5921774 - DNA, 25 bp, Homo sapien
agcacggacgcgctcgtatgtacgt

SEQ ID NO: 5921775 - DNA, 25 bp, Homo sapien
gacgtacgccgcgataagtcgaagg

SEQ ID NO: 5921776 - DNA, 25 bp, Homo sapien
attgctgcgcgcgtaacgagaggtg

SEQ ID NO: 5921777 - DNA, 25 bp, Homo sapien
gttaccgtatacgcccggatgagcc

SEQ ID NO: 5921778 - DNA, 25 bp, Homo sapien
cggagataatcgagagccgggacct

SEQ ID NO: 5921779 - DNA, 25 bp, Homo sapien
aacgcggcgacctacgctaagtagg

SEQ ID NO: 5921780 - DNA, 25 bp, Homo sapien
cccacgatagctcgcgtaccgtagt

SEQ ID NO: 5921781 - DNA, 25 bp, Homo sapien
cgttgtaagaccgcgtcgaagagcc

SEQ ID NO: 5921782 - DNA, 25 bp, Homo sapien
ctggtgtactaccggtcggatgtgc

SEQ ID NO: 5921783 - DNA, 25 bp, Homo sapien
ggtctacgccgttacgctggactgt

SEQ ID NO: 5921784 - DNA, 25 bp, Homo sapien
catctccgcgatactacgagtgcgg

SEQ ID NO: 5921785 - DNA, 25 bp, Homo sapien
tagctttctcgatagcgcgcaccgc

SEQ ID NO: 5921786 - DNA, 25 bp, Homo sapien
tcgatccgggccgtacgtaacttgg

SEQ ID NO: 5921787 - DNA, 25 bp, Homo sapien
cgaggtcgttcgcgcgtagcatact

SEQ ID NO: 5921788 - DNA, 25 bp, Homo sapien
tgtgctgcgctaagtcggaagaggc

SEQ ID NO: 5921789 - DNA, 25 bp, Homo sapien
ggttatgcgctatcggtatgcggcc

SEQ ID NO: 5921790 - DNA, 25 bp, Homo sapien
tttacgatcgtccgcggtgcctcgt

SEQ ID NO: 5921791 - DNA, 25 bp, Homo sapien
tccagccggggtcgtctataaagcg

SEQ ID NO: 5921792 - DNA, 25 bp, Homo sapien
gtgccaacgtccgcgattaccactc

SEQ ID NO: 5921793 - DNA, 25 bp, Homo sapien
tagaccgcgctccgcgtattcatgc

SEQ ID NO: 5921794 - DNA, 25 bp, Homo sapien
gtcctcaagctcgcgcgaagagtga

SEQ ID NO: 5921795 - DNA, 25 bp, Homo sapien
cacaatcgcgctatcagtcggctgg

SEQ ID NO: 5921796 - DNA, 25 bp, Homo sapien
gtacactgtagcgcctcgttacggg

SEQ ID NO: 5921797 - DNA, 25 bp, Homo sapien
tctggaactccgactaacgcgtccg

SEQ ID NO: 5921798 - DNA, 25 bp, Homo sapien
gtcgactcgtagcgttccgagtagc

SEQ ID NO: 5921799 - DNA, 25 bp, Homo sapien
ctgaagcccctcgcgtagttacctc

SEQ ID NO: 5921800 - DNA, 25 bp, Homo sapien
tcatgagtgtcgacgcctagaccgc

SEQ ID NO: 5921801 - DNA, 25 bp, Homo sapien
ccacgtgtacgaacgcgcgctaaca

SEQ ID NO: 5921802 - DNA, 25 bp, Homo sapien
attgccgcgcgttcgtaagacgcga

SEQ ID NO: 5921803 - DNA, 25 bp, Homo sapien
gagtggatacgcgcggtaggactct

SEQ ID NO: 5921804 - DNA, 25 bp, Homo sapien
ttgttctacgacgtcggacacgggg

SEQ ID NO: 5921805 - DNA, 25 bp, Homo sapien
tcttcctagagctcgcgacgctcag

SEQ ID NO: 5921806 - DNA, 25 bp, Homo sapien
gcctctgctacgcgtctagtccaag

SEQ ID NO: 5921807 - DNA, 25 bp, Homo sapien
gctggtcgtgacggtacgaattccc

SEQ ID NO: 5921808 - DNA, 25 bp, Homo sapien
ggtcttcggtaacgtcgcacgcgta

SEQ ID NO: 5921809 - DNA, 25 bp, Homo sapien
gtcagagcgagattacgcggtaggc

SEQ ID NO: 5921810 - DNA, 25 bp, Homo sapien
tcagggcgacctacgcgtttgatgc

SEQ ID NO: 5921811 - DNA, 25 bp, Homo sapien
tcccgacgaggcgacgatagtgaca

SEQ ID NO: 5921812 - DNA, 25 bp, Homo sapien
ccccattttagcgcgctacctgacc

SEQ ID NO: 5921813 - DNA, 25 bp, Homo sapien
ctgctcataccgtgtcgcgtacgca

SEQ ID NO: 5921814 - DNA, 25 bp, Homo sapien
ctccctactcgcgccgtaaaagtcg

SEQ ID NO: 5921815 - DNA, 25 bp, Homo sapien
atcgaacgggcggtatacgccatcg

SEQ ID NO: 5921816 - DNA, 25 bp, Homo sapien
gccacgcatattgacgcggatgcct

SEQ ID NO: 5921817 - DNA, 25 bp, Homo sapien
tcgcgacgctgcgcgattaaggcta

SEQ ID NO: 5921818 - DNA, 25 bp, Homo sapien
ccacagctagcgaaccggactcaca

SEQ ID NO: 5921819 - DNA, 25 bp, Homo sapien
caaagccgtaaccgatccgtgcagc

SEQ ID NO: 5921820 - DNA, 25 bp, Homo sapien
gagacctcgtacgccgaaccctatc

SEQ ID NO: 5921821 - DNA, 25 bp, Homo sapien
ccatcttcgcgcggaatacaggggt

SEQ ID NO: 5921822 - DNA, 25 bp, Homo sapien
tttcccattctacgccgcggacagg

SEQ ID NO: 5921823 - DNA, 25 bp, Homo sapien
tgacggctacgacccgcgtccaaaa

SEQ ID NO: 5921824 - DNA, 25 bp, Homo sapien
aggagccgtctaacccgcgagtttg

SEQ ID NO: 5921825 - DNA, 25 bp, Homo sapien
ttcccaacgatgcgcgtcgacagct

SEQ ID NO: 5921826 - DNA, 25 bp, Homo sapien
ccatggcgatacccgaccgatccaa

SEQ ID NO: 5921827 - DNA, 25 bp, Homo sapien
atcgcgctcgcatcgtgcgacaatg

SEQ ID NO: 5921828 - DNA, 25 bp, Homo sapien
atcccttgtcccgcgatagcccaag

SEQ ID NO: 5921829 - DNA, 25 bp, Homo sapien
gttcgcacgcgatatctcgaggacg

SEQ ID NO: 5921830 - DNA, 25 bp, Homo sapien
cttacgacacgattacgcgccaggc

SEQ ID NO: 5921831 - DNA, 25 bp, Homo sapien
agtcgctcgtattcgcgcgacatcc

SEQ ID NO: 5921832 - DNA, 25 bp, Homo sapien
cctccaggtcgtataccgttgaggg

SEQ ID NO: 5921833 - DNA, 25 bp, Homo sapien
tgcccttacgcgaatcgacggctac

SEQ ID NO: 5921834 - DNA, 25 bp, Homo sapien
cctcaacgacgctagcgtacccaag

SEQ ID NO: 5921835 - DNA, 25 bp, Homo sapien
tgaacgcgcgacgtattgccggact

SEQ ID NO: 5921836 - DNA, 25 bp, Homo sapien
actgaacgggcgacgtgtactgcgt

SEQ ID NO: 5921837 - DNA, 25 bp, Homo sapien
cggtgccgttagtcggtaactgcac

SEQ ID NO: 5921838 - DNA, 25 bp, Homo sapien
agccaccggtgttacgtcgacacga

SEQ ID NO: 5921839 - DNA, 25 bp, Homo sapien
tgccagacgattgacgccgacgttg

SEQ ID NO: 5921840 - DNA, 25 bp, Homo sapien
tccggatagcgcgtagactcgtagc

SEQ ID NO: 5921841 - DNA, 25 bp, Homo sapien
tctgcttcgcgccgatctagcgaca

SEQ ID NO: 5921842 - DNA, 25 bp, Homo sapien
cgcccgcgcacgaactacgtattag

SEQ ID NO: 5921843 - DNA, 25 bp, Homo sapien
tcgcgtcgtacgccgggatttgttc

SEQ ID NO: 5921844 - DNA, 25 bp, Homo sapien
ctgccccgttacggcttaccagtag

SEQ ID NO: 5921845 - DNA, 25 bp, Homo sapien
tcctaccatgcctcgcgtacggaga

SEQ ID NO: 5921846 - DNA, 25 bp, Homo sapien
tcgcgcatagcgcgtcctacagatc

SEQ ID NO: 5921847 - DNA, 25 bp, Homo sapien
accgaaatcgttaccgcggacgtgc

SEQ ID NO: 5921848 - DNA, 25 bp, Homo sapien
ccgtaccgcgcgaagtatatcgagc

SEQ ID NO: 5921849 - DNA, 25 bp, Homo sapien
cttatgcgtacgctacggagcggtc

SEQ ID NO: 5921850 - DNA, 25 bp, Homo sapien
caggtacgcggtgccgtattcggta

SEQ ID NO: 5921851 - DNA, 25 bp, Homo sapien
ccagagtccatacgtccgagtccag

SEQ ID NO: 5921852 - DNA, 25 bp, Homo sapien
aggtggatagtcgggtcgcatgagg

SEQ ID NO: 5921853 - DNA, 25 bp, Homo sapien
gcggtcagggcgcgtaagttgtgaa

SEQ ID NO: 5921854 - DNA, 25 bp, Homo sapien
acgtgctcacgtccgctagacacac

SEQ ID NO: 5921855 - DNA, 25 bp, Homo sapien
gagccggatcgccgaacgtatccta

SEQ ID NO: 5921856 - DNA, 25 bp, Homo sapien
gacttcccgatcggctacgttagcg

SEQ ID NO: 5921857 - DNA, 25 bp, Homo sapien
gcatcaggtgcgtcggttaagaccg

SEQ ID NO: 5921858 - DNA, 25 bp, Homo sapien
aggcgtatcgtacgttcggagccga

SEQ ID NO: 5921859 - DNA, 25 bp, Homo sapien
gtcatcgttcgcgtatcgggcgaca

SEQ ID NO: 5921860 - DNA, 25 bp, Homo sapien
gagggctacggagcgaactgtgcat

SEQ ID NO: 5921861 - DNA, 25 bp, Homo sapien
gtagttcggtcccgacgtagaggct

SEQ ID NO: 5921862 - DNA, 25 bp, Homo sapien
cagctgggtctacgcgtagaagacc

SEQ ID NO: 5921863 - DNA, 25 bp, Homo sapien
cgcgatcttcgtgcgcgtatccaca

SEQ ID NO: 5921864 - DNA, 25 bp, Homo sapien
attggccgggtagcgtatcggttcg

SEQ ID NO: 5921865 - DNA, 25 bp, Homo sapien
tatatgcggtcgcgcgttaggcgca

SEQ ID NO: 5921866 - DNA, 25 bp, Homo sapien
acaccccgttcgtccgctacaactc

SEQ ID NO: 5921867 - DNA, 25 bp, Homo sapien
cgagcgtcgacgtatgaggcagtga

SEQ ID NO: 5921868 - DNA, 25 bp, Homo sapien
ggaagtcgtgcacgacgtactcgct

SEQ ID NO: 5921869 - DNA, 25 bp, Homo sapien
tcgtccagactaccacgcgcacctt

SEQ ID NO: 5921870 - DNA, 25 bp, Homo sapien
cgaggaaatcgggcacgtaggtgga

SEQ ID NO: 5921871 - DNA, 25 bp, Homo sapien
gccatgatctagctgcgcggtatgc

SEQ ID NO: 5921872 - DNA, 25 bp, Homo sapien
gttaggaactaacgtcgcggcgctg

SEQ ID NO: 5921873 - DNA, 25 bp, Homo sapien
gatcgggcgcgaactaatctcgtgc

SEQ ID NO: 5921874 - DNA, 25 bp, Homo sapien
tacggcgtcgcgcgtaactttgcac

SEQ ID NO: 5921875 - DNA, 25 bp, Homo sapien
acgaatcgcggtaatgcgtagccgc

SEQ ID NO: 5921876 - DNA, 25 bp, Homo sapien
cgattggtctagcgcggtttccgct

SEQ ID NO: 5921877 - DNA, 25 bp, Homo sapien
gtaagcaacgtaccgtcgctgctcg

SEQ ID NO: 5921878 - DNA, 25 bp, Homo sapien
gaaggagtcgcgcgcgtattcgtca

SEQ ID NO: 5921879 - DNA, 25 bp, Homo sapien
tcctgatcgcgcattacgatcgcgc

SEQ ID NO: 5921880 - DNA, 25 bp, Homo sapien
gatgccctcgtacgggacgtaacag

SEQ ID NO: 5921881 - DNA, 25 bp, Homo sapien
ttctctcgggtcgtacgaaggcacg

SEQ ID NO: 5921882 - DNA, 25 bp, Homo sapien
ccgcccttaggcgaaacgcttcgaa

SEQ ID NO: 5921883 - DNA, 25 bp, Homo sapien
ttcccgcctattcgcgactccctag

SEQ ID NO: 5921884 - DNA, 25 bp, Homo sapien
atcgtgcgcgacttaggttccacgc

SEQ ID NO: 5921885 - DNA, 25 bp, Homo sapien
atagcagacctgatacgcgcgaccg

SEQ ID NO: 5921886 - DNA, 25 bp, Homo sapien
gcctttctaacgtctcgcgtcaggg

SEQ ID NO: 5921887 - DNA, 25 bp, Homo sapien
gaccgataacgtcgcgttcccacgt

SEQ ID NO: 5921888 - DNA, 25 bp, Homo sapien
tacacgtgcgagaccgtcgctcatc

SEQ ID NO: 5921889 - DNA, 25 bp, Homo sapien
gaggcctcgtatcgcggataggaag

SEQ ID NO: 5921890 - DNA, 25 bp, Homo sapien
tgaagctaagcgcgtcgtagacccg

SEQ ID NO: 5921891 - DNA, 25 bp, Homo sapien
ccgtttataccggacgcgctcgaca

SEQ ID NO: 5921892 - DNA, 25 bp, Homo sapien
cgccgacctacgccgcaatcgattt

SEQ ID NO: 5921893 - DNA, 25 bp, Homo sapien
gcagcagcggttacgctagggctaa

SEQ ID NO: 5921894 - DNA, 25 bp, Homo sapien
tttgcctatcgcgcgcaactcggag

SEQ ID NO: 5921895 - DNA, 25 bp, Homo sapien
taccagggatcgctcgtcgccatac

SEQ ID NO: 5921896 - DNA, 25 bp, Homo sapien
ggatctcgtactacgccgaccacca

SEQ ID NO: 5921897 - DNA, 25 bp, Homo sapien
aggatgtcgtgcgttagcgagctgc

SEQ ID NO: 5921898 - DNA, 25 bp, Homo sapien
gtcagtcgagtagcgtacccgttcg

SEQ ID NO: 5921899 - DNA, 25 bp, Homo sapien
acggcttgcgcgtacgagcttaagc

SEQ ID NO: 5921900 - DNA, 25 bp, Homo sapien
acccgagtctaaccgcgacctgcaa

SEQ ID NO: 5921901 - DNA, 25 bp, Homo sapien
ctcgacgtacgacggctaacttgcg

SEQ ID NO: 5921902 - DNA, 25 bp, Homo sapien
tgcgcgcgacgatacgtcactctga

SEQ ID NO: 5921903 - DNA, 25 bp, Homo sapien
agttcccgcgtagatgcgccgttac

SEQ ID NO: 5921904 - DNA, 25 bp, Homo sapien
gaacgcatactcgcggcgttgttgg

SEQ ID NO: 5921905 - DNA, 25 bp, Homo sapien
cggcgtcgtatagtgccgcatgttc

SEQ ID NO: 5921906 - DNA, 25 bp, Homo sapien
gtaaccttacgcacgcgatccaccc

SEQ ID NO: 5921907 - DNA, 25 bp, Homo sapien
cgactttcgcgcgtactgaagcgag

SEQ ID NO: 5921908 - DNA, 25 bp, Homo sapien
gagacccgacgatatcccggagaca

SEQ ID NO: 5921909 - DNA, 25 bp, Homo sapien
tccccttaagccgttgcggggcata

SEQ ID NO: 5921910 - DNA, 25 bp, Homo sapien
ttggcggcgatcgtccataccatcg

SEQ ID NO: 5921911 - DNA, 25 bp, Homo sapien
gcacgtattgcgccgtacgaccaac

SEQ ID NO: 5921912 - DNA, 25 bp, Homo sapien
cgctctacgcgccggtataaaaggg

SEQ ID NO: 5921913 - DNA, 25 bp, Homo sapien
aggaagtgtataacggcgcgagggc

SEQ ID NO: 5921914 - DNA, 25 bp, Homo sapien
cgactcagatagttgcgcgtcggga

SEQ ID NO: 5921915 - DNA, 25 bp, Homo sapien
ccggaacgcgggctactatgtctac

SEQ ID NO: 5921916 - DNA, 25 bp, Homo sapien
caccctcgacggctacctacatagc

SEQ ID NO: 5921917 - DNA, 25 bp, Homo sapien
cgtgtcaccttacgcggagtggact

SEQ ID NO: 5921918 - DNA, 25 bp, Homo sapien
cgggtaaccaattcgcgccgattcc

SEQ ID NO: 5921919 - DNA, 25 bp, Homo sapien
gaatgccatgtcgcgcctacgccat

SEQ ID NO: 5921920 - DNA, 25 bp, Homo sapien
gtgctccgcaccgattagtaagcgc

SEQ ID NO: 5921921 - DNA, 25 bp, Homo sapien
ttctagcgttaaacgggccgccacg

SEQ ID NO: 5921922 - DNA, 25 bp, Homo sapien
gggagcccgcagtattacgatgcga

SEQ ID NO: 5921923 - DNA, 25 bp, Homo sapien
gctaaccgtctcgacccgtgtgatg

SEQ ID NO: 5921924 - DNA, 25 bp, Homo sapien
atctcgcgggtgtcgtacttgctgc

SEQ ID NO: 5921925 - DNA, 25 bp, Homo sapien
tgcgcgactatcggtccggaactga

SEQ ID NO: 5921926 - DNA, 25 bp, Homo sapien
cggacggactagtcgcgtagtagct

SEQ ID NO: 5921927 - DNA, 25 bp, Homo sapien
tttctgttcgcgacgactcgcctcg

SEQ ID NO: 5921928 - DNA, 25 bp, Homo sapien
caccctcgcaccggcaataatcgac

SEQ ID NO: 5921929 - DNA, 25 bp, Homo sapien
tccgaaaattgctcgcgcgtaggcg

SEQ ID NO: 5921930 - DNA, 25 bp, Homo sapien
gggagtcgcgtcgttgataagcgag

SEQ ID NO: 5921931 - DNA, 25 bp, Homo sapien
aggaacatacgacgcgcacggtagc

SEQ ID NO: 5921932 - DNA, 25 bp, Homo sapien
acagtgccgagacgttacgacggct

SEQ ID NO: 5921933 - DNA, 25 bp, Homo sapien
ccacggcttacatccgcggagtgaa

SEQ ID NO: 5921934 - DNA, 25 bp, Homo sapien
gtagtcgacgttacgtcgccagagc

SEQ ID NO: 5921935 - DNA, 25 bp, Homo sapien
gtgggacggtcctaggtcgacatgt

SEQ ID NO: 5921936 - DNA, 25 bp, Homo sapien
gagtgggcgccgtataagtcaggac

SEQ ID NO: 5921937 - DNA, 25 bp, Homo sapien
ttgagccgtatagcgtcgccccagt

SEQ ID NO: 5921938 - DNA, 25 bp, Homo sapien
acggatcacgcggatagtcgggtac

SEQ ID NO: 5921939 - DNA, 25 bp, Homo sapien
cccctgagtaacgccggacttctca

SEQ ID NO: 5921940 - DNA, 25 bp, Homo sapien
cgtgtcgtcgagcgtacggcgttaa

SEQ ID NO: 5921941 - DNA, 25 bp, Homo sapien
ggccgtgacgcgagcgtatgaagtt

SEQ ID NO: 5921942 - DNA, 25 bp, Homo sapien
cgcggatacgcgcggtaaagaccaa

SEQ ID NO: 5921943 - DNA, 25 bp, Homo sapien
ccgttaaatcgtgcgaccgggctct

SEQ ID NO: 5921944 - DNA, 25 bp, Homo sapien
aggcaagtacgtcgcgggagatgga

SEQ ID NO: 5921945 - DNA, 25 bp, Homo sapien
gtgccccgcgattggtagccgtaat

SEQ ID NO: 5921946 - DNA, 25 bp, Homo sapien
tcgcggatgctacgagtcgccaatc

SEQ ID NO: 5921947 - DNA, 25 bp, Homo sapien
cggctagatagcggctcgtcacaga

SEQ ID NO: 5921948 - DNA, 25 bp, Homo sapien
gcaggggcggtccgtaacaatcatg

SEQ ID NO: 5921949 - DNA, 25 bp, Homo sapien
ttccaccctatcggacgggcgaagt

SEQ ID NO: 5921950 - DNA, 25 bp, Homo sapien
aactgatcggccgaggtatcgcagc

SEQ ID NO: 5921951 - DNA, 25 bp, Homo sapien
ggtactgcgaatcgttcccgcttcc

SEQ ID NO: 5921952 - DNA, 25 bp, Homo sapien
ttggttgggtagtcgtgcgtacccg

SEQ ID NO: 5921953 - DNA, 25 bp, Homo sapien
tgtacgtaagacgcgacggtggtcg

SEQ ID NO: 5921954 - DNA, 25 bp, Homo sapien
agcagtcgaacggctaccggtttgg

SEQ ID NO: 5921955 - DNA, 25 bp, Homo sapien
tgaggccggacttatgcggagttcg

SEQ ID NO: 5921956 - DNA, 25 bp, Homo sapien
cactaggtacgcatagcggctccca

SEQ ID NO: 5921957 - DNA, 25 bp, Homo sapien
cgcctttagactgtccgcggtaacc

SEQ ID NO: 5921958 - DNA, 25 bp, Homo sapien
cgtcggcggcatacgtaacacgtca

SEQ ID NO: 5921959 - DNA, 25 bp, Homo sapien
agtcggcggcccgttacgtgataga

SEQ ID NO: 5921960 - DNA, 25 bp, Homo sapien
acactggcgcgtcgactacgcatct

SEQ ID NO: 5921961 - DNA, 25 bp, Homo sapien
ctacccatgtcgtatcgcgacggga

SEQ ID NO: 5921962 - DNA, 25 bp, Homo sapien
actaggtttcgcggactcgcgtgca

SEQ ID NO: 5921963 - DNA, 25 bp, Homo sapien
gcaagcccgcgatacttagggtgga

SEQ ID NO: 5921964 - DNA, 25 bp, Homo sapien
gtcgtctacgcgttacgacggtgca

SEQ ID NO: 5921965 - DNA, 25 bp, Homo sapien
agtgatctgggtcgcgaatgtgccc

SEQ ID NO: 5921966 - DNA, 25 bp, Homo sapien
cgacagcgcgggatagctaagttgg

SEQ ID NO: 5921967 - DNA, 25 bp, Homo sapien
ctcgcatgcgagcttaccgtacctg

SEQ ID NO: 5921968 - DNA, 25 bp, Homo sapien
aaagctcgcgcgttacgatgcacgg

SEQ ID NO: 5921969 - DNA, 25 bp, Homo sapien
cccaccgatcgacgttcgctaaagc

SEQ ID NO: 5921970 - DNA, 25 bp, Homo sapien
cccccatcgcgtagttacgcagaca

SEQ ID NO: 5921971 - DNA, 25 bp, Homo sapien
acgctgtaccgttcgcgcacaaagg

SEQ ID NO: 5921972 - DNA, 25 bp, Homo sapien
tcgcaggtcgtacgctacggtcact

SEQ ID NO: 5921973 - DNA, 25 bp, Homo sapien
cggaattcgtacgccgtaccgtgac

SEQ ID NO: 5921974 - DNA, 25 bp, Homo sapien
ccatcacgctatagcgtcgtggcag

SEQ ID NO: 5921975 - DNA, 25 bp, Homo sapien
ctgataacgcgttagcgggaccctc

SEQ ID NO: 5921976 - DNA, 25 bp, Homo sapien
tcaaggcccgcgagtattcccctgt

SEQ ID NO: 5921977 - DNA, 25 bp, Homo sapien
gtagcagcgtactagatcggagccg

SEQ ID NO: 5921978 - DNA, 25 bp, Homo sapien
ggagagacgcgccctaagttgctct

SEQ ID NO: 5921979 - DNA, 25 bp, Homo sapien
ttacggacgcgtcgtacctcacggt

SEQ ID NO: 5921980 - DNA, 25 bp, Homo sapien
cctcttaaactctagcgcgaggggg

SEQ ID NO: 5921981 - DNA, 25 bp, Homo sapien
cgacacgacgcgactaggttgacgt

SEQ ID NO: 5921982 - DNA, 25 bp, Homo sapien
tttgcgtcgcgcgatgagtactggc

SEQ ID NO: 5921983 - DNA, 25 bp, Homo sapien
tctttgtccgcgcgacttagtgcgg

SEQ ID NO: 5921984 - DNA, 25 bp, Homo sapien
tcgcacgtcggtaccacggaattgc

SEQ ID NO: 5921985 - DNA, 25 bp, Homo sapien
gtgggtggtatatagcgcgcctcca

SEQ ID NO: 5921986 - DNA, 25 bp, Homo sapien
actccggtcgcgtcctacttgcctt

SEQ ID NO: 5921987 - DNA, 25 bp, Homo sapien
gggtatgtacgttgcgtccgtaggg

SEQ ID NO: 5921988 - DNA, 25 bp, Homo sapien
cttgccgacgcgatatacggagagc

SEQ ID NO: 5921989 - DNA, 25 bp, Homo sapien
gactgcttcgtaaccgcgtcatgcc

SEQ ID NO: 5921990 - DNA, 25 bp, Homo sapien
taagccgccggtacgctagcttgct

SEQ ID NO: 5921991 - DNA, 25 bp, Homo sapien
ggtagccgagatccgtatggtgtcc

SEQ ID NO: 5921992 - DNA, 25 bp, Homo sapien
atgccccgccgaacgtactctagtc

SEQ ID NO: 5921993 - DNA, 25 bp, Homo sapien
atacgattgcgcgttgtagggcggc

SEQ ID NO: 5921994 - DNA, 25 bp, Homo sapien
tgacagaacgcggatagtgctcggc

SEQ ID NO: 5921995 - DNA, 25 bp, Homo sapien
acggtgtatgtcgcgaacgccagca

SEQ ID NO: 5921996 - DNA, 25 bp, Homo sapien
aacgcgttacgctacgacggtcagc

SEQ ID NO: 5921997 - DNA, 25 bp, Homo sapien
gatcgggcgatataccggaccaacg

SEQ ID NO: 5921998 - DNA, 25 bp, Homo sapien
ccctacgtacccttcgcgtgcaagt

SEQ ID NO: 5921999 - DNA, 25 bp, Homo sapien
cagcccgcatagcgctacgccataa

SEQ ID NO: 5922000 - DNA, 25 bp, Homo sapien
cgacagtataccgcgggcgcttttc

SEQ ID NO: 5922001 - DNA, 25 bp, Homo sapien
cccggtcgtccgagcctaattagac

SEQ ID NO: 5922002 - DNA, 25 bp, Homo sapien
gattttcattgcgggtcgtgcgcgg

SEQ ID NO: 5922003 - DNA, 25 bp, Homo sapien
ccagctatcgcgcgaagagcttcgt

SEQ ID NO: 5922004 - DNA, 25 bp, Homo sapien
gcgtcctggggtacgtcgacattca

SEQ ID NO: 5922005 - DNA, 25 bp, Homo sapien
caaggtgacgtcgcgcgaagtagac

SEQ ID NO: 5922006 - DNA, 25 bp, Homo sapien
gtcttgtgcgcggatcatttggcgg

SEQ ID NO: 5922007 - DNA, 25 bp, Homo sapien
tctcgctcaacgcacgcgattcgct

SEQ ID NO: 5922008 - DNA, 25 bp, Homo sapien
cccaaacgaggtatagtcgggcagg

SEQ ID NO: 5922009 - DNA, 25 bp, Homo sapien
ggggtgcttgcgcgataccactgtt

SEQ ID NO: 5922010 - DNA, 25 bp, Homo sapien
gaacacctagcgcggtcgttgactc

SEQ ID NO: 5922011 - DNA, 25 bp, Homo sapien
cgcagcccgatactcgatcacacac

SEQ ID NO: 5922012 - DNA, 25 bp, Homo sapien
aacgctaatcgttcggccgacacgg

SEQ ID NO: 5922013 - DNA, 25 bp, Homo sapien
cataaccgaccggaagcgtagcgac

SEQ ID NO: 5922014 - DNA, 25 bp, Homo sapien
gggctttcgcgtaagacgcaacggt

SEQ ID NO: 5922015 - DNA, 25 bp, Homo sapien
cgtcgggtcgcgcgatacagattac

SEQ ID NO: 5922016 - DNA, 25 bp, Homo sapien
atcgggtaatgtaccgcgaccgtgc

SEQ ID NO: 5922017 - DNA, 25 bp, Homo sapien
tccacaggtgtaagtcgcgagtggc

SEQ ID NO: 5922018 - DNA, 25 bp, Homo sapien
ggttctacgttagcgcggataggcg

SEQ ID NO: 5922019 - DNA, 25 bp, Homo sapien
gccatgcgcgtactcccgtgtttgt

SEQ ID NO: 5922020 - DNA, 25 bp, Homo sapien
agtcgaaggcataccgcgaccactg

SEQ ID NO: 5922021 - DNA, 25 bp, Homo sapien
tgccacttgcgactaacggcatgcc

SEQ ID NO: 5922022 - DNA, 25 bp, Homo sapien
gagctcgagcgttagtacgccgtgt

SEQ ID NO: 5922023 - DNA, 25 bp, Homo sapien
cgccgcgtatcgtacggagatctga

SEQ ID NO: 5922024 - DNA, 25 bp, Homo sapien
ctcgctgacgtacgttcgagtcgag

SEQ ID NO: 5922025 - DNA, 25 bp, Homo sapien
cacacttacgcgcggtatcacgcct

SEQ ID NO: 5922026 - DNA, 25 bp, Homo sapien
gcgccgacgtcgcgactaaagttgt

SEQ ID NO: 5922027 - DNA, 25 bp, Homo sapien
cctggaccgcttacgcgatctgaag

SEQ ID NO: 5922028 - DNA, 25 bp, Homo sapien
gcgactaacgcgcctaggcttagag

SEQ ID NO: 5922029 - DNA, 25 bp, Homo sapien
tcatagacgtagtaccggtcggggg

SEQ ID NO: 5922030 - DNA, 25 bp, Homo sapien
gaacggcgtcgtaatagggcaggct

SEQ ID NO: 5922031 - DNA, 25 bp, Homo sapien
tacgaccttacgcgacactcgaggc

SEQ ID NO: 5922032 - DNA, 25 bp, Homo sapien
atgctctggcgacctcgtaagcgct

SEQ ID NO: 5922033 - DNA, 25 bp, Homo sapien
ctttggacgcgcccgataggcaatg

SEQ ID NO: 5922034 - DNA, 25 bp, Homo sapien
ggttgggcggtatatcgagagcacc

SEQ ID NO: 5922035 - DNA, 25 bp, Homo sapien
gcggagtaacgtctcgcggaaatcg

SEQ ID NO: 5922036 - DNA, 25 bp, Homo sapien
aacaagacgccgtcttacggcgtgg

SEQ ID NO: 5922037 - DNA, 25 bp, Homo sapien
cacggagacgctacgcatcgcagat

SEQ ID NO: 5922038 - DNA, 25 bp, Homo sapien
ggccaatccgcgccacgtacgttat

SEQ ID NO: 5922039 - DNA, 25 bp, Homo sapien
gctcagacctagccgcgtttcctgt

SEQ ID NO: 5922040 - DNA, 25 bp, Homo sapien
cggaataacgcgcgcattacggtcc

SEQ ID NO: 5922041 - DNA, 25 bp, Homo sapien
gagctgtgagcgggcgtacttttgg

SEQ ID NO: 5922042 - DNA, 25 bp, Homo sapien
gggaattcgcgctttgacggttggc

SEQ ID NO: 5922043 - DNA, 25 bp, Homo sapien
cgccgtggcgcaacctagtaaaagc

SEQ ID NO: 5922044 - DNA, 25 bp, Homo sapien
aagggcggtgctacgtcgtcggata

SEQ ID NO: 5922045 - DNA, 25 bp, Homo sapien
tagaggaccggtccgtacgcggata

SEQ ID NO: 5922046 - DNA, 25 bp, Homo sapien
cacccgtgaaacgcgcggtattacg

SEQ ID NO: 5922047 - DNA, 25 bp, Homo sapien
attggcgatacgtcgcgtctgtgcg

SEQ ID NO: 5922048 - DNA, 25 bp, Homo sapien
gccctacggacgctcgttatactgc

SEQ ID NO: 5922049 - DNA, 25 bp, Homo sapien
tcgatggtcgcgaggacgtctagca

SEQ ID NO: 5922050 - DNA, 25 bp, Homo sapien
gaacgccacggtccgcatacacttc

SEQ ID NO: 5922051 - DNA, 25 bp, Homo sapien
acaggagccgtactacgtcgcttgg

SEQ ID NO: 5922052 - DNA, 25 bp, Homo sapien
ttagcctcaatccggcgtatggcgc

SEQ ID NO: 5922053 - DNA, 25 bp, Homo sapien
cggcttccgacggtattcggtagca

SEQ ID NO: 5922054 - DNA, 25 bp, Homo sapien
cagctagtcttaggcgcgtggtcga

SEQ ID NO: 5922055 - DNA, 25 bp, Homo sapien
atcggtccgtcggtagtactggagg

SEQ ID NO: 5922056 - DNA, 25 bp, Homo sapien
gataggtcgacgtaacgcacgccag

SEQ ID NO: 5922057 - DNA, 25 bp, Homo sapien
aacagagtcggcggtaggagtggca

SEQ ID NO: 5922058 - DNA, 25 bp, Homo sapien
ccattagctgtcgcgacgtagcggt

SEQ ID NO: 5922059 - DNA, 25 bp, Homo sapien
aagctacggggtgtatcgcggacga

SEQ ID NO: 5922060 - DNA, 25 bp, Homo sapien
tgagcagtatgatccgcgtctcccg

SEQ ID NO: 5922061 - DNA, 25 bp, Homo sapien
gcagtctcttagacgcgtaggccga

SEQ ID NO: 5922062 - DNA, 25 bp, Homo sapien
gaccacacctatgcgacggatggca

SEQ ID NO: 5922063 - DNA, 25 bp, Homo sapien
taaccgcgcgcaattacctccaccg

SEQ ID NO: 5922064 - DNA, 25 bp, Homo sapien
cgaatctgacgggtcgtcggggaat

SEQ ID NO: 5922065 - DNA, 25 bp, Homo sapien
tctacccccgttaagcgaggctctg

SEQ ID NO: 5922066 - DNA, 25 bp, Homo sapien
ccgtccacgcgttagtcgaactgtc

SEQ ID NO: 5922067 - DNA, 25 bp, Homo sapien
cccagaccgcgtaaccgatatggag

SEQ ID NO: 5922068 - DNA, 25 bp, Homo sapien
tcgagtgtacgctcgtgaccgagga

SEQ ID NO: 5922069 - DNA, 25 bp, Homo sapien
gagattcgcgactatcatgcgcccg

SEQ ID NO: 5922070 - DNA, 25 bp, Homo sapien
tgcggggcgcgacgtgtatatgtct

SEQ ID NO: 5922071 - DNA, 25 bp, Homo sapien
cgttccgtacatcgcgcaatctcgg

SEQ ID NO: 5922072 - DNA, 25 bp, Homo sapien
cctgtgcgatcgcgttaggtatcgg

SEQ ID NO: 5922073 - DNA, 25 bp, Homo sapien
tccgcatgatagcgcgctacgacct

SEQ ID NO: 5922074 - DNA, 25 bp, Homo sapien
tgctcataacggttcgccgcgcttg

SEQ ID NO: 5922075 - DNA, 25 bp, Homo sapien
aggacacatgctatccgcgccggaa

SEQ ID NO: 5922076 - DNA, 25 bp, Homo sapien
gcccgacgcgttatccgtgtcaaca

SEQ ID NO: 5922077 - DNA, 25 bp, Homo sapien
gtttcgttcgcgaacgaccagtgcg

SEQ ID NO: 5922078 - DNA, 25 bp, Homo sapien
gccagcgtacctaccgcgaatcaac

SEQ ID NO: 5922079 - DNA, 25 bp, Homo sapien
gtgacgaccgcgtacggattaggtc

SEQ ID NO: 5922080 - DNA, 25 bp, Homo sapien
gcctatgaccgcgcgaatctccact

SEQ ID NO: 5922081 - DNA, 25 bp, Homo sapien
cgatggaccggttacgcgatctgtg

SEQ ID NO: 5922082 - DNA, 25 bp, Homo sapien
cgatcgcgtacgcgagtcgatcgat

SEQ ID NO: 5922083 - DNA, 25 bp, Homo sapien
gcaaactctaacgcgcggtcccgta

SEQ ID NO: 5922084 - DNA, 25 bp, Homo sapien
acccgaccgacgcgtgatcgatatg

SEQ ID NO: 5922085 - DNA, 25 bp, Homo sapien
cgcaaagttcgcgcgttagcctcac

SEQ ID NO: 5922086 - DNA, 25 bp, Homo sapien
gcgtcgtacgctagcggacaagcat

SEQ ID NO: 5922087 - DNA, 25 bp, Homo sapien
agctgccgtacgttcggaggacgta

SEQ ID NO: 5922088 - DNA, 25 bp, Homo sapien
gcgggaataggcgcgatagtgtctg

SEQ ID NO: 5922089 - DNA, 25 bp, Homo sapien
ggcgcctacgcgaacggacaacttt

SEQ ID NO: 5922090 - DNA, 25 bp, Homo sapien
cgcacaggcggacgtatactaacgc

SEQ ID NO: 5922091 - DNA, 25 bp, Homo sapien
cacaagcgtggtacgccgaggaagt

SEQ ID NO: 5922092 - DNA, 25 bp, Homo sapien
ccggtcagctcgcgcgatataatgc

SEQ ID NO: 5922093 - DNA, 25 bp, Homo sapien
caaccagcccgtagtacgctatccg

SEQ ID NO: 5922094 - DNA, 25 bp, Homo sapien
acgcttcgacttacgcgagacctgg

SEQ ID NO: 5922095 - DNA, 25 bp, Homo sapien
cagggctacgtcgagcgagtgagta

SEQ ID NO: 5922096 - DNA, 25 bp, Homo sapien
tgatcggccgtacgcaactagggca

SEQ ID NO: 5922097 - DNA, 25 bp, Homo sapien
ccgtggcgatatggcgtagaaaggc

SEQ ID NO: 5922098 - DNA, 25 bp, Homo sapien
gttcaccgcgagtcttagctcgacc

SEQ ID NO: 5922099 - DNA, 25 bp, Homo sapien
gagcatgcgatctagcgtggtgacg

SEQ ID NO: 5922100 - DNA, 25 bp, Homo sapien
tggacgaccgtacgggagtgcattg

SEQ ID NO: 5922101 - DNA, 25 bp, Homo sapien
cgcggtaagtcgccttacgcagatg

SEQ ID NO: 5922102 - DNA, 25 bp, Homo sapien
ggagcctatccgcgacatatgtcgc

SEQ ID NO: 5922103 - DNA, 25 bp, Homo sapien
ggaaggcgatacgggaacgtggttc

SEQ ID NO: 5922104 - DNA, 25 bp, Homo sapien
ctcctaccgtctatacgctggggtc

SEQ ID NO: 5922105 - DNA, 25 bp, Homo sapien
ccatcctacaagacgtcgcacgtcc

SEQ ID NO: 5922106 - DNA, 25 bp, Homo sapien
ggacaggcgtcgactagacttagcc

SEQ ID NO: 5922107 - DNA, 25 bp, Homo sapien
acgagagtccggttatgcggctcgt

SEQ ID NO: 5922108 - DNA, 25 bp, Homo sapien
gcaactacgcgctagcgtagatggc

SEQ ID NO: 5922109 - DNA, 25 bp, Homo sapien
aggagctcgcgtacctatcggttcg

SEQ ID NO: 5922110 - DNA, 25 bp, Homo sapien
cggaacaatctcgcgagcgtgtcga

SEQ ID NO: 5922111 - DNA, 25 bp, Homo sapien
caggacgggctattacgcgccaaac

SEQ ID NO: 5922112 - DNA, 25 bp, Homo sapien
gcgtccacccgcgctcttaaaagtg

SEQ ID NO: 5922113 - DNA, 25 bp, Homo sapien
catctcgcggcctatcgtagacgac

SEQ ID NO: 5922114 - DNA, 25 bp, Homo sapien
aagtgccgcggtattgtcgccgcat

SEQ ID NO: 5922115 - DNA, 25 bp, Homo sapien
gtgcctacccgtacggatatcgtcg

SEQ ID NO: 5922116 - DNA, 25 bp, Homo sapien
ccgaatccgtacgcggcattcacag

SEQ ID NO: 5922117 - DNA, 25 bp, Homo sapien
gatgcggatcggtcgcgtatgagac

SEQ ID NO: 5922118 - DNA, 25 bp, Homo sapien
gagatgccgtacgcgatacatggcc

SEQ ID NO: 5922119 - DNA, 25 bp, Homo sapien
gcccattccgaacgcgtactgagct

SEQ ID NO: 5922120 - DNA, 25 bp, Homo sapien
cgcttacggccgttatacgggccaa

SEQ ID NO: 5922121 - DNA, 25 bp, Homo sapien
agccgggcctagcgcgtatttcgat

SEQ ID NO: 5922122 - DNA, 25 bp, Homo sapien
taggccccgcgtcggatatcgtgat

SEQ ID NO: 5922123 - DNA, 25 bp, Homo sapien
cagccgttcgcgtgcggtcttattc

SEQ ID NO: 5922124 - DNA, 25 bp, Homo sapien
tgatcgcgatcgtacgtcgttgccg

SEQ ID NO: 5922125 - DNA, 25 bp, Homo sapien
tggagttaacgtaccgcgggacgga

SEQ ID NO: 5922126 - DNA, 25 bp, Homo sapien
ccggtcgatacataccgcgtcgtgt

SEQ ID NO: 5922127 - DNA, 25 bp, Homo sapien
tccttacgtaaggtcgccatggggg

SEQ ID NO: 5922128 - DNA, 25 bp, Homo sapien
gcatgagtcgttcgtgcgagctggt

SEQ ID NO: 5922129 - DNA, 25 bp, Homo sapien
ggttgtggcgtaacccgatcgctag

SEQ ID NO: 5922130 - DNA, 25 bp, Homo sapien
gcgatcgggcgaactcgtcatggat

SEQ ID NO: 5922131 - DNA, 25 bp, Homo sapien
cagaccaacgctcgtagcgtcgaag

SEQ ID NO: 5922132 - DNA, 25 bp, Homo sapien
tcactgcctcatacgtcgacgctcg

SEQ ID NO: 5922133 - DNA, 25 bp, Homo sapien
gaacagtcgtaacgcggggcagaag

SEQ ID NO: 5922134 - DNA, 25 bp, Homo sapien
gatctcaggcgcgtatgtcgctgtg

SEQ ID NO: 5922135 - DNA, 25 bp, Homo sapien
ttccggcgcggatagcatgtgtcct

SEQ ID NO: 5922136 - DNA, 25 bp, Homo sapien
tcgtccgcgcgtctacgtattctgc

SEQ ID NO: 5922137 - DNA, 25 bp, Homo sapien
gctctggcgacgtaacgtcgactac

SEQ ID NO: 5922138 - DNA, 25 bp, Homo sapien
cgagcagcgacggtacgttgcttac

SEQ ID NO: 5922139 - DNA, 25 bp, Homo sapien
agtatgctacgcgcgaacgacctcg

SEQ ID NO: 5922140 - DNA, 25 bp, Homo sapien
ctgcggtcgcgttacacgcaaaacc

SEQ ID NO: 5922141 - DNA, 25 bp, Homo sapien
agtggagattcgcgcggtcataggc

SEQ ID NO: 5922142 - DNA, 25 bp, Homo sapien
acgagccgcataaccggactctcgt

SEQ ID NO: 5922143 - DNA, 25 bp, Homo sapien
gtctacttcgcgcgacgtcaccttg

SEQ ID NO: 5922144 - DNA, 25 bp, Homo sapien
gtcgctccggatcgatccaatcgtg

SEQ ID NO: 5922145 - DNA, 25 bp, Homo sapien
attccccgacgacccgtcagattcg

SEQ ID NO: 5922146 - DNA, 25 bp, Homo sapien
tcagatctccgtacgatacgcggcg

SEQ ID NO: 5922147 - DNA, 25 bp, Homo sapien
cccgtaacgaggcgctacagtgtac

SEQ ID NO: 5922148 - DNA, 25 bp, Homo sapien
gtgcaaagttacgcgcgacgccgta

SEQ ID NO: 5922149 - DNA, 25 bp, Homo sapien
cgaaccgatacgctacccggccaat

SEQ ID NO: 5922150 - DNA, 25 bp, Homo sapien
tgtcgagcgcgtccggtataaacgg

SEQ ID NO: 5922151 - DNA, 25 bp, Homo sapien
gagacatacgccggcgatatggagc

SEQ ID NO: 5922152 - DNA, 25 bp, Homo sapien
ccgcgcgccgtattaccgtttgttg

SEQ ID NO: 5922153 - DNA, 25 bp, Homo sapien
cctgtccgcggcgtagaatgggaaa

SEQ ID NO: 5922154 - DNA, 25 bp, Homo sapien
caaactcgcgggttagacggctcct

SEQ ID NO: 5922155 - DNA, 25 bp, Homo sapien
agtccggcaatacgtcgcgcgttca

SEQ ID NO: 5922156 - DNA, 25 bp, Homo sapien
gcatgaatacgcggagcgcggtcta

SEQ ID NO: 5922157 - DNA, 25 bp, Homo sapien
agatgcgtagtcgacgcgccagtgt

SEQ ID NO: 5922158 - DNA, 25 bp, Homo sapien
agagcccggtcgcacgatttaacgg

SEQ ID NO: 5922159 - DNA, 25 bp, Homo sapien
gcttttactaggttgcgccacggcg

SEQ ID NO: 5922160 - DNA, 25 bp, Homo sapien
taggatacgttcggcgatccggctc

SEQ ID NO: 5922161 - DNA, 25 bp, Homo sapien
atcgcacggttcgtcgcatgggctt

SEQ ID NO: 5922162 - DNA, 25 bp, Homo sapien
ccaagacgcttatcgaccgttcggc

SEQ ID NO: 5922163 - DNA, 25 bp, Homo sapien
tgtcgcccgatacgcgaacgatgac

SEQ ID NO: 5922164 - DNA, 25 bp, Homo sapien
ccaagccgacgtaggccgtcatgat

SEQ ID NO: 5922165 - DNA, 25 bp, Homo sapien
tcctcgaggtatcgtcgcgatgctc

SEQ ID NO: 5922166 - DNA, 25 bp, Homo sapien
aacctgcgtagaccggcgaaacgga

SEQ ID NO: 5922167 - DNA, 25 bp, Homo sapien
cggctccgatctagtacgctgctac

SEQ ID NO: 5922168 - DNA, 25 bp, Homo sapien
ggttcgtcgcatacgggccacgatt

SEQ ID NO: 5922169 - DNA, 25 bp, Homo sapien
agacgtccgacgtaacggcatccca

SEQ ID NO: 5922170 - DNA, 25 bp, Homo sapien
ttggatcggtcgggtatcgccatgg

SEQ ID NO: 5922171 - DNA, 25 bp, Homo sapien
agcgagtacgtcgtgcacgacttcc

SEQ ID NO: 5922172 - DNA, 25 bp, Homo sapien
gcacgagattagttcgcgcccgatc

SEQ ID NO: 5922173 - DNA, 25 bp, Homo sapien
tgggagccgctatgcgtacctagtg

SEQ ID NO: 5922174 - DNA, 25 bp, Homo sapien
acaactttagtcgcgacgtcggcgc

SEQ ID NO: 5922175 - DNA, 25 bp, Homo sapien
tgctggcgttcgcgacatacaccgt

SEQ ID NO: 5922176 - DNA, 25 bp, Homo sapien
cgtggcggcccgtttaacgctagaa

SEQ ID NO: 5922177 - DNA, 25 bp, Homo sapien
gaggcctaacgcgtaccgtgaggat

SEQ ID NO: 5922178 - DNA, 25 bp, Homo sapien
ccccgtgtccgacgtcgtagaacaa

SEQ ID NO: 5922179 - DNA, 25 bp, Homo sapien
tcacacgacccgtccgttaccactg

SEQ ID NO: 5922180 - DNA, 25 bp, Homo sapien
tgccatccgtcgcataggtgtggtc

SEQ ID NO: 5922181 - DNA, 25 bp, Homo sapien
acccataatcgcgcgtacgcgtgag

SEQ ID NO: 5922182 - DNA, 25 bp, Homo sapien
caagcgcggcgaaccgttatgagca

SEQ ID NO: 5922183 - DNA, 25 bp, Homo sapien
cgtcctcgagatatcgcgtgcgaac

SEQ ID NO: 5922184 - DNA, 25 bp, Homo sapien
cgattggtcgcacgatacggcatcc

SEQ ID NO: 5922185 - DNA, 25 bp, Homo sapien
cgtcaccacgctagatcgcatgctc

SEQ ID NO: 5922186 - DNA, 25 bp, Homo sapien
tctatcacgtaacgggccgccgact

SEQ ID NO: 5922187 - DNA, 25 bp, Homo sapien
tacgtcctccgaacgtacggcagct

SEQ ID NO: 5922188 - DNA, 25 bp, Homo sapien
tacgcgtgcgacgttaccgaagacc

SEQ ID NO: 5922189 - DNA, 25 bp, Homo sapien
ccgcactcgtagtatcgcggagatg

SEQ ID NO: 5922190 - DNA, 25 bp, Homo sapien
cggccaatcacgacgcgtaagactg

SEQ ID NO: 5922191 - DNA, 25 bp, Homo sapien
agcgatgcgctccgacgtacgtcaa

SEQ ID NO: 5922192 - DNA, 25 bp, Homo sapien
gacctgctacgcgagtcggaacagt

SEQ ID NO: 5922193 - DNA, 25 bp, Homo sapien
gcctcgagtgtcgcgtaaggtcgta

SEQ ID NO: 5922194 - DNA, 25 bp, Homo sapien
gtcgtctacgataggccgcgagatg

SEQ ID NO: 5922195 - DNA, 25 bp, Homo sapien
cgatggtatggacgatcgccgccaa

SEQ ID NO: 5922196 - DNA, 25 bp, Homo sapien
atcgtcagcgtacgactagggccgt

SEQ ID NO: 5922197 - DNA, 25 bp, Homo sapien
cgcagtcgtaatgccgcgcacgata

SEQ ID NO: 5922198 - DNA, 25 bp, Homo sapien
gctccgatcacggtacggcaactct

SEQ ID NO: 5922199 - DNA, 25 bp, Homo sapien
gtatggcgacgagcgatccctggta

SEQ ID NO: 5922200 - DNA, 25 bp, Homo sapien
gaagtgtatgcggaccgtggcgttc

SEQ ID NO: 5922201 - DNA, 25 bp, Homo sapien
cccgaagctcgcgaacctagaggta

SEQ ID NO: 5922202 - DNA, 25 bp, Homo sapien
cttgggctatcgcgggacaagggat

SEQ ID NO: 5922203 - DNA, 25 bp, Homo sapien
ggcctttttacgcggtcggcatcag

SEQ ID NO: 5922204 - DNA, 25 bp, Homo sapien
accgtgaggtacgacgcgtccgtaa

SEQ ID NO: 5922205 - DNA, 25 bp, Homo sapien
ggactcgacgcccgtagtagatggt

SEQ ID NO: 5922206 - DNA, 25 bp, Homo sapien
tgccctagttgcgtacggccgatca

SEQ ID NO: 5922207 - DNA, 25 bp, Homo sapien
taccgaatacggcaccgcgtacctg

SEQ ID NO: 5922208 - DNA, 25 bp, Homo sapien
aagtagcgcgtaccgccaacggtca

SEQ ID NO: 5922209 - DNA, 25 bp, Homo sapien
acgtgggaacgcgacgttatcggtc

SEQ ID NO: 5922210 - DNA, 25 bp, Homo sapien
gcctcttccgacttagcgcagcaca

SEQ ID NO: 5922211 - DNA, 25 bp, Homo sapien
gcaaggttcgggccgactatcttcg

SEQ ID NO: 5922212 - DNA, 25 bp, Homo sapien
ctcgcttcagtacgcgcgaaagtcg

SEQ ID NO: 5922213 - DNA, 25 bp, Homo sapien
cggcaacgacgtacgatcgcgatca

SEQ ID NO: 5922214 - DNA, 25 bp, Homo sapien
ccttcgacttatcgcggcgtacgtc

SEQ ID NO: 5922215 - DNA, 25 bp, Homo sapien
acacggcgtactaacgctcgagctc

SEQ ID NO: 5922216 - DNA, 25 bp, Homo sapien
atgcacagttcgctccgtagccctc

SEQ ID NO: 5922217 - DNA, 25 bp, Homo sapien
agctcagtacgcgttcggaatgggc

SEQ ID NO: 5922218 - DNA, 25 bp, Homo sapien
tatccgcgtacggaccggtcctcta

SEQ ID NO: 5922219 - DNA, 25 bp, Homo sapien
aatgagcccgtacgatacgcggcag

SEQ ID NO: 5922220 - DNA, 25 bp, Homo sapien
aggtgatcgggtaccgataccgctc

SEQ ID NO: 5922221 - DNA, 25 bp, Homo sapien
cctccccctcgcgtactagatcgat

SEQ ID NO: 5922222 - DNA, 25 bp, Homo sapien
gcagctcgctaacgcacgacatcct

SEQ ID NO: 5922223 - DNA, 25 bp, Homo sapien
cgaggcgagtcgtcgcgaacagaaa

SEQ ID NO: 5922224 - DNA, 25 bp, Homo sapien
ttcacaacttacgcgccctgaccgc

SEQ ID NO: 5922225 - DNA, 25 bp, Homo sapien
gcatcaaacgcgtaggtcgccctga

SEQ ID NO: 5922226 - DNA, 25 bp, Homo sapien
acgcagtacacgtcgcccgttcagt

SEQ ID NO: 5922227 - DNA, 25 bp, Homo sapien
aggtcgtagcgcgctatcatgcgga

SEQ ID NO: 5922228 - DNA, 25 bp, Homo sapien
agacatatacacgtcgcgccccgca

SEQ ID NO: 5922229 - DNA, 25 bp, Homo sapien
ggtcttctacgcgtagacccagctg

SEQ ID NO: 5922230 - DNA, 25 bp, Homo sapien
cgggcgcatgatagtcgcgaatctc

SEQ ID NO: 5922231 - DNA, 25 bp, Homo sapien
gcttggcgcgactttacggcttcag

SEQ ID NO: 5922232 - DNA, 25 bp, Homo sapien
tacaggagcggtatatcgcgccggt

SEQ ID NO: 5922233 - DNA, 25 bp, Homo sapien
agctactacgcgactagtccgtccg

SEQ ID NO: 5922234 - DNA, 25 bp, Homo sapien
cggtcgcgcgtatcaggtctgctat

SEQ ID NO: 5922235 - DNA, 25 bp, Homo sapien
cctttgtgcgcgaacggtacagcgt

SEQ ID NO: 5922236 - DNA, 25 bp, Homo sapien
ctacaccgacctacgctaggcctag

SEQ ID NO: 5922237 - DNA, 25 bp, Homo sapien
actgctcgatacgccacgtcgctgt

SEQ ID NO: 5922238 - DNA, 25 bp, Homo sapien
atcgaaatacgcgctaggcccggct

SEQ ID NO: 5922239 - DNA, 25 bp, Homo sapien
gaataagaccgcacgcgaacggctg

SEQ ID NO: 5922240 - DNA, 25 bp, Homo sapien
ccgtgcatcgtaacgcgcgagcttt

SEQ ID NO: 5922241 - DNA, 25 bp, Homo sapien
cctcatgcgacccgactatccacct

SEQ ID NO: 5922242 - DNA, 25 bp, Homo sapien
gatgagcgacggtctcgcacgtgta

SEQ ID NO: 5922243 - DNA, 25 bp, Homo sapien
cacctctcgttacgcgcgcagcaat

SEQ ID NO: 5922244 - DNA, 25 bp, Homo sapien
cagagcctcgcttaacgggggtaga

SEQ ID NO: 5922245 - DNA, 25 bp, Homo sapien
gtaacggcgcatctacgcgggaact

SEQ ID NO: 5922246 - DNA, 25 bp, Homo sapien
gaccccagcgtatagacggtaggag

SEQ ID NO: 5922247 - DNA, 25 bp, Homo sapien
tatccgacgacgtagcaccgccctt

SEQ ID NO: 5922248 - DNA, 25 bp, Homo sapien
tggaggcgcgctatataccacccac

SEQ ID NO: 5922249 - DNA, 25 bp, Homo sapien
aaggtgcgcgtggtagtctggacga

SEQ ID NO: 5922250 - DNA, 25 bp, Homo sapien
agccgtcgtaacgtctcggcactgt

SEQ ID NO: 5922251 - DNA, 25 bp, Homo sapien
cattgtcgcacgatgcgagcgcgat

SEQ ID NO: 5922252 - DNA, 25 bp, Homo sapien
tatgccccgcaacggcttaagggga

SEQ ID NO: 5922253 - DNA, 25 bp, Homo sapien
tccatctcccgcgacgtacttgcct

SEQ ID NO: 5922254 - DNA, 25 bp, Homo sapien
agcctgccctattacgacgccgttc

SEQ ID NO: 5922255 - DNA, 25 bp, Homo sapien
cggacgcgttagtcggagttccaga

SEQ ID NO: 5922256 - DNA, 25 bp, Homo sapien
gcgacatatgtcgcggataggctcc

SEQ ID NO: 5922257 - DNA, 25 bp, Homo sapien
aacacacgacgtctagcgtgggacg

SEQ ID NO: 5922258 - DNA, 25 bp, Homo sapien
tgaatgtcgacgtaccccaggacgc

SEQ ID NO: 5922259 - DNA, 25 bp, Homo sapien
aatcggttcgcctcgcatagcggct

SEQ ID NO: 5922260 - DNA, 25 bp, Homo sapien
cactagtaccgcgttcggagcgaag

SEQ ID NO: 5922261 - DNA, 25 bp, Homo sapien
agagtcctaccgcgcgtatccactc

SEQ ID NO: 5922262 - DNA, 25 bp, Homo sapien
aagcttcgtcgtaactccgcgggtg

SEQ ID NO: 5922263 - DNA, 25 bp, Homo sapien
ggagtcgtactacggacgaccgttc

SEQ ID NO: 5922264 - DNA, 25 bp, Homo sapien
tagccttaatcgcgcagcgtcgcga

SEQ ID NO: 5922265 - DNA, 25 bp, Homo sapien
gctatgtaggtagccgtcgagggtg

SEQ ID NO: 5922266 - DNA, 25 bp, Homo sapien
gagtcaacgaccgcgctaggtgttc

SEQ ID NO: 5922267 - DNA, 25 bp, Homo sapien
aacttcatacgctcgcgtcacggcc

SEQ ID NO: 5922268 - DNA, 25 bp, Homo sapien
gcgttagtatacgtccgcctgtgcg

SEQ ID NO: 5922269 - DNA, 25 bp, Homo sapien
gctcgatatacttcgcgcggtacgg

SEQ ID NO: 5922270 - DNA, 25 bp, Homo sapien
catcacacgggtcgagacggttagc

SEQ ID NO: 5922271 - DNA, 25 bp, Homo sapien
gacaccgcgcgaggtaaatgctgtc

SEQ ID NO: 5922272 - DNA, 25 bp, Homo sapien
atcgatcgactcgcgtacgcgatcg

SEQ ID NO: 5922273 - DNA, 25 bp, Homo sapien
cgatggcgtataccgcccgttcgat

SEQ ID NO: 5922274 - DNA, 25 bp, Homo sapien
gccaaccgtcaaagcgcgaattccc

SEQ ID NO: 5922275 - DNA, 25 bp, Homo sapien
aacagtggtatcgcgcaagcacccc

SEQ ID NO: 5922276 - DNA, 25 bp, Homo sapien
ggctcatccgggcgtatacggtaac

SEQ ID NO: 5922277 - DNA, 25 bp, Homo sapien
atggacgtccgctacgcaagtctgc

SEQ ID NO: 5922278 - DNA, 25 bp, Homo sapien
tgcgcctaacgcgcgaccgcatata

SEQ ID NO: 5922279 - DNA, 25 bp, Homo sapien
gctaagttaggacccgcgcagaggt

SEQ ID NO: 5922280 - DNA, 25 bp, Homo sapien
ccaggtctcgcgtaagtcgaagcgt

SEQ ID NO: 5922281 - DNA, 25 bp, Homo sapien
gccgagcactatccgcgttctgtca

SEQ ID NO: 5922282 - DNA, 25 bp, Homo sapien
gcataccgcgcagctagatcatggc

SEQ ID NO: 5922283 - DNA, 25 bp, Homo sapien
gggattcgcggcgtaagtcagggaa

SEQ ID NO: 5922284 - DNA, 25 bp, Homo sapien
cccccatggcgaccttacgtaagga

SEQ ID NO: 5922285 - DNA, 25 bp, Homo sapien
gttggtcgtacggcgcaatacgtgc

SEQ ID NO: 5922286 - DNA, 25 bp, Homo sapien
ccatccccgttaacgcgtcttgtgc

SEQ ID NO: 5922287 - DNA, 25 bp, Homo sapien
cctcgcatgctttcgcgtacagtcg

SEQ ID NO: 5922288 - DNA, 25 bp, Homo sapien
cgaaggtagcgcgaacgttgaccac

SEQ ID NO: 5922289 - DNA, 25 bp, Homo sapien
actggggcgacgctatacggctcaa

SEQ ID NO: 5922290 - DNA, 25 bp, Homo sapien
gtcgctacgcttccggtcggttatg

SEQ ID NO: 5922291 - DNA, 25 bp, Homo sapien
gatagggttcggcgtacgaggtctc

SEQ ID NO: 5922292 - DNA, 25 bp, Homo sapien
acatccgctagcggacgtaggagag

SEQ ID NO: 5922293 - DNA, 25 bp, Homo sapien
accagctcgcacgaacgactcatgc

SEQ ID NO: 5922294 - DNA, 25 bp, Homo sapien
gtcgattattgccggtgcgagggtg

SEQ ID NO: 5922295 - DNA, 25 bp, Homo sapien
accgttgcgtcttacgcgaaagccc

SEQ ID NO: 5922296 - DNA, 25 bp, Homo sapien
gacctaatccgtacgcggtcgtcac

SEQ ID NO: 5922297 - DNA, 25 bp, Homo sapien
agctgtcgacgcgcatcgttgggaa

SEQ ID NO: 5922298 - DNA, 25 bp, Homo sapien
ggactagcgatcacgcgttgcacag

SEQ ID NO: 5922299 - DNA, 25 bp, Homo sapien
aaagttgtccgttcgcgtaggcgcc

SEQ ID NO: 5922300 - DNA, 25 bp, Homo sapien
ccgatacctaacgcgatcgcacagg

SEQ ID NO: 5922301 - DNA, 25 bp, Homo sapien
tgtcgctagatcggcgcgaagcaga

SEQ ID NO: 5922302 - DNA, 25 bp, Homo sapien
gaaaagcgcccgcggtatactgtcg

SEQ ID NO: 5922303 - DNA, 25 bp, Homo sapien
cgacgatatccgtacgggtaggcac

SEQ ID NO: 5922304 - DNA, 25 bp, Homo sapien
cgcctatccgcgctaacgtagaacc

SEQ ID NO: 5922305 - DNA, 25 bp, Homo sapien
acgaagctcttcgcgcgatagctgg

SEQ ID NO: 5922306 - DNA, 25 bp, Homo sapien
gcttaagctcgtacgcgcaagccgt

SEQ ID NO: 5922307 - DNA, 25 bp, Homo sapien
tgtggatacgcgcacgaagatcgcg

SEQ ID NO: 5922308 - DNA, 25 bp, Homo sapien
catgattgttacggaccgcccctgc

SEQ ID NO: 5922309 - DNA, 25 bp, Homo sapien
cttgggtacgctagcgtcgttgagg

SEQ ID NO: 5922310 - DNA, 25 bp, Homo sapien
tcccgacgcgcaactatctgagtcg

SEQ ID NO: 5922311 - DNA, 25 bp, Homo sapien
ccgcgcacgacccgcaatgaaaatc

SEQ ID NO: 5922312 - DNA, 25 bp, Homo sapien
ctctaagcctaggcgcgttagtcgc

SEQ ID NO: 5922313 - DNA, 25 bp, Homo sapien
gctagccactctagcgcgatcccat

SEQ ID NO: 5922314 - DNA, 25 bp, Homo sapien
cgggtctacgacgcgcttagcttca

SEQ ID NO: 5922315 - DNA, 25 bp, Homo sapien
ggaccgtaatgcgcgcgttattccg

SEQ ID NO: 5922316 - DNA, 25 bp, Homo sapien
tctccgtacgcgaggcatggtagga

SEQ ID NO: 5922317 - DNA, 25 bp, Homo sapien
tcctcggtcacgagcgtacactcga

SEQ ID NO: 5922318 - DNA, 25 bp, Homo sapien
gttcagcgtcggagtacgacgaagc

SEQ ID NO: 5922319 - DNA, 25 bp, Homo sapien
tgaggcgtattggcgtacctgctgc

SEQ ID NO: 5922320 - DNA, 25 bp, Homo sapien
cttcgacgctacgagcgttggtctg

SEQ ID NO: 5922321 - DNA, 25 bp, Homo sapien
cgctaacgtagccgatcgggaagtc

SEQ ID NO: 5922322 - DNA, 25 bp, Homo sapien
ggtcaggtagcgcgctaaaatgggg

SEQ ID NO: 5922323 - DNA, 25 bp, Homo sapien
ccagccgactgatagcgcgattgtg

SEQ ID NO: 5922324 - DNA, 25 bp, Homo sapien
cttggactagacgcgtagcagaggc

SEQ ID NO: 5922325 - DNA, 25 bp, Homo sapien
cggatagcgtactacgggctggttg

SEQ ID NO: 5922326 - DNA, 25 bp, Homo sapien
gggaattcgtaccgtcacgaccagc

SEQ ID NO: 5922327 - DNA, 25 bp, Homo sapien
gcctaccgcgtaatctcgctctgac

SEQ ID NO: 5922328 - DNA, 25 bp, Homo sapien
aaggcaagtaggacgcgaccggagt

SEQ ID NO: 5922329 - DNA, 25 bp, Homo sapien
gtgcaatagccggtacgcatgggga

SEQ ID NO: 5922330 - DNA, 25 bp, Homo sapien
cgaactccgcataagtccggcctca

SEQ ID NO: 5922331 - DNA, 25 bp, Homo sapien
gctgaccgtcgtagcgtaacgcgtt

SEQ ID NO: 5922332 - DNA, 25 bp, Homo sapien
tgcatggtatacggttcgcctccgc

SEQ ID NO: 5922333 - DNA, 25 bp, Homo sapien
acaaacacgggagtacgcgcatggc

SEQ ID NO: 5922334 - DNA, 25 bp, Homo sapien
ccctgacgcgagacgttagaaaggc

SEQ ID NO: 5922335 - DNA, 25 bp, Homo sapien
tgcaccgtcgtaacgcgtagacgac

SEQ ID NO: 5922336 - DNA, 25 bp, Homo sapien
ctccatatcggttacgcggtctggg

SEQ ID NO: 5922337 - DNA, 25 bp, Homo sapien
ttggcccgtataacggccgtaagcg

SEQ ID NO: 5922338 - DNA, 25 bp, Homo sapien
aagaccacgtcgcgcgtaatagggg

SEQ ID NO: 5922339 - DNA, 25 bp, Homo sapien
acgtacatacgagcgcgtccgtgct

SEQ ID NO: 5922340 - DNA, 25 bp, Homo sapien
cgaccaccgtcgcgtcttacgtaca

SEQ ID NO: 5922341 - DNA, 25 bp, Homo sapien
cagtggtcgcggtatgccttcgact

SEQ ID NO: 5922342 - DNA, 25 bp, Homo sapien
cgcttctcgacgatacgccctcttg

SEQ ID NO: 5922343 - DNA, 25 bp, Homo sapien
ttcactccgcggatgtaagccgtgg

SEQ ID NO: 5922344 - DNA, 25 bp, Homo sapien
ctccgagttgcgcgcgataggcaaa

SEQ ID NO: 5922345 - DNA, 25 bp, Homo sapien
ctagggagtcgcgaataggcgggaa

SEQ ID NO: 5922346 - DNA, 25 bp, Homo sapien
ccaacttagctatcccgcgctgtcg

SEQ ID NO: 5922347 - DNA, 25 bp, Homo sapien
agagcaacttagggcgcgtctctcc

SEQ ID NO: 5922348 - DNA, 25 bp, Homo sapien
ggctcaggcgcgtacccgaaattag

SEQ ID NO: 5922349 - DNA, 25 bp, Homo sapien
tgttagcgcgcgttcgtacacgtgg

SEQ ID NO: 5922350 - DNA, 25 bp, Homo sapien
ggtcactacgcgggagttagatggc

SEQ ID NO: 5922351 - DNA, 25 bp, Homo sapien
tgctaccgaataccgtcggaagccg

SEQ ID NO: 5922352 - DNA, 25 bp, Homo sapien
tggggtggcgcgaactaaggtggtt

SEQ ID NO: 5922353 - DNA, 25 bp, Homo sapien
cgcactggtcgttcgcgaacgaaac

SEQ ID NO: 5922354 - DNA, 25 bp, Homo sapien
tgcacgcgagtccgcgaaacctagt

SEQ ID NO: 5922355 - DNA, 25 bp, Homo sapien
ggacgtgcgacgtcttgtaggatgg

SEQ ID NO: 5922356 - DNA, 25 bp, Homo sapien
cgctttatagacgaccccggctgga

SEQ ID NO: 5922357 - DNA, 25 bp, Homo sapien
ctctgtttcgtaacgcgggccgtct

SEQ ID NO: 5922358 - DNA, 25 bp, Homo sapien
tgagaagtccggcgttactcagggg

SEQ ID NO: 5922359 - DNA, 25 bp, Homo sapien
gagccagtatcgaggtccgtaaggg

SEQ ID NO: 5922360 - DNA, 25 bp, Homo sapien
tactcactcgctcgacgtagccctg

SEQ ID NO: 5922361 - DNA, 25 bp, Homo sapien
cgcgattatacgtcggccacgcaag

SEQ ID NO: 5922362 - DNA, 25 bp, Homo sapien
gaaccacgttcccgtatcgccttcc

SEQ ID NO: 5922363 - DNA, 25 bp, Homo sapien
ggcgctcgacccgctatatgtgtgt

SEQ ID NO: 5922364 - DNA, 25 bp, Homo sapien
cacagatcgcgtaaccggtccatcg

SEQ ID NO: 5922365 - DNA, 25 bp, Homo sapien
accgctacgtcgcgacagctaatgg

SEQ ID NO: 5922366 - DNA, 25 bp, Homo sapien
gccactcgcgacttacacctgtgga

SEQ ID NO: 5922367 - DNA, 25 bp, Homo sapien
ctcgcttatcaacgacgcgactccc

SEQ ID NO: 5922368 - DNA, 25 bp, Homo sapien
agaccgcgacgtgtcgtaccagtct

SEQ ID NO: 5922369 - DNA, 25 bp, Homo sapien
acacgacgcggtatgtatcgaccgg

SEQ ID NO: 5922370 - DNA, 25 bp, Homo sapien
agcctctacgtcgggaccgaactac

SEQ ID NO: 5922371 - DNA, 25 bp, Homo sapien
tccgtcccgcggtacgttaactcca

SEQ ID NO: 5922372 - DNA, 25 bp, Homo sapien
gcatcgcggcgatccgttaagggta

SEQ ID NO: 5922373 - DNA, 25 bp, Homo sapien
gcgtggaacctaagtcgcgcacgat

SEQ ID NO: 5922374 - DNA, 25 bp, Homo sapien
tgtcactatcgtcgcctcgtcggga

SEQ ID NO: 5922375 - DNA, 25 bp, Homo sapien
gctctccgtatatcgcgtcggcaag

SEQ ID NO: 5922376 - DNA, 25 bp, Homo sapien
gatctgtaggacgcgctatgcgcga

SEQ ID NO: 5922377 - DNA, 25 bp, Homo sapien
tccacctacgtgcccgatttcctcg

SEQ ID NO: 5922378 - DNA, 25 bp, Homo sapien
tgtgagtccggttcgctagctgtgg

SEQ ID NO: 5922379 - DNA, 25 bp, Homo sapien
tcactcttcgcgcgagcttgaggac

SEQ ID NO: 5922380 - DNA, 25 bp, Homo sapien
gcgcttactaatcggtgcggagcac

SEQ ID NO: 5922381 - DNA, 25 bp, Homo sapien
tacgggaccgcgcgttagagtttgc

SEQ ID NO: 5922382 - DNA, 25 bp, Homo sapien
tcgcgtcttacgaacgcgcggcaat

SEQ ID NO: 5922383 - DNA, 25 bp, Homo sapien
gtcacggtacggcgtacgaattccg

SEQ ID NO: 5922384 - DNA, 25 bp, Homo sapien
tctgtgacgagccgctatctagccg

SEQ ID NO: 5922385 - DNA, 25 bp, Homo sapien
gaacaaatcccggcgtacgacgcga

SEQ ID NO: 5922386 - DNA, 25 bp, Homo sapien
ctactggtaagccgtaacggggcag

SEQ ID NO: 5922387 - DNA, 25 bp, Homo sapien
catatcgatcacgcgtcggtcgggt

SEQ ID NO: 5922388 - DNA, 25 bp, Homo sapien
agcaagctagcgtaccggcggctta

SEQ ID NO: 5922389 - DNA, 25 bp, Homo sapien
gcgccatacgccggattgaggctaa

SEQ ID NO: 5922390 - DNA, 25 bp, Homo sapien
gacagttcgactaacgcgtggacgg

SEQ ID NO: 5922391 - DNA, 25 bp, Homo sapien
ccaacaacgccgcgagtatgcgttc

SEQ ID NO: 5922392 - DNA, 25 bp, Homo sapien
ctagcgatcgggttacgccacaacc

SEQ ID NO: 5922393 - DNA, 25 bp, Homo sapien
tcgaccacgcgcctaagactagctg

SEQ ID NO: 5922394 - DNA, 25 bp, Homo sapien
gctaccgtgcgcgtcgtatgttcct

SEQ ID NO: 5922395 - DNA, 25 bp, Homo sapien
gcctggcgcgtaatcgtgtcgtaag

SEQ ID NO: 5922396 - DNA, 25 bp, Homo sapien
tcgtgtcgacgtaacaccggtggct

SEQ ID NO: 5922397 - DNA, 25 bp, Homo sapien
ggtgctctcgatataccgcccaacc

SEQ ID NO: 5922398 - DNA, 25 bp, Homo sapien
gggtggatcgcgtgcgtaaggttac

SEQ ID NO: 5922399 - DNA, 25 bp, Homo sapien
ggcatgccgttagtcgcaagtggca

SEQ ID NO: 5922400 - DNA, 25 bp, Homo sapien
atccatgacgagttcgcccgatcgc

SEQ ID NO: 5922401 - DNA, 25 bp, Homo sapien
ccgtgtcggccgaacgattagcgtt

SEQ ID NO: 5922402 - DNA, 25 bp, Homo sapien
gagttgtagcggacgaacggggtgt

SEQ ID NO: 5922403 - DNA, 25 bp, Homo sapien
gtacccgactatccgcgtgatccgt

SEQ ID NO: 5922404 - DNA, 25 bp, Homo sapien
acgtcaacctagtcgcgtcgtgtcg

SEQ ID NO: 5922405 - DNA, 25 bp, Homo sapien
cgtcgttcgtgccgcatagagcaag

SEQ ID NO: 5922406 - DNA, 25 bp, Homo sapien
gcccgtacatcgtagcgcgtatcca

SEQ ID NO: 5922407 - DNA, 25 bp, Homo sapien
tcgacacgctcgcgagattgttccg

SEQ ID NO: 5922408 - DNA, 25 bp, Homo sapien
ccagtgcgtataacgggtgagctcg

SEQ ID NO: 5922409 - DNA, 25 bp, Homo sapien
ttgcaggtcgcggttagactcgggt

SEQ ID NO: 5922410 - DNA, 25 bp, Homo sapien
gattggcgactcgtagcatccgcga

SEQ ID NO: 5922411 - DNA, 25 bp, Homo sapien
tgcgtacgcgacacggtatgagcag

SEQ ID NO: 5922412 - DNA, 25 bp, Homo sapien
gcacatccgaccggtagtacaccag

SEQ ID NO: 5922413 - DNA, 25 bp, Homo sapien
gtcctgacttatacggcgcccactc

SEQ ID NO: 5922414 - DNA, 25 bp, Homo sapien
cgcacagacgcgacgtatcgccaat

SEQ ID NO: 5922415 - DNA, 25 bp, Homo sapien
cctacttagcgtaggtcgccgcgtt

SEQ ID NO: 5922416 - DNA, 25 bp, Homo sapien
ctaatacgtagttcgtgcgcgggcg

SEQ ID NO: 5922417 - DNA, 25 bp, Homo sapien
acgctttatcggaccgaaccaggcc

SEQ ID NO: 5922418 - DNA, 25 bp, Homo sapien
gtgaggctaacgcgcgaactttgcg

SEQ ID NO: 5922419 - DNA, 25 bp, Homo sapien
tcagagtgacgtatcgtcgcgcgca

SEQ ID NO: 5922420 - DNA, 25 bp, Homo sapien
ggaatcggcgcgaattggttacccg

SEQ ID NO: 5922421 - DNA, 25 bp, Homo sapien
cccttttataccggcgcgtagagcg

SEQ ID NO: 5922422 - DNA, 25 bp, Homo sapien
cagacactatcgcgcctattcccgc

SEQ ID NO: 5922423 - DNA, 25 bp, Homo sapien
tgacgaatacgcgcgcgactccttc

SEQ ID NO: 5922424 - DNA, 25 bp, Homo sapien
gttgattcgcggtaggtacgctggc

SEQ ID NO: 5922425 - DNA, 25 bp, Homo sapien
cagccagcgtccgactaacgccaaa

SEQ ID NO: 5922426 - DNA, 25 bp, Homo sapien
gcggtgcgcgctatcgagaaagcta

SEQ ID NO: 5922427 - DNA, 25 bp, Homo sapien
ggctggtaccgcgtcgtaaacagac

SEQ ID NO: 5922428 - DNA, 25 bp, Homo sapien
ttagccctagcgtaaccgctgctgc

SEQ ID NO: 5922429 - DNA, 25 bp, Homo sapien
ccaaaagtacgcccgctcacagctc

SEQ ID NO: 5922430 - DNA, 25 bp, Homo sapien
tgtctccgggatatcgtcgggtctc

SEQ ID NO: 5922431 - DNA, 25 bp, Homo sapien
agtgaccgtagcgtacgacctgcga

SEQ ID NO: 5922432 - DNA, 25 bp, Homo sapien
cggtcttaaccgacgcacctgatgc

SEQ ID NO: 5922433 - DNA, 25 bp, Homo sapien
gagtggtaatcgcggacgttggcac

SEQ ID NO: 5922434 - DNA, 25 bp, Homo sapien
gtagccgtcgattcgcgtaagggca

SEQ ID NO: 5922435 - DNA, 25 bp, Homo sapien
tcctcgcgcacgaactacgtcagac

SEQ ID NO: 5922436 - DNA, 25 bp, Homo sapien
tcagttccggaccgatagtcgcgca

SEQ ID NO: 5922437 - DNA, 25 bp, Homo sapien
tacccctacgcgcgactagcattgc

SEQ ID NO: 5922438 - DNA, 25 bp, Homo sapien
cgggtacgcacgactacccaaccaa

SEQ ID NO: 5922439 - DNA, 25 bp, Homo sapien
gtctaattaggctcggacgaccggg

SEQ ID NO: 5922440 - DNA, 25 bp, Homo sapien
cgtgccttcgtacgacccgagagaa

SEQ ID NO: 5922441 - DNA, 25 bp, Homo sapien
ggccgcataccgatagcgcataacc

SEQ ID NO: 5922442 - DNA, 25 bp, Homo sapien
ttttggacgcgggtcgtagccgtca

SEQ ID NO: 5922443 - DNA, 25 bp, Homo sapien
gcagtataacgagcgtccgtagggc

SEQ ID NO: 5922444 - DNA, 25 bp, Homo sapien
ttcgaagcgtttcgcctaagggcgg

SEQ ID NO: 5922445 - DNA, 25 bp, Homo sapien
accttagaccgtctagcgtcccgtc

SEQ ID NO: 5922446 - DNA, 25 bp, Homo sapien
agcgcttacgaggtcgccagagcat

SEQ ID NO: 5922447 - DNA, 25 bp, Homo sapien
cttcttcgatcgggcctatccccca

SEQ ID NO: 5922448 - DNA, 25 bp, Homo sapien
cattgcctatcgggcgcgtccaaag

SEQ ID NO: 5922449 - DNA, 25 bp, Homo sapien
cgatttccgcgagacgttactccgc

SEQ ID NO: 5922450 - DNA, 25 bp, Homo sapien
gaccgctccgtagcgtacgcataag

SEQ ID NO: 5922451 - DNA, 25 bp, Homo sapien
gtgcagttaccgactaacggcaccg

SEQ ID NO: 5922452 - DNA, 25 bp, Homo sapien
acttcctcggcgtaccacgcttgtg

SEQ ID NO: 5922453 - DNA, 25 bp, Homo sapien
aaccattcccgcgtcacgatcctcg

SEQ ID NO: 5922454 - DNA, 25 bp, Homo sapien
ccaagttacgtacggcccggatcga

SEQ ID NO: 5922455 - DNA, 25 bp, Homo sapien
gaacatgcggcactatacgacgccg

SEQ ID NO: 5922456 - DNA, 25 bp, Homo sapien
cagcgccgcgacgttagttcctaac

SEQ ID NO: 5922457 - DNA, 25 bp, Homo sapien
ggctaagtctagtcgacgcctgtcc

SEQ ID NO: 5922458 - DNA, 25 bp, Homo sapien
atggagatcgggttggtcgggtgca

SEQ ID NO: 5922459 - DNA, 25 bp, Homo sapien
aggtacatcgtcgctcacgctccca

SEQ ID NO: 5922460 - DNA, 25 bp, Homo sapien
ggatgtcgcgcgaatacgagcgact

SEQ ID NO: 5922461 - DNA, 25 bp, Homo sapien
ataacgtacgtggcgcggattggcc

SEQ ID NO: 5922462 - DNA, 25 bp, Homo sapien
ttatggcgtagcgctatgcgggctg

SEQ ID NO: 5922463 - DNA, 25 bp, Homo sapien
ccccctcgcgctagagtttaagagg

SEQ ID NO: 5922464 - DNA, 25 bp, Homo sapien
tcaacatcgcggatagtcgggcgca

SEQ ID NO: 5922465 - DNA, 25 bp, Homo sapien
catacggtaacgactcgcgcggtga

SEQ ID NO: 5922466 - DNA, 25 bp, Homo sapien
actacggtacgcgagctatcgtggg

SEQ ID NO: 5922467 - DNA, 25 bp, Homo sapien
ggctcttcgacgcggtcttacaacg

SEQ ID NO: 5922468 - DNA, 25 bp, Homo sapien
acttgcacgcgaagggtacgtaggg

SEQ ID NO: 5922469 - DNA, 25 bp, Homo sapien
gcagcaagtacgacacccgcgagat

SEQ ID NO: 5922470 - DNA, 25 bp, Homo sapien
gccagtactcatcgcgcgacgcaaa

SEQ ID NO: 5922471 - DNA, 25 bp, Homo sapien
gcggctacgcattaccgcgattcgt

SEQ ID NO: 5922472 - DNA, 25 bp, Homo sapien
acatgtcgacctaggaccgtcccac

SEQ ID NO: 5922473 - DNA, 25 bp, Homo sapien
gcggtctaggcgtcgacactcatga

SEQ ID NO: 5922474 - DNA, 25 bp, Homo sapien
tgccactcctaccgccgactctgtt

SEQ ID NO: 5922475 - DNA, 25 bp, Homo sapien
atgcggcgacaataccgcggcactt

SEQ ID NO: 5922476 - DNA, 25 bp, Homo sapien
tatcaggcgtacccgtacggcgcat

SEQ ID NO: 5922477 - DNA, 25 bp, Homo sapien
atcacgatatccgacgcggggccta

SEQ ID NO: 5922478 - DNA, 25 bp, Homo sapien
caggtacggtaagctcgcatgcgag

SEQ ID NO: 5922479 - DNA, 25 bp, Homo sapien
ctgcgttatgcgcgacgtcggcata

SEQ ID NO: 5922480 - DNA, 25 bp, Homo sapien
ttaacgccgtacgctcgacgacacg

SEQ ID NO: 5922481 - DNA, 25 bp, Homo sapien
ctggactcggacgtatggactctgg

SEQ ID NO: 5922482 - DNA, 25 bp, Homo sapien
ttcgcgatcgtagcgtgcgaaggac

SEQ ID NO: 5922483 - DNA, 25 bp, Homo sapien
caacgtcggcgtcaatcgtctggca

SEQ ID NO: 5922484 - DNA, 25 bp, Homo sapien
agcggaaaccgcgctagaccaatcg

SEQ ID NO: 5922485 - DNA, 25 bp, Homo sapien
tcggcctacgcgtctaagagactgc

SEQ ID NO: 5922486 - DNA, 25 bp, Homo sapien
gaggtaactacgcgaggggcttcag

SEQ ID NO: 5922487 - DNA, 25 bp, Homo sapien
ctggcgtgcgttacgtcgacctatc

SEQ ID NO: 5922488 - DNA, 25 bp, Homo sapien
ggccagcgcgaaccgctatgattac

SEQ ID NO: 5922489 - DNA, 25 bp, Homo sapien
cgggagacgcggatcatactgctca

SEQ ID NO: 5922490 - DNA, 25 bp, Homo sapien
ccgcactaagtcgcgcggacaaaga

SEQ ID NO: 5922491 - DNA, 25 bp, Homo sapien
accaaaacgacacgccgcaggttcg

SEQ ID NO: 5922492 - DNA, 25 bp, Homo sapien
tgtctgcgtaactacgcgatggggg

SEQ ID NO: 5922493 - DNA, 25 bp, Homo sapien
cttcctatccgcgatacgaggcctc

SEQ ID NO: 5922494 - DNA, 25 bp, Homo sapien
gccgccctacaacgcgcaatcgtat

SEQ ID NO: 5922495 - DNA, 25 bp, Homo sapien
ctgatagtcgtctagacgcgcaccc

SEQ ID NO: 5922496 - DNA, 25 bp, Homo sapien
ccgagattgcgcgatgtacggaacg

SEQ ID NO: 5922497 - DNA, 25 bp, Homo sapien
tggtggtcggcgtagtacgagatcc

SEQ ID NO: 5922498 - DNA, 25 bp, Homo sapien
gcgttttactcgacggacgcggaga

SEQ ID NO: 5922499 - DNA, 25 bp, Homo sapien
cagcacttgcggatacgcgtccgtt

SEQ ID NO: 5922500 - DNA, 25 bp, Homo sapien
gctttagcgaacgtcgatcggtggg

SEQ ID NO: 5922501 - DNA, 25 bp, Homo sapien
aggtcccggctctcgattatctccg

SEQ ID NO: 5922502 - DNA, 25 bp, Homo sapien
tcggctccgaacgtacgatacgcct

SEQ ID NO: 5922503 - DNA, 25 bp, Homo sapien
gccctcgcgccgttatacacttcct

SEQ ID NO: 5922504 - DNA, 25 bp, Homo sapien
ccctacggacgcaacgtacataccc

SEQ ID NO: 5922505 - DNA, 25 bp, Homo sapien
gcctttctacgccatatcgccacgg

SEQ ID NO: 5922506 - DNA, 25 bp, Homo sapien
accttaggagcggtacgtacacgcc

SEQ ID NO: 5922507 - DNA, 25 bp, Homo sapien
cctccagtactaccgacggaccgat

SEQ ID NO: 5922508 - DNA, 25 bp, Homo sapien
gactagagtacgttcggcggggcat

SEQ ID NO: 5922509 - DNA, 25 bp, Homo sapien
ctgccacgacgctatagcgtgatgg

SEQ ID NO: 5922510 - DNA, 25 bp, Homo sapien
cgtaataccgcgcgtttcacgggtg

SEQ ID NO: 5922511 - DNA, 25 bp, Homo sapien
cttcagatcgcgtaagcggtccagg

SEQ ID NO: 5922512 - DNA, 25 bp, Homo sapien
ctcgactcgaacgtacgtcagcgag

SEQ ID NO: 5922513 - DNA, 25 bp, Homo sapien
ggcatgacgcggttacgaagcagtc

SEQ ID NO: 5922514 - DNA, 25 bp, Homo sapien
ccagaggcgcggtagactacactct

SEQ ID NO: 5922515 - DNA, 25 bp, Homo sapien
ctgtgaatgccgcgtacggattcgg

SEQ ID NO: 5922516 - DNA, 25 bp, Homo sapien
aggttcggtacaatccgcgcaccga

SEQ ID NO: 5922517 - DNA, 25 bp, Homo sapien
aaaccccgtataccgtgcggatggc

SEQ ID NO: 5922518 - DNA, 25 bp, Homo sapien
cgatgcacgacgtgtaccggcttgt

SEQ ID NO: 5922519 - DNA, 25 bp, Homo sapien
ctgttacgtcccgtacgagggcatc

SEQ ID NO: 5922520 - DNA, 25 bp, Homo sapien
attacggctaccaatcgcggggcac

SEQ ID NO: 5922521 - DNA, 25 bp, Homo sapien
ccaagcgacgtagtacggctcctgt

SEQ ID NO: 5922522 - DNA, 25 bp, Homo sapien
gcgcgatcgtaatgcgcgatcagga

SEQ ID NO: 5922523 - DNA, 25 bp, Homo sapien
atgcttgtccgctagcgtacgacgc

SEQ ID NO: 5922524 - DNA, 25 bp, Homo sapien
tcccgtcgcgatacgacatgggtag

SEQ ID NO: 5922525 - DNA, 25 bp, Homo sapien
accgctcctacgttcgacggctact

SEQ ID NO: 5922526 - DNA, 25 bp, Homo sapien
acttcgcccgtccgatagggtggaa

SEQ ID NO: 5922527 - DNA, 25 bp, Homo sapien
cgaaccgataggtacgcgagctcct

SEQ ID NO: 5922528 - DNA, 25 bp, Homo sapien
ggatcaagtacgtcgcaccggtcct

SEQ ID NO: 5922529 - DNA, 25 bp, Homo sapien
ggaagcgggaacgattcgcagtacc

SEQ ID NO: 5922530 - DNA, 25 bp, Homo sapien
ccgccaaatgatccgcgcacaagac

SEQ ID NO: 5922531 - DNA, 25 bp, Homo sapien
cgcaagttagccgtcgtacgtcgag

SEQ ID NO: 5922532 - DNA, 25 bp, Homo sapien
gtagacatagtagcccgcgttccgg

SEQ ID NO: 5922533 - DNA, 25 bp, Homo sapien
cgtgggacgagcgtccgtattttgg

SEQ ID NO: 5922534 - DNA, 25 bp, Homo sapien
tgcaatcgggccgtagatcggtgtg

SEQ ID NO: 5922535 - DNA, 25 bp, Homo sapien
ccctcaacggtatacgacctggagg

SEQ ID NO: 5922536 - DNA, 25 bp, Homo sapien
catctgcgtaaggcgacttaccgcg

SEQ ID NO: 5922537 - DNA, 25 bp, Homo sapien
acgaggcaccgcggacgatcgtaaa

SEQ ID NO: 5922538 - DNA, 25 bp, Homo sapien
gcagctccgaacgtcgctagtgagt

SEQ ID NO: 5922539 - DNA, 25 bp, Homo sapien
ggccagtcgtattcgcgcgctgaat

SEQ ID NO: 5922540 - DNA, 25 bp, Homo sapien
aagagtgtcgcgtattgccgtcgcc

SEQ ID NO: 5922541 - DNA, 25 bp, Homo sapien
cggtggaggtaattgcgcgcggtta

SEQ ID NO: 5922542 - DNA, 25 bp, Homo sapien
gcattatatcgcgcgagctgaccgg

SEQ ID NO: 5922543 - DNA, 25 bp, Homo sapien
acccctgtattccgcgcgaagatgg

SEQ ID NO: 5922544 - DNA, 25 bp, Homo sapien
ccacgccgtaagacggcgtcttgtt

SEQ ID NO: 5922545 - DNA, 25 bp, Homo sapien
ggttaccgcggacagtctaaaggcg

SEQ ID NO: 5922546 - DNA, 25 bp, Homo sapien
ccaaaccggtagccgttcgactgct

SEQ ID NO: 5922547 - DNA, 25 bp, Homo sapien
atctgcgatgcgtagcgtctccgtg

SEQ ID NO: 5922548 - DNA, 25 bp, Homo sapien
gccatctacgctagcgcgtagttgc

SEQ ID NO: 5922549 - DNA, 25 bp, Homo sapien
aggcatccgcgtcaatatgcgtggc

SEQ ID NO: 5922550 - DNA, 25 bp, Homo sapien
tcagcttcggcgcgtatggtaacgc

SEQ ID NO: 5922551 - DNA, 25 bp, Homo sapien
gtgtgtctagcggacgtgagcacgt

SEQ ID NO: 5922552 - DNA, 25 bp, Homo sapien
cacttttaagagcgcgggtggacgc

SEQ ID NO: 5922553 - DNA, 25 bp, Homo sapien
ttaggagacgtcgcgatcgcttcgg

SEQ ID NO: 5922554 - DNA, 25 bp, Homo sapien
gctgcgatacctcggccgatcagtt

SEQ ID NO: 5922555 - DNA, 25 bp, Homo sapien
aggcgtgataccgcgcgtaagtgtg

SEQ ID NO: 5922556 - DNA, 25 bp, Homo sapien
atggcgtaggcgcgacatggcattc

SEQ ID NO: 5922557 - DNA, 25 bp, Homo sapien
gtgtgtgatcgagtatcgggctgcg

SEQ ID NO: 5922558 - DNA, 25 bp, Homo sapien
ttggtctttaccgcgcgtatccgcg

SEQ ID NO: 5922559 - DNA, 25 bp, Homo sapien
gctactcggaacgctacgagtcgac

SEQ ID NO: 5922560 - DNA, 25 bp, Homo sapien
ggtcgagctaagactcgcggtgaac

SEQ ID NO: 5922561 - DNA, 25 bp, Homo sapien
agcgaatcgcgtgcgttgagcgaga

SEQ ID NO: 5922562 - DNA, 25 bp, Homo sapien
aaatcgattgcggcgtaggtcggcg

SEQ ID NO: 5922563 - DNA, 25 bp, Homo sapien
gggcacattcgcgacccagatcact

SEQ ID NO: 5922564 - DNA, 25 bp, Homo sapien
gctacgagtctacgcgctatccgga

SEQ ID NO: 5922565 - DNA, 25 bp, Homo sapien
gcctagggcgcgccgttatacatct

SEQ ID NO: 5922566 - DNA, 25 bp, Homo sapien
cctgtctcgccctacgttaacgtgg

SEQ ID NO: 5922567 - DNA, 25 bp, Homo sapien
acaggaaacgcggctaggtctgagc

SEQ ID NO: 5922568 - DNA, 25 bp, Homo sapien
gcacggtcgcggtacattacccgat

SEQ ID NO: 5922569 - DNA, 25 bp, Homo sapien
gtttggcgcgtaatagcccgtcctg

SEQ ID NO: 5922570 - DNA, 25 bp, Homo sapien
ggctcgactacgccttacgataccc

SEQ ID NO: 5922571 - DNA, 25 bp, Homo sapien
cagccgcgcatataagcggtcgtga

SEQ ID NO: 5922572 - DNA, 25 bp, Homo sapien
cccccgaccggtactacgtctatga

SEQ ID NO: 5922573 - DNA, 25 bp, Homo sapien
caatgcactcccgtacggtcgtcca

SEQ ID NO: 5922574 - DNA, 25 bp, Homo sapien
ttggcgcgcggttgtcaatggtgct

SEQ ID NO: 5922575 - DNA, 25 bp, Homo sapien
tccgactacgacgctacatgcgcag

SEQ ID NO: 5922576 - DNA, 25 bp, Homo sapien
cgaccacggagtcgacatactggca

SEQ ID NO: 5922577 - DNA, 25 bp, Homo sapien
ggacaccatacggatctcggctacc

SEQ ID NO: 5922578 - DNA, 25 bp, Homo sapien
agtccactccgcgtaaggtgacacg

SEQ ID NO: 5922579 - DNA, 25 bp, Homo sapien
gtaatctgtatcgcgcgacccgacg

SEQ ID NO: 5922580 - DNA, 25 bp, Homo sapien
tccaccctaagtatcgcgggcttgc

SEQ ID NO: 5922581 - DNA, 25 bp, Homo sapien
tcgcatcgtaatactgcgggctccc

SEQ ID NO: 5922582 - DNA, 25 bp, Homo sapien
ctgagcgtcgcgagctctaggaaga

SEQ ID NO: 5922583 - DNA, 25 bp, Homo sapien
cgcctacgcgcgagcaattttcgga

SEQ ID NO: 5922584 - DNA, 25 bp, Homo sapien
tcgcccttaggcggtacgcatgttc

SEQ ID NO: 5922585 - DNA, 25 bp, Homo sapien
tgacgtgttacgtatgccgccgacg

SEQ ID NO: 5922586 - DNA, 25 bp, Homo sapien
ggccatgtatcgcgtacggcatctc

SEQ ID NO: 5922587 - DNA, 25 bp, Homo sapien
gcacgtccgcggtaacgatttcggt

SEQ ID NO: 5922588 - DNA, 25 bp, Homo sapien
tgttgacacggataacgcgtcgggc

SEQ ID NO: 5922589 - DNA, 25 bp, Homo sapien
ggcgcttaaccgcgatccaagagca

SEQ ID NO: 5922590 - DNA, 25 bp, Homo sapien
cctgcccgactatacctcgtttggg

SEQ ID NO: 5922591 - DNA, 25 bp, Homo sapien
cgtgaagatcggtcgcgtactagcg

SEQ ID NO: 5922592 - DNA, 25 bp, Homo sapien
gctgcacggatcggttacggctttg

SEQ ID NO: 5922593 - DNA, 25 bp, Homo sapien
acagtccagcgtaacggcgtagacc

SEQ ID NO: 5922594 - DNA, 25 bp, Homo sapien
gtctcatacgcgaccgatccgcatc

SEQ ID NO: 5922595 - DNA, 25 bp, Homo sapien
tcgtccgcgatacaccccgtagctt

SEQ ID NO: 5922596 - DNA, 25 bp, Homo sapien
gagggtcccgctaacgcgttatcag

SEQ ID NO: 5922597 - DNA, 25 bp, Homo sapien
gtgacacgcgggaataagttgcccg

SEQ ID NO: 5922598 - DNA, 25 bp, Homo sapien
gaacagtttgcgaccggaccgatgg

SEQ ID NO: 5922599 - DNA, 25 bp, Homo sapien
gcaattccgtggtaccgacgtgcga

SEQ ID NO: 5922600 - DNA, 25 bp, Homo sapien
acaggggaatactcgcgggccttga

SEQ ID NO: 5922601 - DNA, 25 bp, Homo sapien
cgttggtccggtatatcgcccgatc

SEQ ID NO: 5922602 - DNA, 25 bp, Homo sapien
cgaacgggtacgctactcgactgac

SEQ ID NO: 5922603 - DNA, 25 bp, Homo sapien
tgctagacgtcctcgcgaccatcga

SEQ ID NO: 5922604 - DNA, 25 bp, Homo sapien
cccgaacgactaggtcgccaacgta

SEQ ID NO: 5922605 - DNA, 25 bp, Homo sapien
cgacttttacggcgcgagtagggag

SEQ ID NO: 5922606 - DNA, 25 bp, Homo sapien
tcacacttagcgcgtcacgccggct

SEQ ID NO: 5922607 - DNA, 25 bp, Homo sapien
gccggatataccgctcgtctcagcc

SEQ ID NO: 5922608 - DNA, 25 bp, Homo sapien
gatgctgtagcggtccgtctcgagg

SEQ ID NO: 5922609 - DNA, 25 bp, Homo sapien
cacgccgcgctacgctgatataccc

SEQ ID NO: 5922610 - DNA, 25 bp, Homo sapien
cacgacgccgcgtaacgcaggatct

SEQ ID NO: 5922611 - DNA, 25 bp, Homo sapien
cccacgcgagcgtaatccgtctgct

SEQ ID NO: 5922612 - DNA, 25 bp, Homo sapien
acatcctccgcgacgggtaggagct

SEQ ID NO: 5922613 - DNA, 25 bp, Homo sapien
cgttggtatccgtgcgtcgacgcag

SEQ ID NO: 5922614 - DNA, 25 bp, Homo sapien
cgtggatagcatcgcgtcaccgtcc

SEQ ID NO: 5922615 - DNA, 25 bp, Homo sapien
taccgggtcgcgaatacacccgtcg

SEQ ID NO: 5922616 - DNA, 25 bp, Homo sapien
tcgtcacgcttgctcgcgtcgggta

SEQ ID NO: 5922617 - DNA, 25 bp, Homo sapien
gacgagtcgacgatacgccgcttcg

SEQ ID NO: 5922618 - DNA, 25 bp, Homo sapien
tgcggcccgtacgcggtgttctaag

SEQ ID NO: 5922619 - DNA, 25 bp, Homo sapien
acccaggcgctcgtacgtacagcct

SEQ ID NO: 5922620 - DNA, 25 bp, Homo sapien
acggcagccggtcgcgtaaacttgc

SEQ ID NO: 5922621 - DNA, 25 bp, Homo sapien
atctaacgacggtctcgcagccccg

SEQ ID NO: 5922622 - DNA, 25 bp, Homo sapien
tcaggtgcgcgatacgttgccgacc

SEQ ID NO: 5922623 - DNA, 25 bp, Homo sapien
gattgcgccgacgtctatccgtcgc

SEQ ID NO: 5922624 - DNA, 25 bp, Homo sapien
ggctggtattcgaggacgcgcacca

SEQ ID NO: 5922625 - DNA, 25 bp, Homo sapien
cgacaatcgagcgctacgcgtacgc

SEQ ID NO: 5922626 - DNA, 25 bp, Homo sapien
gtcgtgcagtcgtccggtacttgcg

SEQ ID NO: 5922627 - DNA, 25 bp, Homo sapien
gcactccggtcgacaacggtacgca

SEQ ID NO: 5922628 - DNA, 25 bp, Homo sapien
cagtcctaccctcgcgataggaggg

SEQ ID NO: 5922629 - DNA, 25 bp, Homo sapien
gggagacgacgtagcgcgatgctct

SEQ ID NO: 5922630 - DNA, 25 bp, Homo sapien
acctgctcgcgcaccgtagaaggga

SEQ ID NO: 5922631 - DNA, 25 bp, Homo sapien
gtcatctatggcgcgcgctcgagga

SEQ ID NO: 5922632 - DNA, 25 bp, Homo sapien
cttcgttcgcgcgatagaccggcag

SEQ ID NO: 5922633 - DNA, 25 bp, Homo sapien
ttggcaggttacgagaccgcctgcc

SEQ ID NO: 5922634 - DNA, 25 bp, Homo sapien
tcccggtagtcgagcgcgaaggaca

SEQ ID NO: 5922635 - DNA, 25 bp, Homo sapien
gggtatgaccgatgccgtaggtccc

SEQ ID NO: 5922636 - DNA, 25 bp, Homo sapien
tagcattacccgggcgaaccccctc

SEQ ID NO: 5922637 - DNA, 25 bp, Homo sapien
gagaacacgcgcgacgtagcgagtc

SEQ ID NO: 5922638 - DNA, 25 bp, Homo sapien
ccaaggatcgcgtcgtgcgaagggt

SEQ ID NO: 5922639 - DNA, 25 bp, Homo sapien
gagagaggttcgatagcgcggcggt

SEQ ID NO: 5922640 - DNA, 25 bp, Homo sapien
gggcgacgcgtagtgacggaaacca

SEQ ID NO: 5922641 - DNA, 25 bp, Homo sapien
tgggcatagtcggtacgctcgctcg

SEQ ID NO: 5922642 - DNA, 25 bp, Homo sapien
cagcagcgttcgcactacatcgggc

SEQ ID NO: 5922643 - DNA, 25 bp, Homo sapien
ggattcgttccgactcgcgagtccc

SEQ ID NO: 5922644 - DNA, 25 bp, Homo sapien
agggccgggtgtcgcgttacttgca

SEQ ID NO: 5922645 - DNA, 25 bp, Homo sapien
gcgggtctcaataggcgcgatggag

SEQ ID NO: 5922646 - DNA, 25 bp, Homo sapien
gtctgggtccgaacgtaccgcgcaa

SEQ ID NO: 5922647 - DNA, 25 bp, Homo sapien
ggtggccgaccggacttactcgtgt

SEQ ID NO: 5922648 - DNA, 25 bp, Homo sapien
gaaccattacgcacggcgacaccgc

SEQ ID NO: 5922649 - DNA, 25 bp, Homo sapien
tacgcgggtcaccggtacggtcttg

SEQ ID NO: 5922650 - DNA, 25 bp, Homo sapien
cggatgacgcggaccagttgtggac

SEQ ID NO: 5922651 - DNA, 25 bp, Homo sapien
ctccaacgtcgttctacgggcaggc

SEQ ID NO: 5922652 - DNA, 25 bp, Homo sapien
tcgcgtccgcggtcgtcaaaaggac

SEQ ID NO: 5922653 - DNA, 25 bp, Homo sapien
tcggcccgaagtacgctcgtgactg

SEQ ID NO: 5922654 - DNA, 25 bp, Homo sapien
taccgctcgcgctaggcctcatctg

SEQ ID NO: 5922655 - DNA, 25 bp, Homo sapien
aagcagtgtaccaccggcggggact

SEQ ID NO: 5922656 - DNA, 25 bp, Homo sapien
ctcccggcgcgacatacggatcttc

SEQ ID NO: 5922657 - DNA, 25 bp, Homo sapien
actgcggcgacgggtagtcccagaa

SEQ ID NO: 5922658 - DNA, 25 bp, Homo sapien
aagcgaagccgtagtcgcgctgcct

SEQ ID NO: 5922659 - DNA, 25 bp, Homo sapien
agggttcggcccaatcgtagagcgg

SEQ ID NO: 5922660 - DNA, 25 bp, Homo sapien
cagcgcacggccgaacgtatccatc

SEQ ID NO: 5922661 - DNA, 25 bp, Homo sapien
gcacgaccgccgtccgataaagtgc

SEQ ID NO: 5922662 - DNA, 25 bp, Homo sapien
caacaccttcgcggcgtaagtgggc

SEQ ID NO: 5922663 - DNA, 25 bp, Homo sapien
cacatctcgcgcgctagaggcaacg

SEQ ID NO: 5922664 - DNA, 25 bp, Homo sapien
ggcccttcgcgcaaggtaggcagat

SEQ ID NO: 5922665 - DNA, 25 bp, Homo sapien
accgggggcggtatgtcgatcgatg

SEQ ID NO: 5922666 - DNA, 25 bp, Homo sapien
gagggcatcggacgcgaatggttgg

SEQ ID NO: 5922667 - DNA, 25 bp, Homo sapien
ctacgcagtatcgccccgttctgcc

SEQ ID NO: 5922668 - DNA, 25 bp, Homo sapien
gggtcgctcgtcgcgtacggagtaa

SEQ ID NO: 5922669 - DNA, 25 bp, Homo sapien
aatcggcgtgcgatcgaccgcacag

SEQ ID NO: 5922670 - DNA, 25 bp, Homo sapien
ggctcgcgttagcggatgcaaaccg

SEQ ID NO: 5922671 - DNA, 25 bp, Homo sapien
cgctaggcgccatacgaaccgtgag

SEQ ID NO: 5922672 - DNA, 25 bp, Homo sapien
tttgccttcgtcgaccgcgaggcgt

SEQ ID NO: 5922673 - DNA, 25 bp, Homo sapien
ttgcgacgttacggcccgaccagac

SEQ ID NO: 5922674 - DNA, 25 bp, Homo sapien
ggacgatcgtgttacgcgcgctggt

SEQ ID NO: 5922675 - DNA, 25 bp, Homo sapien
ccgagtttaactccgcgcggccatc

SEQ ID NO: 5922676 - DNA, 25 bp, Homo sapien
gaccgacggcagcgtacgttggtga

SEQ ID NO: 5922677 - DNA, 25 bp, Homo sapien
gtcgcccgcgtgaacgatcatccac

SEQ ID NO: 5922678 - DNA, 25 bp, Homo sapien
acggagttacgcgacctacgcgtcc

SEQ ID NO: 5922679 - DNA, 25 bp, Homo sapien
ctccgggtcgacgtatagggtggga

SEQ ID NO: 5922680 - DNA, 25 bp, Homo sapien
tcccgttacgagccgatagcgccca

SEQ ID NO: 5922681 - DNA, 25 bp, Homo sapien
cgcatcgccataccggtcgttaggc

SEQ ID NO: 5922682 - DNA, 25 bp, Homo sapien
tcgggggtgcgatcgaccggctatt

SEQ ID NO: 5922683 - DNA, 25 bp, Homo sapien
tcaggccgtagcgaggacgcgtatg

SEQ ID NO: 5922684 - DNA, 25 bp, Homo sapien
ggaggttagtgcgaccgctgcgctt

SEQ ID NO: 5922685 - DNA, 25 bp, Homo sapien
tcgccaggacgctatacgctgagcg

SEQ ID NO: 5922686 - DNA, 25 bp, Homo sapien
aggacgggacgtatcccgtgtctgc

SEQ ID NO: 5922687 - DNA, 25 bp, Homo sapien
agagaccgtgccgtagcgagctctg

SEQ ID NO: 5922688 - DNA, 25 bp, Homo sapien
actacgcttgcgtaccgacgcgcga

SEQ ID NO: 5922689 - DNA, 25 bp, Homo sapien
accgaccggtatctcgcgtgtcgga

SEQ ID NO: 5922690 - DNA, 25 bp, Homo sapien
aagaggcgggacgtaacgaggctgc

SEQ ID NO: 5922691 - DNA, 25 bp, Homo sapien
acgaagtatcgcgcgggcgtacgtc

SEQ ID NO: 5922692 - DNA, 25 bp, Homo sapien
gcggcataccgcgcataagccagtc

SEQ ID NO: 5922693 - DNA, 25 bp, Homo sapien
gggctggcgtcgtttaccctagacc

SEQ ID NO: 5922694 - DNA, 25 bp, Homo sapien
ctgtatggcggacgtcgtatggccg

SEQ ID NO: 5922695 - DNA, 25 bp, Homo sapien
tccctagacgcacggtacgcggaca

SEQ ID NO: 5922696 - DNA, 25 bp, Homo sapien
cagaaccgctatcgagtaccccgcc

SEQ ID NO: 5922697 - DNA, 25 bp, Homo sapien
tcatgcgaaccgtacgacggcgcga

SEQ ID NO: 5922698 - DNA, 25 bp, Homo sapien
ccccccgttatagcgccggctgtat

SEQ ID NO: 5922699 - DNA, 25 bp, Homo sapien
caccaccactacgacgcgagttggg

SEQ ID NO: 5922700 - DNA, 25 bp, Homo sapien
cgctggacccgtatcgcaccttcca

SEQ ID NO: 5922701 - DNA, 25 bp, Homo sapien
agcggtgccgtagtccgatcgctgt

SEQ ID NO: 5922702 - DNA, 25 bp, Homo sapien
aacgcgcgatcgggtcgaactcgct

SEQ ID NO: 5922703 - DNA, 25 bp, Homo sapien
ggatccacgttacgcgcccaccttc

SEQ ID NO: 5922704 - DNA, 25 bp, Homo sapien
gcactcacgtcggacgtcccatcac

SEQ ID NO: 5922705 - DNA, 25 bp, Homo sapien
tcccagggtacgatcgtacgccgag

SEQ ID NO: 5922706 - DNA, 25 bp, Homo sapien
ttccgtatactgcgcgcgtcgcgtc

SEQ ID NO: 5922707 - DNA, 25 bp, Homo sapien
aggtgcatacgagcggacacggtcc

SEQ ID NO: 5922708 - DNA, 25 bp, Homo sapien
gcgttcgtccgtcgtagcgtgcaga

SEQ ID NO: 5922709 - DNA, 25 bp, Homo sapien
accgtgtcgacagtacggcccgatc

SEQ ID NO: 5922710 - DNA, 25 bp, Homo sapien
gtcccccgatacgacaggtgaaccg

SEQ ID NO: 5922711 - DNA, 25 bp, Homo sapien
tggccaagcgcgttagtcgacaccc

SEQ ID NO: 5922712 - DNA, 25 bp, Homo sapien
cacccgttagcgcgatcgcaggtct

SEQ ID NO: 5922713 - DNA, 25 bp, Homo sapien
gctacagtagcggtcgcaatccgcc

SEQ ID NO: 5922714 - DNA, 25 bp, Homo sapien
ggggcctactagtcgcgctggtaag

SEQ ID NO: 5922715 - DNA, 25 bp, Homo sapien
ggcttggtatgccgcgtcaggagca

SEQ ID NO: 5922716 - DNA, 25 bp, Homo sapien
agacgccgatccgtagcggtctgtc

SEQ ID NO: 5922717 - DNA, 25 bp, Homo sapien
cgcactactaccgtgcgcgctttgc

SEQ ID NO: 5922718 - DNA, 25 bp, Homo sapien
aggtcctagcgttcggcgacccaca

SEQ ID NO: 5922719 - DNA, 25 bp, Homo sapien
agcctccggaccttagacgaccagg

SEQ ID NO: 5922720 - DNA, 25 bp, Homo sapien
aatgaggtcgtctacgcgaccgcgg

SEQ ID NO: 5922721 - DNA, 25 bp, Homo sapien
tgtcactcggtacgagcgtgccgtc

SEQ ID NO: 5922722 - DNA, 25 bp, Homo sapien
gcaggtctagggcgcatcgggacat

SEQ ID NO: 5922723 - DNA, 25 bp, Homo sapien
tcaccataaccaggtcgcgtggcgg

SEQ ID NO: 5922724 - DNA, 25 bp, Homo sapien
tctccacccgtcgttgcgtagggtg

SEQ ID NO: 5922725 - DNA, 25 bp, Homo sapien
cgcgagtacgatcgacctacgtccg

SEQ ID NO: 5922726 - DNA, 25 bp, Homo sapien
tgcgatcgacgagaccgttctgccg

SEQ ID NO: 5922727 - DNA, 25 bp, Homo sapien
cggccgggttcgtaagcgcagattc

SEQ ID NO: 5922728 - DNA, 25 bp, Homo sapien
gggtggcgcgtatctacggagatcc

SEQ ID NO: 5922729 - DNA, 25 bp, Homo sapien
cggtcccgcgaatcgtcttccagca

SEQ ID NO: 5922730 - DNA, 25 bp, Homo sapien
gggtgactagcgggcgtaatggcac

SEQ ID NO: 5922731 - DNA, 25 bp, Homo sapien
tgcaaccgtaacggccgaagccggt

SEQ ID NO: 5922732 - DNA, 25 bp, Homo sapien
agacgccgataggggtccgttggac

SEQ ID NO: 5922733 - DNA, 25 bp, Homo sapien
ctgagccgagccgactatcttccgg

SEQ ID NO: 5922734 - DNA, 25 bp, Homo sapien
atccccttagcgtacgcgggcgtct

SEQ ID NO: 5922735 - DNA, 25 bp, Homo sapien
gcttgtccgtggtacgcgaacgtgc

SEQ ID NO: 5922736 - DNA, 25 bp, Homo sapien
catatcgcataccggcacgggccag

SEQ ID NO: 5922737 - DNA, 25 bp, Homo sapien
tgccatccataggcgcgatcctggc

SEQ ID NO: 5922738 - DNA, 25 bp, Homo sapien
ttcgctggcgtcccgactacgtcac

SEQ ID NO: 5922739 - DNA, 25 bp, Homo sapien
gcagtattggaccgtcgcggctcag

SEQ ID NO: 5922740 - DNA, 25 bp, Homo sapien
acttctttcgcgcgtagggcgcgac

SEQ ID NO: 5922741 - DNA, 25 bp, Homo sapien
gtagcttcgtaaggcggggcgacgt

SEQ ID NO: 5922742 - DNA, 25 bp, Homo sapien
aggccagtcgcgaagaccgttggag

SEQ ID NO: 5922743 - DNA, 25 bp, Homo sapien
tggtcgagcggtatcgcgagtaccg

SEQ ID NO: 5922744 - DNA, 25 bp, Homo sapien
acacatttgcgcactacgccccccg

SEQ ID NO: 5922745 - DNA, 25 bp, Homo sapien
aggacttacgcccgtagagggcgac

SEQ ID NO: 5922746 - DNA, 25 bp, Homo sapien
gcagcaccgaccgtatacgtcgctc

SEQ ID NO: 5922747 - DNA, 25 bp, Homo sapien
tcccgtcacgcggtatcgtaggtgc

SEQ ID NO: 5922748 - DNA, 25 bp, Homo sapien
gtcacgcgtaccgcgactaaagccg

SEQ ID NO: 5922749 - DNA, 25 bp, Homo sapien
cggggaacgtcgtgaccggttcaga

SEQ ID NO: 5922750 - DNA, 25 bp, Homo sapien
agtgccacgcgtcgatagcgtggag

SEQ ID NO: 5922751 - DNA, 25 bp, Homo sapien
gacagtcgattgacgcgcccggaca

SEQ ID NO: 5922752 - DNA, 25 bp, Homo sapien
agtcgcagcgtcggactaggctacg

SEQ ID NO: 5922753 - DNA, 25 bp, Homo sapien
ggaagcataacgcgtgcggaggcct

SEQ ID NO: 5922754 - DNA, 25 bp, Homo sapien
agcggtacggcgcgcgttaatgtcg

SEQ ID NO: 5922755 - DNA, 25 bp, Homo sapien
cccggtaggtatcgcgaacctgacc

SEQ ID NO: 5922756 - DNA, 25 bp, Homo sapien
caggagcgcgcattggtccgatcgt

SEQ ID NO: 5922757 - DNA, 25 bp, Homo sapien
atgaggacgtcgcgctagagtcgcg

SEQ ID NO: 5922758 - DNA, 25 bp, Homo sapien
tcgacgtatacgggtcgcgaaccgc

SEQ ID NO: 5922759 - DNA, 25 bp, Homo sapien
catcgctaactcgcgaccgggatcc

SEQ ID NO: 5922760 - DNA, 25 bp, Homo sapien
gcagcatacgcgacttgggggaggt

SEQ ID NO: 5922761 - DNA, 25 bp, Homo sapien
ggtgggcctagcgcggtttcccaaa

SEQ ID NO: 5922762 - DNA, 25 bp, Homo sapien
ctacccttggcgtgacgcgtcttcc

SEQ ID NO: 5922763 - DNA, 25 bp, Homo sapien
ggccatgcgcgtttaaccgggtagg

SEQ ID NO: 5922764 - DNA, 25 bp, Homo sapien
gtgtccaatcacgcgtcgcgtgtgg

SEQ ID NO: 5922765 - DNA, 25 bp, Homo sapien
aggcgcagcccgcgtaagtatgacg

SEQ ID NO: 5922766 - DNA, 25 bp, Homo sapien
ggggcgttcggactatcggttcagg

SEQ ID NO: 5922767 - DNA, 25 bp, Homo sapien
acctcgatacgcgactgggtccgag

SEQ ID NO: 5922768 - DNA, 25 bp, Homo sapien
gtcacgccgtccgctagatgtctgc

SEQ ID NO: 5922769 - DNA, 25 bp, Homo sapien
gacctcatatcccggaccggaaggg

SEQ ID NO: 5922770 - DNA, 25 bp, Homo sapien
gcaacggatacggttcgcgtgaccg

SEQ ID NO: 5922771 - DNA, 25 bp, Homo sapien
tcaccacgatactagggcggacccc

SEQ ID NO: 5922772 - DNA, 25 bp, Homo sapien
ccatgtgcgtgccgcggtagcatga

SEQ ID NO: 5922773 - DNA, 25 bp, Homo sapien
cacacgtggctcgctaacgtcggtg

SEQ ID NO: 5922774 - DNA, 25 bp, Homo sapien
cgtaccatcgtccggtcgttcggac

SEQ ID NO: 5922775 - DNA, 25 bp, Homo sapien
gcgtggctattgtcgcacgggatgg

SEQ ID NO: 5922776 - DNA, 25 bp, Homo sapien
tgcctgcggagacgtatcgtggcga

SEQ ID NO: 5922777 - DNA, 25 bp, Homo sapien
acgacgacgggacgtacgctgtcgt

SEQ ID NO: 5922778 - DNA, 25 bp, Homo sapien
gtaccgctacattgcggcgactggc

SEQ ID NO: 5922779 - DNA, 25 bp, Homo sapien
cggtggccgcgtcgtatatggtcac

SEQ ID NO: 5922780 - DNA, 25 bp, Homo sapien
ggactcatcatcgcgcggaagccgt

SEQ ID NO: 5922781 - DNA, 25 bp, Homo sapien
tgccgggtcgcgcatctatgagtcg

SEQ ID NO: 5922782 - DNA, 25 bp, Homo sapien
gccctgtacttcgcggtcgcttcct

SEQ ID NO: 5922783 - DNA, 25 bp, Homo sapien
gtcgcggcgtccgcctattagtctc

SEQ ID NO: 5922784 - DNA, 25 bp, Homo sapien
gcacgtgatcggtacgtccggtgct

SEQ ID NO: 5922785 - DNA, 25 bp, Homo sapien
atcggtcgacgcgaagcatccggca

SEQ ID NO: 5922786 - DNA, 25 bp, Homo sapien
aggaatcgtcacgcgtaccgtgccg

SEQ ID NO: 5922787 - DNA, 25 bp, Homo sapien
agcatggacgtaacgcgcgtctccc

SEQ ID NO: 5922788 - DNA, 25 bp, Homo sapien
ttcgcgcttagcgtcgcggggcttt

SEQ ID NO: 5922789 - DNA, 25 bp, Homo sapien
cgaaggcctaacgcgacgattgccg

SEQ ID NO: 5922790 - DNA, 25 bp, Homo sapien
accactttcgtcgcgagcgacctgc

SEQ ID NO: 5922791 - DNA, 25 bp, Homo sapien
cggacccgcgacccctatatcctga

SEQ ID NO: 5922792 - DNA, 25 bp, Homo sapien
gccgtacgcgttacgacgtggcgta

SEQ ID NO: 5922793 - DNA, 25 bp, Homo sapien
ggcctccgacgcgtatagtgcacga

SEQ ID NO: 5922794 - DNA, 25 bp, Homo sapien
agctccgtcgactacggacagtcgc

SEQ ID NO: 5922795 - DNA, 25 bp, Homo sapien
cggatctaccgcgcgtctaacctgc

SEQ ID NO: 5922796 - DNA, 25 bp, Homo sapien
acggggcgttcacggcacgaaagga

SEQ ID NO: 5922797 - DNA, 25 bp, Homo sapien
ggcgtttaccgcgctacgcccagat

SEQ ID NO: 5922798 - DNA, 25 bp, Homo sapien
cccctaccgtaactagccggctgtg

SEQ ID NO: 5922799 - DNA, 25 bp, Homo sapien
gtgttccgactataccgcgccaggg

SEQ ID NO: 5922800 - DNA, 25 bp, Homo sapien
ccggaagtccggacgtacgaagcga

SEQ ID NO: 5922801 - DNA, 25 bp, Homo sapien
ctctctcgcgactagacgtcgaccc

SEQ ID NO: 5922802 - DNA, 25 bp, Homo sapien
ggctagacgtagtaccgggatccgc

SEQ ID NO: 5922803 - DNA, 25 bp, Homo sapien
tctcaccgcgcgtcgatctaagggc

SEQ ID NO: 5922804 - DNA, 25 bp, Homo sapien
gagtgggtccgatagcgttcaccgg

SEQ ID NO: 5922805 - DNA, 25 bp, Homo sapien
ttgtcccgcgaggcataccccgatc

SEQ ID NO: 5922806 - DNA, 25 bp, Homo sapien
ccggcacgatacggactggctaacg

SEQ ID NO: 5922807 - DNA, 25 bp, Homo sapien
ttcgcccggtcggtgcgtattctcc

SEQ ID NO: 5922808 - DNA, 25 bp, Homo sapien
gattctgggcctagcgcgatgggga

SEQ ID NO: 5922809 - DNA, 25 bp, Homo sapien
gggcaatacgcgggacgtttggcag

SEQ ID NO: 5922810 - DNA, 25 bp, Homo sapien
ggctggtcgcgacgttacacacctg

SEQ ID NO: 5922811 - DNA, 25 bp, Homo sapien
gacccatagatcgcgcgctgaccag

SEQ ID NO: 5922812 - DNA, 25 bp, Homo sapien
cttgccggccttaacgcgagtggac

SEQ ID NO: 5922813 - DNA, 25 bp, Homo sapien
gcgcggtctgatacgtcgcgaactc

SEQ ID NO: 5922814 - DNA, 25 bp, Homo sapien
cccccctccgttatgcgggcattac

SEQ ID NO: 5922815 - DNA, 25 bp, Homo sapien
cccgtgacgctcgcgactatcatcg

SEQ ID NO: 5922816 - DNA, 25 bp, Homo sapien
ggcccgtctacgcgctaacgaggat

SEQ ID NO: 5922817 - DNA, 25 bp, Homo sapien
atgctgtagcgctccgcatgggcca

SEQ ID NO: 5922818 - DNA, 25 bp, Homo sapien
gcggtagggcactacgtcgagatgc

SEQ ID NO: 5922819 - DNA, 25 bp, Homo sapien
aagggacgtaccgtcgaagacgcgc

SEQ ID NO: 5922820 - DNA, 25 bp, Homo sapien
ctgaggtcgcgcacttacggtgacc

SEQ ID NO: 5922821 - DNA, 25 bp, Homo sapien
cgttctcgggcggttagacgcagtg

SEQ ID NO: 5922822 - DNA, 25 bp, Homo sapien
agctgtcgatacgcgaaggggtcgc

SEQ ID NO: 5922823 - DNA, 25 bp, Homo sapien
ccgctgactagatcggcgcagccta

SEQ ID NO: 5922824 - DNA, 25 bp, Homo sapien
gtcgtaccgcgcgactataggtccc

SEQ ID NO: 5922825 - DNA, 25 bp, Homo sapien
gactctatacgctaccggccggggt

SEQ ID NO: 5922826 - DNA, 25 bp, Homo sapien
ccccttgcgtaacggacctgcctgt

SEQ ID NO: 5922827 - DNA, 25 bp, Homo sapien
accagagcgcgctaacggtctggag

SEQ ID NO: 5922828 - DNA, 25 bp, Homo sapien
cacctcataccggacgcgttcggtc

SEQ ID NO: 5922829 - DNA, 25 bp, Homo sapien
caacctgtacgatccgggaaggggc

SEQ ID NO: 5922830 - DNA, 25 bp, Homo sapien
acctcgcgtcgtactagcgcgcaag

SEQ ID NO: 5922831 - DNA, 25 bp, Homo sapien
gtagaacgttgtacccgcgcgtggg

SEQ ID NO: 5922832 - DNA, 25 bp, Homo sapien
tcaggcacgtcccgacgtattgccg

SEQ ID NO: 5922833 - DNA, 25 bp, Homo sapien
tgacggctcgacgtacgaacacggg

SEQ ID NO: 5922834 - DNA, 25 bp, Homo sapien
agcggatacgatcgacgcatggccg

SEQ ID NO: 5922835 - DNA, 25 bp, Homo sapien
tctagcggcgtatagtcgggaccgg

SEQ ID NO: 5922836 - DNA, 25 bp, Homo sapien
caccccgtatcgcacgcgtgatagg

SEQ ID NO: 5922837 - DNA, 25 bp, Homo sapien
ccctaagtacgagcgtcgcccggat

SEQ ID NO: 5922838 - DNA, 25 bp, Homo sapien
tctcagatccgacgcggtcgaggac

SEQ ID NO: 5922839 - DNA, 25 bp, Homo sapien
gtgggcagttatatcgcgcgacccg

SEQ ID NO: 5922840 - DNA, 25 bp, Homo sapien
gaggcttcgaccggtagcgcaactg

SEQ ID NO: 5922841 - DNA, 25 bp, Homo sapien
cgcttccgcgtagcggataccacag

SEQ ID NO: 5922842 - DNA, 25 bp, Homo sapien
cctagcgtcgctcgtactaccctgc

SEQ ID NO: 5922843 - DNA, 25 bp, Homo sapien
tcgagggttatgcgcgatcggcagc

SEQ ID NO: 5922844 - DNA, 25 bp, Homo sapien
cattcttccgcacgactagccggcg

SEQ ID NO: 5922845 - DNA, 25 bp, Homo sapien
cccaccgtacgtcccggtaatgctg

SEQ ID NO: 5922846 - DNA, 25 bp, Homo sapien
cgcacttctacgcgcgtcgaccagt

SEQ ID NO: 5922847 - DNA, 25 bp, Homo sapien
acatcctcgtcgcgacgtacgccga

SEQ ID NO: 5922848 - DNA, 25 bp, Homo sapien
tgtgagcgtctggcggtacgcgagt

SEQ ID NO: 5922849 - DNA, 25 bp, Homo sapien
cgctcgcgtccgataaacgaaccgg

SEQ ID NO: 5922850 - DNA, 25 bp, Homo sapien
gcgacactccgcgcaacgaccatgt

SEQ ID NO: 5922851 - DNA, 25 bp, Homo sapien
gtagggcggcggataccgtggtatg

SEQ ID NO: 5922852 - DNA, 25 bp, Homo sapien
gccaactagcgcggttccggatcag

SEQ ID NO: 5922853 - DNA, 25 bp, Homo sapien
gagcattggttcgacgcggtgtggg

SEQ ID NO: 5922854 - DNA, 25 bp, Homo sapien
gctggagacctacgtaccgcaccac

SEQ ID NO: 5922855 - DNA, 25 bp, Homo sapien
tcggtccgacgattagccgggtgct

SEQ ID NO: 5922856 - DNA, 25 bp, Homo sapien
cacatcgcgtgatacgccgagctgc

SEQ ID NO: 5922857 - DNA, 25 bp, Homo sapien
aagcgccgcgccataggttacacgc

SEQ ID NO: 5922858 - DNA, 25 bp, Homo sapien
acgcccccgcgactttacgccattg

SEQ ID NO: 5922859 - DNA, 25 bp, Homo sapien
accgaacgactcgtacgtccggctc

SEQ ID NO: 5922860 - DNA, 25 bp, Homo sapien
gagggctcagtagcggtcggacgaa

SEQ ID NO: 5922861 - DNA, 25 bp, Homo sapien
gtcacagggtcgcgtcgaatgctcg

SEQ ID NO: 5922862 - DNA, 25 bp, Homo sapien
gacgaagacctatctcgcggtccgc

SEQ ID NO: 5922863 - DNA, 25 bp, Homo sapien
acccgcacgtctcgcgtaacgcgtt

SEQ ID NO: 5922864 - DNA, 25 bp, Homo sapien
tcggcataagccggccgtaggcaga

SEQ ID NO: 5922865 - DNA, 25 bp, Homo sapien
gtcgcgatacgtccggtcccgttac

SEQ ID NO: 5922866 - DNA, 25 bp, Homo sapien
cgatccgctcgtcgcatgagccttc

SEQ ID NO: 5922867 - DNA, 25 bp, Homo sapien
agccgctctcgcgtaccgtcatcct

SEQ ID NO: 5922868 - DNA, 25 bp, Homo sapien
tcagtccgcgcttacgtccagctgg

SEQ ID NO: 5922869 - DNA, 25 bp, Homo sapien
tcctgcgccgttacgatcgtgccct

SEQ ID NO: 5922870 - DNA, 25 bp, Homo sapien
ggttggccgctacggtcgatgtgag

SEQ ID NO: 5922871 - DNA, 25 bp, Homo sapien
cgctaccgtactactcgtcggcctg

SEQ ID NO: 5922872 - DNA, 25 bp, Homo sapien
cactcctagatcgtccgcggaccac

SEQ ID NO: 5922873 - DNA, 25 bp, Homo sapien
gaatcgaggtccgtagcgcagcgca

SEQ ID NO: 5922874 - DNA, 25 bp, Homo sapien
gaggcgttcgaacgtacggctgggt

SEQ ID NO: 5922875 - DNA, 25 bp, Homo sapien
acagagcatgcgagcgacgcaccca

SEQ ID NO: 5922876 - DNA, 25 bp, Homo sapien
gcctgtatcgtgcggcgtagctctc

SEQ ID NO: 5922877 - DNA, 25 bp, Homo sapien
acctgcaggttatcgcgaccgtcgg

SEQ ID NO: 5922878 - DNA, 25 bp, Homo sapien
gaccctcgcttacgtcgcaagccct

SEQ ID NO: 5922879 - DNA, 25 bp, Homo sapien
ctgaggattatcgcgcggcgatcgc

SEQ ID NO: 5922880 - DNA, 25 bp, Homo sapien
cggcgacggacgaactaaggtagcg

SEQ ID NO: 5922881 - DNA, 25 bp, Homo sapien
ttcgcgtagtcccgtcgtacggcct

SEQ ID NO: 5922882 - DNA, 25 bp, Homo sapien
cggatctcgacgcgtagctagctcg

SEQ ID NO: 5922883 - DNA, 25 bp, Homo sapien
gcaagcctatgctcgcgcgctagtg

SEQ ID NO: 5922884 - DNA, 25 bp, Homo sapien
tacaagcgcgcgtcatagtggcgcg

SEQ ID NO: 5922885 - DNA, 25 bp, Homo sapien
cgggagatcgggcggacgtactaca

SEQ ID NO: 5922886 - DNA, 25 bp, Homo sapien
accaagccgcttcggtacgtctggc

SEQ ID NO: 5922887 - DNA, 25 bp, Homo sapien
cccgactcgtcgcaacggttgtagc

SEQ ID NO: 5922888 - DNA, 25 bp, Homo sapien
ttgtacacctcgtacgcgccagccc

SEQ ID NO: 5922889 - DNA, 25 bp, Homo sapien
cgcatctcgccatgacgcggaaacg

SEQ ID NO: 5922890 - DNA, 25 bp, Homo sapien
caatactgcggcgtagaccccccca

SEQ ID NO: 5922891 - DNA, 25 bp, Homo sapien
cgcgtgatatacgctcgcgtggcag

SEQ ID NO: 5922892 - DNA, 25 bp, Homo sapien
ggcatgccgcgacgtacgtacggat

SEQ ID NO: 5922893 - DNA, 25 bp, Homo sapien
gccccggtcgcgctatgacactaac

SEQ ID NO: 5922894 - DNA, 25 bp, Homo sapien
tgggctatgacgaccgtcgcgcgat

SEQ ID NO: 5922895 - DNA, 25 bp, Homo sapien
cggccccatcgaacgtacgcctagt

SEQ ID NO: 5922896 - DNA, 25 bp, Homo sapien
gtccgcttcgacgccgcatgacaga

SEQ ID NO: 5922897 - DNA, 25 bp, Homo sapien
ccgacgtaggatgcgcgtatgggca

SEQ ID NO: 5922898 - DNA, 25 bp, Homo sapien
ccccacgtccgcgatacacaagcga

SEQ ID NO: 5922899 - DNA, 25 bp, Homo sapien
cctccagctcgttgcgctaacggct

SEQ ID NO: 5922900 - DNA, 25 bp, Homo sapien
tctgcgtttacgaccgcggggcaag

SEQ ID NO: 5922901 - DNA, 25 bp, Homo sapien
cagtcggaccgacgtgattgggcac

SEQ ID NO: 5922902 - DNA, 25 bp, Homo sapien
acgggtgtacgtagacgcgagtcgc

SEQ ID NO: 5922903 - DNA, 25 bp, Homo sapien
cagctgatggggtcgcgtaggtcca

SEQ ID NO: 5922904 - DNA, 25 bp, Homo sapien
cgcggatttacgcgacgtccacgct

SEQ ID NO: 5922905 - DNA, 25 bp, Homo sapien
agtcagtatcgcgtaggcgcgcgca

SEQ ID NO: 5922906 - DNA, 25 bp, Homo sapien
cacgtgatgatcgggcgcccgatga

SEQ ID NO: 5922907 - DNA, 25 bp, Homo sapien
gacctgctaccggccgatttacccg

SEQ ID NO: 5922908 - DNA, 25 bp, Homo sapien
atcgcttatccgaacgcgcgcacgg

SEQ ID NO: 5922909 - DNA, 25 bp, Homo sapien
gcacagcataacctcgcgatcggcg

SEQ ID NO: 5922910 - DNA, 25 bp, Homo sapien
ctggtctaacgcgcaccgtagaggc

SEQ ID NO: 5922911 - DNA, 25 bp, Homo sapien
caggctcgtacgggtagcgttgtcc

SEQ ID NO: 5922912 - DNA, 25 bp, Homo sapien
gtaagccccgtcgcgtacggatcca

SEQ ID NO: 5922913 - DNA, 25 bp, Homo sapien
tcgatcgtacaccgcaacgacgggc

SEQ ID NO: 5922914 - DNA, 25 bp, Homo sapien
ggtgccagtctacgcgacgagttcc

SEQ ID NO: 5922915 - DNA, 25 bp, Homo sapien
ggcgctacggcgcgatatgagggtt

SEQ ID NO: 5922916 - DNA, 25 bp, Homo sapien
ccaggatggcgcgagcgtatgagga

SEQ ID NO: 5922917 - DNA, 25 bp, Homo sapien
gtgtcttaatactcgcgcccgggcc

SEQ ID NO: 5922918 - DNA, 25 bp, Homo sapien
cccagcacgcgttgtaccggggtta

SEQ ID NO: 5922919 - DNA, 25 bp, Homo sapien
agctctggcgtcggaacgagcgatc

SEQ ID NO: 5922920 - DNA, 25 bp, Homo sapien
caccacgtaccggtacgaccctagc

SEQ ID NO: 5922921 - DNA, 25 bp, Homo sapien
ggtcggcccgagcgtatcggtcata

SEQ ID NO: 5922922 - DNA, 25 bp, Homo sapien
gcgactgatatcgcaggcgcccaac

SEQ ID NO: 5922923 - DNA, 25 bp, Homo sapien
gaccttgcgacgtacggtaggccga

SEQ ID NO: 5922924 - DNA, 25 bp, Homo sapien
atgaggcgtacgcgcgttctcccga

SEQ ID NO: 5922925 - DNA, 25 bp, Homo sapien
cgcactccgacgacttacgggtgtc

SEQ ID NO: 5922926 - DNA, 25 bp, Homo sapien
tgagacctagtcgcgccgttcccgt

SEQ ID NO: 5922927 - DNA, 25 bp, Homo sapien
aggaccttaggcgcgacggctactc

SEQ ID NO: 5922928 - DNA, 25 bp, Homo sapien
ctgtgaaccgaccgcgaatgcacgg

SEQ ID NO: 5922929 - DNA, 25 bp, Homo sapien
accgggcggtataacgcgcacagca

SEQ ID NO: 5922930 - DNA, 25 bp, Homo sapien
tgcacctcgcgaggtacgagtgtgg

SEQ ID NO: 5922931 - DNA, 25 bp, Homo sapien
cggtgccataccgcgccgacatcaa

SEQ ID NO: 5922932 - DNA, 25 bp, Homo sapien
ctgcggtgcgtcgtacggtcacaag

SEQ ID NO: 5922933 - DNA, 25 bp, Homo sapien
tcgtcagggcgtactcgcacagctc

SEQ ID NO: 5922934 - DNA, 25 bp, Homo sapien
cccatggtcgatcgcgtgagcttcg

SEQ ID NO: 5922935 - DNA, 25 bp, Homo sapien
tgggaaactaacgcgcggcaagggc

SEQ ID NO: 5922936 - DNA, 25 bp, Homo sapien
ggagacctcgcggatacgaggcttc

SEQ ID NO: 5922937 - DNA, 25 bp, Homo sapien
gctaccgcgatagtggacgacggtg

SEQ ID NO: 5922938 - DNA, 25 bp, Homo sapien
agccaatgcctaacgcgcccatggg

SEQ ID NO: 5922939 - DNA, 25 bp, Homo sapien
ctagcaatcgtcacgccgtgcccct

SEQ ID NO: 5922940 - DNA, 25 bp, Homo sapien
caagggaaatcggcgcacggcctct

SEQ ID NO: 5922941 - DNA, 25 bp, Homo sapien
ccctggccagtcgtacgactactcc

SEQ ID NO: 5922942 - DNA, 25 bp, Homo sapien
ttcttggcgttaagcggaccgcccc

SEQ ID NO: 5922943 - DNA, 25 bp, Homo sapien
cttctctagatcgggtccgaccccc

SEQ ID NO: 5922944 - DNA, 25 bp, Homo sapien
ccatccacagcgtagcgcgttccga

SEQ ID NO: 5922945 - DNA, 25 bp, Homo sapien
ctccctcccgtagcgcatagcctgt

SEQ ID NO: 5922946 - DNA, 25 bp, Homo sapien
agtgcgctacgcgcgtattcgcgct

SEQ ID NO: 5922947 - DNA, 25 bp, Homo sapien
aggcgcagtcgcgatacggttgagg

SEQ ID NO: 5922948 - DNA, 25 bp, Homo sapien
gtggcactcttacgacgcggcttcc

SEQ ID NO: 5922949 - DNA, 25 bp, Homo sapien
gcgtctgcgcaattcatcgggctcg

SEQ ID NO: 5922950 - DNA, 25 bp, Homo sapien
gaacgccgcaaacggctagtccacg

SEQ ID NO: 5922951 - DNA, 25 bp, Homo sapien
ccaacgccgctccgatagtcggcat

SEQ ID NO: 5922952 - DNA, 25 bp, Homo sapien
ggctcgtaacgcgacgttgctggtg

SEQ ID NO: 5922953 - DNA, 25 bp, Homo sapien
gggtaagcgacctatgccgcagacg

SEQ ID NO: 5922954 - DNA, 25 bp, Homo sapien
cgcttatagcgttcgtcgcccgtgc

SEQ ID NO: 5922955 - DNA, 25 bp, Homo sapien
tccagagcggcccgtaactcgttgg

SEQ ID NO: 5922956 - DNA, 25 bp, Homo sapien
gctaggcggcgataggtacacgacc

SEQ ID NO: 5922957 - DNA, 25 bp, Homo sapien
tccagtatacgccgaacccccgcct

SEQ ID NO: 5922958 - DNA, 25 bp, Homo sapien
catttccgtacaccggccgaggagg

SEQ ID NO: 5922959 - DNA, 25 bp, Homo sapien
cgtcgagtacacgcgtccggagttg

SEQ ID NO: 5922960 - DNA, 25 bp, Homo sapien
gcactatcggtaggcgtacccaggg

SEQ ID NO: 5922961 - DNA, 25 bp, Homo sapien
ctcggacacgacggtaacgcgtacc

SEQ ID NO: 5922962 - DNA, 25 bp, Homo sapien
ccggatccggtagcggtactgctct

SEQ ID NO: 5922963 - DNA, 25 bp, Homo sapien
cgtcttggacccgacgtatcgggtc

SEQ ID NO: 5922964 - DNA, 25 bp, Homo sapien
ccacacatcggtcgcgcacgggaat

SEQ ID NO: 5922965 - DNA, 25 bp, Homo sapien
cgtcctcgccgattacgcagaaggc

SEQ ID NO: 5922966 - DNA, 25 bp, Homo sapien
tggaaggcccgacgataggcgggtt

SEQ ID NO: 5922967 - DNA, 25 bp, Homo sapien
gacgccgactatcggcggatcggaa

SEQ ID NO: 5922968 - DNA, 25 bp, Homo sapien
cggaatcgtagcggtctaagcccgc

SEQ ID NO: 5922969 - DNA, 25 bp, Homo sapien
gtctgcgtcgtaaggcgcgctctag

SEQ ID NO: 5922970 - DNA, 25 bp, Homo sapien
atcgagcgcctaagatcggtgcccc

SEQ ID NO: 5922971 - DNA, 25 bp, Homo sapien
cttgctcggaccgattcgtctgcgc

SEQ ID NO: 5922972 - DNA, 25 bp, Homo sapien
ggtatctcggacccgtagtcggcgt

SEQ ID NO: 5922973 - DNA, 25 bp, Homo sapien
gggcattaacgacgtccgccgctca

SEQ ID NO: 5922974 - DNA, 25 bp, Homo sapien
ggtacgccgacgcgtacttcggcta

SEQ ID NO: 5922975 - DNA, 25 bp, Homo sapien
ggacgcacgcatcgtacggctaagg

SEQ ID NO: 5922976 - DNA, 25 bp, Homo sapien
gtagccccccgcgtcaataggtctg

SEQ ID NO: 5922977 - DNA, 25 bp, Homo sapien
acccgagcgctcggtattgggaacg

SEQ ID NO: 5922978 - DNA, 25 bp, Homo sapien
cctcaggtacgaaccgacgcggcat

SEQ ID NO: 5922979 - DNA, 25 bp, Homo sapien
gtgacggtcgcatacgacccatcgg

SEQ ID NO: 5922980 - DNA, 25 bp, Homo sapien
ggtagttacgtagttgcgccgggcg

SEQ ID NO: 5922981 - DNA, 25 bp, Homo sapien
gggttatcgcgaccgacgtcaccgt

SEQ ID NO: 5922982 - DNA, 25 bp, Homo sapien
acagggtcggttgcgtcacgtgacg

SEQ ID NO: 5922983 - DNA, 25 bp, Homo sapien
acctggcgcgtacgcgctaaagctc

SEQ ID NO: 5922984 - DNA, 25 bp, Homo sapien
gtacagttacgaccgcggaccgtgc

SEQ ID NO: 5922985 - DNA, 25 bp, Homo sapien
cgtaactaccgacgaacgcgggctc

SEQ ID NO: 5922986 - DNA, 25 bp, Homo sapien
accggaccgcacgacgtatcgctca

SEQ ID NO: 5922987 - DNA, 25 bp, Homo sapien
gcggacacgacccctacgtttcagc

SEQ ID NO: 5922988 - DNA, 25 bp, Homo sapien
aagcctgcgctactggtcgcgtcct

SEQ ID NO: 5922989 - DNA, 25 bp, Homo sapien
atttggccgcgacgtaacccacggc

SEQ ID NO: 5922990 - DNA, 25 bp, Homo sapien
gcacatcgtcgcacggtacgcatgg

SEQ ID NO: 5922991 - DNA, 25 bp, Homo sapien
agattgcgcttcggtagcgtggcgc

SEQ ID NO: 5922992 - DNA, 25 bp, Homo sapien
actggctaagcgcgtacccctacgc

SEQ ID NO: 5922993 - DNA, 25 bp, Homo sapien
acggtccgcgcgaatgatcagtcgg

SEQ ID NO: 5922994 - DNA, 25 bp, Homo sapien
gtgcatgacgtatccggacgcccca

SEQ ID NO: 5922995 - DNA, 25 bp, Homo sapien
aggtattaccgcgcgacactgccgc

SEQ ID NO: 5922996 - DNA, 25 bp, Homo sapien
ccaagctatcgcccgacgtggttgg

SEQ ID NO: 5922997 - DNA, 25 bp, Homo sapien
tatccccaacgatcgcgggcaccgt

SEQ ID NO: 5922998 - DNA, 25 bp, Homo sapien
gcatgatagggtgcgtcgtccgcca

SEQ ID NO: 5922999 - DNA, 25 bp, Homo sapien
aaacaccgttacgaccgcgcctggc

SEQ ID NO: 5923000 - DNA, 25 bp, Homo sapien
gtccctcttcgtcgcgtaggactcg

SEQ ID NO: 5923001 - DNA, 25 bp, Homo sapien
gagttcactcgcggtaacgccctcg

SEQ ID NO: 5923002 - DNA, 25 bp, Homo sapien
tgctagggtccggaacgttgccgca

SEQ ID NO: 5923003 - DNA, 25 bp, Homo sapien
gccgtgacgcgcgttggatcgtaca

SEQ ID NO: 5923004 - DNA, 25 bp, Homo sapien
gagcgacggtcgttgctagtggtgg

SEQ ID NO: 5923005 - DNA, 25 bp, Homo sapien
ggcgcgtatcgctgttacgggtctg

SEQ ID NO: 5923006 - DNA, 25 bp, Homo sapien
tactgccgtacgcggttgtccgtgc

SEQ ID NO: 5923007 - DNA, 25 bp, Homo sapien
tccggcatagccgacggtcaacacc

SEQ ID NO: 5923008 - DNA, 25 bp, Homo sapien
aatcagcgagtaaccgcgggggcac

SEQ ID NO: 5923009 - DNA, 25 bp, Homo sapien
ctcagggttacgtcgagccccgctt

SEQ ID NO: 5923010 - DNA, 25 bp, Homo sapien
gctcggacgtcgcgttacccatgct

SEQ ID NO: 5923011 - DNA, 25 bp, Homo sapien
ttcaggcttcgcgtgtcggtacgcc

SEQ ID NO: 5923012 - DNA, 25 bp, Homo sapien
acggcgtaaccgtcgcgcaagcatc

SEQ ID NO: 5923013 - DNA, 25 bp, Homo sapien
ttggcgcgatcatcgcgctgcctgt

SEQ ID NO: 5923014 - DNA, 25 bp, Homo sapien
atgtctgacctatccgcgccggcca

SEQ ID NO: 5923015 - DNA, 25 bp, Homo sapien
tcctgggaacgcgcatacggcaagg

SEQ ID NO: 5923016 - DNA, 25 bp, Homo sapien
cagatgcgccgtagggtaagtcccg

SEQ ID NO: 5923017 - DNA, 25 bp, Homo sapien
gctcccgacgaacgcgacttgcact

SEQ ID NO: 5923018 - DNA, 25 bp, Homo sapien
ggaccccgtatagtcgggcctatcg

SEQ ID NO: 5923019 - DNA, 25 bp, Homo sapien
tacgcgcgtaagagcggttcggtcc

SEQ ID NO: 5923020 - DNA, 25 bp, Homo sapien
gctggtatcgccggctagtagccca

SEQ ID NO: 5923021 - DNA, 25 bp, Homo sapien
gtgcccactacgtcgcgctacctca

SEQ ID NO: 5923022 - DNA, 25 bp, Homo sapien
tcgctccgtctaacgagcggtgagc

SEQ ID NO: 5923023 - DNA, 25 bp, Homo sapien
tggaagtcgagcgtgatcggggcct

SEQ ID NO: 5923024 - DNA, 25 bp, Homo sapien
taccgggcgacctaccgtttggcca

SEQ ID NO: 5923025 - DNA, 25 bp, Homo sapien
acactgcattcgcgcgaaccggcca

SEQ ID NO: 5923026 - DNA, 25 bp, Homo sapien
aagtcgcaaggttcgacgccgggct

SEQ ID NO: 5923027 - DNA, 25 bp, Homo sapien
gtccatcgtcctatcgccgggcctt

SEQ ID NO: 5923028 - DNA, 25 bp, Homo sapien
cgtccaacaccggtcgcatcgacgt

SEQ ID NO: 5923029 - DNA, 25 bp, Homo sapien
ctgtgtgatacgcgacgtaggcggc

SEQ ID NO: 5923030 - DNA, 25 bp, Homo sapien
cgattccacgcgacgggtaggcctt

SEQ ID NO: 5923031 - DNA, 25 bp, Homo sapien
gaggagcgctagcggttacgagtgg

SEQ ID NO: 5923032 - DNA, 25 bp, Homo sapien
cacaccgctacgtcggacagctcga

SEQ ID NO: 5923033 - DNA, 25 bp, Homo sapien
ggcctgcgcgccgtgttatgaggaa

SEQ ID NO: 5923034 - DNA, 25 bp, Homo sapien
gggctgtacgtcgcgccaactcatg

SEQ ID NO: 5923035 - DNA, 25 bp, Homo sapien
atccaccgacgtaccacgctgccgt

SEQ ID NO: 5923036 - DNA, 25 bp, Homo sapien
gtcgggtcgacgggtacgagtgaac

SEQ ID NO: 5923037 - DNA, 25 bp, Homo sapien
gtggtacgcgcgatgagtgggcaca

SEQ ID NO: 5923038 - DNA, 25 bp, Homo sapien
tctcgattacggaacgcggccaggg

SEQ ID NO: 5923039 - DNA, 25 bp, Homo sapien
gcccagaatccgcgcgacaggaagt

SEQ ID NO: 5923040 - DNA, 25 bp, Homo sapien
ggcacggcgctaccggatactacga

SEQ ID NO: 5923041 - DNA, 25 bp, Homo sapien
cgcaggtctacgcgaacgtgcttgg

SEQ ID NO: 5923042 - DNA, 25 bp, Homo sapien
cctgccacggcggtcgtacgactta

SEQ ID NO: 5923043 - DNA, 25 bp, Homo sapien
tggcgttcgcggcgtacctttccgt

SEQ ID NO: 5923044 - DNA, 25 bp, Homo sapien
gcttgcggtcgaccgtatgttcccg

SEQ ID NO: 5923045 - DNA, 25 bp, Homo sapien
gacggatacgcgtcggagctcagtc

SEQ ID NO: 5923046 - DNA, 25 bp, Homo sapien
ccacgctcgtacgtcgagcgaacag

SEQ ID NO: 5923047 - DNA, 25 bp, Homo sapien
ctggagtatacccggcggtcgcatc

SEQ ID NO: 5923048 - DNA, 25 bp, Homo sapien
tggtgggtccgcgtatcgaagcgtg

SEQ ID NO: 5923049 - DNA, 25 bp, Homo sapien
tggtccctagtacggtgcgggagct

SEQ ID NO: 5923050 - DNA, 25 bp, Homo sapien
tacgggcgtgacgtccgatccagca

SEQ ID NO: 5923051 - DNA, 25 bp, Homo sapien
cgtgcgcccgacgtaaccgtagact

SEQ ID NO: 5923052 - DNA, 25 bp, Homo sapien
ggcattatcgcgggctatcccagcg

SEQ ID NO: 5923053 - DNA, 25 bp, Homo sapien
gggggttcgtccgcgagtactcatg

SEQ ID NO: 5923054 - DNA, 25 bp, Homo sapien
ctctgctatgccgaccgttcacggg

SEQ ID NO: 5923055 - DNA, 25 bp, Homo sapien
ggacataacgcgggccgatcaacgg

SEQ ID NO: 5923056 - DNA, 25 bp, Homo sapien
tgaccggtactcgacgtagcccacc

SEQ ID NO: 5923057 - DNA, 25 bp, Homo sapien
gcacgttacggcgcggttgcgatac

SEQ ID NO: 5923058 - DNA, 25 bp, Homo sapien
tacccacctcgtacgcgaccacgca

SEQ ID NO: 5923059 - DNA, 25 bp, Homo sapien
cacccacacgatcgaccgtcaacgg

SEQ ID NO: 5923060 - DNA, 25 bp, Homo sapien
acggatcgcggttaacggcaggtcg

SEQ ID NO: 5923061 - DNA, 25 bp, Homo sapien
gtccgcacattacgcgcccgctaac

SEQ ID NO: 5923062 - DNA, 25 bp, Homo sapien
ctccgggacgtacgctacggatgag

SEQ ID NO: 5923063 - DNA, 25 bp, Homo sapien
ggcagctacgtcgaacccgaatccc

SEQ ID NO: 5923064 - DNA, 25 bp, Homo sapien
ggccagtatatcgggcgcgtgcgta

SEQ ID NO: 5923065 - DNA, 25 bp, Homo sapien
tgttgccgcgaaccgtcgagtgcgt

SEQ ID NO: 5923066 - DNA, 25 bp, Homo sapien
cctcgtccgcgtagcgttggcagta

SEQ ID NO: 5923067 - DNA, 25 bp, Homo sapien
cggcctactgtcgcgacacacggtt

SEQ ID NO: 5923068 - DNA, 25 bp, Homo sapien
cgcggcacgcgcgaacatcgtcaat

SEQ ID NO: 5923069 - DNA, 25 bp, Homo sapien
tggcgggacgcgcgataaccggtaa

SEQ ID NO: 5923070 - DNA, 25 bp, Homo sapien
ctagcatcacgactacgcgcgggtc

SEQ ID NO: 5923071 - DNA, 25 bp, Homo sapien
ccgagcgggtctcgtacgacggtaa

SEQ ID NO: 5923072 - DNA, 25 bp, Homo sapien
atagcccgcactcgtagacgctggg

SEQ ID NO: 5923073 - DNA, 25 bp, Homo sapien
attgcccggtgacgtatcgcggcca

SEQ ID NO: 5923074 - DNA, 25 bp, Homo sapien
ttgcggcgcttaccggtaggacgct

SEQ ID NO: 5923075 - DNA, 25 bp, Homo sapien
tgctggcgcgaccgaatcacgtagc

SEQ ID NO: 5923076 - DNA, 25 bp, Homo sapien
ctaggcgcgacgtggtaccttaccg

SEQ ID NO: 5923077 - DNA, 25 bp, Homo sapien
gcgagagttcggccgcttaatccgc

SEQ ID NO: 5923078 - DNA, 25 bp, Homo sapien
gactgaagttcgcgtaggctcgggc

SEQ ID NO: 5923079 - DNA, 25 bp, Homo sapien
gccttgccgttgcgcgtaatcgcgt

SEQ ID NO: 5923080 - DNA, 25 bp, Homo sapien
ggcgggtgactcgcgtcgttcgttt

SEQ ID NO: 5923081 - DNA, 25 bp, Homo sapien
tcgccttaggacgcgcgtactggag

SEQ ID NO: 5923082 - DNA, 25 bp, Homo sapien
ccgcagtcgcgcgatgatatgtcgc

SEQ ID NO: 5923083 - DNA, 25 bp, Homo sapien
ccgcctcgctaacgtcgggatcttc

SEQ ID NO: 5923084 - DNA, 25 bp, Homo sapien
acctagcgcgatataccgggcggtc

SEQ ID NO: 5923085 - DNA, 25 bp, Homo sapien
gcgctactcgtacgccgcattggga

SEQ ID NO: 5923086 - DNA, 25 bp, Homo sapien
agcatgggtaacgcgacgtccgagc

SEQ ID NO: 5923087 - DNA, 25 bp, Homo sapien
agctcccgcaccgtactagggacca

SEQ ID NO: 5923088 - DNA, 25 bp, Homo sapien
gatcgctcgttccgacgccagagct

SEQ ID NO: 5923089 - DNA, 25 bp, Homo sapien
gtgatgggacgtccgacgtgagtgc

SEQ ID NO: 5923090 - DNA, 25 bp, Homo sapien
ttgcgcggtacgttcggacccagac

SEQ ID NO: 5923091 - DNA, 25 bp, Homo sapien
ttaccggttatcgcgcgtcccgcca

SEQ ID NO: 5923092 - DNA, 25 bp, Homo sapien
ccctgggtacgcctaccgatagtgc

SEQ ID NO: 5923093 - DNA, 25 bp, Homo sapien
gttgggcgcctgcgatatcagtcgc

SEQ ID NO: 5923094 - DNA, 25 bp, Homo sapien
tacccgacgcgagcaagcgtgacga

SEQ ID NO: 5923095 - DNA, 25 bp, Homo sapien
ccgcggtcgcgtagacgacctcatt

SEQ ID NO: 5923096 - DNA, 25 bp, Homo sapien
gagctgtgcgagtacgccctgacga

SEQ ID NO: 5923097 - DNA, 25 bp, Homo sapien
gcgacatatcatcgcgcgactgcgg

SEQ ID NO: 5923098 - DNA, 25 bp, Homo sapien
cctcaaccgtatcgcgactgcgcct

SEQ ID NO: 5923099 - DNA, 25 bp, Homo sapien
tggtttccgtcactacgcgtcgccc

SEQ ID NO: 5923100 - DNA, 25 bp, Homo sapien
cgagctagctacgcgtcgagatccg

SEQ ID NO: 5923101 - DNA, 25 bp, Homo sapien
ccgttgacggtcgatcgtgtgggtg

SEQ ID NO: 5923102 - DNA, 25 bp, Homo sapien
cgctgggatagcccgcgataatgcc

SEQ ID NO: 5923103 - DNA, 25 bp, Homo sapien
acaggcaggtccgttacgcaagggg

SEQ ID NO: 5923104 - DNA, 25 bp, Homo sapien
agtccccgccggtggtacactgctt

SEQ ID NO: 5923105 - DNA, 25 bp, Homo sapien
tcgccacgatacgtctccgcaggca

SEQ ID NO: 5923106 - DNA, 25 bp, Homo sapien
ctgccggtctatcgcgcgaacgaag

SEQ ID NO: 5923107 - DNA, 25 bp, Homo sapien
agggcttgcgacgtaagcgagggtc

SEQ ID NO: 5923108 - DNA, 25 bp, Homo sapien
gcacgttcgcgtaccacggacaagc

SEQ ID NO: 5923109 - DNA, 25 bp, Homo sapien
tacgcacgcgcccgatatactggcc

SEQ ID NO: 5923110 - DNA, 25 bp, Homo sapien
ctcggcgtacgatcgtaccctggga

SEQ ID NO: 5923111 - DNA, 25 bp, Homo sapien
ggctgagacgagcggtatatccggc

SEQ ID NO: 5923112 - DNA, 25 bp, Homo sapien
cgtcatacttacgcgggctgcgcct

SEQ ID NO: 5923113 - DNA, 25 bp, Homo sapien
gcgtgtaacctatggcgcggcgctt

SEQ ID NO: 5923114 - DNA, 25 bp, Homo sapien
ggaccgtgtccgctcgtatgcacct

SEQ ID NO: 5923115 - DNA, 25 bp, Homo sapien
cgagcccgatgaattgcgcagacgc

SEQ ID NO: 5923116 - DNA, 25 bp, Homo sapien
ctgtgcggtcgatcgcacgccgatt

SEQ ID NO: 5923117 - DNA, 25 bp, Homo sapien
agccgttagcgcaacgagctggagg

SEQ ID NO: 5923118 - DNA, 25 bp, Homo sapien
tgcgcgcgcctacgcgatactgact

SEQ ID NO: 5923119 - DNA, 25 bp, Homo sapien
ggtgttgaccgtcggctatgccgga

SEQ ID NO: 5923120 - DNA, 25 bp, Homo sapien
agcgcgaatacgcgcgtagcgcact

SEQ ID NO: 5923121 - DNA, 25 bp, Homo sapien
gtccgaacgaccggacgatggtacg

SEQ ID NO: 5923122 - DNA, 25 bp, Homo sapien
ctgatccggaaccgcgctagttggc

SEQ ID NO: 5923123 - DNA, 25 bp, Homo sapien
gcggttcgcgacccgtatacgtcga

SEQ ID NO: 5923124 - DNA, 25 bp, Homo sapien
gggattcgggttcgacgtagctgcc

SEQ ID NO: 5923125 - DNA, 25 bp, Homo sapien
acggtgacgtcggtcgcgataaccc

SEQ ID NO: 5923126 - DNA, 25 bp, Homo sapien
gggtcgacgtctagtcgcgagagag

SEQ ID NO: 5923127 - DNA, 25 bp, Homo sapien
gtccacaactggtccgcgtcatccg

SEQ ID NO: 5923128 - DNA, 25 bp, Homo sapien
gtctggtcgggccgtaacgtcgcaa

SEQ ID NO: 5923129 - DNA, 25 bp, Homo sapien
tcccaccctatacgtcgacccggag

SEQ ID NO: 5923130 - DNA, 25 bp, Homo sapien
atgccgactatcggagcggcgttgg

SEQ ID NO: 5923131 - DNA, 25 bp, Homo sapien
agaggccgtgcgccgatttcccttg

SEQ ID NO: 5923132 - DNA, 25 bp, Homo sapien
gcccgatgtagtgcgaacgctgctg

SEQ ID NO: 5923133 - DNA, 25 bp, Homo sapien
agagcatcgcgctacgtcgtctccc

SEQ ID NO: 5923134 - DNA, 25 bp, Homo sapien
tcggcctaccgtacgtcgcaaggtc

SEQ ID NO: 5923135 - DNA, 25 bp, Homo sapien
cgcgactctagcgcgacgtcctcat

SEQ ID NO: 5923136 - DNA, 25 bp, Homo sapien
gcagggtagtacgagcgacgctagg

SEQ ID NO: 5923137 - DNA, 25 bp, Homo sapien
tgggtgcgtcgctcgcatgctctgt

SEQ ID NO: 5923138 - DNA, 25 bp, Homo sapien
acgcgattacgcgcaacggcaaggc

SEQ ID NO: 5923139 - DNA, 25 bp, Homo sapien
ccatcccgtgcgacaatagccacgc

SEQ ID NO: 5923140 - DNA, 25 bp, Homo sapien
acagcgatcggactacggcaccgct

SEQ ID NO: 5923141 - DNA, 25 bp, Homo sapien
gtaatgcccgcataacggagggggg

SEQ ID NO: 5923142 - DNA, 25 bp, Homo sapien
cgcgccactatgacgcgcgcttgta

SEQ ID NO: 5923143 - DNA, 25 bp, Homo sapien
ccgctctacgattgggccgaaccct

SEQ ID NO: 5923144 - DNA, 25 bp, Homo sapien
ccgactgatcattcgcgcggaccgt

SEQ ID NO: 5923145 - DNA, 25 bp, Homo sapien
atacagccggcgctataacgggggg

SEQ ID NO: 5923146 - DNA, 25 bp, Homo sapien
cggcagaacggtctcgtcgatcgca

SEQ ID NO: 5923147 - DNA, 25 bp, Homo sapien
ctgtggtatccgctacgcggaagcg

SEQ ID NO: 5923148 - DNA, 25 bp, Homo sapien
aggcagcgcgactacggcttcgctt

SEQ ID NO: 5923149 - DNA, 25 bp, Homo sapien
aggcgggggttcggcgtatactgga

SEQ ID NO: 5923150 - DNA, 25 bp, Homo sapien
caagaccgtaccggtgacccgcgta

SEQ ID NO: 5923151 - DNA, 25 bp, Homo sapien
aacgcgttacgcgagacgtgcgggt

SEQ ID NO: 5923152 - DNA, 25 bp, Homo sapien
ggtcggcaacgtatcgcgcacctga

SEQ ID NO: 5923153 - DNA, 25 bp, Homo sapien
ggtgggctacgtcgagtaccggtca

SEQ ID NO: 5923154 - DNA, 25 bp, Homo sapien
aaggcccggcgataggacgatggac

SEQ ID NO: 5923155 - DNA, 25 bp, Homo sapien
ccgtgcgcgcgttcggataagcgat

SEQ ID NO: 5923156 - DNA, 25 bp, Homo sapien
gtggtgcggtacgtaggtctccagc

SEQ ID NO: 5923157 - DNA, 25 bp, Homo sapien
ctcatccgtagcgtacgtcccggag

SEQ ID NO: 5923158 - DNA, 25 bp, Homo sapien
cgtctgcggcataggtcgcttaccc

SEQ ID NO: 5923159 - DNA, 25 bp, Homo sapien
gatcggggtatgcctcgcgggacaa

SEQ ID NO: 5923160 - DNA, 25 bp, Homo sapien
ggaccgaaccgctcttacgcgcgta

SEQ ID NO: 5923161 - DNA, 25 bp, Homo sapien
gccccttcccggatcgtacaggttg

SEQ ID NO: 5923162 - DNA, 25 bp, Homo sapien
ggacggtgacgcgatgctatccacg

SEQ ID NO: 5923163 - DNA, 25 bp, Homo sapien
gcgacggatagacgtcggcgcaatc

SEQ ID NO: 5923164 - DNA, 25 bp, Homo sapien
ttactccgtacgcgacgagcgaccc

SEQ ID NO: 5923165 - DNA, 25 bp, Homo sapien
gatgcgaccgccgggtatactccag

SEQ ID NO: 5923166 - DNA, 25 bp, Homo sapien
tcgcttgtgtatcgcggacgtgggg

SEQ ID NO: 5923167 - DNA, 25 bp, Homo sapien
gtgacgtagtcgggacgccagcgaa

SEQ ID NO: 5923168 - DNA, 25 bp, Homo sapien
cagacctattgacgcggggggctac

SEQ ID NO: 5923169 - DNA, 25 bp, Homo sapien
ctcacatcgaccgtagcggccaacc

SEQ ID NO: 5923170 - DNA, 25 bp, Homo sapien
ggggtccgccctagtatcgtggtga

SEQ ID NO: 5923171 - DNA, 25 bp, Homo sapien
attgacgatgttcgcgcgtgccgcg

SEQ ID NO: 5923172 - DNA, 25 bp, Homo sapien
gccaggatcgcgcctatggatggca

SEQ ID NO: 5923173 - DNA, 25 bp, Homo sapien
tggccggcgcggataggtcagacat

SEQ ID NO: 5923174 - DNA, 25 bp, Homo sapien
ggtcaggttcgcgatacctaccggg

SEQ ID NO: 5923175 - DNA, 25 bp, Homo sapien
tgaggtagcgcgacgtagtgggcac

SEQ ID NO: 5923176 - DNA, 25 bp, Homo sapien
agcgtcctaccggtaagcgccgcaa

SEQ ID NO: 5923177 - DNA, 25 bp, Homo sapien
ctccatcgcgcctattgagacccgc

SEQ ID NO: 5923178 - DNA, 25 bp, Homo sapien
ggtctagggtaaacgacgccagccc

SEQ ID NO: 5923179 - DNA, 25 bp, Homo sapien
tgcccatacgcgcatcctacgtcgg

SEQ ID NO: 5923180 - DNA, 25 bp, Homo sapien
gggctggcgcgtacgaggtgtacaa

SEQ ID NO: 5923181 - DNA, 25 bp, Homo sapien
gcctctacggtgcgcgttagaccag

SEQ ID NO: 5923182 - DNA, 25 bp, Homo sapien
gacgtacgcccgcgcgatacttcgt

SEQ ID NO: 5923183 - DNA, 25 bp, Homo sapien
atccgtacgtacgtcgcggcatgcc

SEQ ID NO: 5923184 - DNA, 25 bp, Homo sapien
tcctcatacgctcgcgccatcctgg

SEQ ID NO: 5923185 - DNA, 25 bp, Homo sapien
tacgccacgtcgtaacgcgtacggc

SEQ ID NO: 5923186 - DNA, 25 bp, Homo sapien
tgggctactagccggcgataccagc

SEQ ID NO: 5923187 - DNA, 25 bp, Homo sapien
aatagccggtcgatcgcacccccga

SEQ ID NO: 5923188 - DNA, 25 bp, Homo sapien
gtggatgatcgttcacgcgggcgac

SEQ ID NO: 5923189 - DNA, 25 bp, Homo sapien
tctgaaccggtcacgacgttccccg

SEQ ID NO: 5923190 - DNA, 25 bp, Homo sapien
gaccgaacgcgtccggtatgaggtg

SEQ ID NO: 5923191 - DNA, 25 bp, Homo sapien
cggtttgcatccgctaacgcgagcc

SEQ ID NO: 5923192 - DNA, 25 bp, Homo sapien
ctccagtacgcgcgtcctaaggcga

SEQ ID NO: 5923193 - DNA, 25 bp, Homo sapien
acgatcggaccaatgcgcgctcctg

SEQ ID NO: 5923194 - DNA, 25 bp, Homo sapien
aacccgcctatcgtcgggccttcca

SEQ ID NO: 5923195 - DNA, 25 bp, Homo sapien
tgggggggtctacgccgcagtattg

SEQ ID NO: 5923196 - DNA, 25 bp, Homo sapien
atgccgcgtcggttcgtacctgagg

SEQ ID NO: 5923197 - DNA, 25 bp, Homo sapien
aaacgaacgacgcgagtcacccgcc

SEQ ID NO: 5923198 - DNA, 25 bp, Homo sapien
aggctgtacgtacgagcgcctgggt

SEQ ID NO: 5923199 - DNA, 25 bp, Homo sapien
ccggtcccgactatacgccgctaga

SEQ ID NO: 5923200 - DNA, 25 bp, Homo sapien
gcaggtcgctcgcgacgaaagtggt

SEQ ID NO: 5923201 - DNA, 25 bp, Homo sapien
ctccaacggtcttcgcgactggcct

SEQ ID NO: 5923202 - DNA, 25 bp, Homo sapien
gcggtgtcgccgtgcgtaatggttc

SEQ ID NO: 5923203 - DNA, 25 bp, Homo sapien
tttgggaaaccgcgctaggcccacc

SEQ ID NO: 5923204 - DNA, 25 bp, Homo sapien
ggtacgcgttaccgtcgtgtccgag

SEQ ID NO: 5923205 - DNA, 25 bp, Homo sapien
ccacacgcgacgcgtgattggacac

SEQ ID NO: 5923206 - DNA, 25 bp, Homo sapien
cctcgagacggaccgctacagcatc

SEQ ID NO: 5923207 - DNA, 25 bp, Homo sapien
ggatcccggtcgcgagttagcgatg

SEQ ID NO: 5923208 - DNA, 25 bp, Homo sapien
aggcctccgcacgcgttatgcttcc

SEQ ID NO: 5923209 - DNA, 25 bp, Homo sapien
ttcctcataacacggcgcgcaggcc

SEQ ID NO: 5923210 - DNA, 25 bp, Homo sapien
ccgtgcattcgcggtcggttcacag

SEQ ID NO: 5923211 - DNA, 25 bp, Homo sapien
gaatctgcgcttacgaacccggccg

SEQ ID NO: 5923212 - DNA, 25 bp, Homo sapien
cagatgaggcctagcgcgagcggta

SEQ ID NO: 5923213 - DNA, 25 bp, Homo sapien
gcagacatctagcggacggcgtgac

SEQ ID NO: 5923214 - DNA, 25 bp, Homo sapien
cggcacggtacgcgtgacgattcct

SEQ ID NO: 5923215 - DNA, 25 bp, Homo sapien
cgagtcctacgcgacgaagagggac

SEQ ID NO: 5923216 - DNA, 25 bp, Homo sapien
gtccaacggacccctatcggcgtct

SEQ ID NO: 5923217 - DNA, 25 bp, Homo sapien
tcgtagtatccggtagcgccgtgcc

SEQ ID NO: 5923218 - DNA, 25 bp, Homo sapien
ggaagacgcgtcacgccaagggtag

SEQ ID NO: 5923219 - DNA, 25 bp, Homo sapien
gtgcccaatcacgtcggtccgactg

SEQ ID NO: 5923220 - DNA, 25 bp, Homo sapien
agtgcaagtcgcgttcgtcgggagc

SEQ ID NO: 5923221 - DNA, 25 bp, Homo sapien
ggcggattgcgaccgctactgtagc

SEQ ID NO: 5923222 - DNA, 25 bp, Homo sapien
ccgatgggtcgtatgcgaccgtcac

SEQ ID NO: 5923223 - DNA, 25 bp, Homo sapien
cgaagctcacgcgatcgaccatggg

SEQ ID NO: 5923224 - DNA, 25 bp, Homo sapien
tggggcgtccggatacgtcatgcac

SEQ ID NO: 5923225 - DNA, 25 bp, Homo sapien
gtaacgggaccggacgtatcgcgac

SEQ ID NO: 5923226 - DNA, 25 bp, Homo sapien
cagttgcgctaccggtcgaagcctc

SEQ ID NO: 5923227 - DNA, 25 bp, Homo sapien
tgccggatgcttcgcgtcgaccgat

SEQ ID NO: 5923228 - DNA, 25 bp, Homo sapien
agacgcccgcgtacgctaaggggat

SEQ ID NO: 5923229 - DNA, 25 bp, Homo sapien
ggcccgggcgcgagtattaagacac

SEQ ID NO: 5923230 - DNA, 25 bp, Homo sapien
tggacctacgcgaccccatcagctg

SEQ ID NO: 5923231 - DNA, 25 bp, Homo sapien
gagttcgcgacgtatcagaccgcgc

SEQ ID NO: 5923232 - DNA, 25 bp, Homo sapien
acatggtcgttgcgcggagtgtcgc

SEQ ID NO: 5923233 - DNA, 25 bp, Homo sapien
ctgccacgcgagcgtatatcacgcg

SEQ ID NO: 5923234 - DNA, 25 bp, Homo sapien
gactgagctccgacgcgtatccgtc

SEQ ID NO: 5923235 - DNA, 25 bp, Homo sapien
gcatctcgacgtagtgccctaccgc

SEQ ID NO: 5923236 - DNA, 25 bp, Homo sapien
gcgactgtccgtagtcgacggagct

SEQ ID NO: 5923237 - DNA, 25 bp, Homo sapien
tcgcgcgtcggtacgcaagcgtagt

SEQ ID NO: 5923238 - DNA, 25 bp, Homo sapien
gcggcagtgtcgcgcggtaatacct

SEQ ID NO: 5923239 - DNA, 25 bp, Homo sapien
gacggcacgctcgtaccgagtgaca

SEQ ID NO: 5923240 - DNA, 25 bp, Homo sapien
ttccgatccgccgatagtcggcgtc

SEQ ID NO: 5923241 - DNA, 25 bp, Homo sapien
ggaagccgcgtcgtaagagtgccac

SEQ ID NO: 5923242 - DNA, 25 bp, Homo sapien
ctgccaaacgtcccgcgtattgccc

SEQ ID NO: 5923243 - DNA, 25 bp, Homo sapien
gcctgcccgtagaacgacgttggag

SEQ ID NO: 5923244 - DNA, 25 bp, Homo sapien
tcgggagaacgcgcgtacgcctcat

SEQ ID NO: 5923245 - DNA, 25 bp, Homo sapien
gcccgagcctacgcgaacttcagtc

SEQ ID NO: 5923246 - DNA, 25 bp, Homo sapien
ccgttgatcggcccgcgttatgtcc

SEQ ID NO: 5923247 - DNA, 25 bp, Homo sapien
cttgcgcgctagtacgacgcgaggt

SEQ ID NO: 5923248 - DNA, 25 bp, Homo sapien
acccttcgcacgacgcgatccttgg

SEQ ID NO: 5923249 - DNA, 25 bp, Homo sapien
gaccgcccggtatatcgcgctaggt

SEQ ID NO: 5923250 - DNA, 25 bp, Homo sapien
acggcttccgcgcgatgatgagtcc

SEQ ID NO: 5923251 - DNA, 25 bp, Homo sapien
ctgttcgctcgacgtacgagcgtgg

SEQ ID NO: 5923252 - DNA, 25 bp, Homo sapien
cggggctgcgagaccgtcgttagat

SEQ ID NO: 5923253 - DNA, 25 bp, Homo sapien
ctcacggttcgtatggcgcctagcg

SEQ ID NO: 5923254 - DNA, 25 bp, Homo sapien
cataccacggtatccgccgccctac

SEQ ID NO: 5923255 - DNA, 25 bp, Homo sapien
gttagcgggcgcgtaatgtgcggac

SEQ ID NO: 5923256 - DNA, 25 bp, Homo sapien
gggtatatcagcgtagcgcggcgtg

SEQ ID NO: 5923257 - DNA, 25 bp, Homo sapien
cgggacttaccctacggcgcatctg

SEQ ID NO: 5923258 - DNA, 25 bp, Homo sapien
caccagcaacgtcgcgttacgagcc

SEQ ID NO: 5923259 - DNA, 25 bp, Homo sapien
agctcctacccgtcgcggaggatgt

SEQ ID NO: 5923260 - DNA, 25 bp, Homo sapien
gcacggtccgcggtcgtaactgtac

SEQ ID NO: 5923261 - DNA, 25 bp, Homo sapien
tcggcgtacgtcgcgacgaggatgt

SEQ ID NO: 5923262 - DNA, 25 bp, Homo sapien
gcagctcggcgtatcacgcgatgtg

SEQ ID NO: 5923263 - DNA, 25 bp, Homo sapien
gggacctatagtcgcgcggtacgac

SEQ ID NO: 5923264 - DNA, 25 bp, Homo sapien
cggccatacgacgtccgccatacag

SEQ ID NO: 5923265 - DNA, 25 bp, Homo sapien
attcccgtgcgcgaccgatgtgtgg

SEQ ID NO: 5923266 - DNA, 25 bp, Homo sapien
gaaggctcatgcgacgagcggatcg

SEQ ID NO: 5923267 - DNA, 25 bp, Homo sapien
tcaggatataggggtcgcgggtccg

SEQ ID NO: 5923268 - DNA, 25 bp, Homo sapien
accggcttcggccgttacggttgca

SEQ ID NO: 5923269 - DNA, 25 bp, Homo sapien
cgactcatagatgcgcgacccggca

SEQ ID NO: 5923270 - DNA, 25 bp, Homo sapien
ggacaacgctacccgtacgagcctg

SEQ ID NO: 5923271 - DNA, 25 bp, Homo sapien
acccagccgtacgttcgaacgcctc

SEQ ID NO: 5923272 - DNA, 25 bp, Homo sapien
ccacactcgtacctcgcgaggtgca

SEQ ID NO: 5923273 - DNA, 25 bp, Homo sapien
gtgaccatatacgacgcggccaccg

SEQ ID NO: 5923274 - DNA, 25 bp, Homo sapien
atccgggcgacgctcgtacttaggg

SEQ ID NO: 5923275 - DNA, 25 bp, Homo sapien
tgtacgatccaacgcgcgtcacggc

SEQ ID NO: 5923276 - DNA, 25 bp, Homo sapien
tctgtcatgcggcgtcgaagcggac

SEQ ID NO: 5923277 - DNA, 25 bp, Homo sapien
gggggtcggacccgatctagagaag

SEQ ID NO: 5923278 - DNA, 25 bp, Homo sapien
aggccccgatcacgctcgacttcca

SEQ ID NO: 5923279 - DNA, 25 bp, Homo sapien
caggccgacgagtagtacggtagcg

SEQ ID NO: 5923280 - DNA, 25 bp, Homo sapien
gaaggtgggcgcgtaacgtggatcc

SEQ ID NO: 5923281 - DNA, 25 bp, Homo sapien
cccagcgtctacgagtgcgggctat

SEQ ID NO: 5923282 - DNA, 25 bp, Homo sapien
acgcctcgcggtcgacgaaggcaaa

SEQ ID NO: 5923283 - DNA, 25 bp, Homo sapien
cgggtaaatcggccggtagcaggtc

SEQ ID NO: 5923284 - DNA, 25 bp, Homo sapien
cgcaagtaccggacgactgcacgac

SEQ ID NO: 5923285 - DNA, 25 bp, Homo sapien
cgaagcggcgtatcgtcgactcgtc

SEQ ID NO: 5923286 - DNA, 25 bp, Homo sapien
ccagctggacgtaagcgcggactga

SEQ ID NO: 5923287 - DNA, 25 bp, Homo sapien
ccaccactagcaacgaccgtcgctc

SEQ ID NO: 5923288 - DNA, 25 bp, Homo sapien
cctggtcgtctaaggtccggaggct

SEQ ID NO: 5923289 - DNA, 25 bp, Homo sapien
agcccggcgtcgaaccttgcgactt

SEQ ID NO: 5923290 - DNA, 25 bp, Homo sapien
ttcgtccgaccgctactgagccctc

SEQ ID NO: 5923291 - DNA, 25 bp, Homo sapien
gcacggacaaccgcgtacggcagta

SEQ ID NO: 5923292 - DNA, 25 bp, Homo sapien
gcgtacgcgtagcgctcgattgtcg

SEQ ID NO: 5923293 - DNA, 25 bp, Homo sapien
ccactcgtaaccgctagcgctcctc

SEQ ID NO: 5923294 - DNA, 25 bp, Homo sapien
caactccggacgcgtgtactcgacg

SEQ ID NO: 5923295 - DNA, 25 bp, Homo sapien
atgtcccgatgcgccctagacctgc

SEQ ID NO: 5923296 - DNA, 25 bp, Homo sapien
gcgaccccttcgcgtatcgacagct

SEQ ID NO: 5923297 - DNA, 25 bp, Homo sapien
ggcggggtactcgatagcggttctg

SEQ ID NO: 5923298 - DNA, 25 bp, Homo sapien
acctcccccaagtcgcgtatgctgc

SEQ ID NO: 5923299 - DNA, 25 bp, Homo sapien
cgagggcgttaccgcgagtgaactc

SEQ ID NO: 5923300 - DNA, 25 bp, Homo sapien
gccttctgcgtaatcggcgaggacg

SEQ ID NO: 5923301 - DNA, 25 bp, Homo sapien
agggcacgatcgtaacggcgcagga

SEQ ID NO: 5923302 - DNA, 25 bp, Homo sapien
gatgcttgcgcgacggttacgccgt

SEQ ID NO: 5923303 - DNA, 25 bp, Homo sapien
gcgtaggggtacgcgcttagccagt

SEQ ID NO: 5923304 - DNA, 25 bp, Homo sapien
cggtaaggtaccacgtcgcgcctag

SEQ ID NO: 5923305 - DNA, 25 bp, Homo sapien
actcgcgtaccgccagacgctcaca

SEQ ID NO: 5923306 - DNA, 25 bp, Homo sapien
agcgagttcgacccgatcgcgcgtt

SEQ ID NO: 5923307 - DNA, 25 bp, Homo sapien
agacctgcgatcgcgctaacgggtg

SEQ ID NO: 5923308 - DNA, 25 bp, Homo sapien
tcgcgccgtcgtacggttcgcatga

SEQ ID NO: 5923309 - DNA, 25 bp, Homo sapien
cgctcagcgtatagcgtcctggcga

SEQ ID NO: 5923310 - DNA, 25 bp, Homo sapien
gacagaccgctacggatcggcgtct

SEQ ID NO: 5923311 - DNA, 25 bp, Homo sapien
cacgcttcgatacgcggacccacca

SEQ ID NO: 5923312 - DNA, 25 bp, Homo sapien
gctcaccgctcgttagacggagcga

SEQ ID NO: 5923313 - DNA, 25 bp, Homo sapien
cgtagcctagtccgacgctgcgact

SEQ ID NO: 5923314 - DNA, 25 bp, Homo sapien
gatcgggccgtactgtcgacacggt

SEQ ID NO: 5923315 - DNA, 25 bp, Homo sapien
gaagatcccgacgttagcgaggcgg

SEQ ID NO: 5923316 - DNA, 25 bp, Homo sapien
aagcggggctcgacgtaaccctgag

SEQ ID NO: 5923317 - DNA, 25 bp, Homo sapien
ctcggacccagtcgcgtatcgaggt

SEQ ID NO: 5923318 - DNA, 25 bp, Homo sapien
cttgccccgcggtcgtaaacgcaga

SEQ ID NO: 5923319 - DNA, 25 bp, Homo sapien
tgcgctgcgctacggacctcgattc

SEQ ID NO: 5923320 - DNA, 25 bp, Homo sapien
aggccgtacgacgggactacgcgaa

SEQ ID NO: 5923321 - DNA, 25 bp, Homo sapien
ttctgggactacccgtcgccgcagt

SEQ ID NO: 5923322 - DNA, 25 bp, Homo sapien
acgtcgatgcgaccggtgttggacg

SEQ ID NO: 5923323 - DNA, 25 bp, Homo sapien
tcaccaacgtacgctgccgtcggtc

SEQ ID NO: 5923324 - DNA, 25 bp, Homo sapien
gtcgcgccctacgcgcgaaagaagt

SEQ ID NO: 5923325 - DNA, 25 bp, Homo sapien
acaggcagcgcgatgatcgcgccaa

SEQ ID NO: 5923326 - DNA, 25 bp, Homo sapien
tggccaaacggtaggtcgcccggta

SEQ ID NO: 5923327 - DNA, 25 bp, Homo sapien
gcccacttacgccgcgaaggtgttg

SEQ ID NO: 5923328 - DNA, 25 bp, Homo sapien
cccgtgaacggtcggcatagcagag

SEQ ID NO: 5923329 - DNA, 25 bp, Homo sapien
gcgatcgccgcgcgataatcctcag

SEQ ID NO: 5923330 - DNA, 25 bp, Homo sapien
cccatgggcgcgttaggcattggct

SEQ ID NO: 5923331 - DNA, 25 bp, Homo sapien
acgacagcgtacgtcccgtcgtcgt

SEQ ID NO: 5923332 - DNA, 25 bp, Homo sapien
aaccgtgtgtcgcgacagtaggccg

SEQ ID NO: 5923333 - DNA, 25 bp, Homo sapien
cgacgggtgtattcgcgacccggta

SEQ ID NO: 5923334 - DNA, 25 bp, Homo sapien
cccttccggtccgggatatgaggtc

SEQ ID NO: 5923335 - DNA, 25 bp, Homo sapien
acggcagcgtggtacgtcggtggat

SEQ ID NO: 5923336 - DNA, 25 bp, Homo sapien
cggccatgcgtcgatcgtatccgct

SEQ ID NO: 5923337 - DNA, 25 bp, Homo sapien
ctagagcgcgccttacgacgcagac

SEQ ID NO: 5923338 - DNA, 25 bp, Homo sapien
cgacattaacgcgcgccgtaccgct

SEQ ID NO: 5923339 - DNA, 25 bp, Homo sapien
catgagtactcgcggacgaaccccc

SEQ ID NO: 5923340 - DNA, 25 bp, Homo sapien
ccctcctatcgcgagggtaggactg

SEQ ID NO: 5923341 - DNA, 25 bp, Homo sapien
cttaccagcgcgactagtaggcccc

SEQ ID NO: 5923342 - DNA, 25 bp, Homo sapien
gccgtgggttacgtcgcggccaaat

SEQ ID NO: 5923343 - DNA, 25 bp, Homo sapien
ctccacgctatcgacgcgtggcact

SEQ ID NO: 5923344 - DNA, 25 bp, Homo sapien
ggcagaacggggcgatactgcgtag

SEQ ID NO: 5923345 - DNA, 25 bp, Homo sapien
gttagtgtcatagcgcgaccggggc

SEQ ID NO: 5923346 - DNA, 25 bp, Homo sapien
ggtcgtgtacctatcgccgcctagc

SEQ ID NO: 5923347 - DNA, 25 bp, Homo sapien
gccgcctacgtcgcgtatcacacag

SEQ ID NO: 5923348 - DNA, 25 bp, Homo sapien
tcccaatgcggcgtacgagtagcgc

SEQ ID NO: 5923349 - DNA, 25 bp, Homo sapien
gaagcctcgtatccgcgaggtctcc

SEQ ID NO: 5923350 - DNA, 25 bp, Homo sapien
gtcctcgaccgcgtcggatctgaga

SEQ ID NO: 5923351 - DNA, 25 bp, Homo sapien
catcgatcgacataccgcccccggt

SEQ ID NO: 5923352 - DNA, 25 bp, Homo sapien
gcccgtcgttgcggtgtacgatcga

SEQ ID NO: 5923353 - DNA, 25 bp, Homo sapien
cgtggactagccgtttgcggcgttc

SEQ ID NO: 5923354 - DNA, 25 bp, Homo sapien
aggatgacggtacgcgagagcggct

SEQ ID NO: 5923355 - DNA, 25 bp, Homo sapien
acggaaaggtacgccgcgaacgcca

SEQ ID NO: 5923356 - DNA, 25 bp, Homo sapien
ttgatgtcggcgcggtatggcaccg

SEQ ID NO: 5923357 - DNA, 25 bp, Homo sapien
tgctggaagacgattcgcgggaccg

SEQ ID NO: 5923358 - DNA, 25 bp, Homo sapien
acgggaacggcgcgactaggtctca

SEQ ID NO: 5923359 - DNA, 25 bp, Homo sapien
acaggctatgcgctacgggagggag

SEQ ID NO: 5923360 - DNA, 25 bp, Homo sapien
gctgaaacgtaggggtcgtgtccgc

SEQ ID NO: 5923361 - DNA, 25 bp, Homo sapien
tgtccgggcgcgtcaatcgactgtc

SEQ ID NO: 5923362 - DNA, 25 bp, Homo sapien
tggccgcgatacgtcaccgggcaat

SEQ ID NO: 5923363 - DNA, 25 bp, Homo sapien
ctggcccgtgccggtatgcgatatg

SEQ ID NO: 5923364 - DNA, 25 bp, Homo sapien
ccggttcgtttatcggacgcgagcg

SEQ ID NO: 5923365 - DNA, 25 bp, Homo sapien
tgggcgctatcggctcgtaacggga

SEQ ID NO: 5923366 - DNA, 25 bp, Homo sapien
cactgcgtctaaccgcccgagaacg

SEQ ID NO: 5923367 - DNA, 25 bp, Homo sapien
cggacgtaggtcgatcgtactcgcg

SEQ ID NO: 5923368 - DNA, 25 bp, Homo sapien
caccgtcgtccactatcgcggtagc

SEQ ID NO: 5923369 - DNA, 25 bp, Homo sapien
gcgactcgcgtctacgtacacccgt

SEQ ID NO: 5923370 - DNA, 25 bp, Homo sapien
gtccttttgacgaccgcggacgcga

SEQ ID NO: 5923371 - DNA, 25 bp, Homo sapien
cagcattaccgggacgtacggtggg

SEQ ID NO: 5923372 - DNA, 25 bp, Homo sapien
tcgtgcactatacgcgtcggaggcc

SEQ ID NO: 5923373 - DNA, 25 bp, Homo sapien
gatggccgcgcggagttaaactcgg

SEQ ID NO: 5923374 - DNA, 25 bp, Homo sapien
cccacgcgcgggtacaacgttctac

SEQ ID NO: 5923375 - DNA, 25 bp, Homo sapien
cctatcacgcgtgcgatacggggtg

SEQ ID NO: 5923376 - DNA, 25 bp, Homo sapien
tggatccgtacgcgacggggcttac

SEQ ID NO: 5923377 - DNA, 25 bp, Homo sapien
gcacctacgataccgcgtgacggga

SEQ ID NO: 5923378 - DNA, 25 bp, Homo sapien
gcggaccgcgagataggtcttcgtc

SEQ ID NO: 5923379 - DNA, 25 bp, Homo sapien
cgttgcctctagcgcgcgagatgtg

SEQ ID NO: 5923380 - DNA, 25 bp, Homo sapien
cttagaacaccgcgtacgggccgca

SEQ ID NO: 5923381 - DNA, 25 bp, Homo sapien
gtcgccctctacgggcgtaagtcct

SEQ ID NO: 5923382 - DNA, 25 bp, Homo sapien
cgggaacatacggtcgaccgcaagc

SEQ ID NO: 5923383 - DNA, 25 bp, Homo sapien
gcgcagacgaatcggtccgagcaag

SEQ ID NO: 5923384 - DNA, 25 bp, Homo sapien
tgctggatcggacgtcacgcccgta

SEQ ID NO: 5923385 - DNA, 25 bp, Homo sapien
aggaagcgaccgcgaagtacagggc

SEQ ID NO: 5923386 - DNA, 25 bp, Homo sapien
ggaactcgtcgcgtagactggcacc

SEQ ID NO: 5923387 - DNA, 25 bp, Homo sapien
gcccttgccgcgcgttagtttccca

SEQ ID NO: 5923388 - DNA, 25 bp, Homo sapien
tctgcacgctacgacggacgaacgc

SEQ ID NO: 5923389 - DNA, 25 bp, Homo sapien
acgtcgccccgccttacgaagctac

SEQ ID NO: 5923390 - DNA, 25 bp, Homo sapien
cggttcacctgtcgtatcgggggac

SEQ ID NO: 5923391 - DNA, 25 bp, Homo sapien
gtggtccgcggacgatctaggagtg

SEQ ID NO: 5923392 - DNA, 25 bp, Homo sapien
gcggattaagcggccgaactctcgc

SEQ ID NO: 5923393 - DNA, 25 bp, Homo sapien
gtccactcgcgttaaggccggcaag

SEQ ID NO: 5923394 - DNA, 25 bp, Homo sapien
cgccggctagtcgtgcggaagaatg

SEQ ID NO: 5923395 - DNA, 25 bp, Homo sapien
cgttcccaataccgagcgctcgggt

SEQ ID NO: 5923396 - DNA, 25 bp, Homo sapien
gaagatccgtatgtcgcgccgggag

SEQ ID NO: 5923397 - DNA, 25 bp, Homo sapien
ccgccacgcgacctggttatggtga

SEQ ID NO: 5923398 - DNA, 25 bp, Homo sapien
agccggcgtgacgcgctaagtgtga

SEQ ID NO: 5923399 - DNA, 25 bp, Homo sapien
actaggcgtacgttcgatggggccg

SEQ ID NO: 5923400 - DNA, 25 bp, Homo sapien
accccggccggtagcgtatagagtc

SEQ ID NO: 5923401 - DNA, 25 bp, Homo sapien
gtgccattacgcccgctagtcaccc

SEQ ID NO: 5923402 - DNA, 25 bp, Homo sapien
taagtcgtacgaccgccgtggcagg

SEQ ID NO: 5923403 - DNA, 25 bp, Homo sapien
cacagccggctagttacggtagggg

SEQ ID NO: 5923404 - DNA, 25 bp, Homo sapien
tgcggcaacgttccggaccctagca

SEQ ID NO: 5923405 - DNA, 25 bp, Homo sapien
catgagttggcgcgacgtacagccc

SEQ ID NO: 5923406 - DNA, 25 bp, Homo sapien
cagtcacgagcgtacttcgggccga

SEQ ID NO: 5923407 - DNA, 25 bp, Homo sapien
actggtcgacgcgcgtagaagtgcg

SEQ ID NO: 5923408 - DNA, 25 bp, Homo sapien
cccgtgttcgtacgtcgagccgtca

SEQ ID NO: 5923409 - DNA, 25 bp, Homo sapien
atcctcgttagcgcgtagacgggcc

SEQ ID NO: 5923410 - DNA, 25 bp, Homo sapien
cttgtgaccgtacgacgcaccgcag

SEQ ID NO: 5923411 - DNA, 25 bp, Homo sapien
caccctacgcaacgacgggtggaga

SEQ ID NO: 5923412 - DNA, 25 bp, Homo sapien
gacccgatacgtcgggtccaagacg

SEQ ID NO: 5923413 - DNA, 25 bp, Homo sapien
cctacccggttaaacgcgcatggcc

SEQ ID NO: 5923414 - DNA, 25 bp, Homo sapien
cggtactcgcgataccgctcgacca

SEQ ID NO: 5923415 - DNA, 25 bp, Homo sapien
agagcagtaccgctaccggatccgg

SEQ ID NO: 5923416 - DNA, 25 bp, Homo sapien
gagcgacgtatacggtcggtgctgc

SEQ ID NO: 5923417 - DNA, 25 bp, Homo sapien
cgagcattcgacgcgaccctgtgac

SEQ ID NO: 5923418 - DNA, 25 bp, Homo sapien
gtgcccccgcggttactcgctgatt

SEQ ID NO: 5923419 - DNA, 25 bp, Homo sapien
tactgccaacgctacgcggacgagg

SEQ ID NO: 5923420 - DNA, 25 bp, Homo sapien
gggtgtcgactaacgcgcttggcca

SEQ ID NO: 5923421 - DNA, 25 bp, Homo sapien
gacacccgtaagtcgtcggagtgcg

SEQ ID NO: 5923422 - DNA, 25 bp, Homo sapien
gactggcttatgcgcggtatgccgc

SEQ ID NO: 5923423 - DNA, 25 bp, Homo sapien
agcagacggattacgctcgcgtggg

SEQ ID NO: 5923424 - DNA, 25 bp, Homo sapien
tcccttctacggtgcgcgagcaggt

SEQ ID NO: 5923425 - DNA, 25 bp, Homo sapien
tcctttcgtgccgtgaacgccccgt

SEQ ID NO: 5923426 - DNA, 25 bp, Homo sapien
gggactcgcgagtcggaacgaatcc

SEQ ID NO: 5923427 - DNA, 25 bp, Homo sapien
tcggaacgcgctacgctgtggatgg

SEQ ID NO: 5923428 - DNA, 25 bp, Homo sapien
cgcccggcgcaactacgtaactacc

SEQ ID NO: 5923429 - DNA, 25 bp, Homo sapien
gcactttatcggacggcggtcgtgc

SEQ ID NO: 5923430 - DNA, 25 bp, Homo sapien
tggcccatgcggagcgctacagcat

SEQ ID NO: 5923431 - DNA, 25 bp, Homo sapien
tgcaagtaacgcgacacccggccct

SEQ ID NO: 5923432 - DNA, 25 bp, Homo sapien
agcaccggacgtaccgatcacgtgc

SEQ ID NO: 5923433 - DNA, 25 bp, Homo sapien
ttaccgtcgtacgagacccgctcgg

SEQ ID NO: 5923434 - DNA, 25 bp, Homo sapien
ccaaccattcgcgtccgatgccctc

SEQ ID NO: 5923435 - DNA, 25 bp, Homo sapien
tcctcgagcgcgcgccatagatgac

SEQ ID NO: 5923436 - DNA, 25 bp, Homo sapien
tgtagtacgtccgcccgatctcccg

SEQ ID NO: 5923437 - DNA, 25 bp, Homo sapien
gagctttagcgcgtacgcgccaggt

SEQ ID NO: 5923438 - DNA, 25 bp, Homo sapien
aaggcctacccgtcgcgtggaatcg

SEQ ID NO: 5923439 - DNA, 25 bp, Homo sapien
gcgggcttagaccgctacgattccg

SEQ ID NO: 5923440 - DNA, 25 bp, Homo sapien
gtatcgcaaccgcgccgtaacgtgc

SEQ ID NO: 5923441 - DNA, 25 bp, Homo sapien
cagagctcgctacggcacggtctct

SEQ ID NO: 5923442 - DNA, 25 bp, Homo sapien
tctgcctacggccggcttatgccga

SEQ ID NO: 5923443 - DNA, 25 bp, Homo sapien
gcccttagatcgacgcgcggtgaga

SEQ ID NO: 5923444 - DNA, 25 bp, Homo sapien
cccaactcgcgtcgtagtggtggtg

SEQ ID NO: 5923445 - DNA, 25 bp, Homo sapien
gttcactcgtacccgtcgacccgac

SEQ ID NO: 5923446 - DNA, 25 bp, Homo sapien
ccggtgaacgctatcggacccactc

SEQ ID NO: 5923447 - DNA, 25 bp, Homo sapien
gcctaacgaccggtatggcgatgcg

SEQ ID NO: 5923448 - DNA, 25 bp, Homo sapien
accgccgcgctatcgaacctctctc

SEQ ID NO: 5923449 - DNA, 25 bp, Homo sapien
tggaaggtgcgatacgggtccagcg

SEQ ID NO: 5923450 - DNA, 25 bp, Homo sapien
acgcactcgacggttcgcggcaaca

SEQ ID NO: 5923451 - DNA, 25 bp, Homo sapien
catacgcgtcctcgctacggcctga

SEQ ID NO: 5923452 - DNA, 25 bp, Homo sapien
cgtcacgtgacgcaaccgaccctgt

SEQ ID NO: 5923453 - DNA, 25 bp, Homo sapien
tagccgaagtacgcgtcggcgtacc

SEQ ID NO: 5923454 - DNA, 25 bp, Homo sapien
cgtttccgcgtcatggcgagatgcg

SEQ ID NO: 5923455 - DNA, 25 bp, Homo sapien
gacgcgacgcgcgcagtatacggaa

SEQ ID NO: 5923456 - DNA, 25 bp, Homo sapien
ccttgccgtatgcgcgttcccagga

SEQ ID NO: 5923457 - DNA, 25 bp, Homo sapien
tgctgtgcgcgttataccgcccggt

SEQ ID NO: 5923458 - DNA, 25 bp, Homo sapien
tatgaccgatacgctcgggccgacc

SEQ ID NO: 5923459 - DNA, 25 bp, Homo sapien
ccaacgagttacgggccgctctgga

SEQ ID NO: 5923460 - DNA, 25 bp, Homo sapien
agatcctgcgttacgcggcgtcgtg

SEQ ID NO: 5923461 - DNA, 25 bp, Homo sapien
ccttagccgtacgatgcgtgcgtcc

SEQ ID NO: 5923462 - DNA, 25 bp, Homo sapien
ccatgcgtaccgtgcgacgatgtgc

SEQ ID NO: 5923463 - DNA, 25 bp, Homo sapien
cgagcgagcgtaccgactatgccca

SEQ ID NO: 5923464 - DNA, 25 bp, Homo sapien
ggtcaccgtaagtgcgcgacctcag

SEQ ID NO: 5923465 - DNA, 25 bp, Homo sapien
ctgcgtcgacgcacggataccaacg

SEQ ID NO: 5923466 - DNA, 25 bp, Homo sapien
gagactaataggcggacgccgcgac

SEQ ID NO: 5923467 - DNA, 25 bp, Homo sapien
gcgcgtcttcgacggtacgtccctt

SEQ ID NO: 5923468 - DNA, 25 bp, Homo sapien
atctgcctaccttgcgcgaagggcc

SEQ ID NO: 5923469 - DNA, 25 bp, Homo sapien
acgccgactacgggtccgagatacc

SEQ ID NO: 5923470 - DNA, 25 bp, Homo sapien
caatggcgtaaagtcgcgggggcgt

SEQ ID NO: 5923471 - DNA, 25 bp, Homo sapien
tgagcgatacgtcgtgcggtccggt

SEQ ID NO: 5923472 - DNA, 25 bp, Homo sapien
ccgacggtcgcgataacctgcaggt

SEQ ID NO: 5923473 - DNA, 25 bp, Homo sapien
ggcaggcggtctcgtaacctgccaa

SEQ ID NO: 5923474 - DNA, 25 bp, Homo sapien
tcatgctaccgcggcacgcacatgg

SEQ ID NO: 5923475 - DNA, 25 bp, Homo sapien
gcagacacgggatacgtcccgtcct

SEQ ID NO: 5923476 - DNA, 25 bp, Homo sapien
cggtcacgcgaaccgtatccgttgc

SEQ ID NO: 5923477 - DNA, 25 bp, Homo sapien
gggacctacggcatcggtcataccc

SEQ ID NO: 5923478 - DNA, 25 bp, Homo sapien
cgccgatcgcgaggttatgctgtgc

SEQ ID NO: 5923479 - DNA, 25 bp, Homo sapien
cgggtcgcgcgatataactgcccac

SEQ ID NO: 5923480 - DNA, 25 bp, Homo sapien
tgtgggtcgccgaacgctaggacct

SEQ ID NO: 5923481 - DNA, 25 bp, Homo sapien
agcacccggctaatcgtcggaccga

SEQ ID NO: 5923482 - DNA, 25 bp, Homo sapien
tcgagctgtccgacgtagcggtgtg

SEQ ID NO: 5923483 - DNA, 25 bp, Homo sapien
tccgacacgcgagataccggtcggt

SEQ ID NO: 5923484 - DNA, 25 bp, Homo sapien
gactcgctacgtcgcgcgtgttctc

SEQ ID NO: 5923485 - DNA, 25 bp, Homo sapien
gcaagtttacgcgaccggctgccgt

SEQ ID NO: 5923486 - DNA, 25 bp, Homo sapien
ctggtcagcgcgcgatctatgggtc

SEQ ID NO: 5923487 - DNA, 25 bp, Homo sapien
ctccagaccgttagcgcgctctggt

SEQ ID NO: 5923488 - DNA, 25 bp, Homo sapien
aaccctcatatcgcgccgtagcgcc

SEQ ID NO: 5923489 - DNA, 25 bp, Homo sapien
cccacaccgcgtcgaaccaatgctc

SEQ ID NO: 5923490 - DNA, 25 bp, Homo sapien
ctgagccgcgacggtccaatactgc

SEQ ID NO: 5923491 - DNA, 25 bp, Homo sapien
atctgggcgtagcgcggtaaacgcc

SEQ ID NO: 5923492 - DNA, 25 bp, Homo sapien
ccaaccacgtcgggcgatagcttgg

SEQ ID NO: 5923493 - DNA, 25 bp, Homo sapien
gcaaagcgcgcacggtagtagtgcg

SEQ ID NO: 5923494 - DNA, 25 bp, Homo sapien
gcggatcccggtactacgtctagcc

SEQ ID NO: 5923495 - DNA, 25 bp, Homo sapien
acggtgcccgcgatcgttggggata

SEQ ID NO: 5923496 - DNA, 25 bp, Homo sapien
tgcgtggtcgcgtacgaggtgggta

SEQ ID NO: 5923497 - DNA, 25 bp, Homo sapien
tcgcttcgtacgtccggacttccgg

SEQ ID NO: 5923498 - DNA, 25 bp, Homo sapien
gagggggttcgcccgggtaatgcta

SEQ ID NO: 5923499 - DNA, 25 bp, Homo sapien
atcgcgcgacggtcgtcatagccca

SEQ ID NO: 5923500 - DNA, 25 bp, Homo sapien
gccagacgtaccgaagcggcttggt

SEQ ID NO: 5923501 - DNA, 25 bp, Homo sapien
gcaggttagacgcgcggtagatccg

SEQ ID NO: 5923502 - DNA, 25 bp, Homo sapien
gatggatacgttcggccgtgcgctg

SEQ ID NO: 5923503 - DNA, 25 bp, Homo sapien
cggctttagtcgcggtacgcgtgac

SEQ ID NO: 5923504 - DNA, 25 bp, Homo sapien
cctcctcggccggtgtacggaaatg

SEQ ID NO: 5923505 - DNA, 25 bp, Homo sapien
caggtgtgtaacgtcgcgaccagcc

SEQ ID NO: 5923506 - DNA, 25 bp, Homo sapien
ggcgtaccgacacgcgaagcctgaa

SEQ ID NO: 5923507 - DNA, 25 bp, Homo sapien
gccaggcgcggtcgtaacggtgttt

SEQ ID NO: 5923508 - DNA, 25 bp, Homo sapien
gagcccgcgttcgtcggtagttacg

SEQ ID NO: 5923509 - DNA, 25 bp, Homo sapien
acacgagtaagtccggtcggccacc

SEQ ID NO: 5923510 - DNA, 25 bp, Homo sapien
ccggaagatagtcggctcggctcag

SEQ ID NO: 5923511 - DNA, 25 bp, Homo sapien
ggggcggtccgcttaacgccaagaa

SEQ ID NO: 5923512 - DNA, 25 bp, Homo sapien
tggtgcgcgtcctcgaataccagcc

SEQ ID NO: 5923513 - DNA, 25 bp, Homo sapien
ggagtagtcgtacgactggccaggg

SEQ ID NO: 5923514 - DNA, 25 bp, Homo sapien
tggccggttcgcgcgaatgcagtgt

SEQ ID NO: 5923515 - DNA, 25 bp, Homo sapien
aaagccccgcgacgctaagcgcgaa

SEQ ID NO: 5923516 - DNA, 25 bp, Homo sapien
acttcctgtcgcgcggattctgggc

SEQ ID NO: 5923517 - DNA, 25 bp, Homo sapien
agcgtggacgtcgcgtaaatccgcg

SEQ ID NO: 5923518 - DNA, 25 bp, Homo sapien
gcacgggcgacgaacgctataagcg

SEQ ID NO: 5923519 - DNA, 25 bp, Homo sapien
ccctggcgcggtatagtcggaacac

SEQ ID NO: 5923520 - DNA, 25 bp, Homo sapien
cgataggcccgactatacggggtcc

SEQ ID NO: 5923521 - DNA, 25 bp, Homo sapien
tcatcgggcgcccgatcatcacgtg

SEQ ID NO: 5923522 - DNA, 25 bp, Homo sapien
aggggcacggcgtgacgattgctag

SEQ ID NO: 5923523 - DNA, 25 bp, Homo sapien
cgctaccttagttcgtccgtcgccg

SEQ ID NO: 5923524 - DNA, 25 bp, Homo sapien
gcagcctcgttacgtcccgcctctt

SEQ ID NO: 5923525 - DNA, 25 bp, Homo sapien
tgctcctgacgcggcataccaagcc

SEQ ID NO: 5923526 - DNA, 25 bp, Homo sapien
cgatgatagtcgcgagcgtcacggg

SEQ ID NO: 5923527 - DNA, 25 bp, Homo sapien
ggggcaccgatcttaggcgctcgat

SEQ ID NO: 5923528 - DNA, 25 bp, Homo sapien
aggacgcgaccagtagcgcaggctt

SEQ ID NO: 5923529 - DNA, 25 bp, Homo sapien
agtctacggttacgtcgggcgcacg

SEQ ID NO: 5923530 - DNA, 25 bp, Homo sapien
tgagcggcggacgtcgttaatgccc

SEQ ID NO: 5923531 - DNA, 25 bp, Homo sapien
accagcgcgcgtaacacgatcgtcc

SEQ ID NO: 5923532 - DNA, 25 bp, Homo sapien
cagacccgtaacagcgatacgcgcc

SEQ ID NO: 5923533 - DNA, 25 bp, Homo sapien
tgcgtaccgttgtcgaccggagtgc

SEQ ID NO: 5923534 - DNA, 25 bp, Homo sapien
cgttagccagtccgtatcgtgccgg

SEQ ID NO: 5923535 - DNA, 25 bp, Homo sapien
gggagacgcgcgttacgtccatgct

SEQ ID NO: 5923536 - DNA, 25 bp, Homo sapien
ggagaatacgcaccgaccgggcgaa

SEQ ID NO: 5923537 - DNA, 25 bp, Homo sapien
cgacctgccgttaaccgcgatccgt

SEQ ID NO: 5923538 - DNA, 25 bp, Homo sapien
ccctggccgcgttccgtaatcgaga

SEQ ID NO: 5923539 - DNA, 25 bp, Homo sapien
tccccatcgcgctaggcccagaatc

SEQ ID NO: 5923540 - DNA, 25 bp, Homo sapien
tggcggacgacgcaccctatcatgc

SEQ ID NO: 5923541 - DNA, 25 bp, Homo sapien
gagagctacgccgcacgatacaggc

SEQ ID NO: 5923542 - DNA, 25 bp, Homo sapien
cggcaatcgtcgcgttaggccttcg

SEQ ID NO: 5923543 - DNA, 25 bp, Homo sapien
gccagtcgccgcaatgtagcggtac

SEQ ID NO: 5923544 - DNA, 25 bp, Homo sapien
gctagggtcgtaccggtacgtggtg

SEQ ID NO: 5923545 - DNA, 25 bp, Homo sapien
cggcaatacgtcgggacgtgcctga

SEQ ID NO: 5923546 - DNA, 25 bp, Homo sapien
aagcgcagcggtcgcactaacctcc

SEQ ID NO: 5923547 - DNA, 25 bp, Homo sapien
cctgaaccgatagtccgaacgcccc

SEQ ID NO: 5923548 - DNA, 25 bp, Homo sapien
taggctgcgccgatctagtcagcgg

SEQ ID NO: 5923549 - DNA, 25 bp, Homo sapien
cactagcgcgcgagcataggcttgc

SEQ ID NO: 5923550 - DNA, 25 bp, Homo sapien
gagtagccgtcgcgcctaaggtcct

SEQ ID NO: 5923551 - DNA, 25 bp, Homo sapien
ccaagcacgttcgcgtagacctgcg

SEQ ID NO: 5923552 - DNA, 25 bp, Homo sapien
gctgccgatcgcgcataaccctcga

SEQ ID NO: 5923553 - DNA, 25 bp, Homo sapien
caccgacgttagcgagccacgtgtg

SEQ ID NO: 5923554 - DNA, 25 bp, Homo sapien
ggatctccgtagatacgcgccaccc

SEQ ID NO: 5923555 - DNA, 25 bp, Homo sapien
tgtgcccactcatcgcgcgtaccac

SEQ ID NO: 5923556 - DNA, 25 bp, Homo sapien
gctacgtgattcggtcgcgccagca

SEQ ID NO: 5923557 - DNA, 25 bp, Homo sapien
gcgccacgctaccgaagcgcaatct

SEQ ID NO: 5923558 - DNA, 25 bp, Homo sapien
gctacaaccgttgcgacgagtcggg

SEQ ID NO: 5923559 - DNA, 25 bp, Homo sapien
tgtccttcgcgctcgactaccggga

SEQ ID NO: 5923560 - DNA, 25 bp, Homo sapien
gacccgcgcgtagtcgtgatgctag

SEQ ID NO: 5923561 - DNA, 25 bp, Homo sapien
taaccccggtacaacgcgtgctggg

SEQ ID NO: 5923562 - DNA, 25 bp, Homo sapien
tgtccgcgtaccgtgcgtctaggga

SEQ ID NO: 5923563 - DNA, 25 bp, Homo sapien
gagccggacgtacgagtcgttcggt

SEQ ID NO: 5923564 - DNA, 25 bp, Homo sapien
ggacgcgtaggtcgcgtaactccgt

SEQ ID NO: 5923565 - DNA, 25 bp, Homo sapien
cggggggcgtagtgcgcaaatgtgt

SEQ ID NO: 5923566 - DNA, 25 bp, Homo sapien
gcgcgtttacttcgcgcggtcgcac

SEQ ID NO: 5923567 - DNA, 25 bp, Homo sapien
cgcaaccgtagtacgcgctggaggc

SEQ ID NO: 5923568 - DNA, 25 bp, Homo sapien
tgcgggtcccgatacgcgacaggtg

SEQ ID NO: 5923569 - DNA, 25 bp, Homo sapien
accgttgcattacgtcgccgccgcg

SEQ ID NO: 5923570 - DNA, 25 bp, Homo sapien
cgcgcttaccgcgtgtcgtccggtt

SEQ ID NO: 5923571 - DNA, 25 bp, Homo sapien
ctggctaccgcgtagatcggccgca

SEQ ID NO: 5923572 - DNA, 25 bp, Homo sapien
acacggtatcgcgacgtccggcctc

SEQ ID NO: 5923573 - DNA, 25 bp, Homo sapien
ggtcagtcggcgcgcgtaatcctcc

SEQ ID NO: 5923574 - DNA, 25 bp, Homo sapien
ggtcgcatccgtacgcggttgggtg

SEQ ID NO: 5923575 - DNA, 25 bp, Homo sapien
tccagccgtacgccgtcgagtgcac

SEQ ID NO: 5923576 - DNA, 25 bp, Homo sapien
cgagcgcggcgtcggtactgtagac

SEQ ID NO: 5923577 - DNA, 25 bp, Homo sapien
cacacgcgagtcgtcacgcctaccc

SEQ ID NO: 5923578 - DNA, 25 bp, Homo sapien
tccagccgctacgcgcagtccgaga

SEQ ID NO: 5923579 - DNA, 25 bp, Homo sapien
ctaccaacgggatcgcggtgcggtc

SEQ ID NO: 5923580 - DNA, 25 bp, Homo sapien
cccccagccgcgacgtgtaagcatg

SEQ ID NO: 5923581 - DNA, 25 bp, Homo sapien
tccctagacgtatcgcccgcccgtc

SEQ ID NO: 5923582 - DNA, 25 bp, Homo sapien
aagtcgtacgccgtccgcaggtccc

SEQ ID NO: 5923583 - DNA, 25 bp, Homo sapien
ggcccaaagctacgcgtcgtgggac

SEQ ID NO: 5923584 - DNA, 25 bp, Homo sapien
agccgcacggttcggtcgtatcccg

SEQ ID NO: 5923585 - DNA, 25 bp, Homo sapien
gtgctccgatcgcttacggccagcc

SEQ ID NO: 5923586 - DNA, 25 bp, Homo sapien
cgcagtgtaggccgttcgccgtcga

SEQ ID NO: 5923587 - DNA, 25 bp, Homo sapien
ggctcgtcggccgaccgtacctttg

SEQ ID NO: 5923588 - DNA, 25 bp, Homo sapien
ccacgtcggacgaaatcgccccctc

SEQ ID NO: 5923589 - DNA, 25 bp, Homo sapien
cgccgagtagacggtcgacttgcgc

SEQ ID NO: 5923590 - DNA, 25 bp, Homo sapien
ccagcttaccggtccgactgcggtg

SEQ ID NO: 5923591 - DNA, 25 bp, Homo sapien
ctgggcctcgcgacgtagagtgcgt

SEQ ID NO: 5923592 - DNA, 25 bp, Homo sapien
gccagcgcggtatcgcgcacagtac

SEQ ID NO: 5923593 - DNA, 25 bp, Homo sapien
ctcccgacgctataccggccatggg

SEQ ID NO: 5923594 - DNA, 25 bp, Homo sapien
tccctgcgctagcgcgaacccccat

SEQ ID NO: 5923595 - DNA, 25 bp, Homo sapien
gaatgccgtacgtcgcgccccctgt

SEQ ID NO: 5923596 - DNA, 25 bp, Homo sapien
agcccccccgcgtatcgggatgatg

SEQ ID NO: 5923597 - DNA, 25 bp, Homo sapien
aggtgccgcgattaggacgtccgcg

SEQ ID NO: 5923598 - DNA, 25 bp, Homo sapien
gactcacgtatccgcgagcccgctg

SEQ ID NO: 5923599 - DNA, 25 bp, Homo sapien
ggcggcagcgcgatagtctctctcc

SEQ ID NO: 5923600 - DNA, 25 bp, Homo sapien
cggtccgcggttcgcggaatgatcg

SEQ ID NO: 5923601 - DNA, 25 bp, Homo sapien
ttcggtcgacgcgggctaaccgtgg

SEQ ID NO: 5923602 - DNA, 25 bp, Homo sapien
gagactcgtcgccgactagggcgtg

SEQ ID NO: 5923603 - DNA, 25 bp, Homo sapien
atggagttcgcgaccggttcgggcc

SEQ ID NO: 5923604 - DNA, 25 bp, Homo sapien
ccacaacgatcgaccgtgcggcggt

SEQ ID NO: 5923605 - DNA, 25 bp, Homo sapien
catgtgcctacggcgtaacccggcg

SEQ ID NO: 5923606 - DNA, 25 bp, Homo sapien
ggacggataccgcgaccgttcctcg

SEQ ID NO: 5923607 - DNA, 25 bp, Homo sapien
ctagcctacgcgggcttaccacggc

SEQ ID NO: 5923608 - DNA, 25 bp, Homo sapien
ccgcagcgcgcaacggtcagctcta

SEQ ID NO: 5923609 - DNA, 25 bp, Homo sapien
cccctagccgtggtacgcgctcaag

SEQ ID NO: 5923610 - DNA, 25 bp, Homo sapien
acctgggacctacgacgcggagacc

SEQ ID NO: 5923611 - DNA, 25 bp, Homo sapien
ctgaagtgcgtcgacccgacctcgc

SEQ ID NO: 5923612 - DNA, 25 bp, Homo sapien
tcgcccctctacgcgccgatgccta

SEQ ID NO: 5923613 - DNA, 25 bp, Homo sapien
ccggccccgcgcgtagatgcaaact

SEQ ID NO: 5923614 - DNA, 25 bp, Homo sapien
cgcgctcgtagcgctagagcgatgg

SEQ ID NO: 5923615 - DNA, 25 bp, Homo sapien
ccaaaggtctactcgcgcgtcgggc

SEQ ID NO: 5923616 - DNA, 25 bp, Homo sapien
gcatgataacgacgcaccgccgccc

SEQ ID NO: 5923617 - DNA, 25 bp, Homo sapien
gtgtggctatagccgcgcggccctt

SEQ ID NO: 5923618 - DNA, 25 bp, Homo sapien
cctgttcgtctacccggtctcgggc

SEQ ID NO: 5923619 - DNA, 25 bp, Homo sapien
gggccagtcgttcggccttccctca

SEQ ID NO: 5923620 - DNA, 25 bp, Homo sapien
tttggcctactcgacgcggtccccg

SEQ ID NO: 5923621 - DNA, 25 bp, Homo sapien
acggcttagcccgtcgacgcggtct

SEQ ID NO: 5923622 - DNA, 25 bp, Homo sapien
tgaccccgatagagcgccgcctgca

SEQ ID NO: 5923623 - DNA, 25 bp, Homo sapien
agactcgcgggtcggtacgttccgc

SEQ ID NO: 5923624 - DNA, 25 bp, Homo sapien
tgcgccctacgaccgttcgccgact

SEQ ID NO: 5923625 - DNA, 25 bp, Homo sapien
ggtggatgcgacgtaggggcccatc

SEQ ID NO: 5923626 - DNA, 25 bp, Homo sapien
gtgcccccgtacgcgtcatcagacg

SEQ ID NO: 5923627 - DNA, 25 bp, Homo sapien
gtcatagcgcgacccgtagccgagg

SEQ ID NO: 5923628 - DNA, 25 bp, Homo sapien
tctgggcgccggatcgtatgcccca

SEQ ID NO: 5923629 - DNA, 25 bp, Homo sapien
agccgctacggtcccgacgtaggca

SEQ ID NO: 5923630 - DNA, 25 bp, Homo sapien
agcttcactaccggcggacagcccc

SEQ ID NO: 5923631 - DNA, 25 bp, Homo sapien
tcgcggcgtcgtacgtcggtctgga

SEQ ID NO: 5923632 - DNA, 25 bp, Homo sapien
ggtgcgattcgagcgtcggggacac

SEQ ID NO: 5923633 - DNA, 25 bp, Homo sapien
ccggatcgtcgttacgggggcagca

SEQ ID NO: 5923634 - DNA, 25 bp, Homo sapien
ggcccggtgcgatcgttcgactacg

SEQ ID NO: 5923635 - DNA, 25 bp, Homo sapien
caggggtatcgcgcgcacctagtcc

SEQ ID NO: 5923636 - DNA, 25 bp, Homo sapien
agctcgactagtcgctccgcctgcg

SEQ ID NO: 5923637 - DNA, 25 bp, Homo sapien
tggatgtcggacgtagcgcctccgg

SEQ ID NO: 5923638 - DNA, 25 bp, Homo sapien
gtgagaggccgtcggttagacgccc

SEQ ID NO: 5923639 - DNA, 25 bp, Homo sapien
gtcgcctcgcgcgctaaacaaggcc

SEQ ID NO: 5923640 - DNA, 25 bp, Homo sapien
catgtactacgccggacgtccggcg

SEQ ID NO: 5923641 - DNA, 25 bp, Homo sapien
aggtcgcgaccacggtacgagtggc

SEQ ID NO: 5923642 - DNA, 25 bp, Homo sapien
cgcaagtacgcgcggtcggacactc

SEQ ID NO: 5923643 - DNA, 25 bp, Homo sapien
gggtaggcggtcggcactaggtcga

SEQ ID NO: 5923644 - DNA, 25 bp, Homo sapien
ccactctataggcgcgccgcgcgat

SEQ ID NO: 5923645 - DNA, 25 bp, Homo sapien
tgcggttcgcgcctacgactccgag

SEQ ID NO: 5923646 - DNA, 25 bp, Homo sapien
gctcggctacgcgtttccggactgc

SEQ ID NO: 5923647 - DNA, 25 bp, Homo sapien
tggagcgcgaccgtccgaaacacgg

SEQ ID NO: 5923648 - DNA, 25 bp, Homo sapien
acggtgacgtccgaaggcgcatgcc

SEQ ID NO: 5923649 - DNA, 25 bp, Homo sapien
atgctcgcctataccgcggacccgg

SEQ ID NO: 5923650 - DNA, 25 bp, Homo sapien
gggacgttagtcggcggactgccgt

SEQ ID NO: 5923651 - DNA, 25 bp, Homo sapien
atgaggccgtgagcgcgtagccggt

SEQ ID NO: 5923652 - DNA, 25 bp, Homo sapien
ctgccgggtagcgtcgacaaccagc

SEQ ID NO: 5923653 - DNA, 25 bp, Homo sapien
tgggcccgactatacgccggctcca

SEQ ID NO: 5923654 - DNA, 25 bp, Homo sapien
cggcaaaggcgccgtatcgcgcgat

SEQ ID NO: 5923655 - DNA, 25 bp, Homo sapien
cggactgcgcggtatagtcacccgg

SEQ ID NO: 5923656 - DNA, 25 bp, Homo sapien
cactcgagacgcgccgtagtggcac

SEQ ID NO: 5923657 - DNA, 25 bp, Homo sapien
tacacggtccgatcgcggaacgggc

SEQ ID NO: 5923658 - DNA, 25 bp, Homo sapien
ggccccagcgcgcgattagctttgg

SEQ ID NO: 5923659 - DNA, 25 bp, Homo sapien
gagcagggaaccgacgcgtaccagc

SEQ ID NO: 5923660 - DNA, 25 bp, Homo sapien
atgcggaccgcggacgattggcggt

SEQ ID NO: 5923661 - DNA, 25 bp, Homo sapien
ccctcaatacgccggccgtgaagcg

SEQ ID NO: 5923662 - DNA, 25 bp, Homo sapien
acagacccgtccgaaacgccagccg

SEQ ID NO: 5923663 - DNA, 25 bp, Homo sapien
aactagggtagcgcgtcgacccgcc

SEQ ID NO: 5923664 - DNA, 25 bp, Homo sapien
cgactacgcgtctcgctacgcggct

SEQ ID NO: 5923665 - DNA, 25 bp, Homo sapien
ctcaccgtgcgcgtaaacgcgacgc

SEQ ID NO: 5923666 - DNA, 25 bp, Homo sapien
ccccttccgtcgactcgagcctctg

SEQ ID NO: 5923667 - DNA, 25 bp, Homo sapien
cgcggtgtcgcggatactagccctc

SEQ ID NO: 5923668 - DNA, 25 bp, Homo sapien
cctggccgtatcgtgtcgcgcggaa

SEQ ID NO: 5923669 - DNA, 25 bp, Homo sapien
cggaggtcgtgtatcggcggctctc

SEQ ID NO: 5923670 - DNA, 25 bp, Homo sapien
accagccggacgtacggtagcctgc

SEQ ID NO: 5923671 - DNA, 25 bp, Homo sapien
ggggcccgcgctatccgacgattga

SEQ ID NO: 5923672 - DNA, 25 bp, Homo sapien
tcggggatagatcgcgcgcgcgtga

SEQ ID NO: 5923673 - DNA, 25 bp, Homo sapien
gggctccgggcgtacgctagacgtt

SEQ ID NO: 5923674 - DNA, 25 bp, Homo sapien
ctcatcgcgcgctaccgatccgagc

SEQ ID NO: 5923675 - DNA, 25 bp, Homo sapien
accggacccgtacgcatcggtgtgc

SEQ ID NO: 5923676 - DNA, 25 bp, Homo sapien
ggcgacccggacgctagttgcctac

SEQ ID NO: 5923677 - DNA, 25 bp, Homo sapien
ggcgattgtcgcgcgtacatcgcgc

SEQ ID NO: 5923678 - DNA, 25 bp, Homo sapien
tcacggcgcctacgtaccgggacct

SEQ ID NO: 5923679 - DNA, 25 bp, Homo sapien
cctggcgcgcgacgtattgcccatc

SEQ ID NO: 5923680 - DNA, 25 bp, Homo sapien
gcccgagattcgcgcagtcagcgga

SEQ ID NO: 5923681 - DNA, 25 bp, Homo sapien
ccaggccgcgcgatctagtcgtctg

SEQ ID NO: 5923682 - DNA, 25 bp, Homo sapien
aggccaacgcgccgacctacgacct

SEQ ID NO: 5923683 - DNA, 25 bp, Homo sapien
tgcatcccggtcacgacgtctgccg

SEQ ID NO: 5923684 - DNA, 25 bp, Homo sapien
ctggggacactcgcgcgatggaacc

SEQ ID NO: 5923685 - DNA, 25 bp, Homo sapien
tcacgtcccgatcggtaggctgccc

SEQ ID NO: 5923686 - DNA, 25 bp, Homo sapien
ccacgcatacgctcgggcggattcc

SEQ ID NO: 5923687 - DNA, 25 bp, Homo sapien
cggccactacggacgttcgcccaca

SEQ ID NO: 5923688 - DNA, 25 bp, Homo sapien
tctgcgcgcgcgtattcggttgcgg

SEQ ID NO: 5923689 - DNA, 25 bp, Homo sapien
gcttatctagcggcatcgcggcccc

SEQ ID NO: 5923690 - DNA, 25 bp, Homo sapien
cccagcggttcgcgcgttacaccga

SEQ ID NO: 5923691 - DNA, 25 bp, Homo sapien
agcgcgtcggaccgatcgagcgttg

SEQ ID NO: 5923692 - DNA, 25 bp, Homo sapien
gccccttgacgcggctagtcaaggc

SEQ ID NO: 5923693 - DNA, 25 bp, Homo sapien
ccttcgtcgtccggtacgctcagcg

SEQ ID NO: 5923694 - DNA, 25 bp, Homo sapien
gtcatcgcgcaacggtccacacggc

SEQ ID NO: 5923695 - DNA, 25 bp, Homo sapien
accatgccggtagcgcatacggccg

SEQ ID NO: 5923696 - DNA, 25 bp, Homo sapien
ccgtccctgttacgtcgcgacaggc

SEQ ID NO: 5923697 - DNA, 25 bp, Homo sapien
gcaccccttgcgatagcgcggactc

SEQ ID NO: 5923698 - DNA, 25 bp, Homo sapien
gaccacaacgcgactagcgcgggga

SEQ ID NO: 5923699 - DNA, 25 bp, Homo sapien
gccgttgcgccctacgtaccgagga

SEQ ID NO: 5923700 - DNA, 25 bp, Homo sapien
tgtagggtcatacggcgcgcgggct

SEQ ID NO: 5923701 - DNA, 25 bp, Homo sapien
tggtagttgcgttacgcggcccgcg

SEQ ID NO: 5923702 - DNA, 25 bp, Homo sapien
ttccgcgtagggtacgcgacctgcc

SEQ ID NO: 5923703 - DNA, 25 bp, Homo sapien
gcggcaacgggtcgaccgaagcgta

SEQ ID NO: 5923704 - DNA, 25 bp, Homo sapien
aaacgggtcgcgagctagctcccgg

SEQ ID NO: 5923705 - DNA, 25 bp, Homo sapien
tcggcccctacacgacgcgccaatc

SEQ ID NO: 5923706 - DNA, 25 bp, Homo sapien
cgtgggtcgcaacggcgtaagcctg

SEQ ID NO: 5923707 - DNA, 25 bp, Homo sapien
tcgctcggcccctatcgaccccaag

SEQ ID NO: 5923708 - DNA, 25 bp, Homo sapien
tgagccgtacgaacccgactggcgg

SEQ ID NO: 5923709 - DNA, 25 bp, Homo sapien
cagtgacgcgacggcactacgcagg

SEQ ID NO: 5923710 - DNA, 25 bp, Homo sapien
tcggactatcggccgtcgcacggca

SEQ ID NO: 5923711 - DNA, 25 bp, Homo sapien
cggcctactgcgcggattagcaggg

SEQ ID NO: 5923712 - DNA, 25 bp, Homo sapien
gtcgcacgcgtatcggcacacgagc

SEQ ID NO: 5923713 - DNA, 25 bp, Homo sapien
cacccttacgcgagcgacctgtggg

SEQ ID NO: 5923714 - DNA, 25 bp, Homo sapien
tctagctagtagcgccgcggtgccg

SEQ ID NO: 5923715 - DNA, 25 bp, Homo sapien
ccgccctaacgaatgcgcgacgcca

SEQ ID NO: 5923716 - DNA, 25 bp, Homo sapien
cgaacagtgtcgtacgccgccctcc

SEQ ID NO: 5923717 - DNA, 25 bp, Homo sapien
tcagtgagcgggtcgtacgggtgcc

SEQ ID NO: 5923718 - DNA, 25 bp, Homo sapien
ctaagccttacgcggccgagcaccc

SEQ ID NO: 5923719 - DNA, 25 bp, Homo sapien
ggccattccgagcgcgatactcccg

SEQ ID NO: 5923720 - DNA, 25 bp, Homo sapien
gttatgcgtccctatcgcgcggccg

SEQ ID NO: 5923721 - DNA, 25 bp, Homo sapien
cgatacctagtcgcgctagcccccg

SEQ ID NO: 5923722 - DNA, 25 bp, Homo sapien
cccccccgcgctacgtacgcacata

SEQ ID NO: 5923723 - DNA, 25 bp, Homo sapien
acgcggtccggtacacgacctgtgg

SEQ ID NO: 5923724 - DNA, 25 bp, Homo sapien
tgggggtagtacgcgcgacgtctcc

SEQ ID NO: 5923725 - DNA, 25 bp, Homo sapien
tggtagcgtgtacgaccggagggcg

SEQ ID NO: 5923726 - DNA, 25 bp, Homo sapien
ccactctcgcgcatcgcgttcccgt

SEQ ID NO: 5923727 - DNA, 25 bp, Homo sapien
ccggagcgccctgtcgaaccagtag

SEQ ID NO: 5923728 - DNA, 25 bp, Homo sapien
gcggatccttacgagcggtccgcga

SEQ ID NO: 5923729 - DNA, 25 bp, Homo sapien
ggtgtcagcgcggtacgctacagcc

SEQ ID NO: 5923730 - DNA, 25 bp, Homo sapien
gcggagcggatcgaccgtcaacctc

SEQ ID NO: 5923731 - DNA, 25 bp, Homo sapien
cggttggccaatccgtcgcgcactc

SEQ ID NO: 5923732 - DNA, 25 bp, Homo sapien
gcaacatgcgtcgtgcgacctgcgg

SEQ ID NO: 5923733 - DNA, 25 bp, Homo sapien
acgcggcgacggtattcgcggtcac

SEQ ID NO: 5923734 - DNA, 25 bp, Homo sapien
ggcggaagcagtacgcgccgtgatc

SEQ ID NO: 5923735 - DNA, 25 bp, Homo sapien
ggagacaacggccgcgtcgaagcag

SEQ ID NO: 5923736 - DNA, 25 bp, Homo sapien
ccatccacgcgtaccgctacgtgcg

SEQ ID NO: 5923737 - DNA, 25 bp, Homo sapien
tcgtgctcgcgcgagactagccagc

SEQ ID NO: 5923738 - DNA, 25 bp, Homo sapien
cacccgaccgtcgaccgcttcggta

SEQ ID NO: 5923739 - DNA, 25 bp, Homo sapien
gggccaccgctacgatgcgttggtc

SEQ ID NO: 5923740 - DNA, 25 bp, Homo sapien
caaacggtcgtctacgcggctgcgg

SEQ ID NO: 5923741 - DNA, 25 bp, Homo sapien
tgcgccttaccgcgtcggtgttgcc

SEQ ID NO: 5923742 - DNA, 25 bp, Homo sapien
cgcctctcgagcggcggtatagcct

SEQ ID NO: 5923743 - DNA, 25 bp, Homo sapien
gatgcccgcaataccccgcgagctg

SEQ ID NO: 5923744 - DNA, 25 bp, Homo sapien
agatcccgcgacccgtacacagcgg

SEQ ID NO: 5923745 - DNA, 25 bp, Homo sapien
gactagacgggattgcgcgcgaccc

SEQ ID NO: 5923746 - DNA, 25 bp, Homo sapien
cgtgggcgactcgatgcgtggtctc

SEQ ID NO: 5923747 - DNA, 25 bp, Homo sapien
tcctgcatgttccgcgcgttgcggg

SEQ ID NO: 5923748 - DNA, 25 bp, Homo sapien
cgcttggcgtacggcactcagtcgg

SEQ ID NO: 5923749 - DNA, 25 bp, Homo sapien
agcggcatcgcgacacgggttcgac

SEQ ID NO: 5923750 - DNA, 25 bp, Homo sapien
tcggcctagtcccgcggatgatggc

SEQ ID NO: 5923751 - DNA, 25 bp, Homo sapien
gccgagctggacgatcggcttggtc

SEQ ID NO: 5923752 - DNA, 25 bp, Homo sapien
tctggacgtacgaccgcgtcgggtg

SEQ ID NO: 5923753 - DNA, 25 bp, Homo sapien
gcgcgctcagcggtatacgcagctg

SEQ ID NO: 5923754 - DNA, 25 bp, Homo sapien
agcccgggcgttacgggctagagac

SEQ ID NO: 5923755 - DNA, 25 bp, Homo sapien
tgcggaaggttacctcgcggctccg

SEQ ID NO: 5923756 - DNA, 25 bp, Homo sapien
ggcgttctcgaccggtcgatacgcg

SEQ ID NO: 5923757 - DNA, 25 bp, Homo sapien
gcggagcgtaccgcgtatagcctcg

SEQ ID NO: 5923758 - DNA, 25 bp, Homo sapien
agaggtgtccggcgtcataccccgc

SEQ ID NO: 5923759 - DNA, 25 bp, Homo sapien
acacgtcgcggacgtatcgcaccgg

SEQ ID NO: 5923760 - DNA, 25 bp, Homo sapien
cgatcccgcgtaccgacatcgaccc

SEQ ID NO: 5923761 - DNA, 25 bp, Homo sapien
gaccggacacgtgacgcgattcccc

SEQ ID NO: 5923762 - DNA, 25 bp, Homo sapien
gggccgacgcgccgtagtgatcact

SEQ ID NO: 5923763 - DNA, 25 bp, Homo sapien
cgtgcgtacgataggccgcccgaag

SEQ ID NO: 5923764 - DNA, 25 bp, Homo sapien
caagtggcgtacgtccatcggcccc

SEQ ID NO: 5923765 - DNA, 25 bp, Homo sapien
gagctacgaacgtcgatccggcccc

SEQ ID NO: 5923766 - DNA, 25 bp, Homo sapien
cgagggacgaaccgcggatccacga

SEQ ID NO: 5923767 - DNA, 25 bp, Homo sapien
cgtcgttacgagcgcgcgagcagag

SEQ ID NO: 5923768 - DNA, 25 bp, Homo sapien
ccccagctagcgcggatagcacctg

SEQ ID NO: 5923769 - DNA, 25 bp, Homo sapien
ccgggtcccgatcacgacgctcgaa

SEQ ID NO: 5923770 - DNA, 25 bp, Homo sapien
cccagctcggcgtaggatcacaggg

SEQ ID NO: 5923771 - DNA, 25 bp, Homo sapien
gcctgccggagcgttacgcgtacct

SEQ ID NO: 5923772 - DNA, 25 bp, Homo sapien
tcggtgacggatcgcgaacgacccg

SEQ ID NO: 5923773 - DNA, 25 bp, Homo sapien
gatccgtacgcgcatggacgacccg

SEQ ID NO: 5923774 - DNA, 25 bp, Homo sapien
gtcaggaatgcgctccgcgcgcatg

SEQ ID NO: 5923775 - DNA, 25 bp, Homo sapien
cgcgtcgctaactcgcgactagccg

SEQ ID NO: 5923776 - DNA, 25 bp, Homo sapien
cccaggcgctagtagcgcagaggac

SEQ ID NO: 5923777 - DNA, 25 bp, Homo sapien
agagcgcgcgaccgcaatcgctcag

SEQ ID NO: 5923778 - DNA, 25 bp, Homo sapien
gctcctgcgtcgcgctataggggtg

SEQ ID NO: 5923779 - DNA, 25 bp, Homo sapien
cgcgccgtcgcgggataacaaggtg

SEQ ID NO: 5923780 - DNA, 25 bp, Homo sapien
atcgccgttacgacggtccgcacgc

SEQ ID NO: 5923781 - DNA, 25 bp, Homo sapien
agcgcgtatcgacggccgctcgcta

SEQ ID NO: 5923782 - DNA, 25 bp, Homo sapien
ccagactacgggcgacgtccatccc

SEQ ID NO: 5923783 - DNA, 25 bp, Homo sapien
tccatggcgccggtctagtgggtcc

SEQ ID NO: 5923784 - DNA, 25 bp, Homo sapien
tgacccctagcgcaagccgtctgcc

SEQ ID NO: 5923785 - DNA, 25 bp, Homo sapien
gcacgctataagcgccgtcccccga

SEQ ID NO: 5923786 - DNA, 25 bp, Homo sapien
gctcccgcggtcggtctatcaagcc

SEQ ID NO: 5923787 - DNA, 25 bp, Homo sapien
gcctcgcggtcggtacgacaacgac

SEQ ID NO: 5923788 - DNA, 25 bp, Homo sapien
cgcccgtccgatacgtccgaatgcc

SEQ ID NO: 5923789 - DNA, 25 bp, Homo sapien
gagcccgcgcgtaataacgcccgga

SEQ ID NO: 5923790 - DNA, 25 bp, Homo sapien
ccggcctcgcgcgttgacatcgcta

SEQ ID NO: 5923791 - DNA, 25 bp, Homo sapien
cgcatcgtcgcggagcgaagccaac

SEQ ID NO: 5923792 - DNA, 25 bp, Homo sapien
tctcgtagcgctaccgtcggaccgg

SEQ ID NO: 5923793 - DNA, 25 bp, Homo sapien
caccctgcgaactcgctagcgaggc

SEQ ID NO: 5923794 - DNA, 25 bp, Homo sapien
cgcccggcgcgatgcgtacgttact

SEQ ID NO: 5923795 - DNA, 25 bp, Homo sapien
gccgttagcgtcgtgcgacgcaagc

SEQ ID NO: 5923796 - DNA, 25 bp, Homo sapien
ctccatacggcgcgacatggcggct

SEQ ID NO: 5923797 - DNA, 25 bp, Homo sapien
ccgtgcccttacgcgaacgccagtg

SEQ ID NO: 5923798 - DNA, 25 bp, Homo sapien
ttgcggtttcgcgtaaggccccgcc

SEQ ID NO: 5923799 - DNA, 25 bp, Homo sapien
actgaacgggttacgacgcgccggc

SEQ ID NO: 5923800 - DNA, 25 bp, Homo sapien
gcggtgggcgactagttcgcagcgt

SEQ ID NO: 5923801 - DNA, 25 bp, Homo sapien
cagcgataacgtccgacgggacgcc

SEQ ID NO: 5923802 - DNA, 25 bp, Homo sapien
cgagggaatgcgcaacccgtcgcga

SEQ ID NO: 5923803 - DNA, 25 bp, Homo sapien
ggcctaccgtgactagtcggctccc

SEQ ID NO: 5923804 - DNA, 25 bp, Homo sapien
tgccggcccaacgtacgcgtggcat

SEQ ID NO: 5923805 - DNA, 25 bp, Homo sapien
ggtgtccctcgcgccatactcgcag

SEQ ID NO: 5923806 - DNA, 25 bp, Homo sapien
gtcacgtcccgttagcgcgccatcg

SEQ ID NO: 5923807 - DNA, 25 bp, Homo sapien
ctcagggtccggcgtatacagggcc

SEQ ID NO: 5923808 - DNA, 25 bp, Homo sapien
cgacccgcgatcgtcgcatcttccg

SEQ ID NO: 5923809 - DNA, 25 bp, Homo sapien
ggttcgcggtctactcgcgcggtgt

SEQ ID NO: 5923810 - DNA, 25 bp, Homo sapien
ccggacccgatcccgcataacgcga

SEQ ID NO: 5923811 - DNA, 25 bp, Homo sapien
ttcagctccgaccggacgtgcggtg

SEQ ID NO: 5923812 - DNA, 25 bp, Homo sapien
tgttcgcggcgcggacttagccacg

SEQ ID NO: 5923813 - DNA, 25 bp, Homo sapien
tgcgtaatgttcgcgacgccgcgcg

SEQ ID NO: 5923814 - DNA, 25 bp, Homo sapien
aggcatgtcgcgggtatagcgcggg

SEQ ID NO: 5923815 - DNA, 25 bp, Homo sapien
tgtgtcgcgtacccgatacgccggc

SEQ ID NO: 5923816 - DNA, 25 bp, Homo sapien
tacgcgacgaccgcgtcgtgacctg

SEQ ID NO: 5923817 - DNA, 25 bp, Homo sapien
tccgacatgtcgcacgacggacggg

SEQ ID NO: 5923818 - DNA, 25 bp, Homo sapien
gctcaatcgacgcgactagcgcggg

SEQ ID NO: 5923819 - DNA, 25 bp, Homo sapien
gcggctccgcgtactaggtccgaca

SEQ ID NO: 5923820 - DNA, 25 bp, Homo sapien
cggcactaacgcggccgttgtcgtc

SEQ ID NO: 5923821 - DNA, 25 bp, Homo sapien
ggttagacgtacgacgcgggaccgc

SEQ ID NO: 5923822 - DNA, 25 bp, Homo sapien
ggccctacgtcggtcgtatgacccg

SEQ ID NO: 5923823 - DNA, 25 bp, Homo sapien
actggttatccgaccggcggccacg

SEQ ID NO: 5923824 - DNA, 25 bp, Homo sapien
cgctgcgacgtatcggccgtcgcaa

SEQ ID NO: 5923825 - DNA, 25 bp, Homo sapien
caacaccgtatacggccgcgctccc

SEQ ID NO: 5923826 - DNA, 25 bp, Homo sapien
gcagcagcgcctagtacggtgctgg

SEQ ID NO: 5923827 - DNA, 25 bp, Homo sapien
acatacgcggcgtgcgtatcggggc

SEQ ID NO: 5923828 - DNA, 25 bp, Homo sapien
tacggcgtccggctcgtacgcagga

SEQ ID NO: 5923829 - DNA, 25 bp, Homo sapien
gggctcgttcgcgcgggtatgcgtt

SEQ ID NO: 5923830 - DNA, 25 bp, Homo sapien
cggccccctaccgcgcgaatgcatt

SEQ ID NO: 5923831 - DNA, 25 bp, Homo sapien
caagacccgtacgaccggtggcagg

SEQ ID NO: 5923832 - DNA, 25 bp, Homo sapien
tgctccgggtacgtcgagcgcagag

SEQ ID NO: 5923833 - DNA, 25 bp, Homo sapien
cacgcatcgcgacggacttgcctcc

SEQ ID NO: 5923834 - DNA, 25 bp, Homo sapien
ccacggctagcgcaacggggctgtt

SEQ ID NO: 5923835 - DNA, 25 bp, Homo sapien
agtggagcgactagtccgggctggc

SEQ ID NO: 5923836 - DNA, 25 bp, Homo sapien
ctgcgggcgcgttagctaaccggac

SEQ ID NO: 5923837 - DNA, 25 bp, Homo sapien
gccaaccgtagttcgcggcgggtgt

SEQ ID NO: 5923838 - DNA, 25 bp, Homo sapien
ctccccgcgcgataggttagaccgc

SEQ ID NO: 5923839 - DNA, 25 bp, Homo sapien
ggcagttaggactcgcgcgttcggc

SEQ ID NO: 5923840 - DNA, 25 bp, Homo sapien
gccaccacccgatcgcgtagcggaa

SEQ ID NO: 5923841 - DNA, 25 bp, Homo sapien
ggggaacgccactagcggtccacgt

SEQ ID NO: 5923842 - DNA, 25 bp, Homo sapien
gcgagaacgcggtaacgcccgtgac

SEQ ID NO: 5923843 - DNA, 25 bp, Homo sapien
cggtaaggtaatcgcgcggcccgca

SEQ ID NO: 5923844 - DNA, 25 bp, Homo sapien
cgacgacgtatcgtcgcaaccgcgc

SEQ ID NO: 5923845 - DNA, 25 bp, Homo sapien
cggtggagggctacgtcgccgtatg

SEQ ID NO: 5923846 - DNA, 25 bp, Homo sapien
ttggccacgtgttagcgcgagcgcg

SEQ ID NO: 5923847 - DNA, 25 bp, Homo sapien
atctcggttcgtaagcgggcggccg

SEQ ID NO: 5923848 - DNA, 25 bp, Homo sapien
ccggaatcgtctcggtccgtgggtc

SEQ ID NO: 5923849 - DNA, 25 bp, Homo sapien
gccccctcgcgactaccggtgtttg

SEQ ID NO: 5923850 - DNA, 25 bp, Homo sapien
ccaaaggcgggtcgtccatcggctc

SEQ ID NO: 5923851 - DNA, 25 bp, Homo sapien
gactcgatagccccgcgcgagctac

SEQ ID NO: 5923852 - DNA, 25 bp, Homo sapien
ggatcgtagcccgtcgcgagcgatc

SEQ ID NO: 5923853 - DNA, 25 bp, Homo sapien
tccgggtgcggcgatacgagtggtc

SEQ ID NO: 5923854 - DNA, 25 bp, Homo sapien
gtatggtacctcgaccgcgggagcg

SEQ ID NO: 5923855 - DNA, 25 bp, Homo sapien
gcacctgcgaatcggacctcctgcc

SEQ ID NO: 5923856 - DNA, 25 bp, Homo sapien
acttcgcgaacgccctacggcacgg

SEQ ID NO: 5923857 - DNA, 25 bp, Homo sapien
tcccgcagtaagtcgcgcgacgacg

SEQ ID NO: 5923858 - DNA, 25 bp, Homo sapien
gtccctgcgaccttcgacggttccc

SEQ ID NO: 5923859 - DNA, 25 bp, Homo sapien
gcaaccgcggtatagcgcatgcgcg

SEQ ID NO: 5923860 - DNA, 25 bp, Homo sapien
cggtcctagcgtagaccgcatgcgc

SEQ ID NO: 5923861 - DNA, 25 bp, Homo sapien
tggccttacgcgaggcgaccccagt

SEQ ID NO: 5923862 - DNA, 25 bp, Homo sapien
tcacccacgcctaaacccgcgtcgg

SEQ ID NO: 5923863 - DNA, 25 bp, Homo sapien
tgcgtcggtcgcggggtatgtggtc

SEQ ID NO: 5923864 - DNA, 25 bp, Homo sapien
ggcgcagttcgtacgctgcgcggaa

SEQ ID NO: 5923865 - DNA, 25 bp, Homo sapien
gccgtgtgacggacccgtactgcag

SEQ ID NO: 5923866 - DNA, 25 bp, Homo sapien
gcgcgcgcggtctaaatcgtacggg

SEQ ID NO: 5923867 - DNA, 25 bp, Homo sapien
ggaccgccgaatacgcgcggattgc

SEQ ID NO: 5923868 - DNA, 25 bp, Homo sapien
cgttgtcggaccgcgatcaggagcg

SEQ ID NO: 5923869 - DNA, 25 bp, Homo sapien
ggaccacgtagcgtacgtgccgagg

SEQ ID NO: 5923870 - DNA, 25 bp, Homo sapien
ccctagcggtgcgatacgggtcacc

SEQ ID NO: 5923871 - DNA, 25 bp, Homo sapien
gccaagcatgacgagcgcgaggcag

SEQ ID NO: 5923872 - DNA, 25 bp, Homo sapien
cggcgccgcgcttatacgctacgtg

SEQ ID NO: 5923873 - DNA, 25 bp, Homo sapien
cgggctacgcgctcgtatgctcgag

SEQ ID NO: 5923874 - DNA, 25 bp, Homo sapien
gtccgatacgtagcgtcgggagggc

SEQ ID NO: 5923875 - DNA, 25 bp, Homo sapien
tcgagggggcccgcgataactcagc

SEQ ID NO: 5923876 - DNA, 25 bp, Homo sapien
cgcgatacccgcggtatgaccccga

SEQ ID NO: 5923877 - DNA, 25 bp, Homo sapien
ctaccacgcgccgatctaacgcggg

SEQ ID NO: 5923878 - DNA, 25 bp, Homo sapien
ggcacccatccgtacgcgctggtga

SEQ ID NO: 5923879 - DNA, 25 bp, Homo sapien
cgcatgcgatacccgccgtgcggaa

SEQ ID NO: 5923880 - DNA, 25 bp, Homo sapien
gcctggcgtctagcggacctcactg

SEQ ID NO: 5923881 - DNA, 25 bp, Homo sapien
cggctggccgcgaacgctaaaggga

SEQ ID NO: 5923882 - DNA, 25 bp, Homo sapien
cgaccaacgatcaccgggggatccc

SEQ ID NO: 5923883 - DNA, 25 bp, Homo sapien
tggcctccgcggtcgattcccgcaa

SEQ ID NO: 5923884 - DNA, 25 bp, Homo sapien
ctacaacactacgtcgcggcggccc

SEQ ID NO: 5923885 - DNA, 25 bp, Homo sapien
gcgcagaacgtccgcgcaagacgct

SEQ ID NO: 5923886 - DNA, 25 bp, Homo sapien
ccgagcggcccgcgatatagggttg

SEQ ID NO: 5923887 - DNA, 25 bp, Homo sapien
ggcgtcgcgctagcgtatgagtcgg

SEQ ID NO: 5923888 - DNA, 25 bp, Homo sapien
ggagcgcgtcgtatgacgcgtggga

SEQ ID NO: 5923889 - DNA, 25 bp, Homo sapien
actaggtcgcgcgttacacgccggc

SEQ ID NO: 5923890 - DNA, 25 bp, Homo sapien
gtagctgcgccgtacgacacgctgc

SEQ ID NO: 5923891 - DNA, 25 bp, Homo sapien
gacgagcgcgccgacatatggcgac

SEQ ID NO: 5923892 - DNA, 25 bp, Homo sapien
cgccgagttccgcgcgttaagtcgc

SEQ ID NO: 5923893 - DNA, 25 bp, Homo sapien
agaccgcccgacggatcgagtcacc

SEQ ID NO: 5923894 - DNA, 25 bp, Homo sapien
gtgctctcgacgtagcgcccgacgt

SEQ ID NO: 5923895 - DNA, 25 bp, Homo sapien
cgccacgcgacgtaacgtctacggg

SEQ ID NO: 5923896 - DNA, 25 bp, Homo sapien
gacgcgacacggtacgtcggggtac

SEQ ID NO: 5923897 - DNA, 25 bp, Homo sapien
ccccttcgcctagacgcgatctcgc

SEQ ID NO: 5923898 - DNA, 25 bp, Homo sapien
ccgatccgtggacgctacccatcgc

SEQ ID NO: 5923899 - DNA, 25 bp, Homo sapien
gtactgcacgatcgaccgggaggcc

SEQ ID NO: 5923900 - DNA, 25 bp, Homo sapien
ccatgcgtgcgttatcgcgcgctcc

SEQ ID NO: 5923901 - DNA, 25 bp, Homo sapien
agacgcgtagatccgtgcgccggtg

SEQ ID NO: 5923902 - DNA, 25 bp, Homo sapien
gcgtaccggtccgtacgaaggtggc

SEQ ID NO: 5923903 - DNA, 25 bp, Homo sapien
cccgcccgtatacgatcggcagctc

SEQ ID NO: 5923904 - DNA, 25 bp, Homo sapien
ctcgtgcggtccgcggtttgccatg

SEQ ID NO: 5923905 - DNA, 25 bp, Homo sapien
cagggctccctacgcgtcggcactt

SEQ ID NO: 5923906 - DNA, 25 bp, Homo sapien
ctcctcgttatagtcgcggcgcggg

SEQ ID NO: 5923907 - DNA, 25 bp, Homo sapien
cgcagatacggccggtccgttcgac

SEQ ID NO: 5923908 - DNA, 25 bp, Homo sapien
gacggtcgtatgcgggccacgtctg

SEQ ID NO: 5923909 - DNA, 25 bp, Homo sapien
tgaaccagcgcgacgtaccgcaggc

SEQ ID NO: 5923910 - DNA, 25 bp, Homo sapien
accggccctcgtgcgcgtacacttg

SEQ ID NO: 5923911 - DNA, 25 bp, Homo sapien
cgccctcgacgcaatacggcatccc

SEQ ID NO: 5923912 - DNA, 25 bp, Homo sapien
tgtggctatccgtcgggagcggacc

SEQ ID NO: 5923913 - DNA, 25 bp, Homo sapien
cccgccgcgatacgccggtcaatga

SEQ ID NO: 5923914 - DNA, 25 bp, Homo sapien
gatctttcgcgtgagcgtcgggcgg

SEQ ID NO: 5923915 - DNA, 25 bp, Homo sapien
gaccggtgcgcgcaatcggagcaca

SEQ ID NO: 5923916 - DNA, 25 bp, Homo sapien
ttggcgcccgcgtaagtcgggttcg

SEQ ID NO: 5923917 - DNA, 25 bp, Homo sapien
cgggtacgtcgcacgagtaggcctg

SEQ ID NO: 5923918 - DNA, 25 bp, Homo sapien
ggatgccgcgagactaagcgcccct

SEQ ID NO: 5923919 - DNA, 25 bp, Homo sapien
cattgccgatacgccgacggaggcc

SEQ ID NO: 5923920 - DNA, 25 bp, Homo sapien
tgcccgccccgacgcgttatcggta

SEQ ID NO: 5923921 - DNA, 25 bp, Homo sapien
cgatgcgcgtaccggagttggctcg

SEQ ID NO: 5923922 - DNA, 25 bp, Homo sapien
gtgcgagtcgtaccgcgaccttgcc

SEQ ID NO: 5923923 - DNA, 25 bp, Homo sapien
ctcgcataggccgcggttgtggcag

SEQ ID NO: 5923924 - DNA, 25 bp, Homo sapien
ctgagccacgcttccgacgcgctac

SEQ ID NO: 5923925 - DNA, 25 bp, Homo sapien
tggtcgctatcgtaagcggggcggc

SEQ ID NO: 5923926 - DNA, 25 bp, Homo sapien
gacggcgacgttcgaccgcggtact

SEQ ID NO: 5923927 - DNA, 25 bp, Homo sapien
ggcaggctacgacacgtcggatcgc

SEQ ID NO: 5923928 - DNA, 25 bp, Homo sapien
ccgactcgtgtacgcggtcttcgcc

SEQ ID NO: 5923929 - DNA, 25 bp, Homo sapien
ctcgcacgcgattacggcggcatgg

SEQ ID NO: 5923930 - DNA, 25 bp, Homo sapien
gccaccgacgggttcgcgttgcttc

SEQ ID NO: 5923931 - DNA, 25 bp, Homo sapien
cagcactcacgcgagacgggtgacc

SEQ ID NO: 5923932 - DNA, 25 bp, Homo sapien
ggcgccatagcggtcgcgtacctag

SEQ ID NO: 5923933 - DNA, 25 bp, Homo sapien
gcgaagcggtccggattaacgcgcg

SEQ ID NO: 5923934 - DNA, 25 bp, Homo sapien
tgcccaacggtcgatagcgccacgg

SEQ ID NO: 5923935 - DNA, 25 bp, Homo sapien
tccggccgggcgtaacgtaactggc

SEQ ID NO: 5923936 - DNA, 25 bp, Homo sapien
ggtcgacgcgcgactaaaccccgac

SEQ ID NO: 5923937 - DNA, 25 bp, Homo sapien
acttcccgcgcgatagacgcgccca

SEQ ID NO: 5923938 - DNA, 25 bp, Homo sapien
tcgcggcgcgtactttgcgggagtc

SEQ ID NO: 5923939 - DNA, 25 bp, Homo sapien
gtggagttcgtccgatgcgcggcct

SEQ ID NO: 5923940 - DNA, 25 bp, Homo sapien
gctgccacgccttatgtcggggtcc

SEQ ID NO: 5923941 - DNA, 25 bp, Homo sapien
ggcagtgctacttgtcgcgctcgcc

SEQ ID NO: 5923942 - DNA, 25 bp, Homo sapien
gtacggaccgcacgactgtgctcgg

SEQ ID NO: 5923943 - DNA, 25 bp, Homo sapien
cgttaaaccggtcacgcgagcccgc

SEQ ID NO: 5923944 - DNA, 25 bp, Homo sapien
tcggatatcgcgctacgcccagccg

SEQ ID NO: 5923945 - DNA, 25 bp, Homo sapien
atgcgggggtcgcgaatcagccgac

SEQ ID NO: 5923946 - DNA, 25 bp, Homo sapien
agtgcgtcgcgacgcaacgccgtgt

SEQ ID NO: 5923947 - DNA, 25 bp, Homo sapien
tgggcaaggttcgcaacgggcgtgg

SEQ ID NO: 5923948 - DNA, 25 bp, Homo sapien
gtctgcacgtaaccgctgctccggg

SEQ ID NO: 5923949 - DNA, 25 bp, Homo sapien
gggcgccgctatcggtcgacctctt

SEQ ID NO: 5923950 - DNA, 25 bp, Homo sapien
aatgcccctaacggccgactgcgcc

SEQ ID NO: 5923951 - DNA, 25 bp, Homo sapien
cttaggcgccataggatcgcccggc

SEQ ID NO: 5923952 - DNA, 25 bp, Homo sapien
ggcggtggtaatctcgcgctggagc

SEQ ID NO: 5923953 - DNA, 25 bp, Homo sapien
aaggcacgtcgtgcctacggcgacc

SEQ ID NO: 5923954 - DNA, 25 bp, Homo sapien
caccctcgtccgcgaatggcctgac

SEQ ID NO: 5923955 - DNA, 25 bp, Homo sapien
cgttccgagccctacgcgaaccgtc

SEQ ID NO: 5923956 - DNA, 25 bp, Homo sapien
gctagaaccgcgcagcgtacaccgc

SEQ ID NO: 5923957 - DNA, 25 bp, Homo sapien
tgagtaccgagtacgcgctcgcccc

SEQ ID NO: 5923958 - DNA, 25 bp, Homo sapien
actggcgcgacggtacgtttcgcgc

SEQ ID NO: 5923959 - DNA, 25 bp, Homo sapien
cccgaactacggtcgagcggtctgc

SEQ ID NO: 5923960 - DNA, 25 bp, Homo sapien
gggggagacgcgcatcgtctaccca

SEQ ID NO: 5923961 - DNA, 25 bp, Homo sapien
gctcgggtattcgcggcccgcttga

SEQ ID NO: 5923962 - DNA, 25 bp, Homo sapien
cccggcgcctcgtacgcgagtctaa

SEQ ID NO: 5923963 - DNA, 25 bp, Homo sapien
cccaaccgctacaccgcgtgggaag

SEQ ID NO: 5923964 - DNA, 25 bp, Homo sapien
ctcgtaatgcacgtcgcgctcccgg

SEQ ID NO: 5923965 - DNA, 25 bp, Homo sapien
ctctccccgcgtaggcgtactagcc

SEQ ID NO: 5923966 - DNA, 25 bp, Homo sapien
tgccgacgatcgtaccgcgttccgg

SEQ ID NO: 5923967 - DNA, 25 bp, Homo sapien
ccgttggcgcgtcgacgttctcagg

SEQ ID NO: 5923968 - DNA, 25 bp, Homo sapien
gctgggcgcgactagtacccgacgt

SEQ ID NO: 5923969 - DNA, 25 bp, Homo sapien
cacgccgttcggacgcgctaaccag

SEQ ID NO: 5923970 - DNA, 25 bp, Homo sapien
agcttgcggacgaagtcgcaccgcg

SEQ ID NO: 5923971 - DNA, 25 bp, Homo sapien
tccgtcgcgataccgcgcacccgtt

SEQ ID NO: 5923972 - DNA, 25 bp, Homo sapien
caccccccgcgaacgctaagcacag

SEQ ID NO: 5923973 - DNA, 25 bp, Homo sapien
tgggcttattacgcgccggccggac

SEQ ID NO: 5923974 - DNA, 25 bp, Homo sapien
aaccccactacgtcgcggccgcttc

SEQ ID NO: 5923975 - DNA, 25 bp, Homo sapien
gagtagacgtcgttacgcggccccg

SEQ ID NO: 5923976 - DNA, 25 bp, Homo sapien
ccatgcggcgtacgatcgagtcgcc

SEQ ID NO: 5923977 - DNA, 25 bp, Homo sapien
acgcgcgcgcgacttaggtgctcga

SEQ ID NO: 5923978 - DNA, 25 bp, Homo sapien
tgggcctaagtcgcgcgaggagcac

SEQ ID NO: 5923979 - DNA, 25 bp, Homo sapien
gagtgtgcctactcgcgtcgcacgc

SEQ ID NO: 5923980 - DNA, 25 bp, Homo sapien
ctctcgacgcaacgacggggaggac

SEQ ID NO: 5923981 - DNA, 25 bp, Homo sapien
ccctccgtcgtacgacccctatgcc

SEQ ID NO: 5923982 - DNA, 25 bp, Homo sapien
cgccatagcgcgtagcacgctgcag

SEQ ID NO: 5923983 - DNA, 25 bp, Homo sapien
cgtccggcgtagaatcgcgctcgtc

SEQ ID NO: 5923984 - DNA, 25 bp, Homo sapien
gccgaggttgcgctacgccaggaag

SEQ ID NO: 5923985 - DNA, 25 bp, Homo sapien
cgaccccgttgcgtgaccgacaagc

SEQ ID NO: 5923986 - DNA, 25 bp, Homo sapien
aaccggagccgaccgcgtaagccca

SEQ ID NO: 5923987 - DNA, 25 bp, Homo sapien
cacacccgccttacgaccgggatcg

SEQ ID NO: 5923988 - DNA, 25 bp, Homo sapien
gaaccactcgcgtagcggttcccgg

SEQ ID NO: 5923989 - DNA, 25 bp, Homo sapien
ggtccgaccgttactcgcgggatcg

SEQ ID NO: 5923990 - DNA, 25 bp, Homo sapien
ttggccttagcggacgcgtgtcgcc

SEQ ID NO: 5923991 - DNA, 25 bp, Homo sapien
gatgccgtagactcgcgcggctacc

SEQ ID NO: 5923992 - DNA, 25 bp, Homo sapien
gagccgtagcgctaacgcccccgat

SEQ ID NO: 5923993 - DNA, 25 bp, Homo sapien
accgcgtcgcgtgagacgggaacac

SEQ ID NO: 5923994 - DNA, 25 bp, Homo sapien
cacgtcgtacggttcgcggcagtgc

SEQ ID NO: 5923995 - DNA, 25 bp, Homo sapien
gccctttacgcggggatcggacgac

SEQ ID NO: 5923996 - DNA, 25 bp, Homo sapien
tcaggggcgtccgacgtcttcgcgt

SEQ ID NO: 5923997 - DNA, 25 bp, Homo sapien
gtgctgtcggacgtgcgagcgttgc

SEQ ID NO: 5923998 - DNA, 25 bp, Homo sapien
gcgtgtctaacgtcgaccagggggg

SEQ ID NO: 5923999 - DNA, 25 bp, Homo sapien
tctggcataacggcacgcggcccgt

SEQ ID NO: 5924000 - DNA, 25 bp, Homo sapien
gccgtgtccgcgtagcgtaacgctg

SEQ ID NO: 5924001 - DNA, 25 bp, Homo sapien
gtgtaccgatcgtaccggtccgcgg

SEQ ID NO: 5924002 - DNA, 25 bp, Homo sapien
agccgtgtatgcgcgtcggcgctca

SEQ ID NO: 5924003 - DNA, 25 bp, Homo sapien
tagggggtagtcgcggaccgtggct

SEQ ID NO: 5924004 - DNA, 25 bp, Homo sapien
gcgcgcacgtgtagcgcgtctacca

SEQ ID NO: 5924005 - DNA, 25 bp, Homo sapien
ccgggcttcgcggacaggtcagaga

SEQ ID NO: 5924006 - DNA, 25 bp, Homo sapien
gcccagccccgtgtcgcgagcttaa

SEQ ID NO: 5924007 - DNA, 25 bp, Homo sapien
cgcccggcacgcgaccggtttttca

SEQ ID NO: 5924008 - DNA, 25 bp, Homo sapien
accagcaccgacgtagcgcggacag

SEQ ID NO: 5924009 - DNA, 25 bp, Homo sapien
cccgcaacgatcggggcgtacctca

SEQ ID NO: 5924010 - DNA, 25 bp, Homo sapien
cggcggttggcgcgttaggatctgg

SEQ ID NO: 5924011 - DNA, 25 bp, Homo sapien
ctacgcggtcgctagcgcaggttcg

SEQ ID NO: 5924012 - DNA, 25 bp, Homo sapien
agaggcatcgagtgcgcgtgcgctg

SEQ ID NO: 5924013 - DNA, 25 bp, Homo sapien
tccctaccgttgcgccctacccctc

SEQ ID NO: 5924014 - DNA, 25 bp, Homo sapien
ccgcgcgtaggccgtcgctagtaac

SEQ ID NO: 5924015 - DNA, 25 bp, Homo sapien
gctgtccgcgacgtgttacgctgcg

SEQ ID NO: 5924016 - DNA, 25 bp, Homo sapien
cgctgtccgacgtacgactgccagc

SEQ ID NO: 5924017 - DNA, 25 bp, Homo sapien
gggatctcaacccgtacggggcgtg

SEQ ID NO: 5924018 - DNA, 25 bp, Homo sapien
gccatgtactaggccgcgtctcccg

SEQ ID NO: 5924019 - DNA, 25 bp, Homo sapien
ggtgtgcgatacggcgcgttggagg

SEQ ID NO: 5924020 - DNA, 25 bp, Homo sapien
gattaagcgtgtcggacggcggcgc

SEQ ID NO: 5924021 - DNA, 25 bp, Homo sapien
tgggcgggcgcgtactcgatagggt

SEQ ID NO: 5924022 - DNA, 25 bp, Homo sapien
ggacctcacggtcgacgcttcggag

SEQ ID NO: 5924023 - DNA, 25 bp, Homo sapien
gctccgcagccgatatacgggaggg

SEQ ID NO: 5924024 - DNA, 25 bp, Homo sapien
ccgatgcgttgcgcgtgcatcgtcc

SEQ ID NO: 5924025 - DNA, 25 bp, Homo sapien
gtctagaccggtctaccgctggggg

SEQ ID NO: 5924026 - DNA, 25 bp, Homo sapien
actctatagcggggcggatgcccgg

SEQ ID NO: 5924027 - DNA, 25 bp, Homo sapien
tgctgggcgcgtcaagggactacgc

SEQ ID NO: 5924028 - DNA, 25 bp, Homo sapien
tggctcccgccgcataacgcgtcca

SEQ ID NO: 5924029 - DNA, 25 bp, Homo sapien
acagcgtggtctagcgcgaggtgcc

SEQ ID NO: 5924030 - DNA, 25 bp, Homo sapien
ttggggcgcgtacgatgtcgccgct

SEQ ID NO: 5924031 - DNA, 25 bp, Homo sapien
ccccccgaccgacacgctaaagtgc

SEQ ID NO: 5924032 - DNA, 25 bp, Homo sapien
ctgagaccgatcgcggacgctggca

SEQ ID NO: 5924033 - DNA, 25 bp, Homo sapien
ccgagagcgtaccgccctagacgct

SEQ ID NO: 5924034 - DNA, 25 bp, Homo sapien
ccgtggacctaaccggacgcatccg

SEQ ID NO: 5924035 - DNA, 25 bp, Homo sapien
ccgtacatcatgcgcgcgacacccc

SEQ ID NO: 5924036 - DNA, 25 bp, Homo sapien
cgatcccggtcgtaaggcgggtgtg

SEQ ID NO: 5924037 - DNA, 25 bp, Homo sapien
ggagagagactatcgcgctgccgcc

SEQ ID NO: 5924038 - DNA, 25 bp, Homo sapien
tcgacggcgaacggcctacactgcg

SEQ ID NO: 5924039 - DNA, 25 bp, Homo sapien
catgcttacacgtcgcggctggggg

SEQ ID NO: 5924040 - DNA, 25 bp, Homo sapien
tccccgcgctagtcgcgttgtggtc

SEQ ID NO: 5924041 - DNA, 25 bp, Homo sapien
ggcgagcgcgacaagtagcactgcc

SEQ ID NO: 5924042 - DNA, 25 bp, Homo sapien
cagcgcacgcgcactcgatgcctct

SEQ ID NO: 5924043 - DNA, 25 bp, Homo sapien
cgccggacgtccggcgtagtacatg

SEQ ID NO: 5924044 - DNA, 25 bp, Homo sapien
ctccgaagcgtcgaccgtgaggtcc

SEQ ID NO: 5924045 - DNA, 25 bp, Homo sapien
ggggccgcgatgccgctagataagc

SEQ ID NO: 5924046 - DNA, 25 bp, Homo sapien
gaccacataccccgcgaccgacgca

SEQ ID NO: 5924047 - DNA, 25 bp, Homo sapien
ccggtccgacggtagcgctacgaga

SEQ ID NO: 5924048 - DNA, 25 bp, Homo sapien
gatcgctcgcgacgggctacgatcc

SEQ ID NO: 5924049 - DNA, 25 bp, Homo sapien
gcgatgggtagcgtccacggatcgg

SEQ ID NO: 5924050 - DNA, 25 bp, Homo sapien
ccgggtccgcggtataggcgagcat

SEQ ID NO: 5924051 - DNA, 25 bp, Homo sapien
cctgcgtagtgccgtcgcgtcactg

SEQ ID NO: 5924052 - DNA, 25 bp, Homo sapien
gttactagcgacggcctacgcgcgg

SEQ ID NO: 5924053 - DNA, 25 bp, Homo sapien
ggtctccgcgtcgtaggtcccaggt

SEQ ID NO: 5924054 - DNA, 25 bp, Homo sapien
gtagctcgcgcggggctatcgagtc

SEQ ID NO: 5924055 - DNA, 25 bp, Homo sapien
ccctgtgatcctacgccgagctggg

SEQ ID NO: 5924056 - DNA, 25 bp, Homo sapien
gcgatccgacgtgtcgtagcctgcc

SEQ ID NO: 5924057 - DNA, 25 bp, Homo sapien
tcgagcacctaagtcgcgcgcgcgt

SEQ ID NO: 5924058 - DNA, 25 bp, Homo sapien
tcctgcgtacgagccggacgccgta

SEQ ID NO: 5924059 - DNA, 25 bp, Homo sapien
caggtgctatccgcgctagctgggg

SEQ ID NO: 5924060 - DNA, 25 bp, Homo sapien
aggtacgcgtaacgctccggcaggc

SEQ ID NO: 5924061 - DNA, 25 bp, Homo sapien
tcgcggaccgctcgtaaggatccgc

SEQ ID NO: 5924062 - DNA, 25 bp, Homo sapien
ccacaggtcgtgtaccggaccgcgt

SEQ ID NO: 5924063 - DNA, 25 bp, Homo sapien
cgcgcggcgtcgcgaacattacgca

SEQ ID NO: 5924064 - DNA, 25 bp, Homo sapien
gtcgaacccgtgtcgcgatgccgct

SEQ ID NO: 5924065 - DNA, 25 bp, Homo sapien
gccggcgcgtcgtaacccgttcagt

SEQ ID NO: 5924066 - DNA, 25 bp, Homo sapien
gcgaggtcgggtcgacgcacttcag

SEQ ID NO: 5924067 - DNA, 25 bp, Homo sapien
acacggcgttgcgtcgcgacgcact

SEQ ID NO: 5924068 - DNA, 25 bp, Homo sapien
cctccaacgcgccgtatcgcacacc

SEQ ID NO: 5924069 - DNA, 25 bp, Homo sapien
ccgggagctagctcgcgacccgttt

SEQ ID NO: 5924070 - DNA, 25 bp, Homo sapien
cggccgtatgcgctaccggcatggt

SEQ ID NO: 5924071 - DNA, 25 bp, Homo sapien
catcatcccgatacgcgggggggct

SEQ ID NO: 5924072 - DNA, 25 bp, Homo sapien
gtccggttagctaacgcgcccgcag

SEQ ID NO: 5924073 - DNA, 25 bp, Homo sapien
gagccgatggacgacccgcctttgg

SEQ ID NO: 5924074 - DNA, 25 bp, Homo sapien
tgggtagacgatgcgcgtctccccc

SEQ ID NO: 5924075 - DNA, 25 bp, Homo sapien
tagcgatgtcaacgcgcgaggccgg

SEQ ID NO: 5924076 - DNA, 25 bp, Homo sapien
tccgctgactgcgcgaatctcgggc

SEQ ID NO: 5924077 - DNA, 25 bp, Homo sapien
ggcgggtcgacgcgctaccctagtt

SEQ ID NO: 5924078 - DNA, 25 bp, Homo sapien
taggcatcggcgcgtagaggggcga

SEQ ID NO: 5924079 - DNA, 25 bp, Homo sapien
gccgtggtaagcccgcgtaggctag

SEQ ID NO: 5924080 - DNA, 25 bp, Homo sapien
caccttgttatcccgcgacggcgcg

SEQ ID NO: 5924081 - DNA, 25 bp, Homo sapien
cggctgggcgtagcgcgatatccga

SEQ ID NO: 5924082 - DNA, 25 bp, Homo sapien
ccctgctaatccgcgcagtaggccg

SEQ ID NO: 5924083 - DNA, 25 bp, Homo sapien
gtactgtgcgcgataccgcgctggc

SEQ ID NO: 5924084 - DNA, 25 bp, Homo sapien
tgtgctccgattgcgcgcaccggtc

SEQ ID NO: 5924085 - DNA, 25 bp, Homo sapien
gctcgtgtgccgatacgcgtgcgac

SEQ ID NO: 5924086 - DNA, 25 bp, Homo sapien
gctggttgtcgacgctacccggcag

SEQ ID NO: 5924087 - DNA, 25 bp, Homo sapien
cctgccaccggtcgtacgggtcttg

SEQ ID NO: 5924088 - DNA, 25 bp, Homo sapien
ccgcggaccggtacgatcggtacac

SEQ ID NO: 5924089 - DNA, 25 bp, Homo sapien
cccgcgttagatcggcgcgtggtag

SEQ ID NO: 5924090 - DNA, 25 bp, Homo sapien
cccacaggtcgctcgcgtaagggtg

SEQ ID NO: 5924091 - DNA, 25 bp, Homo sapien
tcccacgcgtcatacgacgcgctcc

SEQ ID NO: 5924092 - DNA, 25 bp, Homo sapien
gggtcgatgtcggtacgcgggatcg

SEQ ID NO: 5924093 - DNA, 25 bp, Homo sapien
cagacgactagatcgcgcggcctgg

SEQ ID NO: 5924094 - DNA, 25 bp, Homo sapien
gcaacgctcgcacgtccgacagcac

SEQ ID NO: 5924095 - DNA, 25 bp, Homo sapien
cacccctatagcgcgacgcaggagc

SEQ ID NO: 5924096 - DNA, 25 bp, Homo sapien
gtgaccgcgaataccgtcgccgcgt

SEQ ID NO: 5924097 - DNA, 25 bp, Homo sapien
taccgataacgcgtcggggcgggca

SEQ ID NO: 5924098 - DNA, 25 bp, Homo sapien
gatgggcaatacgtcgcgcgccagg

SEQ ID NO: 5924099 - DNA, 25 bp, Homo sapien
ttcgagcgtcgtgatcgggacccgg

SEQ ID NO: 5924100 - DNA, 25 bp, Homo sapien
gaggggtagggcgcaacggtaggga

SEQ ID NO: 5924101 - DNA, 25 bp, Homo sapien
cacgccctagtcggcgacgagtctc

SEQ ID NO: 5924102 - DNA, 25 bp, Homo sapien
gggatggacgtcgcccgtagtctgg

SEQ ID NO: 5924103 - DNA, 25 bp, Homo sapien
gggatcccccggtgatcgttggtcg

SEQ ID NO: 5924104 - DNA, 25 bp, Homo sapien
ggcgacacgcgtccgctaaggccaa

SEQ ID NO: 5924105 - DNA, 25 bp, Homo sapien
gcactttagcgtgtcggtcgggggg

SEQ ID NO: 5924106 - DNA, 25 bp, Homo sapien
aacagccccgttgcgctagccgtgg

SEQ ID NO: 5924107 - DNA, 25 bp, Homo sapien
ggcatgcgccttcggacgtcaccgt

SEQ ID NO: 5924108 - DNA, 25 bp, Homo sapien
gcccgttccgcgatcggaccgtgta

SEQ ID NO: 5924109 - DNA, 25 bp, Homo sapien
gcagaccgctcgaccgtagttcggg

SEQ ID NO: 5924110 - DNA, 25 bp, Homo sapien
ctgcctcgcgctcgtcatgcttggc

SEQ ID NO: 5924111 - DNA, 25 bp, Homo sapien
gcccgagaccgggtagacgaacagg

SEQ ID NO: 5924112 - DNA, 25 bp, Homo sapien
gcctgcggtacgtcgcgctggttca

SEQ ID NO: 5924113 - DNA, 25 bp, Homo sapien
atgccacgcgtacgttgggccggca

SEQ ID NO: 5924114 - DNA, 25 bp, Homo sapien
ggggccgatggacgtacgccacttg

SEQ ID NO: 5924115 - DNA, 25 bp, Homo sapien
gtgttcccgtctcacgcgacgcggt

SEQ ID NO: 5924116 - DNA, 25 bp, Homo sapien
ggggctgtccgccggtagtgaagct

SEQ ID NO: 5924117 - DNA, 25 bp, Homo sapien
gaggttgacggtcgatccgctccgc

SEQ ID NO: 5924118 - DNA, 25 bp, Homo sapien
cccgcgctagtcgcgtcgattgagc

SEQ ID NO: 5924119 - DNA, 25 bp, Homo sapien
ccgctgtgtacgggtcgcgggatct

SEQ ID NO: 5924120 - DNA, 25 bp, Homo sapien
agccacggtccgcgactacccccta

SEQ ID NO: 5924121 - DNA, 25 bp, Homo sapien
ggcgaagaccgcgtacacgagtcgg

SEQ ID NO: 5924122 - DNA, 25 bp, Homo sapien
gagtgcgcgacggattggccaaccg

SEQ ID NO: 5924123 - DNA, 25 bp, Homo sapien
gcggtcccgcgtcgtacgtctaacc

SEQ ID NO: 5924124 - DNA, 25 bp, Homo sapien
gcctccagcgcgtactacggttgcg

SEQ ID NO: 5924125 - DNA, 25 bp, Homo sapien
tgcggccgatctacgcggtagccag

SEQ ID NO: 5924126 - DNA, 25 bp, Homo sapien
gagaccacgcatcgagtcgcccacg

SEQ ID NO: 5924127 - DNA, 25 bp, Homo sapien
ccgggtgactataccgcgcagtccg

SEQ ID NO: 5924128 - DNA, 25 bp, Homo sapien
ggcccgaaccggtcgcgaactccat

SEQ ID NO: 5924129 - DNA, 25 bp, Homo sapien
tcgggggacggcgcttatagcgtgc

SEQ ID NO: 5924130 - DNA, 25 bp, Homo sapien
gcgcatgcggtctacgctaggaccg

SEQ ID NO: 5924131 - DNA, 25 bp, Homo sapien
gccgtgtggaccgttgcgcgatgac

SEQ ID NO: 5924132 - DNA, 25 bp, Homo sapien
acaccgcgcgagtagaccgcgaacc

SEQ ID NO: 5924133 - DNA, 25 bp, Homo sapien
gccgaacgcgcgagtcctaactgcc

SEQ ID NO: 5924134 - DNA, 25 bp, Homo sapien
ggaggcaagtccgtcgcgatgcgtg

SEQ ID NO: 5924135 - DNA, 25 bp, Homo sapien
tatgtgcgtacgtagcgcggggggg

SEQ ID NO: 5924136 - DNA, 25 bp, Homo sapien
gcgtgcgacgcgagtaggcacactc

SEQ ID NO: 5924137 - DNA, 25 bp, Homo sapien
gaccactcgtatcgccgcacccgga

SEQ ID NO: 5924138 - DNA, 25 bp, Homo sapien
ggcaggaggtccgattcgcaggtgc

SEQ ID NO: 5924139 - DNA, 25 bp, Homo sapien
agaccgcgtcgacgggctaagccgt

SEQ ID NO: 5924140 - DNA, 25 bp, Homo sapien
gctcggatcggtagcgcgcgatgag

SEQ ID NO: 5924141 - DNA, 25 bp, Homo sapien
ccgtgtttcggacggtcgcgctcca

SEQ ID NO: 5924142 - DNA, 25 bp, Homo sapien
ccagatcctaacgcgccaaccgccg

SEQ ID NO: 5924143 - DNA, 25 bp, Homo sapien
aacgtctagcgtacgcccggagccc

SEQ ID NO: 5924144 - DNA, 25 bp, Homo sapien
cgggagtatcgcgctcggaatggcc

SEQ ID NO: 5924145 - DNA, 25 bp, Homo sapien
gcggggtatgacgccggacacctct

SEQ ID NO: 5924146 - DNA, 25 bp, Homo sapien
tcacgcgcgcgcgatctatccccga

SEQ ID NO: 5924147 - DNA, 25 bp, Homo sapien
gcgcgaaacgtaccgtcgcgccagt

SEQ ID NO: 5924148 - DNA, 25 bp, Homo sapien
ttccgcacggcgggtatcgcatgcg

SEQ ID NO: 5924149 - DNA, 25 bp, Homo sapien
cgcgctcgcgctaacacgtggccaa

SEQ ID NO: 5924150 - DNA, 25 bp, Homo sapien
ggagacgtcgcgcgtactaccccca

SEQ ID NO: 5924151 - DNA, 25 bp, Homo sapien
cgtggctaagtccgcgccgcgaaca

SEQ ID NO: 5924152 - DNA, 25 bp, Homo sapien
gcaatccgcgcgtattcggcggtcc

SEQ ID NO: 5924153 - DNA, 25 bp, Homo sapien
ggcacctcgcgctagaccacgctgt

SEQ ID NO: 5924154 - DNA, 25 bp, Homo sapien
cgcgggccgcgtaacgcaactacca

SEQ ID NO: 5924155 - DNA, 25 bp, Homo sapien
taccgaagcggtcgacggtcgggtg

SEQ ID NO: 5924156 - DNA, 25 bp, Homo sapien
cgggatacgaccgaaccgtgcggct

SEQ ID NO: 5924157 - DNA, 25 bp, Homo sapien
ggcataggggtcgtacgacggaggg

SEQ ID NO: 5924158 - DNA, 25 bp, Homo sapien
ggactaggtgcgcgcgatacccctg

SEQ ID NO: 5924159 - DNA, 25 bp, Homo sapien
cgctcccgcggtcgaggtaccatac

SEQ ID NO: 5924160 - DNA, 25 bp, Homo sapien
ggtcacccgtctcgcgtgagtgctg

SEQ ID NO: 5924161 - DNA, 25 bp, Homo sapien
gtcctctgcgctactagcgcctggg

SEQ ID NO: 5924162 - DNA, 25 bp, Homo sapien
caagtgtacgcgcacgagggccggt

SEQ ID NO: 5924163 - DNA, 25 bp, Homo sapien
gaccgcaccgcgatcccgttggtag

SEQ ID NO: 5924164 - DNA, 25 bp, Homo sapien
aacgcatacccgcgcgaacgagccc

SEQ ID NO: 5924165 - DNA, 25 bp, Homo sapien
gtcgtccgatccccgcgtaaagggc

SEQ ID NO: 5924166 - DNA, 25 bp, Homo sapien
ggcttgatagaccgaccgcgggagc

SEQ ID NO: 5924167 - DNA, 25 bp, Homo sapien
gttggcttcgctccgcgacgatgcg

SEQ ID NO: 5924168 - DNA, 25 bp, Homo sapien
tccctttagcgttcgcggccagccg

SEQ ID NO: 5924169 - DNA, 25 bp, Homo sapien
cgccctccggtcgtacacgctacca

SEQ ID NO: 5924170 - DNA, 25 bp, Homo sapien
tgaggtacgccccgatcgttgcggg

SEQ ID NO: 5924171 - DNA, 25 bp, Homo sapien
gtagcgcgtcggaagcgtggctcag

SEQ ID NO: 5924172 - DNA, 25 bp, Homo sapien
agccgccatgtcgcgccgtatggag

SEQ ID NO: 5924173 - DNA, 25 bp, Homo sapien
tcctcggtacgtagggcgcaacggc

SEQ ID NO: 5924174 - DNA, 25 bp, Homo sapien
ctcgagcatacgagcgcgtagcccg

SEQ ID NO: 5924175 - DNA, 25 bp, Homo sapien
agcccgcgcgccgtatgaccctaca

SEQ ID NO: 5924176 - DNA, 25 bp, Homo sapien
gcacaccgatgcgtacgggtccggt

SEQ ID NO: 5924177 - DNA, 25 bp, Homo sapien
tgcctacgtcgggaccgtagcggct

SEQ ID NO: 5924178 - DNA, 25 bp, Homo sapien
gtcaggccattcgcggacgagggtg

SEQ ID NO: 5924179 - DNA, 25 bp, Homo sapien
gggccgccgcgacgtagtgttgtag

SEQ ID NO: 5924180 - DNA, 25 bp, Homo sapien
caaaggtacggtcggccgacgagcc

SEQ ID NO: 5924181 - DNA, 25 bp, Homo sapien
caccgcagtcggaccggtaagctgg

SEQ ID NO: 5924182 - DNA, 25 bp, Homo sapien
ccctcccgtatatcggctgcggagc

SEQ ID NO: 5924183 - DNA, 25 bp, Homo sapien
ggggaatcgcgtcacgtgtccggtc

SEQ ID NO: 5924184 - DNA, 25 bp, Homo sapien
ccgacgcgggtttaggcgtgggtga

SEQ ID NO: 5924185 - DNA, 25 bp, Homo sapien
cggagccgcgaggtaaccttccgca

SEQ ID NO: 5924186 - DNA, 25 bp, Homo sapien
cagctcgcggggtattgcgggcatc

SEQ ID NO: 5924187 - DNA, 25 bp, Homo sapien
ctctgcgctcgacgtacccggagca

SEQ ID NO: 5924188 - DNA, 25 bp, Homo sapien
agccgcgtagcgagacgcgtagtcg

SEQ ID NO: 5924189 - DNA, 25 bp, Homo sapien
ggtgacccgtatcgcaccgctaggg

SEQ ID NO: 5924190 - DNA, 25 bp, Homo sapien
tgagggaaggccgaacgactggccc

SEQ ID NO: 5924191 - DNA, 25 bp, Homo sapien
ccacggttagcccgcgtcgaccgaa

SEQ ID NO: 5924192 - DNA, 25 bp, Homo sapien
ggggtgtcgcgcgcatgatgtacgg

SEQ ID NO: 5924193 - DNA, 25 bp, Homo sapien
gatgggcccctacgtcgcatccacc

SEQ ID NO: 5924194 - DNA, 25 bp, Homo sapien
caggtcacgacgcggtcgtcgcgta

SEQ ID NO: 5924195 - DNA, 25 bp, Homo sapien
accggctacgcgctcacggcctcat

SEQ ID NO: 5924196 - DNA, 25 bp, Homo sapien
agcgtcttgcgcggacgttctgcgc

SEQ ID NO: 5924197 - DNA, 25 bp, Homo sapien
gtgctcctcgcgcgacttaggccca

SEQ ID NO: 5924198 - DNA, 25 bp, Homo sapien
ccagcaccgtactaggcgctgctgc

SEQ ID NO: 5924199 - DNA, 25 bp, Homo sapien
gtgcactcgacggcgtacggctgga

SEQ ID NO: 5924200 - DNA, 25 bp, Homo sapien
ccatgccgccgtaatcgcgtgcgag

SEQ ID NO: 5924201 - DNA, 25 bp, Homo sapien
tgcgggccgcgcgattaccttaccg

SEQ ID NO: 5924202 - DNA, 25 bp, Homo sapien
ggaggattacgcgcgccgactgacc

SEQ ID NO: 5924203 - DNA, 25 bp, Homo sapien
ggcagacggcttgcgctaggggtca

SEQ ID NO: 5924204 - DNA, 25 bp, Homo sapien
atgggggttcgcgctagcgcaggga

SEQ ID NO: 5924205 - DNA, 25 bp, Homo sapien
ttgcgacggccgatacgtcgcagcg

SEQ ID NO: 5924206 - DNA, 25 bp, Homo sapien
cgggagacgcggcctagtacatggc

SEQ ID NO: 5924207 - DNA, 25 bp, Homo sapien
agtttgcatctacgcgcggggccgg

SEQ ID NO: 5924208 - DNA, 25 bp, Homo sapien
ccggaacgcggtacgatcgtcggca

SEQ ID NO: 5924209 - DNA, 25 bp, Homo sapien
gtcccacgacgcgtagctttgggcc

SEQ ID NO: 5924210 - DNA, 25 bp, Homo sapien
tgagcgccgacgcgcatacacggct

SEQ ID NO: 5924211 - DNA, 25 bp, Homo sapien
ggttccatcgcgcgagtgtccccag

SEQ ID NO: 5924212 - DNA, 25 bp, Homo sapien
ggaatccgcccgagcgtatgcgtgg

SEQ ID NO: 5924213 - DNA, 25 bp, Homo sapien
cgagccaactccggtacgcgcatcg

SEQ ID NO: 5924214 - DNA, 25 bp, Homo sapien
cggcaccgcggcgctactagctaga

SEQ ID NO: 5924215 - DNA, 25 bp, Homo sapien
aggctataccgccgctcgagaggcg

SEQ ID NO: 5924216 - DNA, 25 bp, Homo sapien
tctcggactgcgcgtagcggctgga

SEQ ID NO: 5924217 - DNA, 25 bp, Homo sapien
ggcacccgtacgacccgctcactga

SEQ ID NO: 5924218 - DNA, 25 bp, Homo sapien
gctgagttatcgcgggccccctcga

SEQ ID NO: 5924219 - DNA, 25 bp, Homo sapien
gcctcgctagcgagttcgcagggtg

SEQ ID NO: 5924220 - DNA, 25 bp, Homo sapien
aggtcccggtacgtaggcgccgtga

SEQ ID NO: 5924221 - DNA, 25 bp, Homo sapien
cagtgaggtccgctagacgccaggc

SEQ ID NO: 5924222 - DNA, 25 bp, Homo sapien
cggctagtcgcgagttagcgacgcg

SEQ ID NO: 5924223 - DNA, 25 bp, Homo sapien
cttcctggcgtagcgcaacctcggc

SEQ ID NO: 5924224 - DNA, 25 bp, Homo sapien
acagggggcgcgacgtacggcattc

SEQ ID NO: 5924225 - DNA, 25 bp, Homo sapien
gggacctgcggacggcgtacgactt

SEQ ID NO: 5924226 - DNA, 25 bp, Homo sapien
tgcaggcggcgctctatcggggtca

SEQ ID NO: 5924227 - DNA, 25 bp, Homo sapien
gggtcgcgcgcaatcccgtctagtc

SEQ ID NO: 5924228 - DNA, 25 bp, Homo sapien
aggtcgtaggtcggcgcgttggcct

SEQ ID NO: 5924229 - DNA, 25 bp, Homo sapien
ccgcccgacgctcacgcgaaagatc

SEQ ID NO: 5924230 - DNA, 25 bp, Homo sapien
ggggccggatcgacgttcgtagctc

SEQ ID NO: 5924231 - DNA, 25 bp, Homo sapien
atcgcgcgatacggcgcctttgccg

SEQ ID NO: 5924232 - DNA, 25 bp, Homo sapien
gtgcgaccgcgcgaagtaaacgcgc

SEQ ID NO: 5924233 - DNA, 25 bp, Homo sapien
cttcgggcggcctatcgtacgcacg

SEQ ID NO: 5924234 - DNA, 25 bp, Homo sapien
gcgcaagtcgaccgtctactcggcg

SEQ ID NO: 5924235 - DNA, 25 bp, Homo sapien
gaagcaacgcgaacccgtcggtggc

SEQ ID NO: 5924236 - DNA, 25 bp, Homo sapien
gctccagcgcgagattaccaccgcc

SEQ ID NO: 5924237 - DNA, 25 bp, Homo sapien
tccagaccgacgtacgacgccgcga

SEQ ID NO: 5924238 - DNA, 25 bp, Homo sapien
tcaatcgtcggatagcgcgggcccc

SEQ ID NO: 5924239 - DNA, 25 bp, Homo sapien
gacgagcgcgattctacgccggacg

SEQ ID NO: 5924240 - DNA, 25 bp, Homo sapien
gactcccgcaaagtacgcgccgcga

SEQ ID NO: 5924241 - DNA, 25 bp, Homo sapien
ccgggcatccgccccgctatagagt

SEQ ID NO: 5924242 - DNA, 25 bp, Homo sapien
gcgacttaacgcgcggaactcggcg

SEQ ID NO: 5924243 - DNA, 25 bp, Homo sapien
tagagctgaccgttgcgcgctgcgg

SEQ ID NO: 5924244 - DNA, 25 bp, Homo sapien
acgtggaccgctagtggcgttcccc

SEQ ID NO: 5924245 - DNA, 25 bp, Homo sapien
ctgagcgattgcggtcgcgcgctct

SEQ ID NO: 5924246 - DNA, 25 bp, Homo sapien
ccgcagccgcgtagacgaccgtttg

SEQ ID NO: 5924247 - DNA, 25 bp, Homo sapien
cgcggtgcgacttcgtccgcaagct

SEQ ID NO: 5924248 - DNA, 25 bp, Homo sapien
gcgtgcggaccgtcgtaacggcgat

SEQ ID NO: 5924249 - DNA, 25 bp, Homo sapien
aaccggacgacacgcggtaagcgcg

SEQ ID NO: 5924250 - DNA, 25 bp, Homo sapien
gcttgcgtcgcacgacgctaacggc

SEQ ID NO: 5924251 - DNA, 25 bp, Homo sapien
caccggcgcacggatctacgcgtct

SEQ ID NO: 5924252 - DNA, 25 bp, Homo sapien
ccgggagcgcgacgtgcattacgag

SEQ ID NO: 5924253 - DNA, 25 bp, Homo sapien
gtaccccgacgtaccgtgtcgcgtc

SEQ ID NO: 5924254 - DNA, 25 bp, Homo sapien
gggaaccgtcgaaggtcgcagggac

SEQ ID NO: 5924255 - DNA, 25 bp, Homo sapien
cgcggcggcgacgtaatgcaacggt

SEQ ID NO: 5924256 - DNA, 25 bp, Homo sapien
cgcgcgttaatccggaccgcttcgc

SEQ ID NO: 5924257 - DNA, 25 bp, Homo sapien
acgcgaagacgtcggacgcccctga

SEQ ID NO: 5924258 - DNA, 25 bp, Homo sapien
gagtccgcgctatcgcaaggggtgc

SEQ ID NO: 5924259 - DNA, 25 bp, Homo sapien
ggtccgctcccgacggatagccaca

SEQ ID NO: 5924260 - DNA, 25 bp, Homo sapien
ggccctgtatacgccggaccctgag

SEQ ID NO: 5924261 - DNA, 25 bp, Homo sapien
cgtcgtcgcgcgacttactgcggga

SEQ ID NO: 5924262 - DNA, 25 bp, Homo sapien
cgaggctatacgcggtacgctccgc

SEQ ID NO: 5924263 - DNA, 25 bp, Homo sapien
cctcggctacgggtcgcgctatgac

SEQ ID NO: 5924264 - DNA, 25 bp, Homo sapien
ttccgctacgcgatcgggtggtggc

SEQ ID NO: 5924265 - DNA, 25 bp, Homo sapien
ccgcaaccgaatacgcgcgcgcaga

SEQ ID NO: 5924266 - DNA, 25 bp, Homo sapien
ggcctccgtcggcgtatcggcaatg

SEQ ID NO: 5924267 - DNA, 25 bp, Homo sapien
tggtagacgcgctacacgtgcgcgc

SEQ ID NO: 5924268 - DNA, 25 bp, Homo sapien
gggagcgcggccgtatacggtgttg

SEQ ID NO: 5924269 - DNA, 25 bp, Homo sapien
ggcattcggacgtatcggacgggcg

SEQ ID NO: 5924270 - DNA, 25 bp, Homo sapien
tgccagcgtccgcgatcggtctcag

SEQ ID NO: 5924271 - DNA, 25 bp, Homo sapien
caccgcacgtccggtcggagctgaa

SEQ ID NO: 5924272 - DNA, 25 bp, Homo sapien
cacctgtcgcgtatcgggacccgca

SEQ ID NO: 5924273 - DNA, 25 bp, Homo sapien
gagtgtccgaccgcgcgtacttgcg

SEQ ID NO: 5924274 - DNA, 25 bp, Homo sapien
ggacccactagaccggcgccatgga

SEQ ID NO: 5924275 - DNA, 25 bp, Homo sapien
ccgtggcgctatcgaccgttgggca

SEQ ID NO: 5924276 - DNA, 25 bp, Homo sapien
tcggggtcataccgcgggtatcgcg

SEQ ID NO: 5924277 - DNA, 25 bp, Homo sapien
cgggtcatacgaccgacgtagggcc

SEQ ID NO: 5924278 - DNA, 25 bp, Homo sapien
cccggagcagcggttacgtgcagac

SEQ ID NO: 5924279 - DNA, 25 bp, Homo sapien
ggctagtacgcctacgcggggagag

SEQ ID NO: 5924280 - DNA, 25 bp, Homo sapien
tgtcggacctagtacgcggagccgc

SEQ ID NO: 5924281 - DNA, 25 bp, Homo sapien
gccggcgtgtaacgcgcgacctagt

SEQ ID NO: 5924282 - DNA, 25 bp, Homo sapien
gcctgtcgcgacgtaacagggacgg

SEQ ID NO: 5924283 - DNA, 25 bp, Homo sapien
cccgcaacgcgcggaacatgcagga

SEQ ID NO: 5924284 - DNA, 25 bp, Homo sapien
agcgtctagggcggtacgctctcgg

SEQ ID NO: 5924285 - DNA, 25 bp, Homo sapien
ggcgcagtcggccgttaggggcatt

SEQ ID NO: 5924286 - DNA, 25 bp, Homo sapien
gtgccactacggcgcgtctcgagtg

SEQ ID NO: 5924287 - DNA, 25 bp, Homo sapien
cacgccccgtacgggttgagatccc

SEQ ID NO: 5924288 - DNA, 25 bp, Homo sapien
cagcgggctcgcggatacgtgagtc

SEQ ID NO: 5924289 - DNA, 25 bp, Homo sapien
cgtggccgccggtcggataaccagt

SEQ ID NO: 5924290 - DNA, 25 bp, Homo sapien
caacgctcgatcggtccgacgcgct

SEQ ID NO: 5924291 - DNA, 25 bp, Homo sapien
acgtcgggtactagtcgcgcccagc

SEQ ID NO: 5924292 - DNA, 25 bp, Homo sapien
cgcttcacggccggcgtattgaggg

SEQ ID NO: 5924293 - DNA, 25 bp, Homo sapien
ctgtgcttagcgttcgcggggggtg

SEQ ID NO: 5924294 - DNA, 25 bp, Homo sapien
cacgtagcgtataagcgcggcgccg

SEQ ID NO: 5924295 - DNA, 25 bp, Homo sapien
cgcacgtagcggtacgcgtggatgg

SEQ ID NO: 5924296 - DNA, 25 bp, Homo sapien
gcagtccggaaacgcgtagccgagc

SEQ ID NO: 5924297 - DNA, 25 bp, Homo sapien
gcggaacgtaccgacccgcgagtct

SEQ ID NO: 5924298 - DNA, 25 bp, Homo sapien
cccgcgccgcgactataacgaggag

SEQ ID NO: 5924299 - DNA, 25 bp, Homo sapien
cgatcattccgcgaaccgcggaccg

SEQ ID NO: 5924300 - DNA, 25 bp, Homo sapien
tggcgtcgcgcattcgttagggcgg

SEQ ID NO: 5924301 - DNA, 25 bp, Homo sapien
ggcgtcccgtcggacgttatcgctg

SEQ ID NO: 5924302 - DNA, 25 bp, Homo sapien
ggacgatgcacgcgcaacgcatcgg

SEQ ID NO: 5924303 - DNA, 25 bp, Homo sapien
ccgtgccgtagggcgttcgcgaagt

SEQ ID NO: 5924304 - DNA, 25 bp, Homo sapien
ggcaggtcgcgtaccctacgcggaa

SEQ ID NO: 5924305 - DNA, 25 bp, Homo sapien
gaccaagccgatcgtccagctcggc

SEQ ID NO: 5924306 - DNA, 25 bp, Homo sapien
tggacgcgttatgcggcgggagcca

SEQ ID NO: 5924307 - DNA, 25 bp, Homo sapien
ctctgctcgcgcgctcgtaacgacg

SEQ ID NO: 5924308 - DNA, 25 bp, Homo sapien
gagctgccgatcgtatacgggcggg

SEQ ID NO: 5924309 - DNA, 25 bp, Homo sapien
gcactgccgcgaaccgtacgacgtg

SEQ ID NO: 5924310 - DNA, 25 bp, Homo sapien
tggggcatacgatccggcgcccaga

SEQ ID NO: 5924311 - DNA, 25 bp, Homo sapien
cgcagcgtaacacgtcgcggacagc

SEQ ID NO: 5924312 - DNA, 25 bp, Homo sapien
cgtagtcgaacgatcgcaccgggcc

SEQ ID NO: 5924313 - DNA, 25 bp, Homo sapien
ctgcttcgacgcggccgttgtctcc

SEQ ID NO: 5924314 - DNA, 25 bp, Homo sapien
cacccaaccgcgtacggatgcgacc

SEQ ID NO: 5924315 - DNA, 25 bp, Homo sapien
caggcctactcgtgcgacgtacccg

SEQ ID NO: 5924316 - DNA, 25 bp, Homo sapien
tcattgaccggcgtatcgcggcggg

SEQ ID NO: 5924317 - DNA, 25 bp, Homo sapien
gcaggctaccgtacgtccggctggt

SEQ ID NO: 5924318 - DNA, 25 bp, Homo sapien
cggatgcgtccggttaggtccacgg

SEQ ID NO: 5924319 - DNA, 25 bp, Homo sapien
tcaagcgggccgcgaatacccgagc

SEQ ID NO: 5924320 - DNA, 25 bp, Homo sapien
aacgggtgcgcggtatcgcgacgga

SEQ ID NO: 5924321 - DNA, 25 bp, Homo sapien
acacccgccgcgaactacggttggc

SEQ ID NO: 5924322 - DNA, 25 bp, Homo sapien
cactggcgttcgcgtaagggcacgg

SEQ ID NO: 5924323 - DNA, 25 bp, Homo sapien
cggggccgcgtaacgacgtctactc

SEQ ID NO: 5924324 - DNA, 25 bp, Homo sapien
catggcaaaccgcggaccgcacgag

SEQ ID NO: 5924325 - DNA, 25 bp, Homo sapien
cgcgtatcgaccggtcgagaacgcc

SEQ ID NO: 5924326 - DNA, 25 bp, Homo sapien
cgcgcatgcgctataccgcggttgc

SEQ ID NO: 5924327 - DNA, 25 bp, Homo sapien
ccgactcatacgctagcgcgacgcc

SEQ ID NO: 5924328 - DNA, 25 bp, Homo sapien
tacgcttcggtcgacccgttgccgc

SEQ ID NO: 5924329 - DNA, 25 bp, Homo sapien
gggtaggcgtgacgactcgcgtgtg

SEQ ID NO: 5924330 - DNA, 25 bp, Homo sapien
tgctgcccccgtaacgacgatccgg

SEQ ID NO: 5924331 - DNA, 25 bp, Homo sapien
cttggggtcgataggggccgagcga

SEQ ID NO: 5924332 - DNA, 25 bp, Homo sapien
cggccgcccgcttacgaaccgagat

SEQ ID NO: 5924333 - DNA, 25 bp, Homo sapien
ctgccacaaccgcggcctatgcgag

SEQ ID NO: 5924334 - DNA, 25 bp, Homo sapien
gtcacgggcgttaccgcgttctcgc

SEQ ID NO: 5924335 - DNA, 25 bp, Homo sapien
ctaggtacgcgaccgctatggcgcc

SEQ ID NO: 5924336 - DNA, 25 bp, Homo sapien
gcgtagtcccttgacgcgcccagca

SEQ ID NO: 5924337 - DNA, 25 bp, Homo sapien
tgccgtgcgacggccgatagtccga

SEQ ID NO: 5924338 - DNA, 25 bp, Homo sapien
ttccgcgcgacacgatacggccagg

SEQ ID NO: 5924339 - DNA, 25 bp, Homo sapien
ccatcgctctagcgctacgagcgcg

SEQ ID NO: 5924340 - DNA, 25 bp, Homo sapien
aatgcattcgcgcggtagggggccg

SEQ ID NO: 5924341 - DNA, 25 bp, Homo sapien
gcggtgtacgctgcgcggttctagc

SEQ ID NO: 5924342 - DNA, 25 bp, Homo sapien
gacgacaacggccgcgttagtgccg

SEQ ID NO: 5924343 - DNA, 25 bp, Homo sapien
ggctgtagcgtaccgcgctgacacc

SEQ ID NO: 5924344 - DNA, 25 bp, Homo sapien
gagagccgccgatacacgacctccg

SEQ ID NO: 5924345 - DNA, 25 bp, Homo sapien
cgctcctgatcgcggtccgacaacg

SEQ ID NO: 5924346 - DNA, 25 bp, Homo sapien
agtcggcgaacggtcgtagggcgca

SEQ ID NO: 5924347 - DNA, 25 bp, Homo sapien
tcggtgtaacgcgcgaaccgctggg

SEQ ID NO: 5924348 - DNA, 25 bp, Homo sapien
atcgcgcggcgcgcctatagagtgg

SEQ ID NO: 5924349 - DNA, 25 bp, Homo sapien
gaccaacgcatcgtagcggtggccc

SEQ ID NO: 5924350 - DNA, 25 bp, Homo sapien
gcttgtcggtcacgcaacggggtcg

SEQ ID NO: 5924351 - DNA, 25 bp, Homo sapien
gccgggcgatcctatggcgcctaag

SEQ ID NO: 5924352 - DNA, 25 bp, Homo sapien
atcgggggcgttagcgctacggctc

SEQ ID NO: 5924353 - DNA, 25 bp, Homo sapien
gggcgtctaaccgacggcctctcac

SEQ ID NO: 5924354 - DNA, 25 bp, Homo sapien
ctactggttcgacagggcgctccgg

SEQ ID NO: 5924355 - DNA, 25 bp, Homo sapien
cgatcccgcgagtaacggtcggacc

SEQ ID NO: 5924356 - DNA, 25 bp, Homo sapien
gccagttacgttacgcccggccgga

SEQ ID NO: 5924357 - DNA, 25 bp, Homo sapien
cgatggcgcgctaacgggacgtgac

SEQ ID NO: 5924358 - DNA, 25 bp, Homo sapien
ggaccccgacataaggcgtggcagc

SEQ ID NO: 5924359 - DNA, 25 bp, Homo sapien
gtctacagtaccgacgccgcgctcg

SEQ ID NO: 5924360 - DNA, 25 bp, Homo sapien
gattggcgcgtcgtgtaggggccga

SEQ ID NO: 5924361 - DNA, 25 bp, Homo sapien
ctgcagcgtgctacgcgctatggcg

SEQ ID NO: 5924362 - DNA, 25 bp, Homo sapien
tcgcgttatgcgggatcgggtccgg

SEQ ID NO: 5924363 - DNA, 25 bp, Homo sapien
cagacgtggcccgcatacgaccgtc

SEQ ID NO: 5924364 - DNA, 25 bp, Homo sapien
cccatggccggtatagcgtcgggag

SEQ ID NO: 5924365 - DNA, 25 bp, Homo sapien
caaccctatatcgcgggccgctcgg

SEQ ID NO: 5924366 - DNA, 25 bp, Homo sapien
acgcactctacgtcgcgaggcccag

SEQ ID NO: 5924367 - DNA, 25 bp, Homo sapien
ccgagcacagtcgtgcggtccgtac

SEQ ID NO: 5924368 - DNA, 25 bp, Homo sapien
gccctcccgacgctacgtatcggac

SEQ ID NO: 5924369 - DNA, 25 bp, Homo sapien
accctatcgagtacgcgcccgccca

SEQ ID NO: 5924370 - DNA, 25 bp, Homo sapien
cccccagcggtagaccggtctagac

SEQ ID NO: 5924371 - DNA, 25 bp, Homo sapien
ggtcgccgtaggcacgacgtgcctt

SEQ ID NO: 5924372 - DNA, 25 bp, Homo sapien
ggtgactcgatccgtcgggcggtct

SEQ ID NO: 5924373 - DNA, 25 bp, Homo sapien
cagctgcgtataccgctgagcgcgc

SEQ ID NO: 5924374 - DNA, 25 bp, Homo sapien
ccggaggcgctacgtccgacatcca

SEQ ID NO: 5924375 - DNA, 25 bp, Homo sapien
tcgtggatccgcggttcgtccctcg

SEQ ID NO: 5924376 - DNA, 25 bp, Homo sapien
ctgtccgcgctacgtcggtgctggt

SEQ ID NO: 5924377 - DNA, 25 bp, Homo sapien
ggcaacaccgacgcggtaaggcgca

SEQ ID NO: 5924378 - DNA, 25 bp, Homo sapien
catgcgcgcggagcgcattcctgac

SEQ ID NO: 5924379 - DNA, 25 bp, Homo sapien
gccactcgtaccgtggtcgcgacct

SEQ ID NO: 5924380 - DNA, 25 bp, Homo sapien
agtaacgtacgcatcgcgccgggcg

SEQ ID NO: 5924381 - DNA, 25 bp, Homo sapien
cccgtacgatttagaccgcgcgcgc

SEQ ID NO: 5924382 - DNA, 25 bp, Homo sapien
gcagcgtgtcgtacggcgcagctac

SEQ ID NO: 5924383 - DNA, 25 bp, Homo sapien
ttgcgggaatcgaccgcggaggcca

SEQ ID NO: 5924384 - DNA, 25 bp, Homo sapien
aagtgccgacgcgtagggagccctg

SEQ ID NO: 5924385 - DNA, 25 bp, Homo sapien
ccgccagtcgggttcgtacggctca

SEQ ID NO: 5924386 - DNA, 25 bp, Homo sapien
cggaagatgcgacgatcgcgggtcg

SEQ ID NO: 5924387 - DNA, 25 bp, Homo sapien
accgccgcacggtcgatcgttgtgg

SEQ ID NO: 5924388 - DNA, 25 bp, Homo sapien
caggcttacgccgttgcgacccacg

SEQ ID NO: 5924389 - DNA, 25 bp, Homo sapien
tgaaaaaccggtcgcgtgccgggcg

SEQ ID NO: 5924390 - DNA, 25 bp, Homo sapien
cttgagcgcgtaccacggctagggg

SEQ ID NO: 5924391 - DNA, 25 bp, Homo sapien
cctcggcacgtacgctacgtggtcc

SEQ ID NO: 5924392 - DNA, 25 bp, Homo sapien
cgggtcgttcgcgatccgtcaccga

SEQ ID NO: 5924393 - DNA, 25 bp, Homo sapien
ggcaaggtcgcggtacgactcgcac

SEQ ID NO: 5924394 - DNA, 25 bp, Homo sapien
ctgcgagtatggcgcgagggacacc

SEQ ID NO: 5924395 - DNA, 25 bp, Homo sapien
cgctgagcgtaccggacgacgaagg

SEQ ID NO: 5924396 - DNA, 25 bp, Homo sapien
cacccgacgcggtcgtacgtccaga

SEQ ID NO: 5924397 - DNA, 25 bp, Homo sapien
cgcaggcggagcgactagtcgagct

SEQ ID NO: 5924398 - DNA, 25 bp, Homo sapien
gatcacggcgcgtactgcttccgcc

SEQ ID NO: 5924399 - DNA, 25 bp, Homo sapien
gcgtcgcgtttacgcgcacggtgag

SEQ ID NO: 5924400 - DNA, 25 bp, Homo sapien
gcggtctaacctatcgcgcggggag

SEQ ID NO: 5924401 - DNA, 25 bp, Homo sapien
ggcgactcgatcgtacgccgcatgg

SEQ ID NO: 5924402 - DNA, 25 bp, Homo sapien
agtaccgcggtcgaacgtcgccgtc

SEQ ID NO: 5924403 - DNA, 25 bp, Homo sapien
gcgcgatgtacgcgcgacaatcgcc

SEQ ID NO: 5924404 - DNA, 25 bp, Homo sapien
gaagcggccgcgacgtagtggggtt

SEQ ID NO: 5924405 - DNA, 25 bp, Homo sapien
gccaccttcgtacggaccggtacgc

SEQ ID NO: 5924406 - DNA, 25 bp, Homo sapien
ggcctcccggtcgatcgtgcagtac

SEQ ID NO: 5924407 - DNA, 25 bp, Homo sapien
tctctgacctgtccgcgaagcccgg

SEQ ID NO: 5924408 - DNA, 25 bp, Homo sapien
tggagccggcgtatagtcgggccca

SEQ ID NO: 5924409 - DNA, 25 bp, Homo sapien
tcgcgacgggttgcgcattccctcg

SEQ ID NO: 5924410 - DNA, 25 bp, Homo sapien
ccgactgagtgccgtacgccaagcg

SEQ ID NO: 5924411 - DNA, 25 bp, Homo sapien
aagggccgcgcggctatagccacac

SEQ ID NO: 5924412 - DNA, 25 bp, Homo sapien
ccggtgcgatacgtccgcgacgtgt

SEQ ID NO: 5924413 - DNA, 25 bp, Homo sapien
cgtctgatgacgcgtacgggggcac

SEQ ID NO: 5924414 - DNA, 25 bp, Homo sapien
acgctgcgaactagtcgcccaccgc

SEQ ID NO: 5924415 - DNA, 25 bp, Homo sapien
gtcgttgtcgtaccgaccgcgaggc

SEQ ID NO: 5924416 - DNA, 25 bp, Homo sapien
tagcgagcggccgtcgatacgcgct

SEQ ID NO: 5924417 - DNA, 25 bp, Homo sapien
aggccgcgcatcggacgaactccac

SEQ ID NO: 5924418 - DNA, 25 bp, Homo sapien
tgggcgcgtctatcgcgcgggaagt

SEQ ID NO: 5924419 - DNA, 25 bp, Homo sapien
cccgcgctatacccgcgacatgcct

SEQ ID NO: 5924420 - DNA, 25 bp, Homo sapien
caaacaccggtagtcgcgagggggc

SEQ ID NO: 5924421 - DNA, 25 bp, Homo sapien
cgaggaacggtcgcggtatccgtcc

SEQ ID NO: 5924422 - DNA, 25 bp, Homo sapien
catacggcgacgtagccctccaccg

SEQ ID NO: 5924423 - DNA, 25 bp, Homo sapien
gtcgccatatgtcggcgcgctcgtc

SEQ ID NO: 5924424 - DNA, 25 bp, Homo sapien
gccatcatccgcgggactaggccga

SEQ ID NO: 5924425 - DNA, 25 bp, Homo sapien
gcgagatcgcgtctaggcgaagggg

SEQ ID NO: 5924426 - DNA, 25 bp, Homo sapien
aagaggtcgaccgatagcggcgccc

SEQ ID NO: 5924427 - DNA, 25 bp, Homo sapien
gtgtccccgacgctcgaatcgcacc

SEQ ID NO: 5924428 - DNA, 25 bp, Homo sapien
gctggcagtcgtacgtcggacagcg

SEQ ID NO: 5924429 - DNA, 25 bp, Homo sapien
gcgcggttgcgacgatacgtcgtcg

SEQ ID NO: 5924430 - DNA, 25 bp, Homo sapien
cagaggctcgagtcgacggaagggg

SEQ ID NO: 5924431 - DNA, 25 bp, Homo sapien
cgaacctgcgctagcgaccgcgtag

SEQ ID NO: 5924432 - DNA, 25 bp, Homo sapien
actggggtcgcctcgcgtaaggcca

SEQ ID NO: 5924433 - DNA, 25 bp, Homo sapien
gggatgccgtattgcgtcgagggcg

SEQ ID NO: 5924434 - DNA, 25 bp, Homo sapien
gccccgatacgcacgccgcgtatgt

SEQ ID NO: 5924435 - DNA, 25 bp, Homo sapien
ggagggcggcgtacgacactgttcg

SEQ ID NO: 5924436 - DNA, 25 bp, Homo sapien
gccagcccggactagtcgctccact

SEQ ID NO: 5924437 - DNA, 25 bp, Homo sapien
gtcggggtttagtcgcgcgtcgacc

SEQ ID NO: 5924438 - DNA, 25 bp, Homo sapien
cccgtagacgttacgtcgcgtggcg

SEQ ID NO: 5924439 - DNA, 25 bp, Homo sapien
cgggggctagcgcgactaggtatcg

SEQ ID NO: 5924440 - DNA, 25 bp, Homo sapien
ctcggagtcgtaggcgcgaaccgca

SEQ ID NO: 5924441 - DNA, 25 bp, Homo sapien
gagggctagtatccgcgacaccgcg

SEQ ID NO: 5924442 - DNA, 25 bp, Homo sapien
tccgggcgttattacgcgcgggctc

SEQ ID NO: 5924443 - DNA, 25 bp, Homo sapien
ccgcaggtcgcacgacgcatgttgc

SEQ ID NO: 5924444 - DNA, 25 bp, Homo sapien
gctggctagtctcgcgcgagcacga

SEQ ID NO: 5924445 - DNA, 25 bp, Homo sapien
gcccgacgcgcgagtagacctttgg

SEQ ID NO: 5924446 - DNA, 25 bp, Homo sapien
gtcgaacggaccggccgtatctgcg

SEQ ID NO: 5924447 - DNA, 25 bp, Homo sapien
cccgtccgtcgtgcgacatgtcgga

SEQ ID NO: 5924448 - DNA, 25 bp, Homo sapien
acggcagtccgccgactaacgtccc

SEQ ID NO: 5924449 - DNA, 25 bp, Homo sapien
gacccacggaccgagacgattccgg

SEQ ID NO: 5924450 - DNA, 25 bp, Homo sapien
ctgcagtacgggtccgtcacacggc

SEQ ID NO: 5924451 - DNA, 25 bp, Homo sapien
gacgggcgggcgatacgtctaggga

SEQ ID NO: 5924452 - DNA, 25 bp, Homo sapien
cagcgttacgctacgcggacacggc

SEQ ID NO: 5924453 - DNA, 25 bp, Homo sapien
ggctggccgtaagcgatcggagcac

SEQ ID NO: 5924454 - DNA, 25 bp, Homo sapien
cggccgcgcgatagggacgcataac

SEQ ID NO: 5924455 - DNA, 25 bp, Homo sapien
acgggaacgcgatgcgcgagagtgg

SEQ ID NO: 5924456 - DNA, 25 bp, Homo sapien
cctgagaacgtcgacgcgccaacgg

SEQ ID NO: 5924457 - DNA, 25 bp, Homo sapien
ggcggggccttacgcgaaaccgcaa

SEQ ID NO: 5924458 - DNA, 25 bp, Homo sapien
cggggaccgcgtcgagtaggccaaa

SEQ ID NO: 5924459 - DNA, 25 bp, Homo sapien
gaggccggacgtcgcgataccgtgt

SEQ ID NO: 5924460 - DNA, 25 bp, Homo sapien
ctggttagcgcgtccgaacggcgtg

SEQ ID NO: 5924461 - DNA, 25 bp, Homo sapien
cgccgggttacgccgtaggcacatg

SEQ ID NO: 5924462 - DNA, 25 bp, Homo sapien
ccgggaaccgctacgcgagtggttc

SEQ ID NO: 5924463 - DNA, 25 bp, Homo sapien
gctggtacgcgtcggttccctgctc

SEQ ID NO: 5924464 - DNA, 25 bp, Homo sapien
ggagcgcgcgataacgcacgcatgg

SEQ ID NO: 5924465 - DNA, 25 bp, Homo sapien
tcaccagcgcgtacggatgggtgcc

SEQ ID NO: 5924466 - DNA, 25 bp, Homo sapien
cccccctggtcgacgttagacacgc

SEQ ID NO: 5924467 - DNA, 25 bp, Homo sapien
acgtcgggcgctacgtcgagagcac

SEQ ID NO: 5924468 - DNA, 25 bp, Homo sapien
gtcggctgattcgcgacccccgcat

SEQ ID NO: 5924469 - DNA, 25 bp, Homo sapien
gggagccgactagtcacggtaggcc

SEQ ID NO: 5924470 - DNA, 25 bp, Homo sapien
ccaaagctaatcgcgcgctggggcc

SEQ ID NO: 5924471 - DNA, 25 bp, Homo sapien
accgccaatcgtccgcggtccgcat

SEQ ID NO: 5924472 - DNA, 25 bp, Homo sapien
gggtgctcggccgcgtaaggcttag

SEQ ID NO: 5924473 - DNA, 25 bp, Homo sapien
gagggggcgatttcgtccgacgtgg

SEQ ID NO: 5924474 - DNA, 25 bp, Homo sapien
acgggccgcgtgccgttatgccaga

SEQ ID NO: 5924475 - DNA, 25 bp, Homo sapien
agcggcgacatcgtacgcgccccaa

SEQ ID NO: 5924476 - DNA, 25 bp, Homo sapien
cttcccacgcggtgtagcggttggg

SEQ ID NO: 5924477 - DNA, 25 bp, Homo sapien
aggggcgcttagtctcgcggcatcc

SEQ ID NO: 5924478 - DNA, 25 bp, Homo sapien
gggcagcctaccgatcgggacgtga

SEQ ID NO: 5924479 - DNA, 25 bp, Homo sapien
gggcggcggtgcgtcgttatcatgc

SEQ ID NO: 5924480 - DNA, 25 bp, Homo sapien
gtctctagcccgtaacgcccgggct

SEQ ID NO: 5924481 - DNA, 25 bp, Homo sapien
ccacgcccgttgcgaaccttgccca

SEQ ID NO: 5924482 - DNA, 25 bp, Homo sapien
gcgccgccgtccgacacgcttaatc

SEQ ID NO: 5924483 - DNA, 25 bp, Homo sapien
gtcctccccgtcgttgcgtcgagag

SEQ ID NO: 5924484 - DNA, 25 bp, Homo sapien
gacggttcgcgtagggctcggaacg

SEQ ID NO: 5924485 - DNA, 25 bp, Homo sapien
gtccggccggcgcgtaataagccca

SEQ ID NO: 5924486 - DNA, 25 bp, Homo sapien
ggggcgagcgcgtactcggtactca

SEQ ID NO: 5924487 - DNA, 25 bp, Homo sapien
cggcagacgtcgtgaccgggatgca

SEQ ID NO: 5924488 - DNA, 25 bp, Homo sapien
gtaggcaactagcgtccgggtcgcc

SEQ ID NO: 5924489 - DNA, 25 bp, Homo sapien
cgaacccgacttacgcgggcgccaa

SEQ ID NO: 5924490 - DNA, 25 bp, Homo sapien
agtgatcactacggcgcgtcggccc

SEQ ID NO: 5924491 - DNA, 25 bp, Homo sapien
ggtagccgcgcgagtctacggcatc

SEQ ID NO: 5924492 - DNA, 25 bp, Homo sapien
ttaagctcgcgacacggggctgggc

SEQ ID NO: 5924493 - DNA, 25 bp, Homo sapien
ttccgcgcagcgtacgaactgcgcc

SEQ ID NO: 5924494 - DNA, 25 bp, Homo sapien
gccgccccgcttacgatagcgacca

SEQ ID NO: 5924495 - DNA, 25 bp, Homo sapien
ttagactcgcgtacgaggcgccggg

SEQ ID NO: 5924496 - DNA, 25 bp, Homo sapien
tcgacctagtgccgaccgcctaccc

SEQ ID NO: 5924497 - DNA, 25 bp, Homo sapien
cgcggacgtcctaatcgcggcacct

SEQ ID NO: 5924498 - DNA, 25 bp, Homo sapien
cggctggcgtttcggacgggtctgt

SEQ ID NO: 5924499 - DNA, 25 bp, Homo sapien
gcgggctcgcgtgaccggtttaacg

SEQ ID NO: 5924500 - DNA, 25 bp, Homo sapien
gccggcgtatcgggtacgcgacaca

SEQ ID NO: 5924501 - DNA, 25 bp, Homo sapien
tgtgggcgaacgtccgtagtggccg

SEQ ID NO: 5924502 - DNA, 25 bp, Homo sapien
cgggtcgtccatgcgcgtacggatc

SEQ ID NO: 5924503 - DNA, 25 bp, Homo sapien
ggccttgtttagcgcgcgaggcgac

SEQ ID NO: 5924504 - DNA, 25 bp, Homo sapien
tgggcttacgcggtcggctccggtt

SEQ ID NO: 5924505 - DNA, 25 bp, Homo sapien
gccttgactagccgcgtcaaggggc

SEQ ID NO: 5924506 - DNA, 25 bp, Homo sapien
ccgcctatgcgacggtccgtgggct

SEQ ID NO: 5924507 - DNA, 25 bp, Homo sapien
tggaccaccggcgcgctagtcacgg

SEQ ID NO: 5924508 - DNA, 25 bp, Homo sapien
cccgtcgcggtcgtgtacgcgctag

SEQ ID NO: 5924509 - DNA, 25 bp, Homo sapien
ccggcggctcgcgaatacggcggta

SEQ ID NO: 5924510 - DNA, 25 bp, Homo sapien
ccaagcacgtccggacgagtgcccg

SEQ ID NO: 5924511 - DNA, 25 bp, Homo sapien
acacggctacgcggtcgtcgccgga

SEQ ID NO: 5924512 - DNA, 25 bp, Homo sapien
cgcctcgtcaacgcccgcgtgtcac

SEQ ID NO: 5924513 - DNA, 25 bp, Homo sapien
cccccgaattcagcgcgcggctcct

SEQ ID NO: 5924514 - DNA, 25 bp, Homo sapien
ccgggagcgatacgccgattccggg

SEQ ID NO: 5924515 - DNA, 25 bp, Homo sapien
gtggcgacggccgtaacgaccgtgg

SEQ ID NO: 5924516 - DNA, 25 bp, Homo sapien
caccgcaacgcgctagggggctcct

SEQ ID NO: 5924517 - DNA, 25 bp, Homo sapien
cagccccggacgtaagcgcgggatc

SEQ ID NO: 5924518 - DNA, 25 bp, Homo sapien
gccaggatccgggcgacgtcggaac

SEQ ID NO: 5924519 - DNA, 25 bp, Homo sapien
cggccgccgaacttgcgcgctcaag

SEQ ID NO: 5924520 - DNA, 25 bp, Homo sapien
ccggtggctaccgttcgcgacgcac

SEQ ID NO: 5924521 - DNA, 25 bp, Homo sapien
cgagtgatactcgcgcgggggggct

SEQ ID NO: 5924522 - DNA, 25 bp, Homo sapien
tgaggacggttagaccgcgcgcgcc

SEQ ID NO: 5924523 - DNA, 25 bp, Homo sapien
gaggcacgggtacgccgatcacgcg

SEQ ID NO: 5924524 - DNA, 25 bp, Homo sapien
taggccacgagtcgaccgctcccgg

SEQ ID NO: 5924525 - DNA, 25 bp, Homo sapien
cgggtgcggctattacgcggacggc

SEQ ID NO: 5924526 - DNA, 25 bp, Homo sapien
gcccccacttcgcgcgtgtgtccgt

SEQ ID NO: 5924527 - DNA, 25 bp, Homo sapien
gcctagggactatcgcgcgagccgg

SEQ ID NO: 5924528 - DNA, 25 bp, Homo sapien
cggggccgtacgtcgagtgcagcct

SEQ ID NO: 5924529 - DNA, 25 bp, Homo sapien
cgcgttggtctaacgcgcgcccgac

SEQ ID NO: 5924530 - DNA, 25 bp, Homo sapien
catcgcctcggtaccgacgagcccc

SEQ ID NO: 5924531 - DNA, 25 bp, Homo sapien
ctcgggtctagggcgcggaccttgc

SEQ ID NO: 5924532 - DNA, 25 bp, Homo sapien
ggggcggccgcatacgatcctccca

SEQ ID NO: 5924533 - DNA, 25 bp, Homo sapien
gcccacatccgcgcgtagcggagga

SEQ ID NO: 5924534 - DNA, 25 bp, Homo sapien
ctggccgcgccgtacgaagggcatg

SEQ ID NO: 5924535 - DNA, 25 bp, Homo sapien
cctggcgtacgtagccgcgccaggt

SEQ ID NO: 5924536 - DNA, 25 bp, Homo sapien
tgtcgggctagtacccgcgagcccg

SEQ ID NO: 5924537 - DNA, 25 bp, Homo sapien
cgctcgctcgggcgtaacgccgcta

SEQ ID NO: 5924538 - DNA, 25 bp, Homo sapien
gtcggcgtaacggccgaccctcgac

SEQ ID NO: 5924539 - DNA, 25 bp, Homo sapien
ggtcggcggctagatcgcgtcctgc

SEQ ID NO: 5924540 - DNA, 25 bp, Homo sapien
ggtctgcgcgtaagcgagcccggtg

SEQ ID NO: 5924541 - DNA, 25 bp, Homo sapien
gtgaggcgacgtacgcaccgggctg

SEQ ID NO: 5924542 - DNA, 25 bp, Homo sapien
tcgcgcgtaccgtcgacggccccat

SEQ ID NO: 5924543 - DNA, 25 bp, Homo sapien
ggctccctgcggacgcgaactacgg

SEQ ID NO: 5924544 - DNA, 25 bp, Homo sapien
cccagggggtacgatccgcccgatg

SEQ ID NO: 5924545 - DNA, 25 bp, Homo sapien
gaggggccttatgcgcgaggcgcga

SEQ ID NO: 5924546 - DNA, 25 bp, Homo sapien
tctgccgggtcgctacgcgcttggg

SEQ ID NO: 5924547 - DNA, 25 bp, Homo sapien
gggccgtactagcgcgccgacactc

SEQ ID NO: 5924548 - DNA, 25 bp, Homo sapien
cgggactacgatgcgcgtgctccgc

SEQ ID NO: 5924549 - DNA, 25 bp, Homo sapien
cccaccgtcgctacggcgtgggttc

SEQ ID NO: 5924550 - DNA, 25 bp, Homo sapien
tggacggacctacggcgcgagtccg

SEQ ID NO: 5924551 - DNA, 25 bp, Homo sapien
ggggcggacgcgagtaggcggtctt

SEQ ID NO: 5924552 - DNA, 25 bp, Homo sapien
tgggtctatccggctacgcgcggcc

SEQ ID NO: 5924553 - DNA, 25 bp, Homo sapien
gcctcctatacgggccacggcaggg

SEQ ID NO: 5924554 - DNA, 25 bp, Homo sapien
gcgagatagggccgcaacggccggt

SEQ ID NO: 5924555 - DNA, 25 bp, Homo sapien
cgcccgcttgacgtcgcgtgcacac

SEQ ID NO: 5924556 - DNA, 25 bp, Homo sapien
gcgactctcgcgaccgcaagagccc

SEQ ID NO: 5924557 - DNA, 25 bp, Homo sapien
gaccgcccgtcgcgtagtggactcc

SEQ ID NO: 5924558 - DNA, 25 bp, Homo sapien
agcggccgcgggtctagcggtgtag

SEQ ID NO: 5924559 - DNA, 25 bp, Homo sapien
gccaacgcgtcgcaccgtagaccgc

SEQ ID NO: 5924560 - DNA, 25 bp, Homo sapien
cggcctttgcgaccgccgtcggtca

SEQ ID NO: 5924561 - DNA, 25 bp, Homo sapien
cgcgaccgtacggcgggttggcagt

SEQ ID NO: 5924562 - DNA, 25 bp, Homo sapien
ccccggcttgcgagtcgacgggaac

SEQ ID NO: 5924563 - DNA, 25 bp, Homo sapien
cttgcgcgcgtagctccccactccg

SEQ ID NO: 5924564 - DNA, 25 bp, Homo sapien
cgccggcgttcgcgacgtaagcgca

SEQ ID NO: 5924565 - DNA, 25 bp, Homo sapien
gccaagcgcgagacgcatcccacgc

SEQ ID NO: 5924566 - DNA, 25 bp, Homo sapien
cgtgcgcccgtacggacctcctacg

SEQ ID NO: 5924567 - DNA, 25 bp, Homo sapien
tgtcggccgactacgcgaggtccgc

SEQ ID NO: 5924568 - DNA, 25 bp, Homo sapien
tgggcccgcgttagacgacggggca

SEQ ID NO: 5924569 - DNA, 25 bp, Homo sapien
agccgaggtacgcccggatgaccgc

SEQ ID NO: 5924570 - DNA, 25 bp, Homo sapien
ggcaggtaccgccgaaccctcgtcc

SEQ ID NO: 5924571 - DNA, 25 bp, Homo sapien
ggagactacgcgacgcacggtccgc

SEQ ID NO: 5924572 - DNA, 25 bp, Homo sapien
tggcccattggcgggcgtccggatc

SEQ ID NO: 5924573 - DNA, 25 bp, Homo sapien
cgcggctacgcggcggttgtgagac

SEQ ID NO: 5924574 - DNA, 25 bp, Homo sapien
gggtagcctagcgcggtcgtcaggc

SEQ ID NO: 5924575 - DNA, 25 bp, Homo sapien
gacgtcgtccgacgcgatgctgcgg

SEQ ID NO: 5924576 - DNA, 25 bp, Homo sapien
cgacgcattagacgcggcgcccgct

SEQ ID NO: 5924577 - DNA, 25 bp, Homo sapien
gaagggtgttgtcgcgcggcggagc

SEQ ID NO: 5924578 - DNA, 25 bp, Homo sapien
tcagctcgactcgcctacggcgccc

SEQ ID NO: 5924579 - DNA, 25 bp, Homo sapien
cggtagcgacgtatcgggcccccac

SEQ ID NO: 5924580 - DNA, 25 bp, Homo sapien
gcgcgttaccgcgccggtatcggct

SEQ ID NO: 5924581 - DNA, 25 bp, Homo sapien
tccgcttatacgcggcccggagccc

SEQ ID NO: 5924582 - DNA, 25 bp, Homo sapien
gggggtgaactagcgcgacccccac

SEQ ID NO: 5924583 - DNA, 25 bp, Homo sapien
gcggcccgcgctatgggtctgatcg

SEQ ID NO: 5924584 - DNA, 25 bp, Homo sapien
ggcgttggcgctacgtcgaccggag

SEQ ID NO: 5924585 - DNA, 25 bp, Homo sapien
gcccacatcggtccgcgtccacgct

SEQ ID NO: 5924586 - DNA, 25 bp, Homo sapien
ctcccgggggcgaattacgcacgcg

SEQ ID NO: 5924587 - DNA, 25 bp, Homo sapien
cccgatcgtacgcgacgaggagccg

SEQ ID NO: 5924588 - DNA, 25 bp, Homo sapien
ggtgcgcggtcccgcgataaccgtg

SEQ ID NO: 5924589 - DNA, 25 bp, Homo sapien
cgacacgtacgcccgtaggccggag

SEQ ID NO: 5924590 - DNA, 25 bp, Homo sapien
cccccgcgtactgtcgggtcacacc

SEQ ID NO: 5924591 - DNA, 25 bp, Homo sapien
agctccgcccgtaacgcgcgtgtgg

SEQ ID NO: 5924592 - DNA, 25 bp, Homo sapien
cgagcgcggttcgctacgcgagtcg

SEQ ID NO: 5924593 - DNA, 25 bp, Homo sapien
tcgcctcgtcgtacgaccagcggcg

SEQ ID NO: 5924594 - DNA, 25 bp, Homo sapien
tgggccgcgcgatggatcggcgttc

SEQ ID NO: 5924595 - DNA, 25 bp, Homo sapien
catcccgtcgaccgtacgcgccgag

SEQ ID NO: 5924596 - DNA, 25 bp, Homo sapien
ctctgggactaccgtcggggggctg

SEQ ID NO: 5924597 - DNA, 25 bp, Homo sapien
cggtacgaccgtaccgcccagcgct

SEQ ID NO: 5924598 - DNA, 25 bp, Homo sapien
cccggaacgtatcgccgcgtcccag

SEQ ID NO: 5924599 - DNA, 25 bp, Homo sapien
cagggcgcgacgttacgacccggtc

SEQ ID NO: 5924600 - DNA, 25 bp, Homo sapien
tgcctcccataccgcgcgagcgtcg

SEQ ID NO: 5924601 - DNA, 25 bp, Homo sapien
taggcgctaagcgcgccgtctgccg

SEQ ID NO: 5924602 - DNA, 25 bp, Homo sapien
tggtgccgcgccgttggatcgggct

SEQ ID NO: 5924603 - DNA, 25 bp, Homo sapien
gggcactatgcgggatcgggcgcgt

SEQ ID NO: 5924604 - DNA, 25 bp, Homo sapien
cgcctcggctacggacgaacggagc

SEQ ID NO: 5924605 - DNA, 25 bp, Homo sapien
acacgcggtcggtacgccccgagtg

SEQ ID NO: 5924606 - DNA, 25 bp, Homo sapien
accgcgacgggcggtcttagacgcg

SEQ ID NO: 5924607 - DNA, 25 bp, Homo sapien
gagggagcgttcgcgtagaccgggg

SEQ ID NO: 5924608 - DNA, 25 bp, Homo sapien
ccgcgggtcgctatacgcgctgagg

SEQ ID NO: 5924609 - DNA, 25 bp, Homo sapien
cgcttgacgggcgagacgtccaggc

SEQ ID NO: 5924610 - DNA, 25 bp, Homo sapien
acaccgtcgcacgacgtgccgcagg

SEQ ID NO: 5924611 - DNA, 25 bp, Homo sapien
cgtacggcgcgtaaccgaccgagcc

SEQ ID NO: 5924612 - DNA, 25 bp, Homo sapien
tcgctcccgtagaccgtccaccccg

SEQ ID NO: 5924613 - DNA, 25 bp, Homo sapien
ggcagcatccgtacggccgctacgg

SEQ ID NO: 5924614 - DNA, 25 bp, Homo sapien
ccgcacccgcgtagacgtacagccg

SEQ ID NO: 5924615 - DNA, 25 bp, Homo sapien
cgcgtggggcgcgacttacgcctac

SEQ ID NO: 5924616 - DNA, 25 bp, Homo sapien
ggaggtccgtacgggcgtacggagc

SEQ ID NO: 5924617 - DNA, 25 bp, Homo sapien
ccgcgacgcggataactcgtggcgc

SEQ ID NO: 5924618 - DNA, 25 bp, Homo sapien
tgccggagcgcgccgatacttgcgg

SEQ ID NO: 5924619 - DNA, 25 bp, Homo sapien
ggccccgtcgaccgtcctagggtga

SEQ ID NO: 5924620 - DNA, 25 bp, Homo sapien
tgggccactacgccgcggacgatcg

SEQ ID NO: 5924621 - DNA, 25 bp, Homo sapien
tgcgcggtcgcccataacgcgggag

SEQ ID NO: 5924622 - DNA, 25 bp, Homo sapien
ccgcccgacttcgcgcgattccggt

SEQ ID NO: 5924623 - DNA, 25 bp, Homo sapien
tcagctctccgcgtacgtccggccg

SEQ ID NO: 5924624 - DNA, 25 bp, Homo sapien
gaggcccgtcggcctaagacgcgca

SEQ ID NO: 5924625 - DNA, 25 bp, Homo sapien
gcccgccactacgcgtccgagcgta

SEQ ID NO: 5924626 - DNA, 25 bp, Homo sapien
ggcaggcgcatgacggttgggcgga

SEQ ID NO: 5924627 - DNA, 25 bp, Homo sapien
agctctgcggcgtacgctacccggg

SEQ ID NO: 5924628 - DNA, 25 bp, Homo sapien
gggacgcgtcgggtcgcaaagctgg

SEQ ID NO: 5924629 - DNA, 25 bp, Homo sapien
gggcgctgtaggcgcgctagtctgc

SEQ ID NO: 5924630 - DNA, 25 bp, Homo sapien
ggagaggacgggtcgactcgcgctc

SEQ ID NO: 5924631 - DNA, 25 bp, Homo sapien
cacctggtacccccgcgtacgctgg

SEQ ID NO: 5924632 - DNA, 25 bp, Homo sapien
tggcgcttcgccgaccgtcctctgg

SEQ ID NO: 5924633 - DNA, 25 bp, Homo sapien
gaggtgcggtacgtacccgccagcc

SEQ ID NO: 5924634 - DNA, 25 bp, Homo sapien
tccccccgctcgcgtcctatgctcg

SEQ ID NO: 5924635 - DNA, 25 bp, Homo sapien
accccagcccgtacgacctgcaccg

SEQ ID NO: 5924636 - DNA, 25 bp, Homo sapien
gcgggtgcgatcgtgcgtaaggcgg

SEQ ID NO: 5924637 - DNA, 25 bp, Homo sapien
cggaggcccgtatcgcgcatgctgg

SEQ ID NO: 5924638 - DNA, 25 bp, Homo sapien
tccctgtgacgcgtagcggtccgcc

SEQ ID NO: 5924639 - DNA, 25 bp, Homo sapien
cgctgggagcgtacgcgactctcgc

SEQ ID NO: 5924640 - DNA, 25 bp, Homo sapien
gtgacccgcggtcggatacggccgt

SEQ ID NO: 5924641 - DNA, 25 bp, Homo sapien
tgcgccgccgatacgcggaggacga

SEQ ID NO: 5924642 - DNA, 25 bp, Homo sapien
tcccgccgtagtacgccccgagctc

SEQ ID NO: 5924643 - DNA, 25 bp, Homo sapien
ccttcgggtcgtccgcgtaggagcc

SEQ ID NO: 5924644 - DNA, 25 bp, Homo sapien
cgcggcgtcgcgctcgtaaggggta

SEQ ID NO: 5924645 - DNA, 25 bp, Homo sapien
ctaggcgtccggacctagcgcagcg

SEQ ID NO: 5924646 - DNA, 25 bp, Homo sapien
gttccctagcgcgtacgctccgccc

SEQ ID NO: 5924647 - DNA, 25 bp, Homo sapien
gcggatgaacagtcgcgcgcgggac

SEQ ID NO: 5924648 - DNA, 25 bp, Homo sapien
actcccatcgcgtcggaccgggctg

SEQ ID NO: 5924649 - DNA, 25 bp, Homo sapien
tcttccgactacccgtcgcccggcc

SEQ ID NO: 5924650 - DNA, 25 bp, Homo sapien
cggagctacgcccgtcgcttgcgag

SEQ ID NO: 5924651 - DNA, 25 bp, Homo sapien
ccgccgctgtcgcacgacgtcttgc

SEQ ID NO: 5924652 - DNA, 25 bp, Homo sapien
cggccacccgtacggcatagtcccc

SEQ ID NO: 5924653 - DNA, 25 bp, Homo sapien
cctttgcgaccgtacgggggcagcc

SEQ ID NO: 5924654 - DNA, 25 bp, Homo sapien
cgccggacgcgcgatggatgtcgca

SEQ ID NO: 5924655 - DNA, 25 bp, Homo sapien
atcccgttgcgctagcgcgccgcga

SEQ ID NO: 5924656 - DNA, 25 bp, Homo sapien
gagcaccccgatcgtacgggacgcg

SEQ ID NO: 5924657 - DNA, 25 bp, Homo sapien
gatcgtcgcgtacggccgacaccgg

SEQ ID NO: 5924658 - DNA, 25 bp, Homo sapien
ggggccttacgcggacccgtgtcca

SEQ ID NO: 5924659 - DNA, 25 bp, Homo sapien
agacgccgctaggtacggggtcgcg

SEQ ID NO: 5924660 - DNA, 25 bp, Homo sapien
gcgggcattggcccgtacggacagg

SEQ ID NO: 5924661 - DNA, 25 bp, Homo sapien
accgcagccgtccggcgtacccatc

SEQ ID NO: 5924662 - DNA, 25 bp, Homo sapien
gtggcgccgagtagtcgcgtctccc

SEQ ID NO: 5924663 - DNA, 25 bp, Homo sapien
gggccataaggcgtacgcggcgagg

SEQ ID NO: 5924664 - DNA, 25 bp, Homo sapien
ccgtcgctagtccgacgtgcgggac

SEQ ID NO: 5924665 - DNA, 25 bp, Homo sapien
ctgtgtccctcgtaacgcgccgccc

SEQ ID NO: 5924666 - DNA, 25 bp, Homo sapien
cgcccccggaacggcgctaactctc

SEQ ID NO: 5924667 - DNA, 25 bp, Homo sapien
gactgaccgtacgcggatcccggcc

SEQ ID NO: 5924668 - DNA, 25 bp, Homo sapien
tccgcgacgaccgttcgtgcacccg

SEQ ID NO: 5924669 - DNA, 25 bp, Homo sapien
tgaagccgcgggtatacccccgggc

SEQ ID NO: 5924670 - DNA, 25 bp, Homo sapien
cacggacgcggctacgtacggcgca

SEQ ID NO: 5924671 - DNA, 25 bp, Homo sapien
ggggcgacgaatacccgcgcacagg

SEQ ID NO: 5924672 - DNA, 25 bp, Homo sapien
gacgcttacgcgagttcggcggcgg

SEQ ID NO: 5924673 - DNA, 25 bp, Homo sapien
gccggacccggcgtacgttacgagc

SEQ ID NO: 5924674 - DNA, 25 bp, Homo sapien
gcccgcgtacgaccgacgcggacaa

SEQ ID NO: 5924675 - DNA, 25 bp, Homo sapien
tcgcgcgacgcatgcggacgggact

SEQ ID NO: 5924676 - DNA, 25 bp, Homo sapien
gggtagacgcgtcgctaggcgagcc

SEQ ID NO: 5924677 - DNA, 25 bp, Homo sapien
cgcgcttaacggtccgagcgagccg

SEQ ID NO: 5924678 - DNA, 25 bp, Homo sapien
ggtcctccgtatacggggcgcagcc

SEQ ID NO: 5924679 - DNA, 25 bp, Homo sapien
cgcagtagcgtctcgcgactgcggg

SEQ ID NO: 5924680 - DNA, 25 bp, Homo sapien
acacggacggcggtccgacgcatcc

SEQ ID NO: 5924681 - DNA, 25 bp, Homo sapien
ccagggcgcaagttacccggcgcga

SEQ ID NO: 5924682 - DNA, 25 bp, Homo sapien
cgcagtgacgcgcggttggcagcga

SEQ ID NO: 5924683 - DNA, 25 bp, Homo sapien
gggtcggtcgtcaacgcgcgactgg

SEQ ID NO: 5924684 - DNA, 25 bp, Homo sapien
ctagcccgagtcgcgctagaggggc

SEQ ID NO: 5924685 - DNA, 25 bp, Homo sapien
acgcctgtaggttcgcgcgggacgc

SEQ ID NO: 5924686 - DNA, 25 bp, Homo sapien
gacgggacactctacgcgggcgcag

SEQ ID NO: 5924687 - DNA, 25 bp, Homo sapien
aacgagcccctagtcgacgccgggc

SEQ ID NO: 5924688 - DNA, 25 bp, Homo sapien
gggctatcccctaacgcgaccggcc

SEQ ID NO: 5924689 - DNA, 25 bp, Homo sapien
gtgccggagtacgcggtcgtctggg

SEQ ID NO: 5924690 - DNA, 25 bp, Homo sapien
ctccgtccgaacgcacgagcgctgg

SEQ ID NO: 5924691 - DNA, 25 bp, Homo sapien
atgggggcgcgatagggctccaggc

SEQ ID NO: 5924692 - DNA, 25 bp, Homo sapien
tccgggcgctatcccgtcgggcact

SEQ ID NO: 5924693 - DNA, 25 bp, Homo sapien
gccccttaggactcccgcgacaggg

SEQ ID NO: 5924694 - DNA, 25 bp, Homo sapien
cgaggtgcgcgtcgggattcggcct

SEQ ID NO: 5924695 - DNA, 25 bp, Homo sapien
tggcgtaacggccgacggtggctcg

SEQ ID NO: 5924696 - DNA, 25 bp, Homo sapien
tccgagctatacgccgccgagcggg

SEQ ID NO: 5924697 - DNA, 25 bp, Homo sapien
ctcacccgtcgcccgaacacggtgc

SEQ ID NO: 5924698 - DNA, 25 bp, Homo sapien
gcccttgcgcgaacccgatcggacc

SEQ ID NO: 5924699 - DNA, 25 bp, Homo sapien
ccaggacgcgccggttaagacggcg

SEQ ID NO: 5924700 - DNA, 25 bp, Homo sapien
gccgtgattccgcgggcgaagtcgg

SEQ ID NO: 5924701 - DNA, 25 bp, Homo sapien
gcggaacgtacgcgacccgagcagg

SEQ ID NO: 5924702 - DNA, 25 bp, Homo sapien
acggcggtcgtgagtcggcggtacc

SEQ ID NO: 5924703 - DNA, 25 bp, Homo sapien
cccatcgtcggcgcgtactggggtg

SEQ ID NO: 5924704 - DNA, 25 bp, Homo sapien
cgcgcggcgcggacttacgtatccc

SEQ ID NO: 5924705 - DNA, 25 bp, Homo sapien
tcggagtttcgcgcgaggccggggt

SEQ ID NO: 5924706 - DNA, 25 bp, Homo sapien
tcctcctcggacgcgcgttccaggc

SEQ ID NO: 5924707 - DNA, 25 bp, Homo sapien
accgcgcgtaccgacacgcgttcgc

SEQ ID NO: 5924708 - DNA, 25 bp, Homo sapien
cagcgcgatcgtgcgtagcgtccgc

SEQ ID NO: 5924709 - DNA, 25 bp, Homo sapien
cagcgttcgcaacgggcgacgaccg

SEQ ID NO: 5924710 - DNA, 25 bp, Homo sapien
cggcggataggtcgggccgtgtgca

SEQ ID NO: 5924711 - DNA, 25 bp, Homo sapien
gcgcctggtaaccgacgcgggaagc

SEQ ID NO: 5924712 - DNA, 25 bp, Homo sapien
cccgcggtccggtcgcatagacggt

SEQ ID NO: 5924713 - DNA, 25 bp, Homo sapien
cggctgacccgtcgttgcggggtga

SEQ ID NO: 5924714 - DNA, 25 bp, Homo sapien
cagacgggacggcctacgcgggagt

SEQ ID NO: 5924715 - DNA, 25 bp, Homo sapien
cgctcctacgcgaggtcggaaccgg

SEQ ID NO: 5924716 - DNA, 25 bp, Homo sapien
gggacttcgcgcgaccctttggggc

SEQ ID NO: 5924717 - DNA, 25 bp, Homo sapien
gtggcgcgcgcctagacatggccac

SEQ ID NO: 5924718 - DNA, 25 bp, Homo sapien
gtgggcacgtaacgagtcgcgcgcc

SEQ ID NO: 5924719 - DNA, 25 bp, Homo sapien
ccggggcgtgcggtccgtaagctca

SEQ ID NO: 5924720 - DNA, 25 bp, Homo sapien
tcgtgcgtcgcgtacggggagctgg

SEQ ID NO: 5924721 - DNA, 25 bp, Homo sapien
ggctgtctagttcgcgggccccggt

SEQ ID NO: 5924722 - DNA, 25 bp, Homo sapien
tcgggatcgaaccggcgtgcggggt

SEQ ID NO: 5924723 - DNA, 25 bp, Homo sapien
caggcgacggccgtttgcgtctcgg

SEQ ID NO: 5924724 - DNA, 25 bp, Homo sapien
aggggccgagctaaccgcgccacga

SEQ ID NO: 5924725 - DNA, 25 bp, Homo sapien
ggcgctgtcataccgccgtctggcg

SEQ ID NO: 5924726 - DNA, 25 bp, Homo sapien
ccgaagcttgatgcgcgcagcggcc

SEQ ID NO: 5924727 - DNA, 25 bp, Homo sapien
atcgcgcggaccttacgcgggcgct

SEQ ID NO: 5924728 - DNA, 25 bp, Homo sapien
cgcacccgacggacgtaggagtcgg

SEQ ID NO: 5924729 - DNA, 25 bp, Homo sapien
tgggacgtcgcgacggtacctcccg

SEQ ID NO: 5924730 - DNA, 25 bp, Homo sapien
tgcgcgtatctagggcgcggctgcc

SEQ ID NO: 5924731 - DNA, 25 bp, Homo sapien
gggagcgcgaccccgattgcacagg

SEQ ID NO: 5924732 - DNA, 25 bp, Homo sapien
cgccgggccggtcgacgtatcgagt

SEQ ID NO: 5924733 - DNA, 25 bp, Homo sapien
ggcgactcaacgcgtgacgggacgg

SEQ ID NO: 5924734 - DNA, 25 bp, Homo sapien
gctgggaagccgacgcacgcgtcca

SEQ ID NO: 5924735 - DNA, 25 bp, Homo sapien
gcgggcgcgttacgatacccggctc

SEQ ID NO: 5924736 - DNA, 25 bp, Homo sapien
ccatcccggtcgtacgtcgtgcccc

SEQ ID NO: 5924737 - DNA, 25 bp, Homo sapien
gcgctggccgtccgggtatgcgtct

SEQ ID NO: 5924738 - DNA, 25 bp, Homo sapien
accgcgcgggccgtagtaagcctgg

SEQ ID NO: 5924739 - DNA, 25 bp, Homo sapien
gactatccggcgcgactgtcgggcg

SEQ ID NO: 5924740 - DNA, 25 bp, Homo sapien
cggggcaggcgccgtaacgatcgac

SEQ ID NO: 5924741 - DNA, 25 bp, Homo sapien
cgggagagtcgacgcgcgatagcgc

SEQ ID NO: 5924742 - DNA, 25 bp, Homo sapien
gccttccgtaccgtcgcgcgctgct

SEQ ID NO: 5924743 - DNA, 25 bp, Homo sapien
ccctgtgttacgggccgctcgaccg

SEQ ID NO: 5924744 - DNA, 25 bp, Homo sapien
ccaggcgcgctctagaccggtctcc

SEQ ID NO: 5924745 - DNA, 25 bp, Homo sapien
acgcggatcgcgtaggcggggcagt

SEQ ID NO: 5924746 - DNA, 25 bp, Homo sapien
ccacagccgatgttcgcgcacggcc

SEQ ID NO: 5924747 - DNA, 25 bp, Homo sapien
cacgcgcgatcccgcgaacgctgga

SEQ ID NO: 5924748 - DNA, 25 bp, Homo sapien
agcgatccttcgcgcgtagcgggcg

SEQ ID NO: 5924749 - DNA, 25 bp, Homo sapien
catccccggatgtaccgcgcgcctc

SEQ ID NO: 5924750 - DNA, 25 bp, Homo sapien
gctcgcccgacgggtcgaaggtgct

SEQ ID NO: 5924751 - DNA, 25 bp, Homo sapien
cgccgtcgtgcgtttaccgggcgag

SEQ ID NO: 5924752 - DNA, 25 bp, Homo sapien
ggggctgtcgacacgacccagtccg

SEQ ID NO: 5924753 - DNA, 25 bp, Homo sapien
cgacgctaacgctccgtccaggccg

SEQ ID NO: 5924754 - DNA, 25 bp, Homo sapien
acgcgccgatactcgtcggccgggt

SEQ ID NO: 5924755 - DNA, 25 bp, Homo sapien
gggcgggataggttcgcgccgtgca

SEQ ID NO: 5924756 - DNA, 25 bp, Homo sapien
acctgcgacgctaacgcgggcctgg

SEQ ID NO: 5924757 - DNA, 25 bp, Homo sapien
gcgcgcggaacgacgcggttttgcg

SEQ ID NO: 5924758 - DNA, 25 bp, Homo sapien
ccggtgaagcgtctcgcgaccacgc

SEQ ID NO: 5924759 - DNA, 25 bp, Homo sapien
ggcgctgtcgtgcgctgtagtgcgc

SEQ ID NO: 5924760 - DNA, 25 bp, Homo sapien
gcgagcacgaccgtcggaagcgcca

SEQ ID NO: 5924761 - DNA, 25 bp, Homo sapien
ggcaactacgcgacttgcgccgggg

SEQ ID NO: 5924762 - DNA, 25 bp, Homo sapien
aggaggcggtcgaccgctaccacgc

SEQ ID NO: 5924763 - DNA, 25 bp, Homo sapien
cggctagttgacgcgaggtggcccg

SEQ ID NO: 5924764 - DNA, 25 bp, Homo sapien
tccggcacgaccggtgcgtcggtgt

SEQ ID NO: 5924765 - DNA, 25 bp, Homo sapien
gggcgcaccacgcttacgctctccg

SEQ ID NO: 5924766 - DNA, 25 bp, Homo sapien
ggcacggaaggcgcgttaccgtccc

SEQ ID NO: 5924767 - DNA, 25 bp, Homo sapien
cggcgcgctacgcgggtattcccac

SEQ ID NO: 5924768 - DNA, 25 bp, Homo sapien
ggacccgcggtcgcaatcgcccttg

SEQ ID NO: 5924769 - DNA, 25 bp, Homo sapien
gtctgggcgactaccgtccctcccg

SEQ ID NO: 5924770 - DNA, 25 bp, Homo sapien
tcgggagcgcgaatcgaccggtggc

SEQ ID NO: 5924771 - DNA, 25 bp, Homo sapien
gctccctaacgcggacgcatcgggc

SEQ ID NO: 5924772 - DNA, 25 bp, Homo sapien
ccgcaccggcgtaggttcgggactg

SEQ ID NO: 5924773 - DNA, 25 bp, Homo sapien
ggcgctcgctaacggcggaatgcgc

SEQ ID NO: 5924774 - DNA, 25 bp, Homo sapien
cagtgggcgcatacggcctccctgc

SEQ ID NO: 5924775 - DNA, 25 bp, Homo sapien
tgggcgcgtacgcgctaggcgctag

SEQ ID NO: 5924776 - DNA, 25 bp, Homo sapien
tacccgcgcgtaaccctcgggctcg

SEQ ID NO: 5924777 - DNA, 25 bp, Homo sapien
tcggccgtcgtacgtccgtcgtcgg

SEQ ID NO: 5924778 - DNA, 25 bp, Homo sapien
gctagcctaacgtccgcccgccagg

SEQ ID NO: 5924779 - DNA, 25 bp, Homo sapien
cagtaggcgggtcgtacgccccgtg

SEQ ID NO: 5924780 - DNA, 25 bp, Homo sapien
gcccatacgcaacggccgctgtccg

SEQ ID NO: 5924781 - DNA, 25 bp, Homo sapien
cacacgctcgcgaccgactctgggc

SEQ ID NO: 5924782 - DNA, 25 bp, Homo sapien
ggagtcgcggtaacgcgaaccggcg

SEQ ID NO: 5924783 - DNA, 25 bp, Homo sapien
ctccttatccgtcccgcgagggcgg

SEQ ID NO: 5924784 - DNA, 25 bp, Homo sapien
cccctggcgttacggctcgtcggac

SEQ ID NO: 5924785 - DNA, 25 bp, Homo sapien
cggacccgtccgatagcgtccctcc

SEQ ID NO: 5924786 - DNA, 25 bp, Homo sapien
ggccgagcggtcgactcgtcagctc

SEQ ID NO: 5924787 - DNA, 25 bp, Homo sapien
gcccggccgtatgcgcgtccacaga

SEQ ID NO: 5924788 - DNA, 25 bp, Homo sapien
tccgtggccatacgcgagcccggct

SEQ ID NO: 5924789 - DNA, 25 bp, Homo sapien
ccgcatctacggcgcgttcgggcct

SEQ ID NO: 5924790 - DNA, 25 bp, Homo sapien
cccgtctcgttcggcgctaggctgg

SEQ ID NO: 5924791 - DNA, 25 bp, Homo sapien
tcacggctgccgcgcgctacgcaag

SEQ ID NO: 5924792 - DNA, 25 bp, Homo sapien
cgcttccgcgtttggtcgtccggcg

SEQ ID NO: 5924793 - DNA, 25 bp, Homo sapien
ggcgaccccgtcttcgcgaatccgg

SEQ ID NO: 5924794 - DNA, 25 bp, Homo sapien
ggcgccaccgccgggtataacctgg

SEQ ID NO: 5924795 - DNA, 25 bp, Homo sapien
gtgggaccgcgaatacggcgccgct

SEQ ID NO: 5924796 - DNA, 25 bp, Homo sapien
ggtacgcgtcggcgcaagtgccacg

SEQ ID NO: 5924797 - DNA, 25 bp, Homo sapien
cgaccctactgcgccggtcgtgggt

SEQ ID NO: 5924798 - DNA, 25 bp, Homo sapien
cgagggtaccggtgcgacgtggcct

SEQ ID NO: 5924799 - DNA, 25 bp, Homo sapien
ccgtcgcgcttagcgtcgcgaaccc

SEQ ID NO: 5924800 - DNA, 25 bp, Homo sapien
acccccagtcgagtacgcggctggg

SEQ ID NO: 5924801 - DNA, 25 bp, Homo sapien
ccagggcgatacgaccgcgctgcga

SEQ ID NO: 5924802 - DNA, 25 bp, Homo sapien
gcgcataccgcgtaacggacgccgc

SEQ ID NO: 5924803 - DNA, 25 bp, Homo sapien
tgcgggacgacgcagcgtactcccc

SEQ ID NO: 5924804 - DNA, 25 bp, Homo sapien
ctcgtgcgtgcggacgactgtgccc

SEQ ID NO: 5924805 - DNA, 25 bp, Homo sapien
gcggtcgacggtcgttccgtgccca

SEQ ID NO: 5924806 - DNA, 25 bp, Homo sapien
acgggggcgcgttacgacgcgcaag

SEQ ID NO: 5924807 - DNA, 25 bp, Homo sapien
ctgggctatggcgggttcggtcgcc

SEQ ID NO: 5924808 - DNA, 25 bp, Homo sapien
gtctgctcgcgttaggcgccacgcc

SEQ ID NO: 5924809 - DNA, 25 bp, Homo sapien
cccgatcgcgttgcggcaagcgtgc

SEQ ID NO: 5924810 - DNA, 25 bp, Homo sapien
gggctgacgtcgtgaccgagcctgg

SEQ ID NO: 5924811 - DNA, 25 bp, Homo sapien
cggtcctcgcatacggtcgccccca

SEQ ID NO: 5924812 - DNA, 25 bp, Homo sapien
cgccagcctaacgcgtccggggtac

SEQ ID NO: 5924813 - DNA, 25 bp, Homo sapien
gtgtcggctacgttccgccggtccg

SEQ ID NO: 5924814 - DNA, 25 bp, Homo sapien
tgcaccacccgcgtccgtacgccct

SEQ ID NO: 5924815 - DNA, 25 bp, Homo sapien
ccgggactaccgacgctcgagcgtc

SEQ ID NO: 5924816 - DNA, 25 bp, Homo sapien
cgccccttcgcgacggaactggcac

SEQ ID NO: 5924817 - DNA, 25 bp, Homo sapien
gccaggacgtccgcgctagtcgtgc

SEQ ID NO: 5924818 - DNA, 25 bp, Homo sapien
gccgagcgcgacggatagtcctccc

SEQ ID NO: 5924819 - DNA, 25 bp, Homo sapien
gtcgcgagcgtaccgcgctgcactc

SEQ ID NO: 5924820 - DNA, 25 bp, Homo sapien
cgtccggcgacccgcgtacgcctaa

SEQ ID NO: 5924821 - DNA, 25 bp, Homo sapien
ctccctatgcgtcgaaccccgcggc

SEQ ID NO: 5924822 - DNA, 25 bp, Homo sapien
gcgcaccatgccgcgcgttgagcca

SEQ ID NO: 5924823 - DNA, 25 bp, Homo sapien
cctacgcgtcgaacgtctgggggcc

SEQ ID NO: 5924824 - DNA, 25 bp, Homo sapien
cgttgccgtcggccgtatgcgcgct

SEQ ID NO: 5924825 - DNA, 25 bp, Homo sapien
gccagccgtcgcggagctagtcgct

SEQ ID NO: 5924826 - DNA, 25 bp, Homo sapien
cccccccgctacgcgtgtaccctca

SEQ ID NO: 5924827 - DNA, 25 bp, Homo sapien
ccgcagcgcgccgatctatcggcag

SEQ ID NO: 5924828 - DNA, 25 bp, Homo sapien
ggccgtgtaacgccgcgacccaacg

SEQ ID NO: 5924829 - DNA, 25 bp, Homo sapien
gtctggtcgtaccggcccggcatgc

SEQ ID NO: 5924830 - DNA, 25 bp, Homo sapien
cgttgggcgtcttgcgacgcgcagg

SEQ ID NO: 5924831 - DNA, 25 bp, Homo sapien
ctgcgctaccgcgacgggtgcggaa

SEQ ID NO: 5924832 - DNA, 25 bp, Homo sapien
cccgtctagcgcgtcggatccgcac

SEQ ID NO: 5924833 - DNA, 25 bp, Homo sapien
ggccgggagtatcgcgtcgtgctcc

SEQ ID NO: 5924834 - DNA, 25 bp, Homo sapien
cagcgacaccggtccgctacgggca

SEQ ID NO: 5924835 - DNA, 25 bp, Homo sapien
tccagccgcggttagctcgcacgcc

SEQ ID NO: 5924836 - DNA, 25 bp, Homo sapien
aggcaacgacgtacgtgcgggcccc

SEQ ID NO: 5924837 - DNA, 25 bp, Homo sapien
gcgtacgcgctaacgggcgccacag

SEQ ID NO: 5924838 - DNA, 25 bp, Homo sapien
gggcggtattcgcgcccgcccagtt

SEQ ID NO: 5924839 - DNA, 25 bp, Homo sapien
tggcggcgacgctacgtcgtgacgc

SEQ ID NO: 5924840 - DNA, 25 bp, Homo sapien
accgctgatacgcgcgggacccagg

SEQ ID NO: 5924841 - DNA, 25 bp, Homo sapien
ggcggagttccgcgcttcggcgtac

SEQ ID NO: 5924842 - DNA, 25 bp, Homo sapien
tcgcacatgcggaccgtcggcaccc

SEQ ID NO: 5924843 - DNA, 25 bp, Homo sapien
gcgcccggcatactagcgggagtgg

SEQ ID NO: 5924844 - DNA, 25 bp, Homo sapien
tggagcgtaacggacgccgccgcac

SEQ ID NO: 5924845 - DNA, 25 bp, Homo sapien
cgggccttcgaccgcgttcaggcac

SEQ ID NO: 5924846 - DNA, 25 bp, Homo sapien
tcgccgcgcggtatgtccaccgacc

SEQ ID NO: 5924847 - DNA, 25 bp, Homo sapien
gatccctaccgggcgtacgctcccg

SEQ ID NO: 5924848 - DNA, 25 bp, Homo sapien
cacgcgcgggtcgcgtatagcccac

SEQ ID NO: 5924849 - DNA, 25 bp, Homo sapien
tgcctgcgaggggatacgcgggacc

SEQ ID NO: 5924850 - DNA, 25 bp, Homo sapien
tggccgcgcttacgtccgaggccga

SEQ ID NO: 5924851 - DNA, 25 bp, Homo sapien
cacgtccggactcgtacgccgaggc

SEQ ID NO: 5924852 - DNA, 25 bp, Homo sapien
ccgtgccgcatagtacggccccgtc

SEQ ID NO: 5924853 - DNA, 25 bp, Homo sapien
tacctgtcgcgcgtcaaggggcggg

SEQ ID NO: 5924854 - DNA, 25 bp, Homo sapien
ggcactagtccgtcacgcgcggcag

SEQ ID NO: 5924855 - DNA, 25 bp, Homo sapien
acgggagtccgttaccgcggctgcc

SEQ ID NO: 5924856 - DNA, 25 bp, Homo sapien
ccgggctgtgcgacccgtactaccc

SEQ ID NO: 5924857 - DNA, 25 bp, Homo sapien
tcttggtcgaacggccccgcggcgt

SEQ ID NO: 5924858 - DNA, 25 bp, Homo sapien
ggccggccggcgatacgatactccg

SEQ ID NO: 5924859 - DNA, 25 bp, Homo sapien
cctcatgtacggacgggccgccctg

SEQ ID NO: 5924860 - DNA, 25 bp, Homo sapien
gaaccccgtcgaacgcgcagggcag

SEQ ID NO: 5924861 - DNA, 25 bp, Homo sapien
accgcccgcgcgtcaatagtcccgc

SEQ ID NO: 5924862 - DNA, 25 bp, Homo sapien
cagagggcgcgacgtacgtggggag

SEQ ID NO: 5924863 - DNA, 25 bp, Homo sapien
cacgagacgtcccgacccgactccg

SEQ ID NO: 5924864 - DNA, 25 bp, Homo sapien
ccccgttatcgcgctccgagcccgt

SEQ ID NO: 5924865 - DNA, 25 bp, Homo sapien
cctggggcgtcgcgttaggccacgt

SEQ ID NO: 5924866 - DNA, 25 bp, Homo sapien
cggtcctaatcgtggcgcggcccgt

SEQ ID NO: 5924867 - DNA, 25 bp, Homo sapien
caccggcggcggttgaacgactccg

SEQ ID NO: 5924868 - DNA, 25 bp, Homo sapien
tcgtccccgatgtcggacggtcccg

SEQ ID NO: 5924869 - DNA, 25 bp, Homo sapien
ccggatcggtcgcgagctagtccgg

SEQ ID NO: 5924870 - DNA, 25 bp, Homo sapien
ggggtgtcgtcgactagggcgccag

SEQ ID NO: 5924871 - DNA, 25 bp, Homo sapien
tcgaccaacgcgaccggagcggacg

SEQ ID NO: 5924872 - DNA, 25 bp, Homo sapien
ccctgacgcgggtatcgaccgcgtc

SEQ ID NO: 5924873 - DNA, 25 bp, Homo sapien
gcggcgatcgcgcgcaacgcaagtg

SEQ ID NO: 5924874 - DNA, 25 bp, Homo sapien
gcggcctacgctccgtcgagctgag

SEQ ID NO: 5924875 - DNA, 25 bp, Homo sapien
ggccggtatgcggattcgcgtcccg

SEQ ID NO: 5924876 - DNA, 25 bp, Homo sapien
ggcgctgcgtacgcgaaccacgggt

SEQ ID NO: 5924877 - DNA, 25 bp, Homo sapien
gtcggacgctaccggtcgacgcgtg

SEQ ID NO: 5924878 - DNA, 25 bp, Homo sapien
gggcctgtacgtaacgccgccagcg

SEQ ID NO: 5924879 - DNA, 25 bp, Homo sapien
acacggcgaacgcgggtcggagacg

SEQ ID NO: 5924880 - DNA, 25 bp, Homo sapien
gccaggcgtacgtctactcggcggg

SEQ ID NO: 5924881 - DNA, 25 bp, Homo sapien
gcacggcgcgtactaaccgccgtcc

SEQ ID NO: 5924882 - DNA, 25 bp, Homo sapien
ccgcagtcgcgcgtatgcggatgcc

SEQ ID NO: 5924883 - DNA, 25 bp, Homo sapien
ccggggcgacccgtgtacgcgatct

SEQ ID NO: 5924884 - DNA, 25 bp, Homo sapien
gcagagaccccgcatagcggcgtcg

SEQ ID NO: 5924885 - DNA, 25 bp, Homo sapien
cagggcgtccgcggtcatatgggcg

SEQ ID NO: 5924886 - DNA, 25 bp, Homo sapien
tgccgggcggatcgaaccggcggtt

SEQ ID NO: 5924887 - DNA, 25 bp, Homo sapien
cgaccccgctccgacgtaacacggc

SEQ ID NO: 5924888 - DNA, 25 bp, Homo sapien
gctcagcttacggcgcgcaggcgca

SEQ ID NO: 5924889 - DNA, 25 bp, Homo sapien
gccccgacggtcgatcccctcgcat

SEQ ID NO: 5924890 - DNA, 25 bp, Homo sapien
gtcacccgtctaacgcgaggcgccc

SEQ ID NO: 5924891 - DNA, 25 bp, Homo sapien
gagggcacgcttgtacgcgctcccc

SEQ ID NO: 5924892 - DNA, 25 bp, Homo sapien
cagcggctaatcggcgcgccagacg

SEQ ID NO: 5924893 - DNA, 25 bp, Homo sapien
gtcgctattcgcgcgcccatccgcg

SEQ ID NO: 5924894 - DNA, 25 bp, Homo sapien
cgcactcgcgagtcaaccgggggca

SEQ ID NO: 5924895 - DNA, 25 bp, Homo sapien
gctcctctacgcacgagcgcgacgc

SEQ ID NO: 5924896 - DNA, 25 bp, Homo sapien
tacccgtgacgtcgcgcgagcccag

SEQ ID NO: 5924897 - DNA, 25 bp, Homo sapien
ggtgcctcgacccttagcggggctc

SEQ ID NO: 5924898 - DNA, 25 bp, Homo sapien
caccgcacgtgccgctatctggccc

SEQ ID NO: 5924899 - DNA, 25 bp, Homo sapien
cctccatacgcaccgaccgtcgccg

SEQ ID NO: 5924900 - DNA, 25 bp, Homo sapien
ctggcggtcgcgtactcgacctggg

SEQ ID NO: 5924901 - DNA, 25 bp, Homo sapien
gtccgctcgcgcgtatggtcgagcc

SEQ ID NO: 5924902 - DNA, 25 bp, Homo sapien
gggtccaccggcgtcaacccgaagc

SEQ ID NO: 5924903 - DNA, 25 bp, Homo sapien
cagcgctcgtctgtacgcgaccgcg

SEQ ID NO: 5924904 - DNA, 25 bp, Homo sapien
gagtgcgcgggctagtacgcgccga

SEQ ID NO: 5924905 - DNA, 25 bp, Homo sapien
gtggggtgactatgcgccgcagccg

SEQ ID NO: 5924906 - DNA, 25 bp, Homo sapien
tagaggcgcacgtgcggtaggggcc

SEQ ID NO: 5924907 - DNA, 25 bp, Homo sapien
gcttgccgtcggcctaccggcagtg

SEQ ID NO: 5924908 - DNA, 25 bp, Homo sapien
agcgccgcgccgtagactcgtagcc

SEQ ID NO: 5924909 - DNA, 25 bp, Homo sapien
gcctcgcaccgaccgctagcgtcga

SEQ ID NO: 5924910 - DNA, 25 bp, Homo sapien
acccctcggcgcgtactgtctcggg

SEQ ID NO: 5924911 - DNA, 25 bp, Homo sapien
tcgggggtttagcgcgccgggcaca

SEQ ID NO: 5924912 - DNA, 25 bp, Homo sapien
tccccgagacgcgcggtcgtcagag

SEQ ID NO: 5924913 - DNA, 25 bp, Homo sapien
actgcgcgcgttccgacgtcgaggg

SEQ ID NO: 5924914 - DNA, 25 bp, Homo sapien
gagcccccgcggtcgtagaccgctt

SEQ ID NO: 5924915 - DNA, 25 bp, Homo sapien
cgtggacggtcgcgctattgggggc

SEQ ID NO: 5924916 - DNA, 25 bp, Homo sapien
gggcactcgcgcgaacgggtgcact

SEQ ID NO: 5924917 - DNA, 25 bp, Homo sapien
gccaccgacgcgagacgtaggccag

SEQ ID NO: 5924918 - DNA, 25 bp, Homo sapien
gccggttaccgccgctcgacccact

SEQ ID NO: 5924919 - DNA, 25 bp, Homo sapien
cgccccatacgtcccaccgatgccc

SEQ ID NO: 5924920 - DNA, 25 bp, Homo sapien
taggggtcgtaacccgcgcctcgcc

SEQ ID NO: 5924921 - DNA, 25 bp, Homo sapien
aagcggccgtcgacgcgaacccgga

SEQ ID NO: 5924922 - DNA, 25 bp, Homo sapien
cagggcccgttatccgccggaggtg

SEQ ID NO: 5924923 - DNA, 25 bp, Homo sapien
ccgcgaccgtttatcgcgggtggcg

SEQ ID NO: 5924924 - DNA, 25 bp, Homo sapien
gtcggcgacgatcggtactggcggc

SEQ ID NO: 5924925 - DNA, 25 bp, Homo sapien
tggtcggcgctatccgcgtgaccgc

SEQ ID NO: 5924926 - DNA, 25 bp, Homo sapien
cccagcgtacgcgacgacctggtcc

SEQ ID NO: 5924927 - DNA, 25 bp, Homo sapien
tgggggacgcaccgacgaggctgag

SEQ ID NO: 5924928 - DNA, 25 bp, Homo sapien
cccgattcgacggcgctagccggtg

SEQ ID NO: 5924929 - DNA, 25 bp, Homo sapien
gcctctcgtgggcccgttagcgcgt

SEQ ID NO: 5924930 - DNA, 25 bp, Homo sapien
ggcctgtccgcgtcatgcgtggtgc

SEQ ID NO: 5924931 - DNA, 25 bp, Homo sapien
cgctgggtacgcccggacgacacca

SEQ ID NO: 5924932 - DNA, 25 bp, Homo sapien
taggcggcgctacgtcggtgcacgc

SEQ ID NO: 5924933 - DNA, 25 bp, Homo sapien
cgacccccgatgttcgcgtcggcag

SEQ ID NO: 5924934 - DNA, 25 bp, Homo sapien
agggcggactacacgcgatgccggc

SEQ ID NO: 5924935 - DNA, 25 bp, Homo sapien
gacgtcctccgcggtcgactcggac

SEQ ID NO: 5924936 - DNA, 25 bp, Homo sapien
acagccctcgcggggactagcgcgt

SEQ ID NO: 5924937 - DNA, 25 bp, Homo sapien
ggcagcccgacgtgcgactcggcta

SEQ ID NO: 5924938 - DNA, 25 bp, Homo sapien
cgcgcgcccgcaacgtcgacaggaa

SEQ ID NO: 5924939 - DNA, 25 bp, Homo sapien
cgctgccgtcctaccggtcggtcct

SEQ ID NO: 5924940 - DNA, 25 bp, Homo sapien
gaggaccgccgtaacgtgccccgtc

SEQ ID NO: 5924941 - DNA, 25 bp, Homo sapien
gcggcgtagccgcgttccgggattc

SEQ ID NO: 5924942 - DNA, 25 bp, Homo sapien
cccgacgaatatccggcgccctgcg

SEQ ID NO: 5924943 - DNA, 25 bp, Homo sapien
cgcgccgcgtactatgccgagggca

SEQ ID NO: 5924944 - DNA, 25 bp, Homo sapien
ggactggcgcggtatccaaccccgc

SEQ ID NO: 5924945 - DNA, 25 bp, Homo sapien
ccggctcccgcgctattcggttggg

SEQ ID NO: 5924946 - DNA, 25 bp, Homo sapien
tcccgctccgccggtacgagctcgt

SEQ ID NO: 5924947 - DNA, 25 bp, Homo sapien
caacggcgtgcgacgtaggctcggg

SEQ ID NO: 5924948 - DNA, 25 bp, Homo sapien
cacgcgcgcgtagcccggtagacga

SEQ ID NO: 5924949 - DNA, 25 bp, Homo sapien
accgcaatacgcgcggacgcccctg

SEQ ID NO: 5924950 - DNA, 25 bp, Homo sapien
gcggccggtcgcgcgtgtaaaccct

SEQ ID NO: 5924951 - DNA, 25 bp, Homo sapien
cgcggccgatacgccacgtgttccc

SEQ ID NO: 5924952 - DNA, 25 bp, Homo sapien
ggggacaggcgcgttacggctgcag

SEQ ID NO: 5924953 - DNA, 25 bp, Homo sapien
cccgaagccgtacgcggatgcgcct

SEQ ID NO: 5924954 - DNA, 25 bp, Homo sapien
ggtctcctaacgacgccgggccgac

SEQ ID NO: 5924955 - DNA, 25 bp, Homo sapien
cgggcctgacgcgtccgatctgacg

SEQ ID NO: 5924956 - DNA, 25 bp, Homo sapien
ccgggggcggacccgcttactgaga

SEQ ID NO: 5924957 - DNA, 25 bp, Homo sapien
tgagtccgaccgcgttcggcctccg

SEQ ID NO: 5924958 - DNA, 25 bp, Homo sapien
gaagaccgctcgacgcatgccccgg

SEQ ID NO: 5924959 - DNA, 25 bp, Homo sapien
ggaggcgtaggacggcgcagcaacc

SEQ ID NO: 5924960 - DNA, 25 bp, Homo sapien
caggtctagtacggtcgccgccccg

SEQ ID NO: 5924961 - DNA, 25 bp, Homo sapien
gggagagcgtacggtcgtcccgtgg

SEQ ID NO: 5924962 - DNA, 25 bp, Homo sapien
cgggactggctcgacgcgaacgcgt

SEQ ID NO: 5924963 - DNA, 25 bp, Homo sapien
acccaggatagccgcgaaccccgcg

SEQ ID NO: 5924964 - DNA, 25 bp, Homo sapien
ctcggcgcgtacggtcgacgggatg

SEQ ID NO: 5924965 - DNA, 25 bp, Homo sapien
cggagtcgttcaaccgccgccggtg

SEQ ID NO: 5924966 - DNA, 25 bp, Homo sapien
gcgcattccgccgttagcgagcgcc

SEQ ID NO: 5924967 - DNA, 25 bp, Homo sapien
ggctcggtcggttacgcgccgtacg

SEQ ID NO: 5924968 - DNA, 25 bp, Homo sapien
ggcgcgcgactcgttacgtgcccac

SEQ ID NO: 5924969 - DNA, 25 bp, Homo sapien
cggactcgcgccgtaggtccgtcca

SEQ ID NO: 5924970 - DNA, 25 bp, Homo sapien
gcagactagcgcgcctacagcgccc

SEQ ID NO: 5924971 - DNA, 25 bp, Homo sapien
gctccgtacgcccgtacggacctcc

SEQ ID NO: 5924972 - DNA, 25 bp, Homo sapien
gcacgcttgccgcaacgcgatcggg

SEQ ID NO: 5924973 - DNA, 25 bp, Homo sapien
caggggcgtccgcgcgtattgcggt

SEQ ID NO: 5924974 - DNA, 25 bp, Homo sapien
agcccgatccaacggcgcggcacca

SEQ ID NO: 5924975 - DNA, 25 bp, Homo sapien
gcccctctagcgcgactcgggctag

SEQ ID NO: 5924976 - DNA, 25 bp, Homo sapien
gcctgacgaccgcgctaggctaccc

SEQ ID NO: 5924977 - DNA, 25 bp, Homo sapien
agcgactagctccgcgacggctggc

SEQ ID NO: 5924978 - DNA, 25 bp, Homo sapien
cttgcgtagcgcgcggcagccgtga

SEQ ID NO: 5924979 - DNA, 25 bp, Homo sapien
ccactcccgctagtatgccgggcgc

SEQ ID NO: 5924980 - DNA, 25 bp, Homo sapien
gcaggacgcgatctagccgccgacc

SEQ ID NO: 5924981 - DNA, 25 bp, Homo sapien
ctgggacgcggcgatacgttccggg

SEQ ID NO: 5924982 - DNA, 25 bp, Homo sapien
gcctggagccctatcgcgcccccat

SEQ ID NO: 5924983 - DNA, 25 bp, Homo sapien
cgccagacggcggtatgacagcgcc

SEQ ID NO: 5924984 - DNA, 25 bp, Homo sapien
ctgtggcgcccgttagcgcgtacgc

SEQ ID NO: 5924985 - DNA, 25 bp, Homo sapien
gtgccagttccgtcgcgaaggggcg

SEQ ID NO: 5924986 - DNA, 25 bp, Homo sapien
gagccgggtatcgtaacgcgcccgc

SEQ ID NO: 5924987 - DNA, 25 bp, Homo sapien
gcgccacgagttatccgcgtcgcgg

SEQ ID NO: 5924988 - DNA, 25 bp, Homo sapien
cggagagcgtaagcgtggtgcgccc

SEQ ID NO: 5924989 - DNA, 25 bp, Homo sapien
gagccccgctaagggtcgaggcacc

SEQ ID NO: 5924990 - DNA, 25 bp, Homo sapien
gcgggactattgacgcgcgggcggt

SEQ ID NO: 5924991 - DNA, 25 bp, Homo sapien
ggtgtgacccgacagtacgcggggg

SEQ ID NO: 5924992 - DNA, 25 bp, Homo sapien
cgcgtgatcggcgtacccgtgcctc

SEQ ID NO: 5924993 - DNA, 25 bp, Homo sapien
ggctcgcctagcgacgcgtctaccc

SEQ ID NO: 5924994 - DNA, 25 bp, Homo sapien
gtcgatcgttacggcgcctgccccg

SEQ ID NO: 5924995 - DNA, 25 bp, Homo sapien
tcgctgccaaccgcgcgtcactgcg

SEQ ID NO: 5924996 - DNA, 25 bp, Homo sapien
acgggccgcgccacgattaggaccg

SEQ ID NO: 5924997 - DNA, 25 bp, Homo sapien
gatccggacgcccgccaatgggcca

SEQ ID NO: 5924998 - DNA, 25 bp, Homo sapien
acccgtggttcgcgtacgcagcgcc

SEQ ID NO: 5924999 - DNA, 25 bp, Homo sapien
gtgcggatccgacgcgctagacggg

SEQ ID NO: 5925000 - DNA, 25 bp, Homo sapien
tgaccgacggcggtcgcaaaggccg

SEQ ID NO: 5925001 - DNA, 25 bp, Homo sapien
ccctgccgtggcccgtataggaggc

SEQ ID NO: 5925002 - DNA, 25 bp, Homo sapien
aagaccgcctactcgcgtccgcccc

SEQ ID NO: 5925003 - DNA, 25 bp, Homo sapien
gggacggtaacgcgccttccgtgcc

SEQ ID NO: 5925004 - DNA, 25 bp, Homo sapien
cctgctcgggtcgcgtacgttccgc

SEQ ID NO: 5925005 - DNA, 25 bp, Homo sapien
gacgctcgagcgtcggtagtcccgg

SEQ ID NO: 5925006 - DNA, 25 bp, Homo sapien
tgagggtacacgcgtagcggggggg

SEQ ID NO: 5925007 - DNA, 25 bp, Homo sapien
actgccccgcctacgcgatccgcgt

SEQ ID NO: 5925008 - DNA, 25 bp, Homo sapien
acaccgacgcaccggtcgtgccgga

SEQ ID NO: 5925009 - DNA, 25 bp, Homo sapien
cgtctggcgcgccgattagccgctg

SEQ ID NO: 5925010 - DNA, 25 bp, Homo sapien
ggggctcgtcggtaccgaggcgatg

SEQ ID NO: 5925011 - DNA, 25 bp, Homo sapien
acgagctcgtaccggcggagcggga

SEQ ID NO: 5925012 - DNA, 25 bp, Homo sapien
gccgccagtaccgatcgtcgccgac

SEQ ID NO: 5925013 - DNA, 25 bp, Homo sapien
ccagcgctcgtgcgttcggacggag

SEQ ID NO: 5925014 - DNA, 25 bp, Homo sapien
cctgggtcccgcgcgtatcagcggt

SEQ ID NO: 5925015 - DNA, 25 bp, Homo sapien
ccacggtcgttacggccgtcgccac

SEQ ID NO: 5925016 - DNA, 25 bp, Homo sapien
ctccccacgtacgtcgcgccctctg

SEQ ID NO: 5925017 - DNA, 25 bp, Homo sapien
ttaggcgtacgcgggtcgccggacg

SEQ ID NO: 5925018 - DNA, 25 bp, Homo sapien
gtcggcccggcgtcgttaggagacc

SEQ ID NO: 5925019 - DNA, 25 bp, Homo sapien
gcggagcacgcgcatcgtagtcccg

SEQ ID NO: 5925020 - DNA, 25 bp, Homo sapien
caccccagtacgcgccgacgatggg

SEQ ID NO: 5925021 - DNA, 25 bp, Homo sapien
cgggtgcacgaacggtcgtcgcgga

SEQ ID NO: 5925022 - DNA, 25 bp, Homo sapien
gtcgagggtcggccgttacgccgac

SEQ ID NO: 5925023 - DNA, 25 bp, Homo sapien
cggggcggcgaccgtactagacctg

SEQ ID NO: 5925024 - DNA, 25 bp, Homo sapien
accccgcacgccggttcgatcccga

SEQ ID NO: 5925025 - DNA, 25 bp, Homo sapien
ccgggagcggtcgactcgtggccta

SEQ ID NO: 5925026 - DNA, 25 bp, Homo sapien
cacctccggcggataacgggccctg

SEQ ID NO: 5925027 - DNA, 25 bp, Homo sapien
ggagaccggtctagagcgcgcctgg

SEQ ID NO: 5925028 - DNA, 25 bp, Homo sapien
cagccccccgacggtagtcccagag

SEQ ID NO: 5925029 - DNA, 25 bp, Homo sapien
gggcatcggtgggacgtatggggcg

SEQ ID NO: 5925030 - DNA, 25 bp, Homo sapien
taccgccgtattcgcgagccgccgg

SEQ ID NO: 5925031 - DNA, 25 bp, Homo sapien
cagggcggcccgtccgtacatgagg

SEQ ID NO: 5925032 - DNA, 25 bp, Homo sapien
ggggcccgcacgtacgtcgttgcct

SEQ ID NO: 5925033 - DNA, 25 bp, Homo sapien
acgcgctagtccccgcgagggctgt

SEQ ID NO: 5925034 - DNA, 25 bp, Homo sapien
ggaccaggtcgtcgcgtacgctggg

SEQ ID NO: 5925035 - DNA, 25 bp, Homo sapien
gggcggagcgtacgcgctagggaac

SEQ ID NO: 5925036 - DNA, 25 bp, Homo sapien
aggcccgaacgcgccgtagatgcgg

SEQ ID NO: 5925037 - DNA, 25 bp, Homo sapien
cttgcgcgtcgtaacgcgcccccgt

SEQ ID NO: 5925038 - DNA, 25 bp, Homo sapien
caccgggctcgcttacgcgcagacc

SEQ ID NO: 5925039 - DNA, 25 bp, Homo sapien
cgcgtctaagaccgcccgtcgcggt

SEQ ID NO: 5925040 - DNA, 25 bp, Homo sapien
gcccgggggtatacccgcggcttca

SEQ ID NO: 5925041 - DNA, 25 bp, Homo sapien
ctagcgcctagcgcgtacgcgccca

SEQ ID NO: 5925042 - DNA, 25 bp, Homo sapien
ccgtgactagcgcgccggtggtcca

SEQ ID NO: 5925043 - DNA, 25 bp, Homo sapien
aggccacgtcgcaccggtaccctcg

SEQ ID NO: 5925044 - DNA, 25 bp, Homo sapien
tgggcacggaacgaccgtcgaccgc

SEQ ID NO: 5925045 - DNA, 25 bp, Homo sapien
ccaggcttactacggcccgcgcggt

SEQ ID NO: 5925046 - DNA, 25 bp, Homo sapien
ccagaggacggtcggcgaagcgcca

SEQ ID NO: 5925047 - DNA, 25 bp, Homo sapien
gtgcggcggcgtccgttacgctcca

SEQ ID NO: 5925048 - DNA, 25 bp, Homo sapien
tcgcgccgggtaacttgcgccctgg

SEQ ID NO: 5925049 - DNA, 25 bp, Homo sapien
aggcgcatccgcgtacggcttcggg

SEQ ID NO: 5925050 - DNA, 25 bp, Homo sapien
tgtgcccggcgcgctaaacccccga

SEQ ID NO: 5925051 - DNA, 25 bp, Homo sapien
gcacgactagcgcggacgtcctggc

SEQ ID NO: 5925052 - DNA, 25 bp, Homo sapien
agtcccgtccgcatgcgtcgcgcga

SEQ ID NO: 5925053 - DNA, 25 bp, Homo sapien
tgggaggatcgtatgcggccgcccc

SEQ ID NO: 5925054 - DNA, 25 bp, Homo sapien
tgcgcttacgtcgcgaacgccggcg

SEQ ID NO: 5925055 - DNA, 25 bp, Homo sapien
acgggctcggagcgcgataacgggg

SEQ ID NO: 5925056 - DNA, 25 bp, Homo sapien
cgtccgctccggtcgcgttggtcga

SEQ ID NO: 5925057 - DNA, 25 bp, Homo sapien
cgccggttcgcgttaccgcgactcc

SEQ ID NO: 5925058 - DNA, 25 bp, Homo sapien
cggacagcggccgttgcgtatgggc

SEQ ID NO: 5925059 - DNA, 25 bp, Homo sapien
cggccggacgtacgcggagagctga

SEQ ID NO: 5925060 - DNA, 25 bp, Homo sapien
gcaccgtgttcgggcgacgggtgag

SEQ ID NO: 5925061 - DNA, 25 bp, Homo sapien
ccggtgtcggccgtacgcgacgatc

SEQ ID NO: 5925062 - DNA, 25 bp, Homo sapien
cctcagcgcgtatagcgacccgcgg

SEQ ID NO: 5925063 - DNA, 25 bp, Homo sapien
agcccccccgcgcgagtatcactcg

SEQ ID NO: 5925064 - DNA, 25 bp, Homo sapien
gaacgccgatccatcgcgcggccca

SEQ ID NO: 5925065 - DNA, 25 bp, Homo sapien
gggcgccgtaggcgagtcgagctga

SEQ ID NO: 5925066 - DNA, 25 bp, Homo sapien
tctcagtaagcgggtccgcccccgg

SEQ ID NO: 5925067 - DNA, 25 bp, Homo sapien
gggaggactatccgtcgcgctcggc

SEQ ID NO: 5925068 - DNA, 25 bp, Homo sapien
cgcccgctacgcgcgaaggatcgct

SEQ ID NO: 5925069 - DNA, 25 bp, Homo sapien
ggccgcgcgtagccggatagaccca

SEQ ID NO: 5925070 - DNA, 25 bp, Homo sapien
gggcggcgcgttacgagggacacag

SEQ ID NO: 5925071 - DNA, 25 bp, Homo sapien
ggcccctaccgcacgtgcgcctcta

SEQ ID NO: 5925072 - DNA, 25 bp, Homo sapien
acccacgaccggcgcagtagggtcg

SEQ ID NO: 5925073 - DNA, 25 bp, Homo sapien
tggcgcttccgacggtcgtgctcgc

SEQ ID NO: 5925074 - DNA, 25 bp, Homo sapien
gggctccgggccgcgtataagcgga

SEQ ID NO: 5925075 - DNA, 25 bp, Homo sapien
accgtctatgcgaccggaccgcggg

SEQ ID NO: 5925076 - DNA, 25 bp, Homo sapien
ccacgggacgaccgtacgctctccc

SEQ ID NO: 5925077 - DNA, 25 bp, Homo sapien
ccgactcctacgtccgtcgggtgcg

SEQ ID NO: 5925078 - DNA, 25 bp, Homo sapien
ccgtagttcgcgtccgcagggagcc

SEQ ID NO: 5925079 - DNA, 25 bp, Homo sapien
cagtcccgaacctacgccggtgcgg

SEQ ID NO: 5925080 - DNA, 25 bp, Homo sapien
agccgggctcgcgtatggccacgga

SEQ ID NO: 5925081 - DNA, 25 bp, Homo sapien
cctgtgcaatcggggtcgcgctccc

SEQ ID NO: 5925082 - DNA, 25 bp, Homo sapien
ctggcgccctagtcgacgacacccc

SEQ ID NO: 5925083 - DNA, 25 bp, Homo sapien
tccagcgttcgcgggatcgcgcgtg

SEQ ID NO: 5925084 - DNA, 25 bp, Homo sapien
tgcgccgtacgtagccgcgtccgtg

SEQ ID NO: 5925085 - DNA, 25 bp, Homo sapien
cgcgaccccgtacctagcggcgtct

SEQ ID NO: 5925086 - DNA, 25 bp, Homo sapien
ggcgaccgaacccgccatagcccag

SEQ ID NO: 5925087 - DNA, 25 bp, Homo sapien
caccggctagcgccgtcgaatcggg

SEQ ID NO: 5925088 - DNA, 25 bp, Homo sapien
tggctcaacgcgcggcatggtgcgc

SEQ ID NO: 5925089 - DNA, 25 bp, Homo sapien
ggtcggtggacataccgcgcggcga

SEQ ID NO: 5925090 - DNA, 25 bp, Homo sapien
cgggccacctcgcgtcaactagccg

SEQ ID NO: 5925091 - DNA, 25 bp, Homo sapien
accccggcctcgcgcgaaactccga

SEQ ID NO: 5925092 - DNA, 25 bp, Homo sapien
ccagctttgcgacccgacgcgtccc

SEQ ID NO: 5925093 - DNA, 25 bp, Homo sapien
ggccgctgcgcgcatcaagcttcgg

SEQ ID NO: 5925094 - DNA, 25 bp, Homo sapien
tcaccccgcaacgacgggtcagccg

SEQ ID NO: 5925095 - DNA, 25 bp, Homo sapien
cgagcccgagggttacgcgcgggta

SEQ ID NO: 5925096 - DNA, 25 bp, Homo sapien
gcccgatgcgtccgcgttagggagc

SEQ ID NO: 5925097 - DNA, 25 bp, Homo sapien
cctgtgcgcgggtattcgtcgcccc

SEQ ID NO: 5925098 - DNA, 25 bp, Homo sapien
gcagggaggccgtatgcgcccactg

SEQ ID NO: 5925099 - DNA, 25 bp, Homo sapien
cggaccggcggaacgtagccgacac

SEQ ID NO: 5925100 - DNA, 25 bp, Homo sapien
gcttcgggttgacgccggtggaccc

SEQ ID NO: 5925101 - DNA, 25 bp, Homo sapien
gttcccgtcgactcgcaagccgggg

SEQ ID NO: 5925102 - DNA, 25 bp, Homo sapien
ggtcccgcgtatcccctcgcaggca

SEQ ID NO: 5925103 - DNA, 25 bp, Homo sapien
ggggcacgacgtacgaccgggatgg

SEQ ID NO: 5925104 - DNA, 25 bp, Homo sapien
cgttgggtcgcggcgttacacggcc

SEQ ID NO: 5925105 - DNA, 25 bp, Homo sapien
gatcccgcgcttacgtccggggctg

SEQ ID NO: 5925106 - DNA, 25 bp, Homo sapien
agcgctgggcggtacggtcgtaccg

SEQ ID NO: 5925107 - DNA, 25 bp, Homo sapien
aggccgaatcccgacgcgcacctcg

SEQ ID NO: 5925108 - DNA, 25 bp, Homo sapien
cgacgccgctatgcggggtctctgc

SEQ ID NO: 5925109 - DNA, 25 bp, Homo sapien
ccagctccccgtacgcgacgcacga

SEQ ID NO: 5925110 - DNA, 25 bp, Homo sapien
gtaggcgtaagtcgcgccccacgcg

SEQ ID NO: 5925111 - DNA, 25 bp, Homo sapien
ggctgcgccccgtatacggaggacc

SEQ ID NO: 5925112 - DNA, 25 bp, Homo sapien
cacggggcgtacgacccgcctactg

SEQ ID NO: 5925113 - DNA, 25 bp, Homo sapien
ggcccccagacgttcgacgcgtagg

SEQ ID NO: 5925114 - DNA, 25 bp, Homo sapien
tgcccccggttgactcgcgagtgcg

SEQ ID NO: 5925115 - DNA, 25 bp, Homo sapien
ccgccctcgcgggacggataaggag

SEQ ID NO: 5925116 - DNA, 25 bp, Homo sapien
agatcgcgtacacgggtcgccccgg

SEQ ID NO: 5925117 - DNA, 25 bp, Homo sapien
cccagacgaccgcgtactccggcac

SEQ ID NO: 5925118 - DNA, 25 bp, Homo sapien
ggccggtcgcgttaggggatagccc

SEQ ID NO: 5925119 - DNA, 25 bp, Homo sapien
ctcccgcgttatgggcgaccgcgca

SEQ ID NO: 5925120 - DNA, 25 bp, Homo sapien
tgagcttacggaccgcacgccccgg

SEQ ID NO: 5925121 - DNA, 25 bp, Homo sapien
cggctgcggcgcatagtcaccccac

SEQ ID NO: 5925122 - DNA, 25 bp, Homo sapien
tgcgcctgcgcgccgtaagctgagc

SEQ ID NO: 5925123 - DNA, 25 bp, Homo sapien
cggtgcaggtcgtacgggctggggt

SEQ ID NO: 5925124 - DNA, 25 bp, Homo sapien
cgagccaccgtcggccgttacgcca

SEQ ID NO: 5925125 - DNA, 25 bp, Homo sapien
ctgccctgcgcgttcgacggggttc

SEQ ID NO: 5925126 - DNA, 25 bp, Homo sapien
agcccacggaccgtcgcataggcgg

SEQ ID NO: 5925127 - DNA, 25 bp, Homo sapien
ggctcgaccatacgcgcgagcggac

SEQ ID NO: 5925128 - DNA, 25 bp, Homo sapien
actgccaacccgccgtacggtcgcg

SEQ ID NO: 5925129 - DNA, 25 bp, Homo sapien
cgcccgacagtcgcgccggatagtc

SEQ ID NO: 5925130 - DNA, 25 bp, Homo sapien
ccaggttatacccggcggtggcgcc

SEQ ID NO: 5925131 - DNA, 25 bp, Homo sapien
cgatcgtccgcggcgtagtggccca

SEQ ID NO: 5925132 - DNA, 25 bp, Homo sapien
ctggcctacgtctcgcgtcggtggc

SEQ ID NO: 5925133 - DNA, 25 bp, Homo sapien
agtgcacccgttcgcgcgagtgccc

SEQ ID NO: 5925134 - DNA, 25 bp, Homo sapien
cctcgccgcgtacgccttatggccc

SEQ ID NO: 5925135 - DNA, 25 bp, Homo sapien
cggggtggacggtctacgggagcga

SEQ ID NO: 5925136 - DNA, 25 bp, Homo sapien
ccagtcgcgcgttgacgaccgaccc

SEQ ID NO: 5925137 - DNA, 25 bp, Homo sapien
gtcccgcgcgcgactgttcatccgc

SEQ ID NO: 5925138 - DNA, 25 bp, Homo sapien
tggacgcgtgcgtcggcttcccagc

SEQ ID NO: 5925139 - DNA, 25 bp, Homo sapien
acgcgcccgatcccgcatagtgccc

SEQ ID NO: 5925140 - DNA, 25 bp, Homo sapien
gcttcccgcgtcggttaccaggcgc

SEQ ID NO: 5925141 - DNA, 25 bp, Homo sapien
cgccggacgaccaaacgcggaagcg

SEQ ID NO: 5925142 - DNA, 25 bp, Homo sapien
gcgtgggatgcgtctcgcgcttggc

SEQ ID NO: 5925143 - DNA, 25 bp, Homo sapien
ggggagcgcgtacaagcgtgccctc

SEQ ID NO: 5925144 - DNA, 25 bp, Homo sapien
gagcgcgagtcgacccgtcctctcc

SEQ ID NO: 5925145 - DNA, 25 bp, Homo sapien
agggcgtacggacgcgggtggtgca

SEQ ID NO: 5925146 - DNA, 25 bp, Homo sapien
cgactcgcgtagcgaaccgcgctcg

SEQ ID NO: 5925147 - DNA, 25 bp, Homo sapien
gcccggcgtcgactaggggctcgtt

SEQ ID NO: 5925148 - DNA, 25 bp, Homo sapien
ccgccgccgaactcgcgtaagcgtc

SEQ ID NO: 5925149 - DNA, 25 bp, Homo sapien
cgcgtgcgtaattcgcccccgggag

SEQ ID NO: 5925150 - DNA, 25 bp, Homo sapien
ggcgtgcgagctaaccgcggctgga

SEQ ID NO: 5925151 - DNA, 25 bp, Homo sapien
ggcatccgcatacgcgcgactgcgg

SEQ ID NO: 5925152 - DNA, 25 bp, Homo sapien
ctccggcctacgggcgtacgtgtcg

SEQ ID NO: 5925153 - DNA, 25 bp, Homo sapien
accggggcccgcgaactagacagcc

SEQ ID NO: 5925154 - DNA, 25 bp, Homo sapien
ccgcaagtatcggcgcgctccggca

SEQ ID NO: 5925155 - DNA, 25 bp, Homo sapien
tctgtggacgcgcatacggccgggc

SEQ ID NO: 5925156 - DNA, 25 bp, Homo sapien
ccgccttacgcacgatcgcacccgc

SEQ ID NO: 5925157 - DNA, 25 bp, Homo sapien
gcgtcccgcgcgaacctacaggcgt

SEQ ID NO: 5925158 - DNA, 25 bp, Homo sapien
agcgcccgcgtaaggtccgcgcgat

SEQ ID NO: 5925159 - DNA, 25 bp, Homo sapien
cctggcgggcggacgttaggctagc

SEQ ID NO: 5925160 - DNA, 25 bp, Homo sapien
gtggccatgtctaggcgcgcgccac

SEQ ID NO: 5925161 - DNA, 25 bp, Homo sapien
ggttgctgcgccgtcctacgcctcc

SEQ ID NO: 5925162 - DNA, 25 bp, Homo sapien
cccgagacagtacgcgccgaggggt

SEQ ID NO: 5925163 - DNA, 25 bp, Homo sapien
gcctcggcgtacgagtccggacgtg

SEQ ID NO: 5925164 - DNA, 25 bp, Homo sapien
gtgcgtcgcgaacggtagccaccgg

SEQ ID NO: 5925165 - DNA, 25 bp, Homo sapien
ggggactatgccgtacgggtggccg

SEQ ID NO: 5925166 - DNA, 25 bp, Homo sapien
ctgccgatagatcggcgcgctgcgg

SEQ ID NO: 5925167 - DNA, 25 bp, Homo sapien
gccgtccgcgtaatagccgcacccg

SEQ ID NO: 5925168 - DNA, 25 bp, Homo sapien
cttgagcgcgcaagttcggcggccg

SEQ ID NO: 5925169 - DNA, 25 bp, Homo sapien
ggccgggatccgcgtacggtcagtc

SEQ ID NO: 5925170 - DNA, 25 bp, Homo sapien
cgtcagatcggacgcgtcaggcccg

SEQ ID NO: 5925171 - DNA, 25 bp, Homo sapien
ggagcacgacgcgatactcccggcc

SEQ ID NO: 5925172 - DNA, 25 bp, Homo sapien
gtccgacgagccgtaacgccagggg

SEQ ID NO: 5925173 - DNA, 25 bp, Homo sapien
gtgacacgcgggcgttgacgaggcg

SEQ ID NO: 5925174 - DNA, 25 bp, Homo sapien
gcgtggtcgcgagacgcttcaccgg

SEQ ID NO: 5925175 - DNA, 25 bp, Homo sapien
atggggccgtcgacggtacgcgcga

SEQ ID NO: 5925176 - DNA, 25 bp, Homo sapien
ccgcagcatcgcgtcggacgacgtc

SEQ ID NO: 5925177 - DNA, 25 bp, Homo sapien
gacggggcacgttacggcggtcctc

SEQ ID NO: 5925178 - DNA, 25 bp, Homo sapien
aactgggcgggcgcgaataccgccc

SEQ ID NO: 5925179 - DNA, 25 bp, Homo sapien
cgcggggttcgcggctatcctgggt

SEQ ID NO: 5925180 - DNA, 25 bp, Homo sapien
gcggtcatccgggcgtacctcggct

SEQ ID NO: 5925181 - DNA, 25 bp, Homo sapien
ccgagacgcaaacggccgtcgcctg

SEQ ID NO: 5925182 - DNA, 25 bp, Homo sapien
gctccgttcgtccgtagccgaggcg

SEQ ID NO: 5925183 - DNA, 25 bp, Homo sapien
gcctggaacgcgcgtccgaggagga

SEQ ID NO: 5925184 - DNA, 25 bp, Homo sapien
ttccgcacccgtcgcggtagcgcag

SEQ ID NO: 5925185 - DNA, 25 bp, Homo sapien
gtcgggcgcgcgttagaccaacgcg

SEQ ID NO: 5925186 - DNA, 25 bp, Homo sapien
cgggacgcgaatccgcataccggcc

SEQ ID NO: 5925187 - DNA, 25 bp, Homo sapien
gtgcctgaacgcggtcgaaggcccg

SEQ ID NO: 5925188 - DNA, 25 bp, Homo sapien
ctcgcccggtaaacgcacgacggcg

SEQ ID NO: 5925189 - DNA, 25 bp, Homo sapien
ctctgacgaccgcgcgtctcgggga

SEQ ID NO: 5925190 - DNA, 25 bp, Homo sapien
agccgataccggcgcggtaacgcgc

SEQ ID NO: 5925191 - DNA, 25 bp, Homo sapien
cgtctccgacccgcgttcgccgtgt

SEQ ID NO: 5925192 - DNA, 25 bp, Homo sapien
gggttcgcgacgctaagcgcgacgg

SEQ ID NO: 5925193 - DNA, 25 bp, Homo sapien
gacgcggtcgatacccgcgtcaggg

SEQ ID NO: 5925194 - DNA, 25 bp, Homo sapien
tgcacggcgcgaacctatcccgccc

SEQ ID NO: 5925195 - DNA, 25 bp, Homo sapien
gtcccgcacgtcggactagcgacgg

SEQ ID NO: 5925196 - DNA, 25 bp, Homo sapien
agcaccttcgacccgtcgggcgagc

SEQ ID NO: 5925197 - DNA, 25 bp, Homo sapien
ccctcgacgtcggaacgcgcgcagt

SEQ ID NO: 5925198 - DNA, 25 bp, Homo sapien
agtgcccgacgggatagcgcccgga

SEQ ID NO: 5925199 - DNA, 25 bp, Homo sapien
gggccagatagcggcacgtgcggtg

SEQ ID NO: 5925200 - DNA, 25 bp, Homo sapien
gcaagacgtcgtgcgacagcggcgg

SEQ ID NO: 5925201 - DNA, 25 bp, Homo sapien
cgctggcggcgttacgtacaggccc

SEQ ID NO: 5925202 - DNA, 25 bp, Homo sapien
cggaggccgaacgcggtcggactca

SEQ ID NO: 5925203 - DNA, 25 bp, Homo sapien
ggggagtacgctgcgtcgtcccgca

SEQ ID NO: 5925204 - DNA, 25 bp, Homo sapien
ccctgtcgcgggagtcctaaggggc

SEQ ID NO: 5925205 - DNA, 25 bp, Homo sapien
gccgcggggttcgacgcatagggag

SEQ ID NO: 5925206 - DNA, 25 bp, Homo sapien
gcaaggtccgcgccctagacccgag

SEQ ID NO: 5925207 - DNA, 25 bp, Homo sapien
cccaagcgcgtagcgacccggcaga

SEQ ID NO: 5925208 - DNA, 25 bp, Homo sapien
ccaggctcggtcacgacgtcagccc

SEQ ID NO: 5925209 - DNA, 25 bp, Homo sapien
ctcgcaagcgacgggcgtagctccg

SEQ ID NO: 5925210 - DNA, 25 bp, Homo sapien
ccaggcccgcgttagcgtcgcaggt

SEQ ID NO: 5925211 - DNA, 25 bp, Homo sapien
cggcgacggtcggtgcgtatggagg

SEQ ID NO: 5925212 - DNA, 25 bp, Homo sapien
ccggctcgcgcgatagtccctaggc

SEQ ID NO: 5925213 - DNA, 25 bp, Homo sapien
ggcgtggcgcctaacgcgagcagac

SEQ ID NO: 5925214 - DNA, 25 bp, Homo sapien
cgagcataggacgcgagcgggggga

SEQ ID NO: 5925215 - DNA, 25 bp, Homo sapien
ctgcagccgtaacgcgcctgtcccc

SEQ ID NO: 5925216 - DNA, 25 bp, Homo sapien
tagccgagtcgcacgtcgggctgcc

SEQ ID NO: 5925217 - DNA, 25 bp, Homo sapien
cggagtggggagctacgcgcgcaag

SEQ ID NO: 5925218 - DNA, 25 bp, Homo sapien
ggctcctacgcggacgacccgaagg

SEQ ID NO: 5925219 - DNA, 25 bp, Homo sapien
gagctgacgagtcgaccgctcggcc

SEQ ID NO: 5925220 - DNA, 25 bp, Homo sapien
actcgatacgtcgaccggcccggcg

SEQ ID NO: 5925221 - DNA, 25 bp, Homo sapien
ggcgaggcgcgggttacgaccccta

SEQ ID NO: 5925222 - DNA, 25 bp, Homo sapien
ctagcgcgtacacgaccgcgacggg

SEQ ID NO: 5925223 - DNA, 25 bp, Homo sapien
cggtcgagcggcccgtaacacaggg

SEQ ID NO: 5925224 - DNA, 25 bp, Homo sapien
ccggttccgacctcgcgtaggagcg

SEQ ID NO: 5925225 - DNA, 25 bp, Homo sapien
aggagccccctagcgcgttgcggtg

SEQ ID NO: 5925226 - DNA, 25 bp, Homo sapien
cgcgtcccgtacgatcggggtgctc

SEQ ID NO: 5925227 - DNA, 25 bp, Homo sapien
gaacccacgccgtagcgacggtggg

SEQ ID NO: 5925228 - DNA, 25 bp, Homo sapien
ccgacgacggacgtacgacggccga

SEQ ID NO: 5925229 - DNA, 25 bp, Homo sapien
tgcacacggcccgacctatccgccg

SEQ ID NO: 5925230 - DNA, 25 bp, Homo sapien
gcgtgcaccgacgtagcgccgccta

SEQ ID NO: 5925231 - DNA, 25 bp, Homo sapien
tagcggcgttacgcccgagcgagcg

SEQ ID NO: 5925232 - DNA, 25 bp, Homo sapien
ggccgtgcgcgaacatcggctgtgg

SEQ ID NO: 5925233 - DNA, 25 bp, Homo sapien
gctcgtaacgtacgccgggtccggc

SEQ ID NO: 5925234 - DNA, 25 bp, Homo sapien
gcggacctcgcgtagtcggccgaca

SEQ ID NO: 5925235 - DNA, 25 bp, Homo sapien
atgcgaggggatcgaccgtcggggc

SEQ ID NO: 5925236 - DNA, 25 bp, Homo sapien
ggcagccgcgccctagatacgcgca

SEQ ID NO: 5925237 - DNA, 25 bp, Homo sapien
cgccgtcttaaccggcgcgtcctgg

SEQ ID NO: 5925238 - DNA, 25 bp, Homo sapien
cggagtatcgtatcgccggccggcc

SEQ ID NO: 5925239 - DNA, 25 bp, Homo sapien
cgggaggtaccgtcgcgacgtccca

SEQ ID NO: 5925240 - DNA, 25 bp, Homo sapien
gggagacgcgactactcggcgccac

SEQ ID NO: 5925241 - DNA, 25 bp, Homo sapien
cggtcgtcgcccgttgcgaacgctg

SEQ ID NO: 5925242 - DNA, 25 bp, Homo sapien
cgggctcgcgggtactagcccgaca

SEQ ID NO: 5925243 - DNA, 25 bp, Homo sapien
cgccacccgcgataaacggtcgcgg

SEQ ID NO: 5925244 - DNA, 25 bp, Homo sapien
acgtggcctaacgcgacgccccagg

SEQ ID NO: 5925245 - DNA, 25 bp, Homo sapien
gacggggccgtactatgcggcacgg

SEQ ID NO: 5925246 - DNA, 25 bp, Homo sapien
cccagccgcgtactcgactgggggt

SEQ ID NO: 5925247 - DNA, 25 bp, Homo sapien
agcgtggacgcggaccgatgtgggc

SEQ ID NO: 5925248 - DNA, 25 bp, Homo sapien
tgggggcgaccgtatgcgaggaccg

SEQ ID NO: 5925249 - DNA, 25 bp, Homo sapien
ccagcctagcgccgaacgagacggg

SEQ ID NO: 5925250 - DNA, 25 bp, Homo sapien
gagtgtcggcgcgctagtacggccc

SEQ ID NO: 5925251 - DNA, 25 bp, Homo sapien
tcctccgctacgcgcggatgtgggc

SEQ ID NO: 5925252 - DNA, 25 bp, Homo sapien
tcgtggcgcggttagctcggcccct

SEQ ID NO: 5925253 - DNA, 25 bp, Homo sapien
acctggcgcggctacgtacgccagg

SEQ ID NO: 5925254 - DNA, 25 bp, Homo sapien
gagctcggggcgtactacggcggga

SEQ ID NO: 5925255 - DNA, 25 bp, Homo sapien
agtgggtcgagcggcggtaaccggc

SEQ ID NO: 5925256 - DNA, 25 bp, Homo sapien
tgcgcgtcttaggccgacgggcctc

SEQ ID NO: 5925257 - DNA, 25 bp, Homo sapien
gcggaccgtgcgtcgcgtagtctcc

SEQ ID NO: 5925258 - DNA, 25 bp, Homo sapien
gcccccaatagcgcgaccgtccacg

SEQ ID NO: 5925259 - DNA, 25 bp, Homo sapien
cccaaccgaatagcgcgggagccgg

SEQ ID NO: 5925260 - DNA, 25 bp, Homo sapien
acgcgctaacgggcccacgagaggc

SEQ ID NO: 5925261 - DNA, 25 bp, Homo sapien
gcgtggtagcggtcgaccgcctcct

SEQ ID NO: 5925262 - DNA, 25 bp, Homo sapien
tgcgacatccatcgcgcgtccggcg

SEQ ID NO: 5925263 - DNA, 25 bp, Homo sapien
cggactgggtcgtgtcgacagcccc

SEQ ID NO: 5925264 - DNA, 25 bp, Homo sapien
ctacaccgctagacccgcggccgct

SEQ ID NO: 5925265 - DNA, 25 bp, Homo sapien
ccgtagcggccgtacggatgctgcc

SEQ ID NO: 5925266 - DNA, 25 bp, Homo sapien
cctgcggcacgtcgtgcgacggtgt

SEQ ID NO: 5925267 - DNA, 25 bp, Homo sapien
gggcgcctcgcgttagacgggtgac

SEQ ID NO: 5925268 - DNA, 25 bp, Homo sapien
ctccggtcgacgtagcgccaacgcc

SEQ ID NO: 5925269 - DNA, 25 bp, Homo sapien
gagtgcagcgcggtacgctcgcgac

SEQ ID NO: 5925270 - DNA, 25 bp, Homo sapien
tcgcagcgcggtcgtatcgccctgg

SEQ ID NO: 5925271 - DNA, 25 bp, Homo sapien
cgacgctcgcgcggtatgggaggca

SEQ ID NO: 5925272 - DNA, 25 bp, Homo sapien
cccgcagtcgcgagacgctactgcg

SEQ ID NO: 5925273 - DNA, 25 bp, Homo sapien
cggctcgctcggaccgttaagcgcg

SEQ ID NO: 5925274 - DNA, 25 bp, Homo sapien
accggccgttgcggccctatctcgc

SEQ ID NO: 5925275 - DNA, 25 bp, Homo sapien
tacgctcggacgcgtagtggcgggc

SEQ ID NO: 5925276 - DNA, 25 bp, Homo sapien
ctgcgcccgcgtagagtgtcccgtc

SEQ ID NO: 5925277 - DNA, 25 bp, Homo sapien
ccccggcgcaagtcgcgtagttgcc

SEQ ID NO: 5925278 - DNA, 25 bp, Homo sapien
ccggactagctcgcgaccgatccgg

SEQ ID NO: 5925279 - DNA, 25 bp, Homo sapien
gccggcatcgcgtgtagtccgccct

SEQ ID NO: 5925280 - DNA, 25 bp, Homo sapien
tcgacgctagcggtcggtgcgaggc

SEQ ID NO: 5925281 - DNA, 25 bp, Homo sapien
cgggagggacggtagtcgcccagac

SEQ ID NO: 5925282 - DNA, 25 bp, Homo sapien
gccaccggtcgattcgcgctcccga

SEQ ID NO: 5925283 - DNA, 25 bp, Homo sapien
gggtgccgacggtccgcatgtgcga

SEQ ID NO: 5925284 - DNA, 25 bp, Homo sapien
ggcagccgcggtaacggactcccgt

SEQ ID NO: 5925285 - DNA, 25 bp, Homo sapien
gctccgccgcgcgacaacacccttc

SEQ ID NO: 5925286 - DNA, 25 bp, Homo sapien
ggcggaccgctacgcgtcacaggga

SEQ ID NO: 5925287 - DNA, 25 bp, Homo sapien
cgctgcgctaggtccggacgcctag

SEQ ID NO: 5925288 - DNA, 25 bp, Homo sapien
acccggccgacgagtatcggcgcgt

SEQ ID NO: 5925289 - DNA, 25 bp, Homo sapien
cccaggtcgagtacgcgaccgccag

SEQ ID NO: 5925290 - DNA, 25 bp, Homo sapien
cccgccgagtagacgtacgcctggc

SEQ ID NO: 5925291 - DNA, 25 bp, Homo sapien
ggctgcccccgtacggtcgcaaagg

SEQ ID NO: 5925292 - DNA, 25 bp, Homo sapien
gtctcacaaccgccgcgtagccgcg

SEQ ID NO: 5925293 - DNA, 25 bp, Homo sapien
agcggcgccgtattcgcggtcccac

SEQ ID NO: 5925294 - DNA, 25 bp, Homo sapien
ccggggcatgcgtcgagcggtcttc

SEQ ID NO: 5925295 - DNA, 25 bp, Homo sapien
cggcagacggcgcgcttagcgccta

SEQ ID NO: 5925296 - DNA, 25 bp, Homo sapien
cggctgtacgtctacgcgggtgcgg

SEQ ID NO: 5925297 - DNA, 25 bp, Homo sapien
gggaacacgtggcgtatcggccgcg

SEQ ID NO: 5925298 - DNA, 25 bp, Homo sapien
aaccgccggttcgatccgcccggca

SEQ ID NO: 5925299 - DNA, 25 bp, Homo sapien
ttcctgtcgacgttgcgggcgcgcg

SEQ ID NO: 5925300 - DNA, 25 bp, Homo sapien
agacgcatacccggacggccagcgc

SEQ ID NO: 5925301 - DNA, 25 bp, Homo sapien
tccgcccaaccgtcatgcgcctgcc

SEQ ID NO: 5925302 - DNA, 25 bp, Homo sapien
cgatcagacccatagcgcgggccgc

SEQ ID NO: 5925303 - DNA, 25 bp, Homo sapien
ctgccgacgcgaacatcgggggtcg

SEQ ID NO: 5925304 - DNA, 25 bp, Homo sapien
cacttgcgttgcgcgcgatcgccgc

SEQ ID NO: 5925305 - DNA, 25 bp, Homo sapien
acggccgtatccgaccgcgggtcac

SEQ ID NO: 5925306 - DNA, 25 bp, Homo sapien
ggccgggcgacgggtagtcggaaga

SEQ ID NO: 5925307 - DNA, 25 bp, Homo sapien
agcagcgcgcgacggtacggaaggc

SEQ ID NO: 5925308 - DNA, 25 bp, Homo sapien
gttccgacgtcgcccggatcctggc

SEQ ID NO: 5925309 - DNA, 25 bp, Homo sapien
gccgtgttacgtcggagcggggtcg

SEQ ID NO: 5925310 - DNA, 25 bp, Homo sapien
cctgtccgtacgggccaatgcccgc

SEQ ID NO: 5925311 - DNA, 25 bp, Homo sapien
ggtccgatcgggttcgcgcaagggc

SEQ ID NO: 5925312 - DNA, 25 bp, Homo sapien
cgcggatgggcgcgcgaatagcgac

SEQ ID NO: 5925313 - DNA, 25 bp, Homo sapien
gccccaaagggtcgcgcgaagtccc

SEQ ID NO: 5925314 - DNA, 25 bp, Homo sapien
gcgcactacagcgcacgacagcgcc

SEQ ID NO: 5925315 - DNA, 25 bp, Homo sapien
gggatacgtaagtccgcgccgcgcg

SEQ ID NO: 5925316 - DNA, 25 bp, Homo sapien
ggctacgagtctacggcgcggcgct

SEQ ID NO: 5925317 - DNA, 25 bp, Homo sapien
cagcccggtgcgtacgtcgcctcac

SEQ ID NO: 5925318 - DNA, 25 bp, Homo sapien
ctgccgcgcgtgacggactagtgcc

SEQ ID NO: 5925319 - DNA, 25 bp, Homo sapien
actcccgcgtaggccgtcccgtctg

SEQ ID NO: 5925320 - DNA, 25 bp, Homo sapien
gtgggctatacgcgacccgcgcgtg

SEQ ID NO: 5925321 - DNA, 25 bp, Homo sapien
aagcggtctacgaccgcgggggctc

SEQ ID NO: 5925322 - DNA, 25 bp, Homo sapien
accggaatcgcgcgaagtcgggcgg

SEQ ID NO: 5925323 - DNA, 25 bp, Homo sapien
tcgtcctccgcgtatcggcggcgca

SEQ ID NO: 5925324 - DNA, 25 bp, Homo sapien
cggctcctcgtcgcgtacgatcggg

SEQ ID NO: 5925325 - DNA, 25 bp, Homo sapien
gaatcccggaacgcggctacgccgc

SEQ ID NO: 5925326 - DNA, 25 bp, Homo sapien
tgccctcggcatagtacgcggcgcg

SEQ ID NO: 5925327 - DNA, 25 bp, Homo sapien
acgcgttcgcgtcgagccagtcccg

SEQ ID NO: 5925328 - DNA, 25 bp, Homo sapien
taccccttacgagcgcgacgccgcg

SEQ ID NO: 5925329 - DNA, 25 bp, Homo sapien
agcgcgcatacggccgacggcaacg

SEQ ID NO: 5925330 - DNA, 25 bp, Homo sapien
gaggcgcgcggtacatccggggatg

SEQ ID NO: 5925331 - DNA, 25 bp, Homo sapien
gtgggaatacccgcgtagcgcgccg

SEQ ID NO: 5925332 - DNA, 25 bp, Homo sapien
cgcaaaaccgcgtcgttccgcgcgc

SEQ ID NO: 5925333 - DNA, 25 bp, Homo sapien
gcccagagtcggtcgcgagcgtgtg

SEQ ID NO: 5925334 - DNA, 25 bp, Homo sapien
cactcggggcgtaccgaccgcgtgt

SEQ ID NO: 5925335 - DNA, 25 bp, Homo sapien
tcgtctaccgggctacgcgcgcgtg

SEQ ID NO: 5925336 - DNA, 25 bp, Homo sapien
cggagtcgggtcgggacgtctcgtg

SEQ ID NO: 5925337 - DNA, 25 bp, Homo sapien
aggagccgcgcgctgaattcggggg

SEQ ID NO: 5925338 - DNA, 25 bp, Homo sapien
ggagggacgctatcggacgggtccg

SEQ ID NO: 5925339 - DNA, 25 bp, Homo sapien
cccgctcggcggcgtatagctcgga

SEQ ID NO: 5925340 - DNA, 25 bp, Homo sapien
ggacggcggttagtacgcgccgtgc

SEQ ID NO: 5925341 - DNA, 25 bp, Homo sapien
ccgacttcgcccgcggaatcacggc

SEQ ID NO: 5925342 - DNA, 25 bp, Homo sapien
tggtgtcgtccgggcgtacccagcg

SEQ ID NO: 5925343 - DNA, 25 bp, Homo sapien
gcggtctacggtgcgacgcgttggc

SEQ ID NO: 5925344 - DNA, 25 bp, Homo sapien
tgccccgtcgtctaacgcgggccca

SEQ ID NO: 5925345 - DNA, 25 bp, Homo sapien
tggacacgggtccgcgtaaggcccc

SEQ ID NO: 5925346 - DNA, 25 bp, Homo sapien
tcgcggcgcgctagcgcaacgggat

SEQ ID NO: 5925347 - DNA, 25 bp, Homo sapien
gcctggacgtctcgcccgtcaagcg

SEQ ID NO: 5925348 - DNA, 25 bp, Homo sapien
gcggggttggataccgcgccagtcc

SEQ ID NO: 5925349 - DNA, 25 bp, Homo sapien
ctcagctcgacggagcgtaggccgc

SEQ ID NO: 5925350 - DNA, 25 bp, Homo sapien
cgggaccgtccgacatcggggacga

SEQ ID NO: 5925351 - DNA, 25 bp, Homo sapien
gcggacgctacgcacgatcgcgctg

SEQ ID NO: 5925352 - DNA, 25 bp, Homo sapien
gcgctatcgcgcgtcgactctcccg

SEQ ID NO: 5925353 - DNA, 25 bp, Homo sapien
tcaccctaggacggtcgacggggcc

SEQ ID NO: 5925354 - DNA, 25 bp, Homo sapien
acgccgcggggccgttcgaccaaga

SEQ ID NO: 5925355 - DNA, 25 bp, Homo sapien
ccagcgtacgcgggggtaccaggtg

SEQ ID NO: 5925356 - DNA, 25 bp, Homo sapien
gtacgccgaagcgcggaactccgcc

SEQ ID NO: 5925357 - DNA, 25 bp, Homo sapien
cactgccggtaggccgacggcaagc

SEQ ID NO: 5925358 - DNA, 25 bp, Homo sapien
gcgtcacgacgtagcgtcgccgcca

SEQ ID NO: 5925359 - DNA, 25 bp, Homo sapien
ggacgagggttcggcggtacctgcc

SEQ ID NO: 5925360 - DNA, 25 bp, Homo sapien
gggtagtacgggtcgcacagcccgg

SEQ ID NO: 5925361 - DNA, 25 bp, Homo sapien
ttgtccgcgtcggtcgtacgcgggc

SEQ ID NO: 5925362 - DNA, 25 bp, Homo sapien
cgcggtcgcgtacagacgagcgctg

SEQ ID NO: 5925363 - DNA, 25 bp, Homo sapien
agcgggcgccgcgtctaatgcgtcg

SEQ ID NO: 5925364 - DNA, 25 bp, Homo sapien
gcggcgtccgttacgcggtatgcgc

SEQ ID NO: 5925365 - DNA, 25 bp, Homo sapien
cccgggtagcgtacgccgcagagct

SEQ ID NO: 5925366 - DNA, 25 bp, Homo sapien
cacgcgtcgaccggtagcgtccgac

SEQ ID NO: 5925367 - DNA, 25 bp, Homo sapien
tccgggttcgcgtcgacggccgctt

SEQ ID NO: 5925368 - DNA, 25 bp, Homo sapien
cgtggcacttgcgccgacgcgtacc

SEQ ID NO: 5925369 - DNA, 25 bp, Homo sapien
cggcctggacggagcgttagcgtcg

SEQ ID NO: 5925370 - DNA, 25 bp, Homo sapien
gatgggtacgccggacggctgcggt

SEQ ID NO: 5925371 - DNA, 25 bp, Homo sapien
gcggtcacgcggatagcgccgacca

SEQ ID NO: 5925372 - DNA, 25 bp, Homo sapien
acggacacacgcgcgaagtgggggc

SEQ ID NO: 5925373 - DNA, 25 bp, Homo sapien
agggtttacacgcgcgaccggccgc

SEQ ID NO: 5925374 - DNA, 25 bp, Homo sapien
ggctggcgggtacgtaccgcacctc

SEQ ID NO: 5925375 - DNA, 25 bp, Homo sapien
catcgggcggatcgtaccccctggg

SEQ ID NO: 5925376 - DNA, 25 bp, Homo sapien
cctgcgcgtcgcaagacgcccaacg

SEQ ID NO: 5925377 - DNA, 25 bp, Homo sapien
gaccgggtcgtaacgtcgcgccctg

SEQ ID NO: 5925378 - DNA, 25 bp, Homo sapien
aggaccgaccggtaggacggcagcg

SEQ ID NO: 5925379 - DNA, 25 bp, Homo sapien
ggcgcgcgcggtctaaccgtcctca

SEQ ID NO: 5925380 - DNA, 25 bp, Homo sapien
gtaccccggacgcgttaggctggcg

SEQ ID NO: 5925381 - DNA, 25 bp, Homo sapien
cccgagcctacgtcgcacgccgttg

SEQ ID NO: 5925382 - DNA, 25 bp, Homo sapien
cgggcactcgtccggacgtgcttgg

SEQ ID NO: 5925383 - DNA, 25 bp, Homo sapien
tgcccgtagcggaccggtgtcgctg

SEQ ID NO: 5925384 - DNA, 25 bp, Homo sapien
gtgggggtcgcgctagttcaccccc

SEQ ID NO: 5925385 - DNA, 25 bp, Homo sapien
gcaccacgcatgacgcggacaggcc

SEQ ID NO: 5925386 - DNA, 25 bp, Homo sapien
cgccgctggtcgtacgacgaggcga

SEQ ID NO: 5925387 - DNA, 25 bp, Homo sapien
cacggttatcgcgggaccgcgcacc

SEQ ID NO: 5925388 - DNA, 25 bp, Homo sapien
gcgtcgcgctcgtgcgtagaggagc

SEQ ID NO: 5925389 - DNA, 25 bp, Homo sapien
gggcacagtcgtccgcacgcacgag

SEQ ID NO: 5925390 - DNA, 25 bp, Homo sapien
cagcccggtccgacgcgatgggagt

SEQ ID NO: 5925391 - DNA, 25 bp, Homo sapien
aggctgcactcgacgtacggccccg

SEQ ID NO: 5925392 - DNA, 25 bp, Homo sapien
cgcccatatgaccgcggacgccctg

SEQ ID NO: 5925393 - DNA, 25 bp, Homo sapien
ccacacgcgcgttacgggcggagct

SEQ ID NO: 5925394 - DNA, 25 bp, Homo sapien
ggatgcgtcggaccgccgtccgtgt

SEQ ID NO: 5925395 - DNA, 25 bp, Homo sapien
cgtaggaggtccgtacgggcgcacg

SEQ ID NO: 5925396 - DNA, 25 bp, Homo sapien
tccggcgacgaccgcgtagccgtgt

SEQ ID NO: 5925397 - DNA, 25 bp, Homo sapien
cccgccccttgacgcgcgacaggta

SEQ ID NO: 5925398 - DNA, 25 bp, Homo sapien
cgggagcgtacgcccggtagggatc

SEQ ID NO: 5925399 - DNA, 25 bp, Homo sapien
ggtaccgccgactcacgaccgccgt

SEQ ID NO: 5925400 - DNA, 25 bp, Homo sapien
gtgggggcccgatacgtcgctaccg

SEQ ID NO: 5925401 - DNA, 25 bp, Homo sapien
tcgcgcctcgcgcataaggcccctc

SEQ ID NO: 5925402 - DNA, 25 bp, Homo sapien
ctgggctcgcgcgacgtcacgggta

SEQ ID NO: 5925403 - DNA, 25 bp, Homo sapien
ccccggtctacgcgaacgctccctc

SEQ ID NO: 5925404 - DNA, 25 bp, Homo sapien
tcggcgcgtactagcccgcgcactc

SEQ ID NO: 5925405 - DNA, 25 bp, Homo sapien
catgcccttcgtacggcgcggccag

SEQ ID NO: 5925406 - DNA, 25 bp, Homo sapien
ccagcatgcgcgatacgggcctccg

SEQ ID NO: 5925407 - DNA, 25 bp, Homo sapien
ctcagcctcgtcggtgcgtccccca

SEQ ID NO: 5925408 - DNA, 25 bp, Homo sapien
ccggattcgcgaagacggggtcgcc

SEQ ID NO: 5925409 - DNA, 25 bp, Homo sapien
tcggcctcggacgtaagcgcggcca

SEQ ID NO: 5925410 - DNA, 25 bp, Homo sapien
gtgtgcacgcgacgtcaagcgggcg

SEQ ID NO: 5925411 - DNA, 25 bp, Homo sapien
gcgagagtcgcgtacgctcccagcg

SEQ ID NO: 5925412 - DNA, 25 bp, Homo sapien
gggctcttgcggtcgcgagagtcgc

SEQ ID NO: 5925413 - DNA, 25 bp, Homo sapien
caagggcgattgcgaccgcgggtcc

SEQ ID NO: 5925414 - DNA, 25 bp, Homo sapien
gcatgccgggccggtacgaccagac

SEQ ID NO: 5925415 - DNA, 25 bp, Homo sapien
cgcagggcgccggatattcgtcggg

SEQ ID NO: 5925416 - DNA, 25 bp, Homo sapien
ccgtcccgtcacgcgttgagtcgcc

SEQ ID NO: 5925417 - DNA, 25 bp, Homo sapien
gtccgagtcgaccgcggaggacgtc

SEQ ID NO: 5925418 - DNA, 25 bp, Homo sapien
gagagttagcgccgttccgggggcg

SEQ ID NO: 5925419 - DNA, 25 bp, Homo sapien
cccggaatcggcgtatcgctcccgg

SEQ ID NO: 5925420 - DNA, 25 bp, Homo sapien
ggagtccactacgcgacgggcggtc

SEQ ID NO: 5925421 - DNA, 25 bp, Homo sapien
gcgaacgcgtgtcggtacgcgcggt

SEQ ID NO: 5925422 - DNA, 25 bp, Homo sapien
tgctggcgctcgcgttacggccgcg

SEQ ID NO: 5925423 - DNA, 25 bp, Homo sapien
tcgggagttcgaccgcgcgggtcgc

SEQ ID NO: 5925424 - DNA, 25 bp, Homo sapien
gccgcccgcgatacgatgtccgggc

SEQ ID NO: 5925425 - DNA, 25 bp, Homo sapien
ggggacgcgtcgcgtacagcggcca

SEQ ID NO: 5925426 - DNA, 25 bp, Homo sapien
gccgtcgactacggcgcgacgctcc

SEQ ID NO: 5925427 - DNA, 25 bp, Homo sapien
gggccccggcatacgacggcgctag

SEQ ID NO: 5925428 - DNA, 25 bp, Homo sapien
cgaacgccgcgcatcgtacggccgc

SEQ ID NO: 5925429 - DNA, 25 bp, Homo sapien
gggcggaacgcgccgtaggacgcag

SEQ ID NO: 5925430 - DNA, 25 bp, Homo sapien
ccaccctacgcgcacagcgcggagg

SEQ ID NO: 5925431 - DNA, 25 bp, Homo sapien
cctgcctcgcggcgtgctacggagg

SEQ ID NO: 5925432 - DNA, 25 bp, Homo sapien
gcgccacgttcgcgctaggccccac

SEQ ID NO: 5925433 - DNA, 25 bp, Homo sapien
agctcccgatcgtgcgggtgccgcg

SEQ ID NO: 5925434 - DNA, 25 bp, Homo sapien
tccgctcccgcgattacgcgcgggg

SEQ ID NO: 5925435 - DNA, 25 bp, Homo sapien
cttcgcggctcgaacggcgggctgc

SEQ ID NO: 5925436 - DNA, 25 bp, Homo sapien
ggccggtggaccgcgcgtaggagtc

SEQ ID NO: 5925437 - DNA, 25 bp, Homo sapien
ggcacgcgcgcgattacccggcctc

SEQ ID NO: 5925438 - DNA, 25 bp, Homo sapien
ccgggcggcgtataggcgccatgcg

SEQ ID NO: 5925439 - DNA, 25 bp, Homo sapien
cccagcgcgtgccgctcgttagggc

SEQ ID NO: 5925440 - DNA, 25 bp, Homo sapien
tctggcttcgcgcgagcgggcagcc

SEQ ID NO: 5925441 - DNA, 25 bp, Homo sapien
gcggcttacgcggctgtcggccgac

SEQ ID NO: 5925442 - DNA, 25 bp, Homo sapien
cgcgcgctaacccgtccgatggccg

SEQ ID NO: 5925443 - DNA, 25 bp, Homo sapien
aggacggcgctagcgcaacggggcg

SEQ ID NO: 5925444 - DNA, 25 bp, Homo sapien
gctggagatagccccgcgcgacccc

SEQ ID NO: 5925445 - DNA, 25 bp, Homo sapien
gcgggttccgatcgagcgcgctggc

SEQ ID NO: 5925446 - DNA, 25 bp, Homo sapien
cggacgcggtcggtacggaccctgc

SEQ ID NO: 5925447 - DNA, 25 bp, Homo sapien
gcgggtttcggcgctacggagcgcc

SEQ ID NO: 5925448 - DNA, 25 bp, Homo sapien
cgtcccggctacgcgcgaaggggag

SEQ ID NO: 5925449 - DNA, 25 bp, Homo sapien
gcgggcatccgcgtagctcgacggg

SEQ ID NO: 5925450 - DNA, 25 bp, Homo sapien
ggtcggcgtaagtcgcgacgcggcc

SEQ ID NO: 5925451 - DNA, 25 bp, Homo sapien
acctggcgcgctatcggaggggggg

SEQ ID NO: 5925452 - DNA, 25 bp, Homo sapien
gggccgtcgcggcataagggcaccg

SEQ ID NO: 5925453 - DNA, 25 bp, Homo sapien
ggcgccgtaggcggcgtacggaacg

SEQ ID NO: 5925454 - DNA, 25 bp, Homo sapien
ggggtgcccatacggcgcgggatgg

SEQ ID NO: 5925455 - DNA, 25 bp, Homo sapien
ggacggcgccgctataccccgcgga

SEQ ID NO: 5925456 - DNA, 25 bp, Homo sapien
cagaggcggggtaccaacgccgcgc

SEQ ID NO: 5925457 - DNA, 25 bp, Homo sapien
cctcggggatacgcgacggccctgc

SEQ ID NO: 5925458 - DNA, 25 bp, Homo sapien
cgggccacgcgtatcgggggcttgg

SEQ ID NO: 5925459 - DNA, 25 bp, Homo sapien
ctgctgtagggatcgcgcggccgcc

SEQ ID NO: 5925460 - DNA, 25 bp, Homo sapien
cccccccgcctagcggtcgatagcc

SEQ ID NO: 5925461 - DNA, 25 bp, Homo sapien
gcgccgcgcggtccgatagtccgca

SEQ ID NO: 5925462 - DNA, 25 bp, Homo sapien
cgcccggggtgcgcccgttctgatc

SEQ ID NO: 5925463 - DNA, 25 bp, Homo sapien
cctgccccccgtacgtcgcagagcc

SEQ ID NO: 5925464 - DNA, 25 bp, Homo sapien
cgcaggcgaccgggttcgaccctgg

SEQ ID NO: 5925465 - DNA, 25 bp, Homo sapien
gagcccgtcgtctcgacgaggccgc

SEQ ID NO: 5925466 - DNA, 25 bp, Homo sapien
caccgtcgtgcgcgatagggggggg

SEQ ID NO: 5925467 - DNA, 25 bp, Homo sapien
gcggggcgcgaacgcatggtacgcg

SEQ ID NO: 5925468 - DNA, 25 bp, Homo sapien
cgcgcggcacgaccgcgaatggtgc

SEQ ID NO: 5925469 - DNA, 25 bp, Homo sapien
gcgctctacgagcgtcgcctccccg

SEQ ID NO: 5925470 - DNA, 25 bp, Homo sapien
cccgggtctcgacgtgcgacgtgcg

SEQ ID NO: 5925471 - DNA, 25 bp, Homo sapien
ggcagctcgaccatgcgccgccagg

SEQ ID NO: 5925472 - DNA, 25 bp, Homo sapien
caccgggtcgcgctacgccgtgcgt

SEQ ID NO: 5925473 - DNA, 25 bp, Homo sapien
ctcccccgcgacgtaccgcccgatg

SEQ ID NO: 5925474 - DNA, 25 bp, Homo sapien
ctcgcctcgccccgctacacgggtc

SEQ ID NO: 5925475 - DNA, 25 bp, Homo sapien
ccgacgcgcgacgtactccgctggg

SEQ ID NO: 5925476 - DNA, 25 bp, Homo sapien
ggagctcgacggtcgcaaccgccgg

SEQ ID NO: 5925477 - DNA, 25 bp, Homo sapien
gtcgcgaccgtttcggcccgcggct

SEQ ID NO: 5925478 - DNA, 25 bp, Homo sapien
gtcccgccgacgtacgacggctccc

SEQ ID NO: 5925479 - DNA, 25 bp, Homo sapien
cgggagcgcgattgaacgcgcggcc

SEQ ID NO: 5925480 - DNA, 25 bp, Homo sapien
cgagtggaccgtacggcgacgcccg

SEQ ID NO: 5925481 - DNA, 25 bp, Homo sapien
gacgggtatcgcgacgccgtcgggg

SEQ ID NO: 5925482 - DNA, 25 bp, Homo sapien
agcgggcgcgcggactatgcggcga

SEQ ID NO: 5925483 - DNA, 25 bp, Homo sapien
gcacgctacggaccggcgtctccgg

SEQ ID NO: 5925484 - DNA, 25 bp, Homo sapien
cgggcgtagggcgcggcaacgcagt

SEQ ID NO: 5925485 - DNA, 25 bp, Homo sapien
agagtggtcccgtacggcgcgccgg

SEQ ID NO: 5925486 - DNA, 25 bp, Homo sapien
gcacggagcgcgcactacgcgggac

SEQ ID NO: 5925487 - DNA, 25 bp, Homo sapien
tcacgctgatcgcggtccgcccccc

SEQ ID NO: 5925488 - DNA, 25 bp, Homo sapien
accgatcggtaggtccgcggcggcg

SEQ ID NO: 5925489 - DNA, 25 bp, Homo sapien
gcggcactagcccggtacgtcggcc

SEQ ID NO: 5925490 - DNA, 25 bp, Homo sapien
ggcgcggaccggccgcgtagatctg

SEQ ID NO: 5925491 - DNA, 25 bp, Homo sapien
tcggtgccaggcgtacgacccccgg

SEQ ID NO: 5925492 - DNA, 25 bp, Homo sapien
gcgaggtcgacccgtcgtgcggagc

SEQ ID NO: 5925493 - DNA, 25 bp, Homo sapien
ccccgctgtatcgcgcgaggccgag

SEQ ID NO: 5925494 - DNA, 25 bp, Homo sapien
ctcgcaagggcgtacgtcgccggcg

SEQ ID NO: 5925495 - DNA, 25 bp, Homo sapien
gggccgcggcgcacgctaactcgct

SEQ ID NO: 5925496 - DNA, 25 bp, Homo sapien
gtggcccacgggacgtacgggaggc

SEQ ID NO: 5925497 - DNA, 25 bp, Homo sapien
cgtgcgtccgcgacgttcggcggct

SEQ ID NO: 5925498 - DNA, 25 bp, Homo sapien
ctcccgtccgaacgggcgtgagccg

SEQ ID NO: 5925499 - DNA, 25 bp, Homo sapien
ggccgaactacgcgaccgcgacgcg

SEQ ID NO: 5925500 - DNA, 25 bp, Homo sapien
ccgcgttacggtcgcacgcggaccc

SEQ ID NO: 5925501 - DNA, 25 bp, Homo sapien
tcgccccgtccggtacgcggccaag

SEQ ID NO: 5925502 - DNA, 25 bp, Homo sapien
ggtgggtcggacgtcgaccgccgag

SEQ ID NO: 5925503 - DNA, 25 bp, Homo sapien
gcttggcgtgtcgcggtaccgcggg

SEQ ID NO: 5925504 - DNA, 25 bp, Homo sapien
ggtcaccgcggtatagccgggcgcc

SEQ ID NO: 5925505 - DNA, 25 bp, Homo sapien
atggcggagcgtactcgcgccgggc

SEQ ID NO: 5925506 - DNA, 25 bp, Homo sapien
tcgccgcggtacgcgactctcggcc

SEQ ID NO: 5925507 - DNA, 25 bp, Homo sapien
ggcgtgtacccggcgcgatgccgtg

SEQ ID NO: 5925508 - DNA, 25 bp, Homo sapien
gacgccttgacggtccgcgtggggc

SEQ ID NO: 5925509 - DNA, 25 bp, Homo sapien
ggtggccctagcggcatcgcaggcg

SEQ ID NO: 5925510 - DNA, 25 bp, Homo sapien
ctacccgccggaccgcctacgtggc

SEQ ID NO: 5925511 - DNA, 25 bp, Homo sapien
cggagcccggcgtacaacgccccac

SEQ ID NO: 5925512 - DNA, 25 bp, Homo sapien
ccacccgcgtacgttccgcgtgcgg

SEQ ID NO: 5925513 - DNA, 25 bp, Homo sapien
cccgcccgacgttacgcactcccgc

SEQ ID NO: 5925514 - DNA, 25 bp, Homo sapien
cacgcccgggtatacggccgcccga

SEQ ID NO: 5925515 - DNA, 25 bp, Homo sapien
cacgcgcccgcgtaccgatggagcg

SEQ ID NO: 5925516 - DNA, 25 bp, Homo sapien
tccgtggcgtagtccgtcgcgccgg

SEQ ID NO: 5925517 - DNA, 25 bp, Homo sapien
cccgagcgagtacccgcgaccctcg

SEQ ID NO: 5925518 - DNA, 25 bp, Homo sapien
cgccgcatcgtcccggtcgcgactc

SEQ ID NO: 5925519 - DNA, 25 bp, Homo sapien
agggcgacgagtccgcgtgcccctg

SEQ ID NO: 5925520 - DNA, 25 bp, Homo sapien
gggacgtagcgccctgacgtggccc

SEQ ID NO: 5925521 - DNA, 25 bp, Homo sapien
cctgtgcgtgcgaacccgctggcgg

SEQ ID NO: 5925522 - DNA, 25 bp, Homo sapien
gccagcaacgcaacgcgggggcgtc

SEQ ID NO: 5925523 - DNA, 25 bp, Homo sapien
gccgtgagcgcgtcgggtggccttg

SEQ ID NO: 5925524 - DNA, 25 bp, Homo sapien
gagcccccggtacgcttcggggcga

SEQ ID NO: 5925525 - DNA, 25 bp, Homo sapien
ggccggcgacgcgctatgtctccgg

SEQ ID NO: 5925526 - DNA, 25 bp, Homo sapien
gtcgcagcgtcgtacgcgggcggac

SEQ ID NO: 5925527 - DNA, 25 bp, Homo sapien
ggcgacggtccgacgtacgtggcgc

SEQ ID NO: 5925528 - DNA, 25 bp, Homo sapien
gccgccatcggccgcgactgagtgg

SEQ ID NO: 5925529 - DNA, 25 bp, Homo sapien
cggcggccgtcggcgcaagttacgg

SEQ ID NO: 5925530 - DNA, 25 bp, Homo sapien
ccgggtcccggtacgtcgcagctgg

SEQ ID NO: 5925531 - DNA, 25 bp, Homo sapien
ccggtgcgtagcacggtcggggtgc

SEQ ID NO: 5925532 - DNA, 25 bp, Homo sapien
ggagggatcccgtcgcgacggagcc

SEQ ID NO: 5925533 - DNA, 25 bp, Homo sapien
tcgggggctatagcccgcgggagcc

SEQ ID NO: 5925534 - DNA, 25 bp, Homo sapien
gctgcctgcgacgtacgggcgggga

SEQ ID NO: 5925535 - DNA, 25 bp, Homo sapien
gccgctgtaccggcgtacggcacgc

SEQ ID NO: 5925536 - DNA, 25 bp, Homo sapien
gtgggcacggtcgcatcgctgccgg

SEQ ID NO: 5925537 - DNA, 25 bp, Homo sapien
cgtcgggccgtacgtagcggcaggg

SEQ ID NO: 5925538 - DNA, 25 bp, Homo sapien
gcgcccccgaccgtacgaccaccca

SEQ ID NO: 5925539 - DNA, 25 bp, Homo sapien
tgccacggtcgctaccggagcgcgg

SEQ ID NO: 5925540 - DNA, 25 bp, Homo sapien
gtaggcgcacggccgtacggctggc

SEQ ID NO: 5925541 - DNA, 25 bp, Homo sapien
cacgggacgcgtccgcgaagcgcac

SEQ ID NO: 5925542 - DNA, 25 bp, Homo sapien
gtgcgcgtaacgggtgcgccgcgct

SEQ ID NO: 5925543 - DNA, 25 bp, Homo sapien
ccaaggggtatgccgcgcggcacgc

SEQ ID NO: 5925544 - DNA, 25 bp, Homo sapien
ggcccgcctatcggagcgcccagtc

SEQ ID NO: 5925545 - DNA, 25 bp, Homo sapien
ccgctcgtcgaacgccccgcaaggg

SEQ ID NO: 5925546 - DNA, 25 bp, Homo sapien
cgacagtacgtcgcggccggacccg

SEQ ID NO: 5925547 - DNA, 25 bp, Homo sapien
cagcgcgggttaacggtcgcgcccc

SEQ ID NO: 5925548 - DNA, 25 bp, Homo sapien
ggtcgacgtaacgcgggtcgggcgc

SEQ ID NO: 5925549 - DNA, 25 bp, Homo sapien
ccggccagcgtactcgcgcagaccc

SEQ ID NO: 5925550 - DNA, 25 bp, Homo sapien
ggcccacgtggtacgtcgcggccgt

SEQ ID NO: 5925551 - DNA, 25 bp, Homo sapien
gtggggtccgaacgccggtcgctgg

SEQ ID NO: 5925552 - DNA, 25 bp, Homo sapien
gcggcgactacgggccggtgcgatc

SEQ ID NO: 5925553 - DNA, 25 bp, Homo sapien
ccccagctagcgcgccgaccgactg

SEQ ID NO: 5925554 - DNA, 25 bp, Homo sapien
ggacggccatacgcgcgggagcacg

SEQ ID NO: 5925555 - DNA, 25 bp, Homo sapien
gcgcttgtagcgcgcaacgggccgg

SEQ ID NO: 5925556 - DNA, 25 bp, Homo sapien
cggatgcggcgcaaccctacccgcc

SEQ ID NO: 5925557 - DNA, 25 bp, Homo sapien
agggccatcggtagcgcgcggtcgg

SEQ ID NO: 5925558 - DNA, 25 bp, Homo sapien
tgctgacggtcaacgcgcccgcccg

SEQ ID NO: 5925559 - DNA, 25 bp, Homo sapien
tggggccgagacgcgcgtactggcc

SEQ ID NO: 5925560 - DNA, 25 bp, Homo sapien
tgcgcctacgtagggcgcgcgtccg

SEQ ID NO: 5925561 - DNA, 25 bp, Homo sapien
ccccccgtcgcggacgaactctcgc

SEQ ID NO: 5925562 - DNA, 25 bp, Homo sapien
cccccagggatcgtacgcggggcac

SEQ ID NO: 5925563 - DNA, 25 bp, Homo sapien
gcctcgctaacgcgcgacggagccg

SEQ ID NO: 5925564 - DNA, 25 bp, Homo sapien
tgccgccgggtgcgatacggacgcg

SEQ ID NO: 5925565 - DNA, 25 bp, Homo sapien
ccacacgtccgaacgcgcgggcgca

SEQ ID NO: 5925566 - DNA, 25 bp, Homo sapien
cggccccgccgcgcgtatggcattc

SEQ ID NO: 5925567 - DNA, 25 bp, Homo sapien
ggcggataccggtacgcgctgggcc

SEQ ID NO: 5925568 - DNA, 25 bp, Homo sapien
gagcccgacgggccgcgataccgag

SEQ ID NO: 5925569 - DNA, 25 bp, Homo sapien
ccggcctacgggtctcgcggtgtcg

SEQ ID NO: 5925570 - DNA, 25 bp, Homo sapien
ggcttccgtcgtatgcgggcggcgg

SEQ ID NO: 5925571 - DNA, 25 bp, Homo sapien
cagctcgccgggtacgcgtgtgcgg

SEQ ID NO: 5925572 - DNA, 25 bp, Homo sapien
gcgggggatcgttcacgcggcggtc

SEQ ID NO: 5925573 - DNA, 25 bp, Homo sapien
ggccagcggtactacgcgggcgtgg

SEQ ID NO: 5925574 - DNA, 25 bp, Homo sapien
gggccaggtatacgcgcccggtggc

SEQ ID NO: 5925575 - DNA, 25 bp, Homo sapien
cgcgcgtactcgcgacggaggacgc

SEQ ID NO: 5925576 - DNA, 25 bp, Homo sapien
gcgcgcgtcgcgcgtataggtgcgg

SEQ ID NO: 5925577 - DNA, 25 bp, Homo sapien
cacggcgcgcctcgtacgagaggcg

SEQ ID NO: 5925578 - DNA, 25 bp, Homo sapien
ggcggatccggaccgatcggctggc

SEQ ID NO: 5925579 - DNA, 25 bp, Homo sapien
gcgcgtctacgacggccgtacgcgc

SEQ ID NO: 5925580 - DNA, 25 bp, Homo sapien
gcatgcggcgtcgaacgctcgggcc

SEQ ID NO: 5925581 - DNA, 25 bp, Homo sapien
cgcccctactcggacggcgagcgct

SEQ ID NO: 5925582 - DNA, 25 bp, Homo sapien
gcggcgggtaccgatacgccagcgg

SEQ ID NO: 5925583 - DNA, 25 bp, Homo sapien
ggctcgtcgatcgcgggtccgctgg

SEQ ID NO: 5925584 - DNA, 25 bp, Homo sapien
caggcgccgttaacgcccggtgccc

SEQ ID NO: 5925585 - DNA, 25 bp, Homo sapien
cgccggcgcggcctattcgtcggct

SEQ ID NO: 5925586 - DNA, 25 bp, Homo sapien
gctccgcacggtcgatcgcccgctc

SEQ ID NO: 5925587 - DNA, 25 bp, Homo sapien
acggcataggcgcgcgacgaggcgg

SEQ ID NO: 5925588 - DNA, 25 bp, Homo sapien
cgtgcttaccgccggtcgtcggccc

SEQ ID NO: 5925589 - DNA, 25 bp, Homo sapien
cgcccggtcgtacgccccgcgagta

SEQ ID NO: 5925590 - DNA, 25 bp, Homo sapien
ggcgaggtccgcaacgcgatcgggg

SEQ ID NO: 5925591 - DNA, 25 bp, Homo sapien
ggtgtgtacggtcgggccgccgcca

SEQ ID NO: 5925592 - DNA, 25 bp, Homo sapien
gcggggagcggacgctacgcccgaa

SEQ ID NO: 5925593 - DNA, 25 bp, Homo sapien
gtgcggccgatagaacgcggggcgg

SEQ ID NO: 5925594 - DNA, 25 bp, Homo sapien
gggcgttaggcgcggcgattgcccc

SEQ ID NO: 5925595 - DNA, 25 bp, Homo sapien
ccgcgtcgagccgtaacgcgcgcct

SEQ ID NO: 5925596 - DNA, 25 bp, Homo sapien
ggccagctcgcgctagacgccgggt

SEQ ID NO: 5925597 - DNA, 25 bp, Homo sapien
cgagccacggagcgtcgaccagggg

SEQ ID NO: 5925598 - DNA, 25 bp, Homo sapien
ggaccgcgttgcgtcggtcccctgc

SEQ ID NO: 5925599 - DNA, 25 bp, Homo sapien
ctccagcgctcgtaccgcgggtcgc

SEQ ID NO: 5925600 - DNA, 25 bp, Homo sapien
ccgacgtagcgcccgcacggggagt

SEQ ID NO: 5925601 - DNA, 25 bp, Homo sapien
gcccgcacgcgtagcgggactgagg

SEQ ID NO: 5925602 - DNA, 25 bp, Homo sapien
tccgcccgcgtacgtcgatccggcc

SEQ ID NO: 5925603 - DNA, 25 bp, Homo sapien
ccccacgtgttacgtccgcgcgcgg

SEQ ID NO: 5925604 - DNA, 25 bp, Homo sapien
gccgtaccgtacgcgcgtggctcgg

SEQ ID NO: 5925605 - DNA, 25 bp, Homo sapien
cctctgcgcgtaccgtccgcggacc

SEQ ID NO: 5925606 - DNA, 25 bp, Homo sapien
cccaatgcgaccccctacgccgggc

SEQ ID NO: 5925607 - DNA, 25 bp, Homo sapien
ccgccctaaccgcggcgagcgggaa

SEQ ID NO: 5925608 - DNA, 25 bp, Homo sapien
gatgcgacggatcgcgcgccgccct

SEQ ID NO: 5925609 - DNA, 25 bp, Homo sapien
ttgcggcgacgcgtacccgagcggc

SEQ ID NO: 5925610 - DNA, 25 bp, Homo sapien
gcgcggctaactccgtcggcggacc

SEQ ID NO: 5925611 - DNA, 25 bp, Homo sapien
ggtccctagcgcggacgagggacgg

SEQ ID NO: 5925612 - DNA, 25 bp, Homo sapien
ccgcctccgtcgcgagcttagggcc

SEQ ID NO: 5925613 - DNA, 25 bp, Homo sapien
ctgcgccgctagacgcggagtcccc

SEQ ID NO: 5925614 - DNA, 25 bp, Homo sapien
ccgccaccgcgcgtagtacggctcg

SEQ ID NO: 5925615 - DNA, 25 bp, Homo sapien
cgaagggcgcgcgactaagccggcc

SEQ ID NO: 5925616 - DNA, 25 bp, Homo sapien
gctcggtcgggccgtacgtcccagc

SEQ ID NO: 5925617 - DNA, 25 bp, Homo sapien
cgactgcgtacgcccgagccccggt

SEQ ID NO: 5925618 - DNA, 25 bp, Homo sapien
cgtccccgcgtcgactaccgcgagc

SEQ ID NO: 5925619 - DNA, 25 bp, Homo sapien
ccccgccaactaggtcgcgccaggg

SEQ ID NO: 5925620 - DNA, 25 bp, Homo sapien
gagggggtgacgatacgcggcgccc

SEQ ID NO: 5925621 - DNA, 25 bp, Homo sapien
ccccgcctgcgacgcacgaccgaag

SEQ ID NO: 5925622 - DNA, 25 bp, Homo sapien
cctgcgccgctacggcggtcttccc

SEQ ID NO: 5925623 - DNA, 25 bp, Homo sapien
gtcccgacggcgtcgcgtggtgtcc

SEQ ID NO: 5925624 - DNA, 25 bp, Homo sapien
cgtgggatcccgtacgggccgctcg

SEQ ID NO: 5925625 - DNA, 25 bp, Homo sapien
cggttgcccgaagttcgcggccgcc

SEQ ID NO: 5925626 - DNA, 25 bp, Homo sapien
gaaggccgtacggacccgcgctggc

SEQ ID NO: 5925627 - DNA, 25 bp, Homo sapien
cgacggtccgcgacgggcaggtcgt

SEQ ID NO: 5925628 - DNA, 25 bp, Homo sapien
cgccggcgtcgtaacgcgctgggca

SEQ ID NO: 5925629 - DNA, 25 bp, Homo sapien
gccgcgcgcgtacctatcgggccct

SEQ ID NO: 5925630 - DNA, 25 bp, Homo sapien
cagaccgtgcgccgcgatacgcgcg

SEQ ID NO: 5925631 - DNA, 25 bp, Homo sapien
gcggtcagcacgcgtacgggctcgc

SEQ ID NO: 5925632 - DNA, 25 bp, Homo sapien
tgcccggctagcgcgacgcgacggt

SEQ ID NO: 5925633 - DNA, 25 bp, Homo sapien
gcagagcctacggcgcgtaccgggg

SEQ ID NO: 5925634 - DNA, 25 bp, Homo sapien
ggcgtgtcggcgatacgccgtggcc

SEQ ID NO: 5925635 - DNA, 25 bp, Homo sapien
gcgcgcacccccgtcggacggcatt

SEQ ID NO: 5925636 - DNA, 25 bp, Homo sapien
cgcagccggggcgatacttggcccg

SEQ ID NO: 5925637 - DNA, 25 bp, Homo sapien
cgggccacgggcgtacgaagcctgg

SEQ ID NO: 5925638 - DNA, 25 bp, Homo sapien
gcggcgacgcgcggttaggcccact

SEQ ID NO: 5925639 - DNA, 25 bp, Homo sapien
ctgccagcgccgtacggtccggctg

SEQ ID NO: 5925640 - DNA, 25 bp, Homo sapien
ggccccaacggaccgcgccgattcc

SEQ ID NO: 5925641 - DNA, 25 bp, Homo sapien
ggcctctcgcgcgtacagggacggg

SEQ ID NO: 5925642 - DNA, 25 bp, Homo sapien
ctcccgcacgacccgttcgcacggg

SEQ ID NO: 5925643 - DNA, 25 bp, Homo sapien
ctcgggccggacgcgctatcgggac

SEQ ID NO: 5925644 - DNA, 25 bp, Homo sapien
cgggaccccggcgcgcatactgtcc

SEQ ID NO: 5925645 - DNA, 25 bp, Homo sapien
actgcgcgcccgcggattacggccg

SEQ ID NO: 5925646 - DNA, 25 bp, Homo sapien
agcccgggcgtactacccggcgcag

SEQ ID NO: 5925647 - DNA, 25 bp, Homo sapien
cgccgcctaaccgacggccggtcga

SEQ ID NO: 5925648 - DNA, 25 bp, Homo sapien
gggcttttgcgcgagtcgcccgcgc

SEQ ID NO: 5925649 - DNA, 25 bp, Homo sapien
tggtcggcgaatcggcccgagggcc

SEQ ID NO: 5925650 - DNA, 25 bp, Homo sapien
acctgcccccgtatcgccggcgcag

SEQ ID NO: 5925651 - DNA, 25 bp, Homo sapien
cgctcggcccgttgcgacgcacagg

SEQ ID NO: 5925652 - DNA, 25 bp, Homo sapien
gcggtccgataccgtccgccggcct

SEQ ID NO: 5925653 - DNA, 25 bp, Homo sapien
cccacgatgcccgaacgcgccctgc

SEQ ID NO: 5925654 - DNA, 25 bp, Homo sapien
tgccggaccctccgacgcgccgaca

SEQ ID NO: 5925655 - DNA, 25 bp, Homo sapien
cccagcccgtcgtaccggatgcccc

SEQ ID NO: 5925656 - DNA, 25 bp, Homo sapien
cgcaggcgcgaaccggtccttgccg

SEQ ID NO: 5925657 - DNA, 25 bp, Homo sapien
gtgctcaccgaacgtccgcgcgccg

SEQ ID NO: 5925658 - DNA, 25 bp, Homo sapien
caccagcggctactaggcgcgcggg

SEQ ID NO: 5925659 - DNA, 25 bp, Homo sapien
ctcgcatgcgccggacgtagggcgg

SEQ ID NO: 5925660 - DNA, 25 bp, Homo sapien
ccgctcgacgggtcgcgcatgcctg

SEQ ID NO: 5925661 - DNA, 25 bp, Homo sapien
ggtggcctacgcacgcgaggggcct

SEQ ID NO: 5925662 - DNA, 25 bp, Homo sapien
gccgaggcccggactaacgggcgct

SEQ ID NO: 5925663 - DNA, 25 bp, Homo sapien
ccgcgtacgtcgcgaccgatgggcg

SEQ ID NO: 5925664 - DNA, 25 bp, Homo sapien
ctggcgcgcgcggttacctaccccc

SEQ ID NO: 5925665 - DNA, 25 bp, Homo sapien
gaggacccggcgctagtcgccaccc

SEQ ID NO: 5925666 - DNA, 25 bp, Homo sapien
cgtggccgtcgtacggcgtggacgg

SEQ ID NO: 5925667 - DNA, 25 bp, Homo sapien
agcccccgtcaacccgcgtcagggc

SEQ ID NO: 5925668 - DNA, 25 bp, Homo sapien
ccgctctgcggtatccggcgcacgg

SEQ ID NO: 5925669 - DNA, 25 bp, Homo sapien
ggaagcgtaccggactcgcgggcgc

SEQ ID NO: 5925670 - DNA, 25 bp, Homo sapien
gcgctttaccgagcgcggagcccgc

SEQ ID NO: 5925671 - DNA, 25 bp, Homo sapien
cgcggtctcggtcgatcgcgcacgg

SEQ ID NO: 5925672 - DNA, 25 bp, Homo sapien
agctcgtcgtgacgcggccggaggc

SEQ ID NO: 5925673 - DNA, 25 bp, Homo sapien
gtggggcaagacgtcgcgccgccga

SEQ ID NO: 5925674 - DNA, 25 bp, Homo sapien
tcgcgccgcgccccgatgtcccctt

SEQ ID NO: 5925675 - DNA, 25 bp, Homo sapien
tcgagggtcccgcggcgtatgggcg

SEQ ID NO: 5925676 - DNA, 25 bp, Homo sapien
cccaccgggcatacgcgacccgagc

SEQ ID NO: 5925677 - DNA, 25 bp, Homo sapien
cccggggcgataccgctcgtggagg

SEQ ID NO: 5925678 - DNA, 25 bp, Homo sapien
cccccggcgtatcccctcgcgctac

SEQ ID NO: 5925679 - DNA, 25 bp, Homo sapien
cgacctctcgtgtcgcggacgcggg

SEQ ID NO: 5925680 - DNA, 25 bp, Homo sapien
ggcccgccgaccgatacgggagcga

SEQ ID NO: 5925681 - DNA, 25 bp, Homo sapien
cgcgacgctcgcgcgatacctgcgc

SEQ ID NO: 5925682 - DNA, 25 bp, Homo sapien
cgccacccgacgtcgcgtaccggtg

SEQ ID NO: 5925683 - DNA, 25 bp, Homo sapien
gcctagccgtgtaccggcgccggct

SEQ ID NO: 5925684 - DNA, 25 bp, Homo sapien
ggccgacggtagttcgcgcggtccg

SEQ ID NO: 5925685 - DNA, 25 bp, Homo sapien
tgcgggcgtatcgcacccggcaccg

SEQ ID NO: 5925686 - DNA, 25 bp, Homo sapien
cgcgacacccctgcgcgaagtcgcg

SEQ ID NO: 5925687 - DNA, 25 bp, Homo sapien
tgccaccgtacggaccccgtgccgc

SEQ ID NO: 5925688 - DNA, 25 bp, Homo sapien
cgcaccgcgcttacggtcggagcgc

SEQ ID NO: 5925689 - DNA, 25 bp, Homo sapien
cgcggccccatatcggccgatccgg

SEQ ID NO: 5925690 - DNA, 25 bp, Homo sapien
cgagggcgatagggcgacgcgcgca

SEQ ID NO: 5925691 - DNA, 25 bp, Homo sapien
gcgacgggtcgcgccgtatgctccc

SEQ ID NO: 5925692 - DNA, 25 bp, Homo sapien
cgtcgccgcgtccgtcgtgcaccag

SEQ ID NO: 5925693 - DNA, 25 bp, Homo sapien
gcggggctacggacgtccgcacagc

SEQ ID NO: 5925694 - DNA, 25 bp, Homo sapien
gcccggctacctcgcgcgtgggtac

SEQ ID NO: 5925695 - DNA, 25 bp, Homo sapien
gtggggtagttgcgccgcgcggtgg

SEQ ID NO: 5925696 - DNA, 25 bp, Homo sapien
cgctcccgcgaagcggttggcagcg

SEQ ID NO: 5925697 - DNA, 25 bp, Homo sapien
cccgggcgcgacgcgcgataccttg

SEQ ID NO: 5925698 - DNA, 25 bp, Homo sapien
ccgcgttcgcgtacgcccaccccac

SEQ ID NO: 5925699 - DNA, 25 bp, Homo sapien
cggaccctcgacgcgtagcgggcgt

SEQ ID NO: 5925700 - DNA, 25 bp, Homo sapien
gtccggcaccgcgcgaacgaccacg

SEQ ID NO: 5925701 - DNA, 25 bp, Homo sapien
ggttcctcgccggaccgatcgggcc

SEQ ID NO: 5925702 - DNA, 25 bp, Homo sapien
ggctggcgcgtccgcaacacgctgc

SEQ ID NO: 5925703 - DNA, 25 bp, Homo sapien
ttcggcgcgtacgtctcggcggccc

SEQ ID NO: 5925704 - DNA, 25 bp, Homo sapien
cctgctacgtgtccggacggccgcc

SEQ ID NO: 5925705 - DNA, 25 bp, Homo sapien
cgggcgccgaaccgtcgagacgcct

SEQ ID NO: 5925706 - DNA, 25 bp, Homo sapien
cggcgctcgtcggccctactacggg

SEQ ID NO: 5925707 - DNA, 25 bp, Homo sapien
ccaggacggcatgtcgacggccgcc

SEQ ID NO: 5925708 - DNA, 25 bp, Homo sapien
gccaccgcgctcgtatcccgcggtc

SEQ ID NO: 5925709 - DNA, 25 bp, Homo sapien
ggcacgcggccggtaaccgcgttcg

SEQ ID NO: 5925710 - DNA, 25 bp, Homo sapien
cgctcgctacgaccggtgccagggc

SEQ ID NO: 5925711 - DNA, 25 bp, Homo sapien
ttccggcgcgccgtagctagggggc

SEQ ID NO: 5925712 - DNA, 25 bp, Homo sapien
cgactgcgccacacgtacggccgcc

SEQ ID NO: 5925713 - DNA, 25 bp, Homo sapien
cgtggtgcgtatcggcgctccccgc

SEQ ID NO: 5925714 - DNA, 25 bp, Homo sapien
cgcggcacgccgttacgcaggcctc

SEQ ID NO: 5925715 - DNA, 25 bp, Homo sapien
gggcagcgtcccgttcgtagccggc

SEQ ID NO: 5925716 - DNA, 25 bp, Homo sapien
ctcgggcgatcgcctacgggcaggc

SEQ ID NO: 5925717 - DNA, 25 bp, Homo sapien
agggcacggcgcgattacggggggc

SEQ ID NO: 5925718 - DNA, 25 bp, Homo sapien
ggcctacggctatacggggccgcgg

SEQ ID NO: 5925719 - DNA, 25 bp, Homo sapien
cggccggacgcaccgacgagccatc

SEQ ID NO: 5925720 - DNA, 25 bp, Homo sapien
cggggttcgtgggcgcgacgagctg

SEQ ID NO: 5925721 - DNA, 25 bp, Homo sapien
gggccgttacggggcgcgcgcacaa

SEQ ID NO: 5925722 - DNA, 25 bp, Homo sapien
gaggaggcgcaatcggacgggcccc

SEQ ID NO: 5925723 - DNA, 25 bp, Homo sapien
cggcactagttcgcgaccggcgcgc

SEQ ID NO: 5925724 - DNA, 25 bp, Homo sapien
ccggcccgctaacgcgtggggtgct

SEQ ID NO: 5925725 - DNA, 25 bp, Homo sapien
gagcggccatcgcgcgtcgtgacgc

SEQ ID NO: 5925726 - DNA, 25 bp, Homo sapien
ggcgacccgctacgcgagccttgcc

SEQ ID NO: 5925727 - DNA, 25 bp, Homo sapien
ccactcgtcgaagcgtgcggccggg

SEQ ID NO: 5925728 - DNA, 25 bp, Homo sapien
gcgcgtcgcgccgttacgaggccga

SEQ ID NO: 5925729 - DNA, 25 bp, Homo sapien
gttgccaacggtaggccgcgggggc

SEQ ID NO: 5925730 - DNA, 25 bp, Homo sapien
ctgggcatagcccgcgtcgcgcgtc

SEQ ID NO: 5925731 - DNA, 25 bp, Homo sapien
ctacgccgcgatacggcggccgcac

SEQ ID NO: 5925732 - DNA, 25 bp, Homo sapien
gcggtcaacggcgcgttcgcggcac

SEQ ID NO: 5925733 - DNA, 25 bp, Homo sapien
ggagcgctacgcgacggcgcgctac

SEQ ID NO: 5925734 - DNA, 25 bp, Homo sapien
cggcgtactatcgcgggggccaccc

SEQ ID NO: 5925735 - DNA, 25 bp, Homo sapien
gaagggcgtaaccgcgaggcccgcc

SEQ ID NO: 5925736 - DNA, 25 bp, Homo sapien
gggctaacctcgcgtcgggcgtccg

SEQ ID NO: 5925737 - DNA, 25 bp, Homo sapien
gtgcccgcgtcacgcgagtacgcgg

SEQ ID NO: 5925738 - DNA, 25 bp, Homo sapien
gtagcgaccgggcgctagctggggg

SEQ ID NO: 5925739 - DNA, 25 bp, Homo sapien
gcgctccgcgtaccgccgttggagc

SEQ ID NO: 5925740 - DNA, 25 bp, Homo sapien
gtgggcgcccgatcgaccttgcgcc

SEQ ID NO: 5925741 - DNA, 25 bp, Homo sapien
gggggctaccgaccgcgtagtggcc

SEQ ID NO: 5925742 - DNA, 25 bp, Homo sapien
ccggactcgcgtagggctccgaggc

SEQ ID NO: 5925743 - DNA, 25 bp, Homo sapien
cggacccgcggaccctagtgctgcg

SEQ ID NO: 5925744 - DNA, 25 bp, Homo sapien
cgccgacgcgcgttagtcgcccctc

SEQ ID NO: 5925745 - DNA, 25 bp, Homo sapien
cgccggccgtacgcgtctggtgcca

SEQ ID NO: 5925746 - DNA, 25 bp, Homo sapien
gcggaacgggtcgcgtacgcgtccg

SEQ ID NO: 5925747 - DNA, 25 bp, Homo sapien
gcgtgggcgcctacgacggtggctc

SEQ ID NO: 5925748 - DNA, 25 bp, Homo sapien
ggggcctcggtacggcaagcgccag

SEQ ID NO: 5925749 - DNA, 25 bp, Homo sapien
cccgagccggtgcgactcgccgact

SEQ ID NO: 5925750 - DNA, 25 bp, Homo sapien
tggcggcgtatgcgggcgcggagtc

SEQ ID NO: 5925751 - DNA, 25 bp, Homo sapien
gcccggtcaaccgacgcgcacgcct

SEQ ID NO: 5925752 - DNA, 25 bp, Homo sapien
tgccgcagtacgggcgcatgcccgg

SEQ ID NO: 5925753 - DNA, 25 bp, Homo sapien
gcggtagaccgggcgtacgcgggtc

SEQ ID NO: 5925754 - DNA, 25 bp, Homo sapien
cccaggacagcgcggtcgtccgtgc

SEQ ID NO: 5925755 - DNA, 25 bp, Homo sapien
ggggcagctacgcgtacgccctccg

SEQ ID NO: 5925756 - DNA, 25 bp, Homo sapien
gggggaggaccgttgcgtcacgcgg

SEQ ID NO: 5925757 - DNA, 25 bp, Homo sapien
gacggcgcggggtacgtcgacacgg

SEQ ID NO: 5925758 - DNA, 25 bp, Homo sapien
cagcagctaccgcggtcggccgtgc

SEQ ID NO: 5925759 - DNA, 25 bp, Homo sapien
cggcccaagtcgggtacgctgcgcc

SEQ ID NO: 5925760 - DNA, 25 bp, Homo sapien
ccgagccgctagtacgggcgggcgt

SEQ ID NO: 5925761 - DNA, 25 bp, Homo sapien
ggccgggccgcgacacgttcctgac

SEQ ID NO: 5925762 - DNA, 25 bp, Homo sapien
ggggcgggcggcgtatcgtggtctg

SEQ ID NO: 5925763 - DNA, 25 bp, Homo sapien
ggcgcgcgcacggtagcgaccagca

SEQ ID NO: 5925764 - DNA, 25 bp, Homo sapien
cccagactagcccgcgaagcgcggg

SEQ ID NO: 5925765 - DNA, 25 bp, Homo sapien
cgcgcgatcgcgaccaggggtgcgt

SEQ ID NO: 5925766 - DNA, 25 bp, Homo sapien
ggctggcgccccggacgttggtctg

SEQ ID NO: 5925767 - DNA, 25 bp, Homo sapien
gcccggcggctcgcgtacccagatg

SEQ ID NO: 5925768 - DNA, 25 bp, Homo sapien
ggacgctcgcgcggttggggcaagg

SEQ ID NO: 5925769 - DNA, 25 bp, Homo sapien
ccgtgctccacgcgttcgggacggc

SEQ ID NO: 5925770 - DNA, 25 bp, Homo sapien
agggcctcggtcgactcgcgccagc

SEQ ID NO: 5925771 - DNA, 25 bp, Homo sapien
gggaccgtagcgcgcccgagcacag

SEQ ID NO: 5925772 - DNA, 25 bp, Homo sapien
tccgcgcatatccgcgcgacgcggc

SEQ ID NO: 5925773 - DNA, 25 bp, Homo sapien
acggtgctaacccgcgcgtcgccgc

SEQ ID NO: 5925774 - DNA, 25 bp, Homo sapien
cccgggccgcggtacgacggatcac

SEQ ID NO: 5925775 - DNA, 25 bp, Homo sapien
ggtcacgtttcgcgcggtccgcggg

SEQ ID NO: 5925776 - DNA, 25 bp, Homo sapien
ctcccggcgcgtcgaactagccccc

SEQ ID NO: 5925777 - DNA, 25 bp, Homo sapien
gctggccccgttacgagcccgtccc

SEQ ID NO: 5925778 - DNA, 25 bp, Homo sapien
accccagcgcgagacggtacgcggg

SEQ ID NO: 5925779 - DNA, 25 bp, Homo sapien
gctggcgctacccgcggtagcgtcg

SEQ ID NO: 5925780 - DNA, 25 bp, Homo sapien
cgccgggcacgtcgcgagacttcgg

SEQ ID NO: 5925781 - DNA, 25 bp, Homo sapien
ctcggccggtacgacggactcgccc

SEQ ID NO: 5925782 - DNA, 25 bp, Homo sapien
tgccgtgcgtcgcgtacgaggcggc

SEQ ID NO: 5925783 - DNA, 25 bp, Homo sapien
gcgcggctagcgtatcgcgctcccg

SEQ ID NO: 5925784 - DNA, 25 bp, Homo sapien
taccgggtcgcgtatgcccggggcc

SEQ ID NO: 5925785 - DNA, 25 bp, Homo sapien
cgatcggtgcgtacccccgcccagg

SEQ ID NO: 5925786 - DNA, 25 bp, Homo sapien
accggcgtcggcgtatcgtgggggc

SEQ ID NO: 5925787 - DNA, 25 bp, Homo sapien
ccgccgccgcgctagtacgccggat

SEQ ID NO: 5925788 - DNA, 25 bp, Homo sapien
cccgcccgttgcgcgtcgagtcacg

SEQ ID NO: 5925789 - DNA, 25 bp, Homo sapien
ctgccgcgcgagaagcgtagccccc

SEQ ID NO: 5925790 - DNA, 25 bp, Homo sapien
gggcctgtatcgggcgccgccgcat

SEQ ID NO: 5925791 - DNA, 25 bp, Homo sapien
accagccggaccgtgcgttgggggc

SEQ ID NO: 5925792 - DNA, 25 bp, Homo sapien
ccctggggccgattacgcgcccgac

SEQ ID NO: 5925793 - DNA, 25 bp, Homo sapien
cacgagcgcggttcggcatgccccc

SEQ ID NO: 5925794 - DNA, 25 bp, Homo sapien
ggggtgacgtcgaccctcgccaccg

SEQ ID NO: 5925795 - DNA, 25 bp, Homo sapien
cctctccgtgcgaccggttgggggc

SEQ ID NO: 5925796 - DNA, 25 bp, Homo sapien
ggggcacgcgcggtaacgagcgggt

SEQ ID NO: 5925797 - DNA, 25 bp, Homo sapien
ccccgcctacgcgtcgcgggaacga

SEQ ID NO: 5925798 - DNA, 25 bp, Homo sapien
cgggagccgagtacgtcgcctgcgc

SEQ ID NO: 5925799 - DNA, 25 bp, Homo sapien
tgaccgcggtaggccgacgggaggc

SEQ ID NO: 5925800 - DNA, 25 bp, Homo sapien
tcgctctgcgcgtccgatgggcggc

SEQ ID NO: 5925801 - DNA, 25 bp, Homo sapien
cggcgcacgattgagcgcgggctgc

SEQ ID NO: 5925802 - DNA, 25 bp, Homo sapien
acgggcgtcggccgatacggcgcgt

SEQ ID NO: 5925803 - DNA, 25 bp, Homo sapien
ggggcgcgcactataggcgggaggc

SEQ ID NO: 5925804 - DNA, 25 bp, Homo sapien
cgtcggcgcatacgcggctggcctg

SEQ ID NO: 5925805 - DNA, 25 bp, Homo sapien
gcgacggggtatcgggacgacgcgc

SEQ ID NO: 5925806 - DNA, 25 bp, Homo sapien
gtgcgcccgtcgtactgcggcgcag

SEQ ID NO: 5925807 - DNA, 25 bp, Homo sapien
tcgaggcgacgcgaagcgctccccc

SEQ ID NO: 5925808 - DNA, 25 bp, Homo sapien
gcgtgcatcgatccgcggtggcggc

SEQ ID NO: 5925809 - DNA, 25 bp, Homo sapien
gcccgcgcccgcgtaacgacgactc

SEQ ID NO: 5925810 - DNA, 25 bp, Homo sapien
cacccgcggattgacgcgccccgtc

SEQ ID NO: 5925811 - DNA, 25 bp, Homo sapien
cgacgccgacgccctaccggtccac

SEQ ID NO: 5925812 - DNA, 25 bp, Homo sapien
cgggcggacctaacgcggactcgcc

SEQ ID NO: 5925813 - DNA, 25 bp, Homo sapien
acggccagtcgccggtacgggcctc

SEQ ID NO: 5925814 - DNA, 25 bp, Homo sapien
gcaagccgggttcgcaacgggcggc

SEQ ID NO: 5925815 - DNA, 25 bp, Homo sapien
ccccggggtatgcccgcgctagcct

SEQ ID NO: 5925816 - DNA, 25 bp, Homo sapien
gcctacgcgtgccgaccgagccagc

SEQ ID NO: 5925817 - DNA, 25 bp, Homo sapien
cgggccgcgtcgaacggtagcgcgt

SEQ ID NO: 5925818 - DNA, 25 bp, Homo sapien
tcgctcccgcgacgcgtagcgtgcc

SEQ ID NO: 5925819 - DNA, 25 bp, Homo sapien
agcgcccgacgccagaccgctggac

SEQ ID NO: 5925820 - DNA, 25 bp, Homo sapien
gcagctgtcggactagcggcccccc

SEQ ID NO: 5925821 - DNA, 25 bp, Homo sapien
gggccgccgtcgtacgacctgaccc

SEQ ID NO: 5925822 - DNA, 25 bp, Homo sapien
gccaggggtaccgtcgagcccgacc

SEQ ID NO: 5925823 - DNA, 25 bp, Homo sapien
gtggcgcagcgccctatcgcccgtg

SEQ ID NO: 5925824 - DNA, 25 bp, Homo sapien
cgggcctggaccggtacgccgtgga

SEQ ID NO: 5925825 - DNA, 25 bp, Homo sapien
gcggtgcgatccatcgcgccggctc

SEQ ID NO: 5925826 - DNA, 25 bp, Homo sapien
ccacaggtgccgatcgtcgcccggc

SEQ ID NO: 5925827 - DNA, 25 bp, Homo sapien
gggggtcgtaccgatcgccgggcca

SEQ ID NO: 5925828 - DNA, 25 bp, Homo sapien
gtggggtatgtcgtcgcgcgccccg

SEQ ID NO: 5925829 - DNA, 25 bp, Homo sapien
actgggcgcggggacgatcgtcggg

SEQ ID NO: 5925830 - DNA, 25 bp, Homo sapien
ggccttcccgtaacgcgctcggggc

SEQ ID NO: 5925831 - DNA, 25 bp, Homo sapien
gtagggggtaccgcgccagtggcgc

SEQ ID NO: 5925832 - DNA, 25 bp, Homo sapien
gagcgccgcgttcgctagcacgcgg

SEQ ID NO: 5925833 - DNA, 25 bp, Homo sapien
gcactgggtcggacccgacggcgac

SEQ ID NO: 5925834 - DNA, 25 bp, Homo sapien
gggcgctcgtccgcgaacctcggag

SEQ ID NO: 5925835 - DNA, 25 bp, Homo sapien
cctggccacggcttcgcgacggcga

SEQ ID NO: 5925836 - DNA, 25 bp, Homo sapien
cgagccgtcgcgcccgttatgcccc

SEQ ID NO: 5925837 - DNA, 25 bp, Homo sapien
gcgtccccgtaacacgcggggcgag

SEQ ID NO: 5925838 - DNA, 25 bp, Homo sapien
gcccgcacgacccgctacgcctctg

SEQ ID NO: 5925839 - DNA, 25 bp, Homo sapien
gggggcgcgcgtagtcgacgggaag

SEQ ID NO: 5925840 - DNA, 25 bp, Homo sapien
ggccgcatagactcgcgcgccccca

SEQ ID NO: 5925841 - DNA, 25 bp, Homo sapien
gcggggagcgccgatacgcaccacg

SEQ ID NO: 5925842 - DNA, 25 bp, Homo sapien
gtagcgcgccgtcgcgtagcgctcc

SEQ ID NO: 5925843 - DNA, 25 bp, Homo sapien
gggacgggctcgtaacggggccagc

SEQ ID NO: 5925844 - DNA, 25 bp, Homo sapien
gactgggcgctccgataggcgggcc

SEQ ID NO: 5925845 - DNA, 25 bp, Homo sapien
ccggcagcgatgcgaccgtgcccac

SEQ ID NO: 5925846 - DNA, 25 bp, Homo sapien
gccctgacgcgggttgacgggggct

SEQ ID NO: 5925847 - DNA, 25 bp, Homo sapien
ggccgcgcgttcaatcgcgctcccg

SEQ ID NO: 5925848 - DNA, 25 bp, Homo sapien
cggcaaggaccggttcgcgcctgcg

SEQ ID NO: 5925849 - DNA, 25 bp, Homo sapien
caggcatgcgcgacccgtcgagcgg

SEQ ID NO: 5925850 - DNA, 25 bp, Homo sapien
gagcgggcgatcgaccgtgcggagc

SEQ ID NO: 5925851 - DNA, 25 bp, Homo sapien
tggcggcggcccgaccgtacacacc

SEQ ID NO: 5925852 - DNA, 25 bp, Homo sapien
acgacctgcccgtcgcggaccgtcg

SEQ ID NO: 5925853 - DNA, 25 bp, Homo sapien
gcgcaggcgacgtactcggctcccg

SEQ ID NO: 5925854 - DNA, 25 bp, Homo sapien
ggtccgccgacggagttagccgcgc

SEQ ID NO: 5925855 - DNA, 25 bp, Homo sapien
cgctccatcggtacgcgggcgcgtg

SEQ ID NO: 5925856 - DNA, 25 bp, Homo sapien
gctccgcacgacgggtcgacctcgc

SEQ ID NO: 5925857 - DNA, 25 bp, Homo sapien
gccggctacgaacgggacgctgccc

SEQ ID NO: 5925858 - DNA, 25 bp, Homo sapien
ccgaagtctcgcgacgtgcccggcg

SEQ ID NO: 5925859 - DNA, 25 bp, Homo sapien
cagtcggtcggcgcgctagctgggg

SEQ ID NO: 5925860 - DNA, 25 bp, Homo sapien
gccgcctcgtacgcgacgcacggca

SEQ ID NO: 5925861 - DNA, 25 bp, Homo sapien
gggcgccgcgtatcgtcaccccctc

SEQ ID NO: 5925862 - DNA, 25 bp, Homo sapien
ggctatcgaccgctaggcggggggg

SEQ ID NO: 5925863 - DNA, 25 bp, Homo sapien
ggcccagcgcgtaccggtatccgcc

SEQ ID NO: 5925864 - DNA, 25 bp, Homo sapien
cccttgcggggcgttcgacgagcgg

SEQ ID NO: 5925865 - DNA, 25 bp, Homo sapien
ctcggcggtcgacgtccgacccacc

SEQ ID NO: 5925866 - DNA, 25 bp, Homo sapien
ccggagacgccggtccgtagcgtgc

SEQ ID NO: 5925867 - DNA, 25 bp, Homo sapien
tgtcggcgcgtcggagggtccggca

SEQ ID NO: 5925868 - DNA, 25 bp, Homo sapien
cagctcgtcgcgcccacgaaccccg

SEQ ID NO: 5925869 - DNA, 25 bp, Homo sapien
ggcgagtccgcgttaggtccgcccg

SEQ ID NO: 5925870 - DNA, 25 bp, Homo sapien
ccagctgcgacgtaccgggacccgg

SEQ ID NO: 5925871 - DNA, 25 bp, Homo sapien
gcctcccgtacgtcccgtgggccac

SEQ ID NO: 5925872 - DNA, 25 bp, Homo sapien
ttcccgctcgccgcggttagggcgg

SEQ ID NO: 5925873 - DNA, 25 bp, Homo sapien
gccgcgtcgcgcggatatgcgcgga

SEQ ID NO: 5925874 - DNA, 25 bp, Homo sapien
gccgccaccgcggatcgatgcacgc

SEQ ID NO: 5925875 - DNA, 25 bp, Homo sapien
ggcggccgcgaacttcgggcaaccg

SEQ ID NO: 5925876 - DNA, 25 bp, Homo sapien
ggccctaagctcgcgacggaggcgg

SEQ ID NO: 5925877 - DNA, 25 bp, Homo sapien
cgcgtcgcggtcgcgtagttcggcc

SEQ ID NO: 5925878 - DNA, 25 bp, Homo sapien
aggcgcgcgttacggctcgacgcgg

SEQ ID NO: 5925879 - DNA, 25 bp, Homo sapien
ggggtcgcgcggggctatctccagc

SEQ ID NO: 5925880 - DNA, 25 bp, Homo sapien
ccccgatcgcgttgcggacctcgcc

SEQ ID NO: 5925881 - DNA, 25 bp, Homo sapien
tcgaccggccgtcggttaggcggcg

SEQ ID NO: 5925882 - DNA, 25 bp, Homo sapien
gggccacgtcagggcgctacgtccc

SEQ ID NO: 5925883 - DNA, 25 bp, Homo sapien
cctgtgcgtcgcaacgggccgagcg

SEQ ID NO: 5925884 - DNA, 25 bp, Homo sapien
ggccggcttagtcgcgcgcccttcg

SEQ ID NO: 5925885 - DNA, 25 bp, Homo sapien
ccagcggacccgcgatcgacgagcc

SEQ ID NO: 5925886 - DNA, 25 bp, Homo sapien
gccagcgcgctcgatcggaacccgc

SEQ ID NO: 5925887 - DNA, 25 bp, Homo sapien
actgcgttgccgcgccctacgcccg

SEQ ID NO: 5925888 - DNA, 25 bp, Homo sapien
cggccgtaatccgcgggcgcgcagt

SEQ ID NO: 5925889 - DNA, 25 bp, Homo sapien
ggctcccgcgggctatagcccccga

SEQ ID NO: 5925890 - DNA, 25 bp, Homo sapien
atccggcgtactagcgcggcggcgg

SEQ ID NO: 5925891 - DNA, 25 bp, Homo sapien
ggccggatcgacgtacgcgggcgga

SEQ ID NO: 5925892 - DNA, 25 bp, Homo sapien
cgcctctcgtacgaggcgcgccgtg

SEQ ID NO: 5925893 - DNA, 25 bp, Homo sapien
ggcggccgtacgtgtggcgcagtcg

SEQ ID NO: 5925894 - DNA, 25 bp, Homo sapien
cccggccgcacgcttcgacgagtgg

SEQ ID NO: 5925895 - DNA, 25 bp, Homo sapien
gggggctacgcttctcgcgcggcag

SEQ ID NO: 5925896 - DNA, 25 bp, Homo sapien
gccctggcaccggtcgtagcgagcg

SEQ ID NO: 5925897 - DNA, 25 bp, Homo sapien
gacccgtgtagcggggcgaggcgag

SEQ ID NO: 5925898 - DNA, 25 bp, Homo sapien
aggcgtgcgcgtcggttgaccgggc

SEQ ID NO: 5925899 - DNA, 25 bp, Homo sapien
gggccgccgagacgtacgcgccgaa

SEQ ID NO: 5925900 - DNA, 25 bp, Homo sapien
ccgcgtgctagcgaacgcggcgctc

SEQ ID NO: 5925901 - DNA, 25 bp, Homo sapien
ctgcgccgcagtacgacgggcgcac

SEQ ID NO: 5925902 - DNA, 25 bp, Homo sapien
cggaccgcgcgaactaccgtcggcc

SEQ ID NO: 5925903 - DNA, 25 bp, Homo sapien
gggggctagttcgacgcgccgggag

SEQ ID NO: 5925904 - DNA, 25 bp, Homo sapien
gtggggcgttgtacgccgggctccg

SEQ ID NO: 5925905 - DNA, 25 bp, Homo sapien
gtgccgcgaacgcgccgttgaccgc

SEQ ID NO: 5925906 - DNA, 25 bp, Homo sapien
ccgggcatgcgcccgtactgcggca

SEQ ID NO: 5925907 - DNA, 25 bp, Homo sapien
ggccagtacgcgcgtctcggcccca

SEQ ID NO: 5925908 - DNA, 25 bp, Homo sapien
tgggtggtcgtacggtcgggggcgc

SEQ ID NO: 5925909 - DNA, 25 bp, Homo sapien
agccgacgaataggccgcgccggcg

SEQ ID NO: 5925910 - DNA, 25 bp, Homo sapien
cggggaggcgacgctcgtagagcgc

SEQ ID NO: 5925911 - DNA, 25 bp, Homo sapien
gcctcccgtcggcctaccgcggtca

SEQ ID NO: 5925912 - DNA, 25 bp, Homo sapien
gcctccggccgcgtcacgacgagct

SEQ ID NO: 5925913 - DNA, 25 bp, Homo sapien
ccgtaacttgcgccgacggccgccg

SEQ ID NO: 5925914 - DNA, 25 bp, Homo sapien
gggcgagtccgtcgtaccggccgag

SEQ ID NO: 5925915 - DNA, 25 bp, Homo sapien
gtacccacgcgcgaggtagccgggc

SEQ ID NO: 5925916 - DNA, 25 bp, Homo sapien
tggccgctgtacgcgacgcgtcccc

SEQ ID NO: 5925917 - DNA, 25 bp, Homo sapien
catctgggtacgcgagccgccgggc

SEQ ID NO: 5925918 - DNA, 25 bp, Homo sapien
cgggcgtcgccgtacggtccactcg

SEQ ID NO: 5925919 - DNA, 25 bp, Homo sapien
gcgcggcgttggtaccccgcctctg

SEQ ID NO: 5925920 - DNA, 25 bp, Homo sapien
cctccgcgctgtgcgcgtagggtgg

SEQ ID NO: 5925921 - DNA, 25 bp, Homo sapien
cagaccacgatacgccgcccgcccc

SEQ ID NO: 5925922 - DNA, 25 bp, Homo sapien
ccccgcgcgtaatcgcgggagcgga

SEQ ID NO: 5925923 - DNA, 25 bp, Homo sapien
gccacgtaggcggtccggcgggtag

SEQ ID NO: 5925924 - DNA, 25 bp, Homo sapien
gagccggcgcgatggatcgcaccgc

SEQ ID NO: 5925925 - DNA, 25 bp, Homo sapien
tggcaccagacgcgtacggccggcg

SEQ ID NO: 5925926 - DNA, 25 bp, Homo sapien
tgggggcgcgcgagtctatgcggcc

SEQ ID NO: 5925927 - DNA, 25 bp, Homo sapien
cctggcggcgcatggtcgagctgcc

SEQ ID NO: 5925928 - DNA, 25 bp, Homo sapien
gcccccacgatacgccgacgccggt

SEQ ID NO: 5925929 - DNA, 25 bp, Homo sapien
accggggctcgggcgtacgcagtcg

SEQ ID NO: 5925930 - DNA, 25 bp, Homo sapien
gcgggctccgcgctcggtaaagcgc

SEQ ID NO: 5925931 - DNA, 25 bp, Homo sapien
gagtcgcgaccgggacgatgcggcg

SEQ ID NO: 5925932 - DNA, 25 bp, Homo sapien
cgcgtccgtatcgcacccggcggca

SEQ ID NO: 5925933 - DNA, 25 bp, Homo sapien
cttcggtcgtgcgtcgcaggcgggg

SEQ ID NO: 5925934 - DNA, 25 bp, Homo sapien
agccgcgggccgaaacggtcgcgac

SEQ ID NO: 5925935 - DNA, 25 bp, Homo sapien
cttggccgcgtaccggacggggcga

SEQ ID NO: 5925936 - DNA, 25 bp, Homo sapien
cgagccgtactacgcgcggtggcgg

SEQ ID NO: 5925937 - DNA, 25 bp, Homo sapien
gccgctcgggtacgcgtcgccgcaa

SEQ ID NO: 5925938 - DNA, 25 bp, Homo sapien
tcggcggcgcgacgtcttgccccac

SEQ ID NO: 5925939 - DNA, 25 bp, Homo sapien
gtggggcctagcgcgaacgtggcgc

SEQ ID NO: 5925940 - DNA, 25 bp, Homo sapien
cgggagcgcgatacgctagccgcgc

SEQ ID NO: 5925941 - DNA, 25 bp, Homo sapien
aggcgtctcgacggttcggcgcccg

SEQ ID NO: 5925942 - DNA, 25 bp, Homo sapien
cctccacgagcggtatcgccccggg

SEQ ID NO: 5925943 - DNA, 25 bp, Homo sapien
ggccgagagtcgcgtaccgcggcga

SEQ ID NO: 5925944 - DNA, 25 bp, Homo sapien
ggcgctccgtagcgccgaaacccgc

SEQ ID NO: 5925945 - DNA, 25 bp, Homo sapien
ccgggggtcgtacgcctggcaccga

SEQ ID NO: 5925946 - DNA, 25 bp, Homo sapien
ggcggccgtccggacacgtagcagg

SEQ ID NO: 5925947 - DNA, 25 bp, Homo sapien
ccggcccgttgcgcgctacaagcgc

SEQ ID NO: 5925948 - DNA, 25 bp, Homo sapien
gcccggcgcgagtacgctccgccat

SEQ ID NO: 5925949 - DNA, 25 bp, Homo sapien
gacggggcgcgtcaatccgcgggtg

SEQ ID NO: 5925950 - DNA, 25 bp, Homo sapien
ccgcacctatacgcgcgacgcgcgc

SEQ ID NO: 5925951 - DNA, 25 bp, Homo sapien
ccccccctccgatagcgcgccaggt

SEQ ID NO: 5925952 - DNA, 25 bp, Homo sapien
agggcggcgcgcgatccgtcgcatc

SEQ ID NO: 5925953 - DNA, 25 bp, Homo sapien
cgcacgtcgcacgtcgagacccggg

SEQ ID NO: 5925954 - DNA, 25 bp, Homo sapien
cccagcggagtacgtcgcgcgtcgg

SEQ ID NO: 5925955 - DNA, 25 bp, Homo sapien
cgcctgcgatgccgctagggccacc

SEQ ID NO: 5925956 - DNA, 25 bp, Homo sapien
gatggctcgtcggtgcgtccggccg

SEQ ID NO: 5925957 - DNA, 25 bp, Homo sapien
agcaccccacgcgttagcgggccgg

SEQ ID NO: 5925958 - DNA, 25 bp, Homo sapien
gcaggggaccgacgcaacgcggtcc

SEQ ID NO: 5925959 - DNA, 25 bp, Homo sapien
gctggctcggtcggcacgcgtaggc

SEQ ID NO: 5925960 - DNA, 25 bp, Homo sapien
ggggcgcgaccgttaacccgcgctg

SEQ ID NO: 5925961 - DNA, 25 bp, Homo sapien
gcgccactggcgcggtaccccctac

SEQ ID NO: 5925962 - DNA, 25 bp, Homo sapien
caggccagccgcgtatgcgccgacg

SEQ ID NO: 5925963 - DNA, 25 bp, Homo sapien
gccaccgggcgcgtatacctggccc

SEQ ID NO: 5925964 - DNA, 25 bp, Homo sapien
gcctgcccgtaggcgatcgcccgag

SEQ ID NO: 5925965 - DNA, 25 bp, Homo sapien
aggctagcgcgggcataccccgggg

SEQ ID NO: 5925966 - DNA, 25 bp, Homo sapien
cgttccgtacgccgcctacggcgcc

SEQ ID NO: 5925967 - DNA, 25 bp, Homo sapien
cagatctacgcggccggtccgcgcc

SEQ ID NO: 5925968 - DNA, 25 bp, Homo sapien
ccatcccgcgccgtatgggcacccc

SEQ ID NO: 5925969 - DNA, 25 bp, Homo sapien
ggcgggcctcgcggttacgcccttc

SEQ ID NO: 5925970 - DNA, 25 bp, Homo sapien
ggctccgtcgcgacgggatccctcc

SEQ ID NO: 5925971 - DNA, 25 bp, Homo sapien
gaggcccgtaccggcgactggccgt

SEQ ID NO: 5925972 - DNA, 25 bp, Homo sapien
gcctcccgcctatagtgcgcgcccc

SEQ ID NO: 5925973 - DNA, 25 bp, Homo sapien
cgggtccggccgcgacgtactgtcg

SEQ ID NO: 5925974 - DNA, 25 bp, Homo sapien
tgcgcccgcgcgttcggacgtgtgg

SEQ ID NO: 5925975 - DNA, 25 bp, Homo sapien
cgcagcactagggtccgcgggtccg

SEQ ID NO: 5925976 - DNA, 25 bp, Homo sapien
ctcggcctcgcgcgatacagcgggg

SEQ ID NO: 5925977 - DNA, 25 bp, Homo sapien
ccggcgcgccgtacgggaccactct

SEQ ID NO: 5925978 - DNA, 25 bp, Homo sapien
ccagggtcgaacccggtcgcctgcg

SEQ ID NO: 5925979 - DNA, 25 bp, Homo sapien
ggcgcccggctataccgcggtgacc

SEQ ID NO: 5925980 - DNA, 25 bp, Homo sapien
gcgctccgaccgtaagcgcggtgcg

SEQ ID NO: 5925981 - DNA, 25 bp, Homo sapien
ctgtgctcgggcgcgctacggtccc

SEQ ID NO: 5925982 - DNA, 25 bp, Homo sapien
gggtggcccccgcgatagtacgccg

SEQ ID NO: 5925983 - DNA, 25 bp, Homo sapien
tccccgcccgtacgtcgcaggcagc

SEQ ID NO: 5925984 - DNA, 25 bp, Homo sapien
gccagccgatcggtccggatccgcc

SEQ ID NO: 5925985 - DNA, 25 bp, Homo sapien
cccgcgcttcgcgggctagtctggg

SEQ ID NO: 5925986 - DNA, 25 bp, Homo sapien
gcgcccgacccgcgttacgtcgacc

SEQ ID NO: 5925987 - DNA, 25 bp, Homo sapien
agccgccgaacgtcgcggacgcacg

SEQ ID NO: 5925988 - DNA, 25 bp, Homo sapien
gtcaggaacgtgtcgcggcccggcc

SEQ ID NO: 5925989 - DNA, 25 bp, Homo sapien
gtcccgatagcgcgtccggcccgag

SEQ ID NO: 5925990 - DNA, 25 bp, Homo sapien
gggggtaggtaaccgcgcgcgccag

SEQ ID NO: 5925991 - DNA, 25 bp, Homo sapien
acgcgctaccgttcgacgcggcccg

SEQ ID NO: 5925992 - DNA, 25 bp, Homo sapien
acggccgcgacgtaccacgtgggcc

SEQ ID NO: 5925993 - DNA, 25 bp, Homo sapien
ggacaccacgcgacgccgtcgggac

SEQ ID NO: 5925994 - DNA, 25 bp, Homo sapien
ccgcacacgcgtacccggcgagctg

SEQ ID NO: 5925995 - DNA, 25 bp, Homo sapien
acccggcgtctagcgcgagctggcc

SEQ ID NO: 5925996 - DNA, 25 bp, Homo sapien
ggggcccgtccgattgcgcctcctc

SEQ ID NO: 5925997 - DNA, 25 bp, Homo sapien
ggggactccgcgtctagcggcgcag

SEQ ID NO: 5925998 - DNA, 25 bp, Homo sapien
gactccgcgcccgcatacgccgcca

SEQ ID NO: 5925999 - DNA, 25 bp, Homo sapien
ccacgcccgcgtagtaccgctggcc

SEQ ID NO: 5926000 - DNA, 25 bp, Homo sapien
ctgcgtcctacggcgcgttccgccc

SEQ ID NO: 5926001 - DNA, 25 bp, Homo sapien
aaggggacatcggggcgcggcgcga

SEQ ID NO: 5926002 - DNA, 25 bp, Homo sapien
gactcctacgcgcggtccaccggcc

SEQ ID NO: 5926003 - DNA, 25 bp, Homo sapien
cggacgcgcgccctacgtaggcgca

SEQ ID NO: 5926004 - DNA, 25 bp, Homo sapien
gtgcgcttcgcggacgcgtcccgtg

SEQ ID NO: 5926005 - DNA, 25 bp, Homo sapien
gcaccccgaccgtgctacgcaccgg

SEQ ID NO: 5926006 - DNA, 25 bp, Homo sapien
gcagggccgtcgcgtatccccgagg

SEQ ID NO: 5926007 - DNA, 25 bp, Homo sapien
gcccccgcggcctaccgttggcaac

SEQ ID NO: 5926008 - DNA, 25 bp, Homo sapien
cggctcacgcccgttcggacgggag

SEQ ID NO: 5926009 - DNA, 25 bp, Homo sapien
ccgcgtgacgcaacggtcctccccc

SEQ ID NO: 5926010 - DNA, 25 bp, Homo sapien
gccccgagcgcgttacgggaaggcc

SEQ ID NO: 5926011 - DNA, 25 bp, Homo sapien
gtcggccgacagccgcgtaagccgc

SEQ ID NO: 5926012 - DNA, 25 bp, Homo sapien
cccgcggaccgcgcgaaacgtgacc

SEQ ID NO: 5926013 - DNA, 25 bp, Homo sapien
cgtgactcgacgcgcaacgggcggg

SEQ ID NO: 5926014 - DNA, 25 bp, Homo sapien
gggtggcgactagcgccgggtcctc

SEQ ID NO: 5926015 - DNA, 25 bp, Homo sapien
ggcacgctacgcgtcgcgggagcga

SEQ ID NO: 5926016 - DNA, 25 bp, Homo sapien
cagaccaacgtccggggcgccagcc

SEQ ID NO: 5926017 - DNA, 25 bp, Homo sapien
gccccctagctacggcgcgccggaa

SEQ ID NO: 5926018 - DNA, 25 bp, Homo sapien
gcgcgtacggccgtcgtagacgcgc

SEQ ID NO: 5926019 - DNA, 25 bp, Homo sapien
gagccaccgtcgtaggcgcccacgc

SEQ ID NO: 5926020 - DNA, 25 bp, Homo sapien
gcgggagtgcgtaacgtcgggcggg

SEQ ID NO: 5926021 - DNA, 25 bp, Homo sapien
cgggcgggcgcgttgaccgtcagca

SEQ ID NO: 5926022 - DNA, 25 bp, Homo sapien
gggaagaccgccgtagcggcgcagg

SEQ ID NO: 5926023 - DNA, 25 bp, Homo sapien
ggccacggcgtatcgccgacacgcc

SEQ ID NO: 5926024 - DNA, 25 bp, Homo sapien
gcgcaggtatcgcgcgagcgtcgcg

SEQ ID NO: 5926025 - DNA, 25 bp, Homo sapien
tccacggcgtaccggtccaggcccg

SEQ ID NO: 5926026 - DNA, 25 bp, Homo sapien
cccgcgtaccgtctcgcgctggggt

SEQ ID NO: 5926027 - DNA, 25 bp, Homo sapien
gggcaccgggcgttaacggcgcctg

SEQ ID NO: 5926028 - DNA, 25 bp, Homo sapien
tcggcctcgtaacggcgcgacgcgc

SEQ ID NO: 5926029 - DNA, 25 bp, Homo sapien
gaatgccatacgcgcggcggggccg

SEQ ID NO: 5926030 - DNA, 25 bp, Homo sapien
ccgccccgcgttctatcggccgcac

SEQ ID NO: 5926031 - DNA, 25 bp, Homo sapien
cgacaccgcgagacccgtaggccgg

SEQ ID NO: 5926032 - DNA, 25 bp, Homo sapien
ccgtgcgccggataccgcagagcgg

SEQ ID NO: 5926033 - DNA, 25 bp, Homo sapien
caaggtatcgcgcgtcgcgcccggg

SEQ ID NO: 5926034 - DNA, 25 bp, Homo sapien
gaggcctgcgtaacggcgtgccgcg

SEQ ID NO: 5926035 - DNA, 25 bp, Homo sapien
ctggtgcacgacggacgcggcgacg

SEQ ID NO: 5926036 - DNA, 25 bp, Homo sapien
ccctgccgctacgtacggcccgacg

SEQ ID NO: 5926037 - DNA, 25 bp, Homo sapien
cggtgcccttatgccgcgacggccc

SEQ ID NO: 5926038 - DNA, 25 bp, Homo sapien
ccgcggccccgtatagccgtaggcc

SEQ ID NO: 5926039 - DNA, 25 bp, Homo sapien
ggccccgggcatacgcgacccggta

SEQ ID NO: 5926040 - DNA, 25 bp, Homo sapien
ctggcgcttgccgtaccgaggcccc

SEQ ID NO: 5926041 - DNA, 25 bp, Homo sapien
ggggcataacgggcgcgacggctcg

SEQ ID NO: 5926042 - DNA, 25 bp, Homo sapien
gcgacccgcggtacgagcgctggag

SEQ ID NO: 5926043 - DNA, 25 bp, Homo sapien
cggacgcccgacgcgaggttagccc

SEQ ID NO: 5926044 - DNA, 25 bp, Homo sapien
tgcccagcgcgttacgacgccggcg

SEQ ID NO: 5926045 - DNA, 25 bp, Homo sapien
gggggagcgcttcgcgtcgcctcga

SEQ ID NO: 5926046 - DNA, 25 bp, Homo sapien
gcccccaacgcacggtccggctggt

SEQ ID NO: 5926047 - DNA, 25 bp, Homo sapien
gtgatccgtcgtaccgcggcccggg

SEQ ID NO: 5926048 - DNA, 25 bp, Homo sapien
ggcccgatcggtccggcgaggaacc

SEQ ID NO: 5926049 - DNA, 25 bp, Homo sapien
ggctctgcgacgtacggggggcagg

SEQ ID NO: 5926050 - DNA, 25 bp, Homo sapien
gcagcgtgttgcggacgcgccagcc

SEQ ID NO: 5926051 - DNA, 25 bp, Homo sapien
gcgtcacgacgcgcgatggccgctc

SEQ ID NO: 5926052 - DNA, 25 bp, Homo sapien
ccgtccacgccgtacgacggccacg

SEQ ID NO: 5926053 - DNA, 25 bp, Homo sapien
actccccgtgcgggcgctacgtcgg

SEQ ID NO: 5926054 - DNA, 25 bp, Homo sapien
gcgtgccgtacgccggtacagcggc

SEQ ID NO: 5926055 - DNA, 25 bp, Homo sapien
cctcagtcccgctacgcgtgcgggc

SEQ ID NO: 5926056 - DNA, 25 bp, Homo sapien
acgcgccgtatcggccgacgcccgt

SEQ ID NO: 5926057 - DNA, 25 bp, Homo sapien
cagaggcgtagcgggtcgtgcgggc

SEQ ID NO: 5926058 - DNA, 25 bp, Homo sapien
gccagccgtacggccgtgcgcctac

SEQ ID NO: 5926059 - DNA, 25 bp, Homo sapien
ccggagacatagcgcgtcgccggcc

SEQ ID NO: 5926060 - DNA, 25 bp, Homo sapien
gcagggtccgtaccgaccgcgtccg

SEQ ID NO: 5926061 - DNA, 25 bp, Homo sapien
cccctggtcgacgctccgtggctcg

SEQ ID NO: 5926062 - DNA, 25 bp, Homo sapien
ccttgccccaaccgcgcgagcgtcc

SEQ ID NO: 5926063 - DNA, 25 bp, Homo sapien
acccgctcgttaccgcgcgtgcccc

SEQ ID NO: 5926064 - DNA, 25 bp, Homo sapien
ccaggcttcgtacgcccgtggcccg

SEQ ID NO: 5926065 - DNA, 25 bp, Homo sapien
acgcccgcccgtactagcggctcgg

SEQ ID NO: 5926066 - DNA, 25 bp, Homo sapien
gccgggcgacgatcggcacctgtgg

SEQ ID NO: 5926067 - DNA, 25 bp, Homo sapien
ccggcgcgacggactacgccacgga

SEQ ID NO: 5926068 - DNA, 25 bp, Homo sapien
aggccggcggacggtatcggaccgc

SEQ ID NO: 5926069 - DNA, 25 bp, Homo sapien
gggtcaggtcgtacgacggcggccc

SEQ ID NO: 5926070 - DNA, 25 bp, Homo sapien
ccgcgtactcgcgtgacgcgggcac

SEQ ID NO: 5926071 - DNA, 25 bp, Homo sapien
ccgccagcgggttcgcacgcacagg

SEQ ID NO: 5926072 - DNA, 25 bp, Homo sapien
gcgtgccgcgcggcataccccttgg

SEQ ID NO: 5926073 - DNA, 25 bp, Homo sapien
cggagggcgtacgcgtagctgcccc

SEQ ID NO: 5926074 - DNA, 25 bp, Homo sapien
ccggcggttgcgaccgtcgagctcc

SEQ ID NO: 5926075 - DNA, 25 bp, Homo sapien
cctccgtagcacgccgcgaggcagg

SEQ ID NO: 5926076 - DNA, 25 bp, Homo sapien
gaccgcgggatacgagcgcggtggc

SEQ ID NO: 5926077 - DNA, 25 bp, Homo sapien
cccgtcgagctacgcggatgcccgc

SEQ ID NO: 5926078 - DNA, 25 bp, Homo sapien
agccggcgccggtacacggctaggc

SEQ ID NO: 5926079 - DNA, 25 bp, Homo sapien
tcgccgcatagtccgcgcgcccgct

SEQ ID NO: 5926080 - DNA, 25 bp, Homo sapien
gccccccgtaatcgcgccgtgccct

SEQ ID NO: 5926081 - DNA, 25 bp, Homo sapien
gggtctgcgcgagtacgctggccgg

SEQ ID NO: 5926082 - DNA, 25 bp, Homo sapien
cggtgccgggtgcgatacgcccgca

SEQ ID NO: 5926083 - DNA, 25 bp, Homo sapien
gcagcccgcgctcaatcgtgcgccg

SEQ ID NO: 5926084 - DNA, 25 bp, Homo sapien
cacggcatcgcgccgggtacacgcc

SEQ ID NO: 5926085 - DNA, 25 bp, Homo sapien
acgcacccctggtcgcgatcgcgcg

SEQ ID NO: 5926086 - DNA, 25 bp, Homo sapien
ggggggcggaccgcgatcagcgtga

SEQ ID NO: 5926087 - DNA, 25 bp, Homo sapien
cgcccatacgccgcgggaccctcga

SEQ ID NO: 5926088 - DNA, 25 bp, Homo sapien
gggagccgtcgtacgtcggcgggac

SEQ ID NO: 5926089 - DNA, 25 bp, Homo sapien
tcgccgtcgcgaagccgtggccagg

SEQ ID NO: 5926090 - DNA, 25 bp, Homo sapien
ttgtgcgcgcgccccgtaacggccc

SEQ ID NO: 5926091 - DNA, 25 bp, Homo sapien
gacccgcgtacgcccggtctaccgc

SEQ ID NO: 5926092 - DNA, 25 bp, Homo sapien
ggtccgcggacggtacgcgcagagg

SEQ ID NO: 5926093 - DNA, 25 bp, Homo sapien
cacgggcgatagggcgctgcgccac

SEQ ID NO: 5926094 - DNA, 25 bp, Homo sapien
cccgcgtccgcgacacgagaggtcg

SEQ ID NO: 5926095 - DNA, 25 bp, Homo sapien
gcgcccgcgagtccggtacgcttcc

SEQ ID NO: 5926096 - DNA, 25 bp, Homo sapien
cgctgccaaccgcttcgcgggagcg

SEQ ID NO: 5926097 - DNA, 25 bp, Homo sapien
cccccagctagcgcccggtcgctac

SEQ ID NO: 5926098 - DNA, 25 bp, Homo sapien
ccgcacgcggaacgtacgcgggtgg

SEQ ID NO: 5926099 - DNA, 25 bp, Homo sapien
gcgcgtcgtcccgataccccgtcgc

SEQ ID NO: 5926100 - DNA, 25 bp, Homo sapien
agcgcggcgcacccgttacgcgcac

SEQ ID NO: 5926101 - DNA, 25 bp, Homo sapien
gggagcatacggcgcgacccgtcgc

SEQ ID NO: 5926102 - DNA, 25 bp, Homo sapien
agcgagttagcgtgcgccgcggccc

SEQ ID NO: 5926103 - DNA, 25 bp, Homo sapien
gccgcccatcggacgcgcagagcga

SEQ ID NO: 5926104 - DNA, 25 bp, Homo sapien
ccaagcccccgatacgcgtggcccg

SEQ ID NO: 5926105 - DNA, 25 bp, Homo sapien
gcggcgacgcgcgggttagcaccgt

SEQ ID NO: 5926106 - DNA, 25 bp, Homo sapien
ggcgcaaggtcgatcgggcgcccac

SEQ ID NO: 5926107 - DNA, 25 bp, Homo sapien
acgcacggcgtagcgcgacccggtg

SEQ ID NO: 5926108 - DNA, 25 bp, Homo sapien
ggccgacgtaccgggctagtgccgc

SEQ ID NO: 5926109 - DNA, 25 bp, Homo sapien
gcgacccgcgcggtcgaactcccga

SEQ ID NO: 5926110 - DNA, 25 bp, Homo sapien
ggccctcgggccgattcgccgacca

SEQ ID NO: 5926111 - DNA, 25 bp, Homo sapien
ggcccgagcgttcgacgccgcatgc

SEQ ID NO: 5926112 - DNA, 25 bp, Homo sapien
gccgtcccgaacgcgtggagcacgg

SEQ ID NO: 5926113 - DNA, 25 bp, Homo sapien
cttcccgtcgactacgcgcgccccc

SEQ ID NO: 5926114 - DNA, 25 bp, Homo sapien
gctgggacgtacggcccgaccgagc

SEQ ID NO: 5926115 - DNA, 25 bp, Homo sapien
gtcgggcgcgtaatcggccccaggg

SEQ ID NO: 5926116 - DNA, 25 bp, Homo sapien
ggggcatccggtacgacgggctggg

SEQ ID NO: 5926117 - DNA, 25 bp, Homo sapien
ggcgcagcgtacccgacttgggccg

SEQ ID NO: 5926118 - DNA, 25 bp, Homo sapien
cgcgacttcgcgcaggggtgtcgcg

SEQ ID NO: 5926119 - DNA, 25 bp, Homo sapien
gatcgcaccggcccgtagtcgccgc

SEQ ID NO: 5926120 - DNA, 25 bp, Homo sapien
gcgcgccggtcgcgaactagtgccg

SEQ ID NO: 5926121 - DNA, 25 bp, Homo sapien
ccagcgaccggcgttcggaccccac

SEQ ID NO: 5926122 - DNA, 25 bp, Homo sapien
ccgccctacgtccggcgcatgcgag

SEQ ID NO: 5926123 - DNA, 25 bp, Homo sapien
ccaccgcgcggcgcaactaccccac

SEQ ID NO: 5926124 - DNA, 25 bp, Homo sapien
cgaacgcggttaccggccgcgtgcc

SEQ ID NO: 5926125 - DNA, 25 bp, Homo sapien
tggcccggcgatcggtacgaccccc

SEQ ID NO: 5926126 - DNA, 25 bp, Homo sapien
gcgccacgtacgtcggaccgtcgcc

SEQ ID NO: 5926127 - DNA, 25 bp, Homo sapien
gcagggcgcgttcgggcatcgtggg

SEQ ID NO: 5926128 - DNA, 25 bp, Homo sapien
gctggcgcgagtcgaccgaggccct

SEQ ID NO: 5926129 - DNA, 25 bp, Homo sapien
tgcgcgcgtcgccctatcgccctcg

SEQ ID NO: 5926130 - DNA, 25 bp, Homo sapien
gctccaacggcggtacgcggagcgc

SEQ ID NO: 5926131 - DNA, 25 bp, Homo sapien
gctgtgcggacgtccgtagccccgc

SEQ ID NO: 5926132 - DNA, 25 bp, Homo sapien
ctccccttcgcgcgtagccgggacg

SEQ ID NO: 5926133 - DNA, 25 bp, Homo sapien
tcgctcccgtatcggtcggcgggcc

SEQ ID NO: 5926134 - DNA, 25 bp, Homo sapien
tcgggcggccgtatacccgggcgtg

SEQ ID NO: 5926135 - DNA, 25 bp, Homo sapien
gcccggacatcgtatcgcgggcggc

SEQ ID NO: 5926136 - DNA, 25 bp, Homo sapien
gtccgcccgcgtacgacgctgcgac

SEQ ID NO: 5926137 - DNA, 25 bp, Homo sapien
ctcgccccgcgtgttacggggacgc

SEQ ID NO: 5926138 - DNA, 25 bp, Homo sapien
cgcggccgtaacgcgagcgccagca

SEQ ID NO: 5926139 - DNA, 25 bp, Homo sapien
cccgtgcgaacgggtcgtgcgggag

SEQ ID NO: 5926140 - DNA, 25 bp, Homo sapien
gtccagcggtctggcgtcgggcgct

SEQ ID NO: 5926141 - DNA, 25 bp, Homo sapien
ccggatcggccgatatggggccgcg

SEQ ID NO: 5926142 - DNA, 25 bp, Homo sapien
cccgcgcgcctagtagccgctggtg

SEQ ID NO: 5926143 - DNA, 25 bp, Homo sapien
ggcggccgtcgacatgccgtcctgg

SEQ ID NO: 5926144 - DNA, 25 bp, Homo sapien
gtagcgcgaggggatacgccggggg

SEQ ID NO: 5926145 - DNA, 25 bp, Homo sapien
cgggccaagtatcgccccggctgcg

SEQ ID NO: 5926146 - DNA, 25 bp, Homo sapien
gccagcgcgggtccgtacggccttc

SEQ ID NO: 5926147 - DNA, 25 bp, Homo sapien
ccgctggcgtatcggtacccgccgc

SEQ ID NO: 5926148 - DNA, 25 bp, Homo sapien
cgcgtaccatgcgttcgcgccccgc

SEQ ID NO: 5926149 - DNA, 25 bp, Homo sapien
ggcggccgcgcgatccctacagcag

SEQ ID NO: 5926150 - DNA, 25 bp, Homo sapien
gggggcatgccgaaccgcgctcgtg

SEQ ID NO: 5926151 - DNA, 25 bp, Homo sapien
ctccgaggttcgcggacgagcgccc

SEQ ID NO: 5926152 - DNA, 25 bp, Homo sapien
ggggggccgctagtccgacagctgc

SEQ ID NO: 5926153 - DNA, 25 bp, Homo sapien
gcgtcctccgtcgcgagtacgcgcg

SEQ ID NO: 5926154 - DNA, 25 bp, Homo sapien
cccgacgatcgtccccgcgcccagt

SEQ ID NO: 5926155 - DNA, 25 bp, Homo sapien
gcccccaaccggtcgcacggagagg

SEQ ID NO: 5926156 - DNA, 25 bp, Homo sapien
ggccgcgtcgcgacttacgccgacc

SEQ ID NO: 5926157 - DNA, 25 bp, Homo sapien
ccgtccctcgtccgcgctagggacc

SEQ ID NO: 5926158 - DNA, 25 bp, Homo sapien
catcgggcggtacgtcgcgggggag

SEQ ID NO: 5926159 - DNA, 25 bp, Homo sapien
ggtcgggctcgacggtacccctggc

SEQ ID NO: 5926160 - DNA, 25 bp, Homo sapien
gtcccgcgtagtgcgcgctccgtgc

SEQ ID NO: 5926161 - DNA, 25 bp, Homo sapien
tgctggtcgctaccgtgcgcgcgcc

SEQ ID NO: 5926162 - DNA, 25 bp, Homo sapien
gtggggtgggcgtacgcgaacgcgg

SEQ ID NO: 5926163 - DNA, 25 bp, Homo sapien
gctcgggtcgcgtatgcccggtggg

SEQ ID NO: 5926164 - DNA, 25 bp, Homo sapien
gcctcggagccctacgcgagtccgg

SEQ ID NO: 5926165 - DNA, 25 bp, Homo sapien
gggtccgcgtgcgaccgtaacgcgg

SEQ ID NO: 5926166 - DNA, 25 bp, Homo sapien
gccccacgcggaccgtcaaggcgtc

SEQ ID NO: 5926167 - DNA, 25 bp, Homo sapien
cgccccgttgcgctagcgccgtcct

SEQ ID NO: 5926168 - DNA, 25 bp, Homo sapien
cagccggaccgtacggcgctggcag

SEQ ID NO: 5926169 - DNA, 25 bp, Homo sapien
ctgcgccggcgatacgggggcaggt

SEQ ID NO: 5926170 - DNA, 25 bp, Homo sapien
tactcgcggggcgtacgaccgggcg

SEQ ID NO: 5926171 - DNA, 25 bp, Homo sapien
cgcccatcggtcgcgacgtacgcgg

SEQ ID NO: 5926172 - DNA, 25 bp, Homo sapien
acgcccgctacgcgtcgagggtccg

SEQ ID NO: 5926173 - DNA, 25 bp, Homo sapien
ccgaccgcgcgctaccgatggccct

SEQ ID NO: 5926174 - DNA, 25 bp, Homo sapien
gagtcgtcgttacgcgggcgcgggc

SEQ ID NO: 5926175 - DNA, 25 bp, Homo sapien
gatcagaacgggcgcaccccgggcg

SEQ ID NO: 5926176 - DNA, 25 bp, Homo sapien
ggccactacgcggtcggtagccccc

SEQ ID NO: 5926177 - DNA, 25 bp, Homo sapien
ggacagtatgcgcgccggggtcccg

SEQ ID NO: 5926178 - DNA, 25 bp, Homo sapien
cgccgccgcggacctaccgatcggt

SEQ ID NO: 5926179 - DNA, 25 bp, Homo sapien
ccgtgtcgacgtaccccgcgccgtc

SEQ ID NO: 5926180 - DNA, 25 bp, Homo sapien
tcgccccgaagcgtaccgggggctc

SEQ ID NO: 5926181 - DNA, 25 bp, Homo sapien
gacgcccccgcgttgcgttgctggc

SEQ ID NO: 5926182 - DNA, 25 bp, Homo sapien
cggctccgtcgcgcgttagcgaggc

SEQ ID NO: 5926183 - DNA, 25 bp, Homo sapien
tccgcggggtatagcggcgccgtcc

SEQ ID NO: 5926184 - DNA, 25 bp, Homo sapien
aatgccgtccgacgggggtgcgcgc

SEQ ID NO: 5926185 - DNA, 25 bp, Homo sapien
ccccggtacgcgccgtaggctctgc

SEQ ID NO: 5926186 - DNA, 25 bp, Homo sapien
cgtgctcccgcgcgtatggccgtcc

SEQ ID NO: 5926187 - DNA, 25 bp, Homo sapien
ccgcgctccggtagcgaccgtggca

SEQ ID NO: 5926188 - DNA, 25 bp, Homo sapien
cgcggcacccgcacgatcgggagct

SEQ ID NO: 5926189 - DNA, 25 bp, Homo sapien
cggacgcgtacgcgacccgttccgc

SEQ ID NO: 5926190 - DNA, 25 bp, Homo sapien
caccggtacgcgacgtcgggtggcg

SEQ ID NO: 5926191 - DNA, 25 bp, Homo sapien
ggcaaggctcgcgtagcgggtcgcc

SEQ ID NO: 5926192 - DNA, 25 bp, Homo sapien
ccactcagtcgcggccgatggcggc

SEQ ID NO: 5926193 - DNA, 25 bp, Homo sapien
cggccatcggacgggttagcgcgcg

SEQ ID NO: 5926194 - DNA, 25 bp, Homo sapien
agtgggcctaaccgcgcgtcgccgc

SEQ ID NO: 5926195 - DNA, 25 bp, Homo sapien
cccgtccctgtacgcgcgagaggcc

SEQ ID NO: 5926196 - DNA, 25 bp, Homo sapien
gtgcggccgccgtatcgcggcgtag

SEQ ID NO: 5926197 - DNA, 25 bp, Homo sapien
cgacgctaccgcgggtagcgccagc

SEQ ID NO: 5926198 - DNA, 25 bp, Homo sapien
ggcgggtagggttgcgccgcatccg

SEQ ID NO: 5926199 - DNA, 25 bp, Homo sapien
agggcccgataggtacgcgcgcggc

SEQ ID NO: 5926200 - DNA, 25 bp, Homo sapien
ccgtgcgcgatcgaccgagaccgcg

SEQ ID NO: 5926201 - DNA, 25 bp, Homo sapien
gggccgacgaccggcggtaagcacg

SEQ ID NO: 5926202 - DNA, 25 bp, Homo sapien
cgtggtcgttcgcgcggtgccggac

SEQ ID NO: 5926203 - DNA, 25 bp, Homo sapien
gacgcgcgacgcgggctatgcccag

SEQ ID NO: 5926204 - DNA, 25 bp, Homo sapien
cggtggcgagggtcgacgtcacccc

SEQ ID NO: 5926205 - DNA, 25 bp, Homo sapien
cccccccctatcgcgcacgacggtg

SEQ ID NO: 5926206 - DNA, 25 bp, Homo sapien
gcacggccgaccgcggtagctgctg

SEQ ID NO: 5926207 - DNA, 25 bp, Homo sapien
ctagcgccgtcgtatgccggggccc

SEQ ID NO: 5926208 - DNA, 25 bp, Homo sapien
gcgcgggcgactcgcgcaaaagccc

SEQ ID NO: 5926209 - DNA, 25 bp, Homo sapien
gtcgccgtcgggtccgacccagtgc

SEQ ID NO: 5926210 - DNA, 25 bp, Homo sapien
gcggcacggggtccgtacggtggca

SEQ ID NO: 5926211 - DNA, 25 bp, Homo sapien
aggcccctcgcgtgcgtaggccacc

SEQ ID NO: 5926212 - DNA, 25 bp, Homo sapien
gtggaccggtagggcgtcggcgtcg

SEQ ID NO: 5926213 - DNA, 25 bp, Homo sapien
ccgcgcgcggacgtaacacgtgggg

SEQ ID NO: 5926214 - DNA, 25 bp, Homo sapien
ggggcaatcgccgcgcctaacgccc

SEQ ID NO: 5926215 - DNA, 25 bp, Homo sapien
ccgagccacgcgcgtacggtacggc

SEQ ID NO: 5926216 - DNA, 25 bp, Homo sapien
ctcggtatcgcggcccgtcgggctc

SEQ ID NO: 5926217 - DNA, 25 bp, Homo sapien
cccgtagtagggccgacgagcgccg

SEQ ID NO: 5926218 - DNA, 25 bp, Homo sapien
gcgagcccgtacgcgtgctgaccgc

SEQ ID NO: 5926219 - DNA, 25 bp, Homo sapien
gcggcctcgtcgagacgacgggctc

SEQ ID NO: 5926220 - DNA, 25 bp, Homo sapien
agtcggcgagtcgcaccggctcggg

SEQ ID NO: 5926221 - DNA, 25 bp, Homo sapien
gaggccgggtaatcgcgcgcgtgcc

SEQ ID NO: 5926222 - DNA, 25 bp, Homo sapien
cgagggtcgcgggtactcgctcggg

SEQ ID NO: 5926223 - DNA, 25 bp, Homo sapien
gaggggcgactaacgcgcgtcggcg

SEQ ID NO: 5926224 - DNA, 25 bp, Homo sapien
cctgggcgggggtacgcaccgatcg

SEQ ID NO: 5926225 - DNA, 25 bp, Homo sapien
agcgctcgccgtccgagtaggggcg

SEQ ID NO: 5926226 - DNA, 25 bp, Homo sapien
atgcggcggcgcccgatacaggccc

SEQ ID NO: 5926227 - DNA, 25 bp, Homo sapien
gaccgccgcgtgaacgatcccccgc

SEQ ID NO: 5926228 - DNA, 25 bp, Homo sapien
cgcgcgtatcgcggcgcacggtctg

SEQ ID NO: 5926229 - DNA, 25 bp, Homo sapien
gtgccccgcgtacgatccctggggg

SEQ ID NO: 5926230 - DNA, 25 bp, Homo sapien
gcgagagttcgtccgcgacgggggg

SEQ ID NO: 5926231 - DNA, 25 bp, Homo sapien
cccgcggtaccgcgacacgccaagc

SEQ ID NO: 5926232 - DNA, 25 bp, Homo sapien
caaggccacccgacgcgctcacggc

SEQ ID NO: 5926233 - DNA, 25 bp, Homo sapien
accgtcgcgtcgcgctagccgggca

SEQ ID NO: 5926234 - DNA, 25 bp, Homo sapien
gcggccgtacgatgcgcggcgttcg

SEQ ID NO: 5926235 - DNA, 25 bp, Homo sapien
agcgcccgttagtccgggcctcggc

SEQ ID NO: 5926236 - DNA, 25 bp, Homo sapien
ccgcctcgtcgcgcgcctatgccgt

SEQ ID NO: 5926237 - DNA, 25 bp, Homo sapien
cgcatggcgcctatacgccgcccgg

SEQ ID NO: 5926238 - DNA, 25 bp, Homo sapien
gcccggcgtagggggtcgcattggg

SEQ ID NO: 5926239 - DNA, 25 bp, Homo sapien
cggcgcgcggacgttcggtgagcac

SEQ ID NO: 5926240 - DNA, 25 bp, Homo sapien
gccgcccgttgcgaacccggcttgc

SEQ ID NO: 5926241 - DNA, 25 bp, Homo sapien
cggggcgcgcgacgacataccccac

SEQ ID NO: 5926242 - DNA, 25 bp, Homo sapien
gcagcccgccgttcgagccgcgaag

SEQ ID NO: 5926243 - DNA, 25 bp, Homo sapien
ctgcgccgggtagtacgcccgggct

SEQ ID NO: 5926244 - DNA, 25 bp, Homo sapien
ggaatcggcgcggtccgttggggcc

SEQ ID NO: 5926245 - DNA, 25 bp, Homo sapien
caggggcacgcggactcgtcgccct

SEQ ID NO: 5926246 - DNA, 25 bp, Homo sapien
gctcgcggtagtcgacgcggggacg

SEQ ID NO: 5926247 - DNA, 25 bp, Homo sapien
gcaccattcgcggtcgtgccgcgcg

SEQ ID NO: 5926248 - DNA, 25 bp, Homo sapien
ccccgacggcgtcgcgatacccgtc

SEQ ID NO: 5926249 - DNA, 25 bp, Homo sapien
gccctaacgagcggcacgcgctggg

SEQ ID NO: 5926250 - DNA, 25 bp, Homo sapien
ttcgggcgtagcgtccgctccccgc

SEQ ID NO: 5926251 - DNA, 25 bp, Homo sapien
ccctggcgcgacctagttggcgggg

SEQ ID NO: 5926252 - DNA, 25 bp, Homo sapien
ccgccgcccgcatacgacggaagcc

SEQ ID NO: 5926253 - DNA, 25 bp, Homo sapien
cgccggcgacgtacgcccttgcgag

SEQ ID NO: 5926254 - DNA, 25 bp, Homo sapien
tcgttcccgcgacgcgtaggcgggg

SEQ ID NO: 5926255 - DNA, 25 bp, Homo sapien
ggctgcccgctcgcgcgaagccaga

SEQ ID NO: 5926256 - DNA, 25 bp, Homo sapien
ggagcgtcgcgccgtagtcgacggc

SEQ ID NO: 5926257 - DNA, 25 bp, Homo sapien
gcacggacgaccgcgctgtcctggg

SEQ ID NO: 5926258 - DNA, 25 bp, Homo sapien
tgcggactatcggaccgcgcggcgc

SEQ ID NO: 5926259 - DNA, 25 bp, Homo sapien
cgagcggcccgtacgggatcccacg

SEQ ID NO: 5926260 - DNA, 25 bp, Homo sapien
tacgccgctagcgcggacgcggcgg

SEQ ID NO: 5926261 - DNA, 25 bp, Homo sapien
gcggccacggaccgtcggccgtcga

SEQ ID NO: 5926262 - DNA, 25 bp, Homo sapien
agggcgggatacgaccggccggcgc

SEQ ID NO: 5926263 - DNA, 25 bp, Homo sapien
cgcgtgccgcgagacgcgtcctgcc

SEQ ID NO: 5926264 - DNA, 25 bp, Homo sapien
ggctccgtcgagcgcacggtggccg

SEQ ID NO: 5926265 - DNA, 25 bp, Homo sapien
tggcccggcgcgtcaaccagccccg

SEQ ID NO: 5926266 - DNA, 25 bp, Homo sapien
ccgctgcggcccatacgcgcggagg

SEQ ID NO: 5926267 - DNA, 25 bp, Homo sapien
cccctgtcggcccgccgtacgctgc

SEQ ID NO: 5926268 - DNA, 25 bp, Homo sapien
tacgccgcccgatgtcgcgggggcg

SEQ ID NO: 5926269 - DNA, 25 bp, Homo sapien
cagccggctacgctccgcgacggcg

SEQ ID NO: 5926270 - DNA, 25 bp, Homo sapien
cgccgctacgtcggacggcccggag

SEQ ID NO: 5926271 - DNA, 25 bp, Homo sapien
cgccgaacggacgcgcgacgtcccc

SEQ ID NO: 5926272 - DNA, 25 bp, Homo sapien
cgtcggatacggcgcgcgtccgcgc

SEQ ID NO: 5926273 - DNA, 25 bp, Homo sapien
gcggcgccgccgtatcgcgcagcct

SEQ ID NO: 5926274 - DNA, 25 bp, Homo sapien
tcccgcccggtcgtaccggcgggca

SEQ ID NO: 5926275 - DNA, 25 bp, Homo sapien
gtggcccccgatagcggtcggcggc

SEQ ID NO: 5926276 - DNA, 25 bp, Homo sapien
ggggcgtaccgagcgggccctgagg

SEQ ID NO: 5926277 - DNA, 25 bp, Homo sapien
gggctcacgcgcggtactggcggcg

SEQ ID NO: 5926278 - DNA, 25 bp, Homo sapien
ggagcgcgggtagtgcggcccgctg

SEQ ID NO: 5926279 - DNA, 25 bp, Homo sapien
ccgcgcgcgtagcgccgtaccgcac

SEQ ID NO: 5926280 - DNA, 25 bp, Homo sapien
ccctccggccggacgcgtacagcgg

SEQ ID NO: 5926281 - DNA, 25 bp, Homo sapien
cggccggtcgcgtaggtgcgcctgc

SEQ ID NO: 5926282 - DNA, 25 bp, Homo sapien
actccccgacgctacgcgcggcgcg

SEQ ID NO: 5926283 - DNA, 25 bp, Homo sapien
cgcggccgcgtccgatccacccagg

SEQ ID NO: 5926284 - DNA, 25 bp, Homo sapien
tctggcggcggtcgcccgaacccgg

SEQ ID NO: 5926285 - DNA, 25 bp, Homo sapien
gggtcgccgaacgcggtcgagcgcc

SEQ ID NO: 5926286 - DNA, 25 bp, Homo sapien
ggccgcgcgcgtaccgctagccgag

SEQ ID NO: 5926287 - DNA, 25 bp, Homo sapien
caagggcggtcgacggtgcggggcg

SEQ ID NO: 5926288 - DNA, 25 bp, Homo sapien
ggcgcacgatgcggaccggctcccg

SEQ ID NO: 5926289 - DNA, 25 bp, Homo sapien
cggcacttcggcgagcgtcccggcg

SEQ ID NO: 5926290 - DNA, 25 bp, Homo sapien
ccagacgcgcgtccggactgccccg

SEQ ID NO: 5926291 - DNA, 25 bp, Homo sapien
ggcgacggcgcgttacggtccgcgc

SEQ ID NO: 5926292 - DNA, 25 bp, Homo sapien
tgtccgcggggccgttcgagcgccc

SEQ ID NO: 5926293 - DNA, 25 bp, Homo sapien
caggaccggacgcgcgttccgcccc

SEQ ID NO: 5926294 - DNA, 25 bp, Homo sapien
ccgcgcctacacgacgcgcgccgac

SEQ ID NO: 5926295 - DNA, 25 bp, Homo sapien
gctgcggtactgcaccgcggccgcc

SEQ ID NO: 5926296 - DNA, 25 bp, Homo sapien
gcgtgccgcgtcgaccggtcgccgt

SEQ ID NO: 5926297 - DNA, 25 bp, Homo sapien
gggccgcgcgacgtacgcgacctcg

SEQ ID NO: 5926298 - DNA, 25 bp, Homo sapien
gccacgcgcgcccgacgttgggcca

SEQ ID NO: 5926299 - DNA, 25 bp, Homo sapien
ggcgactacgttcggcgccggcgcg

SEQ ID NO: 5926300 - DNA, 25 bp, Homo sapien
cgcgctcgggcccgtacgacccacc

SEQ ID NO: 5926301 - DNA, 25 bp, Homo sapien
ccgcggtagcggaccggtgaggcgg

SEQ ID NO: 5926302 - DNA, 25 bp, Homo sapien
ccgggcgcgtatcacgcgctccggg

SEQ ID NO: 5926303 - DNA, 25 bp, Homo sapien
cgacgggtacgccggactccgcgcc

SEQ ID NO: 5926304 - DNA, 25 bp, Homo sapien
cggagcgcggcgcaacgtccggacc

SEQ ID NO: 5926305 - DNA, 25 bp, Homo sapien
ctgggcgtcgatcgcgggtccggcg

SEQ ID NO: 5926306 - DNA, 25 bp, Homo sapien
cgcagccgggcgcgaaacaggcgcg

SEQ ID NO: 5926307 - DNA, 25 bp, Homo sapien
ggcccgcgccgacggtctatcgccc

SEQ ID NO: 5926308 - DNA, 25 bp, Homo sapien
gctgcctcggcgcgggtacaggccg

SEQ ID NO: 5926309 - DNA, 25 bp, Homo sapien
agcggcggcgtatcacgcccgcccg

SEQ ID NO: 5926310 - DNA, 25 bp, Homo sapien
ccggccggcgcgccgtaagacctcg

SEQ ID NO: 5926311 - DNA, 25 bp, Homo sapien
cgggtctcaaacgggcgcgcccgcg

SEQ ID NO: 5926312 - DNA, 25 bp, Homo sapien
gcgcggacgggttacgccgggccac

SEQ ID NO: 5926313 - DNA, 25 bp, Homo sapien
gccaggcggaccgtcgcatgcccgc

SEQ ID NO: 5926314 - DNA, 25 bp, Homo sapien
gccggccgaccgacggggtgagacc

SEQ ID NO: 5926315 - DNA, 25 bp, Homo sapien
gggcgccgtcgcgcatctaccggcg

SEQ ID NO: 5926316 - DNA, 25 bp, Homo sapien
gggcgcctcatgcgcgcgacgcacc

SEQ ID NO: 5926317 - DNA, 25 bp, Homo sapien
ccgccctatcgcgccgcacacccgg

SEQ ID NO: 5926318 - DNA, 25 bp, Homo sapien
cgccacgcccgtacgccgtgacggc

SEQ ID NO: 5926319 - DNA, 25 bp, Homo sapien
acggcgcggtcgtgctacgcgccgg

SEQ ID NO: 5926320 - DNA, 25 bp, Homo sapien
gctgggcgcgtaggcccgaggccgt

SEQ ID NO: 5926321 - DNA, 25 bp, Homo sapien
tgccgcgtccacgtcgcgtcccccc

SEQ ID NO: 5926322 - DNA, 25 bp, Homo sapien
ggtccgtgtcgaccggtcggggcgc

SEQ ID NO: 5926323 - DNA, 25 bp, Homo sapien
gcgaggccgggccgttacgtgcgcg

SEQ ID NO: 5926324 - DNA, 25 bp, Homo sapien
ggacgcacgacgtcgcgcgctgcgc

SEQ ID NO: 5926325 - DNA, 25 bp, Homo sapien
gccgccgtacgagccggacgctcgc

SEQ ID NO: 5926326 - DNA, 25 bp, Homo sapien
gcccggcgcgtctgacggtccagcc

SEQ ID NO: 5926327 - DNA, 25 bp, Homo sapien
aggggctcggaccggccgtgctccc

SEQ ID NO: 5926328 - DNA, 25 bp, Homo sapien
ggccagtcgcgacgtaccggcgcgc

SEQ ID NO: 5926329 - DNA, 25 bp, Homo sapien
cggccccgcgctaggcgacagtcgg

SEQ ID NO: 5926330 - DNA, 25 bp, Homo sapien
ctcgcgggggtacgcgatccggcgg

SEQ ID NO: 5926331 - DNA, 25 bp, Homo sapien
ggctggcggacgttcgtgcccgcgg

SEQ ID NO: 5926332 - DNA, 25 bp, Homo sapien
gcgggcgtagcgtccgacgtcgggg

SEQ ID NO: 5926333 - DNA, 25 bp, Homo sapien
ccggcccgcacccgtaggacacgcg

SEQ ID NO: 5926334 - DNA, 25 bp, Homo sapien
ggcgcccagcgctcgtacggcccca

SEQ ID NO: 5926335 - DNA, 25 bp, Homo sapien
cggcacaggcgtacgcgcgcggcgt

SEQ ID NO: 5926336 - DNA, 25 bp, Homo sapien
ctgcccccgcgatcatgcggcgccc

SEQ ID NO: 5926337 - DNA, 25 bp, Homo sapien
cgggtctgcgccgtgacgcgcgcga

SEQ ID NO: 5926338 - DNA, 25 bp, Homo sapien
cgacgccgtaccggacgcggagccg

SEQ ID NO: 5926339 - DNA, 25 bp, Homo sapien
gcgtccgtgcgaccgcgcaaggccg

SEQ ID NO: 5926340 - DNA, 25 bp, Homo sapien
cccgagccgcgttgcggcagcctgg

SEQ ID NO: 5926341 - DNA, 25 bp, Homo sapien
ccggcgagacgtcggacgccggagc

SEQ ID NO: 5926342 - DNA, 25 bp, Homo sapien
cgctcctcgcccgacggggaggcga

SEQ ID NO: 5926343 - DNA, 25 bp, Homo sapien
ccgccgcgacccgccgtactggcga

SEQ ID NO: 5926344 - DNA, 25 bp, Homo sapien
cgggcgttagcgcgcctcacgcggg

SEQ ID NO: 5926345 - DNA, 25 bp, Homo sapien
ggcgccgcgtaggggcgaatccccg

SEQ ID NO: 5926346 - DNA, 25 bp, Homo sapien
cggccggtcgcaacgggccggagct

SEQ ID NO: 5926347 - DNA, 25 bp, Homo sapien
ccgcagcgatcgacacggggcgccc

SEQ ID NO: 5926348 - DNA, 25 bp, Homo sapien
cgcagggcgaaccgcgcagcaggcg

SEQ ID NO: 5926349 - DNA, 25 bp, Homo sapien
ccccgacgtacgcgatccgcccgcc

SEQ ID NO: 5926350 - DNA, 25 bp, Homo sapien
gggcgcctagcgtcgccggtgaggc

SEQ ID NO: 5926351 - DNA, 25 bp, Homo sapien
cctagggtgctcgcgcgaccccccg

SEQ ID NO: 5926352 - DNA, 25 bp, Homo sapien
cccgcctggtcgaccgcggacgtcc

SEQ ID NO: 5926353 - DNA, 25 bp, Homo sapien
gacgccgtcgcttcgcgacccccgg

SEQ ID NO: 5926354 - DNA, 25 bp, Homo sapien
gcggtgtgcgacggcccgtgcgcac

SEQ ID NO: 5926355 - DNA, 25 bp, Homo sapien
agcgggaccgccgtcggaccggtgc

SEQ ID NO: 5926356 - DNA, 25 bp, Homo sapien
gtccagcccccgcgatcgaccgggg

SEQ ID NO: 5926357 - DNA, 25 bp, Homo sapien
ggacgcgacacgaccgcgcgctccc

SEQ ID NO: 5926358 - DNA, 25 bp, Homo sapien
gcccggggtctacgcgcgtcgggtg

SEQ ID NO: 5926359 - DNA, 25 bp, Homo sapien
gcaccgtacggccgcgctaccccgg

SEQ ID NO: 5926360 - DNA, 25 bp, Homo sapien
cgcccgtaggacggcgcgcttgccc

SEQ ID NO: 5926361 - DNA, 25 bp, Homo sapien
gcaggccgtcagatcgcggggcgcg

SEQ ID NO: 5926362 - DNA, 25 bp, Homo sapien
ggcggcacgacgtagcgcgggcacg

SEQ ID NO: 5926363 - DNA, 25 bp, Homo sapien
gcccgcggcgcgtcgactactgcgg

SEQ ID NO: 5926364 - DNA, 25 bp, Homo sapien
cgcaggggccgcgcgataggcgctc

SEQ ID NO: 5926365 - DNA, 25 bp, Homo sapien
cgatggctaaggcgcgccgggccgg

SEQ ID NO: 5926366 - DNA, 25 bp, Homo sapien
ggctgtcgcgcaacggctcgggggc

SEQ ID NO: 5926367 - DNA, 25 bp, Homo sapien
ccccggcggtcgaacgcgtgcgcca

SEQ ID NO: 5926368 - DNA, 25 bp, Homo sapien
ggcggcccgggcgtcgtacttccgc

SEQ ID NO: 5926369 - DNA, 25 bp, Homo sapien
tcgtcgccggcataccgcgcccgcg

SEQ ID NO: 5926370 - DNA, 25 bp, Homo sapien
gcagcgtaccggcgacgctcgcccc

SEQ ID NO: 5926371 - DNA, 25 bp, Homo sapien
cctccgcctatgcgcgacgggccgg

SEQ ID NO: 5926372 - DNA, 25 bp, Homo sapien
gacgcctctacggcgcgccgctccc

SEQ ID NO: 5926373 - DNA, 25 bp, Homo sapien
agcgcctcgtaccggcgtgccgcgg

SEQ ID NO: 5926374 - DNA, 25 bp, Homo sapien
ccgcgactgtcgcgcgacgggccgt

SEQ ID NO: 5926375 - DNA, 25 bp, Homo sapien
ggcgcaccgacgcgagacccctgcc

SEQ ID NO: 5926376 - DNA, 25 bp, Homo sapien
cgccacgcgggcgtacgctacggcc

SEQ ID NO: 5926377 - DNA, 25 bp, Homo sapien
tcccgccgcgtacggggcacgcgca

SEQ ID NO: 5926378 - DNA, 25 bp, Homo sapien
ccccagaccggtcgcgagtcggcgg

SEQ ID NO: 5926379 - DNA, 25 bp, Homo sapien
cgcgcgcggtcgaccgactggcacg

SEQ ID NO: 5926380 - DNA, 25 bp, Homo sapien
gcggccccgacgcgtcgagatcggc

SEQ ID NO: 5926381 - DNA, 25 bp, Homo sapien
cgcgggcgtagcgcgtaccacggcc

SEQ ID NO: 5926382 - DNA, 25 bp, Homo sapien
gcggcctacgcacgacgggcgccct

SEQ ID NO: 5926383 - DNA, 25 bp, Homo sapien
ggctgacgtcaccggaccgcgcccg

SEQ ID NO: 5926384 - DNA, 25 bp, Homo sapien
cccgcgtctacgaccgcggccggtc

SEQ ID NO: 5926385 - DNA, 25 bp, Homo sapien
accggccgcgcggtcaaacggcggc

SEQ ID NO: 5926386 - DNA, 25 bp, Homo sapien
ggcccgacgcgatcgaccgaggccc

SEQ ID NO: 5926387 - DNA, 25 bp, Homo sapien
gcggctgtccgttcgcgcgtgcggg

SEQ ID NO: 5926388 - DNA, 25 bp, Homo sapien
gtccgccgagcgtatccccgcgcgc

SEQ ID NO: 5926389 - DNA, 25 bp, Homo sapien
gcggcaccgagccgttcgggcacgc

SEQ ID NO: 5926390 - DNA, 25 bp, Homo sapien
gcccccgacgcgtggtacgaggccc

SEQ ID NO: 5926391 - DNA, 25 bp, Homo sapien
tgcggcctacgggcgcgatgggggc

SEQ ID NO: 5926392 - DNA, 25 bp, Homo sapien
gcggcgccgatcgggtgcgcagagc

SEQ ID NO: 5926393 - DNA, 25 bp, Homo sapien
agtgcgccgctcgcgcgtacccccg

SEQ ID NO: 5926394 - DNA, 25 bp, Homo sapien
cagccgggctcgatgcgcgcccagg

SEQ ID NO: 5926395 - DNA, 25 bp, Homo sapien
cgggtgatagcgcggccggcacgcg

SEQ ID NO: 5926396 - DNA, 25 bp, Homo sapien
gaccgcccgtatcgcgccggggagc

SEQ ID NO: 5926397 - DNA, 25 bp, Homo sapien
cctgccggccggtatagcgcgcccc

SEQ ID NO: 5926398 - DNA, 25 bp, Homo sapien
cctgcggtacgcgcggtaccccggc

SEQ ID NO: 5926399 - DNA, 25 bp, Homo sapien
ccgcggcgcgcaactaccgagggcg

SEQ ID NO: 5926400 - DNA, 25 bp, Homo sapien
gagcggcccgacgtcgcaagcgggg

SEQ ID NO: 5926401 - DNA, 25 bp, Homo sapien
ggcagtgcgtacggccgagccgcgc

SEQ ID NO: 5926402 - DNA, 25 bp, Homo sapien
cacggacgtgtcgaccggcggccgg

SEQ ID NO: 5926403 - DNA, 25 bp, Homo sapien
gggccgcgatgcgctaccggagccg

SEQ ID NO: 5926404 - DNA, 25 bp, Homo sapien
ggccgggcgcgtagcggtactggcc

SEQ ID NO: 5926405 - DNA, 25 bp, Homo sapien
ccgccgatcgacggtcgcggggcga

SEQ ID NO: 5926406 - DNA, 25 bp, Homo sapien
gggggcagcgacggcctacgcccct

SEQ ID NO: 5926407 - DNA, 25 bp, Homo sapien
cccggggcgcgtcgtagccgacgtg

SEQ ID NO: 5926408 - DNA, 25 bp, Homo sapien
gcgcttcgcacgtcgaccgcggccg

SEQ ID NO: 5926409 - DNA, 25 bp, Homo sapien
cgcgccccgccggttaggcagcctg

SEQ ID NO: 5926410 - DNA, 25 bp, Homo sapien
gcaggcggtcgcgtgacggcccctg

SEQ ID NO: 5926411 - DNA, 25 bp, Homo sapien
cgtcccctcacgcgtaccgcggccc

SEQ ID NO: 5926412 - DNA, 25 bp, Homo sapien
gtcggcgggcgctaccgatcgcgcc

SEQ ID NO: 5926413 - DNA, 25 bp, Homo sapien
ccgccgcgaccgtcgtagccggtgc

SEQ ID NO: 5926414 - DNA, 25 bp, Homo sapien
gacgcgcgcgcaacgaccggcctcc

SEQ ID NO: 5926415 - DNA, 25 bp, Homo sapien
cccagagcggccggtcgatcccggg

SEQ ID NO: 5926416 - DNA, 25 bp, Homo sapien
caggcccgacgtcgggacggtgccg

SEQ ID NO: 5926417 - DNA, 25 bp, Homo sapien
ggggccgcgtccgcgtcgacgtgag

SEQ ID NO: 5926418 - DNA, 25 bp, Homo sapien
gctcaccgcgcgtcgatggggcccg

SEQ ID NO: 5926419 - DNA, 25 bp, Homo sapien
aggagcgtcgcgcaaccggcgcggg

SEQ ID NO: 5926420 - DNA, 25 bp, Homo sapien
gagggctagcggacgaccgccgggg

SEQ ID NO: 5926421 - DNA, 25 bp, Homo sapien
cgaccagtaccccgcgacggcgccc

SEQ ID NO: 5926422 - DNA, 25 bp, Homo sapien
ccgcggagtacgtaccgcgcgggcc

SEQ ID NO: 5926423 - DNA, 25 bp, Homo sapien
ccgcatgaacgtccccgcgccgggg

SEQ ID NO: 5926424 - DNA, 25 bp, Homo sapien
gcgggcacggacgcgtacccaccgg

SEQ ID NO: 5926425 - DNA, 25 bp, Homo sapien
gagcggcgtagcgtaggcgggcccc

SEQ ID NO: 5926426 - DNA, 25 bp, Homo sapien
ccggcattcagtcgcgcgggcgggc

SEQ ID NO: 5926427 - DNA, 25 bp, Homo sapien
cgtgggcgagcggtatcgcgcgggc

SEQ ID NO: 5926428 - DNA, 25 bp, Homo sapien
ccgccccccgaccgtacgcgagctg

SEQ ID NO: 5926429 - DNA, 25 bp, Homo sapien
gcgcgggccggcgtaagcgcggaga

SEQ ID NO: 5926430 - DNA, 25 bp, Homo sapien
ggtcgctgtaggcgcgccgcacccg

SEQ ID NO: 5926431 - DNA, 25 bp, Homo sapien
gcgccgcggccgcgacatagcgtgc

SEQ ID NO: 5926432 - DNA, 25 bp, Homo sapien
ccgtcgggtcgcgcgctagggaggg

SEQ ID NO: 5926433 - DNA, 25 bp, Homo sapien
ccgccgcccgtagaccggctcccag

SEQ ID NO: 5926434 - DNA, 25 bp, Homo sapien
gggggagtccacgcgcgaaggcggc

SEQ ID NO: 5926435 - DNA, 25 bp, Homo sapien
cgcgaccggacggtacgcgcagcgg

SEQ ID NO: 5926436 - DNA, 25 bp, Homo sapien
cgtgggcgacgcgcgacgactccgc

SEQ ID NO: 5926437 - DNA, 25 bp, Homo sapien
gcccgacgcgcgagtaccgtggggc

SEQ ID NO: 5926438 - DNA, 25 bp, Homo sapien
tcgtgggctcgaccgcgcaccggcg

SEQ ID NO: 5926439 - DNA, 25 bp, Homo sapien
cgacgcctgcgtacgaccgggcggg

SEQ ID NO: 5926440 - DNA, 25 bp, Homo sapien
gacccgcgcgcgtcggtacggctcc

SEQ ID NO: 5926441 - DNA, 25 bp, Homo sapien
gcgccgcggtacgtcgggatccggc

SEQ ID NO: 5926442 - DNA, 25 bp, Homo sapien
ccgggctgcggtcgtcccgtgctcc

SEQ ID NO: 5926443 - DNA, 25 bp, Homo sapien
cccggcgcggagcgacgtacgcgtc

SEQ ID NO: 5926444 - DNA, 25 bp, Homo sapien
ggtggccgcgcgtaccgcaccctgc

SEQ ID NO: 5926445 - DNA, 25 bp, Homo sapien
ggcgcgcgacctaacgcgggagcgg

SEQ ID NO: 5926446 - DNA, 25 bp, Homo sapien
cccgggctatggcgcgtcgcctccc

SEQ ID NO: 5926447 - DNA, 25 bp, Homo sapien
ccgggaggccgtcgcgctagctccg

SEQ ID NO: 5926448 - DNA, 25 bp, Homo sapien
gagggcggtccgcgcgtacggcggt

SEQ ID NO: 5926449 - DNA, 25 bp, Homo sapien
ggccacgcgtgctagcgccacgcgc

SEQ ID NO: 5926450 - DNA, 25 bp, Homo sapien
agcggggcgcgagcgtctacggcgc

SEQ ID NO: 5926451 - DNA, 25 bp, Homo sapien
ggcggccgcggtatcggcggtcctg

SEQ ID NO: 5926452 - DNA, 25 bp, Homo sapien
ctgggccgacggcccgtatgggccg

SEQ ID NO: 5926453 - DNA, 25 bp, Homo sapien
cggtccgggcgcgtaagccccagcg

SEQ ID NO: 5926454 - DNA, 25 bp, Homo sapien
gcgcgggaccggttacgcgccaggg

SEQ ID NO: 5926455 - DNA, 25 bp, Homo sapien
ggacggcggcctatacgcgcgggcc

SEQ ID NO: 5926456 - DNA, 25 bp, Homo sapien
cggcgtcgccccgcatacgggggtc

SEQ ID NO: 5926457 - DNA, 25 bp, Homo sapien
cgaccgcggcgtgccacgagaggcg

SEQ ID NO: 5926458 - DNA, 25 bp, Homo sapien
ggccggcgacggactacgccgggac

SEQ ID NO: 5926459 - DNA, 25 bp, Homo sapien
gggcaccgataccgcgcgtggccgg

SEQ ID NO: 5926460 - DNA, 25 bp, Homo sapien
ggcgggacgcgatcccggggccaag

SEQ ID NO: 5926461 - DNA, 25 bp, Homo sapien
cggggctcgcgtgtacggtccgccc

SEQ ID NO: 5926462 - DNA, 25 bp, Homo sapien
ccgccgtatcgcggaccgccgaccg

SEQ ID NO: 5926463 - DNA, 25 bp, Homo sapien
ccgtcctcgagtacgcgcccggccc

SEQ ID NO: 5926464 - DNA, 25 bp, Homo sapien
cgcggcatcgcgggcgtaccagggc

SEQ ID NO: 5926465 - DNA, 25 bp, Homo sapien
gtggcggcacgcgcgatagccggcg

SEQ ID NO: 5926466 - DNA, 25 bp, Homo sapien
gcaccccgccgtaggctcgggcctg

SEQ ID NO: 5926467 - DNA, 25 bp, Homo sapien
cactgggtcccgaccgcgtcggccc

SEQ ID NO: 5926468 - DNA, 25 bp, Homo sapien
ggcgccgcatccgtacgcggtgggc

SEQ ID NO: 5926469 - DNA, 25 bp, Homo sapien
ggccacacgctaggcgtcggcccgc

SEQ ID NO: 5926470 - DNA, 25 bp, Homo sapien
tgcgcgcacgcggagcgtacggccg

SEQ ID NO: 5926471 - DNA, 25 bp, Homo sapien
gggtcggtatcgcgccccgcaggcg

SEQ ID NO: 5926472 - DNA, 25 bp, Homo sapien
gcggcgtaccggtcgacgcgctgcg

SEQ ID NO: 5926473 - DNA, 25 bp, Homo sapien
ggcggcgtcgcccgtaacgagggcc

SEQ ID NO: 5926474 - DNA, 25 bp, Homo sapien
gcgcgggcgcgtagcgcgacagggt

SEQ ID NO: 5926475 - DNA, 25 bp, Homo sapien
gcccccgtacgttgcccgccgctcc

SEQ ID NO: 5926476 - DNA, 25 bp, Homo sapien
ccggcgcgctacgggcgactcgagg

SEQ ID NO: 5926477 - DNA, 25 bp, Homo sapien
cgtggccgtacggccgtgcagcggg

SEQ ID NO: 5926478 - DNA, 25 bp, Homo sapien
gcccgctcgacgtacgccggagggg

SEQ ID NO: 5926479 - DNA, 25 bp, Homo sapien
tggccgcgccgtaaccgggccgagg

SEQ ID NO: 5926480 - DNA, 25 bp, Homo sapien
gacggctacgcgcccccgtgtcggc

SEQ ID NO: 5926481 - DNA, 25 bp, Homo sapien
ccggcggtcgcgctacgcgccggta

SEQ ID NO: 5926482 - DNA, 25 bp, Homo sapien
acccggcgcgcgtcatagccggccc

SEQ ID NO: 5926483 - DNA, 25 bp, Homo sapien
tccggccgctcgtacggccgaccgg

SEQ ID NO: 5926484 - DNA, 25 bp, Homo sapien
gcccgccgtaacgtcccgacgcgcg

SEQ ID NO: 5926485 - DNA, 25 bp, Homo sapien
cggcgccatactcgcgcgggcaccg

SEQ ID NO: 5926486 - DNA, 25 bp, Homo sapien
tggcacgggtcgggtacgccggccg

SEQ ID NO: 5926487 - DNA, 25 bp, Homo sapien
cgggcccaaccgcgccgtatggcgg

SEQ ID NO: 5926488 - DNA, 25 bp, Homo sapien
gccactccgcgtagcggcaggccgg

SEQ ID NO: 5926489 - DNA, 25 bp, Homo sapien
tgcgcgcgcgactactcgggcgccg

SEQ ID NO: 5926490 - DNA, 25 bp, Homo sapien
cccccacgtcgcggaccgtgggcag

SEQ ID NO: 5926491 - DNA, 25 bp, Homo sapien
cgcccacgtaccgccctcgaggccg

SEQ ID NO: 5926492 - DNA, 25 bp, Homo sapien
cgcgcacgcgtagcgacccgctcgc

SEQ ID NO: 5926493 - DNA, 25 bp, Homo sapien
ggcggctcgcgacaacggggccgtg

SEQ ID NO: 5926494 - DNA, 25 bp, Homo sapien
gggtagcgcggcgtcgagagcccgc

SEQ ID NO: 5926495 - DNA, 25 bp, Homo sapien
gcacgccgacggtagccgggctggc

SEQ ID NO: 5926496 - DNA, 25 bp, Homo sapien
gaggggttatcgcgcgcggccggcc

SEQ ID NO: 5926497 - DNA, 25 bp, Homo sapien
ccaccgggtcgcacgcgaacgcgcg

SEQ ID NO: 5926498 - DNA, 25 bp, Homo sapien
ggggacctgaccgcgcgtacggccg

SEQ ID NO: 5926499 - DNA, 25 bp, Homo sapien
cgggctgatcggctcgcgacgcgcg

SEQ ID NO: 5926500 - DNA, 25 bp, Homo sapien
tcggcgaccgaccgcggatgcccgc

SEQ ID NO: 5926501 - DNA, 25 bp, Homo sapien
ggttggccgcgcgtatggggccggc

SEQ ID NO: 5926502 - DNA, 25 bp, Homo sapien
cgcggcgcccgtacgacggcggtac

SEQ ID NO: 5926503 - DNA, 25 bp, Homo sapien
cttggcggcggtacgccgaggcggg

SEQ ID NO: 5926504 - DNA, 25 bp, Homo sapien
cgcgcaggtcgtgccgacgcggctg

SEQ ID NO: 5926505 - DNA, 25 bp, Homo sapien
ccccggcgcgatagacgccgctgcc

SEQ ID NO: 5926506 - DNA, 25 bp, Homo sapien
gggccccggcctcgcgtactgccag

SEQ ID NO: 5926507 - DNA, 25 bp, Homo sapien
gcggcccgtacggtcggccagccct

SEQ ID NO: 5926508 - DNA, 25 bp, Homo sapien
cggtcgcgtcgcgtatggggggccc

SEQ ID NO: 5926509 - DNA, 25 bp, Homo sapien
gcccactatgtcgcgcccccgggcc

SEQ ID NO: 5926510 - DNA, 25 bp, Homo sapien
cgcgcgtctcgacgcccgacgtggg

SEQ ID NO: 5926511 - DNA, 25 bp, Homo sapien
tggcctcccgcgtacggtgcggccc

SEQ ID NO: 5926512 - DNA, 25 bp, Homo sapien
ggcggccgaagcggaccgtgcccgt

SEQ ID NO: 5926513 - DNA, 25 bp, Homo sapien
gtcgccggcgtacgcgtgagcgccg

SEQ ID NO: 5926514 - DNA, 25 bp, Homo sapien
gcccgcgggccatacgtcgggcgct

SEQ ID NO: 5926515 - DNA, 25 bp, Homo sapien
gcggcccgcggacgatccactcccc

SEQ ID NO: 5926516 - DNA, 25 bp, Homo sapien
gtgcgggcggcccgcgtatcgcgca

SEQ ID NO: 5926517 - DNA, 25 bp, Homo sapien
gggcggacggtaaccggcgcaggcc

SEQ ID NO: 5926518 - DNA, 25 bp, Homo sapien
ggcccttaccggcacgtcgcgccgg

SEQ ID NO: 5926519 - DNA, 25 bp, Homo sapien
ggacccgcgcgtatccccggcccca

SEQ ID NO: 5926520 - DNA, 25 bp, Homo sapien
ccgcgcgaggcgcgtcgtagcacgg

SEQ ID NO: 5926521 - DNA, 25 bp, Homo sapien
gaggggcgtcgcgtaggcccgtcgc

SEQ ID NO: 5926522 - DNA, 25 bp, Homo sapien
ggcccgctgtagcgcgcgactcccc

SEQ ID NO: 5926523 - DNA, 25 bp, Homo sapien
cggccgtcgcccggccgttcagagg

SEQ ID NO: 5926524 - DNA, 25 bp, Homo sapien
agcggccggacgcgcgtaccggcct

SEQ ID NO: 5926525 - DNA, 25 bp, Homo sapien
ggccctccgtcgcgcatgtcggcgg

SEQ ID NO: 5926526 - DNA, 25 bp, Homo sapien
gcggcccccgccgtacgacacccac

SEQ ID NO: 5926527 - DNA, 25 bp, Homo sapien
cgagccgcggaccttacgccgcccc

SEQ ID NO: 5926528 - DNA, 25 bp, Homo sapien
gcgcccatcgacgctcgcggcaggc

SEQ ID NO: 5926529 - DNA, 25 bp, Homo sapien
cgacggcttagtcgcgccgcgcgcg

SEQ ID NO: 5926530 - DNA, 25 bp, Homo sapien
gctggctgcgccggtacgcgcccac

SEQ ID NO: 5926531 - DNA, 25 bp, Homo sapien
gggaggacgcccgtccgaagccgcc

SEQ ID NO: 5926532 - DNA, 25 bp, Homo sapien
ggtgggcggtcgatcccgcaccggg

SEQ ID NO: 5926533 - DNA, 25 bp, Homo sapien
gacccgtgtcggtagcgcgccgcgc

SEQ ID NO: 5926534 - DNA, 25 bp, Homo sapien
gccgtgatccgccccgctacgccgc

SEQ ID NO: 5926535 - DNA, 25 bp, Homo sapien
agggggcgtctagcgcgagcccggc

SEQ ID NO: 5926536 - DNA, 25 bp, Homo sapien
cgcccgcccggttgcgacgctgtgg

SEQ ID NO: 5926537 - DNA, 25 bp, Homo sapien
ggccccacgcggagtatgccccggg

SEQ ID NO: 5926538 - DNA, 25 bp, Homo sapien
ccggccgcggcgtacgtcgacagcc

SEQ ID NO: 5926539 - DNA, 25 bp, Homo sapien
gctgccggtacgcgcctcggcccct

SEQ ID NO: 5926540 - DNA, 25 bp, Homo sapien
gctccccgctcgacgcacggagggg

SEQ ID NO: 5926541 - DNA, 25 bp, Homo sapien
ggcgctaccgtaccggcgggctcgg

SEQ ID NO: 5926542 - DNA, 25 bp, Homo sapien
ggggccagccctatcgcgccggtcg

SEQ ID NO: 5926543 - DNA, 25 bp, Homo sapien
cgcggcgcaacggtcgcgtgaggcg

SEQ ID NO: 5926544 - DNA, 25 bp, Homo sapien
tgcgccccgcgacgtaccgccccgt

SEQ ID NO: 5926545 - DNA, 25 bp, Homo sapien
cccggctcgtgcgcgcgaaagggcg

SEQ ID NO: 5926546 - DNA, 25 bp, Homo sapien
gtcggcggcgtagcgtacggccgcg

SEQ ID NO: 5926547 - DNA, 25 bp, Homo sapien
tcgggcgcggttcgcgcctccccga

SEQ ID NO: 5926548 - DNA, 25 bp, Homo sapien
gcggcgtcgcgaccgcactcgcctg

SEQ ID NO: 5926549 - DNA, 25 bp, Homo sapien
ccggcgttcgccctagcgcgctggc

SEQ ID NO: 5926550 - DNA, 25 bp, Homo sapien
gcgcgctacgcgggccgagctggac

SEQ ID NO: 5926551 - DNA, 25 bp, Homo sapien
aggccggtcgacgtccgcgcagcgc

SEQ ID NO: 5926552 - DNA, 25 bp, Homo sapien
gccccacgccagtacgcgaggcgcg

SEQ ID NO: 5926553 - DNA, 25 bp, Homo sapien
cggccctcgcgcggcatacgtcccc

SEQ ID NO: 5926554 - DNA, 25 bp, Homo sapien
cgcgggcgttacgagccgggccgga

SEQ ID NO: 5926555 - DNA, 25 bp, Homo sapien
ccagccccgcgcatgcgaccggcgt

SEQ ID NO: 5926556 - DNA, 25 bp, Homo sapien
cgggccgacgtcgcgcgtaccggca

SEQ ID NO: 5926557 - DNA, 25 bp, Homo sapien
cgcgctgcgtaccccgtcgcgcagg

SEQ ID NO: 5926558 - DNA, 25 bp, Homo sapien
cgcggctccgcgacacgacgaggcc

SEQ ID NO: 5926559 - DNA, 25 bp, Homo sapien
cccgggtcgcgcatgacggcggacc

SEQ ID NO: 5926560 - DNA, 25 bp, Homo sapien
gacccctacgcggcacggggaggcg

SEQ ID NO: 5926561 - DNA, 25 bp, Homo sapien
ggtgcgcgcttacggcgtccccccc

SEQ ID NO: 5926562 - DNA, 25 bp, Homo sapien
ggacggcgcgggacgcaacgggcag

SEQ ID NO: 5926563 - DNA, 25 bp, Homo sapien
gcccgctcgccccgtaggcaacggg

SEQ ID NO: 5926564 - DNA, 25 bp, Homo sapien
cggtgccgtcgcgtaccgagcccgc

SEQ ID NO: 5926565 - DNA, 25 bp, Homo sapien
ccacagcgacgcctagccgggggcc

SEQ ID NO: 5926566 - DNA, 25 bp, Homo sapien
ggcgcatgctcgcgaacggcgcgcg

SEQ ID NO: 5926567 - DNA, 25 bp, Homo sapien
gcgccctgcgcgacggacctgacgc

SEQ ID NO: 5926568 - DNA, 25 bp, Homo sapien
gtcggcgtaacggcgcgccgctggc

SEQ ID NO: 5926569 - DNA, 25 bp, Homo sapien
ccgcacgtacgggcccgcagcgacg

SEQ ID NO: 5926570 - DNA, 25 bp, Homo sapien
gcaggccgactagcccgcggggacc

SEQ ID NO: 5926571 - DNA, 25 bp, Homo sapien
cggcccgcgcaacggtcgagggcag

SEQ ID NO: 5926572 - DNA, 25 bp, Homo sapien
tcgggcggcttacgcgcggcctccg

SEQ ID NO: 5926573 - DNA, 25 bp, Homo sapien
gccgggggtctcgtgcgaccccacg

SEQ ID NO: 5926574 - DNA, 25 bp, Homo sapien
aggcggagcgtcgtcccgcccctgg

SEQ ID NO: 5926575 - DNA, 25 bp, Homo sapien
ccgccgcggtcgcctcataggccgc

SEQ ID NO: 5926576 - DNA, 25 bp, Homo sapien
ccaccctcgtacgggcgtcgccgcg

SEQ ID NO: 5926577 - DNA, 25 bp, Homo sapien
cccggacgcgcgaccattgcccccc

SEQ ID NO: 5926578 - DNA, 25 bp, Homo sapien
gagccccccgacgcgagacgggtcc

SEQ ID NO: 5926579 - DNA, 25 bp, Homo sapien
gcgaagtcgtagggcgcgcggcggc

SEQ ID NO: 5926580 - DNA, 25 bp, Homo sapien
ccaggccgcgctacccgatcggggg

SEQ ID NO: 5926581 - DNA, 25 bp, Homo sapien
cgggcgcgcccgcgttagaacccgc

SEQ ID NO: 5926582 - DNA, 25 bp, Homo sapien
gcagcccgacccgtgtcggcggcgt

SEQ ID NO: 5926583 - DNA, 25 bp, Homo sapien
cacgcgcgatggtacggcgcgccgc

SEQ ID NO: 5926584 - DNA, 25 bp, Homo sapien
gggcgccgacctatgggcgtgcgcc

SEQ ID NO: 5926585 - DNA, 25 bp, Homo sapien
cacagcatcggacggccgcggcgcg

SEQ ID NO: 5926586 - DNA, 25 bp, Homo sapien
cggtccgcgctagcgcaccgcggtg

SEQ ID NO: 5926587 - DNA, 25 bp, Homo sapien
cctcgccgacgccgaccgtgtgccg

SEQ ID NO: 5926588 - DNA, 25 bp, Homo sapien
ttcgccgtacgacggccccgcgcgc

SEQ ID NO: 5926589 - DNA, 25 bp, Homo sapien
ggcctgccgacggaccggtccgtgc

SEQ ID NO: 5926590 - DNA, 25 bp, Homo sapien
gcccggcgaggcggtccgtacccag

SEQ ID NO: 5926591 - DNA, 25 bp, Homo sapien
gctcgggtcgcgccgaactcggggg

SEQ ID NO: 5926592 - DNA, 25 bp, Homo sapien
tcgcggcccggtgcgtcgtgctggc

SEQ ID NO: 5926593 - DNA, 25 bp, Homo sapien
acgcgcgtggtccgcgctagggcgg

SEQ ID NO: 5926594 - DNA, 25 bp, Homo sapien
gggcagtacggccgacgacggcccc

SEQ ID NO: 5926595 - DNA, 25 bp, Homo sapien
cgagagtcgggcgtacccggcgcgg

SEQ ID NO: 5926596 - DNA, 25 bp, Homo sapien
cgccgcggacgtacgtccgccagcg

SEQ ID NO: 5926597 - DNA, 25 bp, Homo sapien
cccaccacgttcgaccgccgcgcgc

SEQ ID NO: 5926598 - DNA, 25 bp, Homo sapien
ggggcgccggtcgagcgttgctggc

SEQ ID NO: 5926599 - DNA, 25 bp, Homo sapien
tgcctctccgcggtccgacggcggg

SEQ ID NO: 5926600 - DNA, 25 bp, Homo sapien
ggcccgtacgaccgcgcagcgctgc

SEQ ID NO: 5926601 - DNA, 25 bp, Homo sapien
ccgggccacgtcgcgcgacagtgcc

SEQ ID NO: 5926602 - DNA, 25 bp, Homo sapien
gccgccgcgtacgcggatccacccc

SEQ ID NO: 5926603 - DNA, 25 bp, Homo sapien
cgccagtcgtaccgccgggcgcgtg

SEQ ID NO: 5926604 - DNA, 25 bp, Homo sapien
cgcgggacaccggtcgcggtgggca

SEQ ID NO: 5926605 - DNA, 25 bp, Homo sapien
cggcgtcgccgcgtaagacgcccgg

SEQ ID NO: 5926606 - DNA, 25 bp, Homo sapien
gagccccgccggaccgatcgcgctg

SEQ ID NO: 5926607 - DNA, 25 bp, Homo sapien
gctcggggtagtcggaccgggccgc

SEQ ID NO: 5926608 - DNA, 25 bp, Homo sapien
ctggggccgtcatcgggcggccgac

SEQ ID NO: 5926609 - DNA, 25 bp, Homo sapien
gccgcccgtatgggcgccgcttgcc

SEQ ID NO: 5926610 - DNA, 25 bp, Homo sapien
cgcgcccgctagcgcgaggacggga

SEQ ID NO: 5926611 - DNA, 25 bp, Homo sapien
gcgcgcacgcgttagaccgccgcgg

SEQ ID NO: 5926612 - DNA, 25 bp, Homo sapien
cgtcccatcgcgcggactggcgcgg

SEQ ID NO: 5926613 - DNA, 25 bp, Homo sapien
agcgcctagacggcacgcggcccgg

SEQ ID NO: 5926614 - DNA, 25 bp, Homo sapien
gccccaagacgtgcgacgcgccggg

SEQ ID NO: 5926615 - DNA, 25 bp, Homo sapien
cacggcataccgacgcgcgccgcgg

SEQ ID NO: 5926616 - DNA, 25 bp, Homo sapien
ggcgcgctcggcccgtacgtctggc

SEQ ID NO: 5926617 - DNA, 25 bp, Homo sapien
ccaccccgacgcctatccgcgggcg

SEQ ID NO: 5926618 - DNA, 25 bp, Homo sapien
cgagcggcggtacgtcggacgggcg

SEQ ID NO: 5926619 - DNA, 25 bp, Homo sapien
gcgcgcgtcgcgggccgtagcgtag

SEQ ID NO: 5926620 - DNA, 25 bp, Homo sapien
gttgccacgggccgtcgcacccggc

SEQ ID NO: 5926621 - DNA, 25 bp, Homo sapien
gcgcacgtcgagccgcacccgtggc

SEQ ID NO: 5926622 - DNA, 25 bp, Homo sapien
ggcggcgcgcgccgattaggcccac

SEQ ID NO: 5926623 - DNA, 25 bp, Homo sapien
ggccgccgccgacgtacgctgcggt

SEQ ID NO: 5926624 - DNA, 25 bp, Homo sapien
gcacgtcggtaccgacgcggcgcgg

SEQ ID NO: 5926625 - DNA, 25 bp, Homo sapien
gcggagcgaccgtgcgggtctgggc

SEQ ID NO: 5926626 - DNA, 25 bp, Homo sapien
caggcccgaccggcatcgccctgcc

SEQ ID NO: 5926627 - DNA, 25 bp, Homo sapien
caggcgtaggggccgcccgtcgtcg

SEQ ID NO: 5926628 - DNA, 25 bp, Homo sapien
gcccgtcgctacggcccgtcgtccc

SEQ ID NO: 5926629 - DNA, 25 bp, Homo sapien
gggccgcgtcccgtcacgacgctgc

SEQ ID NO: 5926630 - DNA, 25 bp, Homo sapien
gggtgaaccgcggcgcgtagcccgg

SEQ ID NO: 5926631 - DNA, 25 bp, Homo sapien
cggcggactacgcgcgggaggtcgg

SEQ ID NO: 5926632 - DNA, 25 bp, Homo sapien
gggcgctacgcgcggtcgactgcgc

SEQ ID NO: 5926633 - DNA, 25 bp, Homo sapien
aggcgctaccgcggagcggcgaggg

SEQ ID NO: 5926634 - DNA, 25 bp, Homo sapien
cctccccgccacgagcgacccctgg

SEQ ID NO: 5926635 - DNA, 25 bp, Homo sapien
ccccgggcgccgatacgtccgcacg

SEQ ID NO: 5926636 - DNA, 25 bp, Homo sapien
cgcgagtgccgttcgacgggccgcg

SEQ ID NO: 5926637 - DNA, 25 bp, Homo sapien
ccttggccgtaacgcgcgcgcgccc

SEQ ID NO: 5926638 - DNA, 25 bp, Homo sapien
cctcgcaccggcgtccgaacgcgcc

SEQ ID NO: 5926639 - DNA, 25 bp, Homo sapien
ccccgacgggcgcgagtagcgcacg

SEQ ID NO: 5926640 - DNA, 25 bp, Homo sapien
cgtgcgggtagcgcggacggcgcac

SEQ ID NO: 5926641 - DNA, 25 bp, Homo sapien
cgctgccggtcggcgtaccggcgtg

SEQ ID NO: 5926642 - DNA, 25 bp, Homo sapien
agacggcggaccggcgtacggccgc

SEQ ID NO: 5926643 - DNA, 25 bp, Homo sapien
cccccgcgcggacctaggccaagcc

SEQ ID NO: 5926644 - DNA, 25 bp, Homo sapien
agcgcctgcgcgaccgtagcccgcg

SEQ ID NO: 5926645 - DNA, 25 bp, Homo sapien
gctggtgtcgcgaaggcgccgggcg

SEQ ID NO: 5926646 - DNA, 25 bp, Homo sapien
gcccgctcgcgcgcaggtaccccac

SEQ ID NO: 5926647 - DNA, 25 bp, Homo sapien
ccagggcggcggtcgcgtaagccgg

SEQ ID NO: 5926648 - DNA, 25 bp, Homo sapien
gggccggcctcgcgatacggacccc

SEQ ID NO: 5926649 - DNA, 25 bp, Homo sapien
cctgccggttcgtcgcgacgcgccc

SEQ ID NO: 5926650 - DNA, 25 bp, Homo sapien
gcccgccgccgcgcgatatcctcgg

SEQ ID NO: 5926651 - DNA, 25 bp, Homo sapien
agccgccctatcgtcgggcgcccgc

SEQ ID NO: 5926652 - DNA, 25 bp, Homo sapien
gagcgggcgcggctacgtagccggg

SEQ ID NO: 5926653 - DNA, 25 bp, Homo sapien
gcacggacgcgggatgtcgcccgcg

SEQ ID NO: 5926654 - DNA, 25 bp, Homo sapien
gcccgcacacacggcgtcggacggc

SEQ ID NO: 5926655 - DNA, 25 bp, Homo sapien
cggtgccggtcgcgccgtagggcca

SEQ ID NO: 5926656 - DNA, 25 bp, Homo sapien
ttggcgccgcgggtcgacgggcctc

SEQ ID NO: 5926657 - DNA, 25 bp, Homo sapien
gccccggggtacgacgcggccatcg

SEQ ID NO: 5926658 - DNA, 25 bp, Homo sapien
tgggcggctagcggtacgcgccccg

SEQ ID NO: 5926659 - DNA, 25 bp, Homo sapien
gccagaatcgggccggtcgggcgcg

SEQ ID NO: 5926660 - DNA, 25 bp, Homo sapien
ctcccgccacgtatccgcgccgcgg

SEQ ID NO: 5926661 - DNA, 25 bp, Homo sapien
gcaccccgcgcgactcgtccggctc

SEQ ID NO: 5926662 - DNA, 25 bp, Homo sapien
tgagcccgacccgtcggtcgcgcgg

SEQ ID NO: 5926663 - DNA, 25 bp, Homo sapien
gcgtgggacccgcgtaccgggcacg

SEQ ID NO: 5926664 - DNA, 25 bp, Homo sapien
cgggcccgccgatctacggtgggcg

SEQ ID NO: 5926665 - DNA, 25 bp, Homo sapien
cccgcgccggactagtcgcacgccg

SEQ ID NO: 5926666 - DNA, 25 bp, Homo sapien
gccccggctacgcgcgcatagcccc

SEQ ID NO: 5926667 - DNA, 25 bp, Homo sapien
cacgccggtacgccgaccggcagcg

SEQ ID NO: 5926668 - DNA, 25 bp, Homo sapien
cgccgggacgctcgccgaagtgccg

SEQ ID NO: 5926669 - DNA, 25 bp, Homo sapien
gcagggtgcggtacgcgcggccacc

SEQ ID NO: 5926670 - DNA, 25 bp, Homo sapien
caggctgcctaaccggcggggcgcg

SEQ ID NO: 5926671 - DNA, 25 bp, Homo sapien
ggtccccgcgggctagtcggcctgc

SEQ ID NO: 5926672 - DNA, 25 bp, Homo sapien
cgcgcgcggcgcgactaagccgtcg

SEQ ID NO: 5926673 - DNA, 25 bp, Homo sapien
gcgagcgtccggctcgtacggcggc

SEQ ID NO: 5926674 - DNA, 25 bp, Homo sapien
cgcgccgcggccgtccgatgctgtg

SEQ ID NO: 5926675 - DNA, 25 bp, Homo sapien
ccgggcgtcttacgcggcgacgccg

SEQ ID NO: 5926676 - DNA, 25 bp, Homo sapien
cggccgtacgcgcggtcaggtcccc

SEQ ID NO: 5926677 - DNA, 25 bp, Homo sapien
ggcaggacgcgtctcgcggcacgcg

SEQ ID NO: 5926678 - DNA, 25 bp, Homo sapien
ggggcgagcgtcgccggtacgctgc

SEQ ID NO: 5926679 - DNA, 25 bp, Homo sapien
gcgtcaggtccgtcgcgcagggcgc

SEQ ID NO: 5926680 - DNA, 25 bp, Homo sapien
gcagcgtcgtgacgggacgcggccc

SEQ ID NO: 5926681 - DNA, 25 bp, Homo sapien
cggcctgtacccgcgccgaggcagc

SEQ ID NO: 5926682 - DNA, 25 bp, Homo sapien
gcctgccgcgagcgtcgatgggcgc

SEQ ID NO: 5926683 - DNA, 25 bp, Homo sapien
taccggcgcgtagcgcgaccgccgg

SEQ ID NO: 5926684 - DNA, 25 bp, Homo sapien
cccgcgccggttgcgcgacgctcct

SEQ ID NO: 5926685 - DNA, 25 bp, Homo sapien
agcgcccgacgtatggcccgcgggc

SEQ ID NO: 5926686 - DNA, 25 bp, Homo sapien
ccgagcccgccggtacggtagcgcc

SEQ ID NO: 5926687 - DNA, 25 bp, Homo sapien
ccgctcccgcgttaggtcgcgcgcc

SEQ ID NO: 5926688 - DNA, 25 bp, Homo sapien
cgggccccatcgacgcgcggtgagc

SEQ ID NO: 5926689 - DNA, 25 bp, Homo sapien
caggggccgtcacgcgaccgcctgc

SEQ ID NO: 5926690 - DNA, 25 bp, Homo sapien
cgggagccggtccgcatcgtgcgcc

SEQ ID NO: 5926691 - DNA, 25 bp, Homo sapien
gccgatctcgacgcgtcggggccgc

SEQ ID NO: 5926692 - DNA, 25 bp, Homo sapien
ggcctgcgccggttaccgtccgccc

SEQ ID NO: 5926693 - DNA, 25 bp, Homo sapien
cgcctgcggggcgcgataccgaccc

SEQ ID NO: 5926694 - DNA, 25 bp, Homo sapien
cccgttgcctacggggcgagcgggc

SEQ ID NO: 5926695 - DNA, 25 bp, Homo sapien
gcgggctctcgacgccgcgctaccc

SEQ ID NO: 5926696 - DNA, 25 bp, Homo sapien
aggggcgtaggccgtcgctgccccc

SEQ ID NO: 5926697 - DNA, 25 bp, Homo sapien
cccctccggcgtacgtcgagcgggc

SEQ ID NO: 5926698 - DNA, 25 bp, Homo sapien
ccgtgctacgacgcgcctcgcgcgg

SEQ ID NO: 5926699 - DNA, 25 bp, Homo sapien
cgcctgctgcgcggttcgccctgcg

SEQ ID NO: 5926700 - DNA, 25 bp, Homo sapien
ccggccacgcgcggtatcggtgccc

SEQ ID NO: 5926701 - DNA, 25 bp, Homo sapien
cggccggcgtacccgacccgtgcca

SEQ ID NO: 5926702 - DNA, 25 bp, Homo sapien
gagcgcctatcgcgcggcccctgcg

SEQ ID NO: 5926703 - DNA, 25 bp, Homo sapien
cgcctcacgcgaccgttgcgccgcg

SEQ ID NO: 5926704 - DNA, 25 bp, Homo sapien
gccacgggtgcggctcgacgtgcgc

SEQ ID NO: 5926705 - DNA, 25 bp, Homo sapien
cagcgggccgcactacccgcgctcc

SEQ ID NO: 5926706 - DNA, 25 bp, Homo sapien
cggggctggttgacgcgccgggcca

SEQ ID NO: 5926707 - DNA, 25 bp, Homo sapien
ggggggcaatggtcgcgcgtccggg

SEQ ID NO: 5926708 - DNA, 25 bp, Homo sapien
gccagcggcgcgccgttacgccgac

SEQ ID NO: 5926709 - DNA, 25 bp, Homo sapien
gccgccgaccgctatcgggggccac

SEQ ID NO: 5926710 - DNA, 25 bp, Homo sapien
ggcgcgatcggtagcgcccgccgac

SEQ ID NO: 5926711 - DNA, 25 bp, Homo sapien
tggggccgtacgagcgctgggcgcc

SEQ ID NO: 5926712 - DNA, 25 bp, Homo sapien
ggccgtggtacgcgctacgcccgcg

SEQ ID NO: 5926713 - DNA, 25 bp, Homo sapien
cgcgggcgcggtatgccggcgacga

SEQ ID NO: 5926714 - DNA, 25 bp, Homo sapien
ggcgggcggatcgcgtacgtcgggg

SEQ ID NO: 5926715 - DNA, 25 bp, Homo sapien
cggagctagcgcgacggcctcccgg

SEQ ID NO: 5926716 - DNA, 25 bp, Homo sapien
tccggcccggctcgtaacgcccgcg

SEQ ID NO: 5926717 - DNA, 25 bp, Homo sapien
ccccgacgtcggacgctacgcccgc

SEQ ID NO: 5926718 - DNA, 25 bp, Homo sapien
gccccacggtactcgcgcgtcgggc

SEQ ID NO: 5926719 - DNA, 25 bp, Homo sapien
cggggggtcgcgcgagcaccctagg

SEQ ID NO: 5926720 - DNA, 25 bp, Homo sapien
cctcagggcccgctcggtacgcccc

SEQ ID NO: 5926721 - DNA, 25 bp, Homo sapien
gggcggaccgtacacgcgagccccg

SEQ ID NO: 5926722 - DNA, 25 bp, Homo sapien
cgcccccgcgacatcgggcggcgta

SEQ ID NO: 5926723 - DNA, 25 bp, Homo sapien
agggcgcccgtcgtgcgtaggccgc

SEQ ID NO: 5926724 - DNA, 25 bp, Homo sapien
gaggcccgtcgacccgcggcgccaa

SEQ ID NO: 5926725 - DNA, 25 bp, Homo sapien
cagcgcgatcggtccggcggggctc

SEQ ID NO: 5926726 - DNA, 25 bp, Homo sapien
acgccgccgacacgggtcgggctgc

SEQ ID NO: 5926727 - DNA, 25 bp, Homo sapien
gccgccgcgcgccctacgacttcgc

SEQ ID NO: 5926728 - DNA, 25 bp, Homo sapien
gtgggcctaatcggcgcgcgccgcc

SEQ ID NO: 5926729 - DNA, 25 bp, Homo sapien
ggcgctcgaccgcgttcggcgaccc

SEQ ID NO: 5926730 - DNA, 25 bp, Homo sapien
ccctccctagcgcgcgacccgacgg

SEQ ID NO: 5926731 - DNA, 25 bp, Homo sapien
ctcggctagcggtacgcgcgcggcc

SEQ ID NO: 5926732 - DNA, 25 bp, Homo sapien
gcgcgtggcgctagcacgcgtggcc

SEQ ID NO: 5926733 - DNA, 25 bp, Homo sapien
ggccggccgcgcgcgataacccctc

SEQ ID NO: 5926734 - DNA, 25 bp, Homo sapien
tcgacggccgacggtccgtggccgc

SEQ ID NO: 5926735 - DNA, 25 bp, Homo sapien
cgtgcgctactcgcgcccgtcgggg

SEQ ID NO: 5926736 - DNA, 25 bp, Homo sapien
ccccggcgcggggacgttcatgcgg

SEQ ID NO: 5926737 - DNA, 25 bp, Homo sapien
ccaggctgccgcaacgcggctcggg

SEQ ID NO: 5926738 - DNA, 25 bp, Homo sapien
cacgcgcccggcggtacgactggcg

SEQ ID NO: 5926739 - DNA, 25 bp, Homo sapien
gcctcaccggcgacgctaggcgccc

SEQ ID NO: 5926740 - DNA, 25 bp, Homo sapien
cgccgtcgcggagcgtagccggctg

SEQ ID NO: 5926741 - DNA, 25 bp, Homo sapien
gtccagctcggcccgcgtagcgcgc

SEQ ID NO: 5926742 - DNA, 25 bp, Homo sapien
ccgacctcccgcgcgtagtccgccg

SEQ ID NO: 5926743 - DNA, 25 bp, Homo sapien
cgtgcggacgtatcggcgcccgggg

SEQ ID NO: 5926744 - DNA, 25 bp, Homo sapien
gctccggcgtccgacgtctcgccgg

SEQ ID NO: 5926745 - DNA, 25 bp, Homo sapien
gccgccgtttgaccgcgcggccggt

SEQ ID NO: 5926746 - DNA, 25 bp, Homo sapien
gcgggcgcccgacgatagggcggct

SEQ ID NO: 5926747 - DNA, 25 bp, Homo sapien
cccgcgtgaggcgcgctaacgcccg

SEQ ID NO: 5926748 - DNA, 25 bp, Homo sapien
ggggcggaacgcgcgtccggtcctg

SEQ ID NO: 5926749 - DNA, 25 bp, Homo sapien
cccggtgcgggatcgaccgcccacc

SEQ ID NO: 5926750 - DNA, 25 bp, Homo sapien
cccgcctcggcgtaccgccgccaag

SEQ ID NO: 5926751 - DNA, 25 bp, Homo sapien
ggagccgtaccgacgcgcgcgggtc

SEQ ID NO: 5926752 - DNA, 25 bp, Homo sapien
ggggcccgcctacgctacgccgctc

SEQ ID NO: 5926753 - DNA, 25 bp, Homo sapien
gtgcgcacgggccgtcgcacaccgc

SEQ ID NO: 5926754 - DNA, 25 bp, Homo sapien
ccgcggcgcgcgtcggtatgccgtg

SEQ ID NO: 5926755 - DNA, 25 bp, Homo sapien
ggggagtcgcgcgctacagcgggcc

SEQ ID NO: 5926756 - DNA, 25 bp, Homo sapien
ccccgcttgcgacgtcgggccgctc

SEQ ID NO: 5926757 - DNA, 25 bp, Homo sapien
gggacgacgggccgtagcgacgggc

SEQ ID NO: 5926758 - DNA, 25 bp, Homo sapien
aggggccgaggcgcgtaccggcagc

SEQ ID NO: 5926759 - DNA, 25 bp, Homo sapien
cttggccccgggatcgcgtcccgcc

SEQ ID NO: 5926760 - DNA, 25 bp, Homo sapien
ggaggccggtcgttgcgcgcgcgtc

SEQ ID NO: 5926761 - DNA, 25 bp, Homo sapien
cgcccgcggataggcgtcggggtgg

SEQ ID NO: 5926762 - DNA, 25 bp, Homo sapien
cgcggccgtacgctacgccgccgac

SEQ ID NO: 5926763 - DNA, 25 bp, Homo sapien
gggcgctcgaacggccccgcggaca

SEQ ID NO: 5926764 - DNA, 25 bp, Homo sapien
ccgctgtacgcgtccggccggaggg

SEQ ID NO: 5926765 - DNA, 25 bp, Homo sapien
cctcgagtcgcccgtagcgcgccgg

SEQ ID NO: 5926766 - DNA, 25 bp, Homo sapien
tgcccaccgcgaccggtgtcccgcg

SEQ ID NO: 5926767 - DNA, 25 bp, Homo sapien
gggcgcgcgcgcgttacggccaagg

SEQ ID NO: 5926768 - DNA, 25 bp, Homo sapien
ccggcgcgtagcacgaccgcgccgt

SEQ ID NO: 5926769 - DNA, 25 bp, Homo sapien
ccggggtagcgcggccgtacggtgc

SEQ ID NO: 5926770 - DNA, 25 bp, Homo sapien
ggctggaccgtcagacgcgccgggc

SEQ ID NO: 5926771 - DNA, 25 bp, Homo sapien
cggtcggcggtccgcgatacggcgg

SEQ ID NO: 5926772 - DNA, 25 bp, Homo sapien
cacgtcggctacgacgcgccccggg

SEQ ID NO: 5926773 - DNA, 25 bp, Homo sapien
ggcctcgtcgtgtcgcggagccgcg

SEQ ID NO: 5926774 - DNA, 25 bp, Homo sapien
gggcgccgcatgatcgcgggggcag

SEQ ID NO: 5926775 - DNA, 25 bp, Homo sapien
cggccttgcgcggtcgcacggacgc

SEQ ID NO: 5926776 - DNA, 25 bp, Homo sapien
gaccggccgcggtcgtagacgcggg

SEQ ID NO: 5926777 - DNA, 25 bp, Homo sapien
gcgcgcggggatacgctcggcggac

SEQ ID NO: 5926778 - DNA, 25 bp, Homo sapien
gcgcagtcgaccgcgcgtagcgccc

SEQ ID NO: 5926779 - DNA, 25 bp, Homo sapien
ctacgctacggcccgcgacgcgcgc

SEQ ID NO: 5926780 - DNA, 25 bp, Homo sapien
cggggattcgcccctacgcggcgcc

SEQ ID NO: 5926781 - DNA, 25 bp, Homo sapien
cggccaccgtgcgctcgacggagcc

SEQ ID NO: 5926782 - DNA, 25 bp, Homo sapien
ggggtggatccgcgtacgcggcggc

SEQ ID NO: 5926783 - DNA, 25 bp, Homo sapien
cgcccggcgccttcgcgacaccagc

SEQ ID NO: 5926784 - DNA, 25 bp, Homo sapien
cgcgtgtcctacgggtgcgggccgg

SEQ ID NO: 5926785 - DNA, 25 bp, Homo sapien
gggagcggcgcgccgtagaggcgtc

SEQ ID NO: 5926786 - DNA, 25 bp, Homo sapien
ccggcgcgacgtgccggtaagggcc

SEQ ID NO: 5926787 - DNA, 25 bp, Homo sapien
gcgggcatccgcggtcggtcgccga

SEQ ID NO: 5926788 - DNA, 25 bp, Homo sapien
gcaggcgcacctacgcgaccggccg

SEQ ID NO: 5926789 - DNA, 25 bp, Homo sapien
cgcgcgtcgcgagccgatcagcccg

SEQ ID NO: 5926790 - DNA, 25 bp, Homo sapien
cgtgcccgcgctacgtcgtgccgcc

SEQ ID NO: 5926791 - DNA, 25 bp, Homo sapien
cgacgacgggcggcccctacgcctg

SEQ ID NO: 5926792 - DNA, 25 bp, Homo sapien
ggtccggacgttgcgccgcgctccg

SEQ ID NO: 5926793 - DNA, 25 bp, Homo sapien
ggggggacgcgacgtggacgcggca

SEQ ID NO: 5926794 - DNA, 25 bp, Homo sapien
ggcccgcgcgtataggccgccgtcc

SEQ ID NO: 5926795 - DNA, 25 bp, Homo sapien
gcggcgcgccgtaccatcgcgcgtg

SEQ ID NO: 5926796 - DNA, 25 bp, Homo sapien
gggcgccccgtgtcgatcgctgcgg

SEQ ID NO: 5926797 - DNA, 25 bp, Homo sapien
cgccctcggtagttgcgcgccgcgg

SEQ ID NO: 5926798 - DNA, 25 bp, Homo sapien
ggtccgccgtcatgcgcgacccggg

SEQ ID NO: 5926799 - DNA, 25 bp, Homo sapien
tgcgcgatacgcgggccgcccgcac

SEQ ID NO: 5926800 - DNA, 25 bp, Homo sapien
tcgccagtacggcgggtcgcggcgg

SEQ ID NO: 5926801 - DNA, 25 bp, Homo sapien
ggggtccgtatcgcgaggccggccc

SEQ ID NO: 5926802 - DNA, 25 bp, Homo sapien
gcgcgccggtacgtcgcgactggcc

SEQ ID NO: 5926803 - DNA, 25 bp, Homo sapien
ctccgggccgtccgacgtagcggcg

SEQ ID NO: 5926804 - DNA, 25 bp, Homo sapien
ccgggctacgcgccgcggttcaccc

SEQ ID NO: 5926805 - DNA, 25 bp, Homo sapien
cgcgtgccggccgcgctatcacccg

SEQ ID NO: 5926806 - DNA, 25 bp, Homo sapien
ccgccgcgtccgcgctagcggcgta

SEQ ID NO: 5926807 - DNA, 25 bp, Homo sapien
acgccgcgcgcgtacgcctgtgccg

SEQ ID NO: 5926808 - DNA, 25 bp, Homo sapien
gtgcgccgtccgcgctacccgcacg

SEQ ID NO: 5926809 - DNA, 25 bp, Homo sapien
cgggggtacgcgcgagcggcgcact

SEQ ID NO: 5926810 - DNA, 25 bp, Homo sapien
gcgtgcccgaacggctcggtgccgc

SEQ ID NO: 5926811 - DNA, 25 bp, Homo sapien
tgcgcgtgccccgtacgcggcggga

SEQ ID NO: 5926812 - DNA, 25 bp, Homo sapien
cctccgcgcgtatgggccgcagcgg

SEQ ID NO: 5926813 - DNA, 25 bp, Homo sapien
gcagcgctgcgcggtcgtacgggcc

SEQ ID NO: 5926814 - DNA, 25 bp, Homo sapien
cccggggcatactccgcgtggggcc

SEQ ID NO: 5926815 - DNA, 25 bp, Homo sapien
gctccccggcgcgatacgggcggtc

SEQ ID NO: 5926816 - DNA, 25 bp, Homo sapien
ccgcggcggtctaacgcgtgcgcgc

SEQ ID NO: 5926817 - DNA, 25 bp, Homo sapien
ggggccgtcgtcggccgtactgccc

SEQ ID NO: 5926818 - DNA, 25 bp, Homo sapien
gcccgcccgcgcgactgaatgccgg

SEQ ID NO: 5926819 - DNA, 25 bp, Homo sapien
ggccagtaccgctacgcgcccggcc

SEQ ID NO: 5926820 - DNA, 25 bp, Homo sapien
gccgccttcgcgcgtggactccccc

SEQ ID NO: 5926821 - DNA, 25 bp, Homo sapien
cacccgacgcgcgtagaccccgggc

SEQ ID NO: 5926822 - DNA, 25 bp, Homo sapien
tgccggtacgcgcgacgtcggcccg

SEQ ID NO: 5926823 - DNA, 25 bp, Homo sapien
ccgcgccgggtacgcccgactctcg

SEQ ID NO: 5926824 - DNA, 25 bp, Homo sapien
ccggcctgccgctacgcggagtggc

SEQ ID NO: 5926825 - DNA, 25 bp, Homo sapien
cggcacacggtcggcgtcggcgagg

SEQ ID NO: 5926826 - DNA, 25 bp, Homo sapien
cccctccgtgcgtcgagcggggagc

SEQ ID NO: 5926827 - DNA, 25 bp, Homo sapien
gccagacgtacgggccgagcgcgcc

SEQ ID NO: 5926828 - DNA, 25 bp, Homo sapien
gccagcacgacgcaccgggccgcga

SEQ ID NO: 5926829 - DNA, 25 bp, Homo sapien
cgggcgggcgtgatacgccgccgct

SEQ ID NO: 5926830 - DNA, 25 bp, Homo sapien
ggctgtcgacgtacgccgcggccgg

SEQ ID NO: 5926831 - DNA, 25 bp, Homo sapien
cccccgagttcggcgcgacccgagc

SEQ ID NO: 5926832 - DNA, 25 bp, Homo sapien
ggcggcttcggacgggcgtcctccc

SEQ ID NO: 5926833 - DNA, 25 bp, Homo sapien
gcgagcgggtcgctacgcgtgcgcg

SEQ ID NO: 5926834 - DNA, 25 bp, Homo sapien
cagccgcgtcggcacgacctgcgcg

SEQ ID NO: 5926835 - DNA, 25 bp, Homo sapien
gcgccccgaccggtcgacacggacc

SEQ ID NO: 5926836 - DNA, 25 bp, Homo sapien
cgaggtcttacggcgcgccggccgg

SEQ ID NO: 5926837 - DNA, 25 bp, Homo sapien
gggaggcgacgcgccatagcccggg

SEQ ID NO: 5926838 - DNA, 25 bp, Homo sapien
ggtgggtcgtacgggcccgagcgcg

SEQ ID NO: 5926839 - DNA, 25 bp, Homo sapien
acgggcacggtccgcttcggccgcc

SEQ ID NO: 5926840 - DNA, 25 bp, Homo sapien
ccgcagtagtcgacgcgccgcgggc

SEQ ID NO: 5926841 - DNA, 25 bp, Homo sapien
cagctcgcgtacggtcggggggcgg

SEQ ID NO: 5926842 - DNA, 25 bp, Homo sapien
gggccgacgcggtcgggacccagtg

SEQ ID NO: 5926843 - DNA, 25 bp, Homo sapien
gccagcgcgctagggcgaacgccgg

SEQ ID NO: 5926844 - DNA, 25 bp, Homo sapien
acggcgaccggtcgacgcggcacgc

SEQ ID NO: 5926845 - DNA, 25 bp, Homo sapien
gcccagacccgcacggtcgctccgc

SEQ ID NO: 5926846 - DNA, 25 bp, Homo sapien
ggcgcgttcggacgccggtgcgagg

SEQ ID NO: 5926847 - DNA, 25 bp, Homo sapien
caggaccgccgataccgcggccgcc

SEQ ID NO: 5926848 - DNA, 25 bp, Homo sapien
gagccggacgagtcgcgcggggtgc

SEQ ID NO: 5926849 - DNA, 25 bp, Homo sapien
ctgggtacggaccgcctcgccgggc

SEQ ID NO: 5926850 - DNA, 25 bp, Homo sapien
ccgactgtcgcctagcgcggggccg

SEQ ID NO: 5926851 - DNA, 25 bp, Homo sapien
gcggccgtacgccggtccgccgtct

SEQ ID NO: 5926852 - DNA, 25 bp, Homo sapien
gcgggccgacgcctagcgtgtggcc

SEQ ID NO: 5926853 - DNA, 25 bp, Homo sapien
ggtctcaccccgtcggtcggccggc

SEQ ID NO: 5926854 - DNA, 25 bp, Homo sapien
ccctggcgcgtaaccggtcccgcgc

SEQ ID NO: 5926855 - DNA, 25 bp, Homo sapien
gggccggctatgacgcgcgccgggt

SEQ ID NO: 5926856 - DNA, 25 bp, Homo sapien
gcacggaccggtccgtcggcaggcc

SEQ ID NO: 5926857 - DNA, 25 bp, Homo sapien
cgccggctatcgcgcgtgccgccac

SEQ ID NO: 5926858 - DNA, 25 bp, Homo sapien
cgccggtgcgcggtcgagcccacga

SEQ ID NO: 5926859 - DNA, 25 bp, Homo sapien
cccccgatcgggtagcgcggcctgg

SEQ ID NO: 5926860 - DNA, 25 bp, Homo sapien
cctgcgcgacggggtacgcagcgcg

SEQ ID NO: 5926861 - DNA, 25 bp, Homo sapien
gcggcctatgaggcgaccgcggcgg

SEQ ID NO: 5926862 - DNA, 25 bp, Homo sapien
gggcaagcgcgccgtcctacgggcg

SEQ ID NO: 5926863 - DNA, 25 bp, Homo sapien
ggggctatgcgcgcgtagccggggc

SEQ ID NO: 5926864 - DNA, 25 bp, Homo sapien
gccggatcccgacgtaccgcggcgc

SEQ ID NO: 5926865 - DNA, 25 bp, Homo sapien
gcgcggctcggccgtacgcactgcc

SEQ ID NO: 5926866 - DNA, 25 bp, Homo sapien
gcggcccggtccgactaccccgagc

SEQ ID NO: 5926867 - DNA, 25 bp, Homo sapien
cgggcgcggtccggtgacgtcagcc

SEQ ID NO: 5926868 - DNA, 25 bp, Homo sapien
cccggcgcgtcgcacgtcttggggc

SEQ ID NO: 5926869 - DNA, 25 bp, Homo sapien
gctctgcgcacccgatcggcgccgc

SEQ ID NO: 5926870 - DNA, 25 bp, Homo sapien
cggtgcccgcgcgagtatggcgccg

SEQ ID NO: 5926871 - DNA, 25 bp, Homo sapien
cccgcacgcgcgaacggacagccgc

SEQ ID NO: 5926872 - DNA, 25 bp, Homo sapien
ctgccctcgaccgttgcgcgggccg

SEQ ID NO: 5926873 - DNA, 25 bp, Homo sapien
gggggggacgccgtaagcgcgcacc

SEQ ID NO: 5926874 - DNA, 25 bp, Homo sapien
acggcctcgggcctacgcgcccagc

SEQ ID NO: 5926875 - DNA, 25 bp, Homo sapien
ggggcggcgtaaggtccgcggctcg

SEQ ID NO: 5926876 - DNA, 25 bp, Homo sapien
ccgcgccagtccgcgcgatgggacg

SEQ ID NO: 5926877 - DNA, 25 bp, Homo sapien
gccgggtgcgacggcccgtggcaac

SEQ ID NO: 5926878 - DNA, 25 bp, Homo sapien
gccgtccgacgccgtgtgtgcgggc

SEQ ID NO: 5926879 - DNA, 25 bp, Homo sapien
tggcccaacgtcgggcgcgcgtggc

SEQ ID NO: 5926880 - DNA, 25 bp, Homo sapien
gggccgggcgcgtactcgaggacgg

SEQ ID NO: 5926881 - DNA, 25 bp, Homo sapien
caggcccgagcctacggcggggtgc

SEQ ID NO: 5926882 - DNA, 25 bp, Homo sapien
gcggaagtacgacgcccgggccgcc

SEQ ID NO: 5926883 - DNA, 25 bp, Homo sapien
cgcggcccgtcgaacggcactcgcg

SEQ ID NO: 5926884 - DNA, 25 bp, Homo sapien
gggcgcgtcgcgacgaaccggcagg

SEQ ID NO: 5926885 - DNA, 25 bp, Homo sapien
acgccggtcgcatgcgcggggctgg

SEQ ID NO: 5926886 - DNA, 25 bp, Homo sapien
tcggggaggcgcgaaccgcgcccga

SEQ ID NO: 5926887 - DNA, 25 bp, Homo sapien
ccgggggtcgcgaagcgacggcgtc

SEQ ID NO: 5926888 - DNA, 25 bp, Homo sapien
gcgggttctaacgcgggcgcgcccg

SEQ ID NO: 5926889 - DNA, 25 bp, Homo sapien
ggggcgcgctataccggccggcagg

SEQ ID NO: 5926890 - DNA, 25 bp, Homo sapien
cctgggcgcgcatcgagcccggctg

SEQ ID NO: 5926891 - DNA, 25 bp, Homo sapien
ccgcggcacgccggtacgaggcgct

SEQ ID NO: 5926892 - DNA, 25 bp, Homo sapien
gtcccggcgtagtccgtcgccggcc

SEQ ID NO: 5926893 - DNA, 25 bp, Homo sapien
ccgccatacggcgcggttgggcccg

SEQ ID NO: 5926894 - DNA, 25 bp, Homo sapien
gggcctcgtaccacgcgtcgggggc

SEQ ID NO: 5926895 - DNA, 25 bp, Homo sapien
cgccccgcaccgtcgaccgcccttg

SEQ ID NO: 5926896 - DNA, 25 bp, Homo sapien
tctccgcgcttacgccggcccgcgc

SEQ ID NO: 5926897 - DNA, 25 bp, Homo sapien
ccgggccgcgtgccgtctaggcgct

SEQ ID NO: 5926898 - DNA, 25 bp, Homo sapien
ccggccgccggtcgacacgtccgtg

SEQ ID NO: 5926899 - DNA, 25 bp, Homo sapien
gtggcccggcgtaacccgtccgcgc

SEQ ID NO: 5926900 - DNA, 25 bp, Homo sapien
agctccggcccgttgcgaccggccg

SEQ ID NO: 5926901 - DNA, 25 bp, Homo sapien
ccgccggatcgcgtacccccgcgag

SEQ ID NO: 5926902 - DNA, 25 bp, Homo sapien
gggccccccatacgcgacgcgaccg

SEQ ID NO: 5926903 - DNA, 25 bp, Homo sapien
accctgtcgcgctacgcgcccgcgc

SEQ ID NO: 5926904 - DNA, 25 bp, Homo sapien
caccgcggtgcgctagcgcggaccg

SEQ ID NO: 5926905 - DNA, 25 bp, Homo sapien
ggacgtccgcggtcgaccaggcggg

SEQ ID NO: 5926906 - DNA, 25 bp, Homo sapien
cccgctgcacggccgtacggccacg

SEQ ID NO: 5926907 - DNA, 25 bp, Homo sapien
cctctgaacggccgggcgacggccg

SEQ ID NO: 5926908 - DNA, 25 bp, Homo sapien
gcaccggtccgacggcggtcccgct

SEQ ID NO: 5926909 - DNA, 25 bp, Homo sapien
cgcccgtccgacgtaccgccgctcg

SEQ ID NO: 5926910 - DNA, 25 bp, Homo sapien
tggcgcacgcgttcgaccgccgggg

SEQ ID NO: 5926911 - DNA, 25 bp, Homo sapien
cgcgcccgaccggcccgattctggc

SEQ ID NO: 5926912 - DNA, 25 bp, Homo sapien
cggaggccgcgcgtaagccgcccga

SEQ ID NO: 5926913 - DNA, 25 bp, Homo sapien
gcgcggcgcgctaccgacacgggtc

SEQ ID NO: 5926914 - DNA, 25 bp, Homo sapien
gcgggcatgcgacggtccgcctggc

SEQ ID NO: 5926915 - DNA, 25 bp, Homo sapien
cgcgggcgcgcccgtttgagacccg

SEQ ID NO: 5926916 - DNA, 25 bp, Homo sapien
cgcctctcgtggcacgccgcggtcg

SEQ ID NO: 5926917 - DNA, 25 bp, Homo sapien
ccgccgacatgcgcgacggagggcc

SEQ ID NO: 5926918 - DNA, 25 bp, Homo sapien
cgcccaccgtagatcggcgggcccg

SEQ ID NO: 5926919 - DNA, 25 bp, Homo sapien
ggcggccgcggtgcagtaccgcagc

SEQ ID NO: 5926920 - DNA, 25 bp, Homo sapien
ggggacgtatgccgcgcgagggccg

SEQ ID NO: 5926921 - DNA, 25 bp, Homo sapien
gccgacacgggggcgcgtagccgtc

SEQ ID NO: 5926922 - DNA, 25 bp, Homo sapien
cgcgcgttcgcgtgcgacccggtgg

SEQ ID NO: 5926923 - DNA, 25 bp, Homo sapien
cgggtgcggcgcgcctacagcgacc

SEQ ID NO: 5926924 - DNA, 25 bp, Homo sapien
ggccctcgttacgggcgacgccgcc

SEQ ID NO: 5926925 - DNA, 25 bp, Homo sapien
ccgggttcgggcgaccgccgccaga

SEQ ID NO: 5926926 - DNA, 25 bp, Homo sapien
ccgctgcgcgtaccgtccggtcgcg

SEQ ID NO: 5926927 - DNA, 25 bp, Homo sapien
ggcaagcggcgcccatacgggcggc

SEQ ID NO: 5926928 - DNA, 25 bp, Homo sapien
cgtcgctgcgggcccgtacgtgcgg

SEQ ID NO: 5926929 - DNA, 25 bp, Homo sapien
ccacagcgtcgcaaccgggcgggcg

SEQ ID NO: 5926930 - DNA, 25 bp, Homo sapien
gccagcccggctaccgtcggcgtgc

SEQ ID NO: 5926931 - DNA, 25 bp, Homo sapien
cggcaccgtcccgacgtcgggcctg

SEQ ID NO: 5926932 - DNA, 25 bp, Homo sapien
cccgggatcgaccggccgctctggg

SEQ ID NO: 5926933 - DNA, 25 bp, Homo sapien
gcgccggccggtcgtatcccgccct

SEQ ID NO: 5926934 - DNA, 25 bp, Homo sapien
cggcccatacgggccgtcggcccag

SEQ ID NO: 5926935 - DNA, 25 bp, Homo sapien
gggcgccgtcgcggggtactggtcg

SEQ ID NO: 5926936 - DNA, 25 bp, Homo sapien
gtcggcgcgcgtcgtgtaggcgcgg

SEQ ID NO: 5926937 - DNA, 25 bp, Homo sapien
tcgccccgcgaccgtcgatcggcgg

SEQ ID NO: 5926938 - DNA, 25 bp, Homo sapien
ctgggagccggtctacgggcggcgg

SEQ ID NO: 5926939 - DNA, 25 bp, Homo sapien
ccgggtgtgcggcgcgatagggcgg

SEQ ID NO: 5926940 - DNA, 25 bp, Homo sapien
cacggccccgttgtcgcgagccgcc

SEQ ID NO: 5926941 - DNA, 25 bp, Homo sapien
tgcccgccggtacgaccgggcggga

SEQ ID NO: 5926942 - DNA, 25 bp, Homo sapien
cggccgtacgctccgcgtgcgcgca

SEQ ID NO: 5926943 - DNA, 25 bp, Homo sapien
cggctccggtagcgcatcgcggccc

SEQ ID NO: 5926944 - DNA, 25 bp, Homo sapien
tcgcctccccgtcgggcgaggagcg

SEQ ID NO: 5926945 - DNA, 25 bp, Homo sapien
cgcagcgcgtcgaccggtacgccgc

SEQ ID NO: 5926946 - DNA, 25 bp, Homo sapien
gcgggctcggtacgcgacggcaccg

SEQ ID NO: 5926947 - DNA, 25 bp, Homo sapien
cgaggtcgcgtacgtcgcgcggccc

SEQ ID NO: 5926948 - DNA, 25 bp, Homo sapien
acggggcggtacgtcgcggggcgca

SEQ ID NO: 5926949 - DNA, 25 bp, Homo sapien
cgtgccagtcggtcgaccgcgcgcg

SEQ ID NO: 5926950 - DNA, 25 bp, Homo sapien
gcagcgtacggcgggccgacagggg

SEQ ID NO: 5926951 - DNA, 25 bp, Homo sapien
cgctggggcttacgcgcccggaccg

SEQ ID NO: 5926952 - DNA, 25 bp, Homo sapien
cgatggccgcgtcgtaccccggggc

SEQ ID NO: 5926953 - DNA, 25 bp, Homo sapien
cggcgcccgagtagtcgcgcgcgca

SEQ ID NO: 5926954 - DNA, 25 bp, Homo sapien
gccggccccatacgcgcggccaacc

SEQ ID NO: 5926955 - DNA, 25 bp, Homo sapien
cccgccgtcggaccgcggagaggca

SEQ ID NO: 5926956 - DNA, 25 bp, Homo sapien
ctgcccacggtccgcgacgtggggg

SEQ ID NO: 5926957 - DNA, 25 bp, Homo sapien
gcccaccgcgtacggatgcggcgcc

SEQ ID NO: 5926958 - DNA, 25 bp, Homo sapien
ggcccccggctaggcgtcgctgtgg

SEQ ID NO: 5926959 - DNA, 25 bp, Homo sapien
gcccgcgcgataccgctcgcccacg

SEQ ID NO: 5926960 - DNA, 25 bp, Homo sapien
ggcagcggcgtctatcgcgccgggg

SEQ ID NO: 5926961 - DNA, 25 bp, Homo sapien
gggccgcggtacgcgtgaggggacg

SEQ ID NO: 5926962 - DNA, 25 bp, Homo sapien
gggcgatagaccgtcggcgcgggcc

SEQ ID NO: 5926963 - DNA, 25 bp, Homo sapien
cggggcgcgtaccgctagccgccca

SEQ ID NO: 5926964 - DNA, 25 bp, Homo sapien
caggcgagtgcggtcgcgacgccgc

SEQ ID NO: 5926965 - DNA, 25 bp, Homo sapien
ccggcttacgcgaccgccgccctgg

SEQ ID NO: 5926966 - DNA, 25 bp, Homo sapien
cgccggacccgcgatcgacgcccag

SEQ ID NO: 5926967 - DNA, 25 bp, Homo sapien
ccgcgggcacgaacgtccgccagcc

SEQ ID NO: 5926968 - DNA, 25 bp, Homo sapien
gcgcggaccgtaacgcgccgtcgcc

SEQ ID NO: 5926969 - DNA, 25 bp, Homo sapien
ccggtcggccgtacgagcggccgga

SEQ ID NO: 5926970 - DNA, 25 bp, Homo sapien
gggagcgcgcggtcgtgtcgcgtcc

SEQ ID NO: 5926971 - DNA, 25 bp, Homo sapien
cgcgccggcgccgaacgtagtcgcc

SEQ ID NO: 5926972 - DNA, 25 bp, Homo sapien
gcgctgcgcggacgtcgaccggcct

SEQ ID NO: 5926973 - DNA, 25 bp, Homo sapien
cggcgtgcgactagtccggcgcggg

SEQ ID NO: 5926974 - DNA, 25 bp, Homo sapien
ccgcgccgcgtcggtaccgacgtgc

SEQ ID NO: 5926975 - DNA, 25 bp, Homo sapien
cgtgcccggtacgcgggtcccacgc

SEQ ID NO: 5926976 - DNA, 25 bp, Homo sapien
cgtggggtcgcacgagacccccggc

SEQ ID NO: 5926977 - DNA, 25 bp, Homo sapien
gacccccgtatgcggggcgacgccg

SEQ ID NO: 5926978 - DNA, 25 bp, Homo sapien
gccctggtacgcccgcgatgccgcg

SEQ ID NO: 5926979 - DNA, 25 bp, Homo sapien
ccaggggcgggacgacgctccgcct

SEQ ID NO: 5926980 - DNA, 25 bp, Homo sapien
acggcccgtcgcgcgacagtcgcgg

SEQ ID NO: 5926981 - DNA, 25 bp, Homo sapien
cgcggcgacgcccgtacgagggtgg

SEQ ID NO: 5926982 - DNA, 25 bp, Homo sapien
gcccccatcgcgcccgtaggccgca

SEQ ID NO: 5926983 - DNA, 25 bp, Homo sapien
gcaccggctacgacggtcgcggcgg

SEQ ID NO: 5926984 - DNA, 25 bp, Homo sapien
ggcagggcgatgccggtcgggcctg

SEQ ID NO: 5926985 - DNA, 25 bp, Homo sapien
cgctggcggacgtacgtccgcggcg

SEQ ID NO: 5926986 - DNA, 25 bp, Homo sapien
ccgcggcgcggatacgtggcgggag

SEQ ID NO: 5926987 - DNA, 25 bp, Homo sapien
ccgcgcgaccgacgggtcgggctca

SEQ ID NO: 5926988 - DNA, 25 bp, Homo sapien
gtaccgccgtcgtacgggcgccgcg

SEQ ID NO: 5926989 - DNA, 25 bp, Homo sapien
gcgacgggcctacgcgacgcccctc

SEQ ID NO: 5926990 - DNA, 25 bp, Homo sapien
ccgccgactcgcgaccggtctgggg

SEQ ID NO: 5926991 - DNA, 25 bp, Homo sapien
ccggtgggtacgcgtccgtgcccgc

SEQ ID NO: 5926992 - DNA, 25 bp, Homo sapien
gggagcacggccggtccgagcccct

SEQ ID NO: 5926993 - DNA, 25 bp, Homo sapien
tggccctacggcgcgaccggcaccg

SEQ ID NO: 5926994 - DNA, 25 bp, Homo sapien
ccgaggatatcgcgcggcggcgggc

SEQ ID NO: 5926995 - DNA, 25 bp, Homo sapien
cgcgggctacggtcgcgcaggcgct

SEQ ID NO: 5926996 - DNA, 25 bp, Homo sapien
cgcgcctgtttcgcgcccggctgcg

SEQ ID NO: 5926997 - DNA, 25 bp, Homo sapien
ggagcggcgggcaacgtacgggggc

SEQ ID NO: 5926998 - DNA, 25 bp, Homo sapien
cgcgggcgacatcccgcgtccgtgc

SEQ ID NO: 5926999 - DNA, 25 bp, Homo sapien
gccggggtaccgcgcgtaccgcagg

SEQ ID NO: 5927000 - DNA, 25 bp, Homo sapien
tcgcgcgcgtcacggcgcagacccg

SEQ ID NO: 5927001 - DNA, 25 bp, Homo sapien
aggccggtacgcgcgtccggccgct

SEQ ID NO: 5927002 - DNA, 25 bp, Homo sapien
ccctcgccgctccgcggtagcgcct

SEQ ID NO: 5927003 - DNA, 25 bp, Homo sapien
gcccccgagccgttgcgcgacagcc

SEQ ID NO: 5927004 - DNA, 25 bp, Homo sapien
aggctgcgcgatacggcggcgccgc

SEQ ID NO: 5927005 - DNA, 25 bp, Homo sapien
cccacgtcgggcgtcgagacgcgcg

SEQ ID NO: 5927006 - DNA, 25 bp, Homo sapien
cgccgccagtaccgcgcgtgagccc

SEQ ID NO: 5927007 - DNA, 25 bp, Homo sapien
gccgtcacggcgtacgggcgtggcg

SEQ ID NO: 5927008 - DNA, 25 bp, Homo sapien
ggcaggggtctcgcgtcggtgcgcc

SEQ ID NO: 5927009 - DNA, 25 bp, Homo sapien
ggggacgtcgcgcgtccgttcggcg

SEQ ID NO: 5927010 - DNA, 25 bp, Homo sapien
gcgccgtagacgctcgcgccccgct

SEQ ID NO: 5927011 - DNA, 25 bp, Homo sapien
ctcacgtcgacgcggacgcggcccc

SEQ ID NO: 5927012 - DNA, 25 bp, Homo sapien
ggccgtagcgtacgcccgcgtggcg

SEQ ID NO: 5927013 - DNA, 25 bp, Homo sapien
cccggagcgcgtgatacgcgcccgg

SEQ ID NO: 5927014 - DNA, 25 bp, Homo sapien
ctgcccgttgcgtcccgcgccgtcc

SEQ ID NO: 5927015 - DNA, 25 bp, Homo sapien
cccgcccggtcgtacgcaggcgtcg

SEQ ID NO: 5927016 - DNA, 25 bp, Homo sapien
tggggccggggatacgcgcgggtcc

SEQ ID NO: 5927017 - DNA, 25 bp, Homo sapien
cggccgcggtcgacgtgcgaagcgc

SEQ ID NO: 5927018 - DNA, 25 bp, Homo sapien
gcggagtcgtcgcgcgtcgcccacg

SEQ ID NO: 5927019 - DNA, 25 bp, Homo sapien
ctggcagtacgcgaggccggggccc

SEQ ID NO: 5927020 - DNA, 25 bp, Homo sapien
cgcgccgcgcgtagcgtcggggagt

SEQ ID NO: 5927021 - DNA, 25 bp, Homo sapien
ggcactgtcgcgcgacgtggcccgg

SEQ ID NO: 5927022 - DNA, 25 bp, Homo sapien
cgcgcacgtaacggcccggcctcgc

SEQ ID NO: 5927023 - DNA, 25 bp, Homo sapien
gcgcagcgcgcgacgtcgtgcgtcc

SEQ ID NO: 5927024 - DNA, 25 bp, Homo sapien
ggacccgtctcgcgtcggggggctc

SEQ ID NO: 5927025 - DNA, 25 bp, Homo sapien
cgccggtagatgcgcgacggcgccc

SEQ ID NO: 5927026 - DNA, 25 bp, Homo sapien
cgaccggcgcgatagggctggcccc

SEQ ID NO: 5927027 - DNA, 25 bp, Homo sapien
cggctccgcgtccggtacggcgtcg

SEQ ID NO: 5927028 - DNA, 25 bp, Homo sapien
ggcgcacgcccataggtcggcgccc

SEQ ID NO: 5927029 - DNA, 25 bp, Homo sapien
agggctggccgaccgtacgggccgc

SEQ ID NO: 5927030 - DNA, 25 bp, Homo sapien
cggggcagtccggacgcgcgtctgg

SEQ ID NO: 5927031 - DNA, 25 bp, Homo sapien
ggcttggcctaggtccgcgcggggg

SEQ ID NO: 5927032 - DNA, 25 bp, Homo sapien
ggcccgggggcgcgacatagtgggc

SEQ ID NO: 5927033 - DNA, 25 bp, Homo sapien
cggcgctcacgcgtacgccggcgac

SEQ ID NO: 5927034 - DNA, 25 bp, Homo sapien
cccggctacgtagccgcgcccgctc

SEQ ID NO: 5927035 - DNA, 25 bp, Homo sapien
gtgggtgtcgtacggcgggggccgc

SEQ ID NO: 5927036 - DNA, 25 bp, Homo sapien
gccagcaacgctcgaccggcgcccc

SEQ ID NO: 5927037 - DNA, 25 bp, Homo sapien
gccgggctcgcgctagacgccccct

SEQ ID NO: 5927038 - DNA, 25 bp, Homo sapien
cctgggtggatcggacgcggccgcg

SEQ ID NO: 5927039 - DNA, 25 bp, Homo sapien
gacgcgtacgtcgctccgcgccggg

SEQ ID NO: 5927040 - DNA, 25 bp, Homo sapien
ccgccctagcgcggaccacgcgcgt

SEQ ID NO: 5927041 - DNA, 25 bp, Homo sapien
gggccgcaccgtacgcgggaggcca

SEQ ID NO: 5927042 - DNA, 25 bp, Homo sapien
ccccggcggtcgtccgctagccctc

SEQ ID NO: 5927043 - DNA, 25 bp, Homo sapien
gcgcgcggcggtcgaacgtggtggg

SEQ ID NO: 5927044 - DNA, 25 bp, Homo sapien
cctcggcccggttacggcgcggcca

SEQ ID NO: 5927045 - DNA, 25 bp, Homo sapien
gtggggtacctgcgcgcgagcgggc

SEQ ID NO: 5927046 - DNA, 25 bp, Homo sapien
gcggcgtagcggggcggatcacggc

SEQ ID NO: 5927047 - DNA, 25 bp, Homo sapien
ccgcctcaccggtccgctaccgcgg

SEQ ID NO: 5927048 - DNA, 25 bp, Homo sapien
gggcctcggtcgatcgcgtcgggcc

SEQ ID NO: 5927049 - DNA, 25 bp, Homo sapien
cgcctccccgtgccgcgtaggggtc

SEQ ID NO: 5927050 - DNA, 25 bp, Homo sapien
ggcccgcgcggtacgtactccgcgg

SEQ ID NO: 5927051 - DNA, 25 bp, Homo sapien
cgcgcgtcgggacgttacggcgggc

SEQ ID NO: 5927052 - DNA, 25 bp, Homo sapien
ccggcccgtcgcgcataggcggagg

SEQ ID NO: 5927053 - DNA, 25 bp, Homo sapien
accgccgtacgcgcggaccgccctc

SEQ ID NO: 5927054 - DNA, 25 bp, Homo sapien
accgcagcgtacgtcggcggcggcc

SEQ ID NO: 5927055 - DNA, 25 bp, Homo sapien
cgccctttcgcgcgcacgagccggg

SEQ ID NO: 5927056 - DNA, 25 bp, Homo sapien
ggagcacgggacgaccgcagcccgg

SEQ ID NO: 5927057 - DNA, 25 bp, Homo sapien
gcgcgcggggccgtcgtacggcgaa

SEQ ID NO: 5927058 - DNA, 25 bp, Homo sapien
cggcctcgagggcggtacgtgggcg

SEQ ID NO: 5927059 - DNA, 25 bp, Homo sapien
ccggcccggcgcgccttagccatcg

SEQ ID NO: 5927060 - DNA, 25 bp, Homo sapien
gtgcggtacggcgctacgcgcgcgg

SEQ ID NO: 5927061 - DNA, 25 bp, Homo sapien
gtgggcgcgtaccggcgcagccagc

SEQ ID NO: 5927062 - DNA, 25 bp, Homo sapien
gcacgctatgtcgcggccgcggcgc

SEQ ID NO: 5927063 - DNA, 25 bp, Homo sapien
ccaggggtcgctcgtggcggggagg

SEQ ID NO: 5927064 - DNA, 25 bp, Homo sapien
cgcgcctcgcgtactggcgtggggc

SEQ ID NO: 5927065 - DNA, 25 bp, Homo sapien
cgcgccccgcgatctgacggcctgc

SEQ ID NO: 5927066 - DNA, 25 bp, Homo sapien
gtcggccgcccgatgacggccccag

SEQ ID NO: 5927067 - DNA, 25 bp, Homo sapien
tcccgtcctcgcgctagcgggcgcg

SEQ ID NO: 5927068 - DNA, 25 bp, Homo sapien
ggggagtggatcgtccgcgggccgc

SEQ ID NO: 5927069 - DNA, 25 bp, Homo sapien
ggtgcgtcgcgcgcatgaggcgccc

SEQ ID NO: 5927070 - DNA, 25 bp, Homo sapien
cgcgcgccgttcgcgagcatgcgcc

SEQ ID NO: 5927071 - DNA, 25 bp, Homo sapien
gcgcggacgcgcgccgtatccgacg

SEQ ID NO: 5927072 - DNA, 25 bp, Homo sapien
ccccggtcgatcgcgggggctggac

SEQ ID NO: 5927073 - DNA, 25 bp, Homo sapien
ggcgcggagtccggcgtacccgtcg

SEQ ID NO: 5927074 - DNA, 25 bp, Homo sapien
gcgggctcgcgaccgcgcacgctgc

SEQ ID NO: 5927075 - DNA, 25 bp, Homo sapien
ggccccgcgcacgacggctctgcgc

SEQ ID NO: 5927076 - DNA, 25 bp, Homo sapien
agcccctccgcacgacgcgggggcg

SEQ ID NO: 5927077 - DNA, 25 bp, Homo sapien
cgggtcggtcgttcgcgcggcccgc

SEQ ID NO: 5927078 - DNA, 25 bp, Homo sapien
cgcgcgggtgcgccccgtaccgacc

SEQ ID NO: 5927079 - DNA, 25 bp, Homo sapien
ccggtgcgtaccccgctcggcggcc

SEQ ID NO: 5927080 - DNA, 25 bp, Homo sapien
agggcgcgatacgcggccgccgcgc

SEQ ID NO: 5927081 - DNA, 25 bp, Homo sapien
cggcgccgcgcgaaccgtagccccg

SEQ ID NO: 5927082 - DNA, 25 bp, Homo sapien
ccccgccgtacgcgcggacgccagc

SEQ ID NO: 5927083 - DNA, 25 bp, Homo sapien
gggcggcgttcgcgacgggtgcgcc

SEQ ID NO: 5927084 - DNA, 25 bp, Homo sapien
cgcggcggttacgcggccgccgcca

SEQ ID NO: 5927085 - DNA, 25 bp, Homo sapien
cgcggccggaccgacgagccgccac

SEQ ID NO: 5927086 - DNA, 25 bp, Homo sapien
cgggcacgtgccgaccgaccgccgg

SEQ ID NO: 5927087 - DNA, 25 bp, Homo sapien
ggccgcgtggcgccgtacccgccac

SEQ ID NO: 5927088 - DNA, 25 bp, Homo sapien
acccggtaggcgcgacgggcggcgc

SEQ ID NO: 5927089 - DNA, 25 bp, Homo sapien
gtgccggacggtcgaccgcggcggc

SEQ ID NO: 5927090 - DNA, 25 bp, Homo sapien
cgggggtcgcgcggcttacgcgggc

SEQ ID NO: 5927091 - DNA, 25 bp, Homo sapien
ccgcccgcgtaaccgcgcagcgcgg

SEQ ID NO: 5927092 - DNA, 25 bp, Homo sapien
gcggcgccgtcgtacgcggggggct

SEQ ID NO: 5927093 - DNA, 25 bp, Homo sapien
ccagcggtcgaccgcggacggcggc

SEQ ID NO: 5927094 - DNA, 25 bp, Homo sapien
cacgcctcgctagcgcgccgggcgc

SEQ ID NO: 5927095 - DNA, 25 bp, Homo sapien
ccggccgcgttccgcgatcgcgggg

SEQ ID NO: 5927096 - DNA, 25 bp, Homo sapien
ccccgccggacggccgtatcggcgc

SEQ ID NO: 5927097 - DNA, 25 bp, Homo sapien
cggcctctcgacgcgggggtgcccc

SEQ ID NO: 5927098 - DNA, 25 bp, Homo sapien
cgcggcggccgacgtacgcgccgtg

SEQ ID NO: 5927099 - DNA, 25 bp, Homo sapien
ccgggcggcgcgtagtcgcccctcc

SEQ ID NO: 5927100 - DNA, 25 bp, Homo sapien
gcacgcgttcggccgcgtcccggcg

SEQ ID NO: 5927101 - DNA, 25 bp, Homo sapien
gcgccccgcggtatgccggctgccc

SEQ ID NO: 5927102 - DNA, 25 bp, Homo sapien
gcctcccgtcgtaccgcggcgcgcc

SEQ ID NO: 5927103 - DNA, 25 bp, Homo sapien
ctcggccgtcgcgacgggtcccgcg

SEQ ID NO: 5927104 - DNA, 25 bp, Homo sapien
gccggctgccgcaacgcggccggga

SEQ ID NO: 5927105 - DNA, 25 bp, Homo sapien
ccgcgcgcccgacgcgctaccggca

SEQ ID NO: 5927106 - DNA, 25 bp, Homo sapien
gcggggcgtatcgggaccgcccgcg

SEQ ID NO: 5927107 - DNA, 25 bp, Homo sapien
caggggcacgggcgctacgccgccc

SEQ ID NO: 5927108 - DNA, 25 bp, Homo sapien
cccgcgcacgcccgtagcgacccgg

SEQ ID NO: 5927109 - DNA, 25 bp, Homo sapien
cccgcgcgtcccgacgtcggcggct

SEQ ID NO: 5927110 - DNA, 25 bp, Homo sapien
ggtgcgtacgcccccccggcgccac

SEQ ID NO: 5927111 - DNA, 25 bp, Homo sapien
gcggccatgtgcgccggtcgcgcgc

SEQ ID NO: 5927112 - DNA, 25 bp, Homo sapien
ccgggccgcgtagcgcgacgcaggc

SEQ ID NO: 5927113 - DNA, 25 bp, Homo sapien
gcgccccgccgtaccgtgtcggggc

SEQ ID NO: 5927114 - DNA, 25 bp, Homo sapien
cgcgtgcggcgtcggatcggcggcg

SEQ ID NO: 5927115 - DNA, 25 bp, Homo sapien
ccggggcttgacgcgcgaccgcggc

SEQ ID NO: 5927116 - DNA, 25 bp, Homo sapien
cgcccgtcgtcggggcgagccctcc

SEQ ID NO: 5927117 - DNA, 25 bp, Homo sapien
ggccgagccaacgcgcggtggggcg

SEQ ID NO: 5927118 - DNA, 25 bp, Homo sapien
cgctcgccgactacgcgcggcggcc

SEQ ID NO: 5927119 - DNA, 25 bp, Homo sapien
gcgccttccgcccgtagcgggcgcc

SEQ ID NO: 5927120 - DNA, 25 bp, Homo sapien
cccgccacgcgcgtacggcaccgcg

SEQ ID NO: 5927121 - DNA, 25 bp, Homo sapien
cggggcgccgcgcctcgtaggccac

SEQ ID NO: 5927122 - DNA, 25 bp, Homo sapien
ggccgcatctcggacgcgccccccc

SEQ ID NO: 5927123 - DNA, 25 bp, Homo sapien
cccgccacggtcgagtcggccgccc

SEQ ID NO: 5927124 - DNA, 25 bp, Homo sapien
gagggcacgggcccgtcgcacgcgg

SEQ ID NO: 5927125 - DNA, 25 bp, Homo sapien
acgggcgcacgcgacgaccccgccg

SEQ ID NO: 5927126 - DNA, 25 bp, Homo sapien
ccggtcacgacgcgtgcggggcccc

SEQ ID NO: 5927127 - DNA, 25 bp, Homo sapien
cgacggcgtgccgggtcgacgcccg

SEQ ID NO: 5927128 - DNA, 25 bp, Homo sapien
cgggcccgtcctcgcaacgccgccc

SEQ ID NO: 5927129 - DNA, 25 bp, Homo sapien
gcggcgccggacttccgcgctccgc

SEQ ID NO: 5927130 - DNA, 25 bp, Homo sapien
cggcgccggtcgactcgcacgccgg

SEQ ID NO: 5927131 - DNA, 25 bp, Homo sapien
cgaccctcgacgcgagggccgcggc

SEQ ID NO: 5927132 - DNA, 25 bp, Homo sapien
cctccgccctcgctacgcgccgccc

SEQ ID NO: 5927133 - DNA, 25 bp, Homo sapien
cccctggcgcgaccctacggggcgc

SEQ ID NO: 5927134 - DNA, 25 bp, Homo sapien
ggcggctatcgggcgcgacgccgcc

SEQ ID NO: 5927135 - DNA, 25 bp, Homo sapien
gcgtgcgtacgtccgcggccccgcc

SEQ ID NO: 5927136 - DNA, 25 bp, Homo sapien
ggcggccgcgcccgatcgtcctggc

SEQ ID NO: 5927137 - DNA, 25 bp, Homo sapien
ggagggtcgcgctacgcgcgcggcg

SEQ ID NO: 5927138 - DNA, 25 bp, Homo sapien
gcgcgcggaacgctcgcgaccgggc

SEQ ID NO: 5927139 - DNA, 25 bp, Homo sapien
gccggcccgtcgcgacacgcgagcc

SEQ ID NO: 5927140 - DNA, 25 bp, Homo sapien
cgggcccggtccgacgcggcactcg

SEQ ID NO: 5927141 - DNA, 25 bp, Homo sapien
ggcccggtcgcgcgatcgggcgagg

SEQ ID NO: 5927142 - DNA, 25 bp, Homo sapien
gcccgggcggtcgtacgcacgcggg

SEQ ID NO: 5927143 - DNA, 25 bp, Homo sapien
ccgcccccctggttcggcgcgaggc

SEQ ID NO: 5927144 - DNA, 25 bp, Homo sapien
gccctggcgaccgcgcgttgggccc

SEQ ID NO: 5927145 - DNA, 25 bp, Homo sapien
gcggcgcccgcgacgggttgcgcca

SEQ ID NO: 5927146 - DNA, 25 bp, Homo sapien
ggccaccgcggtccgacgcccccca

SEQ ID NO: 5927147 - DNA, 25 bp, Homo sapien
ggcggcctacgtcggtccgcgcccg

SEQ ID NO: 5927148 - DNA, 25 bp, Homo sapien
ccgagctcgcgctaggccccccgcg

SEQ ID NO: 5927149 - DNA, 25 bp, Homo sapien
ccgcgcacgcgaccgttgccgcccc

SEQ ID NO: 5927150 - DNA, 25 bp, Homo sapien
cgccccttgcgcgaccgtccgcggg

SEQ ID NO: 5927151 - DNA, 25 bp, Homo sapien
cggcgcgtacggcgcgatccggcgg

SEQ ID NO: 5927152 - DNA, 25 bp, Homo sapien
cccccggcgccggtacggaggctgc

SEQ ID NO: 5927153 - DNA, 25 bp, Homo sapien
ccgcggcgggcgcgacgtaccccac

SEQ ID NO: 5927154 - DNA, 25 bp, Homo sapien
cgcggccgcgtcggcacgagcgcac

SEQ ID NO: 5927155 - DNA, 25 bp, Homo sapien
ggcggcgacggcctacgctggggcg

SEQ ID NO: 5927156 - DNA, 25 bp, Homo sapien
ggcgggtaggcccgcgcgtgcgcga

SEQ ID NO: 5927157 - DNA, 25 bp, Homo sapien
gccgcaccgcgcgtcgcaagccggc

SEQ ID NO: 5927158 - DNA, 25 bp, Homo sapien
gcgcgataccccgcgcgaccccccg

SEQ ID NO: 5927159 - DNA, 25 bp, Homo sapien
gccgcccggacgcgtagtggcccgg

SEQ ID NO: 5927160 - DNA, 25 bp, Homo sapien
ccgccccgggtcgcgtcgacgaggc

SEQ ID NO: 5927161 - DNA, 25 bp, Homo sapien
gggggcacgccgcccggtagcgcca

SEQ ID NO: 5927162 - DNA, 25 bp, Homo sapien
ctggggcggtccgctagcggcccgg

SEQ ID NO: 5927163 - DNA, 25 bp, Homo sapien
ctcgcgtcgcgacacggggcgcccg

SEQ ID NO: 5927164 - DNA, 25 bp, Homo sapien
cgcacggtcatccgcgcggcccccg

SEQ ID NO: 5927165 - DNA, 25 bp, Homo sapien
gccagccacgcggacccgtccgcgg

SEQ ID NO: 5927166 - DNA, 25 bp, Homo sapien
ccccagcgctaggcgtcgccgcgcc

SEQ ID NO: 5927167 - DNA, 25 bp, Homo sapien
gcggggtaccgcgtcacgggcggcg

SEQ ID NO: 5927168 - DNA, 25 bp, Homo sapien
gcccgccgaccgcactacgcgcccc

SEQ ID NO: 5927169 - DNA, 25 bp, Homo sapien
cggcgccgatcgaccgcgccccgtg

SEQ ID NO: 5927170 - DNA, 25 bp, Homo sapien
ccgcgcggttcgcccgcgtcggagc

SEQ ID NO: 5927171 - DNA, 25 bp, Homo sapien
ccgccctcgcggcgctgtacgcggg

SEQ ID NO: 5927172 - DNA, 25 bp, Homo sapien
gccgcacgcgggtacgacgggccgg

SEQ ID NO: 5927173 - DNA, 25 bp, Homo sapien
cgcggcacggcacgcgagggtcgcg

SEQ ID NO: 5927174 - DNA, 25 bp, Homo sapien
gccggtgcgcggtcgtgtccgcgcc

SEQ ID NO: 5927175 - DNA, 25 bp, Homo sapien
gcggcgcgaccggctcgaacggccg

SEQ ID NO: 5927176 - DNA, 25 bp, Homo sapien
ggccgccgacgcaccggggcgatgg

SEQ ID NO: 5927177 - DNA, 25 bp, Homo sapien
ccgccgtcgacccggcacggcaggg

SEQ ID NO: 5927178 - DNA, 25 bp, Homo sapien
ggccggcgtcgggcgtacggcaggg

SEQ ID NO: 5927179 - DNA, 25 bp, Homo sapien
ggcgggcggtacgaccgcgcggagc

SEQ ID NO: 5927180 - DNA, 25 bp, Homo sapien
ccggccgtcggtcggcacgccggtc

SEQ ID NO: 5927181 - DNA, 25 bp, Homo sapien
cccgcctcgttgcgcgtcgccgggg

SEQ ID NO: 5927182 - DNA, 25 bp, Homo sapien
ggcgggcgggcgcgatcatgccgcc

SEQ ID NO: 5927183 - DNA, 25 bp, Homo sapien
cgggcgggtcgtcgcgaacggcggc

SEQ ID NO: 5927184 - DNA, 25 bp, Homo sapien
cgcccagctcgtacggccgcgcccc

SEQ ID NO: 5927185 - DNA, 25 bp, Homo sapien
gccgcctacgtcgaccgcgggcccg

SEQ ID NO: 5927186 - DNA, 25 bp, Homo sapien
gggcggtagcgacacgccgcggcgg

SEQ ID NO: 5927187 - DNA, 25 bp, Homo sapien
ggcgccggtgcaacgcgcacggccg

SEQ ID NO: 5927188 - DNA, 25 bp, Homo sapien
cgcgcccggcgcggatagaccgccc

SEQ ID NO: 5927189 - DNA, 25 bp, Homo sapien
cgcggtgccgggtcgacgtggcgcc

SEQ ID NO: 5927190 - DNA, 25 bp, Homo sapien
ggcgggcccgtacgctcggcggcga

SEQ ID NO: 5927191 - DNA, 25 bp, Homo sapien
cgccgcacccggtatgccgcccgcc

SEQ ID NO: 5927192 - DNA, 25 bp, Homo sapien
ggccgccggcgcgcgtagtaggcgc

SEQ ID NO: 5927193 - DNA, 25 bp, Homo sapien
ggccgggcccgtacgcgcatggccc

SEQ ID NO: 5927194 - DNA, 25 bp, Homo sapien
gcccgccggcgtagtccgtggcgcc

SEQ ID NO: 5927195 - DNA, 25 bp, Homo sapien
gacgcgctcccggtacgcgcgcccg

SEQ ID NO: 5927196 - DNA, 25 bp, Homo sapien
gggcgcctgccgaaacgcgcgcccc

SEQ ID NO: 5927197 - DNA, 25 bp, Homo sapien
aggcggccgaccgttgcgcccggcc

SEQ ID NO: 5927198 - DNA, 25 bp, Homo sapien
ccgccgcctacgcgacggacggccc

SEQ ID NO: 5927199 - DNA, 25 bp, Homo sapien
gccgcgcgtcgcggcctaccacggg

SEQ ID NO: 5927200 - DNA, 25 bp, Homo sapien
gctgccggtcgcgccgacggcgagg

SEQ ID NO: 5927201 - DNA, 25 bp, Homo sapien
ggggcgcgtgcggcgtacgtgggcc

SEQ ID NO: 5927202 - DNA, 25 bp, Homo sapien
gcggcggttccgcggcgtacggccc

SEQ ID NO: 5927203 - DNA, 25 bp, Homo sapien
gagcgccgtatgccgcgcggcgggg

SEQ ID NO: 5927204 - DNA, 25 bp, Homo sapien
gcaggccgcggcgtaacccgcccgc

SEQ ID NO: 5927205 - DNA, 25 bp, Homo sapien
gcccgccgcgaccgtacggcgacgc

SEQ ID NO: 5927206 - DNA, 25 bp, Homo sapien
ccccgcggcgtaccccgatgcggcg

SEQ ID NO: 5927207 - DNA, 25 bp, Homo sapien
gcggcggcggccgttgcgtggccca

SEQ ID NO: 5927208 - DNA, 25 bp, Homo sapien
cgcgccccgtagcgacggtcccggc

SEQ ID NO: 5927209 - DNA, 25 bp, Homo sapien
ggcagctacgggcgcctcgcccccg

SEQ ID NO: 5927210 - DNA, 25 bp, Homo sapien
cggcccccacgacgcgcgagggcga

SEQ ID NO: 5927211 - DNA, 25 bp, Homo sapien
gcccgccgatacgcgccccacccgc

SEQ ID NO: 5927212 - DNA, 25 bp, Homo sapien
tgcccctgccgcggtcgagcggccg

SEQ ID NO: 5927213 - DNA, 25 bp, Homo sapien
ctccccggtcccgcgtacggcgcgc

SEQ ID NO: 5927214 - DNA, 25 bp, Homo sapien
cggcgccgctcgtcgcggtaggggc

SEQ ID NO: 5927215 - DNA, 25 bp, Homo sapien
ggcgcgtagaccgcgcgctcccggg

SEQ ID NO: 5927216 - DNA, 25 bp, Homo sapien
ggcggccgaggcgcccgtacgaggg

SEQ ID NO: 5927217 - DNA, 25 bp, Homo sapien
gcggccttcggcccgctacggccgg

SEQ ID NO: 5927218 - DNA, 25 bp, Homo sapien
cgccgctacggtcccgcgccgcctg

SEQ ID NO: 5927219 - DNA, 25 bp, Homo sapien
tgcgcgtacgcgccgaccgcgcccg

SEQ ID NO: 5927220 - DNA, 25 bp, Homo sapien
cgcgcgcgtgcgtcgcaccccggac

SEQ ID NO: 5927221 - DNA, 25 bp, Homo sapien
ggcgccaacgtcccgcgcgccgcga

SEQ ID NO: 5927222 - DNA, 25 bp, Homo sapien
gcgcgggcgcgtgtcgagggctcgg

SEQ ID NO: 5927223 - DNA, 25 bp, Homo sapien
gggcggccgaggcgtaccgtgcgcg

SEQ ID NO: 5927224 - DNA, 25 bp, Homo sapien
ggcgctcgtacgtccgcccggccgg

SEQ ID NO: 5927225 - DNA, 25 bp, Homo sapien
gggccgcggacgcgtaccgctcccg

SEQ ID NO: 5927226 - DNA, 25 bp, Homo sapien
ggggcgtcgaccggcacgccgctgg

SEQ ID NO: 5927227 - DNA, 25 bp, Homo sapien
ctggccccgtacgcgcgacccggcc

SEQ ID NO: 5927228 - DNA, 25 bp, Homo sapien
gacccgccgcgcgtacgtgcccggg

SEQ ID NO: 5927229 - DNA, 25 bp, Homo sapien
ccggcgtacgcgtaccgcggccgcc

SEQ ID NO: 5927230 - DNA, 25 bp, Homo sapien
gcgccatcgaccgcgcgaggccggc

SEQ ID NO: 5927231 - DNA, 25 bp, Homo sapien
tccggagccgcgacggacccggcgc

SEQ ID NO: 5927232 - DNA, 25 bp, Homo sapien
gagcggcgtcgccccgcatcccgcc

SEQ ID NO: 5927233 - DNA, 25 bp, Homo sapien
cgtggcacggcgcacccgtcggccc

SEQ ID NO: 5927234 - DNA, 25 bp, Homo sapien
ggcgcgcgcgtggcgactaccggcg

SEQ ID NO: 5927235 - DNA, 25 bp, Homo sapien
ccccgccgagcgtacggcaggccgg

SEQ ID NO: 5927236 - DNA, 25 bp, Homo sapien
ggcggcgccccgtagtcgaccggcc

SEQ ID NO: 5927237 - DNA, 25 bp, Homo sapien
ccgccacgcgctgggtcgaggcccg

SEQ ID NO: 5927238 - DNA, 25 bp, Homo sapien
gggccgcatcgggtcgccgaggccc

SEQ ID NO: 5927239 - DNA, 25 bp, Homo sapien
ccgccgggtcgtcgcgtgccgggac

SEQ ID NO: 5927240 - DNA, 25 bp, Homo sapien
ggcgtgcgtctaggcgcgggggccg

SEQ ID NO: 5927241 - DNA, 25 bp, Homo sapien
ccgggcacaaccggtccgccgcgcg

SEQ ID NO: 5927242 - DNA, 25 bp, Homo sapien
gggcctcccaaccgcgcgaggcccg

SEQ ID NO: 5927243 - DNA, 25 bp, Homo sapien
gcggccggatacgcgcgggcagggc

SEQ ID NO: 5927244 - DNA, 25 bp, Homo sapien
ggccgctcggtacgggcgcaggccc

SEQ ID NO: 5927245 - DNA, 25 bp, Homo sapien
gcggcagcccggtgcgacgcgaccc

SEQ ID NO: 5927246 - DNA, 25 bp, Homo sapien
gaccgcaccggacgacggcgggcgg

SEQ ID NO: 5927247 - DNA, 25 bp, Homo sapien
gggccggcgccgcgtacatggccgg

SEQ ID NO: 5927248 - DNA, 25 bp, Homo sapien
gccccgctacggtgacgcggccggc

SEQ ID NO: 5927249 - DNA, 25 bp, Homo sapien
ggctgcgccgcgtcgtacgcccgcc

SEQ ID NO: 5927250 - DNA, 25 bp, Homo sapien
cccccgtgacccgcgcgaaccgcgc

SEQ ID NO: 5927251 - DNA, 25 bp, Homo sapien
gcacccacgcgccgttgcgcccgcc

SEQ ID NO: 5927252 - DNA, 25 bp, Homo sapien
caggcgcccggcgacgtaggcggcg

SEQ ID NO: 5927253 - DNA, 25 bp, Homo sapien
gccgcggtaccgtcgagcgccggcc

SEQ ID NO: 5927254 - DNA, 25 bp, Homo sapien
ggagccagcgcgaccggtgcgcggg

SEQ ID NO: 5927255 - DNA, 25 bp, Homo sapien
gcctggcgcgagcgtaccccggccg

SEQ ID NO: 5927256 - DNA, 25 bp, Homo sapien
gagggcaccgtcgcgcctcgggcgg

SEQ ID NO: 5927257 - DNA, 25 bp, Homo sapien
ggccgctcggtcgccggtagccggc

SEQ ID NO: 5927258 - DNA, 25 bp, Homo sapien
ggggggagctcgcgtagcgccggcc

SEQ ID NO: 5927259 - DNA, 25 bp, Homo sapien
ctcaggcgtcgacccgccgcgggcg

SEQ ID NO: 5927260 - DNA, 25 bp, Homo sapien
gccgccaccgcgcgtacggggcgag

SEQ ID NO: 5927261 - DNA, 25 bp, Homo sapien
ccaggggcgcgcgccgtaagccggc

SEQ ID NO: 5927262 - DNA, 25 bp, Homo sapien
gcggccatcgcgcgctagcgcgccg

SEQ ID NO: 5927263 - DNA, 25 bp, Homo sapien
ggcccgtcgtcgcgcacccggcgag

SEQ ID NO: 5927264 - DNA, 25 bp, Homo sapien
gcgcagcgcacgttcgcggcgcggg

SEQ ID NO: 5927265 - DNA, 25 bp, Homo sapien
ccggcgcgcccgcgcgataggtggg

SEQ ID NO: 5927266 - DNA, 25 bp, Homo sapien
ggggaccgttcacgcggggccgcgc

SEQ ID NO: 5927267 - DNA, 25 bp, Homo sapien
ggtgccccgtcgagcgcaggcggcg

SEQ ID NO: 5927268 - DNA, 25 bp, Homo sapien
cggccctatgcgggccgcggccacg

SEQ ID NO: 5927269 - DNA, 25 bp, Homo sapien
ggggcccgcgcggctatgcccccca

SEQ ID NO: 5927270 - DNA, 25 bp, Homo sapien
cccccgctcgaccggccgtgcccac

SEQ ID NO: 5927271 - DNA, 25 bp, Homo sapien
ccctcgtgcgcgcgacagcgcgccg

SEQ ID NO: 5927272 - DNA, 25 bp, Homo sapien
gccgcccgggccgttgcgtgctcgc

SEQ ID NO: 5927273 - DNA, 25 bp, Homo sapien
cggcgcgcgcaacgcccgtgcgggt

SEQ ID NO: 5927274 - DNA, 25 bp, Homo sapien
gcgggtgcgcgctacccgacggccc

SEQ ID NO: 5927275 - DNA, 25 bp, Homo sapien
gacgggcgcgaccgtcgacccggcg

SEQ ID NO: 5927276 - DNA, 25 bp, Homo sapien
ccccccatgcgttcgggcgcgggcc

SEQ ID NO: 5927277 - DNA, 25 bp, Homo sapien
gggcagcgcgtacgtccgcggcgcc

SEQ ID NO: 5927278 - DNA, 25 bp, Homo sapien
cgcccgcgcgtcggctcgagacggg

SEQ ID NO: 5927279 - DNA, 25 bp, Homo sapien
gcgcgcccgacggccgtcgagcgca

SEQ ID NO: 5927280 - DNA, 25 bp, Homo sapien
ggccccaggccgtacgccgcccgct

SEQ ID NO: 5927281 - DNA, 25 bp, Homo sapien
ccgcgggttcgtcgcgcggcgtccg

SEQ ID NO: 5927282 - DNA, 25 bp, Homo sapien
tggccggtacgcgggtcgccggggc

SEQ ID NO: 5927283 - DNA, 25 bp, Homo sapien
cgcgggcgtagcgcggtacgccgcc

SEQ ID NO: 5927284 - DNA, 25 bp, Homo sapien
ccgcggcgtacggcgcgacccagcc

SEQ ID NO: 5927285 - DNA, 25 bp, Homo sapien
ccgcgcgccgtaccgcggtgcagcc

SEQ ID NO: 5927286 - DNA, 25 bp, Homo sapien
cctccccgtcgcgcgcctacccgcg

SEQ ID NO: 5927287 - DNA, 25 bp, Homo sapien
gtggccccgttcggccgagcccggc

SEQ ID NO: 5927288 - DNA, 25 bp, Homo sapien
ggcgcgcgtcgatacccgcgggccc

SEQ ID NO: 5927289 - DNA, 25 bp, Homo sapien
gccgcctctcgagccgacgccgcgc

SEQ ID NO: 5927290 - DNA, 25 bp, Homo sapien
cggcgcgggcggtacggtcgcacgg

SEQ ID NO: 5927291 - DNA, 25 bp, Homo sapien
gtggccgggtacgcggcgtgggccg

SEQ ID NO: 5927292 - DNA, 25 bp, Homo sapien
gccgccctcgtacgtcggcgccccc

SEQ ID NO: 5927293 - DNA, 25 bp, Homo sapien
ccggggcggcgtacgtccgcgagcg

SEQ ID NO: 5927294 - DNA, 25 bp, Homo sapien
ccggcgaccccgcgcgtacgtcgcg

SEQ ID NO: 5927295 - DNA, 25 bp, Homo sapien
ggcgcgctagcgggcgtcggaggcc

SEQ ID NO: 5927296 - DNA, 25 bp, Homo sapien
ggggcgacgcgcgggcctacctggc

SEQ ID NO: 5927297 - DNA, 25 bp, Homo sapien
tggcggtagccgcgcccgagcccgc

SEQ ID NO: 5927298 - DNA, 25 bp, Homo sapien
gcccgccgcggcgctacgaggagcg

SEQ ID NO: 5927299 - DNA, 25 bp, Homo sapien
ggggcggttcggtccgcggcgagcg

SEQ ID NO: 5927300 - DNA, 25 bp, Homo sapien
cgcggggcgaccactcgcgggcgct

SEQ ID NO: 5927301 - DNA, 25 bp, Homo sapien
cgcccccgcgtagcgagggcaggcg

SEQ ID NO: 5927302 - DNA, 25 bp, Homo sapien
gccggccgcggtccgtcgtcccgtg

SEQ ID NO: 5927303 - DNA, 25 bp, Homo sapien
gcggcgtacggcgcgcgcacggacg

SEQ ID NO: 5927304 - DNA, 25 bp, Homo sapien
ggcaggcgcgcgtagcgtggccggg

SEQ ID NO: 5927305 - DNA, 25 bp, Homo sapien
cggacgcggcgggcgttaggcgcgg

SEQ ID NO: 5927306 - DNA, 25 bp, Homo sapien
aggcggacggtcggcacgcgcgccg

SEQ ID NO: 5927307 - DNA, 25 bp, Homo sapien
ggccgccgtcgcgcgtatgggcccc

SEQ ID NO: 5927308 - DNA, 25 bp, Homo sapien
acgggccgacgcgcgaacgcgggcg

SEQ ID NO: 5927309 - DNA, 25 bp, Homo sapien
cgcgggtgcgtacgcagcgggcggg

SEQ ID NO: 5927310 - DNA, 25 bp, Homo sapien
ccggcccggtcgcgtagggcctcgc

SEQ ID NO: 5927311 - DNA, 25 bp, Homo sapien
ccgccgccgacgtatcccggcgcgc

SEQ ID NO: 5927312 - DNA, 25 bp, Homo sapien
agcgggcggtcgttgcgcgcgcggc

SEQ ID NO: 5927313 - DNA, 25 bp, Homo sapien
cgcccgtgcgcggatcgagggccgc

SEQ ID NO: 5927314 - DNA, 25 bp, Homo sapien
gcccgccgcgcgttcggtcgcggtg

SEQ ID NO: 5927315 - DNA, 25 bp, Homo sapien
cggcggcgtcgcgtagggagggcgc

SEQ ID NO: 5927316 - DNA, 25 bp, Homo sapien
ggcgggggccgtacgagcgccacgg

SEQ ID NO: 5927317 - DNA, 25 bp, Homo sapien
ggcagctcgaccgcgcctcggccgc

SEQ ID NO: 5927318 - DNA, 25 bp, Homo sapien
ggcgcgcccgaccgcgcaaccgcac

SEQ ID NO: 5927319 - DNA, 25 bp, Homo sapien
gccaccgtcgaccggcgctgggggc

SEQ ID NO: 5927320 - DNA, 25 bp, Homo sapien
ggccgccggtacggcgcgagtcgcc

SEQ ID NO: 5927321 - DNA, 25 bp, Homo sapien
ccggcgccgtagctcgcgacccgcc

SEQ ID NO: 5927322 - DNA, 25 bp, Homo sapien
gggcagtcgtagcgccgcggcggcg

SEQ ID NO: 5927323 - DNA, 25 bp, Homo sapien
cgccggtggtaccgcgacggcgcgc

SEQ ID NO: 5927324 - DNA, 25 bp, Homo sapien
cggggcgcgcgcacgtcgagtcgcc

SEQ ID NO: 5927325 - DNA, 25 bp, Homo sapien
ggcgccacggtacggcgcgcgcgct

SEQ ID NO: 5927326 - DNA, 25 bp, Homo sapien
tggccggggccgttcgacgcccggc

SEQ ID NO: 5927327 - DNA, 25 bp, Homo sapien
ccgcgcatcggccgcgagccgcgtc

SEQ ID NO: 5927328 - DNA, 25 bp, Homo sapien
cgcccctaacgtcgccggcgcgcgc

SEQ ID NO: 5927329 - DNA, 25 bp, Homo sapien
gggctgtagaccgcccgcgggggcg

SEQ ID NO: 5927330 - DNA, 25 bp, Homo sapien
gcgggctcggaccgcggtcgcgacg

SEQ ID NO: 5927331 - DNA, 25 bp, Homo sapien
gaccccgggacgtgcgtcggcccgc

SEQ ID NO: 5927332 - DNA, 25 bp, Homo sapien
cccgggcgtacgcgcccctgctggc

SEQ ID NO: 5927333 - DNA, 25 bp, Homo sapien
gcgcccccgtgttgcgcaccccccc

SEQ ID NO: 5927334 - DNA, 25 bp, Homo sapien
cgccccgccgcgccgtatctccggc

SEQ ID NO: 5927335 - DNA, 25 bp, Homo sapien
ggtcgccgtacgggcgtcggcgcgc

SEQ ID NO: 5927336 - DNA, 25 bp, Homo sapien
gcccgggtagcgctacgcggcgcgc

SEQ ID NO: 5927337 - DNA, 25 bp, Homo sapien
ggcggcctacgcccgttcggcgccg

SEQ ID NO: 5927338 - DNA, 25 bp, Homo sapien
ggccggcagactcgcgcgtgccggg

SEQ ID NO: 5927339 - DNA, 25 bp, Homo sapien
gggctccgccgatgcgacggcccgg

SEQ ID NO: 5927340 - DNA, 25 bp, Homo sapien
ggcagggtcggaccgcggagggccc

SEQ ID NO: 5927341 - DNA, 25 bp, Homo sapien
cggctcccgcgccgacgtacgcgcg

SEQ ID NO: 5927342 - DNA, 25 bp, Homo sapien
cgccgggtccggaccgcaagcgccc

SEQ ID NO: 5927343 - DNA, 25 bp, Homo sapien
acccgcgcgcgcgatacggggggcc

SEQ ID NO: 5927344 - DNA, 25 bp, Homo sapien
cgcgcagggtcgtacggcggcccgg

SEQ ID NO: 5927345 - DNA, 25 bp, Homo sapien
ggcccgcgcgacgaaccctcgcgcg

SEQ ID NO: 5927346 - DNA, 25 bp, Homo sapien
gggcgcggtagtcgcgcggaccggc

SEQ ID NO: 5927347 - DNA, 25 bp, Homo sapien
ggcgtggtcgacggtccgccgcgcg

SEQ ID NO: 5927348 - DNA, 25 bp, Homo sapien
ccccgcgcagtctacgccgcccccc

SEQ ID NO: 5927349 - DNA, 25 bp, Homo sapien
tccgggccgctccgcggtagggcgc

SEQ ID NO: 5927350 - DNA, 25 bp, Homo sapien
gccgggcgaccgcgcgtctacgcgg

SEQ ID NO: 5927351 - DNA, 25 bp, Homo sapien
ggcgggtacgcgtgggcggcccgct

SEQ ID NO: 5927352 - DNA, 25 bp, Homo sapien
gccgcccgtcgcgtgagcgcgcctc

SEQ ID NO: 5927353 - DNA, 25 bp, Homo sapien
gccgtgtcgaacgggccgcggggcc

SEQ ID NO: 5927354 - DNA, 25 bp, Homo sapien
ccgccccgcgggcgtaccctgcgct

SEQ ID NO: 5927355 - DNA, 25 bp, Homo sapien
gcgcccgtaacggcgcgcgcgggca

SEQ ID NO: 5927356 - DNA, 25 bp, Homo sapien
gcgaggcgcgcgtagcgacggcgcg

SEQ ID NO: 5927357 - DNA, 25 bp, Homo sapien
cgggcctcgcacggtcgaccgggcg

SEQ ID NO: 5927358 - DNA, 25 bp, Homo sapien
cgcggctcgccggtaggcgccgtgc

SEQ ID NO: 5927359 - DNA, 25 bp, Homo sapien
ggcagcgtcgacccgcggtcggggg

SEQ ID NO: 5927360 - DNA, 25 bp, Homo sapien
gcggtgcgccgtacccgtgcggggg

SEQ ID NO: 5927361 - DNA, 25 bp, Homo sapien
ggccgggcgtccgagcggtcggtcc

SEQ ID NO: 5927362 - DNA, 25 bp, Homo sapien
ggcccgtccgacgcgcgactgcgcc

SEQ ID NO: 5927363 - DNA, 25 bp, Homo sapien
gccagcccgtacgacggcccgggcg

SEQ ID NO: 5927364 - DNA, 25 bp, Homo sapien
cccgacccggtcgacgcgtgcgcgc

SEQ ID NO: 5927365 - DNA, 25 bp, Homo sapien
gcgccgccccgcgactacgcgctgc

SEQ ID NO: 5927366 - DNA, 25 bp, Homo sapien
gcctgggtgtcgaccgcgccccggc

SEQ ID NO: 5927367 - DNA, 25 bp, Homo sapien
gcgcgcgccggccgtacgagcgtcg

SEQ ID NO: 5927368 - DNA, 25 bp, Homo sapien
ccccgcggtagcgtccacgggccgc

SEQ ID NO: 5927369 - DNA, 25 bp, Homo sapien
tcgccccggcgcgccttagcgcgcg

SEQ ID NO: 5927370 - DNA, 25 bp, Homo sapien
gcggggtatcgccccgcggtccgcg

SEQ ID NO: 5927371 - DNA, 25 bp, Homo sapien
gggcgggcgcggcttggtacgcggg

SEQ ID NO: 5927372 - DNA, 25 bp, Homo sapien
ggcgcgacggtcgcgggtagccccc

SEQ ID NO: 5927373 - DNA, 25 bp, Homo sapien
ggccgaaccggtggacgcgggccgc

SEQ ID NO: 5927374 - DNA, 25 bp, Homo sapien
agcggcgcgcgcggacgatgcgcgg

SEQ ID NO: 5927375 - DNA, 25 bp, Homo sapien
tgcccccggtccgagcgacgcccgg

SEQ ID NO: 5927376 - DNA, 25 bp, Homo sapien
gcggccgccctatcggcgtgcggcg

SEQ ID NO: 5927377 - DNA, 25 bp, Homo sapien
ggcgccgcgacggaccggtcgcacc

SEQ ID NO: 5927378 - DNA, 25 bp, Homo sapien
ctggcgcccggttgcgcgacccggc

SEQ ID NO: 5927379 - DNA, 25 bp, Homo sapien
ggccgctatcggacggcgggcgccc

SEQ ID NO: 5927380 - DNA, 25 bp, Homo sapien
ccgcgggtccgcgcatccggccacc

SEQ ID NO: 5927381 - DNA, 25 bp, Homo sapien
cggaccatcgcgcgtcgggcgcgcg

SEQ ID NO: 5927382 - DNA, 25 bp, Homo sapien
ggggccgtcgcctacgcgaccgcgg

SEQ ID NO: 5927383 - DNA, 25 bp, Homo sapien
cgcctgccgcggcgtcgtagcccgg

SEQ ID NO: 5927384 - DNA, 25 bp, Homo sapien
ccggccggttcgaccgcgcacgccc

SEQ ID NO: 5927385 - DNA, 25 bp, Homo sapien
ccgcgcggtgccgcgtcgagcgcgt

SEQ ID NO: 5927386 - DNA, 25 bp, Homo sapien
gggctctgtcggtccgcgggccgcg

SEQ ID NO: 5927387 - DNA, 25 bp, Homo sapien
gcccgagcgcggggctatcgcccgg

SEQ ID NO: 5927388 - DNA, 25 bp, Homo sapien
ggcgcggtccgcgcacgacgcggag

SEQ ID NO: 5927389 - DNA, 25 bp, Homo sapien
gtggcgcggtcccggcgtacgcccc

SEQ ID NO: 5927390 - DNA, 25 bp, Homo sapien
ggcccgtagacgcccggcgcctccg

SEQ ID NO: 5927391 - DNA, 25 bp, Homo sapien
gggcgccccgtcacgcggacgcacg

SEQ ID NO: 5927392 - DNA, 25 bp, Homo sapien
gaggcccggctaggcgcgtggcggc

SEQ ID NO: 5927393 - DNA, 25 bp, Homo sapien
aggccccgcgtgcgacacggcgggc

SEQ ID NO: 5927394 - DNA, 25 bp, Homo sapien
cgtccgcggcccgacgtacggccgc

SEQ ID NO: 5927395 - DNA, 25 bp, Homo sapien
ccgcgtcgacgcggtagcccgcgcc

SEQ ID NO: 5927396 - DNA, 25 bp, Homo sapien
cgagcggaccgtcggctcgcccggc

SEQ ID NO: 5927397 - DNA, 25 bp, Homo sapien
gcccgggcgtacgtcggcgctgggc

SEQ ID NO: 5927398 - DNA, 25 bp, Homo sapien
cgctcggcgcgtaccggtcgcgccc

SEQ ID NO: 5927399 - DNA, 25 bp, Homo sapien
ggcccgccgcgcgtaagcccctgcg

SEQ ID NO: 5927400 - DNA, 25 bp, Homo sapien
cgggcgatcgtcgggcgggcctccg

SEQ ID NO: 5927401 - DNA, 25 bp, Homo sapien
gccggcgccctcgcgtcgactgccc

SEQ ID NO: 5927402 - DNA, 25 bp, Homo sapien
ccccgctagcgccccgacggtccgc

SEQ ID NO: 5927403 - DNA, 25 bp, Homo sapien
cgcgggcgtgcgccctacgcagggg

SEQ ID NO: 5927404 - DNA, 25 bp, Homo sapien
cctgccacgcgccgtagcggggccc

SEQ ID NO: 5927405 - DNA, 25 bp, Homo sapien
cggggggtacgcctccgcgtggcgc

SEQ ID NO: 5927406 - DNA, 25 bp, Homo sapien
cggtgcctcgtacggccggcgggcg

SEQ ID NO: 5927407 - DNA, 25 bp, Homo sapien
gccgcccgtacgcgcgagggtcgcc

SEQ ID NO: 5927408 - DNA, 25 bp, Homo sapien
ctcccgacgcgcccgacggcgctgc

SEQ ID NO: 5927409 - DNA, 25 bp, Homo sapien
ggcgggcgcgacggaccgtgggctc

SEQ ID NO: 5927410 - DNA, 25 bp, Homo sapien
gggccctcggacgcccgtccggtgc

SEQ ID NO: 5927411 - DNA, 25 bp, Homo sapien
gggcgctatccgcggccggggcagc

SEQ ID NO: 5927412 - DNA, 25 bp, Homo sapien
ggcccgcgacactacgcgcgccggg

SEQ ID NO: 5927413 - DNA, 25 bp, Homo sapien
cccgcgcgtccgctacgaggcggcc

SEQ ID NO: 5927414 - DNA, 25 bp, Homo sapien
gcgccgcgcgcgttcggaccccagg

SEQ ID NO: 5927415 - DNA, 25 bp, Homo sapien
cgcggcaccggggcgtacggctccg

SEQ ID NO: 5927416 - DNA, 25 bp, Homo sapien
ccccggcccgcgctacgacgcagcg

SEQ ID NO: 5927417 - DNA, 25 bp, Homo sapien
gccccgtaccgcggcgtgtcgggcc

SEQ ID NO: 5927418 - DNA, 25 bp, Homo sapien
cgccgcaaccggtaggcgccgccgg

SEQ ID NO: 5927419 - DNA, 25 bp, Homo sapien
tccgccgggcggtcgtacggcggcc

SEQ ID NO: 5927420 - DNA, 25 bp, Homo sapien
ccgcggcggttgagcccgcccgcca

SEQ ID NO: 5927421 - DNA, 25 bp, Homo sapien
ggctgcaccgcggtacggcgcgcgg

SEQ ID NO: 5927422 - DNA, 25 bp, Homo sapien
gggtcgcgtcgcaccgggctgccgc

SEQ ID NO: 5927423 - DNA, 25 bp, Homo sapien
cgggggccgcgcggatgaccgtgcg

SEQ ID NO: 5927424 - DNA, 25 bp, Homo sapien
cacggcgcgtacgtcggccgccgcg

SEQ ID NO: 5927425 - DNA, 25 bp, Homo sapien
ggggcggcaacggtcgcgtgcgcgg

SEQ ID NO: 5927426 - DNA, 25 bp, Homo sapien
cgcctgccctcgctacgcgggggcg

SEQ ID NO: 5927427 - DNA, 25 bp, Homo sapien
ccatcgccccggtgcgtcggcggcc

SEQ ID NO: 5927428 - DNA, 25 bp, Homo sapien
gctccgacgcgggcgaaccgcgcgg

SEQ ID NO: 5927429 - DNA, 25 bp, Homo sapien
cgccgccgatccgacgccgcacgcg

SEQ ID NO: 5927430 - DNA, 25 bp, Homo sapien
ccgcccgccgtcgtccggtgcggtc

SEQ ID NO: 5927431 - DNA, 25 bp, Homo sapien
gcgcggttcgcgcgggtcacggggg

SEQ ID NO: 5927432 - DNA, 25 bp, Homo sapien
cgccgggtcgacggtcgcgcccgtc

SEQ ID NO: 5927433 - DNA, 25 bp, Homo sapien
tggcgctaccgggcggcgtgccccc

SEQ ID NO: 5927434 - DNA, 25 bp, Homo sapien
ggggggcggcgtagactgcgcgggg

SEQ ID NO: 5927435 - DNA, 25 bp, Homo sapien
cgccgggacgcggccgaacgcgtgc

SEQ ID NO: 5927436 - DNA, 25 bp, Homo sapien
gccctgcccgcgcgtatccggccgc

SEQ ID NO: 5927437 - DNA, 25 bp, Homo sapien
ccggccgggcggacgtacgagcgcc

SEQ ID NO: 5927438 - DNA, 25 bp, Homo sapien
ggcgcggcgacgcctagcgctgggg

SEQ ID NO: 5927439 - DNA, 25 bp, Homo sapien
acgcgctcgacgcggcaccgcgcgg

SEQ ID NO: 5927440 - DNA, 25 bp, Homo sapien
gctgccccggccgcggatagcgccc

SEQ ID NO: 5927441 - DNA, 25 bp, Homo sapien
gcgcgccgtacgcgggaccggggag

SEQ ID NO: 5927442 - DNA, 25 bp, Homo sapien
cccggccacgctacgcgcgcctgcc

SEQ ID NO: 5927443 - DNA, 25 bp, Homo sapien
tgcccgcgcgcgccgttacgggcgc

SEQ ID NO: 5927444 - DNA, 25 bp, Homo sapien
ccggcccgtcgtacccgcgtgcggc

SEQ ID NO: 5927445 - DNA, 25 bp, Homo sapien
cgccgcacgccgatagggcggccgc

SEQ ID NO: 5927446 - DNA, 25 bp, Homo sapien
gtgcgctcgtgccgacgcggccgcg

SEQ ID NO: 5927447 - DNA, 25 bp, Homo sapien
tgcgctcgacggccgtcgggcgcgc

SEQ ID NO: 5927448 - DNA, 25 bp, Homo sapien
cgcccccgcgtcgtgcggaggggct

SEQ ID NO: 5927449 - DNA, 25 bp, Homo sapien
gcggcccgtggacgctaccgcgggg

SEQ ID NO: 5927450 - DNA, 25 bp, Homo sapien
gtggcgggtacggcgccacgcggcc

SEQ ID NO: 5927451 - DNA, 25 bp, Homo sapien
cgccgcatcggggtacgccgcgggg

SEQ ID NO: 5927452 - DNA, 25 bp, Homo sapien
ggggcgtacgccgggaccgcgccac

SEQ ID NO: 5927453 - DNA, 25 bp, Homo sapien
cgcgcacggtacgcctcggccgccc

SEQ ID NO: 5927454 - DNA, 25 bp, Homo sapien
gcggagcgcggaagtccggcgccgc

SEQ ID NO: 5927455 - DNA, 25 bp, Homo sapien
cccgggagcgcgcggtctacgcgcc

SEQ ID NO: 5927456 - DNA, 25 bp, Homo sapien
ccctcgtacgggcgcctcggccgcc

SEQ ID NO: 5927457 - DNA, 25 bp, Homo sapien
gccaggacgatcgggcgcggccgcc

SEQ ID NO: 5927458 - DNA, 25 bp, Homo sapien
gcggaccgtcggggcgctagcgggg

SEQ ID NO: 5927459 - DNA, 25 bp, Homo sapien
ggcggccgcggtacgcgtacgccgg

SEQ ID NO: 5927460 - DNA, 25 bp, Homo sapien
gggcctgcgcccgtaccgagcggcc

SEQ ID NO: 5927461 - DNA, 25 bp, Homo sapien
cccgcggacggtcgcgcaaggggcg

SEQ ID NO: 5927462 - DNA, 25 bp, Homo sapien
gcccagcgccgacgtacgcccgggc

SEQ ID NO: 5927463 - DNA, 25 bp, Homo sapien
ggcggcgtaccgcgctacgcccgcg

SEQ ID NO: 5927464 - DNA, 25 bp, Homo sapien
gggcccgcgggtatcgacgcgcgcc

SEQ ID NO: 5927465 - DNA, 25 bp, Homo sapien
ggcgcacccgtcgcgaacgccgccc

SEQ ID NO: 5927466 - DNA, 25 bp, Homo sapien
gccgggctcggccgaacggggccac

SEQ ID NO: 5927467 - DNA, 25 bp, Homo sapien
gccgccgttcgcgacgacccgcccg

SEQ ID NO: 5927468 - DNA, 25 bp, Homo sapien
cgggcgtcgacccggcacgccgtcg

SEQ ID NO: 5927469 - DNA, 25 bp, Homo sapien
gcggcccgcgtccaccggttcggcc

SEQ ID NO: 5927470 - DNA, 25 bp, Homo sapien
gcgcccggcgcgctagcgaggcgtg

SEQ ID NO: 5927471 - DNA, 25 bp, Homo sapien
gggcgcccgccgtccgatagcggcc

SEQ ID NO: 5927472 - DNA, 25 bp, Homo sapien
cacggggcgcggtcgatcggcgccg

SEQ ID NO: 5927473 - DNA, 25 bp, Homo sapien
gcgcgccgtcgcggtaccaccggcg

SEQ ID NO: 5927474 - DNA, 25 bp, Homo sapien
ggcgcgggctaccgcgtcgacgcgg

SEQ ID NO: 5927475 - DNA, 25 bp, Homo sapien
gcgcgccgcgtagcgctacccgggc

SEQ ID NO: 5927476 - DNA, 25 bp, Homo sapien
gggggggcgcgtccgagatgcggcc

SEQ ID NO: 5927477 - DNA, 25 bp, Homo sapien
ggcgccacgtcgacccggcaccgcg

SEQ ID NO: 5927478 - DNA, 25 bp, Homo sapien
gccggctaccggcgaccgagcggcc

SEQ ID NO: 5927479 - DNA, 25 bp, Homo sapien
gccgcgcgcgcaacgaccgcccgct

SEQ ID NO: 5927480 - DNA, 25 bp, Homo sapien
gcgccgggtccgtcgcggctccgga

SEQ ID NO: 5927481 - DNA, 25 bp, Homo sapien
ggcgggtcgcgagctacggcgccgg

SEQ ID NO: 5927482 - DNA, 25 bp, Homo sapien
gcgggcgggttacgccgcggcctgc

SEQ ID NO: 5927483 - DNA, 25 bp, Homo sapien
ggtgcgaccggtccgtcgcggcgcc

SEQ ID NO: 5927484 - DNA, 25 bp, Homo sapien
gccccgacacggtacggcggggcgc

SEQ ID NO: 5927485 - DNA, 25 bp, Homo sapien
ccgggcgtcgctcggaccgggggca

SEQ ID NO: 5927486 - DNA, 25 bp, Homo sapien
ggccgccgcgcgtagtcggcgagcg

SEQ ID NO: 5927487 - DNA, 25 bp, Homo sapien
gcagcgtgcgcggtcgcgagcccgc

SEQ ID NO: 5927488 - DNA, 25 bp, Homo sapien
cgcgggacccgtcgcgacggccgag

SEQ ID NO: 5927489 - DNA, 25 bp, Homo sapien
gcgccctccctacgcgacgccgccg

SEQ ID NO: 5927490 - DNA, 25 bp, Homo sapien
ccctgccgtgccgggtcgacggcgg

SEQ ID NO: 5927491 - DNA, 25 bp, Homo sapien
gggggggtgcgcaacacgggggcgc

SEQ ID NO: 5927492 - DNA, 25 bp, Homo sapien
ccgggccgtcgcatcggcggagccc

SEQ ID NO: 5927493 - DNA, 25 bp, Homo sapien
agcgggccgcccacgcgtacccgcc

SEQ ID NO: 5927494 - DNA, 25 bp, Homo sapien
cggaggcccgcccgacgatcgcccg

SEQ ID NO: 5927495 - DNA, 25 bp, Homo sapien
cgacgctcgtacggccggcgcgcgc

SEQ ID NO: 5927496 - DNA, 25 bp, Homo sapien
cccgcccgctgcgtacgcacccgcg

SEQ ID NO: 5927497 - DNA, 25 bp, Homo sapien
gcgcggcggccgcgtatcgcgccct

SEQ ID NO: 5927498 - DNA, 25 bp, Homo sapien
gcccctaccgcgacgagcggcgccg

SEQ ID NO: 5927499 - DNA, 25 bp, Homo sapien
cgcggcccgcggaccgacagagccc

SEQ ID NO: 5927500 - DNA, 25 bp, Homo sapien
cccgcgccgcgaacgtgcgctgcgc

SEQ ID NO: 5927501 - DNA, 25 bp, Homo sapien
ggcgccgcggacgtacgcgctgccc

SEQ ID NO: 5927502 - DNA, 25 bp, Homo sapien
cgccccaccgcgcgttggctcggcc

SEQ ID NO: 5927503 - DNA, 25 bp, Homo sapien
gtcccggcacgcgacgacccggcgg

SEQ ID NO: 5927504 - DNA, 25 bp, Homo sapien
gggggcgccgacgtacgagggcggc

SEQ ID NO: 5927505 - DNA, 25 bp, Homo sapien
ggcggcgtcgcgcccgatagccgcc

SEQ ID NO: 5927506 - DNA, 25 bp, Homo sapien
gcggccgtacgtcgggccgcggacg

SEQ ID NO: 5927507 - DNA, 25 bp, Homo sapien
cccacctatcgcgcgggcgcgccgg

SEQ ID NO: 5927508 - DNA, 25 bp, Homo sapien
cgggcctcgacccagcgcgtggcgg

SEQ ID NO: 5927509 - DNA, 25 bp, Homo sapien
ccagcggcgtgccggtcgacgcccc

SEQ ID NO: 5927510 - DNA, 25 bp, Homo sapien
gcagcgccgtcgggcgcgtcgggag

SEQ ID NO: 5927511 - DNA, 25 bp, Homo sapien
ggcgcagtcgcgcgtcggacgggcc

SEQ ID NO: 5927512 - DNA, 25 bp, Homo sapien
ggcgaccctcgcgcgtacgggcggc

SEQ ID NO: 5927513 - DNA, 25 bp, Homo sapien
cccctgcgtagggcgcacgcccgcg

SEQ ID NO: 5927514 - DNA, 25 bp, Homo sapien
ggggcgcggccgtacgagctgggcg

SEQ ID NO: 5927515 - DNA, 25 bp, Homo sapien
gccggccgcgtcaccgtagcggggc

SEQ ID NO: 5927516 - DNA, 25 bp, Homo sapien
gggggctacccgcgaccgtcgcgcc

SEQ ID NO: 5927517 - DNA, 25 bp, Homo sapien
ccccgccgcgcggcatacggcgctc

SEQ ID NO: 5927518 - DNA, 25 bp, Homo sapien
gccgcggtcgcgcgtcaagccccgg

SEQ ID NO: 5927519 - DNA, 25 bp, Homo sapien
gccaggtaggcccgcgcgtcgcccc

SEQ ID NO: 5927520 - DNA, 25 bp, Homo sapien
ggccgccgtacgaccgcccggcgga

SEQ ID NO: 5927521 - DNA, 25 bp, Homo sapien
cgggcgcggtcggcgcgtacgcgca

SEQ ID NO: 5927522 - DNA, 25 bp, Homo sapien
cgagtgccgcgtcggaccgggcccg

SEQ ID NO: 5927523 - DNA, 25 bp, Homo sapien
cggcccacgccgcgtacccggccac

SEQ ID NO: 5927524 - DNA, 25 bp, Homo sapien
gggcggcgttgcgaggacgggcccg

SEQ ID NO: 5927525 - DNA, 25 bp, Homo sapien
cgctcgcggacgtacgccgccccgg

SEQ ID NO: 5927526 - DNA, 25 bp, Homo sapien
gcgccacgcggaggcgtaccccccg

SEQ ID NO: 5927527 - DNA, 25 bp, Homo sapien
gcgcggccccgcgtgaacggtcccc

SEQ ID NO: 5927528 - DNA, 25 bp, Homo sapien
gcacggcgcctaccggcgagccgcg

SEQ ID NO: 5927529 - DNA, 25 bp, Homo sapien
gcgcgccgggatacgtcggcggcgg

SEQ ID NO: 5927530 - DNA, 25 bp, Homo sapien
cgggcgcgcgtaccgggagcgcgtc

SEQ ID NO: 5927531 - DNA, 25 bp, Homo sapien
ggctgggtcgcgccgtacgccgcgg

SEQ ID NO: 5927532 - DNA, 25 bp, Homo sapien
ccgggtcgctacgggcgtgcgcggg

SEQ ID NO: 5927533 - DNA, 25 bp, Homo sapien
ggcgcccgctacgggcggaaggcgc

SEQ ID NO: 5927534 - DNA, 25 bp, Homo sapien
gcccgcgtaagccgcgcgacccccg

SEQ ID NO: 5927535 - DNA, 25 bp, Homo sapien
ggcccacgtacgccgcacgcgcccc

SEQ ID NO: 5927536 - DNA, 25 bp, Homo sapien
cccgcgcaccggtcgcgctggctcc

SEQ ID NO: 5927537 - DNA, 25 bp, Homo sapien
ggccgcctcgtagcggacgcgcggg

SEQ ID NO: 5927538 - DNA, 25 bp, Homo sapien
cgggcctcgcgcggttgggaggccc

SEQ ID NO: 5927539 - DNA, 25 bp, Homo sapien
cgcgcgctaaggcgcgccggggcga

SEQ ID NO: 5927540 - DNA, 25 bp, Homo sapien
agccgccgacgtcgggacgcgcggg

SEQ ID NO: 5927541 - DNA, 25 bp, Homo sapien
cccgcgtgcgtacgaccgcccgggc

SEQ ID NO: 5927542 - DNA, 25 bp, Homo sapien
gctccgcgcggtcgtaccgcccgcc

SEQ ID NO: 5927543 - DNA, 25 bp, Homo sapien
gccgggcgagccgacggtccgctcg

SEQ ID NO: 5927544 - DNA, 25 bp, Homo sapien
cggcgcgctgtcgcgcgcacgaggg

SEQ ID NO: 5927545 - DNA, 25 bp, Homo sapien
ggaccgaccgctcggacgcccggcc

SEQ ID NO: 5927546 - DNA, 25 bp, Homo sapien
cgggagcggtacgcgtccgcggccc

SEQ ID NO: 5927547 - DNA, 25 bp, Homo sapien
gagcccacggtccgtcgcgcccgcc

SEQ ID NO: 5927548 - DNA, 25 bp, Homo sapien
ccggcggcgcctaccggttgcggcg

SEQ ID NO: 5927549 - DNA, 25 bp, Homo sapien
tcgccgccgagcgtacgggcccgcc

SEQ ID NO: 5927550 - DNA, 25 bp, Homo sapien
gccgccgtccgcggtcgaccgctgg

SEQ ID NO: 5927551 - DNA, 25 bp, Homo sapien
ccccgcgatcgcggaacgcggccgg

SEQ ID NO: 5927552 - DNA, 25 bp, Homo sapien
cgcgcgtacgtcggcgcgggagccg

SEQ ID NO: 5927553 - DNA, 25 bp, Homo sapien
gccggggcgcggtcgacacccaggc

SEQ ID NO: 5927554 - DNA, 25 bp, Homo sapien
gggccatgcgcgtacgggcccggcc

SEQ ID NO: 5927555 - DNA, 25 bp, Homo sapien
ccggccatgtacgcggcgccggccc

SEQ ID NO: 5927556 - DNA, 25 bp, Homo sapien
cgcgcgcccgacgcgcgatggtccg

SEQ ID NO: 5927557 - DNA, 25 bp, Homo sapien
tggggggcatagccgcgcgggcccc

SEQ ID NO: 5927558 - DNA, 25 bp, Homo sapien
gcaccggacgggcgtccgagggccc

SEQ ID NO: 5927559 - DNA, 25 bp, Homo sapien
agcgcgcgcgccgtaccgtggcgcc

SEQ ID NO: 5927560 - DNA, 25 bp, Homo sapien
gcgggctcgggcgcggctaccgcca

SEQ ID NO: 5927561 - DNA, 25 bp, Homo sapien
cgctgcgtcgtagcgcgggccgggg

SEQ ID NO: 5927562 - DNA, 25 bp, Homo sapien
gaccggcgtgccgaccgacggccgg

SEQ ID NO: 5927563 - DNA, 25 bp, Homo sapien
ggcctccgacgcccgctagcgcgcc

SEQ ID NO: 5927564 - DNA, 25 bp, Homo sapien
cgcgcggcggaccgtcgaccacgcc

SEQ ID NO: 5927565 - DNA, 25 bp, Homo sapien
cgggcccgcggtcgacgtaggcggc

SEQ ID NO: 5927566 - DNA, 25 bp, Homo sapien
ccgggccactacgcgtccgggcggc

SEQ ID NO: 5927567 - DNA, 25 bp, Homo sapien
gcccccagcgccggtcgacggtggc

SEQ ID NO: 5927568 - DNA, 25 bp, Homo sapien
gcgcagagccgtcgtgcgcggggcc

SEQ ID NO: 5927569 - DNA, 25 bp, Homo sapien
ccgggccgccgtacgaccctgcgcg

SEQ ID NO: 5927570 - DNA, 25 bp, Homo sapien
ggccgccgagcggggtacgcaccgg

SEQ ID NO: 5927571 - DNA, 25 bp, Homo sapien
gggcgtgcgcggtcgaaccggccgg

SEQ ID NO: 5927572 - DNA, 25 bp, Homo sapien
cgccgcccgtgacgcggtaccccgc

SEQ ID NO: 5927573 - DNA, 25 bp, Homo sapien
ccgcgtgcgacgggcccgtgccctc

SEQ ID NO: 5927574 - DNA, 25 bp, Homo sapien
gcgccccgtagggtcgcgccagggg

SEQ ID NO: 5927575 - DNA, 25 bp, Homo sapien
cggggggtcgcgcggggtatcgcgc

SEQ ID NO: 5927576 - DNA, 25 bp, Homo sapien
cggccggggtacgctcgcgccaggc

SEQ ID NO: 5927577 - DNA, 25 bp, Homo sapien
gtggcgccgggggggcgtacgcacc

SEQ ID NO: 5927578 - DNA, 25 bp, Homo sapien
tgccggtagcgcgtcgggcgcgcgg

SEQ ID NO: 5927579 - DNA, 25 bp, Homo sapien
gccggcttgcgacgcgcggtgcggc

SEQ ID NO: 5927580 - DNA, 25 bp, Homo sapien
ggccggcgctcgacggtaccgcggc

SEQ ID NO: 5927581 - DNA, 25 bp, Homo sapien
tcgcgcacgcgcgggcctacccgcc

SEQ ID NO: 5927582 - DNA, 25 bp, Homo sapien
ggggccccgcacgcgtcgtgaccgg

SEQ ID NO: 5927583 - DNA, 25 bp, Homo sapien
gcctcgcgccgaaccaggggggcgg

SEQ ID NO: 5927584 - DNA, 25 bp, Homo sapien
ccgggccgctagcggaccgccccag

SEQ ID NO: 5927585 - DNA, 25 bp, Homo sapien
cgcggggggcctagcgcgagctcgg

SEQ ID NO: 5927586 - DNA, 25 bp, Homo sapien
cgcgccgtcgctacgcgcgcctcgc

SEQ ID NO: 5927587 - DNA, 25 bp, Homo sapien
ccgcgcatcgtccgcgcgcgccgct

SEQ ID NO: 5927588 - DNA, 25 bp, Homo sapien
cacgggacgacggaccgcggccggc

SEQ ID NO: 5927589 - DNA, 25 bp, Homo sapien
ctcgccccgtacgcgcggtggcggc

SEQ ID NO: 5927590 - DNA, 25 bp, Homo sapien
cgcccccgcgggcggtctacagccc

SEQ ID NO: 5927591 - DNA, 25 bp, Homo sapien
cccgcgtaccaagccgcgcccgccc

SEQ ID NO: 5927592 - DNA, 25 bp, Homo sapien
cgccgcctacgtcgccgggcgcctg

SEQ ID NO: 5927593 - DNA, 25 bp, Homo sapien
tcgccctcgcgcgtcgtgggggccg

SEQ ID NO: 5927594 - DNA, 25 bp, Homo sapien
ggcggggccgcggacgtacgcacgc

SEQ ID NO: 5927595 - DNA, 25 bp, Homo sapien
gccagcaggggcgcgtacgcccggg

SEQ ID NO: 5927596 - DNA, 25 bp, Homo sapien
cgggcgcggaccgacgtaggccgcc

SEQ ID NO: 5927597 - DNA, 25 bp, Homo sapien
cggcgccgaacgggcgtaggccgcc

SEQ ID NO: 5927598 - DNA, 25 bp, Homo sapien
cgccggtagtcgccacgcgcgcgcc

SEQ ID NO: 5927599 - DNA, 25 bp, Homo sapien
cccggcacgcgcgagtctgccggcc

SEQ ID NO: 5927600 - DNA, 25 bp, Homo sapien
cggcccccgcgcctagacgcacgcc

SEQ ID NO: 5927601 - DNA, 25 bp, Homo sapien
cgcccggtcgaccgtgcgaggcccg

SEQ ID NO: 5927602 - DNA, 25 bp, Homo sapien
ccgcggacgggtccgcgtggctggc

SEQ ID NO: 5927603 - DNA, 25 bp, Homo sapien
ggtcggtacggggcgcacccgcgcg

SEQ ID NO: 5927604 - DNA, 25 bp, Homo sapien
gtgcggttgcgcggtcgggcgcgcc

SEQ ID NO: 5927605 - DNA, 25 bp, Homo sapien
ggcggcatgatcgcgcccgcccgcc

SEQ ID NO: 5927606 - DNA, 25 bp, Homo sapien
cgcgggcggtcccgatacgccccgc

SEQ ID NO: 5927607 - DNA, 25 bp, Homo sapien
cgcggaccgcggggcgataccccgc

SEQ ID NO: 5927608 - DNA, 25 bp, Homo sapien
gcgccctaccgcggagcggcccgga

SEQ ID NO: 5927609 - DNA, 25 bp, Homo sapien
cctggggtccgaacgcgcgcggcgc

SEQ ID NO: 5927610 - DNA, 25 bp, Homo sapien
cgggcgccccgtgtcgcgacgcgag

SEQ ID NO: 5927611 - DNA, 25 bp, Homo sapien
gggcgcgaccggtacgcgccgagcg

SEQ ID NO: 5927612 - DNA, 25 bp, Homo sapien
gcgggccgcgcgaacgaccgacccg

SEQ ID NO: 5927613 - DNA, 25 bp, Homo sapien
cccccgcacgggtacggcgcaccgc

SEQ ID NO: 5927614 - DNA, 25 bp, Homo sapien
gcgccgcccgtcgcgcctaccgggt

SEQ ID NO: 5927615 - DNA, 25 bp, Homo sapien
ggccgggtcgcgcgtacggggccag

SEQ ID NO: 5927616 - DNA, 25 bp, Homo sapien
ccctgccgtacgcccgacgccggcc

SEQ ID NO: 5927617 - DNA, 25 bp, Homo sapien
cggcggggtcgtcgcgtgcgcccgt

SEQ ID NO: 5927618 - DNA, 25 bp, Homo sapien
ccgcgcctaacgcccgccgcgtccg

SEQ ID NO: 5927619 - DNA, 25 bp, Homo sapien
ggcgggatgcggggcgacgccgctc

SEQ ID NO: 5927620 - DNA, 25 bp, Homo sapien
ggggcacccccgcgtcgagaggccg

SEQ ID NO: 5927621 - DNA, 25 bp, Homo sapien
gggcgcttgcggtccggacccggcg

SEQ ID NO: 5927622 - DNA, 25 bp, Homo sapien
ggccggtcgactacggggcgccgcc

SEQ ID NO: 5927623 - DNA, 25 bp, Homo sapien
gggcccaacgcgcggtcgccagggc

SEQ ID NO: 5927624 - DNA, 25 bp, Homo sapien
gggcagccggcataccgcggggcgc

SEQ ID NO: 5927625 - DNA, 25 bp, Homo sapien
tcccggccgcgttgcggcagccggc

SEQ ID NO: 5927626 - DNA, 25 bp, Homo sapien
gggccgacgggtgcgccgtgccacg

SEQ ID NO: 5927627 - DNA, 25 bp, Homo sapien
gcgcgccgacgcccgtacggcgacc

SEQ ID NO: 5927628 - DNA, 25 bp, Homo sapien
tgggccacgcaacggccgccgccgc

SEQ ID NO: 5927629 - DNA, 25 bp, Homo sapien
cgtggccgcggcccgcatagggccg

SEQ ID NO: 5927630 - DNA, 25 bp, Homo sapien
ggcgggcgtacgacgcggcgcagcc

SEQ ID NO: 5927631 - DNA, 25 bp, Homo sapien
cctcgcccgatcgcgcgaccgggcc

SEQ ID NO: 5927632 - DNA, 25 bp, Homo sapien
gccgccacgcgcctagccgggcctc

SEQ ID NO: 5927633 - DNA, 25 bp, Homo sapien
ggcgggcgcaacggcgcgtgggtgc

SEQ ID NO: 5927634 - DNA, 25 bp, Homo sapien
cccgtctcgagccgacgcgcgggcg

SEQ ID NO: 5927635 - DNA, 25 bp, Homo sapien
ggctcgcgtgtcgcgacgggccggc

SEQ ID NO: 5927636 - DNA, 25 bp, Homo sapien
gcgagcacgcaacggcccgggcggc

SEQ ID NO: 5927637 - DNA, 25 bp, Homo sapien
cccggcgcgcgtagtgtcgcgggcc

SEQ ID NO: 5927638 - DNA, 25 bp, Homo sapien
gcggccgaggcgcggtcgagctgcc

SEQ ID NO: 5927639 - DNA, 25 bp, Homo sapien
gggcctcggcgacccgatgcggccc

SEQ ID NO: 5927640 - DNA, 25 bp, Homo sapien
cccgcgtacagcgccgcgagggcgg

SEQ ID NO: 5927641 - DNA, 25 bp, Homo sapien
gcgggccgacgcacgtcccggggtc

SEQ ID NO: 5927642 - DNA, 25 bp, Homo sapien
gcccgccgtgtcgcacgcggggcct

SEQ ID NO: 5927643 - DNA, 25 bp, Homo sapien
cgcgacgtacgcgcggggtcgccgg

SEQ ID NO: 5927644 - DNA, 25 bp, Homo sapien
gggccccgctacggcgcgtggcagg

SEQ ID NO: 5927645 - DNA, 25 bp, Homo sapien
gggcagtcgacgcgagggcgccggc

SEQ ID NO: 5927646 - DNA, 25 bp, Homo sapien
gggcggccgactcgaccgtggcggg

SEQ ID NO: 5927647 - DNA, 25 bp, Homo sapien
cgcccgcggcgggtcgacgcctgag

SEQ ID NO: 5927648 - DNA, 25 bp, Homo sapien
ctcgccgggtgcgcgacgacgggcc

SEQ ID NO: 5927649 - DNA, 25 bp, Homo sapien
gggccgtccgtcgcgtaggcggcgg

SEQ ID NO: 5927650 - DNA, 25 bp, Homo sapien
cggccgtgcgcgttgcaccggcgcc

SEQ ID NO: 5927651 - DNA, 25 bp, Homo sapien
acccgcacgggcgttgcgcgcgccg

SEQ ID NO: 5927652 - DNA, 25 bp, Homo sapien
cgctcgccgcggaccgaaccgcccc

SEQ ID NO: 5927653 - DNA, 25 bp, Homo sapien
ggccccccgtatcgcgcgcgcgggt

SEQ ID NO: 5927654 - DNA, 25 bp, Homo sapien
gcctcgtcgacgcgacccggggcgg

SEQ ID NO: 5927655 - DNA, 25 bp, Homo sapien
gcgaggccctacgcgaccgggccgg

SEQ ID NO: 5927656 - DNA, 25 bp, Homo sapien
gtccggggtgcgacgcacgcgcgcg

SEQ ID NO: 5927657 - DNA, 25 bp, Homo sapien
cggaggcgccgggcgtctacgggcc

SEQ ID NO: 5927658 - DNA, 25 bp, Homo sapien
agcgcagggtacgcccgcggggcgg

SEQ ID NO: 5927659 - DNA, 25 bp, Homo sapien
gccggagatacggcgcggcggggcg

SEQ ID NO: 5927660 - DNA, 25 bp, Homo sapien
cgtgcgtccgcgtgacggggcgccc

SEQ ID NO: 5927661 - DNA, 25 bp, Homo sapien
cgcccgccggccgtacgaggcaccg

SEQ ID NO: 5927662 - DNA, 25 bp, Homo sapien
cgcgcgagggttcgtcgcgcgggcc

SEQ ID NO: 5927663 - DNA, 25 bp, Homo sapien
ccgggctacgacgccgcggcaggcg

SEQ ID NO: 5927664 - DNA, 25 bp, Homo sapien
gtggggtacgtcgcgcccgccgcgg

SEQ ID NO: 5927665 - DNA, 25 bp, Homo sapien
gccggcctcgcgcggtcgatggcgc

SEQ ID NO: 5927666 - DNA, 25 bp, Homo sapien
ccgtggcgctcgtacggcccccgcc

SEQ ID NO: 5927667 - DNA, 25 bp, Homo sapien
ccgcgctgcgcggttacgcgggcgg

SEQ ID NO: 5927668 - DNA, 25 bp, Homo sapien
gccgccgcggtcgaccgtccggcac

SEQ ID NO: 5927669 - DNA, 25 bp, Homo sapien
cgcaggggcttacgcgcggcgggcc

SEQ ID NO: 5927670 - DNA, 25 bp, Homo sapien
ccggcgtgcgagtcgaccggcgccg

SEQ ID NO: 5927671 - DNA, 25 bp, Homo sapien
ggcgcggacacgaccgcgcaccggc

SEQ ID NO: 5927672 - DNA, 25 bp, Homo sapien
ggcgccacggactacgccggcgggc

SEQ ID NO: 5927673 - DNA, 25 bp, Homo sapien
cgcgaccctcgcgtgccgtgccgcg

SEQ ID NO: 5927674 - DNA, 25 bp, Homo sapien
ccgcgtagacgcgcggtcgcccggc

SEQ ID NO: 5927675 - DNA, 25 bp, Homo sapien
gccggcttacggcgcgcgcccctgg

SEQ ID NO: 5927676 - DNA, 25 bp, Homo sapien
ggcccgacacgccgcggtacggggc

SEQ ID NO: 5927677 - DNA, 25 bp, Homo sapien
cgcccgggccgtcgtacgggctggc

SEQ ID NO: 5927678 - DNA, 25 bp, Homo sapien
gcagcctccgtaccggcgccggggg

SEQ ID NO: 5927679 - DNA, 25 bp, Homo sapien
cgtcgcgaccgcggtccgagcccgc

SEQ ID NO: 5927680 - DNA, 25 bp, Homo sapien
cggggctacggttcgcgcggcgccg

SEQ ID NO: 5927681 - DNA, 25 bp, Homo sapien
agccccccgcgtacgacggcgccgc

SEQ ID NO: 5927682 - DNA, 25 bp, Homo sapien
ggccggcgctacgcgagctcccccc

SEQ ID NO: 5927683 - DNA, 25 bp, Homo sapien
cgctcctcgtagcgccgcggcgggc

SEQ ID NO: 5927684 - DNA, 25 bp, Homo sapien
gcgtcgccgtacggtcgcggcgggc

SEQ ID NO: 5927685 - DNA, 25 bp, Homo sapien
caccgcgaccgaacgcgcggcgggc

SEQ ID NO: 5927686 - DNA, 25 bp, Homo sapien
gggccctccgcggtccgaccctgcc

SEQ ID NO: 5927687 - DNA, 25 bp, Homo sapien
cccccgaccgcgggtcgacgctgcc

SEQ ID NO: 5927688 - DNA, 25 bp, Homo sapien
gccgcggccctcgcgtcgagggtcg

SEQ ID NO: 5927689 - DNA, 25 bp, Homo sapien
gaggcgcgctcacgcgacgggcggc

SEQ ID NO: 5927690 - DNA, 25 bp, Homo sapien
ggccgggcgcaacggtcggccgcct

SEQ ID NO: 5927691 - DNA, 25 bp, Homo sapien
cgccgcgcgcgtagcgcgaccctcc

SEQ ID NO: 5927692 - DNA, 25 bp, Homo sapien
cgggggcgaggcgcccgtagctgcc

SEQ ID NO: 5927693 - DNA, 25 bp, Homo sapien
cgcccgcgttcgcgcgtcggcccgt

SEQ ID NO: 5927694 - DNA, 25 bp, Homo sapien
ggccccgcggcccgttcgacacggc

SEQ ID NO: 5927695 - DNA, 25 bp, Homo sapien
ccgcggtcgcgtaggcgacggcccc

SEQ ID NO: 5927696 - DNA, 25 bp, Homo sapien
gccgggtcgcgcaaccgggcgccag

SEQ ID NO: 5927697 - DNA, 25 bp, Homo sapien
tggggggcgtcggaccgcggtggcc

SEQ ID NO: 5927698 - DNA, 25 bp, Homo sapien
tggcggcggccgcgtaaccgccgcg

SEQ ID NO: 5927699 - DNA, 25 bp, Homo sapien
gcccggtcgcgagcgttccgcgcgc

SEQ ID NO: 5927700 - DNA, 25 bp, Homo sapien
cgtccgtgcgcgcgccgtacgccgc

SEQ ID NO: 5927701 - DNA, 25 bp, Homo sapien
gccgggaccgtcgctacggggcgcg

SEQ ID NO: 5927702 - DNA, 25 bp, Homo sapien
ccgccggatcgcgccgtacgcgccg

SEQ ID NO: 5927703 - DNA, 25 bp, Homo sapien
cccgggcacgtacgcgcggcgggtc

SEQ ID NO: 5927704 - DNA, 25 bp, Homo sapien
cgccccagcgtaggccgtcgccgcc

SEQ ID NO: 5927705 - DNA, 25 bp, Homo sapien
tcgcggcgcgcgggacgttggcgcc

SEQ ID NO: 5927706 - DNA, 25 bp, Homo sapien
ggggcgcgcgtttcggcaggcgccc

SEQ ID NO: 5927707 - DNA, 25 bp, Homo sapien
cggcgcgcgtgccgaccgtccgcct

SEQ ID NO: 5927708 - DNA, 25 bp, Homo sapien
cgcgcggcggaccggttgtgcccgg

SEQ ID NO: 5927709 - DNA, 25 bp, Homo sapien
cccgtggtaggccgcgacgcgcggc

SEQ ID NO: 5927710 - DNA, 25 bp, Homo sapien
gtgggcacggccggtcgagcggggg

SEQ ID NO: 5927711 - DNA, 25 bp, Homo sapien
gggccgtacgccgcggaaccgccgc

SEQ ID NO: 5927712 - DNA, 25 bp, Homo sapien
cggcgcgctagcgcgcgatggccgc

SEQ ID NO: 5927713 - DNA, 25 bp, Homo sapien
gcgcgcgaccggcgcacatggccgc

SEQ ID NO: 5927714 - DNA, 25 bp, Homo sapien
caggcggcgcgggaccgtagcggcg

SEQ ID NO: 5927715 - DNA, 25 bp, Homo sapien
cggacgccgcgcgacgaacccgcgg

SEQ ID NO: 5927716 - DNA, 25 bp, Homo sapien
gcgcggcgtcggctcgagaggcggc

SEQ ID NO: 5927717 - DNA, 25 bp, Homo sapien
gcctgcgtcgcgctacgcggcccgg

SEQ ID NO: 5927718 - DNA, 25 bp, Homo sapien
gtggcggctcgtcggtccggccgcg

SEQ ID NO: 5927719 - DNA, 25 bp, Homo sapien
gggccgtcgggtagcgcgcacccgc

SEQ ID NO: 5927720 - DNA, 25 bp, Homo sapien
gacgcggctcgcggccgatgcgcgg

SEQ ID NO: 5927721 - DNA, 25 bp, Homo sapien
ccgtgcgaccgtaccgcccgcgccg

SEQ ID NO: 5927722 - DNA, 25 bp, Homo sapien
cggccgctcgaccgcggcaggggca

SEQ ID NO: 5927723 - DNA, 25 bp, Homo sapien
ggcgggcggcataccgggtgcggcg

SEQ ID NO: 5927724 - DNA, 25 bp, Homo sapien
ggagggctcgccccgacgacgggcg

SEQ ID NO: 5927725 - DNA, 25 bp, Homo sapien
gcgcgcgccggcgacgttaggggcg

SEQ ID NO: 5927726 - DNA, 25 bp, Homo sapien
cggagccgtacgccccggtgccgcg

SEQ ID NO: 5927727 - DNA, 25 bp, Homo sapien
ggcgcgccgcggtacgacgggaggc

SEQ ID NO: 5927728 - DNA, 25 bp, Homo sapien
cgcgggtaggcgcgcgacggggagg

SEQ ID NO: 5927729 - DNA, 25 bp, Homo sapien
ggtggccggatgcgcggacccgcgg

SEQ ID NO: 5927730 - DNA, 25 bp, Homo sapien
ggaggggcgactacgcgccgcccgg

SEQ ID NO: 5927731 - DNA, 25 bp, Homo sapien
gccccggcgacccgcgtaccggcca

SEQ ID NO: 5927732 - DNA, 25 bp, Homo sapien
gccgggcgtcgaacggccccggcca

SEQ ID NO: 5927733 - DNA, 25 bp, Homo sapien
ccgcccgaggcgcgacggtgccctc

SEQ ID NO: 5927734 - DNA, 25 bp, Homo sapien
cggccgttcgagccggtcgcgccgc

SEQ ID NO: 5927735 - DNA, 25 bp, Homo sapien
ctccgcgtcgtgcgcggaccgcgcc

SEQ ID NO: 5927736 - DNA, 25 bp, Homo sapien
gggcggcgcgtagcgagggcggagg

SEQ ID NO: 5927737 - DNA, 25 bp, Homo sapien
tggcgcaacccgtcgcgggcgccgc

SEQ ID NO: 5927738 - DNA, 25 bp, Homo sapien
cgcggtgccgtacgcgcgtggcggg

SEQ ID NO: 5927739 - DNA, 25 bp, Homo sapien
gggcggcgtagcgcccgtgcccctg

SEQ ID NO: 5927740 - DNA, 25 bp, Homo sapien
agcgggcggcgtacggcctggggcc

SEQ ID NO: 5927741 - DNA, 25 bp, Homo sapien
gtggcctacgaggcgcggcgccccg

SEQ ID NO: 5927742 - DNA, 25 bp, Homo sapien
ccccggcgacgcgcaacgaggcggg

SEQ ID NO: 5927743 - DNA, 25 bp, Homo sapien
gcgggtggggcgcgtatcggcgggc

SEQ ID NO: 5927744 - DNA, 25 bp, Homo sapien
ggcgactcgacgtgcgcgcgccccg

SEQ ID NO: 5927745 - DNA, 25 bp, Homo sapien
ccgagccctcgacacgcgcccgcgc

SEQ ID NO: 5927746 - DNA, 25 bp, Homo sapien
ggcccgcgcccgaacgcatgggggg

SEQ ID NO: 5927747 - DNA, 25 bp, Homo sapien
ggggcgcgtagtgcggtcggcgggc

SEQ ID NO: 5927748 - DNA, 25 bp, Homo sapien
gggcggtctatccgcgccgggcgcg

SEQ ID NO: 5927749 - DNA, 25 bp, Homo sapien
cgccgcctgcgctcgacggggcacc

SEQ ID NO: 5927750 - DNA, 25 bp, Homo sapien
gcgcctactacgcgcgccggcggcc

SEQ ID NO: 5927751 - DNA, 25 bp, Homo sapien
cgccgccgcggcgctacgactgccc

SEQ ID NO: 5927752 - DNA, 25 bp, Homo sapien
gcggccctcgatccgcgcacgggcg

SEQ ID NO: 5927753 - DNA, 25 bp, Homo sapien
tggcgggcgggctcaaccgccgcgg

SEQ ID NO: 5927754 - DNA, 25 bp, Homo sapien
gcgcgcacgcgtcgaccgggtcggg

SEQ ID NO: 5927755 - DNA, 25 bp, Homo sapien
gccggtccgcgcgactaccgcgccc

SEQ ID NO: 5927756 - DNA, 25 bp, Homo sapien
ggcgactcgcgccgtaccggcggcc

SEQ ID NO: 5927757 - DNA, 25 bp, Homo sapien
ccggcggtcggtcggcacgtgcccg

SEQ ID NO: 5927758 - DNA, 25 bp, Homo sapien
agcgcccgcgagtggtcgccccgcg

SEQ ID NO: 5927759 - DNA, 25 bp, Homo sapien
gcagcgcgtagtcgcggggcggcgc

SEQ ID NO: 5927760 - DNA, 25 bp, Homo sapien
gcgccgatacggccgtccggcgggg

SEQ ID NO: 5927761 - DNA, 25 bp, Homo sapien
ccgggcgatagccccgcgctcgggc

SEQ ID NO: 5927762 - DNA, 25 bp, Homo sapien
gctggcgtccgcgcgtacggcgggg

SEQ ID NO: 5927763 - DNA, 25 bp, Homo sapien
ccggccgtagcgggccgaaggccgc

SEQ ID NO: 5927764 - DNA, 25 bp, Homo sapien
cctcgccgtcggcgcgaccggcagc

SEQ ID NO: 5927765 - DNA, 25 bp, Homo sapien
ccggcctgccgtacgctcggcgggg

SEQ ID NO: 5927766 - DNA, 25 bp, Homo sapien
ggggcccatacgcgcgacggcggcc

SEQ ID NO: 5927767 - DNA, 25 bp, Homo sapien
ccgccgcggcgtgtcgctaccgccc

SEQ ID NO: 5927768 - DNA, 25 bp, Homo sapien
gagccgcccgcgtgtcgcgcgcgcg

SEQ ID NO: 5927769 - DNA, 25 bp, Homo sapien
gcggggcgccccgtggacgcctgcg

SEQ ID NO: 5927770 - DNA, 25 bp, Homo sapien
cccccgcgtcgcgctccgccagcgg

SEQ ID NO: 5927771 - DNA, 25 bp, Homo sapien
gggaggaccggccgctggggcccgc

SEQ ID NO: 5927772 - DNA, 25 bp, Homo sapien
gcctccggtccgccgagccggccgc

SEQ ID NO: 5927773 - DNA, 25 bp, Homo sapien
ccccccgtgcgacgacgcccggcgc

SEQ ID NO: 5927774 - DNA, 25 bp, Homo sapien
ggggggccgcgacggtgcgccgacc

SEQ ID NO: 5927775 - DNA, 25 bp, Homo sapien
ccgctctcggcacggcgccgccggg

SEQ ID NO: 5927776 - DNA, 25 bp, Homo sapien
ggcggcgcgccgaccgaccgcctcc

SEQ ID NO: 5927777 - DNA, 25 bp, Homo sapien
ggcggggcgcgactcccgacccgcg

SEQ ID NO: 5927778 - DNA, 25 bp, Homo sapien
cgtggccgcaggtcgcccccgccgg

SEQ ID NO: 5927779 - DNA, 25 bp, Homo sapien
cccggcggctgggcgccaccgcgag

SEQ ID NO: 5927780 - DNA, 25 bp, Homo sapien
gccctggcgccgcctcgacccgccg

SEQ ID NO: 5927781 - DNA, 25 bp, Homo sapien
cggcaggcgccgcccaacccgccgg

SEQ ID NO: 5927782 - DNA, 25 bp, Homo sapien
cgccccgcgtcgtacgggcgcggcc

SEQ ID NO: 5927783 - DNA, 25 bp, Homo sapien
cgcgcggccgcgcacgccgtgggtg

SEQ ID NO: 5927784 - DNA, 25 bp, Homo sapien
gccggccgacgacgcgcggcctgcc

SEQ ID NO: 5927785 - DNA, 25 bp, Homo sapien
ggcccgcgcccgtacggagccgccc

SEQ ID NO: 5927786 - DNA, 25 bp, Homo sapien
cgccgccctagccgcggacggcgcg

SEQ ID NO: 5927787 - DNA, 25 bp, Homo sapien
ccggcgttgcgcgggacggcgcgcc

SEQ ID NO: 5927788 - DNA, 25 bp, Homo sapien
tgcggaggggccgcgcaccggcgcg

SEQ ID NO: 5927789 - DNA, 25 bp, Homo sapien
ggccccgtcggcgcatcgcccgccg

SEQ ID NO: 5927790 - DNA, 25 bp, Homo sapien
gccctcgcgccgccgggtgagcccg

SEQ ID NO: 5927791 - DNA, 25 bp, Homo sapien
cggtcgtcggccggcccgtcgcggc

SEQ ID NO: 5927792 - DNA, 25 bp, Homo sapien
cggggcgggcgaccgcgtcgcaggc

SEQ ID NO: 5927793 - DNA, 25 bp, Homo sapien
gcgggcggtgctgcgcgcccctggc

SEQ ID NO: 5927794 - DNA, 25 bp, Homo sapien
caggcggcgccgaccgggtggcgcg

SEQ ID NO: 5927795 - DNA, 25 bp, Homo sapien
gcgcccgtgcgcccgatcggcggcg

SEQ ID NO: 5927796 - DNA, 25 bp, Homo sapien
ctcgtccgccggggcgtgcccgccg

SEQ ID NO: 5927797 - DNA, 25 bp, Homo sapien
cggcccacgcgcccggttgcgggcc

SEQ ID NO: 5927798 - DNA, 25 bp, Homo sapien
cggcgggaccggcgtagcgcgcccc

SEQ ID NO: 5927799 - DNA, 25 bp, Homo sapien
gcgggccgtcgcgtacgggccgccc

SEQ ID NO: 5927800 - DNA, 25 bp, Homo sapien
ccgccgcccgccggcggtgtctgcc

SEQ ID NO: 5927801 - DNA, 25 bp, Homo sapien
gccccctccacgcgtcgcggccccg

SEQ ID NO: 5927802 - DNA, 25 bp, Homo sapien
ggaccgccggacgcgccggcgacgg

SEQ ID NO: 5927803 - DNA, 25 bp, Homo sapien
cccgccccgacgcgagcgtgcgggc

SEQ ID NO: 5927804 - DNA, 25 bp, Homo sapien
ccagcgcgagccgacgcccccggcg

SEQ ID NO: 5927805 - DNA, 25 bp, Homo sapien
ccgccgacggcggccggtgccggag

SEQ ID NO: 5927806 - DNA, 25 bp, Homo sapien
cgccccggcggtccgctaggcggcg

SEQ ID NO: 5927807 - DNA, 25 bp, Homo sapien
gccgcggggtgcgcccggcgggact

SEQ ID NO: 5927808 - DNA, 25 bp, Homo sapien
gcggggctccgcgggtacgcgccgg

SEQ ID NO: 5927809 - DNA, 25 bp, Homo sapien
cggccacgtctgcccggcgggcgcc

SEQ ID NO: 5927810 - DNA, 25 bp, Homo sapien
cccgccccgcgtatcgccgcgcccc

SEQ ID NO: 5927811 - DNA, 25 bp, Homo sapien
cgcgggtgcgcggtcgcgagcgcgc

SEQ ID NO: 5927812 - DNA, 25 bp, Homo sapien
cggccgccgcgccgcgtactccccg

SEQ ID NO: 5927813 - DNA, 25 bp, Homo sapien
gccgtctcgccggggccgtggcgcg

SEQ ID NO: 5927814 - DNA, 25 bp, Homo sapien
ccgccggtcgcccgcggcgagtggc

SEQ ID NO: 5927815 - DNA, 25 bp, Homo sapien
cccggcccggcaggctacgcgcccg

SEQ ID NO: 5927816 - DNA, 25 bp, Homo sapien
ggcgggtcgcggccgatcccggcgg

SEQ ID NO: 5927817 - DNA, 25 bp, Homo sapien
ccacagccccccgacgcgcggcgcc

SEQ ID NO: 5927818 - DNA, 25 bp, Homo sapien
cgcccgcgcgtcgcgcctccggctg

SEQ ID NO: 5927819 - DNA, 25 bp, Homo sapien
cgggcccgccggcctaccgcagccc

SEQ ID NO: 5927820 - DNA, 25 bp, Homo sapien
gcgggggcgcgccccggcgtacgtc

SEQ ID NO: 5927821 - DNA, 25 bp, Homo sapien
gcggcccgcgtcgacgcgtccgggc

SEQ ID NO: 5927822 - DNA, 25 bp, Homo sapien
cggccgacgcccgtcgcgaccgccg

SEQ ID NO: 5927823 - DNA, 25 bp, Homo sapien
cgggcctcggcggtcacggcgccgg

SEQ ID NO: 5927824 - DNA, 25 bp, Homo sapien
gggccccggggggcgatcccgcagc

SEQ ID NO: 5927825 - DNA, 25 bp, Homo sapien
gcgcaccccccgcgtcgagcgcccg

SEQ ID NO: 5927826 - DNA, 25 bp, Homo sapien
cgggcccgccggtacacggcgcggc

SEQ ID NO: 5927827 - DNA, 25 bp, Homo sapien
gcccggcaggtctcgcgcggcgcgc

SEQ ID NO: 5927828 - DNA, 25 bp, Homo sapien
cggcggcgacgctgccgcggcccca

SEQ ID NO: 5927829 - DNA, 25 bp, Homo sapien
cgagcggccccagcgcgtgccgggc

SEQ ID NO: 5927830 - DNA, 25 bp, Homo sapien
accgcggcgggccacgccgtggccc

SEQ ID NO: 5927831 - DNA, 25 bp, Homo sapien
gcctacgcggccgtcggccggcgcc

SEQ ID NO: 5927832 - DNA, 25 bp, Homo sapien
gccccgccgaccggtacgcgggcgc

SEQ ID NO: 5927833 - DNA, 25 bp, Homo sapien
cgggcgcgcgaccgtgcgacgcccc

SEQ ID NO: 5927834 - DNA, 25 bp, Homo sapien
gggcgcgcacgccgacgtcgcgccc

SEQ ID NO: 5927835 - DNA, 25 bp, Homo sapien
ggacccgtcgcgccggcccgtgcgg

SEQ ID NO: 5927836 - DNA, 25 bp, Homo sapien
cggcgctaggcgtcgcggcccgccc

SEQ ID NO: 5927837 - DNA, 25 bp, Homo sapien
cgacggggggcacgcggcgcgccgt

SEQ ID NO: 5927838 - DNA, 25 bp, Homo sapien
gggcccccgcggcgcatacgggcgc

SEQ ID NO: 5927839 - DNA, 25 bp, Homo sapien
ccccggctcgagcgggccggtcgcc

SEQ ID NO: 5927840 - DNA, 25 bp, Homo sapien
tccggcgcgtcggaccgcggcgccg

SEQ ID NO: 5927841 - DNA, 25 bp, Homo sapien
gggcgcggcaactggcgcgcgcggg

SEQ ID NO: 5927842 - DNA, 25 bp, Homo sapien
cgcccccccgtcggcacgggctgcg

SEQ ID NO: 5927843 - DNA, 25 bp, Homo sapien
cggcgggcccgtcgcacgaggcgcc

SEQ ID NO: 5927844 - DNA, 25 bp, Homo sapien
gccccgtggccgcgaccgggtcgcc

SEQ ID NO: 5927845 - DNA, 25 bp, Homo sapien
ggcggggtcgcgcgtacgggccggc

SEQ ID NO: 5927846 - DNA, 25 bp, Homo sapien
cggccctcgtacgccgggcggcgcc

SEQ ID NO: 5927847 - DNA, 25 bp, Homo sapien
tgggggacggccggtccgcggcgcc

SEQ ID NO: 5927848 - DNA, 25 bp, Homo sapien
cggggggcgttcgcggcacgccggc

SEQ ID NO: 5927849 - DNA, 25 bp, Homo sapien
cctccgcgccggcccgacgcgcgca

SEQ ID NO: 5927850 - DNA, 25 bp, Homo sapien
cggaccgccccggtgccgggcaggc

SEQ ID NO: 5927851 - DNA, 25 bp, Homo sapien
ggccaccgcggcacgctgcgcgggg

SEQ ID NO: 5927852 - DNA, 25 bp, Homo sapien
ggcgcgccgcgggtatgcccccccg

SEQ ID NO: 5927853 - DNA, 25 bp, Homo sapien
cgcgacccggtccgggcgcgggtgc

SEQ ID NO: 5927854 - DNA, 25 bp, Homo sapien
cgtcggcgcgccgaggcgacccccg

SEQ ID NO: 5927855 - DNA, 25 bp, Homo sapien
cggtgcccggcggccgaccgggtgc

SEQ ID NO: 5927856 - DNA, 25 bp, Homo sapien
ggggccgcccccctgcggtctgcgc

SEQ ID NO: 5927857 - DNA, 25 bp, Homo sapien
ccggaggcggtgccgtggcggccgg

SEQ ID NO: 5927858 - DNA, 25 bp, Homo sapien
ccccgcacccggcgtagcggcgcgc

SEQ ID NO: 5927859 - DNA, 25 bp, Homo sapien
cggcccgcgccgagtcgtccccggc

SEQ ID NO: 5927860 - DNA, 25 bp, Homo sapien
gccgccggggcgtcgaacgcgcggg

SEQ ID NO: 5927861 - DNA, 25 bp, Homo sapien
gccgccgacggcgcgcgcggttcgg

SEQ ID NO: 5927862 - DNA, 25 bp, Homo sapien
ggcgggggtcgcgcggtagcgggcc

SEQ ID NO: 5927863 - DNA, 25 bp, Homo sapien
gcgcggcgggccgtctggcgcggtc

SEQ ID NO: 5927864 - DNA, 25 bp, Homo sapien
cccgccccgagcgctacgcgcgcgg

SEQ ID NO: 5927865 - DNA, 25 bp, Homo sapien
gcctcggacgcctccggcgcggcgg

SEQ ID NO: 5927866 - DNA, 25 bp, Homo sapien
gccgccgtatcccggcggcggccgg

SEQ ID NO: 5927867 - DNA, 25 bp, Homo sapien
gcgcccgccggctgtcggcgcctcg

SEQ ID NO: 5927868 - DNA, 25 bp, Homo sapien
ggtgcgctaccggcccgcgccgccc

SEQ ID NO: 5927869 - DNA, 25 bp, Homo sapien
ggggcccggcgtgcccgcggagcga

SEQ ID NO: 5927870 - DNA, 25 bp, Homo sapien
cgtgcggcggccgtcggcccgctcg

SEQ ID NO: 5927871 - DNA, 25 bp, Homo sapien
tgcgccccgggccggacggcctgcc

SEQ ID NO: 5927872 - DNA, 25 bp, Homo sapien
gccgccggccgggcccgatgtcccc

SEQ ID NO: 5927873 - DNA, 25 bp, Homo sapien
ctgggggcggcccccgtccgcgagc

SEQ ID NO: 5927874 - DNA, 25 bp, Homo sapien
gccggtgggcggcccacgcgcctcg

SEQ ID NO: 5927875 - DNA, 25 bp, Homo sapien
cctgggcgcggcacgcgggcccgag

SEQ ID NO: 5927876 - DNA, 25 bp, Homo sapien
cgcggcgcgcgtcgggtgccgaccc

SEQ ID NO: 5927877 - DNA, 25 bp, Homo sapien
ccctggtgccggctcgccgccccgg

SEQ ID NO: 5927878 - DNA, 25 bp, Homo sapien
ggcgccatcgcgcgagcgggcgggc

SEQ ID NO: 5927879 - DNA, 25 bp, Homo sapien
ggcgcgccgtccgacgtcgcggccg

SEQ ID NO: 5927880 - DNA, 25 bp, Homo sapien
ggcggcacgtccgacgcggcgcccc

SEQ ID NO: 5927881 - DNA, 25 bp, Homo sapien
ccggccgcgcccgtgtccgggccca

SEQ ID NO: 5927882 - DNA, 25 bp, Homo sapien
cggtcgtcggagcgcccccgcgcgg

SEQ ID NO: 5927883 - DNA, 25 bp, Homo sapien
ccccggacggccggtccgagcgcgc

SEQ ID NO: 5927884 - DNA, 25 bp, Homo sapien
ggcgccgagagggcccccgtggccg

SEQ ID NO: 5927885 - DNA, 25 bp, Homo sapien
ccgcgcgtcgcgcccgtaccggccc

SEQ ID NO: 5927886 - DNA, 25 bp, Homo sapien
cccgcacccggccgtcgcaccccgc

SEQ ID NO: 5927887 - DNA, 25 bp, Homo sapien
cgcgcgggcgtcgtcccgaccgggc

SEQ ID NO: 5927888 - DNA, 25 bp, Homo sapien
cgcgccccggaccggtcgccgccga

SEQ ID NO: 5927889 - DNA, 25 bp, Homo sapien
cgggccgtcgcgcgacgcgccaggg

SEQ ID NO: 5927890 - DNA, 25 bp, Homo sapien
ggggcgaccgtcgctccgcgcgcgg

SEQ ID NO: 5927891 - DNA, 25 bp, Homo sapien
ccgtgcgcgcagcggggcctgggcc

SEQ ID NO: 5927892 - DNA, 25 bp, Homo sapien
cgccgtcggccggccgcacgctcgg

SEQ ID NO: 5927893 - DNA, 25 bp, Homo sapien
ggcgcgccgtcgcgcgccgctggct

SEQ ID NO: 5927894 - DNA, 25 bp, Homo sapien
ggcgcgcgtcgtacgcggggcccgc

SEQ ID NO: 5927895 - DNA, 25 bp, Homo sapien
ggggcctggcggtcgcacgcgcgcc

SEQ ID NO: 5927896 - DNA, 25 bp, Homo sapien
gggccgcgacccgctagcggccgcc

SEQ ID NO: 5927897 - DNA, 25 bp, Homo sapien
gcgcgaccgccgggccggcagccac

SEQ ID NO: 5927898 - DNA, 25 bp, Homo sapien
ggggtgcgccgtcgcgggccagccc

SEQ ID NO: 5927899 - DNA, 25 bp, Homo sapien
cccgcctgcgcgcgccgtacggccc

SEQ ID NO: 5927900 - DNA, 25 bp, Homo sapien
cgggcgcgacgggtccgcacggcgc

SEQ ID NO: 5927901 - DNA, 25 bp, Homo sapien
cgcgcccggcgcggcgtgccgcatg

SEQ ID NO: 5927902 - DNA, 25 bp, Homo sapien
gcggcccggacgggccttcccgcgc

SEQ ID NO: 5927903 - DNA, 25 bp, Homo sapien
gcgggccgtacgccggtcggccggc

SEQ ID NO: 5927904 - DNA, 25 bp, Homo sapien
ggcctggcgccggtccgcgacgcgc

SEQ ID NO: 5927905 - DNA, 25 bp, Homo sapien
ggccggttcgcccgcgggtggcggc

SEQ ID NO: 5927906 - DNA, 25 bp, Homo sapien
cggcgggcaggcccgaccgcgcgct

SEQ ID NO: 5927907 - DNA, 25 bp, Homo sapien
ccggcggtcgaccgcgcgaggcccg

SEQ ID NO: 5927908 - DNA, 25 bp, Homo sapien
cgcggccacggccgccttgccggcc

SEQ ID NO: 5927909 - DNA, 25 bp, Homo sapien
cggccccgcctgtggcgcgcggtgc

SEQ ID NO: 5927910 - DNA, 25 bp, Homo sapien
ggtccgcccgtgcgggcgcggcggt

SEQ ID NO: 5927911 - DNA, 25 bp, Homo sapien
ccgccgggcgcgcgctagtccccgc

SEQ ID NO: 5927912 - DNA, 25 bp, Homo sapien
gggcgggtcgcgaccgcctggccgg

SEQ ID NO: 5927913 - DNA, 25 bp, Homo sapien
ggcgcggaccggaccccccacgcgc

SEQ ID NO: 5927914 - DNA, 25 bp, Homo sapien
cgggcgcgacggccgtcggcctccc

SEQ ID NO: 5927915 - DNA, 25 bp, Homo sapien
cggtccgcccgcgcgcgaccctcgc

SEQ ID NO: 5927916 - DNA, 25 bp, Homo sapien
cagggccacggccggcccgccggca

SEQ ID NO: 5927917 - DNA, 25 bp, Homo sapien
gccggctacgggggggccgcgcacc

SEQ ID NO: 5927918 - DNA, 25 bp, Homo sapien
cgccccgcctcgcagccgcgctgcg

SEQ ID NO: 5927919 - DNA, 25 bp, Homo sapien
gcggccgcgatccgcccccagcgcg

SEQ ID NO: 5927920 - DNA, 25 bp, Homo sapien
ccgcgatggcgccgcccctcgggcg

SEQ ID NO: 5927921 - DNA, 25 bp, Homo sapien
gcccccggtcgctgccagcgggcgg

SEQ ID NO: 5927922 - DNA, 25 bp, Homo sapien
gccgggcgcgcgctctggtcgggcg

SEQ ID NO: 5927923 - DNA, 25 bp, Homo sapien
gcccccctcgccggtccgcggcgtc

SEQ ID NO: 5927924 - DNA, 25 bp, Homo sapien
ccggccccgccggcacgtaccgcgc

SEQ ID NO: 5927925 - DNA, 25 bp, Homo sapien
ccggcggcgacgggcccgtgcgagc

SEQ ID NO: 5927926 - DNA, 25 bp, Homo sapien
cccaccccccgcgtgcggctgcccc

SEQ ID NO: 5927927 - DNA, 25 bp, Homo sapien
cccgccgggaccgcacgcgccgcag

SEQ ID NO: 5927928 - DNA, 25 bp, Homo sapien
ggccggcgcggtacgacggcgcccc

SEQ ID NO: 5927929 - DNA, 25 bp, Homo sapien
gggggggcctaggtccgcgcgcgcg

SEQ ID NO: 5927930 - DNA, 25 bp, Homo sapien
ggggtgcctacgcgcgcggcggccc

SEQ ID NO: 5927931 - DNA, 25 bp, Homo sapien
cgggggcgacgcggaccggcgctcc

SEQ ID NO: 5927932 - DNA, 25 bp, Homo sapien
cgcccgctggacgagcggcgcgccg

SEQ ID NO: 5927933 - DNA, 25 bp, Homo sapien
ccggcgccggcaccgtgcgccgctc

SEQ ID NO: 5927934 - DNA, 25 bp, Homo sapien
cgcctgcgtcccccccctgggcgcg

SEQ ID NO: 5927935 - DNA, 25 bp, Homo sapien
cagggggggcgtacccgcgcgcgcg

SEQ ID NO: 5927936 - DNA, 25 bp, Homo sapien
cggcggccccgttgcgcggaggccg

SEQ ID NO: 5927937 - DNA, 25 bp, Homo sapien
ccacgcatgggccgcgcccccgcgc

SEQ ID NO: 5927938 - DNA, 25 bp, Homo sapien
gtgccgcgcccgggggggcagctcc

SEQ ID NO: 5927939 - DNA, 25 bp, Homo sapien
ccgcgccgcggttgcggtcggcggg

SEQ ID NO: 5927940 - DNA, 25 bp, Homo sapien
cctgggccgcccgcgctaccggcgg

SEQ ID NO: 5927941 - DNA, 25 bp, Homo sapien
cccgtgccggcggcccccgtccgca

SEQ ID NO: 5927942 - DNA, 25 bp, Homo sapien
ggccgccaccggcggccctacgggc

SEQ ID NO: 5927943 - DNA, 25 bp, Homo sapien
gccgcgcccggcgccgtcgcaagcc

SEQ ID NO: 5927944 - DNA, 25 bp, Homo sapien
cccgcgccgcgtgtcgacccccgcg

SEQ ID NO: 5927945 - DNA, 25 bp, Homo sapien
accccgcgcgtcgggcgcagggcgg

SEQ ID NO: 5927946 - DNA, 25 bp, Homo sapien
cccaaggccgccgcgggcgacgggc

SEQ ID NO: 5927947 - DNA, 25 bp, Homo sapien
gcgcggacgcgccaccggccgcgca

SEQ ID NO: 5927948 - DNA, 25 bp, Homo sapien
ggcgcggaccgaacgcgcgcgggcg

SEQ ID NO: 5927949 - DNA, 25 bp, Homo sapien
cgccgcccggtcggcgacggcacgg

SEQ ID NO: 5927950 - DNA, 25 bp, Homo sapien
agcggcggcgacggtcggcgggccc

SEQ ID NO: 5927951 - DNA, 25 bp, Homo sapien
cgcagcgcgcgccccggtagccggc

SEQ ID NO: 5927952 - DNA, 25 bp, Homo sapien
gcggcgcgcgtggcgtacccgcggc

SEQ ID NO: 5927953 - DNA, 25 bp, Homo sapien
ccggagccgcgcgccgacgccacgc

SEQ ID NO: 5927954 - DNA, 25 bp, Homo sapien
ggccagccggtgcgggacccgccgg

SEQ ID NO: 5927955 - DNA, 25 bp, Homo sapien
gccggcccgcgctacgggcgtcgcg

SEQ ID NO: 5927956 - DNA, 25 bp, Homo sapien
gcgcgaccacgccggacgggccccc

SEQ ID NO: 5927957 - DNA, 25 bp, Homo sapien
cgctgggtcgcgcgccgacgggcgc

SEQ ID NO: 5927958 - DNA, 25 bp, Homo sapien
gcgggctgtccggcggtgggccccc

SEQ ID NO: 5927959 - DNA, 25 bp, Homo sapien
gcggggccgcgcgacggctcaggcc

SEQ ID NO: 5927960 - DNA, 25 bp, Homo sapien
aaggggtgccgcgccgcggcgccgg

SEQ ID NO: 5927961 - DNA, 25 bp, Homo sapien
cccgtgcggccgtgcccggggcgca

SEQ ID NO: 5927962 - DNA, 25 bp, Homo sapien
ccggccggactgcgccgccgcggga

SEQ ID NO: 5927963 - DNA, 25 bp, Homo sapien
gcgggcggtaggcgcaccgccggcg

SEQ ID NO: 5927964 - DNA, 25 bp, Homo sapien
ccccacactcccgcggcggccgggc

SEQ ID NO: 5927965 - DNA, 25 bp, Homo sapien
cggccgccgcgacgcgtgaggcgcc

SEQ ID NO: 5927966 - DNA, 25 bp, Homo sapien
cccgcgcgcgcgccgtacggcctcc

SEQ ID NO: 5927967 - DNA, 25 bp, Homo sapien
gcgtcccggcgacgcggccggtccg

SEQ ID NO: 5927968 - DNA, 25 bp, Homo sapien
cgcgggcgcacgccgtggctcgccg

SEQ ID NO: 5927969 - DNA, 25 bp, Homo sapien
ccgcgcccgcgtcggacgcctgcgg

SEQ ID NO: 5927970 - DNA, 25 bp, Homo sapien
tgtcgcgcggccccccgacgccccc

SEQ ID NO: 5927971 - DNA, 25 bp, Homo sapien
gcggcccgcgtcgagggaccgcggc

SEQ ID NO: 5927972 - DNA, 25 bp, Homo sapien
ccggaggcggaccgccgggcggctc

SEQ ID NO: 5927973 - DNA, 25 bp, Homo sapien
cgccggccgcgcgtccgctcgccct

SEQ ID NO: 5927974 - DNA, 25 bp, Homo sapien
cgccagacccaccgcgcggcgcggc

SEQ ID NO: 5927975 - DNA, 25 bp, Homo sapien
ggccggcgggagcgctcgagcccgc

SEQ ID NO: 5927976 - DNA, 25 bp, Homo sapien
cggcgcgctcatcgcgcccgccggg

SEQ ID NO: 5927977 - DNA, 25 bp, Homo sapien
cggccccggacgcgcgacgcgaccc

SEQ ID NO: 5927978 - DNA, 25 bp, Homo sapien
cgccccctcgaccgcgcgagccccc

SEQ ID NO: 5927979 - DNA, 25 bp, Homo sapien
cggacccgcgcggcagggcgtgcgg

SEQ ID NO: 5927980 - DNA, 25 bp, Homo sapien
cgccgcggcccgtacgacggcgccg

SEQ ID NO: 5927981 - DNA, 25 bp, Homo sapien
tccacgacgcgcccgcccggccggg

SEQ ID NO: 5927982 - DNA, 25 bp, Homo sapien
ccggcgcaaccggccctccgcgccc

SEQ ID NO: 5927983 - DNA, 25 bp, Homo sapien
ggtcgcgacggacccggccgcgccc

SEQ ID NO: 5927984 - DNA, 25 bp, Homo sapien
gcccgcggcgatccgacgggccgcc

SEQ ID NO: 5927985 - DNA, 25 bp, Homo sapien
tggcctgccggcccgccgcgcccag

SEQ ID NO: 5927986 - DNA, 25 bp, Homo sapien
ggccgggctaggcgccgcacccggg

SEQ ID NO: 5927987 - DNA, 25 bp, Homo sapien
cgcgcccgcgtacgcgcggcccctc

SEQ ID NO: 5927988 - DNA, 25 bp, Homo sapien
gtccaccgccgtgcggcgggccccc

SEQ ID NO: 5927989 - DNA, 25 bp, Homo sapien
cggggggcacgaggcgcgacgccgc

SEQ ID NO: 5927990 - DNA, 25 bp, Homo sapien
gggcccgctgctagcgcgccgcccc

SEQ ID NO: 5927991 - DNA, 25 bp, Homo sapien
gggggcggtacgcgctccgccccgc

SEQ ID NO: 5927992 - DNA, 25 bp, Homo sapien
gcgggagcccccgcgcgcgtcccgt

SEQ ID NO: 5927993 - DNA, 25 bp, Homo sapien
acggcgggggctcgcagccgcgccg

SEQ ID NO: 5927994 - DNA, 25 bp, Homo sapien
gccgcgccgcgcgacgaacggcggc

SEQ ID NO: 5927995 - DNA, 25 bp, Homo sapien
cgggcgcggtgcgccgctacgccgc

SEQ ID NO: 5927996 - DNA, 25 bp, Homo sapien
gctgccccccgttccgcgcgcccgg

SEQ ID NO: 5927997 - DNA, 25 bp, Homo sapien
cgctcgggcccgccggtcgccagcg

SEQ ID NO: 5927998 - DNA, 25 bp, Homo sapien
ggcggcccccgtgcgggcgctctgc

SEQ ID NO: 5927999 - DNA, 25 bp, Homo sapien
gccacgccccgtcgccgagcggggg

SEQ ID NO: 5928000 - DNA, 25 bp, Homo sapien
ccgcggcgtcgcgtacccgcgggcg

SEQ ID NO: 5928001 - DNA, 25 bp, Homo sapien
gcgcgccgcgtatcggcccgccgcc

SEQ ID NO: 5928002 - DNA, 25 bp, Homo sapien
ggcgccccgggcccgacgacctgcc

SEQ ID NO: 5928003 - DNA, 25 bp, Homo sapien
tgcgggccacccggcgggcggccag

SEQ ID NO: 5928004 - DNA, 25 bp, Homo sapien
gggcgccgcgcacgggcccgtcgga

SEQ ID NO: 5928005 - DNA, 25 bp, Homo sapien
cggcccacggtcgaccgcgggccgc

SEQ ID NO: 5928006 - DNA, 25 bp, Homo sapien
ggcgcgaacccggtcgcccgcgccg

SEQ ID NO: 5928007 - DNA, 25 bp, Homo sapien
cgaccgcacgggccggcggtccgcg

SEQ ID NO: 5928008 - DNA, 25 bp, Homo sapien
ggcctggctccgtccggcgcgccgc

SEQ ID NO: 5928009 - DNA, 25 bp, Homo sapien
cgcggccgtcgctgtgcgcgggggc

SEQ ID NO: 5928010 - DNA, 25 bp, Homo sapien
gcctggcgctaccgcccccgcgggc

SEQ ID NO: 5928011 - DNA, 25 bp, Homo sapien
gccgggcgccgtccccccggcgcaa

SEQ ID NO: 5928012 - DNA, 25 bp, Homo sapien
gccgcgggtctcgaccgcggccgcg

SEQ ID NO: 5928013 - DNA, 25 bp, Homo sapien
cgccggccgttccggcgagcgccgc

SEQ ID NO: 5928014 - DNA, 25 bp, Homo sapien
gcgggcccgcccgacgatcccgcgg

SEQ ID NO: 5928015 - DNA, 25 bp, Homo sapien
tccctgcggcggcgcgccacggcgc

SEQ ID NO: 5928016 - DNA, 25 bp, Homo sapien
ccggggcccactcgcggcgcgcgac

SEQ ID NO: 5928017 - DNA, 25 bp, Homo sapien
cggaggccgcgcggcgcgtggccct

SEQ ID NO: 5928018 - DNA, 25 bp, Homo sapien
cgggccacgcgggcgtacgcgccgc

SEQ ID NO: 5928019 - DNA, 25 bp, Homo sapien
gcgcccgtcgggtccgccgcgtgcc

SEQ ID NO: 5928020 - DNA, 25 bp, Homo sapien
gccgcgcggtcctacgcgggccgcg

SEQ ID NO: 5928021 - DNA, 25 bp, Homo sapien
gcggaccggcgacccgcggcgcacc

SEQ ID NO: 5928022 - DNA, 25 bp, Homo sapien
gcccgcccgacgcgcggtgcgcctc

SEQ ID NO: 5928023 - DNA, 25 bp, Homo sapien
gggcgagcccgggaccgcgtgggcg

SEQ ID NO: 5928024 - DNA, 25 bp, Homo sapien
cccggcccgtcgatgcgcgcgggcg

SEQ ID NO: 5928025 - DNA, 25 bp, Homo sapien
cggccgcgccccgcctggacccgag

SEQ ID NO: 5928026 - DNA, 25 bp, Homo sapien
cctccgcgcggtacgccgcccgccc

SEQ ID NO: 5928027 - DNA, 25 bp, Homo sapien
cgagcctggccgcgccgaggcggcc

SEQ ID NO: 5928028 - DNA, 25 bp, Homo sapien
ggggccgccggcgcgcggcagtgtg

SEQ ID NO: 5928029 - DNA, 25 bp, Homo sapien
gccgcgctacgccgcgtcggccggg

SEQ ID NO: 5928030 - DNA, 25 bp, Homo sapien
gcgaggccggccgtacggcgcgcgg

SEQ ID NO: 5928031 - DNA, 25 bp, Homo sapien
gcggcccgcgtacgaccgcgcgccc

SEQ ID NO: 5928032 - DNA, 25 bp, Homo sapien
cgcgctacgcggggcccccccacgc

SEQ ID NO: 5928033 - DNA, 25 bp, Homo sapien
ccgcgcgacgcgcgtcgggcctccg

SEQ ID NO: 5928034 - DNA, 25 bp, Homo sapien
ccgccgaggcgtcacgcccggccgc

SEQ ID NO: 5928035 - DNA, 25 bp, Homo sapien
gccgggcgatccgacgccgggcgcg

SEQ ID NO: 5928036 - DNA, 25 bp, Homo sapien
cgccgcgcccgtacgggcgagccgg

SEQ ID NO: 5928037 - DNA, 25 bp, Homo sapien
gccccggcgcgataccccccgcgcg

SEQ ID NO: 5928038 - DNA, 25 bp, Homo sapien
ccgtgcgcgtcggggccgccgtgcg

SEQ ID NO: 5928039 - DNA, 25 bp, Homo sapien
ccggcgcctcgtacgggcggcgcgg

SEQ ID NO: 5928040 - DNA, 25 bp, Homo sapien
gcggggcgcccgttagcgcgcgcgg

SEQ ID NO: 5928041 - DNA, 25 bp, Homo sapien
cccccggtgcgccagcggcgggtcc

SEQ ID NO: 5928042 - DNA, 25 bp, Homo sapien
cgggccgcgcggacgcgtagccggg

SEQ ID NO: 5928043 - DNA, 25 bp, Homo sapien
gcggcgcgacgtacgccccgccccg

SEQ ID NO: 5928044 - DNA, 25 bp, Homo sapien
gcgccggtcgcatgcgcggcccgcg

SEQ ID NO: 5928045 - DNA, 25 bp, Homo sapien
ggcgggacgcggtcgtccggcccgc

SEQ ID NO: 5928046 - DNA, 25 bp, Homo sapien
ccgcggaaggcgccggcccggcagc

SEQ ID NO: 5928047 - DNA, 25 bp, Homo sapien
gcggcgccggcgcgtaccgaggggg

SEQ ID NO: 5928048 - DNA, 25 bp, Homo sapien
gcacgggggcctcgcgtggcccggc

SEQ ID NO: 5928049 - DNA, 25 bp, Homo sapien
gcggggccggatgaccgcgccgcgg

SEQ ID NO: 5928050 - DNA, 25 bp, Homo sapien
ccgccgtagcgagcccgcggcccgc

SEQ ID NO: 5928051 - DNA, 25 bp, Homo sapien
cgggagccgtgcggacgccgccgcg

SEQ ID NO: 5928052 - DNA, 25 bp, Homo sapien
ccgcggccggtcggcgctaccgcgc

SEQ ID NO: 5928053 - DNA, 25 bp, Homo sapien
ctcgcggtggcgcccagccgccggg

SEQ ID NO: 5928054 - DNA, 25 bp, Homo sapien
cgcagcgcggctgcgaggcggggcg

SEQ ID NO: 5928055 - DNA, 25 bp, Homo sapien
ggcgcccgccgggcagacgtggccg

SEQ ID NO: 5928056 - DNA, 25 bp, Homo sapien
cggcgccgcggtccgacgcgccgga

SEQ ID NO: 5928057 - DNA, 25 bp, Homo sapien
gggggcgtcggggggccgcgcgaca

SEQ ID NO: 5928058 - DNA, 25 bp, Homo sapien
acggcgcgccgcgtgccccccgtcg

SEQ ID NO: 5928059 - DNA, 25 bp, Homo sapien
ccgcgcgggggcgctccgacgaccg

SEQ ID NO: 5928060 - DNA, 25 bp, Homo sapien
cgcaggcgtccacggggcgccccgc

SEQ ID NO: 5928061 - DNA, 25 bp, Homo sapien
cgcagcccgtgccgacgggggggcg

SEQ ID NO: 5928062 - DNA, 25 bp, Homo sapien
ggcgcctcgtgcgacgggcccgccg

SEQ ID NO: 5928063 - DNA, 25 bp, Homo sapien
gcgggccccgcgtacgacgcgcgcc

SEQ ID NO: 5928064 - DNA, 25 bp, Homo sapien
ccgcgggatcgtcgggcgggcccgc

SEQ ID NO: 5928065 - DNA, 25 bp, Homo sapien
cgccgccgatcgggcgcacgggcgc

SEQ ID NO: 5928066 - DNA, 25 bp, Homo sapien
cgggcctcgcgcggtcgaccgccgg

SEQ ID NO: 5928067 - DNA, 25 bp, Homo sapien
gcacccggtcggccgccgggcaccg

SEQ ID NO: 5928068 - DNA, 25 bp, Homo sapien
cggcgcggctgcgagcccccgccgt

SEQ ID NO: 5928069 - DNA, 25 bp, Homo sapien
agcgcgcggtcgggcctgcccgccg

SEQ ID NO: 5928070 - DNA, 25 bp, Homo sapien
ggccgcgcccgtacgacgcggggcg

SEQ ID NO: 5928071 - DNA, 25 bp, Homo sapien
cggcgcgccgctcgtccagcgggcg

SEQ ID NO: 5928072 - DNA, 25 bp, Homo sapien
ccgcgcgcgctaacgggcgccccgc

SEQ ID NO: 5928073 - DNA, 25 bp, Homo sapien
cgccgcctagcggaccgccggggcg

SEQ ID NO: 5928074 - DNA, 25 bp, Homo sapien
gcggggtgcgacggccgggtgcggg

SEQ ID NO: 5928075 - DNA, 25 bp, Homo sapien
gggcgcgcggtcgtacgcgggccgc

SEQ ID NO: 5928076 - DNA, 25 bp, Homo sapien
cggccgcgacgtcggacggcgcgcc

SEQ ID NO: 5928077 - DNA, 25 bp, Homo sapien
ggggcggcgcgctagcagcgggccc

SEQ ID NO: 5928078 - DNA, 25 bp, Homo sapien
cgcgcgcgcgacacgcgggcggctc

SEQ ID NO: 5928079 - DNA, 25 bp, Homo sapien
cgccggcggtgcgcctaccgcccgc

SEQ ID NO: 5928080 - DNA, 25 bp, Homo sapien
cgcccgaggggcggcgccatcgcgg

SEQ ID NO: 5928081 - DNA, 25 bp, Homo sapien
gctcgcacgggcccgtcgccgccgg

SEQ ID NO: 5928082 - DNA, 25 bp, Homo sapien
gggccacggcgtggcccgccgcggt

SEQ ID NO: 5928083 - DNA, 25 bp, Homo sapien
gcgcgccgctacgccgggtgcgggg

SEQ ID NO: 5928084 - DNA, 25 bp, Homo sapien
gcgcgtggggggtccggtccgcgcc

SEQ ID NO: 5928085 - DNA, 25 bp, Homo sapien
gggcgcggagggccggttgcgccgg

SEQ ID NO: 5928086 - DNA, 25 bp, Homo sapien
cgcgccacggccccggcgagacggc

SEQ ID NO: 5928087 - DNA, 25 bp, Homo sapien
gcgcgccgcgcgagacctgccgggc

SEQ ID NO: 5928088 - DNA, 25 bp, Homo sapien
gggggcccaccgccggacagcccgc

SEQ ID NO: 5928089 - DNA, 25 bp, Homo sapien
ccgccgcgccggaggcgtccgaggc

SEQ ID NO: 5928090 - DNA, 25 bp, Homo sapien
cggcgcgggcgaccgggttcgcgcc

SEQ ID NO: 5928091 - DNA, 25 bp, Homo sapien
gcggcgtcgcgcctcgtgccccccg

SEQ ID NO: 5928092 - DNA, 25 bp, Homo sapien
ggcgcgccgtcccgcgcaacgccgg

SEQ ID NO: 5928093 - DNA, 25 bp, Homo sapien
cgggggggcatacccgcggcgcgcc

SEQ ID NO: 5928094 - DNA, 25 bp, Homo sapien
gccggcccgtacgcgcgaccccgcc

SEQ ID NO: 5928095 - DNA, 25 bp, Homo sapien
ggcccgctaccgcgcgacccccgcc

SEQ ID NO: 5928096 - DNA, 25 bp, Homo sapien
gcgggccgcgggctcgctacggcgg

SEQ ID NO: 5928097 - DNA, 25 bp, Homo sapien
gcggggactagcgcgcgcccggcgg

SEQ ID NO: 5928098 - DNA, 25 bp, Homo sapien
cggcctccgcgcaacggggccgccg

SEQ ID NO: 5928099 - DNA, 25 bp, Homo sapien
ccgggcgcgcggaacggggggcagc

SEQ ID NO: 5928100 - DNA, 25 bp, Homo sapien
tggggccgcggcagcgtcgccgccg

SEQ ID NO: 5928101 - DNA, 25 bp, Homo sapien
ggaggccgtacggcgcgcgcgcggg

SEQ ID NO: 5928102 - DNA, 25 bp, Homo sapien
gggaggccgacggccgtcgcgcccg

SEQ ID NO: 5928103 - DNA, 25 bp, Homo sapien
gccggcgtgccgcgaacgccccccg

SEQ ID NO: 5928104 - DNA, 25 bp, Homo sapien
agggcgagcggacgcgcggccggcg

SEQ ID NO: 5928105 - DNA, 25 bp, Homo sapien
gcggcgctcgccggaacggccggcg

SEQ ID NO: 5928106 - DNA, 25 bp, Homo sapien
gcgcgctcgcgaccgcgcacccgcg

SEQ ID NO: 5928107 - DNA, 25 bp, Homo sapien
gggcgcgacgtcggcgtgcgcgccc

SEQ ID NO: 5928108 - DNA, 25 bp, Homo sapien
ccgcgccgcccgtacgaggcgccgg

SEQ ID NO: 5928109 - DNA, 25 bp, Homo sapien
ggcgccgcggaccggccgtccccca

SEQ ID NO: 5928110 - DNA, 25 bp, Homo sapien
ggcaggtcgtcgggcccggggcgcc

SEQ ID NO: 5928111 - DNA, 25 bp, Homo sapien
gcggccgggcgtgacgcctcggcgg

SEQ ID NO: 5928112 - DNA, 25 bp, Homo sapien
ccgtgccgtcgccgaccgggcggcg

SEQ ID NO: 5928113 - DNA, 25 bp, Homo sapien
gctgccgggccggcgccttccgcgg

SEQ ID NO: 5928114 - DNA, 25 bp, Homo sapien
ctccggcaccggccgccgtcggcgg

SEQ ID NO: 5928115 - DNA, 25 bp, Homo sapien
ccggctcgcccgtacgggcgcggcg

SEQ ID NO: 5928116 - DNA, 25 bp, Homo sapien
ccgaaccgcgcgcgccgtcggcggc

SEQ ID NO: 5928117 - DNA, 25 bp, Homo sapien
ggcgaccggcccgctcgagccgggg

SEQ ID NO: 5928118 - DNA, 25 bp, Homo sapien
tgcgcggccggtggcgcgtccgcgc

SEQ ID NO: 5928119 - DNA, 25 bp, Homo sapien
cggccacgggggccctctcggcgcc

SEQ ID NO: 5928120 - DNA, 25 bp, Homo sapien
accgccgcgcccgcacgggcggacc

SEQ ID NO: 5928121 - DNA, 25 bp, Homo sapien
gcggcgtagcggcgcaccgcgcccg

SEQ ID NO: 5928122 - DNA, 25 bp, Homo sapien
ccggccgccgccgggatacggcggc

SEQ ID NO: 5928123 - DNA, 25 bp, Homo sapien
cggcgggtcgaggcggcgccagggc

SEQ ID NO: 5928124 - DNA, 25 bp, Homo sapien
gggctggcccgcgacggcgcacccc

SEQ ID NO: 5928125 - DNA, 25 bp, Homo sapien
gcgcggtacgtgccggcggggccgg

SEQ ID NO: 5928126 - DNA, 25 bp, Homo sapien
ccggcgggttgggcggcgcctgccg

SEQ ID NO: 5928127 - DNA, 25 bp, Homo sapien
gcgcgggggcgcggcccatgcgtgg

SEQ ID NO: 5928128 - DNA, 25 bp, Homo sapien
gccgcgccgtgtaccggcgggcccg

SEQ ID NO: 5928129 - DNA, 25 bp, Homo sapien
gcgccgtgcggacccgtcgcgcccg

SEQ ID NO: 5928130 - DNA, 25 bp, Homo sapien
gcccggcacgcgctggggccgctcg

SEQ ID NO: 5928131 - DNA, 25 bp, Homo sapien
gtcgcgcgccgcgagtgggccccgg

SEQ ID NO: 5928132 - DNA, 25 bp, Homo sapien
gggctgcggtaggccggcgggcccg

SEQ ID NO: 5928133 - DNA, 25 bp, Homo sapien
cggcgccgtcgtacgggccgcggcg

SEQ ID NO: 5928134 - DNA, 25 bp, Homo sapien
cccgcgcgttcgacgccccggcggc

SEQ ID NO: 5928135 - DNA, 25 bp, Homo sapien
ccgcacgccctgccgcgcgggtccg

SEQ ID NO: 5928136 - DNA, 25 bp, Homo sapien
ggggcgtcgcacggtcgcgcgcccg

SEQ ID NO: 5928137 - DNA, 25 bp, Homo sapien
cgagcgggccgacggccgccgcacg

SEQ ID NO: 5928138 - DNA, 25 bp, Homo sapien
cgcggaccgccggcccgtgcggtcg

SEQ ID NO: 5928139 - DNA, 25 bp, Homo sapien
ccggcgccgcggcgcggcacccctt

SEQ ID NO: 5928140 - DNA, 25 bp, Homo sapien
cgcgccggtgcgcggcccctccgca

SEQ ID NO: 5928141 - DNA, 25 bp, Homo sapien
gcgcgctcggaccggccgtccgggg

SEQ ID NO: 5928142 - DNA, 25 bp, Homo sapien
cccggctacgcgtccgcgcggcccg

SEQ ID NO: 5928143 - DNA, 25 bp, Homo sapien
gcacccgcgcccggaccgggtcgcg

SEQ ID NO: 5928144 - DNA, 25 bp, Homo sapien
tgggcccggacacgggcgcggccgg

SEQ ID NO: 5928145 - DNA, 25 bp, Homo sapien
gtggctgccggcccggcggtcgcgc

SEQ ID NO: 5928146 - DNA, 25 bp, Homo sapien
ggagcgccggtccgcgtcgcccccg

SEQ ID NO: 5928147 - DNA, 25 bp, Homo sapien
cggcgggcacgccccggcggacgag

SEQ ID NO: 5928148 - DNA, 25 bp, Homo sapien
gcccgtagggccgccggtggcggcc

SEQ ID NO: 5928149 - DNA, 25 bp, Homo sapien
ggggacatcgggcccggccggcggc

SEQ ID NO: 5928150 - DNA, 25 bp, Homo sapien
gcgcggtagcgccgaccggccgcgg

SEQ ID NO: 5928151 - DNA, 25 bp, Homo sapien
gacgtacgccggggcgcgcccccgc

SEQ ID NO: 5928152 - DNA, 25 bp, Homo sapien
cgcgccacccggtcggcgccgcctg

SEQ ID NO: 5928153 - DNA, 25 bp, Homo sapien
ggcgcctcacgcgtcgcggcggccg

SEQ ID NO: 5928154 - DNA, 25 bp, Homo sapien
agtcccgccgggcgcaccccgcggc

SEQ ID NO: 5928155 - DNA, 25 bp, Homo sapien
tgcgcgcgtcgggccggcgcggagg

SEQ ID NO: 5928156 - DNA, 25 bp, Homo sapien
ccctggcgcgtcgcgcgacggcccg

SEQ ID NO: 5928157 - DNA, 25 bp, Homo sapien
gcgggccccagcggccggtcctccc

SEQ ID NO: 5928158 - DNA, 25 bp, Homo sapien
gggcccgccgaccgtcgccgccgct

SEQ ID NO: 5928159 - DNA, 25 bp, Homo sapien
tcccgcggcggcgcagtccggccgg

SEQ ID NO: 5928160 - DNA, 25 bp, Homo sapien
cccgggtgcggcgcctagcccggcc

SEQ ID NO: 5928161 - DNA, 25 bp, Homo sapien
cccccgctcggcgacggggcgtggc

SEQ ID NO: 5928162 - DNA, 25 bp, Homo sapien
gcgtgggggggccccgcgtagcgcg

SEQ ID NO: 5928163 - DNA, 25 bp, Homo sapien
ggccgcctcggcgcggccaggctcg

SEQ ID NO: 5928164 - DNA, 25 bp, Homo sapien
cgccgggggcgtcggctcgcgctgg

SEQ ID NO: 5928165 - DNA, 25 bp, Homo sapien
cacactgccgcgcgccggcggcccc

SEQ ID NO: 5928166 - DNA, 25 bp, Homo sapien
ggcgccgcgcgtcggggggctgtgg

SEQ ID NO: 5928167 - DNA, 25 bp, Homo sapien
gccgccgttcgtcgcgcggcgcggc

SEQ ID NO: 5928168 - DNA, 25 bp, Homo sapien
ggcggcgggccgatacgcggcgcgc

SEQ ID NO: 5928169 - DNA, 25 bp, Homo sapien
ccggcgcgtacccgcggagccccgc

SEQ ID NO: 5928170 - DNA, 25 bp, Homo sapien
gcgcagaccgcaggggggcggcccc

SEQ ID NO: 5928171 - DNA, 25 bp, Homo sapien
ccgcggcgcggtcatccggccccgc

SEQ ID NO: 5928172 - DNA, 25 bp, Homo sapien
cgcgcggggggtatcgcgccggggc

SEQ ID NO: 5928173 - DNA, 25 bp, Homo sapien
ccccgcgcagcgtgccgcggtggcc

SEQ ID NO: 5928174 - DNA, 25 bp, Homo sapien
ggcaggccgcgcgtcgtcggccggc

SEQ ID NO: 5928175 - DNA, 25 bp, Homo sapien
gcaccgcgcgccacaggcggggccg

SEQ ID NO: 5928176 - DNA, 25 bp, Homo sapien
ggcgacccggtcgcggccacggggc

SEQ ID NO: 5928177 - DNA, 25 bp, Homo sapien
gggggcccgtccggcgtggtcgcgc

SEQ ID NO: 5928178 - DNA, 25 bp, Homo sapien
gcccgcacgctcgcgtcggggcggg

SEQ ID NO: 5928179 - DNA, 25 bp, Homo sapien
ccgcgcgcgtagcgctcggggcggg

SEQ ID NO: 5928180 - DNA, 25 bp, Homo sapien
gcccgcgggggcggtagcgccaggc

SEQ ID NO: 5928181 - DNA, 25 bp, Homo sapien
cccggcggcgccgtgccgagagcgg

SEQ ID NO: 5928182 - DNA, 25 bp, Homo sapien
ccggcgccgtgaccgccgaggcccg

SEQ ID NO: 5928183 - DNA, 25 bp, Homo sapien
gccgccacccgcgggcgaaccggcc

SEQ ID NO: 5928184 - DNA, 25 bp, Homo sapien
gagcggcgcacggtgccggcgccgg

SEQ ID NO: 5928185 - DNA, 25 bp, Homo sapien
ggtgcgccgcgggtcgccggtccgc

SEQ ID NO: 5928186 - DNA, 25 bp, Homo sapien
agccagcggcgcgcgacggcgcgcc

SEQ ID NO: 5928187 - DNA, 25 bp, Homo sapien
gcccggtcgggacgacgcccgcgcg

SEQ ID NO: 5928188 - DNA, 25 bp, Homo sapien
ccggcgggtcccgcaccggctggcc

SEQ ID NO: 5928189 - DNA, 25 bp, Homo sapien
gccggctaccggggcgcgcgctgcg

SEQ ID NO: 5928190 - DNA, 25 bp, Homo sapien
ccgccctgcgcccgacgcgcggggt

SEQ ID NO: 5928191 - DNA, 25 bp, Homo sapien
gggcggctccgtacgggcgcgggcc

SEQ ID NO: 5928192 - DNA, 25 bp, Homo sapien
gcggcgcgtacgcccgcgtggcccg

SEQ ID NO: 5928193 - DNA, 25 bp, Homo sapien
gcgggctcgagcgctcccgccggcc

SEQ ID NO: 5928194 - DNA, 25 bp, Homo sapien
ggcggccgctagcgggtcgcggccc

SEQ ID NO: 5928195 - DNA, 25 bp, Homo sapien
ccggggcggcgagccggcaccaggg

SEQ ID NO: 5928196 - DNA, 25 bp, Homo sapien
gcccggccgccgcgggagtgtgggg

SEQ ID NO: 5928197 - DNA, 25 bp, Homo sapien
gcgcgtcgcggaccggcgccaggcc

SEQ ID NO: 5928198 - DNA, 25 bp, Homo sapien
gccaggggcgcgcagcaccgcccgc

SEQ ID NO: 5928199 - DNA, 25 bp, Homo sapien
cgctggcgaccggcgggcccgagcg

SEQ ID NO: 5928200 - DNA, 25 bp, Homo sapien
cggcggtcgcgacgggcgtcggccg

SEQ ID NO: 5928201 - DNA, 25 bp, Homo sapien
gcggcgcgccggacggagccaggcc

SEQ ID NO: 5928202 - DNA, 25 bp, Homo sapien
cgggctcacccggcggcgcgagggc

SEQ ID NO: 5928203 - DNA, 25 bp, Homo sapien
cgcgggtcgggagtcgcgccccgcc

SEQ ID NO: 5928204 - DNA, 25 bp, Homo sapien
ggtgcgcggcccccccgtagccggc

SEQ ID NO: 5928205 - DNA, 25 bp, Homo sapien
ccggcgggggcgacctgcggccacg

SEQ ID NO: 5928206 - DNA, 25 bp, Homo sapien
ggggcgccgtcgtaccgcgccggcc

SEQ ID NO: 5928207 - DNA, 25 bp, Homo sapien
cggggccgcgacgcgtggagggggc

SEQ ID NO: 5928208 - DNA, 25 bp, Homo sapien
gccgcgacgggccggccgacgaccg

SEQ ID NO: 5928209 - DNA, 25 bp, Homo sapien
ggggcagccgcacgcggggggtggg

SEQ ID NO: 5928210 - DNA, 25 bp, Homo sapien
ctgcggcgcgtgcggtcccggcggg

SEQ ID NO: 5928211 - DNA, 25 bp, Homo sapien
gggccgtacggcgcgcgcaggcggg

SEQ ID NO: 5928212 - DNA, 25 bp, Homo sapien
cccggcgggcgcgatgagcgcgccg

SEQ ID NO: 5928213 - DNA, 25 bp, Homo sapien
ctcgggtccaggcggggcgcggccg

SEQ ID NO: 5928214 - DNA, 25 bp, Homo sapien
ggcccgcaaccgggcgcgtgggccg

SEQ ID NO: 5928215 - DNA, 25 bp, Homo sapien
cggaggcccgacgcgcgtcgcgcgg

SEQ ID NO: 5928216 - DNA, 25 bp, Homo sapien
gccactcgccgcgggcgaccggcgg

SEQ ID NO: 5928217 - DNA, 25 bp, Homo sapien
ggcgccggccgacggccgcgtaggc

SEQ ID NO: 5928218 - DNA, 25 bp, Homo sapien
cgaggcgccgacagccggcgggcgc

SEQ ID NO: 5928219 - DNA, 25 bp, Homo sapien
cgggggtcgcctcggcgcgccgacg

SEQ ID NO: 5928220 - DNA, 25 bp, Homo sapien
tgcgccccgggcacggccgcacggg

SEQ ID NO: 5928221 - DNA, 25 bp, Homo sapien
gggtcgcgtcgcgcgtccggggccg

SEQ ID NO: 5928222 - DNA, 25 bp, Homo sapien
cgcgacgcccgtagcgcgggccggc

SEQ ID NO: 5928223 - DNA, 25 bp, Homo sapien
gctgcgggatcgccccccggggccc

SEQ ID NO: 5928224 - DNA, 25 bp, Homo sapien
ctggccgcccgccgggtggcccgca

SEQ ID NO: 5928225 - DNA, 25 bp, Homo sapien
gccggggacgactcggcgcgggccg

SEQ ID NO: 5928226 - DNA, 25 bp, Homo sapien
gcccgcccgctcgcgcgatggcgcc

SEQ ID NO: 5928227 - DNA, 25 bp, Homo sapien
cagccggaggcgcgacgcgcgggcg

SEQ ID NO: 5928228 - DNA, 25 bp, Homo sapien
ggcccaggccccgctgcgcgcacgg

SEQ ID NO: 5928229 - DNA, 25 bp, Homo sapien
tgcggacgggggccgccggcacggg

SEQ ID NO: 5928230 - DNA, 25 bp, Homo sapien
gcgcccgtatgcgccgcgggggccc

SEQ ID NO: 5928231 - DNA, 25 bp, Homo sapien
cgcacggcggccccgacgcgcacgg

SEQ ID NO: 5928232 - DNA, 25 bp, Homo sapien
cggggagtacgcggcgcggcggccg

SEQ ID NO: 5928233 - DNA, 25 bp, Homo sapien
cgggcgctcgacgcggggggtgcgc

SEQ ID NO: 5928234 - DNA, 25 bp, Homo sapien
gcggcccgcggtcgaccgtgggccg

SEQ ID NO: 5928235 - DNA, 25 bp, Homo sapien
cgcgcccaggggggggacgcaggcg

SEQ ID NO: 5928236 - DNA, 25 bp, Homo sapien
gcgagggtcgcgcgcgggcggaccg

SEQ ID NO: 5928237 - DNA, 25 bp, Homo sapien
ggcgccgcccggcgtacgagggccg

SEQ ID NO: 5928238 - DNA, 25 bp, Homo sapien
gaccgcgccagacggcccgccgcgc

SEQ ID NO: 5928239 - DNA, 25 bp, Homo sapien
ggcacgcggcggacccgacgggcgc

SEQ ID NO: 5928240 - DNA, 25 bp, Homo sapien
gcctgcccggcaccggggcggtccg

SEQ ID NO: 5928241 - DNA, 25 bp, Homo sapien
tgccggcgggccggccgtggccctg

SEQ ID NO: 5928242 - DNA, 25 bp, Homo sapien
cgcggccgcggtcgagacccgcggc

SEQ ID NO: 5928243 - DNA, 25 bp, Homo sapien
tcggcggcgaccggtccggggcgcg

SEQ ID NO: 5928244 - DNA, 25 bp, Homo sapien
cgcggcggcgtccgcacggctcccg

SEQ ID NO: 5928245 - DNA, 25 bp, Homo sapien
gggccggtacgggcgcgacgcgcgg

SEQ ID NO: 5928246 - DNA, 25 bp, Homo sapien
ccggccgccacggcaccgcctccgg

SEQ ID NO: 5928247 - DNA, 25 bp, Homo sapien
gcgcccgcgtaccggtcggcggggc

SEQ ID NO: 5928248 - DNA, 25 bp, Homo sapien
tcgctccgcgggcacgccgggcccc

SEQ ID NO: 5928249 - DNA, 25 bp, Homo sapien
gacgccgcggaccggcgaggggggc

SEQ ID NO: 5928250 - DNA, 25 bp, Homo sapien
cgcgctgggggcggatcgcggccgc

SEQ ID NO: 5928251 - DNA, 25 bp, Homo sapien
gcgtggcgtcggcgcgcggctccgg

SEQ ID NO: 5928252 - DNA, 25 bp, Homo sapien
ccgccgggatcggccgcgacccgcc

SEQ ID NO: 5928253 - DNA, 25 bp, Homo sapien
ccgccggtagcgcgggcggcccagg

SEQ ID NO: 5928254 - DNA, 25 bp, Homo sapien
cacccacggcgtgcgcggccgcgcg

SEQ ID NO: 5928255 - DNA, 25 bp, Homo sapien
ggcaggccgtccggcccggggcgca

SEQ ID NO: 5928256 - DNA, 25 bp, Homo sapien
gcgggccggacgaccgcgtcccgcc

SEQ ID NO: 5928257 - DNA, 25 bp, Homo sapien
gagccgcccggcggtccgcctccgg

SEQ ID NO: 5928258 - DNA, 25 bp, Homo sapien
ttgcgccggggggacggcgcccggc

SEQ ID NO: 5928259 - DNA, 25 bp, Homo sapien
cgcgcgcgcggacctaggccccccc

SEQ ID NO: 5928260 - DNA, 25 bp, Homo sapien
gcagagcgcccgcacgggggccgcc

SEQ ID NO: 5928261 - DNA, 25 bp, Homo sapien
ggacccgccgctggcgcaccggggg

SEQ ID NO: 5928262 - DNA, 25 bp, Homo sapien
ggcctgagccgtcgcgcggccccgc

SEQ ID NO: 5928263 - DNA, 25 bp, Homo sapien
gccgggccacgcgaggcccccgtgc

SEQ ID NO: 5928264 - DNA, 25 bp, Homo sapien
ggagctgcccccccgggcgcggcac

SEQ ID NO: 5928265 - DNA, 25 bp, Homo sapien
catgcggcacgccgcgccgggcgcg

SEQ ID NO: 5928266 - DNA, 25 bp, Homo sapien
ccgtcgccggcgcgtccggcggtcc

SEQ ID NO: 5928267 - DNA, 25 bp, Homo sapien
gggcgggccgcgacgcctagcgccg

SEQ ID NO: 5928268 - DNA, 25 bp, Homo sapien
ggaggcggtcggtcggcgcgccgcc

SEQ ID NO: 5928269 - DNA, 25 bp, Homo sapien
ctgggcgcggcgggccggcaggcca

SEQ ID NO: 5928270 - DNA, 25 bp, Homo sapien
ccgcccgctggcagcgaccgggggc

SEQ ID NO: 5928271 - DNA, 25 bp, Homo sapien
ggtcggcgcaccgtcgcggcccccc

SEQ ID NO: 5928272 - DNA, 25 bp, Homo sapien
gccgcgggtacgccacgcgcgccgc

SEQ ID NO: 5928273 - DNA, 25 bp, Homo sapien
cgcgccgtccgcggctagggcggcg

SEQ ID NO: 5928274 - DNA, 25 bp, Homo sapien
gaggcgcaccgcgcgtcgggcgggc

SEQ ID NO: 5928275 - DNA, 25 bp, Homo sapien
gcgcccgtcggcgcgcgacccagcg

SEQ ID NO: 5928276 - DNA, 25 bp, Homo sapien
cgcccgcgcgcatcgacgggccggg

SEQ ID NO: 5928277 - DNA, 25 bp, Homo sapien
cggggcggggcgtacgtcgcgccgc

SEQ ID NO: 5928278 - DNA, 25 bp, Homo sapien
gcgccgtggcgcgccgccgcaggga

SEQ ID NO: 5928279 - DNA, 25 bp, Homo sapien
cgaggcgcgtgggccgcccaccggc

SEQ ID NO: 5928280 - DNA, 25 bp, Homo sapien
cgggcgcgtagcctgccgggccggg

SEQ ID NO: 5928281 - DNA, 25 bp, Homo sapien
cgcccacgcggtcccgggctcgccc

SEQ ID NO: 5928282 - DNA, 25 bp, Homo sapien
agggccacgcgccgcgcggcctccg

SEQ ID NO: 5928283 - DNA, 25 bp, Homo sapien
acgggacgcgcgcgggggctcccgc

SEQ ID NO: 5928284 - DNA, 25 bp, Homo sapien
cccggccgacgcggcgtagcgcggc

SEQ ID NO: 5928285 - DNA, 25 bp, Homo sapien
cgcggcccgcgtaggaccgcgcggc

SEQ ID NO: 5928286 - DNA, 25 bp, Homo sapien
gcgcgggaaggcccgtccgggccgc

SEQ ID NO: 5928287 - DNA, 25 bp, Homo sapien
cggcgggcgatgcgccgacggggcc

SEQ ID NO: 5928288 - DNA, 25 bp, Homo sapien
ccgcgcgccgtacggccggcctcgc

SEQ ID NO: 5928289 - DNA, 25 bp, Homo sapien
gcggggcggagcgcgtaccgccccc

SEQ ID NO: 5928290 - DNA, 25 bp, Homo sapien
ggccggcaaggcggccgtggccgcg

SEQ ID NO: 5928291 - DNA, 25 bp, Homo sapien
gggcgcggccgggtccgtcgcgacc

SEQ ID NO: 5928292 - DNA, 25 bp, Homo sapien
ggcttgcgacggcgccgggcgcggc

SEQ ID NO: 5928293 - DNA, 25 bp, Homo sapien
cggaccggccgcgtcgccgggacgc

SEQ ID NO: 5928294 - DNA, 25 bp, Homo sapien
ccgctggcggagcgcgacgcggggg

SEQ ID NO: 5928295 - DNA, 25 bp, Homo sapien
cgcgggggtcgacacgcggcgcggg

SEQ ID NO: 5928296 - DNA, 25 bp, Homo sapien
ccccctcggtacgcgccggcgccgc

SEQ ID NO: 5928297 - DNA, 25 bp, Homo sapien
tccgacgggcccgtgcgcggcgccc

SEQ ID NO: 5928298 - DNA, 25 bp, Homo sapien
cgcgggccgcgcatgcgaccggcgc

SEQ ID NO: 5928299 - DNA, 25 bp, Homo sapien
ctcgggcccgcgtgccgcgcccagg

SEQ ID NO: 5928300 - DNA, 25 bp, Homo sapien
gctcgcggacgggggccgcccccag

SEQ ID NO: 5928301 - DNA, 25 bp, Homo sapien
gcccccgcgcacagcgacggccgcg

SEQ ID NO: 5928302 - DNA, 25 bp, Homo sapien
cgcgcgcgcgggtacgccccccctg

SEQ ID NO: 5928303 - DNA, 25 bp, Homo sapien
cccgccgaccgcaaccgcggcgcgg

SEQ ID NO: 5928304 - DNA, 25 bp, Homo sapien
ggggcgcgctacgccggtcccgccg

SEQ ID NO: 5928305 - DNA, 25 bp, Homo sapien
ggcggcccgtcggatcgccgcgggc

SEQ ID NO: 5928306 - DNA, 25 bp, Homo sapien
gggcggcgcgggccggtagcgcacc

SEQ ID NO: 5928307 - DNA, 25 bp, Homo sapien
cgcccgcgcgcgttcggtccgcgcc

SEQ ID NO: 5928308 - DNA, 25 bp, Homo sapien
gggccgccgcgcgcgtaggcacccc

SEQ ID NO: 5928309 - DNA, 25 bp, Homo sapien
gccgcgccgcgcggtgggtctggcg

SEQ ID NO: 5928310 - DNA, 25 bp, Homo sapien
gggcgggcggcgtaccgcgcggagg

SEQ ID NO: 5928311 - DNA, 25 bp, Homo sapien
ggggcgcggcgatacgcggggcggg

SEQ ID NO: 5928312 - DNA, 25 bp, Homo sapien
gcccgtcgcccgcggcggccttggg

SEQ ID NO: 5928313 - DNA, 25 bp, Homo sapien
ccgcaggcgtccgacgcgggcgcgg

SEQ ID NO: 5928314 - DNA, 25 bp, Homo sapien
gcgccgggcgtcgtcgcacgggggg

SEQ ID NO: 5928315 - DNA, 25 bp, Homo sapien
ggggcgccgcgtcggacgtgccgcc

SEQ ID NO: 5928316 - DNA, 25 bp, Homo sapien
cgcgcccggcgtcggatcgcccggc

SEQ ID NO: 5928317 - DNA, 25 bp, Homo sapien
ccggccaggcggtcgcgacccgccc

SEQ ID NO: 5928318 - DNA, 25 bp, Homo sapien
gggtcggcacccgacgcgcgccgcg

SEQ ID NO: 5928319 - DNA, 25 bp, Homo sapien
gcggccggctcggcggaccggaggc

SEQ ID NO: 5928320 - DNA, 25 bp, Homo sapien
ggcagacaccgccggcgggcggcgg

SEQ ID NO: 5928321 - DNA, 25 bp, Homo sapien
cgcccgaccagagcgcgcgcccggc

SEQ ID NO: 5928322 - DNA, 25 bp, Homo sapien
cccggccgggcgggcgcgtcgtgga

SEQ ID NO: 5928323 - DNA, 25 bp, Homo sapien
cggcgagccacggcgtgcgcccgcg

SEQ ID NO: 5928324 - DNA, 25 bp, Homo sapien
ggcgcgcgtgcgaccgccaggcccc

SEQ ID NO: 5928325 - DNA, 25 bp, Homo sapien
cccgcgcgcgccagttgccgcgccc

SEQ ID NO: 5928326 - DNA, 25 bp, Homo sapien
cgcccgcgggtacgcgacgccgcgg

SEQ ID NO: 5928327 - DNA, 25 bp, Homo sapien
ccgcacgggccggcgcgacgggtcc

SEQ ID NO: 5928328 - DNA, 25 bp, Homo sapien
gggggctcgcgcggtcgagggggcg

SEQ ID NO: 5928329 - DNA, 25 bp, Homo sapien
gggcggcccgtacgcgacggcccgc

SEQ ID NO: 5928330 - DNA, 25 bp, Homo sapien
gccggccgaccggcgtacggcccgc

SEQ ID NO: 5928331 - DNA, 25 bp, Homo sapien
gaggggccgcgcgtacgcgggcgcg

SEQ ID NO: 5928332 - DNA, 25 bp, Homo sapien
ccgagcgtgcggccggccgacggcg

SEQ ID NO: 5928333 - DNA, 25 bp, Homo sapien
gcccggacgcgtcgacgcgggccgc

SEQ ID NO: 5928334 - DNA, 25 bp, Homo sapien
ccgcgcgcggagcgacggtcgcccc

SEQ ID NO: 5928335 - DNA, 25 bp, Homo sapien
gcctgcgacgcggtcgcccgccccg

SEQ ID NO: 5928336 - DNA, 25 bp, Homo sapien
gccgcggtccctcgacgcgggccgc

SEQ ID NO: 5928337 - DNA, 25 bp, Homo sapien
gggggcccgccgcacggcggtggac

SEQ ID NO: 5928338 - DNA, 25 bp, Homo sapien
gacgcggcccccctgcgcggcgggg

SEQ ID NO: 5928339 - DNA, 25 bp, Homo sapien
ggcggcgggcgcgtgcccccaccgc

SEQ ID NO: 5928340 - DNA, 25 bp, Homo sapien
gcggggcgccccccccgctgcccga

SEQ ID NO: 5928341 - DNA, 25 bp, Homo sapien
tcccggccgcccggtcggcgcgggc

SEQ ID NO: 5928342 - DNA, 25 bp, Homo sapien
gccgcgcggcgcgccgccgttcggg

SEQ ID NO: 5928343 - DNA, 25 bp, Homo sapien
cggggcggcccggtgcgccgtcggc

SEQ ID NO: 5928344 - DNA, 25 bp, Homo sapien
cgggtcgcccgtcggcggcgcgggc

SEQ ID NO: 5928345 - DNA, 25 bp, Homo sapien
gctccggcgcccgtcgcccggccgc

SEQ ID NO: 5928346 - DNA, 25 bp, Homo sapien
ggcggggcgtcgcccggcgagcccg

SEQ ID NO: 5928347 - DNA, 25 bp, Homo sapien
ccgccgcgccgccggcgagcctggg

SEQ ID NO: 5928348 - DNA, 25 bp, Homo sapien
cggcgcgcgccggcccgtcggcctc

SEQ ID NO: 5928349 - DNA, 25 bp, Homo sapien
cccgcgagcgggcccccggcagcgg

SEQ ID NO: 5928350 - DNA, 25 bp, Homo sapien
ccgcccgcgcgtcggcacccgccgg

SEQ ID NO: 5928351 - DNA, 25 bp, Homo sapien
gccacccccggtgcgccgcgcccgc

SEQ ID NO: 5928352 - DNA, 25 bp, Homo sapien
cgtggcccccccgcgcagcgcccgc

SEQ ID NO: 5928353 - DNA, 25 bp, Homo sapien
gccgccgcgcgggcgccacggggct

SEQ ID NO: 5928354 - DNA, 25 bp, Homo sapien
cccgccgcgagcggtgggccgcccg

SEQ ID NO: 5928355 - DNA, 25 bp, Homo sapien
ccgccgcaccgcgcgtcggcgcgcc

SEQ ID NO: 5928356 - DNA, 25 bp, Homo sapien
cgggccccgtggcgccgcccgtgcc

SEQ ID NO: 5928357 - DNA, 25 bp, Homo sapien
cgcccggcccgccggcacccccagc

SEQ ID NO: 5928358 - DNA, 25 bp, Homo sapien
cgcccgccgcgaccggccgcccctc

SEQ ID NO: 5928359 - DNA, 25 bp, Homo sapien
cgccgcgggcgcgcccaccgagcgg

SEQ ID NO: 5928360 - DNA, 25 bp, Homo sapien
cccgccagccgacgcgcgcccgggc

SEQ ID NO: 5928361 - DNA, 25 bp, Homo sapien
gcgacccggccgacgcccgcccgcg

SEQ ID NO: 5928362 - DNA, 25 bp, Homo sapien
cgcgcacggtcggcccgggccgcgc

SEQ ID NO: 5928363 - DNA, 25 bp, Homo sapien
cggccgccggcccggcacgcgggca

SEQ ID NO: 5928364 - DNA, 25 bp, Homo sapien
cggcggtgccgccggccggtcgggc

SEQ ID NO: 5928365 - DNA, 25 bp, Homo sapien
ccggcgcgtcggcgcgaccgcccgc

SEQ ID NO: 5928366 - DNA, 25 bp, Homo sapien
gcgccggtggcccgccggcgcgcca

SEQ ID NO: 5928367 - DNA, 25 bp, Homo sapien
cgcccggtggcgcggcccgccctcg

SEQ ID NO: 5928368 - DNA, 25 bp, Homo sapien
cggcccgcggcgggcgacgcgcgga

SEQ ID NO: 5928369 - DNA, 25 bp, Homo sapien
ccggggaccgcgcgcggctgcggcc

SEQ ID NO: 5928370 - DNA, 25 bp, Homo sapien
gcgccggccgccgggcatccgccgg

SEQ ID NO: 5928371 - DNA, 25 bp, Homo sapien
cgccggcgtcgcccgcgcgaccgcg

SEQ ID NO: 5928372 - DNA, 25 bp, Homo sapien
gggcggccgcggtccgggagcccgc

SEQ ID NO: 5928373 - DNA, 25 bp, Homo sapien
gccgcgcctgggccggaccgggccg

SEQ ID NO: 5928374 - DNA, 25 bp, Homo sapien
gtggggcccgcgaccgggcgcgcgg

SEQ ID NO: 5928375 - DNA, 25 bp, Homo sapien
gggcggcgccacgagcggcccccgg

SEQ ID NO: 5928376 - DNA, 25 bp, Homo sapien
gccgggcccccgtgcccgagccgcc

SEQ ID NO: 5928377 - DNA, 25 bp, Homo sapien
cggccgtcgcccgccggcgggtggc

SEQ ID NO: 5928378 - DNA, 25 bp, Homo sapien
ccggcgcggagcgcccggcgacgcg

SEQ ID NO: 5928379 - DNA, 25 bp, Homo sapien
tccccccccggtcgcgcggcgcgcc

SEQ ID NO: 5928380 - DNA, 25 bp, Homo sapien
gccccggcgtcgcgcgcgggcgagg

SEQ ID NO: 5928381 - DNA, 25 bp, Homo sapien
ccggcccttggcgcgccgccccgcc

SEQ ID NO: 5928382 - DNA, 25 bp, Homo sapien
ggcgcggggccgcggcacgccccac

SEQ ID NO: 5928383 - DNA, 25 bp, Homo sapien
gggcgcgccggtggcccgcctcccc

SEQ ID NO: 5928384 - DNA, 25 bp, Homo sapien
gcggggggccccccctgcgctgcgg

SEQ ID NO: 5928385 - DNA, 25 bp, Homo sapien
gagcccgcgcccggcgcgtcgccgg

SEQ ID NO: 5928386 - DNA, 25 bp, Homo sapien
ccgtggcgcgcgcaccgcgccggcg

SEQ ID NO: 5928387 - DNA, 25 bp, Homo sapien
ccggcgcgcccgccggcgtgcgcga

SEQ ID NO: 5928388 - DNA, 25 bp, Homo sapien
ccggtgcggcgccacgccgcgccgg

SEQ ID NO: 5928389 - DNA, 25 bp, Homo sapien
ccgctcgggtgcccggcggcgccgg

SEQ ID NO: 5928390 - DNA, 25 bp, Homo sapien
tgcgccgcccccccggtgcgcgcgc

SEQ ID NO: 5928391 - DNA, 25 bp, Homo sapien
gcagggcggtcgccggcgccgcgcc

SEQ ID NO: 5928392 - DNA, 25 bp, Homo sapien
cctgccgccgcgcgtcgggcgcccg

SEQ ID NO: 5928393 - DNA, 25 bp, Homo sapien
aggccccgcggggcgtgccgggcgc

SEQ ID NO: 5928394 - DNA, 25 bp, Homo sapien
cccaggggccccgtcgcgcggcgcc

SEQ ID NO: 5928395 - DNA, 25 bp, Homo sapien
cccggccgcgacgccgcggcgcgac

SEQ ID NO: 5928396 - DNA, 25 bp, Homo sapien
aggccccccgcgcgacggcgccggc

SEQ ID NO: 5928397 - DNA, 25 bp, Homo sapien
cccgcggacgcgccccgcgtggcgc

SEQ ID NO: 5928398 - DNA, 25 bp, Homo sapien
gccccccccccgcgcggcgtgccac

SEQ ID NO: 5928399 - DNA, 25 bp, Homo sapien
gggccgcgggccgcaggcgtggcgc

SEQ ID NO: 5928400 - DNA, 25 bp, Homo sapien
gcgggcggcggctcgccggtcccgg

SEQ ID NO: 5928401 - DNA, 25 bp, Homo sapien
ccggtgggggcgctcccgcgccggc

SEQ ID NO: 5928402 - DNA, 25 bp, Homo sapien
caggccgagcggcgcgccgccgcgg

SEQ ID NO: 5928403 - DNA, 25 bp, Homo sapien
gcagcggcgcccgggcgaccccggg

SEQ ID NO: 5928404 - DNA, 25 bp, Homo sapien
gggcgcgcgcgaggggccccacgcg

SEQ ID NO: 5928405 - DNA, 25 bp, Homo sapien
gcgggcgtcgcccccggccacgggc

SEQ ID NO: 5928406 - DNA, 25 bp, Homo sapien
gccgccgggcccccggcgacgcgct

SEQ ID NO: 5928407 - DNA, 25 bp, Homo sapien
cgaggggcacggccgcgcgggcccg

SEQ ID NO: 5928408 - DNA, 25 bp, Homo sapien
gcgcgcgcggtgcgccgcgggtccc

SEQ ID NO: 5928409 - DNA, 25 bp, Homo sapien
tcgccggcccgtccgggccgcggcg

SEQ ID NO: 5928410 - DNA, 25 bp, Homo sapien
ccgcgcgcaccgccggcgcgtgccg

SEQ ID NO: 5928411 - DNA, 25 bp, Homo sapien
gagccgcgtcgggccggcgccgcgg

SEQ ID NO: 5928412 - DNA, 25 bp, Homo sapien
ctcgcggcgacgccgggcccgcccc

SEQ ID NO: 5928413 - DNA, 25 bp, Homo sapien
cccggcgaccggcgctcgcggccgg

SEQ ID NO: 5928414 - DNA, 25 bp, Homo sapien
gcccccggtggcgcgcccgccgctg

SEQ ID NO: 5928415 - DNA, 25 bp, Homo sapien
cgccgcgacgcgcgggcgcgcctcg

SEQ ID NO: 5928416 - DNA, 25 bp, Homo sapien
gcgcgcgcggtgggccggcgtgcgg

SEQ ID NO: 5928417 - DNA, 25 bp, Homo sapien
gccggccgtgcggcccacgccgccc

SEQ ID NO: 5928418 - DNA, 25 bp, Homo sapien
ggggccggtcgtgccccgcgcggcc

SEQ ID NO: 5928419 - DNA, 25 bp, Homo sapien
ggggcggcccggtacgcccgcgcgc

SEQ ID NO: 5928420 - DNA, 25 bp, Homo sapien
cacgcgcccccccgggcgcagccgc

SEQ ID NO: 5928421 - DNA, 25 bp, Homo sapien
cagcctccgcgggggcgccccgggc

SEQ ID NO: 5928422 - DNA, 25 bp, Homo sapien
ccaggggcgcgcccgccggtggccg

SEQ ID NO: 5928423 - DNA, 25 bp, Homo sapien
cgcccgcgccggggcgaccccgcac

SEQ ID NO: 5928424 - DNA, 25 bp, Homo sapien
ggcgccggccgatccgggcccgcgc

SEQ ID NO: 5928425 - DNA, 25 bp, Homo sapien
gccgccggctgcgagccgcgggccg

SEQ ID NO: 5928426 - DNA, 25 bp, Homo sapien
ggccgcgccggcgggcgtccccagc

SEQ ID NO: 5928427 - DNA, 25 bp, Homo sapien
gcgggccgcgccccctacgccccgc

SEQ ID NO: 5928428 - DNA, 25 bp, Homo sapien
cggcggcggctcgcgcagccgggcg

SEQ ID NO: 5928429 - DNA, 25 bp, Homo sapien
ggccccccgccggcgcccgtgctcg

SEQ ID NO: 5928430 - DNA, 25 bp, Homo sapien
gcggccgcgggtcgccccgggcagg

SEQ ID NO: 5928431 - DNA, 25 bp, Homo sapien
ccgcccgtggcgcccgtcgccccgc

SEQ ID NO: 5928432 - DNA, 25 bp, Homo sapien
gccgcgggcccccgcgaccgcgagc

SEQ ID NO: 5928433 - DNA, 25 bp, Homo sapien
cgcgggcgccgcgacgggcccaccc

SEQ ID NO: 5928434 - DNA, 25 bp, Homo sapien
gctgcgcccgcgtgccgcgcggcgg

SEQ ID NO: 5928435 - DNA, 25 bp, Homo sapien
gccccgcccgggccggcaccgccga

SEQ ID NO: 5928436 - DNA, 25 bp, Homo sapien
gctccgcggcacggcgccccggggc

SEQ ID NO: 5928437 - DNA, 25 bp, Homo sapien
cccggcgtcgcaccgggcggccgcc

SEQ ID NO: 5928438 - DNA, 25 bp, Homo sapien
gaggccgccggtgcgggcccgcccg

SEQ ID NO: 5928439 - DNA, 25 bp, Homo sapien
ccagcgcgcgccacccccggggggc

SEQ ID NO: 5928440 - DNA, 25 bp, Homo sapien
gcccgggcgcctcgcccgcgcccgt

SEQ ID NO: 5928441 - DNA, 25 bp, Homo sapien
cccccgggcccgcgcacggcctgcg

SEQ ID NO: 5928442 - DNA, 25 bp, Homo sapien
cgggcccccgcgtgccgggccgcca

SEQ ID NO: 5928443 - DNA, 25 bp, Homo sapien
cggcgccgccccggtgggcgcccac

SEQ ID NO: 5928444 - DNA, 25 bp, Homo sapien
gcgcggccccccggtgcgcgagggc

SEQ ID NO: 5928445 - DNA, 25 bp, Homo sapien
tggcccggcgcgtcggcgccgcggc

SEQ ID NO: 5928446 - DNA, 25 bp, Homo sapien
cgcggcacggcgccccgggcagccc

SEQ ID NO: 5928447 - DNA, 25 bp, Homo sapien
gccggctcgccgtgggcgggccggg

SEQ ID NO: 5928448 - DNA, 25 bp, Homo sapien
ccctcggcggacgggcccgccgcgc

SEQ ID NO: 5928449 - DNA, 25 bp, Homo sapien
gtcggggccgtcgccgcgcgccggg

SEQ ID NO: 5928450 - DNA, 25 bp, Homo sapien
ggcgcccgtgtccggcggcgcgccg

SEQ ID NO: 5928451 - DNA, 25 bp, Homo sapien
ccccgcgcggtgcccggccggccga

SEQ ID NO: 5928452 - DNA, 25 bp, Homo sapien
gctcgccccccgcgggaccgccgcg

SEQ ID NO: 5928453 - DNA, 25 bp, Homo sapien
ggggaggggcccgcgtgccgccgcg

SEQ ID NO: 5928454 - DNA, 25 bp, Homo sapien
ggctccgccccacggcggcgggcgc

SEQ ID NO: 5928455 - DNA, 25 bp, Homo sapien
ggccggccgggcgcgcggtacgggc

SEQ ID NO: 5928456 - DNA, 25 bp, Homo sapien
ctggcgcgggcggtcgccggccccc

SEQ ID NO: 5928457 - DNA, 25 bp, Homo sapien
acggccgcggcggctcgcccgggcc

SEQ ID NO: 5928458 - DNA, 25 bp, Homo sapien
gccgcccgtccggggcgcgctgccg

SEQ ID NO: 5928459 - DNA, 25 bp, Homo sapien
gcgccggcgggtacgcccgggcgcg

SEQ ID NO: 5928460 - DNA, 25 bp, Homo sapien
gcgcccgcagagccccccgcggggc

SEQ ID NO: 5928461 - DNA, 25 bp, Homo sapien
ccccgccacgcgcccggcgccacgc

SEQ ID NO: 5928462 - DNA, 25 bp, Homo sapien
cccggcccccggcggcgcgagcgca

SEQ ID NO: 5928463 - DNA, 25 bp, Homo sapien
gccagcgcgggcggtccccgggcgc

SEQ ID NO: 5928464 - DNA, 25 bp, Homo sapien
ccgcccgaggtgccgcggcgccccc

SEQ ID NO: 5928465 - DNA, 25 bp, Homo sapien
gggcgccggcgtcaccccgccgggc

SEQ ID NO: 5928466 - DNA, 25 bp, Homo sapien
gcggcggcgacagccccgcgccggc

SEQ ID NO: 5928467 - DNA, 25 bp, Homo sapien
cagcggccggtcgggccgccgcccc

SEQ ID NO: 5928468 - DNA, 25 bp, Homo sapien
cgcggcagccgaccggccccggggc

SEQ ID NO: 5928469 - DNA, 25 bp, Homo sapien
gcgcgctgcgccgtcggcgccgccg

SEQ ID NO: 5928470 - DNA, 25 bp, Homo sapien
gcgcgccccctgggtcgccgggcgc

SEQ ID NO: 5928471 - DNA, 25 bp, Homo sapien
cgcgcgcccccccgctcgcgcgcac

SEQ ID NO: 5928472 - DNA, 25 bp, Homo sapien
ggcgcgcgcgtcgccggccgcaccc

SEQ ID NO: 5928473 - DNA, 25 bp, Homo sapien
gccggccgcgtcgcgcgaccccggg

SEQ ID NO: 5928474 - DNA, 25 bp, Homo sapien
gcccgggcccgcgcccggtggccca

SEQ ID NO: 5928475 - DNA, 25 bp, Homo sapien
cgacgcgccgtgcccccccgcgcgg

SEQ ID NO: 5928476 - DNA, 25 bp, Homo sapien
ggctgggcgccgcccgtgcggccgc

SEQ ID NO: 5928477 - DNA, 25 bp, Homo sapien
ggcgggcgcgcgactcgccggccgc

SEQ ID NO: 5928478 - DNA, 25 bp, Homo sapien
gagccgccccccggacgcggccgcg

SEQ ID NO: 5928479 - DNA, 25 bp, Homo sapien
cgcccgacctgccgcgccgggggcc

SEQ ID NO: 5928480 - DNA, 25 bp, Homo sapien
gcgcgggcgcggtccgccggaggcc

SEQ ID NO: 5928481 - DNA, 25 bp, Homo sapien
cgggccggctcgccgctcgggcccc

SEQ ID NO: 5928482 - DNA, 25 bp, Homo sapien
gggggggcggtgcgcccgcgcgcgt

SEQ ID NO: 5928483 - DNA, 25 bp, Homo sapien
gccagggcacgcccgcgccggcgcg

SEQ ID NO: 5928484 - DNA, 25 bp, Homo sapien
ccgcgactccggcgcgcgggccgcg

SEQ ID NO: 5928485 - DNA, 25 bp, Homo sapien
gcgcggtcgcccccgcggcggtcgc

SEQ ID NO: 5928486 - DNA, 25 bp, Homo sapien
cgggcctcccacgcgcggcgccgcg

SEQ ID NO: 5928487 - DNA, 25 bp, Homo sapien
ccgcgggcccccctggcgcgaggcg

SEQ ID NO: 5928488 - DNA, 25 bp, Homo sapien
ccccccgcgccgccagtggcccggc

SEQ ID NO: 5928489 - DNA, 25 bp, Homo sapien
ggccgccccgtgccgcgtcgggggc

SEQ ID NO: 5928490 - DNA, 25 bp, Homo sapien
agggggacgcgcgcgcggcgccgcg

SEQ ID NO: 5928491 - DNA, 25 bp, Homo sapien
ccgcggtgctccccgcgcggccggg

SEQ ID NO: 5928492 - DNA, 25 bp, Homo sapien
cgcgcggtccggcgcccgcccaccc

SEQ ID NO: 5928493 - DNA, 25 bp, Homo sapien
gccgcgccgccacccgacggcccgg

SEQ ID NO: 5928494 - DNA, 25 bp, Homo sapien
cgcgggacgcgcggcgggcctgggc

SEQ ID NO: 5928495 - DNA, 25 bp, Homo sapien
gggcccgcggggcgcgaccctccgc

SEQ ID NO: 5928496 - DNA, 25 bp, Homo sapien
ggccccgtcggcccgcgccgcgtgg

SEQ ID NO: 5928497 - DNA, 25 bp, Homo sapien
cggcgggaccggcccacgcgcgccg

SEQ ID NO: 5928498 - DNA, 25 bp, Homo sapien
agcggcacggcgggcccgccgcgcg

SEQ ID NO: 5928499 - DNA, 25 bp, Homo sapien
ggcaccggtcgcgggccccgccgcg

SEQ ID NO: 5928500 - DNA, 25 bp, Homo sapien
cgccgggcgagccgccggccctccg

SEQ ID NO: 5928501 - DNA, 25 bp, Homo sapien
cgccctgcggccccccgccggagcg

SEQ ID NO: 5928502 - DNA, 25 bp, Homo sapien
gcgccgcggcgcacgccgacccccc

SEQ ID NO: 5928503 - DNA, 25 bp, Homo sapien
ccggtccgcggcgccgcacgcgccg

SEQ ID NO: 5928504 - DNA, 25 bp, Homo sapien
tgcccccgaccggcgccgcgcccgg

SEQ ID NO: 5928505 - DNA, 25 bp, Homo sapien
tgccccgctgggcgcgccccgcgcg

SEQ ID NO: 5928506 - DNA, 25 bp, Homo sapien
gcccgcggcgggtccgcccctgggc

SEQ ID NO: 5928507 - DNA, 25 bp, Homo sapien
tcgccacgcgccggcgcccggggcc

SEQ ID NO: 5928508 - DNA, 25 bp, Homo sapien
gcggcagccgcgccagcggccgccg

SEQ ID NO: 5928509 - DNA, 25 bp, Homo sapien
cggccgcccggcgcgcgcaagcgcc

SEQ ID NO: 5928510 - DNA, 25 bp, Homo sapien
ccgcctggccccccgcgcggccctc

SEQ ID NO: 5928511 - DNA, 25 bp, Homo sapien
gggcccggtccggcgccggcgcctc

SEQ ID NO: 5928512 - DNA, 25 bp, Homo sapien
gccgccgcgaccggcccgccgtgcc

SEQ ID NO: 5928513 - DNA, 25 bp, Homo sapien
ggggcggcgccgaccggcggcctcc

SEQ ID NO: 5928514 - DNA, 25 bp, Homo sapien
cagccccggtcgcgcggccccggcg

SEQ ID NO: 5928515 - DNA, 25 bp, Homo sapien
ccgccggccgcgcggcgacgcgacc

SEQ ID NO: 5928516 - DNA, 25 bp, Homo sapien
ccgcctccgcccggcgggcgccctc

SEQ ID NO: 5928517 - DNA, 25 bp, Homo sapien
gccggacccgcgccggaccgcgccg

SEQ ID NO: 5928518 - DNA, 25 bp, Homo sapien
gggctcggcacgcgccgggggccgc

SEQ ID NO: 5928519 - DNA, 25 bp, Homo sapien
cgcgcccggcccggcgtgccccctg

SEQ ID NO: 5928520 - DNA, 25 bp, Homo sapien
ccgccgacgcgccacggggggccgc

SEQ ID NO: 5928521 - DNA, 25 bp, Homo sapien
gcgcccgcccccacgggccgtgggc

SEQ ID NO: 5928522 - DNA, 25 bp, Homo sapien
gcgcgccggtccgggcggccccgtc

SEQ ID NO: 5928523 - DNA, 25 bp, Homo sapien
ccgcgccgcgcggtcggccctgcgc

SEQ ID NO: 5928524 - DNA, 25 bp, Homo sapien
gcacccggacgggccgcggcgcgcg

SEQ ID NO: 5928525 - DNA, 25 bp, Homo sapien
cgcgcgggtcggcccgcggcgtgcc

SEQ ID NO: 5928526 - DNA, 25 bp, Homo sapien
acgggcgcgcgcgcaccgcgggccg

SEQ ID NO: 5928527 - DNA, 25 bp, Homo sapien
cgcgcgcgccgcgctgtcggccccg

SEQ ID NO: 5928528 - DNA, 25 bp, Homo sapien
agccgccgcgggcgtgcggcccccc

SEQ ID NO: 5928529 - DNA, 25 bp, Homo sapien
gggagggcgcaccgccgggcgggcg

SEQ ID NO: 5928530 - DNA, 25 bp, Homo sapien
ccccccggccgctcgggcgcagggc

SEQ ID NO: 5928531 - DNA, 25 bp, Homo sapien
gtgccggccgcgcgaccgcgggccg

SEQ ID NO: 5928532 - DNA, 25 bp, Homo sapien
gccccgggagccggcgccgtgcccg

SEQ ID NO: 5928533 - DNA, 25 bp, Homo sapien
ccgcacggtgcgcccgggccccgcg

SEQ ID NO: 5928534 - DNA, 25 bp, Homo sapien
tggcccgcgagccgggcccccgccc

SEQ ID NO: 5928535 - DNA, 25 bp, Homo sapien
gcgcgcgcgacgcgccggccgcggt

SEQ ID NO: 5928536 - DNA, 25 bp, Homo sapien
gggcgcgcccgtccgccggcctccg

SEQ ID NO: 5928537 - DNA, 25 bp, Homo sapien
ggcgcggcgcgctacccccgccccg

SEQ ID NO: 5928538 - DNA, 25 bp, Homo sapien
cggctccgcggaccggcgccccgcg

SEQ ID NO: 5928539 - DNA, 25 bp, Homo sapien
ccggccgcacgggcccgccggcgtg

SEQ ID NO: 5928540 - DNA, 25 bp, Homo sapien
cccggcggccgcccgccctaggcgc

SEQ ID NO: 5928541 - DNA, 25 bp, Homo sapien
cggcgcggcgccgctcgtccccgcg

SEQ ID NO: 5928542 - DNA, 25 bp, Homo sapien
gggtgggcgggcgccggaccgcgcg

SEQ ID NO: 5928543 - DNA, 25 bp, Homo sapien
cgcggcggcacgcgggcccctcccc

SEQ ID NO: 5928544 - DNA, 25 bp, Homo sapien
gcggggcgtagggggcgcggcccgc

SEQ ID NO: 5928545 - DNA, 25 bp, Homo sapien
gctggggacgcccgccggcgcggcc

SEQ ID NO: 5928546 - DNA, 25 bp, Homo sapien
cgcaggccgtgcgcgggcccggggg

SEQ ID NO: 5928547 - DNA, 25 bp, Homo sapien
cgcgccggcgcgggcgtgccctggc

SEQ ID NO: 5928548 - DNA, 25 bp, Homo sapien
gcgcggcgggcccgtccgccgaggg

SEQ ID NO: 5928549 - DNA, 25 bp, Homo sapien
cgcgcccgggcgtacccgccggcgc

SEQ ID NO: 5928550 - DNA, 25 bp, Homo sapien
gcccccgacgcggcacggggcggcc

SEQ ID NO: 5928551 - DNA, 25 bp, Homo sapien
gccgcggcgccgacgcgccgggcca

SEQ ID NO: 5928552 - DNA, 25 bp, Homo sapien
gggctgcccggggcgccgtgccgcg

SEQ ID NO: 5928553 - DNA, 25 bp, Homo sapien
gcgaccgccgcgggggcgaccgcgc

SEQ ID NO: 5928554 - DNA, 25 bp, Homo sapien
tcggccggccgggcaccgcgcgggg

SEQ ID NO: 5928555 - DNA, 25 bp, Homo sapien
agccccgtggcgcccgcgcggcggc

SEQ ID NO: 5928556 - DNA, 25 bp, Homo sapien
gggtgcggccggcgacgcgcgcgcc

SEQ ID NO: 5928557 - DNA, 25 bp, Homo sapien
ggcacggcgggccggtcgcggcggc

SEQ ID NO: 5928558 - DNA, 25 bp, Homo sapien
gcccaggggcggacccgccgcgggc

SEQ ID NO: 5928559 - DNA, 25 bp, Homo sapien
cggggcgggggtagcgcgccgcgcc

SEQ ID NO: 5928560 - DNA, 25 bp, Homo sapien
ccggcgccgccgggcacccgagcgg

SEQ ID NO: 5928561 - DNA, 25 bp, Homo sapien
gtggggcgtgccgcggccccgcgcc

SEQ ID NO: 5928562 - DNA, 25 bp, Homo sapien
ggccgcgcggggcacgaccggcccc

SEQ ID NO: 5928563 - DNA, 25 bp, Homo sapien
cggcgcgcgtgggccggtcccgccg

SEQ ID NO: 5928564 - DNA, 25 bp, Homo sapien
gagggcgcccgccgggcggaggcgg

SEQ ID NO: 5928565 - DNA, 25 bp, Homo sapien
gcccgtggccgggggcgacgcccgc

SEQ ID NO: 5928566 - DNA, 25 bp, Homo sapien
gccctcgcgcaccggggggccgcgc

SEQ ID NO: 5928567 - DNA, 25 bp, Homo sapien
ccgggggccgctcgtggcgccgccc

SEQ ID NO: 5928568 - DNA, 25 bp, Homo sapien
gcgcggcccgggccgaccgtgcgcg

SEQ ID NO: 5928569 - DNA, 25 bp, Homo sapien
cggcgcgccgccggacacgggcgcc

SEQ ID NO: 5928570 - DNA, 25 bp, Homo sapien
gggtgggcccgtcgcggcgcccgcg

SEQ ID NO: 5928571 - DNA, 25 bp, Homo sapien
cgcgtcgccgggcgctccgcgccgg

SEQ ID NO: 5928572 - DNA, 25 bp, Homo sapien
ggccccgggcgccggcgcgtggcga

SEQ ID NO: 5928573 - DNA, 25 bp, Homo sapien
cgggcccgcgcggccgtgcccctcg

SEQ ID NO: 5928574 - DNA, 25 bp, Homo sapien
gagggccgcgcggggggccaggcgg

SEQ ID NO: 5928575 - DNA, 25 bp, Homo sapien
gcgggcggtcgcgccgacgcgccgg

SEQ ID NO: 5928576 - DNA, 25 bp, Homo sapien
gcccggggcgcccccgcggaggctg

SEQ ID NO: 5928577 - DNA, 25 bp, Homo sapien
ggtcgcgtcgccgcgcggccggcgg

SEQ ID NO: 5928578 - DNA, 25 bp, Homo sapien
ggggggtcggcgtgcgccgcggcgc

SEQ ID NO: 5928579 - DNA, 25 bp, Homo sapien
gccctgcgcccgagcggccgggggg

SEQ ID NO: 5928580 - DNA, 25 bp, Homo sapien
cggcggcgccgacggcgcagcgcgc

SEQ ID NO: 5928581 - DNA, 25 bp, Homo sapien
gcgggctcccggaccgcggccgccc

SEQ ID NO: 5928582 - DNA, 25 bp, Homo sapien
cgcgcggggcgcgcccagcggggca

SEQ ID NO: 5928583 - DNA, 25 bp, Homo sapien
cgcggtcgcgcgggcgacgccggcg

SEQ ID NO: 5928584 - DNA, 25 bp, Homo sapien
cgcccggctgcgcgagccgccgccg

SEQ ID NO: 5928585 - DNA, 25 bp, Homo sapien
cccgaacggcggcgcgccgcgcggc

SEQ ID NO: 5928586 - DNA, 25 bp, Homo sapien
cccggggtcgcccgggcgccgctgc

SEQ ID NO: 5928587 - DNA, 25 bp, Homo sapien
gcccacggcccgtgggggcgggcgc

SEQ ID NO: 5928588 - DNA, 25 bp, Homo sapien
ccgggccgtcgggtggcggcgcggc

SEQ ID NO: 5928589 - DNA, 25 bp, Homo sapien
gcggccgggcgacgggcgccggagc

SEQ ID NO: 5928590 - DNA, 25 bp, Homo sapien
cgcggggcgccggtccgcggagccg

SEQ ID NO: 5928591 - DNA, 25 bp, Homo sapien
cggcccggtccggcccaggcgcggc

SEQ ID NO: 5928592 - DNA, 25 bp, Homo sapien
cgccgcggcccggacgggccggcga

SEQ ID NO: 5928593 - DNA, 25 bp, Homo sapien
gcgtggcgccgggcgcgtggcgggg

SEQ ID NO: 5928594 - DNA, 25 bp, Homo sapien
ccgcacgccggcccaccgcgcgcgc

SEQ ID NO: 5928595 - DNA, 25 bp, Homo sapien
gcccgaccggccggcggcaccgccg

SEQ ID NO: 5928596 - DNA, 25 bp, Homo sapien
gcggcccccggcgcgtgccgagccc

SEQ ID NO: 5928597 - DNA, 25 bp, Homo sapien
gcccaggcccgccgcgcgtcccgcg

SEQ ID NO: 5928598 - DNA, 25 bp, Homo sapien
cgcggggcccgggcgcaccgtgcgg

SEQ ID NO: 5928599 - DNA, 25 bp, Homo sapien
ccgggcgcggcgccggtcgggggca

SEQ ID NO: 5928600 - DNA, 25 bp, Homo sapien
cccggggtcgcgcgacgcggccggc

SEQ ID NO: 5928601 - DNA, 25 bp, Homo sapien
ggccgcagccgcgcgcggtccccgg

SEQ ID NO: 5928602 - DNA, 25 bp, Homo sapien
gcggccccccgtggcgcgtcggcgg

SEQ ID NO: 5928603 - DNA, 25 bp, Homo sapien
ccgctgccgggggcccgctcgcggg

SEQ ID NO: 5928604 - DNA, 25 bp, Homo sapien
gccccggggcgccgtgccgcggagc

SEQ ID NO: 5928605 - DNA, 25 bp, Homo sapien
cccggcccgcccacggcgagccggc

SEQ ID NO: 5928606 - DNA, 25 bp, Homo sapien
cgcgcggcgggcccgccgtgccgct

SEQ ID NO: 5928607 - DNA, 25 bp, Homo sapien
cggcccgcggtcgcgcggccggcac

SEQ ID NO: 5928608 - DNA, 25 bp, Homo sapien
ggcccgggcgagccgccgcggccgt

SEQ ID NO: 5928609 - DNA, 25 bp, Homo sapien
acgggcgcgggcgaggcgcccgggc

SEQ ID NO: 5928610 - DNA, 25 bp, Homo sapien
ccgctcggtgggcgcgcccgcggcg

SEQ ID NO: 5928611 - DNA, 25 bp, Homo sapien
gcgcgggcccggatcggccggcgcc

SEQ ID NO: 5928612 - DNA, 25 bp, Homo sapien
agcgcgtcgccgggggcccggcggc

SEQ ID NO: 5928613 - DNA, 25 bp, Homo sapien
gacggggccgcccggaccggcgcgc

SEQ ID NO: 5928614 - DNA, 25 bp, Homo sapien
cgcccgcccggcggtgcgccctccc

SEQ ID NO: 5928615 - DNA, 25 bp, Homo sapien
gcgcccgccgccgtggggcggagcc

SEQ ID NO: 5928616 - DNA, 25 bp, Homo sapien
cgagggcgggccgcgccaccgggcg

SEQ ID NO: 5928617 - DNA, 25 bp, Homo sapien
gcgcgcgcaccgggggggcggcgca

SEQ ID NO: 5928618 - DNA, 25 bp, Homo sapien
ggggcggcggcccgaccggccgctg

SEQ ID NO: 5928619 - DNA, 25 bp, Homo sapien
ggcggctcgggcacgggggcccggc

SEQ ID NO: 5928620 - DNA, 25 bp, Homo sapien
gggggccggcgaccgcccgcgccag

SEQ ID NO: 5928621 - DNA, 25 bp, Homo sapien
cacgccggcgggcccgtgcggccgg

SEQ ID NO: 5928622 - DNA, 25 bp, Homo sapien
ccgcgcgcccggtcgcgggccccac

SEQ ID NO: 5928623 - DNA, 25 bp, Homo sapien
gccggcgcgggagcgcccccaccgg

SEQ ID NO: 5928624 - DNA, 25 bp, Homo sapien
gcggagggtcgcgccccgcgggccc

SEQ ID NO: 5928625 - DNA, 25 bp, Homo sapien
ggcgcttgcgcgcgccgggcggccg

SEQ ID NO: 5928626 - DNA, 25 bp, Homo sapien
gcccggcggggtgacgccggcgccc

SEQ ID NO: 5928627 - DNA, 25 bp, Homo sapien
ccggcggatgcccggcggccggcgc

SEQ ID NO: 5928628 - DNA, 25 bp, Homo sapien
tgcccgcgtgccgggccggcggccg

SEQ ID NO: 5928629 - DNA, 25 bp, Homo sapien
ccgcagcgcagggggggccccccgc

SEQ ID NO: 5928630 - DNA, 25 bp, Homo sapien
ccccgccgcgcaggggggccgcgtc

SEQ ID NO: 5928631 - DNA, 25 bp, Homo sapien
ggggcccgagcggcgagccggcccg

SEQ ID NO: 5928632 - DNA, 25 bp, Homo sapien
ccggcgcggcgtggcgccgcaccgg

SEQ ID NO: 5928633 - DNA, 25 bp, Homo sapien
cggcgcgtgcggcgccgcggaccgg

SEQ ID NO: 5928634 - DNA, 25 bp, Homo sapien
gcgggcgcggcgcaccgggggtggc

SEQ ID NO: 5928635 - DNA, 25 bp, Homo sapien
cgcggcgccgcgcgtgggaggcccg

SEQ ID NO: 5928636 - DNA, 25 bp, Homo sapien
gcccgtaccgcgcgcccggccggcc

SEQ ID NO: 5928637 - DNA, 25 bp, Homo sapien
tcgcgcacgccggcgggcgcgccgg

SEQ ID NO: 5928638 - DNA, 25 bp, Homo sapien
ccggcgggtgccgacgcgcgggcgg

SEQ ID NO: 5928639 - DNA, 25 bp, Homo sapien
tcgggcagcggggggggcgccccgc

SEQ ID NO: 5928640 - DNA, 25 bp, Homo sapien
cggcccgcggtgcgcgcgcgcccgt

SEQ ID NO: 5928641 - DNA, 25 bp, Homo sapien
gcgcccggggaccgcccgcgctggc

SEQ ID NO: 5928642 - DNA, 25 bp, Homo sapien
gcgggcgctgcgcgggggggccacg

SEQ ID NO: 5928643 - DNA, 25 bp, Homo sapien
gcggccggcgagtcgcgcgcccgcc

SEQ ID NO: 5928644 - DNA, 25 bp, Homo sapien
cgggcgcccgacgcgcggcggcagg

SEQ ID NO: 5928645 - DNA, 25 bp, Homo sapien
tccgcgcgtcgcccgccgcgggccg

SEQ ID NO: 5928646 - DNA, 25 bp, Homo sapien
ggcgcggcgccggcgaccgccctgc

SEQ ID NO: 5928647 - DNA, 25 bp, Homo sapien
gtggcacgccgcgcggggggggggc

SEQ ID NO: 5928648 - DNA, 25 bp, Homo sapien
gcggggcgacgggcgccacgggcgg

SEQ ID NO: 5928649 - DNA, 25 bp, Homo sapien
cggagggccggcggctcgcccggcg

SEQ ID NO: 5928650 - DNA, 25 bp, Homo sapien
ccgcggcggcgcgccgctcggcctg

SEQ ID NO: 5928651 - DNA, 25 bp, Homo sapien
ggggcgggcccggcgtcgccgcgag

SEQ ID NO: 5928652 - DNA, 25 bp, Homo sapien
gggcggcgtgggccgcacggccggc

SEQ ID NO: 5928653 - DNA, 25 bp, Homo sapien
cgggcggcccaccgctcgcggcggg

SEQ ID NO: 5928654 - DNA, 25 bp, Homo sapien
gggggcgccgcggcacctcgggcgg

SEQ ID NO: 5928655 - DNA, 25 bp, Homo sapien
ggcgcgccgcgcgaccgggggggga

SEQ ID NO: 5928656 - DNA, 25 bp, Homo sapien
gccacccgccggcgggcgacggccg

SEQ ID NO: 5928657 - DNA, 25 bp, Homo sapien
ccggccgcgagcgccggtcgccggg

SEQ ID NO: 5928658 - DNA, 25 bp, Homo sapien
cggcgcggtccggcgcgggtccggc

SEQ ID NO: 5928659 - DNA, 25 bp, Homo sapien
tggcggcccggcacgcgggggcccg

SEQ ID NO: 5928660 - DNA, 25 bp, Homo sapien
ggcacgggcggcgccacggggcccg

SEQ ID NO: 5928661 - DNA, 25 bp, Homo sapien
cgggctcgccgggcgacgccccgcc

SEQ ID NO: 5928662 - DNA, 25 bp, Homo sapien
cgcgcgccgcggcccgtccgggtgc

SEQ ID NO: 5928663 - DNA, 25 bp, Homo sapien
cggcggccgctggcgcggctgccgc

SEQ ID NO: 5928664 - DNA, 25 bp, Homo sapien
gcccgcgccgccgacgggcgacccg

SEQ ID NO: 5928665 - DNA, 25 bp, Homo sapien
gcgccacgcggggcgcgtccgcggg

SEQ ID NO: 5928666 - DNA, 25 bp, Homo sapien
cctcgcccgcgcgcgacgccggggc

SEQ ID NO: 5928667 - DNA, 25 bp, Homo sapien
cagggggcacgccgggccgggcgcg

SEQ ID NO: 5928668 - DNA, 25 bp, Homo sapien
gaggccgacgggccggcgcgcgccg

SEQ ID NO: 5928669 - DNA, 25 bp, Homo sapien
gccccgcggggggctctgcgggcgc

SEQ ID NO: 5928670 - DNA, 25 bp, Homo sapien
gcgcccggcacgccccgcggggcct

SEQ ID NO: 5928671 - DNA, 25 bp, Homo sapien
ccgccgcgcggcacgcgggcgcagc

SEQ ID NO: 5928672 - DNA, 25 bp, Homo sapien
tgggccaccgggcgcgggcccgggc

SEQ ID NO: 5928673 - DNA, 25 bp, Homo sapien
gcgccacgcctgcggcccgcggccc

SEQ ID NO: 5928674 - DNA, 25 bp, Homo sapien
gcgcgcgggcgtaccgggccgcccc

SEQ ID NO: 5928675 - DNA, 25 bp, Homo sapien
ggaggccgccggtcggcgccgcccc

SEQ ID NO: 5928676 - DNA, 25 bp, Homo sapien
gccggcgccgtcgcgcggggggcct

SEQ ID NO: 5928677 - DNA, 25 bp, Homo sapien
ggcggggcggcgcgccaagggccgg

SEQ ID NO: 5928678 - DNA, 25 bp, Homo sapien
ggcgcgccgacgcgcggtgcggcgg

SEQ ID NO: 5928679 - DNA, 25 bp, Homo sapien
tcggcggtgccggcccgggcggggc

SEQ ID NO: 5928680 - DNA, 25 bp, Homo sapien
gcgcagggccgaccgcgcggcgcgg

SEQ ID NO: 5928681 - DNA, 25 bp, Homo sapien
gaggcgccggcgccggaccgggccc

SEQ ID NO: 5928682 - DNA, 25 bp, Homo sapien
cgggcacggcgccggctcccggggc

SEQ ID NO: 5928683 - DNA, 25 bp, Homo sapien
cggccaccggcgggcgcgcccctgg

SEQ ID NO: 5928684 - DNA, 25 bp, Homo sapien
ggggaggcgggccaccggcgcgccc

SEQ ID NO: 5928685 - DNA, 25 bp, Homo sapien
cgcggccgcgtccggggggcggctc

SEQ ID NO: 5928686 - DNA, 25 bp, Homo sapien
gctcgcggtcgcgggggcccgcggc

SEQ ID NO: 5928687 - DNA, 25 bp, Homo sapien
cggaggccggcggacgggcgcgccc

SEQ ID NO: 5928688 - DNA, 25 bp, Homo sapien
cgctccggcggggggccgcagggcg

SEQ ID NO: 5928689 - DNA, 25 bp, Homo sapien
gccccccgggggtggcgcgcgctgg

SEQ ID NO: 5928690 - DNA, 25 bp, Homo sapien
gcgcccggcgacccagggggcgcgc

SEQ ID NO: 5928691 - DNA, 25 bp, Homo sapien
cgcggcccgcgcgccggagtcgcgg

SEQ ID NO: 5928692 - DNA, 25 bp, Homo sapien
cgcggcggggcccgcgaccggtgcc

SEQ ID NO: 5928693 - DNA, 25 bp, Homo sapien
gccggcgcggggctgtcgccgccgc

SEQ ID NO: 5928694 - DNA, 25 bp, Homo sapien
gctgggggtgccggcgggccgggcg

SEQ ID NO: 5928695 - DNA, 25 bp, Homo sapien
ggcacgccgcgggccgacccgcgcg

SEQ ID NO: 5928696 - DNA, 25 bp, Homo sapien
accgcggccggcgcgtcgcgcgcgc

SEQ ID NO: 5928697 - DNA, 25 bp, Homo sapien
gtgggcgcccaccggggcggcgccg

SEQ ID NO: 5928698 - DNA, 25 bp, Homo sapien
gtcgcgccgcggcgtcgcggccggg

SEQ ID NO: 5928699 - DNA, 25 bp, Homo sapien
gggacccgcggcgcaccgcgcgcgc

SEQ ID NO: 5928700 - DNA, 25 bp, Homo sapien
tgcgctcgcgccgccgggggccggg

SEQ ID NO: 5928701 - DNA, 25 bp, Homo sapien
cccggcgcgcggcgacggccccgac

SEQ ID NO: 5928702 - DNA, 25 bp, Homo sapien
cagcggcgggcgcgccaccgggggc

SEQ ID NO: 5928703 - DNA, 25 bp, Homo sapien
ccgggaccggcgagccgccgcccgc

SEQ ID NO: 5928704 - DNA, 25 bp, Homo sapien
ccgcggcgccggcccgacgcggctc

SEQ ID NO: 5928705 - DNA, 25 bp, Homo sapien
cgaggcgcgcccgcgcgtcgcggcg

SEQ ID NO: 5928706 - DNA, 25 bp, Homo sapien
cgcctcgcgccaggggggcccgcgg

SEQ ID NO: 5928707 - DNA, 25 bp, Homo sapien
gcccgcgccgaccgggcggccggga

SEQ ID NO: 5928708 - DNA, 25 bp, Homo sapien
cggcccgcggctcgcagccggcggc

SEQ ID NO: 5928709 - DNA, 25 bp, Homo sapien
cgagcacgggcgccggcggggggcc

SEQ ID NO: 5928710 - DNA, 25 bp, Homo sapien
cgccggcgcggtgcgcgcgccacgg

SEQ ID NO: 5928711 - DNA, 25 bp, Homo sapien
ccacgcggcgcgggccgacggggcc

SEQ ID NO: 5928712 - DNA, 25 bp, Homo sapien
gtgcgcgcgagcgggggggcgcgcg

SEQ ID NO: 5928713 - DNA, 25 bp, Homo sapien
gcggccgcacgggcggcgcccagcc

SEQ ID NO: 5928714 - DNA, 25 bp, Homo sapien
gcggctgcgcccgggggggcgcgtg

SEQ ID NO: 5928715 - DNA, 25 bp, Homo sapien
cgcggcgccgcgcgcgcgtccccct

SEQ ID NO: 5928716 - DNA, 25 bp, Homo sapien
gcggtgggggcacgcgcccgccgcc

SEQ ID NO: 5928717 - DNA, 25 bp, Homo sapien
ggcgccgcgcgacggggcccctggg

SEQ ID NO: 5928718 - DNA, 25 bp, Homo sapien
ccgcgcgggggggcacggcgcgtcg

SEQ ID NO: 5928719 - DNA, 25 bp, Homo sapien
ggcccccggcgcggcaggtcgggcg

SEQ ID NO: 5928720 - DNA, 25 bp, Homo sapien
cgcggggacgagcggcgccgcgccg

SEQ ID NO: 5928721 - DNA, 25 bp, Homo sapien
cggcacgcgccggcggtgcgcgcgg

SEQ ID NO: 5928722 - DNA, 25 bp, Homo sapien
cccaggctcgccggcggcgcggcgg

SEQ ID NO: 5928723 - DNA, 25 bp, Homo sapien
tggcgcgccggcgggccaccggcgc

SEQ ID NO: 5928724 - DNA, 25 bp, Homo sapien
ccggcgacgcgccgggcgcgggctc

SEQ ID NO: 5928725 - DNA, 25 bp, Homo sapien
ggggggccgcacgcccgcggcggct

SEQ ID NO: 5928726 - DNA, 25 bp, Homo sapien
cggggccgacagcgcggcgcgcgcg

SEQ ID NO: 5928727 - DNA, 25 bp, Homo sapien
ggcggccgcccggtgcgacgccggg

SEQ ID NO: 5928728 - DNA, 25 bp, Homo sapien
cgcggcggtcccgcggggggcgagc

SEQ ID NO: 5928729 - DNA, 25 bp, Homo sapien
acgcgcgcgggcgcaccgccccccc

SEQ ID NO: 5928730 - DNA, 25 bp, Homo sapien
cctgcccggggcgacccgcggccgc

SEQ ID NO: 5928731 - DNA, 25 bp, Homo sapien
gcccgggcgcgcgtcggctggcggg

SEQ ID NO: 5928732 - DNA, 25 bp, Homo sapien
gccccggggccggtcggctgccgcg

SEQ ID NO: 5928733 - DNA, 25 bp, Homo sapien
gccgggccactggcggcgcgggggg

SEQ ID NO: 5928734 - DNA, 25 bp, Homo sapien
cccggccgcgcggggagcaccgcgg

SEQ ID NO: 5928735 - DNA, 25 bp, Homo sapien
cggcagcgcgccccggacgggcggc

SEQ ID NO: 5928736 - DNA, 25 bp, Homo sapien
cgcgtggggcccctcgcgcgcgccc

SEQ ID NO: 5928737 - DNA, 25 bp, Homo sapien
gtgcggggtcgccccggcgcgggcg

SEQ ID NO: 5928738 - DNA, 25 bp, Homo sapien
gcgcctagggcgggcggccgccggg

SEQ ID NO: 5928739 - DNA, 25 bp, Homo sapien
gggcgggggcccggctcgcgggcca

SEQ ID NO: 5928740 - DNA, 25 bp, Homo sapien
gaggggcggccggtcgcggcgggcg

SEQ ID NO: 5928741 - DNA, 25 bp, Homo sapien
ggcctccggcggaccgcgcccgcgc

SEQ ID NO: 5928742 - DNA, 25 bp, Homo sapien
cgcgggcgggcgtcggccgggtcgc

SEQ ID NO: 5928743 - DNA, 25 bp, Homo sapien
cgccggggccgcgcgaccggggctg

SEQ ID NO: 5928744 - DNA, 25 bp, Homo sapien
gccgacggcgcaccgggccgccccg

SEQ ID NO: 5928745 - DNA, 25 bp, Homo sapien
cgggcgggcccgcaccggcggcctc

SEQ ID NO: 5928746 - DNA, 25 bp, Homo sapien
gggcgggcgcccccctggcgcgggc

SEQ ID NO: 5928747 - DNA, 25 bp, Homo sapien
ggcgcgtcgcgcccgcccccccgcg

SEQ ID NO: 5928748 - DNA, 25 bp, Homo sapien
gcgcccggcgggcccgctcggcggc

SEQ ID NO: 5928749 - DNA, 25 bp, Homo sapien
ggcgcgggcggcggtcccccggcgc

SEQ ID NO: 5928750 - DNA, 25 bp, Homo sapien
gcccgcgcgggccggccgtcgcccc

SEQ ID NO: 5928751 - DNA, 25 bp, Homo sapien
gcccgcggccgcgccccggtgggcg

SEQ ID NO: 5928752 - DNA, 25 bp, Homo sapien
cgcccgggcgtcggccggcgcggcc

SEQ ID NO: 5928753 - DNA, 25 bp, Homo sapien
gccgcccgcacccggcggcggcggc

SEQ ID NO: 5928754 - DNA, 25 bp, Homo sapien
gcggcgcgtcgccggcccccgccgg

SEQ ID NO: 5928755 - DNA, 25 bp, Homo sapien
ggcgggcgggcgcgtgccccgcgcc

SEQ ID NO: 5928756 - DNA, 25 bp, Homo sapien
gcccgccggccgtgcgggcggcccc

SEQ ID NO: 5928757 - DNA, 25 bp, Homo sapien
ccgcgccgcgaccggcgccggccgc

SEQ ID NO: 5928758 - DNA, 25 bp, Homo sapien
cggcctggcgcggcccccggggcgc

SEQ ID NO: 5928759 - DNA, 25 bp, Homo sapien
cggccgcgccgccccgccgagcggg

SEQ ID NO: 5928760 - DNA, 25 bp, Homo sapien
cccgcgccgcgcgtgccgccgccgg

SEQ ID NO: 5928761 - DNA, 25 bp, Homo sapien
gcgcgcgccccggcgggtgccggcg

SEQ ID NO: 5928762 - DNA, 25 bp, Homo sapien
gggcgcgccccggccggacgcccgc

SEQ ID NO: 5928763 - DNA, 25 bp, Homo sapien
cggcggtcgccgccgggcgcccgcg

SEQ ID NO: 5928764 - DNA, 25 bp, Homo sapien
gcggccacgccgcccggcgggcgcc

SEQ ID NO: 5928765 - DNA, 25 bp, Homo sapien
gcccgggcggctcgccccccgcggc

SEQ ID NO: 5928766 - DNA, 25 bp, Homo sapien
cccgcgccgcgaccggcccgcggcc

SEQ ID NO: 5928767 - DNA, 25 bp, Homo sapien
gcggcctcgcgcgcgggccccgccg

SEQ ID NO: 5928768 - DNA, 25 bp, Homo sapien
gcggcgggcaccccgccggccgccc

SEQ ID NO: 5928769 - DNA, 25 bp, Homo sapien
ggcgcgagcccccgcgggcggcgcc

SEQ ID NO: 5928770 - DNA, 25 bp, Homo sapien
gcgcctcgggcccgcgcgccgcccg

SEQ ID NO: 5928771 - DNA, 25 bp, Homo sapien
gcccggccggcggcgcggcacgccc

SEQ ID NO: 5928772 - DNA, 25 bp, Homo sapien
ggcgccgccgacgggcccgcgcccc

SEQ ID NO: 5928773 - DNA, 25 bp, Homo sapien
gcgccgcggccgcccgtcggcgcgc

SEQ ID NO: 5928774 - DNA, 25 bp, Homo sapien
gcgcctggcgcgccggcccgcggcc

SEQ ID NO: 5928775 - DNA, 25 bp, Homo sapien
gccgccggcccgcccggtgggcgcc

SEQ ID NO: 5928776 - DNA, 25 bp, Homo sapien
ggcgcggcacgggcgcgccccgcgg

SEQ ID NO: 5928777 - DNA, 25 bp, Homo sapien
gcgcgggcccccgaccgcgcgcccg

SEQ ID NO: 5928778 - DNA, 25 bp, Homo sapien
ggcccccggcacgcgccgcgggcgc

SEQ ID NO: 5928779 - DNA, 25 bp, Homo sapien
gcccggcgagcgccccccgggcggc

SEQ ID NO: 5928780 - DNA, 25 bp, Homo sapien
gccgcggccccgtccgcgggcggcg

SEQ ID NO: 5928781 - DNA, 25 bp, Homo sapien
cgcgcgccgggccgtgcccgcccgc

SEQ ID NO: 5928782 - DNA, 25 bp, Homo sapien
cggcgccccgcacgggcggcgcccg

SEQ ID NO: 5928783 - DNA, 25 bp, Homo sapien
ccgcccacgcgccgcgcggcgccgg

SEQ ID NO: 5928784 - DNA, 25 bp, Homo sapien
cgcgctcggcccgccggggggcgcc

SEQ ID NO: 5928785 - DNA, 25 bp, Homo sapien
gccggccggtgccgcgcccgcgcgc

SEQ ID NO: 5928786 - DNA, 25 bp, Homo sapien
ccggcgtcgccccgcgccggcgccc

SEQ ID NO: 5928787 - DNA, 25 bp, Homo sapien
ccgcccggggcgcgcccgcaggccc

SEQ ID NO: 5928788 - DNA, 25 bp, Homo sapien
ggcggccgccctgcgggcgccggcg

SEQ ID NO: 5928789 - DNA, 25 bp, Homo sapien
gcggcggggcgccgcaccgcccccg

SEQ ID NO: 5928790 - DNA, 25 bp, Homo sapien
gccccggcacgcccggcgcggccgg

SEQ ID NO: 5928791 - DNA, 25 bp, Homo sapien
gcgggccgcgggcgtcgccggcggc

SEQ ID NO: 5928792 - DNA, 25 bp, Homo sapien
gcccgcccccgggcccgtcgcgcgc

SEQ ID NO: 5928793 - DNA, 25 bp, Homo sapien
gcccgcgcggccggcgtcgcccccg

SEQ ID NO: 5928794 - DNA, 25 bp, Homo sapien
gggcgggcaccccggcgccggcggc

SEQ ID NO: 5928795 - DNA, 25 bp, Homo sapien
gccgggcggccccccggacgcgcgc

SEQ ID NO: 5928796 - DNA, 25 bp, Homo sapien
ggccgcgacgcgcgggcgcccccgc

SEQ ID NO: 5928797 - DNA, 25 bp, Homo sapien
gggcggcgctcccccccgcgcgcgg

SEQ ID NO: 5928798 - DNA, 25 bp, Homo sapien
gggccaccgcggcccccccgcgcgc

SEQ ID NO: 5928799 - DNA, 25 bp, Homo sapien
gggggcggcgtcgccggccgcggcc

SEQ ID NO: 5928800 - DNA, 25 bp, Homo sapien
ggcccgcggcccgctggccggcggc

SEQ ID NO: 5928801 - DNA, 25 bp, Homo sapien
ccgccgccacgggggggccgcgcgc

SEQ ID NO: 5928802 - DNA, 25 bp, Homo sapien
ccggctcgcgcgccggcggcgcccc

SEQ ID NO: 5928803 - DNA, 25 bp, Homo sapien
cccggggcccgccggcgcgtcgcgc

SEQ ID NO: 5928804 - DNA, 25 bp, Homo sapien
cgcgggccccccccgcggcacgcgc

SEQ ID NO: 5928805 - DNA, 25 bp, Homo sapien
cgcgcgcggccgcgaccggcccggg

SEQ ID NO: 5928806 - DNA, 25 bp, Homo sapien
cgccgcggcacggcccgccggccgg

SEQ ID NO: 5928807 - DNA, 25 bp, Homo sapien
cgccggcgtgccgcgcgggccccgc

SEQ ID NO: 5928808 - DNA, 25 bp, Homo sapien
ggcgcgcgcgggtcgcggcggcccc

SEQ ID NO: 5928809 - DNA, 25 bp, Homo sapien
gcggcccgtgcggcgggcccggccc

SEQ ID NO: 5928810 - DNA, 25 bp, Homo sapien
ccgccccgtccgccggcgcgccggc

SEQ ID NO: 5928811 - DNA, 25 bp, Homo sapien
gcgcgcccgcctcgcgccggggccg

SEQ ID NO: 5928812 - DNA, 25 bp, Homo sapien
gcccgggggcggcgcgccgtgcccg

SEQ ID NO: 5928813 - DNA, 25 bp, Homo sapien
gcccccccggcgcgcgaccggcggc

SEQ ID NO: 5928814 - DNA, 25 bp, Homo sapien
gcgcccgccgccgtggcgcgggccg

SEQ ID NO: 5928815 - DNA, 25 bp, Homo sapien
ccgccgccgggcaggcccgccggcc

SEQ ID NO: 5928816 - DNA, 25 bp, Homo sapien
cgggcgcgcggccgtgcgccggcgg

SEQ ID NO: 5928817 - DNA, 25 bp, Homo sapien
ggcgccggggcggcccaccccgcgc

SEQ ID NO: 5928818 - DNA, 25 bp, Homo sapien
gcggcgccggaccggggccccgcgc

SEQ ID NO: 5928819 - DNA, 25 bp, Homo sapien
gcggcgggaccgccggcgggccgcc

SEQ ID NO: 5928820 - DNA, 25 bp, Homo sapien
cggggcgccacgcgcgcgggccgcc

SEQ ID NO: 5928821 - DNA, 25 bp, Homo sapien
ggcgcggccgccggcacgccgcggc

SEQ ID NO: 5928822 - DNA, 25 bp, Homo sapien
cgcgcgacggcccccgcgccgggcc

SEQ ID NO: 5928823 - DNA, 25 bp, Homo sapien
ggcccccgcgccgtgcgcggccggc

SEQ ID NO: 5928824 - DNA, 25 bp, Homo sapien
gcggccgaccgcgggcccgcggccg

SEQ ID NO: 5928825 - DNA, 25 bp, Homo sapien
cgcgcggcccccgcgccggagccgc

SEQ ID NO: 5928826 - DNA, 25 bp, Homo sapien
cggcccgccacgcggcgcccggcgg

SEQ ID NO: 5928827 - DNA, 25 bp, Homo sapien
cgcccgtcgcggcgccggcccgggc

SEQ ID NO: 5928828 - DNA, 25 bp, Homo sapien
cggcgcgaccgcggccggccccggc

SEQ ID NO: 5928829 - DNA, 25 bp, Homo sapien
cgcggccgggcccgcacgcgccggc

SEQ ID NO: 5928830 - DNA, 25 bp, Homo sapien
ggccgcgccgcgacccgcgccgcgc

SEQ ID NO: 5928831 - DNA, 25 bp, Homo sapien
ggcgcggccctccgccgcgcggccc

SEQ ID NO: 5928832 - DNA, 25 bp, Homo sapien
gggggcgctcgcgggcgcgcggccc

SEQ ID NO: 5928833 - DNA, 25 bp, Homo sapien
gcggccggccgcgaccggggcgccc

SEQ ID NO: 5928834 - DNA, 25 bp, Homo sapien
gccgccgcgaccggcgcccgccccc

SEQ ID NO: 5928835 - DNA, 25 bp, Homo sapien
ccggcaccgccgggggcgccgccgc

SEQ ID NO: 5928836 - DNA, 25 bp, Homo sapien
cgcggacggcggcccgccgcccggc

SEQ ID NO: 5928837 - DNA, 25 bp, Homo sapien
gcgggccggccgcacgccggcgcgc

SEQ ID NO: 5928838 - DNA, 25 bp, Homo sapien
cgccgcgtcgggccccggcgcgcgc

SEQ ID NO: 5928839 - DNA, 25 bp, Homo sapien
cggcgtgccggcgcccggcgcgccc

SEQ ID NO: 5928840 - DNA, 25 bp, Homo sapien
gcccggccggcgcgacgccgcgcgg

SEQ ID NO: 5928841 - DNA, 25 bp, Homo sapien
gcggccggcgggcccgcgtgcccgc

SEQ ID NO: 5928842 - DNA, 25 bp, Homo sapien
gccccgccggccaccggcgccgcgg

SEQ ID NO: 5928843 - DNA, 25 bp, Homo sapien
cgcccgccgccgggcacccgcgccc

SEQ ID NO: 5928844 - DNA, 25 bp, Homo sapien
cgccgccgcgacggggccgcccgcc

SEQ ID NO: 5928845 - DNA, 25 bp, Homo sapien
gccggaggcggcgcccgccgcgccc

SEQ ID NO: 5928846 - DNA, 25 bp, Homo sapien
cgcggcgccggcgggcccgtcgcgg

SEQ ID NO: 5928847 - DNA, 25 bp, Homo sapien
gcgggcgctccggcgggcccgcgcg

SEQ ID NO: 5928848 - DNA, 25 bp, Homo sapien
gcgcgggcccccgacgggcgcgcgc

SEQ ID NO: 5928849 - DNA, 25 bp, Homo sapien
gcgcgcgcgccgacgcgggccccgc

SEQ ID NO: 5928850 - DNA, 25 bp, Homo sapien
ggccccggccgtcggccgcgccgcg

SEQ ID NO: 5928851 - DNA, 25 bp, Homo sapien
gcggcggcggcccccccgacgccgc

SEQ ID NO: 5928852 - DNA, 25 bp, Homo sapien
cccgccgtcggccgccggcgcgccg

SEQ ID NO: 5928853 - DNA, 25 bp, Homo sapien
cgcccgccggcgcgtcgccccccgc

SEQ ID NO: 5928854 - DNA, 25 bp, Homo sapien
gggcgggcgggcgcgccacgcgcgc

SEQ ID NO: 5928855 - DNA, 25 bp, Homo sapien
ccggcgccgccccgcggcgtgcgcc

SEQ ID NO: 5928856 - DNA, 25 bp, Homo sapien
cggcgggcccccccgcgtgcgccgc

SEQ ID NO: 5928857 - DNA, 25 bp, Homo sapien
ggcgccgcccgcacgcgggcccgcc

SEQ ID NO: 5928858 - DNA, 25 bp, Homo sapien
cggcgggcggccgtcgcgcgggccg

SEQ ID NO: 5928859 - DNA, 25 bp, Homo sapien
cgcccggcgccggaccgccgcgccg

SEQ ID NO: 5928860 - DNA, 25 bp, Homo sapien
gccgggcggccggcgcggtcgggcg

SEQ ID NO: 5928861 - DNA, 25 bp, Homo sapien
cgcgcgggccgccaccgggccggcg

SEQ ID NO: 5928862 - DNA, 25 bp, Homo sapien
ccgcggcgtcggcgcgcccgggcgg

SEQ ID NO: 5928863 - DNA, 25 bp, Homo sapien
gcgcgcgcgtgcgggccgggcccgg

SEQ ID NO: 5928864 - DNA, 25 bp, Homo sapien
cgcgcgggcgcgtccgcgcccccgc

SEQ ID NO: 5928865 - DNA, 25 bp, Homo sapien
gcgccgccgggcacgcgcccccccc

SEQ ID NO: 5928866 - DNA, 25 bp, Homo sapien
gcgccgcgaccggccccggcgcgcg

SEQ ID NO: 5928867 - DNA, 25 bp, Homo sapien
ccgcgcgggcacccgcccggcgggc

SEQ ID NO: 5928868 - DNA, 25 bp, Homo sapien
cgcccgcgcgggcgcgccgtcgccg

SEQ ID NO: 5928869 - DNA, 25 bp, Homo sapien
gcggccggccgccgggccctgccgg

SEQ ID NO: 5928870 - DNA, 25 bp, Homo sapien
ggcggagcgccccgggcgcgccgcg

SEQ ID NO: 5928871 - DNA, 25 bp, Homo sapien
gccccgccgccgcgtgggcggccgg

SEQ ID NO: 5928872 - DNA, 25 bp, Homo sapien
gccgccgcgggcccccggcagcggc

SEQ ID NO: 5928873 - DNA, 25 bp, Homo sapien
ggcgggccgcacgccgcgcgccgcg

SEQ ID NO: 5928874 - DNA, 25 bp, Homo sapien
cgcgcgcggcaccgccccgggcgcg

SEQ ID NO: 5928875 - DNA, 25 bp, Homo sapien
ccgccgcgcgcccggcgggtcgccg

SEQ ID NO: 5928876 - DNA, 25 bp, Homo sapien
cccgcgccccgtcgccgcggcgggc

SEQ ID NO: 5928877 - DNA, 25 bp, Homo sapien
cgcgcggcgccggacgcgcgccccg

SEQ ID NO: 5928878 - DNA, 25 bp, Homo sapien
gccgcggcgccccggcgtcgccgcg

SEQ ID NO: 5928879 - DNA, 25 bp, Homo sapien
gccgcgccggcgccccgtcgcgcgg

SEQ ID NO: 5928880 - DNA, 25 bp, Homo sapien
gcccgcgcgccggccgaccccgcgc

SEQ ID NO: 5928881 - DNA, 25 bp, Homo sapien
cgcgcccccccggcacgcggcccgc

SEQ ID NO: 5928882 - DNA, 25 bp, Homo sapien
gccgctgccgggggcccgcggcggc

SEQ ID NO: 5928883 - DNA, 25 bp, Homo sapien
ggggcgccgccggcgcgcgagccgg

SEQ ID NO: 5928884 - DNA, 25 bp, Homo sapien
ggggcgacggccggcccgcgcgggc

SEQ ID NO: 5928885 - DNA, 25 bp, Homo sapien
gggcgcgccgggcgccggcacgccg

SEQ ID NO: 5928886 - DNA, 25 bp, Homo sapien
gggccgcgcgcccgcgagcgccccc

SEQ ID NO: 5928887 - DNA, 25 bp, Homo sapien
cgggggcgacgccggccgcgcgggc

SEQ ID NO: 5928888 - DNA, 25 bp, Homo sapien
cgcggcgcgcccggggcgctccgcc

SEQ ID NO: 5928889 - DNA, 25 bp, Homo sapien
ggggccgccgcgacccgcgcgcgcc

SEQ ID NO: 5928890 - DNA, 25 bp, Homo sapien
ggggggggcgcgtgcccggcggcgc

SEQ ID NO: 5928891 - DNA, 25 bp, Homo sapien
gcggcgcacgcgggggggcccgccg

SEQ ID NO: 5928892 - DNA, 25 bp, Homo sapien
gggcgccggcgcggggcgacgccgg

SEQ ID NO: 5928893 - DNA, 25 bp, Homo sapien
cgcgcgggcccgccggagcgcccgc

SEQ ID NO: 5928894 - DNA, 25 bp, Homo sapien
gcgggcacgcgggcccgccggccgc

SEQ ID NO: 5928895 - DNA, 25 bp, Homo sapien
cgccgcccgcggacggggccgcggc

SEQ ID NO: 5928896 - DNA, 25 bp, Homo sapien
cggcccgcgcgacggccgcccgccg

SEQ ID NO: 5928897 - DNA, 25 bp, Homo sapien
gcgccgggggaccgccgcccgcgcc

SEQ ID NO: 5928898 - DNA, 25 bp, Homo sapien
gcgggggcgcccgcgcgtcgcggcc

SEQ ID NO: 5928899 - DNA, 25 bp, Homo sapien
cgcgggggggcgggcgcgacgcgcc

SEQ ID NO: 5928900 - DNA, 25 bp, Homo sapien
ccgcgcgcgggggggagcgccgccc

SEQ ID NO: 5928901 - DNA, 25 bp, Homo sapien
gcgcggcgcgggtcgcggcgcggcc

SEQ ID NO: 5928902 - DNA, 25 bp, Homo sapien
gcgcgtgccgcggggggggcccgcg

SEQ ID NO: 5928903 - DNA, 25 bp, Homo sapien
ggcgcccgccgggcggcgtggccgc

SEQ ID NO: 5928904 - DNA, 25 bp, Homo sapien
cgcgggcgcccggcggcgaccgccg

SEQ ID NO: 5928905 - DNA, 25 bp, Homo sapien
gcggggcccgcgtcggcgcgcgcgc

SEQ ID NO: 5928906 - DNA, 25 bp, Homo sapien
gccgccggccagcgggccgcgggcc

SEQ ID NO: 5928907 - DNA, 25 bp, Homo sapien
gccgcggcgtgccggcggccgcgcc

SEQ ID NO: 5928908 - DNA, 25 bp, Homo sapien
ggcgggcggccccgtcgcggcggcg

SEQ ID NO: 5928909 - DNA, 25 bp, Homo sapien
gcgcgcgggggggccgcggtggccc

SEQ ID NO: 5928910 - DNA, 25 bp, Homo sapien
gcgcgacgcgccggcgggccccggg

SEQ ID NO: 5928911 - DNA, 25 bp, Homo sapien
cgcggcgacgccggggcgccgcggc

SEQ ID NO: 5928912 - DNA, 25 bp, Homo sapien
gcgcgcgtggcgcgcccgcccgccc

SEQ ID NO: 5928913 - DNA, 25 bp, Homo sapien
ggggcgcgggcccgtcggcggcgcc

SEQ ID NO: 5928914 - DNA, 25 bp, Homo sapien
ggcgggcccgcgtgcgggcggcgcc

SEQ ID NO: 5928915 - DNA, 25 bp, Homo sapien
ggcgcacgccgcggggcggcgccgg

SEQ ID NO: 5928916 - DNA, 25 bp, Homo sapien
gggggcgggcgccggtcgcggcggc

SEQ ID NO: 5928917 - DNA, 25 bp, Homo sapien
gggcgtgccgcgccgccggccgggc

SEQ ID NO: 5928918 - DNA, 25 bp, Homo sapien
gcgcggggtgggccgccccggcgcc

SEQ ID NO: 5928919 - DNA, 25 bp, Homo sapien
ccggccggcgggccgtgccgcggcg

SEQ ID NO: 5928920 - DNA, 25 bp, Homo sapien
ccgccggcgcacggccgcgcgcccg

SEQ ID NO: 5928921 - DNA, 25 bp, Homo sapien
cggcgacccgccgggcgcgcggcgg

SEQ ID NO: 5928922 - DNA, 25 bp, Homo sapien
gccgcggggggcgagccgcccgggc

SEQ ID NO: 5928923 - DNA, 25 bp, Homo sapien
gcccgccgcggcgacggggcgcggg

SEQ ID NO: 5928924 - DNA, 25 bp, Homo sapien
cgggcggcgcgcgggcccgaggcgc

SEQ ID NO: 5928925 - DNA, 25 bp, Homo sapien
ggccgcgggccggtcgcggcgcggg

SEQ ID NO: 5928926 - DNA, 25 bp, Homo sapien
cgcggcgcgcggcgtgcggcccgcc

SEQ ID NO: 5928927 - DNA, 25 bp, Homo sapien
ggcgcccaccgggcgggccggcggc

SEQ ID NO: 5928928 - DNA, 25 bp, Homo sapien
ccggcggcggcacgcgcggcgcggg

SEQ ID NO: 5928929 - DNA, 25 bp, Homo sapien
gcgcgcggcccccccgtggcggcgg

SEQ ID NO: 5928930 - DNA, 25 bp, Homo sapien
cgggcgcgcggtcgggggcccgcgc

SEQ ID NO: 5928931 - DNA, 25 bp, Homo sapien
gccggcgcgccggcggacggggcgg

SEQ ID NO: 5928932 - DNA, 25 bp, Homo sapien
gccgcccggggggcgctcgccgggc

SEQ ID NO: 5928933 - DNA, 25 bp, Homo sapien
gcgcgcgggcgcggcaccggccggc

SEQ ID NO: 5928934 - DNA, 25 bp, Homo sapien
ccggccgcccacgcggcggcggggc

SEQ ID NO: 5928935 - DNA, 25 bp, Homo sapien
gcggctccggcgcgggggccgcgcg

SEQ ID NO: 5928936 - DNA, 25 bp, Homo sapien
gcccgggccggcgccgcgacgggcg

SEQ ID NO: 5928937 - DNA, 25 bp, Homo sapien
cgccggcccggtggcggcccgcgcg

SEQ ID NO: 5928938 - DNA, 25 bp, Homo sapien
ccgcggcgccggtggccggcggggc

SEQ ID NO: 5928939 - DNA, 25 bp, Homo sapien
cgcgcgccggggccggtcgcggcgc

SEQ ID NO: 5928940 - DNA, 25 bp, Homo sapien
cgccggcgcccgcagggcggccgcc

SEQ ID NO: 5928941 - DNA, 25 bp, Homo sapien
cggcgcgccggcggccgacggcggg

SEQ ID NO: 5928942 - DNA, 25 bp, Homo sapien
gccgccggtcgcgcgccgggggggc

SEQ ID NO: 5928943 - DNA, 25 bp, Homo sapien
gcgccccgggggccgcgccaggccg

SEQ ID NO: 5928944 - DNA, 25 bp, Homo sapien
cccgctcggcggggcggcgcggccg

SEQ ID NO: 5928945 - DNA, 25 bp, Homo sapien
ccgcgcggcgtcgcgccggccgggc

SEQ ID NO: 5928946 - DNA, 25 bp, Homo sapien
ggggccgcccgcacggccggcgggc

SEQ ID NO: 5928947 - DNA, 25 bp, Homo sapien
cgcccaccggggcgcggccgcgggc

SEQ ID NO: 5928948 - DNA, 25 bp, Homo sapien
ggcccggcgcgggggccgtcgcgcg

SEQ ID NO: 5928949 - DNA, 25 bp, Homo sapien
gggcgcggcgggcgccgcctccggc

SEQ ID NO: 5928950 - DNA, 25 bp, Homo sapien
ccgccgggcgccgcgtggcgggccg

SEQ ID NO: 5928951 - DNA, 25 bp, Homo sapien
cggcccgcgccacggcggcgggcgc

SEQ ID NO: 5928952 - DNA, 25 bp, Homo sapien
cgccggcacccgccggggcgcgcgc

SEQ ID NO: 5928953 - DNA, 25 bp, Homo sapien
ccggccgcgccgggcgtgccggggc

SEQ ID NO: 5928954 - DNA, 25 bp, Homo sapien
cgggcacggcgcgccgcccccgggc

SEQ ID NO: 5928955 - DNA, 25 bp, Homo sapien
ggccggcgggcctgcccggcggcgg

SEQ ID NO: 5928956 - DNA, 25 bp, Homo sapien
gcgggccgcgtgccgggggggcgcg

SEQ ID NO: 5928957 - DNA, 25 bp, Homo sapien
gcgcgccggcgtgcggccggcccgc

SEQ ID NO: 5928958 - DNA, 25 bp, Homo sapien
gccgccgagcgggcccgccgggcgc

SEQ ID NO: 5928959 - DNA, 25 bp, Homo sapien
gcggggcccgcgcggcacgccggcg

SEQ ID NO: 5928960 - DNA, 25 bp, Homo sapien
ggcgccccccggcgggccgagcgcg

SEQ ID NO: 5928961 - DNA, 25 bp, Homo sapien
cgcccgaccgcgccggccgcccggc

SEQ ID NO: 5928962 - DNA, 25 bp, Homo sapien
gcgcgcgtccggggggccgcccggc

SEQ ID NO: 5928963 - DNA, 25 bp, Homo sapien
gcggcgtcgggggggccgccgccgc

SEQ ID NO: 5928964 - DNA, 25 bp, Homo sapien
gcccgccgggcgggtgcccgcgcgg

SEQ ID NO: 5928965 - DNA, 25 bp, Homo sapien
ccgcccgggcgcgccgacgccgcgg

SEQ ID NO: 5928966 - DNA, 25 bp, Homo sapien
cgggggcggtgcggcgccccgccgc

SEQ ID NO: 5928967 - DNA, 25 bp, Homo sapien
gcgggcgtccggccggggcgcgccc

SEQ ID NO: 5928968 - DNA, 25 bp, Homo sapien
ggcggcccgccggcggtcccgccgc

SEQ ID NO: 5928969 - DNA, 25 bp, Homo sapien
gcggggggcgacgcgccggcgggcg

SEQ ID NO: 5928970 - DNA, 25 bp, Homo sapien
gcgcccgcggcgcgtgccgggggcc

SEQ ID NO: 5928971 - DNA, 25 bp, Homo sapien
cggccccggcgcgaggcgggcgcgc

SEQ ID NO: 5928972 - DNA, 25 bp, Homo sapien
gggcggccggcggggtgcccgccgc

SEQ ID NO: 5928973 - DNA, 25 bp, Homo sapien
cccgggccggtcgcggccgcgcgcg

SEQ ID NO: 5928974 - DNA, 25 bp, Homo sapien
cggggcgcgcgtccggcgccgcgcg

SEQ ID NO: 5928975 - DNA, 25 bp, Homo sapien
ccgcgacgggcccgccggcgccgcg

SEQ ID NO: 5928976 - DNA, 25 bp, Homo sapien
ccggcgggggccggcgacgcgccgc

SEQ ID NO: 5928977 - DNA, 25 bp, Homo sapien
cggcgcggcggtccggcgccgggcg

SEQ ID NO: 5928978 - DNA, 25 bp, Homo sapien
ccgggcccggcccgcacgcgcgcgc

SEQ ID NO: 5928979 - DNA, 25 bp, Homo sapien
cgggcgccgcccgtgcggggcgccg

SEQ ID NO: 5928980 - DNA, 25 bp, Homo sapien
gcgcggggccccggtccggcgccgc

SEQ ID NO: 5928981 - DNA, 25 bp, Homo sapien
gccggccgcgcacggcgcgggggcc

SEQ ID NO: 5928982 - DNA, 25 bp, Homo sapien
ggcgcggggcacgcgcccgcccgcc

SEQ ID NO: 5928983 - DNA, 25 bp, Homo sapien
gcgcggggtcggccggcgcgcgggc

SEQ ID NO: 5928984 - DNA, 25 bp, Homo sapien
gccggggccggccgcggtcgcgccg

SEQ ID NO: 5928985 - DNA, 25 bp, Homo sapien
gcgcgcgccggggcccgacgcggcg

SEQ ID NO: 5928986 - DNA, 25 bp, Homo sapien
gcgggggcgcggacgcgcccgcgcg

SEQ ID NO: 5928987 - DNA, 25 bp, Homo sapien
ggccgcgccggccgacgcccgggcg

SEQ ID NO: 5928988 - DNA, 25 bp, Homo sapien
ggccgcgggccggcgcgccaggcgc

SEQ ID NO: 5928989 - DNA, 25 bp, Homo sapien
gccgggcggcgggccgccgtccgcg

SEQ ID NO: 5928990 - DNA, 25 bp, Homo sapien
ccggcgccgcgcggcgcgtgggcgg

SEQ ID NO: 5928991 - DNA, 25 bp, Homo sapien
ggccgcggccggcgacgccgccccc

SEQ ID NO: 5928992 - DNA, 25 bp, Homo sapien
gggccgggcccgccgcacgggccgc

SEQ ID NO: 5928993 - DNA, 25 bp, Homo sapien
cgcgcccggggcggtgccgcgcgcg

SEQ ID NO: 5928994 - DNA, 25 bp, Homo sapien
ccgcgcgacggggcgccggcgcggc

SEQ ID NO: 5928995 - DNA, 25 bp, Homo sapien
gccggcgcgtgcgggcccggccgcg

SEQ ID NO: 5928996 - DNA, 25 bp, Homo sapien
gggccgcgcggcggagggccgcgcc

SEQ ID NO: 5928997 - DNA, 25 bp, Homo sapien
ccgcggggcgcgcccgtgccgcgcc

SEQ ID NO: 5928998 - DNA, 25 bp, Homo sapien
cgcggcgcggccgacggccggggcc

SEQ ID NO: 5928999 - DNA, 25 bp, Homo sapien
gcggccggcgccggtcgcggcgcgg

SEQ ID NO: 5929000 - DNA, 25 bp, Homo sapien
gcgggcgggcacggcccggcgcgcg

SEQ ID NO: 5929001 - DNA, 25 bp, Homo sapien
cggcgacggcgcgcccgcgcgggcg

SEQ ID NO: 5929002 - DNA, 25 bp, Homo sapien
ggcgccgcccgcgggggctcgcgcc

SEQ ID NO: 5929003 - DNA, 25 bp, Homo sapien
gcggcggcgcccccggcggtgccgg

SEQ ID NO: 5929004 - DNA, 25 bp, Homo sapien
gcccgcgccaggggggcgcccgccc

SEQ ID NO: 5929005 - DNA, 25 bp, Homo sapien
ggcggcccgcgcgcgtggcgccccg

SEQ ID NO: 5929006 - DNA, 25 bp, Homo sapien
cggccgcgggcccgcggtcggccgc

SEQ ID NO: 5929007 - DNA, 25 bp, Homo sapien
gcgcgccgacgggcggccgcggcgc

SEQ ID NO: 5929008 - DNA, 25 bp, Homo sapien
gccgccgccgccgggtgcgggcggc

SEQ ID NO: 5929009 - DNA, 25 bp, Homo sapien
gcgcgcgcccgtcgggggcccgcgc

SEQ ID NO: 5929010 - DNA, 25 bp, Homo sapien
gggcgcgggtgcccggcggcgggcg

SEQ ID NO: 5929011 - DNA, 25 bp, Homo sapien
gccgccggcgccggggtgcccgccc

SEQ ID NO: 5929012 - DNA, 25 bp, Homo sapien
gggcctgcgggcgcgccccgggcgg

SEQ ID NO: 5929013 - DNA, 25 bp, Homo sapien
ccggcagggcccggcggccggccgc

SEQ ID NO: 5929014 - DNA, 25 bp, Homo sapien
gggcgccccggtcgcggccggccgc

SEQ ID NO: 5929015 - DNA, 25 bp, Homo sapien
gcgcgcgacgggcccgggggcgggc

SEQ ID NO: 5929016 - DNA, 25 bp, Homo sapien
cggcggggcccgcgcgcgaggccgc

SEQ ID NO: 5929017 - DNA, 25 bp, Homo sapien
gccgccggcgacgcccgcggcccgc

SEQ ID NO: 5929018 - DNA, 25 bp, Homo sapien
gcgcgggcccccccgggcggcgcgc

SEQ ID NO: 5929019 - DNA, 25 bp, Homo sapien
cgcgcggcgcgcccccccggcgccc

SEQ ID NO: 5929020 - DNA, 25 bp, Homo sapien
gccggcccccccgggcggcgcgcgc

SEQ ID NO: 5929021 - DNA, 25 bp, Homo sapien
gcgcgcgccccccccggccggcggc

SEQ ID NO: 5929022 - DNA, 25 bp, Homo sapien
gccgcgcggcgccccggcgcccccg

SEQ ID NO: 5929023 - DNA, 25 bp, Homo sapien
cgcgccggcccccccgcgcgccgcc

SEQ ID NO: 5929024 - DNA, 25 bp, Homo sapien
gccgccgggcggcccgcccgcgccc

SEQ ID NO: 5929025 - DNA, 25 bp, Homo sapien
gccgcgcccccccggcggcgcgcgc

SEQ ID NO: 5929026 - DNA, 25 bp, Homo sapien
cgcggcggcgggcccccgcggccgc

SEQ ID NO: 5929027 - DNA, 25 bp, Homo sapien
cgggggcgccggggcgccgcgcggc

SEQ ID NO: 5929028 - DNA, 25 bp, Homo sapien
gggcgcgggcgggccgcccggcggc

SEQ ID NO: 5929029 - DNA, 25 bp, Homo sapien
gccgccggccggggggggcgcgcgc

SEQ ID NO: 5929030 - DNA, 25 bp, Homo sapien
gcgcgcgccgcccgggggggccggc

SEQ ID NO: 5929031 - DNA, 25 bp, Homo sapien
gggcgccgggggggcgcgccgcgcg

SEQ ID NO: 5929032 - DNA, 25 bp, Homo sapien
gcgcgccgcccgggggggcccgcgc

SEQ ID NO: 5929033 - DNA, 25 bp, Homo sapien
ggcggcgcgcgggggggccggcgcg

SEQ ID NO: 5929034 - DNA, 25 bp, Homo sapien
gcggccgcgggggcccgccgccgcg

SEQ ID NO: 5929035 - DNA, 25 bp, Homo sapien
gcgcgcgccgccgggggggcgcggc

SEQ ID NO: 5929036 - DNA, 25 bp, Homo sapien
tattttatcaatttttcgtaattaa

SEQ ID NO: 5929037 - DNA, 25 bp, Homo sapien
ttttacttatattaatcgattattt

SEQ ID NO: 5929038 - DNA, 25 bp, Homo sapien
aataattataactttttcgaatata

SEQ ID NO: 5929039 - DNA, 25 bp, Homo sapien
aatttataattattgcgtattttta

SEQ ID NO: 5929040 - DNA, 25 bp, Homo sapien
attatttattaatcgactatttaaa

SEQ ID NO: 5929041 - DNA, 25 bp, Homo sapien
ttattaacttatacgatattttatt

SEQ ID NO: 5929042 - DNA, 25 bp, Homo sapien
attaaaattatttcgattctaatat

SEQ ID NO: 5929043 - DNA, 25 bp, Homo sapien
tttattatattaattctcgttaaat

SEQ ID NO: 5929044 - DNA, 25 bp, Homo sapien
attttatctttatatcgtaaattta

SEQ ID NO: 5929045 - DNA, 25 bp, Homo sapien
tataatattacttaatttcgttaaa

SEQ ID NO: 5929046 - DNA, 25 bp, Homo sapien
attttcgattattatatgtatttta

SEQ ID NO: 5929047 - DNA, 25 bp, Homo sapien
tttaacgaaattaagtaatattata

SEQ ID NO: 5929048 - DNA, 25 bp, Homo sapien
atattagaatcgaaataattttaat

SEQ ID NO: 5929049 - DNA, 25 bp, Homo sapien
tatattcgaaaaagttataattatt

SEQ ID NO: 5929050 - DNA, 25 bp, Homo sapien
atttaacgagaattaatataataaa

SEQ ID NO: 5929051 - DNA, 25 bp, Homo sapien
aataaaatatcgtataagttaataa

SEQ ID NO: 5929052 - DNA, 25 bp, Homo sapien
ttaattacgaaaaattgataaaata

SEQ ID NO: 5929053 - DNA, 25 bp, Homo sapien
taaaatacatataataatcgaaaat

SEQ ID NO: 5929054 - DNA, 25 bp, Homo sapien
tttaaatagtcgattaataaataat

SEQ ID NO: 5929055 - DNA, 25 bp, Homo sapien
taaaaatacgcaataattataaatt

SEQ ID NO: 5929056 - DNA, 25 bp, Homo sapien
taaatttacgatataaagataaaat

SEQ ID NO: 5929057 - DNA, 25 bp, Homo sapien
aaataatcgattaatataagtaaaa

SEQ ID NO: 5929058 - DNA, 25 bp, Homo sapien
attagaatctatatcgaattttaat

SEQ ID NO: 5929059 - DNA, 25 bp, Homo sapien
tatttatatcaatcgtatatgaaat

SEQ ID NO: 5929060 - DNA, 25 bp, Homo sapien
tatattcgtatatcataattattac

SEQ ID NO: 5929061 - DNA, 25 bp, Homo sapien
tctaaattatattagttcgatttta

SEQ ID NO: 5929062 - DNA, 25 bp, Homo sapien
ataaatactcgattaattatatgta

SEQ ID NO: 5929063 - DNA, 25 bp, Homo sapien
ttcaatatctaatcgttataatatt

SEQ ID NO: 5929064 - DNA, 25 bp, Homo sapien
atataattaacgatttaatcttgta

SEQ ID NO: 5929065 - DNA, 25 bp, Homo sapien
attttttaatactcgttatatacta

SEQ ID NO: 5929066 - DNA, 25 bp, Homo sapien
tatactatcgttaacttataaaaat

SEQ ID NO: 5929067 - DNA, 25 bp, Homo sapien
tatattacgattaatccataattaa

SEQ ID NO: 5929068 - DNA, 25 bp, Homo sapien
gatatcgaaatttagttattataat

SEQ ID NO: 5929069 - DNA, 25 bp, Homo sapien
tttaaaaattcgtctatttacataa

SEQ ID NO: 5929070 - DNA, 25 bp, Homo sapien
gaattatcgcttaattaatatttat

SEQ ID NO: 5929071 - DNA, 25 bp, Homo sapien
ataaatatgttattatcgatgtttt

SEQ ID NO: 5929072 - DNA, 25 bp, Homo sapien
ttttgtatatatcgattagaattaa

SEQ ID NO: 5929073 - DNA, 25 bp, Homo sapien
atttttcgtataagtattaacatta

SEQ ID NO: 5929074 - DNA, 25 bp, Homo sapien
ttatttttcgaatctattatttgta

SEQ ID NO: 5929075 - DNA, 25 bp, Homo sapien
atattgattatatcgtattattctt

SEQ ID NO: 5929076 - DNA, 25 bp, Homo sapien
acttttatatacttatcgataataa

SEQ ID NO: 5929077 - DNA, 25 bp, Homo sapien
ttatgattatagtttttacgtattt

SEQ ID NO: 5929078 - DNA, 25 bp, Homo sapien
aagtataataaatttatcgctataa

SEQ ID NO: 5929079 - DNA, 25 bp, Homo sapien
aatatagtcgttataattaattatc

SEQ ID NO: 5929080 - DNA, 25 bp, Homo sapien
ttattaatcgatttacttaagaaaa

SEQ ID NO: 5929081 - DNA, 25 bp, Homo sapien
ttaattatactacgatattacaaaa

SEQ ID NO: 5929082 - DNA, 25 bp, Homo sapien
tattaattcgtaaattttagacatt

SEQ ID NO: 5929083 - DNA, 25 bp, Homo sapien
atgaagtataattcgtttaatatat

SEQ ID NO: 5929084 - DNA, 25 bp, Homo sapien
taaatacgattacataatttctaat

SEQ ID NO: 5929085 - DNA, 25 bp, Homo sapien
attttatctaatcgaattatcatta

SEQ ID NO: 5929086 - DNA, 25 bp, Homo sapien
cattttaatcgaattgttatataat

SEQ ID NO: 5929087 - DNA, 25 bp, Homo sapien
taaattttagtatacgtaacttata

SEQ ID NO: 5929088 - DNA, 25 bp, Homo sapien
taactttcgtctatataatatatat

SEQ ID NO: 5929089 - DNA, 25 bp, Homo sapien
attgttctatataattatcgttaaa

SEQ ID NO: 5929090 - DNA, 25 bp, Homo sapien
aaatgattataacttttcgtatata

SEQ ID NO: 5929091 - DNA, 25 bp, Homo sapien
ttaatatatcgaacttttatcataa

SEQ ID NO: 5929092 - DNA, 25 bp, Homo sapien
aaataatttcgactaatatattctt

SEQ ID NO: 5929093 - DNA, 25 bp, Homo sapien
taacattagttataatacgattttt

SEQ ID NO: 5929094 - DNA, 25 bp, Homo sapien
tagtactatattaatcgttttattt

SEQ ID NO: 5929095 - DNA, 25 bp, Homo sapien
ataacatagatcgtttaatataaat

SEQ ID NO: 5929096 - DNA, 25 bp, Homo sapien
ataatattaaattttcggatcaaat

SEQ ID NO: 5929097 - DNA, 25 bp, Homo sapien
ttaatttatttagattcgtattatg

SEQ ID NO: 5929098 - DNA, 25 bp, Homo sapien
aaaatttatgatcgtttaatcaaat

SEQ ID NO: 5929099 - DNA, 25 bp, Homo sapien
aaatagttaataatcgtataatcta

SEQ ID NO: 5929100 - DNA, 25 bp, Homo sapien
aagttaataatatcgtattcataaa

SEQ ID NO: 5929101 - DNA, 25 bp, Homo sapien
ataatattcgttaatcgttatttaa

SEQ ID NO: 5929102 - DNA, 25 bp, Homo sapien
attttataagtattatcgattcatt

SEQ ID NO: 5929103 - DNA, 25 bp, Homo sapien
ttctaaatttactaatcgaattata

SEQ ID NO: 5929104 - DNA, 25 bp, Homo sapien
ttttgtataatacttattcgatttt

SEQ ID NO: 5929105 - DNA, 25 bp, Homo sapien
taataatactttttcgataacttat

SEQ ID NO: 5929106 - DNA, 25 bp, Homo sapien
attcattaattcgatatacataaaa

SEQ ID NO: 5929107 - DNA, 25 bp, Homo sapien
tacattataaatttcaatcgatata

SEQ ID NO: 5929108 - DNA, 25 bp, Homo sapien
taaatttaatttatattcgcaaaac

SEQ ID NO: 5929109 - DNA, 25 bp, Homo sapien
tatgatcgaatcttaattataaatt

SEQ ID NO: 5929110 - DNA, 25 bp, Homo sapien
acaattataatcgttattacattat

SEQ ID NO: 5929111 - DNA, 25 bp, Homo sapien
aataatacgatctaaattttactta

SEQ ID NO: 5929112 - DNA, 25 bp, Homo sapien
attttcgttaaatctattatttatg

SEQ ID NO: 5929113 - DNA, 25 bp, Homo sapien
tattaatttatacgatagtctttat

SEQ ID NO: 5929114 - DNA, 25 bp, Homo sapien
aatattaattaatcgtaatcatcat

SEQ ID NO: 5929115 - DNA, 25 bp, Homo sapien
ttctatatatcgacaaatttatttt

SEQ ID NO: 5929116 - DNA, 25 bp, Homo sapien
attctactatcgttataataataat

SEQ ID NO: 5929117 - DNA, 25 bp, Homo sapien
tttatattaatcgtaatcttattag

SEQ ID NO: 5929118 - DNA, 25 bp, Homo sapien
attaattaattatcgtattcacata

SEQ ID NO: 5929119 - DNA, 25 bp, Homo sapien
atttattaaatttatgtcgattact

SEQ ID NO: 5929120 - DNA, 25 bp, Homo sapien
taatttaataagtcgaattcatatt

SEQ ID NO: 5929121 - DNA, 25 bp, Homo sapien
aatgttctataaatcgttaattatt

SEQ ID NO: 5929122 - DNA, 25 bp, Homo sapien
aatttcgattaattatctaaacaaa

SEQ ID NO: 5929123 - DNA, 25 bp, Homo sapien
aaataatattacttcgattacaaat

SEQ ID NO: 5929124 - DNA, 25 bp, Homo sapien
taatactaatattacgttattttac

SEQ ID NO: 5929125 - DNA, 25 bp, Homo sapien
aatcaatactatcgtaaattttaat

SEQ ID NO: 5929126 - DNA, 25 bp, Homo sapien
attattattaattaagcgatactat

SEQ ID NO: 5929127 - DNA, 25 bp, Homo sapien
aatatattaatcgatcgtattttat

SEQ ID NO: 5929128 - DNA, 25 bp, Homo sapien
atcttttaatcgaattacaatttat

SEQ ID NO: 5929129 - DNA, 25 bp, Homo sapien
attcaattataacgatatgattttt

SEQ ID NO: 5929130 - DNA, 25 bp, Homo sapien
tacaaaatttattcgtaatcaatta

SEQ ID NO: 5929131 - DNA, 25 bp, Homo sapien
ttattcattatattaatacgtcata

SEQ ID NO: 5929132 - DNA, 25 bp, Homo sapien
ataatttattaatttagcgtatctt

SEQ ID NO: 5929133 - DNA, 25 bp, Homo sapien
atattcgatatgtatacttaatata

SEQ ID NO: 5929134 - DNA, 25 bp, Homo sapien
agttacatattattcgattttttaa

SEQ ID NO: 5929135 - DNA, 25 bp, Homo sapien
taagactatattaaattcgttttaa

SEQ ID NO: 5929136 - DNA, 25 bp, Homo sapien
attattaatatgtcgtttatgttaa

SEQ ID NO: 5929137 - DNA, 25 bp, Homo sapien
tttatatacttattaattcgcaatt

SEQ ID NO: 5929138 - DNA, 25 bp, Homo sapien
ttataatactatcaatttcgtaaat

SEQ ID NO: 5929139 - DNA, 25 bp, Homo sapien
ttcataatttcgtaaatagttttaa

SEQ ID NO: 5929140 - DNA, 25 bp, Homo sapien
aatctaattattaaattcgcaatta

SEQ ID NO: 5929141 - DNA, 25 bp, Homo sapien
aatttgttcgtaattataatcatta

SEQ ID NO: 5929142 - DNA, 25 bp, Homo sapien
atcttttcgataaatattacattta

SEQ ID NO: 5929143 - DNA, 25 bp, Homo sapien
gttatataaattcgctaaatattat

SEQ ID NO: 5929144 - DNA, 25 bp, Homo sapien
ttagatttaatcgattattcattta

SEQ ID NO: 5929145 - DNA, 25 bp, Homo sapien
atatctaactttaatttcgatttat

SEQ ID NO: 5929146 - DNA, 25 bp, Homo sapien
ttataaaatttcgatatacttagtt

SEQ ID NO: 5929147 - DNA, 25 bp, Homo sapien
atgttattaatcgtatatacttttt

SEQ ID NO: 5929148 - DNA, 25 bp, Homo sapien
aatatattaattaatacgtcgttaa

SEQ ID NO: 5929149 - DNA, 25 bp, Homo sapien
attatgcgtaatataattattctta

SEQ ID NO: 5929150 - DNA, 25 bp, Homo sapien
aaatgttcgtcatataataaatttt

SEQ ID NO: 5929151 - DNA, 25 bp, Homo sapien
ttaatattcgaacttattatcaatt

SEQ ID NO: 5929152 - DNA, 25 bp, Homo sapien
tactacgtaatctttaataaaataa

SEQ ID NO: 5929153 - DNA, 25 bp, Homo sapien
tttattatactaattacgatactaa

SEQ ID NO: 5929154 - DNA, 25 bp, Homo sapien
tatatttcgactataataattttgt

SEQ ID NO: 5929155 - DNA, 25 bp, Homo sapien
ttgtaaatctaatcgtatatatatt

SEQ ID NO: 5929156 - DNA, 25 bp, Homo sapien
gaatatatatcgatacttaaatttt

SEQ ID NO: 5929157 - DNA, 25 bp, Homo sapien
gaaattaacttatatcgtatattat

SEQ ID NO: 5929158 - DNA, 25 bp, Homo sapien
aaatattttcgatatgttattagat

SEQ ID NO: 5929159 - DNA, 25 bp, Homo sapien
tatttaatatgcgcattttttaaat

SEQ ID NO: 5929160 - DNA, 25 bp, Homo sapien
aatgaatcgtaattgttatatatta

SEQ ID NO: 5929161 - DNA, 25 bp, Homo sapien
gttaattttttcgagtaatatataa

SEQ ID NO: 5929162 - DNA, 25 bp, Homo sapien
aattcaattaatagttatcgttatt

SEQ ID NO: 5929163 - DNA, 25 bp, Homo sapien
aaaactacgttaaatgattatataa

SEQ ID NO: 5929164 - DNA, 25 bp, Homo sapien
gtatatataatttccgtataatttt

SEQ ID NO: 5929165 - DNA, 25 bp, Homo sapien
atttaatataattaaccgattctat

SEQ ID NO: 5929166 - DNA, 25 bp, Homo sapien
aaattattcatttacgatatagtat

SEQ ID NO: 5929167 - DNA, 25 bp, Homo sapien
aaaatatataaaattcgacttcaat

SEQ ID NO: 5929168 - DNA, 25 bp, Homo sapien
taaattcgtaaaatactaattctat

SEQ ID NO: 5929169 - DNA, 25 bp, Homo sapien
ttaatttcgtattcaatctaatttt

SEQ ID NO: 5929170 - DNA, 25 bp, Homo sapien
aatctccgatttatatattaaatat

SEQ ID NO: 5929171 - DNA, 25 bp, Homo sapien
aatattcgataatatattacttttc

SEQ ID NO: 5929172 - DNA, 25 bp, Homo sapien
atataataatttcgataactacatt

SEQ ID NO: 5929173 - DNA, 25 bp, Homo sapien
aaatgattaacgtcaatttaattat

SEQ ID NO: 5929174 - DNA, 25 bp, Homo sapien
ataaaaattcgattattcatatttc

SEQ ID NO: 5929175 - DNA, 25 bp, Homo sapien
taatattttcgcataattataaaca

SEQ ID NO: 5929176 - DNA, 25 bp, Homo sapien
aataataacataataattcgtacta

SEQ ID NO: 5929177 - DNA, 25 bp, Homo sapien
aaaactacttcgtaatataatatat

SEQ ID NO: 5929178 - DNA, 25 bp, Homo sapien
atatatatcgtagtattaatgtaaa

SEQ ID NO: 5929179 - DNA, 25 bp, Homo sapien
tattaactaatttaatcgtacaatt

SEQ ID NO: 5929180 - DNA, 25 bp, Homo sapien
attgatattcgattacaatttaata

SEQ ID NO: 5929181 - DNA, 25 bp, Homo sapien
tataatttacgagtatattaacttt

SEQ ID NO: 5929182 - DNA, 25 bp, Homo sapien
attataccttaattaatcgttataa

SEQ ID NO: 5929183 - DNA, 25 bp, Homo sapien
aaataaatttacttatatcgttgat

SEQ ID NO: 5929184 - DNA, 25 bp, Homo sapien
ataatttattatatcgttagactaa

SEQ ID NO: 5929185 - DNA, 25 bp, Homo sapien
aattattagtattacgacatattta

SEQ ID NO: 5929186 - DNA, 25 bp, Homo sapien
gaattttaatatcaatttcgttaat

SEQ ID NO: 5929187 - DNA, 25 bp, Homo sapien
atttcaattattcgaattagttaaa

SEQ ID NO: 5929188 - DNA, 25 bp, Homo sapien
ttagtgtatcgattataatatttaa

SEQ ID NO: 5929189 - DNA, 25 bp, Homo sapien
atgaatctattataatatcgatatt

SEQ ID NO: 5929190 - DNA, 25 bp, Homo sapien
taaattattcgacaattttatattc

SEQ ID NO: 5929191 - DNA, 25 bp, Homo sapien
gtatacgttaatctattatatatta

SEQ ID NO: 5929192 - DNA, 25 bp, Homo sapien
tttagcgtctaatatattaaaatta

SEQ ID NO: 5929193 - DNA, 25 bp, Homo sapien
tattttatcgataactattaattct

SEQ ID NO: 5929194 - DNA, 25 bp, Homo sapien
tctatttatatcgaactttattata

SEQ ID NO: 5929195 - DNA, 25 bp, Homo sapien
acataatttaacgatttactattta

SEQ ID NO: 5929196 - DNA, 25 bp, Homo sapien
aaatgtttattaatcgaaagtatat

SEQ ID NO: 5929197 - DNA, 25 bp, Homo sapien
ataaattatatattatccgcaattt

SEQ ID NO: 5929198 - DNA, 25 bp, Homo sapien
taagttcatttatcgataatttatt

SEQ ID NO: 5929199 - DNA, 25 bp, Homo sapien
tttaaaataacattcgtatctaaaa

SEQ ID NO: 5929200 - DNA, 25 bp, Homo sapien
ttatatagtttattcgttgtattaa

SEQ ID NO: 5929201 - DNA, 25 bp, Homo sapien
aattgctttaataattcgtttatat

SEQ ID NO: 5929202 - DNA, 25 bp, Homo sapien
tcttacggattaatataaattttat

SEQ ID NO: 5929203 - DNA, 25 bp, Homo sapien
atatatatacaaatcgattaaactt

SEQ ID NO: 5929204 - DNA, 25 bp, Homo sapien
tgttataattatcgcaattttaatt

SEQ ID NO: 5929205 - DNA, 25 bp, Homo sapien
aaaaatcatatcgttataataattg

SEQ ID NO: 5929206 - DNA, 25 bp, Homo sapien
ttattgatatcataatacgtatatt

SEQ ID NO: 5929207 - DNA, 25 bp, Homo sapien
tatattatccgaattattatttatg

SEQ ID NO: 5929208 - DNA, 25 bp, Homo sapien
taaattaatattcgtaaatctagta

SEQ ID NO: 5929209 - DNA, 25 bp, Homo sapien
agttaccgattaattatatatattt

SEQ ID NO: 5929210 - DNA, 25 bp, Homo sapien
tatactaatcgacaatatattattt

SEQ ID NO: 5929211 - DNA, 25 bp, Homo sapien
gaaaatataatatctcgtataaaat

SEQ ID NO: 5929212 - DNA, 25 bp, Homo sapien
attaaaatatttttttagcgtgata

SEQ ID NO: 5929213 - DNA, 25 bp, Homo sapien
ttaattatactttcgattaatacat

SEQ ID NO: 5929214 - DNA, 25 bp, Homo sapien
tagatcgtatatattgtaattattt

SEQ ID NO: 5929215 - DNA, 25 bp, Homo sapien
taagtttaatcgatactataaattt

SEQ ID NO: 5929216 - DNA, 25 bp, Homo sapien
aatacattactcgttataatttata

SEQ ID NO: 5929217 - DNA, 25 bp, Homo sapien
gtttacgatttaataactaattata

SEQ ID NO: 5929218 - DNA, 25 bp, Homo sapien
taatatataatagattaacgtatac

SEQ ID NO: 5929219 - DNA, 25 bp, Homo sapien
ttaaatattataatcgatacactaa

SEQ ID NO: 5929220 - DNA, 25 bp, Homo sapien
aaagttaatatactcgtaaattata

SEQ ID NO: 5929221 - DNA, 25 bp, Homo sapien
taaaatcgaactaatataatttaga

SEQ ID NO: 5929222 - DNA, 25 bp, Homo sapien
aaaattagattgaatacgaaattaa

SEQ ID NO: 5929223 - DNA, 25 bp, Homo sapien
ttatgataaaagttcgatatattaa

SEQ ID NO: 5929224 - DNA, 25 bp, Homo sapien
attaacgaaattgatattaaaattc

SEQ ID NO: 5929225 - DNA, 25 bp, Homo sapien
gtaataattatgatatacgaatata

SEQ ID NO: 5929226 - DNA, 25 bp, Homo sapien
cataatacgaatctaaataaattaa

SEQ ID NO: 5929227 - DNA, 25 bp, Homo sapien
ttatagcgataaatttattatactt

SEQ ID NO: 5929228 - DNA, 25 bp, Homo sapien
tataataaagttcgatataaataga

SEQ ID NO: 5929229 - DNA, 25 bp, Homo sapien
aaattgcggataatatataatttat

SEQ ID NO: 5929230 - DNA, 25 bp, Homo sapien
taatgataattcgattagataaaat

SEQ ID NO: 5929231 - DNA, 25 bp, Homo sapien
taattttaatatattagacgctaaa

SEQ ID NO: 5929232 - DNA, 25 bp, Homo sapien
aaatacgtaaaaactataatcataa

SEQ ID NO: 5929233 - DNA, 25 bp, Homo sapien
aaaataaatttgtcgatatatagaa

SEQ ID NO: 5929234 - DNA, 25 bp, Homo sapien
aaaacatcgataataacatatttat

SEQ ID NO: 5929235 - DNA, 25 bp, Homo sapien
tagtacgaattattatgttattatt

SEQ ID NO: 5929236 - DNA, 25 bp, Homo sapien
aattaaaattgcgataattataaca

SEQ ID NO: 5929237 - DNA, 25 bp, Homo sapien
attaaaattcgatatagattctaat

SEQ ID NO: 5929238 - DNA, 25 bp, Homo sapien
taatgttaatacttatacgaaaaat

SEQ ID NO: 5929239 - DNA, 25 bp, Homo sapien
atactatatcgtaaatgaataattt

SEQ ID NO: 5929240 - DNA, 25 bp, Homo sapien
ttatataatcatttaacgtagtttt

SEQ ID NO: 5929241 - DNA, 25 bp, Homo sapien
tttatgaatacgatattattaactt

SEQ ID NO: 5929242 - DNA, 25 bp, Homo sapien
atatattatattacgaagtagtttt

SEQ ID NO: 5929243 - DNA, 25 bp, Homo sapien
aagtttaatcgatttgtatatatat

SEQ ID NO: 5929244 - DNA, 25 bp, Homo sapien
atcaacgatataagtaaatttattt

SEQ ID NO: 5929245 - DNA, 25 bp, Homo sapien
taaatagtaaatcgttaaattatgt

SEQ ID NO: 5929246 - DNA, 25 bp, Homo sapien
ttattatcgataagtatataaaagt

SEQ ID NO: 5929247 - DNA, 25 bp, Homo sapien
atttttataagttaacgatagtata

SEQ ID NO: 5929248 - DNA, 25 bp, Homo sapien
tttgtttagataattaatcgaaatt

SEQ ID NO: 5929249 - DNA, 25 bp, Homo sapien
tataattagttattaaatcgtaaac

SEQ ID NO: 5929250 - DNA, 25 bp, Homo sapien
aaataattacaatatatacgatcta

SEQ ID NO: 5929251 - DNA, 25 bp, Homo sapien
agtaatcgacataaatttaataaat

SEQ ID NO: 5929252 - DNA, 25 bp, Homo sapien
tataattcgattagtaaatttagaa

SEQ ID NO: 5929253 - DNA, 25 bp, Homo sapien
taattgcgaatttaataattagatt

SEQ ID NO: 5929254 - DNA, 25 bp, Homo sapien
ataaagactatcgtataaattaata

SEQ ID NO: 5929255 - DNA, 25 bp, Homo sapien
taattgattacgaataaattttgta

SEQ ID NO: 5929256 - DNA, 25 bp, Homo sapien
atagaatcggttaattatattaaat

SEQ ID NO: 5929257 - DNA, 25 bp, Homo sapien
aataattaacgatttatagaacatt

SEQ ID NO: 5929258 - DNA, 25 bp, Homo sapien
ttaattctaatcgatatatacaaaa

SEQ ID NO: 5929259 - DNA, 25 bp, Homo sapien
atatatattatatagacgaaagtta

SEQ ID NO: 5929260 - DNA, 25 bp, Homo sapien
acaaaattattatagtcgaaatata

SEQ ID NO: 5929261 - DNA, 25 bp, Homo sapien
atagtatcgcttaattaataataat

SEQ ID NO: 5929262 - DNA, 25 bp, Homo sapien
aaataaaacgattaatatagtacta

SEQ ID NO: 5929263 - DNA, 25 bp, Homo sapien
attaaaatttacgatagtattgatt

SEQ ID NO: 5929264 - DNA, 25 bp, Homo sapien
aataaattatcgataaatgaactta

SEQ ID NO: 5929265 - DNA, 25 bp, Homo sapien
aaaaagtatatacgattaataacat

SEQ ID NO: 5929266 - DNA, 25 bp, Homo sapien
aaaatcgaataagtattatacaaaa

SEQ ID NO: 5929267 - DNA, 25 bp, Homo sapien
ttttatgtatatcgaattaatgaat

SEQ ID NO: 5929268 - DNA, 25 bp, Homo sapien
ataaattgtaattcgattaaaagat

SEQ ID NO: 5929269 - DNA, 25 bp, Homo sapien
atttcatatacgattgatataaata

SEQ ID NO: 5929270 - DNA, 25 bp, Homo sapien
tacatataattaatcgagtatttat

SEQ ID NO: 5929271 - DNA, 25 bp, Homo sapien
attataataactaaatttcgatatc

SEQ ID NO: 5929272 - DNA, 25 bp, Homo sapien
atttgtaatcgaagtaatattattt

SEQ ID NO: 5929273 - DNA, 25 bp, Homo sapien
attattattataacgatagtagaat

SEQ ID NO: 5929274 - DNA, 25 bp, Homo sapien
aagaatatattagtcgaaattattt

SEQ ID NO: 5929275 - DNA, 25 bp, Homo sapien
ttaaaacgaatttaatatagtctta

SEQ ID NO: 5929276 - DNA, 25 bp, Homo sapien
ttaacataaacgacatattaataat

SEQ ID NO: 5929277 - DNA, 25 bp, Homo sapien
aatatatatacgattagatttacaa

SEQ ID NO: 5929278 - DNA, 25 bp, Homo sapien
aataacgataactattaattgaatt

SEQ ID NO: 5929279 - DNA, 25 bp, Homo sapien
atatattaaacgaattatacttcat

SEQ ID NO: 5929280 - DNA, 25 bp, Homo sapien
taagtaaaatttagatcgtattatt

SEQ ID NO: 5929281 - DNA, 25 bp, Homo sapien
ataatgtaataacgattataattgt

SEQ ID NO: 5929282 - DNA, 25 bp, Homo sapien
caattattataacgatatgattttt

SEQ ID NO: 5929283 - DNA, 25 bp, Homo sapien
taatatataacaattacgattcatt

SEQ ID NO: 5929284 - DNA, 25 bp, Homo sapien
tatatcgattgaaatttataatgta

SEQ ID NO: 5929285 - DNA, 25 bp, Homo sapien
ttataacgattaattaaggtataat

SEQ ID NO: 5929286 - DNA, 25 bp, Homo sapien
gataattaattataacgactatatt

SEQ ID NO: 5929287 - DNA, 25 bp, Homo sapien
gaaatatgaataatcgaatttttat

SEQ ID NO: 5929288 - DNA, 25 bp, Homo sapien
ttttcttaagtaaatcgattaataa

SEQ ID NO: 5929289 - DNA, 25 bp, Homo sapien
tatcacgctaaaaaaatattttaat

SEQ ID NO: 5929290 - DNA, 25 bp, Homo sapien
taaatatgtcgtaatactaataatt

SEQ ID NO: 5929291 - DNA, 25 bp, Homo sapien
atttaaaaaatgcgcatattaaata

SEQ ID NO: 5929292 - DNA, 25 bp, Homo sapien
aaatttatagtatcgattaaactta

SEQ ID NO: 5929293 - DNA, 25 bp, Homo sapien
ttaacgacgtattaattaatatatt

SEQ ID NO: 5929294 - DNA, 25 bp, Homo sapien
aatttataattaagattcgatcata

SEQ ID NO: 5929295 - DNA, 25 bp, Homo sapien
ataaatattaattaagcgataattc

SEQ ID NO: 5929296 - DNA, 25 bp, Homo sapien
atttatattaaacgatctatgttat

SEQ ID NO: 5929297 - DNA, 25 bp, Homo sapien
atgatgattacgattaattaatatt

SEQ ID NO: 5929298 - DNA, 25 bp, Homo sapien
aatgtagttatcgaaattattatat

SEQ ID NO: 5929299 - DNA, 25 bp, Homo sapien
attgaagtcgaattttatatatttt

SEQ ID NO: 5929300 - DNA, 25 bp, Homo sapien
ttattttattaaagattacgtagta

SEQ ID NO: 5929301 - DNA, 25 bp, Homo sapien
tacaaataatagattcgaaaaataa

SEQ ID NO: 5929302 - DNA, 25 bp, Homo sapien
aaaaatcgtattataactaatgtta

SEQ ID NO: 5929303 - DNA, 25 bp, Homo sapien
atttgatccgaaaatttaatattat

SEQ ID NO: 5929304 - DNA, 25 bp, Homo sapien
atttgattaaacgatcataaatttt

SEQ ID NO: 5929305 - DNA, 25 bp, Homo sapien
gaaaagtaatatattatcgaatatt

SEQ ID NO: 5929306 - DNA, 25 bp, Homo sapien
ataaaatacgatcgattaatatatt

SEQ ID NO: 5929307 - DNA, 25 bp, Homo sapien
ttaaataacgattaacgaatattat

SEQ ID NO: 5929308 - DNA, 25 bp, Homo sapien
aatatcgatattataatagattcat

SEQ ID NO: 5929309 - DNA, 25 bp, Homo sapien
attatataacaattcgattaaaatg

SEQ ID NO: 5929310 - DNA, 25 bp, Homo sapien
ataaaatttatattaatccgtaaga

SEQ ID NO: 5929311 - DNA, 25 bp, Homo sapien
ttagtctaacgatataataaattat

SEQ ID NO: 5929312 - DNA, 25 bp, Homo sapien
tagattatacgattattaactattt

SEQ ID NO: 5929313 - DNA, 25 bp, Homo sapien
aagatacgctaaattaataaattat

SEQ ID NO: 5929314 - DNA, 25 bp, Homo sapien
aatatacgtattatgatatcaataa

SEQ ID NO: 5929315 - DNA, 25 bp, Homo sapien
attttatacgagatattatattttc

SEQ ID NO: 5929316 - DNA, 25 bp, Homo sapien
aactaagtatatcgaaattttataa

SEQ ID NO: 5929317 - DNA, 25 bp, Homo sapien
aatatgaattcgacttattaaatta

SEQ ID NO: 5929318 - DNA, 25 bp, Homo sapien
tttaactaattcgaataattgaaat

SEQ ID NO: 5929319 - DNA, 25 bp, Homo sapien
ataatatacgatataagttaatttc

SEQ ID NO: 5929320 - DNA, 25 bp, Homo sapien
aattgataataagttcgaatattaa

SEQ ID NO: 5929321 - DNA, 25 bp, Homo sapien
aaaatttattatatgacgaacattt

SEQ ID NO: 5929322 - DNA, 25 bp, Homo sapien
tataaattataacgagtaatgtatt

SEQ ID NO: 5929323 - DNA, 25 bp, Homo sapien
gttttgcgaatataaattaaattta

SEQ ID NO: 5929324 - DNA, 25 bp, Homo sapien
agaattaatagttatcgataaaata

SEQ ID NO: 5929325 - DNA, 25 bp, Homo sapien
tataagttacgtatactaaaattta

SEQ ID NO: 5929326 - DNA, 25 bp, Homo sapien
tatgacgtattaatataatgaataa

SEQ ID NO: 5929327 - DNA, 25 bp, Homo sapien
aagaataatacgatataatcaatat

SEQ ID NO: 5929328 - DNA, 25 bp, Homo sapien
ttttgtaatatcgtagtataattaa

SEQ ID NO: 5929329 - DNA, 25 bp, Homo sapien
atgtattaatcgaaagtataattaa

SEQ ID NO: 5929330 - DNA, 25 bp, Homo sapien
ataattaaattgacgttaatcattt

SEQ ID NO: 5929331 - DNA, 25 bp, Homo sapien
aatgtctaaaatttacgaattaata

SEQ ID NO: 5929332 - DNA, 25 bp, Homo sapien
aaataatatattgtcgattagtata

SEQ ID NO: 5929333 - DNA, 25 bp, Homo sapien
aattgtacgattaaattagttaata

SEQ ID NO: 5929334 - DNA, 25 bp, Homo sapien
atatactttcgattaataaacattt

SEQ ID NO: 5929335 - DNA, 25 bp, Homo sapien
tgtttataattatgcgaaaatatta

SEQ ID NO: 5929336 - DNA, 25 bp, Homo sapien
ttttagatacgaatgttattttaaa

SEQ ID NO: 5929337 - DNA, 25 bp, Homo sapien
aattgcgaattaataagtatataaa

SEQ ID NO: 5929338 - DNA, 25 bp, Homo sapien
aaatatatataattaatcggtaact

SEQ ID NO: 5929339 - DNA, 25 bp, Homo sapien
aaaatttaagtatcgatatatattc

SEQ ID NO: 5929340 - DNA, 25 bp, Homo sapien
ataatatttagcgaatttatataac

SEQ ID NO: 5929341 - DNA, 25 bp, Homo sapien
ctaataagattacgattaatataaa

SEQ ID NO: 5929342 - DNA, 25 bp, Homo sapien
tatatacgaaaagttataatcattt

SEQ ID NO: 5929343 - DNA, 25 bp, Homo sapien
tattaaattgtaatcgaatatcaat

SEQ ID NO: 5929344 - DNA, 25 bp, Homo sapien
ttatgtaaatagacgaatttttaaa

SEQ ID NO: 5929345 - DNA, 25 bp, Homo sapien
attagaaattatgtaatcgtattta

SEQ ID NO: 5929346 - DNA, 25 bp, Homo sapien
ttaaaactatttacgaaattatgaa

SEQ ID NO: 5929347 - DNA, 25 bp, Homo sapien
tatgtgaatacgataattaattaat

SEQ ID NO: 5929348 - DNA, 25 bp, Homo sapien
taatgattataattacgaacaaatt

SEQ ID NO: 5929349 - DNA, 25 bp, Homo sapien
taaatgaataatcgattaaatctaa

SEQ ID NO: 5929350 - DNA, 25 bp, Homo sapien
tttacattaatactacgatatatat

SEQ ID NO: 5929351 - DNA, 25 bp, Homo sapien
cataaataatagatttaacgaaaat

SEQ ID NO: 5929352 - DNA, 25 bp, Homo sapien
atataaacgaattattaaagcaatt

SEQ ID NO: 5929353 - DNA, 25 bp, Homo sapien
ttaaaaaatcgaataatatgtaact

SEQ ID NO: 5929354 - DNA, 25 bp, Homo sapien
aaaaatcatatcgttataattgaat

SEQ ID NO: 5929355 - DNA, 25 bp, Homo sapien
ttagtatcgtaattagtataataaa

SEQ ID NO: 5929356 - DNA, 25 bp, Homo sapien
tatattaagtatacatatcgaatat

SEQ ID NO: 5929357 - DNA, 25 bp, Homo sapien
gtaaaataacgtaatattagtatta

SEQ ID NO: 5929358 - DNA, 25 bp, Homo sapien
atatttaatatataaatcggagatt

SEQ ID NO: 5929359 - DNA, 25 bp, Homo sapien
aatattataacgattagatattgaa

SEQ ID NO: 5929360 - DNA, 25 bp, Homo sapien
tttaacgataattatatagaacaat

SEQ ID NO: 5929361 - DNA, 25 bp, Homo sapien
atctaataacatatcgaaaatattt

SEQ ID NO: 5929362 - DNA, 25 bp, Homo sapien
gaatataaaattgtcgaataattta

SEQ ID NO: 5929363 - DNA, 25 bp, Homo sapien
tacaagattaaatcgttaattatat

SEQ ID NO: 5929364 - DNA, 25 bp, Homo sapien
tagtatataacgagtattaaaaaat

SEQ ID NO: 5929365 - DNA, 25 bp, Homo sapien
taaatgtaatatttatcgaaaagat

SEQ ID NO: 5929366 - DNA, 25 bp, Homo sapien
tactagatttacgaatattaattta

SEQ ID NO: 5929367 - DNA, 25 bp, Homo sapien
atagaattagtattttacgaattta

SEQ ID NO: 5929368 - DNA, 25 bp, Homo sapien
atttacgaaattgatagtattataa

SEQ ID NO: 5929369 - DNA, 25 bp, Homo sapien
cataaataataattcggataatata

SEQ ID NO: 5929370 - DNA, 25 bp, Homo sapien
aatgaatcgataatacttataaaat

SEQ ID NO: 5929371 - DNA, 25 bp, Homo sapien
taagaataattatattacgcataat

SEQ ID NO: 5929372 - DNA, 25 bp, Homo sapien
ttatatattactcgaaaaaattaac

SEQ ID NO: 5929373 - DNA, 25 bp, Homo sapien
ataagttatcgaaaaagtattatta

SEQ ID NO: 5929374 - DNA, 25 bp, Homo sapien
ttaattatggattaatcgtaatata

SEQ ID NO: 5929375 - DNA, 25 bp, Homo sapien
ttaatacaacgaataaactatataa

SEQ ID NO: 5929376 - DNA, 25 bp, Homo sapien
aaaattatacggaaattatatatac

SEQ ID NO: 5929377 - DNA, 25 bp, Homo sapien
ataaatcgaaattaaagttagatat

SEQ ID NO: 5929378 - DNA, 25 bp, Homo sapien
atgattttaatgattaatcgctatt

SEQ ID NO: 5929379 - DNA, 25 bp, Homo sapien
aaatatattatattagagcgtgttt

SEQ ID NO: 5929380 - DNA, 25 bp, Homo sapien
tattttaacgattaatatctgtaag

SEQ ID NO: 5929381 - DNA, 25 bp, Homo sapien
tgtctatatatacgattagtaatta

SEQ ID NO: 5929382 - DNA, 25 bp, Homo sapien
tacattaacgtaaatattcgataat

SEQ ID NO: 5929383 - DNA, 25 bp, Homo sapien
ttaactacgataattatctaagaaa

SEQ ID NO: 5929384 - DNA, 25 bp, Homo sapien
ttataatatcgtatttaaccgatat

SEQ ID NO: 5929385 - DNA, 25 bp, Homo sapien
ttaaatatttcaaccgaatatcaat

SEQ ID NO: 5929386 - DNA, 25 bp, Homo sapien
ataaatatcgtagatgttatatgta

SEQ ID NO: 5929387 - DNA, 25 bp, Homo sapien
ttggtgttatattacgataaaaaat

SEQ ID NO: 5929388 - DNA, 25 bp, Homo sapien
atactattatattacgaaacgtaaa

SEQ ID NO: 5929389 - DNA, 25 bp, Homo sapien
tagatataacatataacgattttac

SEQ ID NO: 5929390 - DNA, 25 bp, Homo sapien
aaaatatcgtaattctcttactata

SEQ ID NO: 5929391 - DNA, 25 bp, Homo sapien
agaatgtatcgaaattataaactta

SEQ ID NO: 5929392 - DNA, 25 bp, Homo sapien
actatgatatattacgataacaaat

SEQ ID NO: 5929393 - DNA, 25 bp, Homo sapien
ttattaatatgtcttatcgttatgt

SEQ ID NO: 5929394 - DNA, 25 bp, Homo sapien
gtaaatatactaactattcgttaat

SEQ ID NO: 5929395 - DNA, 25 bp, Homo sapien
taactctattgttcgatataaataa

SEQ ID NO: 5929396 - DNA, 25 bp, Homo sapien
tatagactatatacgattaaataac

SEQ ID NO: 5929397 - DNA, 25 bp, Homo sapien
aaatcaattcgactatattatagaa

SEQ ID NO: 5929398 - DNA, 25 bp, Homo sapien
tgaattcttatcgtatattatactt

SEQ ID NO: 5929399 - DNA, 25 bp, Homo sapien
atttcaattaatagtaatcggtaat

SEQ ID NO: 5929400 - DNA, 25 bp, Homo sapien
tattcattatgttatcgaaaagtta

SEQ ID NO: 5929401 - DNA, 25 bp, Homo sapien
ttgttttccgaatatttataaaatc

SEQ ID NO: 5929402 - DNA, 25 bp, Homo sapien
atgtattcggatagattatatatta

SEQ ID NO: 5929403 - DNA, 25 bp, Homo sapien
atctattcgatataatgtaattctt

SEQ ID NO: 5929404 - DNA, 25 bp, Homo sapien
tagtatttcgtaatgattatgtaat

SEQ ID NO: 5929405 - DNA, 25 bp, Homo sapien
tgttattcgctaaattttatctatt

SEQ ID NO: 5929406 - DNA, 25 bp, Homo sapien
ttgcatataatgatcgattaatata

SEQ ID NO: 5929407 - DNA, 25 bp, Homo sapien
tctatcgataatacttattaatgat

SEQ ID NO: 5929408 - DNA, 25 bp, Homo sapien
attgaataaatcgatatagttctat

SEQ ID NO: 5929409 - DNA, 25 bp, Homo sapien
taaaatactataataatgcgaagat

SEQ ID NO: 5929410 - DNA, 25 bp, Homo sapien
ttaatcgttaatatacaatttctag

SEQ ID NO: 5929411 - DNA, 25 bp, Homo sapien
attatagattaatatacgatccatt

SEQ ID NO: 5929412 - DNA, 25 bp, Homo sapien
tactaaaccgataattaatatagat

SEQ ID NO: 5929413 - DNA, 25 bp, Homo sapien
aaaattatatatatcgttgatgttc

SEQ ID NO: 5929414 - DNA, 25 bp, Homo sapien
aattttgataagtcgttaaacatat

SEQ ID NO: 5929415 - DNA, 25 bp, Homo sapien
aaacttttagcgatattatgttata

SEQ ID NO: 5929416 - DNA, 25 bp, Homo sapien
aaatagtattataatatcgagtcaa

SEQ ID NO: 5929417 - DNA, 25 bp, Homo sapien
gtattatcataattcgtatagtaat

SEQ ID NO: 5929418 - DNA, 25 bp, Homo sapien
ttaatgttaatatacaacgtttagt

SEQ ID NO: 5929419 - DNA, 25 bp, Homo sapien
ttttttatcgtaaatctatatgaag

SEQ ID NO: 5929420 - DNA, 25 bp, Homo sapien
agcaatctattaataatcgaattaa

SEQ ID NO: 5929421 - DNA, 25 bp, Homo sapien
tgatttatatccgttaattaatatg

SEQ ID NO: 5929422 - DNA, 25 bp, Homo sapien
taaagtaatatttcgaagattaatc

SEQ ID NO: 5929423 - DNA, 25 bp, Homo sapien
ttatgataattattgattcgattct

SEQ ID NO: 5929424 - DNA, 25 bp, Homo sapien
agtaaaacgctaaattaataatcaa

SEQ ID NO: 5929425 - DNA, 25 bp, Homo sapien
ataattaacgaatcattgtagaaaa

SEQ ID NO: 5929426 - DNA, 25 bp, Homo sapien
aatgtctataacgaaaattctataa

SEQ ID NO: 5929427 - DNA, 25 bp, Homo sapien
atatatgatattataatcggatgaa

SEQ ID NO: 5929428 - DNA, 25 bp, Homo sapien
tatacattatctaatcgttagtaat

SEQ ID NO: 5929429 - DNA, 25 bp, Homo sapien
atattaatttagatcgatatgaaac

SEQ ID NO: 5929430 - DNA, 25 bp, Homo sapien
aacataatacttattgcgattaaat

SEQ ID NO: 5929431 - DNA, 25 bp, Homo sapien
tttatcgaagtattagacaatataa

SEQ ID NO: 5929432 - DNA, 25 bp, Homo sapien
attatacggttaatttaatagaaca

SEQ ID NO: 5929433 - DNA, 25 bp, Homo sapien
tgtatatcgaattaacattactaaa

SEQ ID NO: 5929434 - DNA, 25 bp, Homo sapien
gatattagtttaacgatattacata

SEQ ID NO: 5929435 - DNA, 25 bp, Homo sapien
tcacattaataatataacggtataa

SEQ ID NO: 5929436 - DNA, 25 bp, Homo sapien
tatgttttcgaatactttatatgaa

SEQ ID NO: 5929437 - DNA, 25 bp, Homo sapien
atccttttataatgttcgatttata

SEQ ID NO: 5929438 - DNA, 25 bp, Homo sapien
ttattttatatgttcgattaaagag

SEQ ID NO: 5929439 - DNA, 25 bp, Homo sapien
attatttaagtactatcgataagtt

SEQ ID NO: 5929440 - DNA, 25 bp, Homo sapien
atgataatttaacttatcgataaca

SEQ ID NO: 5929441 - DNA, 25 bp, Homo sapien
tactttaatatgatcgacataaatt

SEQ ID NO: 5929442 - DNA, 25 bp, Homo sapien
tctattaacgattaaattgtctaaa

SEQ ID NO: 5929443 - DNA, 25 bp, Homo sapien
tatagattagatttcgatatattct

SEQ ID NO: 5929444 - DNA, 25 bp, Homo sapien
tttttagatataatactcgataaca

SEQ ID NO: 5929445 - DNA, 25 bp, Homo sapien
atattttcgaatagttattatcgat

SEQ ID NO: 5929446 - DNA, 25 bp, Homo sapien
ataggacgatatcaataaatataat

SEQ ID NO: 5929447 - DNA, 25 bp, Homo sapien
catttttaatataatcgttctaaac

SEQ ID NO: 5929448 - DNA, 25 bp, Homo sapien
cttattcgtaactagataaatatat

SEQ ID NO: 5929449 - DNA, 25 bp, Homo sapien
aattgtacgataatcagtataaatt

SEQ ID NO: 5929450 - DNA, 25 bp, Homo sapien
aaatattagattcgatctattagta

SEQ ID NO: 5929451 - DNA, 25 bp, Homo sapien
ttatcaaattaatcgatgatgttat

SEQ ID NO: 5929452 - DNA, 25 bp, Homo sapien
gaaaataatattcgttgatacataa

SEQ ID NO: 5929453 - DNA, 25 bp, Homo sapien
tataatattattcgataagaagcaa

SEQ ID NO: 5929454 - DNA, 25 bp, Homo sapien
atttatttgattacgacaattgttt

SEQ ID NO: 5929455 - DNA, 25 bp, Homo sapien
aaaaagtgcgtataatattattaac

SEQ ID NO: 5929456 - DNA, 25 bp, Homo sapien
aaacaacgtttatatataagcttaa

SEQ ID NO: 5929457 - DNA, 25 bp, Homo sapien
tttaacgtattgctctttaaaaata

SEQ ID NO: 5929458 - DNA, 25 bp, Homo sapien
tgatcatttatgattaaacgtttta

SEQ ID NO: 5929459 - DNA, 25 bp, Homo sapien
tttttttacgataacgatttataga

SEQ ID NO: 5929460 - DNA, 25 bp, Homo sapien
tcaatatcgaataatttacttgttt

SEQ ID NO: 5929461 - DNA, 25 bp, Homo sapien
ataatttatgttagtttcgtcttat

SEQ ID NO: 5929462 - DNA, 25 bp, Homo sapien
gaaaaacgaatcaacttatataaat

SEQ ID NO: 5929463 - DNA, 25 bp, Homo sapien
attaattatctagattgcgaatttt

SEQ ID NO: 5929464 - DNA, 25 bp, Homo sapien
taaaaatcttgtaatatacgtttac

SEQ ID NO: 5929465 - DNA, 25 bp, Homo sapien
actgatcgattatataatgataaat

SEQ ID NO: 5929466 - DNA, 25 bp, Homo sapien
tatttctatacgtttgattaaagtt

SEQ ID NO: 5929467 - DNA, 25 bp, Homo sapien
cattaattatcttatacgtcttatt

SEQ ID NO: 5929468 - DNA, 25 bp, Homo sapien
ttaccattattcgatatgattatta

SEQ ID NO: 5929469 - DNA, 25 bp, Homo sapien
aatctcgattattaatgtacaatat

SEQ ID NO: 5929470 - DNA, 25 bp, Homo sapien
gattaacttcgtctaatatataaat

SEQ ID NO: 5929471 - DNA, 25 bp, Homo sapien
ctaaattttcgaatctaatataaga

SEQ ID NO: 5929472 - DNA, 25 bp, Homo sapien
tatgattacgattgttaatagataa

SEQ ID NO: 5929473 - DNA, 25 bp, Homo sapien
aataactatatatcgtaacactaat

SEQ ID NO: 5929474 - DNA, 25 bp, Homo sapien
aacacaacgttaattattacataaa

SEQ ID NO: 5929475 - DNA, 25 bp, Homo sapien
agctttcgtaaaaattcatatttaa

SEQ ID NO: 5929476 - DNA, 25 bp, Homo sapien
tacatcgaatatttaatctatgaaa

SEQ ID NO: 5929477 - DNA, 25 bp, Homo sapien
attgaattattgcgatatacaatat

SEQ ID NO: 5929478 - DNA, 25 bp, Homo sapien
taaggtaatcgttaattctatttaa

SEQ ID NO: 5929479 - DNA, 25 bp, Homo sapien
taaaaatagtttaacgaatctacaa

SEQ ID NO: 5929480 - DNA, 25 bp, Homo sapien
aaagttcgattaattatgtaatgaa

SEQ ID NO: 5929481 - DNA, 25 bp, Homo sapien
acacaattagattattacgttattt

SEQ ID NO: 5929482 - DNA, 25 bp, Homo sapien
aatattgattttcgatataatagtc

SEQ ID NO: 5929483 - DNA, 25 bp, Homo sapien
atgtagtcgatttataatagtttta

SEQ ID NO: 5929484 - DNA, 25 bp, Homo sapien
ttttgtttcgatttataacttacaa

SEQ ID NO: 5929485 - DNA, 25 bp, Homo sapien
aaatttcgtactagttatatcaaaa

SEQ ID NO: 5929486 - DNA, 25 bp, Homo sapien
tatgcaatatcgtataagttaaatt

SEQ ID NO: 5929487 - DNA, 25 bp, Homo sapien
atatccatagataatcgatatttat

SEQ ID NO: 5929488 - DNA, 25 bp, Homo sapien
taacaaatttttcgataactaagat

SEQ ID NO: 5929489 - DNA, 25 bp, Homo sapien
catttttgtaatattcgataatcta

SEQ ID NO: 5929490 - DNA, 25 bp, Homo sapien
cttaaatcggtattataatattact

SEQ ID NO: 5929491 - DNA, 25 bp, Homo sapien
tttgatcgaaattattagtttaaac

SEQ ID NO: 5929492 - DNA, 25 bp, Homo sapien
aataaacttattatattcgactatc

SEQ ID NO: 5929493 - DNA, 25 bp, Homo sapien
aaaactaacgattagcataataaat

SEQ ID NO: 5929494 - DNA, 25 bp, Homo sapien
tattctataatcggataattaattg

SEQ ID NO: 5929495 - DNA, 25 bp, Homo sapien
aatacaaggatatatcgttataaat

SEQ ID NO: 5929496 - DNA, 25 bp, Homo sapien
gtaattgataattatacgataacaa

SEQ ID NO: 5929497 - DNA, 25 bp, Homo sapien
ctaaaatttaatagtcgatattcat

SEQ ID NO: 5929498 - DNA, 25 bp, Homo sapien
caatgattatatcgtactataaatt

SEQ ID NO: 5929499 - DNA, 25 bp, Homo sapien
tgtaagtattatcgtaattttaaac

SEQ ID NO: 5929500 - DNA, 25 bp, Homo sapien
ataattaatcaatttattcgcagtt

SEQ ID NO: 5929501 - DNA, 25 bp, Homo sapien
atttttcgtctaagttatatagaaa

SEQ ID NO: 5929502 - DNA, 25 bp, Homo sapien
taggacgtattaatataacttattt

SEQ ID NO: 5929503 - DNA, 25 bp, Homo sapien
aaaaaattatatattcggttgcaaa

SEQ ID NO: 5929504 - DNA, 25 bp, Homo sapien
tatattaattaattcgtatcaggta

SEQ ID NO: 5929505 - DNA, 25 bp, Homo sapien
gttcatattaataagtacgataaat

SEQ ID NO: 5929506 - DNA, 25 bp, Homo sapien
atttttttagtcgcatattaaagaa

SEQ ID NO: 5929507 - DNA, 25 bp, Homo sapien
atatcagtcgtaatttataaacata

SEQ ID NO: 5929508 - DNA, 25 bp, Homo sapien
atttaaatcgtataattatcacaca

SEQ ID NO: 5929509 - DNA, 25 bp, Homo sapien
tgtaatttacgataatatcttaaac

SEQ ID NO: 5929510 - DNA, 25 bp, Homo sapien
ctttcatattcgtaattgataaata

SEQ ID NO: 5929511 - DNA, 25 bp, Homo sapien
aatacaactcgtaataatatttgaa

SEQ ID NO: 5929512 - DNA, 25 bp, Homo sapien
aatatattagtatttcgtaaagcaa

SEQ ID NO: 5929513 - DNA, 25 bp, Homo sapien
aactatactctattacgataataat

SEQ ID NO: 5929514 - DNA, 25 bp, Homo sapien
tatttcgtaattatattaagtacag

SEQ ID NO: 5929515 - DNA, 25 bp, Homo sapien
aatttatatattcggattaatgaga

SEQ ID NO: 5929516 - DNA, 25 bp, Homo sapien
atagagattaacgatattatatgta

SEQ ID NO: 5929517 - DNA, 25 bp, Homo sapien
tgtattactaatttcgtatatatgt

SEQ ID NO: 5929518 - DNA, 25 bp, Homo sapien
tatattcgagttaagttaatttgaa

SEQ ID NO: 5929519 - DNA, 25 bp, Homo sapien
tataacattagatcgaatatcaata

SEQ ID NO: 5929520 - DNA, 25 bp, Homo sapien
aagtaataaatcgcatataaaacat

SEQ ID NO: 5929521 - DNA, 25 bp, Homo sapien
ctattaataacgatataacttacta

SEQ ID NO: 5929522 - DNA, 25 bp, Homo sapien
atgtttaacgaaaaattgatactat

SEQ ID NO: 5929523 - DNA, 25 bp, Homo sapien
agtattattacgctatataaaacat

SEQ ID NO: 5929524 - DNA, 25 bp, Homo sapien
taaaagattcgcaaatataattgat

SEQ ID NO: 5929525 - DNA, 25 bp, Homo sapien
cttttatcaaattcgtctattaatt

SEQ ID NO: 5929526 - DNA, 25 bp, Homo sapien
aattcaaatatgcggataattataa

SEQ ID NO: 5929527 - DNA, 25 bp, Homo sapien
tttatctatttaatgcgaataagta

SEQ ID NO: 5929528 - DNA, 25 bp, Homo sapien
tttttgataatgcgcaataatattt

SEQ ID NO: 5929529 - DNA, 25 bp, Homo sapien
tatagtaaaaattttcgatcaattc

SEQ ID NO: 5929530 - DNA, 25 bp, Homo sapien
ttctacaatcgattatattagatat

SEQ ID NO: 5929531 - DNA, 25 bp, Homo sapien
tctgacgattagaataattatttat

SEQ ID NO: 5929532 - DNA, 25 bp, Homo sapien
tttcttatacgattcataatttact

SEQ ID NO: 5929533 - DNA, 25 bp, Homo sapien
aataatttatatcaatcgcttagaa

SEQ ID NO: 5929534 - DNA, 25 bp, Homo sapien
tttatttgtattaaatcgatttgca

SEQ ID NO: 5929535 - DNA, 25 bp, Homo sapien
tttctttatatcgtataagatgatt

SEQ ID NO: 5929536 - DNA, 25 bp, Homo sapien
acagttacttacgaattatattatt

SEQ ID NO: 5929537 - DNA, 25 bp, Homo sapien
tctaaaaactttatacgttcaatta

SEQ ID NO: 5929538 - DNA, 25 bp, Homo sapien
tatctgatacataattcgtatatta

SEQ ID NO: 5929539 - DNA, 25 bp, Homo sapien
taatgactattacgttaatttcata

SEQ ID NO: 5929540 - DNA, 25 bp, Homo sapien
atttaaatgattattcgctatatct

SEQ ID NO: 5929541 - DNA, 25 bp, Homo sapien
agtatgatatacgtttaataactaa

SEQ ID NO: 5929542 - DNA, 25 bp, Homo sapien
taaataactatcgataattatgctt

SEQ ID NO: 5929543 - DNA, 25 bp, Homo sapien
ttagaattactacgattaataatct

SEQ ID NO: 5929544 - DNA, 25 bp, Homo sapien
tttttcgcataattaatctaatctt

SEQ ID NO: 5929545 - DNA, 25 bp, Homo sapien
agtttatatcgttaatctaaaaaga

SEQ ID NO: 5929546 - DNA, 25 bp, Homo sapien
aatttctatagacgttataatcata

SEQ ID NO: 5929547 - DNA, 25 bp, Homo sapien
tatcctaatgattaatcgaaaaata

SEQ ID NO: 5929548 - DNA, 25 bp, Homo sapien
ttaggtcgacaatattataatttat

SEQ ID NO: 5929549 - DNA, 25 bp, Homo sapien
tacttttaatatcgaaaggtatatt

SEQ ID NO: 5929550 - DNA, 25 bp, Homo sapien
atacgtagttcgatattaaaaatta

SEQ ID NO: 5929551 - DNA, 25 bp, Homo sapien
taaatgacgtaatcaaattttcatt

SEQ ID NO: 5929552 - DNA, 25 bp, Homo sapien
acaaatttgatcgtaaatatctaat

SEQ ID NO: 5929553 - DNA, 25 bp, Homo sapien
tttttatagttatcgataaattcga

SEQ ID NO: 5929554 - DNA, 25 bp, Homo sapien
gttaaataccgatataatattgaat

SEQ ID NO: 5929555 - DNA, 25 bp, Homo sapien
ttaattaatcttaacatacgttact

SEQ ID NO: 5929556 - DNA, 25 bp, Homo sapien
aaaatatcgagtttaaatacaaatc

SEQ ID NO: 5929557 - DNA, 25 bp, Homo sapien
tcaaatttaagttaattcgtacaat

SEQ ID NO: 5929558 - DNA, 25 bp, Homo sapien
ttaatcgtattgtattaactaaaag

SEQ ID NO: 5929559 - DNA, 25 bp, Homo sapien
tatttacgaactttataattggaat

SEQ ID NO: 5929560 - DNA, 25 bp, Homo sapien
gataattattacgaatcatttaaga

SEQ ID NO: 5929561 - DNA, 25 bp, Homo sapien
aatttattatattcgtaatgattgg

SEQ ID NO: 5929562 - DNA, 25 bp, Homo sapien
tattcttcgaatataagttagataa

SEQ ID NO: 5929563 - DNA, 25 bp, Homo sapien
attaaaagtcgaaaatctatacaat

SEQ ID NO: 5929564 - DNA, 25 bp, Homo sapien
aagtgtaacaattaatcgatattat

SEQ ID NO: 5929565 - DNA, 25 bp, Homo sapien
aattattattcgtaatctaaatcga

SEQ ID NO: 5929566 - DNA, 25 bp, Homo sapien
atgaatctaaacgatattaatattg

SEQ ID NO: 5929567 - DNA, 25 bp, Homo sapien
atactattcataatttatcgaagaa

SEQ ID NO: 5929568 - DNA, 25 bp, Homo sapien
ttgaacgtttaattagaataatctt

SEQ ID NO: 5929569 - DNA, 25 bp, Homo sapien
attgttatttacgagattaatgatt

SEQ ID NO: 5929570 - DNA, 25 bp, Homo sapien
tattacgaaacttatagatacaata

SEQ ID NO: 5929571 - DNA, 25 bp, Homo sapien
taatagataaccgtatcatttttat

SEQ ID NO: 5929572 - DNA, 25 bp, Homo sapien
aaatttactcgtcaatattaaaaca

SEQ ID NO: 5929573 - DNA, 25 bp, Homo sapien
aagtatattattatccgatatctat

SEQ ID NO: 5929574 - DNA, 25 bp, Homo sapien
taatgtatagtttatttcgatagta

SEQ ID NO: 5929575 - DNA, 25 bp, Homo sapien
tattctgttactaattaacgaataa

SEQ ID NO: 5929576 - DNA, 25 bp, Homo sapien
agctaattaatttatccgaaaataa

SEQ ID NO: 5929577 - DNA, 25 bp, Homo sapien
tgttgcataaattatcgttaaatat

SEQ ID NO: 5929578 - DNA, 25 bp, Homo sapien
taattgacgttaatataatacagtt

SEQ ID NO: 5929579 - DNA, 25 bp, Homo sapien
atatatccgttaacaataagttata

SEQ ID NO: 5929580 - DNA, 25 bp, Homo sapien
aataagtatcgtaaatagtaacaat

SEQ ID NO: 5929581 - DNA, 25 bp, Homo sapien
taataaagttattcgattaacaatg

SEQ ID NO: 5929582 - DNA, 25 bp, Homo sapien
agaaaatatcgtcatataattcttt

SEQ ID NO: 5929583 - DNA, 25 bp, Homo sapien
aaaatcgatatagattcctaatatt

SEQ ID NO: 5929584 - DNA, 25 bp, Homo sapien
gaattatcgaaaattgatctttatt

SEQ ID NO: 5929585 - DNA, 25 bp, Homo sapien
gttaagcgtttaattgatatatatt

SEQ ID NO: 5929586 - DNA, 25 bp, Homo sapien
gcaaaatatcgatactaattaatta

SEQ ID NO: 5929587 - DNA, 25 bp, Homo sapien
gtaagattatattcggatatttaaa

SEQ ID NO: 5929588 - DNA, 25 bp, Homo sapien
ataatcgaattatattaagtaccta

SEQ ID NO: 5929589 - DNA, 25 bp, Homo sapien
atatattatcgataatcaatacgta

SEQ ID NO: 5929590 - DNA, 25 bp, Homo sapien
gaaacagtattaatatcgaaattat

SEQ ID NO: 5929591 - DNA, 25 bp, Homo sapien
tacaaacgaattgttattattacat

SEQ ID NO: 5929592 - DNA, 25 bp, Homo sapien
tagtaatttaaatcgttagaaacaa

SEQ ID NO: 5929593 - DNA, 25 bp, Homo sapien
tgtattataatacgtctaaactata

SEQ ID NO: 5929594 - DNA, 25 bp, Homo sapien
aattttcttatcaacgattatatag

SEQ ID NO: 5929595 - DNA, 25 bp, Homo sapien
ctaattaatcgacaatttattacat

SEQ ID NO: 5929596 - DNA, 25 bp, Homo sapien
tctatttagtatattattcgttaag

SEQ ID NO: 5929597 - DNA, 25 bp, Homo sapien
tatatttatttagcgaattatcatg

SEQ ID NO: 5929598 - DNA, 25 bp, Homo sapien
gaattatttcgtataattactcata

SEQ ID NO: 5929599 - DNA, 25 bp, Homo sapien
ttttaattagtacgaataatgcttt

SEQ ID NO: 5929600 - DNA, 25 bp, Homo sapien
tcctataataagttcgaataatttt

SEQ ID NO: 5929601 - DNA, 25 bp, Homo sapien
caatctcgatttatatatcttttat

SEQ ID NO: 5929602 - DNA, 25 bp, Homo sapien
atactttatattcgttatagataga

SEQ ID NO: 5929603 - DNA, 25 bp, Homo sapien
tttctattatttatctacgatatag

SEQ ID NO: 5929604 - DNA, 25 bp, Homo sapien
gtaactatatcgtattacaaatatt

SEQ ID NO: 5929605 - DNA, 25 bp, Homo sapien
ttactgtttaattcgcattatatta

SEQ ID NO: 5929606 - DNA, 25 bp, Homo sapien
tatagtctcgatataataactattt

SEQ ID NO: 5929607 - DNA, 25 bp, Homo sapien
gcttatataatgatttacgataatt

SEQ ID NO: 5929608 - DNA, 25 bp, Homo sapien
ttagtattaatttcgaacaatctaa

SEQ ID NO: 5929609 - DNA, 25 bp, Homo sapien
aatctttttattagttcgaaataca

SEQ ID NO: 5929610 - DNA, 25 bp, Homo sapien
ttaattataaagaaattcgcattct

SEQ ID NO: 5929611 - DNA, 25 bp, Homo sapien
ttaatattactacgatatcttgata

SEQ ID NO: 5929612 - DNA, 25 bp, Homo sapien
attgttactacgaaaattatgatat

SEQ ID NO: 5929613 - DNA, 25 bp, Homo sapien
ttgtattaattagattcgaatgata

SEQ ID NO: 5929614 - DNA, 25 bp, Homo sapien
tatatacgacgaatttatatcttaa

SEQ ID NO: 5929615 - DNA, 25 bp, Homo sapien
gtacatcgtctaataattaaatatt

SEQ ID NO: 5929616 - DNA, 25 bp, Homo sapien
gaattataaattaactatcgtctat

SEQ ID NO: 5929617 - DNA, 25 bp, Homo sapien
tatagacgtagatctaataaatatt

SEQ ID NO: 5929618 - DNA, 25 bp, Homo sapien
tctctttattatcgaactaaaaata

SEQ ID NO: 5929619 - DNA, 25 bp, Homo sapien
gaaatcgattgatatattatattgt

SEQ ID NO: 5929620 - DNA, 25 bp, Homo sapien
tagtaaaatattatatccgattgat

SEQ ID NO: 5929621 - DNA, 25 bp, Homo sapien
aatgtattaagttcgattaacaatt

SEQ ID NO: 5929622 - DNA, 25 bp, Homo sapien
aaataactaattatcgataatacca

SEQ ID NO: 5929623 - DNA, 25 bp, Homo sapien
taaaccgatgttatattatatgata

SEQ ID NO: 5929624 - DNA, 25 bp, Homo sapien
tcttttatgttcgatataatgaaat

SEQ ID NO: 5929625 - DNA, 25 bp, Homo sapien
gtattattagtttattacgattgat

SEQ ID NO: 5929626 - DNA, 25 bp, Homo sapien
cagtataactataatcgaataaaaa

SEQ ID NO: 5929627 - DNA, 25 bp, Homo sapien
ttaaaaattataagtcgcttaaaca

SEQ ID NO: 5929628 - DNA, 25 bp, Homo sapien
taacatcggtatgattaataaaata

SEQ ID NO: 5929629 - DNA, 25 bp, Homo sapien
ttatgttatacgaacaaatttgatt

SEQ ID NO: 5929630 - DNA, 25 bp, Homo sapien
attagatttaactcgtaatacattt

SEQ ID NO: 5929631 - DNA, 25 bp, Homo sapien
agaatattcgctatcaataaattaa

SEQ ID NO: 5929632 - DNA, 25 bp, Homo sapien
tttatcttttagtcgaagttaatta

SEQ ID NO: 5929633 - DNA, 25 bp, Homo sapien
ataagatatacgattagtttttgaa

SEQ ID NO: 5929634 - DNA, 25 bp, Homo sapien
aattaaattcgataagattttagac

SEQ ID NO: 5929635 - DNA, 25 bp, Homo sapien
aaaagatatactagttcgatataaa

SEQ ID NO: 5929636 - DNA, 25 bp, Homo sapien
atcttatagattaacgataactttt

SEQ ID NO: 5929637 - DNA, 25 bp, Homo sapien
atgaatacgaatcattattagataa

SEQ ID NO: 5929638 - DNA, 25 bp, Homo sapien
tcttattttcgtaatctaatacatt

SEQ ID NO: 5929639 - DNA, 25 bp, Homo sapien
atctaaatacgatatctatttacta

SEQ ID NO: 5929640 - DNA, 25 bp, Homo sapien
aaatcatgatattaatcgaagtaaa

SEQ ID NO: 5929641 - DNA, 25 bp, Homo sapien
aatagatcaaattttgaacgttaaa

SEQ ID NO: 5929642 - DNA, 25 bp, Homo sapien
aaaaactaacgattcgatattaata

SEQ ID NO: 5929643 - DNA, 25 bp, Homo sapien
attaggtcgaattttcaatataaaa

SEQ ID NO: 5929644 - DNA, 25 bp, Homo sapien
cattagcgattaattaatattgtaa

SEQ ID NO: 5929645 - DNA, 25 bp, Homo sapien
attaataatcgattataagctagtt

SEQ ID NO: 5929646 - DNA, 25 bp, Homo sapien
aattgttattaatgaatcgataatg

SEQ ID NO: 5929647 - DNA, 25 bp, Homo sapien
ttattcgatttaccatattaataag

SEQ ID NO: 5929648 - DNA, 25 bp, Homo sapien
taatgatcggataatttaattacaa

SEQ ID NO: 5929649 - DNA, 25 bp, Homo sapien
tatattataagttcgtattatactg

SEQ ID NO: 5929650 - DNA, 25 bp, Homo sapien
tatctatacttaatcgtaatactaa

SEQ ID NO: 5929651 - DNA, 25 bp, Homo sapien
taattaattattatgtacgctaatg

SEQ ID NO: 5929652 - DNA, 25 bp, Homo sapien
cactacatcgtaaatttataaattt

SEQ ID NO: 5929653 - DNA, 25 bp, Homo sapien
ttagttacgatatgttaacaaaatt

SEQ ID NO: 5929654 - DNA, 25 bp, Homo sapien
tcaattagttgttcgtataattata

SEQ ID NO: 5929655 - DNA, 25 bp, Homo sapien
atcattaacgatagttatatttgaa

SEQ ID NO: 5929656 - DNA, 25 bp, Homo sapien
tctcagtttatataaatcgaattaa

SEQ ID NO: 5929657 - DNA, 25 bp, Homo sapien
atatatcgttatagtaatacatgat

SEQ ID NO: 5929658 - DNA, 25 bp, Homo sapien
ttcatgtttatttgtcgaattttat

SEQ ID NO: 5929659 - DNA, 25 bp, Homo sapien
ctaaaataatatcgctgtaattaaa

SEQ ID NO: 5929660 - DNA, 25 bp, Homo sapien
aagtcaacatattaatcgaaataaa

SEQ ID NO: 5929661 - DNA, 25 bp, Homo sapien
tatattataatttcgtaatgttcga

SEQ ID NO: 5929662 - DNA, 25 bp, Homo sapien
tcatgtatgatattatcgattttat

SEQ ID NO: 5929663 - DNA, 25 bp, Homo sapien
aacattacgattctaaattatttca

SEQ ID NO: 5929664 - DNA, 25 bp, Homo sapien
tatatatatcgctataatcaattct

SEQ ID NO: 5929665 - DNA, 25 bp, Homo sapien
gagatatcgtttagtattaattaat

SEQ ID NO: 5929666 - DNA, 25 bp, Homo sapien
tattacgcaatattaattatagtca

SEQ ID NO: 5929667 - DNA, 25 bp, Homo sapien
aaatcattaatgtatttcgttaaag

SEQ ID NO: 5929668 - DNA, 25 bp, Homo sapien
tgtgtattctaatcgatatatataa

SEQ ID NO: 5929669 - DNA, 25 bp, Homo sapien
ttgatgtattaccgttaaataaatt

SEQ ID NO: 5929670 - DNA, 25 bp, Homo sapien
ttatctcaaattaacgataatctat

SEQ ID NO: 5929671 - DNA, 25 bp, Homo sapien
tatattattatacgcgaaaatctaa

SEQ ID NO: 5929672 - DNA, 25 bp, Homo sapien
ttttattaatctaatttacgagatg

SEQ ID NO: 5929673 - DNA, 25 bp, Homo sapien
tatgtaacggatttaattattgatt

SEQ ID NO: 5929674 - DNA, 25 bp, Homo sapien
attactatttgacgattaattatct

SEQ ID NO: 5929675 - DNA, 25 bp, Homo sapien
taatcttataacgaattcaatcaat

SEQ ID NO: 5929676 - DNA, 25 bp, Homo sapien
gaaaatatcgataatttagtagtaa

SEQ ID NO: 5929677 - DNA, 25 bp, Homo sapien
ttgatattatataacgatgtcttta

SEQ ID NO: 5929678 - DNA, 25 bp, Homo sapien
tatttttcgaaagttattatgacta

SEQ ID NO: 5929679 - DNA, 25 bp, Homo sapien
ttatttacgtataaatcgtttgtta

SEQ ID NO: 5929680 - DNA, 25 bp, Homo sapien
actagaactatcgaaattatttatt

SEQ ID NO: 5929681 - DNA, 25 bp, Homo sapien
atagttctaatgcgataatatttta

SEQ ID NO: 5929682 - DNA, 25 bp, Homo sapien
ttattggatttatccgaatataata

SEQ ID NO: 5929683 - DNA, 25 bp, Homo sapien
aatgttgcgtactattaatattaat

SEQ ID NO: 5929684 - DNA, 25 bp, Homo sapien
aatacagcgtaataatattattgaa

SEQ ID NO: 5929685 - DNA, 25 bp, Homo sapien
acattatagtacgaaaaacttatat

SEQ ID NO: 5929686 - DNA, 25 bp, Homo sapien
atacatattagattacgaaaaaagt

SEQ ID NO: 5929687 - DNA, 25 bp, Homo sapien
tttttataacttatatcgaacgata

SEQ ID NO: 5929688 - DNA, 25 bp, Homo sapien
tatattaaatcgtttactggtaaaa

SEQ ID NO: 5929689 - DNA, 25 bp, Homo sapien
tttctttcattacgtaataatcatt

SEQ ID NO: 5929690 - DNA, 25 bp, Homo sapien
taaaagatacgaatattgtaactaa

SEQ ID NO: 5929691 - DNA, 25 bp, Homo sapien
ttatatcaaattcgtaattatcaac

SEQ ID NO: 5929692 - DNA, 25 bp, Homo sapien
tatgaatttcgttataactaattac

SEQ ID NO: 5929693 - DNA, 25 bp, Homo sapien
atattcttaatcgaaaaattccatt

SEQ ID NO: 5929694 - DNA, 25 bp, Homo sapien
atacatatcgttattagaaatactt

SEQ ID NO: 5929695 - DNA, 25 bp, Homo sapien
aattgtattatcggttagaatttta

SEQ ID NO: 5929696 - DNA, 25 bp, Homo sapien
agtaatccgaatatttagtttataa

SEQ ID NO: 5929697 - DNA, 25 bp, Homo sapien
atatatattaagaaattcgtcaatg

SEQ ID NO: 5929698 - DNA, 25 bp, Homo sapien
caaactagtttaatcgttattatat

SEQ ID NO: 5929699 - DNA, 25 bp, Homo sapien
cttaattctcgattcaattattaaa

SEQ ID NO: 5929700 - DNA, 25 bp, Homo sapien
tttagaattttacgcgaataattta

SEQ ID NO: 5929701 - DNA, 25 bp, Homo sapien
tatcttaatcgatctaaatacattt

SEQ ID NO: 5929702 - DNA, 25 bp, Homo sapien
atagatatatctttcgataaaaaca

SEQ ID NO: 5929703 - DNA, 25 bp, Homo sapien
ttttttcgaaattgataattgcaaa

SEQ ID NO: 5929704 - DNA, 25 bp, Homo sapien
taatttattcgttatacctagtaat

SEQ ID NO: 5929705 - DNA, 25 bp, Homo sapien
aatagttataacattaacgattcaa

SEQ ID NO: 5929706 - DNA, 25 bp, Homo sapien
actctacgcaatatttaataaaaat

SEQ ID NO: 5929707 - DNA, 25 bp, Homo sapien
acttctataacaattcgaatttaaa

SEQ ID NO: 5929708 - DNA, 25 bp, Homo sapien
tatttttatgtcgtcgtataatata

SEQ ID NO: 5929709 - DNA, 25 bp, Homo sapien
aaatattagtcgtaatttatgatct

SEQ ID NO: 5929710 - DNA, 25 bp, Homo sapien
agattcgaataacattaaactaaat

SEQ ID NO: 5929711 - DNA, 25 bp, Homo sapien
attcttatcgactattatattagta

SEQ ID NO: 5929712 - DNA, 25 bp, Homo sapien
actttatactaattattcgattgaa

SEQ ID NO: 5929713 - DNA, 25 bp, Homo sapien
taaaaatcgacaattagtattaact

SEQ ID NO: 5929714 - DNA, 25 bp, Homo sapien
ctaatattatacgaattactatcat

SEQ ID NO: 5929715 - DNA, 25 bp, Homo sapien
tttataattatcaatttcgaaaagg

SEQ ID NO: 5929716 - DNA, 25 bp, Homo sapien
ttaaatttcgaccttattatatatg

SEQ ID NO: 5929717 - DNA, 25 bp, Homo sapien
ttttaacttattaatccgatttcaa

SEQ ID NO: 5929718 - DNA, 25 bp, Homo sapien
gttctctataacgatattattaatt

SEQ ID NO: 5929719 - DNA, 25 bp, Homo sapien
aaactatcaattttcgttatttcaa

SEQ ID NO: 5929720 - DNA, 25 bp, Homo sapien
aaagttatatcgaaagagtatttta

SEQ ID NO: 5929721 - DNA, 25 bp, Homo sapien
cttatactattcgtattaatattca

SEQ ID NO: 5929722 - DNA, 25 bp, Homo sapien
aatagttagtattattcgattaatg

SEQ ID NO: 5929723 - DNA, 25 bp, Homo sapien
ttttaatcgtatatagaatctagta

SEQ ID NO: 5929724 - DNA, 25 bp, Homo sapien
agaataatttatcggtcaataaaat

SEQ ID NO: 5929725 - DNA, 25 bp, Homo sapien
gttagataataattcggataaatat

SEQ ID NO: 5929726 - DNA, 25 bp, Homo sapien
gtgttatacgataactatattaatt

SEQ ID NO: 5929727 - DNA, 25 bp, Homo sapien
atgagaagatattatcgtatttatt

SEQ ID NO: 5929728 - DNA, 25 bp, Homo sapien
atacattgattagtcgtaatatatt

SEQ ID NO: 5929729 - DNA, 25 bp, Homo sapien
caatctactcgtattaattaaattt

SEQ ID NO: 5929730 - DNA, 25 bp, Homo sapien
aaaacatagtgttatacgtatataa

SEQ ID NO: 5929731 - DNA, 25 bp, Homo sapien
acacttacttatatcgattatttta

SEQ ID NO: 5929732 - DNA, 25 bp, Homo sapien
actttttaattaatactcgattaga

SEQ ID NO: 5929733 - DNA, 25 bp, Homo sapien
aatttatactgattatcgtacaatt

SEQ ID NO: 5929734 - DNA, 25 bp, Homo sapien
ttgcttcttatcgaataatattata

SEQ ID NO: 5929735 - DNA, 25 bp, Homo sapien
ttcaaatattattacgagttgtatt

SEQ ID NO: 5929736 - DNA, 25 bp, Homo sapien
tacctgatacgaattaattaatata

SEQ ID NO: 5929737 - DNA, 25 bp, Homo sapien
agtaaattatgaatcgtataagaaa

SEQ ID NO: 5929738 - DNA, 25 bp, Homo sapien
ataatatcgattaattgttacactt

SEQ ID NO: 5929739 - DNA, 25 bp, Homo sapien
aataagacgtataagataattaatg

SEQ ID NO: 5929740 - DNA, 25 bp, Homo sapien
tatgtttataaattacgactgatat

SEQ ID NO: 5929741 - DNA, 25 bp, Homo sapien
tatcatataatataacatcggttta

SEQ ID NO: 5929742 - DNA, 25 bp, Homo sapien
ttatttatatcgaacaatagagtta

SEQ ID NO: 5929743 - DNA, 25 bp, Homo sapien
tatttttcgattaatcattaggata

SEQ ID NO: 5929744 - DNA, 25 bp, Homo sapien
aagtataatatacgataagaattca

SEQ ID NO: 5929745 - DNA, 25 bp, Homo sapien
ttataattatccgcatatttgaatt

SEQ ID NO: 5929746 - DNA, 25 bp, Homo sapien
atctatattaattatcggtttagta

SEQ ID NO: 5929747 - DNA, 25 bp, Homo sapien
tctataaatcgttatcgtaaaaaaa

SEQ ID NO: 5929748 - DNA, 25 bp, Homo sapien
agaattgattatagcgatatatata

SEQ ID NO: 5929749 - DNA, 25 bp, Homo sapien
attatatttattgatatcgtcctat

SEQ ID NO: 5929750 - DNA, 25 bp, Homo sapien
gaattgatcgaaaatttttactata

SEQ ID NO: 5929751 - DNA, 25 bp, Homo sapien
ataaaattcgacaaataaacatgaa

SEQ ID NO: 5929752 - DNA, 25 bp, Homo sapien
ttaaatatgaatttttacgaaagct

SEQ ID NO: 5929753 - DNA, 25 bp, Homo sapien
atatgtttaacgacttatcaaaatt

SEQ ID NO: 5929754 - DNA, 25 bp, Homo sapien
tgtatttcgaactaataaaaagatt

SEQ ID NO: 5929755 - DNA, 25 bp, Homo sapien
catctcgtaaattagattaataaaa

SEQ ID NO: 5929756 - DNA, 25 bp, Homo sapien
agattattaatcgtagtaattctaa

SEQ ID NO: 5929757 - DNA, 25 bp, Homo sapien
catatataataaggtcgaaatttaa

SEQ ID NO: 5929758 - DNA, 25 bp, Homo sapien
atagatatcggataataatatactt

SEQ ID NO: 5929759 - DNA, 25 bp, Homo sapien
aaatagttattatatcgagactata

SEQ ID NO: 5929760 - DNA, 25 bp, Homo sapien
aaagcattattcgtactaattaaaa

SEQ ID NO: 5929761 - DNA, 25 bp, Homo sapien
gtaattagttataacgaaattcata

SEQ ID NO: 5929762 - DNA, 25 bp, Homo sapien
caattaattatccgattatagaata

SEQ ID NO: 5929763 - DNA, 25 bp, Homo sapien
taaaactattataaatcgactacat

SEQ ID NO: 5929764 - DNA, 25 bp, Homo sapien
ttatatatatcgattagaatacaca

SEQ ID NO: 5929765 - DNA, 25 bp, Homo sapien
aatttatagtacgatataatcattg

SEQ ID NO: 5929766 - DNA, 25 bp, Homo sapien
ttcattacataattaatcgaacttt

SEQ ID NO: 5929767 - DNA, 25 bp, Homo sapien
ttgtttctaacgatttaaattacta

SEQ ID NO: 5929768 - DNA, 25 bp, Homo sapien
aaagaattatatgacgatattttct

SEQ ID NO: 5929769 - DNA, 25 bp, Homo sapien
aatagataaaatttagcgaataaca

SEQ ID NO: 5929770 - DNA, 25 bp, Homo sapien
agtaacgtatgttaagattaattaa

SEQ ID NO: 5929771 - DNA, 25 bp, Homo sapien
atttcattatatcgaacataaaaga

SEQ ID NO: 5929772 - DNA, 25 bp, Homo sapien
aagaattacattatatcgaatagat

SEQ ID NO: 5929773 - DNA, 25 bp, Homo sapien
atcatgtattactataacgatatat

SEQ ID NO: 5929774 - DNA, 25 bp, Homo sapien
aatttatttaacggtaatacatcaa

SEQ ID NO: 5929775 - DNA, 25 bp, Homo sapien
tttacgtttcgtaatataatagtat

SEQ ID NO: 5929776 - DNA, 25 bp, Homo sapien
agaatatatcgaaatctaatctata

SEQ ID NO: 5929777 - DNA, 25 bp, Homo sapien
atgtaataataacaattcgtttgta

SEQ ID NO: 5929778 - DNA, 25 bp, Homo sapien
tataattatacgaacaactaattga

SEQ ID NO: 5929779 - DNA, 25 bp, Homo sapien
attaattaatactaaacgatatctc

SEQ ID NO: 5929780 - DNA, 25 bp, Homo sapien
tactaatagatcgaatctaatattt

SEQ ID NO: 5929781 - DNA, 25 bp, Homo sapien
attaacgaatagttagtatatttac

SEQ ID NO: 5929782 - DNA, 25 bp, Homo sapien
cattaatcgaataatactaactatt

SEQ ID NO: 5929783 - DNA, 25 bp, Homo sapien
taatttttaatatcgaactacgtat

SEQ ID NO: 5929784 - DNA, 25 bp, Homo sapien
ttcatccgattataatatcatatat

SEQ ID NO: 5929785 - DNA, 25 bp, Homo sapien
gactattatatcgaaaatcaatatt

SEQ ID NO: 5929786 - DNA, 25 bp, Homo sapien
ttgttatcgtataattatcaattac

SEQ ID NO: 5929787 - DNA, 25 bp, Homo sapien
tatgaaattaacgtaatagtcatta

SEQ ID NO: 5929788 - DNA, 25 bp, Homo sapien
ttaagcttatatataaacgttgttt

SEQ ID NO: 5929789 - DNA, 25 bp, Homo sapien
cattgttaatcgaataactttatta

SEQ ID NO: 5929790 - DNA, 25 bp, Homo sapien
attcaatattatatcggtatttaac

SEQ ID NO: 5929791 - DNA, 25 bp, Homo sapien
atttttattaaatattgcgtagagt

SEQ ID NO: 5929792 - DNA, 25 bp, Homo sapien
ttatatacgtataacactatgtttt

SEQ ID NO: 5929793 - DNA, 25 bp, Homo sapien
ttcaatcgaataattagtataaagt

SEQ ID NO: 5929794 - DNA, 25 bp, Homo sapien
tttctatataacttagacgaaaaat

SEQ ID NO: 5929795 - DNA, 25 bp, Homo sapien
tttatgtaataattaacgttgtgtt

SEQ ID NO: 5929796 - DNA, 25 bp, Homo sapien
taaattattcgcgtaaaattctaaa

SEQ ID NO: 5929797 - DNA, 25 bp, Homo sapien
ttattttcggataaattaattagct

SEQ ID NO: 5929798 - DNA, 25 bp, Homo sapien
ttagttacaatattcgtatctttta

SEQ ID NO: 5929799 - DNA, 25 bp, Homo sapien
ttagttattaaacgtatatcatact

SEQ ID NO: 5929800 - DNA, 25 bp, Homo sapien
atgttttatatagcgtaataatact

SEQ ID NO: 5929801 - DNA, 25 bp, Homo sapien
aaatttataaatttacgatgtagtg

SEQ ID NO: 5929802 - DNA, 25 bp, Homo sapien
aaatgtatttagatcgattaagata

SEQ ID NO: 5929803 - DNA, 25 bp, Homo sapien
ttgtaattaaattatccgatcatta

SEQ ID NO: 5929804 - DNA, 25 bp, Homo sapien
attactaacgattagataatgtata

SEQ ID NO: 5929805 - DNA, 25 bp, Homo sapien
atattgtacattaataatcgagatt

SEQ ID NO: 5929806 - DNA, 25 bp, Homo sapien
atgttttatatgcgatttattactt

SEQ ID NO: 5929807 - DNA, 25 bp, Homo sapien
ttataaactaaatattcggattact

SEQ ID NO: 5929808 - DNA, 25 bp, Homo sapien
acttttttcgtaatctaatatgtat

SEQ ID NO: 5929809 - DNA, 25 bp, Homo sapien
aaataacgtaataatctaattgtgt

SEQ ID NO: 5929810 - DNA, 25 bp, Homo sapien
atgtaataaattgtcgattaattag

SEQ ID NO: 5929811 - DNA, 25 bp, Homo sapien
aagtatttctaataacgatatgtat

SEQ ID NO: 5929812 - DNA, 25 bp, Homo sapien
atagaactatatcgatttattcaat

SEQ ID NO: 5929813 - DNA, 25 bp, Homo sapien
atttatcattatataatcgatcagt

SEQ ID NO: 5929814 - DNA, 25 bp, Homo sapien
atattgtatatcgcaataattcaat

SEQ ID NO: 5929815 - DNA, 25 bp, Homo sapien
attacataatcattacgaaatacta

SEQ ID NO: 5929816 - DNA, 25 bp, Homo sapien
ttaaatagaattaacgattacctta

SEQ ID NO: 5929817 - DNA, 25 bp, Homo sapien
tttaacgttcaaaatttgatctatt

SEQ ID NO: 5929818 - DNA, 25 bp, Homo sapien
tactatcgaaataaactatacatta

SEQ ID NO: 5929819 - DNA, 25 bp, Homo sapien
aatggatcgtatattaatctataat

SEQ ID NO: 5929820 - DNA, 25 bp, Homo sapien
ttgaatcgttaatgttataactatt

SEQ ID NO: 5929821 - DNA, 25 bp, Homo sapien
aatatttgtaatacgatatagttac

SEQ ID NO: 5929822 - DNA, 25 bp, Homo sapien
ttgactcgatattataatactattt

SEQ ID NO: 5929823 - DNA, 25 bp, Homo sapien
gtttaagatattatcgtaaattaca

SEQ ID NO: 5929824 - DNA, 25 bp, Homo sapien
tttcatagattaaatattcgatgta

SEQ ID NO: 5929825 - DNA, 25 bp, Homo sapien
atttattatgctaatcgttagtttt

SEQ ID NO: 5929826 - DNA, 25 bp, Homo sapien
aaatattattgcgcattatcaaaaa

SEQ ID NO: 5929827 - DNA, 25 bp, Homo sapien
aattgttaatcgaacttaatacatt

SEQ ID NO: 5929828 - DNA, 25 bp, Homo sapien
gttgataattacgaatttgatataa

SEQ ID NO: 5929829 - DNA, 25 bp, Homo sapien
ccaatcattacgaatataataaatt

SEQ ID NO: 5929830 - DNA, 25 bp, Homo sapien
tactaatataatagtcgataagaat

SEQ ID NO: 5929831 - DNA, 25 bp, Homo sapien
aaacaattgtcgtaatcaaataaat

SEQ ID NO: 5929832 - DNA, 25 bp, Homo sapien
gtttaaaattacgataatacttaca

SEQ ID NO: 5929833 - DNA, 25 bp, Homo sapien
actaaacgttgtatattaacattaa

SEQ ID NO: 5929834 - DNA, 25 bp, Homo sapien
aatcatcttatacgatataaagaaa

SEQ ID NO: 5929835 - DNA, 25 bp, Homo sapien
tataacttattgttaacggatatat

SEQ ID NO: 5929836 - DNA, 25 bp, Homo sapien
tatgattataacgtctatagaaatt

SEQ ID NO: 5929837 - DNA, 25 bp, Homo sapien
cttaacgaataatatactaaataga

SEQ ID NO: 5929838 - DNA, 25 bp, Homo sapien
aaacaagtaaattattcgatattga

SEQ ID NO: 5929839 - DNA, 25 bp, Homo sapien
ttatctattaacaatcgtaatcata

SEQ ID NO: 5929840 - DNA, 25 bp, Homo sapien
gttaataatattatacgcacttttt

SEQ ID NO: 5929841 - DNA, 25 bp, Homo sapien
aatatttaattattagacgatgtac

SEQ ID NO: 5929842 - DNA, 25 bp, Homo sapien
tggtattatcgataattagttattt

SEQ ID NO: 5929843 - DNA, 25 bp, Homo sapien
tagtaaatagatatcgtatttagat

SEQ ID NO: 5929844 - DNA, 25 bp, Homo sapien
ttcaaaaactaatcgtatatcttat

SEQ ID NO: 5929845 - DNA, 25 bp, Homo sapien
taattaacttcgactaaaagataaa

SEQ ID NO: 5929846 - DNA, 25 bp, Homo sapien
gtaaaatcgttatatgttatatcta

SEQ ID NO: 5929847 - DNA, 25 bp, Homo sapien
ccttttcgaaattgataattataaa

SEQ ID NO: 5929848 - DNA, 25 bp, Homo sapien
aatgtattagattacgaaaataaga

SEQ ID NO: 5929849 - DNA, 25 bp, Homo sapien
ttcaaattaacttaactcgaatata

SEQ ID NO: 5929850 - DNA, 25 bp, Homo sapien
tttgcaaccgaatatataatttttt

SEQ ID NO: 5929851 - DNA, 25 bp, Homo sapien
aatattaggaatctatatcgatttt

SEQ ID NO: 5929852 - DNA, 25 bp, Homo sapien
aaaagttatcgttaatctataagat

SEQ ID NO: 5929853 - DNA, 25 bp, Homo sapien
atcaatcgtaataaactaataatac

SEQ ID NO: 5929854 - DNA, 25 bp, Homo sapien
gattaatcttcgaaatattacttta

SEQ ID NO: 5929855 - DNA, 25 bp, Homo sapien
taattgaacgtataaagtttttaga

SEQ ID NO: 5929856 - DNA, 25 bp, Homo sapien
ttttatattgaaaattcgacctaat

SEQ ID NO: 5929857 - DNA, 25 bp, Homo sapien
tctcattaatccgaatatataaatt

SEQ ID NO: 5929858 - DNA, 25 bp, Homo sapien
attatcgaatatttacgttaatgta

SEQ ID NO: 5929859 - DNA, 25 bp, Homo sapien
aaataagttatattaatacgtccta

SEQ ID NO: 5929860 - DNA, 25 bp, Homo sapien
ttgtaagttataaatcgaaacaaaa

SEQ ID NO: 5929861 - DNA, 25 bp, Homo sapien
ttatattgtctaatacttcgataaa

SEQ ID NO: 5929862 - DNA, 25 bp, Homo sapien
agttaatactaattgtcgattttta

SEQ ID NO: 5929863 - DNA, 25 bp, Homo sapien
gtaaacgtatattacaagattttta

SEQ ID NO: 5929864 - DNA, 25 bp, Homo sapien
tacatataacatctacgatatttat

SEQ ID NO: 5929865 - DNA, 25 bp, Homo sapien
tacttattcgcattaaatagataaa

SEQ ID NO: 5929866 - DNA, 25 bp, Homo sapien
ttacaatattaattaatcgctaatg

SEQ ID NO: 5929867 - DNA, 25 bp, Homo sapien
ttttaccagtaaacgatttaatata

SEQ ID NO: 5929868 - DNA, 25 bp, Homo sapien
agatcataaattacgactaatattt

SEQ ID NO: 5929869 - DNA, 25 bp, Homo sapien
aagattagattaattatgcgaaaaa

SEQ ID NO: 5929870 - DNA, 25 bp, Homo sapien
ataaaagatatataaatcgagattg

SEQ ID NO: 5929871 - DNA, 25 bp, Homo sapien
tatttttagttcgataataaagaga

SEQ ID NO: 5929872 - DNA, 25 bp, Homo sapien
aatcaataattaaatccgttacata

SEQ ID NO: 5929873 - DNA, 25 bp, Homo sapien
ttatctaacttatattcgaagaata

SEQ ID NO: 5929874 - DNA, 25 bp, Homo sapien
ataaataattattctaatcgtcaga

SEQ ID NO: 5929875 - DNA, 25 bp, Homo sapien
tattatattcggataaatccaataa

SEQ ID NO: 5929876 - DNA, 25 bp, Homo sapien
aataaataatttcgatagttctagt

SEQ ID NO: 5929877 - DNA, 25 bp, Homo sapien
tcttatattagattcgaaaatttag

SEQ ID NO: 5929878 - DNA, 25 bp, Homo sapien
ttgtagattcgttaaactattttta

SEQ ID NO: 5929879 - DNA, 25 bp, Homo sapien
ttatgtatcaacgaatattattttc

SEQ ID NO: 5929880 - DNA, 25 bp, Homo sapien
aaacacgctctaatataatatattt

SEQ ID NO: 5929881 - DNA, 25 bp, Homo sapien
tgtttaagcgacttataatttttaa

SEQ ID NO: 5929882 - DNA, 25 bp, Homo sapien
agtaatattataataccgatttaag

SEQ ID NO: 5929883 - DNA, 25 bp, Homo sapien
aactttaatcaaacgtatagaaata

SEQ ID NO: 5929884 - DNA, 25 bp, Homo sapien
agataattaatcgtcaaatagtaat

SEQ ID NO: 5929885 - DNA, 25 bp, Homo sapien
tatagtaagagaattacgatatttt

SEQ ID NO: 5929886 - DNA, 25 bp, Homo sapien
cattgacgaatttcttaatatatat

SEQ ID NO: 5929887 - DNA, 25 bp, Homo sapien
tagtcataataactttcgaaaaata

SEQ ID NO: 5929888 - DNA, 25 bp, Homo sapien
ctgtacttaatataattacgaaata

SEQ ID NO: 5929889 - DNA, 25 bp, Homo sapien
attgtacgaattaacttaaatttga

SEQ ID NO: 5929890 - DNA, 25 bp, Homo sapien
aaaattattcgaacttattatagga

SEQ ID NO: 5929891 - DNA, 25 bp, Homo sapien
attttattgaccgataaattattct

SEQ ID NO: 5929892 - DNA, 25 bp, Homo sapien
gtttaaactaataatttcgatcaaa

SEQ ID NO: 5929893 - DNA, 25 bp, Homo sapien
aatatacctttcgatattaaaagta

SEQ ID NO: 5929894 - DNA, 25 bp, Homo sapien
atatttatccgaattattatctaac

SEQ ID NO: 5929895 - DNA, 25 bp, Homo sapien
aataaatacgataatatcttctcat

SEQ ID NO: 5929896 - DNA, 25 bp, Homo sapien
atagtatcaatttttcgttaaacat

SEQ ID NO: 5929897 - DNA, 25 bp, Homo sapien
tatttttaaagagcaatacgttaaa

SEQ ID NO: 5929898 - DNA, 25 bp, Homo sapien
atttagtttaatgttattcgaatct

SEQ ID NO: 5929899 - DNA, 25 bp, Homo sapien
ataatttcgatattaatactgtttc

SEQ ID NO: 5929900 - DNA, 25 bp, Homo sapien
ctttaacgaaatacattaatgattt

SEQ ID NO: 5929901 - DNA, 25 bp, Homo sapien
ataaatatcgattatctatggatat

SEQ ID NO: 5929902 - DNA, 25 bp, Homo sapien
tgttctattaaattaaccgtataat

SEQ ID NO: 5929903 - DNA, 25 bp, Homo sapien
aactgtattatattaacgtcaatta

SEQ ID NO: 5929904 - DNA, 25 bp, Homo sapien
tatattatacgacgacataaaaata

SEQ ID NO: 5929905 - DNA, 25 bp, Homo sapien
ttctataatatagtcgaattgattt

SEQ ID NO: 5929906 - DNA, 25 bp, Homo sapien
tttaaattcgaattgttatagaagt

SEQ ID NO: 5929907 - DNA, 25 bp, Homo sapien
taatatacgaattatgtatcagata

SEQ ID NO: 5929908 - DNA, 25 bp, Homo sapien
taggtacttaatataattcgattat

SEQ ID NO: 5929909 - DNA, 25 bp, Homo sapien
ttattcgttaattagtaacagaata

SEQ ID NO: 5929910 - DNA, 25 bp, Homo sapien
taaaatattatcgcattagaactat

SEQ ID NO: 5929911 - DNA, 25 bp, Homo sapien
tttacttcgattaatatcatgattt

SEQ ID NO: 5929912 - DNA, 25 bp, Homo sapien
ctatataatcgttgataagaaaatt

SEQ ID NO: 5929913 - DNA, 25 bp, Homo sapien
tttatttcgattaatatgttgactt

SEQ ID NO: 5929914 - DNA, 25 bp, Homo sapien
ttgattattaatttagcgttttact

SEQ ID NO: 5929915 - DNA, 25 bp, Homo sapien
aattaatatagttatcgtataacac

SEQ ID NO: 5929916 - DNA, 25 bp, Homo sapien
ttcatataaagtattcgaaaacata

SEQ ID NO: 5929917 - DNA, 25 bp, Homo sapien
gatttgtatttaaactcgatatttt

SEQ ID NO: 5929918 - DNA, 25 bp, Homo sapien
tcgatttagattacgaataataatt

SEQ ID NO: 5929919 - DNA, 25 bp, Homo sapien
catattaattaacggatataaatca

SEQ ID NO: 5929920 - DNA, 25 bp, Homo sapien
aattaatagacgaatttgataaaag

SEQ ID NO: 5929921 - DNA, 25 bp, Homo sapien
tatattaatcgatcattatatgcaa

SEQ ID NO: 5929922 - DNA, 25 bp, Homo sapien
aaaattcgcaatctagataattaat

SEQ ID NO: 5929923 - DNA, 25 bp, Homo sapien
aatggaatttttcgattaagaatat

SEQ ID NO: 5929924 - DNA, 25 bp, Homo sapien
tagattatcgaatattacaaaaatg

SEQ ID NO: 5929925 - DNA, 25 bp, Homo sapien
ttagtattacgattaagtatagata

SEQ ID NO: 5929926 - DNA, 25 bp, Homo sapien
tataaatcgaacattataaaaggat

SEQ ID NO: 5929927 - DNA, 25 bp, Homo sapien
aacttatcgatagtacttaaataat

SEQ ID NO: 5929928 - DNA, 25 bp, Homo sapien
tctttttagattaacgatataaact

SEQ ID NO: 5929929 - DNA, 25 bp, Homo sapien
tgcaaatcgatttaatacaaataaa

SEQ ID NO: 5929930 - DNA, 25 bp, Homo sapien
cttattaatatggtaaatcgaataa

SEQ ID NO: 5929931 - DNA, 25 bp, Homo sapien
aatagcgattaatcattaaaatcat

SEQ ID NO: 5929932 - DNA, 25 bp, Homo sapien
atttgttatcgtaatatatcatagt

SEQ ID NO: 5929933 - DNA, 25 bp, Homo sapien
tagtaagttatatcgttattaatag

SEQ ID NO: 5929934 - DNA, 25 bp, Homo sapien
atcttcgcattattatagtatttta

SEQ ID NO: 5929935 - DNA, 25 bp, Homo sapien
gttatttaatcgtatatagtctata

SEQ ID NO: 5929936 - DNA, 25 bp, Homo sapien
aataaagatcaattttcgataattc

SEQ ID NO: 5929937 - DNA, 25 bp, Homo sapien
attccaattataaagttcgtaaata

SEQ ID NO: 5929938 - DNA, 25 bp, Homo sapien
attttttatcgtaatataacaccaa

SEQ ID NO: 5929939 - DNA, 25 bp, Homo sapien
tatcattcgaatctaattaatacaa

SEQ ID NO: 5929940 - DNA, 25 bp, Homo sapien
tttaataattgaatcgagaattaag

SEQ ID NO: 5929941 - DNA, 25 bp, Homo sapien
aatcaaatttgttcgtataacataa

SEQ ID NO: 5929942 - DNA, 25 bp, Homo sapien
attgatattcggttgaaatatttaa

SEQ ID NO: 5929943 - DNA, 25 bp, Homo sapien
tatcaagatatcgtagtaatattaa

SEQ ID NO: 5929944 - DNA, 25 bp, Homo sapien
atagacgatagttaatttataattc

SEQ ID NO: 5929945 - DNA, 25 bp, Homo sapien
attgttactatttacgatacttatt

SEQ ID NO: 5929946 - DNA, 25 bp, Homo sapien
tttagtaatgttaattcgatataca

SEQ ID NO: 5929947 - DNA, 25 bp, Homo sapien
tatgagtaattatacgaaataattc

SEQ ID NO: 5929948 - DNA, 25 bp, Homo sapien
aattaataatatcgttatagagaac

SEQ ID NO: 5929949 - DNA, 25 bp, Homo sapien
ttatctaataatgattcgtattcat

SEQ ID NO: 5929950 - DNA, 25 bp, Homo sapien
gaacatcaacgatatatataatttt

SEQ ID NO: 5929951 - DNA, 25 bp, Homo sapien
cattagcgtacataataattaatta

SEQ ID NO: 5929952 - DNA, 25 bp, Homo sapien
acatatatacgaaattagtaataca

SEQ ID NO: 5929953 - DNA, 25 bp, Homo sapien
ttactactaaattatcgatattttc

SEQ ID NO: 5929954 - DNA, 25 bp, Homo sapien
tttaaatatccgaatataatcttac

SEQ ID NO: 5929955 - DNA, 25 bp, Homo sapien
taagtttataatttcgatacattct

SEQ ID NO: 5929956 - DNA, 25 bp, Homo sapien
gattttataaatattcggaaaacaa

SEQ ID NO: 5929957 - DNA, 25 bp, Homo sapien
taaaacgtttaatcataaatgatca

SEQ ID NO: 5929958 - DNA, 25 bp, Homo sapien
taataatcatatcgaataatggtaa

SEQ ID NO: 5929959 - DNA, 25 bp, Homo sapien
taacaaacgatttatacgtaaataa

SEQ ID NO: 5929960 - DNA, 25 bp, Homo sapien
tgtgtgataattatacgatttaaat

SEQ ID NO: 5929961 - DNA, 25 bp, Homo sapien
ttgctttacgaaatactaatatatt

SEQ ID NO: 5929962 - DNA, 25 bp, Homo sapien
attgtatagattttcgacttttaat

SEQ ID NO: 5929963 - DNA, 25 bp, Homo sapien
ttgaaataacgaaaattgatagttt

SEQ ID NO: 5929964 - DNA, 25 bp, Homo sapien
agatatagcgaataatcatttaaat

SEQ ID NO: 5929965 - DNA, 25 bp, Homo sapien
acataacgataagacatattaataa

SEQ ID NO: 5929966 - DNA, 25 bp, Homo sapien
tattttattaatcataccgatgtta

SEQ ID NO: 5929967 - DNA, 25 bp, Homo sapien
caatattaatatcgtttagattcat

SEQ ID NO: 5929968 - DNA, 25 bp, Homo sapien
ttagattgttcgaaattaatactaa

SEQ ID NO: 5929969 - DNA, 25 bp, Homo sapien
cattatcgattcattaataacaatt

SEQ ID NO: 5929970 - DNA, 25 bp, Homo sapien
aatatatatcaattaaacgcttaac

SEQ ID NO: 5929971 - DNA, 25 bp, Homo sapien
ataagacgaaactaacataaattat

SEQ ID NO: 5929972 - DNA, 25 bp, Homo sapien
agaatcgaatcaataattatcataa

SEQ ID NO: 5929973 - DNA, 25 bp, Homo sapien
ctagaaattgtatattaacgattaa

SEQ ID NO: 5929974 - DNA, 25 bp, Homo sapien
cttttagttaatacaatacgattaa

SEQ ID NO: 5929975 - DNA, 25 bp, Homo sapien
taattaattagtatcgatattttgc

SEQ ID NO: 5929976 - DNA, 25 bp, Homo sapien
taatatataatctatccgaatacat

SEQ ID NO: 5929977 - DNA, 25 bp, Homo sapien
atataataacgattaaactagtttg

SEQ ID NO: 5929978 - DNA, 25 bp, Homo sapien
ttaattcgatttatataaactgaga

SEQ ID NO: 5929979 - DNA, 25 bp, Homo sapien
tacgtattgattatcgataatatat

SEQ ID NO: 5929980 - DNA, 25 bp, Homo sapien
attaccgattactattaattgaaat

SEQ ID NO: 5929981 - DNA, 25 bp, Homo sapien
aagcataattatcgatagttattta

SEQ ID NO: 5929982 - DNA, 25 bp, Homo sapien
tattaatatcgaatcgttagttttt

SEQ ID NO: 5929983 - DNA, 25 bp, Homo sapien
ttatagaattttcgttatagacatt

SEQ ID NO: 5929984 - DNA, 25 bp, Homo sapien
tataacataatatcgctaaaagttt

SEQ ID NO: 5929985 - DNA, 25 bp, Homo sapien
tatagtttagacgtattataataca

SEQ ID NO: 5929986 - DNA, 25 bp, Homo sapien
ttaattcgattattaatagattgct

SEQ ID NO: 5929987 - DNA, 25 bp, Homo sapien
attagtgttacgatatatagttatt

SEQ ID NO: 5929988 - DNA, 25 bp, Homo sapien
aatttaacttatacgatattgcata

SEQ ID NO: 5929989 - DNA, 25 bp, Homo sapien
atttatatattagacgaagttaatc

SEQ ID NO: 5929990 - DNA, 25 bp, Homo sapien
tattgtatctataagtttcgtaata

SEQ ID NO: 5929991 - DNA, 25 bp, Homo sapien
ttcaataatattattacgctgtatt

SEQ ID NO: 5929992 - DNA, 25 bp, Homo sapien
tactagattctatatacgattaaaa

SEQ ID NO: 5929993 - DNA, 25 bp, Homo sapien
tttaattacagcgatattattttag

SEQ ID NO: 5929994 - DNA, 25 bp, Homo sapien
tttatatcgaactagtatatctttt

SEQ ID NO: 5929995 - DNA, 25 bp, Homo sapien
atgaatatcgactattaaattttag

SEQ ID NO: 5929996 - DNA, 25 bp, Homo sapien
ataacatcatcgattaatttgataa

SEQ ID NO: 5929997 - DNA, 25 bp, Homo sapien
ctctttaatcgaacatataaaataa

SEQ ID NO: 5929998 - DNA, 25 bp, Homo sapien
attattatcgtaatagagtatagtt

SEQ ID NO: 5929999 - DNA, 25 bp, Homo sapien
ataaattataatattgtcgacctaa

SEQ ID NO: 5930000 - DNA, 25 bp, Homo sapien
tattgatattcgatctaatgttata

SEQ ID NO: 5930001 - DNA, 25 bp, Homo sapien
taaaattctaaccgataatacaatt

SEQ ID NO: 5930002 - DNA, 25 bp, Homo sapien
cttacagatattaatcgttaaaata

SEQ ID NO: 5930003 - DNA, 25 bp, Homo sapien
taaaatactctttcgatataacttt

SEQ ID NO: 5930004 - DNA, 25 bp, Homo sapien
atcattaataagtattatcgataga

SEQ ID NO: 5930005 - DNA, 25 bp, Homo sapien
tttcttagataattatcgtagttaa

SEQ ID NO: 5930006 - DNA, 25 bp, Homo sapien
attactaggtataacgaataaatta

SEQ ID NO: 5930007 - DNA, 25 bp, Homo sapien
ttaatttattgatagcgaatattct

SEQ ID NO: 5930008 - DNA, 25 bp, Homo sapien
gatagtcgaatataataagtttatt

SEQ ID NO: 5930009 - DNA, 25 bp, Homo sapien
aaatgtattacgagttaaatctaat

SEQ ID NO: 5930010 - DNA, 25 bp, Homo sapien
atagattatcgttaatttgagataa

SEQ ID NO: 5930011 - DNA, 25 bp, Homo sapien
atgatagtaattcgtataatattag

SEQ ID NO: 5930012 - DNA, 25 bp, Homo sapien
cttcatatagatttacgataaaaaa

SEQ ID NO: 5930013 - DNA, 25 bp, Homo sapien
agaatgcgaatttctttataattaa

SEQ ID NO: 5930014 - DNA, 25 bp, Homo sapien
atttaatcgcaataagtattatgtt

SEQ ID NO: 5930015 - DNA, 25 bp, Homo sapien
aatgaaaatttgattacgtcattta

SEQ ID NO: 5930016 - DNA, 25 bp, Homo sapien
ataaaatcgataatatcatacatga

SEQ ID NO: 5930017 - DNA, 25 bp, Homo sapien
gtttagaacgattatattaaaaatg

SEQ ID NO: 5930018 - DNA, 25 bp, Homo sapien
aatttatgtcgatcatattaaagta

SEQ ID NO: 5930019 - DNA, 25 bp, Homo sapien
tttagacaatttaatcgttaataga

SEQ ID NO: 5930020 - DNA, 25 bp, Homo sapien
ttaagatataaattcgtcgtatata

SEQ ID NO: 5930021 - DNA, 25 bp, Homo sapien
atcaatcggatataatattttacta

SEQ ID NO: 5930022 - DNA, 25 bp, Homo sapien
attagatatttacgatcaaatttgt

SEQ ID NO: 5930023 - DNA, 25 bp, Homo sapien
tgactataattaatattgcgtaata

SEQ ID NO: 5930024 - DNA, 25 bp, Homo sapien
taattactaatcgtatatatagaca

SEQ ID NO: 5930025 - DNA, 25 bp, Homo sapien
atatttaacgataatttatgcaaca

SEQ ID NO: 5930026 - DNA, 25 bp, Homo sapien
ttcttcgataaattatgaatagtat

SEQ ID NO: 5930027 - DNA, 25 bp, Homo sapien
acaatataatatatcaatcgatttc

SEQ ID NO: 5930028 - DNA, 25 bp, Homo sapien
gtctaaaatcttatcgaatttaatt

SEQ ID NO: 5930029 - DNA, 25 bp, Homo sapien
attactatacgaattatgataatac

SEQ ID NO: 5930030 - DNA, 25 bp, Homo sapien
ttttgatataactagtacgaaattt

SEQ ID NO: 5930031 - DNA, 25 bp, Homo sapien
ttttctacaatgattcgttaattat

SEQ ID NO: 5930032 - DNA, 25 bp, Homo sapien
atatatttatctagttacgaataag

SEQ ID NO: 5930033 - DNA, 25 bp, Homo sapien
tatttatcaattacgaatatgaaag

SEQ ID NO: 5930034 - DNA, 25 bp, Homo sapien
atatcataattttcgtagtaacaat

SEQ ID NO: 5930035 - DNA, 25 bp, Homo sapien
ctatatcgtagataaataatagaaa

SEQ ID NO: 5930036 - DNA, 25 bp, Homo sapien
aataatataattcgtaagtaactgt

SEQ ID NO: 5930037 - DNA, 25 bp, Homo sapien
tgtttttatcgaaagatatatctat

SEQ ID NO: 5930038 - DNA, 25 bp, Homo sapien
aactgcgaataaattgattaattat

SEQ ID NO: 5930039 - DNA, 25 bp, Homo sapien
atatctaatataatcgattgtagaa

SEQ ID NO: 5930040 - DNA, 25 bp, Homo sapien
tgaaataatttagaatcgtaatgtt

SEQ ID NO: 5930041 - DNA, 25 bp, Homo sapien
atttataacgatatatccttgtatt

SEQ ID NO: 5930042 - DNA, 25 bp, Homo sapien
tctatctataacgaatataaagtat

SEQ ID NO: 5930043 - DNA, 25 bp, Homo sapien
gtttcatatcgatctaaattaatat

SEQ ID NO: 5930044 - DNA, 25 bp, Homo sapien
tgttatcgataagttaaattatcat

SEQ ID NO: 5930045 - DNA, 25 bp, Homo sapien
atcttagttatcgaaaaatttgtta

SEQ ID NO: 5930046 - DNA, 25 bp, Homo sapien
tttttattcgattatagttatactg

SEQ ID NO: 5930047 - DNA, 25 bp, Homo sapien
attgattgaattcgttataagatta

SEQ ID NO: 5930048 - DNA, 25 bp, Homo sapien
ttcaaatataactatcgttaatgat

SEQ ID NO: 5930049 - DNA, 25 bp, Homo sapien
tctaatcgagtattaattaaaaagt

SEQ ID NO: 5930050 - DNA, 25 bp, Homo sapien
atttatataagttgattcgtttttc

SEQ ID NO: 5930051 - DNA, 25 bp, Homo sapien
aatcattaatctcgtaaataacaat

SEQ ID NO: 5930052 - DNA, 25 bp, Homo sapien
attaatattaatagtacgcaacatt

SEQ ID NO: 5930053 - DNA, 25 bp, Homo sapien
tgaatattaatacgaatagtataag

SEQ ID NO: 5930054 - DNA, 25 bp, Homo sapien
aatgattattacgtaatgaaagaaa

SEQ ID NO: 5930055 - DNA, 25 bp, Homo sapien
tttgcaattatcaatttcgaaaaaa

SEQ ID NO: 5930056 - DNA, 25 bp, Homo sapien
catgataattcgctaaataaatata

SEQ ID NO: 5930057 - DNA, 25 bp, Homo sapien
aatatattacgactaatcaatgtat

SEQ ID NO: 5930058 - DNA, 25 bp, Homo sapien
atcaattatatttgcgaatctttta

SEQ ID NO: 5930059 - DNA, 25 bp, Homo sapien
ttataccgttatattattaatgtga

SEQ ID NO: 5930060 - DNA, 25 bp, Homo sapien
tatcgttcgatataagttataaaaa

SEQ ID NO: 5930061 - DNA, 25 bp, Homo sapien
atcgataataactattcgaaaatat

SEQ ID NO: 5930062 - DNA, 25 bp, Homo sapien
taaagacatcgttatataatatcaa

SEQ ID NO: 5930063 - DNA, 25 bp, Homo sapien
ttagattttcgcgtataataatata

SEQ ID NO: 5930064 - DNA, 25 bp, Homo sapien
atataagtttttcgtactataatgt

SEQ ID NO: 5930065 - DNA, 25 bp, Homo sapien
ttctttaatatgcgactaaaaaaat

SEQ ID NO: 5930066 - DNA, 25 bp, Homo sapien
taaaataatcgatataagtaagtgt

SEQ ID NO: 5930067 - DNA, 25 bp, Homo sapien
taatataatgcgaattaaacagtaa

SEQ ID NO: 5930068 - DNA, 25 bp, Homo sapien
ttctaagcgattgatataaattatt

SEQ ID NO: 5930069 - DNA, 25 bp, Homo sapien
aagattattctaattaaacgttcaa

SEQ ID NO: 5930070 - DNA, 25 bp, Homo sapien
ataaaaatgatacggttatctatta

SEQ ID NO: 5930071 - DNA, 25 bp, Homo sapien
atttatcgtacttattaatatgaac

SEQ ID NO: 5930072 - DNA, 25 bp, Homo sapien
ttgaaatcggattaataagttaaaa

SEQ ID NO: 5930073 - DNA, 25 bp, Homo sapien
tcttaaatgattcgtaataattatc

SEQ ID NO: 5930074 - DNA, 25 bp, Homo sapien
cagtataatacgaacttataatata

SEQ ID NO: 5930075 - DNA, 25 bp, Homo sapien
tcgaatttatcgataactataaaaa

SEQ ID NO: 5930076 - DNA, 25 bp, Homo sapien
tcgaacattacgaaattataatata

SEQ ID NO: 5930077 - DNA, 25 bp, Homo sapien
taacttttcgataacataatgaata

SEQ ID NO: 5930078 - DNA, 25 bp, Homo sapien
aactagcttataatcgattattaat

SEQ ID NO: 5930079 - DNA, 25 bp, Homo sapien
aaatttaattaatacgagtagattg

SEQ ID NO: 5930080 - DNA, 25 bp, Homo sapien
atatcggttaaatacgatattataa

SEQ ID NO: 5930081 - DNA, 25 bp, Homo sapien
aattatcgtaaatcattatataagc

SEQ ID NO: 5930082 - DNA, 25 bp, Homo sapien
aatatttattagatctacgtctata

SEQ ID NO: 5930083 - DNA, 25 bp, Homo sapien
aattttgttaacatatcgtaactaa

SEQ ID NO: 5930084 - DNA, 25 bp, Homo sapien
tgttttaatattgacgagtaaattt

SEQ ID NO: 5930085 - DNA, 25 bp, Homo sapien
tacatataatatcgttaatctctat

SEQ ID NO: 5930086 - DNA, 25 bp, Homo sapien
tatgtaatatcgttaaactaatatc

SEQ ID NO: 5930087 - DNA, 25 bp, Homo sapien
tgttatcgagtattatatctaaaaa

SEQ ID NO: 5930088 - DNA, 25 bp, Homo sapien
acagatattatacgatactcttttt

SEQ ID NO: 5930089 - DNA, 25 bp, Homo sapien
tctacttactaatgaacgtaaaata

SEQ ID NO: 5930090 - DNA, 25 bp, Homo sapien
taaattcgataataactatggtatg

SEQ ID NO: 5930091 - DNA, 25 bp, Homo sapien
atgattacttaaatcgattagagaa

SEQ ID NO: 5930092 - DNA, 25 bp, Homo sapien
aataaatattcgtaaaattgtcgca

SEQ ID NO: 5930093 - DNA, 25 bp, Homo sapien
atttgattcgacttattataggata

SEQ ID NO: 5930094 - DNA, 25 bp, Homo sapien
agtttcattatatacgattaagact

SEQ ID NO: 5930095 - DNA, 25 bp, Homo sapien
gtaataaattagtagtcgatactta

SEQ ID NO: 5930096 - DNA, 25 bp, Homo sapien
ttttcgtcaatcgttatagaatata

SEQ ID NO: 5930097 - DNA, 25 bp, Homo sapien
ttgtataacttaaatatcgcagtaa

SEQ ID NO: 5930098 - DNA, 25 bp, Homo sapien
taatatcatatcgcgaattattgtt

SEQ ID NO: 5930099 - DNA, 25 bp, Homo sapien
tattaactacgatattaactacatg

SEQ ID NO: 5930100 - DNA, 25 bp, Homo sapien
tgttttatcgaattgttaatatacg

SEQ ID NO: 5930101 - DNA, 25 bp, Homo sapien
catttgcgtatcaataataatactt

SEQ ID NO: 5930102 - DNA, 25 bp, Homo sapien
gtttctaattgtcgtataaacaata

SEQ ID NO: 5930103 - DNA, 25 bp, Homo sapien
atgctattttttatacgcgaattat

SEQ ID NO: 5930104 - DNA, 25 bp, Homo sapien
taaaattaatcgatcactaaaatcc

SEQ ID NO: 5930105 - DNA, 25 bp, Homo sapien
atctctaatcgaatgttaatttcta

SEQ ID NO: 5930106 - DNA, 25 bp, Homo sapien
atttaattattgtcgaatcacgatt

SEQ ID NO: 5930107 - DNA, 25 bp, Homo sapien
attggtaatttcgaataaacatgaa

SEQ ID NO: 5930108 - DNA, 25 bp, Homo sapien
acaaaattcgtatagtagtacaaat

SEQ ID NO: 5930109 - DNA, 25 bp, Homo sapien
cattgcgaattatagtatttgttaa

SEQ ID NO: 5930110 - DNA, 25 bp, Homo sapien
ccacatatattgattaacgtattaa

SEQ ID NO: 5930111 - DNA, 25 bp, Homo sapien
gatatattaatcggatattacagat

SEQ ID NO: 5930112 - DNA, 25 bp, Homo sapien
aataaacgaaaattgcacttagtat

SEQ ID NO: 5930113 - DNA, 25 bp, Homo sapien
ggatatcggacttttaataaattaa

SEQ ID NO: 5930114 - DNA, 25 bp, Homo sapien
tcttgcgtcgaattaatataaataa

SEQ ID NO: 5930115 - DNA, 25 bp, Homo sapien
taaatctgacgatattacaaatgta

SEQ ID NO: 5930116 - DNA, 25 bp, Homo sapien
catacaaataatagttcgattcaaa

SEQ ID NO: 5930117 - DNA, 25 bp, Homo sapien
aacatgattttttatcgtaaatcac

SEQ ID NO: 5930118 - DNA, 25 bp, Homo sapien
ttgctatcaatttttcgaaagaaaa

SEQ ID NO: 5930119 - DNA, 25 bp, Homo sapien
ttattaaatagtcgtgtatatcgtt

SEQ ID NO: 5930120 - DNA, 25 bp, Homo sapien
taagatattaatattcgactcctaa

SEQ ID NO: 5930121 - DNA, 25 bp, Homo sapien
tatattagattaacgtaacggaaat

SEQ ID NO: 5930122 - DNA, 25 bp, Homo sapien
tcaatgaacctttaatcgtattatt

SEQ ID NO: 5930123 - DNA, 25 bp, Homo sapien
ttataattccgattacttttgaatg

SEQ ID NO: 5930124 - DNA, 25 bp, Homo sapien
agaaaactaactacgtaaatcataa

SEQ ID NO: 5930125 - DNA, 25 bp, Homo sapien
agaatttatgcgaaatttatcctaa

SEQ ID NO: 5930126 - DNA, 25 bp, Homo sapien
ttaacaatcaattgtatcgttatgt

SEQ ID NO: 5930127 - DNA, 25 bp, Homo sapien
attagatcgtaatatgtaaattgca

SEQ ID NO: 5930128 - DNA, 25 bp, Homo sapien
ttacagtaaatcgaacaataattga

SEQ ID NO: 5930129 - DNA, 25 bp, Homo sapien
tttccattattcgatataggatttt

SEQ ID NO: 5930130 - DNA, 25 bp, Homo sapien
tcatcaatatacgattcgtaatata

SEQ ID NO: 5930131 - DNA, 25 bp, Homo sapien
tcataatttacgatatacgataact

SEQ ID NO: 5930132 - DNA, 25 bp, Homo sapien
ctttataaacgctatatcatgtttt

SEQ ID NO: 5930133 - DNA, 25 bp, Homo sapien
tactattacttaataacgcttagta

SEQ ID NO: 5930134 - DNA, 25 bp, Homo sapien
tatataacattacgcttatgatatc

SEQ ID NO: 5930135 - DNA, 25 bp, Homo sapien
taaattttgatcgcataagtcataa

SEQ ID NO: 5930136 - DNA, 25 bp, Homo sapien
tatactcgaagttatcataataaca

SEQ ID NO: 5930137 - DNA, 25 bp, Homo sapien
aagcacgaataagtaattatttgtt

SEQ ID NO: 5930138 - DNA, 25 bp, Homo sapien
atatataaggacgttacaaatagat

SEQ ID NO: 5930139 - DNA, 25 bp, Homo sapien
agttacgtataattattaagtagct

SEQ ID NO: 5930140 - DNA, 25 bp, Homo sapien
tgaaaattatcgtttatcaacttgt

SEQ ID NO: 5930141 - DNA, 25 bp, Homo sapien
gatgaaatcgtttatgctatattta

SEQ ID NO: 5930142 - DNA, 25 bp, Homo sapien
aaaaatatattatccaaacgagact

SEQ ID NO: 5930143 - DNA, 25 bp, Homo sapien
taacttactataacgatttataacc

SEQ ID NO: 5930144 - DNA, 25 bp, Homo sapien
aataatcaacttagttcgaactaaa

SEQ ID NO: 5930145 - DNA, 25 bp, Homo sapien
taaatgcgttatatttcactgataa

SEQ ID NO: 5930146 - DNA, 25 bp, Homo sapien
caaatattagtcacatcgtatatat

SEQ ID NO: 5930147 - DNA, 25 bp, Homo sapien
ataattttcgattataatgacgctt

SEQ ID NO: 5930148 - DNA, 25 bp, Homo sapien
gataattataatctcgatatgctat

SEQ ID NO: 5930149 - DNA, 25 bp, Homo sapien
ttacaatctacgattataatgtcta

SEQ ID NO: 5930150 - DNA, 25 bp, Homo sapien
tgaaattcgactatagataactatt

SEQ ID NO: 5930151 - DNA, 25 bp, Homo sapien
tgatatctaattattaatcgtgcat

SEQ ID NO: 5930152 - DNA, 25 bp, Homo sapien
aaatgagtaatatctatacgaatac

SEQ ID NO: 5930153 - DNA, 25 bp, Homo sapien
tattgaattcggaactatataacta

SEQ ID NO: 5930154 - DNA, 25 bp, Homo sapien
aaatatcaaatcgatacgtttactt

SEQ ID NO: 5930155 - DNA, 25 bp, Homo sapien
gtaattataatcgccttatttaaag

SEQ ID NO: 5930156 - DNA, 25 bp, Homo sapien
ttatgtataatttcgcataatacga

SEQ ID NO: 5930157 - DNA, 25 bp, Homo sapien
taaaaaatcggttattgtaacatac

SEQ ID NO: 5930158 - DNA, 25 bp, Homo sapien
ttatccgatttattaacaatagtgt

SEQ ID NO: 5930159 - DNA, 25 bp, Homo sapien
tttgaactacgctataaaatttagt

SEQ ID NO: 5930160 - DNA, 25 bp, Homo sapien
gaaattcgttctaatactagtattt

SEQ ID NO: 5930161 - DNA, 25 bp, Homo sapien
aaagtaatccgatcttatagttata

SEQ ID NO: 5930162 - DNA, 25 bp, Homo sapien
tttccaacgatgtatttagttatta

SEQ ID NO: 5930163 - DNA, 25 bp, Homo sapien
tattgtggtcgaattgtttataaaa

SEQ ID NO: 5930164 - DNA, 25 bp, Homo sapien
ctcgtcgatttaaatctatttaata

SEQ ID NO: 5930165 - DNA, 25 bp, Homo sapien
tatatctaaattacgtacaagcaaa

SEQ ID NO: 5930166 - DNA, 25 bp, Homo sapien
aatattagtaaaatttgcgcagatt

SEQ ID NO: 5930167 - DNA, 25 bp, Homo sapien
ataatgacctcgtattttatcttaa

SEQ ID NO: 5930168 - DNA, 25 bp, Homo sapien
agtcattattttcggacataatatt

SEQ ID NO: 5930169 - DNA, 25 bp, Homo sapien
agtattcgtatcgatatattttgat

SEQ ID NO: 5930170 - DNA, 25 bp, Homo sapien
aaatagacatatatacgatcgaata

SEQ ID NO: 5930171 - DNA, 25 bp, Homo sapien
ttttattcgtacaatcaaaaatgtc

SEQ ID NO: 5930172 - DNA, 25 bp, Homo sapien
tattattcgtcataataatggtatg

SEQ ID NO: 5930173 - DNA, 25 bp, Homo sapien
tatatatatcgtactattgagtgta

SEQ ID NO: 5930174 - DNA, 25 bp, Homo sapien
ttaaatgttccgatattacaattag

SEQ ID NO: 5930175 - DNA, 25 bp, Homo sapien
aattgttaatcgactataattaagc

SEQ ID NO: 5930176 - DNA, 25 bp, Homo sapien
taaagcattaactttttcgattaca

SEQ ID NO: 5930177 - DNA, 25 bp, Homo sapien
ttgtgaatccgataaaaattatgta

SEQ ID NO: 5930178 - DNA, 25 bp, Homo sapien
tgaaattagtcgtttgatataatgt

SEQ ID NO: 5930179 - DNA, 25 bp, Homo sapien
cttacaattactgattatcgaaatt

SEQ ID NO: 5930180 - DNA, 25 bp, Homo sapien
ttgatttaaacgataagtttcttag

SEQ ID NO: 5930181 - DNA, 25 bp, Homo sapien
gtaaaaagttcgtttgaatatgata

SEQ ID NO: 5930182 - DNA, 25 bp, Homo sapien
aaacgatatcgcatttataatacaa

SEQ ID NO: 5930183 - DNA, 25 bp, Homo sapien
atgaatgttattatactacgtcaat

SEQ ID NO: 5930184 - DNA, 25 bp, Homo sapien
tatatggtaacgtaatgtatacata

SEQ ID NO: 5930185 - DNA, 25 bp, Homo sapien
aatatattaatgtaatgcgagaact

SEQ ID NO: 5930186 - DNA, 25 bp, Homo sapien
atatatatatcgatacttgtgaagt

SEQ ID NO: 5930187 - DNA, 25 bp, Homo sapien
ataatcgacgaattttaaatcctat

SEQ ID NO: 5930188 - DNA, 25 bp, Homo sapien
aagcttaatatattataccgagatt

SEQ ID NO: 5930189 - DNA, 25 bp, Homo sapien
gatgaaattattacgtaatgagatt

SEQ ID NO: 5930190 - DNA, 25 bp, Homo sapien
attaggattttttcgcttatttatc

SEQ ID NO: 5930191 - DNA, 25 bp, Homo sapien
ctatatattcgtattctatgttaac

SEQ ID NO: 5930192 - DNA, 25 bp, Homo sapien
aaataggtatattgcgaatattgaa

SEQ ID NO: 5930193 - DNA, 25 bp, Homo sapien
tctgtatcgatgtaaattaaatgtt

SEQ ID NO: 5930194 - DNA, 25 bp, Homo sapien
tacagtacgaatattaactattatg

SEQ ID NO: 5930195 - DNA, 25 bp, Homo sapien
attacaattatacgatacgaaaaga

SEQ ID NO: 5930196 - DNA, 25 bp, Homo sapien
aagtttagcgattaataagtatgta

SEQ ID NO: 5930197 - DNA, 25 bp, Homo sapien
atataatagattactcgtatactca

SEQ ID NO: 5930198 - DNA, 25 bp, Homo sapien
ttttttaatcgaatgtattgatctc

SEQ ID NO: 5930199 - DNA, 25 bp, Homo sapien
tcaacacaatcgatatactaaattt

SEQ ID NO: 5930200 - DNA, 25 bp, Homo sapien
atataatttacgaatgtctagttac

SEQ ID NO: 5930201 - DNA, 25 bp, Homo sapien
gttaacgctaactcttatatatata

SEQ ID NO: 5930202 - DNA, 25 bp, Homo sapien
taaatggacgcgattatatttataa

SEQ ID NO: 5930203 - DNA, 25 bp, Homo sapien
cattatataatatgtcgaatatcag

SEQ ID NO: 5930204 - DNA, 25 bp, Homo sapien
cacttctaatattatcgatattttg

SEQ ID NO: 5930205 - DNA, 25 bp, Homo sapien
ctaagtatctaatatcatcgaaata

SEQ ID NO: 5930206 - DNA, 25 bp, Homo sapien
ctatcataagtcgattattaatgtt

SEQ ID NO: 5930207 - DNA, 25 bp, Homo sapien
atactcgatttaattaatcctatct

SEQ ID NO: 5930208 - DNA, 25 bp, Homo sapien
ttgatatacttattacgttaatgct

SEQ ID NO: 5930209 - DNA, 25 bp, Homo sapien
aatccaattatcgcatataataatg

SEQ ID NO: 5930210 - DNA, 25 bp, Homo sapien
aaaagtatttcaagcgattatttgt

SEQ ID NO: 5930211 - DNA, 25 bp, Homo sapien
gagaaaatcgtaataagttattctt

SEQ ID NO: 5930212 - DNA, 25 bp, Homo sapien
tttaaaatattattataccgactcg

SEQ ID NO: 5930213 - DNA, 25 bp, Homo sapien
actattatttagcgactaaattgat

SEQ ID NO: 5930214 - DNA, 25 bp, Homo sapien
atgattcgattattaatctaaaacg

SEQ ID NO: 5930215 - DNA, 25 bp, Homo sapien
tttcaaaagttcgattaatatcaac

SEQ ID NO: 5930216 - DNA, 25 bp, Homo sapien
tattcctgattattcgataattcat

SEQ ID NO: 5930217 - DNA, 25 bp, Homo sapien
gtatttcgttaatccttaataatca

SEQ ID NO: 5930218 - DNA, 25 bp, Homo sapien
taataatattagattacgaaagcac

SEQ ID NO: 5930219 - DNA, 25 bp, Homo sapien
tggacattgtataacgatattatta

SEQ ID NO: 5930220 - DNA, 25 bp, Homo sapien
caattacatataagttatcgagttt

SEQ ID NO: 5930221 - DNA, 25 bp, Homo sapien
ataattatcaatttcgattgtaagg

SEQ ID NO: 5930222 - DNA, 25 bp, Homo sapien
ggtatttatacgattacttatacaa

SEQ ID NO: 5930223 - DNA, 25 bp, Homo sapien
tacaacgtcatatagtattacttta

SEQ ID NO: 5930224 - DNA, 25 bp, Homo sapien
atatatcgatacttaattaaggtac

SEQ ID NO: 5930225 - DNA, 25 bp, Homo sapien
tgcatcgataattatagttaaagaa

SEQ ID NO: 5930226 - DNA, 25 bp, Homo sapien
aaaacttcgtaatattatacctgaa

SEQ ID NO: 5930227 - DNA, 25 bp, Homo sapien
tattagtatatccgattaacttctt

SEQ ID NO: 5930228 - DNA, 25 bp, Homo sapien
gattgatcaaatttcgttgaattat

SEQ ID NO: 5930229 - DNA, 25 bp, Homo sapien
taaaaacgatatttagctatttcgt

SEQ ID NO: 5930230 - DNA, 25 bp, Homo sapien
cagattataaatccgttaattacat

SEQ ID NO: 5930231 - DNA, 25 bp, Homo sapien
atgggctattaacgataaaaatata

SEQ ID NO: 5930232 - DNA, 25 bp, Homo sapien
tagacaaatttacgtattgtaatag

SEQ ID NO: 5930233 - DNA, 25 bp, Homo sapien
ttacgatatcgattaaaggttttta

SEQ ID NO: 5930234 - DNA, 25 bp, Homo sapien
atagaaaacgtaattagtctagaaa

SEQ ID NO: 5930235 - DNA, 25 bp, Homo sapien
cttgaaatatattagcgatcataat

SEQ ID NO: 5930236 - DNA, 25 bp, Homo sapien
aaacttaagtattagtatcgaaaga

SEQ ID NO: 5930237 - DNA, 25 bp, Homo sapien
ctaaataatcgattagataagttct

SEQ ID NO: 5930238 - DNA, 25 bp, Homo sapien
attacattacgaaaaaattgtgcta

SEQ ID NO: 5930239 - DNA, 25 bp, Homo sapien
tattaaatatacgatagtcccttaa

SEQ ID NO: 5930240 - DNA, 25 bp, Homo sapien
ggatattatattaacgttagtctta

SEQ ID NO: 5930241 - DNA, 25 bp, Homo sapien
ttcatttaattttattcgcgtacaa

SEQ ID NO: 5930242 - DNA, 25 bp, Homo sapien
aatgttgccgaaaaataataatttg

SEQ ID NO: 5930243 - DNA, 25 bp, Homo sapien
tttaaattaggtcgttctataacat

SEQ ID NO: 5930244 - DNA, 25 bp, Homo sapien
aaactatagcgactataattttttg

SEQ ID NO: 5930245 - DNA, 25 bp, Homo sapien
actgttagcgtaaattaatacaaaa

SEQ ID NO: 5930246 - DNA, 25 bp, Homo sapien
aattacgaattaattatctagcact

SEQ ID NO: 5930247 - DNA, 25 bp, Homo sapien
gatattcgactaacataatatagat

SEQ ID NO: 5930248 - DNA, 25 bp, Homo sapien
atttactattaatcgatagtgatga

SEQ ID NO: 5930249 - DNA, 25 bp, Homo sapien
tgattaacgaaagtcctaattaaat

SEQ ID NO: 5930250 - DNA, 25 bp, Homo sapien
aataaaattacggaacaatttcaga

SEQ ID NO: 5930251 - DNA, 25 bp, Homo sapien
taagtatcatcgataaaagtatact

SEQ ID NO: 5930252 - DNA, 25 bp, Homo sapien
tattctatttatttcgatcgaaact

SEQ ID NO: 5930253 - DNA, 25 bp, Homo sapien
ctaacagttgatcgaatttaataat

SEQ ID NO: 5930254 - DNA, 25 bp, Homo sapien
tgttttataatgttttgtcgtgtaa

SEQ ID NO: 5930255 - DNA, 25 bp, Homo sapien
ctaaatattacttatagacgtgtaa

SEQ ID NO: 5930256 - DNA, 25 bp, Homo sapien
gattcaatattaatatgtcgttgta

SEQ ID NO: 5930257 - DNA, 25 bp, Homo sapien
atcaagcgatcaagttattatttat

SEQ ID NO: 5930258 - DNA, 25 bp, Homo sapien
ttttttaatttcgtcaattagtcca

SEQ ID NO: 5930259 - DNA, 25 bp, Homo sapien
tgtacacgattatacattaaaatag

SEQ ID NO: 5930260 - DNA, 25 bp, Homo sapien
cgaagatcattacgattaataaata

SEQ ID NO: 5930261 - DNA, 25 bp, Homo sapien
ttgtttatttcgtaatattcagctt

SEQ ID NO: 5930262 - DNA, 25 bp, Homo sapien
aggtattgtatcgtaaattgtttaa

SEQ ID NO: 5930263 - DNA, 25 bp, Homo sapien
aatagtgtatcgtatagtctaatta

SEQ ID NO: 5930264 - DNA, 25 bp, Homo sapien
gaaatgatttatcgttaattatgtg

SEQ ID NO: 5930265 - DNA, 25 bp, Homo sapien
gttatgtaatattatgcgatgataa

SEQ ID NO: 5930266 - DNA, 25 bp, Homo sapien
attttcattaaataccgtaagttga

SEQ ID NO: 5930267 - DNA, 25 bp, Homo sapien
acttattaacttattacgatttgtc

SEQ ID NO: 5930268 - DNA, 25 bp, Homo sapien
aatatgtacggtataattaaggaat

SEQ ID NO: 5930269 - DNA, 25 bp, Homo sapien
aaaatatatgcataacgatttgaag

SEQ ID NO: 5930270 - DNA, 25 bp, Homo sapien
attaattaacgtattaaactgctag

SEQ ID NO: 5930271 - DNA, 25 bp, Homo sapien
ttcctttatggatattcgtattatt

SEQ ID NO: 5930272 - DNA, 25 bp, Homo sapien
ttacatatctaaacgttatcactat

SEQ ID NO: 5930273 - DNA, 25 bp, Homo sapien
tatgattacgcgaaaatattatttg

SEQ ID NO: 5930274 - DNA, 25 bp, Homo sapien
aacaggtcaatattatcgtaaatta

SEQ ID NO: 5930275 - DNA, 25 bp, Homo sapien
atacacgatacgttatatatacaaa

SEQ ID NO: 5930276 - DNA, 25 bp, Homo sapien
aaatgtcgtattagataaacattgt

SEQ ID NO: 5930277 - DNA, 25 bp, Homo sapien
attgaatcttaatcgaatatgttgt

SEQ ID NO: 5930278 - DNA, 25 bp, Homo sapien
caaatagtattcgataaatctaagt

SEQ ID NO: 5930279 - DNA, 25 bp, Homo sapien
ttagtataatagtatcgttaacttg

SEQ ID NO: 5930280 - DNA, 25 bp, Homo sapien
aatacgtcgataataagaacaataa

SEQ ID NO: 5930281 - DNA, 25 bp, Homo sapien
atgatcttgtaattatgcgaataat

SEQ ID NO: 5930282 - DNA, 25 bp, Homo sapien
aacaccgtaatatatcttgtatatt

SEQ ID NO: 5930283 - DNA, 25 bp, Homo sapien
tctattatgatatcgtattactagt

SEQ ID NO: 5930284 - DNA, 25 bp, Homo sapien
ctttaacttattattcgtactttga

SEQ ID NO: 5930285 - DNA, 25 bp, Homo sapien
caacttaacaattaatcgtaacaaa

SEQ ID NO: 5930286 - DNA, 25 bp, Homo sapien
gtaaatattgtcggactaaaataaa

SEQ ID NO: 5930287 - DNA, 25 bp, Homo sapien
catgatataaatctcgttattactt

SEQ ID NO: 5930288 - DNA, 25 bp, Homo sapien
gatttttaacttattcgaattcgat

SEQ ID NO: 5930289 - DNA, 25 bp, Homo sapien
atttaaacagtataattcgagaatc

SEQ ID NO: 5930290 - DNA, 25 bp, Homo sapien
atgatagtgatcgtatttaattaca

SEQ ID NO: 5930291 - DNA, 25 bp, Homo sapien
agtatttgaagtgtcgtattaataa

SEQ ID NO: 5930292 - DNA, 25 bp, Homo sapien
ataatacaataaattagcgataggt

SEQ ID NO: 5930293 - DNA, 25 bp, Homo sapien
atattctaattcgttacgaacataa

SEQ ID NO: 5930294 - DNA, 25 bp, Homo sapien
atagtctctcgtaatttgatataat

SEQ ID NO: 5930295 - DNA, 25 bp, Homo sapien
gattatattacgattagttagagat

SEQ ID NO: 5930296 - DNA, 25 bp, Homo sapien
gttattatattgttgcgttaatttg

SEQ ID NO: 5930297 - DNA, 25 bp, Homo sapien
ggatcactaatcgtatataaaaata

SEQ ID NO: 5930298 - DNA, 25 bp, Homo sapien
ttattaatagtcgttagataccaat

SEQ ID NO: 5930299 - DNA, 25 bp, Homo sapien
atgtatatatcgacactattgatta

SEQ ID NO: 5930300 - DNA, 25 bp, Homo sapien
gatagttatatgcgatttattactt

SEQ ID NO: 5930301 - DNA, 25 bp, Homo sapien
atgttcaatcgcaattaattgaaat

SEQ ID NO: 5930302 - DNA, 25 bp, Homo sapien
tgctttcgttcgtaaatatatattt

SEQ ID NO: 5930303 - DNA, 25 bp, Homo sapien
cataaacaaatcgctaataaatctt

SEQ ID NO: 5930304 - DNA, 25 bp, Homo sapien
tgttaacacgatactatatatgtta

SEQ ID NO: 5930305 - DNA, 25 bp, Homo sapien
tttctatcgactatttatcaagatt

SEQ ID NO: 5930306 - DNA, 25 bp, Homo sapien
tattaatattgaatttcggtatagg

SEQ ID NO: 5930307 - DNA, 25 bp, Homo sapien
tttaatacgttaatggttatgagtt

SEQ ID NO: 5930308 - DNA, 25 bp, Homo sapien
ttattaaattacgcgatatacagta

SEQ ID NO: 5930309 - DNA, 25 bp, Homo sapien
tcaattatatccgattagatatact

SEQ ID NO: 5930310 - DNA, 25 bp, Homo sapien
tttcttagttcatagcgtaattaat

SEQ ID NO: 5930311 - DNA, 25 bp, Homo sapien
tatcagttattacgaaaccttatat

SEQ ID NO: 5930312 - DNA, 25 bp, Homo sapien
aggtatatacgatattcgaaataat

SEQ ID NO: 5930313 - DNA, 25 bp, Homo sapien
attaaaatattatcgaaacgacaag

SEQ ID NO: 5930314 - DNA, 25 bp, Homo sapien
tttctttctatcgttcaatatagta

SEQ ID NO: 5930315 - DNA, 25 bp, Homo sapien
aagaccatatcgattataatcaata

SEQ ID NO: 5930316 - DNA, 25 bp, Homo sapien
tcaaaacgctatccaataatatttt

SEQ ID NO: 5930317 - DNA, 25 bp, Homo sapien
agtattaattaattgacgattgcat

SEQ ID NO: 5930318 - DNA, 25 bp, Homo sapien
aggaattatcgatataagtttagat

SEQ ID NO: 5930319 - DNA, 25 bp, Homo sapien
actcaaaaaatacgtcgattaaata

SEQ ID NO: 5930320 - DNA, 25 bp, Homo sapien
tattggatatttatcatacgttctt

SEQ ID NO: 5930321 - DNA, 25 bp, Homo sapien
ttcctacgaatcaatatttatattg

SEQ ID NO: 5930322 - DNA, 25 bp, Homo sapien
taagacgatataatataagactcta

SEQ ID NO: 5930323 - DNA, 25 bp, Homo sapien
gttttagattaatcgtataattctg

SEQ ID NO: 5930324 - DNA, 25 bp, Homo sapien
tggtaattaagatttcgatataaag

SEQ ID NO: 5930325 - DNA, 25 bp, Homo sapien
caattacctcgtattatatgaaata

SEQ ID NO: 5930326 - DNA, 25 bp, Homo sapien
taatgcgttgtgtataaatcaaata

SEQ ID NO: 5930327 - DNA, 25 bp, Homo sapien
ctaaatcgctaatttatgtaaatca

SEQ ID NO: 5930328 - DNA, 25 bp, Homo sapien
aatactaagataagattcgaaaaag

SEQ ID NO: 5930329 - DNA, 25 bp, Homo sapien
tgttattactcgatgttaattagtt

SEQ ID NO: 5930330 - DNA, 25 bp, Homo sapien
atattactaatcgaataattcgcaa

SEQ ID NO: 5930331 - DNA, 25 bp, Homo sapien
taactcgcttaaattaatataccaa

SEQ ID NO: 5930332 - DNA, 25 bp, Homo sapien
taccattatattgtatcgaattcat

SEQ ID NO: 5930333 - DNA, 25 bp, Homo sapien
tacataatatttcgatagttctaga

SEQ ID NO: 5930334 - DNA, 25 bp, Homo sapien
aaattgtcgataacttatatgaaca

SEQ ID NO: 5930335 - DNA, 25 bp, Homo sapien
ttgagcgataataatataagcatta

SEQ ID NO: 5930336 - DNA, 25 bp, Homo sapien
tgattacactaaaattatcgtgatt

SEQ ID NO: 5930337 - DNA, 25 bp, Homo sapien
aaatatcgttaatataatcctgaga

SEQ ID NO: 5930338 - DNA, 25 bp, Homo sapien
gtaatcattaatagattcgaaaaac

SEQ ID NO: 5930339 - DNA, 25 bp, Homo sapien
aattctgtcgaactaatatatagat

SEQ ID NO: 5930340 - DNA, 25 bp, Homo sapien
atttagatttagcaatacgtattac

SEQ ID NO: 5930341 - DNA, 25 bp, Homo sapien
ttttttataaattacgatcgcactt

SEQ ID NO: 5930342 - DNA, 25 bp, Homo sapien
tataatgtacgaacgtaaatcaatt

SEQ ID NO: 5930343 - DNA, 25 bp, Homo sapien
ctagagacgaaatttgtaaaatatt

SEQ ID NO: 5930344 - DNA, 25 bp, Homo sapien
tgatctagtacgaatattatatgta

SEQ ID NO: 5930345 - DNA, 25 bp, Homo sapien
ttaaaaaatattatcggctaactac

SEQ ID NO: 5930346 - DNA, 25 bp, Homo sapien
gaaatctattcgtagtattattcat

SEQ ID NO: 5930347 - DNA, 25 bp, Homo sapien
tcatggttataatcgaatatctatt

SEQ ID NO: 5930348 - DNA, 25 bp, Homo sapien
tactaactatttatacgataattcc

SEQ ID NO: 5930349 - DNA, 25 bp, Homo sapien
atataacgataatattacgtaggta

SEQ ID NO: 5930350 - DNA, 25 bp, Homo sapien
agcaacgcataataattcattaaaa

SEQ ID NO: 5930351 - DNA, 25 bp, Homo sapien
tcaatatcataatattacgagtatc

SEQ ID NO: 5930352 - DNA, 25 bp, Homo sapien
atccaaggtcgtattaatatattat

SEQ ID NO: 5930353 - DNA, 25 bp, Homo sapien
aagcttagttcgtaaaatattagat

SEQ ID NO: 5930354 - DNA, 25 bp, Homo sapien
atttctattatagttatcggttaag

SEQ ID NO: 5930355 - DNA, 25 bp, Homo sapien
aaatataatttatcgctattagggt

SEQ ID NO: 5930356 - DNA, 25 bp, Homo sapien
cacaaaatataagttcgtttaatct

SEQ ID NO: 5930357 - DNA, 25 bp, Homo sapien
tttaatatacgataataacgggaat

SEQ ID NO: 5930358 - DNA, 25 bp, Homo sapien
gaatctaataatatcgcaatatatg

SEQ ID NO: 5930359 - DNA, 25 bp, Homo sapien
tgtttttaatcgtatgataagacta

SEQ ID NO: 5930360 - DNA, 25 bp, Homo sapien
tttgccaattaattttatcgtttca

SEQ ID NO: 5930361 - DNA, 25 bp, Homo sapien
aaattaattctacaacaacgagatt

SEQ ID NO: 5930362 - DNA, 25 bp, Homo sapien
tcgtacgcaagtatattattaaaaa

SEQ ID NO: 5930363 - DNA, 25 bp, Homo sapien
gatcttaatcgatcgtaataatttt

SEQ ID NO: 5930364 - DNA, 25 bp, Homo sapien
aaagttttcgatcatcatatactaa

SEQ ID NO: 5930365 - DNA, 25 bp, Homo sapien
ttaatgatattaataatgcgtccta

SEQ ID NO: 5930366 - DNA, 25 bp, Homo sapien
tgattaacgacgatataaatttact

SEQ ID NO: 5930367 - DNA, 25 bp, Homo sapien
ttcaattatattaaatcggttgatg

SEQ ID NO: 5930368 - DNA, 25 bp, Homo sapien
ctttcaattatatttagcgtatatg

SEQ ID NO: 5930369 - DNA, 25 bp, Homo sapien
tttcttactaatcgaaaatttccaa

SEQ ID NO: 5930370 - DNA, 25 bp, Homo sapien
atatataattacgaaattggctatc

SEQ ID NO: 5930371 - DNA, 25 bp, Homo sapien
tttatttgtaattcgatccacaata

SEQ ID NO: 5930372 - DNA, 25 bp, Homo sapien
atgtaaacgaatacttataaatcgt

SEQ ID NO: 5930373 - DNA, 25 bp, Homo sapien
aatggttatctagtcgtataattat

SEQ ID NO: 5930374 - DNA, 25 bp, Homo sapien
gattcattaaatagtacgttatttc

SEQ ID NO: 5930375 - DNA, 25 bp, Homo sapien
tatcagtcgataaagtttatgaaat

SEQ ID NO: 5930376 - DNA, 25 bp, Homo sapien
atttttaaactataatgcgctttag

SEQ ID NO: 5930377 - DNA, 25 bp, Homo sapien
gacttagttcgaaaaatatgataaa

SEQ ID NO: 5930378 - DNA, 25 bp, Homo sapien
tacgacgattatactatcttaaaaa

SEQ ID NO: 5930379 - DNA, 25 bp, Homo sapien
attaagtacgtcgtatattattttc

SEQ ID NO: 5930380 - DNA, 25 bp, Homo sapien
ttagatatttttacgatcgatgttt

SEQ ID NO: 5930381 - DNA, 25 bp, Homo sapien
ttttataattataatcggatgtagg

SEQ ID NO: 5930382 - DNA, 25 bp, Homo sapien
aaagttctattcgatataaaatcgt

SEQ ID NO: 5930383 - DNA, 25 bp, Homo sapien
tacatatatcgtcgttataatttga

SEQ ID NO: 5930384 - DNA, 25 bp, Homo sapien
gtattatatcgataaagattcatct

SEQ ID NO: 5930385 - DNA, 25 bp, Homo sapien
actgataatatactatacgaatctt

SEQ ID NO: 5930386 - DNA, 25 bp, Homo sapien
acatatatatcttaacgcgattatt

SEQ ID NO: 5930387 - DNA, 25 bp, Homo sapien
aagaaactattaatacgagtgtata

SEQ ID NO: 5930388 - DNA, 25 bp, Homo sapien
aagtagattattaaacgcttcattt

SEQ ID NO: 5930389 - DNA, 25 bp, Homo sapien
agtatcgattaattaacgaacaatt

SEQ ID NO: 5930390 - DNA, 25 bp, Homo sapien
ctatttaccattatacgatacataa

SEQ ID NO: 5930391 - DNA, 25 bp, Homo sapien
tcaacttcgttaagtagatttttat

SEQ ID NO: 5930392 - DNA, 25 bp, Homo sapien
taattaattacgatcgtttaagaag

SEQ ID NO: 5930393 - DNA, 25 bp, Homo sapien
ttacgatatttcgtactatgtattt

SEQ ID NO: 5930394 - DNA, 25 bp, Homo sapien
tgttttatagcgttataagataaac

SEQ ID NO: 5930395 - DNA, 25 bp, Homo sapien
agaactataacaattacgataagaa

SEQ ID NO: 5930396 - DNA, 25 bp, Homo sapien
tacattatatcaaatttcgaagcta

SEQ ID NO: 5930397 - DNA, 25 bp, Homo sapien
agcgacgatctattattatataata

SEQ ID NO: 5930398 - DNA, 25 bp, Homo sapien
gatttatcgatatacttagtttatc

SEQ ID NO: 5930399 - DNA, 25 bp, Homo sapien
gtaatattttttcgagaaatagaac

SEQ ID NO: 5930400 - DNA, 25 bp, Homo sapien
aactttgttgtgttatatcgatata

SEQ ID NO: 5930401 - DNA, 25 bp, Homo sapien
tcatgatactcgaattctattttat

SEQ ID NO: 5930402 - DNA, 25 bp, Homo sapien
attcgctatatcgaattataactta

SEQ ID NO: 5930403 - DNA, 25 bp, Homo sapien
aattctatatagttaatcgatttcc

SEQ ID NO: 5930404 - DNA, 25 bp, Homo sapien
agaaaaatatatttcgatcgtatct

SEQ ID NO: 5930405 - DNA, 25 bp, Homo sapien
tacgtattatcgattatgaaaactt

SEQ ID NO: 5930406 - DNA, 25 bp, Homo sapien
caagataatcatatttcgtaacttt

SEQ ID NO: 5930407 - DNA, 25 bp, Homo sapien
ataaaaatcgttagtaaatagctct

SEQ ID NO: 5930408 - DNA, 25 bp, Homo sapien
gtggttatcgtatatataagaaaat

SEQ ID NO: 5930409 - DNA, 25 bp, Homo sapien
tacacttatacgcttaaattcatat

SEQ ID NO: 5930410 - DNA, 25 bp, Homo sapien
aatagtatcgcaaaaactataacat

SEQ ID NO: 5930411 - DNA, 25 bp, Homo sapien
cactattacgttataactataaatg

SEQ ID NO: 5930412 - DNA, 25 bp, Homo sapien
caaatattactaatctaacgaatga

SEQ ID NO: 5930413 - DNA, 25 bp, Homo sapien
atgaaagcgttattattaacaaaga

SEQ ID NO: 5930414 - DNA, 25 bp, Homo sapien
atgaattcgcgaaaatatataatag

SEQ ID NO: 5930415 - DNA, 25 bp, Homo sapien
ttaaagagtcttatcgattattgtt

SEQ ID NO: 5930416 - DNA, 25 bp, Homo sapien
attagcgattatctacgtttattta

SEQ ID NO: 5930417 - DNA, 25 bp, Homo sapien
agtcagatttcgtaataataatttc

SEQ ID NO: 5930418 - DNA, 25 bp, Homo sapien
aagatgtatatttagcgaatattag

SEQ ID NO: 5930419 - DNA, 25 bp, Homo sapien
ctaaatattcgaaagtacagttaaa

SEQ ID NO: 5930420 - DNA, 25 bp, Homo sapien
aggtttattatacgattaacactaa

SEQ ID NO: 5930421 - DNA, 25 bp, Homo sapien
aaatacgtattacgattttatgaac

SEQ ID NO: 5930422 - DNA, 25 bp, Homo sapien
taagggtacgattaattaattatct

SEQ ID NO: 5930423 - DNA, 25 bp, Homo sapien
cttgaagtaatatcattcgttttat

SEQ ID NO: 5930424 - DNA, 25 bp, Homo sapien
ttaccatcgttaaattgaattatca

SEQ ID NO: 5930425 - DNA, 25 bp, Homo sapien
aattagttacgatatgattaatggt

SEQ ID NO: 5930426 - DNA, 25 bp, Homo sapien
atatataatgtgttaatcgaggatt

SEQ ID NO: 5930427 - DNA, 25 bp, Homo sapien
aaaggatatatcggttaatacattt

SEQ ID NO: 5930428 - DNA, 25 bp, Homo sapien
atacattgatcgtctaaaaaaacat

SEQ ID NO: 5930429 - DNA, 25 bp, Homo sapien
cattttcgtaagaagtatatttatc

SEQ ID NO: 5930430 - DNA, 25 bp, Homo sapien
caactccgaatgttattaaataaaa

SEQ ID NO: 5930431 - DNA, 25 bp, Homo sapien
aataattaacgcacgaatctaaaaa

SEQ ID NO: 5930432 - DNA, 25 bp, Homo sapien
cttattaatcgaaacttatattggt

SEQ ID NO: 5930433 - DNA, 25 bp, Homo sapien
caaaaatcttcgatatagataaaac

SEQ ID NO: 5930434 - DNA, 25 bp, Homo sapien
ttttaatgcgatttcttatagtaca

SEQ ID NO: 5930435 - DNA, 25 bp, Homo sapien
aagaaatcgacttatgttgaaataa

SEQ ID NO: 5930436 - DNA, 25 bp, Homo sapien
atgttttaatcgcaataaatccttt

SEQ ID NO: 5930437 - DNA, 25 bp, Homo sapien
gattcataatagatttacgatatac

SEQ ID NO: 5930438 - DNA, 25 bp, Homo sapien
tttgacgttgatatcgatttttaaa

SEQ ID NO: 5930439 - DNA, 25 bp, Homo sapien
tattatattttatcgcgattatagc

SEQ ID NO: 5930440 - DNA, 25 bp, Homo sapien
atatagaatcgttaaattgatacga

SEQ ID NO: 5930441 - DNA, 25 bp, Homo sapien
atatacgagtttatatctatatcag

SEQ ID NO: 5930442 - DNA, 25 bp, Homo sapien
ttatctcgttatatcataaccaata

SEQ ID NO: 5930443 - DNA, 25 bp, Homo sapien
tagaatactaagcgagtttatatta

SEQ ID NO: 5930444 - DNA, 25 bp, Homo sapien
ttattattaagattacgattgcact

SEQ ID NO: 5930445 - DNA, 25 bp, Homo sapien
agttaacgaaatatattatcttacg

SEQ ID NO: 5930446 - DNA, 25 bp, Homo sapien
tgaataaacattaacgaactacaaa

SEQ ID NO: 5930447 - DNA, 25 bp, Homo sapien
aaatctagaactatcgtattgtaat

SEQ ID NO: 5930448 - DNA, 25 bp, Homo sapien
agtttcgataacaattactaatgtt

SEQ ID NO: 5930449 - DNA, 25 bp, Homo sapien
aaacaatcgtaaatttcgcaaatta

SEQ ID NO: 5930450 - DNA, 25 bp, Homo sapien
aaaaacgatagtatactaatgcaaa

SEQ ID NO: 5930451 - DNA, 25 bp, Homo sapien
attcataagcagattatcgtaataa

SEQ ID NO: 5930452 - DNA, 25 bp, Homo sapien
aaatctcgtaaagctatttagaata

SEQ ID NO: 5930453 - DNA, 25 bp, Homo sapien
tatgcatataacgacaaattactat

SEQ ID NO: 5930454 - DNA, 25 bp, Homo sapien
tatcgatatcgaattaatacactaa

SEQ ID NO: 5930455 - DNA, 25 bp, Homo sapien
aggtaattaacttattacgagaata

SEQ ID NO: 5930456 - DNA, 25 bp, Homo sapien
taggattaatcgtaatttagatatc

SEQ ID NO: 5930457 - DNA, 25 bp, Homo sapien
tgtgatatttacgtagaatcaatat

SEQ ID NO: 5930458 - DNA, 25 bp, Homo sapien
ttaaaacgatataatcttgttagtc

SEQ ID NO: 5930459 - DNA, 25 bp, Homo sapien
aattcatcaaattacgatatatgtc

SEQ ID NO: 5930460 - DNA, 25 bp, Homo sapien
taaattaatcggtattacttcttga

SEQ ID NO: 5930461 - DNA, 25 bp, Homo sapien
gtctatatcggaatttataatcaat

SEQ ID NO: 5930462 - DNA, 25 bp, Homo sapien
gctaagtaaatcgtattaatatcta

SEQ ID NO: 5930463 - DNA, 25 bp, Homo sapien
aaaattcgaatgtatcgataacaat

SEQ ID NO: 5930464 - DNA, 25 bp, Homo sapien
taagatatctattacgaaatatctg

SEQ ID NO: 5930465 - DNA, 25 bp, Homo sapien
atgaataaactttcgctttaaaatg

SEQ ID NO: 5930466 - DNA, 25 bp, Homo sapien
atacaattatatcggattaattcag

SEQ ID NO: 5930467 - DNA, 25 bp, Homo sapien
tgcttgactaatttaacgaaaaatt

SEQ ID NO: 5930468 - DNA, 25 bp, Homo sapien
gattatagcggttaatttaatttct

SEQ ID NO: 5930469 - DNA, 25 bp, Homo sapien
gtaactattctatcgttaaagaatt

SEQ ID NO: 5930470 - DNA, 25 bp, Homo sapien
tctctttattcgacacaatatataa

SEQ ID NO: 5930471 - DNA, 25 bp, Homo sapien
aatagatttttcgccatataataga

SEQ ID NO: 5930472 - DNA, 25 bp, Homo sapien
gtgattaattttcgactaaatactt

SEQ ID NO: 5930473 - DNA, 25 bp, Homo sapien
tatatatcttatttcgcataaacct

SEQ ID NO: 5930474 - DNA, 25 bp, Homo sapien
tatgaaatattagtttatcgtaggt

SEQ ID NO: 5930475 - DNA, 25 bp, Homo sapien
ataaaaaatagtacgattgccataa

SEQ ID NO: 5930476 - DNA, 25 bp, Homo sapien
gagtaatatataattcgctatatgt

SEQ ID NO: 5930477 - DNA, 25 bp, Homo sapien
ttagaattatcttgtacgaatatag

SEQ ID NO: 5930478 - DNA, 25 bp, Homo sapien
caatacaatctatttacgaagatta

SEQ ID NO: 5930479 - DNA, 25 bp, Homo sapien
ataaagattatcgttatacacacta

SEQ ID NO: 5930480 - DNA, 25 bp, Homo sapien
aatggcgattaaataactattgatt

SEQ ID NO: 5930481 - DNA, 25 bp, Homo sapien
attagacgtatcttattgtatgaaa

SEQ ID NO: 5930482 - DNA, 25 bp, Homo sapien
agtcttattcgattagatatgtata

SEQ ID NO: 5930483 - DNA, 25 bp, Homo sapien
agtatatcgtaatattacttagact

SEQ ID NO: 5930484 - DNA, 25 bp, Homo sapien
tctgaaattgcgtaatcaatttaat

SEQ ID NO: 5930485 - DNA, 25 bp, Homo sapien
ctaagcttattaatacgaaatcttt

SEQ ID NO: 5930486 - DNA, 25 bp, Homo sapien
tacttcatattagtacgtcttaaat

SEQ ID NO: 5930487 - DNA, 25 bp, Homo sapien
tcagttataccgttctattaattat

SEQ ID NO: 5930488 - DNA, 25 bp, Homo sapien
ttatatcatatgaattcgacttaag

SEQ ID NO: 5930489 - DNA, 25 bp, Homo sapien
tatttttcaattatatatcgcagtc

SEQ ID NO: 5930490 - DNA, 25 bp, Homo sapien
atataaacgttatcgtattagtgat

SEQ ID NO: 5930491 - DNA, 25 bp, Homo sapien
atttcaatgaattatgcgactttaa

SEQ ID NO: 5930492 - DNA, 25 bp, Homo sapien
ataagaaattatattggacgtttct

SEQ ID NO: 5930493 - DNA, 25 bp, Homo sapien
acatcgattcaataatacgatttta

SEQ ID NO: 5930494 - DNA, 25 bp, Homo sapien
atattgttacgaaaatcgtattgaa

SEQ ID NO: 5930495 - DNA, 25 bp, Homo sapien
acaactaaattattttacgctatga

SEQ ID NO: 5930496 - DNA, 25 bp, Homo sapien
ttatatattatcttatcgacatacg

SEQ ID NO: 5930497 - DNA, 25 bp, Homo sapien
aacagtattcacgatataattagtt

SEQ ID NO: 5930498 - DNA, 25 bp, Homo sapien
atcgaataaattaacgtcgttatta

SEQ ID NO: 5930499 - DNA, 25 bp, Homo sapien
caatggcgtaatattgttataaata

SEQ ID NO: 5930500 - DNA, 25 bp, Homo sapien
tattcttcgtactaattattgagtt

SEQ ID NO: 5930501 - DNA, 25 bp, Homo sapien
atatataataatgcgaactacaaca

SEQ ID NO: 5930502 - DNA, 25 bp, Homo sapien
gtcctgtatattataatcgattaaa

SEQ ID NO: 5930503 - DNA, 25 bp, Homo sapien
tttggagtaatcgaattatatgtat

SEQ ID NO: 5930504 - DNA, 25 bp, Homo sapien
atttcgtaataattcgtatatgtag

SEQ ID NO: 5930505 - DNA, 25 bp, Homo sapien
tatttaaagtttcgagtatacgata

SEQ ID NO: 5930506 - DNA, 25 bp, Homo sapien
tatgttataagtcgttaaattttcg

SEQ ID NO: 5930507 - DNA, 25 bp, Homo sapien
attttatcgatcgaaaattatagac

SEQ ID NO: 5930508 - DNA, 25 bp, Homo sapien
aatgtttaatcgatctatattgatg

SEQ ID NO: 5930509 - DNA, 25 bp, Homo sapien
tattcccaattcgataaaataacaa

SEQ ID NO: 5930510 - DNA, 25 bp, Homo sapien
atattgtttaaatcgtataaggagt

SEQ ID NO: 5930511 - DNA, 25 bp, Homo sapien
tatgctttacgaatttcgatatatt

SEQ ID NO: 5930512 - DNA, 25 bp, Homo sapien
aaacatgattagtacgaaatgaata

SEQ ID NO: 5930513 - DNA, 25 bp, Homo sapien
aatatttctattcgtactatatcac

SEQ ID NO: 5930514 - DNA, 25 bp, Homo sapien
tgttaaacataagtcgttatttcaa

SEQ ID NO: 5930515 - DNA, 25 bp, Homo sapien
agaattcgttaatgtctatttaatg

SEQ ID NO: 5930516 - DNA, 25 bp, Homo sapien
taaaccgattaaacgtaatttgata

SEQ ID NO: 5930517 - DNA, 25 bp, Homo sapien
ttatcatttcgacatattatcagat

SEQ ID NO: 5930518 - DNA, 25 bp, Homo sapien
actgtcatattacgtaaagattaat

SEQ ID NO: 5930519 - DNA, 25 bp, Homo sapien
acaattcgtcgaattactataaata

SEQ ID NO: 5930520 - DNA, 25 bp, Homo sapien
cttatatacgctaatacgtaatata

SEQ ID NO: 5930521 - DNA, 25 bp, Homo sapien
ttagtattagccgattatatttcat

SEQ ID NO: 5930522 - DNA, 25 bp, Homo sapien
tgagttatagtcgaatttttcttat

SEQ ID NO: 5930523 - DNA, 25 bp, Homo sapien
aaataattacttcataacgatttgg

SEQ ID NO: 5930524 - DNA, 25 bp, Homo sapien
ttatgtaatacaaatagcgttatac

SEQ ID NO: 5930525 - DNA, 25 bp, Homo sapien
taaaaataattacgagttcactgtt

SEQ ID NO: 5930526 - DNA, 25 bp, Homo sapien
gattatgttcaattcgtaagttata

SEQ ID NO: 5930527 - DNA, 25 bp, Homo sapien
tacgtctaatctttatatcgaaatt

SEQ ID NO: 5930528 - DNA, 25 bp, Homo sapien
atgcatttcaaaaaactcgatttta

SEQ ID NO: 5930529 - DNA, 25 bp, Homo sapien
cttaaacgcataaaaatttgtaaca

SEQ ID NO: 5930530 - DNA, 25 bp, Homo sapien
tataactataagatcggattacttt

SEQ ID NO: 5930531 - DNA, 25 bp, Homo sapien
tcgtattatgcgaaattatacataa

SEQ ID NO: 5930532 - DNA, 25 bp, Homo sapien
ttatgacttatgcgatcaaaattta

SEQ ID NO: 5930533 - DNA, 25 bp, Homo sapien
tacactcaatagtacgatatatata

SEQ ID NO: 5930534 - DNA, 25 bp, Homo sapien
agttatcgtatatcgtaaattatga

SEQ ID NO: 5930535 - DNA, 25 bp, Homo sapien
aagaagttaatcggatatactaata

SEQ ID NO: 5930536 - DNA, 25 bp, Homo sapien
tagagtcttatattatatcgtctta

SEQ ID NO: 5930537 - DNA, 25 bp, Homo sapien
taataacgacgttaatttattcgat

SEQ ID NO: 5930538 - DNA, 25 bp, Homo sapien
gtgatatagtacgaatagaaatatt

SEQ ID NO: 5930539 - DNA, 25 bp, Homo sapien
aaatgaagcgtttaataatctactt

SEQ ID NO: 5930540 - DNA, 25 bp, Homo sapien
agtatacttttatcgatgatactta

SEQ ID NO: 5930541 - DNA, 25 bp, Homo sapien
accctaatagcgataaattatattt

SEQ ID NO: 5930542 - DNA, 25 bp, Homo sapien
cataccatagttattatcgaattta

SEQ ID NO: 5930543 - DNA, 25 bp, Homo sapien
aattgttcgttaattaatcgatact

SEQ ID NO: 5930544 - DNA, 25 bp, Homo sapien
gtgatttacgataaaaaatcatgtt

SEQ ID NO: 5930545 - DNA, 25 bp, Homo sapien
gacatttttgattgtacgaataaaa

SEQ ID NO: 5930546 - DNA, 25 bp, Homo sapien
tatcctataataagtcgaatcaaat

SEQ ID NO: 5930547 - DNA, 25 bp, Homo sapien
aactcataaccattaacgtattaaa

SEQ ID NO: 5930548 - DNA, 25 bp, Homo sapien
ctacatatacgaattattacgaaat

SEQ ID NO: 5930549 - DNA, 25 bp, Homo sapien
acaatgtttatctaatacgacattt

SEQ ID NO: 5930550 - DNA, 25 bp, Homo sapien
aagctgaatattacgaaataaacaa

SEQ ID NO: 5930551 - DNA, 25 bp, Homo sapien
tattctcgtaataagttaattacct

SEQ ID NO: 5930552 - DNA, 25 bp, Homo sapien
atgaattcgatacaatataatggta

SEQ ID NO: 5930553 - DNA, 25 bp, Homo sapien
taattagactatacgatacactatt

SEQ ID NO: 5930554 - DNA, 25 bp, Homo sapien
atctaatattttacgaactaagctt

SEQ ID NO: 5930555 - DNA, 25 bp, Homo sapien
taaaaacctttaatcgatatcgtaa

SEQ ID NO: 5930556 - DNA, 25 bp, Homo sapien
ttctctaatcgatttaagtaatcat

SEQ ID NO: 5930557 - DNA, 25 bp, Homo sapien
aagaataacttattacgattttctc

SEQ ID NO: 5930558 - DNA, 25 bp, Homo sapien
ttttaatgaattattatgcgttgct

SEQ ID NO: 5930559 - DNA, 25 bp, Homo sapien
catttatagttataacgtaatagtg

SEQ ID NO: 5930560 - DNA, 25 bp, Homo sapien
atcgaattcgaataagttaaaaatc

SEQ ID NO: 5930561 - DNA, 25 bp, Homo sapien
aaaattattacgatcgattaagatc

SEQ ID NO: 5930562 - DNA, 25 bp, Homo sapien
aatattttacaaatttcgtctctag

SEQ ID NO: 5930563 - DNA, 25 bp, Homo sapien
aagtgcgatcgtaatttataaaaaa

SEQ ID NO: 5930564 - DNA, 25 bp, Homo sapien
atgaattatcgaataatcaggaata

SEQ ID NO: 5930565 - DNA, 25 bp, Homo sapien
gagatcaatacattcgattaaaaaa

SEQ ID NO: 5930566 - DNA, 25 bp, Homo sapien
tttattttagtccgacaatatttac

SEQ ID NO: 5930567 - DNA, 25 bp, Homo sapien
actagtaatacgatatcataataga

SEQ ID NO: 5930568 - DNA, 25 bp, Homo sapien
ccaaatcgttatgaagtaattattt

SEQ ID NO: 5930569 - DNA, 25 bp, Homo sapien
agtctaagtaatattacgatatact

SEQ ID NO: 5930570 - DNA, 25 bp, Homo sapien
atgttatagtttttgcgatactatt

SEQ ID NO: 5930571 - DNA, 25 bp, Homo sapien
ttagtgtattaattcgatatcgata

SEQ ID NO: 5930572 - DNA, 25 bp, Homo sapien
tgttacaaatttttatgcgtttaag

SEQ ID NO: 5930573 - DNA, 25 bp, Homo sapien
taaataaacgtagataatcgctaat

SEQ ID NO: 5930574 - DNA, 25 bp, Homo sapien
ttattaatacgacacttcaaatact

SEQ ID NO: 5930575 - DNA, 25 bp, Homo sapien
tctattatatggcgaaaaatctatt

SEQ ID NO: 5930576 - DNA, 25 bp, Homo sapien
ttatcatcgcataatattacataac

SEQ ID NO: 5930577 - DNA, 25 bp, Homo sapien
aacaaataattacttattcgtgctt

SEQ ID NO: 5930578 - DNA, 25 bp, Homo sapien
tactatattgaacgatagaaagaaa

SEQ ID NO: 5930579 - DNA, 25 bp, Homo sapien
aagtaataacgagatttatatcatg

SEQ ID NO: 5930580 - DNA, 25 bp, Homo sapien
gttcataaaatcgtaatacgtattt

SEQ ID NO: 5930581 - DNA, 25 bp, Homo sapien
actccttatacgatttaaacaatat

SEQ ID NO: 5930582 - DNA, 25 bp, Homo sapien
tattttacgttcattagtaagtaga

SEQ ID NO: 5930583 - DNA, 25 bp, Homo sapien
tttgtatatataacgtatcgtgtat

SEQ ID NO: 5930584 - DNA, 25 bp, Homo sapien
tttttaagatagtataatcgtcgta

SEQ ID NO: 5930585 - DNA, 25 bp, Homo sapien
aagtaataaatcgcatataactatc

SEQ ID NO: 5930586 - DNA, 25 bp, Homo sapien
ataattcaacgaaatttgatcaatc

SEQ ID NO: 5930587 - DNA, 25 bp, Homo sapien
aatagttatctatagtcgaatttca

SEQ ID NO: 5930588 - DNA, 25 bp, Homo sapien
ttaagggactatcgtatatttaata

SEQ ID NO: 5930589 - DNA, 25 bp, Homo sapien
taaaatcgtattattgaatcgatgt

SEQ ID NO: 5930590 - DNA, 25 bp, Homo sapien
aaatgtattaaccgatatatccttt

SEQ ID NO: 5930591 - DNA, 25 bp, Homo sapien
tcaaagtacgaataataagttaaag

SEQ ID NO: 5930592 - DNA, 25 bp, Homo sapien
acataacgatacaattgattgttaa

SEQ ID NO: 5930593 - DNA, 25 bp, Homo sapien
atctgtaatatccgattaatatatc

SEQ ID NO: 5930594 - DNA, 25 bp, Homo sapien
gaaattattattacgaaatctgact

SEQ ID NO: 5930595 - DNA, 25 bp, Homo sapien
aagattcgtatagtatattatcagt

SEQ ID NO: 5930596 - DNA, 25 bp, Homo sapien
gtagttagccgataatattttttaa

SEQ ID NO: 5930597 - DNA, 25 bp, Homo sapien
cctacatccgattataattataaaa

SEQ ID NO: 5930598 - DNA, 25 bp, Homo sapien
ttctttaactataattatcgatgca

SEQ ID NO: 5930599 - DNA, 25 bp, Homo sapien
ggaaatcgattaactatatagaatt

SEQ ID NO: 5930600 - DNA, 25 bp, Homo sapien
aacattaataatcgacttatgatag

SEQ ID NO: 5930601 - DNA, 25 bp, Homo sapien
taatttgcgaaatttacgattgttt

SEQ ID NO: 5930602 - DNA, 25 bp, Homo sapien
attccttaattataccgtacatatt

SEQ ID NO: 5930603 - DNA, 25 bp, Homo sapien
ataattatacgactagataaccatt

SEQ ID NO: 5930604 - DNA, 25 bp, Homo sapien
accattaatcatatcgtaactaatt

SEQ ID NO: 5930605 - DNA, 25 bp, Homo sapien
atattgattctacgtaaatatcaca

SEQ ID NO: 5930606 - DNA, 25 bp, Homo sapien
aataatacgattaaaggttcattga

SEQ ID NO: 5930607 - DNA, 25 bp, Homo sapien
atctgataatatgtcgaaatgataa

SEQ ID NO: 5930608 - DNA, 25 bp, Homo sapien
tatgtatacattacgttaccatata

SEQ ID NO: 5930609 - DNA, 25 bp, Homo sapien
agtctcgtttggataatatattttt

SEQ ID NO: 5930610 - DNA, 25 bp, Homo sapien
ttaggagtcgaatattaatatctta

SEQ ID NO: 5930611 - DNA, 25 bp, Homo sapien
ttggtatattaatttaagcgagtta

SEQ ID NO: 5930612 - DNA, 25 bp, Homo sapien
ttgtacgcgaataaaattaaatgaa

SEQ ID NO: 5930613 - DNA, 25 bp, Homo sapien
atctaaacttatatcgataattcct

SEQ ID NO: 5930614 - DNA, 25 bp, Homo sapien
ctatattcgtacaagataattctaa

SEQ ID NO: 5930615 - DNA, 25 bp, Homo sapien
caatataaatattgattcgtaggaa

SEQ ID NO: 5930616 - DNA, 25 bp, Homo sapien
gaaataacgtactatttaatgaatc

SEQ ID NO: 5930617 - DNA, 25 bp, Homo sapien
tatttttatatacgattagtgatcc

SEQ ID NO: 5930618 - DNA, 25 bp, Homo sapien
aatctgcgcaaattttactaatatt

SEQ ID NO: 5930619 - DNA, 25 bp, Homo sapien
acatatagcgaattatatattactc

SEQ ID NO: 5930620 - DNA, 25 bp, Homo sapien
aatcctcgattaacacattatatat

SEQ ID NO: 5930621 - DNA, 25 bp, Homo sapien
catgtagttaatatcgtagttaata

SEQ ID NO: 5930622 - DNA, 25 bp, Homo sapien
gtgctttcgtaatctaatattatta

SEQ ID NO: 5930623 - DNA, 25 bp, Homo sapien
taatgcttatattattatcgctcaa

SEQ ID NO: 5930624 - DNA, 25 bp, Homo sapien
ttcaatattcgcaatatacctattt

SEQ ID NO: 5930625 - DNA, 25 bp, Homo sapien
atataaggtttcgtaataactgata

SEQ ID NO: 5930626 - DNA, 25 bp, Homo sapien
atctatattatgttagtcgaatatc

SEQ ID NO: 5930627 - DNA, 25 bp, Homo sapien
taaaatcgagttttttgaaatgcat

SEQ ID NO: 5930628 - DNA, 25 bp, Homo sapien
tagatattaatacgatttacttagc

SEQ ID NO: 5930629 - DNA, 25 bp, Homo sapien
atctatttgtaacgtccttatatat

SEQ ID NO: 5930630 - DNA, 25 bp, Homo sapien
taaagtaatactatatgacgttgta

SEQ ID NO: 5930631 - DNA, 25 bp, Homo sapien
catcaaccgatttaatataattgaa

SEQ ID NO: 5930632 - DNA, 25 bp, Homo sapien
atttaattaggactttcgttaatca

SEQ ID NO: 5930633 - DNA, 25 bp, Homo sapien
agataattaattaatcgtaccctta

SEQ ID NO: 5930634 - DNA, 25 bp, Homo sapien
gtaccttaattaagtatcgatatat

SEQ ID NO: 5930635 - DNA, 25 bp, Homo sapien
tgagtatacgagtaatctattatat

SEQ ID NO: 5930636 - DNA, 25 bp, Homo sapien
tattcgatcgtatatatgtctattt

SEQ ID NO: 5930637 - DNA, 25 bp, Homo sapien
accaatataagtttcgattaataag

SEQ ID NO: 5930638 - DNA, 25 bp, Homo sapien
agtaaatttatatcgtcgttaatca

SEQ ID NO: 5930639 - DNA, 25 bp, Homo sapien
tctagaactatcgaaatattatgta

SEQ ID NO: 5930640 - DNA, 25 bp, Homo sapien
gtatgttacaataaccgatttttta

SEQ ID NO: 5930641 - DNA, 25 bp, Homo sapien
aattctttaacgatagaatagttac

SEQ ID NO: 5930642 - DNA, 25 bp, Homo sapien
gtataacgctatttgtattacataa

SEQ ID NO: 5930643 - DNA, 25 bp, Homo sapien
tcttttcgtatcgtataattgtaat

SEQ ID NO: 5930644 - DNA, 25 bp, Homo sapien
gacaaatcgtaataagttaataagt

SEQ ID NO: 5930645 - DNA, 25 bp, Homo sapien
tattgtttatacgacaattagaaac

SEQ ID NO: 5930646 - DNA, 25 bp, Homo sapien
cctataccgaaattcaatattaata

SEQ ID NO: 5930647 - DNA, 25 bp, Homo sapien
ctaattgtaatatcggaacatttaa

SEQ ID NO: 5930648 - DNA, 25 bp, Homo sapien
acttagatttatcgaatactatttg

SEQ ID NO: 5930649 - DNA, 25 bp, Homo sapien
acattatatcaaacgactaatttca

SEQ ID NO: 5930650 - DNA, 25 bp, Homo sapien
ttatttatattaattcgacgcaaga

SEQ ID NO: 5930651 - DNA, 25 bp, Homo sapien
agaaacgtccaatataatttcttat

SEQ ID NO: 5930652 - DNA, 25 bp, Homo sapien
aacaataatcgataagactctttaa

SEQ ID NO: 5930653 - DNA, 25 bp, Homo sapien
ctgaattaatccgatataattgtat

SEQ ID NO: 5930654 - DNA, 25 bp, Homo sapien
tgttgtagttcgcattattatatat

SEQ ID NO: 5930655 - DNA, 25 bp, Homo sapien
aataatacgaatatccataaaggaa

SEQ ID NO: 5930656 - DNA, 25 bp, Homo sapien
caaattattatttttcggcaacatt

SEQ ID NO: 5930657 - DNA, 25 bp, Homo sapien
gataaataagcgaaaaaatcctaat

SEQ ID NO: 5930658 - DNA, 25 bp, Homo sapien
acgaaatagctaaatatcgttttta

SEQ ID NO: 5930659 - DNA, 25 bp, Homo sapien
ttttctttcgaaaaattgatagcaa

SEQ ID NO: 5930660 - DNA, 25 bp, Homo sapien
attattcgcataattacaagatcat

SEQ ID NO: 5930661 - DNA, 25 bp, Homo sapien
taacatatatagtatcgtgttaaca

SEQ ID NO: 5930662 - DNA, 25 bp, Homo sapien
aatctcgttgttgtagaattaattt

SEQ ID NO: 5930663 - DNA, 25 bp, Homo sapien
tctgaaattgttccgtaattttatt

SEQ ID NO: 5930664 - DNA, 25 bp, Homo sapien
gatagccaatttcgtaattatatat

SEQ ID NO: 5930665 - DNA, 25 bp, Homo sapien
cattattatatgcgataattggatt

SEQ ID NO: 5930666 - DNA, 25 bp, Homo sapien
atagtgataacgtttagatatgtaa

SEQ ID NO: 5930667 - DNA, 25 bp, Homo sapien
ttcaggtataatattacgaagtttt

SEQ ID NO: 5930668 - DNA, 25 bp, Homo sapien
aagatttattagcgatttgtttatg

SEQ ID NO: 5930669 - DNA, 25 bp, Homo sapien
ttcttatcgtaattgttatagttct

SEQ ID NO: 5930670 - DNA, 25 bp, Homo sapien
ataagaaaaattcgactataactca

SEQ ID NO: 5930671 - DNA, 25 bp, Homo sapien
tttcatacaataagatacgtctaat

SEQ ID NO: 5930672 - DNA, 25 bp, Homo sapien
attgacgtagtataataacattcat

SEQ ID NO: 5930673 - DNA, 25 bp, Homo sapien
atttcaattaattgcgattgaacat

SEQ ID NO: 5930674 - DNA, 25 bp, Homo sapien
ttaagataaaatacgaggtcattat

SEQ ID NO: 5930675 - DNA, 25 bp, Homo sapien
aataatcgcgttaagatatatatgt

SEQ ID NO: 5930676 - DNA, 25 bp, Homo sapien
aacagtgaactcgtaattattttta

SEQ ID NO: 5930677 - DNA, 25 bp, Homo sapien
ttgaaataacgacttatgtttaaca

SEQ ID NO: 5930678 - DNA, 25 bp, Homo sapien
attatgatcgctaatatatttcaag

SEQ ID NO: 5930679 - DNA, 25 bp, Homo sapien
atttccgttacgttaatctaatata

SEQ ID NO: 5930680 - DNA, 25 bp, Homo sapien
gatatctaaattacgattaatccta

SEQ ID NO: 5930681 - DNA, 25 bp, Homo sapien
tagcacaattttttcgtaatgtaat

SEQ ID NO: 5930682 - DNA, 25 bp, Homo sapien
tcatcactatcgattaatagtaaat

SEQ ID NO: 5930683 - DNA, 25 bp, Homo sapien
tgaaacgataaaattaattggcaaa

SEQ ID NO: 5930684 - DNA, 25 bp, Homo sapien
tcaaattataacgacgatatatgta

SEQ ID NO: 5930685 - DNA, 25 bp, Homo sapien
ctaatattcgctaaatatacatctt

SEQ ID NO: 5930686 - DNA, 25 bp, Homo sapien
atttcataaactttatcgactgata

SEQ ID NO: 5930687 - DNA, 25 bp, Homo sapien
attatatcaaattacgagagactat

SEQ ID NO: 5930688 - DNA, 25 bp, Homo sapien
ttaatacgttaatcaatatatgtgg

SEQ ID NO: 5930689 - DNA, 25 bp, Homo sapien
taataatatcgttatacaatgtcca

SEQ ID NO: 5930690 - DNA, 25 bp, Homo sapien
tgcaatttacatattacgatctaat

SEQ ID NO: 5930691 - DNA, 25 bp, Homo sapien
aacattagtaattgttatcgaaact

SEQ ID NO: 5930692 - DNA, 25 bp, Homo sapien
tatattacgaatcgtatattgatga

SEQ ID NO: 5930693 - DNA, 25 bp, Homo sapien
cattcaaaagtaatcggaattataa

SEQ ID NO: 5930694 - DNA, 25 bp, Homo sapien
cgtaagataatatatttcgttaact

SEQ ID NO: 5930695 - DNA, 25 bp, Homo sapien
aactcaataattagtacgaagaata

SEQ ID NO: 5930696 - DNA, 25 bp, Homo sapien
aatcacgataattttagtgtaatca

SEQ ID NO: 5930697 - DNA, 25 bp, Homo sapien
ttattacgataatctgcttatgaat

SEQ ID NO: 5930698 - DNA, 25 bp, Homo sapien
gtaatacgtattgctaaatctaaat

SEQ ID NO: 5930699 - DNA, 25 bp, Homo sapien
acaacatattcgattaagattcaat

SEQ ID NO: 5930700 - DNA, 25 bp, Homo sapien
ttacacgtctataagtaatatttag

SEQ ID NO: 5930701 - DNA, 25 bp, Homo sapien
agtcttaatcgtatataatgaaact

SEQ ID NO: 5930702 - DNA, 25 bp, Homo sapien
cttcaaatcgttatgcatatatttt

SEQ ID NO: 5930703 - DNA, 25 bp, Homo sapien
agaacttatctaatcgattatttag

SEQ ID NO: 5930704 - DNA, 25 bp, Homo sapien
taatataaactcgcttagtattcta

SEQ ID NO: 5930705 - DNA, 25 bp, Homo sapien
attaattacgctatgaactaagaaa

SEQ ID NO: 5930706 - DNA, 25 bp, Homo sapien
tagttatatagttccgaattcaata

SEQ ID NO: 5930707 - DNA, 25 bp, Homo sapien
ttaacaaatactataattcgcaatg

SEQ ID NO: 5930708 - DNA, 25 bp, Homo sapien
gactaacaagattatatcgttttaa

SEQ ID NO: 5930709 - DNA, 25 bp, Homo sapien
tatatatataagagttagcgttaac

SEQ ID NO: 5930710 - DNA, 25 bp, Homo sapien
agtttcgatcgaaataaatagaata

SEQ ID NO: 5930711 - DNA, 25 bp, Homo sapien
aattgatttacgttcgtacattata

SEQ ID NO: 5930712 - DNA, 25 bp, Homo sapien
cttcttaaacgatcgtaattaatta

SEQ ID NO: 5930713 - DNA, 25 bp, Homo sapien
aatttttcgttaaattagtcaagca

SEQ ID NO: 5930714 - DNA, 25 bp, Homo sapien
taataactaaatacatcgttggaaa

SEQ ID NO: 5930715 - DNA, 25 bp, Homo sapien
ctttatatcgaaatcttaattacca

SEQ ID NO: 5930716 - DNA, 25 bp, Homo sapien
tatttgatttatacacaacgcatta

SEQ ID NO: 5930717 - DNA, 25 bp, Homo sapien
caaataatattttcgcgtaatcata

SEQ ID NO: 5930718 - DNA, 25 bp, Homo sapien
aatatacaagatatattacggtgtt

SEQ ID NO: 5930719 - DNA, 25 bp, Homo sapien
tttagttcgaactaagttgattatt

SEQ ID NO: 5930720 - DNA, 25 bp, Homo sapien
ttgcgaattattcgattagtaatat

SEQ ID NO: 5930721 - DNA, 25 bp, Homo sapien
ttatgtatcgtataatggtaaatag

SEQ ID NO: 5930722 - DNA, 25 bp, Homo sapien
gactgcgatatataattgaaaaata

SEQ ID NO: 5930723 - DNA, 25 bp, Homo sapien
tgtaattaaatacgatcactatcat

SEQ ID NO: 5930724 - DNA, 25 bp, Homo sapien
tagcttcgaaatttgatataatgta

SEQ ID NO: 5930725 - DNA, 25 bp, Homo sapien
aatcgtgattcgacaataattaaat

SEQ ID NO: 5930726 - DNA, 25 bp, Homo sapien
ataattaatagaacggtataactga

SEQ ID NO: 5930727 - DNA, 25 bp, Homo sapien
attaaattgattacgcaatttcaga

SEQ ID NO: 5930728 - DNA, 25 bp, Homo sapien
ttataaatataatcgcgtccattta

SEQ ID NO: 5930729 - DNA, 25 bp, Homo sapien
ataggatttaaaattcgtcgattat

SEQ ID NO: 5930730 - DNA, 25 bp, Homo sapien
ttggaaattttcgattagtaagaaa

SEQ ID NO: 5930731 - DNA, 25 bp, Homo sapien
acctatcgctaatttattgtattat

SEQ ID NO: 5930732 - DNA, 25 bp, Homo sapien
ttaaagtcgcataattcattgaaat

SEQ ID NO: 5930733 - DNA, 25 bp, Homo sapien
agattaaacgaacttatattttgtg

SEQ ID NO: 5930734 - DNA, 25 bp, Homo sapien
ttcatgtttattcgaaattaccaat

SEQ ID NO: 5930735 - DNA, 25 bp, Homo sapien
agataggattaattaaatcgagtat

SEQ ID NO: 5930736 - DNA, 25 bp, Homo sapien
atagcatatcgagattataattatc

SEQ ID NO: 5930737 - DNA, 25 bp, Homo sapien
ttaatttattaaaagtccgatatcc

SEQ ID NO: 5930738 - DNA, 25 bp, Homo sapien
ctttaaataaggcgattataattac

SEQ ID NO: 5930739 - DNA, 25 bp, Homo sapien
attcccgttattatcgtatattaaa

SEQ ID NO: 5930740 - DNA, 25 bp, Homo sapien
tattgtggatcgaattacaaataaa

SEQ ID NO: 5930741 - DNA, 25 bp, Homo sapien
gttttatctatatcgaagatttttg

SEQ ID NO: 5930742 - DNA, 25 bp, Homo sapien
tttaactgtactttcgaatatttag

SEQ ID NO: 5930743 - DNA, 25 bp, Homo sapien
tatttataacaatattacgccattg

SEQ ID NO: 5930744 - DNA, 25 bp, Homo sapien
tcaattattgttcgatttactgtaa

SEQ ID NO: 5930745 - DNA, 25 bp, Homo sapien
atgcaatcgtcaattaattaatact

SEQ ID NO: 5930746 - DNA, 25 bp, Homo sapien
aaaatattattggatagcgttttga

SEQ ID NO: 5930747 - DNA, 25 bp, Homo sapien
ttgttattttatcgaattgggaata

SEQ ID NO: 5930748 - DNA, 25 bp, Homo sapien
tacatataatattcgtactagatca

SEQ ID NO: 5930749 - DNA, 25 bp, Homo sapien
cgttttagattaataatcgaatcat

SEQ ID NO: 5930750 - DNA, 25 bp, Homo sapien
tattctaaatagctttacgagattt

SEQ ID NO: 5930751 - DNA, 25 bp, Homo sapien
ttatcagtgaaatataacgcattta

SEQ ID NO: 5930752 - DNA, 25 bp, Homo sapien
cattaaatagacattaacgaattct

SEQ ID NO: 5930753 - DNA, 25 bp, Homo sapien
atcaaaatatatcgatacgaatact

SEQ ID NO: 5930754 - DNA, 25 bp, Homo sapien
tatatcgatataacacaacaaagtt

SEQ ID NO: 5930755 - DNA, 25 bp, Homo sapien
ttatggcaatcgtactattttttat

SEQ ID NO: 5930756 - DNA, 25 bp, Homo sapien
tctcaggattatattaacgatattt

SEQ ID NO: 5930757 - DNA, 25 bp, Homo sapien
tttatcatatttttcgaactaagtc

SEQ ID NO: 5930758 - DNA, 25 bp, Homo sapien
tataacttacgaattgaacataatc

SEQ ID NO: 5930759 - DNA, 25 bp, Homo sapien
gtaactagacattcgtaaattatat

SEQ ID NO: 5930760 - DNA, 25 bp, Homo sapien
tagtgtgtataacgataatctttat

SEQ ID NO: 5930761 - DNA, 25 bp, Homo sapien
atgtaattaacggatttataatctg

SEQ ID NO: 5930762 - DNA, 25 bp, Homo sapien
ctattatatattttcgcgaattcat

SEQ ID NO: 5930763 - DNA, 25 bp, Homo sapien
ttatgatttacgtagttagttttct

SEQ ID NO: 5930764 - DNA, 25 bp, Homo sapien
tttaaaaatcgatatcaacgtcaaa

SEQ ID NO: 5930765 - DNA, 25 bp, Homo sapien
tacaacgacatattaatattgaatc

SEQ ID NO: 5930766 - DNA, 25 bp, Homo sapien
ttactgcgatatttaagttatacaa

SEQ ID NO: 5930767 - DNA, 25 bp, Homo sapien
ataaaatagaattcgagtatcatga

SEQ ID NO: 5930768 - DNA, 25 bp, Homo sapien
aaaacatgatatagcgtttataaag

SEQ ID NO: 5930769 - DNA, 25 bp, Homo sapien
ttatatattgtgtcgaataaagaga

SEQ ID NO: 5930770 - DNA, 25 bp, Homo sapien
tatttcgatgatattagatacttag

SEQ ID NO: 5930771 - DNA, 25 bp, Homo sapien
tacatttgtaatatcgtcagattta

SEQ ID NO: 5930772 - DNA, 25 bp, Homo sapien
acactattgttaataaatcggataa

SEQ ID NO: 5930773 - DNA, 25 bp, Homo sapien
tcatagcgtaaaataatttagttgt

SEQ ID NO: 5930774 - DNA, 25 bp, Homo sapien
ataaaacgaatgatattacttcaag

SEQ ID NO: 5930775 - DNA, 25 bp, Homo sapien
ctaagaaacttatcgtttaaatcaa

SEQ ID NO: 5930776 - DNA, 25 bp, Homo sapien
agaaattaaattaaccgctataatc

SEQ ID NO: 5930777 - DNA, 25 bp, Homo sapien
ataaaaatctacttaacgaagttga

SEQ ID NO: 5930778 - DNA, 25 bp, Homo sapien
aaaggatttattgcgattaaaacat

SEQ ID NO: 5930779 - DNA, 25 bp, Homo sapien
atttaagacgtactaatatgaagta

SEQ ID NO: 5930780 - DNA, 25 bp, Homo sapien
caagttaacgatactattatactaa

SEQ ID NO: 5930781 - DNA, 25 bp, Homo sapien
acgatttataagtattcgtttacat

SEQ ID NO: 5930782 - DNA, 25 bp, Homo sapien
attacaatacgatagttctagattt

SEQ ID NO: 5930783 - DNA, 25 bp, Homo sapien
aatattatgtccgaaaataatgact

SEQ ID NO: 5930784 - DNA, 25 bp, Homo sapien
aaaaagagtatcgtataatatctgt

SEQ ID NO: 5930785 - DNA, 25 bp, Homo sapien
aaatacatagtacgaaatatcgtaa

SEQ ID NO: 5930786 - DNA, 25 bp, Homo sapien
gttaacatagaatacgaatatatag

SEQ ID NO: 5930787 - DNA, 25 bp, Homo sapien
ctattttaatgtataatcgtgtaca

SEQ ID NO: 5930788 - DNA, 25 bp, Homo sapien
tgtactataagaaatcgcattaaaa

SEQ ID NO: 5930789 - DNA, 25 bp, Homo sapien
gcttaattatagtcgattaacaatt

SEQ ID NO: 5930790 - DNA, 25 bp, Homo sapien
gattctcgaattatactgtttaaat

SEQ ID NO: 5930791 - DNA, 25 bp, Homo sapien
tgataattcaatttaacgatggtaa

SEQ ID NO: 5930792 - DNA, 25 bp, Homo sapien
aacaataattcgcgatatgatatta

SEQ ID NO: 5930793 - DNA, 25 bp, Homo sapien
tttctagactaattacgttttctat

SEQ ID NO: 5930794 - DNA, 25 bp, Homo sapien
caaaaaattatagtcgctatagttt

SEQ ID NO: 5930795 - DNA, 25 bp, Homo sapien
tatcaaattacgtttaatcggttta

SEQ ID NO: 5930796 - DNA, 25 bp, Homo sapien
cataccattattatgacgaataata

SEQ ID NO: 5930797 - DNA, 25 bp, Homo sapien
attggtatctaacgactattaataa

SEQ ID NO: 5930798 - DNA, 25 bp, Homo sapien
aacgatatacacgactatttaataa

SEQ ID NO: 5930799 - DNA, 25 bp, Homo sapien
aaatttagtatatcgattgtgttga

SEQ ID NO: 5930800 - DNA, 25 bp, Homo sapien
atttgtactactatacgaattttgt

SEQ ID NO: 5930801 - DNA, 25 bp, Homo sapien
tactgtatatcgcgtaatttaataa

SEQ ID NO: 5930802 - DNA, 25 bp, Homo sapien
tttttagattcgtgcgttaattatt

SEQ ID NO: 5930803 - DNA, 25 bp, Homo sapien
acctacgataaactaatatttcata

SEQ ID NO: 5930804 - DNA, 25 bp, Homo sapien
atatgaatttaagcgtataagtgta

SEQ ID NO: 5930805 - DNA, 25 bp, Homo sapien
actaaattttatagcgtagttcaaa

SEQ ID NO: 5930806 - DNA, 25 bp, Homo sapien
tatcgtatactcgaaactttaaata

SEQ ID NO: 5930807 - DNA, 25 bp, Homo sapien
atgtttttttagacgatcaatgtat

SEQ ID NO: 5930808 - DNA, 25 bp, Homo sapien
aagcgtcattataatcgaaaattat

SEQ ID NO: 5930809 - DNA, 25 bp, Homo sapien
ataaataataacttgatcgcttgat

SEQ ID NO: 5930810 - DNA, 25 bp, Homo sapien
gctataatcgcgataaaatataata

SEQ ID NO: 5930811 - DNA, 25 bp, Homo sapien
tttgcattagtatactatcgttttt

SEQ ID NO: 5930812 - DNA, 25 bp, Homo sapien
ggaattatcgtataaatagttagta

SEQ ID NO: 5930813 - DNA, 25 bp, Homo sapien
ccttacaatcgaaattgataattat

SEQ ID NO: 5930814 - DNA, 25 bp, Homo sapien
gataaatatacttcttacgaaaatg

SEQ ID NO: 5930815 - DNA, 25 bp, Homo sapien
taggacgcattattaatatcattaa

SEQ ID NO: 5930816 - DNA, 25 bp, Homo sapien
tgcgacaattttacgaatatttatt

SEQ ID NO: 5930817 - DNA, 25 bp, Homo sapien
tattaaatagatttaaatcgacgag

SEQ ID NO: 5930818 - DNA, 25 bp, Homo sapien
gaaaataatatacgacgtacttaat

SEQ ID NO: 5930819 - DNA, 25 bp, Homo sapien
taatcttcgtaaatagattgtattg

SEQ ID NO: 5930820 - DNA, 25 bp, Homo sapien
aactaattatatcgtgaatactgtt

SEQ ID NO: 5930821 - DNA, 25 bp, Homo sapien
tatacactcgtattaatagtttctt

SEQ ID NO: 5930822 - DNA, 25 bp, Homo sapien
ttttataaacaattcgaccacaata

SEQ ID NO: 5930823 - DNA, 25 bp, Homo sapien
tggactaattgacgaaattaaaaaa

SEQ ID NO: 5930824 - DNA, 25 bp, Homo sapien
atcaatttagtcgctaaataatagt

SEQ ID NO: 5930825 - DNA, 25 bp, Homo sapien
gataaactaagtatatcgataaatc

SEQ ID NO: 5930826 - DNA, 25 bp, Homo sapien
ttagtgttaatcgtataataaacct

SEQ ID NO: 5930827 - DNA, 25 bp, Homo sapien
gttctatttctcgaaaaaatattac

SEQ ID NO: 5930828 - DNA, 25 bp, Homo sapien
atgcacgattaataattagatatca

SEQ ID NO: 5930829 - DNA, 25 bp, Homo sapien
gttgatattaatcgaacttttgaaa

SEQ ID NO: 5930830 - DNA, 25 bp, Homo sapien
cacataattaacgataaatcatttc

SEQ ID NO: 5930831 - DNA, 25 bp, Homo sapien
tttttaataatatacttgcgtacga

SEQ ID NO: 5930832 - DNA, 25 bp, Homo sapien
tattatataataatagatcgtcgct

SEQ ID NO: 5930833 - DNA, 25 bp, Homo sapien
agatgaatctttatcgatataatac

SEQ ID NO: 5930834 - DNA, 25 bp, Homo sapien
catatattgcgatattattagattc

SEQ ID NO: 5930835 - DNA, 25 bp, Homo sapien
catatacgctaaatataattgaaag

SEQ ID NO: 5930836 - DNA, 25 bp, Homo sapien
agagctatttactaacgatttttat

SEQ ID NO: 5930837 - DNA, 25 bp, Homo sapien
aaacatcgatcgtaaaaatatctaa

SEQ ID NO: 5930838 - DNA, 25 bp, Homo sapien
aatttcgataatcagtaattgtaag

SEQ ID NO: 5930839 - DNA, 25 bp, Homo sapien
tatttatagtaattcgacgaattgt

SEQ ID NO: 5930840 - DNA, 25 bp, Homo sapien
aaatactagtattagaacgaatttc

SEQ ID NO: 5930841 - DNA, 25 bp, Homo sapien
ttcaatacgattttcgtaacaatat

SEQ ID NO: 5930842 - DNA, 25 bp, Homo sapien
agtgctagataattaattcgtaatt

SEQ ID NO: 5930843 - DNA, 25 bp, Homo sapien
atatatacgatgtgactaatatttg

SEQ ID NO: 5930844 - DNA, 25 bp, Homo sapien
ttttatttaataacattcggagttg

SEQ ID NO: 5930845 - DNA, 25 bp, Homo sapien
tttgcttgtacgtaatttagatata

SEQ ID NO: 5930846 - DNA, 25 bp, Homo sapien
aaatatatatttacgaacgaaagca

SEQ ID NO: 5930847 - DNA, 25 bp, Homo sapien
tcattcgttagattagtaatatttg

SEQ ID NO: 5930848 - DNA, 25 bp, Homo sapien
cagaattatacgattaatctaaaac

SEQ ID NO: 5930849 - DNA, 25 bp, Homo sapien
aagaacgtatgataaatatccaata

SEQ ID NO: 5930850 - DNA, 25 bp, Homo sapien
tacataatttttatcggattcacaa

SEQ ID NO: 5930851 - DNA, 25 bp, Homo sapien
atagtaatttgtcgttatatgcata

SEQ ID NO: 5930852 - DNA, 25 bp, Homo sapien
acttcacaagtatcgatatatatat

SEQ ID NO: 5930853 - DNA, 25 bp, Homo sapien
tatttattaatcgtaatgatcttcg

SEQ ID NO: 5930854 - DNA, 25 bp, Homo sapien
ctattacaatacgtaaatttgtcta

SEQ ID NO: 5930855 - DNA, 25 bp, Homo sapien
ggttataaatcgttatagtaagtta

SEQ ID NO: 5930856 - DNA, 25 bp, Homo sapien
attttcttatatatacgataaccac

SEQ ID NO: 5930857 - DNA, 25 bp, Homo sapien
cgaaaatttaacgacttataacata

SEQ ID NO: 5930858 - DNA, 25 bp, Homo sapien
ttaaacaatttacgatacaatacct

SEQ ID NO: 5930859 - DNA, 25 bp, Homo sapien
tagacattataatcgtagattgtaa

SEQ ID NO: 5930860 - DNA, 25 bp, Homo sapien
attaatctttacgtaatatgacagt

SEQ ID NO: 5930861 - DNA, 25 bp, Homo sapien
acaaataatcgcttgaaatactttt

SEQ ID NO: 5930862 - DNA, 25 bp, Homo sapien
atactaagtgcaattttcgtttatt

SEQ ID NO: 5930863 - DNA, 25 bp, Homo sapien
taagttataattcgatatagcgaat

SEQ ID NO: 5930864 - DNA, 25 bp, Homo sapien
tcgtatcaatttaacgattctatat

SEQ ID NO: 5930865 - DNA, 25 bp, Homo sapien
ataattcgcgtataaaaaatagcat

SEQ ID NO: 5930866 - DNA, 25 bp, Homo sapien
attatttcgaatatcgtatatacct

SEQ ID NO: 5930867 - DNA, 25 bp, Homo sapien
cttgtcgtttcgataatattttaat

SEQ ID NO: 5930868 - DNA, 25 bp, Homo sapien
tattgattataatcgatatggtctt

SEQ ID NO: 5930869 - DNA, 25 bp, Homo sapien
caaaatatcgataatattagaagtg

SEQ ID NO: 5930870 - DNA, 25 bp, Homo sapien
aagtattattattgatacgcaaatg

SEQ ID NO: 5930871 - DNA, 25 bp, Homo sapien
tattggttatgatataacgagataa

SEQ ID NO: 5930872 - DNA, 25 bp, Homo sapien
atctatatattagttcgacagaatt

SEQ ID NO: 5930873 - DNA, 25 bp, Homo sapien
attattaaattcgatcaactgttag

SEQ ID NO: 5930874 - DNA, 25 bp, Homo sapien
tctttgttaataataacgctttcat

SEQ ID NO: 5930875 - DNA, 25 bp, Homo sapien
attgttatcgatacattcgaatttt

SEQ ID NO: 5930876 - DNA, 25 bp, Homo sapien
aatctcggtataatatattaagctt

SEQ ID NO: 5930877 - DNA, 25 bp, Homo sapien
aatagatattcgattataaccatga

SEQ ID NO: 5930878 - DNA, 25 bp, Homo sapien
atgaaatataatcggctaatactaa

SEQ ID NO: 5930879 - DNA, 25 bp, Homo sapien
ttaggataaatttcgcataaattct

SEQ ID NO: 5930880 - DNA, 25 bp, Homo sapien
gtattcgtatagatattactcattt

SEQ ID NO: 5930881 - DNA, 25 bp, Homo sapien
acgattttatatcgaatagaacttt

SEQ ID NO: 5930882 - DNA, 25 bp, Homo sapien
agatacgatcgaaatatatttttct

SEQ ID NO: 5930883 - DNA, 25 bp, Homo sapien
gtttttcgaatctattaatgattac

SEQ ID NO: 5930884 - DNA, 25 bp, Homo sapien
cgagtcggtataataatattttaaa

SEQ ID NO: 5930885 - DNA, 25 bp, Homo sapien
gatactcgtaatattatgatattga

SEQ ID NO: 5930886 - DNA, 25 bp, Homo sapien
ctagcagtttaatacgttaattaat

SEQ ID NO: 5930887 - DNA, 25 bp, Homo sapien
ttatttcaacataagtcgatttctt

SEQ ID NO: 5930888 - DNA, 25 bp, Homo sapien
tttaatcgattataatatacaggac

SEQ ID NO: 5930889 - DNA, 25 bp, Homo sapien
agcattaacgtaataagtatatcaa

SEQ ID NO: 5930890 - DNA, 25 bp, Homo sapien
tatacatatctaatcgaataagact

SEQ ID NO: 5930891 - DNA, 25 bp, Homo sapien
tgttcatataagttatcgacaattt

SEQ ID NO: 5930892 - DNA, 25 bp, Homo sapien
tgatttacataaattagcgatttag

SEQ ID NO: 5930893 - DNA, 25 bp, Homo sapien
ctgatatagatataaactcgtatat

SEQ ID NO: 5930894 - DNA, 25 bp, Homo sapien
agctacttaataattatacgtaact

SEQ ID NO: 5930895 - DNA, 25 bp, Homo sapien
ttgtataagtaatcgtataaatacc

SEQ ID NO: 5930896 - DNA, 25 bp, Homo sapien
ttatgttcgtaacgaattagaatat

SEQ ID NO: 5930897 - DNA, 25 bp, Homo sapien
tattcatttcgtactaatcatgttt

SEQ ID NO: 5930898 - DNA, 25 bp, Homo sapien
ttttgtattaatttacgctaacagt

SEQ ID NO: 5930899 - DNA, 25 bp, Homo sapien
aatcttgataaatagtcgatagaaa

SEQ ID NO: 5930900 - DNA, 25 bp, Homo sapien
tttgttacgattaattgttaagttg

SEQ ID NO: 5930901 - DNA, 25 bp, Homo sapien
aggtttatgcgaaataagatatata

SEQ ID NO: 5930902 - DNA, 25 bp, Homo sapien
taagtatcgactactaatttattac

SEQ ID NO: 5930903 - DNA, 25 bp, Homo sapien
tagaaattaacattcgattagagat

SEQ ID NO: 5930904 - DNA, 25 bp, Homo sapien
gtatatcgtaaatctattatgaatc

SEQ ID NO: 5930905 - DNA, 25 bp, Homo sapien
tttgtagttcgttaatgtttattca

SEQ ID NO: 5930906 - DNA, 25 bp, Homo sapien
cattttaaagcgaaagtttattcat

SEQ ID NO: 5930907 - DNA, 25 bp, Homo sapien
atgaataatactacgaatagatttc

SEQ ID NO: 5930908 - DNA, 25 bp, Homo sapien
atacatataattcgattactccaaa

SEQ ID NO: 5930909 - DNA, 25 bp, Homo sapien
caaattaacgcaacaatataataac

SEQ ID NO: 5930910 - DNA, 25 bp, Homo sapien
taatttacgataatattgacctgtt

SEQ ID NO: 5930911 - DNA, 25 bp, Homo sapien
tactaagcgttattaagtaatagta

SEQ ID NO: 5930912 - DNA, 25 bp, Homo sapien
tatttaatcgacgtattttttgagt

SEQ ID NO: 5930913 - DNA, 25 bp, Homo sapien
aatatatcgaaattcgtaaagcata

SEQ ID NO: 5930914 - DNA, 25 bp, Homo sapien
aaactcgataacttatatgtaattg

SEQ ID NO: 5930915 - DNA, 25 bp, Homo sapien
gtttatcttataacgctataaaaca

SEQ ID NO: 5930916 - DNA, 25 bp, Homo sapien
ctgatattcgacatattatataatg

SEQ ID NO: 5930917 - DNA, 25 bp, Homo sapien
cgtatgtcgataagataatatataa

SEQ ID NO: 5930918 - DNA, 25 bp, Homo sapien
aagtatttagtcgaaaattaatcac

SEQ ID NO: 5930919 - DNA, 25 bp, Homo sapien
tatttcatataatacgaggtaattg

SEQ ID NO: 5930920 - DNA, 25 bp, Homo sapien
aatctcattacgtaataatttcatc

SEQ ID NO: 5930921 - DNA, 25 bp, Homo sapien
attgattataaattccgatatagac

SEQ ID NO: 5930922 - DNA, 25 bp, Homo sapien
tatatttttatcgttaatagcccat

SEQ ID NO: 5930923 - DNA, 25 bp, Homo sapien
tacatacttattaatcgctaaactt

SEQ ID NO: 5930924 - DNA, 25 bp, Homo sapien
ttattgttcttattatcgacgtatt

SEQ ID NO: 5930925 - DNA, 25 bp, Homo sapien
cttaaccgataactataatagaaat

SEQ ID NO: 5930926 - DNA, 25 bp, Homo sapien
cagatatttcgtaatagatatctta

SEQ ID NO: 5930927 - DNA, 25 bp, Homo sapien
taatcaatagtgtcgatatatacat

SEQ ID NO: 5930928 - DNA, 25 bp, Homo sapien
ttacacgacaaaacattataaaaca

SEQ ID NO: 5930929 - DNA, 25 bp, Homo sapien
taaatatagcataaacgatttcatc

SEQ ID NO: 5930930 - DNA, 25 bp, Homo sapien
aacatttaatttacatcgatacaga

SEQ ID NO: 5930931 - DNA, 25 bp, Homo sapien
cgtatattaacaattcgataaaaca

SEQ ID NO: 5930932 - DNA, 25 bp, Homo sapien
agtatatctaatcggatataattga

SEQ ID NO: 5930933 - DNA, 25 bp, Homo sapien
catcaatatagatcgattaaacatt

SEQ ID NO: 5930934 - DNA, 25 bp, Homo sapien
tacctacgtaatattatcgttatat

SEQ ID NO: 5930935 - DNA, 25 bp, Homo sapien
atcactaatacgataacgtttatat

SEQ ID NO: 5930936 - DNA, 25 bp, Homo sapien
tcaacttacggtatttaatgaaaat

SEQ ID NO: 5930937 - DNA, 25 bp, Homo sapien
acaagttgataaacgataattttca

SEQ ID NO: 5930938 - DNA, 25 bp, Homo sapien
tatattctataacgattgacgaaaa

SEQ ID NO: 5930939 - DNA, 25 bp, Homo sapien
atctctaactaatcgtaatataatc

SEQ ID NO: 5930940 - DNA, 25 bp, Homo sapien
aatcaatagttatttaatcgccatt

SEQ ID NO: 5930941 - DNA, 25 bp, Homo sapien
ataatatattaatacgaccttggat

SEQ ID NO: 5930942 - DNA, 25 bp, Homo sapien
tgttattatgataacttcgagtata

SEQ ID NO: 5930943 - DNA, 25 bp, Homo sapien
cttaagtcgaattcatatgatataa

SEQ ID NO: 5930944 - DNA, 25 bp, Homo sapien
aactaattaacatcgagtaataaca

SEQ ID NO: 5930945 - DNA, 25 bp, Homo sapien
ggattttagtgatcgattaatttta

SEQ ID NO: 5930946 - DNA, 25 bp, Homo sapien
tagtcttatcatacgattaaaaaca

SEQ ID NO: 5930947 - DNA, 25 bp, Homo sapien
tgtaatcgaaaaagttaatgcttta

SEQ ID NO: 5930948 - DNA, 25 bp, Homo sapien
gtctataattttcgatcgataaaat

SEQ ID NO: 5930949 - DNA, 25 bp, Homo sapien
taagactaacgttaatataatatcc

SEQ ID NO: 5930950 - DNA, 25 bp, Homo sapien
tatattacgtattagcgtatataag

SEQ ID NO: 5930951 - DNA, 25 bp, Homo sapien
tgattattaaggattaacgaaatac

SEQ ID NO: 5930952 - DNA, 25 bp, Homo sapien
atgttatagaacgacctaatttaaa

SEQ ID NO: 5930953 - DNA, 25 bp, Homo sapien
ctaaagcgcattatagtttaaaaat

SEQ ID NO: 5930954 - DNA, 25 bp, Homo sapien
aaagttacgaaatatgattatcttg

SEQ ID NO: 5930955 - DNA, 25 bp, Homo sapien
aaagatttcgtattaataagcttag

SEQ ID NO: 5930956 - DNA, 25 bp, Homo sapien
tcaagaagtaataccgattaattta

SEQ ID NO: 5930957 - DNA, 25 bp, Homo sapien
gacatatatcgtaatttgatgaatt

SEQ ID NO: 5930958 - DNA, 25 bp, Homo sapien
tatcatattcaaacgaactttttac

SEQ ID NO: 5930959 - DNA, 25 bp, Homo sapien
cataatagttaatattcgtactgta

SEQ ID NO: 5930960 - DNA, 25 bp, Homo sapien
aaaatcctatatcgaataatggaaa

SEQ ID NO: 5930961 - DNA, 25 bp, Homo sapien
ttgtattataaatgcgatatcgttt

SEQ ID NO: 5930962 - DNA, 25 bp, Homo sapien
tttgaatcgaactattatttgtatg

SEQ ID NO: 5930963 - DNA, 25 bp, Homo sapien
aagtaaacgtatcgatttgatattt

SEQ ID NO: 5930964 - DNA, 25 bp, Homo sapien
aatttcgatataaagattagacgta

SEQ ID NO: 5930965 - DNA, 25 bp, Homo sapien
agtgcaatcgtaatcttaataataa

SEQ ID NO: 5930966 - DNA, 25 bp, Homo sapien
aagttttcataatcgataatacgta

SEQ ID NO: 5930967 - DNA, 25 bp, Homo sapien
gatatcataagcgtaatgttatata

SEQ ID NO: 5930968 - DNA, 25 bp, Homo sapien
ttagtatatgatgatcgaaaacttt

SEQ ID NO: 5930969 - DNA, 25 bp, Homo sapien
agttctcgcattacattaatatatt

SEQ ID NO: 5930970 - DNA, 25 bp, Homo sapien
tctttcgatactaatacttaagttt

SEQ ID NO: 5930971 - DNA, 25 bp, Homo sapien
ctttttcgaatcttatcttagtatt

SEQ ID NO: 5930972 - DNA, 25 bp, Homo sapien
tttgatagtacatcggtaaatgata

SEQ ID NO: 5930973 - DNA, 25 bp, Homo sapien
aaagtatacgaatcaatagagtttg

SEQ ID NO: 5930974 - DNA, 25 bp, Homo sapien
gtaaacgtctatttaataacaaagc

SEQ ID NO: 5930975 - DNA, 25 bp, Homo sapien
aacatatacgaatcattcgattttg

SEQ ID NO: 5930976 - DNA, 25 bp, Homo sapien
agaaagatactatcggtaaagatta

SEQ ID NO: 5930977 - DNA, 25 bp, Homo sapien
gtactattattagatcgtacatctt

SEQ ID NO: 5930978 - DNA, 25 bp, Homo sapien
tcgaatttatttcgaacttaactag

SEQ ID NO: 5930979 - DNA, 25 bp, Homo sapien
tttcattatattgatcgaaaaggtc

SEQ ID NO: 5930980 - DNA, 25 bp, Homo sapien
aaaatttcgcgaatgttattgaatg

SEQ ID NO: 5930981 - DNA, 25 bp, Homo sapien
taatatgaattatatccggacgtta

SEQ ID NO: 5930982 - DNA, 25 bp, Homo sapien
tagaacagcgaattaataattctga

SEQ ID NO: 5930983 - DNA, 25 bp, Homo sapien
cagtatatattaatccgatagacta

SEQ ID NO: 5930984 - DNA, 25 bp, Homo sapien
tcgattaataatttgcgtcataagt

SEQ ID NO: 5930985 - DNA, 25 bp, Homo sapien
ttcatttcgttcaattaagtacgat

SEQ ID NO: 5930986 - DNA, 25 bp, Homo sapien
aatatacgaatatcgtacgaatatg

SEQ ID NO: 5930987 - DNA, 25 bp, Homo sapien
tttagacaatattaatcgcttcaga

SEQ ID NO: 5930988 - DNA, 25 bp, Homo sapien
tcacattttttcgtgcattatattg

SEQ ID NO: 5930989 - DNA, 25 bp, Homo sapien
aacaaaactctatacgacaaaacta

SEQ ID NO: 5930990 - DNA, 25 bp, Homo sapien
tggtataatcgaacataactttgta

SEQ ID NO: 5930991 - DNA, 25 bp, Homo sapien
gtttatttttcgattactaattgcc

SEQ ID NO: 5930992 - DNA, 25 bp, Homo sapien
aatccttaaacaattgtcgctaata

SEQ ID NO: 5930993 - DNA, 25 bp, Homo sapien
tcatgctactgattaaacgaaatta

SEQ ID NO: 5930994 - DNA, 25 bp, Homo sapien
gtaaaatcgtaggtgtaaaatatgt

SEQ ID NO: 5930995 - DNA, 25 bp, Homo sapien
ggaatctataatgtacgattcataa

SEQ ID NO: 5930996 - DNA, 25 bp, Homo sapien
ctagcgtttataaattatcggtaat

SEQ ID NO: 5930997 - DNA, 25 bp, Homo sapien
tgttaaaaacgttattcgatactga

SEQ ID NO: 5930998 - DNA, 25 bp, Homo sapien
tgttctaacgctatgataatatgat

SEQ ID NO: 5930999 - DNA, 25 bp, Homo sapien
tctaatagatagtacgcataacatt

SEQ ID NO: 5931000 - DNA, 25 bp, Homo sapien
gatatatagtatttcgttcatggta

SEQ ID NO: 5931001 - DNA, 25 bp, Homo sapien
ccaatgaattatattgcgatgtaat

SEQ ID NO: 5931002 - DNA, 25 bp, Homo sapien
tctttaatttaatcgaacgcgttta

SEQ ID NO: 5931003 - DNA, 25 bp, Homo sapien
ttatatgataggtaaacgaaacgat

SEQ ID NO: 5931004 - DNA, 25 bp, Homo sapien
gaactattatcgcgtagtaataatt

SEQ ID NO: 5931005 - DNA, 25 bp, Homo sapien
caacacgttaaattaactattgttg

SEQ ID NO: 5931006 - DNA, 25 bp, Homo sapien
cattcctaatttcatcgtcaaatat

SEQ ID NO: 5931007 - DNA, 25 bp, Homo sapien
gtatcacttcttatcggtataaata

SEQ ID NO: 5931008 - DNA, 25 bp, Homo sapien
tctaagtaagcgtattattagtgaa

SEQ ID NO: 5931009 - DNA, 25 bp, Homo sapien
gactctttaataacgatatgacata

SEQ ID NO: 5931010 - DNA, 25 bp, Homo sapien
aggctaaattagcgatattaaattg

SEQ ID NO: 5931011 - DNA, 25 bp, Homo sapien
aattatataatgagtcgtattctgg

SEQ ID NO: 5931012 - DNA, 25 bp, Homo sapien
gaagcttacgtctaaatatattctt

SEQ ID NO: 5931013 - DNA, 25 bp, Homo sapien
attatacgcgaaatacaatacctat

SEQ ID NO: 5931014 - DNA, 25 bp, Homo sapien
gattgacgttaaagtgatattttac

SEQ ID NO: 5931015 - DNA, 25 bp, Homo sapien
aaacggtaacgttatattgacataa

SEQ ID NO: 5931016 - DNA, 25 bp, Homo sapien
agaaattacttcgatatatagcgaa

SEQ ID NO: 5931017 - DNA, 25 bp, Homo sapien
tcaatatagatatttaaccgcagtt

SEQ ID NO: 5931018 - DNA, 25 bp, Homo sapien
gattgaattgtgcgatatgaaaaaa

SEQ ID NO: 5931019 - DNA, 25 bp, Homo sapien
agatttctcgaattttaccatattg

SEQ ID NO: 5931020 - DNA, 25 bp, Homo sapien
tccgttcgtactatataatgtaata

SEQ ID NO: 5931021 - DNA, 25 bp, Homo sapien
tcaatgagtataattacgaactaca

SEQ ID NO: 5931022 - DNA, 25 bp, Homo sapien
gcttgtacgaaataatactatagaa

SEQ ID NO: 5931023 - DNA, 25 bp, Homo sapien
cctcatctatttacgatacatatat

SEQ ID NO: 5931024 - DNA, 25 bp, Homo sapien
gattcattgcacgatttgaaaaaat

SEQ ID NO: 5931025 - DNA, 25 bp, Homo sapien
acaaaagcgaaacgttaaatatgat

SEQ ID NO: 5931026 - DNA, 25 bp, Homo sapien
gtttttcgagagtaatataatgaag

SEQ ID NO: 5931027 - DNA, 25 bp, Homo sapien
taactaattacgcttactagctaat

SEQ ID NO: 5931028 - DNA, 25 bp, Homo sapien
acataattctaaactagacgatctt

SEQ ID NO: 5931029 - DNA, 25 bp, Homo sapien
ctgtaaatcgttattcaatattctg

SEQ ID NO: 5931030 - DNA, 25 bp, Homo sapien
tggaataacgattagataaacctaa

SEQ ID NO: 5931031 - DNA, 25 bp, Homo sapien
acaatctcgattaatttcaaaggat

SEQ ID NO: 5931032 - DNA, 25 bp, Homo sapien
aaagctacgaatatcgattttgttt

SEQ ID NO: 5931033 - DNA, 25 bp, Homo sapien
agctcttatatcgtattagatatct

SEQ ID NO: 5931034 - DNA, 25 bp, Homo sapien
tttatcgaacatattatgaaagtgg

SEQ ID NO: 5931035 - DNA, 25 bp, Homo sapien
actacgttaaataattcgatctcat

SEQ ID NO: 5931036 - DNA, 25 bp, Homo sapien
tcaattatcgaattttagcgtttgt

SEQ ID NO: 5931037 - DNA, 25 bp, Homo sapien
taaattcgtcttatagcgtattaca

SEQ ID NO: 5931038 - DNA, 25 bp, Homo sapien
cagttcaataattaacgttagtaga

SEQ ID NO: 5931039 - DNA, 25 bp, Homo sapien
gtattattaattcttgacgactatc

SEQ ID NO: 5931040 - DNA, 25 bp, Homo sapien
tagttatttaaccatcgaatattgc

SEQ ID NO: 5931041 - DNA, 25 bp, Homo sapien
aatgaaagtgtacgattaatcagaa

SEQ ID NO: 5931042 - DNA, 25 bp, Homo sapien
tctttatctattcgatatgaaagtc

SEQ ID NO: 5931043 - DNA, 25 bp, Homo sapien
aaatttatctagcgcgataatttgt

SEQ ID NO: 5931044 - DNA, 25 bp, Homo sapien
ttatacgttataaatataagctggg

SEQ ID NO: 5931045 - DNA, 25 bp, Homo sapien
gtaagcgataattattcgtaaaaga

SEQ ID NO: 5931046 - DNA, 25 bp, Homo sapien
tggatcttaatcgaaataattatcg

SEQ ID NO: 5931047 - DNA, 25 bp, Homo sapien
atttaatgcgaactttagtacacta

SEQ ID NO: 5931048 - DNA, 25 bp, Homo sapien
tattatcgtacgaacgtaaattctt

SEQ ID NO: 5931049 - DNA, 25 bp, Homo sapien
aaaagtcaatcgtaaactatgtgtt

SEQ ID NO: 5931050 - DNA, 25 bp, Homo sapien
gaatacgcctattatattaaaggtt

SEQ ID NO: 5931051 - DNA, 25 bp, Homo sapien
tctttactattcgttaaatcgttca

SEQ ID NO: 5931052 - DNA, 25 bp, Homo sapien
gaacttatcgcgatttatttttatc

SEQ ID NO: 5931053 - DNA, 25 bp, Homo sapien
tagtaagttaacgctaaataatagg

SEQ ID NO: 5931054 - DNA, 25 bp, Homo sapien
caattaatataataccgaactgcat

SEQ ID NO: 5931055 - DNA, 25 bp, Homo sapien
cttatatttagcgacataagagatt

SEQ ID NO: 5931056 - DNA, 25 bp, Homo sapien
aaagctataaagattacgtcataag

SEQ ID NO: 5931057 - DNA, 25 bp, Homo sapien
taaatcttaatcgaacgtatttgct

SEQ ID NO: 5931058 - DNA, 25 bp, Homo sapien
caaatttatgcgaattaatagtggt

SEQ ID NO: 5931059 - DNA, 25 bp, Homo sapien
tgagaaacgagatacattacaatta

SEQ ID NO: 5931060 - DNA, 25 bp, Homo sapien
atgtttaataaacgattaacagtcg

SEQ ID NO: 5931061 - DNA, 25 bp, Homo sapien
aaatccaatattttaaggcgattga

SEQ ID NO: 5931062 - DNA, 25 bp, Homo sapien
ataacttatgtatcgacgttataag

SEQ ID NO: 5931063 - DNA, 25 bp, Homo sapien
attttgtacggataataagtagaac

SEQ ID NO: 5931064 - DNA, 25 bp, Homo sapien
ttgtgatctcgctataaatatcata

SEQ ID NO: 5931065 - DNA, 25 bp, Homo sapien
gtgtttatcgttaactaacatgtaa

SEQ ID NO: 5931066 - DNA, 25 bp, Homo sapien
tacttacgtttacgttatagatttg

SEQ ID NO: 5931067 - DNA, 25 bp, Homo sapien
aagtatattatactatatcgccctt

SEQ ID NO: 5931068 - DNA, 25 bp, Homo sapien
tctaatatatgcttatagcgaaaag

SEQ ID NO: 5931069 - DNA, 25 bp, Homo sapien
tagaatatgataaatttacgccctt

SEQ ID NO: 5931070 - DNA, 25 bp, Homo sapien
aagagttagaaccgaaagatatata

SEQ ID NO: 5931071 - DNA, 25 bp, Homo sapien
tattttatcataacgatacgcacat

SEQ ID NO: 5931072 - DNA, 25 bp, Homo sapien
acaagttagatatagtatcgcaaat

SEQ ID NO: 5931073 - DNA, 25 bp, Homo sapien
tctctacaatcgattacaacttatt

SEQ ID NO: 5931074 - DNA, 25 bp, Homo sapien
gtactacgttaactataagtcttat

SEQ ID NO: 5931075 - DNA, 25 bp, Homo sapien
gaagtatcaatattacgattctatg

SEQ ID NO: 5931076 - DNA, 25 bp, Homo sapien
caatgtaatacttattatcgactgt

SEQ ID NO: 5931077 - DNA, 25 bp, Homo sapien
ttggttatatacgaattatcgcttt

SEQ ID NO: 5931078 - DNA, 25 bp, Homo sapien
ataggaaaaatttcgatcgaataca

SEQ ID NO: 5931079 - DNA, 25 bp, Homo sapien
ttagattaattgttcgtataactcc

SEQ ID NO: 5931080 - DNA, 25 bp, Homo sapien
tattgatttcgcactttttagaatc

SEQ ID NO: 5931081 - DNA, 25 bp, Homo sapien
aaatgaattaatttgcggatcatac

SEQ ID NO: 5931082 - DNA, 25 bp, Homo sapien
cgttctttaacacgatataaacatt

SEQ ID NO: 5931083 - DNA, 25 bp, Homo sapien
ctttacaaaattgaatcgtcttaca

SEQ ID NO: 5931084 - DNA, 25 bp, Homo sapien
atgttacggaaaattgtttggtata

SEQ ID NO: 5931085 - DNA, 25 bp, Homo sapien
ttatcaaatttttcgtatcgctaag

SEQ ID NO: 5931086 - DNA, 25 bp, Homo sapien
tcaactattatgtacgatcagaata

SEQ ID NO: 5931087 - DNA, 25 bp, Homo sapien
tatccatataatatagatcgccttt

SEQ ID NO: 5931088 - DNA, 25 bp, Homo sapien
ttatcgttttttacgattagtcaac

SEQ ID NO: 5931089 - DNA, 25 bp, Homo sapien
tttatcatgattaacgtaaacacca

SEQ ID NO: 5931090 - DNA, 25 bp, Homo sapien
gcaaaaattattacgacatatacct

SEQ ID NO: 5931091 - DNA, 25 bp, Homo sapien
ctgttactacttatcgatatagtta

SEQ ID NO: 5931092 - DNA, 25 bp, Homo sapien
tcattcggaattttttgacttattg

SEQ ID NO: 5931093 - DNA, 25 bp, Homo sapien
gactatttttcgaattgatccaaaa

SEQ ID NO: 5931094 - DNA, 25 bp, Homo sapien
ttctatagataacacacgtttagat

SEQ ID NO: 5931095 - DNA, 25 bp, Homo sapien
atcgtaattaagcgaattgtcaaaa

SEQ ID NO: 5931096 - DNA, 25 bp, Homo sapien
tggttgtactttacgaaatctttaa

SEQ ID NO: 5931097 - DNA, 25 bp, Homo sapien
gcgataacacttataatacgaaatt

SEQ ID NO: 5931098 - DNA, 25 bp, Homo sapien
aatttttatcccgcgtatagatata

SEQ ID NO: 5931099 - DNA, 25 bp, Homo sapien
gtatgtaatttaactacgatcagat

SEQ ID NO: 5931100 - DNA, 25 bp, Homo sapien
caagttcaatacggaactaaatata

SEQ ID NO: 5931101 - DNA, 25 bp, Homo sapien
tgtagtattatagttaacgcaatca

SEQ ID NO: 5931102 - DNA, 25 bp, Homo sapien
tgtgattaagtcgaatttaataacg

SEQ ID NO: 5931103 - DNA, 25 bp, Homo sapien
aacactaaccgatattaagtaagaa

SEQ ID NO: 5931104 - DNA, 25 bp, Homo sapien
aatacatcgttcataacatgaacat

SEQ ID NO: 5931105 - DNA, 25 bp, Homo sapien
atatctgttcgaaatttatggatag

SEQ ID NO: 5931106 - DNA, 25 bp, Homo sapien
acagaaaagttcgtaatatgagaat

SEQ ID NO: 5931107 - DNA, 25 bp, Homo sapien
acatacgactaaacagttattaagt

SEQ ID NO: 5931108 - DNA, 25 bp, Homo sapien
acggaatcgactattatattttttc

SEQ ID NO: 5931109 - DNA, 25 bp, Homo sapien
tttgaattcgattaccgaaacaaat

SEQ ID NO: 5931110 - DNA, 25 bp, Homo sapien
catttgcgcgtataatttatatttg

SEQ ID NO: 5931111 - DNA, 25 bp, Homo sapien
ctttatacccaaatacgataatgta

SEQ ID NO: 5931112 - DNA, 25 bp, Homo sapien
aaccatatctaaattactcgacaat

SEQ ID NO: 5931113 - DNA, 25 bp, Homo sapien
gtaacatcgcatattacaatatagt

SEQ ID NO: 5931114 - DNA, 25 bp, Homo sapien
catatataattagttcgctaaacac

SEQ ID NO: 5931115 - DNA, 25 bp, Homo sapien
tttaatcgaattacttaactcctga

SEQ ID NO: 5931116 - DNA, 25 bp, Homo sapien
ttgttatgtctccgattatagatat

SEQ ID NO: 5931117 - DNA, 25 bp, Homo sapien
atcactaacggaaaaacttttatca

SEQ ID NO: 5931118 - DNA, 25 bp, Homo sapien
tgtaaactaaattagtccgaactta

SEQ ID NO: 5931119 - DNA, 25 bp, Homo sapien
ttcattagggaatatatcgtcaaat

SEQ ID NO: 5931120 - DNA, 25 bp, Homo sapien
taacttatcgtaaagaatagaaacg

SEQ ID NO: 5931121 - DNA, 25 bp, Homo sapien
aaacatgtcggtaaataacaatcta

SEQ ID NO: 5931122 - DNA, 25 bp, Homo sapien
ttgccatcgaattatcgaaattttt

SEQ ID NO: 5931123 - DNA, 25 bp, Homo sapien
tacatttaaagtatatcgtctcaca

SEQ ID NO: 5931124 - DNA, 25 bp, Homo sapien
tcgatttattaacgattgttcaaga

SEQ ID NO: 5931125 - DNA, 25 bp, Homo sapien
ggatttcgctttataatatatgtgt

SEQ ID NO: 5931126 - DNA, 25 bp, Homo sapien
tactaacgatttgagtatattcaag

SEQ ID NO: 5931127 - DNA, 25 bp, Homo sapien
gattaacttcgcgaataaattaaac

SEQ ID NO: 5931128 - DNA, 25 bp, Homo sapien
aatctttaatactattcgtagtcgt

SEQ ID NO: 5931129 - DNA, 25 bp, Homo sapien
tacaaagtgttatcgctaattaaac

SEQ ID NO: 5931130 - DNA, 25 bp, Homo sapien
catttcttgatatttcgattttctc

SEQ ID NO: 5931131 - DNA, 25 bp, Homo sapien
ggtaaattgaaaccgatataataga

SEQ ID NO: 5931132 - DNA, 25 bp, Homo sapien
atagatactattaatcgatcgaaca

SEQ ID NO: 5931133 - DNA, 25 bp, Homo sapien
aacttttcgtctatacgaattaaga

SEQ ID NO: 5931134 - DNA, 25 bp, Homo sapien
atgaaaatcaattgcgcttaaacaa

SEQ ID NO: 5931135 - DNA, 25 bp, Homo sapien
aattctaacgttgtaatactcgaaa

SEQ ID NO: 5931136 - DNA, 25 bp, Homo sapien
gctttgtaatcgaatcttagttatt

SEQ ID NO: 5931137 - DNA, 25 bp, Homo sapien
ctaagttataatagttagcgtttga

SEQ ID NO: 5931138 - DNA, 25 bp, Homo sapien
aatatattaatacgcggacagattt

SEQ ID NO: 5931139 - DNA, 25 bp, Homo sapien
acagacgataattaatactaattcc

SEQ ID NO: 5931140 - DNA, 25 bp, Homo sapien
tcccttgaaatttgcgaatttttaa

SEQ ID NO: 5931141 - DNA, 25 bp, Homo sapien
gcatatgaattatacgtacgtttat

SEQ ID NO: 5931142 - DNA, 25 bp, Homo sapien
actttatcaacgattgtatatagct

SEQ ID NO: 5931143 - DNA, 25 bp, Homo sapien
caatatcgaattgagtatgactaat

SEQ ID NO: 5931144 - DNA, 25 bp, Homo sapien
tattgcttaatcgaaatgttatggt

SEQ ID NO: 5931145 - DNA, 25 bp, Homo sapien
tttgtgttaaaagattacgactttc

SEQ ID NO: 5931146 - DNA, 25 bp, Homo sapien
caacatcggtaagtttatatagaat

SEQ ID NO: 5931147 - DNA, 25 bp, Homo sapien
gtattacgtaattttcgtgaagaaa

SEQ ID NO: 5931148 - DNA, 25 bp, Homo sapien
actttctattgttcgtcaaagaata

SEQ ID NO: 5931149 - DNA, 25 bp, Homo sapien
aatactttgacgatatcctaaacat

SEQ ID NO: 5931150 - DNA, 25 bp, Homo sapien
ggattttacaatacgttagttctta

SEQ ID NO: 5931151 - DNA, 25 bp, Homo sapien
tcatatatatgactaccgttgattt

SEQ ID NO: 5931152 - DNA, 25 bp, Homo sapien
tcagcatcgaaaattttcgataatt

SEQ ID NO: 5931153 - DNA, 25 bp, Homo sapien
tgtgataattagtttcgtatgtgat

SEQ ID NO: 5931154 - DNA, 25 bp, Homo sapien
agtctgctttaaatttacgaacaaa

SEQ ID NO: 5931155 - DNA, 25 bp, Homo sapien
tcgatacgtgaatcttgtatatttt

SEQ ID NO: 5931156 - DNA, 25 bp, Homo sapien
atgactggatacgataaattctatt

SEQ ID NO: 5931157 - DNA, 25 bp, Homo sapien
tttttcaatgttcgcgactatattt

SEQ ID NO: 5931158 - DNA, 25 bp, Homo sapien
ctgtgtaatagtcgttgattataaa

SEQ ID NO: 5931159 - DNA, 25 bp, Homo sapien
agagtatactaatcgtttaactttg

SEQ ID NO: 5931160 - DNA, 25 bp, Homo sapien
gaaattataatctcgaacgaaagat

SEQ ID NO: 5931161 - DNA, 25 bp, Homo sapien
aatctcgtataactaagattcacat

SEQ ID NO: 5931162 - DNA, 25 bp, Homo sapien
atatccgatgtttaactagttacaa

SEQ ID NO: 5931163 - DNA, 25 bp, Homo sapien
atattattcgtgtttcgatttgaag

SEQ ID NO: 5931164 - DNA, 25 bp, Homo sapien
ctatttacggttattataacgatct

SEQ ID NO: 5931165 - DNA, 25 bp, Homo sapien
aaaaggtaatatacttcgtgacaat

SEQ ID NO: 5931166 - DNA, 25 bp, Homo sapien
gtctagtgattacgtattaaactat

SEQ ID NO: 5931167 - DNA, 25 bp, Homo sapien
tttttcctaatcgatacatttgcat

SEQ ID NO: 5931168 - DNA, 25 bp, Homo sapien
taactcatgtcgtgtaaataaatag

SEQ ID NO: 5931169 - DNA, 25 bp, Homo sapien
tacatatcgatatactataattcgg

SEQ ID NO: 5931170 - DNA, 25 bp, Homo sapien
tccaattaatttcgactataaactc

SEQ ID NO: 5931171 - DNA, 25 bp, Homo sapien
tcaatattataacgattagtacgtc

SEQ ID NO: 5931172 - DNA, 25 bp, Homo sapien
ggataattaatcgatacctattgtt

SEQ ID NO: 5931173 - DNA, 25 bp, Homo sapien
gcaatatgatacatatagcgttata

SEQ ID NO: 5931174 - DNA, 25 bp, Homo sapien
tcgttaatcatgattcgataatctt

SEQ ID NO: 5931175 - DNA, 25 bp, Homo sapien
tgtaaaatatttactcgcgtcaata

SEQ ID NO: 5931176 - DNA, 25 bp, Homo sapien
ctacttatacaattctatcgataca

SEQ ID NO: 5931177 - DNA, 25 bp, Homo sapien
ttggacaatattacgtagtaattag

SEQ ID NO: 5931178 - DNA, 25 bp, Homo sapien
ttctctagtatcgaaaatttcatga

SEQ ID NO: 5931179 - DNA, 25 bp, Homo sapien
aagagaaataccgtaattgcttata

SEQ ID NO: 5931180 - DNA, 25 bp, Homo sapien
ttcattggtaacgataagatattct

SEQ ID NO: 5931181 - DNA, 25 bp, Homo sapien
taaaaacaatttacgcgtatatcct

SEQ ID NO: 5931182 - DNA, 25 bp, Homo sapien
aatggaaatgaaagtcgataactat

SEQ ID NO: 5931183 - DNA, 25 bp, Homo sapien
tgatatattattacgtcgaagatga

SEQ ID NO: 5931184 - DNA, 25 bp, Homo sapien
gtatgcgtacactagatatatattt

SEQ ID NO: 5931185 - DNA, 25 bp, Homo sapien
aatcataagttactattcgtacatg

SEQ ID NO: 5931186 - DNA, 25 bp, Homo sapien
tatatttttatatttcgtcgacctg

SEQ ID NO: 5931187 - DNA, 25 bp, Homo sapien
agttacgatcgtaaattagtataac

SEQ ID NO: 5931188 - DNA, 25 bp, Homo sapien
aataaaaacgatttagttgctctac

SEQ ID NO: 5931189 - DNA, 25 bp, Homo sapien
gctaaatgagttatacgttaaagta

SEQ ID NO: 5931190 - DNA, 25 bp, Homo sapien
atctcatttttatcgcgttagattt

SEQ ID NO: 5931191 - DNA, 25 bp, Homo sapien
cattattaatccgatgtattattgg

SEQ ID NO: 5931192 - DNA, 25 bp, Homo sapien
ttgaataacgactatgaattatgac

SEQ ID NO: 5931193 - DNA, 25 bp, Homo sapien
cttcaagtacgttctaaatcattaa

SEQ ID NO: 5931194 - DNA, 25 bp, Homo sapien
tttatataaccattatatcggaggt

SEQ ID NO: 5931195 - DNA, 25 bp, Homo sapien
caatttttaacgcttaattgacaag

SEQ ID NO: 5931196 - DNA, 25 bp, Homo sapien
tgaacattcgaatattagttcttac

SEQ ID NO: 5931197 - DNA, 25 bp, Homo sapien
atagttcgacgattttatatcatag

SEQ ID NO: 5931198 - DNA, 25 bp, Homo sapien
ccaaaattatccgtctaattaatag

SEQ ID NO: 5931199 - DNA, 25 bp, Homo sapien
ttaggaatttatcgctatataggta

SEQ ID NO: 5931200 - DNA, 25 bp, Homo sapien
tgatagtctaaattttgacgttctt

SEQ ID NO: 5931201 - DNA, 25 bp, Homo sapien
ctctaagatataatcgataacaatg

SEQ ID NO: 5931202 - DNA, 25 bp, Homo sapien
gaattttaacgtcatttcgtattag

SEQ ID NO: 5931203 - DNA, 25 bp, Homo sapien
ttgactatagtacgtaataatacgt

SEQ ID NO: 5931204 - DNA, 25 bp, Homo sapien
caatttattatccgcgtaaaacaat

SEQ ID NO: 5931205 - DNA, 25 bp, Homo sapien
cacaataatatgaaccgacattaaa

SEQ ID NO: 5931206 - DNA, 25 bp, Homo sapien
tactgcttgcatcgatataaaaaat

SEQ ID NO: 5931207 - DNA, 25 bp, Homo sapien
taagtcgtcaattgttgatatgtat

SEQ ID NO: 5931208 - DNA, 25 bp, Homo sapien
gttgccattagataattacgttata

SEQ ID NO: 5931209 - DNA, 25 bp, Homo sapien
gtctcctaaattaatcgaaaacaat

SEQ ID NO: 5931210 - DNA, 25 bp, Homo sapien
aataatattatagaggttcgagtct

SEQ ID NO: 5931211 - DNA, 25 bp, Homo sapien
taagtatacggtctaaattatctct

SEQ ID NO: 5931212 - DNA, 25 bp, Homo sapien
taactcatggtaacgtaaaaattct

SEQ ID NO: 5931213 - DNA, 25 bp, Homo sapien
ttaaaataccgtctattgttcgtta

SEQ ID NO: 5931214 - DNA, 25 bp, Homo sapien
tatcctaggatataattcgtaatgt

SEQ ID NO: 5931215 - DNA, 25 bp, Homo sapien
ataagcgctttatacttcaatatag

SEQ ID NO: 5931216 - DNA, 25 bp, Homo sapien
ttacttatcggacttataattgtac

SEQ ID NO: 5931217 - DNA, 25 bp, Homo sapien
agtaataactatttataacgtccca

SEQ ID NO: 5931218 - DNA, 25 bp, Homo sapien
tactacgcaaatttacttagttcat

SEQ ID NO: 5931219 - DNA, 25 bp, Homo sapien
tcgtggataactatatcgattttta

SEQ ID NO: 5931220 - DNA, 25 bp, Homo sapien
atcatacttcatatagcgaatagtt

SEQ ID NO: 5931221 - DNA, 25 bp, Homo sapien
gtactacttattaggaacgattaat

SEQ ID NO: 5931222 - DNA, 25 bp, Homo sapien
tttctcaacgtatcgttaaactaaa

SEQ ID NO: 5931223 - DNA, 25 bp, Homo sapien
taaacatatattccgtagacttaca

SEQ ID NO: 5931224 - DNA, 25 bp, Homo sapien
tcattgatctatatactcgaatttc

SEQ ID NO: 5931225 - DNA, 25 bp, Homo sapien
aatatagtatagatagtcgaaaacg

SEQ ID NO: 5931226 - DNA, 25 bp, Homo sapien
aaaaaacgactattattcgactaca

SEQ ID NO: 5931227 - DNA, 25 bp, Homo sapien
ctaatttttacgaaacgcatatgat

SEQ ID NO: 5931228 - DNA, 25 bp, Homo sapien
atgcagtcgataatagattaatgtt

SEQ ID NO: 5931229 - DNA, 25 bp, Homo sapien
aaagattatcattgtaaacgtggaa

SEQ ID NO: 5931230 - DNA, 25 bp, Homo sapien
aatagatatcgcgatagacataaat

SEQ ID NO: 5931231 - DNA, 25 bp, Homo sapien
tagcttaatcaatctatcgtaatca

SEQ ID NO: 5931232 - DNA, 25 bp, Homo sapien
ttttcataacgtttctcgaattatc

SEQ ID NO: 5931233 - DNA, 25 bp, Homo sapien
tatttagattcgtttaatacttccc

SEQ ID NO: 5931234 - DNA, 25 bp, Homo sapien
ttagttcgtatcgtacgaatattat

SEQ ID NO: 5931235 - DNA, 25 bp, Homo sapien
cattattatatcgtttacgaatagg

SEQ ID NO: 5931236 - DNA, 25 bp, Homo sapien
atgatcgatgatcttatatagttac

SEQ ID NO: 5931237 - DNA, 25 bp, Homo sapien
tgaggattatattaggttcgataat

SEQ ID NO: 5931238 - DNA, 25 bp, Homo sapien
aatcatattatatcgagtaagtgac

SEQ ID NO: 5931239 - DNA, 25 bp, Homo sapien
ttaatttagtacgtcgatacaactt

SEQ ID NO: 5931240 - DNA, 25 bp, Homo sapien
atacaaattatcgttaccgaataac

SEQ ID NO: 5931241 - DNA, 25 bp, Homo sapien
taaggctaatttaaattcgcacatt

SEQ ID NO: 5931242 - DNA, 25 bp, Homo sapien
gaataatacgtgttcgattaattgt

SEQ ID NO: 5931243 - DNA, 25 bp, Homo sapien
ataatttaattagtcgtcttcaagc

SEQ ID NO: 5931244 - DNA, 25 bp, Homo sapien
caactatatcgatttatactgagat

SEQ ID NO: 5931245 - DNA, 25 bp, Homo sapien
gttacgtatattattaatcgactga

SEQ ID NO: 5931246 - DNA, 25 bp, Homo sapien
caaaacgttaacttatactatactc

SEQ ID NO: 5931247 - DNA, 25 bp, Homo sapien
atacgtataatgccgtaactaatta

SEQ ID NO: 5931248 - DNA, 25 bp, Homo sapien
cacagatattcgatatgatataact

SEQ ID NO: 5931249 - DNA, 25 bp, Homo sapien
atatcacgcttataatgactgaaat

SEQ ID NO: 5931250 - DNA, 25 bp, Homo sapien
aatcaattcgttagttgaacaactt

SEQ ID NO: 5931251 - DNA, 25 bp, Homo sapien
atcgattagatagttcgtaaactaa

SEQ ID NO: 5931252 - DNA, 25 bp, Homo sapien
gcaactataattccgtaaaattatc

SEQ ID NO: 5931253 - DNA, 25 bp, Homo sapien
atcaatcgcgaaatttttactatac

SEQ ID NO: 5931254 - DNA, 25 bp, Homo sapien
cattactataatcgaagaatctaga

SEQ ID NO: 5931255 - DNA, 25 bp, Homo sapien
gaaaattacgacgctaatatcttaa

SEQ ID NO: 5931256 - DNA, 25 bp, Homo sapien
agtaaatcgttaacgcatatttact

SEQ ID NO: 5931257 - DNA, 25 bp, Homo sapien
gcactgttatatttatcgaaatatg

SEQ ID NO: 5931258 - DNA, 25 bp, Homo sapien
tgcgaataagtcgtattatatttct

SEQ ID NO: 5931259 - DNA, 25 bp, Homo sapien
aactattacatcgcgtattgaattt

SEQ ID NO: 5931260 - DNA, 25 bp, Homo sapien
gttttaacctatattactcgtacaa

SEQ ID NO: 5931261 - DNA, 25 bp, Homo sapien
acatagatatcgtaataagtcgtat

SEQ ID NO: 5931262 - DNA, 25 bp, Homo sapien
tgaataatttcgcgatataatcatc

SEQ ID NO: 5931263 - DNA, 25 bp, Homo sapien
taatataattacgctagcgactata

SEQ ID NO: 5931264 - DNA, 25 bp, Homo sapien
agtaatatgcgcttaaacatgaaat

SEQ ID NO: 5931265 - DNA, 25 bp, Homo sapien
ttctacgatgaagatttctaaaact

SEQ ID NO: 5931266 - DNA, 25 bp, Homo sapien
taagtaaatatcatcaacggctaat

SEQ ID NO: 5931267 - DNA, 25 bp, Homo sapien
attattcttatttgtcgcgtatatg

SEQ ID NO: 5931268 - DNA, 25 bp, Homo sapien
aagggcatacgtaatataagaaatt

SEQ ID NO: 5931269 - DNA, 25 bp, Homo sapien
gataacaattttcgactgtttaaga

SEQ ID NO: 5931270 - DNA, 25 bp, Homo sapien
tattataaaacgatacaacgactga

SEQ ID NO: 5931271 - DNA, 25 bp, Homo sapien
aggttgatatataattcgtttgcta

SEQ ID NO: 5931272 - DNA, 25 bp, Homo sapien
tagtaacgttacgatgtaatgttat

SEQ ID NO: 5931273 - DNA, 25 bp, Homo sapien
aagttattagcgaatttcaaatgag

SEQ ID NO: 5931274 - DNA, 25 bp, Homo sapien
tagacattatagttaatcgatccaa

SEQ ID NO: 5931275 - DNA, 25 bp, Homo sapien
ttgtagaaaattgacgatcttctat

SEQ ID NO: 5931276 - DNA, 25 bp, Homo sapien
actacaattcgcatatataatgttg

SEQ ID NO: 5931277 - DNA, 25 bp, Homo sapien
ctcattattacggcattaatttaca

SEQ ID NO: 5931278 - DNA, 25 bp, Homo sapien
ttgataagcggttaatagtaatagt

SEQ ID NO: 5931279 - DNA, 25 bp, Homo sapien
aagaacgcctaatattatattctct

SEQ ID NO: 5931280 - DNA, 25 bp, Homo sapien
ctatctcgaactatagtaaaattac

SEQ ID NO: 5931281 - DNA, 25 bp, Homo sapien
gtatctttttttgccgcttataaaa

SEQ ID NO: 5931282 - DNA, 25 bp, Homo sapien
ttaacatcattgtagtacgttacaa

SEQ ID NO: 5931283 - DNA, 25 bp, Homo sapien
catagtgtaagttacgcatataata

SEQ ID NO: 5931284 - DNA, 25 bp, Homo sapien
atcttaatattttagcgtacatcac

SEQ ID NO: 5931285 - DNA, 25 bp, Homo sapien
agtggatattacgattagtttatag

SEQ ID NO: 5931286 - DNA, 25 bp, Homo sapien
agttaaacgatattcgagattatac

SEQ ID NO: 5931287 - DNA, 25 bp, Homo sapien
tttactgattaacgtactatttcca

SEQ ID NO: 5931288 - DNA, 25 bp, Homo sapien
caccatattcggattaaagtaaaaa

SEQ ID NO: 5931289 - DNA, 25 bp, Homo sapien
cgatagtacgctataataattctat

SEQ ID NO: 5931290 - DNA, 25 bp, Homo sapien
aagtgagacgttgattaatatgttt

SEQ ID NO: 5931291 - DNA, 25 bp, Homo sapien
taatcaatcgcatatagtaatcaca

SEQ ID NO: 5931292 - DNA, 25 bp, Homo sapien
tatcagtcgaaaaacgaatttgaat

SEQ ID NO: 5931293 - DNA, 25 bp, Homo sapien
tcaatcttaatcgtaacgtattaga

SEQ ID NO: 5931294 - DNA, 25 bp, Homo sapien
tgagaatcgatagaaagaatatttg

SEQ ID NO: 5931295 - DNA, 25 bp, Homo sapien
taatttcgttagactcaattagaag

SEQ ID NO: 5931296 - DNA, 25 bp, Homo sapien
cagaatatcgtattggaatttaatc

SEQ ID NO: 5931297 - DNA, 25 bp, Homo sapien
tcttgagattttatatacgcaaaca

SEQ ID NO: 5931298 - DNA, 25 bp, Homo sapien
atttacaatgatttcgtatactctc

SEQ ID NO: 5931299 - DNA, 25 bp, Homo sapien
tagtgtatcatcgtaacttaactta

SEQ ID NO: 5931300 - DNA, 25 bp, Homo sapien
tcattctattaccgttaattcactt

SEQ ID NO: 5931301 - DNA, 25 bp, Homo sapien
tttgacataacgattatcgtttatc

SEQ ID NO: 5931302 - DNA, 25 bp, Homo sapien
cttggagtatatatcgtaaagtata

SEQ ID NO: 5931303 - DNA, 25 bp, Homo sapien
tggattaataatcgtgtaaaggaat

SEQ ID NO: 5931304 - DNA, 25 bp, Homo sapien
acattatttaatcgaaaagtcgtac

SEQ ID NO: 5931305 - DNA, 25 bp, Homo sapien
ttgtattccgtcgaactataaataa

SEQ ID NO: 5931306 - DNA, 25 bp, Homo sapien
tatattatactcgtcgtatacatga

SEQ ID NO: 5931307 - DNA, 25 bp, Homo sapien
atcaagcgtattatgatagaacaat

SEQ ID NO: 5931308 - DNA, 25 bp, Homo sapien
cgttagatttacgtgatagtttatt

SEQ ID NO: 5931309 - DNA, 25 bp, Homo sapien
atagtacgactatatatcttaatcc

SEQ ID NO: 5931310 - DNA, 25 bp, Homo sapien
aaataacggtcttacgatatactaa

SEQ ID NO: 5931311 - DNA, 25 bp, Homo sapien
tgctacgataataactaatcaaaca

SEQ ID NO: 5931312 - DNA, 25 bp, Homo sapien
aggttcgaatcatttatatgataga

SEQ ID NO: 5931313 - DNA, 25 bp, Homo sapien
gtgtactaaaacgactagtttaata

SEQ ID NO: 5931314 - DNA, 25 bp, Homo sapien
tgtcatacgaattaaagattttcac

SEQ ID NO: 5931315 - DNA, 25 bp, Homo sapien
agtatatagctaaacgcgttatata

SEQ ID NO: 5931316 - DNA, 25 bp, Homo sapien
gtgagttataagacgaattattagt

SEQ ID NO: 5931317 - DNA, 25 bp, Homo sapien
tagtaaatcgataatgaaccaaagt

SEQ ID NO: 5931318 - DNA, 25 bp, Homo sapien
aatatataaacgagtagttgctgta

SEQ ID NO: 5931319 - DNA, 25 bp, Homo sapien
atttttactattagtacgatcatgc

SEQ ID NO: 5931320 - DNA, 25 bp, Homo sapien
tcagttcgaaaaagagttatcattt

SEQ ID NO: 5931321 - DNA, 25 bp, Homo sapien
tatacacaatacattatcggaaaca

SEQ ID NO: 5931322 - DNA, 25 bp, Homo sapien
acttcatcaaaaaaatatcgcaaca

SEQ ID NO: 5931323 - DNA, 25 bp, Homo sapien
caaaatgttacgatctaaagattca

SEQ ID NO: 5931324 - DNA, 25 bp, Homo sapien
gtctagattactgtttttcgtaaaa

SEQ ID NO: 5931325 - DNA, 25 bp, Homo sapien
acataaattggtatatcgtaaacct

SEQ ID NO: 5931326 - DNA, 25 bp, Homo sapien
tctagattgataaatttcgatcaga

SEQ ID NO: 5931327 - DNA, 25 bp, Homo sapien
aatcgaattaataatacgtcggtat

SEQ ID NO: 5931328 - DNA, 25 bp, Homo sapien
ttctaacggttaatttattgactgt

SEQ ID NO: 5931329 - DNA, 25 bp, Homo sapien
agataaatcgataaactatattcgg

SEQ ID NO: 5931330 - DNA, 25 bp, Homo sapien
attctatcgataatcgaagagaatt

SEQ ID NO: 5931331 - DNA, 25 bp, Homo sapien
agcgaacgtttaataatcgataaaa

SEQ ID NO: 5931332 - DNA, 25 bp, Homo sapien
cgattataacgaacttatatagaca

SEQ ID NO: 5931333 - DNA, 25 bp, Homo sapien
ctcaataaggttgttatcgataaaa

SEQ ID NO: 5931334 - DNA, 25 bp, Homo sapien
tataacaataactagatcgaattgg

SEQ ID NO: 5931335 - DNA, 25 bp, Homo sapien
ataattacgcacgttttaatgtcta

SEQ ID NO: 5931336 - DNA, 25 bp, Homo sapien
cttgctaatataatccgctaaaaaa

SEQ ID NO: 5931337 - DNA, 25 bp, Homo sapien
tgaagaacgttatcgaatatatgat

SEQ ID NO: 5931338 - DNA, 25 bp, Homo sapien
tgcaacgaattcaagattaaactaa

SEQ ID NO: 5931339 - DNA, 25 bp, Homo sapien
agacccgtattcttatattaaatga

SEQ ID NO: 5931340 - DNA, 25 bp, Homo sapien
ctaattgtattaacaatcgcttttc

SEQ ID NO: 5931341 - DNA, 25 bp, Homo sapien
ctactgataattatcgatatagcat

SEQ ID NO: 5931342 - DNA, 25 bp, Homo sapien
aaatacgaaatcatatatcgcaatg

SEQ ID NO: 5931343 - DNA, 25 bp, Homo sapien
ggaattaattcgtacttaagtattc

SEQ ID NO: 5931344 - DNA, 25 bp, Homo sapien
tctaatcatattacgataatccatg

SEQ ID NO: 5931345 - DNA, 25 bp, Homo sapien
gagatgtcgcactaatatatttaaa

SEQ ID NO: 5931346 - DNA, 25 bp, Homo sapien
tttgaatacgaacgcgttatatata

SEQ ID NO: 5931347 - DNA, 25 bp, Homo sapien
tctaagtataaaactcgaactgttt

SEQ ID NO: 5931348 - DNA, 25 bp, Homo sapien
aatacataaataagtggcgaatcaa

SEQ ID NO: 5931349 - DNA, 25 bp, Homo sapien
acttatactatttatatcgttccac

SEQ ID NO: 5931350 - DNA, 25 bp, Homo sapien
agtggttaataacgaattgtattca

SEQ ID NO: 5931351 - DNA, 25 bp, Homo sapien
taaagtttttaatacgtcgattctc

SEQ ID NO: 5931352 - DNA, 25 bp, Homo sapien
ctaattattaacttattcgcgctat

SEQ ID NO: 5931353 - DNA, 25 bp, Homo sapien
aactatatcgtatgctacaacattt

SEQ ID NO: 5931354 - DNA, 25 bp, Homo sapien
taaattcgaattacgacgtttattc

SEQ ID NO: 5931355 - DNA, 25 bp, Homo sapien
gtttttattactatcgtatacacct

SEQ ID NO: 5931356 - DNA, 25 bp, Homo sapien
actgtagttattcggatgaaattta

SEQ ID NO: 5931357 - DNA, 25 bp, Homo sapien
atctatattacaaatagtcgtctga

SEQ ID NO: 5931358 - DNA, 25 bp, Homo sapien
aagaggatggcgtaatattattata

SEQ ID NO: 5931359 - DNA, 25 bp, Homo sapien
tcgttacgcaatactcttattaata

SEQ ID NO: 5931360 - DNA, 25 bp, Homo sapien
ggatgactaatattatacgaattga

SEQ ID NO: 5931361 - DNA, 25 bp, Homo sapien
taattggtttacgatttgatcatct

SEQ ID NO: 5931362 - DNA, 25 bp, Homo sapien
gtcaaatcggacgaattatattaaa

SEQ ID NO: 5931363 - DNA, 25 bp, Homo sapien
aagaatagaccgaattaataacttg

SEQ ID NO: 5931364 - DNA, 25 bp, Homo sapien
aataaaattcgtataactccacgta

SEQ ID NO: 5931365 - DNA, 25 bp, Homo sapien
attgtgaaattatgttatcgactca

SEQ ID NO: 5931366 - DNA, 25 bp, Homo sapien
ctaattatctaatcgaataactgtc

SEQ ID NO: 5931367 - DNA, 25 bp, Homo sapien
atataaactaattgcgtactttcga

SEQ ID NO: 5931368 - DNA, 25 bp, Homo sapien
taaacatatgttattctacgggaat

SEQ ID NO: 5931369 - DNA, 25 bp, Homo sapien
ataatactaaacgatcatttactcg

SEQ ID NO: 5931370 - DNA, 25 bp, Homo sapien
cgactatttagttcgtcatattaaa

SEQ ID NO: 5931371 - DNA, 25 bp, Homo sapien
atccgcgatattataatagatctat

SEQ ID NO: 5931372 - DNA, 25 bp, Homo sapien
atataattcgactaagtctatcgat

SEQ ID NO: 5931373 - DNA, 25 bp, Homo sapien
atttgcgtttaattacgtcaaaatg

SEQ ID NO: 5931374 - DNA, 25 bp, Homo sapien
cgtatatccgtataataagtaatac

SEQ ID NO: 5931375 - DNA, 25 bp, Homo sapien
ttctaaaccagttatatcgatcaaa

SEQ ID NO: 5931376 - DNA, 25 bp, Homo sapien
tcatatagatgattatcgaaacatg

SEQ ID NO: 5931377 - DNA, 25 bp, Homo sapien
ttagatcgtataaacgaaatccata

SEQ ID NO: 5931378 - DNA, 25 bp, Homo sapien
taagtaagatcgattaatacgctat

SEQ ID NO: 5931379 - DNA, 25 bp, Homo sapien
gaacattaagccagtatagtttaaa

SEQ ID NO: 5931380 - DNA, 25 bp, Homo sapien
aataattaacgtagcgcgataatat

SEQ ID NO: 5931381 - DNA, 25 bp, Homo sapien
gcaattttatacgactattgtagtt

SEQ ID NO: 5931382 - DNA, 25 bp, Homo sapien
ccataaaaattatcgatagtacgat

SEQ ID NO: 5931383 - DNA, 25 bp, Homo sapien
ctaaatattacgtatcgtaattgtc

SEQ ID NO: 5931384 - DNA, 25 bp, Homo sapien
catttataatatgcgcattgaatag

SEQ ID NO: 5931385 - DNA, 25 bp, Homo sapien
caacactaaattttcgaaaagattc

SEQ ID NO: 5931386 - DNA, 25 bp, Homo sapien
gatgttaattaatccgtatagtatc

SEQ ID NO: 5931387 - DNA, 25 bp, Homo sapien
atctaagatcgtactttatgaaatg

SEQ ID NO: 5931388 - DNA, 25 bp, Homo sapien
gttatattcgtattatgatgtaacg

SEQ ID NO: 5931389 - DNA, 25 bp, Homo sapien
aatgtatactattaagtcgaactag

SEQ ID NO: 5931390 - DNA, 25 bp, Homo sapien
gaaatatactattcgtgtacaatag

SEQ ID NO: 5931391 - DNA, 25 bp, Homo sapien
caatgatagaatatatccgatcata

SEQ ID NO: 5931392 - DNA, 25 bp, Homo sapien
aggtaatccgatcgtaataaattta

SEQ ID NO: 5931393 - DNA, 25 bp, Homo sapien
aattactagaaaaaccgtatgctaa

SEQ ID NO: 5931394 - DNA, 25 bp, Homo sapien
aaaatatacgcgataacttaaactc

SEQ ID NO: 5931395 - DNA, 25 bp, Homo sapien
ttcttcgaaaattagatggatctaa

SEQ ID NO: 5931396 - DNA, 25 bp, Homo sapien
atttgtttcgtcgatttttaagaga

SEQ ID NO: 5931397 - DNA, 25 bp, Homo sapien
acgtcatttacgacaatttatcatt

SEQ ID NO: 5931398 - DNA, 25 bp, Homo sapien
atatattagatcgcgatagtttagt

SEQ ID NO: 5931399 - DNA, 25 bp, Homo sapien
atcaattcgaaactctaacaaacat

SEQ ID NO: 5931400 - DNA, 25 bp, Homo sapien
gtaaatagtcaagattcgaagtatt

SEQ ID NO: 5931401 - DNA, 25 bp, Homo sapien
aataactactcgtaacgcaattaaa

SEQ ID NO: 5931402 - DNA, 25 bp, Homo sapien
ataggtattagcgcgatataattta

SEQ ID NO: 5931403 - DNA, 25 bp, Homo sapien
aatacactcttataacgaattatgc

SEQ ID NO: 5931404 - DNA, 25 bp, Homo sapien
tttctgacatattttttcgatcttg

SEQ ID NO: 5931405 - DNA, 25 bp, Homo sapien
tagaataatttagtttacgaccaac

SEQ ID NO: 5931406 - DNA, 25 bp, Homo sapien
tcgaggaatacgttacaataattta

SEQ ID NO: 5931407 - DNA, 25 bp, Homo sapien
atcttaccgactaaaagtattcaat

SEQ ID NO: 5931408 - DNA, 25 bp, Homo sapien
ttcattgcgtaaactatattttggt

SEQ ID NO: 5931409 - DNA, 25 bp, Homo sapien
atattatctttttcgatcgactgta

SEQ ID NO: 5931410 - DNA, 25 bp, Homo sapien
ataaagcgaattgaaatatcagtag

SEQ ID NO: 5931411 - DNA, 25 bp, Homo sapien
aataagtatataatcgaacggagtt

SEQ ID NO: 5931412 - DNA, 25 bp, Homo sapien
agatacgtataactttaatacagag

SEQ ID NO: 5931413 - DNA, 25 bp, Homo sapien
aatgaatagtccgtttaaactaaca

SEQ ID NO: 5931414 - DNA, 25 bp, Homo sapien
tattcacgagtatatgtaattactc

SEQ ID NO: 5931415 - DNA, 25 bp, Homo sapien
agtgatttaatcgtatatacgaatc

SEQ ID NO: 5931416 - DNA, 25 bp, Homo sapien
taagaagtcttattagatcgattac

SEQ ID NO: 5931417 - DNA, 25 bp, Homo sapien
attatcaatacgtctacaatcgttt

SEQ ID NO: 5931418 - DNA, 25 bp, Homo sapien
agagaattaaaccgataattgaact

SEQ ID NO: 5931419 - DNA, 25 bp, Homo sapien
ttgctttacgatatccgtaaaattt

SEQ ID NO: 5931420 - DNA, 25 bp, Homo sapien
ctaaacgaatatcgtttgatttgat

SEQ ID NO: 5931421 - DNA, 25 bp, Homo sapien
gtctatcaactataacgatttatgt

SEQ ID NO: 5931422 - DNA, 25 bp, Homo sapien
accataatatcgatcgaagaaaatt

SEQ ID NO: 5931423 - DNA, 25 bp, Homo sapien
actgtcttatacgatttaatcaatg

SEQ ID NO: 5931424 - DNA, 25 bp, Homo sapien
taacttctattatcgtacgtaaaag

SEQ ID NO: 5931425 - DNA, 25 bp, Homo sapien
gctaatatatcgttacaatatggat

SEQ ID NO: 5931426 - DNA, 25 bp, Homo sapien
aactttagccgataacatatagatt

SEQ ID NO: 5931427 - DNA, 25 bp, Homo sapien
atttctttaccttcgataaagagta

SEQ ID NO: 5931428 - DNA, 25 bp, Homo sapien
tagacattaaaacgtgcgtaattat

SEQ ID NO: 5931429 - DNA, 25 bp, Homo sapien
atcatattatcatagcgttagaaca

SEQ ID NO: 5931430 - DNA, 25 bp, Homo sapien
tatgatcggatatattctatcattg

SEQ ID NO: 5931431 - DNA, 25 bp, Homo sapien
acataaatcgttatagttgatagac

SEQ ID NO: 5931432 - DNA, 25 bp, Homo sapien
agcaaatacgttcgattaagattta

SEQ ID NO: 5931433 - DNA, 25 bp, Homo sapien
ataatattcgtacgatacgaactaa

SEQ ID NO: 5931434 - DNA, 25 bp, Homo sapien
ccgaattatagtatatcgatatgta

SEQ ID NO: 5931435 - DNA, 25 bp, Homo sapien
tattctttgacgaacaatagaaagt

SEQ ID NO: 5931436 - DNA, 25 bp, Homo sapien
ttaaaaattcgcaaatttcaaggga

SEQ ID NO: 5931437 - DNA, 25 bp, Homo sapien
tgtaatacgctataagacgaattta

SEQ ID NO: 5931438 - DNA, 25 bp, Homo sapien
gtacaattataagtccgataagtaa

SEQ ID NO: 5931439 - DNA, 25 bp, Homo sapien
aaacagttcgagttttatacttaga

SEQ ID NO: 5931440 - DNA, 25 bp, Homo sapien
acaattaatcgaacacgtattattc

SEQ ID NO: 5931441 - DNA, 25 bp, Homo sapien
aagtgaattaacggtaatagaatga

SEQ ID NO: 5931442 - DNA, 25 bp, Homo sapien
tcttaattcgtatagacgaaaagtt

SEQ ID NO: 5931443 - DNA, 25 bp, Homo sapien
ccaattcgatctagttattgttata

SEQ ID NO: 5931444 - DNA, 25 bp, Homo sapien
tgtattcgatcgaaatttttcctat

SEQ ID NO: 5931445 - DNA, 25 bp, Homo sapien
atatatgtatcgtaaatagatgagg

SEQ ID NO: 5931446 - DNA, 25 bp, Homo sapien
taaatttattacgatcggattacct

SEQ ID NO: 5931447 - DNA, 25 bp, Homo sapien
acgactacgaatagtattaaagatt

SEQ ID NO: 5931448 - DNA, 25 bp, Homo sapien
atcgtttcgtttacctatcatataa

SEQ ID NO: 5931449 - DNA, 25 bp, Homo sapien
catgtttcgataatcatctatatga

SEQ ID NO: 5931450 - DNA, 25 bp, Homo sapien
aagttgtatcgacgtactaaattaa

SEQ ID NO: 5931451 - DNA, 25 bp, Homo sapien
aactgcggttaaatatctatattga

SEQ ID NO: 5931452 - DNA, 25 bp, Homo sapien
ctaatacgaaatgacgttaaaattc

SEQ ID NO: 5931453 - DNA, 25 bp, Homo sapien
aagatgtacgatctaataatagtac

SEQ ID NO: 5931454 - DNA, 25 bp, Homo sapien
ctattgtacacgaatagtatatttc

SEQ ID NO: 5931455 - DNA, 25 bp, Homo sapien
gacgtactaatcgttataatattga

SEQ ID NO: 5931456 - DNA, 25 bp, Homo sapien
aacattaatctattatcgactgcat

SEQ ID NO: 5931457 - DNA, 25 bp, Homo sapien
atttatgtctatcgcgatatctatt

SEQ ID NO: 5931458 - DNA, 25 bp, Homo sapien
ttttatcgattattaaacgttcgct

SEQ ID NO: 5931459 - DNA, 25 bp, Homo sapien
gtaagaactaatattcgaatgttca

SEQ ID NO: 5931460 - DNA, 25 bp, Homo sapien
attgttttacgcggataataaattg

SEQ ID NO: 5931461 - DNA, 25 bp, Homo sapien
cgttacatcataatacgaatataac

SEQ ID NO: 5931462 - DNA, 25 bp, Homo sapien
aagggcgatatagtataatatactt

SEQ ID NO: 5931463 - DNA, 25 bp, Homo sapien
gttgactaatcgtaaaaaacgataa

SEQ ID NO: 5931464 - DNA, 25 bp, Homo sapien
tctatcatataaatgattcgaacct

SEQ ID NO: 5931465 - DNA, 25 bp, Homo sapien
atccatattgtaacgatatattagc

SEQ ID NO: 5931466 - DNA, 25 bp, Homo sapien
cctattatttagcgttaacttacta

SEQ ID NO: 5931467 - DNA, 25 bp, Homo sapien
tcaaacgctaactattataacttag

SEQ ID NO: 5931468 - DNA, 25 bp, Homo sapien
acgtattattacgtactatagtcaa

SEQ ID NO: 5931469 - DNA, 25 bp, Homo sapien
tgtgagacgatatactttaaatgta

SEQ ID NO: 5931470 - DNA, 25 bp, Homo sapien
tatatataacgcgttcgtattcaaa

SEQ ID NO: 5931471 - DNA, 25 bp, Homo sapien
aaacgattgtagacgtattgataat

SEQ ID NO: 5931472 - DNA, 25 bp, Homo sapien
tgtctatataagttcgttataatcg

SEQ ID NO: 5931473 - DNA, 25 bp, Homo sapien
ttttttcatatcgcacaattcaatc

SEQ ID NO: 5931474 - DNA, 25 bp, Homo sapien
ttaggtttatctaatcgttattcca

SEQ ID NO: 5931475 - DNA, 25 bp, Homo sapien
cttgaatatactcaaatcgttagta

SEQ ID NO: 5931476 - DNA, 25 bp, Homo sapien
tcatgtatacgacgagtataatata

SEQ ID NO: 5931477 - DNA, 25 bp, Homo sapien
ttttggatcaattcgaaaaatagtc

SEQ ID NO: 5931478 - DNA, 25 bp, Homo sapien
agttttagaaatcttcatcgtagaa

SEQ ID NO: 5931479 - DNA, 25 bp, Homo sapien
ctatccataaatttcgaacagatat

SEQ ID NO: 5931480 - DNA, 25 bp, Homo sapien
aatacttcgaatcttgactatttac

SEQ ID NO: 5931481 - DNA, 25 bp, Homo sapien
taaattatatcgcgctaatacctat

SEQ ID NO: 5931482 - DNA, 25 bp, Homo sapien
aaatatatatctagtgtacgcatac

SEQ ID NO: 5931483 - DNA, 25 bp, Homo sapien
tattaaactagtcgttttagtacac

SEQ ID NO: 5931484 - DNA, 25 bp, Homo sapien
aagatcgtctagtttagaattatgt

SEQ ID NO: 5931485 - DNA, 25 bp, Homo sapien
atgttcatgttatgaacgatgtatt

SEQ ID NO: 5931486 - DNA, 25 bp, Homo sapien
tcagaattattaattcgctgttcta

SEQ ID NO: 5931487 - DNA, 25 bp, Homo sapien
acttaataactgtttagtcgtatgt

SEQ ID NO: 5931488 - DNA, 25 bp, Homo sapien
tcagtcgattaataatatacgtaac

SEQ ID NO: 5931489 - DNA, 25 bp, Homo sapien
caaatataaattatacgcgcaaatg

SEQ ID NO: 5931490 - DNA, 25 bp, Homo sapien
cattgttatcgattatatcttagag

SEQ ID NO: 5931491 - DNA, 25 bp, Homo sapien
atctaaacgtgtgttatctatagaa

SEQ ID NO: 5931492 - DNA, 25 bp, Homo sapien
atcgtactatcgataatttttatgg

SEQ ID NO: 5931493 - DNA, 25 bp, Homo sapien
catttcataaagtacgatcttagat

SEQ ID NO: 5931494 - DNA, 25 bp, Homo sapien
aattatcgaaaattttcgatgctga

SEQ ID NO: 5931495 - DNA, 25 bp, Homo sapien
ttccacgtttacaatgataatcttt

SEQ ID NO: 5931496 - DNA, 25 bp, Homo sapien
acagtcgataataagtattacattg

SEQ ID NO: 5931497 - DNA, 25 bp, Homo sapien
ttgattcgccacttatttatgtatt

SEQ ID NO: 5931498 - DNA, 25 bp, Homo sapien
agctatatacaatcgttgataaagt

SEQ ID NO: 5931499 - DNA, 25 bp, Homo sapien
atttgcgatactatatctaacttgt

SEQ ID NO: 5931500 - DNA, 25 bp, Homo sapien
atagttatcgactttcatttccatt

SEQ ID NO: 5931501 - DNA, 25 bp, Homo sapien
attttttatatcgatgcaagcagta

SEQ ID NO: 5931502 - DNA, 25 bp, Homo sapien
taatctttaccgatagtatctttct

SEQ ID NO: 5931503 - DNA, 25 bp, Homo sapien
ttagtttacgaactatctaatcgat

SEQ ID NO: 5931504 - DNA, 25 bp, Homo sapien
aacaataggtatcgattaattatcc

SEQ ID NO: 5931505 - DNA, 25 bp, Homo sapien
ataggtattgtatttcgcgtataat

SEQ ID NO: 5931506 - DNA, 25 bp, Homo sapien
tgattgcgttaactataatactaca

SEQ ID NO: 5931507 - DNA, 25 bp, Homo sapien
gcatgatcgtactaatagtaaaaat

SEQ ID NO: 5931508 - DNA, 25 bp, Homo sapien
gtttaattagcgataacactttgta

SEQ ID NO: 5931509 - DNA, 25 bp, Homo sapien
gcaatattcgatggttaaataacta

SEQ ID NO: 5931510 - DNA, 25 bp, Homo sapien
taccatgaacgaaatactatatatc

SEQ ID NO: 5931511 - DNA, 25 bp, Homo sapien
caacattatatatgcgaattgtagt

SEQ ID NO: 5931512 - DNA, 25 bp, Homo sapien
acagtcaataaattaaccgttagaa

SEQ ID NO: 5931513 - DNA, 25 bp, Homo sapien
gtcataattcatagtcgttattcaa

SEQ ID NO: 5931514 - DNA, 25 bp, Homo sapien
actaaactatcgcgatctaatatat

SEQ ID NO: 5931515 - DNA, 25 bp, Homo sapien
atgtgaatcttagttatacgagatt

SEQ ID NO: 5931516 - DNA, 25 bp, Homo sapien
cccagcttatatttataacgtataa

SEQ ID NO: 5931517 - DNA, 25 bp, Homo sapien
ttatttatagttcgacggaatacaa

SEQ ID NO: 5931518 - DNA, 25 bp, Homo sapien
agttatatcatatcgaatatctgtg

SEQ ID NO: 5931519 - DNA, 25 bp, Homo sapien
agatgatcaaatcgtaaaccaatta

SEQ ID NO: 5931520 - DNA, 25 bp, Homo sapien
tcaattcgtataatattagtcatcc

SEQ ID NO: 5931521 - DNA, 25 bp, Homo sapien
gactttcatatcgaatagataaaga

SEQ ID NO: 5931522 - DNA, 25 bp, Homo sapien
cattttgacgtaattaaacgcaaat

SEQ ID NO: 5931523 - DNA, 25 bp, Homo sapien
atcgtacttaattgaacgaaatgaa

SEQ ID NO: 5931524 - DNA, 25 bp, Homo sapien
taacgaacaatagacggtattttaa

SEQ ID NO: 5931525 - DNA, 25 bp, Homo sapien
atcacatacgaaactaattatcaca

SEQ ID NO: 5931526 - DNA, 25 bp, Homo sapien
attaccgataatttataaacgctag

SEQ ID NO: 5931527 - DNA, 25 bp, Homo sapien
tcatgaaattttcgatactagagaa

SEQ ID NO: 5931528 - DNA, 25 bp, Homo sapien
tcatcttcgacgtaataatatatca

SEQ ID NO: 5931529 - DNA, 25 bp, Homo sapien
aattctcttcgattatcgatagaat

SEQ ID NO: 5931530 - DNA, 25 bp, Homo sapien
attgtcgagtaatttagatatggtt

SEQ ID NO: 5931531 - DNA, 25 bp, Homo sapien
gtgatgtacgctaaaatattaagat

SEQ ID NO: 5931532 - DNA, 25 bp, Homo sapien
attacatcgcaatataattcattgg

SEQ ID NO: 5931533 - DNA, 25 bp, Homo sapien
taattagttacggcattatacgtat

SEQ ID NO: 5931534 - DNA, 25 bp, Homo sapien
catggattatcgtaatatgattaga

SEQ ID NO: 5931535 - DNA, 25 bp, Homo sapien
agaaatataatacgacttattcgca

SEQ ID NO: 5931536 - DNA, 25 bp, Homo sapien
tgtttccgataatgtattgtgtata

SEQ ID NO: 5931537 - DNA, 25 bp, Homo sapien
atgagatcgaattatttaacgtagt

SEQ ID NO: 5931538 - DNA, 25 bp, Homo sapien
ctatttatttacacgacatgagtta

SEQ ID NO: 5931539 - DNA, 25 bp, Homo sapien
attcaaattcgtttttcgactgata

SEQ ID NO: 5931540 - DNA, 25 bp, Homo sapien
aactacaatagtcgtataaaattgc

SEQ ID NO: 5931541 - DNA, 25 bp, Homo sapien
tataacgctatatgtatcatattgc

SEQ ID NO: 5931542 - DNA, 25 bp, Homo sapien
tataataatattacgccatcctctt

SEQ ID NO: 5931543 - DNA, 25 bp, Homo sapien
gattaaattccaatacgatattctg

SEQ ID NO: 5931544 - DNA, 25 bp, Homo sapien
ttagtttaatcttgaattcgttgca

SEQ ID NO: 5931545 - DNA, 25 bp, Homo sapien
ttttatcgataacaaccttattgag

SEQ ID NO: 5931546 - DNA, 25 bp, Homo sapien
aatagaatttatcgtatccagtcat

SEQ ID NO: 5931547 - DNA, 25 bp, Homo sapien
tgttgcgatatttttttgatgaagt

SEQ ID NO: 5931548 - DNA, 25 bp, Homo sapien
ccaataatacatcggattaataatg

SEQ ID NO: 5931549 - DNA, 25 bp, Homo sapien
caaaatcgaatgattcgtatatgtt

SEQ ID NO: 5931550 - DNA, 25 bp, Homo sapien
atagaagatcgtcaattttctacaa

SEQ ID NO: 5931551 - DNA, 25 bp, Homo sapien
aatctatatgttatcggctaaagtt

SEQ ID NO: 5931552 - DNA, 25 bp, Homo sapien
caagttattaattcggtctattctt

SEQ ID NO: 5931553 - DNA, 25 bp, Homo sapien
tgtagttcgtaattatactcattga

SEQ ID NO: 5931554 - DNA, 25 bp, Homo sapien
atgtgcgtatcgttatgataaaata

SEQ ID NO: 5931555 - DNA, 25 bp, Homo sapien
atcatatattcgataacgttcttca

SEQ ID NO: 5931556 - DNA, 25 bp, Homo sapien
caagatcgaaaaaatatgtcagaaa

SEQ ID NO: 5931557 - DNA, 25 bp, Homo sapien
gtattacttattatacggatatacg

SEQ ID NO: 5931558 - DNA, 25 bp, Homo sapien
attctatataaacttaccgatgttg

SEQ ID NO: 5931559 - DNA, 25 bp, Homo sapien
gctttgttattaaatagacgtttac

SEQ ID NO: 5931560 - DNA, 25 bp, Homo sapien
ttggatcgattaactataatgtcta

SEQ ID NO: 5931561 - DNA, 25 bp, Homo sapien
ttagcatacggtttttctagtaatt

SEQ ID NO: 5931562 - DNA, 25 bp, Homo sapien
caggtcgacgaaatataaaaatata

SEQ ID NO: 5931563 - DNA, 25 bp, Homo sapien
gaccttttcgatcaatataatgaaa

SEQ ID NO: 5931564 - DNA, 25 bp, Homo sapien
ttgtaacgtactacaatgatgttaa

SEQ ID NO: 5931565 - DNA, 25 bp, Homo sapien
ttagtatatcgtaagaccgttattt

SEQ ID NO: 5931566 - DNA, 25 bp, Homo sapien
ctataaactaatcgtaatatccact

SEQ ID NO: 5931567 - DNA, 25 bp, Homo sapien
atttgacgatatattccctaatgaa

SEQ ID NO: 5931568 - DNA, 25 bp, Homo sapien
atctcagtataaatcgatatagttg

SEQ ID NO: 5931569 - DNA, 25 bp, Homo sapien
attgaatacttttagtcggtaagat

SEQ ID NO: 5931570 - DNA, 25 bp, Homo sapien
gtaatcgatctaataagacttctta

SEQ ID NO: 5931571 - DNA, 25 bp, Homo sapien
tgaatacaattcgttattaaccact

SEQ ID NO: 5931572 - DNA, 25 bp, Homo sapien
accaaaatatagtttacgcaatgaa

SEQ ID NO: 5931573 - DNA, 25 bp, Homo sapien
cattgcgatatatgatttcgtattt

SEQ ID NO: 5931574 - DNA, 25 bp, Homo sapien
gagtatagtataagttaacgttttg

SEQ ID NO: 5931575 - DNA, 25 bp, Homo sapien
aggatatacgcgtaaattgttttta

SEQ ID NO: 5931576 - DNA, 25 bp, Homo sapien
gaaagtcgtaatcttttaacacaaa

SEQ ID NO: 5931577 - DNA, 25 bp, Homo sapien
tttaatatgacgaactaaatagtcg

SEQ ID NO: 5931578 - DNA, 25 bp, Homo sapien
ttatgtcaatataacgttaccgttt

SEQ ID NO: 5931579 - DNA, 25 bp, Homo sapien
gatagtcgtcaagaattaataatac

SEQ ID NO: 5931580 - DNA, 25 bp, Homo sapien
tttaatataattcgtccgatttgac

SEQ ID NO: 5931581 - DNA, 25 bp, Homo sapien
gtaactatataagatcatcgatcat

SEQ ID NO: 5931582 - DNA, 25 bp, Homo sapien
tagtctatcggattaatatatactg

SEQ ID NO: 5931583 - DNA, 25 bp, Homo sapien
tgggacgttataaatagttattact

SEQ ID NO: 5931584 - DNA, 25 bp, Homo sapien
aataagttgtaatcgattgtagaga

SEQ ID NO: 5931585 - DNA, 25 bp, Homo sapien
tataccaaacaattttccgtaacat

SEQ ID NO: 5931586 - DNA, 25 bp, Homo sapien
tttgatcgatataactggtttagaa

SEQ ID NO: 5931587 - DNA, 25 bp, Homo sapien
gtataatctcgaatatcgtttaact

SEQ ID NO: 5931588 - DNA, 25 bp, Homo sapien
agagataatttagaccgtatactta

SEQ ID NO: 5931589 - DNA, 25 bp, Homo sapien
atgctatatcgataattatcagtag

SEQ ID NO: 5931590 - DNA, 25 bp, Homo sapien
tatgatatttatagcgagatcacaa

SEQ ID NO: 5931591 - DNA, 25 bp, Homo sapien
tctcttaaaaatcgacgaaacaaat

SEQ ID NO: 5931592 - DNA, 25 bp, Homo sapien
aaattcaatacgcgatgtaatagtt

SEQ ID NO: 5931593 - DNA, 25 bp, Homo sapien
gtttaatttattcgcgaagttaatc

SEQ ID NO: 5931594 - DNA, 25 bp, Homo sapien
agaatatcttatcgttaccaatgaa

SEQ ID NO: 5931595 - DNA, 25 bp, Homo sapien
ttgtacgagtaatataggttaaaac

SEQ ID NO: 5931596 - DNA, 25 bp, Homo sapien
gtggaacgatataaatagtataagt

SEQ ID NO: 5931597 - DNA, 25 bp, Homo sapien
atatctataatcggagacataacaa

SEQ ID NO: 5931598 - DNA, 25 bp, Homo sapien
atatttgacgatgaaattaggaatg

SEQ ID NO: 5931599 - DNA, 25 bp, Homo sapien
tcagacgactatttgtaatatagat

SEQ ID NO: 5931600 - DNA, 25 bp, Homo sapien
gttattcggtaacgataatttgtat

SEQ ID NO: 5931601 - DNA, 25 bp, Homo sapien
agatcgttataataaccgtaaatag

SEQ ID NO: 5931602 - DNA, 25 bp, Homo sapien
atctgatcgtagttaaattacatac

SEQ ID NO: 5931603 - DNA, 25 bp, Homo sapien
aagttgttcaactaacgaattgatt

SEQ ID NO: 5931604 - DNA, 25 bp, Homo sapien
taagttcggactaatttagtttaca

SEQ ID NO: 5931605 - DNA, 25 bp, Homo sapien
taaacgcgttcgattaaattaaaga

SEQ ID NO: 5931606 - DNA, 25 bp, Homo sapien
atttcatgtttaagcgcatattact

SEQ ID NO: 5931607 - DNA, 25 bp, Homo sapien
gtcacttactcgatataatatgatt

SEQ ID NO: 5931608 - DNA, 25 bp, Homo sapien
aggtttacgatataccaatttatgt

SEQ ID NO: 5931609 - DNA, 25 bp, Homo sapien
ctactgatatttcaattcgctttat

SEQ ID NO: 5931610 - DNA, 25 bp, Homo sapien
acaaacgctaaaattcgataattga

SEQ ID NO: 5931611 - DNA, 25 bp, Homo sapien
aggtgtatacgatagtaataaaaac

SEQ ID NO: 5931612 - DNA, 25 bp, Homo sapien
tcagtatcgaataacgtttttaaca

SEQ ID NO: 5931613 - DNA, 25 bp, Homo sapien
aattattactacgcgataatagttc

SEQ ID NO: 5931614 - DNA, 25 bp, Homo sapien
ttctgattaatcgtacactttcatt

SEQ ID NO: 5931615 - DNA, 25 bp, Homo sapien
tagtgtactaaagttcgcattaaat

SEQ ID NO: 5931616 - DNA, 25 bp, Homo sapien
gcataattcgttataagagtgtatt

SEQ ID NO: 5931617 - DNA, 25 bp, Homo sapien
tgaatctttagatcgtaacattttg

SEQ ID NO: 5931618 - DNA, 25 bp, Homo sapien
accactattaattcgcataaatttg

SEQ ID NO: 5931619 - DNA, 25 bp, Homo sapien
tattatatgcgtaacttacactatg

SEQ ID NO: 5931620 - DNA, 25 bp, Homo sapien
acatattttacacctacgattttac

SEQ ID NO: 5931621 - DNA, 25 bp, Homo sapien
taaattattgtaacgtattcctcga

SEQ ID NO: 5931622 - DNA, 25 bp, Homo sapien
catgtacgaatagtaacttatgatt

SEQ ID NO: 5931623 - DNA, 25 bp, Homo sapien
accataacatttcgattaagcaata

SEQ ID NO: 5931624 - DNA, 25 bp, Homo sapien
tggtgtttacgttaatcatgataaa

SEQ ID NO: 5931625 - DNA, 25 bp, Homo sapien
ggattaagatatatagtcgtactat

SEQ ID NO: 5931626 - DNA, 25 bp, Homo sapien
gataaaaataaatcgcgataagttc

SEQ ID NO: 5931627 - DNA, 25 bp, Homo sapien
taactatatcgataagtagtaacag

SEQ ID NO: 5931628 - DNA, 25 bp, Homo sapien
agactcgaacctctataatattatt

SEQ ID NO: 5931629 - DNA, 25 bp, Homo sapien
ctagttaagttcgaaataaattcga

SEQ ID NO: 5931630 - DNA, 25 bp, Homo sapien
ggcaattagtaatcgaaaaataaac

SEQ ID NO: 5931631 - DNA, 25 bp, Homo sapien
aagggcgtaaatttatcatattcta

SEQ ID NO: 5931632 - DNA, 25 bp, Homo sapien
cttagcgatacgaaaaatttgataa

SEQ ID NO: 5931633 - DNA, 25 bp, Homo sapien
gagagtatacgaaatcattgtaaat

SEQ ID NO: 5931634 - DNA, 25 bp, Homo sapien
gagaatcgacgtattaaaaacttta

SEQ ID NO: 5931635 - DNA, 25 bp, Homo sapien
gtaaaatatcactttaacgtcaatc

SEQ ID NO: 5931636 - DNA, 25 bp, Homo sapien
aataactaagattcgattacaaagc

SEQ ID NO: 5931637 - DNA, 25 bp, Homo sapien
gtgtttagcgaactaattatatatg

SEQ ID NO: 5931638 - DNA, 25 bp, Homo sapien
attcctttacacgattattaatcca

SEQ ID NO: 5931639 - DNA, 25 bp, Homo sapien
tatatttagttccgtattgaacttg

SEQ ID NO: 5931640 - DNA, 25 bp, Homo sapien
tttataatcaacgactattacacag

SEQ ID NO: 5931641 - DNA, 25 bp, Homo sapien
aagaacgtcaaaatttagactatca

SEQ ID NO: 5931642 - DNA, 25 bp, Homo sapien
tgtatcgatagaattgtataagtag

SEQ ID NO: 5931643 - DNA, 25 bp, Homo sapien
taatttcgtttaatcagtagcatga

SEQ ID NO: 5931644 - DNA, 25 bp, Homo sapien
caatataatgcacgaaaaaatgtga

SEQ ID NO: 5931645 - DNA, 25 bp, Homo sapien
tcgaaagtacgcaattagtttatat

SEQ ID NO: 5931646 - DNA, 25 bp, Homo sapien
gattcgtatatacgattaaatcact

SEQ ID NO: 5931647 - DNA, 25 bp, Homo sapien
tgtttgcgtatataaaatctcaaga

SEQ ID NO: 5931648 - DNA, 25 bp, Homo sapien
tttagtttaacgatacgttgagaaa

SEQ ID NO: 5931649 - DNA, 25 bp, Homo sapien
atcatatgcgtttcgtaaaaattag

SEQ ID NO: 5931650 - DNA, 25 bp, Homo sapien
taaaaatcgatatagttatccacga

SEQ ID NO: 5931651 - DNA, 25 bp, Homo sapien
atagcgcgaataagttaataattag

SEQ ID NO: 5931652 - DNA, 25 bp, Homo sapien
cgactgttaatcgtttattaaacat

SEQ ID NO: 5931653 - DNA, 25 bp, Homo sapien
gacagttattcgattagataattag

SEQ ID NO: 5931654 - DNA, 25 bp, Homo sapien
tttaaactatactggcttaatgttc

SEQ ID NO: 5931655 - DNA, 25 bp, Homo sapien
gacaattacgatacgtaatatttag

SEQ ID NO: 5931656 - DNA, 25 bp, Homo sapien
agaatttttacgttaccatgagtta

SEQ ID NO: 5931657 - DNA, 25 bp, Homo sapien
ttttttagcggattatattagcaag

SEQ ID NO: 5931658 - DNA, 25 bp, Homo sapien
tcttttacgaataattatcgcttac

SEQ ID NO: 5931659 - DNA, 25 bp, Homo sapien
tctgatcgaaatttatcaatctaga

SEQ ID NO: 5931660 - DNA, 25 bp, Homo sapien
gaaattcgagtatatagatcaatga

SEQ ID NO: 5931661 - DNA, 25 bp, Homo sapien
caaagttaaacgattagtatactct

SEQ ID NO: 5931662 - DNA, 25 bp, Homo sapien
cgttttcgactatctatactatatt

SEQ ID NO: 5931663 - DNA, 25 bp, Homo sapien
aaaatatacaagattcacgtatcga

SEQ ID NO: 5931664 - DNA, 25 bp, Homo sapien
attcccgtagaataacatatgttta

SEQ ID NO: 5931665 - DNA, 25 bp, Homo sapien
tgtgattactatatgcgattgatta

SEQ ID NO: 5931666 - DNA, 25 bp, Homo sapien
tacagtcgatcgaaaaagataatat

SEQ ID NO: 5931667 - DNA, 25 bp, Homo sapien
tatataacgcgtttagctatatact

SEQ ID NO: 5931668 - DNA, 25 bp, Homo sapien
attagctagtaagcgtaattagtta

SEQ ID NO: 5931669 - DNA, 25 bp, Homo sapien
caaatctataacgtaaacgtaagta

SEQ ID NO: 5931670 - DNA, 25 bp, Homo sapien
atacgacttattacgatatctatgt

SEQ ID NO: 5931671 - DNA, 25 bp, Homo sapien
taattgtaatgtatctcgtttctca

SEQ ID NO: 5931672 - DNA, 25 bp, Homo sapien
ttagatccatctaattttcgaagaa

SEQ ID NO: 5931673 - DNA, 25 bp, Homo sapien
gaaaagcgattgttaatacaattag

SEQ ID NO: 5931674 - DNA, 25 bp, Homo sapien
aactccgttcgattatatacttatt

SEQ ID NO: 5931675 - DNA, 25 bp, Homo sapien
tgttagtttaaacggactattcatt

SEQ ID NO: 5931676 - DNA, 25 bp, Homo sapien
tacctatatagcgataaattcctaa

SEQ ID NO: 5931677 - DNA, 25 bp, Homo sapien
ttatgaatcgtacattatagattcc

SEQ ID NO: 5931678 - DNA, 25 bp, Homo sapien
catattcgtacgatattcgtatatt

SEQ ID NO: 5931679 - DNA, 25 bp, Homo sapien
gagtttaagttatcgcgtatatttt

SEQ ID NO: 5931680 - DNA, 25 bp, Homo sapien
ccagaatacgactcattatataatt

SEQ ID NO: 5931681 - DNA, 25 bp, Homo sapien
ttaatgatttagaacgtacttgaag

SEQ ID NO: 5931682 - DNA, 25 bp, Homo sapien
atagatctattataatatcgcggat

SEQ ID NO: 5931683 - DNA, 25 bp, Homo sapien
aaacatattaatcaacgtctcactt

SEQ ID NO: 5931684 - DNA, 25 bp, Homo sapien
cgagtaaatgatcgtttagtattat

SEQ ID NO: 5931685 - DNA, 25 bp, Homo sapien
aataaactatcacgtaaatctaacg

SEQ ID NO: 5931686 - DNA, 25 bp, Homo sapien
caatatggtaaaattcgagaaatct

SEQ ID NO: 5931687 - DNA, 25 bp, Homo sapien
tactttaacgtataactcatttagc

SEQ ID NO: 5931688 - DNA, 25 bp, Homo sapien
tataagcaattacggtatttctctt

SEQ ID NO: 5931689 - DNA, 25 bp, Homo sapien
attagtcatactcaattcgatattg

SEQ ID NO: 5931690 - DNA, 25 bp, Homo sapien
tacaaagttatgttcgattatacca

SEQ ID NO: 5931691 - DNA, 25 bp, Homo sapien
cattcaataacattcgcgaaatttt

SEQ ID NO: 5931692 - DNA, 25 bp, Homo sapien
agatatctaatacgatataagagct

SEQ ID NO: 5931693 - DNA, 25 bp, Homo sapien
aaattttacggatatcgtaaagcaa

SEQ ID NO: 5931694 - DNA, 25 bp, Homo sapien
aagattatcgaatcatgattaacga

SEQ ID NO: 5931695 - DNA, 25 bp, Homo sapien
tacattatcgtatttgggtataaag

SEQ ID NO: 5931696 - DNA, 25 bp, Homo sapien
ttttataagcggcaaaaaaagatac

SEQ ID NO: 5931697 - DNA, 25 bp, Homo sapien
cttcattatattactctcgaaaaac

SEQ ID NO: 5931698 - DNA, 25 bp, Homo sapien
ttacatgttagttaacgataaacac

SEQ ID NO: 5931699 - DNA, 25 bp, Homo sapien
aaatatagtcgcgaacattgaaaaa

SEQ ID NO: 5931700 - DNA, 25 bp, Homo sapien
agagaatataatattaggcgttctt

SEQ ID NO: 5931701 - DNA, 25 bp, Homo sapien
actatattgtaatatgcgatgttac

SEQ ID NO: 5931702 - DNA, 25 bp, Homo sapien
tacagcaactactcgtttatatatt

SEQ ID NO: 5931703 - DNA, 25 bp, Homo sapien
gatactatacggattaattaacatc

SEQ ID NO: 5931704 - DNA, 25 bp, Homo sapien
caaactctattgattcgtatacttt

SEQ ID NO: 5931705 - DNA, 25 bp, Homo sapien
gggaagtattaaacgaatctaaata

SEQ ID NO: 5931706 - DNA, 25 bp, Homo sapien
tatgtcatatcgttattaaagagtc

SEQ ID NO: 5931707 - DNA, 25 bp, Homo sapien
atcctttgaaattaatcgagattgt

SEQ ID NO: 5931708 - DNA, 25 bp, Homo sapien
actattactattaaccgcttatcaa

SEQ ID NO: 5931709 - DNA, 25 bp, Homo sapien
cttttacgtacgataatagaagtta

SEQ ID NO: 5931710 - DNA, 25 bp, Homo sapien
actaataattcgtcttataactcac

SEQ ID NO: 5931711 - DNA, 25 bp, Homo sapien
agtaaatatgcgttaacgatttact

SEQ ID NO: 5931712 - DNA, 25 bp, Homo sapien
aatgtgcgaatttaaattagcctta

SEQ ID NO: 5931713 - DNA, 25 bp, Homo sapien
gaatacttaagtacgaattaattcc

SEQ ID NO: 5931714 - DNA, 25 bp, Homo sapien
ttcgctatatatcgaagtaatttct

SEQ ID NO: 5931715 - DNA, 25 bp, Homo sapien
attgttttcgattaatttaggagac

SEQ ID NO: 5931716 - DNA, 25 bp, Homo sapien
aagaatttacgttcgtacgataata

SEQ ID NO: 5931717 - DNA, 25 bp, Homo sapien
tcaatcgccttaaaatattggattt

SEQ ID NO: 5931718 - DNA, 25 bp, Homo sapien
tgagtcgataacataatttcacaat

SEQ ID NO: 5931719 - DNA, 25 bp, Homo sapien
acttatgacgcaaattattaatcga

SEQ ID NO: 5931720 - DNA, 25 bp, Homo sapien
aaatctgtccgcgtattaatatatt

SEQ ID NO: 5931721 - DNA, 25 bp, Homo sapien
ttaagatattagcgtcgtaattttc

SEQ ID NO: 5931722 - DNA, 25 bp, Homo sapien
aggtatatgtcgtaataatttttgc

SEQ ID NO: 5931723 - DNA, 25 bp, Homo sapien
cgttattaaattcgacttaatcaca

SEQ ID NO: 5931724 - DNA, 25 bp, Homo sapien
ccactttcataatatgttcgataaa

SEQ ID NO: 5931725 - DNA, 25 bp, Homo sapien
tagttttgtcgtatagagttttgtt

SEQ ID NO: 5931726 - DNA, 25 bp, Homo sapien
tcttgaacaatcgttaataaatcga

SEQ ID NO: 5931727 - DNA, 25 bp, Homo sapien
aaagcgataattcgtatataaccaa

SEQ ID NO: 5931728 - DNA, 25 bp, Homo sapien
gattctaaaaagtgcgaaatcaata

SEQ ID NO: 5931729 - DNA, 25 bp, Homo sapien
attatcgaacctaatataatcctca

SEQ ID NO: 5931730 - DNA, 25 bp, Homo sapien
aaatctaacgcgataaaaatgagat

SEQ ID NO: 5931731 - DNA, 25 bp, Homo sapien
ttcttacttaatatcggttagtgtt

SEQ ID NO: 5931732 - DNA, 25 bp, Homo sapien
atcaaatcaaacgatattcgtttag

SEQ ID NO: 5931733 - DNA, 25 bp, Homo sapien
catatttcgataaatataacagtgc

SEQ ID NO: 5931734 - DNA, 25 bp, Homo sapien
tacgtggagttatacgaattttatt

SEQ ID NO: 5931735 - DNA, 25 bp, Homo sapien
gcttgaagacgactaattaaattat

SEQ ID NO: 5931736 - DNA, 25 bp, Homo sapien
aatgtttatatcgtgttaaagaacg

SEQ ID NO: 5931737 - DNA, 25 bp, Homo sapien
tatcatttaccgatgtactatcaaa

SEQ ID NO: 5931738 - DNA, 25 bp, Homo sapien
attgttctatcataatacgcttgat

SEQ ID NO: 5931739 - DNA, 25 bp, Homo sapien
caaatattctttctatcgattctca

SEQ ID NO: 5931740 - DNA, 25 bp, Homo sapien
tatagtcgctagcgtaattatatta

SEQ ID NO: 5931741 - DNA, 25 bp, Homo sapien
ttaaagatttcgtaaagtacaacca

SEQ ID NO: 5931742 - DNA, 25 bp, Homo sapien
atcatatttaacgtttcgcttttgt

SEQ ID NO: 5931743 - DNA, 25 bp, Homo sapien
tttaattgcgttacgagtagttatt

SEQ ID NO: 5931744 - DNA, 25 bp, Homo sapien
cttatgacgtaatctttatagcttt

SEQ ID NO: 5931745 - DNA, 25 bp, Homo sapien
ttgtaactagttaaacatcggatat

SEQ ID NO: 5931746 - DNA, 25 bp, Homo sapien
atgtttgttagagtttcgaattgat

SEQ ID NO: 5931747 - DNA, 25 bp, Homo sapien
cctattcgtaaacgatataataatg

SEQ ID NO: 5931748 - DNA, 25 bp, Homo sapien
tctattatatcggtttcaatttacc

SEQ ID NO: 5931749 - DNA, 25 bp, Homo sapien
tattacattatatagtacgaacgga

SEQ ID NO: 5931750 - DNA, 25 bp, Homo sapien
ggagttatacgaacaattaatctaa

SEQ ID NO: 5931751 - DNA, 25 bp, Homo sapien
atctttcgttcgagattataatttc

SEQ ID NO: 5931752 - DNA, 25 bp, Homo sapien
tgattacgatagattgattaagcta

SEQ ID NO: 5931753 - DNA, 25 bp, Homo sapien
aatttcgtattataagtgttatcgc

SEQ ID NO: 5931754 - DNA, 25 bp, Homo sapien
tattaataagagtattgcgtaacga

SEQ ID NO: 5931755 - DNA, 25 bp, Homo sapien
atagtttaatacgtaatcactagac

SEQ ID NO: 5931756 - DNA, 25 bp, Homo sapien
aaatgataactctttttcgaactga

SEQ ID NO: 5931757 - DNA, 25 bp, Homo sapien
ttctatagtattatttcgtacaagc

SEQ ID NO: 5931758 - DNA, 25 bp, Homo sapien
aaatgttgtagcatacgatatagtt

SEQ ID NO: 5931759 - DNA, 25 bp, Homo sapien
aaatcaacggtagtcatatatatga

SEQ ID NO: 5931760 - DNA, 25 bp, Homo sapien
tcttaaacagtcgaaaattgttatc

SEQ ID NO: 5931761 - DNA, 25 bp, Homo sapien
ggaattagtattaattatcgtctgt

SEQ ID NO: 5931762 - DNA, 25 bp, Homo sapien
tataacgtaattatctaatggcaac

SEQ ID NO: 5931763 - DNA, 25 bp, Homo sapien
aattttcttcgatcgatattatggt

SEQ ID NO: 5931764 - DNA, 25 bp, Homo sapien
gtatagtaaaaatttcgcgattgat

SEQ ID NO: 5931765 - DNA, 25 bp, Homo sapien
aatttcttatattacgtatgccctt

SEQ ID NO: 5931766 - DNA, 25 bp, Homo sapien
agttcaattatcggtttaattctct

SEQ ID NO: 5931767 - DNA, 25 bp, Homo sapien
gtagagcaactaaatcgtttttatt

SEQ ID NO: 5931768 - DNA, 25 bp, Homo sapien
tagcaaacgaattatatatcaacct

SEQ ID NO: 5931769 - DNA, 25 bp, Homo sapien
ttttacgaaaaacagtaatctagac

SEQ ID NO: 5931770 - DNA, 25 bp, Homo sapien
atttgtttcggtaatcgaattcaaa

SEQ ID NO: 5931771 - DNA, 25 bp, Homo sapien
cttctaattgagtctaacgaaatta

SEQ ID NO: 5931772 - DNA, 25 bp, Homo sapien
tgtagtcgaataatagtcgtttttt

SEQ ID NO: 5931773 - DNA, 25 bp, Homo sapien
ctagttcgacttaatagtatacatt

SEQ ID NO: 5931774 - DNA, 25 bp, Homo sapien
cgtttctattctttacgataagtta

SEQ ID NO: 5931775 - DNA, 25 bp, Homo sapien
ctctgtattaaagttatacgtatct

SEQ ID NO: 5931776 - DNA, 25 bp, Homo sapien
aatgataaattgtcgtaaatgacgt

SEQ ID NO: 5931777 - DNA, 25 bp, Homo sapien
tagattgttatttaccgacatgttt

SEQ ID NO: 5931778 - DNA, 25 bp, Homo sapien
tgtaagacgattcaattttgtaaag

SEQ ID NO: 5931779 - DNA, 25 bp, Homo sapien
aacctttaatataataggcgtattc

SEQ ID NO: 5931780 - DNA, 25 bp, Homo sapien
aactattcgctatatgaagtatgat

SEQ ID NO: 5931781 - DNA, 25 bp, Homo sapien
gataattttacggaattatagttgc

SEQ ID NO: 5931782 - DNA, 25 bp, Homo sapien
atacatatcaacaattgacgactta

SEQ ID NO: 5931783 - DNA, 25 bp, Homo sapien
acattacgaattatatcctaggata

SEQ ID NO: 5931784 - DNA, 25 bp, Homo sapien
ataccgacgtattattaattcgatt

SEQ ID NO: 5931785 - DNA, 25 bp, Homo sapien
actttggttcattatcgatttacta

SEQ ID NO: 5931786 - DNA, 25 bp, Homo sapien
catatacgcgacaaataagaataat

SEQ ID NO: 5931787 - DNA, 25 bp, Homo sapien
acctccgatataatggttatataaa

SEQ ID NO: 5931788 - DNA, 25 bp, Homo sapien
tcatttaatataagaatacgggtct

SEQ ID NO: 5931789 - DNA, 25 bp, Homo sapien
ccgaatatagtttatcgatttatct

SEQ ID NO: 5931790 - DNA, 25 bp, Homo sapien
ctattcaatgcgcatattataaatg

SEQ ID NO: 5931791 - DNA, 25 bp, Homo sapien
tatatatctttcggttctaactctt

SEQ ID NO: 5931792 - DNA, 25 bp, Homo sapien
caataagtcaaaaaattccgaatga

SEQ ID NO: 5931793 - DNA, 25 bp, Homo sapien
gtatgatccgcaaattaattcattt

SEQ ID NO: 5931794 - DNA, 25 bp, Homo sapien
ctcatttgaaattcgctaataactt

SEQ ID NO: 5931795 - DNA, 25 bp, Homo sapien
tatttataccgataagaagtgatac

SEQ ID NO: 5931796 - DNA, 25 bp, Homo sapien
tggaaatagtacgttaatcagtaaa

SEQ ID NO: 5931797 - DNA, 25 bp, Homo sapien
acaaattatcgcgctagataaattt

SEQ ID NO: 5931798 - DNA, 25 bp, Homo sapien
ctatgatataaaatcgtcgaactat

SEQ ID NO: 5931799 - DNA, 25 bp, Homo sapien
ctaattactacgtaatattgtccaa

SEQ ID NO: 5931800 - DNA, 25 bp, Homo sapien
aaaaatttcgataattcgatggcaa

SEQ ID NO: 5931801 - DNA, 25 bp, Homo sapien
ttgtttaagcgcaattgattttcat

SEQ ID NO: 5931802 - DNA, 25 bp, Homo sapien
gttatactaatttacgatcgtaact

SEQ ID NO: 5931803 - DNA, 25 bp, Homo sapien
ttcactaataatacgcttacttaga

SEQ ID NO: 5931804 - DNA, 25 bp, Homo sapien
taagttaagttacgatgatacacta

SEQ ID NO: 5931805 - DNA, 25 bp, Homo sapien
attctcatattacgaacttttctgt

SEQ ID NO: 5931806 - DNA, 25 bp, Homo sapien
ataacattacatcgtaacgttacta

SEQ ID NO: 5931807 - DNA, 25 bp, Homo sapien
atgcagttcggtattatattaattg

SEQ ID NO: 5931808 - DNA, 25 bp, Homo sapien
tttgttcgtaaatttaaagcagact

SEQ ID NO: 5931809 - DNA, 25 bp, Homo sapien
gttctacttattatccgtacaaaat

SEQ ID NO: 5931810 - DNA, 25 bp, Homo sapien
taaatttcatccgaataactacagt

SEQ ID NO: 5931811 - DNA, 25 bp, Homo sapien
cgataattatttcgattaagatcca

SEQ ID NO: 5931812 - DNA, 25 bp, Homo sapien
aagaatatatttagacgtaagcttc

SEQ ID NO: 5931813 - DNA, 25 bp, Homo sapien
attttttcaaatcgtgcaatgaatc

SEQ ID NO: 5931814 - DNA, 25 bp, Homo sapien
tgtaaattaatgccgtaataatgag

SEQ ID NO: 5931815 - DNA, 25 bp, Homo sapien
ctattaattagacggataattttgg

SEQ ID NO: 5931816 - DNA, 25 bp, Homo sapien
atgcaaatgtatcgattaggaaaaa

SEQ ID NO: 5931817 - DNA, 25 bp, Homo sapien
taacgtccggatataattcatatta

SEQ ID NO: 5931818 - DNA, 25 bp, Homo sapien
ttttgacaattcgcttaattacgat

SEQ ID NO: 5931819 - DNA, 25 bp, Homo sapien
tttaaatatattagtgcgacatctc

SEQ ID NO: 5931820 - DNA, 25 bp, Homo sapien
tttcttcacgaaaattacgtaatac

SEQ ID NO: 5931821 - DNA, 25 bp, Homo sapien
tttcgagtattacaacgttagaatt

SEQ ID NO: 5931822 - DNA, 25 bp, Homo sapien
cttcaaatcgaaacacgaataatat

SEQ ID NO: 5931823 - DNA, 25 bp, Homo sapien
gtaattttactatagttcgagatag

SEQ ID NO: 5931824 - DNA, 25 bp, Homo sapien
tgtaagtctacggaatatatgttta

SEQ ID NO: 5931825 - DNA, 25 bp, Homo sapien
tatggatttcgtttatacgatctaa

SEQ ID NO: 5931826 - DNA, 25 bp, Homo sapien
gatgattatatcgcgaaattattca

SEQ ID NO: 5931827 - DNA, 25 bp, Homo sapien
acacatatattataaagcgaaatcc

SEQ ID NO: 5931828 - DNA, 25 bp, Homo sapien
tactctttatcgaaggtaaagaaat

SEQ ID NO: 5931829 - DNA, 25 bp, Homo sapien
aacacatagtttacgattgactttt

SEQ ID NO: 5931830 - DNA, 25 bp, Homo sapien
tgtttgattagttattatcgtagca

SEQ ID NO: 5931831 - DNA, 25 bp, Homo sapien
catagaatcgtaatattgatacttc

SEQ ID NO: 5931832 - DNA, 25 bp, Homo sapien
gagtaattacatatactcgtgaata

SEQ ID NO: 5931833 - DNA, 25 bp, Homo sapien
ataaacgtacgtataattcatatgc

SEQ ID NO: 5931834 - DNA, 25 bp, Homo sapien
attaatcgttcctaataagtagtac

SEQ ID NO: 5931835 - DNA, 25 bp, Homo sapien
tgttcgatcgattaatagtatctat

SEQ ID NO: 5931836 - DNA, 25 bp, Homo sapien
gagaaaatcgaaatatcaagaaatg

SEQ ID NO: 5931837 - DNA, 25 bp, Homo sapien
ataagacttatagttaacgtagtac

SEQ ID NO: 5931838 - DNA, 25 bp, Homo sapien
gttggtcgtaaactaaattattcta

SEQ ID NO: 5931839 - DNA, 25 bp, Homo sapien
caatttaatatcgctaatttagcct

SEQ ID NO: 5931840 - DNA, 25 bp, Homo sapien
tttttactttaatccgaatatggtg

SEQ ID NO: 5931841 - DNA, 25 bp, Homo sapien
tgataaaagtttttccgttagtgat

SEQ ID NO: 5931842 - DNA, 25 bp, Homo sapien
tatatctatacgcgggataaaaatt

SEQ ID NO: 5931843 - DNA, 25 bp, Homo sapien
tcaggagttaagtaattcgattaaa

SEQ ID NO: 5931844 - DNA, 25 bp, Homo sapien
gaaaaaatataatagtcgattccgt

SEQ ID NO: 5931845 - DNA, 25 bp, Homo sapien
ctatattgaagtataaagcgcttat

SEQ ID NO: 5931846 - DNA, 25 bp, Homo sapien
tgaacgatttaacgaatagtaaaga

SEQ ID NO: 5931847 - DNA, 25 bp, Homo sapien
atagcgtattaatcgatcttactta

SEQ ID NO: 5931848 - DNA, 25 bp, Homo sapien
tctgaagcgattaatattgtctaaa

SEQ ID NO: 5931849 - DNA, 25 bp, Homo sapien
atattatcgcgctacgttaattatt

SEQ ID NO: 5931850 - DNA, 25 bp, Homo sapien
tctagattcttcgattatagtaatg

SEQ ID NO: 5931851 - DNA, 25 bp, Homo sapien
gagtttatagtcgaaattaattgga

SEQ ID NO: 5931852 - DNA, 25 bp, Homo sapien
tttaatgtcggttcatattattgtg

SEQ ID NO: 5931853 - DNA, 25 bp, Homo sapien
attgtcacgaagtatattacctttt

SEQ ID NO: 5931854 - DNA, 25 bp, Homo sapien
cttgtcaattaagcgttaaaaattg

SEQ ID NO: 5931855 - DNA, 25 bp, Homo sapien
tctaatacgttacgattaagattga

SEQ ID NO: 5931856 - DNA, 25 bp, Homo sapien
atcgatagacttagtcgaattatat

SEQ ID NO: 5931857 - DNA, 25 bp, Homo sapien
tcagtcgttgtatcgttttataata

SEQ ID NO: 5931858 - DNA, 25 bp, Homo sapien
gataattcgagaaacgttatgaaaa

SEQ ID NO: 5931859 - DNA, 25 bp, Homo sapien
aaacaaaatcgatattcgtagcttt

SEQ ID NO: 5931860 - DNA, 25 bp, Homo sapien
gataaacgataatcgttatgtcaaa

SEQ ID NO: 5931861 - DNA, 25 bp, Homo sapien
gtacgacttttcgattaaataatgt

SEQ ID NO: 5931862 - DNA, 25 bp, Homo sapien
atgaactaagtaaatttgcgtagta

SEQ ID NO: 5931863 - DNA, 25 bp, Homo sapien
tattgacgcgagtaaatattttaca

SEQ ID NO: 5931864 - DNA, 25 bp, Homo sapien
tattagcgacaattgtttaaggatt

SEQ ID NO: 5931865 - DNA, 25 bp, Homo sapien
tctactaacgttaattattgaactg

SEQ ID NO: 5931866 - DNA, 25 bp, Homo sapien
taagaactaacgtattgtaaaatcc

SEQ ID NO: 5931867 - DNA, 25 bp, Homo sapien
cttttcgctataagcatatattaga

SEQ ID NO: 5931868 - DNA, 25 bp, Homo sapien
aatgttatgcgtactatctattaga

SEQ ID NO: 5931869 - DNA, 25 bp, Homo sapien
cattgattaaatcgtataagacagt

SEQ ID NO: 5931870 - DNA, 25 bp, Homo sapien
aatctcttatgtcgctaaatataag

SEQ ID NO: 5931871 - DNA, 25 bp, Homo sapien
caacaatagttaatttaacgtgttg

SEQ ID NO: 5931872 - DNA, 25 bp, Homo sapien
gaataaacgtcgtaattcgaattta

SEQ ID NO: 5931873 - DNA, 25 bp, Homo sapien
atgtttaggatatcgtcaaagtatt

SEQ ID NO: 5931874 - DNA, 25 bp, Homo sapien
cagaatattgaataacgatttacag

SEQ ID NO: 5931875 - DNA, 25 bp, Homo sapien
attagccgttgatgatatttactta

SEQ ID NO: 5931876 - DNA, 25 bp, Homo sapien
cttataacgtcgatacataagttat

SEQ ID NO: 5931877 - DNA, 25 bp, Homo sapien
aaaggcgatctatattatatggata

SEQ ID NO: 5931878 - DNA, 25 bp, Homo sapien
tattctgatcgtacataatagttga

SEQ ID NO: 5931879 - DNA, 25 bp, Homo sapien
atagaattattatagcgtactatcg

SEQ ID NO: 5931880 - DNA, 25 bp, Homo sapien
atttcagtcattataagcgtgatat

SEQ ID NO: 5931881 - DNA, 25 bp, Homo sapien
tatactttacgatatatactccaag

SEQ ID NO: 5931882 - DNA, 25 bp, Homo sapien
gaatcttttcgaaaatttagtgttg

SEQ ID NO: 5931883 - DNA, 25 bp, Homo sapien
gtgaaaatctttaattcgtatgaca

SEQ ID NO: 5931884 - DNA, 25 bp, Homo sapien
ttttcataatttcgatatcgggttg

SEQ ID NO: 5931885 - DNA, 25 bp, Homo sapien
cttgtattggcgttatacataagtt

SEQ ID NO: 5931886 - DNA, 25 bp, Homo sapien
tgaactatatcgtaaaaaagcgtac

SEQ ID NO: 5931887 - DNA, 25 bp, Homo sapien
aagatacgtaatatacgcgatgata

SEQ ID NO: 5931888 - DNA, 25 bp, Homo sapien
cgaatctttttggtaatcgagatat

SEQ ID NO: 5931889 - DNA, 25 bp, Homo sapien
ttggcaatttaaccgatcttataag

SEQ ID NO: 5931890 - DNA, 25 bp, Homo sapien
catttatgcgcgttaatacatatag

SEQ ID NO: 5931891 - DNA, 25 bp, Homo sapien
taattactacattcgtagaaggaca

SEQ ID NO: 5931892 - DNA, 25 bp, Homo sapien
aatacgtttcaacgttatatcttgc

SEQ ID NO: 5931893 - DNA, 25 bp, Homo sapien
tctatccataaaatttacgggctta

SEQ ID NO: 5931894 - DNA, 25 bp, Homo sapien
gaattttaagtcgaccgctattaaa

SEQ ID NO: 5931895 - DNA, 25 bp, Homo sapien
gtttttcggattacgatattaggaa

SEQ ID NO: 5931896 - DNA, 25 bp, Homo sapien
ataattgtcggcgtagtatattact

SEQ ID NO: 5931897 - DNA, 25 bp, Homo sapien
taaaggttaatattgcgttacgaga

SEQ ID NO: 5931898 - DNA, 25 bp, Homo sapien
gatcaagacatattacttcgttgaa

SEQ ID NO: 5931899 - DNA, 25 bp, Homo sapien
tatgatctaaccggcgtatatatat

SEQ ID NO: 5931900 - DNA, 25 bp, Homo sapien
taaaaagacgataattcgctagtac

SEQ ID NO: 5931901 - DNA, 25 bp, Homo sapien
ataatatacgacggtatactcttgt

SEQ ID NO: 5931902 - DNA, 25 bp, Homo sapien
taaattaaactatattctcgctgcc

SEQ ID NO: 5931903 - DNA, 25 bp, Homo sapien
tataatcgaatactcgcgaaatgat

SEQ ID NO: 5931904 - DNA, 25 bp, Homo sapien
tcctcatccgcataatattgtataa

SEQ ID NO: 5931905 - DNA, 25 bp, Homo sapien
tcaaacgcatattagtataacgaag

SEQ ID NO: 5931906 - DNA, 25 bp, Homo sapien
ttgatcgattatttataacgccatg

SEQ ID NO: 5931907 - DNA, 25 bp, Homo sapien
aatgaacgatagtaatcttatgtgg

SEQ ID NO: 5931908 - DNA, 25 bp, Homo sapien
gtagatcgaaatagtacgaaatgta

SEQ ID NO: 5931909 - DNA, 25 bp, Homo sapien
gacaaatactcgtattatataacgg

SEQ ID NO: 5931910 - DNA, 25 bp, Homo sapien
tgctaattagtgcgatagattgttt

SEQ ID NO: 5931911 - DNA, 25 bp, Homo sapien
ttttttataacgatgtcgatagtgc

SEQ ID NO: 5931912 - DNA, 25 bp, Homo sapien
taccaaatagattaacgtactcgta

SEQ ID NO: 5931913 - DNA, 25 bp, Homo sapien
ttgggactattccgctttataataa

SEQ ID NO: 5931914 - DNA, 25 bp, Homo sapien
gattaataatgatcgcactattcga

SEQ ID NO: 5931915 - DNA, 25 bp, Homo sapien
actgcctttatacgtattcgtaata

SEQ ID NO: 5931916 - DNA, 25 bp, Homo sapien
gcaacattaatacaatcggaagtaa

SEQ ID NO: 5931917 - DNA, 25 bp, Homo sapien
ttgaagtttattaccgcaataaggt

SEQ ID NO: 5931918 - DNA, 25 bp, Homo sapien
tcatttttcggttattgatgtatgg

SEQ ID NO: 5931919 - DNA, 25 bp, Homo sapien
tccatttatattttcgaccgtactt

SEQ ID NO: 5931920 - DNA, 25 bp, Homo sapien
tgaatatcgataattgacctttggt

SEQ ID NO: 5931921 - DNA, 25 bp, Homo sapien
aagaatcgcgatattagtactaaac

SEQ ID NO: 5931922 - DNA, 25 bp, Homo sapien
attatgcggtctatacgtaataaca

SEQ ID NO: 5931923 - DNA, 25 bp, Homo sapien
tatttagaacgaccgtataagctaa

SEQ ID NO: 5931924 - DNA, 25 bp, Homo sapien
agatattcgcatagttttagattgc

SEQ ID NO: 5931925 - DNA, 25 bp, Homo sapien
tattttcgtcggacgtataatagat

SEQ ID NO: 5931926 - DNA, 25 bp, Homo sapien
tcaagcgtactcgaattattacata

SEQ ID NO: 5931927 - DNA, 25 bp, Homo sapien
gtgaaacattgaattgacgttatag

SEQ ID NO: 5931928 - DNA, 25 bp, Homo sapien
ttgttcgagactatataaaccttag

SEQ ID NO: 5931929 - DNA, 25 bp, Homo sapien
agaaatgtttaaccgtcgatttaga

SEQ ID NO: 5931930 - DNA, 25 bp, Homo sapien
ttacgataccttttacgcgattaaa

SEQ ID NO: 5931931 - DNA, 25 bp, Homo sapien
ttttaaaacgtctcgatacaagagt

SEQ ID NO: 5931932 - DNA, 25 bp, Homo sapien
tattaataccggatcgtaattctgt

SEQ ID NO: 5931933 - DNA, 25 bp, Homo sapien
tcaaaaaagacgcgaaaaaaggata

SEQ ID NO: 5931934 - DNA, 25 bp, Homo sapien
ctctttcaaatagtttacgactaag

SEQ ID NO: 5931935 - DNA, 25 bp, Homo sapien
atttgtatgatcgcacataaaggtt

SEQ ID NO: 5931936 - DNA, 25 bp, Homo sapien
caacctcgttatattctaatatctc

SEQ ID NO: 5931937 - DNA, 25 bp, Homo sapien
tttaaatactagtcgacgtacatac

SEQ ID NO: 5931938 - DNA, 25 bp, Homo sapien
cataaatacgcgcattttattacag

SEQ ID NO: 5931939 - DNA, 25 bp, Homo sapien
cataaacgtctaatcgtacttgttt

SEQ ID NO: 5931940 - DNA, 25 bp, Homo sapien
aaacgtaatctatgacaacgtgttt

SEQ ID NO: 5931941 - DNA, 25 bp, Homo sapien
tgttaatcgcgattagttcctaata

SEQ ID NO: 5931942 - DNA, 25 bp, Homo sapien
aagactgacgatttatactagcttt

SEQ ID NO: 5931943 - DNA, 25 bp, Homo sapien
taggacacttattttagtcggttat

SEQ ID NO: 5931944 - DNA, 25 bp, Homo sapien
gaaaaaatttcgaatacgctcatca

SEQ ID NO: 5931945 - DNA, 25 bp, Homo sapien
ctaaatagttattcgcgactcatta

SEQ ID NO: 5931946 - DNA, 25 bp, Homo sapien
agacaagttaacttaagacgatgta

SEQ ID NO: 5931947 - DNA, 25 bp, Homo sapien
atagtatatacgattaccgtatgtc

SEQ ID NO: 5931948 - DNA, 25 bp, Homo sapien
aggctgttaagttcgtataaatact

SEQ ID NO: 5931949 - DNA, 25 bp, Homo sapien
cctatgtctttcgaaacttatagat

SEQ ID NO: 5931950 - DNA, 25 bp, Homo sapien
taccatcaattgaatacgtatgtca

SEQ ID NO: 5931951 - DNA, 25 bp, Homo sapien
atacgaattctaattaacggtagtg

SEQ ID NO: 5931952 - DNA, 25 bp, Homo sapien
ttttgttattgtagatcggacattc

SEQ ID NO: 5931953 - DNA, 25 bp, Homo sapien
tttcagttctatcgaaaaaatcgct

SEQ ID NO: 5931954 - DNA, 25 bp, Homo sapien
aattgatagacgtaatacgctgaaa

SEQ ID NO: 5931955 - DNA, 25 bp, Homo sapien
taagtatcgtactataatgccgata

SEQ ID NO: 5931956 - DNA, 25 bp, Homo sapien
accatttcgaatcatatactagatg

SEQ ID NO: 5931957 - DNA, 25 bp, Homo sapien
ttatcataccttaacgatactcctt

SEQ ID NO: 5931958 - DNA, 25 bp, Homo sapien
attggtaaaagctcgatttacatga

SEQ ID NO: 5931959 - DNA, 25 bp, Homo sapien
attacacgcatagtatacgagtaat

SEQ ID NO: 5931960 - DNA, 25 bp, Homo sapien
tggagatacgagagatatatattca

SEQ ID NO: 5931961 - DNA, 25 bp, Homo sapien
tgaacagccgtaatataattaggaa

SEQ ID NO: 5931962 - DNA, 25 bp, Homo sapien
tcgataattcgtaacgctaagaatt

SEQ ID NO: 5931963 - DNA, 25 bp, Homo sapien
agtagaacgcgtattatattaagac

SEQ ID NO: 5931964 - DNA, 25 bp, Homo sapien
acaaataaaatttgtagtcgtagcc

SEQ ID NO: 5931965 - DNA, 25 bp, Homo sapien
catcgtatactaaccttacgtttta

SEQ ID NO: 5931966 - DNA, 25 bp, Homo sapien
ttacacataacgtcgtgacttaaat

SEQ ID NO: 5931967 - DNA, 25 bp, Homo sapien
tagtatacgcatattcatcatctct

SEQ ID NO: 5931968 - DNA, 25 bp, Homo sapien
gtgataactacttgcgtaaagaatt

SEQ ID NO: 5931969 - DNA, 25 bp, Homo sapien
tttatatctagactaaacgagccat

SEQ ID NO: 5931970 - DNA, 25 bp, Homo sapien
caacatatataggacgcgaaaattt

SEQ ID NO: 5931971 - DNA, 25 bp, Homo sapien
gtaattattactagcgacgctttaa

SEQ ID NO: 5931972 - DNA, 25 bp, Homo sapien
gttcataatagagtacgttatctag

SEQ ID NO: 5931973 - DNA, 25 bp, Homo sapien
aactattacctaggttcgcaattaa

SEQ ID NO: 5931974 - DNA, 25 bp, Homo sapien
ttaaatcgtacgcgataaatattgc

SEQ ID NO: 5931975 - DNA, 25 bp, Homo sapien
agtaggacgattatagttacataag

SEQ ID NO: 5931976 - DNA, 25 bp, Homo sapien
agtcagattatcacgcttaatttct

SEQ ID NO: 5931977 - DNA, 25 bp, Homo sapien
ctcgcttgcgaatatttagataaaa

SEQ ID NO: 5931978 - DNA, 25 bp, Homo sapien
ggctatatattgaattacgagcaat

SEQ ID NO: 5931979 - DNA, 25 bp, Homo sapien
tagaatgtacgatatcgtatttcct

SEQ ID NO: 5931980 - DNA, 25 bp, Homo sapien
tatacactatcatatcgcggataaa

SEQ ID NO: 5931981 - DNA, 25 bp, Homo sapien
gttttatcgactatacgtaagatgt

SEQ ID NO: 5931982 - DNA, 25 bp, Homo sapien
cataatgacgcgttctataattaac

SEQ ID NO: 5931983 - DNA, 25 bp, Homo sapien
tgagcgcgcaaatcaaaataaattt

SEQ ID NO: 5931984 - DNA, 25 bp, Homo sapien
attcattaatcgatactagcgagtt

SEQ ID NO: 5931985 - DNA, 25 bp, Homo sapien
gagcatcgtaatagttcttagaaat

SEQ ID NO: 5931986 - DNA, 25 bp, Homo sapien
gcaatcgaattgatttactactaca

SEQ ID NO: 5931987 - DNA, 25 bp, Homo sapien
gactaattcgttacggaatattatg

SEQ ID NO: 5931988 - DNA, 25 bp, Homo sapien
ttacgcggataccttaattatttga

SEQ ID NO: 5931989 - DNA, 25 bp, Homo sapien
tcatttatttcggtatcgatcagta

SEQ ID NO: 5931990 - DNA, 25 bp, Homo sapien
tatggataacgatcgtgatattaac

SEQ ID NO: 5931991 - DNA, 25 bp, Homo sapien
atcatagcttaatcgattcattgga

SEQ ID NO: 5931992 - DNA, 25 bp, Homo sapien
taacgacgcattattccgaataaat

SEQ ID NO: 5931993 - DNA, 25 bp, Homo sapien
aattaaggatataaccgcgaaacaa

SEQ ID NO: 5931994 - DNA, 25 bp, Homo sapien
atagtacatacgacgcgatataaaa

SEQ ID NO: 5931995 - DNA, 25 bp, Homo sapien
aactgtcttcgattgataatactca

SEQ ID NO: 5931996 - DNA, 25 bp, Homo sapien
atagtgttttgaactaatcgctatg

SEQ ID NO: 5931997 - DNA, 25 bp, Homo sapien
ctctatattaacggtctatagtgtt

SEQ ID NO: 5931998 - DNA, 25 bp, Homo sapien
tttatttcgactaagttcgtcctat

SEQ ID NO: 5931999 - DNA, 25 bp, Homo sapien
aagacctaatattatcggtagaatc

SEQ ID NO: 5932000 - DNA, 25 bp, Homo sapien
tcagtttcgttagttataaggatct

SEQ ID NO: 5932001 - DNA, 25 bp, Homo sapien
tttccagcgcgaatctatattatat

SEQ ID NO: 5932002 - DNA, 25 bp, Homo sapien
gatatcacaacgtcgatacatttaa

SEQ ID NO: 5932003 - DNA, 25 bp, Homo sapien
atatacaatattcgatttcggcgat

SEQ ID NO: 5932004 - DNA, 25 bp, Homo sapien
aacacaaatccgtatacgcaattat

SEQ ID NO: 5932005 - DNA, 25 bp, Homo sapien
tgacatattcgaactattcaattgc

SEQ ID NO: 5932006 - DNA, 25 bp, Homo sapien
atacgtaaattaagcgatcctgtaa

SEQ ID NO: 5932007 - DNA, 25 bp, Homo sapien
taaatagacgtaccgattataatgc

SEQ ID NO: 5932008 - DNA, 25 bp, Homo sapien
gcattatcgagaactaaagtatgaa

SEQ ID NO: 5932009 - DNA, 25 bp, Homo sapien
gctttgaaagttttgtacgaataag

SEQ ID NO: 5932010 - DNA, 25 bp, Homo sapien
actacaatcgacttttttcctgtat

SEQ ID NO: 5932011 - DNA, 25 bp, Homo sapien
tcgtatcgtaataaattggagttga

SEQ ID NO: 5932012 - DNA, 25 bp, Homo sapien
caaatgacgtatcgcgtaatattat

SEQ ID NO: 5932013 - DNA, 25 bp, Homo sapien
atcctttagtaatgtcggatcttat

SEQ ID NO: 5932014 - DNA, 25 bp, Homo sapien
gtagaaactatatcggaaattgact

SEQ ID NO: 5932015 - DNA, 25 bp, Homo sapien
attcacgcaaagttattacttcagt

SEQ ID NO: 5932016 - DNA, 25 bp, Homo sapien
ttgtataatataaccggattgatgc

SEQ ID NO: 5932017 - DNA, 25 bp, Homo sapien
atgtttaggttcgcgtaatattttc

SEQ ID NO: 5932018 - DNA, 25 bp, Homo sapien
actcaatatatcgatcgtagtcatt

SEQ ID NO: 5932019 - DNA, 25 bp, Homo sapien
tgtgatctaacgcgtgataaattat

SEQ ID NO: 5932020 - DNA, 25 bp, Homo sapien
tatgtttaacgccgtattgcaaaaa

SEQ ID NO: 5932021 - DNA, 25 bp, Homo sapien
attagctattacgatcggaatttca

SEQ ID NO: 5932022 - DNA, 25 bp, Homo sapien
agagaataaattataacgcggatgt

SEQ ID NO: 5932023 - DNA, 25 bp, Homo sapien
tatatacggttgtaatacgtgctaa

SEQ ID NO: 5932024 - DNA, 25 bp, Homo sapien
atactattgagtcgtaccgttataa

SEQ ID NO: 5932025 - DNA, 25 bp, Homo sapien
tttgcacgcgtgataaaatattcta

SEQ ID NO: 5932026 - DNA, 25 bp, Homo sapien
gattctttcgagttctaaatctgtt

SEQ ID NO: 5932027 - DNA, 25 bp, Homo sapien
gacactttcggttcgataatttata

SEQ ID NO: 5932028 - DNA, 25 bp, Homo sapien
agtaagcatattacgtaagatgaag

SEQ ID NO: 5932029 - DNA, 25 bp, Homo sapien
tagattgatatcgtcgaaattcatg

SEQ ID NO: 5932030 - DNA, 25 bp, Homo sapien
gaatagtagtcgacaatcgaaattt

SEQ ID NO: 5932031 - DNA, 25 bp, Homo sapien
gtaagaattagactactcgatattc

SEQ ID NO: 5932032 - DNA, 25 bp, Homo sapien
tcttattagtaaatcgtaatcgcga

SEQ ID NO: 5932033 - DNA, 25 bp, Homo sapien
ccacttcgatcgatatttaacaaat

SEQ ID NO: 5932034 - DNA, 25 bp, Homo sapien
ccatgtaattttattcgcattcgat

SEQ ID NO: 5932035 - DNA, 25 bp, Homo sapien
actcctgatagtatcgaaaaatcta

SEQ ID NO: 5932036 - DNA, 25 bp, Homo sapien
ctttacaacgcgttatagatatctt

SEQ ID NO: 5932037 - DNA, 25 bp, Homo sapien
attggtcattcgctattaatttcgt

SEQ ID NO: 5932038 - DNA, 25 bp, Homo sapien
ttttatatagtttcgtactacgcca

SEQ ID NO: 5932039 - DNA, 25 bp, Homo sapien
tatagttacggttagtcgtaagaat

SEQ ID NO: 5932040 - DNA, 25 bp, Homo sapien
ggtctaatttcgaatcgtaacaaaa

SEQ ID NO: 5932041 - DNA, 25 bp, Homo sapien
agatttgatttgtcaattcgctagt

SEQ ID NO: 5932042 - DNA, 25 bp, Homo sapien
aacttattaatccgctacgctttaa

SEQ ID NO: 5932043 - DNA, 25 bp, Homo sapien
agttgttgtacgaataacatatctc

SEQ ID NO: 5932044 - DNA, 25 bp, Homo sapien
taatgtttgcgtacgaactgatata

SEQ ID NO: 5932045 - DNA, 25 bp, Homo sapien
ttaacatatcgaatatcgtaacgct

SEQ ID NO: 5932046 - DNA, 25 bp, Homo sapien
taagtaatcgcgctaaaatatgatg

SEQ ID NO: 5932047 - DNA, 25 bp, Homo sapien
aaatttcctatacgtcacgtaacat

SEQ ID NO: 5932048 - DNA, 25 bp, Homo sapien
aactcgttttagtcgaacatacaaa

SEQ ID NO: 5932049 - DNA, 25 bp, Homo sapien
gaaatacgaattttacgatctgttg

SEQ ID NO: 5932050 - DNA, 25 bp, Homo sapien
taacgttactcgtaagaatttgcta

SEQ ID NO: 5932051 - DNA, 25 bp, Homo sapien
taagggatttaataaatcgcagaca

SEQ ID NO: 5932052 - DNA, 25 bp, Homo sapien
tgaggatacaatagttgcgtataaa

SEQ ID NO: 5932053 - DNA, 25 bp, Homo sapien
agcttcgacgttgataattaatgta

SEQ ID NO: 5932054 - DNA, 25 bp, Homo sapien
tgattatacgtatagtcggtcaaat

SEQ ID NO: 5932055 - DNA, 25 bp, Homo sapien
tatcttttactcgcaaaagtcaaga

SEQ ID NO: 5932056 - DNA, 25 bp, Homo sapien
tgaacattcataattgcgtttctgt

SEQ ID NO: 5932057 - DNA, 25 bp, Homo sapien
aagcataatcgtatactcatttgag

SEQ ID NO: 5932058 - DNA, 25 bp, Homo sapien
cataaatcgtcggatatacttgaaa

SEQ ID NO: 5932059 - DNA, 25 bp, Homo sapien
taaggtacttcgtaagatacataca

SEQ ID NO: 5932060 - DNA, 25 bp, Homo sapien
acacagttatctttaatacgtcaac

SEQ ID NO: 5932061 - DNA, 25 bp, Homo sapien
aatactcgctaatcctatatatctc

SEQ ID NO: 5932062 - DNA, 25 bp, Homo sapien
ttttattgcgcgactaataggtata

SEQ ID NO: 5932063 - DNA, 25 bp, Homo sapien
atacaaatgattcgcgctaaaacaa

SEQ ID NO: 5932064 - DNA, 25 bp, Homo sapien
cattaaatgtatcgacgtaccttaa

SEQ ID NO: 5932065 - DNA, 25 bp, Homo sapien
acatgacgcaaatcgtactaaaaaa

SEQ ID NO: 5932066 - DNA, 25 bp, Homo sapien
aataagcacgaccgattataacata

SEQ ID NO: 5932067 - DNA, 25 bp, Homo sapien
tgaaaagagtcataacgaatctaag

SEQ ID NO: 5932068 - DNA, 25 bp, Homo sapien
tgatccagttatgtcgtaatcaata

SEQ ID NO: 5932069 - DNA, 25 bp, Homo sapien
aaattgcggtcaatattatagagtg

SEQ ID NO: 5932070 - DNA, 25 bp, Homo sapien
tcttcacggtgatattcgatataat

SEQ ID NO: 5932071 - DNA, 25 bp, Homo sapien
ttcatatactatacgccgaagttat

SEQ ID NO: 5932072 - DNA, 25 bp, Homo sapien
gtatcatccttattcgtaatgcaaa

SEQ ID NO: 5932073 - DNA, 25 bp, Homo sapien
tcatttatacacgttcgtttctcta

SEQ ID NO: 5932074 - DNA, 25 bp, Homo sapien
tcctaacgcgataactatttaatca

SEQ ID NO: 5932075 - DNA, 25 bp, Homo sapien
cttaaatataatgtttcggacctgt

SEQ ID NO: 5932076 - DNA, 25 bp, Homo sapien
attacatataatgcgcgctctaaaa

SEQ ID NO: 5932077 - DNA, 25 bp, Homo sapien
gtccctagtaatacgttaaatatca

SEQ ID NO: 5932078 - DNA, 25 bp, Homo sapien
gttgattgcgaaatatcaaggtttt

SEQ ID NO: 5932079 - DNA, 25 bp, Homo sapien
ccatgtatcgaagtattataaagca

SEQ ID NO: 5932080 - DNA, 25 bp, Homo sapien
actttgtatcgcttcgtcataatta

SEQ ID NO: 5932081 - DNA, 25 bp, Homo sapien
agactcgtaatagtaattgaagcta

SEQ ID NO: 5932082 - DNA, 25 bp, Homo sapien
cgcacataatataacaatcgagtat

SEQ ID NO: 5932083 - DNA, 25 bp, Homo sapien
tgactatagtacgcgtaattttaca

SEQ ID NO: 5932084 - DNA, 25 bp, Homo sapien
ctcagattatatatgattcggattg

SEQ ID NO: 5932085 - DNA, 25 bp, Homo sapien
tttcttacgattgtaaagttagcac

SEQ ID NO: 5932086 - DNA, 25 bp, Homo sapien
atgttttctaatagcgtcgatacat

SEQ ID NO: 5932087 - DNA, 25 bp, Homo sapien
gatattatcgttaatttagtctgcc

SEQ ID NO: 5932088 - DNA, 25 bp, Homo sapien
ggtagagtatcgtagtaaatttcat

SEQ ID NO: 5932089 - DNA, 25 bp, Homo sapien
taagtaacgtacgcgttattagaaa

SEQ ID NO: 5932090 - DNA, 25 bp, Homo sapien
cttattacgataaacgattacacac

SEQ ID NO: 5932091 - DNA, 25 bp, Homo sapien
gtgtttaacgcgttaaatatctagt

SEQ ID NO: 5932092 - DNA, 25 bp, Homo sapien
tatgtatatgtcgcgtagaaatgta

SEQ ID NO: 5932093 - DNA, 25 bp, Homo sapien
aaagtatatatccgacttacttacc

SEQ ID NO: 5932094 - DNA, 25 bp, Homo sapien
catacatacgcggtagtataatata

SEQ ID NO: 5932095 - DNA, 25 bp, Homo sapien
ttgctatcgttacgatattagcaaa

SEQ ID NO: 5932096 - DNA, 25 bp, Homo sapien
tatactctataacaccgttagttac

SEQ ID NO: 5932097 - DNA, 25 bp, Homo sapien
caaaatactcgacgtattgctataa

SEQ ID NO: 5932098 - DNA, 25 bp, Homo sapien
cggagattaatacgagatatagttt

SEQ ID NO: 5932099 - DNA, 25 bp, Homo sapien
atatcatacgatatgacgcaagtta

SEQ ID NO: 5932100 - DNA, 25 bp, Homo sapien
attgtgataaatatagcgcagtgtt

SEQ ID NO: 5932101 - DNA, 25 bp, Homo sapien
tacagaaacttatcgtttaagggaa

SEQ ID NO: 5932102 - DNA, 25 bp, Homo sapien
gttgtataaaacgctatgtcattgt

SEQ ID NO: 5932103 - DNA, 25 bp, Homo sapien
atagttattagtcgaaactgaagtc

SEQ ID NO: 5932104 - DNA, 25 bp, Homo sapien
tatattttagtacgctccggtaaat

SEQ ID NO: 5932105 - DNA, 25 bp, Homo sapien
tttcaacgtaacgcgattaaatttc

SEQ ID NO: 5932106 - DNA, 25 bp, Homo sapien
tttattcgcggtatagtactgaatt

SEQ ID NO: 5932107 - DNA, 25 bp, Homo sapien
tatgtaatacgcttatacgtccatt

SEQ ID NO: 5932108 - DNA, 25 bp, Homo sapien
ttgaaaactatcgtatggatgatca

SEQ ID NO: 5932109 - DNA, 25 bp, Homo sapien
attatgtaaaatcgtactgagtgca

SEQ ID NO: 5932110 - DNA, 25 bp, Homo sapien
atttctatcttttcgcgataaaacg

SEQ ID NO: 5932111 - DNA, 25 bp, Homo sapien
accagacgcttaaattaatatggta

SEQ ID NO: 5932112 - DNA, 25 bp, Homo sapien
cttttatacataagtattcgcagca

SEQ ID NO: 5932113 - DNA, 25 bp, Homo sapien
tataagaaatagtcgatgatgggaa

SEQ ID NO: 5932114 - DNA, 25 bp, Homo sapien
aatgagcggtctaatcgtataatat

SEQ ID NO: 5932115 - DNA, 25 bp, Homo sapien
aagatagtacgttatacggttcatt

SEQ ID NO: 5932116 - DNA, 25 bp, Homo sapien
gtttgaattcaacgctagtaagaat

SEQ ID NO: 5932117 - DNA, 25 bp, Homo sapien
aagctgtaaaggtacgttaatctat

SEQ ID NO: 5932118 - DNA, 25 bp, Homo sapien
aagaattgttataaacgtcgcactt

SEQ ID NO: 5932119 - DNA, 25 bp, Homo sapien
cacaatacgcgctagtataatttta

SEQ ID NO: 5932120 - DNA, 25 bp, Homo sapien
tatatgacgcgtaagtagtaatact

SEQ ID NO: 5932121 - DNA, 25 bp, Homo sapien
ccaaccaatcgtattaattgatgat

SEQ ID NO: 5932122 - DNA, 25 bp, Homo sapien
aggagaatcgttatagttgagataa

SEQ ID NO: 5932123 - DNA, 25 bp, Homo sapien
atctgtgcatagatcgataaataca

SEQ ID NO: 5932124 - DNA, 25 bp, Homo sapien
acacacgcatattactatacaagaa

SEQ ID NO: 5932125 - DNA, 25 bp, Homo sapien
ttttagctaccgcgatatatttttg

SEQ ID NO: 5932126 - DNA, 25 bp, Homo sapien
ctattaattcgcttagcaatgattc

SEQ ID NO: 5932127 - DNA, 25 bp, Homo sapien
ctaaaatcgcgtactaagtttttga

SEQ ID NO: 5932128 - DNA, 25 bp, Homo sapien
taaaataattagcgtttcgtctacc

SEQ ID NO: 5932129 - DNA, 25 bp, Homo sapien
cgagcattagtttacgaataagata

SEQ ID NO: 5932130 - DNA, 25 bp, Homo sapien
gagtcgtacgtatctaaatttagat

SEQ ID NO: 5932131 - DNA, 25 bp, Homo sapien
tgatttttacgcggaaatttgagtt

SEQ ID NO: 5932132 - DNA, 25 bp, Homo sapien
actttatcgcgaactaggttaaata

SEQ ID NO: 5932133 - DNA, 25 bp, Homo sapien
agtaaaacgcgactagtatcattta

SEQ ID NO: 5932134 - DNA, 25 bp, Homo sapien
ggacattcgataaaaaacgtaatag

SEQ ID NO: 5932135 - DNA, 25 bp, Homo sapien
acttgaccgaatcgttaattaaatg

SEQ ID NO: 5932136 - DNA, 25 bp, Homo sapien
ttaggtatcgcgataaatattagag

SEQ ID NO: 5932137 - DNA, 25 bp, Homo sapien
gattccgatcatatatgaaatccta

SEQ ID NO: 5932138 - DNA, 25 bp, Homo sapien
tgcaacgtctttacattaacttcaa

SEQ ID NO: 5932139 - DNA, 25 bp, Homo sapien
agtgttgtgcgattaattagtaagt

SEQ ID NO: 5932140 - DNA, 25 bp, Homo sapien
ttgcttacgattaattctatgtgga

SEQ ID NO: 5932141 - DNA, 25 bp, Homo sapien
cctaacactatagatttcgagttta

SEQ ID NO: 5932142 - DNA, 25 bp, Homo sapien
aaaatcgaattattatttcgaccgc

SEQ ID NO: 5932143 - DNA, 25 bp, Homo sapien
ttctctattacattcgatcgtattc

SEQ ID NO: 5932144 - DNA, 25 bp, Homo sapien
tgggagtatttaacgcaatatagat

SEQ ID NO: 5932145 - DNA, 25 bp, Homo sapien
acatcatacattcgaatcgtttcat

SEQ ID NO: 5932146 - DNA, 25 bp, Homo sapien
aaataatgcgctatatgattgacgt

SEQ ID NO: 5932147 - DNA, 25 bp, Homo sapien
aagagcggtaacatattaatttagc

SEQ ID NO: 5932148 - DNA, 25 bp, Homo sapien
gatatatataccttacgcgataaag

SEQ ID NO: 5932149 - DNA, 25 bp, Homo sapien
gtttaatttccgatacaatagtagc

SEQ ID NO: 5932150 - DNA, 25 bp, Homo sapien
aacaaagatgcgagaataattatgc

SEQ ID NO: 5932151 - DNA, 25 bp, Homo sapien
tggttatacgttcgtcctatattat

SEQ ID NO: 5932152 - DNA, 25 bp, Homo sapien
aacaaaggatcgaacgctatattat

SEQ ID NO: 5932153 - DNA, 25 bp, Homo sapien
actcaatattcgttactatacgtag

SEQ ID NO: 5932154 - DNA, 25 bp, Homo sapien
taaagtatctcgttcaaagtctgaa

SEQ ID NO: 5932155 - DNA, 25 bp, Homo sapien
cgttatcaatcgatgatctaagttt

SEQ ID NO: 5932156 - DNA, 25 bp, Homo sapien
atacatgatcgtttacgatagtgta

SEQ ID NO: 5932157 - DNA, 25 bp, Homo sapien
tttagatccgagttgtttaagagtt

SEQ ID NO: 5932158 - DNA, 25 bp, Homo sapien
atcaagtgcgttgattttaacatga

SEQ ID NO: 5932159 - DNA, 25 bp, Homo sapien
ttcgagaatcagtattcgtagttat

SEQ ID NO: 5932160 - DNA, 25 bp, Homo sapien
tcttccatattagtccgatttgata

SEQ ID NO: 5932161 - DNA, 25 bp, Homo sapien
gttattcgacgaatatgtccaataa

SEQ ID NO: 5932162 - DNA, 25 bp, Homo sapien
atcttgttacgaacgaattatcatg

SEQ ID NO: 5932163 - DNA, 25 bp, Homo sapien
aacgcaactatattcattcgtaatc

SEQ ID NO: 5932164 - DNA, 25 bp, Homo sapien
aattttaacacgacatattggcagt

SEQ ID NO: 5932165 - DNA, 25 bp, Homo sapien
atatgttcttcgtagtttagcctta

SEQ ID NO: 5932166 - DNA, 25 bp, Homo sapien
gtgctttaatcgaaaactaagaaca

SEQ ID NO: 5932167 - DNA, 25 bp, Homo sapien
ccttattacgctaaatacattcaga

SEQ ID NO: 5932168 - DNA, 25 bp, Homo sapien
acttaatgcgtcaagtattatcgta

SEQ ID NO: 5932169 - DNA, 25 bp, Homo sapien
cttggttttataatctaccgtcata

SEQ ID NO: 5932170 - DNA, 25 bp, Homo sapien
ctttttgcgtaatgttattacgtct

SEQ ID NO: 5932171 - DNA, 25 bp, Homo sapien
agattgaagtacgaatatatccgat

SEQ ID NO: 5932172 - DNA, 25 bp, Homo sapien
acaggtgttcgaaatagtgtaaaaa

SEQ ID NO: 5932173 - DNA, 25 bp, Homo sapien
cagtattacatatcgacattgaaga

SEQ ID NO: 5932174 - DNA, 25 bp, Homo sapien
cgaacacgactcgttatataatttt

SEQ ID NO: 5932175 - DNA, 25 bp, Homo sapien
tttcttatcgggtgttaaatgacat

SEQ ID NO: 5932176 - DNA, 25 bp, Homo sapien
ttctaacgatcatacgtactaagaa

SEQ ID NO: 5932177 - DNA, 25 bp, Homo sapien
gaaggctatcgtataaagtattatc

SEQ ID NO: 5932178 - DNA, 25 bp, Homo sapien
tgataattcgttcgcaatattgtgt

SEQ ID NO: 5932179 - DNA, 25 bp, Homo sapien
attttatcaatcgtatatgacgagg

SEQ ID NO: 5932180 - DNA, 25 bp, Homo sapien
tctaaaataattcggacgcattcat

SEQ ID NO: 5932181 - DNA, 25 bp, Homo sapien
ataactaatatacgtagtcggtttg

SEQ ID NO: 5932182 - DNA, 25 bp, Homo sapien
ctattaacgcgtcgttaatttaatc

SEQ ID NO: 5932183 - DNA, 25 bp, Homo sapien
attaatccgttatggttaaatccca

SEQ ID NO: 5932184 - DNA, 25 bp, Homo sapien
ttacctataatacgggcgtttataa

SEQ ID NO: 5932185 - DNA, 25 bp, Homo sapien
gcaattacgatacttaagcatttca

SEQ ID NO: 5932186 - DNA, 25 bp, Homo sapien
agtatagtacgatgttataggtatg

SEQ ID NO: 5932187 - DNA, 25 bp, Homo sapien
ttatattattcggcccgtaaatagt

SEQ ID NO: 5932188 - DNA, 25 bp, Homo sapien
actttttacgatatgttgttatccc

SEQ ID NO: 5932189 - DNA, 25 bp, Homo sapien
atgacaaagttcgtcactttgtaaa

SEQ ID NO: 5932190 - DNA, 25 bp, Homo sapien
attatattaacgcgtactaggcata

SEQ ID NO: 5932191 - DNA, 25 bp, Homo sapien
tatatgtattgcgaacgtcgaataa

SEQ ID NO: 5932192 - DNA, 25 bp, Homo sapien
aacgcgattatatcgattaacaagt

SEQ ID NO: 5932193 - DNA, 25 bp, Homo sapien
ccgatcgatattataaactttggat

SEQ ID NO: 5932194 - DNA, 25 bp, Homo sapien
ttacgtgttaacgtataatagctca

SEQ ID NO: 5932195 - DNA, 25 bp, Homo sapien
attaaacgcaatacgtctaacatga

SEQ ID NO: 5932196 - DNA, 25 bp, Homo sapien
ctaagtcttactagtacgaatatgt

SEQ ID NO: 5932197 - DNA, 25 bp, Homo sapien
tagagttacgagtcgactataaaaa

SEQ ID NO: 5932198 - DNA, 25 bp, Homo sapien
tctatattacgactcgtagtgtaaa

SEQ ID NO: 5932199 - DNA, 25 bp, Homo sapien
aatcaaaaagttagacgactggtat

SEQ ID NO: 5932200 - DNA, 25 bp, Homo sapien
aaacataagtaacaaacgtacctca

SEQ ID NO: 5932201 - DNA, 25 bp, Homo sapien
caaaaatttattagatcgcaacgga

SEQ ID NO: 5932202 - DNA, 25 bp, Homo sapien
gttaatattttcgctagtacagttg

SEQ ID NO: 5932203 - DNA, 25 bp, Homo sapien
tttacataataatcagtcgtagcca

SEQ ID NO: 5932204 - DNA, 25 bp, Homo sapien
tcattaatacttttcgagttgtacg

SEQ ID NO: 5932205 - DNA, 25 bp, Homo sapien
gaaaaataacgcgtataggatacta

SEQ ID NO: 5932206 - DNA, 25 bp, Homo sapien
caaggatcgtatatcaattgatagt

SEQ ID NO: 5932207 - DNA, 25 bp, Homo sapien
ttatccgaattactttacgatgatc

SEQ ID NO: 5932208 - DNA, 25 bp, Homo sapien
taaagagcgatatacgtctatatga

SEQ ID NO: 5932209 - DNA, 25 bp, Homo sapien
acaatttcgacgttacatatctttg

SEQ ID NO: 5932210 - DNA, 25 bp, Homo sapien
gataagtataacgttccgctataaa

SEQ ID NO: 5932211 - DNA, 25 bp, Homo sapien
attctgtgcgaaattttcttgtaca

SEQ ID NO: 5932212 - DNA, 25 bp, Homo sapien
acttataaataacgtatacgaacgc

SEQ ID NO: 5932213 - DNA, 25 bp, Homo sapien
aattaatcgcgttaatacaccctaa

SEQ ID NO: 5932214 - DNA, 25 bp, Homo sapien
cacatcgtccgttaaattttttgaa

SEQ ID NO: 5932215 - DNA, 25 bp, Homo sapien
ctgttgtcggtaattactaagtata

SEQ ID NO: 5932216 - DNA, 25 bp, Homo sapien
ttatgataattccctatcgataagg

SEQ ID NO: 5932217 - DNA, 25 bp, Homo sapien
tttctcgaagattgattttgagaca

SEQ ID NO: 5932218 - DNA, 25 bp, Homo sapien
ttagtcaatctacgactaaatgcta

SEQ ID NO: 5932219 - DNA, 25 bp, Homo sapien
aatagtatatgactttacgcatagc

SEQ ID NO: 5932220 - DNA, 25 bp, Homo sapien
gaagttcaacttattaatcgaatgc

SEQ ID NO: 5932221 - DNA, 25 bp, Homo sapien
atcagtcacgtataggataaatttc

SEQ ID NO: 5932222 - DNA, 25 bp, Homo sapien
actgattaaacgtaacgtaattgtc

SEQ ID NO: 5932223 - DNA, 25 bp, Homo sapien
atttccctaataatcgatctaaagc

SEQ ID NO: 5932224 - DNA, 25 bp, Homo sapien
tttttactataattcgcgatagctc

SEQ ID NO: 5932225 - DNA, 25 bp, Homo sapien
aaacagttaataacattccgatacc

SEQ ID NO: 5932226 - DNA, 25 bp, Homo sapien
gtaatttttttggaacgtacagcat

SEQ ID NO: 5932227 - DNA, 25 bp, Homo sapien
ttaaaaggtaccgcgaataattgta

SEQ ID NO: 5932228 - DNA, 25 bp, Homo sapien
ctgtttacgtcaagactttagtata

SEQ ID NO: 5932229 - DNA, 25 bp, Homo sapien
aaatctcaaatttcgtcaatcgcat

SEQ ID NO: 5932230 - DNA, 25 bp, Homo sapien
ctcaattcgctagattgattaaact

SEQ ID NO: 5932231 - DNA, 25 bp, Homo sapien
catgtattatatcgattgtgcgaaa

SEQ ID NO: 5932232 - DNA, 25 bp, Homo sapien
cgatcttcgtttagatatagttcat

SEQ ID NO: 5932233 - DNA, 25 bp, Homo sapien
cttactttacgtatcggacatatat

SEQ ID NO: 5932234 - DNA, 25 bp, Homo sapien
atttaacgattgtacgtacaggata

SEQ ID NO: 5932235 - DNA, 25 bp, Homo sapien
ttacaccgtattatactatcactca

SEQ ID NO: 5932236 - DNA, 25 bp, Homo sapien
agcgacgagaataatataagttcat

SEQ ID NO: 5932237 - DNA, 25 bp, Homo sapien
tagatagtacggtttacgaaaaaca

SEQ ID NO: 5932238 - DNA, 25 bp, Homo sapien
tctgaaataatgcgttatacagact

SEQ ID NO: 5932239 - DNA, 25 bp, Homo sapien
aggaattcgcgtatgattattgata

SEQ ID NO: 5932240 - DNA, 25 bp, Homo sapien
gctatgttcgaatcattcaaattag

SEQ ID NO: 5932241 - DNA, 25 bp, Homo sapien
tagattacgaaaagttagtttacgc

SEQ ID NO: 5932242 - DNA, 25 bp, Homo sapien
ggaagataacgatttaatcctatgt

SEQ ID NO: 5932243 - DNA, 25 bp, Homo sapien
gaataatcttagctttatcgtcttg

SEQ ID NO: 5932244 - DNA, 25 bp, Homo sapien
tatgaataattagattatcgtcccg

SEQ ID NO: 5932245 - DNA, 25 bp, Homo sapien
atcaagtatgatcatcgtttaaagg

SEQ ID NO: 5932246 - DNA, 25 bp, Homo sapien
gctactatccgaaatacgtaaataa

SEQ ID NO: 5932247 - DNA, 25 bp, Homo sapien
aaaagactaatcgtacgactatgtt

SEQ ID NO: 5932248 - DNA, 25 bp, Homo sapien
tggtttacatcgttcattgagtaaa

SEQ ID NO: 5932249 - DNA, 25 bp, Homo sapien
atgcttatcgataaatgagttctag

SEQ ID NO: 5932250 - DNA, 25 bp, Homo sapien
atacattttaatccgcgaggtttat

SEQ ID NO: 5932251 - DNA, 25 bp, Homo sapien
ggtttatatatccgacaatatacga

SEQ ID NO: 5932252 - DNA, 25 bp, Homo sapien
tgttgtaagttatcgcgtatatcaa

SEQ ID NO: 5932253 - DNA, 25 bp, Homo sapien
ttgataagaattcgtatcgatgaca

SEQ ID NO: 5932254 - DNA, 25 bp, Homo sapien
aaacttttatcgaattcgaaaggca

SEQ ID NO: 5932255 - DNA, 25 bp, Homo sapien
cgtaatccaattctatcgaagaaat

SEQ ID NO: 5932256 - DNA, 25 bp, Homo sapien
ttaacattacgaacgctacagataa

SEQ ID NO: 5932257 - DNA, 25 bp, Homo sapien
attacaaactccgcgtataattaag

SEQ ID NO: 5932258 - DNA, 25 bp, Homo sapien
tattattaatacgacgcgaaggttt

SEQ ID NO: 5932259 - DNA, 25 bp, Homo sapien
atactcactaattatcgatagctga

SEQ ID NO: 5932260 - DNA, 25 bp, Homo sapien
ctatttcgacggtatatcaatcaat

SEQ ID NO: 5932261 - DNA, 25 bp, Homo sapien
tgtattaccgttagttaactactgt

SEQ ID NO: 5932262 - DNA, 25 bp, Homo sapien
ttttttatactaacggacgcaatac

SEQ ID NO: 5932263 - DNA, 25 bp, Homo sapien
aaaaatatatagtgacgcgggaaaa

SEQ ID NO: 5932264 - DNA, 25 bp, Homo sapien
aatcggatatacgttcgttaataga

SEQ ID NO: 5932265 - DNA, 25 bp, Homo sapien
tattggtacgacaatataagttcga

SEQ ID NO: 5932266 - DNA, 25 bp, Homo sapien
ttgaatatacgacggattagtagtt

SEQ ID NO: 5932267 - DNA, 25 bp, Homo sapien
aagagatagtagtacgctaaaaaca

SEQ ID NO: 5932268 - DNA, 25 bp, Homo sapien
cctatataagttacgtcgcaaattt

SEQ ID NO: 5932269 - DNA, 25 bp, Homo sapien
gcattaattacttcgagctttatca

SEQ ID NO: 5932270 - DNA, 25 bp, Homo sapien
gcattgtagttcgaataagttatca

SEQ ID NO: 5932271 - DNA, 25 bp, Homo sapien
gtaagtaatccgtagtattaaatgc

SEQ ID NO: 5932272 - DNA, 25 bp, Homo sapien
gagatctacattatcgtactataga

SEQ ID NO: 5932273 - DNA, 25 bp, Homo sapien
tatacataattagttcggctagact

SEQ ID NO: 5932274 - DNA, 25 bp, Homo sapien
cgaaaatcgtatcgcatttaataac

SEQ ID NO: 5932275 - DNA, 25 bp, Homo sapien
gtatgatttaagtatgttcgttggt

SEQ ID NO: 5932276 - DNA, 25 bp, Homo sapien
tgtgtcttattaacagtcgtcttat

SEQ ID NO: 5932277 - DNA, 25 bp, Homo sapien
gtaattaaactctctatcgaacttg

SEQ ID NO: 5932278 - DNA, 25 bp, Homo sapien
tgtacgcaaatttgacgaatagtat

SEQ ID NO: 5932279 - DNA, 25 bp, Homo sapien
ctgactaatcgacttatctacttaa

SEQ ID NO: 5932280 - DNA, 25 bp, Homo sapien
tagctcgtaaacgacttatttctat

SEQ ID NO: 5932281 - DNA, 25 bp, Homo sapien
cattaatacgcaacatttagattcg

SEQ ID NO: 5932282 - DNA, 25 bp, Homo sapien
tgaattacgtccgtactatcattaa

SEQ ID NO: 5932283 - DNA, 25 bp, Homo sapien
aagttattgcgataagcttagaaga

SEQ ID NO: 5932284 - DNA, 25 bp, Homo sapien
gggtaatacttattcgataactgta

SEQ ID NO: 5932285 - DNA, 25 bp, Homo sapien
taatcatctcgtaatacgaaaggat

SEQ ID NO: 5932286 - DNA, 25 bp, Homo sapien
tgtcatagctttcgtataactaact

SEQ ID NO: 5932287 - DNA, 25 bp, Homo sapien
tgaatctcgcgatatagtctatttt

SEQ ID NO: 5932288 - DNA, 25 bp, Homo sapien
cggctataatcgattattcaacttt

SEQ ID NO: 5932289 - DNA, 25 bp, Homo sapien
aagaaattcataccataacgcgatt

SEQ ID NO: 5932290 - DNA, 25 bp, Homo sapien
tttcaatacgtcgctagattttgat

SEQ ID NO: 5932291 - DNA, 25 bp, Homo sapien
gcaaacctaaatttatgcgtagtaa

SEQ ID NO: 5932292 - DNA, 25 bp, Homo sapien
atgaatagattgtcgataagtcaca

SEQ ID NO: 5932293 - DNA, 25 bp, Homo sapien
tgatcccacgtaatcatatatacat

SEQ ID NO: 5932294 - DNA, 25 bp, Homo sapien
tgaagcgttaaatttaacgagtctt

SEQ ID NO: 5932295 - DNA, 25 bp, Homo sapien
ggtttagcgtattatcatagtcaaa

SEQ ID NO: 5932296 - DNA, 25 bp, Homo sapien
taaaatggtcgacgaattagtgtat

SEQ ID NO: 5932297 - DNA, 25 bp, Homo sapien
ttgcttacgctaaaaaagagaaaga

SEQ ID NO: 5932298 - DNA, 25 bp, Homo sapien
atgacatcgatctgctaattttatg

SEQ ID NO: 5932299 - DNA, 25 bp, Homo sapien
gtaattatcgtaatattcgacagac

SEQ ID NO: 5932300 - DNA, 25 bp, Homo sapien
tctttgtagataattaccgagagat

SEQ ID NO: 5932301 - DNA, 25 bp, Homo sapien
taagatatttgcgaacacattcctt

SEQ ID NO: 5932302 - DNA, 25 bp, Homo sapien
taattgcggttgcgtactaaattta

SEQ ID NO: 5932303 - DNA, 25 bp, Homo sapien
ttttaacgtatgtatcgcgtgaata

SEQ ID NO: 5932304 - DNA, 25 bp, Homo sapien
gaatcatcgaaataagatcgttgtt

SEQ ID NO: 5932305 - DNA, 25 bp, Homo sapien
cattacattataaacgtcgagtgat

SEQ ID NO: 5932306 - DNA, 25 bp, Homo sapien
agtcttatcataatccgtcatctat

SEQ ID NO: 5932307 - DNA, 25 bp, Homo sapien
acgaaattacgattgcaacatcaat

SEQ ID NO: 5932308 - DNA, 25 bp, Homo sapien
atactactagtacgtatcggtaaaa

SEQ ID NO: 5932309 - DNA, 25 bp, Homo sapien
acaaaaattgtttaatcggagtgtc

SEQ ID NO: 5932310 - DNA, 25 bp, Homo sapien
acttcacgcgaatagtagataaata

SEQ ID NO: 5932311 - DNA, 25 bp, Homo sapien
tcgagttaatcgtaacataggtatt

SEQ ID NO: 5932312 - DNA, 25 bp, Homo sapien
aagtctagactatttcgatagtaac

SEQ ID NO: 5932313 - DNA, 25 bp, Homo sapien
agtatctaagttcgcgatattatca

SEQ ID NO: 5932314 - DNA, 25 bp, Homo sapien
caaataatattgcgataagaagagg

SEQ ID NO: 5932315 - DNA, 25 bp, Homo sapien
atcaccatattcgaacgtatataag

SEQ ID NO: 5932316 - DNA, 25 bp, Homo sapien
tataactacgtaactccgatattca

SEQ ID NO: 5932317 - DNA, 25 bp, Homo sapien
ttaagaaacctaacgttcgataaca

SEQ ID NO: 5932318 - DNA, 25 bp, Homo sapien
agttaacgtgaattatcgaatgtca

SEQ ID NO: 5932319 - DNA, 25 bp, Homo sapien
agataccggtataaaacttaatcga

SEQ ID NO: 5932320 - DNA, 25 bp, Homo sapien
agttaaattcaatgtacggactgtt

SEQ ID NO: 5932321 - DNA, 25 bp, Homo sapien
ttactgtaataaatatcgggtgagt

SEQ ID NO: 5932322 - DNA, 25 bp, Homo sapien
gtatgttagctttacgtcgtaattt

SEQ ID NO: 5932323 - DNA, 25 bp, Homo sapien
ttagccgtatagtattgatattcga

SEQ ID NO: 5932324 - DNA, 25 bp, Homo sapien
tgcaaacgacggtattaataatatg

SEQ ID NO: 5932325 - DNA, 25 bp, Homo sapien
taatgcgataggttaaactttagga

SEQ ID NO: 5932326 - DNA, 25 bp, Homo sapien
gtaagtacaatatccgtacatactt

SEQ ID NO: 5932327 - DNA, 25 bp, Homo sapien
tcattctaatagatcgtacatccat

SEQ ID NO: 5932328 - DNA, 25 bp, Homo sapien
caatggaccgattaataatggtaaa

SEQ ID NO: 5932329 - DNA, 25 bp, Homo sapien
aattccgaattacttagatgggaat

SEQ ID NO: 5932330 - DNA, 25 bp, Homo sapien
attaaaatcgaatcgctttagttcc

SEQ ID NO: 5932331 - DNA, 25 bp, Homo sapien
gcattatttacgattgcgatttagt

SEQ ID NO: 5932332 - DNA, 25 bp, Homo sapien
atgttcgatacgaacaaataatcac

SEQ ID NO: 5932333 - DNA, 25 bp, Homo sapien
tttcatatattgaccgaatcccata

SEQ ID NO: 5932334 - DNA, 25 bp, Homo sapien
atccttacttagatcgattatcaag

SEQ ID NO: 5932335 - DNA, 25 bp, Homo sapien
ctttcaatttatcggtaacattagg

SEQ ID NO: 5932336 - DNA, 25 bp, Homo sapien
gtcatcttacgtaaatcgtaaattg

SEQ ID NO: 5932337 - DNA, 25 bp, Homo sapien
ttgacttcgataactatcagacatt

SEQ ID NO: 5932338 - DNA, 25 bp, Homo sapien
attaactaacgttatcttgaggtct

SEQ ID NO: 5932339 - DNA, 25 bp, Homo sapien
aatgttttcgctatctaagatatcc

SEQ ID NO: 5932340 - DNA, 25 bp, Homo sapien
aatgtgttaaatttcgtcgatatcc

SEQ ID NO: 5932341 - DNA, 25 bp, Homo sapien
caatcttgacgatcatataacgatt

SEQ ID NO: 5932342 - DNA, 25 bp, Homo sapien
gtgtaatttcgtataacaatgccaa

SEQ ID NO: 5932343 - DNA, 25 bp, Homo sapien
aatgtcttactatcgtaataaaggc

SEQ ID NO: 5932344 - DNA, 25 bp, Homo sapien
tggttctaagtattaacgttaacga

SEQ ID NO: 5932345 - DNA, 25 bp, Homo sapien
tgaatgttatcgttaacctaaacca

SEQ ID NO: 5932346 - DNA, 25 bp, Homo sapien
ttcgaaaaatcgaccgaaatagatt

SEQ ID NO: 5932347 - DNA, 25 bp, Homo sapien
tatttatctactattcgcgtgaagt

SEQ ID NO: 5932348 - DNA, 25 bp, Homo sapien
catcatattttagcgcgattactta

SEQ ID NO: 5932349 - DNA, 25 bp, Homo sapien
tatcctgtacgtacaatcgttaaat

SEQ ID NO: 5932350 - DNA, 25 bp, Homo sapien
ccatacatcaataaccgaaaaatga

SEQ ID NO: 5932351 - DNA, 25 bp, Homo sapien
ttttatctaaatattcgcaagcgag

SEQ ID NO: 5932352 - DNA, 25 bp, Homo sapien
atgaaatttactacgatactctacc

SEQ ID NO: 5932353 - DNA, 25 bp, Homo sapien
gattacgaatgaatatagttgcgtt

SEQ ID NO: 5932354 - DNA, 25 bp, Homo sapien
ttaatgatagtacggacgtaattca

SEQ ID NO: 5932355 - DNA, 25 bp, Homo sapien
tagcaaattcttacgagtaacgtta

SEQ ID NO: 5932356 - DNA, 25 bp, Homo sapien
aatgtctgatagttatcgaagtcaa

SEQ ID NO: 5932357 - DNA, 25 bp, Homo sapien
tgctttataatacttcgatacatgg

SEQ ID NO: 5932358 - DNA, 25 bp, Homo sapien
gctaaattaatatgttaccgctctt

SEQ ID NO: 5932359 - DNA, 25 bp, Homo sapien
tagagaaacgaacgtgtataaatga

SEQ ID NO: 5932360 - DNA, 25 bp, Homo sapien
tttcagcgtattacgtctatcaatt

SEQ ID NO: 5932361 - DNA, 25 bp, Homo sapien
catgataattcgttcgtaacaagat

SEQ ID NO: 5932362 - DNA, 25 bp, Homo sapien
caaaccgactacgtatattagttat

SEQ ID NO: 5932363 - DNA, 25 bp, Homo sapien
tctaaatcgacggttaaacatttct

SEQ ID NO: 5932364 - DNA, 25 bp, Homo sapien
agatccttataactaacgaaactga

SEQ ID NO: 5932365 - DNA, 25 bp, Homo sapien
aaacacgttgtcatagattacgttt

SEQ ID NO: 5932366 - DNA, 25 bp, Homo sapien
tccaatgaatcgattaagctatgat

SEQ ID NO: 5932367 - DNA, 25 bp, Homo sapien
tatattatactaccgcgtatgtatg

SEQ ID NO: 5932368 - DNA, 25 bp, Homo sapien
caatccgaatcatatataatctgag

SEQ ID NO: 5932369 - DNA, 25 bp, Homo sapien
gctatgcgtaaagtcatatactatt

SEQ ID NO: 5932370 - DNA, 25 bp, Homo sapien
actagatatttaacgcgttaaacac

SEQ ID NO: 5932371 - DNA, 25 bp, Homo sapien
aattctttacgcaagtagttatcac

SEQ ID NO: 5932372 - DNA, 25 bp, Homo sapien
tttaatcgcgtaaaaggtatcgtaa

SEQ ID NO: 5932373 - DNA, 25 bp, Homo sapien
ttatacaatattatgcggatgagga

SEQ ID NO: 5932374 - DNA, 25 bp, Homo sapien
atacactaattcgtcgaccatttta

SEQ ID NO: 5932375 - DNA, 25 bp, Homo sapien
tgatcatccatacgatagttttcaa

SEQ ID NO: 5932376 - DNA, 25 bp, Homo sapien
ttttaccgatacgtactagtagtat

SEQ ID NO: 5932377 - DNA, 25 bp, Homo sapien
taaactcgaaatctatagtgttagg

SEQ ID NO: 5932378 - DNA, 25 bp, Homo sapien
cgggacgataatctaattattcata

SEQ ID NO: 5932379 - DNA, 25 bp, Homo sapien
caagacgataaagctaagattattc

SEQ ID NO: 5932380 - DNA, 25 bp, Homo sapien
acaatgacatagcgttttatacaac

SEQ ID NO: 5932381 - DNA, 25 bp, Homo sapien
tctattaacgaacgtatatccgatt

SEQ ID NO: 5932382 - DNA, 25 bp, Homo sapien
gcgtaaactaacttttcgtaatcta

SEQ ID NO: 5932383 - DNA, 25 bp, Homo sapien
gtacgcttttttacgatatagttca

SEQ ID NO: 5932384 - DNA, 25 bp, Homo sapien
agaaattaagcgtgataatctgact

SEQ ID NO: 5932385 - DNA, 25 bp, Homo sapien
gtattgcgtccgttagtataaaaaa

SEQ ID NO: 5932386 - DNA, 25 bp, Homo sapien
cataaaattagcagatcgatgtcat

SEQ ID NO: 5932387 - DNA, 25 bp, Homo sapien
tgtgacttatcgacaatctattcat

SEQ ID NO: 5932388 - DNA, 25 bp, Homo sapien
ttattataaagcggaatagtcccaa

SEQ ID NO: 5932389 - DNA, 25 bp, Homo sapien
gtctgtcgaatattacgataattac

SEQ ID NO: 5932390 - DNA, 25 bp, Homo sapien
ttttagagcgcgcattatatgtaat

SEQ ID NO: 5932391 - DNA, 25 bp, Homo sapien
cctcgtcatatacgattgataaaat

SEQ ID NO: 5932392 - DNA, 25 bp, Homo sapien
ttattggacatattcgtcgaataac

SEQ ID NO: 5932393 - DNA, 25 bp, Homo sapien
gctttagatcgattattagggaaat

SEQ ID NO: 5932394 - DNA, 25 bp, Homo sapien
tacattaattatcaacgtcgaagct

SEQ ID NO: 5932395 - DNA, 25 bp, Homo sapien
accaacgaacatacttaaatcatac

SEQ ID NO: 5932396 - DNA, 25 bp, Homo sapien
tggcgtagtacgaaactatataaaa

SEQ ID NO: 5932397 - DNA, 25 bp, Homo sapien
tttgctaatatcgtaacgatagcaa

SEQ ID NO: 5932398 - DNA, 25 bp, Homo sapien
tttttatagtcgactcgtaactcta

SEQ ID NO: 5932399 - DNA, 25 bp, Homo sapien
gcgttcgtatacgttatttataagt

SEQ ID NO: 5932400 - DNA, 25 bp, Homo sapien
ttaaatgtatcgacgttgtgatatc

SEQ ID NO: 5932401 - DNA, 25 bp, Homo sapien
ataatatagcgttcgatcctttgtt

SEQ ID NO: 5932402 - DNA, 25 bp, Homo sapien
tgtttttcgtaaaccgtactatcta

SEQ ID NO: 5932403 - DNA, 25 bp, Homo sapien
gcaatctaaaactatgcgaatatct

SEQ ID NO: 5932404 - DNA, 25 bp, Homo sapien
agacgtaataacattacgcaaaaag

SEQ ID NO: 5932405 - DNA, 25 bp, Homo sapien
tatacttagtaattaccgacaacag

SEQ ID NO: 5932406 - DNA, 25 bp, Homo sapien
acatattcgtactagtaagacttag

SEQ ID NO: 5932407 - DNA, 25 bp, Homo sapien
taaaacgtaaggttagtatacgatg

SEQ ID NO: 5932408 - DNA, 25 bp, Homo sapien
tgaggtacgtttgttacttatgttt

SEQ ID NO: 5932409 - DNA, 25 bp, Homo sapien
tatgacggtagattataaaaccaag

SEQ ID NO: 5932410 - DNA, 25 bp, Homo sapien
aagtacggtcgaaaatataaatgga

SEQ ID NO: 5932411 - DNA, 25 bp, Homo sapien
tacatcgtcttaagttaacttgtct

SEQ ID NO: 5932412 - DNA, 25 bp, Homo sapien
aactcttaaacaactcggatctaaa

SEQ ID NO: 5932413 - DNA, 25 bp, Homo sapien
caaagatatgtaacgtcgaaattgt

SEQ ID NO: 5932414 - DNA, 25 bp, Homo sapien
tttatagcggaacgttatacttatc

SEQ ID NO: 5932415 - DNA, 25 bp, Homo sapien
tcttgacttttgcgagtaaaagata

SEQ ID NO: 5932416 - DNA, 25 bp, Homo sapien
gcaattgaatagttcgaatatgtca

SEQ ID NO: 5932417 - DNA, 25 bp, Homo sapien
ctctaatatttatcgcgatacctaa

SEQ ID NO: 5932418 - DNA, 25 bp, Homo sapien
cttatatacgttcgaatatggtgat

SEQ ID NO: 5932419 - DNA, 25 bp, Homo sapien
ttttgttacgattcgaaattagacc

SEQ ID NO: 5932420 - DNA, 25 bp, Homo sapien
tagaatattttatcacgcgtgcaaa

SEQ ID NO: 5932421 - DNA, 25 bp, Homo sapien
aacaacgatcttatttcgatgattc

SEQ ID NO: 5932422 - DNA, 25 bp, Homo sapien
ctaaggtttatatagtctcgaacaa

SEQ ID NO: 5932423 - DNA, 25 bp, Homo sapien
ataattgcgtatacggatttgtgtt

SEQ ID NO: 5932424 - DNA, 25 bp, Homo sapien
aaagctagtataaatcgtcagtctt

SEQ ID NO: 5932425 - DNA, 25 bp, Homo sapien
tacagttatcgaataagtattaccc

SEQ ID NO: 5932426 - DNA, 25 bp, Homo sapien
tccacatagaattaatcgtaagcaa

SEQ ID NO: 5932427 - DNA, 25 bp, Homo sapien
aaattacgacgtaaagctaacatac

SEQ ID NO: 5932428 - DNA, 25 bp, Homo sapien
tccgttgcgatctaataaatttttg

SEQ ID NO: 5932429 - DNA, 25 bp, Homo sapien
atagaaataagtcgtttacgagcta

SEQ ID NO: 5932430 - DNA, 25 bp, Homo sapien
ccttatcgatagggaattatcataa

SEQ ID NO: 5932431 - DNA, 25 bp, Homo sapien
atgaaacgattcgaatgtatgatgt

SEQ ID NO: 5932432 - DNA, 25 bp, Homo sapien
tacgataatacttgacgcattaagt

SEQ ID NO: 5932433 - DNA, 25 bp, Homo sapien
aagactcgttaaatttaacgcttca

SEQ ID NO: 5932434 - DNA, 25 bp, Homo sapien
attatatcgaatatcaccgtgaaga

SEQ ID NO: 5932435 - DNA, 25 bp, Homo sapien
tgatatttaacgtattactagggac

SEQ ID NO: 5932436 - DNA, 25 bp, Homo sapien
ggctacgactacaaattttatttgt

SEQ ID NO: 5932437 - DNA, 25 bp, Homo sapien
atacaggaaaaaagtcgattgtagt

SEQ ID NO: 5932438 - DNA, 25 bp, Homo sapien
aatggacgtataagcgtattacata

SEQ ID NO: 5932439 - DNA, 25 bp, Homo sapien
tacaattattcgcggtaccttttaa

SEQ ID NO: 5932440 - DNA, 25 bp, Homo sapien
tgaaatgcttaagtatcgtaattgc

SEQ ID NO: 5932441 - DNA, 25 bp, Homo sapien
cttgataatcgatctaagtaaggat

SEQ ID NO: 5932442 - DNA, 25 bp, Homo sapien
ttaaagcgtagcggattaataagtt

SEQ ID NO: 5932443 - DNA, 25 bp, Homo sapien
ttacaggatcgcttaatttacgtat

SEQ ID NO: 5932444 - DNA, 25 bp, Homo sapien
gagatatataggattagcgagtatt

SEQ ID NO: 5932445 - DNA, 25 bp, Homo sapien
tacatttctacgcgacatatacata

SEQ ID NO: 5932446 - DNA, 25 bp, Homo sapien
atattatacgattagaccgctcatt

SEQ ID NO: 5932447 - DNA, 25 bp, Homo sapien
ttattcgacgttcgcaatacatata

SEQ ID NO: 5932448 - DNA, 25 bp, Homo sapien
gaatacgatcgaatgtaatagagaa

SEQ ID NO: 5932449 - DNA, 25 bp, Homo sapien
ttttcccgcgtcactatatattttt

SEQ ID NO: 5932450 - DNA, 25 bp, Homo sapien
tatacctattagtcgcgcaataaaa

SEQ ID NO: 5932451 - DNA, 25 bp, Homo sapien
atttgaccgactatacgtataatca

SEQ ID NO: 5932452 - DNA, 25 bp, Homo sapien
ttgttttagcgcgaatcatttgtat

SEQ ID NO: 5932453 - DNA, 25 bp, Homo sapien
cctcttcttatcgcaatattatttg

SEQ ID NO: 5932454 - DNA, 25 bp, Homo sapien
atgaactatatctaaacgaagatcg

SEQ ID NO: 5932455 - DNA, 25 bp, Homo sapien
aaattttcgcgtcctatatatgttg

SEQ ID NO: 5932456 - DNA, 25 bp, Homo sapien
catgaatttcgacgatatcaatcta

SEQ ID NO: 5932457 - DNA, 25 bp, Homo sapien
agtctagccgaactaattatgtata

SEQ ID NO: 5932458 - DNA, 25 bp, Homo sapien
ataaacctcgcggattaaaatgtat

SEQ ID NO: 5932459 - DNA, 25 bp, Homo sapien
catttaattaacgattcggtcaagt

SEQ ID NO: 5932460 - DNA, 25 bp, Homo sapien
aaaccttcgcgtcgtattaataata

SEQ ID NO: 5932461 - DNA, 25 bp, Homo sapien
aagtgcgacgtttataacaattctt

SEQ ID NO: 5932462 - DNA, 25 bp, Homo sapien
gtaactaacggtgttatagagtata

SEQ ID NO: 5932463 - DNA, 25 bp, Homo sapien
ttgaagttaatgtaaagacgttgca

SEQ ID NO: 5932464 - DNA, 25 bp, Homo sapien
gcataattattctcgcatctttgtt

SEQ ID NO: 5932465 - DNA, 25 bp, Homo sapien
gggataacaacatatcgtaaaaagt

SEQ ID NO: 5932466 - DNA, 25 bp, Homo sapien
aacagatttagaactcgaaagaatc

SEQ ID NO: 5932467 - DNA, 25 bp, Homo sapien
gcctttattacgatagtaagacatt

SEQ ID NO: 5932468 - DNA, 25 bp, Homo sapien
ataacttcggcgtatagtatatgaa

SEQ ID NO: 5932469 - DNA, 25 bp, Homo sapien
aaaaccttgatatttcgcaatcaac

SEQ ID NO: 5932470 - DNA, 25 bp, Homo sapien
tatgcctagtacgcgttaatataat

SEQ ID NO: 5932471 - DNA, 25 bp, Homo sapien
tattgattacgacataactggatca

SEQ ID NO: 5932472 - DNA, 25 bp, Homo sapien
tgctgcgaatacttatgtataaaag

SEQ ID NO: 5932473 - DNA, 25 bp, Homo sapien
ttatttacgtatttcggatagtagc

SEQ ID NO: 5932474 - DNA, 25 bp, Homo sapien
ataatttatcacgcgttagatcaca

SEQ ID NO: 5932475 - DNA, 25 bp, Homo sapien
agagatgatgaatatgcgtatacta

SEQ ID NO: 5932476 - DNA, 25 bp, Homo sapien
tcttcaatgtcgatatgtaatactg

SEQ ID NO: 5932477 - DNA, 25 bp, Homo sapien
ttatagcaatacgtcgagtattttg

SEQ ID NO: 5932478 - DNA, 25 bp, Homo sapien
aaagttgaataatcgattatagccg

SEQ ID NO: 5932479 - DNA, 25 bp, Homo sapien
tagtatcctatacgcgttatttttc

SEQ ID NO: 5932480 - DNA, 25 bp, Homo sapien
tatgggattcggtcaatatatgaaa

SEQ ID NO: 5932481 - DNA, 25 bp, Homo sapien
gattctaccgataatattaggtctt

SEQ ID NO: 5932482 - DNA, 25 bp, Homo sapien
gtgattatttgttcgtatcgaacat

SEQ ID NO: 5932483 - DNA, 25 bp, Homo sapien
tatcaataatcatacgcgaattcct

SEQ ID NO: 5932484 - DNA, 25 bp, Homo sapien
tgttcttagttttcgattaaagcac

SEQ ID NO: 5932485 - DNA, 25 bp, Homo sapien
tcgcgattacgatttactaataaga

SEQ ID NO: 5932486 - DNA, 25 bp, Homo sapien
gtttagtactaatatcgcgattctt

SEQ ID NO: 5932487 - DNA, 25 bp, Homo sapien
attcttacgactaaccgtaactata

SEQ ID NO: 5932488 - DNA, 25 bp, Homo sapien
ttcagactttgaacgagatacttta

SEQ ID NO: 5932489 - DNA, 25 bp, Homo sapien
gaatgtccgatctacaataacaaaa

SEQ ID NO: 5932490 - DNA, 25 bp, Homo sapien
aactcaaatttccgcgtaaaaatca

SEQ ID NO: 5932491 - DNA, 25 bp, Homo sapien
tgaaattccgatcgtaatagctaat

SEQ ID NO: 5932492 - DNA, 25 bp, Homo sapien
gcggtcgaaataataattcgatttt

SEQ ID NO: 5932493 - DNA, 25 bp, Homo sapien
agcgttacgatattcgatatgttaa

SEQ ID NO: 5932494 - DNA, 25 bp, Homo sapien
taaatgatactagtcgcgttttact

SEQ ID NO: 5932495 - DNA, 25 bp, Homo sapien
tgcactcagtacgattttacataat

SEQ ID NO: 5932496 - DNA, 25 bp, Homo sapien
gaatatcgagtagtctaattcttac

SEQ ID NO: 5932497 - DNA, 25 bp, Homo sapien
ttatctgtagcgttcgtaatgttaa

SEQ ID NO: 5932498 - DNA, 25 bp, Homo sapien
aacactatagaccgttaatatagag

SEQ ID NO: 5932499 - DNA, 25 bp, Homo sapien
atatatatacgccggttagatcata

SEQ ID NO: 5932500 - DNA, 25 bp, Homo sapien
ataccagtcgtctaactttttgatt

SEQ ID NO: 5932501 - DNA, 25 bp, Homo sapien
aatacctatgttacgattaactcga

SEQ ID NO: 5932502 - DNA, 25 bp, Homo sapien
acgaaattaatagcgaatgaccaat

SEQ ID NO: 5932503 - DNA, 25 bp, Homo sapien
atttgttaaatatcgatcgaagtgg

SEQ ID NO: 5932504 - DNA, 25 bp, Homo sapien
atatctcgattaccaaaaagattcg

SEQ ID NO: 5932505 - DNA, 25 bp, Homo sapien
tatgtaataattcgagtacgcttga

SEQ ID NO: 5932506 - DNA, 25 bp, Homo sapien
ccgttatataatacgagtatttgtc

SEQ ID NO: 5932507 - DNA, 25 bp, Homo sapien
atctataagtttcgaaagacatagg

SEQ ID NO: 5932508 - DNA, 25 bp, Homo sapien
aaacttagatcatcgattgataacg

SEQ ID NO: 5932509 - DNA, 25 bp, Homo sapien
taacttgcgtcatatcgtatgatat

SEQ ID NO: 5932510 - DNA, 25 bp, Homo sapien
atcgaatgcgaataaaattacatgg

SEQ ID NO: 5932511 - DNA, 25 bp, Homo sapien
ttttttagtacgatttgcgtcatgt

SEQ ID NO: 5932512 - DNA, 25 bp, Homo sapien
gcattataatcggtacgtctattta

SEQ ID NO: 5932513 - DNA, 25 bp, Homo sapien
agacctcaagataacgttagttaat

SEQ ID NO: 5932514 - DNA, 25 bp, Homo sapien
ttaattgcgaacctaggtaatagtt

SEQ ID NO: 5932515 - DNA, 25 bp, Homo sapien
catattattaataccgtcgtttgca

SEQ ID NO: 5932516 - DNA, 25 bp, Homo sapien
atttaccggagcgtactaaaatata

SEQ ID NO: 5932517 - DNA, 25 bp, Homo sapien
gaaatttatcctatacgtgactgat

SEQ ID NO: 5932518 - DNA, 25 bp, Homo sapien
ttgtttcgcggttatatccttaatt

SEQ ID NO: 5932519 - DNA, 25 bp, Homo sapien
gctactattgtatcggaaattaaac

SEQ ID NO: 5932520 - DNA, 25 bp, Homo sapien
ttcttagtacgtatgatcgttagaa

SEQ ID NO: 5932521 - DNA, 25 bp, Homo sapien
tgacatacgtattcaattgatggta

SEQ ID NO: 5932522 - DNA, 25 bp, Homo sapien
aaacaagtacgattagacgtttatg

SEQ ID NO: 5932523 - DNA, 25 bp, Homo sapien
tctttctcttttttagcgtaagcaa

SEQ ID NO: 5932524 - DNA, 25 bp, Homo sapien
ttagggtgtattaacgcgattaatt

SEQ ID NO: 5932525 - DNA, 25 bp, Homo sapien
aacagtccgtacattgaatttaact

SEQ ID NO: 5932526 - DNA, 25 bp, Homo sapien
ctcaaatgagtatacgattatgctt

SEQ ID NO: 5932527 - DNA, 25 bp, Homo sapien
actgccaatatgtcgtgttaaaatt

SEQ ID NO: 5932528 - DNA, 25 bp, Homo sapien
ataggacgaacttagtcgaaataaa

SEQ ID NO: 5932529 - DNA, 25 bp, Homo sapien
tgtccttctacgaatgtagtaatta

SEQ ID NO: 5932530 - DNA, 25 bp, Homo sapien
catacctataacatcgtactatact

SEQ ID NO: 5932531 - DNA, 25 bp, Homo sapien
acgtcaatcatatagcgcattattt

SEQ ID NO: 5932532 - DNA, 25 bp, Homo sapien
tctcgtaacgcaatattaaccttta

SEQ ID NO: 5932533 - DNA, 25 bp, Homo sapien
atcactcgacgtttataatgtaatg

SEQ ID NO: 5932534 - DNA, 25 bp, Homo sapien
tttactcaatgaacgatgtaaacca

SEQ ID NO: 5932535 - DNA, 25 bp, Homo sapien
tcctaaagtttaacctatcgcatta

SEQ ID NO: 5932536 - DNA, 25 bp, Homo sapien
ttaagtagataagtcgattagtcag

SEQ ID NO: 5932537 - DNA, 25 bp, Homo sapien
tactgatcgataccgaaataaatga

SEQ ID NO: 5932538 - DNA, 25 bp, Homo sapien
taccatattaatttaagcgtctggt

SEQ ID NO: 5932539 - DNA, 25 bp, Homo sapien
gacatacggtaatcgtatatactat

SEQ ID NO: 5932540 - DNA, 25 bp, Homo sapien
ctgtaataaaatgcgcgtatttatg

SEQ ID NO: 5932541 - DNA, 25 bp, Homo sapien
aattcagtactataccgcgaataaa

SEQ ID NO: 5932542 - DNA, 25 bp, Homo sapien
aattcttagcgttacgaattatcga

SEQ ID NO: 5932543 - DNA, 25 bp, Homo sapien
gaaatttaatcgcgttacgttgaaa

SEQ ID NO: 5932544 - DNA, 25 bp, Homo sapien
tttgactatgataatacgctaaacc

SEQ ID NO: 5932545 - DNA, 25 bp, Homo sapien
tattaggaactaatcgcgattaaca

SEQ ID NO: 5932546 - DNA, 25 bp, Homo sapien
aaggagtatcgttaaggtatgataa

SEQ ID NO: 5932547 - DNA, 25 bp, Homo sapien
atgtcatttaacacccgataagaaa

SEQ ID NO: 5932548 - DNA, 25 bp, Homo sapien
aatctatttcggtcgatttttcgaa

SEQ ID NO: 5932549 - DNA, 25 bp, Homo sapien
ccacataagattactatcgttcatt

SEQ ID NO: 5932550 - DNA, 25 bp, Homo sapien
cttcatcttacgtaatatgcttact

SEQ ID NO: 5932551 - DNA, 25 bp, Homo sapien
aatgaaccgtataacgtactatctt

SEQ ID NO: 5932552 - DNA, 25 bp, Homo sapien
attgctcgtaattcaatatatagcc

SEQ ID NO: 5932553 - DNA, 25 bp, Homo sapien
atctaaatttagatacgtacgactc

SEQ ID NO: 5932554 - DNA, 25 bp, Homo sapien
tatccttttttcgcgtcttttttga

SEQ ID NO: 5932555 - DNA, 25 bp, Homo sapien
ttcaacgaagtaatatgtcttgatc

SEQ ID NO: 5932556 - DNA, 25 bp, Homo sapien
catctagtatatgattcgaaatggt

SEQ ID NO: 5932557 - DNA, 25 bp, Homo sapien
cgaatctaaatgttgcgtattaatg

SEQ ID NO: 5932558 - DNA, 25 bp, Homo sapien
atgtatcgacgctattagaaaacat

SEQ ID NO: 5932559 - DNA, 25 bp, Homo sapien
tataaattatcgaaccgaaagtgtc

SEQ ID NO: 5932560 - DNA, 25 bp, Homo sapien
aggaaatacgatatcgtacattcta

SEQ ID NO: 5932561 - DNA, 25 bp, Homo sapien
tgataatatcgcgaacttagatact

SEQ ID NO: 5932562 - DNA, 25 bp, Homo sapien
agtaatatactacgccgacaattat

SEQ ID NO: 5932563 - DNA, 25 bp, Homo sapien
tgtaaaattacgcgtactatagtca

SEQ ID NO: 5932564 - DNA, 25 bp, Homo sapien
actcacccgatatttattacagtaa

SEQ ID NO: 5932565 - DNA, 25 bp, Homo sapien
tcgaatagtgcgatcattattaatc

SEQ ID NO: 5932566 - DNA, 25 bp, Homo sapien
tttttgcaatacggcgttaaacata

SEQ ID NO: 5932567 - DNA, 25 bp, Homo sapien
gacttcagtttcgactaataactat

SEQ ID NO: 5932568 - DNA, 25 bp, Homo sapien
tcgaatatcaatactatacggctaa

SEQ ID NO: 5932569 - DNA, 25 bp, Homo sapien
gcatcaatccggttatattatacaa

SEQ ID NO: 5932570 - DNA, 25 bp, Homo sapien
gtgctaactttacaatcgtaagaaa

SEQ ID NO: 5932571 - DNA, 25 bp, Homo sapien
tcgtatattgtcggatatataaacc

SEQ ID NO: 5932572 - DNA, 25 bp, Homo sapien
agtctgtataacgcattatttcaga

SEQ ID NO: 5932573 - DNA, 25 bp, Homo sapien
tgtatgtatcttacgaagtacctta

SEQ ID NO: 5932574 - DNA, 25 bp, Homo sapien
tcatgtaaatcgagcttttaccaat

SEQ ID NO: 5932575 - DNA, 25 bp, Homo sapien
atttaagtcacgacgttatgtgtaa

SEQ ID NO: 5932576 - DNA, 25 bp, Homo sapien
tatcttattcgtaaactaatgctcg

SEQ ID NO: 5932577 - DNA, 25 bp, Homo sapien
agcgattttttcgatagaactgaaa

SEQ ID NO: 5932578 - DNA, 25 bp, Homo sapien
actatcaattgatatacgatccttg

SEQ ID NO: 5932579 - DNA, 25 bp, Homo sapien
gttgacgtattaaagataactgtgt

SEQ ID NO: 5932580 - DNA, 25 bp, Homo sapien
gtactagcgaattatcgtcttttta

SEQ ID NO: 5932581 - DNA, 25 bp, Homo sapien
ctattacgttttttatcgaatgtcc

SEQ ID NO: 5932582 - DNA, 25 bp, Homo sapien
tttctaataacgcgtacgttactta

SEQ ID NO: 5932583 - DNA, 25 bp, Homo sapien
agtattactacttacgcgtcatata

SEQ ID NO: 5932584 - DNA, 25 bp, Homo sapien
agtttaatcaatctagcgaattgag

SEQ ID NO: 5932585 - DNA, 25 bp, Homo sapien
tgtcatcgatacgaattcttatcaa

SEQ ID NO: 5932586 - DNA, 25 bp, Homo sapien
tatatcagttcgtacgcaaacatta

SEQ ID NO: 5932587 - DNA, 25 bp, Homo sapien
tgattaaatagttatcgcgttagga

SEQ ID NO: 5932588 - DNA, 25 bp, Homo sapien
gagatattagaatataacgaggttg

SEQ ID NO: 5932589 - DNA, 25 bp, Homo sapien
ggatatcgacgaaatttaacacatt

SEQ ID NO: 5932590 - DNA, 25 bp, Homo sapien
gattaaattaacgacgcgttaatag

SEQ ID NO: 5932591 - DNA, 25 bp, Homo sapien
tcatgttaaaatcaacgcacttgat

SEQ ID NO: 5932592 - DNA, 25 bp, Homo sapien
tatactaaagtcttgacgtaaacag

SEQ ID NO: 5932593 - DNA, 25 bp, Homo sapien
ttactacgcataaatttaggtttgc

SEQ ID NO: 5932594 - DNA, 25 bp, Homo sapien
gacactccgattaaacaatttttgt

SEQ ID NO: 5932595 - DNA, 25 bp, Homo sapien
agtcaatttccgatatagtttctac

SEQ ID NO: 5932596 - DNA, 25 bp, Homo sapien
ttcttgtatagtaatatgcgtgtgt

SEQ ID NO: 5932597 - DNA, 25 bp, Homo sapien
ataatattacgcgatacgtcatttg

SEQ ID NO: 5932598 - DNA, 25 bp, Homo sapien
ataagatccgacattactaaaggat

SEQ ID NO: 5932599 - DNA, 25 bp, Homo sapien
atgaacttatattattctcgtcgct

SEQ ID NO: 5932600 - DNA, 25 bp, Homo sapien
tattcacgcgatacatacgttaaaa

SEQ ID NO: 5932601 - DNA, 25 bp, Homo sapien
actgaagtaataactttgcgtgaat

SEQ ID NO: 5932602 - DNA, 25 bp, Homo sapien
atctatattgcgttaaatactccca

SEQ ID NO: 5932603 - DNA, 25 bp, Homo sapien
taagcccgtaaattttatggataga

SEQ ID NO: 5932604 - DNA, 25 bp, Homo sapien
acttgttaatcgatataatcgcgtt

SEQ ID NO: 5932605 - DNA, 25 bp, Homo sapien
atggctcgtttagtctagatataaa

SEQ ID NO: 5932606 - DNA, 25 bp, Homo sapien
tacactatcgtaaacgatcatgtat

SEQ ID NO: 5932607 - DNA, 25 bp, Homo sapien
gtatgtacgtcgactagtatttaaa

SEQ ID NO: 5932608 - DNA, 25 bp, Homo sapien
tcaaataattaaggtatccgcgtaa

SEQ ID NO: 5932609 - DNA, 25 bp, Homo sapien
gagatatgttattcgtacaacaact

SEQ ID NO: 5932610 - DNA, 25 bp, Homo sapien
tattacgaatacgtataaaggcagt

SEQ ID NO: 5932611 - DNA, 25 bp, Homo sapien
acaagagtataccgtcgtatattat

SEQ ID NO: 5932612 - DNA, 25 bp, Homo sapien
atggatgtacgatctattagaatga

SEQ ID NO: 5932613 - DNA, 25 bp, Homo sapien
aacctttatgtgcgatcatacaaat

SEQ ID NO: 5932614 - DNA, 25 bp, Homo sapien
aactactaatccgtcgtatattcaa

SEQ ID NO: 5932615 - DNA, 25 bp, Homo sapien
aacactgcgctatatttatcacaat

SEQ ID NO: 5932616 - DNA, 25 bp, Homo sapien
gaaaatattacgcgaacctaaacat

SEQ ID NO: 5932617 - DNA, 25 bp, Homo sapien
tgaatatatatctctcgtatctcca

SEQ ID NO: 5932618 - DNA, 25 bp, Homo sapien
aactcgctagtatcgattaatgaat

SEQ ID NO: 5932619 - DNA, 25 bp, Homo sapien
gttactatcgaaatagtctagactt

SEQ ID NO: 5932620 - DNA, 25 bp, Homo sapien
tctgaatgtatttagcgtaataagg

SEQ ID NO: 5932621 - DNA, 25 bp, Homo sapien
attcccatctaagtaattcggaatt

SEQ ID NO: 5932622 - DNA, 25 bp, Homo sapien
atgcgattgacgaaatttgagattt

SEQ ID NO: 5932623 - DNA, 25 bp, Homo sapien
aaactatatctcgtattaatctccg

SEQ ID NO: 5932624 - DNA, 25 bp, Homo sapien
ttagcttatacggtcgttctaaata

SEQ ID NO: 5932625 - DNA, 25 bp, Homo sapien
ggtagacgaaacgctaattatttta

SEQ ID NO: 5932626 - DNA, 25 bp, Homo sapien
tgttatcgaacgttaggtttcttaa

SEQ ID NO: 5932627 - DNA, 25 bp, Homo sapien
tttacactacgagtcgtaatataga

SEQ ID NO: 5932628 - DNA, 25 bp, Homo sapien
actatttacgggccgaataatataa

SEQ ID NO: 5932629 - DNA, 25 bp, Homo sapien
tttttacactatttcgaacacctgt

SEQ ID NO: 5932630 - DNA, 25 bp, Homo sapien
atataatatagattcgcgctggaaa

SEQ ID NO: 5932631 - DNA, 25 bp, Homo sapien
tgtagtagtaaatcaattcgattgc

SEQ ID NO: 5932632 - DNA, 25 bp, Homo sapien
gcatttaatactacggattacttac

SEQ ID NO: 5932633 - DNA, 25 bp, Homo sapien
aaatttgcgacgtaacttatatagg

SEQ ID NO: 5932634 - DNA, 25 bp, Homo sapien
tgatgagcgtattcgaaattttttc

SEQ ID NO: 5932635 - DNA, 25 bp, Homo sapien
tacgagtacgttaatctatttggta

SEQ ID NO: 5932636 - DNA, 25 bp, Homo sapien
tttgtatgttcgactaaaacgagtt

SEQ ID NO: 5932637 - DNA, 25 bp, Homo sapien
tgtttttagcgtactactatctctt

SEQ ID NO: 5932638 - DNA, 25 bp, Homo sapien
tatcatcgcgtatattacgtatctt

SEQ ID NO: 5932639 - DNA, 25 bp, Homo sapien
tgcctttcgaattcgataaaagttt

SEQ ID NO: 5932640 - DNA, 25 bp, Homo sapien
aagtatgtacggatattgtacttac

SEQ ID NO: 5932641 - DNA, 25 bp, Homo sapien
tgagtgatagtataatacggtgtaa

SEQ ID NO: 5932642 - DNA, 25 bp, Homo sapien
ttataacggtacgactcaatagtat

SEQ ID NO: 5932643 - DNA, 25 bp, Homo sapien
catagcgattagttcaaaacactat

SEQ ID NO: 5932644 - DNA, 25 bp, Homo sapien
atttattcggaataatgcgtcgtta

SEQ ID NO: 5932645 - DNA, 25 bp, Homo sapien
cgtacaactcgaaaagtattaatga

SEQ ID NO: 5932646 - DNA, 25 bp, Homo sapien
ggtaagtaagtcggatatatacttt

SEQ ID NO: 5932647 - DNA, 25 bp, Homo sapien
tttaatagcggtcgacttaaaattc

SEQ ID NO: 5932648 - DNA, 25 bp, Homo sapien
cttattcgtacaaaactttcaaagc

SEQ ID NO: 5932649 - DNA, 25 bp, Homo sapien
taaatttagtacgcaaccgcaatta

SEQ ID NO: 5932650 - DNA, 25 bp, Homo sapien
ttcccatcatcgactatttcttata

SEQ ID NO: 5932651 - DNA, 25 bp, Homo sapien
ctaatttgaatgattcgaacatagc

SEQ ID NO: 5932652 - DNA, 25 bp, Homo sapien
tcgattaagttttataccggtatct

SEQ ID NO: 5932653 - DNA, 25 bp, Homo sapien
atgctgtacgttccaaaaaaattac

SEQ ID NO: 5932654 - DNA, 25 bp, Homo sapien
atgtatatatgattacgtgggatca

SEQ ID NO: 5932655 - DNA, 25 bp, Homo sapien
ttacttccgattgtattaatgttgc

SEQ ID NO: 5932656 - DNA, 25 bp, Homo sapien
acatccgcgttataatttattctct

SEQ ID NO: 5932657 - DNA, 25 bp, Homo sapien
atctctcggtaattatctacaaaga

SEQ ID NO: 5932658 - DNA, 25 bp, Homo sapien
atcggatatattcgtacttcaatct

SEQ ID NO: 5932659 - DNA, 25 bp, Homo sapien
ttttatatcgcgtcgtatgtactat

SEQ ID NO: 5932660 - DNA, 25 bp, Homo sapien
tttacaaagtgacgaactttgtcat

SEQ ID NO: 5932661 - DNA, 25 bp, Homo sapien
ctacgtatagtaacgaatattgagt

SEQ ID NO: 5932662 - DNA, 25 bp, Homo sapien
tcaaaaacttagtacgcgattttag

SEQ ID NO: 5932663 - DNA, 25 bp, Homo sapien
tggctacgactgattattatgtaaa

SEQ ID NO: 5932664 - DNA, 25 bp, Homo sapien
catggcgttataaataatcgatcaa

SEQ ID NO: 5932665 - DNA, 25 bp, Homo sapien
gttaattatagaacgcgtcattatg

SEQ ID NO: 5932666 - DNA, 25 bp, Homo sapien
caagttcgatagagagtttaattac

SEQ ID NO: 5932667 - DNA, 25 bp, Homo sapien
tcgttaacgttaatacttagaacca

SEQ ID NO: 5932668 - DNA, 25 bp, Homo sapien
tcagctatcgataattagtgagtat

SEQ ID NO: 5932669 - DNA, 25 bp, Homo sapien
aaatttattttgatttgcgcgctca

SEQ ID NO: 5932670 - DNA, 25 bp, Homo sapien
aatcgttatatgatcgtcaagattg

SEQ ID NO: 5932671 - DNA, 25 bp, Homo sapien
taatgagtcgcgaataactatttag

SEQ ID NO: 5932672 - DNA, 25 bp, Homo sapien
tggtttaggttaacgataacattca

SEQ ID NO: 5932673 - DNA, 25 bp, Homo sapien
ttcaaaaaatttaacggacgatgtg

SEQ ID NO: 5932674 - DNA, 25 bp, Homo sapien
acatcttacgtatagtcgataaaac

SEQ ID NO: 5932675 - DNA, 25 bp, Homo sapien
tagcttcaattactattacgagtct

SEQ ID NO: 5932676 - DNA, 25 bp, Homo sapien
gcactatcgacatcgttataaaaaa

SEQ ID NO: 5932677 - DNA, 25 bp, Homo sapien
taattatgacgaagcgatacaaagt

SEQ ID NO: 5932678 - DNA, 25 bp, Homo sapien
ataaccgactaaaataagtgtccta

SEQ ID NO: 5932679 - DNA, 25 bp, Homo sapien
atcaaaatctagcgacgtattgaaa

SEQ ID NO: 5932680 - DNA, 25 bp, Homo sapien
acagaattacgatccggtattaata

SEQ ID NO: 5932681 - DNA, 25 bp, Homo sapien
cctttaaacgatgatcatacttgat

SEQ ID NO: 5932682 - DNA, 25 bp, Homo sapien
ctatatgtattaacgcgcataaatg

SEQ ID NO: 5932683 - DNA, 25 bp, Homo sapien
acataggattaaatcgttatcttcc

SEQ ID NO: 5932684 - DNA, 25 bp, Homo sapien
aacttatgtataacgccaatacaag

SEQ ID NO: 5932685 - DNA, 25 bp, Homo sapien
ggaactaaagcgattcgattttaat

SEQ ID NO: 5932686 - DNA, 25 bp, Homo sapien
tatgttataatcggtcgtgcttatt

SEQ ID NO: 5932687 - DNA, 25 bp, Homo sapien
ttagcacgtattacaaccgtatata

SEQ ID NO: 5932688 - DNA, 25 bp, Homo sapien
gtgtgtaatcgtttatcgtaataag

SEQ ID NO: 5932689 - DNA, 25 bp, Homo sapien
cttaattatacgcggagtttgtaat

SEQ ID NO: 5932690 - DNA, 25 bp, Homo sapien
tgggatttaaccataacggattaat

SEQ ID NO: 5932691 - DNA, 25 bp, Homo sapien
ttcccttaaacgataagtttctgta

SEQ ID NO: 5932692 - DNA, 25 bp, Homo sapien
tcgaacttatattgtcgtaccaata

SEQ ID NO: 5932693 - DNA, 25 bp, Homo sapien
tcttctaagcttatcgcaataactt

SEQ ID NO: 5932694 - DNA, 25 bp, Homo sapien
tagatttttcgatactatcaggagt

SEQ ID NO: 5932695 - DNA, 25 bp, Homo sapien
tgataacttattcgaactacaatgc

SEQ ID NO: 5932696 - DNA, 25 bp, Homo sapien
actcttgtatcgagacgttttaaaa

SEQ ID NO: 5932697 - DNA, 25 bp, Homo sapien
aagatatctataacgcgttgtaaag

SEQ ID NO: 5932698 - DNA, 25 bp, Homo sapien
ctataacgtcaattcaatgtttcac

SEQ ID NO: 5932699 - DNA, 25 bp, Homo sapien
atctattatacgtccgacgaaaata

SEQ ID NO: 5932700 - DNA, 25 bp, Homo sapien
cttagattcgttatgactcttttca

SEQ ID NO: 5932701 - DNA, 25 bp, Homo sapien
tatcggcattatagtacgatactta

SEQ ID NO: 5932702 - DNA, 25 bp, Homo sapien
agtatttatacgaacttaacagcct

SEQ ID NO: 5932703 - DNA, 25 bp, Homo sapien
taaggctaaactacgaagaacatat

SEQ ID NO: 5932704 - DNA, 25 bp, Homo sapien
atatatgtccgatacgtaaagtaag

SEQ ID NO: 5932705 - DNA, 25 bp, Homo sapien
ttcctaattatattacggctgttca

SEQ ID NO: 5932706 - DNA, 25 bp, Homo sapien
aaaatagactatatcgcgagattca

SEQ ID NO: 5932707 - DNA, 25 bp, Homo sapien
aatcgcgttatggtatgaatttctt

SEQ ID NO: 5932708 - DNA, 25 bp, Homo sapien
atcatcaattaatacgattggttgg

SEQ ID NO: 5932709 - DNA, 25 bp, Homo sapien
atagatgacggattatgataagact

SEQ ID NO: 5932710 - DNA, 25 bp, Homo sapien
tgagctattatacgttaacacgtaa

SEQ ID NO: 5932711 - DNA, 25 bp, Homo sapien
actaaatcgcaatcgtaaataatgc

SEQ ID NO: 5932712 - DNA, 25 bp, Homo sapien
aaatttcgattgtcgactactattc

SEQ ID NO: 5932713 - DNA, 25 bp, Homo sapien
ctagataacgtactctattatgaac

SEQ ID NO: 5932714 - DNA, 25 bp, Homo sapien
ggatatcttagatagcgaaaacatt

SEQ ID NO: 5932715 - DNA, 25 bp, Homo sapien
gcattcgattaataagttgaacttc

SEQ ID NO: 5932716 - DNA, 25 bp, Homo sapien
tgtctgcgatttattaaatccctta

SEQ ID NO: 5932717 - DNA, 25 bp, Homo sapien
tacatttcgtactatttcgatctac

SEQ ID NO: 5932718 - DNA, 25 bp, Homo sapien
aaacaatctatcgcactaattagca

SEQ ID NO: 5932719 - DNA, 25 bp, Homo sapien
gcaatatttatcgcgtacgatttaa

SEQ ID NO: 5932720 - DNA, 25 bp, Homo sapien
attgatgttgcaatcgtaatttcgt

SEQ ID NO: 5932721 - DNA, 25 bp, Homo sapien
gttattaaatgcgatacgattttcg

SEQ ID NO: 5932722 - DNA, 25 bp, Homo sapien
cgttttatcgcgaaaagatagaaat

SEQ ID NO: 5932723 - DNA, 25 bp, Homo sapien
acttactaattaatcgcacaacact

SEQ ID NO: 5932724 - DNA, 25 bp, Homo sapien
ttggcattgttatacgaaattacac

SEQ ID NO: 5932725 - DNA, 25 bp, Homo sapien
tatttaacctagttcgcgataaagt

SEQ ID NO: 5932726 - DNA, 25 bp, Homo sapien
atactcgattgttatattatgtgcg

SEQ ID NO: 5932727 - DNA, 25 bp, Homo sapien
acaggtccgaaacattatatttaag

SEQ ID NO: 5932728 - DNA, 25 bp, Homo sapien
aaaattatataacgagtcgtgttcg

SEQ ID NO: 5932729 - DNA, 25 bp, Homo sapien
tcaactccaatttattacgatacga

SEQ ID NO: 5932730 - DNA, 25 bp, Homo sapien
gataatactttatacgatagccttc

SEQ ID NO: 5932731 - DNA, 25 bp, Homo sapien
gtcttaatataatacgcgttctact

SEQ ID NO: 5932732 - DNA, 25 bp, Homo sapien
atttcttcgatagaattggattacg

SEQ ID NO: 5932733 - DNA, 25 bp, Homo sapien
atgttacgtgacgtataggaaattt

SEQ ID NO: 5932734 - DNA, 25 bp, Homo sapien
ctagaactcatttatcgataagcat

SEQ ID NO: 5932735 - DNA, 25 bp, Homo sapien
gacaattacgttacgtttaatcagt

SEQ ID NO: 5932736 - DNA, 25 bp, Homo sapien
gttaatatcacgatcgttatccata

SEQ ID NO: 5932737 - DNA, 25 bp, Homo sapien
attgattgatataccgtcgaaatag

SEQ ID NO: 5932738 - DNA, 25 bp, Homo sapien
cactaccgttaattagaattcgtat

SEQ ID NO: 5932739 - DNA, 25 bp, Homo sapien
aaggaatgtgttcgcaaatatctta

SEQ ID NO: 5932740 - DNA, 25 bp, Homo sapien
tttatccgcgatatgatagtgtata

SEQ ID NO: 5932741 - DNA, 25 bp, Homo sapien
atcctttcgtattacgagatgatta

SEQ ID NO: 5932742 - DNA, 25 bp, Homo sapien
atagattaacgtacctttacagctt

SEQ ID NO: 5932743 - DNA, 25 bp, Homo sapien
atcgccgaaatcgaatattgtatat

SEQ ID NO: 5932744 - DNA, 25 bp, Homo sapien
atttctaagaactattacgatgctc

SEQ ID NO: 5932745 - DNA, 25 bp, Homo sapien
tcatgttagacgtattgcgtttaat

SEQ ID NO: 5932746 - DNA, 25 bp, Homo sapien
cactctataatattgaccgcaattt

SEQ ID NO: 5932747 - DNA, 25 bp, Homo sapien
tttatacgcaactattgtatcctca

SEQ ID NO: 5932748 - DNA, 25 bp, Homo sapien
gcaagatataacgttgaaacgtatt

SEQ ID NO: 5932749 - DNA, 25 bp, Homo sapien
cttcgttatactaatatgcgtttga

SEQ ID NO: 5932750 - DNA, 25 bp, Homo sapien
tgataaagctcgaagtaattaatgc

SEQ ID NO: 5932751 - DNA, 25 bp, Homo sapien
atactattcgtcaaatttgcgtaca

SEQ ID NO: 5932752 - DNA, 25 bp, Homo sapien
aatgactacgatcgatatattgagt

SEQ ID NO: 5932753 - DNA, 25 bp, Homo sapien
gaatcattgctaagcgaattaatag

SEQ ID NO: 5932754 - DNA, 25 bp, Homo sapien
tcatatagacgtatatcgctcttta

SEQ ID NO: 5932755 - DNA, 25 bp, Homo sapien
caaaaatatatcgcggtagctaaaa

SEQ ID NO: 5932756 - DNA, 25 bp, Homo sapien
atgaatgcgtccgaattattttaga

SEQ ID NO: 5932757 - DNA, 25 bp, Homo sapien
gatcatcgtaaagtaattcggataa

SEQ ID NO: 5932758 - DNA, 25 bp, Homo sapien
ttaaggtacgtcgatacatttaatg

SEQ ID NO: 5932759 - DNA, 25 bp, Homo sapien
ggtatcggaatgttattaactgttt

SEQ ID NO: 5932760 - DNA, 25 bp, Homo sapien
tgtatttatcgatctatgcacagat

SEQ ID NO: 5932761 - DNA, 25 bp, Homo sapien
ataactacgaatactgattctcgaa

SEQ ID NO: 5932762 - DNA, 25 bp, Homo sapien
caatttacgatttacgtaagatgac

SEQ ID NO: 5932763 - DNA, 25 bp, Homo sapien
cataatattccgtaacgaattagtc

SEQ ID NO: 5932764 - DNA, 25 bp, Homo sapien
ttaaagcgtcgctagtaataattac

SEQ ID NO: 5932765 - DNA, 25 bp, Homo sapien
tttcaagtatatccgacgatttatg

SEQ ID NO: 5932766 - DNA, 25 bp, Homo sapien
caacagatcgtaaaattcgtatttc

SEQ ID NO: 5932767 - DNA, 25 bp, Homo sapien
attcttactagcgttgaattcaaac

SEQ ID NO: 5932768 - DNA, 25 bp, Homo sapien
atcatttcgcgagtattcgattata

SEQ ID NO: 5932769 - DNA, 25 bp, Homo sapien
cttagtcgtaaactatttgaaagag

SEQ ID NO: 5932770 - DNA, 25 bp, Homo sapien
ctttatcgcgtaaggtatatatatc

SEQ ID NO: 5932771 - DNA, 25 bp, Homo sapien
taaaattatactagcgcgtattgtg

SEQ ID NO: 5932772 - DNA, 25 bp, Homo sapien
cctaatgttaccgataaattgaaag

SEQ ID NO: 5932773 - DNA, 25 bp, Homo sapien
ttcctaatatcgtaatccgaaaaac

SEQ ID NO: 5932774 - DNA, 25 bp, Homo sapien
acagaaacgcaattatgaatgttca

SEQ ID NO: 5932775 - DNA, 25 bp, Homo sapien
ttatctcaactataacgattctcct

SEQ ID NO: 5932776 - DNA, 25 bp, Homo sapien
tgagtattatcaatcgaagacagtt

SEQ ID NO: 5932777 - DNA, 25 bp, Homo sapien
tgacattcgataattcacgttaact

SEQ ID NO: 5932778 - DNA, 25 bp, Homo sapien
tttcgcacaatcgatataatacatg

SEQ ID NO: 5932779 - DNA, 25 bp, Homo sapien
ataagacgactgttaataagacaca

SEQ ID NO: 5932780 - DNA, 25 bp, Homo sapien
accaaaggtcaattatcgatattca

SEQ ID NO: 5932781 - DNA, 25 bp, Homo sapien
ttgatatacgcgataacttacaaca

SEQ ID NO: 5932782 - DNA, 25 bp, Homo sapien
tctatagtacgataatgtagatctc

SEQ ID NO: 5932783 - DNA, 25 bp, Homo sapien
caacccgatatcgaaattatgaaaa

SEQ ID NO: 5932784 - DNA, 25 bp, Homo sapien
tatcaaatcggactaatatggaaga

SEQ ID NO: 5932785 - DNA, 25 bp, Homo sapien
tttgcattacgaataaggatgatac

SEQ ID NO: 5932786 - DNA, 25 bp, Homo sapien
accttattgcggtaataaacttcaa

SEQ ID NO: 5932787 - DNA, 25 bp, Homo sapien
taggatttcatatatgatcggaatc

SEQ ID NO: 5932788 - DNA, 25 bp, Homo sapien
agttagttatacgaaagctatgaca

SEQ ID NO: 5932789 - DNA, 25 bp, Homo sapien
acacaatattgcgaacgaattatca

SEQ ID NO: 5932790 - DNA, 25 bp, Homo sapien
atccaaagtttataatatcgatcgg

SEQ ID NO: 5932791 - DNA, 25 bp, Homo sapien
ggcagcgagaatatagtttaattta

SEQ ID NO: 5932792 - DNA, 25 bp, Homo sapien
ttataaacgcccgtattataggtaa

SEQ ID NO: 5932793 - DNA, 25 bp, Homo sapien
acagtagttaactaacggtaataca

SEQ ID NO: 5932794 - DNA, 25 bp, Homo sapien
tttaccattattaatcggtccattg

SEQ ID NO: 5932795 - DNA, 25 bp, Homo sapien
aacatagtcgtacgattagtctttt

SEQ ID NO: 5932796 - DNA, 25 bp, Homo sapien
cttataagatcggttaaattgccaa

SEQ ID NO: 5932797 - DNA, 25 bp, Homo sapien
cttatgtaactataatcgtcctact

SEQ ID NO: 5932798 - DNA, 25 bp, Homo sapien
ataatataggacgaacgtataacca

SEQ ID NO: 5932799 - DNA, 25 bp, Homo sapien
tgtctcaaaatcaatcttcgagaaa

SEQ ID NO: 5932800 - DNA, 25 bp, Homo sapien
tagcatttagtcgtagattgactaa

SEQ ID NO: 5932801 - DNA, 25 bp, Homo sapien
tgtacaagaaaatttcgcacagaat

SEQ ID NO: 5932802 - DNA, 25 bp, Homo sapien
tgttattacgtatagaccgcataat

SEQ ID NO: 5932803 - DNA, 25 bp, Homo sapien
attactcgtatactatgcgtgtaat

SEQ ID NO: 5932804 - DNA, 25 bp, Homo sapien
actagcgaattgacaaatcaaatct

SEQ ID NO: 5932805 - DNA, 25 bp, Homo sapien
ttcatactttagttctcgataatgc

SEQ ID NO: 5932806 - DNA, 25 bp, Homo sapien
gagctatcgcgaattatagtaaaaa

SEQ ID NO: 5932807 - DNA, 25 bp, Homo sapien
ggcagactaaattaacgataatatc

SEQ ID NO: 5932808 - DNA, 25 bp, Homo sapien
tgaatatcggagttacgtagttata

SEQ ID NO: 5932809 - DNA, 25 bp, Homo sapien
caactgtactagcgaaaatattaac

SEQ ID NO: 5932810 - DNA, 25 bp, Homo sapien
tatcgaacgttatcgcgtaagatat

SEQ ID NO: 5932811 - DNA, 25 bp, Homo sapien
atttttaatcgcggagtatgctatc

SEQ ID NO: 5932812 - DNA, 25 bp, Homo sapien
ttagatcgttatactcgagaggtaa

SEQ ID NO: 5932813 - DNA, 25 bp, Homo sapien
tgttaaagtcgctaatcggaaaatg

SEQ ID NO: 5932814 - DNA, 25 bp, Homo sapien
tattagcgacttatgcgtatcgtat

SEQ ID NO: 5932815 - DNA, 25 bp, Homo sapien
taacaatatcgacgtactagatagc

SEQ ID NO: 5932816 - DNA, 25 bp, Homo sapien
tagttgccctacgcgatattataaa

SEQ ID NO: 5932817 - DNA, 25 bp, Homo sapien
tactactgcgtattacgtcttcaaa

SEQ ID NO: 5932818 - DNA, 25 bp, Homo sapien
ttccaaactagtgcgttcgatttta

SEQ ID NO: 5932819 - DNA, 25 bp, Homo sapien
tataagtcgtacgagcaagcattta

SEQ ID NO: 5932820 - DNA, 25 bp, Homo sapien
tacttatcgaccgcgaataaaagtt

SEQ ID NO: 5932821 - DNA, 25 bp, Homo sapien
aagtgacgcgtaatacttatcttct

SEQ ID NO: 5932822 - DNA, 25 bp, Homo sapien
gttaagagcgtctatacgagaaatt

SEQ ID NO: 5932823 - DNA, 25 bp, Homo sapien
ttttatgtccgacgcattacgaaat

SEQ ID NO: 5932824 - DNA, 25 bp, Homo sapien
agttgttcgcgagtaactattctaa

SEQ ID NO: 5932825 - DNA, 25 bp, Homo sapien
gcgattgacgcgactatattattat

SEQ ID NO: 5932826 - DNA, 25 bp, Homo sapien
aacattttacgcgatgtagctttgt

SEQ ID NO: 5932827 - DNA, 25 bp, Homo sapien
ttgtacgcgttacttcgtataaaga

SEQ ID NO: 5932828 - DNA, 25 bp, Homo sapien
tttcacataatgcgcgctataaaca

SEQ ID NO: 5932829 - DNA, 25 bp, Homo sapien
gaattattaacgcgttacgacgtaa

SEQ ID NO: 5932830 - DNA, 25 bp, Homo sapien
tagatgtaccgttacgtcaatttga

SEQ ID NO: 5932831 - DNA, 25 bp, Homo sapien
agagatcgcgtttacgattctattt

SEQ ID NO: 5932832 - DNA, 25 bp, Homo sapien
cgatgcgaatcttttatcaaggaat

SEQ ID NO: 5932833 - DNA, 25 bp, Homo sapien
attaatctactagcgcgtttctcta

SEQ ID NO: 5932834 - DNA, 25 bp, Homo sapien
tctgaactaatccgcgtatacaaat

SEQ ID NO: 5932835 - DNA, 25 bp, Homo sapien
atatctgcgtaatatcgagcaatca

SEQ ID NO: 5932836 - DNA, 25 bp, Homo sapien
aagctacgcgatagatctagattat

SEQ ID NO: 5932837 - DNA, 25 bp, Homo sapien
aaattattaatccggacgcctagaa

SEQ ID NO: 5932838 - DNA, 25 bp, Homo sapien
cgatatatagtataccgcgttatgt

SEQ ID NO: 5932839 - DNA, 25 bp, Homo sapien
tagtattacgatcgagcgtacaatt

SEQ ID NO: 5932840 - DNA, 25 bp, Homo sapien
gttatttactaatccgacgtgtcat

SEQ ID NO: 5932841 - DNA, 25 bp, Homo sapien
atattaatccgcgatacgagtgttt

SEQ ID NO: 5932842 - DNA, 25 bp, Homo sapien
actttttatcgcgcaatgataagag

SEQ ID NO: 5932843 - DNA, 25 bp, Homo sapien
ttttaccaattagtacgcggatgaa

SEQ ID NO: 5932844 - DNA, 25 bp, Homo sapien
gactgaatataactcgcaaagaatg

SEQ ID NO: 5932845 - DNA, 25 bp, Homo sapien
caagtacgcgtcacgtataataatt

SEQ ID NO: 5932846 - DNA, 25 bp, Homo sapien
cattgacgctcaatgataattgact

SEQ ID NO: 5932847 - DNA, 25 bp, Homo sapien
gatatccgcgtactaagttagaata

SEQ ID NO: 5932848 - DNA, 25 bp, Homo sapien
tcctatatcgtaccgtagaagaatt

SEQ ID NO: 5932849 - DNA, 25 bp, Homo sapien
tggtatttacgacttaccgatattg

SEQ ID NO: 5932850 - DNA, 25 bp, Homo sapien
gttatattcgtacgcgtatgtgtaa

SEQ ID NO: 5932851 - DNA, 25 bp, Homo sapien
atgttagaccgcgctattaataaca

SEQ ID NO: 5932852 - DNA, 25 bp, Homo sapien
actcatatcagtcggtacgatatat

SEQ ID NO: 5932853 - DNA, 25 bp, Homo sapien
ggattttaacgacgttcgtattatc

SEQ ID NO: 5932854 - DNA, 25 bp, Homo sapien
ataggatctggcgttaacgtttata

SEQ ID NO: 5932855 - DNA, 25 bp, Homo sapien
tttatatcgcgagatagtttgcgat

SEQ ID NO: 5932856 - DNA, 25 bp, Homo sapien
tcaaatgtcttacgcgaagttatag

SEQ ID NO: 5932857 - DNA, 25 bp, Homo sapien
atagttctagttcgtacgcttgttt

SEQ ID NO: 5932858 - DNA, 25 bp, Homo sapien
aaaaatatacgtatgaccgacccta

SEQ ID NO: 5932859 - DNA, 25 bp, Homo sapien
ttactaaggtcgattcgtagttctt

SEQ ID NO: 5932860 - DNA, 25 bp, Homo sapien
gacaatcgttaactagtcgttaatc

SEQ ID NO: 5932861 - DNA, 25 bp, Homo sapien
ttactctatacgtcgtgcgatatat

SEQ ID NO: 5932862 - DNA, 25 bp, Homo sapien
tctgcttatcgataacgtatgaact

SEQ ID NO: 5932863 - DNA, 25 bp, Homo sapien
ccaaaacctatattcgtcgaagtaa

SEQ ID NO: 5932864 - DNA, 25 bp, Homo sapien
tagtaacataagcgacgatacattc

SEQ ID NO: 5932865 - DNA, 25 bp, Homo sapien
acaatggtatcgcaatacgtcttaa

SEQ ID NO: 5932866 - DNA, 25 bp, Homo sapien
ttttaccctttacaacgcgataatc

SEQ ID NO: 5932867 - DNA, 25 bp, Homo sapien
tcattagttacgcacgattgatatc

SEQ ID NO: 5932868 - DNA, 25 bp, Homo sapien
gttacatcgacgcgtaatttagtaa

SEQ ID NO: 5932869 - DNA, 25 bp, Homo sapien
ttgaatcgcttatacgtacgtacat

SEQ ID NO: 5932870 - DNA, 25 bp, Homo sapien
tgaattacgttcggtcgtttttgta

SEQ ID NO: 5932871 - DNA, 25 bp, Homo sapien
aaagtaacgttattcgtcgattcca

SEQ ID NO: 5932872 - DNA, 25 bp, Homo sapien
cctatagtatagcgcgttaattaca

SEQ ID NO: 5932873 - DNA, 25 bp, Homo sapien
tagatacgttaccgcaacattctat

SEQ ID NO: 5932874 - DNA, 25 bp, Homo sapien
atgggatagtatttcgacgaactta

SEQ ID NO: 5932875 - DNA, 25 bp, Homo sapien
ttaatctcgtaagacgtcgtagtaa

SEQ ID NO: 5932876 - DNA, 25 bp, Homo sapien
atatagcgtcgatataacgcagatt

SEQ ID NO: 5932877 - DNA, 25 bp, Homo sapien
taaacacgtcagtttacgctcatta

SEQ ID NO: 5932878 - DNA, 25 bp, Homo sapien
ctatatccgtacgctagatcaaata

SEQ ID NO: 5932879 - DNA, 25 bp, Homo sapien
gttactacggcgtattatcgtttta

SEQ ID NO: 5932880 - DNA, 25 bp, Homo sapien
caatatggacgatcgtacataacta

SEQ ID NO: 5932881 - DNA, 25 bp, Homo sapien
caactagttcgctaacgtaatgtaa

SEQ ID NO: 5932882 - DNA, 25 bp, Homo sapien
tgatttccgcgattatctaatcaag

SEQ ID NO: 5932883 - DNA, 25 bp, Homo sapien
tagattcgcgcgttatgagattttt

SEQ ID NO: 5932884 - DNA, 25 bp, Homo sapien
tgttaatacccgaacgatagtcatt

SEQ ID NO: 5932885 - DNA, 25 bp, Homo sapien
tcttgtactcgtgtatagatgctta

SEQ ID NO: 5932886 - DNA, 25 bp, Homo sapien
cctttttgtacatcgcgacataatt

SEQ ID NO: 5932887 - DNA, 25 bp, Homo sapien
atcggtatcgtattagacgtacttt

SEQ ID NO: 5932888 - DNA, 25 bp, Homo sapien
ctgctaacagcgcattatatttgaa

SEQ ID NO: 5932889 - DNA, 25 bp, Homo sapien
acctaacgtacgcgagataatttaa

SEQ ID NO: 5932890 - DNA, 25 bp, Homo sapien
ttttctgtattacggccgaatttca

SEQ ID NO: 5932891 - DNA, 25 bp, Homo sapien
ttaaatgctattacgcgtatctcct

SEQ ID NO: 5932892 - DNA, 25 bp, Homo sapien
attagctagtacgcgttaagctatt

SEQ ID NO: 5932893 - DNA, 25 bp, Homo sapien
gttttaaacgatacgacctcattag

SEQ ID NO: 5932894 - DNA, 25 bp, Homo sapien
tactgtgtatacggtcgtaagaatt

SEQ ID NO: 5932895 - DNA, 25 bp, Homo sapien
agcattttcgacggtactaatttga

SEQ ID NO: 5932896 - DNA, 25 bp, Homo sapien
gtactatcgtataatcgcgattaag

SEQ ID NO: 5932897 - DNA, 25 bp, Homo sapien
acttagcgtttacgctagtaagtat

SEQ ID NO: 5932898 - DNA, 25 bp, Homo sapien
taattacgacgctattagagtgttc

SEQ ID NO: 5932899 - DNA, 25 bp, Homo sapien
tatttccttgacgcgatatcaacat

SEQ ID NO: 5932900 - DNA, 25 bp, Homo sapien
gacaaacgtttaacgcgtatacatt

SEQ ID NO: 5932901 - DNA, 25 bp, Homo sapien
tccgattatttataatcggatccct

SEQ ID NO: 5932902 - DNA, 25 bp, Homo sapien
attatagcgacgaacagtaaagatg

SEQ ID NO: 5932903 - DNA, 25 bp, Homo sapien
aatgtaacgaggcgtaataaatcag

SEQ ID NO: 5932904 - DNA, 25 bp, Homo sapien
atgctattaaaccgagtaatctgag

SEQ ID NO: 5932905 - DNA, 25 bp, Homo sapien
tatataatcgcgcgtactattcaag

SEQ ID NO: 5932906 - DNA, 25 bp, Homo sapien
attgatcttctaatcgcggcataaa

SEQ ID NO: 5932907 - DNA, 25 bp, Homo sapien
gtgttagcgttcgatactatgataa

SEQ ID NO: 5932908 - DNA, 25 bp, Homo sapien
tccttacgcgatactgtatttttgt

SEQ ID NO: 5932909 - DNA, 25 bp, Homo sapien
aaattcttatacggcgaactagcta

SEQ ID NO: 5932910 - DNA, 25 bp, Homo sapien
gaagatttcgcgtattgtctaagat

SEQ ID NO: 5932911 - DNA, 25 bp, Homo sapien
gcaaatgtagcgtacgcaaataaat

SEQ ID NO: 5932912 - DNA, 25 bp, Homo sapien
atatttgttcgatcgtccatcaagt

SEQ ID NO: 5932913 - DNA, 25 bp, Homo sapien
ttttaactatacgcgagtaccaaca

SEQ ID NO: 5932914 - DNA, 25 bp, Homo sapien
tggttacgttatagtacgctatgtt

SEQ ID NO: 5932915 - DNA, 25 bp, Homo sapien
aatacgaataatgtagcgaatggct

SEQ ID NO: 5932916 - DNA, 25 bp, Homo sapien
agtgaacgcgttataccatttattg

SEQ ID NO: 5932917 - DNA, 25 bp, Homo sapien
tttaatatctttacgtacgtctccc

SEQ ID NO: 5932918 - DNA, 25 bp, Homo sapien
atatagcgtattgcgatactagcta

SEQ ID NO: 5932919 - DNA, 25 bp, Homo sapien
ctcgagcgctgttaatttatatagt

SEQ ID NO: 5932920 - DNA, 25 bp, Homo sapien
attttctaactacgcgatctcgtat

SEQ ID NO: 5932921 - DNA, 25 bp, Homo sapien
tgaattacgcgattacgtttttgtc

SEQ ID NO: 5932922 - DNA, 25 bp, Homo sapien
gtacaccggtaatcgtataagtata

SEQ ID NO: 5932923 - DNA, 25 bp, Homo sapien
aatcactactacgtcggttaaacaa

SEQ ID NO: 5932924 - DNA, 25 bp, Homo sapien
aaaaacataatacgcgtcgcaatag

SEQ ID NO: 5932925 - DNA, 25 bp, Homo sapien
tccatttaagaccgaacgcttaata

SEQ ID NO: 5932926 - DNA, 25 bp, Homo sapien
tacacatcgtatactggcgaaaaat

SEQ ID NO: 5932927 - DNA, 25 bp, Homo sapien
aattatatactacgcgttggccaat

SEQ ID NO: 5932928 - DNA, 25 bp, Homo sapien
catactacgacgaaaaacattcgta

SEQ ID NO: 5932929 - DNA, 25 bp, Homo sapien
taatggataagtatcgcgcactaaa

SEQ ID NO: 5932930 - DNA, 25 bp, Homo sapien
tactaattcggacgactaagtcaat

SEQ ID NO: 5932931 - DNA, 25 bp, Homo sapien
atggaatagcgaaacggacttaata

SEQ ID NO: 5932932 - DNA, 25 bp, Homo sapien
aagttgtacttcgcgaagttatcat

SEQ ID NO: 5932933 - DNA, 25 bp, Homo sapien
tgagtacgatcgacgtatcatttaa

SEQ ID NO: 5932934 - DNA, 25 bp, Homo sapien
ttatactacattgacgcgagaattg

SEQ ID NO: 5932935 - DNA, 25 bp, Homo sapien
tgtaaagtataatcgtgcgcattag

SEQ ID NO: 5932936 - DNA, 25 bp, Homo sapien
tcaggatcgcgcgatttaattatat

SEQ ID NO: 5932937 - DNA, 25 bp, Homo sapien
acttttcgtatattacgcgttgact

SEQ ID NO: 5932938 - DNA, 25 bp, Homo sapien
tggtttaaaatcgacgattagctct

SEQ ID NO: 5932939 - DNA, 25 bp, Homo sapien
tcgtaatatgcgttaacgacatact

SEQ ID NO: 5932940 - DNA, 25 bp, Homo sapien
atctaccgaagtatatcggtcttat

SEQ ID NO: 5932941 - DNA, 25 bp, Homo sapien
ttacaaattacgcgtactagaaagg

SEQ ID NO: 5932942 - DNA, 25 bp, Homo sapien
tagatagacgcgtatattctatctg

SEQ ID NO: 5932943 - DNA, 25 bp, Homo sapien
ttttgtctatatcgcggaatgaagt

SEQ ID NO: 5932944 - DNA, 25 bp, Homo sapien
aatcgtatacgcgactaaaagtgtt

SEQ ID NO: 5932945 - DNA, 25 bp, Homo sapien
atatatcggtattaatccgcttgac

SEQ ID NO: 5932946 - DNA, 25 bp, Homo sapien
tggtttatcgttcgcgatatttttc

SEQ ID NO: 5932947 - DNA, 25 bp, Homo sapien
ctacattccgtcgcgtataaatata

SEQ ID NO: 5932948 - DNA, 25 bp, Homo sapien
agaaattcgtcaatacgggaataca

SEQ ID NO: 5932949 - DNA, 25 bp, Homo sapien
agtacaagtacgatttgcgttactt

SEQ ID NO: 5932950 - DNA, 25 bp, Homo sapien
cttaatatcgcgtaaacgtaatacg

SEQ ID NO: 5932951 - DNA, 25 bp, Homo sapien
attgcttattacgccgacatagtta

SEQ ID NO: 5932952 - DNA, 25 bp, Homo sapien
atggaattagatcgtagcgtaacaa

SEQ ID NO: 5932953 - DNA, 25 bp, Homo sapien
tttgacacgctatattcggacttaa

SEQ ID NO: 5932954 - DNA, 25 bp, Homo sapien
ggatcaataatccgcataaattgct

SEQ ID NO: 5932955 - DNA, 25 bp, Homo sapien
aggttatatcggtcgtaatctacaa

SEQ ID NO: 5932956 - DNA, 25 bp, Homo sapien
atttacgatagcgtacgtttcaaag

SEQ ID NO: 5932957 - DNA, 25 bp, Homo sapien
taattgctattgcgcgtacgtttta

SEQ ID NO: 5932958 - DNA, 25 bp, Homo sapien
atataatcgcgctatactgcattga

SEQ ID NO: 5932959 - DNA, 25 bp, Homo sapien
catccatagtgtacgtcgaaaaatt

SEQ ID NO: 5932960 - DNA, 25 bp, Homo sapien
ttatgttttaacgcgcgtataaagg

SEQ ID NO: 5932961 - DNA, 25 bp, Homo sapien
atcaatagcgtacgtttcgctattt

SEQ ID NO: 5932962 - DNA, 25 bp, Homo sapien
tactctgatatcgagtcgctaataa

SEQ ID NO: 5932963 - DNA, 25 bp, Homo sapien
tatatgcgactatacgagatgtgaa

SEQ ID NO: 5932964 - DNA, 25 bp, Homo sapien
gtatttattaacgcgctacccataa

SEQ ID NO: 5932965 - DNA, 25 bp, Homo sapien
agatagttaaatttgtcgtagctgg

SEQ ID NO: 5932966 - DNA, 25 bp, Homo sapien
aacaatcgaattagtcgtaggttca

SEQ ID NO: 5932967 - DNA, 25 bp, Homo sapien
aacattcgcggtgcaatatttagaa

SEQ ID NO: 5932968 - DNA, 25 bp, Homo sapien
aaattacgcgcatttagacaaggtt

SEQ ID NO: 5932969 - DNA, 25 bp, Homo sapien
ccgataatgtatcgaatcttgatct

SEQ ID NO: 5932970 - DNA, 25 bp, Homo sapien
ctgatatcgtattacgatgacactt

SEQ ID NO: 5932971 - DNA, 25 bp, Homo sapien
aatatccgcctttcgaacacatatt

SEQ ID NO: 5932972 - DNA, 25 bp, Homo sapien
actcttaatatccttcatcgccatt

SEQ ID NO: 5932973 - DNA, 25 bp, Homo sapien
tatagcatccgctagatcgaaataa

SEQ ID NO: 5932974 - DNA, 25 bp, Homo sapien
atctgttacgataacattacagcct

SEQ ID NO: 5932975 - DNA, 25 bp, Homo sapien
tagaaaattgtcggatcgttctatg

SEQ ID NO: 5932976 - DNA, 25 bp, Homo sapien
acaagtcgatcggacataatgatat

SEQ ID NO: 5932977 - DNA, 25 bp, Homo sapien
ttgtatacgtcgaataccgcaatat

SEQ ID NO: 5932978 - DNA, 25 bp, Homo sapien
acaacttcgtacgtccatacattat

SEQ ID NO: 5932979 - DNA, 25 bp, Homo sapien
tacttacgaccgtcataagtaatag

SEQ ID NO: 5932980 - DNA, 25 bp, Homo sapien
atgactcgttagtagcgtaacatat

SEQ ID NO: 5932981 - DNA, 25 bp, Homo sapien
ttctgattcgcgactatatcatagt

SEQ ID NO: 5932982 - DNA, 25 bp, Homo sapien
tgtaaatagagcgcgtaatagcaat

SEQ ID NO: 5932983 - DNA, 25 bp, Homo sapien
tgtataatacgcgtcgtaaacagat

SEQ ID NO: 5932984 - DNA, 25 bp, Homo sapien
ggggtaatttaatatcgtcgaatag

SEQ ID NO: 5932985 - DNA, 25 bp, Homo sapien
agaatacagcgttatacgatctgat

SEQ ID NO: 5932986 - DNA, 25 bp, Homo sapien
ttacagtcgatatccgttagtttct

SEQ ID NO: 5932987 - DNA, 25 bp, Homo sapien
atgttacgttgcgtatgtcgataaa

SEQ ID NO: 5932988 - DNA, 25 bp, Homo sapien
aatatctacgtcgtatcgtaggtaa

SEQ ID NO: 5932989 - DNA, 25 bp, Homo sapien
acgattttcgtataacgccttatca

SEQ ID NO: 5932990 - DNA, 25 bp, Homo sapien
cccaattagtcgaccgtaaaatata

SEQ ID NO: 5932991 - DNA, 25 bp, Homo sapien
ttctaaggcgatcgcgttataaata

SEQ ID NO: 5932992 - DNA, 25 bp, Homo sapien
gaaggactattcgtaacgtcatatt

SEQ ID NO: 5932993 - DNA, 25 bp, Homo sapien
tgaagaccgttacgtatagactaaa

SEQ ID NO: 5932994 - DNA, 25 bp, Homo sapien
aggaatccgtagttcgaacataaat

SEQ ID NO: 5932995 - DNA, 25 bp, Homo sapien
taattccgtacaataacgctccaat

SEQ ID NO: 5932996 - DNA, 25 bp, Homo sapien
aacaatccgagcgtaattcaatgtt

SEQ ID NO: 5932997 - DNA, 25 bp, Homo sapien
tagcaatcgtgcgaagtattttgat

SEQ ID NO: 5932998 - DNA, 25 bp, Homo sapien
aatttatacgcccggtatactgaat

SEQ ID NO: 5932999 - DNA, 25 bp, Homo sapien
aaaatatacgccgtatcgtaagatc

SEQ ID NO: 5933000 - DNA, 25 bp, Homo sapien
aacattagattagccgacgtactat

SEQ ID NO: 5933001 - DNA, 25 bp, Homo sapien
atatgtgagttcgcgacatacaaaa

SEQ ID NO: 5933002 - DNA, 25 bp, Homo sapien
gtcgatacttatttaaaccgcagta

SEQ ID NO: 5933003 - DNA, 25 bp, Homo sapien
gctaacttacgcgttactaaaagat

SEQ ID NO: 5933004 - DNA, 25 bp, Homo sapien
aacgaagtatcgtatacgctttatg

SEQ ID NO: 5933005 - DNA, 25 bp, Homo sapien
taaaaacgctacgatctaatggatg

SEQ ID NO: 5933006 - DNA, 25 bp, Homo sapien
attatagcttagttacgcgattctc

SEQ ID NO: 5933007 - DNA, 25 bp, Homo sapien
atcactcgagccgatactaataatt

SEQ ID NO: 5933008 - DNA, 25 bp, Homo sapien
tggtataaaggcgaatatattgctg

SEQ ID NO: 5933009 - DNA, 25 bp, Homo sapien
aagtaacgcgaagtcttatcaagaa

SEQ ID NO: 5933010 - DNA, 25 bp, Homo sapien
tatttaacgatacgtcgtatcacga

SEQ ID NO: 5933011 - DNA, 25 bp, Homo sapien
tccatatgcgaccgttataaaagat

SEQ ID NO: 5933012 - DNA, 25 bp, Homo sapien
tcttattacgccggaattacaagta

SEQ ID NO: 5933013 - DNA, 25 bp, Homo sapien
atacgaccgaacgattagtttctta

SEQ ID NO: 5933014 - DNA, 25 bp, Homo sapien
aacagatagtacgatcggtattcaa

SEQ ID NO: 5933015 - DNA, 25 bp, Homo sapien
cttatggttaatcgcggtacaataa

SEQ ID NO: 5933016 - DNA, 25 bp, Homo sapien
attatgcatcgtatacggtatatcc

SEQ ID NO: 5933017 - DNA, 25 bp, Homo sapien
atctcataaatacgtcgcgtatcat

SEQ ID NO: 5933018 - DNA, 25 bp, Homo sapien
ttataatgcgatacgcgtataacgt

SEQ ID NO: 5933019 - DNA, 25 bp, Homo sapien
tcagttcatacttatcgcgatgata

SEQ ID NO: 5933020 - DNA, 25 bp, Homo sapien
agagttgcggataatcgtttgataa

SEQ ID NO: 5933021 - DNA, 25 bp, Homo sapien
ttaacttaattagtcgcgagcaaac

SEQ ID NO: 5933022 - DNA, 25 bp, Homo sapien
tgttattcgcgcattactatcgtat

SEQ ID NO: 5933023 - DNA, 25 bp, Homo sapien
atatgagcgactatactcgatttgt

SEQ ID NO: 5933024 - DNA, 25 bp, Homo sapien
gtgtcttacgcgtattaagttctat

SEQ ID NO: 5933025 - DNA, 25 bp, Homo sapien
atataactatcgcgtagcaaaccta

SEQ ID NO: 5933026 - DNA, 25 bp, Homo sapien
tgagtgaatacgcgatgtaagttat

SEQ ID NO: 5933027 - DNA, 25 bp, Homo sapien
tatgtctagtaattcgacgtcctta

SEQ ID NO: 5933028 - DNA, 25 bp, Homo sapien
gtagatcaacttatgttcgaattcc

SEQ ID NO: 5933029 - DNA, 25 bp, Homo sapien
tagaagacggacgtaattctttgta

SEQ ID NO: 5933030 - DNA, 25 bp, Homo sapien
aatttgataccgttcgtacctttga

SEQ ID NO: 5933031 - DNA, 25 bp, Homo sapien
aatacaataggttacgcgttgttac

SEQ ID NO: 5933032 - DNA, 25 bp, Homo sapien
ttacctttagcttacgcgaatcata

SEQ ID NO: 5933033 - DNA, 25 bp, Homo sapien
taaatcacgcgtaatctagtatgca

SEQ ID NO: 5933034 - DNA, 25 bp, Homo sapien
taataagtacgcgagctatacacat

SEQ ID NO: 5933035 - DNA, 25 bp, Homo sapien
gtgtagataattagatccgagatct

SEQ ID NO: 5933036 - DNA, 25 bp, Homo sapien
gaaaaatcgacgtattacgacaact

SEQ ID NO: 5933037 - DNA, 25 bp, Homo sapien
taattccgcgtaacatacttagtct

SEQ ID NO: 5933038 - DNA, 25 bp, Homo sapien
caaggtgcgataatattgctagtat

SEQ ID NO: 5933039 - DNA, 25 bp, Homo sapien
acttaatcgtatcgtgtagatcact

SEQ ID NO: 5933040 - DNA, 25 bp, Homo sapien
tagagtattacgaccgataagctta

SEQ ID NO: 5933041 - DNA, 25 bp, Homo sapien
actattgcgcgaatagctaaatgta

SEQ ID NO: 5933042 - DNA, 25 bp, Homo sapien
attcgatgacggtatacgaataatc

SEQ ID NO: 5933043 - DNA, 25 bp, Homo sapien
taatatttatacgccgacgtaggat

SEQ ID NO: 5933044 - DNA, 25 bp, Homo sapien
tgaagttaatacaccgacggaataa

SEQ ID NO: 5933045 - DNA, 25 bp, Homo sapien
taactgtacgtagcgtaacgaataa

SEQ ID NO: 5933046 - DNA, 25 bp, Homo sapien
atatctattcgaacgcgtaatggaa

SEQ ID NO: 5933047 - DNA, 25 bp, Homo sapien
tgactctagttacgcgactaaatta

SEQ ID NO: 5933048 - DNA, 25 bp, Homo sapien
cgtgaaagattaacgcacgaataat

SEQ ID NO: 5933049 - DNA, 25 bp, Homo sapien
atacattaatcgcgctaacccaaaa

SEQ ID NO: 5933050 - DNA, 25 bp, Homo sapien
cttgttcgcaattatatctacagag

SEQ ID NO: 5933051 - DNA, 25 bp, Homo sapien
ttggaatagttatcacgcgtcaata

SEQ ID NO: 5933052 - DNA, 25 bp, Homo sapien
cattattaacgtgtcgctatactct

SEQ ID NO: 5933053 - DNA, 25 bp, Homo sapien
ctttctgacgctttatacgatgatt

SEQ ID NO: 5933054 - DNA, 25 bp, Homo sapien
agcgatcgtccgatataatcattta

SEQ ID NO: 5933055 - DNA, 25 bp, Homo sapien
ttgaagttacgcggataatcatatg

SEQ ID NO: 5933056 - DNA, 25 bp, Homo sapien
tgtattcgccgaaacattaaaccat

SEQ ID NO: 5933057 - DNA, 25 bp, Homo sapien
atctgactagtaagtcgttaaactc

SEQ ID NO: 5933058 - DNA, 25 bp, Homo sapien
ttgactttcgcgataatacatacac

SEQ ID NO: 5933059 - DNA, 25 bp, Homo sapien
ttaaaggtcgaatacgctaaactca

SEQ ID NO: 5933060 - DNA, 25 bp, Homo sapien
cagtttcgcgaagtataatgcataa

SEQ ID NO: 5933061 - DNA, 25 bp, Homo sapien
ctaattatcgtatagtccggtttga

SEQ ID NO: 5933062 - DNA, 25 bp, Homo sapien
aagagtagctcgcgtattagaaatt

SEQ ID NO: 5933063 - DNA, 25 bp, Homo sapien
atataccttaacgaatcgcttgtac

SEQ ID NO: 5933064 - DNA, 25 bp, Homo sapien
ctaatggtacgatacgtcacattta

SEQ ID NO: 5933065 - DNA, 25 bp, Homo sapien
ttcataggcgtatcgacttttagtt

SEQ ID NO: 5933066 - DNA, 25 bp, Homo sapien
taaaggaggtcgtatcgttaattct

SEQ ID NO: 5933067 - DNA, 25 bp, Homo sapien
ttcggtaatattcgaagtctatgtg

SEQ ID NO: 5933068 - DNA, 25 bp, Homo sapien
ataaggatagtatacgcgcaaatag

SEQ ID NO: 5933069 - DNA, 25 bp, Homo sapien
atagaagtactaaaccgcgcaataa

SEQ ID NO: 5933070 - DNA, 25 bp, Homo sapien
gtcctgtaatcgatttataagctca

SEQ ID NO: 5933071 - DNA, 25 bp, Homo sapien
cttttattatcgtcgagcgtgtatt

SEQ ID NO: 5933072 - DNA, 25 bp, Homo sapien
tcttcatagtatcggcgtttagaaa

SEQ ID NO: 5933073 - DNA, 25 bp, Homo sapien
aggaatatacgtcgaggtacattta

SEQ ID NO: 5933074 - DNA, 25 bp, Homo sapien
atacagatacgaataatcgtcaggt

SEQ ID NO: 5933075 - DNA, 25 bp, Homo sapien
ttgaaatcggagcgttatatatgtg

SEQ ID NO: 5933076 - DNA, 25 bp, Homo sapien
atcttcgtagtacgtagcgtatatt

SEQ ID NO: 5933077 - DNA, 25 bp, Homo sapien
ctttacgtattacgcgactcattaa

SEQ ID NO: 5933078 - DNA, 25 bp, Homo sapien
cactaatcattgcgcgatatatttc

SEQ ID NO: 5933079 - DNA, 25 bp, Homo sapien
cagttaacgttaacgcgttatatag

SEQ ID NO: 5933080 - DNA, 25 bp, Homo sapien
gtttaattgcgtacgctacgttata

SEQ ID NO: 5933081 - DNA, 25 bp, Homo sapien
atagatgtcgaatcgtatacgttct

SEQ ID NO: 5933082 - DNA, 25 bp, Homo sapien
aacagaacgcgataacgttatagta

SEQ ID NO: 5933083 - DNA, 25 bp, Homo sapien
tatgtacgacgcgatgtattatgta

SEQ ID NO: 5933084 - DNA, 25 bp, Homo sapien
atatacatatgttcgagcgagaaag

SEQ ID NO: 5933085 - DNA, 25 bp, Homo sapien
cccagcgtttgttatagtacttatt

SEQ ID NO: 5933086 - DNA, 25 bp, Homo sapien
gaactcggataattgattagtccaa

SEQ ID NO: 5933087 - DNA, 25 bp, Homo sapien
ctcatacgtcgtatcgacaaatttt

SEQ ID NO: 5933088 - DNA, 25 bp, Homo sapien
cttatgaacttagtcgcgagtaaat

SEQ ID NO: 5933089 - DNA, 25 bp, Homo sapien
attatacgcgtaataagtacgcgtt

SEQ ID NO: 5933090 - DNA, 25 bp, Homo sapien
tgaaatcgttcctacgcgaaatttt

SEQ ID NO: 5933091 - DNA, 25 bp, Homo sapien
gacaaattcgcgtaacgatcttttt

SEQ ID NO: 5933092 - DNA, 25 bp, Homo sapien
agaaagtagccgacggatatatatt

SEQ ID NO: 5933093 - DNA, 25 bp, Homo sapien
gtcatatatactagtcgcgaatttc

SEQ ID NO: 5933094 - DNA, 25 bp, Homo sapien
ttatcaagtatactcgcgaaagaag

SEQ ID NO: 5933095 - DNA, 25 bp, Homo sapien
atcaagcgacgcaatatcttcatta

SEQ ID NO: 5933096 - DNA, 25 bp, Homo sapien
cacttcggaatattcataatagctg

SEQ ID NO: 5933097 - DNA, 25 bp, Homo sapien
tataaccgcgttattagggataatc

SEQ ID NO: 5933098 - DNA, 25 bp, Homo sapien
atacttgttgtcggcgtatattttc

SEQ ID NO: 5933099 - DNA, 25 bp, Homo sapien
atttttacgttaatgcgcgaacatc

SEQ ID NO: 5933100 - DNA, 25 bp, Homo sapien
aaaaatgattcgtgcgttacttcac

SEQ ID NO: 5933101 - DNA, 25 bp, Homo sapien
ataagaatacgtctcggatcgttta

SEQ ID NO: 5933102 - DNA, 25 bp, Homo sapien
catttagatatcgcgattaaactgg

SEQ ID NO: 5933103 - DNA, 25 bp, Homo sapien
attctacgtataacgcgaatgaatg

SEQ ID NO: 5933104 - DNA, 25 bp, Homo sapien
agatcttcgcgtaacacgtttaaat

SEQ ID NO: 5933105 - DNA, 25 bp, Homo sapien
tatatacgcaacgcctatattgtgt

SEQ ID NO: 5933106 - DNA, 25 bp, Homo sapien
aaagataagcgtatatcggcgaatt

SEQ ID NO: 5933107 - DNA, 25 bp, Homo sapien
agtataataatcggtcgtgttatgg

SEQ ID NO: 5933108 - DNA, 25 bp, Homo sapien
gtttattacgtcggacatattactc

SEQ ID NO: 5933109 - DNA, 25 bp, Homo sapien
atctcttgtattaacgcgatgaaga

SEQ ID NO: 5933110 - DNA, 25 bp, Homo sapien
tttatcatattcggtcgcgagaaat

SEQ ID NO: 5933111 - DNA, 25 bp, Homo sapien
ttagaatacgtcgatacatcgtaac

SEQ ID NO: 5933112 - DNA, 25 bp, Homo sapien
cttgtttatacgtcaacgtatccat

SEQ ID NO: 5933113 - DNA, 25 bp, Homo sapien
gacatatagtctaatcgcgtataga

SEQ ID NO: 5933114 - DNA, 25 bp, Homo sapien
atttagacgagtcgactatagaaca

SEQ ID NO: 5933115 - DNA, 25 bp, Homo sapien
ttcattatcgactccttaatgttgg

SEQ ID NO: 5933116 - DNA, 25 bp, Homo sapien
acagcttatgtcgaacgtaacaatt

SEQ ID NO: 5933117 - DNA, 25 bp, Homo sapien
tagatataacattacgcggcttttc

SEQ ID NO: 5933118 - DNA, 25 bp, Homo sapien
acgaatcgtactacggatttataga

SEQ ID NO: 5933119 - DNA, 25 bp, Homo sapien
gtacatttggtacgcgtaattttga

SEQ ID NO: 5933120 - DNA, 25 bp, Homo sapien
gaataatccgatagcgttaaattgg

SEQ ID NO: 5933121 - DNA, 25 bp, Homo sapien
ggattactatatcgcgtactaatga

SEQ ID NO: 5933122 - DNA, 25 bp, Homo sapien
ctatactactacgcgttagttctat

SEQ ID NO: 5933123 - DNA, 25 bp, Homo sapien
aatacgttattcgctaatctcggaa

SEQ ID NO: 5933124 - DNA, 25 bp, Homo sapien
aggcatcgtaatcactacgtaatta

SEQ ID NO: 5933125 - DNA, 25 bp, Homo sapien
acgtataatatcgttcgcgttttgt

SEQ ID NO: 5933126 - DNA, 25 bp, Homo sapien
ttcaaggtcgacgtaattaccatta

SEQ ID NO: 5933127 - DNA, 25 bp, Homo sapien
cttgattgttacaatatcgcttctg

SEQ ID NO: 5933128 - DNA, 25 bp, Homo sapien
ctatatgtatatccgcgacttgtta

SEQ ID NO: 5933129 - DNA, 25 bp, Homo sapien
acgtttgcgtaaccgtatagtataa

SEQ ID NO: 5933130 - DNA, 25 bp, Homo sapien
agtacagttatgcgacgtaataatg

SEQ ID NO: 5933131 - DNA, 25 bp, Homo sapien
ttgaaaggcgacgatatatatctca

SEQ ID NO: 5933132 - DNA, 25 bp, Homo sapien
tgattatgtaatcgcgagaaaacac

SEQ ID NO: 5933133 - DNA, 25 bp, Homo sapien
aaaatacgcgactaataagataggg

SEQ ID NO: 5933134 - DNA, 25 bp, Homo sapien
tactttatattgcgacgtctgattc

SEQ ID NO: 5933135 - DNA, 25 bp, Homo sapien
ttcaaccgtaacgtcgatagttatt

SEQ ID NO: 5933136 - DNA, 25 bp, Homo sapien
gttctctacgactagtcgtttaaat

SEQ ID NO: 5933137 - DNA, 25 bp, Homo sapien
tagaatactatcgtaacggactctt

SEQ ID NO: 5933138 - DNA, 25 bp, Homo sapien
attggttaccgtacggctataatat

SEQ ID NO: 5933139 - DNA, 25 bp, Homo sapien
aacagattatatcattgcgtcgtgt

SEQ ID NO: 5933140 - DNA, 25 bp, Homo sapien
taatctgtctatcgcgatatcttgt

SEQ ID NO: 5933141 - DNA, 25 bp, Homo sapien
ttaatatcgcgacgggataatagtt

SEQ ID NO: 5933142 - DNA, 25 bp, Homo sapien
tgtgattatcgtcgtaagtatcaac

SEQ ID NO: 5933143 - DNA, 25 bp, Homo sapien
attcaagttattacgaccgttcatc

SEQ ID NO: 5933144 - DNA, 25 bp, Homo sapien
ccacttagtcgaaacattacacaat

SEQ ID NO: 5933145 - DNA, 25 bp, Homo sapien
tatagacgcctatacggaatgataa

SEQ ID NO: 5933146 - DNA, 25 bp, Homo sapien
ataaatggtcgcgcgaataattaga

SEQ ID NO: 5933147 - DNA, 25 bp, Homo sapien
ttatgttacgacgttcgattcatct

SEQ ID NO: 5933148 - DNA, 25 bp, Homo sapien
tttcaagccggtatatcgattatac

SEQ ID NO: 5933149 - DNA, 25 bp, Homo sapien
gtgtattaacgatacgcgatgtatt

SEQ ID NO: 5933150 - DNA, 25 bp, Homo sapien
tatcagcctaacgacgattatcttt

SEQ ID NO: 5933151 - DNA, 25 bp, Homo sapien
caaagtacctcgacgtatttaaaca

SEQ ID NO: 5933152 - DNA, 25 bp, Homo sapien
aatagttaactagtcgcgtcattac

SEQ ID NO: 5933153 - DNA, 25 bp, Homo sapien
ataaagatagcggcgtcaatctttt

SEQ ID NO: 5933154 - DNA, 25 bp, Homo sapien
aagtagccgctataacgataattac

SEQ ID NO: 5933155 - DNA, 25 bp, Homo sapien
agcccgtattaacaatcgataatga

SEQ ID NO: 5933156 - DNA, 25 bp, Homo sapien
atttcttataagtcgcgaggtatct

SEQ ID NO: 5933157 - DNA, 25 bp, Homo sapien
gattagacgcgcggttatattaaaa

SEQ ID NO: 5933158 - DNA, 25 bp, Homo sapien
tgcctaccaattcgaaattgttcaa

SEQ ID NO: 5933159 - DNA, 25 bp, Homo sapien
atctacatcgtaggtcgttagttat

SEQ ID NO: 5933160 - DNA, 25 bp, Homo sapien
tccattctagtatacgtcgtagaaa

SEQ ID NO: 5933161 - DNA, 25 bp, Homo sapien
tataaccgaccgtataacgtaaatg

SEQ ID NO: 5933162 - DNA, 25 bp, Homo sapien
ttgtcatagtaccgtcgaaagttaa

SEQ ID NO: 5933163 - DNA, 25 bp, Homo sapien
gtctatcgcgagatagtatgttata

SEQ ID NO: 5933164 - DNA, 25 bp, Homo sapien
gaatatcgcgagtaactaagtacat

SEQ ID NO: 5933165 - DNA, 25 bp, Homo sapien
aaagaagcgtattacgtccatctaa

SEQ ID NO: 5933166 - DNA, 25 bp, Homo sapien
actttatcgatacgcgttaacagtt

SEQ ID NO: 5933167 - DNA, 25 bp, Homo sapien
accataatacagcgcgataaataag

SEQ ID NO: 5933168 - DNA, 25 bp, Homo sapien
tactatcgcgacttattacataggt

SEQ ID NO: 5933169 - DNA, 25 bp, Homo sapien
aggtatgacgttcgcaataaataag

SEQ ID NO: 5933170 - DNA, 25 bp, Homo sapien
gatacacgttcgagtatagttcaaa

SEQ ID NO: 5933171 - DNA, 25 bp, Homo sapien
ctcgagttcgcttatactaactttt

SEQ ID NO: 5933172 - DNA, 25 bp, Homo sapien
aaagctactaatccgacgtatatct

SEQ ID NO: 5933173 - DNA, 25 bp, Homo sapien
acgcaaattagtctcgaagaataga

SEQ ID NO: 5933174 - DNA, 25 bp, Homo sapien
aacactcgccgtatagattatgttt

SEQ ID NO: 5933175 - DNA, 25 bp, Homo sapien
tatagtgacgcggataatgtacaat

SEQ ID NO: 5933176 - DNA, 25 bp, Homo sapien
atatcactcgcggattaaaactttg

SEQ ID NO: 5933177 - DNA, 25 bp, Homo sapien
aactttcgcgtcaattagtaggata

SEQ ID NO: 5933178 - DNA, 25 bp, Homo sapien
tagagccgaaggtacgataaaattt

SEQ ID NO: 5933179 - DNA, 25 bp, Homo sapien
agaaaatacgatatcgtaccgtgaa

SEQ ID NO: 5933180 - DNA, 25 bp, Homo sapien
aataatccatcgtatgcgacactat

SEQ ID NO: 5933181 - DNA, 25 bp, Homo sapien
ttttttattaatcgtcgcgaccgat

SEQ ID NO: 5933182 - DNA, 25 bp, Homo sapien
aagatctatactaccgcgtaaagta

SEQ ID NO: 5933183 - DNA, 25 bp, Homo sapien
ctaatctacgccgtaatacgttaaa

SEQ ID NO: 5933184 - DNA, 25 bp, Homo sapien
aacgttcgtatctagacgtgttaaa

SEQ ID NO: 5933185 - DNA, 25 bp, Homo sapien
aaccagtatcggatcgttaatgtta

SEQ ID NO: 5933186 - DNA, 25 bp, Homo sapien
catatatcgcgaattgaaaatgcag

SEQ ID NO: 5933187 - DNA, 25 bp, Homo sapien
agtattggtacgtagatcgagataa

SEQ ID NO: 5933188 - DNA, 25 bp, Homo sapien
cttaaatctattacgcttgatcagc

SEQ ID NO: 5933189 - DNA, 25 bp, Homo sapien
caaaataggtcgtaatacgcatcat

SEQ ID NO: 5933190 - DNA, 25 bp, Homo sapien
ttcatgtaattcgtcgaccagaatt

SEQ ID NO: 5933191 - DNA, 25 bp, Homo sapien
tttttgctatacggttcgaagtaag

SEQ ID NO: 5933192 - DNA, 25 bp, Homo sapien
cttattcgtagatctatcgtgttag

SEQ ID NO: 5933193 - DNA, 25 bp, Homo sapien
cttgtatcgacgtacgataaattct

SEQ ID NO: 5933194 - DNA, 25 bp, Homo sapien
aattcatacatcgttcgcgtagtat

SEQ ID NO: 5933195 - DNA, 25 bp, Homo sapien
gttaaacgatatactagccctgtat

SEQ ID NO: 5933196 - DNA, 25 bp, Homo sapien
atttatacgtctagatacggtacga

SEQ ID NO: 5933197 - DNA, 25 bp, Homo sapien
gaatcttagtcgtatgagtaacaac

SEQ ID NO: 5933198 - DNA, 25 bp, Homo sapien
ctggatcgttacgcgattatttaat

SEQ ID NO: 5933199 - DNA, 25 bp, Homo sapien
ttcttataacgcgtatcgacttaga

SEQ ID NO: 5933200 - DNA, 25 bp, Homo sapien
ttttactatctcgcgacattacagt

SEQ ID NO: 5933201 - DNA, 25 bp, Homo sapien
aaataactagttaccgacgaagcat

SEQ ID NO: 5933202 - DNA, 25 bp, Homo sapien
ggatatgcgttgtacgtataatttg

SEQ ID NO: 5933203 - DNA, 25 bp, Homo sapien
ttttcacgccgacaatataaatacc

SEQ ID NO: 5933204 - DNA, 25 bp, Homo sapien
taaggtcgcgcattcaatatactta

SEQ ID NO: 5933205 - DNA, 25 bp, Homo sapien
taacgctacacgcggtatatattta

SEQ ID NO: 5933206 - DNA, 25 bp, Homo sapien
tgttaatacgatcgaacgttaagtg

SEQ ID NO: 5933207 - DNA, 25 bp, Homo sapien
agtacttacggactatgcgaattaa

SEQ ID NO: 5933208 - DNA, 25 bp, Homo sapien
tttaaagtcgcgcaagtttatatcg

SEQ ID NO: 5933209 - DNA, 25 bp, Homo sapien
tgtatttagtaccgcgtaagattct

SEQ ID NO: 5933210 - DNA, 25 bp, Homo sapien
gttgtatataacggtcgtcagtatt

SEQ ID NO: 5933211 - DNA, 25 bp, Homo sapien
aatacgtataacgtctcgcaatttc

SEQ ID NO: 5933212 - DNA, 25 bp, Homo sapien
aaatatcgacgctatacgtgattca

SEQ ID NO: 5933213 - DNA, 25 bp, Homo sapien
tatacgttcgacgtatcggaaattt

SEQ ID NO: 5933214 - DNA, 25 bp, Homo sapien
ttaaattcttacgcgtattgaccgt

SEQ ID NO: 5933215 - DNA, 25 bp, Homo sapien
acttttcgcgataacctattttctg

SEQ ID NO: 5933216 - DNA, 25 bp, Homo sapien
ccagctaatccgtgaataacataat

SEQ ID NO: 5933217 - DNA, 25 bp, Homo sapien
acattacgtactgatacgaccattt

SEQ ID NO: 5933218 - DNA, 25 bp, Homo sapien
tggaagcagtcgatatcgtatttaa

SEQ ID NO: 5933219 - DNA, 25 bp, Homo sapien
cttactacgaacgtcgttaattcat

SEQ ID NO: 5933220 - DNA, 25 bp, Homo sapien
tgtacagtcggtacgactaaataaa

SEQ ID NO: 5933221 - DNA, 25 bp, Homo sapien
gtaaactatcctacgcgtcaaattt

SEQ ID NO: 5933222 - DNA, 25 bp, Homo sapien
ttggattatagcgcggtattttttc

SEQ ID NO: 5933223 - DNA, 25 bp, Homo sapien
atagatatatacggctacgctgaat

SEQ ID NO: 5933224 - DNA, 25 bp, Homo sapien
ttacttttacgtacgtccgatttca

SEQ ID NO: 5933225 - DNA, 25 bp, Homo sapien
aaacattaatatcttcgtcgggcaa

SEQ ID NO: 5933226 - DNA, 25 bp, Homo sapien
gatatagtatatccgacgatagcat

SEQ ID NO: 5933227 - DNA, 25 bp, Homo sapien
caaattactattacgcgctaaatcc

SEQ ID NO: 5933228 - DNA, 25 bp, Homo sapien
gttccacgtacgctactaaatatta

SEQ ID NO: 5933229 - DNA, 25 bp, Homo sapien
tttactgataccgattcgctatcaa

SEQ ID NO: 5933230 - DNA, 25 bp, Homo sapien
atgtcagtacggatatcggtaaaat

SEQ ID NO: 5933231 - DNA, 25 bp, Homo sapien
agtactgataatacgtcggatctat

SEQ ID NO: 5933232 - DNA, 25 bp, Homo sapien
ggatcctacttattacgcgataata

SEQ ID NO: 5933233 - DNA, 25 bp, Homo sapien
tctgagttacgatacgtcctaataa

SEQ ID NO: 5933234 - DNA, 25 bp, Homo sapien
atgataataacgtcgcgagtgttat

SEQ ID NO: 5933235 - DNA, 25 bp, Homo sapien
aggctattatcgatctacgaacatt

SEQ ID NO: 5933236 - DNA, 25 bp, Homo sapien
gtaaaatagtcgagtaccgaatgaa

SEQ ID NO: 5933237 - DNA, 25 bp, Homo sapien
gtaattgtcgacatagcgtatctta

SEQ ID NO: 5933238 - DNA, 25 bp, Homo sapien
tggtgttgcgtcgaatagttatatt

SEQ ID NO: 5933239 - DNA, 25 bp, Homo sapien
caaagccggtagtatacgatttatt

SEQ ID NO: 5933240 - DNA, 25 bp, Homo sapien
taaatgtattacgcgtagcatagac

SEQ ID NO: 5933241 - DNA, 25 bp, Homo sapien
agttagtatcgtatgcgacctatta

SEQ ID NO: 5933242 - DNA, 25 bp, Homo sapien
tatagagcgtaatctagcgtattca

SEQ ID NO: 5933243 - DNA, 25 bp, Homo sapien
tataggaggcgacgtatatagttta

SEQ ID NO: 5933244 - DNA, 25 bp, Homo sapien
gcaattataatcgtacgcgaataga

SEQ ID NO: 5933245 - DNA, 25 bp, Homo sapien
aatcttcaatgacgcgtatatgcat

SEQ ID NO: 5933246 - DNA, 25 bp, Homo sapien
tttactctatacgtcacgcatatgt

SEQ ID NO: 5933247 - DNA, 25 bp, Homo sapien
atatacttcgcgttatacgtaacgt

SEQ ID NO: 5933248 - DNA, 25 bp, Homo sapien
agatctatacccgatcgttttcata

SEQ ID NO: 5933249 - DNA, 25 bp, Homo sapien
gttgaactgacgatcgtataattac

SEQ ID NO: 5933250 - DNA, 25 bp, Homo sapien
attaaaacttagtcgcgacaacttg

SEQ ID NO: 5933251 - DNA, 25 bp, Homo sapien
aaagccaatcgccttacgaatattt

SEQ ID NO: 5933252 - DNA, 25 bp, Homo sapien
aattttattactatacgcgagccgt

SEQ ID NO: 5933253 - DNA, 25 bp, Homo sapien
catagagcgttcggttatatttatg

SEQ ID NO: 5933254 - DNA, 25 bp, Homo sapien
gtcattttcgcgttgtaattgtaag

SEQ ID NO: 5933255 - DNA, 25 bp, Homo sapien
ttacagtatcgcgagtctacaatta

SEQ ID NO: 5933256 - DNA, 25 bp, Homo sapien
aataaggtattagcgccgataatgt

SEQ ID NO: 5933257 - DNA, 25 bp, Homo sapien
cagttaaacggtcgttaatttcatg

SEQ ID NO: 5933258 - DNA, 25 bp, Homo sapien
agttaatctactattcgcgttgaac

SEQ ID NO: 5933259 - DNA, 25 bp, Homo sapien
actcaacgataagtttgaattcgag

SEQ ID NO: 5933260 - DNA, 25 bp, Homo sapien
aactattatcggtccggtataatgt

SEQ ID NO: 5933261 - DNA, 25 bp, Homo sapien
caacaccgtcggtgtattataaaat

SEQ ID NO: 5933262 - DNA, 25 bp, Homo sapien
gataatttgtattcgcgagcctttt

SEQ ID NO: 5933263 - DNA, 25 bp, Homo sapien
tactaaaacgttcgaacgatcgata

SEQ ID NO: 5933264 - DNA, 25 bp, Homo sapien
gttattgcgcgtaatgtaaggtaaa

SEQ ID NO: 5933265 - DNA, 25 bp, Homo sapien
attatccggcgtattacatttggtt

SEQ ID NO: 5933266 - DNA, 25 bp, Homo sapien
ttatttcacgcgtagtcaaaacgta

SEQ ID NO: 5933267 - DNA, 25 bp, Homo sapien
tattgaacgttacggacgttgtaaa

SEQ ID NO: 5933268 - DNA, 25 bp, Homo sapien
tgatggcgaataacggttaaagaaa

SEQ ID NO: 5933269 - DNA, 25 bp, Homo sapien
tttgaatacttgtcgcgacagttta

SEQ ID NO: 5933270 - DNA, 25 bp, Homo sapien
aaaactgtataccgtcgaactatga

SEQ ID NO: 5933271 - DNA, 25 bp, Homo sapien
tacataagtacgctcgtaagttgtt

SEQ ID NO: 5933272 - DNA, 25 bp, Homo sapien
actgcttccgcggtaaatataaaat

SEQ ID NO: 5933273 - DNA, 25 bp, Homo sapien
cgcttgcgtatatacataactaaag

SEQ ID NO: 5933274 - DNA, 25 bp, Homo sapien
aacaacgcgagtacgttactattaa

SEQ ID NO: 5933275 - DNA, 25 bp, Homo sapien
gatacaagttattcgtaacgcctaa

SEQ ID NO: 5933276 - DNA, 25 bp, Homo sapien
taagatgacgcgtactatagtttag

SEQ ID NO: 5933277 - DNA, 25 bp, Homo sapien
ataaatcgcgcaatagtattaggga

SEQ ID NO: 5933278 - DNA, 25 bp, Homo sapien
tctaaagcgtttacgctatcaaaag

SEQ ID NO: 5933279 - DNA, 25 bp, Homo sapien
tccatacgtcgaatatacgaacatt

SEQ ID NO: 5933280 - DNA, 25 bp, Homo sapien
aatacaatacgcgtcattggcaaaa

SEQ ID NO: 5933281 - DNA, 25 bp, Homo sapien
ctaaagtagttactcgcgatatcat

SEQ ID NO: 5933282 - DNA, 25 bp, Homo sapien
ttcgaacgtccaatacgatttatgt

SEQ ID NO: 5933283 - DNA, 25 bp, Homo sapien
aaacagcgcgctagtataaaacaaa

SEQ ID NO: 5933284 - DNA, 25 bp, Homo sapien
gtacactaccgaacgtataattaac

SEQ ID NO: 5933285 - DNA, 25 bp, Homo sapien
gtattacgtgtatagtcgaagatct

SEQ ID NO: 5933286 - DNA, 25 bp, Homo sapien
aaattatatatcgtcgcctatgtgg

SEQ ID NO: 5933287 - DNA, 25 bp, Homo sapien
gatctaatcgtaattcgggtatgta

SEQ ID NO: 5933288 - DNA, 25 bp, Homo sapien
attctatagtcgacgtaacattgtg

SEQ ID NO: 5933289 - DNA, 25 bp, Homo sapien
aagatcttacgcggtaatctgttta

SEQ ID NO: 5933290 - DNA, 25 bp, Homo sapien
acaagcaattcaatagcgatctttg

SEQ ID NO: 5933291 - DNA, 25 bp, Homo sapien
acaattttagatcgcgacacaagat

SEQ ID NO: 5933292 - DNA, 25 bp, Homo sapien
tgaaaataatccgtcgtataccgtt

SEQ ID NO: 5933293 - DNA, 25 bp, Homo sapien
ttaatgcgcatacgactaatctttg

SEQ ID NO: 5933294 - DNA, 25 bp, Homo sapien
aaatagaatcgtaaacgcgatctct

SEQ ID NO: 5933295 - DNA, 25 bp, Homo sapien
atataattaaatcgcgcgatcctga

SEQ ID NO: 5933296 - DNA, 25 bp, Homo sapien
taattgtagactcgcgatactgtaa

SEQ ID NO: 5933297 - DNA, 25 bp, Homo sapien
agagctaatcgtcgattttaaacca

SEQ ID NO: 5933298 - DNA, 25 bp, Homo sapien
taatggtaattacgtcgaccttgaa

SEQ ID NO: 5933299 - DNA, 25 bp, Homo sapien
taacaagtcgcggatatacatatag

SEQ ID NO: 5933300 - DNA, 25 bp, Homo sapien
ttttgccaatgacgcgtattgtatt

SEQ ID NO: 5933301 - DNA, 25 bp, Homo sapien
gggagacgtacgtaaagatattaaa

SEQ ID NO: 5933302 - DNA, 25 bp, Homo sapien
cttacaattacaacgcgaaaatgac

SEQ ID NO: 5933303 - DNA, 25 bp, Homo sapien
tgcatactagattacgcgtgattta

SEQ ID NO: 5933304 - DNA, 25 bp, Homo sapien
agtcaacgcgtaatatacgaaaagt

SEQ ID NO: 5933305 - DNA, 25 bp, Homo sapien
gttaattatacgttcggtagtgtac

SEQ ID NO: 5933306 - DNA, 25 bp, Homo sapien
ttacgtcgtaacgcgttaataattc

SEQ ID NO: 5933307 - DNA, 25 bp, Homo sapien
cagaaaataggttatcgcgaaaagt

SEQ ID NO: 5933308 - DNA, 25 bp, Homo sapien
aacggtatacgacggattattttca

SEQ ID NO: 5933309 - DNA, 25 bp, Homo sapien
tataacatactatctcgcgatagac

SEQ ID NO: 5933310 - DNA, 25 bp, Homo sapien
aatactgacgaccgttatatacaac

SEQ ID NO: 5933311 - DNA, 25 bp, Homo sapien
aaccttgtctaaatgcgcgtaattt

SEQ ID NO: 5933312 - DNA, 25 bp, Homo sapien
ttacacatacgcgtacgaatataac

SEQ ID NO: 5933313 - DNA, 25 bp, Homo sapien
aattgttacgttcgacataagctgt

SEQ ID NO: 5933314 - DNA, 25 bp, Homo sapien
gtaattatcgttatagcggctactt

SEQ ID NO: 5933315 - DNA, 25 bp, Homo sapien
ttaagtccgaatatagcgtgtcaaa

SEQ ID NO: 5933316 - DNA, 25 bp, Homo sapien
tatcgatcgttcgaacgttttagta

SEQ ID NO: 5933317 - DNA, 25 bp, Homo sapien
ccaatttaacgctatcggattattc

SEQ ID NO: 5933318 - DNA, 25 bp, Homo sapien
ttccattacgcgttcgaatagatat

SEQ ID NO: 5933319 - DNA, 25 bp, Homo sapien
ccacataggcgacgatatataattt

SEQ ID NO: 5933320 - DNA, 25 bp, Homo sapien
aagaactacgaatcgaccttagtaa

SEQ ID NO: 5933321 - DNA, 25 bp, Homo sapien
tataaacgttaacgccagatcctat

SEQ ID NO: 5933322 - DNA, 25 bp, Homo sapien
taaactgtcgcgacaagtattcaaa

SEQ ID NO: 5933323 - DNA, 25 bp, Homo sapien
gtgtatgtattatcgcgaaagtcaa

SEQ ID NO: 5933324 - DNA, 25 bp, Homo sapien
tgaatacgctagattacgctctata

SEQ ID NO: 5933325 - DNA, 25 bp, Homo sapien
ttccgagattagcgaataacgtatt

SEQ ID NO: 5933326 - DNA, 25 bp, Homo sapien
acctgacgattattcgtatctgtat

SEQ ID NO: 5933327 - DNA, 25 bp, Homo sapien
ttacattacgttagcgaactagttg

SEQ ID NO: 5933328 - DNA, 25 bp, Homo sapien
aaattttatcgtaccttcggctcta

SEQ ID NO: 5933329 - DNA, 25 bp, Homo sapien
catttacgttatacggtcggttata

SEQ ID NO: 5933330 - DNA, 25 bp, Homo sapien
taatttagtcgcgtaactagagtca

SEQ ID NO: 5933331 - DNA, 25 bp, Homo sapien
atcggtcgcgacgattaataaaaaa

SEQ ID NO: 5933332 - DNA, 25 bp, Homo sapien
gttgttactcatacgactaagattc

SEQ ID NO: 5933333 - DNA, 25 bp, Homo sapien
ggtatttatattgtcggcgtgaaaa

SEQ ID NO: 5933334 - DNA, 25 bp, Homo sapien
gtaatgacgcgactagttaactatt

SEQ ID NO: 5933335 - DNA, 25 bp, Homo sapien
gatgttcgcgcattaacgtaaaaat

SEQ ID NO: 5933336 - DNA, 25 bp, Homo sapien
ctctgtagatataattgcgaacaag

SEQ ID NO: 5933337 - DNA, 25 bp, Homo sapien
ctatataacgcgttaacgttaactg

SEQ ID NO: 5933338 - DNA, 25 bp, Homo sapien
agggatccgattataaataatcgga

SEQ ID NO: 5933339 - DNA, 25 bp, Homo sapien
acttgatggacgatcgaacaaatat

SEQ ID NO: 5933340 - DNA, 25 bp, Homo sapien
ctttagttatgtatatacgcaagcg

SEQ ID NO: 5933341 - DNA, 25 bp, Homo sapien
ttatcaaacgattatccgcaactct

SEQ ID NO: 5933342 - DNA, 25 bp, Homo sapien
attttatatttaccgcggaagcagt

SEQ ID NO: 5933343 - DNA, 25 bp, Homo sapien
cctttctagtacgcgtaatttgtaa

SEQ ID NO: 5933344 - DNA, 25 bp, Homo sapien
tgaaatcggacgtacgtaaaagtaa

SEQ ID NO: 5933345 - DNA, 25 bp, Homo sapien
catgaaattaacgaccgtttaactg

SEQ ID NO: 5933346 - DNA, 25 bp, Homo sapien
acggtcaatacgcgtaagaatttaa

SEQ ID NO: 5933347 - DNA, 25 bp, Homo sapien
ctcagattactcggtttaatagcat

SEQ ID NO: 5933348 - DNA, 25 bp, Homo sapien
ttactaaattacgcgtcgatgtaac

SEQ ID NO: 5933349 - DNA, 25 bp, Homo sapien
cagaagcgatattgtaacaatcaag

SEQ ID NO: 5933350 - DNA, 25 bp, Homo sapien
aatagcttaacgcgtactagctaat

SEQ ID NO: 5933351 - DNA, 25 bp, Homo sapien
ttaaattatctcgcgtacgttaggt

SEQ ID NO: 5933352 - DNA, 25 bp, Homo sapien
taagatacgctatgtcgacaattac

SEQ ID NO: 5933353 - DNA, 25 bp, Homo sapien
atacgatagtaatgcgcgaataaca

SEQ ID NO: 5933354 - DNA, 25 bp, Homo sapien
catctttactgttcgtcgctataat

SEQ ID NO: 5933355 - DNA, 25 bp, Homo sapien
agatatacgtcggattagtagcttt

SEQ ID NO: 5933356 - DNA, 25 bp, Homo sapien
atatcattatgtccgatcgacttgt

SEQ ID NO: 5933357 - DNA, 25 bp, Homo sapien
agaatcttacgcggtactaaataca

SEQ ID NO: 5933358 - DNA, 25 bp, Homo sapien
gattatccctaataacgcggttata

SEQ ID NO: 5933359 - DNA, 25 bp, Homo sapien
caatatcggtaagtcgtaaatacca

SEQ ID NO: 5933360 - DNA, 25 bp, Homo sapien
attgtacattatccgcgtcactata

SEQ ID NO: 5933361 - DNA, 25 bp, Homo sapien
ttaaatgatacgtcgatcgtactca

SEQ ID NO: 5933362 - DNA, 25 bp, Homo sapien
ttgtagattacgaccgatataacct

SEQ ID NO: 5933363 - DNA, 25 bp, Homo sapien
atttttcgccagtatacgatgtgta

SEQ ID NO: 5933364 - DNA, 25 bp, Homo sapien
attgacttagtcgtccgaattagta

SEQ ID NO: 5933365 - DNA, 25 bp, Homo sapien
atgctatcgtcggatatactatatc

SEQ ID NO: 5933366 - DNA, 25 bp, Homo sapien
gatagcatactccgcgattaaaaat

SEQ ID NO: 5933367 - DNA, 25 bp, Homo sapien
tactttacgcggtagtatagatctt

SEQ ID NO: 5933368 - DNA, 25 bp, Homo sapien
atcagatcgtataacgctgtattct

SEQ ID NO: 5933369 - DNA, 25 bp, Homo sapien
taaacgatccgagacgtattcttat

SEQ ID NO: 5933370 - DNA, 25 bp, Homo sapien
gagaatcgcgtaactaagctataat

SEQ ID NO: 5933371 - DNA, 25 bp, Homo sapien
agtgatctacacgatacgattaagt

SEQ ID NO: 5933372 - DNA, 25 bp, Homo sapien
atacttactagcgtaaacgctaagt

SEQ ID NO: 5933373 - DNA, 25 bp, Homo sapien
taaaacgataatacgccgtagtaac

SEQ ID NO: 5933374 - DNA, 25 bp, Homo sapien
agaaactaacggatatcgactgtaa

SEQ ID NO: 5933375 - DNA, 25 bp, Homo sapien
tagctagtatcgcaatacgctatat

SEQ ID NO: 5933376 - DNA, 25 bp, Homo sapien
ttttgggttagcgcgattaatgtat

SEQ ID NO: 5933377 - DNA, 25 bp, Homo sapien
tattaagcgttcggtcttaaatgga

SEQ ID NO: 5933378 - DNA, 25 bp, Homo sapien
taaggacgtcgaattactagacata

SEQ ID NO: 5933379 - DNA, 25 bp, Homo sapien
taaacagattaccgcgtaagatctt

SEQ ID NO: 5933380 - DNA, 25 bp, Homo sapien
tctattcgcgtacgattataattgc

SEQ ID NO: 5933381 - DNA, 25 bp, Homo sapien
aattgtacgctcgatcgtaatacta

SEQ ID NO: 5933382 - DNA, 25 bp, Homo sapien
ctcttatcattgcgcgataaaaagt

SEQ ID NO: 5933383 - DNA, 25 bp, Homo sapien
cagatagaatatacgcgtctatcta

SEQ ID NO: 5933384 - DNA, 25 bp, Homo sapien
ctttctcgctcgaacatatgtatat

SEQ ID NO: 5933385 - DNA, 25 bp, Homo sapien
atttatgttcgaactacggattcct

SEQ ID NO: 5933386 - DNA, 25 bp, Homo sapien
gttgatacttacgacgataatcaca

SEQ ID NO: 5933387 - DNA, 25 bp, Homo sapien
tctaattattcgcgcgaccatttat

SEQ ID NO: 5933388 - DNA, 25 bp, Homo sapien
attattcgtgcgttaatctttcacg

SEQ ID NO: 5933389 - DNA, 25 bp, Homo sapien
aatttctaatacgcgagctactctt

SEQ ID NO: 5933390 - DNA, 25 bp, Homo sapien
taataggtcgcatacgatactaact

SEQ ID NO: 5933391 - DNA, 25 bp, Homo sapien
tgtattcccgtattgacgaatttct

SEQ ID NO: 5933392 - DNA, 25 bp, Homo sapien
atgttgatatcgcgtcaaggaaata

SEQ ID NO: 5933393 - DNA, 25 bp, Homo sapien
cttatttatcgcgctgtattatggt

SEQ ID NO: 5933394 - DNA, 25 bp, Homo sapien
attgtgtaatgtttcgactaagtgg

SEQ ID NO: 5933395 - DNA, 25 bp, Homo sapien
atatgttacgctactaacgagtcat

SEQ ID NO: 5933396 - DNA, 25 bp, Homo sapien
cattcattcgcgttatacgtagaat

SEQ ID NO: 5933397 - DNA, 25 bp, Homo sapien
attaaataatcgcgtaacgatccag

SEQ ID NO: 5933398 - DNA, 25 bp, Homo sapien
cacaatgttacgtcgactatagaat

SEQ ID NO: 5933399 - DNA, 25 bp, Homo sapien
ctatttgcgcgtatactatccttat

SEQ ID NO: 5933400 - DNA, 25 bp, Homo sapien
gaaatatatcgcgcaatgattagtg

SEQ ID NO: 5933401 - DNA, 25 bp, Homo sapien
tagggtcggtcatacgtatattttt

SEQ ID NO: 5933402 - DNA, 25 bp, Homo sapien
ctgatttattacgcctcgttacatt

SEQ ID NO: 5933403 - DNA, 25 bp, Homo sapien
tcaaaccggactatacgataattag

SEQ ID NO: 5933404 - DNA, 25 bp, Homo sapien
agatgaatcgaacgtcgtaacataa

SEQ ID NO: 5933405 - DNA, 25 bp, Homo sapien
aagtgtcatcgtaatacgatatcag

SEQ ID NO: 5933406 - DNA, 25 bp, Homo sapien
tttaacgtattacggcgtagattag

SEQ ID NO: 5933407 - DNA, 25 bp, Homo sapien
gttacgatgtatcgacgtattctaa

SEQ ID NO: 5933408 - DNA, 25 bp, Homo sapien
tcaaaattacgcgtaccaaatgtac

SEQ ID NO: 5933409 - DNA, 25 bp, Homo sapien
tgaaattcggccgtaatacagaaaa

SEQ ID NO: 5933410 - DNA, 25 bp, Homo sapien
ttattccgtcggtgtattaacttca

SEQ ID NO: 5933411 - DNA, 25 bp, Homo sapien
agtcaattatcattgagcgtcaatg

SEQ ID NO: 5933412 - DNA, 25 bp, Homo sapien
taaatgtgacgtatcgtaccattag

SEQ ID NO: 5933413 - DNA, 25 bp, Homo sapien
attttataatacaccgacggtgttg

SEQ ID NO: 5933414 - DNA, 25 bp, Homo sapien
aatataactattcgacgcaacacca

SEQ ID NO: 5933415 - DNA, 25 bp, Homo sapien
ccaacattaaggagtcgataatgaa

SEQ ID NO: 5933416 - DNA, 25 bp, Homo sapien
taagcatctatacacgagtacaaga

SEQ ID NO: 5933417 - DNA, 25 bp, Homo sapien
ataactaacgacctacgatgtagat

SEQ ID NO: 5933418 - DNA, 25 bp, Homo sapien
atgatgcgtattacgacctattttg

SEQ ID NO: 5933419 - DNA, 25 bp, Homo sapien
ttgtttaaccgacgtagtagtgatt

SEQ ID NO: 5933420 - DNA, 25 bp, Homo sapien
aaatttccgatacgtcgaacgtata

SEQ ID NO: 5933421 - DNA, 25 bp, Homo sapien
aagtaacgcaaatcgtacttgtact

SEQ ID NO: 5933422 - DNA, 25 bp, Homo sapien
aatgttcgtagatcgataatagcct

SEQ ID NO: 5933423 - DNA, 25 bp, Homo sapien
cataaagcgtatacgatacttcgtt

SEQ ID NO: 5933424 - DNA, 25 bp, Homo sapien
agatcttcgactatacacgtaatac

SEQ ID NO: 5933425 - DNA, 25 bp, Homo sapien
ttattaggacgtatcgtaactcaga

SEQ ID NO: 5933426 - DNA, 25 bp, Homo sapien
atgtgtatagctcgcgtacttatta

SEQ ID NO: 5933427 - DNA, 25 bp, Homo sapien
ttattcgttacgctacgtacagtta

SEQ ID NO: 5933428 - DNA, 25 bp, Homo sapien
atggtttaatgtttcggcgaataca

SEQ ID NO: 5933429 - DNA, 25 bp, Homo sapien
tacttgtaattccggcgtaataaga

SEQ ID NO: 5933430 - DNA, 25 bp, Homo sapien
tttctacgacgtatactagaatgga

SEQ ID NO: 5933431 - DNA, 25 bp, Homo sapien
aacaacttacgagcgtacttatgta

SEQ ID NO: 5933432 - DNA, 25 bp, Homo sapien
atgcttcgtcggtaactagttattt

SEQ ID NO: 5933433 - DNA, 25 bp, Homo sapien
tttagtgcgcgatacttatccatta

SEQ ID NO: 5933434 - DNA, 25 bp, Homo sapien
tcatagttcgacggtatacagtttt

SEQ ID NO: 5933435 - DNA, 25 bp, Homo sapien
atattatagccgtacggtaaccaat

SEQ ID NO: 5933436 - DNA, 25 bp, Homo sapien
tcgtaccgtatctagacgtataaat

SEQ ID NO: 5933437 - DNA, 25 bp, Homo sapien
tgagtttagcgtattcgacctttaa

SEQ ID NO: 5933438 - DNA, 25 bp, Homo sapien
atttcgtaatgcgtcggacataaaa

SEQ ID NO: 5933439 - DNA, 25 bp, Homo sapien
tttaacacgtctagatacgaacgtt

SEQ ID NO: 5933440 - DNA, 25 bp, Homo sapien
aaatttgacgcgtaggatagtttac

SEQ ID NO: 5933441 - DNA, 25 bp, Homo sapien
tctatacgcgattagactatatgtc

SEQ ID NO: 5933442 - DNA, 25 bp, Homo sapien
caataaatggtataacgcgttcact

SEQ ID NO: 5933443 - DNA, 25 bp, Homo sapien
tattgacgcgtgataactattccaa

SEQ ID NO: 5933444 - DNA, 25 bp, Homo sapien
tatcctactaattgacgcgaaagtt

SEQ ID NO: 5933445 - DNA, 25 bp, Homo sapien
acaaatcgagtatagtcgctcatat

SEQ ID NO: 5933446 - DNA, 25 bp, Homo sapien
tacaaaaacgaccgaacgtaattca

SEQ ID NO: 5933447 - DNA, 25 bp, Homo sapien
cttatttattgcgaacgtcatacct

SEQ ID NO: 5933448 - DNA, 25 bp, Homo sapien
atgtacttagttactcgcgatattc

SEQ ID NO: 5933449 - DNA, 25 bp, Homo sapien
aaaagattgacgccgctatctttat

SEQ ID NO: 5933450 - DNA, 25 bp, Homo sapien
acaaagctacatcgcgtaaaatgtt

SEQ ID NO: 5933451 - DNA, 25 bp, Homo sapien
tacatttagctattcgcgcaatagt

SEQ ID NO: 5933452 - DNA, 25 bp, Homo sapien
tcgtgatacgacgtatcgttaaata

SEQ ID NO: 5933453 - DNA, 25 bp, Homo sapien
ttatgcattatacttcgcgaaactg

SEQ ID NO: 5933454 - DNA, 25 bp, Homo sapien
attatgttattcacggattagctgg

SEQ ID NO: 5933455 - DNA, 25 bp, Homo sapien
tgttctatagtcgactcgtctaaat

SEQ ID NO: 5933456 - DNA, 25 bp, Homo sapien
aggctgtaatgttatcgtaacagat

SEQ ID NO: 5933457 - DNA, 25 bp, Homo sapien
aaacataatctatacggcgagtgtt

SEQ ID NO: 5933458 - DNA, 25 bp, Homo sapien
gtacaagcgattcgttaaggtatat

SEQ ID NO: 5933459 - DNA, 25 bp, Homo sapien
tggaatcgacgaataacgttacttt

SEQ ID NO: 5933460 - DNA, 25 bp, Homo sapien
aataagtactataacaaacgctggg

SEQ ID NO: 5933461 - DNA, 25 bp, Homo sapien
tcaaattgacgtaacggtacatcta

SEQ ID NO: 5933462 - DNA, 25 bp, Homo sapien
taaatgcttgctcgtacgacttata

SEQ ID NO: 5933463 - DNA, 25 bp, Homo sapien
cataaatataaccgaacgctctatg

SEQ ID NO: 5933464 - DNA, 25 bp, Homo sapien
tctttatacgaagtaacgcgtacaa

SEQ ID NO: 5933465 - DNA, 25 bp, Homo sapien
ccataacacgaccgattattatact

SEQ ID NO: 5933466 - DNA, 25 bp, Homo sapien
aatacacgctcgacgataataaaag

SEQ ID NO: 5933467 - DNA, 25 bp, Homo sapien
acattataccggaccgataatagtt

SEQ ID NO: 5933468 - DNA, 25 bp, Homo sapien
attccttgataaaagattcgcatcg

SEQ ID NO: 5933469 - DNA, 25 bp, Homo sapien
ttctaaatattgcaccgcgaatgtt

SEQ ID NO: 5933470 - DNA, 25 bp, Homo sapien
cattttccgattagcgactttaaca

SEQ ID NO: 5933471 - DNA, 25 bp, Homo sapien
atttaaacgactagtcgtagagaac

SEQ ID NO: 5933472 - DNA, 25 bp, Homo sapien
ccagctacgacaaatttaactatct

SEQ ID NO: 5933473 - DNA, 25 bp, Homo sapien
ttagatggacgtaatacgcttcttt

SEQ ID NO: 5933474 - DNA, 25 bp, Homo sapien
gtcaagcggattaataccgatatat

SEQ ID NO: 5933475 - DNA, 25 bp, Homo sapien
ttttgtatgtcgcgaactcacatat

SEQ ID NO: 5933476 - DNA, 25 bp, Homo sapien
tttatcgacatacgcaacgtaacat

SEQ ID NO: 5933477 - DNA, 25 bp, Homo sapien
atttctcgcgaccgaatatgataaa

SEQ ID NO: 5933478 - DNA, 25 bp, Homo sapien
gaacactctaatagcgtcgtaatta

SEQ ID NO: 5933479 - DNA, 25 bp, Homo sapien
tatttataacgcgatcgccttagaa

SEQ ID NO: 5933480 - DNA, 25 bp, Homo sapien
ttcttgataagacttcgcgttactt

SEQ ID NO: 5933481 - DNA, 25 bp, Homo sapien
taattacgtagtgattacgatgcct

SEQ ID NO: 5933482 - DNA, 25 bp, Homo sapien
taaatgattatatcggacgatcgct

SEQ ID NO: 5933483 - DNA, 25 bp, Homo sapien
gtgaagtaacgcacgaatcattttt

SEQ ID NO: 5933484 - DNA, 25 bp, Homo sapien
taacattaacgatccgatactggtt

SEQ ID NO: 5933485 - DNA, 25 bp, Homo sapien
ttcattcggtactcgactattttac

SEQ ID NO: 5933486 - DNA, 25 bp, Homo sapien
ttaagacgtattgcgataccattgt

SEQ ID NO: 5933487 - DNA, 25 bp, Homo sapien
gaatcagacgtcgcaatataaagta

SEQ ID NO: 5933488 - DNA, 25 bp, Homo sapien
ttacctacgatacgacgtagatatt

SEQ ID NO: 5933489 - DNA, 25 bp, Homo sapien
tttataatatcgcgtagggcaacta

SEQ ID NO: 5933490 - DNA, 25 bp, Homo sapien
aagagtccgttacgatagtattcta

SEQ ID NO: 5933491 - DNA, 25 bp, Homo sapien
tccctaatactattgcgcgatttat

SEQ ID NO: 5933492 - DNA, 25 bp, Homo sapien
ctattacttatgacggtcgtaagta

SEQ ID NO: 5933493 - DNA, 25 bp, Homo sapien
atcttagacaatacgcgaaatcttc

SEQ ID NO: 5933494 - DNA, 25 bp, Homo sapien
ttgaacaatttcgaattggtaggca

SEQ ID NO: 5933495 - DNA, 25 bp, Homo sapien
acttcattccgcgatatagacaaaa

SEQ ID NO: 5933496 - DNA, 25 bp, Homo sapien
tctattcttcgagactaatttgcgt

SEQ ID NO: 5933497 - DNA, 25 bp, Homo sapien
ttcatccgcgtactaattggtaaaa

SEQ ID NO: 5933498 - DNA, 25 bp, Homo sapien
tcaatgcagtatagcgcgattatat

SEQ ID NO: 5933499 - DNA, 25 bp, Homo sapien
tgattgctcgatattacgcagatat

SEQ ID NO: 5933500 - DNA, 25 bp, Homo sapien
aaaagttagtataagcgaactcgag

SEQ ID NO: 5933501 - DNA, 25 bp, Homo sapien
ggatttagcgcgtaatagtaatttg

SEQ ID NO: 5933502 - DNA, 25 bp, Homo sapien
aacgcgtacttattacgcgtataat

SEQ ID NO: 5933503 - DNA, 25 bp, Homo sapien
cttacttcgaaccgtatagcaaaaa

SEQ ID NO: 5933504 - DNA, 25 bp, Homo sapien
gtctatgctacgcgtaatacattta

SEQ ID NO: 5933505 - DNA, 25 bp, Homo sapien
gaatgtatcgtcgcttatgttacta

SEQ ID NO: 5933506 - DNA, 25 bp, Homo sapien
aatatgtgttcgaaaggcggatatt

SEQ ID NO: 5933507 - DNA, 25 bp, Homo sapien
cacttaacgttcgatcgtattaaca

SEQ ID NO: 5933508 - DNA, 25 bp, Homo sapien
gaaaatatacgccgacaacaagtat

SEQ ID NO: 5933509 - DNA, 25 bp, Homo sapien
taaatgtacctcgacgtatattcct

SEQ ID NO: 5933510 - DNA, 25 bp, Homo sapien
ttattagcgactcgatatcagagta

SEQ ID NO: 5933511 - DNA, 25 bp, Homo sapien
gctgatcaagcgtaatagatttaag

SEQ ID NO: 5933512 - DNA, 25 bp, Homo sapien
aatgactatcgttcgggtattaaca

SEQ ID NO: 5933513 - DNA, 25 bp, Homo sapien
aaacaagcgtacgaactagaactat

SEQ ID NO: 5933514 - DNA, 25 bp, Homo sapien
ttaaatacgatatcgactgcttcca

SEQ ID NO: 5933515 - DNA, 25 bp, Homo sapien
tatgaaaacgatcgggtatagatct

SEQ ID NO: 5933516 - DNA, 25 bp, Homo sapien
taggtttgctacgcgatagttatat

SEQ ID NO: 5933517 - DNA, 25 bp, Homo sapien
aatttttcgacgtacactatggatg

SEQ ID NO: 5933518 - DNA, 25 bp, Homo sapien
gatcttacgatacggcgtatatttt

SEQ ID NO: 5933519 - DNA, 25 bp, Homo sapien
ccagtttaatcgcgatatctaaatg

SEQ ID NO: 5933520 - DNA, 25 bp, Homo sapien
gtaattatacgatcgtcagttcaac

SEQ ID NO: 5933521 - DNA, 25 bp, Homo sapien
ctttgaaacgtacgctatcgtaaat

SEQ ID NO: 5933522 - DNA, 25 bp, Homo sapien
taatatttagtagcgtacgtggaac

SEQ ID NO: 5933523 - DNA, 25 bp, Homo sapien
tttagtctatacgtaacggtcttca

SEQ ID NO: 5933524 - DNA, 25 bp, Homo sapien
ccctatcttattagtcgcgtatttt

SEQ ID NO: 5933525 - DNA, 25 bp, Homo sapien
aaaatttgtcgatacgacgtatgag

SEQ ID NO: 5933526 - DNA, 25 bp, Homo sapien
caaattatacgtacaacgcatatcc

SEQ ID NO: 5933527 - DNA, 25 bp, Homo sapien
cattattacgtcgcataactgtact

SEQ ID NO: 5933528 - DNA, 25 bp, Homo sapien
taaaacgtacgcgcaatagcaatta

SEQ ID NO: 5933529 - DNA, 25 bp, Homo sapien
ttatcattccgtataggcgtctata

SEQ ID NO: 5933530 - DNA, 25 bp, Homo sapien
tactgcggtttaaataagtatcgac

SEQ ID NO: 5933531 - DNA, 25 bp, Homo sapien
atctgtttacgacgcgtattataca

SEQ ID NO: 5933532 - DNA, 25 bp, Homo sapien
tctataaatccgtagtacgattcgt

SEQ ID NO: 5933533 - DNA, 25 bp, Homo sapien
ataatgtatggacgtacgaagttgt

SEQ ID NO: 5933534 - DNA, 25 bp, Homo sapien
atcttttagtaacgcgtaagttagc

SEQ ID NO: 5933535 - DNA, 25 bp, Homo sapien
agagtatagcgacacgttaataatg

SEQ ID NO: 5933536 - DNA, 25 bp, Homo sapien
taagtatattgaatgcgcgacctta

SEQ ID NO: 5933537 - DNA, 25 bp, Homo sapien
attggagcgttattgtacggaatta

SEQ ID NO: 5933538 - DNA, 25 bp, Homo sapien
tgagcttataaatcgattacaggac

SEQ ID NO: 5933539 - DNA, 25 bp, Homo sapien
atattgcggtattcgacgtatacaa

SEQ ID NO: 5933540 - DNA, 25 bp, Homo sapien
tgtaattaacgcgctatactatagg

SEQ ID NO: 5933541 - DNA, 25 bp, Homo sapien
attggccaacgcgtagtatataatt

SEQ ID NO: 5933542 - DNA, 25 bp, Homo sapien
agactaagtatgttacgcggaatta

SEQ ID NO: 5933543 - DNA, 25 bp, Homo sapien
tgaatcacgtatagcgtcgatattt

SEQ ID NO: 5933544 - DNA, 25 bp, Homo sapien
ataagaccgatatacttcggtagat

SEQ ID NO: 5933545 - DNA, 25 bp, Homo sapien
tactataacgttatcgcgttctgtt

SEQ ID NO: 5933546 - DNA, 25 bp, Homo sapien
actgtaatgtcgcgagatagtaaaa

SEQ ID NO: 5933547 - DNA, 25 bp, Homo sapien
acattatcggcgctaataccttatt

SEQ ID NO: 5933548 - DNA, 25 bp, Homo sapien
aatatatatccgtcggctactttct

SEQ ID NO: 5933549 - DNA, 25 bp, Homo sapien
acaagatatcgcgatagacagatta

SEQ ID NO: 5933550 - DNA, 25 bp, Homo sapien
atgacacgtcggattagtaaataac

SEQ ID NO: 5933551 - DNA, 25 bp, Homo sapien
tacaaagaattacgtccgtcttcta

SEQ ID NO: 5933552 - DNA, 25 bp, Homo sapien
tgtttatagcgcgcattatgtgaaa

SEQ ID NO: 5933553 - DNA, 25 bp, Homo sapien
ggatataccgtatacgatgcataat

SEQ ID NO: 5933554 - DNA, 25 bp, Homo sapien
taactatgtcggcgtaataagcaat

SEQ ID NO: 5933555 - DNA, 25 bp, Homo sapien
ttaattcgcatagtccgtaagtact

SEQ ID NO: 5933556 - DNA, 25 bp, Homo sapien
cgtattacgtttacgcgatattaag

SEQ ID NO: 5933557 - DNA, 25 bp, Homo sapien
atttgtatacgcggattagttcaga

SEQ ID NO: 5933558 - DNA, 25 bp, Homo sapien
acctatgtaataagtcgcgatagta

SEQ ID NO: 5933559 - DNA, 25 bp, Homo sapien
taagcttatcggtcgtaatactcta

SEQ ID NO: 5933560 - DNA, 25 bp, Homo sapien
tacgaatgtttttcgtcgtagtatg

SEQ ID NO: 5933561 - DNA, 25 bp, Homo sapien
aattcttacgaccgtatacacagta

SEQ ID NO: 5933562 - DNA, 25 bp, Homo sapien
atgataacttcgcgaagtacaactt

SEQ ID NO: 5933563 - DNA, 25 bp, Homo sapien
tagttatgtacgatcgtccatattg

SEQ ID NO: 5933564 - DNA, 25 bp, Homo sapien
ttaactttcgacggtactatgacaa

SEQ ID NO: 5933565 - DNA, 25 bp, Homo sapien
caattctcgcgtcaatgtagtataa

SEQ ID NO: 5933566 - DNA, 25 bp, Homo sapien
gtgttttctcgcgattacataatca

SEQ ID NO: 5933567 - DNA, 25 bp, Homo sapien
atcgcaaactatctcgcgatataaa

SEQ ID NO: 5933568 - DNA, 25 bp, Homo sapien
ttatctcgatctacgtaccaatact

SEQ ID NO: 5933569 - DNA, 25 bp, Homo sapien
atagaactaacgcgtagtagtatag

SEQ ID NO: 5933570 - DNA, 25 bp, Homo sapien
aatttctcgtatagacgctcttaac

SEQ ID NO: 5933571 - DNA, 25 bp, Homo sapien
acgttatacgcgtatcgcattataa

SEQ ID NO: 5933572 - DNA, 25 bp, Homo sapien
ttattgtaccgcgattaaccataag

SEQ ID NO: 5933573 - DNA, 25 bp, Homo sapien
acaaaaatacagtatcgcgtaagga

SEQ ID NO: 5933574 - DNA, 25 bp, Homo sapien
atacgatacgcataagtcgctaata

SEQ ID NO: 5933575 - DNA, 25 bp, Homo sapien
agaacgtatacgattcgacatctat

SEQ ID NO: 5933576 - DNA, 25 bp, Homo sapien
agatcaagattcgatacattatcgg

SEQ ID NO: 5933577 - DNA, 25 bp, Homo sapien
tacatacccgaattacgattagatc

SEQ ID NO: 5933578 - DNA, 25 bp, Homo sapien
tatcatcgcgataagtatgaactga

SEQ ID NO: 5933579 - DNA, 25 bp, Homo sapien
atttatttgcgtacgctacatttgc

SEQ ID NO: 5933580 - DNA, 25 bp, Homo sapien
ttatcatagtatcgaacgctaacac

SEQ ID NO: 5933581 - DNA, 25 bp, Homo sapien
gatatcaatcgtgcgtaactaatga

SEQ ID NO: 5933582 - DNA, 25 bp, Homo sapien
caaagttttaatccgcgagtgatat

SEQ ID NO: 5933583 - DNA, 25 bp, Homo sapien
gaaaaaataccgcgctataatccaa

SEQ ID NO: 5933584 - DNA, 25 bp, Homo sapien
aatgttcgtatattcgacgtatgga

SEQ ID NO: 5933585 - DNA, 25 bp, Homo sapien
aaaaggctcgcgaatacaaattatc

SEQ ID NO: 5933586 - DNA, 25 bp, Homo sapien
atgatacgcgacgtatttatgagat

SEQ ID NO: 5933587 - DNA, 25 bp, Homo sapien
atcttttataacggtcgcatatgga

SEQ ID NO: 5933588 - DNA, 25 bp, Homo sapien
atgtacgtacgtataagcgattcaa

SEQ ID NO: 5933589 - DNA, 25 bp, Homo sapien
attttaccgatatccgtactgacat

SEQ ID NO: 5933590 - DNA, 25 bp, Homo sapien
ataataatatagtcgcgtcaatcgc

SEQ ID NO: 5933591 - DNA, 25 bp, Homo sapien
acatatgcgtgacgtatagagtaaa

SEQ ID NO: 5933592 - DNA, 25 bp, Homo sapien
cacatagacttcgaatattaccgaa

SEQ ID NO: 5933593 - DNA, 25 bp, Homo sapien
atttactcgcgactaagttcataag

SEQ ID NO: 5933594 - DNA, 25 bp, Homo sapien
actatataaattaacagcgctcgag

SEQ ID NO: 5933595 - DNA, 25 bp, Homo sapien
tttgaagacgtaatacgcagtagta

SEQ ID NO: 5933596 - DNA, 25 bp, Homo sapien
cttctttcgcgagtatacttgataa

SEQ ID NO: 5933597 - DNA, 25 bp, Homo sapien
tatgattcgcgtaagctaaaggtaa

SEQ ID NO: 5933598 - DNA, 25 bp, Homo sapien
aatggcgatgaaggatattaagagt

SEQ ID NO: 5933599 - DNA, 25 bp, Homo sapien
ctaatgaggtcgtatcgtttaaaac

SEQ ID NO: 5933600 - DNA, 25 bp, Homo sapien
tttatttagtcgtaccgactgtaca

SEQ ID NO: 5933601 - DNA, 25 bp, Homo sapien
ttactacgacgtcttacgagattaa

SEQ ID NO: 5933602 - DNA, 25 bp, Homo sapien
ttcaaatataatgcgctgttagcag

SEQ ID NO: 5933603 - DNA, 25 bp, Homo sapien
gctatctagtacgtcgatattgtta

SEQ ID NO: 5933604 - DNA, 25 bp, Homo sapien
gagtaatatgtccgacgtaataaac

SEQ ID NO: 5933605 - DNA, 25 bp, Homo sapien
tcttcatcgcgttaatacaagagat

SEQ ID NO: 5933606 - DNA, 25 bp, Homo sapien
attgctattacgcgctctatttaca

SEQ ID NO: 5933607 - DNA, 25 bp, Homo sapien
aactattatcccgtcgcgatattaa

SEQ ID NO: 5933608 - DNA, 25 bp, Homo sapien
actatgatatagtcgcgaatcagaa

SEQ ID NO: 5933609 - DNA, 25 bp, Homo sapien
atagatccgacgtattatcagtact

SEQ ID NO: 5933610 - DNA, 25 bp, Homo sapien
tcaaaggtacgaacggtatcaaatt

SEQ ID NO: 5933611 - DNA, 25 bp, Homo sapien
aaatagcgaaacgtacgctattgat

SEQ ID NO: 5933612 - DNA, 25 bp, Homo sapien
ttgcccgacgaagatattaatgttt

SEQ ID NO: 5933613 - DNA, 25 bp, Homo sapien
aataactatcgacgttacggttgaa

SEQ ID NO: 5933614 - DNA, 25 bp, Homo sapien
tgataaggcgttatacgaaaatcgt

SEQ ID NO: 5933615 - DNA, 25 bp, Homo sapien
atactacgcgaacgatgtatgaatt

SEQ ID NO: 5933616 - DNA, 25 bp, Homo sapien
ttattgcgcggtttagtacttctat

SEQ ID NO: 5933617 - DNA, 25 bp, Homo sapien
aatatacgctacgtactacgaagat

SEQ ID NO: 5933618 - DNA, 25 bp, Homo sapien
atagtgtcgcatacgatggattatt

SEQ ID NO: 5933619 - DNA, 25 bp, Homo sapien
atatatcgtaccgactgatatgagt

SEQ ID NO: 5933620 - DNA, 25 bp, Homo sapien
atacagggctagtatatcgtttaac

SEQ ID NO: 5933621 - DNA, 25 bp, Homo sapien
caagttgtcgcgactaagttttaat

SEQ ID NO: 5933622 - DNA, 25 bp, Homo sapien
aatacatcgcgtatcgttaatacac

SEQ ID NO: 5933623 - DNA, 25 bp, Homo sapien
ctcgaattcaaacttatcgttgagt

SEQ ID NO: 5933624 - DNA, 25 bp, Homo sapien
ctattgcgacgcgtattatgttttt

SEQ ID NO: 5933625 - DNA, 25 bp, Homo sapien
aaagataatcgtcgttaggctgata

SEQ ID NO: 5933626 - DNA, 25 bp, Homo sapien
gtttgctcgcgactaattaagttaa

SEQ ID NO: 5933627 - DNA, 25 bp, Homo sapien
agttcatacgttatcgataagcaga

SEQ ID NO: 5933628 - DNA, 25 bp, Homo sapien
tttctaaacgccgatactatgaaga

SEQ ID NO: 5933629 - DNA, 25 bp, Homo sapien
atatatcgcacgacgtatagagtaa

SEQ ID NO: 5933630 - DNA, 25 bp, Homo sapien
tgaacctacgactaattcgattgtt

SEQ ID NO: 5933631 - DNA, 25 bp, Homo sapien
ttaatgagtcgcgtaatacgtaaag

SEQ ID NO: 5933632 - DNA, 25 bp, Homo sapien
gaaattcgcgactagtatatatgac

SEQ ID NO: 5933633 - DNA, 25 bp, Homo sapien
ttgaataccgatcgtactatctgtt

SEQ ID NO: 5933634 - DNA, 25 bp, Homo sapien
ttctaggcgtccggattaataattt

SEQ ID NO: 5933635 - DNA, 25 bp, Homo sapien
aaatattcgtaaggcgattggcttt

SEQ ID NO: 5933636 - DNA, 25 bp, Homo sapien
tgttattaatagcgcggtctaacat

SEQ ID NO: 5933637 - DNA, 25 bp, Homo sapien
aacattgaattacgctcggattgtt

SEQ ID NO: 5933638 - DNA, 25 bp, Homo sapien
ggaattcgaacataagttgatctac

SEQ ID NO: 5933639 - DNA, 25 bp, Homo sapien
acacgacgcaatgatataatctgtt

SEQ ID NO: 5933640 - DNA, 25 bp, Homo sapien
gtataatcgatataccggcttgaaa

SEQ ID NO: 5933641 - DNA, 25 bp, Homo sapien
ctataacttcgcgtaagacatttga

SEQ ID NO: 5933642 - DNA, 25 bp, Homo sapien
catccattagatcgtagcgttttta

SEQ ID NO: 5933643 - DNA, 25 bp, Homo sapien
ttgatagcgaatcggtatcagtaaa

SEQ ID NO: 5933644 - DNA, 25 bp, Homo sapien
catatgattatccgcgtaacttcaa

SEQ ID NO: 5933645 - DNA, 25 bp, Homo sapien
atcttgtgtcgcgatctaaaattgt

SEQ ID NO: 5933646 - DNA, 25 bp, Homo sapien
agaattaacgatacgacctccttta

SEQ ID NO: 5933647 - DNA, 25 bp, Homo sapien
ctgcattttcaattcgcgatatatg

SEQ ID NO: 5933648 - DNA, 25 bp, Homo sapien
tttctttaaccgttattcgccatca

SEQ ID NO: 5933649 - DNA, 25 bp, Homo sapien
gattatcgcgttgtaaagggtaaaa

SEQ ID NO: 5933650 - DNA, 25 bp, Homo sapien
agatctcggatctaattatctacac

SEQ ID NO: 5933651 - DNA, 25 bp, Homo sapien
taaactatatacgtcgcctcctata

SEQ ID NO: 5933652 - DNA, 25 bp, Homo sapien
caaagattagtcgtatgcgcattaa

SEQ ID NO: 5933653 - DNA, 25 bp, Homo sapien
aaccaaatgtaatacgccggataat

SEQ ID NO: 5933654 - DNA, 25 bp, Homo sapien
aacttttattcgcggtcgataagta

SEQ ID NO: 5933655 - DNA, 25 bp, Homo sapien
ttatttcgatctagcggatgctata

SEQ ID NO: 5933656 - DNA, 25 bp, Homo sapien
acataaatcgtattggacgttcgaa

SEQ ID NO: 5933657 - DNA, 25 bp, Homo sapien
ttacttcgacgaatataggttttgg

SEQ ID NO: 5933658 - DNA, 25 bp, Homo sapien
cttgaatagtacgcgcgattatata

SEQ ID NO: 5933659 - DNA, 25 bp, Homo sapien
agaatttatcgtacgtcgatacaag

SEQ ID NO: 5933660 - DNA, 25 bp, Homo sapien
aaagtacgtctaatacgataccgat

SEQ ID NO: 5933661 - DNA, 25 bp, Homo sapien
atgcatatacgcgtcattgaagatt

SEQ ID NO: 5933662 - DNA, 25 bp, Homo sapien
aataaatcgtatactaccggctttg

SEQ ID NO: 5933663 - DNA, 25 bp, Homo sapien
tctaagtcgatacgcgttataagaa

SEQ ID NO: 5933664 - DNA, 25 bp, Homo sapien
aattcttctacggtacgatatagga

SEQ ID NO: 5933665 - DNA, 25 bp, Homo sapien
aatctgcgttatatcgacgctatat

SEQ ID NO: 5933666 - DNA, 25 bp, Homo sapien
atttaaacgtgttacgcgaagatct

SEQ ID NO: 5933667 - DNA, 25 bp, Homo sapien
acacaatataggcgttgcgtatata

SEQ ID NO: 5933668 - DNA, 25 bp, Homo sapien
taaaatcgaacgcactagtttggaa

SEQ ID NO: 5933669 - DNA, 25 bp, Homo sapien
gatgaacggtcgtaataacttgaat

SEQ ID NO: 5933670 - DNA, 25 bp, Homo sapien
tacataatacatcgcgtcgtacata

SEQ ID NO: 5933671 - DNA, 25 bp, Homo sapien
atacgagatcgcgtagttagaaaat

SEQ ID NO: 5933672 - DNA, 25 bp, Homo sapien
cagctattatgaatattccgaagtg

SEQ ID NO: 5933673 - DNA, 25 bp, Homo sapien
aacacttttagtcgcgtatacgatt

SEQ ID NO: 5933674 - DNA, 25 bp, Homo sapien
tattctaacttagtacgcggatatc

SEQ ID NO: 5933675 - DNA, 25 bp, Homo sapien
ataacttacatcgcgtattcactca

SEQ ID NO: 5933676 - DNA, 25 bp, Homo sapien
acggctcgcgtatagtaataaaatt

SEQ ID NO: 5933677 - DNA, 25 bp, Homo sapien
taatgagcgtaaactgacgtgttta

SEQ ID NO: 5933678 - DNA, 25 bp, Homo sapien
tattaagtccgtttcgctattccat

SEQ ID NO: 5933679 - DNA, 25 bp, Homo sapien
atgaattaacgacgttcgtagtaag

SEQ ID NO: 5933680 - DNA, 25 bp, Homo sapien
tacgttttgactacgcgtgaaataa

SEQ ID NO: 5933681 - DNA, 25 bp, Homo sapien
ataatctagatctatcgcgtagctt

SEQ ID NO: 5933682 - DNA, 25 bp, Homo sapien
aattattatacgtgacgcgtacttg

SEQ ID NO: 5933683 - DNA, 25 bp, Homo sapien
gagtttaacgacttactagtcagat

SEQ ID NO: 5933684 - DNA, 25 bp, Homo sapien
ttaggcgttacgaataacttgtatc

SEQ ID NO: 5933685 - DNA, 25 bp, Homo sapien
taagaaactaatcgttcggtcgtat

SEQ ID NO: 5933686 - DNA, 25 bp, Homo sapien
aaacactcgtatcgcggattaatat

SEQ ID NO: 5933687 - DNA, 25 bp, Homo sapien
cattctttgcgagttatattcagtc

SEQ ID NO: 5933688 - DNA, 25 bp, Homo sapien
tttatgccgcgattagaagatcaat

SEQ ID NO: 5933689 - DNA, 25 bp, Homo sapien
agcaatttatgcggattattgatcc

SEQ ID NO: 5933690 - DNA, 25 bp, Homo sapien
cagcaatatattcgcctttatacca

SEQ ID NO: 5933691 - DNA, 25 bp, Homo sapien
atggatacgttgacgtataaacaag

SEQ ID NO: 5933692 - DNA, 25 bp, Homo sapien
ctaacacgatagatctacgaataag

SEQ ID NO: 5933693 - DNA, 25 bp, Homo sapien
atagtacgtcggctaatctaatgtt

SEQ ID NO: 5933694 - DNA, 25 bp, Homo sapien
atcctacgtcggcgtataaatatta

SEQ ID NO: 5933695 - DNA, 25 bp, Homo sapien
tttgaactatactcgaacgtgtatc

SEQ ID NO: 5933696 - DNA, 25 bp, Homo sapien
acgttacgtataacgcgaagtatat

SEQ ID NO: 5933697 - DNA, 25 bp, Homo sapien
aaaatttcgcgtaggaacgatttca

SEQ ID NO: 5933698 - DNA, 25 bp, Homo sapien
aactaaaagtcgatacgcctatgaa

SEQ ID NO: 5933699 - DNA, 25 bp, Homo sapien
agaagataagtattacgcgtcactt

SEQ ID NO: 5933700 - DNA, 25 bp, Homo sapien
attcagtataccgggcgtataaatt

SEQ ID NO: 5933701 - DNA, 25 bp, Homo sapien
gtaacaacgcgtaacctattgtatt

SEQ ID NO: 5933702 - DNA, 25 bp, Homo sapien
gaaaagccgcgtaatgttatatcta

SEQ ID NO: 5933703 - DNA, 25 bp, Homo sapien
gattattcgtataccgtcatcgaat

SEQ ID NO: 5933704 - DNA, 25 bp, Homo sapien
ctaatgcgcacgattatactttaca

SEQ ID NO: 5933705 - DNA, 25 bp, Homo sapien
tcattagtacgcgatatagtaatcc

SEQ ID NO: 5933706 - DNA, 25 bp, Homo sapien
cacatatataacgctccgatttcaa

SEQ ID NO: 5933707 - DNA, 25 bp, Homo sapien
atgatatcgcgagtaactactttag

SEQ ID NO: 5933708 - DNA, 25 bp, Homo sapien
aactgttaacgcgtatcgataaagt

SEQ ID NO: 5933709 - DNA, 25 bp, Homo sapien
catagaacgatccgacaattttcta

SEQ ID NO: 5933710 - DNA, 25 bp, Homo sapien
gaaattgcgagacgttatacgtatt

SEQ ID NO: 5933711 - DNA, 25 bp, Homo sapien
tatattttacggtcgactaattggg

SEQ ID NO: 5933712 - DNA, 25 bp, Homo sapien
tttacaacgtccgtaacgttcaata

SEQ ID NO: 5933713 - DNA, 25 bp, Homo sapien
atagaatgttgcggtaacgtatcta

SEQ ID NO: 5933714 - DNA, 25 bp, Homo sapien
attcagcgtagccgtatatatctat

SEQ ID NO: 5933715 - DNA, 25 bp, Homo sapien
ataacactcgcgacgttattatcat

SEQ ID NO: 5933716 - DNA, 25 bp, Homo sapien
tattatcgcgtaataagtaggatcc

SEQ ID NO: 5933717 - DNA, 25 bp, Homo sapien
aattctggtcgacgaattacatgaa

SEQ ID NO: 5933718 - DNA, 25 bp, Homo sapien
agatacctcgcgacttataagaaat

SEQ ID NO: 5933719 - DNA, 25 bp, Homo sapien
agccattcgctacattattcgtatt

SEQ ID NO: 5933720 - DNA, 25 bp, Homo sapien
aaatggtcgtatcagtacgtaatgt

SEQ ID NO: 5933721 - DNA, 25 bp, Homo sapien
aatgtatacgcgttaaacgtttgtc

SEQ ID NO: 5933722 - DNA, 25 bp, Homo sapien
aggagatacgcgtaatagcatttaa

SEQ ID NO: 5933723 - DNA, 25 bp, Homo sapien
aacatagcgtactataacgtaacca

SEQ ID NO: 5933724 - DNA, 25 bp, Homo sapien
aattatgtcgcgatgtacaaaaagg

SEQ ID NO: 5933725 - DNA, 25 bp, Homo sapien
ttacctctcgagtataacgatctaa

SEQ ID NO: 5933726 - DNA, 25 bp, Homo sapien
ttcacatctcgtatagtcgcatata

SEQ ID NO: 5933727 - DNA, 25 bp, Homo sapien
aattattagtatcggctcgagtgat

SEQ ID NO: 5933728 - DNA, 25 bp, Homo sapien
aaaaagatcgttacgcgaatttgtc

SEQ ID NO: 5933729 - DNA, 25 bp, Homo sapien
ttaatagtaacgtactcgcgttgtt

SEQ ID NO: 5933730 - DNA, 25 bp, Homo sapien
gataatacgaacgtcgttaaaatcc

SEQ ID NO: 5933731 - DNA, 25 bp, Homo sapien
ttatgggtagcgcgttaataaatac

SEQ ID NO: 5933732 - DNA, 25 bp, Homo sapien
tcaaattagtaccgtcgaaaatgct

SEQ ID NO: 5933733 - DNA, 25 bp, Homo sapien
tatatttatacgcgacggaatgtag

SEQ ID NO: 5933734 - DNA, 25 bp, Homo sapien
gattaacgactagttaacgattgtc

SEQ ID NO: 5933735 - DNA, 25 bp, Homo sapien
atagaacttaatacgcgtaagacac

SEQ ID NO: 5933736 - DNA, 25 bp, Homo sapien
cttttgatagcgtaaacgctttaga

SEQ ID NO: 5933737 - DNA, 25 bp, Homo sapien
tcattatcgattgttaatacgggct

SEQ ID NO: 5933738 - DNA, 25 bp, Homo sapien
ttatactatacggttacgcaaacgt

SEQ ID NO: 5933739 - DNA, 25 bp, Homo sapien
cgatataaacttgcgcgactttaaa

SEQ ID NO: 5933740 - DNA, 25 bp, Homo sapien
ttagaatagttactcgcgaacaact

SEQ ID NO: 5933741 - DNA, 25 bp, Homo sapien
tttgttttatactagcgcgctgttt

SEQ ID NO: 5933742 - DNA, 25 bp, Homo sapien
acataacgcggtatactatatatcg

SEQ ID NO: 5933743 - DNA, 25 bp, Homo sapien
atactagcaatattatcgcaccttg

SEQ ID NO: 5933744 - DNA, 25 bp, Homo sapien
tatttgatctagcgtacggatatag

SEQ ID NO: 5933745 - DNA, 25 bp, Homo sapien
tgtttaaatacgtcgaggtactttg

SEQ ID NO: 5933746 - DNA, 25 bp, Homo sapien
taagttcgtcgaaatactatcccat

SEQ ID NO: 5933747 - DNA, 25 bp, Homo sapien
gttcaacgcgaatagtagattaact

SEQ ID NO: 5933748 - DNA, 25 bp, Homo sapien
ttgttacgctacgatctaattccat

SEQ ID NO: 5933749 - DNA, 25 bp, Homo sapien
agttgtcgtaatacgtcgatttttc

SEQ ID NO: 5933750 - DNA, 25 bp, Homo sapien
taaatatataccgcgtgtagcgtta

SEQ ID NO: 5933751 - DNA, 25 bp, Homo sapien
atatcttacgcgataacgttcgata

SEQ ID NO: 5933752 - DNA, 25 bp, Homo sapien
cttaatcgcgattatacgatagtac

SEQ ID NO: 5933753 - DNA, 25 bp, Homo sapien
acaaaacgcgaacgatattatacgt

SEQ ID NO: 5933754 - DNA, 25 bp, Homo sapien
aattcgccgatatacgcttatcttt

SEQ ID NO: 5933755 - DNA, 25 bp, Homo sapien
cctttatacgcgcgttaaaacataa

SEQ ID NO: 5933756 - DNA, 25 bp, Homo sapien
ttggactaatcaattatccgagttc

SEQ ID NO: 5933757 - DNA, 25 bp, Homo sapien
cttgattagataatcgcggaaatca

SEQ ID NO: 5933758 - DNA, 25 bp, Homo sapien
tttaccttacattacgcgcaataac

SEQ ID NO: 5933759 - DNA, 25 bp, Homo sapien
ctattcgacgatattaaattacccc

SEQ ID NO: 5933760 - DNA, 25 bp, Homo sapien
tgttggtactcgcgtatagttaaaa

SEQ ID NO: 5933761 - DNA, 25 bp, Homo sapien
taatgaagatattgcgtcgcttgat

SEQ ID NO: 5933762 - DNA, 25 bp, Homo sapien
gacaaaaacgtaatcgcgtaattca

SEQ ID NO: 5933763 - DNA, 25 bp, Homo sapien
atcaaaatacttcgcacgattgcta

SEQ ID NO: 5933764 - DNA, 25 bp, Homo sapien
aaaaatctcataacgcgcgaatcta

SEQ ID NO: 5933765 - DNA, 25 bp, Homo sapien
tagctagttcgccgtataagaattt

SEQ ID NO: 5933766 - DNA, 25 bp, Homo sapien
gaaaaatatcgcgaacgataaacca

SEQ ID NO: 5933767 - DNA, 25 bp, Homo sapien
caaagatcgctattgaattgcttgt

SEQ ID NO: 5933768 - DNA, 25 bp, Homo sapien
ttttaatataaccgcgcgtctaatc

SEQ ID NO: 5933769 - DNA, 25 bp, Homo sapien
tagagaaacgcgctagtagattaat

SEQ ID NO: 5933770 - DNA, 25 bp, Homo sapien
tataacgtagcgtacgcaattaaac

SEQ ID NO: 5933771 - DNA, 25 bp, Homo sapien
agtatgtcgttaacgcatattacga

SEQ ID NO: 5933772 - DNA, 25 bp, Homo sapien
ctaaactatagtacgcgtcatctta

SEQ ID NO: 5933773 - DNA, 25 bp, Homo sapien
aatatgacgttacgaatagtccttc

SEQ ID NO: 5933774 - DNA, 25 bp, Homo sapien
ttcacggtacgatatcgtattttct

SEQ ID NO: 5933775 - DNA, 25 bp, Homo sapien
tgagatatatatcgtcgcctttcaa

SEQ ID NO: 5933776 - DNA, 25 bp, Homo sapien
aatcatcgtataaagcgtcagaaag

SEQ ID NO: 5933777 - DNA, 25 bp, Homo sapien
tatacttatacgattaccggtgtac

SEQ ID NO: 5933778 - DNA, 25 bp, Homo sapien
tttcagaattgccaggtttttctat

SEQ ID NO: 5933779 - DNA, 25 bp, Homo sapien
tttcttgggctccattcccatgaag

SEQ ID NO: 5933780 - DNA, 25 bp, Homo sapien
cttgacaagatgtttcccaataacc

SEQ ID NO: 5933781 - DNA, 25 bp, Homo sapien
cgaatgggttcttgacaagatgttt

SEQ ID NO: 5933782 - DNA, 25 bp, Homo sapien
tagttgcgaatgggttcttgacaag

SEQ ID NO: 5933783 - DNA, 25 bp, Homo sapien
atccagttagcaggcccaagatttt

SEQ ID NO: 5933784 - DNA, 25 bp, Homo sapien
aaagacatcaagcatcagagtgaat

SEQ ID NO: 5933785 - DNA, 25 bp, Homo sapien
agcaactggctgcaatcacccaatg

SEQ ID NO: 5933786 - DNA, 25 bp, Homo sapien
gaaatgagtgaaccgaacttggact

SEQ ID NO: 5933787 - DNA, 25 bp, Homo sapien
atgtcctcatgtgttgtcactttat

SEQ ID NO: 5933788 - DNA, 25 bp, Homo sapien
ggttcttgacaagatgtttcccaat

SEQ ID NO: 5933789 - DNA, 25 bp, Homo sapien
aagaagaatagtcctgaaccaggtt

SEQ ID NO: 5933790 - DNA, 25 bp, Homo sapien
tgcccagtacagtgtcctggagact

SEQ ID NO: 5933791 - DNA, 25 bp, Homo sapien
tcagaaattacctttttacaaaaga

SEQ ID NO: 5933792 - DNA, 25 bp, Homo sapien
aaactggaaatgagtgaaccgaact

SEQ ID NO: 5933793 - DNA, 25 bp, Homo sapien
atgtttggtaactttttctttcaga

SEQ ID NO: 5933794 - DNA, 25 bp, Homo sapien
tttagtaggaactggtggatccctt

SEQ ID NO: 5933795 - DNA, 25 bp, Homo sapien
ttgtgtctggacagtcagtggtagg

SEQ ID NO: 5933796 - DNA, 25 bp, Homo sapien
ttctagggaggaggaaggcagggtg

SEQ ID NO: 5933797 - DNA, 25 bp, Homo sapien
tataccaaaaacaggttagcggtta

SEQ ID NO: 5933798 - DNA, 25 bp, Homo sapien
tccagcaatgcagtaccaagcagcc

SEQ ID NO: 5933799 - DNA, 25 bp, Homo sapien
ggtgtgctagcaactggctgcaatc

SEQ ID NO: 5933800 - DNA, 25 bp, Homo sapien
gtcctcccaagagtggcattctagg

SEQ ID NO: 5933801 - DNA, 25 bp, Homo sapien
ctggacacaagaaaacacaaagaca

SEQ ID NO: 5933802 - DNA, 25 bp, Homo sapien
taacataactagcaaatttacttta

SEQ ID NO: 5933803 - DNA, 25 bp, Homo sapien
tgttcagagatgcccagtacagtgt

SEQ ID NO: 5933804 - DNA, 25 bp, Homo sapien
tcatgtgttgtcactttataaaaag

SEQ ID NO: 5933805 - DNA, 25 bp, Homo sapien
agctcagaaattacctttttacaaa

SEQ ID NO: 5933806 - DNA, 25 bp, Homo sapien
atgaaggacctacttttaaaatgtg

SEQ ID NO: 5933807 - DNA, 25 bp, Homo sapien
tcttgggctccattcccatgaagga

SEQ ID NO: 5933808 - DNA, 25 bp, Homo sapien
atttaaactggaaatgagtgaaccg

SEQ ID NO: 5933809 - DNA, 25 bp, Homo sapien
gggaggaggaaggcagggtgtggct

SEQ ID NO: 5933810 - DNA, 25 bp, Homo sapien
ctaatgtcatgctatgaggaacaag

SEQ ID NO: 5933811 - DNA, 25 bp, Homo sapien
gtaggcggagatccagttagcaggc

SEQ ID NO: 5933812 - DNA, 25 bp, Homo sapien
gaagcagtcctcccaagagtggcat

SEQ ID NO: 5933813 - DNA, 25 bp, Homo sapien
tgaatccagcaatgcagtaccaagc

SEQ ID NO: 5933814 - DNA, 25 bp, Homo sapien
tgtcctggagactaaggtctctaat

SEQ ID NO: 5933815 - DNA, 25 bp, Homo sapien
tgtgaaatgtcctcatgtgttgtca

SEQ ID NO: 5933816 - DNA, 25 bp, Homo sapien
ctagggaggaggaaggcagggtgtg

SEQ ID NO: 5933817 - DNA, 25 bp, Homo sapien
cgaggattcccccaatccaagaaat

SEQ ID NO: 5933818 - DNA, 25 bp, Homo sapien
agctcagtttatttaaccattcctg

SEQ ID NO: 5933819 - DNA, 25 bp, Homo sapien
aatccagcaatgcagtaccaagcag

SEQ ID NO: 5933820 - DNA, 25 bp, Homo sapien
tggtaggcatgtgacatttccctgg

SEQ ID NO: 5933821 - DNA, 25 bp, Homo sapien
ctacataatcgggttgatattgtaa

SEQ ID NO: 5933822 - DNA, 25 bp, Homo sapien
ggagactaaggtctctaatgtcatg

SEQ ID NO: 5933823 - DNA, 25 bp, Homo sapien
gagatgcccagtacagtgtcctgga

SEQ ID NO: 5933824 - DNA, 25 bp, Homo sapien
tgctagcaactggctgcaatcaccc

SEQ ID NO: 5933825 - DNA, 25 bp, Homo sapien
atattctaccctcaaactggagggg

SEQ ID NO: 5933826 - DNA, 25 bp, Homo sapien
aggaggaagaagaatagtcctgaac

SEQ ID NO: 5933827 - DNA, 25 bp, Homo sapien
aggcatgtgacatttccctggtggg

SEQ ID NO: 5933828 - DNA, 25 bp, Homo sapien
agaatagtcctgaaccaggttggag

SEQ ID NO: 5933829 - DNA, 25 bp, Homo sapien
taccaaaaacaggttagcggttata

SEQ ID NO: 5933830 - DNA, 25 bp, Homo sapien
gaggaagaagaatagtcctgaacca

SEQ ID NO: 5933831 - DNA, 25 bp, Homo sapien
aaataagtaggcggagatccagtta

SEQ ID NO: 5933832 - DNA, 25 bp, Homo sapien
cagtggctactttagttgcgaatgg

SEQ ID NO: 5933833 - DNA, 25 bp, Homo sapien
aggcagggtgtggcttgtgtctgga

SEQ ID NO: 5933834 - DNA, 25 bp, Homo sapien
gcattttataccaaaaacaggttag

SEQ ID NO: 5933835 - DNA, 25 bp, Homo sapien
ggacctacttttaaaatgtgaaatg

SEQ ID NO: 5933836 - DNA, 25 bp, Homo sapien
ggacgtctgagagaagcagtcctcc

SEQ ID NO: 5933837 - DNA, 25 bp, Homo sapien
tgggaaaaaaataagtaggcggaga

SEQ ID NO: 5933838 - DNA, 25 bp, Homo sapien
tcagagtgaatccagcaatgcagta

SEQ ID NO: 5933839 - DNA, 25 bp, Homo sapien
gtaccaagcagcctgggtggggtgt

SEQ ID NO: 5933840 - DNA, 25 bp, Homo sapien
acaagaaaacacaaagacatcaagc

SEQ ID NO: 5933841 - DNA, 25 bp, Homo sapien
aagaaacacagtggctactttagtt

SEQ ID NO: 5933842 - DNA, 25 bp, Homo sapien
actaaggtctctaatgtcatgctat

SEQ ID NO: 5933843 - DNA, 25 bp, Homo sapien
tctttcagaattgccaggtttttct

SEQ ID NO: 5933844 - DNA, 25 bp, Homo sapien
tgtgtatataaaactttgccagtat

SEQ ID NO: 5933845 - DNA, 25 bp, Homo sapien
gtaggcatgtgacatttccctggtg

SEQ ID NO: 5933846 - DNA, 25 bp, Homo sapien
atgtgttgtcactttataaaaaggg

SEQ ID NO: 5933847 - DNA, 25 bp, Homo sapien
actttagttgcgaatgggttcttga

SEQ ID NO: 5933848 - DNA, 25 bp, Homo sapien
actttagtaggaactggtggatccc

SEQ ID NO: 5933849 - DNA, 25 bp, Homo sapien
acatcaagcatcagagtgaatccag

SEQ ID NO: 5933850 - DNA, 25 bp, Homo sapien
gtttatttaaccattcctgtattgt

SEQ ID NO: 5933851 - DNA, 25 bp, Homo sapien
agtgaatccagcaatgcagtaccaa

SEQ ID NO: 5933852 - DNA, 25 bp, Homo sapien
ctatgtttttaattttcttcattat

SEQ ID NO: 5933853 - DNA, 25 bp, Homo sapien
atgcagctcagtttatttaaccatt

SEQ ID NO: 5933854 - DNA, 25 bp, Homo sapien
gaggaggaaggcagggtgtggcttg

SEQ ID NO: 5933855 - DNA, 25 bp, Homo sapien
acagtgtcctggagactaaggtctc

SEQ ID NO: 5933856 - DNA, 25 bp, Homo sapien
ccaaaaacaggttagcggttatata

SEQ ID NO: 5933857 - DNA, 25 bp, Homo sapien
tgggttcttgacaagatgtttccca

SEQ ID NO: 5933858 - DNA, 25 bp, Homo sapien
caataacccagacccttaacataac

SEQ ID NO: 5933859 - DNA, 25 bp, Homo sapien
ggaacaaggaggaagaagaatagtc

SEQ ID NO: 5933860 - DNA, 25 bp, Homo sapien
gaagaatagtcctgaaccaggttgg

SEQ ID NO: 5933861 - DNA, 25 bp, Homo sapien
caactggctgcaatcacccaatgga

SEQ ID NO: 5933862 - DNA, 25 bp, Homo sapien
gtgacatttccctggtgggaaaaaa

SEQ ID NO: 5933863 - DNA, 25 bp, Homo sapien
ggggtgtgctagcaactggctgcaa

SEQ ID NO: 5933864 - DNA, 25 bp, Homo sapien
atccctttctggacacaagaaaaca

SEQ ID NO: 5933865 - DNA, 25 bp, Homo sapien
cctcccaagagtggcattctaggga

SEQ ID NO: 5933866 - DNA, 25 bp, Homo sapien
ggattcccccaatccaagaaattta

SEQ ID NO: 5933867 - DNA, 25 bp, Homo sapien
cttaacataactagcaaatttactt

SEQ ID NO: 5933868 - DNA, 25 bp, Homo sapien
atgatttcttgggctccattcccat

SEQ ID NO: 5933869 - DNA, 25 bp, Homo sapien
aggcggagatccagttagcaggccc

SEQ ID NO: 5933870 - DNA, 25 bp, Homo sapien
ttcccaataacccagacccttaaca

SEQ ID NO: 5933871 - DNA, 25 bp, Homo sapien
ataagtaggcggagatccagttagc

SEQ ID NO: 5933872 - DNA, 25 bp, Homo sapien
gtggggtgtgctagcaactggctgc

SEQ ID NO: 5933873 - DNA, 25 bp, Homo sapien
tccatttaatggatgcagctcagtt

SEQ ID NO: 5933874 - DNA, 25 bp, Homo sapien
ggcccaagattttgctcgaggattc

SEQ ID NO: 5933875 - DNA, 25 bp, Homo sapien
agtcagtggtaggcatgtgacattt

SEQ ID NO: 5933876 - DNA, 25 bp, Homo sapien
caatggacaccctgtgttcagagat

SEQ ID NO: 5933877 - DNA, 25 bp, Homo sapien
ttataatattggaagaatcttgtgt

SEQ ID NO: 5933878 - DNA, 25 bp, Homo sapien
agcagcctgggtggggtgtgctagc

SEQ ID NO: 5933879 - DNA, 25 bp, Homo sapien
gtggcattctagggaggaggaaggc

SEQ ID NO: 5933880 - DNA, 25 bp, Homo sapien
tgttgactatgtttttaattttctt

SEQ ID NO: 5933881 - DNA, 25 bp, Homo sapien
gcttgtgtctggacagtcagtggta

SEQ ID NO: 5933882 - DNA, 25 bp, Homo sapien
agcggttatataatattccatttaa

SEQ ID NO: 5933883 - DNA, 25 bp, Homo sapien
ttagcaggcccaagattttgctcga

SEQ ID NO: 5933884 - DNA, 25 bp, Homo sapien
ggcattctagggaggaggaaggcag

SEQ ID NO: 5933885 - DNA, 25 bp, Homo sapien
aatattggaagaatcttgtgtatat

SEQ ID NO: 5933886 - DNA, 25 bp, Homo sapien
aggggtgaccatgctgacaaaaagc

SEQ ID NO: 5933887 - DNA, 25 bp, Homo sapien
gtgaccatgctgacaaaaagctcag

SEQ ID NO: 5933888 - DNA, 25 bp, Homo sapien
atcttgtgtatataaaactttgcca

SEQ ID NO: 5933889 - DNA, 25 bp, Homo sapien
actttttctttcagaattgccaggt

SEQ ID NO: 5933890 - DNA, 25 bp, Homo sapien
ttggtaactttttctttcagaattg

SEQ ID NO: 5933891 - DNA, 25 bp, Homo sapien
tgtttcccaataacccagaccctta

SEQ ID NO: 5933892 - DNA, 25 bp, Homo sapien
aaaagaaacacagtggctactttag

SEQ ID NO: 5933893 - DNA, 25 bp, Homo sapien
attcctgtattgttgactatgtttt

SEQ ID NO: 5933894 - DNA, 25 bp, Homo sapien
gtctgagagaagcagtcctcccaag

SEQ ID NO: 5933895 - DNA, 25 bp, Homo sapien
caagcatcagagtgaatccagcaat

SEQ ID NO: 5933896 - DNA, 25 bp, Homo sapien
ggaagaagaatagtcctgaaccagg

SEQ ID NO: 5933897 - DNA, 25 bp, Homo sapien
tatggcattttataccaaaaacagg

SEQ ID NO: 5933898 - DNA, 25 bp, Homo sapien
ggacacaagaaaacacaaagacatc

SEQ ID NO: 5933899 - DNA, 25 bp, Homo sapien
caggcccaagattttgctcgaggat

SEQ ID NO: 5933900 - DNA, 25 bp, Homo sapien
tatcattgatgatttcttgggctcc

SEQ ID NO: 5933901 - DNA, 25 bp, Homo sapien
tgtcatgctatgaggaacaaggagg

SEQ ID NO: 5933902 - DNA, 25 bp, Homo sapien
acataatcgggttgatattgtaaaa

SEQ ID NO: 5933903 - DNA, 25 bp, Homo sapien
actggctgcaatcacccaatggaca

SEQ ID NO: 5933904 - DNA, 25 bp, Homo sapien
acaccctgtgttcagagatgcccag

SEQ ID NO: 5933905 - DNA, 25 bp, Homo sapien
gaactggtggatccctttctggaca

SEQ ID NO: 5933906 - DNA, 25 bp, Homo sapien
ataacccagacccttaacataacta

SEQ ID NO: 5933907 - DNA, 25 bp, Homo sapien
caagcagcctgggtggggtgtgcta

SEQ ID NO: 5933908 - DNA, 25 bp, Homo sapien
aaccaggttggagaggtcaggagga

SEQ ID NO: 5933909 - DNA, 25 bp, Homo sapien
accaagcagcctgggtggggtgtgc

SEQ ID NO: 5933910 - DNA, 25 bp, Homo sapien
ctggagactaaggtctctaatgtca

SEQ ID NO: 5933911 - DNA, 25 bp, Homo sapien
ccaagagtggcattctagggaggag

SEQ ID NO: 5933912 - DNA, 25 bp, Homo sapien
ttactttagtaggaactggtggatc

SEQ ID NO: 5933913 - DNA, 25 bp, Homo sapien
atggatgcagctcagtttatttaac

SEQ ID NO: 5933914 - DNA, 25 bp, Homo sapien
taaggtctctaatgtcatgctatga

SEQ ID NO: 5933915 - DNA, 25 bp, Homo sapien
tggagaggtcaggaggacgtctgag

SEQ ID NO: 5933916 - DNA, 25 bp, Homo sapien
gcagctcagtttatttaaccattcc

SEQ ID NO: 5933917 - DNA, 25 bp, Homo sapien
actggtggatccctttctggacaca

SEQ ID NO: 5933918 - DNA, 25 bp, Homo sapien
tgccagtatcattgatgatttcttg

SEQ ID NO: 5933919 - DNA, 25 bp, Homo sapien
cacagtggctactttagttgcgaat

SEQ ID NO: 5933920 - DNA, 25 bp, Homo sapien
gcctgggtggggtgtgctagcaact

SEQ ID NO: 5933921 - DNA, 25 bp, Homo sapien
gttgcgaatgggttcttgacaagat

SEQ ID NO: 5933922 - DNA, 25 bp, Homo sapien
agttagcaggcccaagattttgctc

SEQ ID NO: 5933923 - DNA, 25 bp, Homo sapien
ataactagcaaatttactttagtag

SEQ ID NO: 5933924 - DNA, 25 bp, Homo sapien
gttatataatattccatttaatgga

SEQ ID NO: 5933925 - DNA, 25 bp, Homo sapien
agcaggcccaagattttgctcgagg

SEQ ID NO: 5933926 - DNA, 25 bp, Homo sapien
ttatttaaccattcctgtattgttg

SEQ ID NO: 5933927 - DNA, 25 bp, Homo sapien
tcagtggtaggcatgtgacatttcc

SEQ ID NO: 5933928 - DNA, 25 bp, Homo sapien
cttttcctacataatcgggttgata

SEQ ID NO: 5933929 - DNA, 25 bp, Homo sapien
aggaaggcagggtgtggcttgtgtc

SEQ ID NO: 5933930 - DNA, 25 bp, Homo sapien
atcaagcatcagagtgaatccagca

SEQ ID NO: 5933931 - DNA, 25 bp, Homo sapien
actggaaatgagtgaaccgaacttg

SEQ ID NO: 5933932 - DNA, 25 bp, Homo sapien
tataaaactttgccagtatcattga

SEQ ID NO: 5933933 - DNA, 25 bp, Homo sapien
gggtggggtgtgctagcaactggct

SEQ ID NO: 5933934 - DNA, 25 bp, Homo sapien
gatttcttgggctccattcccatga

SEQ ID NO: 5933935 - DNA, 25 bp, Homo sapien
aaagctcagaaattacctttttaca

SEQ ID NO: 5933936 - DNA, 25 bp, Homo sapien
caatccaagaaatttaaactggaaa

SEQ ID NO: 5933937 - DNA, 25 bp, Homo sapien
ctagcaaatttactttagtaggaac

SEQ ID NO: 5933938 - DNA, 25 bp, Homo sapien
agacatcaagcatcagagtgaatcc

SEQ ID NO: 5933939 - DNA, 25 bp, Homo sapien
cctcatgtgttgtcactttataaaa

SEQ ID NO: 5933940 - DNA, 25 bp, Homo sapien
ttgccaggtttttctatggcatttt

SEQ ID NO: 5933941 - DNA, 25 bp, Homo sapien
ttattgattccccttttatggggga

SEQ ID NO: 5933942 - DNA, 25 bp, Homo sapien
gctccattcccatgaaggacctact

SEQ ID NO: 5933943 - DNA, 25 bp, Homo sapien
ccagtatcattgatgatttcttggg

SEQ ID NO: 5933944 - DNA, 25 bp, Homo sapien
accctgtgttcagagatgcccagta

SEQ ID NO: 5933945 - DNA, 25 bp, Homo sapien
tttagttgcgaatgggttcttgaca

SEQ ID NO: 5933946 - DNA, 25 bp, Homo sapien
gaccatgctgacaaaaagctcagaa

SEQ ID NO: 5933947 - DNA, 25 bp, Homo sapien
caaactggaggggtgaccatgctga

SEQ ID NO: 5933948 - DNA, 25 bp, Homo sapien
agaattgccaggtttttctatggca

SEQ ID NO: 5933949 - DNA, 25 bp, Homo sapien
aagtaggcggagatccagttagcag

SEQ ID NO: 5933950 - DNA, 25 bp, Homo sapien
tttgctcgaggattcccccaatcca

SEQ ID NO: 5933951 - DNA, 25 bp, Homo sapien
tcaggaggacgtctgagagaagcag

SEQ ID NO: 5933952 - DNA, 25 bp, Homo sapien
ggaggaaggcagggtgtggcttgtg

SEQ ID NO: 5933953 - DNA, 25 bp, Homo sapien
gactatgtttttaattttcttcatt

SEQ ID NO: 5933954 - DNA, 25 bp, Homo sapien
ggacagtcagtggtaggcatgtgac

SEQ ID NO: 5933955 - DNA, 25 bp, Homo sapien
atttactttagtaggaactggtgga

SEQ ID NO: 5933956 - DNA, 25 bp, Homo sapien
gtggctactttagttgcgaatgggt

SEQ ID NO: 5933957 - DNA, 25 bp, Homo sapien
gctatgaggaacaaggaggaagaag

SEQ ID NO: 5933958 - DNA, 25 bp, Homo sapien
agggatattctaccctcaaactgga

SEQ ID NO: 5933959 - DNA, 25 bp, Homo sapien
attgttgactatgtttttaattttc

SEQ ID NO: 5933960 - DNA, 25 bp, Homo sapien
aacaaggaggaagaagaatagtcct

SEQ ID NO: 5933961 - DNA, 25 bp, Homo sapien
tggcttgtgtctggacagtcagtgg

SEQ ID NO: 5933962 - DNA, 25 bp, Homo sapien
gtgttgtcactttataaaaagggat

SEQ ID NO: 5933963 - DNA, 25 bp, Homo sapien
aacccagacccttaacataactagc

SEQ ID NO: 5933964 - DNA, 25 bp, Homo sapien
ctcgaggattcccccaatccaagaa

SEQ ID NO: 5933965 - DNA, 25 bp, Homo sapien
tcatgctatgaggaacaaggaggaa

SEQ ID NO: 5933966 - DNA, 25 bp, Homo sapien
attccatttaatggatgcagctcag

SEQ ID NO: 5933967 - DNA, 25 bp, Homo sapien
ccagttagcaggcccaagattttgc

SEQ ID NO: 5933968 - DNA, 25 bp, Homo sapien
aaactttgccagtatcattgatgat

SEQ ID NO: 5933969 - DNA, 25 bp, Homo sapien
ttggaagaatcttgtgtatataaaa

SEQ ID NO: 5933970 - DNA, 25 bp, Homo sapien
ataatattggaagaatcttgtgtat

SEQ ID NO: 5933971 - DNA, 25 bp, Homo sapien
gggtgaccatgctgacaaaaagctc

SEQ ID NO: 5933972 - DNA, 25 bp, Homo sapien
tggtggatccctttctggacacaag

SEQ ID NO: 5933973 - DNA, 25 bp, Homo sapien
gtgaaccgaacttggacttttattg

SEQ ID NO: 5933974 - DNA, 25 bp, Homo sapien
tattataatattggaagaatcttgt

SEQ ID NO: 5933975 - DNA, 25 bp, Homo sapien
aatgtcatgctatgaggaacaagga

SEQ ID NO: 5933976 - DNA, 25 bp, Homo sapien
cacccaatggacaccctgtgttcag

SEQ ID NO: 5933977 - DNA, 25 bp, Homo sapien
gtcctgaaccaggttggagaggtca

SEQ ID NO: 5933978 - DNA, 25 bp, Homo sapien
aatagtcctgaaccaggttggagag

SEQ ID NO: 5933979 - DNA, 25 bp, Homo sapien
aagaatcttgtgtatataaaacttt

SEQ ID NO: 5933980 - DNA, 25 bp, Homo sapien
tcccaagagtggcattctagggagg

SEQ ID NO: 5933981 - DNA, 25 bp, Homo sapien
cttgtgtatataaaactttgccagt

SEQ ID NO: 5933982 - DNA, 25 bp, Homo sapien
atggacaccctgtgttcagagatgc

SEQ ID NO: 5933983 - DNA, 25 bp, Homo sapien
cccaagattttgctcgaggattccc

SEQ ID NO: 5933984 - DNA, 25 bp, Homo sapien
aaacacaaagacatcaagcatcaga

SEQ ID NO: 5933985 - DNA, 25 bp, Homo sapien
gccaggtttttctatggcattttat

SEQ ID NO: 5933986 - DNA, 25 bp, Homo sapien
tcctgtattgttgactatgttttta

SEQ ID NO: 5933987 - DNA, 25 bp, Homo sapien
tgctcgaggattcccccaatccaag

SEQ ID NO: 5933988 - DNA, 25 bp, Homo sapien
ctactttagttgcgaatgggttctt

SEQ ID NO: 5933989 - DNA, 25 bp, Homo sapien
ctcagtttatttaaccattcctgta

SEQ ID NO: 5933990 - DNA, 25 bp, Homo sapien
tggacttttattgattcccctttta

SEQ ID NO: 5933991 - DNA, 25 bp, Homo sapien
tcattgatgatttcttgggctccat

SEQ ID NO: 5933992 - DNA, 25 bp, Homo sapien
agagtgaatccagcaatgcagtacc

SEQ ID NO: 5933993 - DNA, 25 bp, Homo sapien
ggtttttctatggcattttatacca

SEQ ID NO: 5933994 - DNA, 25 bp, Homo sapien
aatcgggttgatattgtaaaatgtt

SEQ ID NO: 5933995 - DNA, 25 bp, Homo sapien
ggaggggtgaccatgctgacaaaaa

SEQ ID NO: 5933996 - DNA, 25 bp, Homo sapien
agcaaatttactttagtaggaactg

SEQ ID NO: 5933997 - DNA, 25 bp, Homo sapien
ggtgtggcttgtgtctggacagtca

SEQ ID NO: 5933998 - DNA, 25 bp, Homo sapien
caaggaggaagaagaatagtcctga

SEQ ID NO: 5933999 - DNA, 25 bp, Homo sapien
caggtttttctatggcattttatac

SEQ ID NO: 5934000 - DNA, 25 bp, Homo sapien
tcgggttgatattgtaaaatgtttg

SEQ ID NO: 5934001 - DNA, 25 bp, Homo sapien
taactttttctttcagaattgccag

SEQ ID NO: 5934002 - DNA, 25 bp, Homo sapien
tattggaagaatcttgtgtatataa

SEQ ID NO: 5934003 - DNA, 25 bp, Homo sapien
ggacaccctgtgttcagagatgccc

SEQ ID NO: 5934004 - DNA, 25 bp, Homo sapien
accgaacttggacttttattgattc

SEQ ID NO: 5934005 - DNA, 25 bp, Homo sapien
taaaactttgccagtatcattgatg

SEQ ID NO: 5934006 - DNA, 25 bp, Homo sapien
tgtgctagcaactggctgcaatcac

SEQ ID NO: 5934007 - DNA, 25 bp, Homo sapien
tgtcactttataaaaagggatattc

SEQ ID NO: 5934008 - DNA, 25 bp, Homo sapien
ctctaatgtcatgctatgaggaaca

SEQ ID NO: 5934009 - DNA, 25 bp, Homo sapien
ccctttctggacacaagaaaacaca

SEQ ID NO: 5934010 - DNA, 25 bp, Homo sapien
caagattttgctcgaggattccccc

SEQ ID NO: 5934011 - DNA, 25 bp, Homo sapien
ttcagagatgcccagtacagtgtcc

SEQ ID NO: 5934012 - DNA, 25 bp, Homo sapien
atgtgacatttccctggtgggaaaa

SEQ ID NO: 5934013 - DNA, 25 bp, Homo sapien
ttttaaaatgtgaaatgtcctcatg

SEQ ID NO: 5934014 - DNA, 25 bp, Homo sapien
ctgggtggggtgtgctagcaactgg

SEQ ID NO: 5934015 - DNA, 25 bp, Homo sapien
aaaatgtgaaatgtcctcatgtgtt

SEQ ID NO: 5934016 - DNA, 25 bp, Homo sapien
ctgtattgttgactatgtttttaat

SEQ ID NO: 5934017 - DNA, 25 bp, Homo sapien
aactagcaaatttactttagtagga

SEQ ID NO: 5934018 - DNA, 25 bp, Homo sapien
acacaagaaaacacaaagacatcaa

SEQ ID NO: 5934019 - DNA, 25 bp, Homo sapien
gcagggtgtggcttgtgtctggaca

SEQ ID NO: 5934020 - DNA, 25 bp, Homo sapien
tccattcccatgaaggacctacttt

SEQ ID NO: 5934021 - DNA, 25 bp, Homo sapien
cattcccatgaaggacctactttta

SEQ ID NO: 5934022 - DNA, 25 bp, Homo sapien
ctagcaactggctgcaatcacccaa

SEQ ID NO: 5934023 - DNA, 25 bp, Homo sapien
aacacagtggctactttagttgcga

SEQ ID NO: 5934024 - DNA, 25 bp, Homo sapien
cagtcctcccaagagtggcattcta

SEQ ID NO: 5934025 - DNA, 25 bp, Homo sapien
aaagggatattctaccctcaaactg

SEQ ID NO: 5934026 - DNA, 25 bp, Homo sapien
gtaggaactggtggatccctttctg

SEQ ID NO: 5934027 - DNA, 25 bp, Homo sapien
ggctactttagttgcgaatgggttc

SEQ ID NO: 5934028 - DNA, 25 bp, Homo sapien
cccaataacccagacccttaacata

SEQ ID NO: 5934029 - DNA, 25 bp, Homo sapien
ctggaggggtgaccatgctgacaaa

SEQ ID NO: 5934030 - DNA, 25 bp, Homo sapien
ccaagaaatttaaactggaaatgag

SEQ ID NO: 5934031 - DNA, 25 bp, Homo sapien
agtatcattgatgatttcttgggct

SEQ ID NO: 5934032 - DNA, 25 bp, Homo sapien
tttctttcagaattgccaggttttt

SEQ ID NO: 5934033 - DNA, 25 bp, Homo sapien
tttcctacataatcgggttgatatt

SEQ ID NO: 5934034 - DNA, 25 bp, Homo sapien
cagcaatgcagtaccaagcagcctg

SEQ ID NO: 5934035 - DNA, 25 bp, Homo sapien
ataatcgggttgatattgtaaaatg

SEQ ID NO: 5934036 - DNA, 25 bp, Homo sapien
tttttctttcagaattgccaggttt

SEQ ID NO: 5934037 - DNA, 25 bp, Homo sapien
atcacccaatggacaccctgtgttc

SEQ ID NO: 5934038 - DNA, 25 bp, Homo sapien
atattccatttaatggatgcagctc

SEQ ID NO: 5934039 - DNA, 25 bp, Homo sapien
ttaaaatgtgaaatgtcctcatgtg

SEQ ID NO: 5934040 - DNA, 25 bp, Homo sapien
ccatgctgacaaaaagctcagaaat

SEQ ID NO: 5934041 - DNA, 25 bp, Homo sapien
aagatgtttcccaataacccagacc

SEQ ID NO: 5934042 - DNA, 25 bp, Homo sapien
aaccattcctgtattgttgactatg

SEQ ID NO: 5934043 - DNA, 25 bp, Homo sapien
gtcctcatgtgttgtcactttataa

SEQ ID NO: 5934044 - DNA, 25 bp, Homo sapien
tgaggaacaaggaggaagaagaata

SEQ ID NO: 5934045 - DNA, 25 bp, Homo sapien
ggatgcagctcagtttatttaacca

SEQ ID NO: 5934046 - DNA, 25 bp, Homo sapien
gggctccattcccatgaaggaccta

SEQ ID NO: 5934047 - DNA, 25 bp, Homo sapien
gaaacacagtggctactttagttgc

SEQ ID NO: 5934048 - DNA, 25 bp, Homo sapien
agggtgtggcttgtgtctggacagt

SEQ ID NO: 5934049 - DNA, 25 bp, Homo sapien
ttaaccattcctgtattgttgacta

SEQ ID NO: 5934050 - DNA, 25 bp, Homo sapien
tgacaagatgtttcccaataaccca

SEQ ID NO: 5934051 - DNA, 25 bp, Homo sapien
ccattcctgtattgttgactatgtt

SEQ ID NO: 5934052 - DNA, 25 bp, Homo sapien
agactaaggtctctaatgtcatgct

SEQ ID NO: 5934053 - DNA, 25 bp, Homo sapien
gagtggcattctagggaggaggaag

SEQ ID NO: 5934054 - DNA, 25 bp, Homo sapien
ccatgaaggacctacttttaaaatg

SEQ ID NO: 5934055 - DNA, 25 bp, Homo sapien
tgaaatgtcctcatgtgttgtcact

SEQ ID NO: 5934056 - DNA, 25 bp, Homo sapien
gagagaagcagtcctcccaagagtg

SEQ ID NO: 5934057 - DNA, 25 bp, Homo sapien
tgtggcttgtgtctggacagtcagt

SEQ ID NO: 5934058 - DNA, 25 bp, Homo sapien
tgcagtaccaagcagcctgggtggg

SEQ ID NO: 5934059 - DNA, 25 bp, Homo sapien
gcggagatccagttagcaggcccaa

SEQ ID NO: 5934060 - DNA, 25 bp, Homo sapien
aattgccaggtttttctatggcatt

SEQ ID NO: 5934061 - DNA, 25 bp, Homo sapien
attctaccctcaaactggaggggtg

SEQ ID NO: 5934062 - DNA, 25 bp, Homo sapien
taatattccatttaatggatgcagc

SEQ ID NO: 5934063 - DNA, 25 bp, Homo sapien
gaaccgaacttggacttttattgat

SEQ ID NO: 5934064 - DNA, 25 bp, Homo sapien
aagaaaacacaaagacatcaagcat

SEQ ID NO: 5934065 - DNA, 25 bp, Homo sapien
aggtctctaatgtcatgctatgagg

SEQ ID NO: 5934066 - DNA, 25 bp, Homo sapien
tgtgttcagagatgcccagtacagt

SEQ ID NO: 5934067 - DNA, 25 bp, Homo sapien
tggaaatgagtgaaccgaacttgga

SEQ ID NO: 5934068 - DNA, 25 bp, Homo sapien
gtattgttgactatgtttttaattt

SEQ ID NO: 5934069 - DNA, 25 bp, Homo sapien
gttggagaggtcaggaggacgtctg

SEQ ID NO: 5934070 - DNA, 25 bp, Homo sapien
catcagagtgaatccagcaatgcag

SEQ ID NO: 5934071 - DNA, 25 bp, Homo sapien
gtctggacagtcagtggtaggcatg

SEQ ID NO: 5934072 - DNA, 25 bp, Homo sapien
tttctatggcattttataccaaaaa

SEQ ID NO: 5934073 - DNA, 25 bp, Homo sapien
acacaaagacatcaagcatcagagt

SEQ ID NO: 5934074 - DNA, 25 bp, Homo sapien
cccaatccaagaaatttaaactgga

SEQ ID NO: 5934075 - DNA, 25 bp, Homo sapien
aaaaaaataagtaggcggagatcca

SEQ ID NO: 5934076 - DNA, 25 bp, Homo sapien
gttgtcactttataaaaagggatat

SEQ ID NO: 5934077 - DNA, 25 bp, Homo sapien
tgagtgaaccgaacttggactttta

SEQ ID NO: 5934078 - DNA, 25 bp, Homo sapien
tcctggagactaaggtctctaatgt

SEQ ID NO: 5934079 - DNA, 25 bp, Homo sapien
cattctagggaggaggaaggcaggg

SEQ ID NO: 5934080 - DNA, 25 bp, Homo sapien
attttgctcgaggattcccccaatc

SEQ ID NO: 5934081 - DNA, 25 bp, Homo sapien
agcatcagagtgaatccagcaatgc

SEQ ID NO: 5934082 - DNA, 25 bp, Homo sapien
acaagatgtttcccaataacccaga

SEQ ID NO: 5934083 - DNA, 25 bp, Homo sapien
agtggtaggcatgtgacatttccct

SEQ ID NO: 5934084 - DNA, 25 bp, Homo sapien
aggaactggtggatccctttctgga

SEQ ID NO: 5934085 - DNA, 25 bp, Homo sapien
ttttacaaaagaaacacagtggcta

SEQ ID NO: 5934086 - DNA, 25 bp, Homo sapien
aatgggttcttgacaagatgtttcc

SEQ ID NO: 5934087 - DNA, 25 bp, Homo sapien
ttaaactggaaatgagtgaaccgaa

SEQ ID NO: 5934088 - DNA, 25 bp, Homo sapien
tttgccagtatcattgatgatttct

SEQ ID NO: 5934089 - DNA, 25 bp, Homo sapien
gttgatattgtaaaatgtttggtaa

SEQ ID NO: 5934090 - DNA, 25 bp, Homo sapien
tttaatggatgcagctcagtttatt

SEQ ID NO: 5934091 - DNA, 25 bp, Homo sapien
tggctgcaatcacccaatggacacc

SEQ ID NO: 5934092 - DNA, 25 bp, Homo sapien
attgatgatttcttgggctccattc

SEQ ID NO: 5934093 - DNA, 25 bp, Homo sapien
gagaagcagtcctcccaagagtggc

SEQ ID NO: 5934094 - DNA, 25 bp, Homo sapien
tctatggcattttataccaaaaaca

SEQ ID NO: 5934095 - DNA, 25 bp, Homo sapien
tcctacataatcgggttgatattgt

SEQ ID NO: 5934096 - DNA, 25 bp, Homo sapien
catttaatggatgcagctcagttta

SEQ ID NO: 5934097 - DNA, 25 bp, Homo sapien
gtttttaattttcttcattattata

SEQ ID NO: 5934098 - DNA, 25 bp, Homo sapien
ttgactatgtttttaattttcttca

SEQ ID NO: 5934099 - DNA, 25 bp, Homo sapien
ctcaaactggaggggtgaccatgct

SEQ ID NO: 5934100 - DNA, 25 bp, Homo sapien
cagcctgggtggggtgtgctagcaa

SEQ ID NO: 5934101 - DNA, 25 bp, Homo sapien
aaaaataagtaggcggagatccagt

SEQ ID NO: 5934102 - DNA, 25 bp, Homo sapien
aggttggagaggtcaggaggacgtc

SEQ ID NO: 5934103 - DNA, 25 bp, Homo sapien
tgacaaaaagctcagaaattacctt

SEQ ID NO: 5934104 - DNA, 25 bp, Homo sapien
gaatcttgtgtatataaaactttgc

SEQ ID NO: 5934105 - DNA, 25 bp, Homo sapien
acaaagacatcaagcatcagagtga

SEQ ID NO: 5934106 - DNA, 25 bp, Homo sapien
aagagtggcattctagggaggagga

SEQ ID NO: 5934107 - DNA, 25 bp, Homo sapien
acaaaagaaacacagtggctacttt

SEQ ID NO: 5934108 - DNA, 25 bp, Homo sapien
gagaggtcaggaggacgtctgagag

SEQ ID NO: 5934109 - DNA, 25 bp, Homo sapien
aggaggacgtctgagagaagcagtc

SEQ ID NO: 5934110 - DNA, 25 bp, Homo sapien
gatgcccagtacagtgtcctggaga

SEQ ID NO: 5934111 - DNA, 25 bp, Homo sapien
actttgccagtatcattgatgattt

SEQ ID NO: 5934112 - DNA, 25 bp, Homo sapien
agaaatttaaactggaaatgagtga

SEQ ID NO: 5934113 - DNA, 25 bp, Homo sapien
ataaaaagggatattctaccctcaa

SEQ ID NO: 5934114 - DNA, 25 bp, Homo sapien
tggcattttataccaaaaacaggtt

SEQ ID NO: 5934115 - DNA, 25 bp, Homo sapien
caggttagcggttatataatattcc

SEQ ID NO: 5934116 - DNA, 25 bp, Homo sapien
ggtaactttttctttcagaattgcc

SEQ ID NO: 5934117 - DNA, 25 bp, Homo sapien
gaaggacctacttttaaaatgtgaa

SEQ ID NO: 5934118 - DNA, 25 bp, Homo sapien
cagacccttaacataactagcaaat

SEQ ID NO: 5934119 - DNA, 25 bp, Homo sapien
tgtatataaaactttgccagtatca

SEQ ID NO: 5934120 - DNA, 25 bp, Homo sapien
agattttgctcgaggattcccccaa

SEQ ID NO: 5934121 - DNA, 25 bp, Homo sapien
acataactagcaaatttactttagt

SEQ ID NO: 5934122 - DNA, 25 bp, Homo sapien
gatgtttcccaataacccagaccct

SEQ ID NO: 5934123 - DNA, 25 bp, Homo sapien
atgctgacaaaaagctcagaaatta

SEQ ID NO: 5934124 - DNA, 25 bp, Homo sapien
cactttataaaaagggatattctac

SEQ ID NO: 5934125 - DNA, 25 bp, Homo sapien
cagtacagtgtcctggagactaagg

SEQ ID NO: 5934126 - DNA, 25 bp, Homo sapien
gacttttattgattccccttttatg

SEQ ID NO: 5934127 - DNA, 25 bp, Homo sapien
gggttgatattgtaaaatgtttggt

SEQ ID NO: 5934128 - DNA, 25 bp, Homo sapien
acttttaaaatgtgaaatgtcctca

SEQ ID NO: 5934129 - DNA, 25 bp, Homo sapien
gtggatccctttctggacacaagaa

SEQ ID NO: 5934130 - DNA, 25 bp, Homo sapien
cccagtacagtgtcctggagactaa

SEQ ID NO: 5934131 - DNA, 25 bp, Homo sapien
ctggacagtcagtggtaggcatgtg

SEQ ID NO: 5934132 - DNA, 25 bp, Homo sapien
gtacagtgtcctggagactaaggtc

SEQ ID NO: 5934133 - DNA, 25 bp, Homo sapien
gcatgtgacatttccctggtgggaa

SEQ ID NO: 5934134 - DNA, 25 bp, Homo sapien
agatccagttagcaggcccaagatt

SEQ ID NO: 5934135 - DNA, 25 bp, Homo sapien
tataatattccatttaatggatgca

SEQ ID NO: 5934136 - DNA, 25 bp, Homo sapien
cagtaccaagcagcctgggtggggt

SEQ ID NO: 5934137 - DNA, 25 bp, Homo sapien
ccaggttggagaggtcaggaggacg

SEQ ID NO: 5934138 - DNA, 25 bp, Homo sapien
gaggacgtctgagagaagcagtcct

SEQ ID NO: 5934139 - DNA, 25 bp, Homo sapien
aatgagtgaaccgaacttggacttt

SEQ ID NO: 5934140 - DNA, 25 bp, Homo sapien
gacccttaacataactagcaaattt

SEQ ID NO: 5934141 - DNA, 25 bp, Homo sapien
tgaaccaggttggagaggtcaggag

SEQ ID NO: 5934142 - DNA, 25 bp, Homo sapien
aatgcagtaccaagcagcctgggtg

SEQ ID NO: 5934143 - DNA, 25 bp, Homo sapien
acctacttttaaaatgtgaaatgtc

SEQ ID NO: 5934144 - DNA, 25 bp, Homo sapien
acagtcagtggtaggcatgtgacat

SEQ ID NO: 5934145 - DNA, 25 bp, Homo sapien
atgtttttaattttcttcattatta

SEQ ID NO: 5934146 - DNA, 25 bp, Homo sapien
ttacaaaagaaacacagtggctact

SEQ ID NO: 5934147 - DNA, 25 bp, Homo sapien
ggttagcggttatataatattccat

SEQ ID NO: 5934148 - DNA, 25 bp, Homo sapien
aacaggttagcggttatataatatt

SEQ ID NO: 5934149 - DNA, 25 bp, Homo sapien
cctgtgttcagagatgcccagtaca

SEQ ID NO: 5934150 - DNA, 25 bp, Homo sapien
taatggatgcagctcagtttattta

SEQ ID NO: 5934151 - DNA, 25 bp, Homo sapien
cccaatggacaccctgtgttcagag

SEQ ID NO: 5934152 - DNA, 25 bp, Homo sapien
gctgacaaaaagctcagaaattacc

SEQ ID NO: 5934153 - DNA, 25 bp, Homo sapien
cgaacttggacttttattgattccc

SEQ ID NO: 5934154 - DNA, 25 bp, Homo sapien
tatgaggaacaaggaggaagaagaa

SEQ ID NO: 5934155 - DNA, 25 bp, Homo sapien
tcagaattgccaggtttttctatgg

SEQ ID NO: 5934156 - DNA, 25 bp, Homo sapien
aaaacaggttagcggttatataata

SEQ ID NO: 5934157 - DNA, 25 bp, Homo sapien
ttcttgacaagatgtttcccaataa

SEQ ID NO: 5934158 - DNA, 25 bp, Homo sapien
ggaaaaaaataagtaggcggagatc

SEQ ID NO: 5934159 - DNA, 25 bp, Homo sapien
tgcgaatgggttcttgacaagatgt

SEQ ID NO: 5934160 - DNA, 25 bp, Homo sapien
gcaatgcagtaccaagcagcctggg

SEQ ID NO: 5934161 - DNA, 25 bp, Homo sapien
ggaagaatcttgtgtatataaaact

SEQ ID NO: 5934162 - DNA, 25 bp, Homo sapien
gtctctaatgtcatgctatgaggaa

SEQ ID NO: 5934163 - DNA, 25 bp, Homo sapien
tatataaaactttgccagtatcatt

SEQ ID NO: 5934164 - DNA, 25 bp, Homo sapien
ctacttttaaaatgtgaaatgtcct

SEQ ID NO: 5934165 - DNA, 25 bp, Homo sapien
ctttctggacacaagaaaacacaaa

SEQ ID NO: 5934166 - DNA, 25 bp, Homo sapien
ttgggctccattcccatgaaggacc

SEQ ID NO: 5934167 - DNA, 25 bp, Homo sapien
tgatattgtaaaatgtttggtaact

SEQ ID NO: 5934168 - DNA, 25 bp, Homo sapien
tgcaatcacccaatggacaccctgt

SEQ ID NO: 5934169 - DNA, 25 bp, Homo sapien
gaaaacacaaagacatcaagcatca

SEQ ID NO: 5934170 - DNA, 25 bp, Homo sapien
cggttatataatattccatttaatg

SEQ ID NO: 5934171 - DNA, 25 bp, Homo sapien
aaatgtcctcatgtgttgtcacttt

SEQ ID NO: 5934172 - DNA, 25 bp, Homo sapien
agcagtcctcccaagagtggcattc

SEQ ID NO: 5934173 - DNA, 25 bp, Homo sapien
ggagatccagttagcaggcccaaga

SEQ ID NO: 5934174 - DNA, 25 bp, Homo sapien
gaggtcaggaggacgtctgagagaa

SEQ ID NO: 5934175 - DNA, 25 bp, Homo sapien
gtgtctggacagtcagtggtaggca

SEQ ID NO: 5934176 - DNA, 25 bp, Homo sapien
ggatccctttctggacacaagaaaa

SEQ ID NO: 5934177 - DNA, 25 bp, Homo sapien
cctgaaccaggttggagaggtcagg

SEQ ID NO: 5934178 - DNA, 25 bp, Homo sapien
ctgagagaagcagtcctcccaagag

SEQ ID NO: 5934179 - DNA, 25 bp, Homo sapien
acgtctgagagaagcagtcctccca

SEQ ID NO: 5934180 - DNA, 25 bp, Homo sapien
cagtttatttaaccattcctgtatt

SEQ ID NO: 5934181 - DNA, 25 bp, Homo sapien
cccttaacataactagcaaatttac

SEQ ID NO: 5934182 - DNA, 25 bp, Homo sapien
ttagcggttatataatattccattt

SEQ ID NO: 5934183 - DNA, 25 bp, Homo sapien
atgctatgaggaacaaggaggaaga

SEQ ID NO: 5934184 - DNA, 25 bp, Homo sapien
ggatattctaccctcaaactggagg

SEQ ID NO: 5934185 - DNA, 25 bp, Homo sapien
aactggaggggtgaccatgctgaca

SEQ ID NO: 5934186 - DNA, 25 bp, Homo sapien
ttcccatgaaggacctacttttaaa

SEQ ID NO: 5934187 - DNA, 25 bp, Homo sapien
tagtcctgaaccaggttggagaggt

SEQ ID NO: 5934188 - DNA, 25 bp, Homo sapien
ttataaaaagggatattctaccctc

SEQ ID NO: 5934189 - DNA, 25 bp, Homo sapien
ttctggacacaagaaaacacaaaga

SEQ ID NO: 5934190 - DNA, 25 bp, Homo sapien
tgatgatttcttgggctccattccc

SEQ ID NO: 5934191 - DNA, 25 bp, Homo sapien
caatcacccaatggacaccctgtgt

SEQ ID NO: 5934192 - DNA, 25 bp, Homo sapien
tagtaggaactggtggatccctttc

SEQ ID NO: 5934193 - DNA, 25 bp, Homo sapien
agtgtcctggagactaaggtctcta

SEQ ID NO: 5934194 - DNA, 25 bp, Homo sapien
gaaggcagggtgtggcttgtgtctg

SEQ ID NO: 5934195 - DNA, 25 bp, Homo sapien
atttaaccattcctgtattgttgac

SEQ ID NO: 5934196 - DNA, 25 bp, Homo sapien
cccagacccttaacataactagcaa

SEQ ID NO: 5934197 - DNA, 25 bp, Homo sapien
gctgcaatcacccaatggacaccct

SEQ ID NO: 5934198 - DNA, 25 bp, Homo sapien
tttttctatggcattttataccaaa

SEQ ID NO: 5934199 - DNA, 25 bp, Homo sapien
cagagatgcccagtacagtgtcctg

SEQ ID NO: 5934200 - DNA, 25 bp, Homo sapien
ggtcaggaggacgtctgagagaagc

SEQ ID NO: 5934201 - DNA, 25 bp, Homo sapien
ctttttacaaaagaaacacagtggc

SEQ ID NO: 5934202 - DNA, 25 bp, Homo sapien
aatgtgaaatgtcctcatgtgttgt

SEQ ID NO: 5934203 - DNA, 25 bp, Homo sapien
aaatttaaactggaaatgagtgaac

SEQ ID NO: 5934204 - DNA, 25 bp, Homo sapien
tggcaaagttttatatacacaagat

SEQ ID NO: 5934205 - DNA, 25 bp, Homo sapien
atcatcaatgatactggcaaagttt

SEQ ID NO: 5934206 - DNA, 25 bp, Homo sapien
ttggtactgcattgctggattcact

SEQ ID NO: 5934207 - DNA, 25 bp, Homo sapien
tagcacaccccacccaggctgcttg

SEQ ID NO: 5934208 - DNA, 25 bp, Homo sapien
tgatactggcaaagttttatataca

SEQ ID NO: 5934209 - DNA, 25 bp, Homo sapien
tccaggacactgtactgggcatctc

SEQ ID NO: 5934210 - DNA, 25 bp, Homo sapien
atgggaatggagcccaagaaatcat

SEQ ID NO: 5934211 - DNA, 25 bp, Homo sapien
agggtctgggttattgggaaacatc

SEQ ID NO: 5934212 - DNA, 25 bp, Homo sapien
gcttggtactgcattgctggattca

SEQ ID NO: 5934213 - DNA, 25 bp, Homo sapien
tccattaaatggaatattatataac

SEQ ID NO: 5934214 - DNA, 25 bp, Homo sapien
ttcctcatagcatgacattagagac

SEQ ID NO: 5934215 - DNA, 25 bp, Homo sapien
gaacacagggtgtccattgggtgat

SEQ ID NO: 5934216 - DNA, 25 bp, Homo sapien
gcattgctggattcactctgatgct

SEQ ID NO: 5934217 - DNA, 25 bp, Homo sapien
ggaatggttaaataaactgagctgc

SEQ ID NO: 5934218 - DNA, 25 bp, Homo sapien
gaatatccctttttataaagtgaca

SEQ ID NO: 5934219 - DNA, 25 bp, Homo sapien
tccagtttgagggtagaatatccct

SEQ ID NO: 5934220 - DNA, 25 bp, Homo sapien
gccactgtgtttcttttgtaaaaag

SEQ ID NO: 5934221 - DNA, 25 bp, Homo sapien
gctagcacaccccacccaggctgct

SEQ ID NO: 5934222 - DNA, 25 bp, Homo sapien
cttgtcaagaacccattcgcaacta

SEQ ID NO: 5934223 - DNA, 25 bp, Homo sapien
aaagtgacaacacatgaggacattt

SEQ ID NO: 5934224 - DNA, 25 bp, Homo sapien
attcgcaactaaagtagccactgtg

SEQ ID NO: 5934225 - DNA, 25 bp, Homo sapien
cctgacctctccaacctggttcagg

SEQ ID NO: 5934226 - DNA, 25 bp, Homo sapien
agttcggttcactcatttccagttt

SEQ ID NO: 5934227 - DNA, 25 bp, Homo sapien
acagggtgtccattgggtgattgca

SEQ ID NO: 5934228 - DNA, 25 bp, Homo sapien
ccatagaaaaacctggcaattctga

SEQ ID NO: 5934229 - DNA, 25 bp, Homo sapien
tctgggttattgggaaacatcttgt

SEQ ID NO: 5934230 - DNA, 25 bp, Homo sapien
cctccttgttcctcatagcatgaca

SEQ ID NO: 5934231 - DNA, 25 bp, Homo sapien
agccacaccctgccttcctcctccc

SEQ ID NO: 5934232 - DNA, 25 bp, Homo sapien
gggtgattgcagccagttgctagca

SEQ ID NO: 5934233 - DNA, 25 bp, Homo sapien
tgaagaaaattaaaaacatagtcaa

SEQ ID NO: 5934234 - DNA, 25 bp, Homo sapien
atcaataaaagtccaagttcggttc

SEQ ID NO: 5934235 - DNA, 25 bp, Homo sapien
ttttttcccaccagggaaatgtcac

SEQ ID NO: 5934236 - DNA, 25 bp, Homo sapien
atactggcaaagttttatatacaca

SEQ ID NO: 5934237 - DNA, 25 bp, Homo sapien
tatcaacccgattatgtaggaaaag

SEQ ID NO: 5934238 - DNA, 25 bp, Homo sapien
atttcttggattgggggaatcctcg

SEQ ID NO: 5934239 - DNA, 25 bp, Homo sapien
ttttacaatatcaacccgattatgt

SEQ ID NO: 5934240 - DNA, 25 bp, Homo sapien
ctgctaactggatctccgcctactt

SEQ ID NO: 5934241 - DNA, 25 bp, Homo sapien
tcaagaacccattcgcaactaaagt

SEQ ID NO: 5934242 - DNA, 25 bp, Homo sapien
attgctggattcactctgatgcttg

SEQ ID NO: 5934243 - DNA, 25 bp, Homo sapien
gaaaattaaaaacatagtcaacaat

SEQ ID NO: 5934244 - DNA, 25 bp, Homo sapien
cctccctagaatgccactcttggga

SEQ ID NO: 5934245 - DNA, 25 bp, Homo sapien
agtaggtccttcatgggaatggagc

SEQ ID NO: 5934246 - DNA, 25 bp, Homo sapien
aacctgtttttggtataaaatgcca

SEQ ID NO: 5934247 - DNA, 25 bp, Homo sapien
tcttttgtaaaaaggtaatttctga

SEQ ID NO: 5934248 - DNA, 25 bp, Homo sapien
gaccttagtctccaggacactgtac

SEQ ID NO: 5934249 - DNA, 25 bp, Homo sapien
ctcctgacctctccaacctggttca

SEQ ID NO: 5934250 - DNA, 25 bp, Homo sapien
ctgcattgctggattcactctgatg

SEQ ID NO: 5934251 - DNA, 25 bp, Homo sapien
gattgcagccagttgctagcacacc

SEQ ID NO: 5934252 - DNA, 25 bp, Homo sapien
tagagaccttagtctccaggacact

SEQ ID NO: 5934253 - DNA, 25 bp, Homo sapien
caagaaatcatcaatgatactggca

SEQ ID NO: 5934254 - DNA, 25 bp, Homo sapien
gggaatcaataaaagtccaagttcg

SEQ ID NO: 5934255 - DNA, 25 bp, Homo sapien
ttcacattttaaaagtaggtccttc

SEQ ID NO: 5934256 - DNA, 25 bp, Homo sapien
cccctccagtttgagggtagaatat

SEQ ID NO: 5934257 - DNA, 25 bp, Homo sapien
tagttatgttaagggtctgggttat

SEQ ID NO: 5934258 - DNA, 25 bp, Homo sapien
atatccctttttataaagtgacaac

SEQ ID NO: 5934259 - DNA, 25 bp, Homo sapien
ccagttgctagcacaccccacccag

SEQ ID NO: 5934260 - DNA, 25 bp, Homo sapien
atatacacaagattcttccaatatt

SEQ ID NO: 5934261 - DNA, 25 bp, Homo sapien
actgtactgggcatctctgaacaca

SEQ ID NO: 5934262 - DNA, 25 bp, Homo sapien
attagagaccttagtctccaggaca

SEQ ID NO: 5934263 - DNA, 25 bp, Homo sapien
cttggattgggggaatcctcgagca

SEQ ID NO: 5934264 - DNA, 25 bp, Homo sapien
taaaagtccaagttcggttcactca

SEQ ID NO: 5934265 - DNA, 25 bp, Homo sapien
gctaactggatctccgcctacttat

SEQ ID NO: 5934266 - DNA, 25 bp, Homo sapien
tctttgtgttttcttgtgtccagaa

SEQ ID NO: 5934267 - DNA, 25 bp, Homo sapien
gagaccttagtctccaggacactgt

SEQ ID NO: 5934268 - DNA, 25 bp, Homo sapien
tttgtaaaaaggtaatttctgagct

SEQ ID NO: 5934269 - DNA, 25 bp, Homo sapien
tggttaaataaactgagctgcatcc

SEQ ID NO: 5934270 - DNA, 25 bp, Homo sapien
gcaaagttttatatacacaagattc

SEQ ID NO: 5934271 - DNA, 25 bp, Homo sapien
ctcatttccagtttaaatttcttgg

SEQ ID NO: 5934272 - DNA, 25 bp, Homo sapien
atggaatattatataaccgctaacc

SEQ ID NO: 5934273 - DNA, 25 bp, Homo sapien
cccaggctgcttggtactgcattgc

SEQ ID NO: 5934274 - DNA, 25 bp, Homo sapien
ggaaatgtcacatgcctaccactga

SEQ ID NO: 5934275 - DNA, 25 bp, Homo sapien
gtataaaatgccatagaaaaacctg

SEQ ID NO: 5934276 - DNA, 25 bp, Homo sapien
ttcctccttgttcctcatagcatga

SEQ ID NO: 5934277 - DNA, 25 bp, Homo sapien
ggttattgggaaacatcttgtcaag

SEQ ID NO: 5934278 - DNA, 25 bp, Homo sapien
gactattcttcttcctccttgttcc

SEQ ID NO: 5934279 - DNA, 25 bp, Homo sapien
ctttttataaagtgacaacacatga

SEQ ID NO: 5934280 - DNA, 25 bp, Homo sapien
cacccctccagtttgagggtagaat

SEQ ID NO: 5934281 - DNA, 25 bp, Homo sapien
aagaaaattaaaaacatagtcaaca

SEQ ID NO: 5934282 - DNA, 25 bp, Homo sapien
tcatgggaatggagcccaagaaatc

SEQ ID NO: 5934283 - DNA, 25 bp, Homo sapien
cattaaatggaatattatataaccg

SEQ ID NO: 5934284 - DNA, 25 bp, Homo sapien
ccctgccttcctcctccctagaatg

SEQ ID NO: 5934285 - DNA, 25 bp, Homo sapien
caccctgccttcctcctccctagaa

SEQ ID NO: 5934286 - DNA, 25 bp, Homo sapien
actaaagtaaatttgctagttatgt

SEQ ID NO: 5934287 - DNA, 25 bp, Homo sapien
gcatctctgaacacagggtgtccat

SEQ ID NO: 5934288 - DNA, 25 bp, Homo sapien
acaccccacccaggctgcttggtac

SEQ ID NO: 5934289 - DNA, 25 bp, Homo sapien
actgactgtccagacacaagccaca

SEQ ID NO: 5934290 - DNA, 25 bp, Homo sapien
catagtcaacaatacaggaatggtt

SEQ ID NO: 5934291 - DNA, 25 bp, Homo sapien
ctctccaacctggttcaggactatt

SEQ ID NO: 5934292 - DNA, 25 bp, Homo sapien
ctctgaacacagggtgtccattggg

SEQ ID NO: 5934293 - DNA, 25 bp, Homo sapien
ttctgagctttttgtcagcatggtc

SEQ ID NO: 5934294 - DNA, 25 bp, Homo sapien
gtgattgcagccagttgctagcaca

SEQ ID NO: 5934295 - DNA, 25 bp, Homo sapien
aatacaggaatggttaaataaactg

SEQ ID NO: 5934296 - DNA, 25 bp, Homo sapien
taaccgctaacctgtttttggtata

SEQ ID NO: 5934297 - DNA, 25 bp, Homo sapien
gttcctactaaagtaaatttgctag

SEQ ID NO: 5934298 - DNA, 25 bp, Homo sapien
acatcttgtcaagaacccattcgca

SEQ ID NO: 5934299 - DNA, 25 bp, Homo sapien
tgcatccattaaatggaatattata

SEQ ID NO: 5934300 - DNA, 25 bp, Homo sapien
gagctgcatccattaaatggaatat

SEQ ID NO: 5934301 - DNA, 25 bp, Homo sapien
acctggcaattctgaaagaaaaagt

SEQ ID NO: 5934302 - DNA, 25 bp, Homo sapien
atctctgaacacagggtgtccattg

SEQ ID NO: 5934303 - DNA, 25 bp, Homo sapien
tgggttattgggaaacatcttgtca

SEQ ID NO: 5934304 - DNA, 25 bp, Homo sapien
tttttgtcagcatggtcacccctcc

SEQ ID NO: 5934305 - DNA, 25 bp, Homo sapien
agggtgtccattgggtgattgcagc

SEQ ID NO: 5934306 - DNA, 25 bp, Homo sapien
caagccacaccctgccttcctcctc

SEQ ID NO: 5934307 - DNA, 25 bp, Homo sapien
agtagccactgtgtttcttttgtaa

SEQ ID NO: 5934308 - DNA, 25 bp, Homo sapien
gttatgttaagggtctgggttattg

SEQ ID NO: 5934309 - DNA, 25 bp, Homo sapien
aaacatcttgtcaagaacccattcg

SEQ ID NO: 5934310 - DNA, 25 bp, Homo sapien
ttaccaaacattttacaatatcaac

SEQ ID NO: 5934311 - DNA, 25 bp, Homo sapien
agttttatatacacaagattcttcc

SEQ ID NO: 5934312 - DNA, 25 bp, Homo sapien
taaaagtaggtccttcatgggaatg

SEQ ID NO: 5934313 - DNA, 25 bp, Homo sapien
aatcttgggcctgctaactggatct

SEQ ID NO: 5934314 - DNA, 25 bp, Homo sapien
ataaagtgacaacacatgaggacat

SEQ ID NO: 5934315 - DNA, 25 bp, Homo sapien
aaagttttatatacacaagattctt

SEQ ID NO: 5934316 - DNA, 25 bp, Homo sapien
tccattgggtgattgcagccagttg

SEQ ID NO: 5934317 - DNA, 25 bp, Homo sapien
ttgagggtagaatatccctttttat

SEQ ID NO: 5934318 - DNA, 25 bp, Homo sapien
tgtcaagaacccattcgcaactaaa

SEQ ID NO: 5934319 - DNA, 25 bp, Homo sapien
tctccaggacactgtactgggcatc

SEQ ID NO: 5934320 - DNA, 25 bp, Homo sapien
ggctgcttggtactgcattgctgga

SEQ ID NO: 5934321 - DNA, 25 bp, Homo sapien
tcgagcaaaatcttgggcctgctaa

SEQ ID NO: 5934322 - DNA, 25 bp, Homo sapien
gcctgctaactggatctccgcctac

SEQ ID NO: 5934323 - DNA, 25 bp, Homo sapien
cagaaagggatccaccagttcctac

SEQ ID NO: 5934324 - DNA, 25 bp, Homo sapien
ttttcttgtgtccagaaagggatcc

SEQ ID NO: 5934325 - DNA, 25 bp, Homo sapien
aaagtaggtccttcatgggaatgga

SEQ ID NO: 5934326 - DNA, 25 bp, Homo sapien
tgtccattgggtgattgcagccagt

SEQ ID NO: 5934327 - DNA, 25 bp, Homo sapien
tggattgggggaatcctcgagcaaa

SEQ ID NO: 5934328 - DNA, 25 bp, Homo sapien
tccttcatgggaatggagcccaaga

SEQ ID NO: 5934329 - DNA, 25 bp, Homo sapien
cagttcctactaaagtaaatttgct

SEQ ID NO: 5934330 - DNA, 25 bp, Homo sapien
attcactctgatgcttgatgtcttt

SEQ ID NO: 5934331 - DNA, 25 bp, Homo sapien
gcttgatgtctttgtgttttcttgt

SEQ ID NO: 5934332 - DNA, 25 bp, Homo sapien
cctcatagcatgacattagagacct

SEQ ID NO: 5934333 - DNA, 25 bp, Homo sapien
agggaaatgtcacatgcctaccact

SEQ ID NO: 5934334 - DNA, 25 bp, Homo sapien
ggtactgcattgctggattcactct

SEQ ID NO: 5934335 - DNA, 25 bp, Homo sapien
accccacccaggctgcttggtactg

SEQ ID NO: 5934336 - DNA, 25 bp, Homo sapien
attgggaaacatcttgtcaagaacc

SEQ ID NO: 5934337 - DNA, 25 bp, Homo sapien
aatggttaaataaactgagctgcat

SEQ ID NO: 5934338 - DNA, 25 bp, Homo sapien
gccttcctcctccctagaatgccac

SEQ ID NO: 5934339 - DNA, 25 bp, Homo sapien
tagaatgccactcttgggaggactg

SEQ ID NO: 5934340 - DNA, 25 bp, Homo sapien
ttttataaagtgacaacacatgagg

SEQ ID NO: 5934341 - DNA, 25 bp, Homo sapien
tccagacacaagccacaccctgcct

SEQ ID NO: 5934342 - DNA, 25 bp, Homo sapien
cacatgaggacatttcacattttaa

SEQ ID NO: 5934343 - DNA, 25 bp, Homo sapien
tgtaaaaaggtaatttctgagcttt

SEQ ID NO: 5934344 - DNA, 25 bp, Homo sapien
tggatctccgcctacttattttttt

SEQ ID NO: 5934345 - DNA, 25 bp, Homo sapien
agcatggtcacccctccagtttgag

SEQ ID NO: 5934346 - DNA, 25 bp, Homo sapien
tgtctttgtgttttcttgtgtccag

SEQ ID NO: 5934347 - DNA, 25 bp, Homo sapien
tattatataaccgctaacctgtttt

SEQ ID NO: 5934348 - DNA, 25 bp, Homo sapien
gacatttcacattttaaaagtaggt

SEQ ID NO: 5934349 - DNA, 25 bp, Homo sapien
actggatctccgcctacttattttt

SEQ ID NO: 5934350 - DNA, 25 bp, Homo sapien
cattttaaaagtaggtccttcatgg

SEQ ID NO: 5934351 - DNA, 25 bp, Homo sapien
cccaagaaatcatcaatgatactgg

SEQ ID NO: 5934352 - DNA, 25 bp, Homo sapien
ggtctgggttattgggaaacatctt

SEQ ID NO: 5934353 - DNA, 25 bp, Homo sapien
ttagtctccaggacactgtactggg

SEQ ID NO: 5934354 - DNA, 25 bp, Homo sapien
ctggcaattctgaaagaaaaagtta

SEQ ID NO: 5934355 - DNA, 25 bp, Homo sapien
gctgcatccattaaatggaatatta

SEQ ID NO: 5934356 - DNA, 25 bp, Homo sapien
agaaaaacctggcaattctgaaaga

SEQ ID NO: 5934357 - DNA, 25 bp, Homo sapien
ttcggttcactcatttccagtttaa

SEQ ID NO: 5934358 - DNA, 25 bp, Homo sapien
tcgcaactaaagtagccactgtgtt

SEQ ID NO: 5934359 - DNA, 25 bp, Homo sapien
gactgcttctctcagacgtcctcct

SEQ ID NO: 5934360 - DNA, 25 bp, Homo sapien
tcctcctgacctctccaacctggtt

SEQ ID NO: 5934361 - DNA, 25 bp, Homo sapien
aaaaacctggcaattctgaaagaaa

SEQ ID NO: 5934362 - DNA, 25 bp, Homo sapien
agttgctagcacaccccacccaggc

SEQ ID NO: 5934363 - DNA, 25 bp, Homo sapien
agcccaagaaatcatcaatgatact

SEQ ID NO: 5934364 - DNA, 25 bp, Homo sapien
taagggtctgggttattgggaaaca

SEQ ID NO: 5934365 - DNA, 25 bp, Homo sapien
ctcctccctagaatgccactcttgg

SEQ ID NO: 5934366 - DNA, 25 bp, Homo sapien
tgggaaacatcttgtcaagaaccca

SEQ ID NO: 5934367 - DNA, 25 bp, Homo sapien
ggaaacatcttgtcaagaacccatt

SEQ ID NO: 5934368 - DNA, 25 bp, Homo sapien
gcaactaaagtagccactgtgtttc

SEQ ID NO: 5934369 - DNA, 25 bp, Homo sapien
aaagtccaagttcggttcactcatt

SEQ ID NO: 5934370 - DNA, 25 bp, Homo sapien
tttccagtttaaatttcttggattg

SEQ ID NO: 5934371 - DNA, 25 bp, Homo sapien
tttgtgttttcttgtgtccagaaag

SEQ ID NO: 5934372 - DNA, 25 bp, Homo sapien
ttgctagttatgttaagggtctggg

SEQ ID NO: 5934373 - DNA, 25 bp, Homo sapien
agttaccaaacattttacaatatca

SEQ ID NO: 5934374 - DNA, 25 bp, Homo sapien
taataatgaagaaaattaaaaacat

SEQ ID NO: 5934375 - DNA, 25 bp, Homo sapien
ttacaatatcaacccgattatgtag

SEQ ID NO: 5934376 - DNA, 25 bp, Homo sapien
ttgggcctgctaactggatctccgc

SEQ ID NO: 5934377 - DNA, 25 bp, Homo sapien
tataataatgaagaaaattaaaaac

SEQ ID NO: 5934378 - DNA, 25 bp, Homo sapien
tcctactaaagtaaatttgctagtt

SEQ ID NO: 5934379 - DNA, 25 bp, Homo sapien
cataaaaggggaatcaataaaagtc

SEQ ID NO: 5934380 - DNA, 25 bp, Homo sapien
aaaatcttgggcctgctaactggat

SEQ ID NO: 5934381 - DNA, 25 bp, Homo sapien
cagtttgagggtagaatatcccttt

SEQ ID NO: 5934382 - DNA, 25 bp, Homo sapien
tcccccataaaaggggaatcaataa

SEQ ID NO: 5934383 - DNA, 25 bp, Homo sapien
tccagaaagggatccaccagttcct

SEQ ID NO: 5934384 - DNA, 25 bp, Homo sapien
tcaggactattcttcttcctccttg

SEQ ID NO: 5934385 - DNA, 25 bp, Homo sapien
tgttaagggtctgggttattgggaa

SEQ ID NO: 5934386 - DNA, 25 bp, Homo sapien
ggtccttcatgggaatggagcccaa

SEQ ID NO: 5934387 - DNA, 25 bp, Homo sapien
ttttcccaccagggaaatgtcacat

SEQ ID NO: 5934388 - DNA, 25 bp, Homo sapien
attaaaaacatagtcaacaatacag

SEQ ID NO: 5934389 - DNA, 25 bp, Homo sapien
ttattgggaaacatcttgtcaagaa

SEQ ID NO: 5934390 - DNA, 25 bp, Homo sapien
cagacacaagccacaccctgccttc

SEQ ID NO: 5934391 - DNA, 25 bp, Homo sapien
acctctccaacctggttcaggacta

SEQ ID NO: 5934392 - DNA, 25 bp, Homo sapien
acaatacaggaatggttaaataaac

SEQ ID NO: 5934393 - DNA, 25 bp, Homo sapien
aactgagctgcatccattaaatgga

SEQ ID NO: 5934394 - DNA, 25 bp, Homo sapien
cctaccactgactgtccagacacaa

SEQ ID NO: 5934395 - DNA, 25 bp, Homo sapien
cacaccctgccttcctcctccctag

SEQ ID NO: 5934396 - DNA, 25 bp, Homo sapien
gaatgccactcttgggaggactgct

SEQ ID NO: 5934397 - DNA, 25 bp, Homo sapien
aacctggttcaggactattcttctt

SEQ ID NO: 5934398 - DNA, 25 bp, Homo sapien
tttaaaagtaggtccttcatgggaa

SEQ ID NO: 5934399 - DNA, 25 bp, Homo sapien
ccctttttataaagtgacaacacat

SEQ ID NO: 5934400 - DNA, 25 bp, Homo sapien
cctgtttttggtataaaatgccata

SEQ ID NO: 5934401 - DNA, 25 bp, Homo sapien
agtccaagttcggttcactcatttc

SEQ ID NO: 5934402 - DNA, 25 bp, Homo sapien
tcactctgatgcttgatgtctttgt

SEQ ID NO: 5934403 - DNA, 25 bp, Homo sapien
tacaggaatggttaaataaactgag

SEQ ID NO: 5934404 - DNA, 25 bp, Homo sapien
ctgccttcctcctccctagaatgcc

SEQ ID NO: 5934405 - DNA, 25 bp, Homo sapien
ctcttgggaggactgcttctctcag

SEQ ID NO: 5934406 - DNA, 25 bp, Homo sapien
tactgggcatctctgaacacagggt

SEQ ID NO: 5934407 - DNA, 25 bp, Homo sapien
gtaaatttgctagttatgttaaggg

SEQ ID NO: 5934408 - DNA, 25 bp, Homo sapien
aatgccatagaaaaacctggcaatt

SEQ ID NO: 5934409 - DNA, 25 bp, Homo sapien
tctgaaagaaaaagttaccaaacat

SEQ ID NO: 5934410 - DNA, 25 bp, Homo sapien
gggaatggagcccaagaaatcatca

SEQ ID NO: 5934411 - DNA, 25 bp, Homo sapien
acaatatcaacccgattatgtagga

SEQ ID NO: 5934412 - DNA, 25 bp, Homo sapien
atgcttgatgtctttgtgttttctt

SEQ ID NO: 5934413 - DNA, 25 bp, Homo sapien
tccctagaatgccactcttgggagg

SEQ ID NO: 5934414 - DNA, 25 bp, Homo sapien
cattgggtgattgcagccagttgct

SEQ ID NO: 5934415 - DNA, 25 bp, Homo sapien
ttataaagtgacaacacatgaggac

SEQ ID NO: 5934416 - DNA, 25 bp, Homo sapien
caagttcggttcactcatttccagt

SEQ ID NO: 5934417 - DNA, 25 bp, Homo sapien
aatattatataaccgctaacctgtt

SEQ ID NO: 5934418 - DNA, 25 bp, Homo sapien
aatgaagaaaattaaaaacatagtc

SEQ ID NO: 5934419 - DNA, 25 bp, Homo sapien
tgtactgggcatctctgaacacagg

SEQ ID NO: 5934420 - DNA, 25 bp, Homo sapien
cacccaggctgcttggtactgcatt

SEQ ID NO: 5934421 - DNA, 25 bp, Homo sapien
ggcaattctgaaagaaaaagttacc

SEQ ID NO: 5934422 - DNA, 25 bp, Homo sapien
gcaaaatcttgggcctgctaactgg

SEQ ID NO: 5934423 - DNA, 25 bp, Homo sapien
gttcaggactattcttcttcctcct

SEQ ID NO: 5934424 - DNA, 25 bp, Homo sapien
gattgggggaatcctcgagcaaaat

SEQ ID NO: 5934425 - DNA, 25 bp, Homo sapien
gaaagggatccaccagttcctacta

SEQ ID NO: 5934426 - DNA, 25 bp, Homo sapien
ctgagctgcatccattaaatggaat

SEQ ID NO: 5934427 - DNA, 25 bp, Homo sapien
atgccactcttgggaggactgcttc

SEQ ID NO: 5934428 - DNA, 25 bp, Homo sapien
gggcatctctgaacacagggtgtcc

SEQ ID NO: 5934429 - DNA, 25 bp, Homo sapien
tgttttcttgtgtccagaaagggat

SEQ ID NO: 5934430 - DNA, 25 bp, Homo sapien
catgaggacatttcacattttaaaa

SEQ ID NO: 5934431 - DNA, 25 bp, Homo sapien
tccaccagttcctactaaagtaaat

SEQ ID NO: 5934432 - DNA, 25 bp, Homo sapien
aaattaaaaacatagtcaacaatac

SEQ ID NO: 5934433 - DNA, 25 bp, Homo sapien
atagaaaaacctggcaattctgaaa

SEQ ID NO: 5934434 - DNA, 25 bp, Homo sapien
catttcacattttaaaagtaggtcc

SEQ ID NO: 5934435 - DNA, 25 bp, Homo sapien
cacaagccacaccctgccttcctcc

SEQ ID NO: 5934436 - DNA, 25 bp, Homo sapien
cttgtgtccagaaagggatccacca

SEQ ID NO: 5934437 - DNA, 25 bp, Homo sapien
agtctccaggacactgtactgggca

SEQ ID NO: 5934438 - DNA, 25 bp, Homo sapien
caccagggaaatgtcacatgcctac

SEQ ID NO: 5934439 - DNA, 25 bp, Homo sapien
aataaactgagctgcatccattaaa

SEQ ID NO: 5934440 - DNA, 25 bp, Homo sapien
tgactgtccagacacaagccacacc

SEQ ID NO: 5934441 - DNA, 25 bp, Homo sapien
actggcaaagttttatatacacaag

SEQ ID NO: 5934442 - DNA, 25 bp, Homo sapien
ggacactgtactgggcatctctgaa

SEQ ID NO: 5934443 - DNA, 25 bp, Homo sapien
taaaaggggaatcaataaaagtcca

SEQ ID NO: 5934444 - DNA, 25 bp, Homo sapien
tgtttttggtataaaatgccataga

SEQ ID NO: 5934445 - DNA, 25 bp, Homo sapien
ttcttcttcctccttgttcctcata

SEQ ID NO: 5934446 - DNA, 25 bp, Homo sapien
tgttcctcatagcatgacattagag

SEQ ID NO: 5934447 - DNA, 25 bp, Homo sapien
ggagcccaagaaatcatcaatgata

SEQ ID NO: 5934448 - DNA, 25 bp, Homo sapien
acacagggtgtccattgggtgattg

SEQ ID NO: 5934449 - DNA, 25 bp, Homo sapien
tgtcagcatggtcacccctccagtt

SEQ ID NO: 5934450 - DNA, 25 bp, Homo sapien
tgtccagaaagggatccaccagttc

SEQ ID NO: 5934451 - DNA, 25 bp, Homo sapien
gggggaatcctcgagcaaaatcttg

SEQ ID NO: 5934452 - DNA, 25 bp, Homo sapien
tgacctctccaacctggttcaggac

SEQ ID NO: 5934453 - DNA, 25 bp, Homo sapien
tagccactgtgtttcttttgtaaaa

SEQ ID NO: 5934454 - DNA, 25 bp, Homo sapien
cattttacaatatcaacccgattat

SEQ ID NO: 5934455 - DNA, 25 bp, Homo sapien
aagggatccaccagttcctactaaa

SEQ ID NO: 5934456 - DNA, 25 bp, Homo sapien
gccactcttgggaggactgcttctc

SEQ ID NO: 5934457 - DNA, 25 bp, Homo sapien
atcttgtcaagaacccattcgcaac

SEQ ID NO: 5934458 - DNA, 25 bp, Homo sapien
tgatgcttgatgtctttgtgttttc

SEQ ID NO: 5934459 - DNA, 25 bp, Homo sapien
accaaacattttacaatatcaaccc

SEQ ID NO: 5934460 - DNA, 25 bp, Homo sapien
tttggtataaaatgccatagaaaaa

SEQ ID NO: 5934461 - DNA, 25 bp, Homo sapien
cttgttcctcatagcatgacattag

SEQ ID NO: 5934462 - DNA, 25 bp, Homo sapien
ttgctagcacaccccacccaggctg

SEQ ID NO: 5934463 - DNA, 25 bp, Homo sapien
aaacctggcaattctgaaagaaaaa

SEQ ID NO: 5934464 - DNA, 25 bp, Homo sapien
actctgatgcttgatgtctttgtgt

SEQ ID NO: 5934465 - DNA, 25 bp, Homo sapien
atacacaagattcttccaatattat

SEQ ID NO: 5934466 - DNA, 25 bp, Homo sapien
tctccgcctacttatttttttccca

SEQ ID NO: 5934467 - DNA, 25 bp, Homo sapien
ttctctcagacgtcctcctgacctc

SEQ ID NO: 5934468 - DNA, 25 bp, Homo sapien
tgtgtccagaaagggatccaccagt

SEQ ID NO: 5934469 - DNA, 25 bp, Homo sapien
caaacattttacaatatcaacccga

SEQ ID NO: 5934470 - DNA, 25 bp, Homo sapien
agaaatcatcaatgatactggcaaa

SEQ ID NO: 5934471 - DNA, 25 bp, Homo sapien
cggttcactcatttccagtttaaat

SEQ ID NO: 5934472 - DNA, 25 bp, Homo sapien
gttaaataaactgagctgcatccat

SEQ ID NO: 5934473 - DNA, 25 bp, Homo sapien
tgtgttttcttgtgtccagaaaggg

SEQ ID NO: 5934474 - DNA, 25 bp, Homo sapien
ggattcactctgatgcttgatgtct

SEQ ID NO: 5934475 - DNA, 25 bp, Homo sapien
tttgtcagcatggtcacccctccag

SEQ ID NO: 5934476 - DNA, 25 bp, Homo sapien
tgccatagaaaaacctggcaattct

SEQ ID NO: 5934477 - DNA, 25 bp, Homo sapien
aagaacccattcgcaactaaagtag

SEQ ID NO: 5934478 - DNA, 25 bp, Homo sapien
ataatgaagaaaattaaaaacatag

SEQ ID NO: 5934479 - DNA, 25 bp, Homo sapien
caattctgaaagaaaaagttaccaa

SEQ ID NO: 5934480 - DNA, 25 bp, Homo sapien
aggacatttcacattttaaaagtag

SEQ ID NO: 5934481 - DNA, 25 bp, Homo sapien
aacattttacaatatcaacccgatt

SEQ ID NO: 5934482 - DNA, 25 bp, Homo sapien
aggactattcttcttcctccttgtt

SEQ ID NO: 5934483 - DNA, 25 bp, Homo sapien
aaagtagccactgtgtttcttttgt

SEQ ID NO: 5934484 - DNA, 25 bp, Homo sapien
acacaagattcttccaatattataa

SEQ ID NO: 5934485 - DNA, 25 bp, Homo sapien
ggaatattatataaccgctaacctg

SEQ ID NO: 5934486 - DNA, 25 bp, Homo sapien
cactcttgggaggactgcttctctc

SEQ ID NO: 5934487 - DNA, 25 bp, Homo sapien
taaataaactgagctgcatccatta

SEQ ID NO: 5934488 - DNA, 25 bp, Homo sapien
ctggattcactctgatgcttgatgt

SEQ ID NO: 5934489 - DNA, 25 bp, Homo sapien
cctagaatgccactcttgggaggac

SEQ ID NO: 5934490 - DNA, 25 bp, Homo sapien
ccagggaaatgtcacatgcctacca

SEQ ID NO: 5934491 - DNA, 25 bp, Homo sapien
cttcctcctccctagaatgccactc

SEQ ID NO: 5934492 - DNA, 25 bp, Homo sapien
tgtccagacacaagccacaccctgc

SEQ ID NO: 5934493 - DNA, 25 bp, Homo sapien
ttcttgtgtccagaaagggatccac

SEQ ID NO: 5934494 - DNA, 25 bp, Homo sapien
tgcctaccactgactgtccagacac

SEQ ID NO: 5934495 - DNA, 25 bp, Homo sapien
atcctcgagcaaaatcttgggcctg

SEQ ID NO: 5934496 - DNA, 25 bp, Homo sapien
caataaaagtccaagttcggttcac

SEQ ID NO: 5934497 - DNA, 25 bp, Homo sapien
caggaatggttaaataaactgagct

SEQ ID NO: 5934498 - DNA, 25 bp, Homo sapien
taaaaacatagtcaacaatacagga

SEQ ID NO: 5934499 - DNA, 25 bp, Homo sapien
catgacattagagaccttagtctcc

SEQ ID NO: 5934500 - DNA, 25 bp, Homo sapien
tggttcaggactattcttcttcctc

SEQ ID NO: 5934501 - DNA, 25 bp, Homo sapien
tggtataaaatgccatagaaaaacc

SEQ ID NO: 5934502 - DNA, 25 bp, Homo sapien
ggtgtccattgggtgattgcagcca

SEQ ID NO: 5934503 - DNA, 25 bp, Homo sapien
ttgggggaatcctcgagcaaaatct

SEQ ID NO: 5934504 - DNA, 25 bp, Homo sapien
gctagttatgttaagggtctgggtt

SEQ ID NO: 5934505 - DNA, 25 bp, Homo sapien
taccactgactgtccagacacaagc

SEQ ID NO: 5934506 - DNA, 25 bp, Homo sapien
gagctttttgtcagcatggtcaccc

SEQ ID NO: 5934507 - DNA, 25 bp, Homo sapien
ttttatatacacaagattcttccaa

SEQ ID NO: 5934508 - DNA, 25 bp, Homo sapien
ctaaagtagccactgtgtttctttt

SEQ ID NO: 5934509 - DNA, 25 bp, Homo sapien
aagtaaatttgctagttatgttaag

SEQ ID NO: 5934510 - DNA, 25 bp, Homo sapien
tcatagcatgacattagagacctta

SEQ ID NO: 5934511 - DNA, 25 bp, Homo sapien
aaatttgctagttatgttaagggtc

SEQ ID NO: 5934512 - DNA, 25 bp, Homo sapien
taggtccttcatgggaatggagccc

SEQ ID NO: 5934513 - DNA, 25 bp, Homo sapien
ataaaatgccatagaaaaacctggc

SEQ ID NO: 5934514 - DNA, 25 bp, Homo sapien
gcttctctcagacgtcctcctgacc

SEQ ID NO: 5934515 - DNA, 25 bp, Homo sapien
gctttttgtcagcatggtcacccct

SEQ ID NO: 5934516 - DNA, 25 bp, Homo sapien
acactgtactgggcatctctgaaca

SEQ ID NO: 5934517 - DNA, 25 bp, Homo sapien
tccaagttcggttcactcatttcca

SEQ ID NO: 5934518 - DNA, 25 bp, Homo sapien
acaagattcttccaatattataata

SEQ ID NO: 5934519 - DNA, 25 bp, Homo sapien
gtcaacaatacaggaatggttaaat

SEQ ID NO: 5934520 - DNA, 25 bp, Homo sapien
cagacgtcctcctgacctctccaac

SEQ ID NO: 5934521 - DNA, 25 bp, Homo sapien
ctgggcatctctgaacacagggtgt

SEQ ID NO: 5934522 - DNA, 25 bp, Homo sapien
caggctgcttggtactgcattgctg

SEQ ID NO: 5934523 - DNA, 25 bp, Homo sapien
ttgatgtctttgtgttttcttgtgt

SEQ ID NO: 5934524 - DNA, 25 bp, Homo sapien
tataaccgctaacctgtttttggta

SEQ ID NO: 5934525 - DNA, 25 bp, Homo sapien
aactaaagtagccactgtgtttctt

SEQ ID NO: 5934526 - DNA, 25 bp, Homo sapien
agtgacaacacatgaggacatttca

SEQ ID NO: 5934527 - DNA, 25 bp, Homo sapien
aacatagtcaacaatacaggaatgg

SEQ ID NO: 5934528 - DNA, 25 bp, Homo sapien
ctctcagacgtcctcctgacctctc

SEQ ID NO: 5934529 - DNA, 25 bp, Homo sapien
gacacaagccacaccctgccttcct

SEQ ID NO: 5934530 - DNA, 25 bp, Homo sapien
catgcctaccactgactgtccagac

SEQ ID NO: 5934531 - DNA, 25 bp, Homo sapien
ctccaacctggttcaggactattct

SEQ ID NO: 5934532 - DNA, 25 bp, Homo sapien
tcctcctccctagaatgccactctt

SEQ ID NO: 5934533 - DNA, 25 bp, Homo sapien
tctgatgcttgatgtctttgtgttt

SEQ ID NO: 5934534 - DNA, 25 bp, Homo sapien
tcaatgatactggcaaagttttata

SEQ ID NO: 5934535 - DNA, 25 bp, Homo sapien
taaagtaaatttgctagttatgtta

SEQ ID NO: 5934536 - DNA, 25 bp, Homo sapien
taaactgagctgcatccattaaatg

SEQ ID NO: 5934537 - DNA, 25 bp, Homo sapien
cttcttcctccttgttcctcatagc

SEQ ID NO: 5934538 - DNA, 25 bp, Homo sapien
ccactgactgtccagacacaagcca

SEQ ID NO: 5934539 - DNA, 25 bp, Homo sapien
cttgggaggactgcttctctcagac

SEQ ID NO: 5934540 - DNA, 25 bp, Homo sapien
ggtaatttctgagctttttgtcagc

SEQ ID NO: 5934541 - DNA, 25 bp, Homo sapien
ttcccaccagggaaatgtcacatgc

SEQ ID NO: 5934542 - DNA, 25 bp, Homo sapien
ttaaatggaatattatataaccgct

SEQ ID NO: 5934543 - DNA, 25 bp, Homo sapien
ccaacctggttcaggactattcttc

SEQ ID NO: 5934544 - DNA, 25 bp, Homo sapien
tcagcatggtcacccctccagtttg

SEQ ID NO: 5934545 - DNA, 25 bp, Homo sapien
aatgatactggcaaagttttatata

SEQ ID NO: 5934546 - DNA, 25 bp, Homo sapien
atttgctagttatgttaagggtctg

SEQ ID NO: 5934547 - DNA, 25 bp, Homo sapien
cctggttcaggactattcttcttcc

SEQ ID NO: 5934548 - DNA, 25 bp, Homo sapien
actgtccagacacaagccacaccct

SEQ ID NO: 5934549 - DNA, 25 bp, Homo sapien
ttcttggattgggggaatcctcgag

SEQ ID NO: 5934550 - DNA, 25 bp, Homo sapien
cttcatgggaatggagcccaagaaa

SEQ ID NO: 5934551 - DNA, 25 bp, Homo sapien
ctgcttggtactgcattgctggatt

SEQ ID NO: 5934552 - DNA, 25 bp, Homo sapien
aaaatgccatagaaaaacctggcaa

SEQ ID NO: 5934553 - DNA, 25 bp, Homo sapien
ctgagctttttgtcagcatggtcac

SEQ ID NO: 5934554 - DNA, 25 bp, Homo sapien
cacatgcctaccactgactgtccag

SEQ ID NO: 5934555 - DNA, 25 bp, Homo sapien
cccacccaggctgcttggtactgca

SEQ ID NO: 5934556 - DNA, 25 bp, Homo sapien
tttttggtataaaatgccatagaaa

SEQ ID NO: 5934557 - DNA, 25 bp, Homo sapien
tgctggattcactctgatgcttgat

SEQ ID NO: 5934558 - DNA, 25 bp, Homo sapien
atttctgagctttttgtcagcatgg

SEQ ID NO: 5934559 - DNA, 25 bp, Homo sapien
aaatcatcaatgatactggcaaagt

SEQ ID NO: 5934560 - DNA, 25 bp, Homo sapien
tatataaccgctaacctgtttttgg

SEQ ID NO: 5934561 - DNA, 25 bp, Homo sapien
taaatttcttggattgggggaatcc

SEQ ID NO: 5934562 - DNA, 25 bp, Homo sapien
cctcgagcaaaatcttgggcctgct

SEQ ID NO: 5934563 - DNA, 25 bp, Homo sapien
caacaatacaggaatggttaaataa

SEQ ID NO: 5934564 - DNA, 25 bp, Homo sapien
aaggtaatttctgagctttttgtca

SEQ ID NO: 5934565 - DNA, 25 bp, Homo sapien
gatgtctttgtgttttcttgtgtcc

SEQ ID NO: 5934566 - DNA, 25 bp, Homo sapien
tcttcctccttgttcctcatagcat

SEQ ID NO: 5934567 - DNA, 25 bp, Homo sapien
gggatccaccagttcctactaaagt

SEQ ID NO: 5934568 - DNA, 25 bp, Homo sapien
gttcactcatttccagtttaaattt

SEQ ID NO: 5934569 - DNA, 25 bp, Homo sapien
ccattcgcaactaaagtagccactg

SEQ ID NO: 5934570 - DNA, 25 bp, Homo sapien
tgacattagagaccttagtctccag

SEQ ID NO: 5934571 - DNA, 25 bp, Homo sapien
aatatcaacccgattatgtaggaaa

SEQ ID NO: 5934572 - DNA, 25 bp, Homo sapien
tattcttcttcctccttgttcctca

SEQ ID NO: 5934573 - DNA, 25 bp, Homo sapien
tgggaggactgcttctctcagacgt

SEQ ID NO: 5934574 - DNA, 25 bp, Homo sapien
ttgggtgattgcagccagttgctag

SEQ ID NO: 5934575 - DNA, 25 bp, Homo sapien
cgtcctcctgacctctccaacctgg

SEQ ID NO: 5934576 - DNA, 25 bp, Homo sapien
cacattttaaaagtaggtccttcat

SEQ ID NO: 5934577 - DNA, 25 bp, Homo sapien
tactgcattgctggattcactctga

SEQ ID NO: 5934578 - DNA, 25 bp, Homo sapien
cccaccagggaaatgtcacatgcct

SEQ ID NO: 5934579 - DNA, 25 bp, Homo sapien
ctcagacgtcctcctgacctctcca

SEQ ID NO: 5934580 - DNA, 25 bp, Homo sapien
gatctccgcctacttatttttttcc

SEQ ID NO: 5934581 - DNA, 25 bp, Homo sapien
catcaatgatactggcaaagtttta

SEQ ID NO: 5934582 - DNA, 25 bp, Homo sapien
gggcctgctaactggatctccgcct

SEQ ID NO: 5934583 - DNA, 25 bp, Homo sapien
gaatggagcccaagaaatcatcaat

SEQ ID NO: 5934584 - DNA, 25 bp, Homo sapien
agcatgacattagagaccttagtct

SEQ ID NO: 5934585 - DNA, 25 bp, Homo sapien
gcacaccccacccaggctgcttggt

SEQ ID NO: 5934586 - DNA, 25 bp, Homo sapien
atccctttttataaagtgacaacac

SEQ ID NO: 5934587 - DNA, 25 bp, Homo sapien
aaaacatagtcaacaatacaggaat

SEQ ID NO: 5934588 - DNA, 25 bp, Homo sapien
agccagttgctagcacaccccaccc

SEQ ID NO: 5934589 - DNA, 25 bp, Homo sapien
tagtcaacaatacaggaatggttaa

SEQ ID NO: 5934590 - DNA, 25 bp, Homo sapien
gagcaaaatcttgggcctgctaact

SEQ ID NO: 5934591 - DNA, 25 bp, Homo sapien
acattagagaccttagtctccagga

SEQ ID NO: 5934592 - DNA, 25 bp, Homo sapien
gaacccattcgcaactaaagtagcc

SEQ ID NO: 5934593 - DNA, 25 bp, Homo sapien
tatgttaagggtctgggttattggg

SEQ ID NO: 5934594 - DNA, 25 bp, Homo sapien
gacgtcctcctgacctctccaacct

SEQ ID NO: 5934595 - DNA, 25 bp, Homo sapien
taactggatctccgcctacttattt

SEQ ID NO: 5934596 - DNA, 25 bp, Homo sapien
atagcatgacattagagaccttagt

SEQ ID NO: 5934597 - DNA, 25 bp, Homo sapien
tcactcatttccagtttaaatttct

SEQ ID NO: 5934598 - DNA, 25 bp, Homo sapien
tccagtttaaatttcttggattggg

SEQ ID NO: 5934599 - DNA, 25 bp, Homo sapien
gagggtagaatatccctttttataa

SEQ ID NO: 5934600 - DNA, 25 bp, Homo sapien
cctccagtttgagggtagaatatcc

SEQ ID NO: 5934601 - DNA, 25 bp, Homo sapien
gatccaccagttcctactaaagtaa

SEQ ID NO: 5934602 - DNA, 25 bp, Homo sapien
tgacaacacatgaggacatttcaca

SEQ ID NO: 5934603 - DNA, 25 bp, Homo sapien
ccttagtctccaggacactgtactg

SEQ ID NO: 5934604 - DNA, 25 bp, Homo sapien
aaatggaatattatataaccgctaa

SEQ ID NO: 5934605 - DNA, 25 bp, Homo sapien
gcagccagttgctagcacaccccac

SEQ ID NO: 5934606 - DNA, 25 bp, Homo sapien
aaatgtcacatgcctaccactgact

SEQ ID NO: 5934607 - DNA, 25 bp, Homo sapien
tcttgggcctgctaactggatctcc

SEQ ID NO: 5934608 - DNA, 25 bp, Homo sapien
ctaacctgtttttggtataaaatgc

SEQ ID NO: 5934609 - DNA, 25 bp, Homo sapien
aggactgcttctctcagacgtcctc

SEQ ID NO: 5934610 - DNA, 25 bp, Homo sapien
gaatcctcgagcaaaatcttgggcc

SEQ ID NO: 5934611 - DNA, 25 bp, Homo sapien
ttatatacacaagattcttccaata

SEQ ID NO: 5934612 - DNA, 25 bp, Homo sapien
taatttctgagctttttgtcagcat

SEQ ID NO: 5934613 - DNA, 25 bp, Homo sapien
acaacacatgaggacatttcacatt

SEQ ID NO: 5934614 - DNA, 25 bp, Homo sapien
tgaggacatttcacattttaaaagt

SEQ ID NO: 5934615 - DNA, 25 bp, Homo sapien
ggaggactgcttctctcagacgtcc

SEQ ID NO: 5934616 - DNA, 25 bp, Homo sapien
caggacactgtactgggcatctctg

SEQ ID NO: 5934617 - DNA, 25 bp, Homo sapien
ctgcttctctcagacgtcctcctga

SEQ ID NO: 5934618 - DNA, 25 bp, Homo sapien
acccattcgcaactaaagtagccac

SEQ ID NO: 5934619 - DNA, 25 bp, Homo sapien
atggagcccaagaaatcatcaatga

SEQ ID NO: 5934620 - DNA, 25 bp, Homo sapien
ttgcagccagttgctagcacacccc

SEQ ID NO: 5934621 - DNA, 25 bp, Homo sapien
gtagaatatccctttttataaagtg

SEQ ID NO: 5934622 - DNA, 25 bp, Homo sapien
atgtcacatgcctaccactgactgt

SEQ ID NO: 5934623 - DNA, 25 bp, Homo sapien
gtcacatgcctaccactgactgtcc

SEQ ID NO: 5934624 - DNA, 25 bp, Homo sapien
gaatcaataaaagtccaagttcggt

SEQ ID NO: 5934625 - DNA, 25 bp, Homo sapien
aacacatgaggacatttcacatttt

SEQ ID NO: 5934626 - DNA, 25 bp, Homo sapien
ctgaacacagggtgtccattgggtg

SEQ ID NO: 5934627 - DNA, 25 bp, Homo sapien
tccttgttcctcatagcatgacatt

SEQ ID NO: 5934628 - DNA, 25 bp, Homo sapien
gggaatcctcgagcaaaatcttggg

SEQ ID NO: 5934629 - DNA, 25 bp, Homo sapien
ctactaaagtaaatttgctagttat

SEQ ID NO: 5934630 - DNA, 25 bp, Homo sapien
acccaggttcacatcctcctcagat

SEQ ID NO: 5934631 - DNA, 25 bp, Homo sapien
gccgccaggtacatagacttcctct

SEQ ID NO: 5934632 - DNA, 25 bp, Homo sapien
aagaaatcgagcgaagatggcagcc

SEQ ID NO: 5934633 - DNA, 25 bp, Homo sapien
ggaggagggctccagctcgccggtg

SEQ ID NO: 5934634 - DNA, 25 bp, Homo sapien
gacaaccttgtggttcctcatgacc

SEQ ID NO: 5934635 - DNA, 25 bp, Homo sapien
tccccacgctcccctctgacaagct

SEQ ID NO: 5934636 - DNA, 25 bp, Homo sapien
gcaagaagggcagcccgagcgcgca

SEQ ID NO: 5934637 - DNA, 25 bp, Homo sapien
tctttcgaggagctgcagagccagc

SEQ ID NO: 5934638 - DNA, 25 bp, Homo sapien
tgtttatttattgagatattttacc

SEQ ID NO: 5934639 - DNA, 25 bp, Homo sapien
acttcctctaccaggttctccagag

SEQ ID NO: 5934640 - DNA, 25 bp, Homo sapien
tatgttgcttatttgtttatttatt

SEQ ID NO: 5934641 - DNA, 25 bp, Homo sapien
accagtgaggaagagctggagaggc

SEQ ID NO: 5934642 - DNA, 25 bp, Homo sapien
tgactttcggcacctggacaacctt

SEQ ID NO: 5934643 - DNA, 25 bp, Homo sapien
gaccaaggctctcagaacaagaacc

SEQ ID NO: 5934644 - DNA, 25 bp, Homo sapien
ccgtgttttctattccctgtccagt

SEQ ID NO: 5934645 - DNA, 25 bp, Homo sapien
agaaatgcattcttgtagaacctgt

SEQ ID NO: 5934646 - DNA, 25 bp, Homo sapien
ctccggagccgcaagccaggaccca

SEQ ID NO: 5934647 - DNA, 25 bp, Homo sapien
cccctctgacaagctcagcaagatc

SEQ ID NO: 5934648 - DNA, 25 bp, Homo sapien
tctaccaggttctccagagcgacga

SEQ ID NO: 5934649 - DNA, 25 bp, Homo sapien
gtctgggcaccagtgaggaagagct

SEQ ID NO: 5934650 - DNA, 25 bp, Homo sapien
catgaccccagtgcccaagtgtttg

SEQ ID NO: 5934651 - DNA, 25 bp, Homo sapien
atatatattggattgtatttccctc

SEQ ID NO: 5934652 - DNA, 25 bp, Homo sapien
gaattcttgcccgcatactcctgtt

SEQ ID NO: 5934653 - DNA, 25 bp, Homo sapien
ttgtagaacctgtttaaactggacc

SEQ ID NO: 5934654 - DNA, 25 bp, Homo sapien
ggccaacgtgcgcgagcgccagcgc

SEQ ID NO: 5934655 - DNA, 25 bp, Homo sapien
acaagaacccaagatccctcccgcc

SEQ ID NO: 5934656 - DNA, 25 bp, Homo sapien
acctgtttaaactggaccaaggctc

SEQ ID NO: 5934657 - DNA, 25 bp, Homo sapien
atccacctccggagccgcaagccag

SEQ ID NO: 5934658 - DNA, 25 bp, Homo sapien
caagatcatccccacgctcccctct

SEQ ID NO: 5934659 - DNA, 25 bp, Homo sapien
tggtccatgtccgcctcccactagc

SEQ ID NO: 5934660 - DNA, 25 bp, Homo sapien
cacgagcgtctcagctacgccttct

SEQ ID NO: 5934661 - DNA, 25 bp, Homo sapien
cgcaagatcatccccacgctcccct

SEQ ID NO: 5934662 - DNA, 25 bp, Homo sapien
ccgcaagccaggacccacctgcaca

SEQ ID NO: 5934663 - DNA, 25 bp, Homo sapien
gtttcgaggaagcctggaattcttg

SEQ ID NO: 5934664 - DNA, 25 bp, Homo sapien
gattgtatttccctctaagtgcctt

SEQ ID NO: 5934665 - DNA, 25 bp, Homo sapien
cggctgtgactttcggcacctggac

SEQ ID NO: 5934666 - DNA, 25 bp, Homo sapien
gtttaaactggaccaaggctctcag

SEQ ID NO: 5934667 - DNA, 25 bp, Homo sapien
ccagcgcacccagtcgctcaacgag

SEQ ID NO: 5934668 - DNA, 25 bp, Homo sapien
aagctggccgccaggtacatagact

SEQ ID NO: 5934669 - DNA, 25 bp, Homo sapien
tcaggaatgcatttgtaaggatata

SEQ ID NO: 5934670 - DNA, 25 bp, Homo sapien
catccccacgctcccctctgacaag

SEQ ID NO: 5934671 - DNA, 25 bp, Homo sapien
gcatggagggcgcgtggtccatgtc

SEQ ID NO: 5934672 - DNA, 25 bp, Homo sapien
acgtggctcacgagcgtctcagcta

SEQ ID NO: 5934673 - DNA, 25 bp, Homo sapien
cgctcaacgaggccttcgccgcgct

SEQ ID NO: 5934674 - DNA, 25 bp, Homo sapien
ttgggggaatctttctggaaagttc

SEQ ID NO: 5934675 - DNA, 25 bp, Homo sapien
tttatttattgagatattttaccag

SEQ ID NO: 5934676 - DNA, 25 bp, Homo sapien
cgccgcgctgcgcaagatcatcccc

SEQ ID NO: 5934677 - DNA, 25 bp, Homo sapien
cacgctcccctctgacaagctcagc

SEQ ID NO: 5934678 - DNA, 25 bp, Homo sapien
tattccctgtccagtgtatatgttg

SEQ ID NO: 5934679 - DNA, 25 bp, Homo sapien
gcattcttgtagaacctgtttaaac

SEQ ID NO: 5934680 - DNA, 25 bp, Homo sapien
agtgactgccacgcggttgtgtata

SEQ ID NO: 5934681 - DNA, 25 bp, Homo sapien
tcgaggagctgcagagccagcgcat

SEQ ID NO: 5934682 - DNA, 25 bp, Homo sapien
agtgtatatgttgcttatttgttta

SEQ ID NO: 5934683 - DNA, 25 bp, Homo sapien
accttgtggttcctcatgaccccag

SEQ ID NO: 5934684 - DNA, 25 bp, Homo sapien
atctcaggcgcatgcggaactggat

SEQ ID NO: 5934685 - DNA, 25 bp, Homo sapien
aagcgcttcggccggaagcggcgct

SEQ ID NO: 5934686 - DNA, 25 bp, Homo sapien
ctcccactagcgccgcgccgtgcca

SEQ ID NO: 5934687 - DNA, 25 bp, Homo sapien
gctcaagctggccgccaggtacata

SEQ ID NO: 5934688 - DNA, 25 bp, Homo sapien
ggacagagacccaggttcacatcct

SEQ ID NO: 5934689 - DNA, 25 bp, Homo sapien
ttccctctaagtgccttcttttaat

SEQ ID NO: 5934690 - DNA, 25 bp, Homo sapien
aagagctggagaggcagcccaagcg

SEQ ID NO: 5934691 - DNA, 25 bp, Homo sapien
ctgcagagccagcgcatcctggcca

SEQ ID NO: 5934692 - DNA, 25 bp, Homo sapien
ctgggcaccagtgaggaagagctgg

SEQ ID NO: 5934693 - DNA, 25 bp, Homo sapien
cgtgccatccacctccggagccgca

SEQ ID NO: 5934694 - DNA, 25 bp, Homo sapien
ccgcgccgtgccatccacctccgga

SEQ ID NO: 5934695 - DNA, 25 bp, Homo sapien
tccctcccgccccagacctcccgtg

SEQ ID NO: 5934696 - DNA, 25 bp, Homo sapien
cacccagtcgctcaacgaggccttc

SEQ ID NO: 5934697 - DNA, 25 bp, Homo sapien
gcccgaccccgggtaagcgcggcaa

SEQ ID NO: 5934698 - DNA, 25 bp, Homo sapien
cgctcccctctgacaagctcagcaa

SEQ ID NO: 5934699 - DNA, 25 bp, Homo sapien
gtagaacctgtttaaactggaccaa

SEQ ID NO: 5934700 - DNA, 25 bp, Homo sapien
ctacgccttctccgtgtggcgcatg

SEQ ID NO: 5934701 - DNA, 25 bp, Homo sapien
tggacaaccttgtggttcctcatga

SEQ ID NO: 5934702 - DNA, 25 bp, Homo sapien
taagatgaccagctgcagctacgtg

SEQ ID NO: 5934703 - DNA, 25 bp, Homo sapien
ccacctccggagccgcaagccagga

SEQ ID NO: 5934704 - DNA, 25 bp, Homo sapien
agctgcagctacgtggctcacgagc

SEQ ID NO: 5934705 - DNA, 25 bp, Homo sapien
tgtggttcctcatgaccccagtgcc

SEQ ID NO: 5934706 - DNA, 25 bp, Homo sapien
cgcatgcggaactggatgcggccac

SEQ ID NO: 5934707 - DNA, 25 bp, Homo sapien
tgcgcaagatcatccccacgctccc

SEQ ID NO: 5934708 - DNA, 25 bp, Homo sapien
atggaggagggctccagctcgccgg

SEQ ID NO: 5934709 - DNA, 25 bp, Homo sapien
gaagggcagcccgagcgcgcagtct

SEQ ID NO: 5934710 - DNA, 25 bp, Homo sapien
ctggaaagttctagcttcaggaatg

SEQ ID NO: 5934711 - DNA, 25 bp, Homo sapien
gcgcagtctttcgaggagctgcaga

SEQ ID NO: 5934712 - DNA, 25 bp, Homo sapien
aggagggctccagctcgccggtgtc

SEQ ID NO: 5934713 - DNA, 25 bp, Homo sapien
cagcccgagcgcgcagtctttcgag

SEQ ID NO: 5934714 - DNA, 25 bp, Homo sapien
gggcaccagtgaggaagagctggag

SEQ ID NO: 5934715 - DNA, 25 bp, Homo sapien
attggattgtatttccctctaagtg

SEQ ID NO: 5934716 - DNA, 25 bp, Homo sapien
cgccaggtacatagacttcctctac

SEQ ID NO: 5934717 - DNA, 25 bp, Homo sapien
cccgtggacagtctgggcaccagtg

SEQ ID NO: 5934718 - DNA, 25 bp, Homo sapien
gcctgctcagctagccgtgttttct

SEQ ID NO: 5934719 - DNA, 25 bp, Homo sapien
gttctttacgtctccatggcctgct

SEQ ID NO: 5934720 - DNA, 25 bp, Homo sapien
ctctcagaacaagaacccaagatcc

SEQ ID NO: 5934721 - DNA, 25 bp, Homo sapien
gtccgcctcccactagcgccgcgcc

SEQ ID NO: 5934722 - DNA, 25 bp, Homo sapien
agtgacttctgtgccctcatctcct

SEQ ID NO: 5934723 - DNA, 25 bp, Homo sapien
aaactggaccaaggctctcagaaca

SEQ ID NO: 5934724 - DNA, 25 bp, Homo sapien
agatcatccccacgctcccctctga

SEQ ID NO: 5934725 - DNA, 25 bp, Homo sapien
ctgtccagtgtatatgttgcttatt

SEQ ID NO: 5934726 - DNA, 25 bp, Homo sapien
gatattttaccagctaagtgactgc

SEQ ID NO: 5934727 - DNA, 25 bp, Homo sapien
acctgcacatctcaggcgcatgcgg

SEQ ID NO: 5934728 - DNA, 25 bp, Homo sapien
ccatgtccgcctcccactagcgccg

SEQ ID NO: 5934729 - DNA, 25 bp, Homo sapien
tttagtttgggggaatctttctgga

SEQ ID NO: 5934730 - DNA, 25 bp, Homo sapien
ccgccccagacctcccgtgactgtt

SEQ ID NO: 5934731 - DNA, 25 bp, Homo sapien
acaagctcagcaagatccagacgct

SEQ ID NO: 5934732 - DNA, 25 bp, Homo sapien
tttctattccctgtccagtgtatat

SEQ ID NO: 5934733 - DNA, 25 bp, Homo sapien
tctcagctacgccttctccgtgtgg

SEQ ID NO: 5934734 - DNA, 25 bp, Homo sapien
actcctgttctttacgtctccatgg

SEQ ID NO: 5934735 - DNA, 25 bp, Homo sapien
atcatccccacgctcccctctgaca

SEQ ID NO: 5934736 - DNA, 25 bp, Homo sapien
agttctagcttcaggaatgcatttg

SEQ ID NO: 5934737 - DNA, 25 bp, Homo sapien
ttcggccggaagcggcgctacagca

SEQ ID NO: 5934738 - DNA, 25 bp, Homo sapien
gcaagaaatcgagcgaagatggcag

SEQ ID NO: 5934739 - DNA, 25 bp, Homo sapien
tctccgtgtggcgcatggagggcgc

SEQ ID NO: 5934740 - DNA, 25 bp, Homo sapien
gggatgggcatcagccttcctgcca

SEQ ID NO: 5934741 - DNA, 25 bp, Homo sapien
cccagtcgctcaacgaggccttcgc

SEQ ID NO: 5934742 - DNA, 25 bp, Homo sapien
caagatccctcccgccccagacctc

SEQ ID NO: 5934743 - DNA, 25 bp, Homo sapien
gctggagaggcagcccaagcgcttc

SEQ ID NO: 5934744 - DNA, 25 bp, Homo sapien
cgccgcgccgtgccatccacctccg

SEQ ID NO: 5934745 - DNA, 25 bp, Homo sapien
cccaagatccctcccgccccagacc

SEQ ID NO: 5934746 - DNA, 25 bp, Homo sapien
cggaagcggcgctacagcaagaaat

SEQ ID NO: 5934747 - DNA, 25 bp, Homo sapien
gagatattttaccagctaagtgact

SEQ ID NO: 5934748 - DNA, 25 bp, Homo sapien
cggcaagaagggcagcccgagcgcg

SEQ ID NO: 5934749 - DNA, 25 bp, Homo sapien
ttcgccgcgctgcgcaagatcatcc

SEQ ID NO: 5934750 - DNA, 25 bp, Homo sapien
tattttaccagctaagtgactgcca

SEQ ID NO: 5934751 - DNA, 25 bp, Homo sapien
gaccagctgcagctacgtggctcac

SEQ ID NO: 5934752 - DNA, 25 bp, Homo sapien
ctcaacgaggccttcgccgcgctgc

SEQ ID NO: 5934753 - DNA, 25 bp, Homo sapien
gaaatcgagcgaagatggcagcccg

SEQ ID NO: 5934754 - DNA, 25 bp, Homo sapien
gcccgagcgcgcagtctttcgagga

SEQ ID NO: 5934755 - DNA, 25 bp, Homo sapien
aggttctccagagcgacgagatgga

SEQ ID NO: 5934756 - DNA, 25 bp, Homo sapien
aggaagcctggaattcttgcccgca

SEQ ID NO: 5934757 - DNA, 25 bp, Homo sapien
tgcgcgagcgccagcgcacccagtc

SEQ ID NO: 5934758 - DNA, 25 bp, Homo sapien
gaggaagagctggagaggcagccca

SEQ ID NO: 5934759 - DNA, 25 bp, Homo sapien
atgcatttgtaaggatatatattgg

SEQ ID NO: 5934760 - DNA, 25 bp, Homo sapien
caagatccagacgctcaagctggcc

SEQ ID NO: 5934761 - DNA, 25 bp, Homo sapien
tccgtgtggcgcatggagggcgcgt

SEQ ID NO: 5934762 - DNA, 25 bp, Homo sapien
actggatgcggccacggctgtgact

SEQ ID NO: 5934763 - DNA, 25 bp, Homo sapien
agacgctcaagctggccgccaggta

SEQ ID NO: 5934764 - DNA, 25 bp, Homo sapien
cagtgaggaagagctggagaggcag

SEQ ID NO: 5934765 - DNA, 25 bp, Homo sapien
acgctcaagctggccgccaggtaca

SEQ ID NO: 5934766 - DNA, 25 bp, Homo sapien
acatagacttcctctaccaggttct

SEQ ID NO: 5934767 - DNA, 25 bp, Homo sapien
ggcatcagccttcctgccagtgact

SEQ ID NO: 5934768 - DNA, 25 bp, Homo sapien
ctggccaacgtgcgcgagcgccagc

SEQ ID NO: 5934769 - DNA, 25 bp, Homo sapien
gcgcatggagggcgcgtggtccatg

SEQ ID NO: 5934770 - DNA, 25 bp, Homo sapien
cctctaccaggttctccagagcgac

SEQ ID NO: 5934771 - DNA, 25 bp, Homo sapien
gtccagtgtatatgttgcttatttg

SEQ ID NO: 5934772 - DNA, 25 bp, Homo sapien
cccagtgcccaagtgtttggcaggg

SEQ ID NO: 5934773 - DNA, 25 bp, Homo sapien
cgcatcctggccaacgtgcgcgagc

SEQ ID NO: 5934774 - DNA, 25 bp, Homo sapien
tcactgttggattttcctcctgggt

SEQ ID NO: 5934775 - DNA, 25 bp, Homo sapien
atttccctctaagtgccttctttta

SEQ ID NO: 5934776 - DNA, 25 bp, Homo sapien
ggacccacctgcacatctcaggcgc

SEQ ID NO: 5934777 - DNA, 25 bp, Homo sapien
cgtctcagctacgccttctccgtgt

SEQ ID NO: 5934778 - DNA, 25 bp, Homo sapien
atctcctcactgttggattttcctc

SEQ ID NO: 5934779 - DNA, 25 bp, Homo sapien
gcgctacagcaagaaatcgagcgaa

SEQ ID NO: 5934780 - DNA, 25 bp, Homo sapien
tgttgcttatttgtttatttattga

SEQ ID NO: 5934781 - DNA, 25 bp, Homo sapien
gcgacgagatggacaataagatgac

SEQ ID NO: 5934782 - DNA, 25 bp, Homo sapien
tgaccccagtgcccaagtgtttggc

SEQ ID NO: 5934783 - DNA, 25 bp, Homo sapien
cctggaattcttgcccgcatactcc

SEQ ID NO: 5934784 - DNA, 25 bp, Homo sapien
tcctcatgaccccagtgcccaagtg

SEQ ID NO: 5934785 - DNA, 25 bp, Homo sapien
cgaggaagcctggaattcttgcccg

SEQ ID NO: 5934786 - DNA, 25 bp, Homo sapien
ccaggttcacatcctcctcagatac

SEQ ID NO: 5934787 - DNA, 25 bp, Homo sapien
atccagacgctcaagctggccgcca

SEQ ID NO: 5934788 - DNA, 25 bp, Homo sapien
gaggcagcccaagcgcttcggccgg

SEQ ID NO: 5934789 - DNA, 25 bp, Homo sapien
ccgcctcccactagcgccgcgccgt

SEQ ID NO: 5934790 - DNA, 25 bp, Homo sapien
ctcagatacccaggggatgggcatc

SEQ ID NO: 5934791 - DNA, 25 bp, Homo sapien
atattggattgtatttccctctaag

SEQ ID NO: 5934792 - DNA, 25 bp, Homo sapien
gttttctattccctgtccagtgtat

SEQ ID NO: 5934793 - DNA, 25 bp, Homo sapien
ccaaggctctcagaacaagaaccca

SEQ ID NO: 5934794 - DNA, 25 bp, Homo sapien
ttgcccgcatactcctgttctttac

SEQ ID NO: 5934795 - DNA, 25 bp, Homo sapien
ccaggttctccagagcgacgagatg

SEQ ID NO: 5934796 - DNA, 25 bp, Homo sapien
tggacagtctgggcaccagtgagga

SEQ ID NO: 5934797 - DNA, 25 bp, Homo sapien
ttcctgccagtgacttctgtgccct

SEQ ID NO: 5934798 - DNA, 25 bp, Homo sapien
cgtgcgcgagcgccagcgcacccag

SEQ ID NO: 5934799 - DNA, 25 bp, Homo sapien
ctgcagctacgtggctcacgagcgt

SEQ ID NO: 5934800 - DNA, 25 bp, Homo sapien
gctccagctcgccggtgtcccccgt

SEQ ID NO: 5934801 - DNA, 25 bp, Homo sapien
ggagccgcaagccaggacccacctg

SEQ ID NO: 5934802 - DNA, 25 bp, Homo sapien
agcgtctcagctacgccttctccgt

SEQ ID NO: 5934803 - DNA, 25 bp, Homo sapien
cccgggtaagcgcggcaagaagggc

SEQ ID NO: 5934804 - DNA, 25 bp, Homo sapien
gtgactgtttcgaggaagcctggaa

SEQ ID NO: 5934805 - DNA, 25 bp, Homo sapien
gtgccttcttttaatgtatattttt

SEQ ID NO: 5934806 - DNA, 25 bp, Homo sapien
ccgagcgcgcagtctttcgaggagc

SEQ ID NO: 5934807 - DNA, 25 bp, Homo sapien
gttcctcatgaccccagtgcccaag

SEQ ID NO: 5934808 - DNA, 25 bp, Homo sapien
agatccagacgctcaagctggccgc

SEQ ID NO: 5934809 - DNA, 25 bp, Homo sapien
cccccgtggacagtctgggcaccag

SEQ ID NO: 5934810 - DNA, 25 bp, Homo sapien
tgcggccacggctgtgactttcggc

SEQ ID NO: 5934811 - DNA, 25 bp, Homo sapien
ggcgcgtggtccatgtccgcctccc

SEQ ID NO: 5934812 - DNA, 25 bp, Homo sapien
cacctggacaaccttgtggttcctc

SEQ ID NO: 5934813 - DNA, 25 bp, Homo sapien
acccaggggatgggcatcagccttc

SEQ ID NO: 5934814 - DNA, 25 bp, Homo sapien
gactgtttcgaggaagcctggaatt

SEQ ID NO: 5934815 - DNA, 25 bp, Homo sapien
taaataaaacagaaatgcattcttg

SEQ ID NO: 5934816 - DNA, 25 bp, Homo sapien
ttctggaaagttctagcttcaggaa

SEQ ID NO: 5934817 - DNA, 25 bp, Homo sapien
aaggatatatattggattgtatttc

SEQ ID NO: 5934818 - DNA, 25 bp, Homo sapien
accagctaagtgactgccacgcggt

SEQ ID NO: 5934819 - DNA, 25 bp, Homo sapien
gctcagcaagatccagacgctcaag

SEQ ID NO: 5934820 - DNA, 25 bp, Homo sapien
gggaatctttctggaaagttctagc

SEQ ID NO: 5934821 - DNA, 25 bp, Homo sapien
cctggacaaccttgtggttcctcat

SEQ ID NO: 5934822 - DNA, 25 bp, Homo sapien
cgagcgccagcgcacccagtcgctc

SEQ ID NO: 5934823 - DNA, 25 bp, Homo sapien
cggtgtcccccgtggacagtctggg

SEQ ID NO: 5934824 - DNA, 25 bp, Homo sapien
agcttcaggaatgcatttgtaagga

SEQ ID NO: 5934825 - DNA, 25 bp, Homo sapien
agccgcaagccaggacccacctgca

SEQ ID NO: 5934826 - DNA, 25 bp, Homo sapien
gctgtgactttcggcacctggacaa

SEQ ID NO: 5934827 - DNA, 25 bp, Homo sapien
actggaccaaggctctcagaacaag

SEQ ID NO: 5934828 - DNA, 25 bp, Homo sapien
tcgccggtgtcccccgtggacagtc

SEQ ID NO: 5934829 - DNA, 25 bp, Homo sapien
gctacagcaagaaatcgagcgaaga

SEQ ID NO: 5934830 - DNA, 25 bp, Homo sapien
tgactgccacgcggttgtgtataac

SEQ ID NO: 5934831 - DNA, 25 bp, Homo sapien
cctcccgtgactgtttcgaggaagc

SEQ ID NO: 5934832 - DNA, 25 bp, Homo sapien
cagcaagaaatcgagcgaagatggc

SEQ ID NO: 5934833 - DNA, 25 bp, Homo sapien
aagtgccttcttttaatgtatattt

SEQ ID NO: 5934834 - DNA, 25 bp, Homo sapien
atagacttcctctaccaggttctcc

SEQ ID NO: 5934835 - DNA, 25 bp, Homo sapien
ccagctgcagctacgtggctcacga

SEQ ID NO: 5934836 - DNA, 25 bp, Homo sapien
ctcaggcgcatgcggaactggatgc

SEQ ID NO: 5934837 - DNA, 25 bp, Homo sapien
agtctttcgaggagctgcagagcca

SEQ ID NO: 5934838 - DNA, 25 bp, Homo sapien
agctgcagagccagcgcatcctggc

SEQ ID NO: 5934839 - DNA, 25 bp, Homo sapien
ggagctgcagagccagcgcatcctg

SEQ ID NO: 5934840 - DNA, 25 bp, Homo sapien
agcgcatcctggccaacgtgcgcga

SEQ ID NO: 5934841 - DNA, 25 bp, Homo sapien
agcggcgctacagcaagaaatcgag

SEQ ID NO: 5934842 - DNA, 25 bp, Homo sapien
ccagtgacttctgtgccctcatctc

SEQ ID NO: 5934843 - DNA, 25 bp, Homo sapien
tgcggaactggatgcggccacggct

SEQ ID NO: 5934844 - DNA, 25 bp, Homo sapien
gagggctccagctcgccggtgtccc

SEQ ID NO: 5934845 - DNA, 25 bp, Homo sapien
tgtggcgcatggagggcgcgtggtc

SEQ ID NO: 5934846 - DNA, 25 bp, Homo sapien
ctcacgagcgtctcagctacgcctt

SEQ ID NO: 5934847 - DNA, 25 bp, Homo sapien
taagtgactgccacgcggttgtgta

SEQ ID NO: 5934848 - DNA, 25 bp, Homo sapien
tcttgcccgcatactcctgttcttt

SEQ ID NO: 5934849 - DNA, 25 bp, Homo sapien
gcagtctttcgaggagctgcagagc

SEQ ID NO: 5934850 - DNA, 25 bp, Homo sapien
acatctcaggcgcatgcggaactgg

SEQ ID NO: 5934851 - DNA, 25 bp, Homo sapien
attcttgtagaacctgtttaaactg

SEQ ID NO: 5934852 - DNA, 25 bp, Homo sapien
ggcagcccgaccccgggtaagcgcg

SEQ ID NO: 5934853 - DNA, 25 bp, Homo sapien
agcgcacccagtcgctcaacgaggc

SEQ ID NO: 5934854 - DNA, 25 bp, Homo sapien
gaggccttcgccgcgctgcgcaaga

SEQ ID NO: 5934855 - DNA, 25 bp, Homo sapien
ggctctcagaacaagaacccaagat

SEQ ID NO: 5934856 - DNA, 25 bp, Homo sapien
acctccggagccgcaagccaggacc

SEQ ID NO: 5934857 - DNA, 25 bp, Homo sapien
tgtgactttcggcacctggacaacc

SEQ ID NO: 5934858 - DNA, 25 bp, Homo sapien
gtgccctcatctcctcactgttgga

SEQ ID NO: 5934859 - DNA, 25 bp, Homo sapien
tggattgtatttccctctaagtgcc

SEQ ID NO: 5934860 - DNA, 25 bp, Homo sapien
tggaattcttgcccgcatactcctg

SEQ ID NO: 5934861 - DNA, 25 bp, Homo sapien
ctagcgccgcgccgtgccatccacc

SEQ ID NO: 5934862 - DNA, 25 bp, Homo sapien
ggaagagctggagaggcagcccaag

SEQ ID NO: 5934863 - DNA, 25 bp, Homo sapien
gcaagccaggacccacctgcacatc

SEQ ID NO: 5934864 - DNA, 25 bp, Homo sapien
ctaagtgccttcttttaatgtatat

SEQ ID NO: 5934865 - DNA, 25 bp, Homo sapien
ccctctaagtgccttcttttaatgt

SEQ ID NO: 5934866 - DNA, 25 bp, Homo sapien
gcgaagatggcagcccgaccccggg

SEQ ID NO: 5934867 - DNA, 25 bp, Homo sapien
gccttcttttaatgtatatttttaa

SEQ ID NO: 5934868 - DNA, 25 bp, Homo sapien
ggctcacgagcgtctcagctacgcc

SEQ ID NO: 5934869 - DNA, 25 bp, Homo sapien
tggaccaaggctctcagaacaagaa

SEQ ID NO: 5934870 - DNA, 25 bp, Homo sapien
ccggagccgcaagccaggacccacc

SEQ ID NO: 5934871 - DNA, 25 bp, Homo sapien
tcttgtagaacctgtttaaactgga

SEQ ID NO: 5934872 - DNA, 25 bp, Homo sapien
cgtctccatggcctgctcagctagc

SEQ ID NO: 5934873 - DNA, 25 bp, Homo sapien
ttaaactggaccaaggctctcagaa

SEQ ID NO: 5934874 - DNA, 25 bp, Homo sapien
tcagcaagatccagacgctcaagct

SEQ ID NO: 5934875 - DNA, 25 bp, Homo sapien
gcgctgcgcaagatcatccccacgc

SEQ ID NO: 5934876 - DNA, 25 bp, Homo sapien
ggcaggggacagagacccaggttca

SEQ ID NO: 5934877 - DNA, 25 bp, Homo sapien
ccagcgcatcctggccaacgtgcgc

SEQ ID NO: 5934878 - DNA, 25 bp, Homo sapien
tcggcacctggacaaccttgtggtt

SEQ ID NO: 5934879 - DNA, 25 bp, Homo sapien
tggagaggcagcccaagcgcttcgg

SEQ ID NO: 5934880 - DNA, 25 bp, Homo sapien
tctattccctgtccagtgtatatgt

SEQ ID NO: 5934881 - DNA, 25 bp, Homo sapien
ccgcatactcctgttctttacgtct

SEQ ID NO: 5934882 - DNA, 25 bp, Homo sapien
accccagtgcccaagtgtttggcag

SEQ ID NO: 5934883 - DNA, 25 bp, Homo sapien
cccacgctcccctctgacaagctca

SEQ ID NO: 5934884 - DNA, 25 bp, Homo sapien
gcttcggccggaagcggcgctacag

SEQ ID NO: 5934885 - DNA, 25 bp, Homo sapien
gggggaatctttctggaaagttcta

SEQ ID NO: 5934886 - DNA, 25 bp, Homo sapien
cggccggaagcggcgctacagcaag

SEQ ID NO: 5934887 - DNA, 25 bp, Homo sapien
cagctaagtgactgccacgcggttg

SEQ ID NO: 5934888 - DNA, 25 bp, Homo sapien
gagaggcagcccaagcgcttcggcc

SEQ ID NO: 5934889 - DNA, 25 bp, Homo sapien
gggctccagctcgccggtgtccccc

SEQ ID NO: 5934890 - DNA, 25 bp, Homo sapien
gccaggacccacctgcacatctcag

SEQ ID NO: 5934891 - DNA, 25 bp, Homo sapien
ttgtaaggatatatattggattgta

SEQ ID NO: 5934892 - DNA, 25 bp, Homo sapien
ccaggtacatagacttcctctacca

SEQ ID NO: 5934893 - DNA, 25 bp, Homo sapien
atctttctggaaagttctagcttca

SEQ ID NO: 5934894 - DNA, 25 bp, Homo sapien
ctgtttcgaggaagcctggaattct

SEQ ID NO: 5934895 - DNA, 25 bp, Homo sapien
ttaccagctaagtgactgccacgcg

SEQ ID NO: 5934896 - DNA, 25 bp, Homo sapien
tgtatatgttgcttatttgtttatt

SEQ ID NO: 5934897 - DNA, 25 bp, Homo sapien
gaggagctgcagagccagcgcatcc

SEQ ID NO: 5934898 - DNA, 25 bp, Homo sapien
aagctcagcaagatccagacgctca

SEQ ID NO: 5934899 - DNA, 25 bp, Homo sapien
cgtggtccatgtccgcctcccacta

SEQ ID NO: 5934900 - DNA, 25 bp, Homo sapien
cagcccaagcgcttcggccggaagc

SEQ ID NO: 5934901 - DNA, 25 bp, Homo sapien
ggaaagttctagcttcaggaatgca

SEQ ID NO: 5934902 - DNA, 25 bp, Homo sapien
gcatactcctgttctttacgtctcc

SEQ ID NO: 5934903 - DNA, 25 bp, Homo sapien
aatcgagcgaagatggcagcccgac

SEQ ID NO: 5934904 - DNA, 25 bp, Homo sapien
tcctgttctttacgtctccatggcc

SEQ ID NO: 5934905 - DNA, 25 bp, Homo sapien
tcctggccaacgtgcgcgagcgcca

SEQ ID NO: 5934906 - DNA, 25 bp, Homo sapien
gcccaagtgtttggcaggggacaga

SEQ ID NO: 5934907 - DNA, 25 bp, Homo sapien
tctccagagcgacgagatggacaat

SEQ ID NO: 5934908 - DNA, 25 bp, Homo sapien
gttcacatcctcctcagatacccag

SEQ ID NO: 5934909 - DNA, 25 bp, Homo sapien
cctcatctcctcactgttggatttt

SEQ ID NO: 5934910 - DNA, 25 bp, Homo sapien
ctgcacatctcaggcgcatgcggaa

SEQ ID NO: 5934911 - DNA, 25 bp, Homo sapien
gtgcccaagtgtttggcaggggaca

SEQ ID NO: 5934912 - DNA, 25 bp, Homo sapien
tggcctgctcagctagccgtgtttt

SEQ ID NO: 5934913 - DNA, 25 bp, Homo sapien
caaccttgtggttcctcatgacccc

SEQ ID NO: 5934914 - DNA, 25 bp, Homo sapien
gagcgcgcagtctttcgaggagctg

SEQ ID NO: 5934915 - DNA, 25 bp, Homo sapien
ctcatgaccccagtgcccaagtgtt

SEQ ID NO: 5934916 - DNA, 25 bp, Homo sapien
gtgtcccccgtggacagtctgggca

SEQ ID NO: 5934917 - DNA, 25 bp, Homo sapien
cagtctgggcaccagtgaggaagag

SEQ ID NO: 5934918 - DNA, 25 bp, Homo sapien
cacggctgtgactttcggcacctgg

SEQ ID NO: 5934919 - DNA, 25 bp, Homo sapien
ggggacagagacccaggttcacatc

SEQ ID NO: 5934920 - DNA, 25 bp, Homo sapien
ctcctcactgttggattttcctcct

SEQ ID NO: 5934921 - DNA, 25 bp, Homo sapien
atcctcctcagatacccaggggatg

SEQ ID NO: 5934922 - DNA, 25 bp, Homo sapien
aataaaacagaaatgcattcttgta

SEQ ID NO: 5934923 - DNA, 25 bp, Homo sapien
cgagatggacaataagatgaccagc

SEQ ID NO: 5934924 - DNA, 25 bp, Homo sapien
agcctggaattcttgcccgcatact

SEQ ID NO: 5934925 - DNA, 25 bp, Homo sapien
caggcgcatgcggaactggatgcgg

SEQ ID NO: 5934926 - DNA, 25 bp, Homo sapien
gaccccgggtaagcgcggcaagaag

SEQ ID NO: 5934927 - DNA, 25 bp, Homo sapien
aggggatgggcatcagccttcctgc

SEQ ID NO: 5934928 - DNA, 25 bp, Homo sapien
cctcccgccccagacctcccgtgac

SEQ ID NO: 5934929 - DNA, 25 bp, Homo sapien
tcagctacgccttctccgtgtggcg

SEQ ID NO: 5934930 - DNA, 25 bp, Homo sapien
atttgtaaggatatatattggattg

SEQ ID NO: 5934931 - DNA, 25 bp, Homo sapien
atggcagcccgaccccgggtaagcg

SEQ ID NO: 5934932 - DNA, 25 bp, Homo sapien
gcgcgcagtctttcgaggagctgca

SEQ ID NO: 5934933 - DNA, 25 bp, Homo sapien
gacctcccgtgactgtttcgaggaa

SEQ ID NO: 5934934 - DNA, 25 bp, Homo sapien
agccgtgttttctattccctgtcca

SEQ ID NO: 5934935 - DNA, 25 bp, Homo sapien
tcagccttcctgccagtgacttctg

SEQ ID NO: 5934936 - DNA, 25 bp, Homo sapien
cgcgtggtccatgtccgcctcccac

SEQ ID NO: 5934937 - DNA, 25 bp, Homo sapien
ccttcctgccagtgacttctgtgcc

SEQ ID NO: 5934938 - DNA, 25 bp, Homo sapien
ttctagcttcaggaatgcatttgta

SEQ ID NO: 5934939 - DNA, 25 bp, Homo sapien
ttgtatttccctctaagtgccttct

SEQ ID NO: 5934940 - DNA, 25 bp, Homo sapien
atgaccagctgcagctacgtggctc

SEQ ID NO: 5934941 - DNA, 25 bp, Homo sapien
ccagacgctcaagctggccgccagg

SEQ ID NO: 5934942 - DNA, 25 bp, Homo sapien
gcgccgtgccatccacctccggagc

SEQ ID NO: 5934943 - DNA, 25 bp, Homo sapien
tgacaagctcagcaagatccagacg

SEQ ID NO: 5934944 - DNA, 25 bp, Homo sapien
gtcccccgtggacagtctgggcacc

SEQ ID NO: 5934945 - DNA, 25 bp, Homo sapien
gcccgcatactcctgttctttacgt

SEQ ID NO: 5934946 - DNA, 25 bp, Homo sapien
aaatgcattcttgtagaacctgttt

SEQ ID NO: 5934947 - DNA, 25 bp, Homo sapien
atggacaataagatgaccagctgca

SEQ ID NO: 5934948 - DNA, 25 bp, Homo sapien
agccttcctgccagtgacttctgtg

SEQ ID NO: 5934949 - DNA, 25 bp, Homo sapien
ccaagtgtttggcaggggacagaga

SEQ ID NO: 5934950 - DNA, 25 bp, Homo sapien
ccagtgtatatgttgcttatttgtt

SEQ ID NO: 5934951 - DNA, 25 bp, Homo sapien
gaatgcatttgtaaggatatatatt

SEQ ID NO: 5934952 - DNA, 25 bp, Homo sapien
cctctgacaagctcagcaagatcca

SEQ ID NO: 5934953 - DNA, 25 bp, Homo sapien
ccgtgactgtttcgaggaagcctgg

SEQ ID NO: 5934954 - DNA, 25 bp, Homo sapien
agggcagcccgagcgcgcagtcttt

SEQ ID NO: 5934955 - DNA, 25 bp, Homo sapien
acttctgtgccctcatctcctcact

SEQ ID NO: 5934956 - DNA, 25 bp, Homo sapien
cccactagcgccgcgccgtgccatc

SEQ ID NO: 5934957 - DNA, 25 bp, Homo sapien
atatattggattgtatttccctcta

SEQ ID NO: 5934958 - DNA, 25 bp, Homo sapien
ggcagcccgagcgcgcagtctttcg

SEQ ID NO: 5934959 - DNA, 25 bp, Homo sapien
gtatttccctctaagtgccttcttt

SEQ ID NO: 5934960 - DNA, 25 bp, Homo sapien
aaacagaaatgcattcttgtagaac

SEQ ID NO: 5934961 - DNA, 25 bp, Homo sapien
aaagttctagcttcaggaatgcatt

SEQ ID NO: 5934962 - DNA, 25 bp, Homo sapien
gcttatttgtttatttattgagata

SEQ ID NO: 5934963 - DNA, 25 bp, Homo sapien
aacccaagatccctcccgccccaga

SEQ ID NO: 5934964 - DNA, 25 bp, Homo sapien
cggccacggctgtgactttcggcac

SEQ ID NO: 5934965 - DNA, 25 bp, Homo sapien
agatacccaggggatgggcatcagc

SEQ ID NO: 5934966 - DNA, 25 bp, Homo sapien
ctacgtggctcacgagcgtctcagc

SEQ ID NO: 5934967 - DNA, 25 bp, Homo sapien
tacagcaagaaatcgagcgaagatg

SEQ ID NO: 5934968 - DNA, 25 bp, Homo sapien
ttgcttatttgtttatttattgaga

SEQ ID NO: 5934969 - DNA, 25 bp, Homo sapien
ccaggggatgggcatcagccttcct

SEQ ID NO: 5934970 - DNA, 25 bp, Homo sapien
ccacctgcacatctcaggcgcatgc

SEQ ID NO: 5934971 - DNA, 25 bp, Homo sapien
ggccttcgccgcgctgcgcaagatc

SEQ ID NO: 5934972 - DNA, 25 bp, Homo sapien
gacgagatggacaataagatgacca

SEQ ID NO: 5934973 - DNA, 25 bp, Homo sapien
atacccaggggatgggcatcagcct
